United States Patent Application Publication US 2014/0004565 A1 - sequence listing, part 70

SEQ ID NO: 1700156 - RNA, 19 nt, Artificial Sequence
  Description of Artificial Sequence: Synthetic oligonucleotide
uuggaguucucaggauuaa

SEQ ID NO: 1700157 - RNA, 19 nt, Artificial Sequence
  Description of Artificial Sequence: Synthetic oligonucleotide
gcucgcuucucucuccgag

SEQ ID NO: 1700158 - RNA, 19 nt, Artificial Sequence
  Description of Artificial Sequence: Synthetic oligonucleotide
guccggugaagcccuggag

SEQ ID NO: 1700159 - RNA, 19 nt, Artificial Sequence
  Description of Artificial Sequence: Synthetic oligonucleotide
guauugauuucggggucac

SEQ ID NO: 1700160 - RNA, 19 nt, Artificial Sequence
  Description of Artificial Sequence: Synthetic oligonucleotide
ugcugcgccauggccagca

SEQ ID NO: 1700161 - RNA, 19 nt, Artificial Sequence
  Description of Artificial Sequence: Synthetic oligonucleotide
uuucggggucacugguaac

SEQ ID NO: 1700162 - RNA, 19 nt, Artificial Sequence
  Description of Artificial Sequence: Synthetic oligonucleotide
uccuguuucccaggugagu

SEQ ID NO: 1700163 - RNA, 19 nt, Artificial Sequence
  Description of Artificial Sequence: Synthetic oligonucleotide
ucggggucacugguaacca

SEQ ID NO: 1700164 - RNA, 19 nt, Artificial Sequence
  Description of Artificial Sequence: Synthetic oligonucleotide
cuccgucaaucaccggcgg

SEQ ID NO: 1700165 - RNA, 19 nt, Artificial Sequence
  Description of Artificial Sequence: Synthetic oligonucleotide
ccccucuucuccuccaacg

SEQ ID NO: 1700166 - RNA, 19 nt, Artificial Sequence
  Description of Artificial Sequence: Synthetic oligonucleotide
gucaaucaccggcggcugc

SEQ ID NO: 1700167 - RNA, 19 nt, Artificial Sequence
  Description of Artificial Sequence: Synthetic oligonucleotide
uauugauuucggggucacu

SEQ ID NO: 1700168 - RNA, 19 nt, Artificial Sequence
  Description of Artificial Sequence: Synthetic oligonucleotide
ugcgucgaaggaagcugaa

SEQ ID NO: 1700169 - RNA, 19 nt, Artificial Sequence
  Description of Artificial Sequence: Synthetic oligonucleotide
accaugcugcgagucucac

SEQ ID NO: 1700170 - RNA, 19 nt, Artificial Sequence
  Description of Artificial Sequence: Synthetic oligonucleotide
ucggaagggcacagccaga

SEQ ID NO: 1700171 - RNA, 19 nt, Artificial Sequence
  Description of Artificial Sequence: Synthetic oligonucleotide
cugcgagucucacugucca

SEQ ID NO: 1700172 - RNA, 19 nt, Artificial Sequence
  Description of Artificial Sequence: Synthetic oligonucleotide
ccaaauggggaggagaaga

SEQ ID NO: 1700173 - RNA, 19 nt, Artificial Sequence
  Description of Artificial Sequence: Synthetic oligonucleotide
guacagcucuccgucaauc

SEQ ID NO: 1700174 - RNA, 19 nt, Artificial Sequence
  Description of Artificial Sequence: Synthetic oligonucleotide
gaggugccgccgcuggaug

SEQ ID NO: 1700175 - RNA, 19 nt, Artificial Sequence
  Description of Artificial Sequence: Synthetic oligonucleotide
uccgagccuucugugccag

SEQ ID NO: 1700176 - RNA, 19 nt, Artificial Sequence
  Description of Artificial Sequence: Synthetic oligonucleotide
caggugagucgagacugcc

SEQ ID NO: 1700177 - RNA, 19 nt, Artificial Sequence
  Description of Artificial Sequence: Synthetic oligonucleotide
aggugggaaaggaaguuua

SEQ ID NO: 1700178 - RNA, 19 nt, Artificial Sequence
  Description of Artificial Sequence: Synthetic oligonucleotide
agggcacagccagaucuag

SEQ ID NO: 1700179 - RNA, 19 nt, Artificial Sequence
  Description of Artificial Sequence: Synthetic oligonucleotide
cucgcgcucggcgaugccc

SEQ ID NO: 1700180 - RNA, 19 nt, Artificial Sequence
  Description of Artificial Sequence: Synthetic oligonucleotide
ccgucuucaaugagccacg

SEQ ID NO: 1700181 - RNA, 19 nt, Artificial Sequence
  Description of Artificial Sequence: Synthetic oligonucleotide
gguauugauuucgggguca

SEQ ID NO: 1700182 - RNA, 19 nt, Artificial Sequence
  Description of Artificial Sequence: Synthetic oligonucleotide
guuuugcgucgaaggaagc

SEQ ID NO: 1700183 - RNA, 19 nt, Artificial Sequence
  Description of Artificial Sequence: Synthetic oligonucleotide
aaguccguuuugcgucgaa

SEQ ID NO: 1700184 - RNA, 19 nt, Artificial Sequence
  Description of Artificial Sequence: Synthetic oligonucleotide
gccagaucuaguuccgaca

SEQ ID NO: 1700185 - RNA, 19 nt, Artificial Sequence
  Description of Artificial Sequence: Synthetic oligonucleotide
ucccuuuguccuucucauc

SEQ ID NO: 1700186 - RNA, 19 nt, Artificial Sequence
  Description of Artificial Sequence: Synthetic oligonucleotide
ucagccccguugcccaggu

SEQ ID NO: 1700187 - RNA, 19 nt, Artificial Sequence
  Description of Artificial Sequence: Synthetic oligonucleotide
aaaguccguuuugcgucga

SEQ ID NO: 1700188 - RNA, 19 nt, Artificial Sequence
  Description of Artificial Sequence: Synthetic oligonucleotide
agcugguuguggugguuaa

SEQ ID NO: 1700189 - RNA, 19 nt, Artificial Sequence
  Description of Artificial Sequence: Synthetic oligonucleotide
gcucaaucccaagaguuca

SEQ ID NO: 1700190 - RNA, 19 nt, Artificial Sequence
  Description of Artificial Sequence: Synthetic oligonucleotide
ccugcacucgcgcucggcg

SEQ ID NO: 1700191 - RNA, 19 nt, Artificial Sequence
  Description of Artificial Sequence: Synthetic oligonucleotide
ggaugucccaugccugccc

SEQ ID NO: 1700192 - RNA, 19 nt, Artificial Sequence
  Description of Artificial Sequence: Synthetic oligonucleotide
acaggccaaauggggagga

SEQ ID NO: 1700193 - RNA, 19 nt, Artificial Sequence
  Description of Artificial Sequence: Synthetic oligonucleotide
cacugcgagcccugcacuc

SEQ ID NO: 1700194 - RNA, 19 nt, Artificial Sequence
  Description of Artificial Sequence: Synthetic oligonucleotide
gcacgguucgcgucgggcc

SEQ ID NO: 1700195 - RNA, 19 nt, Artificial Sequence
  Description of Artificial Sequence: Synthetic oligonucleotide
gggcccaacgguccccucg

SEQ ID NO: 1700196 - RNA, 19 nt, Artificial Sequence
  Description of Artificial Sequence: Synthetic oligonucleotide
cugcgagcccugcacucgc

SEQ ID NO: 1700197 - RNA, 19 nt, Artificial Sequence
  Description of Artificial Sequence: Synthetic oligonucleotide
ggugaagcccuggagcuca

SEQ ID NO: 1700198 - RNA, 19 nt, Artificial Sequence
  Description of Artificial Sequence: Synthetic oligonucleotide
cacaggagcuaguugaauu

SEQ ID NO: 1700199 - RNA, 19 nt, Artificial Sequence
  Description of Artificial Sequence: Synthetic oligonucleotide
uuucagccggaagcugacu

SEQ ID NO: 1700200 - RNA, 19 nt, Artificial Sequence
  Description of Artificial Sequence: Synthetic oligonucleotide
gguccagcgguaguugggc

SEQ ID NO: 1700201 - RNA, 19 nt, Artificial Sequence
  Description of Artificial Sequence: Synthetic oligonucleotide
acucgcgcucggcgaugcc

SEQ ID NO: 1700202 - RNA, 19 nt, Artificial Sequence
  Description of Artificial Sequence: Synthetic oligonucleotide
auguccggugaagcccugg

SEQ ID NO: 1700203 - RNA, 19 nt, Artificial Sequence
  Description of Artificial Sequence: Synthetic oligonucleotide
ggugagucgagacugccau

SEQ ID NO: 1700204 - RNA, 19 nt, Artificial Sequence
  Description of Artificial Sequence: Synthetic oligonucleotide
cugcgccauggccagcagc

SEQ ID NO: 1700205 - RNA, 19 nt, Artificial Sequence
  Description of Artificial Sequence: Synthetic oligonucleotide
ccggaagcugacucggaag

SEQ ID NO: 1700206 - RNA, 19 nt, Artificial Sequence
  Description of Artificial Sequence: Synthetic oligonucleotide
gauuucggggucacuggua

SEQ ID NO: 1700207 - RNA, 19 nt, Artificial Sequence
  Description of Artificial Sequence: Synthetic oligonucleotide
ugacucggaagggcacagc

SEQ ID NO: 1700208 - RNA, 19 nt, Artificial Sequence
  Description of Artificial Sequence: Synthetic oligonucleotide
cuccugccgagcucgcuuc

SEQ ID NO: 1700209 - RNA, 19 nt, Artificial Sequence
  Description of Artificial Sequence: Synthetic oligonucleotide
cccauguccggugaagccc

SEQ ID NO: 1700210 - RNA, 19 nt, Artificial Sequence
  Description of Artificial Sequence: Synthetic oligonucleotide
ggugguuaaaggucugcgu

SEQ ID NO: 1700211 - RNA, 19 nt, Artificial Sequence
  Description of Artificial Sequence: Synthetic oligonucleotide
acucggaagggcacagcca

SEQ ID NO: 1700212 - RNA, 19 nt, Artificial Sequence
  Description of Artificial Sequence: Synthetic oligonucleotide
guugggcaggucagccccg

SEQ ID NO: 1700213 - RNA, 19 nt, Artificial Sequence
  Description of Artificial Sequence: Synthetic oligonucleotide
cgucgaaggaagcugaaga

SEQ ID NO: 1700214 - RNA, 19 nt, Artificial Sequence
  Description of Artificial Sequence: Synthetic oligonucleotide
ccccuugaggcccacccgg

SEQ ID NO: 1700215 - RNA, 19 nt, Artificial Sequence
  Description of Artificial Sequence: Synthetic oligonucleotide
ugccgucuucaaugagcca

SEQ ID NO: 1700216 - RNA, 19 nt, Artificial Sequence
  Description of Artificial Sequence: Synthetic oligonucleotide
caacgguccccucgccggc

SEQ ID NO: 1700217 - RNA, 19 nt, Artificial Sequence
  Description of Artificial Sequence: Synthetic oligonucleotide
aggugccgccgcuggaugu

SEQ ID NO: 1700218 - RNA, 19 nt, Artificial Sequence
  Description of Artificial Sequence: Synthetic oligonucleotide
ugccgagcucgcuucucuc

SEQ ID NO: 1700219 - RNA, 19 nt, Artificial Sequence
  Description of Artificial Sequence: Synthetic oligonucleotide
ggcucaaucccaagaguuc

SEQ ID NO: 1700220 - RNA, 19 nt, Artificial Sequence
  Description of Artificial Sequence: Synthetic oligonucleotide
aggugagucgagacugcca

SEQ ID NO: 1700221 - RNA, 19 nt, Artificial Sequence
  Description of Artificial Sequence: Synthetic oligonucleotide
uccgcacgguucgcgucgg

SEQ ID NO: 1700222 - RNA, 19 nt, Artificial Sequence
  Description of Artificial Sequence: Synthetic oligonucleotide
gcccauguccggugaagcc

SEQ ID NO: 1700223 - RNA, 19 nt, Artificial Sequence
  Description of Artificial Sequence: Synthetic oligonucleotide
cuggguccagcgguaguug

SEQ ID NO: 1700224 - RNA, 19 nt, Artificial Sequence
  Description of Artificial Sequence: Synthetic oligonucleotide
agcgguaguugggcagguc

SEQ ID NO: 1700225 - RNA, 19 nt, Artificial Sequence
  Description of Artificial Sequence: Synthetic oligonucleotide
acacaggagcuaguugaau

SEQ ID NO: 1700226 - RNA, 19 nt, Artificial Sequence
  Description of Artificial Sequence: Synthetic oligonucleotide
caaucaccggcggcugccc

SEQ ID NO: 1700227 - RNA, 19 nt, Artificial Sequence
  Description of Artificial Sequence: Synthetic oligonucleotide
aggucugcgugaugagcuu

SEQ ID NO: 1700228 - RNA, 19 nt, Artificial Sequence
  Description of Artificial Sequence: Synthetic oligonucleotide
cagcccauguccggugaag

SEQ ID NO: 1700229 - RNA, 19 nt, Artificial Sequence
  Description of Artificial Sequence: Synthetic oligonucleotide
cugacagcuuggaguucuc

SEQ ID NO: 1700230 - RNA, 19 nt, Artificial Sequence
  Description of Artificial Sequence: Synthetic oligonucleotide
aggaaguuuaggggcucaa

SEQ ID NO: 1700231 - RNA, 19 nt, Artificial Sequence
  Description of Artificial Sequence: Synthetic oligonucleotide
gguuccaccauuccauuuu

SEQ ID NO: 1700232 - RNA, 19 nt, Artificial Sequence
  Description of Artificial Sequence: Synthetic oligonucleotide
ccuaggaugucccaugccu

SEQ ID NO: 1700233 - RNA, 19 nt, Artificial Sequence
  Description of Artificial Sequence: Synthetic oligonucleotide
ucugcgugaugagcuucuc

SEQ ID NO: 1700234 - RNA, 19 nt, Artificial Sequence
  Description of Artificial Sequence: Synthetic oligonucleotide
augcugcgagucucacugu

SEQ ID NO: 1700235 - RNA, 19 nt, Artificial Sequence
  Description of Artificial Sequence: Synthetic oligonucleotide
cguucagucuccugccgag

SEQ ID NO: 1700236 - RNA, 19 nt, Artificial Sequence
  Description of Artificial Sequence: Synthetic oligonucleotide
agucuccugccgagcucgc

SEQ ID NO: 1700237 - RNA, 19 nt, Artificial Sequence
  Description of Artificial Sequence: Synthetic oligonucleotide
uccccgcccaucgcgcugc

SEQ ID NO: 1700238 - RNA, 19 nt, Artificial Sequence
  Description of Artificial Sequence: Synthetic oligonucleotide
guuccgacagggucugggu

SEQ ID NO: 1700239 - RNA, 19 nt, Artificial Sequence
  Description of Artificial Sequence: Synthetic oligonucleotide
ggcccaacgguccccucgc

SEQ ID NO: 1700240 - RNA, 19 nt, Artificial Sequence
  Description of Artificial Sequence: Synthetic oligonucleotide
gcugcgagucucacugucc

SEQ ID NO: 1700241 - RNA, 19 nt, Artificial Sequence
  Description of Artificial Sequence: Synthetic oligonucleotide
ugguaaccaggcgguucca

SEQ ID NO: 1700242 - RNA, 19 nt, Artificial Sequence
  Description of Artificial Sequence: Synthetic oligonucleotide
cccaacgguccccucgccg

SEQ ID NO: 1700243 - RNA, 19 nt, Artificial Sequence
  Description of Artificial Sequence: Synthetic oligonucleotide
agcucgcuucucucuccga

SEQ ID NO: 1700244 - RNA, 19 nt, Artificial Sequence
  Description of Artificial Sequence: Synthetic oligonucleotide
ccaggugagucgagacugc

SEQ ID NO: 1700245 - RNA, 19 nt, Artificial Sequence
  Description of Artificial Sequence: Synthetic oligonucleotide
cugcacucgcgcucggcga

SEQ ID NO: 1700246 - RNA, 19 nt, Artificial Sequence
  Description of Artificial Sequence: Synthetic oligonucleotide
acuucugccuuuggucaua

SEQ ID NO: 1700247 - RNA, 19 nt, Artificial Sequence
  Description of Artificial Sequence: Synthetic oligonucleotide
gccuaggaugucccaugcc

SEQ ID NO: 1700248 - RNA, 19 nt, Artificial Sequence
  Description of Artificial Sequence: Synthetic oligonucleotide
gccaaauggggaggagaag

SEQ ID NO: 1700249 - RNA, 19 nt, Artificial Sequence
  Description of Artificial Sequence: Synthetic oligonucleotide
caugauucucugcauccuu

SEQ ID NO: 1700250 - RNA, 19 nt, Artificial Sequence
  Description of Artificial Sequence: Synthetic oligonucleotide
guccagcgguaguugggca

SEQ ID NO: 1700251 - RNA, 19 nt, Artificial Sequence
  Description of Artificial Sequence: Synthetic oligonucleotide
caggccaaauggggaggag

SEQ ID NO: 1700252 - RNA, 19 nt, Artificial Sequence
  Description of Artificial Sequence: Synthetic oligonucleotide
uugggcaggucagccccgu

SEQ ID NO: 1700253 - RNA, 19 nt, Artificial Sequence
  Description of Artificial Sequence: Synthetic oligonucleotide
cacccggaggugccgccgc

SEQ ID NO: 1700254 - RNA, 19 nt, Artificial Sequence
  Description of Artificial Sequence: Synthetic oligonucleotide
cacucgcgcucggcgaugc

SEQ ID NO: 1700255 - RNA, 19 nt, Artificial Sequence
  Description of Artificial Sequence: Synthetic oligonucleotide
gccccuugaggcccacccg

SEQ ID NO: 1700256 - RNA, 19 nt, Artificial Sequence
  Description of Artificial Sequence: Synthetic oligonucleotide
gcgucgaaggaagcugaag

SEQ ID NO: 1700257 - RNA, 19 nt, Artificial Sequence
  Description of Artificial Sequence: Synthetic oligonucleotide
gguaaccaggcgguuccac

SEQ ID NO: 1700258 - RNA, 19 nt, Artificial Sequence
  Description of Artificial Sequence: Synthetic oligonucleotide
cucugccuucuccugacgu

SEQ ID NO: 1700259 - RNA, 19 nt, Artificial Sequence
  Description of Artificial Sequence: Synthetic oligonucleotide
cgaucaaucuccagcugca

SEQ ID NO: 1700260 - RNA, 19 nt, Artificial Sequence
  Description of Artificial Sequence: Synthetic oligonucleotide
cugggugcugauccaugaa

SEQ ID NO: 1700261 - RNA, 19 nt, Artificial Sequence
  Description of Artificial Sequence: Synthetic oligonucleotide
uccugacguucagucuccu

SEQ ID NO: 1700262 - RNA, 19 nt, Artificial Sequence
  Description of Artificial Sequence: Synthetic oligonucleotide
acgagcucuccuccaccuu

SEQ ID NO: 1700263 - RNA, 19 nt, Artificial Sequence
  Description of Artificial Sequence: Synthetic oligonucleotide
ccacauccuucccuuucag

SEQ ID NO: 1700264 - RNA, 19 nt, Artificial Sequence
  Description of Artificial Sequence: Synthetic oligonucleotide
gcucugccuucuccugacg

SEQ ID NO: 1700265 - RNA, 19 nt, Artificial Sequence
  Description of Artificial Sequence: Synthetic oligonucleotide
cacgagcucuccuccaccu

SEQ ID NO: 1700266 - RNA, 19 nt, Artificial Sequence
  Description of Artificial Sequence: Synthetic oligonucleotide
cuccugcacgccgcccucg

SEQ ID NO: 1700267 - RNA, 19 nt, Artificial Sequence
  Description of Artificial Sequence: Synthetic oligonucleotide
gggugcugauccaugaacu

SEQ ID NO: 1700268 - RNA, 19 nt, Artificial Sequence
  Description of Artificial Sequence: Synthetic oligonucleotide
accaggcgguuccaccauu

SEQ ID NO: 1700269 - RNA, 19 nt, Artificial Sequence
  Description of Artificial Sequence: Synthetic oligonucleotide
gcaccgucaccaccuugcc

SEQ ID NO: 1700270 - RNA, 19 nt, Artificial Sequence
  Description of Artificial Sequence: Synthetic oligonucleotide
cucggcgaugcccgcgcuc

SEQ ID NO: 1700271 - RNA, 19 nt, Artificial Sequence
  Description of Artificial Sequence: Synthetic oligonucleotide
ugaggcccacccggaggug

SEQ ID NO: 1700272 - RNA, 19 nt, Artificial Sequence
  Description of Artificial Sequence: Synthetic oligonucleotide
gcuuggaguucucaggauu

SEQ ID NO: 1700273 - RNA, 19 nt, Artificial Sequence
  Description of Artificial Sequence: Synthetic oligonucleotide
gccccguugcccagguugg

SEQ ID NO: 1700274 - RNA, 19 nt, Artificial Sequence
  Description of Artificial Sequence: Synthetic oligonucleotide
ggcaaucccauggacuucu

SEQ ID NO: 1700275 - RNA, 19 nt, Artificial Sequence
  Description of Artificial Sequence: Synthetic oligonucleotide
ccaagacccagcccauguc

SEQ ID NO: 1700276 - RNA, 19 nt, Artificial Sequence
  Description of Artificial Sequence: Synthetic oligonucleotide
ccuugaggcccacccggag

SEQ ID NO: 1700277 - RNA, 19 nt, Artificial Sequence
  Description of Artificial Sequence: Synthetic oligonucleotide
ccaggcgguuccaccauuc

SEQ ID NO: 1700278 - RNA, 19 nt, Artificial Sequence
  Description of Artificial Sequence: Synthetic oligonucleotide
ccugacguucagucuccug

SEQ ID NO: 1700279 - RNA, 19 nt, Artificial Sequence
  Description of Artificial Sequence: Synthetic oligonucleotide
cagaggugggcaaucccau

SEQ ID NO: 1700280 - RNA, 19 nt, Artificial Sequence
  Description of Artificial Sequence: Synthetic oligonucleotide
ggucuggguccagcgguag

SEQ ID NO: 1700281 - RNA, 19 nt, Artificial Sequence
  Description of Artificial Sequence: Synthetic oligonucleotide
aucugcggcccaggagucu

SEQ ID NO: 1700282 - RNA, 19 nt, Artificial Sequence
  Description of Artificial Sequence: Synthetic oligonucleotide
gguuaaaggucugcgugau

SEQ ID NO: 1700283 - RNA, 19 nt, Artificial Sequence
  Description of Artificial Sequence: Synthetic oligonucleotide
ggugcugauccaugaacuu

SEQ ID NO: 1700284 - RNA, 19 nt, Artificial Sequence
  Description of Artificial Sequence: Synthetic oligonucleotide
cuccccgcccaucgcgcug

SEQ ID NO: 1700285 - RNA, 19 nt, Artificial Sequence
  Description of Artificial Sequence: Synthetic oligonucleotide
ggucugcgugaugagcuuc

SEQ ID NO: 1700286 - RNA, 19 nt, Artificial Sequence
  Description of Artificial Sequence: Synthetic oligonucleotide
gccggaagcugacucggaa

SEQ ID NO: 1700287 - RNA, 19 nt, Artificial Sequence
  Description of Artificial Sequence: Synthetic oligonucleotide
gcgagcccugcacucgcgc

SEQ ID NO: 1700288 - RNA, 19 nt, Artificial Sequence
  Description of Artificial Sequence: Synthetic oligonucleotide
gucugcgugaugagcuucu

SEQ ID NO: 1700289 - RNA, 19 nt, Artificial Sequence
  Description of Artificial Sequence: Synthetic oligonucleotide
cugcgugaugagcuucucu

SEQ ID NO: 1700290 - RNA, 19 nt, Artificial Sequence
  Description of Artificial Sequence: Synthetic oligonucleotide
ccgcgcuccgcacgguucg

SEQ ID NO: 1700291 - RNA, 19 nt, Artificial Sequence
  Description of Artificial Sequence: Synthetic oligonucleotide
ccaccaugcugcgagucuc

SEQ ID NO: 1700292 - RNA, 19 nt, Artificial Sequence
  Description of Artificial Sequence: Synthetic oligonucleotide
cgcuggauguccaccacca

SEQ ID NO: 1700293 - RNA, 19 nt, Artificial Sequence
  Description of Artificial Sequence: Synthetic oligonucleotide
acgguucgcgucgggccca

SEQ ID NO: 1700294 - RNA, 19 nt, Artificial Sequence
  Description of Artificial Sequence: Synthetic oligonucleotide
ccggccuuccgcagcggag

SEQ ID NO: 1700295 - RNA, 19 nt, Artificial Sequence
  Description of Artificial Sequence: Synthetic oligonucleotide
gacccagcccauguccggu

SEQ ID NO: 1700296 - RNA, 19 nt, Artificial Sequence
  Description of Artificial Sequence: Synthetic oligonucleotide
gaugcaccgucaccaccuu

SEQ ID NO: 1700297 - RNA, 19 nt, Artificial Sequence
  Description of Artificial Sequence: Synthetic oligonucleotide
cugcacugcgagcccugca

SEQ ID NO: 1700298 - RNA, 19 nt, Artificial Sequence
  Description of Artificial Sequence: Synthetic oligonucleotide
ucaccggcggcugccccuu

SEQ ID NO: 1700299 - RNA, 19 nt, Artificial Sequence
  Description of Artificial Sequence: Synthetic oligonucleotide
ugggcaggucagccccguu

SEQ ID NO: 1700300 - RNA, 19 nt, Artificial Sequence
  Description of Artificial Sequence: Synthetic oligonucleotide
gagucgagacugccauuuu

SEQ ID NO: 1700301 - RNA, 19 nt, Artificial Sequence
  Description of Artificial Sequence: Synthetic oligonucleotide
cccguugcccagguugggc

SEQ ID NO: 1700302 - RNA, 19 nt, Artificial Sequence
  Description of Artificial Sequence: Synthetic oligonucleotide
gcgucgggcccaacggucc

SEQ ID NO: 1700303 - RNA, 19 nt, Artificial Sequence
  Description of Artificial Sequence: Synthetic oligonucleotide
ccuggagcucacaugccua

SEQ ID NO: 1700304 - RNA, 19 nt, Artificial Sequence
  Description of Artificial Sequence: Synthetic oligonucleotide
ccguuuugcgucgaaggaa

SEQ ID NO: 1700305 - RNA, 19 nt, Artificial Sequence
  Description of Artificial Sequence: Synthetic oligonucleotide
cagccagaucuaguuccga

SEQ ID NO: 1700306 - RNA, 19 nt, Artificial Sequence
  Description of Artificial Sequence: Synthetic oligonucleotide
gcuccgcacgguucgcguc

SEQ ID NO: 1700307 - RNA, 19 nt, Artificial Sequence
  Description of Artificial Sequence: Synthetic oligonucleotide
cugccgagcucgcuucucu

SEQ ID NO: 1700308 - RNA, 19 nt, Artificial Sequence
  Description of Artificial Sequence: Synthetic oligonucleotide
ccggugaagcccuggagcu

SEQ ID NO: 1700309 - RNA, 19 nt, Artificial Sequence
  Description of Artificial Sequence: Synthetic oligonucleotide
ggaaguuuaggggcucaau

SEQ ID NO: 1700310 - RNA, 19 nt, Artificial Sequence
  Description of Artificial Sequence: Synthetic oligonucleotide
gucuggguccagcgguagu

SEQ ID NO: 1700311 - RNA, 19 nt, Artificial Sequence
  Description of Artificial Sequence: Synthetic oligonucleotide
accccaagacccagcccau

SEQ ID NO: 1700312 - RNA, 19 nt, Artificial Sequence
  Description of Artificial Sequence: Synthetic oligonucleotide
ccccucgccggccuuccgc

SEQ ID NO: 1700313 - RNA, 19 nt, Artificial Sequence
  Description of Artificial Sequence: Synthetic oligonucleotide
gccauccccucuucuccuc

SEQ ID NO: 1700314 - RNA, 19 nt, Artificial Sequence
  Description of Artificial Sequence: Synthetic oligonucleotide
gcugcgccauggccagcag

SEQ ID NO: 1700315 - RNA, 19 nt, Artificial Sequence
  Description of Artificial Sequence: Synthetic oligonucleotide
ccauguccggugaagcccu

SEQ ID NO: 1700316 - RNA, 19 nt, Artificial Sequence
  Description of Artificial Sequence: Synthetic oligonucleotide
gugaagcccuggagcucac

SEQ ID NO: 1700317 - RNA, 19 nt, Artificial Sequence
  Description of Artificial Sequence: Synthetic oligonucleotide
cugccccuugaggcccacc

SEQ ID NO: 1700318 - RNA, 19 nt, Artificial Sequence
  Description of Artificial Sequence: Synthetic oligonucleotide
gugagucgagacugccauu

SEQ ID NO: 1700319 - RNA, 19 nt, Artificial Sequence
  Description of Artificial Sequence: Synthetic oligonucleotide
cccuuucagccggaagcug

SEQ ID NO: 1700320 - RNA, 19 nt, Artificial Sequence
  Description of Artificial Sequence: Synthetic oligonucleotide
cgcgucgggcccaacgguc

SEQ ID NO: 1700321 - RNA, 19 nt, Artificial Sequence
  Description of Artificial Sequence: Synthetic oligonucleotide
cccacccggaggugccgcc

SEQ ID NO: 1700322 - RNA, 19 nt, Artificial Sequence
  Description of Artificial Sequence: Synthetic oligonucleotide
cccgcgcuccgcacgguuc

SEQ ID NO: 1700323 - RNA, 19 nt, Artificial Sequence
  Description of Artificial Sequence: Synthetic oligonucleotide
ccacccggaggugccgccg

SEQ ID NO: 1700324 - RNA, 19 nt, Artificial Sequence
  Description of Artificial Sequence: Synthetic oligonucleotide
gccgccgcuggauguccac

SEQ ID NO: 1700325 - RNA, 19 nt, Artificial Sequence
  Description of Artificial Sequence: Synthetic oligonucleotide
cgucaaucaccggcggcug

SEQ ID NO: 1700326 - RNA, 19 nt, Artificial Sequence
  Description of Artificial Sequence: Synthetic oligonucleotide
ccgucaaucaccggcggcu

SEQ ID NO: 1700327 - RNA, 19 nt, Artificial Sequence
  Description of Artificial Sequence: Synthetic oligonucleotide
cgcucggcgaugcccgcgc

SEQ ID NO: 1700328 - RNA, 19 nt, Artificial Sequence
  Description of Artificial Sequence: Synthetic oligonucleotide
gcccaucgcgcugcacugc

SEQ ID NO: 1700329 - RNA, 19 nt, Artificial Sequence
  Description of Artificial Sequence: Synthetic oligonucleotide
ggcccacccggaggugccg

SEQ ID NO: 1700330 - RNA, 19 nt, Artificial Sequence
  Description of Artificial Sequence: Synthetic oligonucleotide
gcccaacgguccccucgcc

SEQ ID NO: 1700331 - RNA, 19 nt, Artificial Sequence
  Description of Artificial Sequence: Synthetic oligonucleotide
gcgcucggcgaugcccgcg

SEQ ID NO: 1700332 - RNA, 19 nt, Artificial Sequence
  Description of Artificial Sequence: Synthetic oligonucleotide
gccggccuuccgcagcgga

SEQ ID NO: 1700333 - RNA, 19 nt, Artificial Sequence
  Description of Artificial Sequence: Synthetic oligonucleotide
ggcaaacacaggagcuagu

SEQ ID NO: 1700334 - RNA, 19 nt, Artificial Sequence
  Description of Artificial Sequence: Synthetic oligonucleotide
ccgccgcuggauguccacc

SEQ ID NO: 1700335 - RNA, 19 nt, Artificial Sequence
  Description of Artificial Sequence: Synthetic oligonucleotide
cgucgggcccaacgguccc

SEQ ID NO: 1700336 - RNA, 19 nt, Artificial Sequence
  Description of Artificial Sequence: Synthetic oligonucleotide
cugcugcgccauggccagc

SEQ ID NO: 1700337 - RNA, 19 nt, Artificial Sequence
  Description of Artificial Sequence: Synthetic oligonucleotide
ccguugcccagguugggcu

SEQ ID NO: 1700338 - RNA, 19 nt, Artificial Sequence
  Description of Artificial Sequence: Synthetic oligonucleotide
ggaggugccgccgcuggau

SEQ ID NO: 1700339 - RNA, 19 nt, Artificial Sequence
  Description of Artificial Sequence: Synthetic oligonucleotide
ccgucaccaccuugccguc

SEQ ID NO: 1700340 - RNA, 19 nt, Artificial Sequence
  Description of Artificial Sequence: Synthetic oligonucleotide
ccgagccuucugugccagc

SEQ ID NO: 1700341 - RNA, 19 nt, Artificial Sequence
  Description of Artificial Sequence: Synthetic oligonucleotide
ccugcacgccgcccucgug

SEQ ID NO: 1700342 - RNA, 19 nt, Artificial Sequence
  Description of Artificial Sequence: Synthetic oligonucleotide
cgcgcugcacugcgagccc

SEQ ID NO: 1700343 - RNA, 19 nt, Artificial Sequence
  Description of Artificial Sequence: Synthetic oligonucleotide
cggcggcugccccuugagg

SEQ ID NO: 1700344 - RNA, 19 nt, Artificial Sequence
  Description of Artificial Sequence: Synthetic oligonucleotide
ccgcccaucgcgcugcacu

SEQ ID NO: 1700345 - RNA, 19 nt, Artificial Sequence
  Description of Artificial Sequence: Synthetic oligonucleotide
ccccguugcccagguuggg

SEQ ID NO: 1700346 - RNA, 19 nt, Artificial Sequence
  Description of Artificial Sequence: Synthetic oligonucleotide
ccugccgagcucgcuucuc

SEQ ID NO: 1700347 - RNA, 19 nt, Artificial Sequence
  Description of Artificial Sequence: Synthetic oligonucleotide
cccugcacucgcgcucggc

SEQ ID NO: 1700348 - RNA, 19 nt, Artificial Sequence
  Description of Artificial Sequence: Synthetic oligonucleotide
cccucgugcugcugcgcca

SEQ ID NO: 1700349 - RNA, 19 nt, Artificial Sequence
  Description of Artificial Sequence: Synthetic oligonucleotide
gcccugcacucgcgcucgg

SEQ ID NO: 1700350 - RNA, 19 nt, Artificial Sequence
  Description of Artificial Sequence: Synthetic oligonucleotide
gggucuggguccagcggua

SEQ ID NO: 1700351 - RNA, 19 nt, Artificial Sequence
  Description of Artificial Sequence: Synthetic oligonucleotide
gcacgccgcccucgugcug

SEQ ID NO: 1700352 - RNA, 19 nt, Artificial Sequence
  Description of Artificial Sequence: Synthetic oligonucleotide
gggcacagccagaucuagu

SEQ ID NO: 1700353 - RNA, 19 nt, Artificial Sequence
  Description of Artificial Sequence: Synthetic oligonucleotide
ccaugcugcgagucucacu

SEQ ID NO: 1700354 - RNA, 19 nt, Artificial Sequence
  Description of Artificial Sequence: Synthetic oligonucleotide
caccggcggcugccccuug

SEQ ID NO: 1700355 - RNA, 19 nt, Artificial Sequence
  Description of Artificial Sequence: Synthetic oligonucleotide
ccaucgcgcugcacugcga

SEQ ID NO: 1700356 - RNA, 19 nt, Artificial Sequence
  Description of Artificial Sequence: Synthetic oligonucleotide
ccgcacgguucgcgucggg

SEQ ID NO: 1700357 - RNA, 19 nt, Artificial Sequence
  Description of Artificial Sequence: Synthetic oligonucleotide
ccgucgaagcgcuccuccu

SEQ ID NO: 1700358 - RNA, 19 nt, Artificial Sequence
  Description of Artificial Sequence: Synthetic oligonucleotide
cacugguaaccaggcgguu

SEQ ID NO: 1700359 - RNA, 19 nt, Artificial Sequence
  Description of Artificial Sequence: Synthetic oligonucleotide
cccauggacuucugccuuu

SEQ ID NO: 1700360 - RNA, 19 nt, Artificial Sequence
  Description of Artificial Sequence: Synthetic oligonucleotide
gguucgcgucgggcccaac

SEQ ID NO: 1700361 - RNA, 19 nt, Artificial Sequence
  Description of Artificial Sequence: Synthetic oligonucleotide
gcaugccgucgaagcgcuc

SEQ ID NO: 1700362 - RNA, 19 nt, Artificial Sequence
  Description of Artificial Sequence: Synthetic oligonucleotide
cgcccucgugcugcugcgc

SEQ ID NO: 1700363 - RNA, 19 nt, Artificial Sequence
  Description of Artificial Sequence: Synthetic oligonucleotide
gcgcugcacugcgagcccu

SEQ ID NO: 1700364 - RNA, 19 nt, Artificial Sequence
  Description of Artificial Sequence: Synthetic oligonucleotide
cgcuccgcacgguucgcgu

SEQ ID NO: 1700365 - RNA, 19 nt, Artificial Sequence
  Description of Artificial Sequence: Synthetic oligonucleotide
cguugcccagguugggcuu

SEQ ID NO: 1700366 - RNA, 19 nt, Artificial Sequence
  Description of Artificial Sequence: Synthetic oligonucleotide
cgacagggucuggguccag

SEQ ID NO: 1700367 - RNA, 19 nt, Artificial Sequence
  Description of Artificial Sequence: Synthetic oligonucleotide
gcccgcgcuccgcacgguu

SEQ ID NO: 1700368 - RNA, 19 nt, Artificial Sequence
  Description of Artificial Sequence: Synthetic oligonucleotide
cgccgcccucgugcugcug

SEQ ID NO: 1700369 - RNA, 19 nt, Artificial Sequence
  Description of Artificial Sequence: Synthetic oligonucleotide
cgguucgcgucgggcccaa

SEQ ID NO: 1700370 - RNA, 19 nt, Artificial Sequence
  Description of Artificial Sequence: Synthetic oligonucleotide
aacauaacagcacaauggc

SEQ ID NO: 1700371 - RNA, 19 nt, Artificial Sequence
  Description of Artificial Sequence: Synthetic oligonucleotide
uaacauaacagcacaaugg

SEQ ID NO: 1700372 - RNA, 19 nt, Artificial Sequence
  Description of Artificial Sequence: Synthetic oligonucleotide
ugugauuuguagaagaaca

SEQ ID NO: 1700373 - RNA, 19 nt, Artificial Sequence
  Description of Artificial Sequence: Synthetic oligonucleotide
uguguauucgcucucagcc

SEQ ID NO: 1700374 - RNA, 19 nt, Artificial Sequence
  Description of Artificial Sequence: Synthetic oligonucleotide
ucucauuugcuuaagacug

SEQ ID NO: 1700375 - RNA, 19 nt, Artificial Sequence
  Description of Artificial Sequence: Synthetic oligonucleotide
uugaaaugcagcuugaaga

SEQ ID NO: 1700376 - RNA, 19 nt, Artificial Sequence
  Description of Artificial Sequence: Synthetic oligonucleotide
ugcccuauuauuauaaaag

SEQ ID NO: 1700377 - RNA, 19 nt, Artificial Sequence
  Description of Artificial Sequence: Synthetic oligonucleotide
aauugcuuauuagucaagg

SEQ ID NO: 1700378 - RNA, 19 nt, Artificial Sequence
  Description of Artificial Sequence: Synthetic oligonucleotide
aaauaggucugguaaccgg

SEQ ID NO: 1700379 - RNA, 19 nt, Artificial Sequence
  Description of Artificial Sequence: Synthetic oligonucleotide
uugcuuauuagucaaggga

SEQ ID NO: 1700380 - RNA, 19 nt, Artificial Sequence
  Description of Artificial Sequence: Synthetic oligonucleotide
uuuuacacaccacgcacgg

SEQ ID NO: 1700381 - RNA, 19 nt, Artificial Sequence
  Description of Artificial Sequence: Synthetic oligonucleotide
aagggaauggcagccaccc

SEQ ID NO: 1700382 - RNA, 19 nt, Artificial Sequence
  Description of Artificial Sequence: Synthetic oligonucleotide
aaugugcagguucaaacca

SEQ ID NO: 1700383 - RNA, 19 nt, Artificial Sequence
  Description of Artificial Sequence: Synthetic oligonucleotide
ugcuuauuagucaagggaa

SEQ ID NO: 1700384 - RNA, 19 nt, Artificial Sequence
  Description of Artificial Sequence: Synthetic oligonucleotide
acauacuuagagaaugugc

SEQ ID NO: 1700385 - RNA, 19 nt, Artificial Sequence
  Description of Artificial Sequence: Synthetic oligonucleotide
aagacugcgccauuuguug

SEQ ID NO: 1700386 - RNA, 19 nt, Artificial Sequence
  Description of Artificial Sequence: Synthetic oligonucleotide
cuacguaccauuaccauac

SEQ ID NO: 1700387 - RNA, 19 nt, Artificial Sequence
  Description of Artificial Sequence: Synthetic oligonucleotide
uugugaaacagacagcaaa

SEQ ID NO: 1700388 - RNA, 19 nt, Artificial Sequence
  Description of Artificial Sequence: Synthetic oligonucleotide
aaguuggugaagacuaccc

SEQ ID NO: 1700389 - RNA, 19 nt, Artificial Sequence
  Description of Artificial Sequence: Synthetic oligonucleotide
uauugcacuggauaucugc

SEQ ID NO: 1700390 - RNA, 19 nt, Artificial Sequence
  Description of Artificial Sequence: Synthetic oligonucleotide
aauaggucugguaaccggg

SEQ ID NO: 1700391 - RNA, 19 nt, Artificial Sequence
  Description of Artificial Sequence: Synthetic oligonucleotide
guaccauuaccauacagug

SEQ ID NO: 1700392 - RNA, 19 nt, Artificial Sequence
  Description of Artificial Sequence: Synthetic oligonucleotide
agcacaauggcuucgguca

SEQ ID NO: 1700393 - RNA, 19 nt, Artificial Sequence
  Description of Artificial Sequence: Synthetic oligonucleotide
aaaauaggucugguaaccg

SEQ ID NO: 1700394 - RNA, 19 nt, Artificial Sequence
  Description of Artificial Sequence: Synthetic oligonucleotide
cacaaauugcuuauuaguc

SEQ ID NO: 1700395 - RNA, 19 nt, Artificial Sequence
  Description of Artificial Sequence: Synthetic oligonucleotide
aaacccuucaguggaacgg

SEQ ID NO: 1700396 - RNA, 19 nt, Artificial Sequence
  Description of Artificial Sequence: Synthetic oligonucleotide
aaggcucuaugcaugaagg

SEQ ID NO: 1700397 - RNA, 19 nt, Artificial Sequence
  Description of Artificial Sequence: Synthetic oligonucleotide
auucuaucuuccaagaaag

SEQ ID NO: 1700398 - RNA, 19 nt, Artificial Sequence
  Description of Artificial Sequence: Synthetic oligonucleotide
auacaggugagauucuuug

SEQ ID NO: 1700399 - RNA, 19 nt, Artificial Sequence
  Description of Artificial Sequence: Synthetic oligonucleotide
caccccauaacauaacagc

SEQ ID NO: 1700400 - RNA, 19 nt, Artificial Sequence
  Description of Artificial Sequence: Synthetic oligonucleotide
ugaaguaguacacguggga

SEQ ID NO: 1700401 - RNA, 19 nt, Artificial Sequence
  Description of Artificial Sequence: Synthetic oligonucleotide
guguuuggcagccaggucc

SEQ ID NO: 1700402 - RNA, 19 nt, Artificial Sequence
  Description of Artificial Sequence: Synthetic oligonucleotide
agucaagggaagugagucc

SEQ ID NO: 1700403 - RNA, 19 nt, Artificial Sequence
  Description of Artificial Sequence: Synthetic oligonucleotide
aaguaguacacgugggacu

SEQ ID NO: 1700404 - RNA, 19 nt, Artificial Sequence
  Description of Artificial Sequence: Synthetic oligonucleotide
uuguagaagaacaggcaga

SEQ ID NO: 1700405 - RNA, 19 nt, Artificial Sequence
  Description of Artificial Sequence: Synthetic oligonucleotide
aacgacauacagcuucuca

SEQ ID NO: 1700406 - RNA, 19 nt, Artificial Sequence
  Description of Artificial Sequence: Synthetic oligonucleotide
uauuagucaagggaaguga

SEQ ID NO: 1700407 - RNA, 19 nt, Artificial Sequence
  Description of Artificial Sequence: Synthetic oligonucleotide
guagacacuggagaaaucc

SEQ ID NO: 1700408 - RNA, 19 nt, Artificial Sequence
  Description of Artificial Sequence: Synthetic oligonucleotide
aacggagugccccacaaau

SEQ ID NO: 1700409 - RNA, 19 nt, Artificial Sequence
  Description of Artificial Sequence: Synthetic oligonucleotide
aacaccccauaacauaaca

SEQ ID NO: 1700410 - RNA, 19 nt, Artificial Sequence
  Description of Artificial Sequence: Synthetic oligonucleotide
aagacguaguccuugugaa

SEQ ID NO: 1700411 - RNA, 19 nt, Artificial Sequence
  Description of Artificial Sequence: Synthetic oligonucleotide
gucuguacaagaugugggg

SEQ ID NO: 1700412 - RNA, 19 nt, Artificial Sequence
  Description of Artificial Sequence: Synthetic oligonucleotide
auguguauucgcucucagc

SEQ ID NO: 1700413 - RNA, 19 nt, Artificial Sequence
  Description of Artificial Sequence: Synthetic oligonucleotide
gcagguucaaaccauggcg

SEQ ID NO: 1700414 - RNA, 19 nt, Artificial Sequence
  Description of Artificial Sequence: Synthetic oligonucleotide
uguauucgcucucagcccu

SEQ ID NO: 1700415 - RNA, 19 nt, Artificial Sequence
  Description of Artificial Sequence: Synthetic oligonucleotide
aggugagauucuuugugac

SEQ ID NO: 1700416 - RNA, 19 nt, Artificial Sequence
  Description of Artificial Sequence: Synthetic oligonucleotide
cuaugcaugaagggaaugg

SEQ ID NO: 1700417 - RNA, 19 nt, Artificial Sequence
  Description of Artificial Sequence: Synthetic oligonucleotide
gaagacguaguccuuguga

SEQ ID NO: 1700418 - RNA, 19 nt, Artificial Sequence
  Description of Artificial Sequence: Synthetic oligonucleotide
ucgaauguguauucgcucu

SEQ ID NO: 1700419 - RNA, 19 nt, Artificial Sequence
  Description of Artificial Sequence: Synthetic oligonucleotide
ucucgaauguguauucgcu

SEQ ID NO: 1700420 - RNA, 19 nt, Artificial Sequence
  Description of Artificial Sequence: Synthetic oligonucleotide
gucaacgacauacagcuuc

SEQ ID NO: 1700421 - RNA, 19 nt, Artificial Sequence
  Description of Artificial Sequence: Synthetic oligonucleotide
aacggugagugaguagccc

SEQ ID NO: 1700422 - RNA, 19 nt, Artificial Sequence
  Description of Artificial Sequence: Synthetic oligonucleotide
ucauuugcuuaagacugcg

SEQ ID NO: 1700423 - RNA, 19 nt, Artificial Sequence
  Description of Artificial Sequence: Synthetic oligonucleotide
acuuagagaaugugcaggu

SEQ ID NO: 1700424 - RNA, 19 nt, Artificial Sequence
  Description of Artificial Sequence: Synthetic oligonucleotide
uuaagacugcgccauuugu

SEQ ID NO: 1700425 - RNA, 19 nt, Artificial Sequence
  Description of Artificial Sequence: Synthetic oligonucleotide
uucaguggaacggagugcc

SEQ ID NO: 1700426 - RNA, 19 nt, Artificial Sequence
  Description of Artificial Sequence: Synthetic oligonucleotide
uccacugggaggcuuaggu

SEQ ID NO: 1700427 - RNA, 19 nt, Artificial Sequence
  Description of Artificial Sequence: Synthetic oligonucleotide
gagccaaacccuucagugg

SEQ ID NO: 1700428 - RNA, 19 nt, Artificial Sequence
  Description of Artificial Sequence: Synthetic oligonucleotide
cuucucaugcuugugaaac

SEQ ID NO: 1700429 - RNA, 19 nt, Artificial Sequence
  Description of Artificial Sequence: Synthetic oligonucleotide
auuuuacacaccacgcacg

SEQ ID NO: 1700430 - RNA, 19 nt, Artificial Sequence
  Description of Artificial Sequence: Synthetic oligonucleotide
aguuuguaaauaagaauca

SEQ ID NO: 1700431 - RNA, 19 nt, Artificial Sequence
  Description of Artificial Sequence: Synthetic oligonucleotide
ggugguagcacuucggaug

SEQ ID NO: 1700432 - RNA, 19 nt, Artificial Sequence
  Description of Artificial Sequence: Synthetic oligonucleotide
ucuugcauuguagaaggcu

SEQ ID NO: 1700433 - RNA, 19 nt, Artificial Sequence
  Description of Artificial Sequence: Synthetic oligonucleotide
gaaaugcagcuugaagacg

SEQ ID NO: 1700434 - RNA, 19 nt, Artificial Sequence
  Description of Artificial Sequence: Synthetic oligonucleotide
uuagucaagggaagugagu

SEQ ID NO: 1700435 - RNA, 19 nt, Artificial Sequence
  Description of Artificial Sequence: Synthetic oligonucleotide
gaaguaguacacgugggac

SEQ ID NO: 1700436 - RNA, 19 nt, Artificial Sequence
  Description of Artificial Sequence: Synthetic oligonucleotide
uucuaucuuccaagaaagc

SEQ ID NO: 1700437 - RNA, 19 nt, Artificial Sequence
  Description of Artificial Sequence: Synthetic oligonucleotide
cauucuaucuuccaagaaa

SEQ ID NO: 1700438 - RNA, 19 nt, Artificial Sequence
  Description of Artificial Sequence: Synthetic oligonucleotide
uucgcucucagcccugaag

SEQ ID NO: 1700439 - RNA, 19 nt, Artificial Sequence
  Description of Artificial Sequence: Synthetic oligonucleotide
agaaaaccccacuacaguu

SEQ ID NO: 1700440 - RNA, 19 nt, Artificial Sequence
  Description of Artificial Sequence: Synthetic oligonucleotide
ucaacgacauacagcuucu

SEQ ID NO: 1700441 - RNA, 19 nt, Artificial Sequence
  Description of Artificial Sequence: Synthetic oligonucleotide
uagucaagggaagugaguc

SEQ ID NO: 1700442 - RNA, 19 nt, Artificial Sequence
  Description of Artificial Sequence: Synthetic oligonucleotide
uggucaacuuccaccaaga

SEQ ID NO: 1700443 - RNA, 19 nt, Artificial Sequence
  Description of Artificial Sequence: Synthetic oligonucleotide
cauuaccauacagugagug

SEQ ID NO: 1700444 - RNA, 19 nt, Artificial Sequence
  Description of Artificial Sequence: Synthetic oligonucleotide
cucucgaauguguauucgc

SEQ ID NO: 1700445 - RNA, 19 nt, Artificial Sequence
  Description of Artificial Sequence: Synthetic oligonucleotide
auuagucaagggaagugag

SEQ ID NO: 1700446 - RNA, 19 nt, Artificial Sequence
  Description of Artificial Sequence: Synthetic oligonucleotide
guuuguaaauaagaaucac

SEQ ID NO: 1700447 - RNA, 19 nt, Artificial Sequence
  Description of Artificial Sequence: Synthetic oligonucleotide
uccaucuguaccccaugcc

SEQ ID NO: 1700448 - RNA, 19 nt, Artificial Sequence
  Description of Artificial Sequence: Synthetic oligonucleotide
guaaccggggucucacugg

SEQ ID NO: 1700449 - RNA, 19 nt, Artificial Sequence
  Description of Artificial Sequence: Synthetic oligonucleotide
aagcagccgugacuggaac

SEQ ID NO: 1700450 - RNA, 19 nt, Artificial Sequence
  Description of Artificial Sequence: Synthetic oligonucleotide
gacauacuuagagaaugug

SEQ ID NO: 1700451 - RNA, 19 nt, Artificial Sequence
  Description of Artificial Sequence: Synthetic oligonucleotide
uugcauuguagaaggcucu

SEQ ID NO: 1700452 - RNA, 19 nt, Artificial Sequence
  Description of Artificial Sequence: Synthetic oligonucleotide
uaagacugcgccauuuguu

SEQ ID NO: 1700453 - RNA, 19 nt, Artificial Sequence
  Description of Artificial Sequence: Synthetic oligonucleotide
aggagucuguacaagaugu

SEQ ID NO: 1700454 - RNA, 19 nt, Artificial Sequence
  Description of Artificial Sequence: Synthetic oligonucleotide
uguacaagauguggggugu

SEQ ID NO: 1700455 - RNA, 19 nt, Artificial Sequence
  Description of Artificial Sequence: Synthetic oligonucleotide
acuacguaccauuaccaua

SEQ ID NO: 1700456 - RNA, 19 nt, Artificial Sequence
  Description of Artificial Sequence: Synthetic oligonucleotide
gauaucugcugcucuuaac

SEQ ID NO: 1700457 - RNA, 19 nt, Artificial Sequence
  Description of Artificial Sequence: Synthetic oligonucleotide
agcaggugguagcacuucg

SEQ ID NO: 1700458 - RNA, 19 nt, Artificial Sequence
  Description of Artificial Sequence: Synthetic oligonucleotide
cuuaagacugcgccauuug

SEQ ID NO: 1700459 - RNA, 19 nt, Artificial Sequence
  Description of Artificial Sequence: Synthetic oligonucleotide
agacagcaaaacaucacag

SEQ ID NO: 1700460 - RNA, 19 nt, Artificial Sequence
  Description of Artificial Sequence: Synthetic oligonucleotide
ggaacggugagugaguagc

SEQ ID NO: 1700461 - RNA, 19 nt, Artificial Sequence
  Description of Artificial Sequence: Synthetic oligonucleotide
ugcuugugaaacagacagc

SEQ ID NO: 1700462 - RNA, 19 nt, Artificial Sequence
  Description of Artificial Sequence: Synthetic oligonucleotide
aggcucuaugcaugaaggg

SEQ ID NO: 1700463 - RNA, 19 nt, Artificial Sequence
  Description of Artificial Sequence: Synthetic oligonucleotide
ggaacaaccaauggugucc

SEQ ID NO: 1700464 - RNA, 19 nt, Artificial Sequence
  Description of Artificial Sequence: Synthetic oligonucleotide
gacucaaaaugugggcccg

SEQ ID NO: 1700465 - RNA, 19 nt, Artificial Sequence
  Description of Artificial Sequence: Synthetic oligonucleotide
gggacuacguaccauuacc

SEQ ID NO: 1700466 - RNA, 19 nt, Artificial Sequence
  Description of Artificial Sequence: Synthetic oligonucleotide
ugcgccauuuguuguagac

SEQ ID NO: 1700467 - RNA, 19 nt, Artificial Sequence
  Description of Artificial Sequence: Synthetic oligonucleotide
aagacuacccacagcuucu

SEQ ID NO: 1700468 - RNA, 19 nt, Artificial Sequence
  Description of Artificial Sequence: Synthetic oligonucleotide
acguaccauuaccauacag

SEQ ID NO: 1700469 - RNA, 19 nt, Artificial Sequence
  Description of Artificial Sequence: Synthetic oligonucleotide
agccgugacuggaacaacc

SEQ ID NO: 1700470 - RNA, 19 nt, Artificial Sequence
  Description of Artificial Sequence: Synthetic oligonucleotide
ugauguggccaucuugcau

SEQ ID NO: 1700471 - RNA, 19 nt, Artificial Sequence
  Description of Artificial Sequence: Synthetic oligonucleotide
uggaacaaccaaugguguc

SEQ ID NO: 1700472 - RNA, 19 nt, Artificial Sequence
  Description of Artificial Sequence: Synthetic oligonucleotide
uccuaugagugcccuauua

SEQ ID NO: 1700473 - RNA, 19 nt, Artificial Sequence
  Description of Artificial Sequence: Synthetic oligonucleotide
acgcacgggauggugacgc

SEQ ID NO: 1700474 - RNA, 19 nt, Artificial Sequence
  Description of Artificial Sequence: Synthetic oligonucleotide
cucgaauguguauucgcuc

SEQ ID NO: 1700475 - RNA, 19 nt, Artificial Sequence
  Description of Artificial Sequence: Synthetic oligonucleotide
gauguagggcauugggaga

SEQ ID NO: 1700476 - RNA, 19 nt, Artificial Sequence
  Description of Artificial Sequence: Synthetic oligonucleotide
aggugugaauuuugccagg

SEQ ID NO: 1700477 - RNA, 19 nt, Artificial Sequence
  Description of Artificial Sequence: Synthetic oligonucleotide
cauuugcuuaagacugcgc

SEQ ID NO: 1700478 - RNA, 19 nt, Artificial Sequence
  Description of Artificial Sequence: Synthetic oligonucleotide
uguucagacaggugugaau

SEQ ID NO: 1700479 - RNA, 19 nt, Artificial Sequence
  Description of Artificial Sequence: Synthetic oligonucleotide
uuuacacaccacgcacggg

SEQ ID NO: 1700480 - RNA, 19 nt, Artificial Sequence
  Description of Artificial Sequence: Synthetic oligonucleotide
ucuaugcaugaagggaaug

SEQ ID NO: 1700481 - RNA, 19 nt, Artificial Sequence
  Description of Artificial Sequence: Synthetic oligonucleotide
uaaccggggucucacugga

SEQ ID NO: 1700482 - RNA, 19 nt, Artificial Sequence
  Description of Artificial Sequence: Synthetic oligonucleotide
agguauugcacuggauauc

SEQ ID NO: 1700483 - RNA, 19 nt, Artificial Sequence
  Description of Artificial Sequence: Synthetic oligonucleotide
ugcccggaaggaaugagua

SEQ ID NO: 1700484 - RNA, 19 nt, Artificial Sequence
  Description of Artificial Sequence: Synthetic oligonucleotide
ccccauuuuacacaccacg

SEQ ID NO: 1700485 - RNA, 19 nt, Artificial Sequence
  Description of Artificial Sequence: Synthetic oligonucleotide
ugggacuacguaccauuac

SEQ ID NO: 1700486 - RNA, 19 nt, Artificial Sequence
  Description of Artificial Sequence: Synthetic oligonucleotide
agaggacgugcugaugugg

SEQ ID NO: 1700487 - RNA, 19 nt, Artificial Sequence
  Description of Artificial Sequence: Synthetic oligonucleotide
auggcuucggucaacgaca

SEQ ID NO: 1700488 - RNA, 19 nt, Artificial Sequence
  Description of Artificial Sequence: Synthetic oligonucleotide
cagggcugggacuacguac

SEQ ID NO: 1700489 - RNA, 19 nt, Artificial Sequence
  Description of Artificial Sequence: Synthetic oligonucleotide
cccauuuuacacaccacgc

SEQ ID NO: 1700490 - RNA, 19 nt, Artificial Sequence
  Description of Artificial Sequence: Synthetic oligonucleotide
gauguggccaucuugcauu

SEQ ID NO: 1700491 - RNA, 19 nt, Artificial Sequence
  Description of Artificial Sequence: Synthetic oligonucleotide
acggugagugaguagccca

SEQ ID NO: 1700492 - RNA, 19 nt, Artificial Sequence
  Description of Artificial Sequence: Synthetic oligonucleotide
cacgugggacuugaaaugc

SEQ ID NO: 1700493 - RNA, 19 nt, Artificial Sequence
  Description of Artificial Sequence: Synthetic oligonucleotide
accccauaacauaacagca

SEQ ID NO: 1700494 - RNA, 19 nt, Artificial Sequence
  Description of Artificial Sequence: Synthetic oligonucleotide
agugagugcuucucugcga

SEQ ID NO: 1700495 - RNA, 19 nt, Artificial Sequence
  Description of Artificial Sequence: Synthetic oligonucleotide
acgcucgguguuccggugc

SEQ ID NO: 1700496 - RNA, 19 nt, Artificial Sequence
  Description of Artificial Sequence: Synthetic oligonucleotide
aacccuucaguggaacgga

SEQ ID NO: 1700497 - RNA, 19 nt, Artificial Sequence
  Description of Artificial Sequence: Synthetic oligonucleotide
ccaucuguaccccaugccc

SEQ ID NO: 1700498 - RNA, 19 nt, Artificial Sequence
  Description of Artificial Sequence: Synthetic oligonucleotide
acaccccauaacauaacag

SEQ ID NO: 1700499 - RNA, 19 nt, Artificial Sequence
  Description of Artificial Sequence: Synthetic oligonucleotide
aguccuaugagugcccuau

SEQ ID NO: 1700500 - RNA, 19 nt, Artificial Sequence
  Description of Artificial Sequence: Synthetic oligonucleotide
gcgaagcucacucaacacc

SEQ ID NO: 1700501 - RNA, 19 nt, Artificial Sequence
  Description of Artificial Sequence: Synthetic oligonucleotide
guaguguuuggcagccagg

SEQ ID NO: 1700502 - RNA, 19 nt, Artificial Sequence
  Description of Artificial Sequence: Synthetic oligonucleotide
uucggaugacuuccaucca

SEQ ID NO: 1700503 - RNA, 19 nt, Artificial Sequence
  Description of Artificial Sequence: Synthetic oligonucleotide
gagaggacgugcugaugug

SEQ ID NO: 1700504 - RNA, 19 nt, Artificial Sequence
  Description of Artificial Sequence: Synthetic oligonucleotide
cucagacucugagggaacg

SEQ ID NO: 1700505 - RNA, 19 nt, Artificial Sequence
  Description of Artificial Sequence: Synthetic oligonucleotide
agcccugaaguaguacacg

SEQ ID NO: 1700506 - RNA, 19 nt, Artificial Sequence
  Description of Artificial Sequence: Synthetic oligonucleotide
cgaagcucacucaacaccc

SEQ ID NO: 1700507 - RNA, 19 nt, Artificial Sequence
  Description of Artificial Sequence: Synthetic oligonucleotide
gagacgcucgguguuccgg

SEQ ID NO: 1700508 - RNA, 19 nt, Artificial Sequence
  Description of Artificial Sequence: Synthetic oligonucleotide
cucaacaccccauaacaua

SEQ ID NO: 1700509 - RNA, 19 nt, Artificial Sequence
  Description of Artificial Sequence: Synthetic oligonucleotide
gggaagugaguccuaugag

SEQ ID NO: 1700510 - RNA, 19 nt, Artificial Sequence
  Description of Artificial Sequence: Synthetic oligonucleotide
uaguacacgugggacuuga

SEQ ID NO: 1700511 - RNA, 19 nt, Artificial Sequence
  Description of Artificial Sequence: Synthetic oligonucleotide
ugagugcccuauuauuaua

SEQ ID NO: 1700512 - RNA, 19 nt, Artificial Sequence
  Description of Artificial Sequence: Synthetic oligonucleotide
gugguagcacuucggauga

SEQ ID NO: 1700513 - RNA, 19 nt, Artificial Sequence
  Description of Artificial Sequence: Synthetic oligonucleotide
gcuuauuagucaagggaag

SEQ ID NO: 1700514 - RNA, 19 nt, Artificial Sequence
  Description of Artificial Sequence: Synthetic oligonucleotide
agugcccuauuauuauaaa

SEQ ID NO: 1700515 - RNA, 19 nt, Artificial Sequence
  Description of Artificial Sequence: Synthetic oligonucleotide
cagcacaauggcuucgguc

SEQ ID NO: 1700516 - RNA, 19 nt, Artificial Sequence
  Description of Artificial Sequence: Synthetic oligonucleotide
gguaaccggggucucacug

SEQ ID NO: 1700517 - RNA, 19 nt, Artificial Sequence
  Description of Artificial Sequence: Synthetic oligonucleotide
caguggaacggagugcccc

SEQ ID NO: 1700518 - RNA, 19 nt, Artificial Sequence
  Description of Artificial Sequence: Synthetic oligonucleotide
cuuccaagaaagcagccgu

SEQ ID NO: 1700519 - RNA, 19 nt, Artificial Sequence
  Description of Artificial Sequence: Synthetic oligonucleotide
uuuggucaacuuccaccaa

SEQ ID NO: 1700520 - RNA, 19 nt, Artificial Sequence
  Description of Artificial Sequence: Synthetic oligonucleotide
ccaucuugcauuguagaag

SEQ ID NO: 1700521 - RNA, 19 nt, Artificial Sequence
  Description of Artificial Sequence: Synthetic oligonucleotide
aaccccacuacaguuugua

SEQ ID NO: 1700522 - RNA, 19 nt, Artificial Sequence
  Description of Artificial Sequence: Synthetic oligonucleotide
ucucugcgaagcucacuca

SEQ ID NO: 1700523 - RNA, 19 nt, Artificial Sequence
  Description of Artificial Sequence: Synthetic oligonucleotide
cucaaaaugugggcccgag

SEQ ID NO: 1700524 - RNA, 19 nt, Artificial Sequence
  Description of Artificial Sequence: Synthetic oligonucleotide
gaacggugagugaguagcc

SEQ ID NO: 1700525 - RNA, 19 nt, Artificial Sequence
  Description of Artificial Sequence: Synthetic oligonucleotide
uugccaggcuucauucuau

SEQ ID NO: 1700526 - RNA, 19 nt, Artificial Sequence
  Description of Artificial Sequence: Synthetic oligonucleotide
uagcacuucggaugacuuc

SEQ ID NO: 1700527 - RNA, 19 nt, Artificial Sequence
  Description of Artificial Sequence: Synthetic oligonucleotide
gaagcucacucaacacccc

SEQ ID NO: 1700528 - RNA, 19 nt, Artificial Sequence
  Description of Artificial Sequence: Synthetic oligonucleotide
agauguggggugucaucca

SEQ ID NO: 1700529 - RNA, 19 nt, Artificial Sequence
  Description of Artificial Sequence: Synthetic oligonucleotide
gagugcccuauuauuauaa

SEQ ID NO: 1700530 - RNA, 19 nt, Artificial Sequence
  Description of Artificial Sequence: Synthetic oligonucleotide
gcuuagguaguguuuggca

SEQ ID NO: 1700531 - RNA, 19 nt, Artificial Sequence
  Description of Artificial Sequence: Synthetic oligonucleotide
ugaacuuccucagcagguu

SEQ ID NO: 1700532 - RNA, 19 nt, Artificial Sequence
  Description of Artificial Sequence: Synthetic oligonucleotide
guacacgugggacuugaaa

SEQ ID NO: 1700533 - RNA, 19 nt, Artificial Sequence
  Description of Artificial Sequence: Synthetic oligonucleotide
caacaccccauaacauaac

SEQ ID NO: 1700534 - RNA, 19 nt, Artificial Sequence
  Description of Artificial Sequence: Synthetic oligonucleotide
uacguaccauuaccauaca

SEQ ID NO: 1700535 - RNA, 19 nt, Artificial Sequence
  Description of Artificial Sequence: Synthetic oligonucleotide
gacuacccacagcuucugc

SEQ ID NO: 1700536 - RNA, 19 nt, Artificial Sequence
  Description of Artificial Sequence: Synthetic oligonucleotide
uacacaccacgcacgggau

SEQ ID NO: 1700537 - RNA, 19 nt, Artificial Sequence
  Description of Artificial Sequence: Synthetic oligonucleotide
gugagugcuucucugcgaa

SEQ ID NO: 1700538 - RNA, 19 nt, Artificial Sequence
  Description of Artificial Sequence: Synthetic oligonucleotide
cuggugugauuuguagaag

SEQ ID NO: 1700539 - RNA, 19 nt, Artificial Sequence
  Description of Artificial Sequence: Synthetic oligonucleotide
acugcgccauuuguuguag

SEQ ID NO: 1700540 - RNA, 19 nt, Artificial Sequence
  Description of Artificial Sequence: Synthetic oligonucleotide
aggugguagcacuucggau

SEQ ID NO: 1700541 - RNA, 19 nt, Artificial Sequence
  Description of Artificial Sequence: Synthetic oligonucleotide
ggugugaauuuugccaggc

SEQ ID NO: 1700542 - RNA, 19 nt, Artificial Sequence
  Description of Artificial Sequence: Synthetic oligonucleotide
guagaagaacaggcagaag

SEQ ID NO: 1700543 - RNA, 19 nt, Artificial Sequence
  Description of Artificial Sequence: Synthetic oligonucleotide
uucugccacccguugcugu

SEQ ID NO: 1700544 - RNA, 19 nt, Artificial Sequence
  Description of Artificial Sequence: Synthetic oligonucleotide
agacacuggagaaauccau

SEQ ID NO: 1700545 - RNA, 19 nt, Artificial Sequence
  Description of Artificial Sequence: Synthetic oligonucleotide
auggagacgcucgguguuc

SEQ ID NO: 1700546 - RNA, 19 nt, Artificial Sequence
  Description of Artificial Sequence: Synthetic oligonucleotide
ccccauaacauaacagcac

SEQ ID NO: 1700547 - RNA, 19 nt, Artificial Sequence
  Description of Artificial Sequence: Synthetic oligonucleotide
ucugguaaccggggucuca

SEQ ID NO: 1700548 - RNA, 19 nt, Artificial Sequence
  Description of Artificial Sequence: Synthetic oligonucleotide
cagguucaaaccauggcgu

SEQ ID NO: 1700549 - RNA, 19 nt, Artificial Sequence
  Description of Artificial Sequence: Synthetic oligonucleotide
uaccccaugcccggaagga

SEQ ID NO: 1700550 - RNA, 19 nt, Artificial Sequence
  Description of Artificial Sequence: Synthetic oligonucleotide
accgcgaugcugaagucca

SEQ ID NO: 1700551 - RNA, 19 nt, Artificial Sequence
  Description of Artificial Sequence: Synthetic oligonucleotide
uggaacggagugccccaca

SEQ ID NO: 1700552 - RNA, 19 nt, Artificial Sequence
  Description of Artificial Sequence: Synthetic oligonucleotide
ggcucuaugcaugaaggga

SEQ ID NO: 1700553 - RNA, 19 nt, Artificial Sequence
  Description of Artificial Sequence: Synthetic oligonucleotide
caccgcgaugcugaagucc

SEQ ID NO: 1700554 - RNA, 19 nt, Artificial Sequence
  Description of Artificial Sequence: Synthetic oligonucleotide
ccuggugugauuuguagaa

SEQ ID NO: 1700555 - RNA, 19 nt, Artificial Sequence
  Description of Artificial Sequence: Synthetic oligonucleotide
cagcaaaacaucacagccu

SEQ ID NO: 1700556 - RNA, 19 nt, Artificial Sequence
  Description of Artificial Sequence: Synthetic oligonucleotide
gucaagggaagugaguccu

SEQ ID NO: 1700557 - RNA, 19 nt, Artificial Sequence
  Description of Artificial Sequence: Synthetic oligonucleotide
gacuacguaccauuaccau

SEQ ID NO: 1700558 - RNA, 19 nt, Artificial Sequence
  Description of Artificial Sequence: Synthetic oligonucleotide
caugcccggaaggaaugag

SEQ ID NO: 1700559 - RNA, 19 nt, Artificial Sequence
  Description of Artificial Sequence: Synthetic oligonucleotide
gaagacauacuuagagaau

SEQ ID NO: 1700560 - RNA, 19 nt, Artificial Sequence
  Description of Artificial Sequence: Synthetic oligonucleotide
cugguaaccggggucucac

SEQ ID NO: 1700561 - RNA, 19 nt, Artificial Sequence
  Description of Artificial Sequence: Synthetic oligonucleotide
gguauugcacuggauaucu

SEQ ID NO: 1700562 - RNA, 19 nt, Artificial Sequence
  Description of Artificial Sequence: Synthetic oligonucleotide
uggagacgcucgguguucc

SEQ ID NO: 1700563 - RNA, 19 nt, Artificial Sequence
  Description of Artificial Sequence: Synthetic oligonucleotide
caggugguagcacuucgga

SEQ ID NO: 1700564 - RNA, 19 nt, Artificial Sequence
  Description of Artificial Sequence: Synthetic oligonucleotide
gcugcucuuaacagaaaac

SEQ ID NO: 1700565 - RNA, 19 nt, Artificial Sequence
  Description of Artificial Sequence: Synthetic oligonucleotide
gcccuauuauuauaaaagu

SEQ ID NO: 1700566 - RNA, 19 nt, Artificial Sequence
  Description of Artificial Sequence: Synthetic oligonucleotide
cagucaccagggcugggac

SEQ ID NO: 1700567 - RNA, 19 nt, Artificial Sequence
  Description of Artificial Sequence: Synthetic oligonucleotide
cuaugagugcccuauuauu

SEQ ID NO: 1700568 - RNA, 19 nt, Artificial Sequence
  Description of Artificial Sequence: Synthetic oligonucleotide
gacugcgccauuuguugua

SEQ ID NO: 1700569 - RNA, 19 nt, Artificial Sequence
  Description of Artificial Sequence: Synthetic oligonucleotide
auguggggugucauccauc

SEQ ID NO: 1700570 - RNA, 19 nt, Artificial Sequence
  Description of Artificial Sequence: Synthetic oligonucleotide
ucgguguuccggugccagc

SEQ ID NO: 1700571 - RNA, 19 nt, Artificial Sequence
  Description of Artificial Sequence: Synthetic oligonucleotide
ccauuuuacacaccacgca

SEQ ID NO: 1700572 - RNA, 19 nt, Artificial Sequence
  Description of Artificial Sequence: Synthetic oligonucleotide
gaaaaccccacuacaguuu

SEQ ID NO: 1700573 - RNA, 19 nt, Artificial Sequence
  Description of Artificial Sequence: Synthetic oligonucleotide
cucugcgaagcucacucaa

SEQ ID NO: 1700574 - RNA, 19 nt, Artificial Sequence
  Description of Artificial Sequence: Synthetic oligonucleotide
ggcuuagguaguguuuggc

SEQ ID NO: 1700575 - RNA, 19 nt, Artificial Sequence
  Description of Artificial Sequence: Synthetic oligonucleotide
gcucuaugcaugaagggaa

SEQ ID NO: 1700576 - RNA, 19 nt, Artificial Sequence
  Description of Artificial Sequence: Synthetic oligonucleotide
cggagugccccacaaauug

SEQ ID NO: 1700577 - RNA, 19 nt, Artificial Sequence
  Description of Artificial Sequence: Synthetic oligonucleotide
gacgcccagguauugcacu

SEQ ID NO: 1700578 - RNA, 19 nt, Artificial Sequence
  Description of Artificial Sequence: Synthetic oligonucleotide
ggacuacguaccauuacca

SEQ ID NO: 1700579 - RNA, 19 nt, Artificial Sequence
  Description of Artificial Sequence: Synthetic oligonucleotide
ccagguauugcacuggaua

SEQ ID NO: 1700580 - RNA, 19 nt, Artificial Sequence
  Description of Artificial Sequence: Synthetic oligonucleotide
gauguggggugucauccau

SEQ ID NO: 1700581 - RNA, 19 nt, Artificial Sequence
  Description of Artificial Sequence: Synthetic oligonucleotide
agacuacccacagcuucug

SEQ ID NO: 1700582 - RNA, 19 nt, Artificial Sequence
  Description of Artificial Sequence: Synthetic oligonucleotide
gguucaaaccauggcguca

SEQ ID NO: 1700583 - RNA, 19 nt, Artificial Sequence
  Description of Artificial Sequence: Synthetic oligonucleotide
ugguaaccggggucucacu

SEQ ID NO: 1700584 - RNA, 19 nt, Artificial Sequence
  Description of Artificial Sequence: Synthetic oligonucleotide
cggucaacgacauacagcu

SEQ ID NO: 1700585 - RNA, 19 nt, Artificial Sequence
  Description of Artificial Sequence: Synthetic oligonucleotide
agauucuuugugacucaaa

SEQ ID NO: 1700586 - RNA, 19 nt, Artificial Sequence
  Description of Artificial Sequence: Synthetic oligonucleotide
aaaccccacuacaguuugu

SEQ ID NO: 1700587 - RNA, 19 nt, Artificial Sequence
  Description of Artificial Sequence: Synthetic oligonucleotide
gaacggagugccccacaaa

SEQ ID NO: 1700588 - RNA, 19 nt, Artificial Sequence
  Description of Artificial Sequence: Synthetic oligonucleotide
augcccggaaggaaugagu

SEQ ID NO: 1700589 - RNA, 19 nt, Artificial Sequence
  Description of Artificial Sequence: Synthetic oligonucleotide
gggaacggugagugaguag

SEQ ID NO: 1700590 - RNA, 19 nt, Artificial Sequence
  Description of Artificial Sequence: Synthetic oligonucleotide
ugggaggcuuagguagugu

SEQ ID NO: 1700591 - RNA, 19 nt, Artificial Sequence
  Description of Artificial Sequence: Synthetic oligonucleotide
gcccgagaggcugagcagg

SEQ ID NO: 1700592 - RNA, 19 nt, Artificial Sequence
  Description of Artificial Sequence: Synthetic oligonucleotide
ugcuuaagacugcgccauu

SEQ ID NO: 1700593 - RNA, 19 nt, Artificial Sequence
  Description of Artificial Sequence: Synthetic oligonucleotide
cggaugacuuccauccacc

SEQ ID NO: 1700594 - RNA, 19 nt, Artificial Sequence
  Description of Artificial Sequence: Synthetic oligonucleotide
acucaaaaugugggcccga

SEQ ID NO: 1700595 - RNA, 19 nt, Artificial Sequence
  Description of Artificial Sequence: Synthetic oligonucleotide
cguaccauuaccauacagu

SEQ ID NO: 1700596 - RNA, 19 nt, Artificial Sequence
  Description of Artificial Sequence: Synthetic oligonucleotide
agaaagacuugaagacaua

SEQ ID NO: 1700597 - RNA, 19 nt, Artificial Sequence
  Description of Artificial Sequence: Synthetic oligonucleotide
guagggcauugggagagga

SEQ ID NO: 1700598 - RNA, 19 nt, Artificial Sequence
  Description of Artificial Sequence: Synthetic oligonucleotide
ccucucgaauguguauucg

SEQ ID NO: 1700599 - RNA, 19 nt, Artificial Sequence
  Description of Artificial Sequence: Synthetic oligonucleotide
ggagacgcucgguguuccg

SEQ ID NO: 1700600 - RNA, 19 nt, Artificial Sequence
  Description of Artificial Sequence: Synthetic oligonucleotide
aaccggggucucacuggag

SEQ ID NO: 1700601 - RNA, 19 nt, Artificial Sequence
  Description of Artificial Sequence: Synthetic oligonucleotide
cugggacuacguaccauua

SEQ ID NO: 1700602 - RNA, 19 nt, Artificial Sequence
  Description of Artificial Sequence: Synthetic oligonucleotide
guauucgcucucagcccug

SEQ ID NO: 1700603 - RNA, 19 nt, Artificial Sequence
  Description of Artificial Sequence: Synthetic oligonucleotide
ggacgugcugauguggcca

SEQ ID NO: 1700604 - RNA, 19 nt, Artificial Sequence
  Description of Artificial Sequence: Synthetic oligonucleotide
ggaacggagugccccacaa

SEQ ID NO: 1700605 - RNA, 19 nt, Artificial Sequence
  Description of Artificial Sequence: Synthetic oligonucleotide
acgugggacuugaaaugca

SEQ ID NO: 1700606 - RNA, 19 nt, Artificial Sequence
  Description of Artificial Sequence: Synthetic oligonucleotide
ggagaacaggcaaacauuu

SEQ ID NO: 1700607 - RNA, 19 nt, Artificial Sequence
  Description of Artificial Sequence: Synthetic oligonucleotide
agggaacggugagugagua

SEQ ID NO: 1700608 - RNA, 19 nt, Artificial Sequence
  Description of Artificial Sequence: Synthetic oligonucleotide
caauggcuucggucaacga

SEQ ID NO: 1700609 - RNA, 19 nt, Artificial Sequence
  Description of Artificial Sequence: Synthetic oligonucleotide
cacgcacgggauggugacg

SEQ ID NO: 1700610 - RNA, 19 nt, Artificial Sequence
  Description of Artificial Sequence: Synthetic oligonucleotide
cucuaugcaugaagggaau

SEQ ID NO: 1700611 - RNA, 19 nt, Artificial Sequence
  Description of Artificial Sequence: Synthetic oligonucleotide
ggcauugggagaggacgug

SEQ ID NO: 1700612 - RNA, 19 nt, Artificial Sequence
  Description of Artificial Sequence: Synthetic oligonucleotide
cagccacccuggagaacag

SEQ ID NO: 1700613 - RNA, 19 nt, Artificial Sequence
  Description of Artificial Sequence: Synthetic oligonucleotide
ggcccgagaggcugagcag

SEQ ID NO: 1700614 - RNA, 19 nt, Artificial Sequence
  Description of Artificial Sequence: Synthetic oligonucleotide
ggugauuguccugguguga

SEQ ID NO: 1700615 - RNA, 19 nt, Artificial Sequence
  Description of Artificial Sequence: Synthetic oligonucleotide
auucgcucucagcccugaa

SEQ ID NO: 1700616 - RNA, 19 nt, Artificial Sequence
  Description of Artificial Sequence: Synthetic oligonucleotide
cccaugcccggaaggaaug

SEQ ID NO: 1700617 - RNA, 19 nt, Artificial Sequence
  Description of Artificial Sequence: Synthetic oligonucleotide
gaguccuaugagugcccua

SEQ ID NO: 1700618 - RNA, 19 nt, Artificial Sequence
  Description of Artificial Sequence: Synthetic oligonucleotide
caacgacauacagcuucuc

SEQ ID NO: 1700619 - RNA, 19 nt, Artificial Sequence
  Description of Artificial Sequence: Synthetic oligonucleotide
auggugacgcccagguauu

SEQ ID NO: 1700620 - RNA, 19 nt, Artificial Sequence
  Description of Artificial Sequence: Synthetic oligonucleotide
ccacgcacgggauggugac

SEQ ID NO: 1700621 - RNA, 19 nt, Artificial Sequence
  Description of Artificial Sequence: Synthetic oligonucleotide
gagggaacggugagugagu

SEQ ID NO: 1700622 - RNA, 19 nt, Artificial Sequence
  Description of Artificial Sequence: Synthetic oligonucleotide
acggagugccccacaaauu

SEQ ID NO: 1700623 - RNA, 19 nt, Artificial Sequence
  Description of Artificial Sequence: Synthetic oligonucleotide
caccacgcacgggauggug

SEQ ID NO: 1700624 - RNA, 19 nt, Artificial Sequence
  Description of Artificial Sequence: Synthetic oligonucleotide
gguagcacuucggaugacu

SEQ ID NO: 1700625 - RNA, 19 nt, Artificial Sequence
  Description of Artificial Sequence: Synthetic oligonucleotide
acgugcugauguggccauc

SEQ ID NO: 1700626 - RNA, 19 nt, Artificial Sequence
  Description of Artificial Sequence: Synthetic oligonucleotide
gcugggacuacguaccauu

SEQ ID NO: 1700627 - RNA, 19 nt, Artificial Sequence
  Description of Artificial Sequence: Synthetic oligonucleotide
cagacucugagggaacggu

SEQ ID NO: 1700628 - RNA, 19 nt, Artificial Sequence
  Description of Artificial Sequence: Synthetic oligonucleotide
guagcacuucggaugacuu

SEQ ID NO: 1700629 - RNA, 19 nt, Artificial Sequence
  Description of Artificial Sequence: Synthetic oligonucleotide
cauggagacgcucgguguu

SEQ ID NO: 1700630 - RNA, 19 nt, Artificial Sequence
  Description of Artificial Sequence: Synthetic oligonucleotide
ccggaaggaaugaguauaa

SEQ ID NO: 1700631 - RNA, 19 nt, Artificial Sequence
  Description of Artificial Sequence: Synthetic oligonucleotide
ccaucaauacaggugagau

SEQ ID NO: 1700632 - RNA, 19 nt, Artificial Sequence
  Description of Artificial Sequence: Synthetic oligonucleotide
ccacccguugcuguucuug

SEQ ID NO: 1700633 - RNA, 19 nt, Artificial Sequence
  Description of Artificial Sequence: Synthetic oligonucleotide
ugguagcacuucggaugac

SEQ ID NO: 1700634 - RNA, 19 nt, Artificial Sequence
  Description of Artificial Sequence: Synthetic oligonucleotide
guuuggcagccaggucccc

SEQ ID NO: 1700635 - RNA, 19 nt, Artificial Sequence
  Description of Artificial Sequence: Synthetic oligonucleotide
cagccgugacuggaacaac

SEQ ID NO: 1700636 - RNA, 19 nt, Artificial Sequence
  Description of Artificial Sequence: Synthetic oligonucleotide
cuccaccgcgaugcugaag

SEQ ID NO: 1700637 - RNA, 19 nt, Artificial Sequence
  Description of Artificial Sequence: Synthetic oligonucleotide
cccggaaggaaugaguaua

SEQ ID NO: 1700638 - RNA, 19 nt, Artificial Sequence
  Description of Artificial Sequence: Synthetic oligonucleotide
ccuaugagugcccuauuau

SEQ ID NO: 1700639 - RNA, 19 nt, Artificial Sequence
  Description of Artificial Sequence: Synthetic oligonucleotide
caauacaggugagauucuu

SEQ ID NO: 1700640 - RNA, 19 nt, Artificial Sequence
  Description of Artificial Sequence: Synthetic oligonucleotide
ccacccagccacccuggag

SEQ ID NO: 1700641 - RNA, 19 nt, Artificial Sequence
  Description of Artificial Sequence: Synthetic oligonucleotide
gcccagguauugcacugga

SEQ ID NO: 1700642 - RNA, 19 nt, Artificial Sequence
  Description of Artificial Sequence: Synthetic oligonucleotide
cugcgccauuuguuguaga

SEQ ID NO: 1700643 - RNA, 19 nt, Artificial Sequence
  Description of Artificial Sequence: Synthetic oligonucleotide
gcacaauggcuucggucaa

SEQ ID NO: 1700644 - RNA, 19 nt, Artificial Sequence
  Description of Artificial Sequence: Synthetic oligonucleotide
ccccacaaauugcuuauua

SEQ ID NO: 1700645 - RNA, 19 nt, Artificial Sequence
  Description of Artificial Sequence: Synthetic oligonucleotide
caccucucgaauguguauu

SEQ ID NO: 1700646 - RNA, 19 nt, Artificial Sequence
  Description of Artificial Sequence: Synthetic oligonucleotide
gccaggcuucauucuaucu

SEQ ID NO: 1700647 - RNA, 19 nt, Artificial Sequence
  Description of Artificial Sequence: Synthetic oligonucleotide
cgcucgguguuccggugcc

SEQ ID NO: 1700648 - RNA, 19 nt, Artificial Sequence
  Description of Artificial Sequence: Synthetic oligonucleotide
gcuuaagacugcgccauuu

SEQ ID NO: 1700649 - RNA, 19 nt, Artificial Sequence
  Description of Artificial Sequence: Synthetic oligonucleotide
ggggucucacuggagccaa

SEQ ID NO: 1700650 - RNA, 19 nt, Artificial Sequence
  Description of Artificial Sequence: Synthetic oligonucleotide
cacuucggaugacuuccau

SEQ ID NO: 1700651 - RNA, 19 nt, Artificial Sequence
  Description of Artificial Sequence: Synthetic oligonucleotide
guccuaugagugcccuauu

SEQ ID NO: 1700652 - RNA, 19 nt, Artificial Sequence
  Description of Artificial Sequence: Synthetic oligonucleotide
ccauggcgucaggaggaac

SEQ ID NO: 1700653 - RNA, 19 nt, Artificial Sequence
  Description of Artificial Sequence: Synthetic oligonucleotide
ccgcgaugcugaaguccac

SEQ ID NO: 1700654 - RNA, 19 nt, Artificial Sequence
  Description of Artificial Sequence: Synthetic oligonucleotide
ccaugcccggaaggaauga

SEQ ID NO: 1700655 - RNA, 19 nt, Artificial Sequence
  Description of Artificial Sequence: Synthetic oligonucleotide
ccaccucucgaauguguau

SEQ ID NO: 1700656 - RNA, 19 nt, Artificial Sequence
  Description of Artificial Sequence: Synthetic oligonucleotide
ggcuucggucaacgacaua

SEQ ID NO: 1700657 - RNA, 19 nt, Artificial Sequence
  Description of Artificial Sequence: Synthetic oligonucleotide
gcucgguguuccggugcca

SEQ ID NO: 1700658 - RNA, 19 nt, Artificial Sequence
  Description of Artificial Sequence: Synthetic oligonucleotide
cccagguauugcacuggau

SEQ ID NO: 1700659 - RNA, 19 nt, Artificial Sequence
  Description of Artificial Sequence: Synthetic oligonucleotide
ggucaacgacauacagcuu

SEQ ID NO: 1700660 - RNA, 19 nt, Artificial Sequence
  Description of Artificial Sequence: Synthetic oligonucleotide
gccacccguugcuguucuu

SEQ ID NO: 1700661 - RNA, 19 nt, Artificial Sequence
  Description of Artificial Sequence: Synthetic oligonucleotide
aaauuuaacgcuugcaucc

SEQ ID NO: 1700662 - RNA, 19 nt, Artificial Sequence
  Description of Artificial Sequence: Synthetic oligonucleotide
uuuauuagcccugagaacc

SEQ ID NO: 1700663 - RNA, 19 nt, Artificial Sequence
  Description of Artificial Sequence: Synthetic oligonucleotide
uccgguaaaggcaaggagg

SEQ ID NO: 1700664 - RNA, 19 nt, Artificial Sequence
  Description of Artificial Sequence: Synthetic oligonucleotide
caagagauguucaaggccc

SEQ ID NO: 1700665 - RNA, 19 nt, Artificial Sequence
  Description of Artificial Sequence: Synthetic oligonucleotide
uguuuugccagcccggccg

SEQ ID NO: 1700666 - RNA, 19 nt, Artificial Sequence
  Description of Artificial Sequence: Synthetic oligonucleotide
cuaguugccggacauaugc

SEQ ID NO: 1700667 - RNA, 19 nt, Artificial Sequence
  Description of Artificial Sequence: Synthetic oligonucleotide
agaaauuuaacgcuugcau

SEQ ID NO: 1700668 - RNA, 19 nt, Artificial Sequence
  Description of Artificial Sequence: Synthetic oligonucleotide
ucgaagaagaacauuccug

SEQ ID NO: 1700669 - RNA, 19 nt, Artificial Sequence
  Description of Artificial Sequence: Synthetic oligonucleotide
uggcugauggcucacuucg

SEQ ID NO: 1700670 - RNA, 19 nt, Artificial Sequence
  Description of Artificial Sequence: Synthetic oligonucleotide
gaagcacucauugagagac

SEQ ID NO: 1700671 - RNA, 19 nt, Artificial Sequence
  Description of Artificial Sequence: Synthetic oligonucleotide
aauuuaacgcuugcauccg

SEQ ID NO: 1700672 - RNA, 19 nt, Artificial Sequence
  Description of Artificial Sequence: Synthetic oligonucleotide
agcacaucucuuuggauuc

SEQ ID NO: 1700673 - RNA, 19 nt, Artificial Sequence
  Description of Artificial Sequence: Synthetic oligonucleotide
auugagagacagguuaugg

SEQ ID NO: 1700674 - RNA, 19 nt, Artificial Sequence
  Description of Artificial Sequence: Synthetic oligonucleotide
uuugucaggaggccccggg

SEQ ID NO: 1700675 - RNA, 19 nt, Artificial Sequence
  Description of Artificial Sequence: Synthetic oligonucleotide
agucaguucccauacagaa

SEQ ID NO: 1700676 - RNA, 19 nt, Artificial Sequence
  Description of Artificial Sequence: Synthetic oligonucleotide
agaacauuccugguguccg

SEQ ID NO: 1700677 - RNA, 19 nt, Artificial Sequence
  Description of Artificial Sequence: Synthetic oligonucleotide
acauaugcuggcuggcaac

SEQ ID NO: 1700678 - RNA, 19 nt, Artificial Sequence
  Description of Artificial Sequence: Synthetic oligonucleotide
gaagcgacccaugauguag

SEQ ID NO: 1700679 - RNA, 19 nt, Artificial Sequence
  Description of Artificial Sequence: Synthetic oligonucleotide
aacgcuugcauccggcacu

SEQ ID NO: 1700680 - RNA, 19 nt, Artificial Sequence
  Description of Artificial Sequence: Synthetic oligonucleotide
aaauccgagggccccaccu

SEQ ID NO: 1700681 - RNA, 19 nt, Artificial Sequence
  Description of Artificial Sequence: Synthetic oligonucleotide
uugcauccggcacugguag

SEQ ID NO: 1700682 - RNA, 19 nt, Artificial Sequence
  Description of Artificial Sequence: Synthetic oligonucleotide
gaacucuggauagccaugg

SEQ ID NO: 1700683 - RNA, 19 nt, Artificial Sequence
  Description of Artificial Sequence: Synthetic oligonucleotide
agacccuugggguuuggcg

SEQ ID NO: 1700684 - RNA, 19 nt, Artificial Sequence
  Description of Artificial Sequence: Synthetic oligonucleotide
acacuggcuuuauuagccc

SEQ ID NO: 1700685 - RNA, 19 nt, Artificial Sequence
  Description of Artificial Sequence: Synthetic oligonucleotide
aaaauccgagggccccacc

SEQ ID NO: 1700686 - RNA, 19 nt, Artificial Sequence
  Description of Artificial Sequence: Synthetic oligonucleotide
acucgaagaagaacauucc

SEQ ID NO: 1700687 - RNA, 19 nt, Artificial Sequence
  Description of Artificial Sequence: Synthetic oligonucleotide
uugaagagugcccuagguc

SEQ ID NO: 1700688 - RNA, 19 nt, Artificial Sequence
  Description of Artificial Sequence: Synthetic oligonucleotide
gagagacagguuauggcgg

SEQ ID NO: 1700689 - RNA, 19 nt, Artificial Sequence
  Description of Artificial Sequence: Synthetic oligonucleotide
aucagggcuauguagcugu

SEQ ID NO: 1700690 - RNA, 19 nt, Artificial Sequence
  Description of Artificial Sequence: Synthetic oligonucleotide
aauccgagggccccaccuc

SEQ ID NO: 1700691 - RNA, 19 nt, Artificial Sequence
  Description of Artificial Sequence: Synthetic oligonucleotide
guaaaaggcgaagcgaccc

SEQ ID NO: 1700692 - RNA, 19 nt, Artificial Sequence
  Description of Artificial Sequence: Synthetic oligonucleotide
caacgaccccaucagaucc

SEQ ID NO: 1700693 - RNA, 19 nt, Artificial Sequence
  Description of Artificial Sequence: Synthetic oligonucleotide
uuauuagcccugagaacca

SEQ ID NO: 1700694 - RNA, 19 nt, Artificial Sequence
  Description of Artificial Sequence: Synthetic oligonucleotide
ucagugagcucccuuggac

SEQ ID NO: 1700695 - RNA, 19 nt, Artificial Sequence
  Description of Artificial Sequence: Synthetic oligonucleotide
cagccgaaaagcugaaugc

SEQ ID NO: 1700696 - RNA, 19 nt, Artificial Sequence
  Description of Artificial Sequence: Synthetic oligonucleotide
caugauguagccguagaug

SEQ ID NO: 1700697 - RNA, 19 nt, Artificial Sequence
  Description of Artificial Sequence: Synthetic oligonucleotide
gacagguuauggcggaugc

SEQ ID NO: 1700698 - RNA, 19 nt, Artificial Sequence
  Description of Artificial Sequence: Synthetic oligonucleotide
aaggcagccgaaaagcuga

SEQ ID NO: 1700699 - RNA, 19 nt, Artificial Sequence
  Description of Artificial Sequence: Synthetic oligonucleotide
ucugcggcgacggaggaag

SEQ ID NO: 1700700 - RNA, 19 nt, Artificial Sequence
  Description of Artificial Sequence: Synthetic oligonucleotide
uuuggauucaguggccagc

SEQ ID NO: 1700701 - RNA, 19 nt, Artificial Sequence
  Description of Artificial Sequence: Synthetic oligonucleotide
ugaacucuggauagccaug

SEQ ID NO: 1700702 - RNA, 19 nt, Artificial Sequence
  Description of Artificial Sequence: Synthetic oligonucleotide
uggauagccauggcgauca

SEQ ID NO: 1700703 - RNA, 19 nt, Artificial Sequence
  Description of Artificial Sequence: Synthetic oligonucleotide
gauguucaaggcccgaguc

SEQ ID NO: 1700704 - RNA, 19 nt, Artificial Sequence
  Description of Artificial Sequence: Synthetic oligonucleotide
ugcagucaaucacucgaag

SEQ ID NO: 1700705 - RNA, 19 nt, Artificial Sequence
  Description of Artificial Sequence: Synthetic oligonucleotide
cgaagaagaacauuccugg

SEQ ID NO: 1700706 - RNA, 19 nt, Artificial Sequence
  Description of Artificial Sequence: Synthetic oligonucleotide
uggugaagcgucugcggcg

SEQ ID NO: 1700707 - RNA, 19 nt, Artificial Sequence
  Description of Artificial Sequence: Synthetic oligonucleotide
caaggcccgagucaguucc

SEQ ID NO: 1700708 - RNA, 19 nt, Artificial Sequence
  Description of Artificial Sequence: Synthetic oligonucleotide
ugauggcucacuucggccu

SEQ ID NO: 1700709 - RNA, 19 nt, Artificial Sequence
  Description of Artificial Sequence: Synthetic oligonucleotide
uaaaaggcgaagcgaccca

SEQ ID NO: 1700710 - RNA, 19 nt, Artificial Sequence
  Description of Artificial Sequence: Synthetic oligonucleotide
ugggguuuggcgccucugg

SEQ ID NO: 1700711 - RNA, 19 nt, Artificial Sequence
  Description of Artificial Sequence: Synthetic oligonucleotide
aagcgacccaugauguagc

SEQ ID NO: 1700712 - RNA, 19 nt, Artificial Sequence
  Description of Artificial Sequence: Synthetic oligonucleotide
uuggagucagcuggcaagg

SEQ ID NO: 1700713 - RNA, 19 nt, Artificial Sequence
  Description of Artificial Sequence: Synthetic oligonucleotide
aguugccggacauaugcug

SEQ ID NO: 1700714 - RNA, 19 nt, Artificial Sequence
  Description of Artificial Sequence: Synthetic oligonucleotide
uggcgaucugcacaggcug

SEQ ID NO: 1700715 - RNA, 19 nt, Artificial Sequence
  Description of Artificial Sequence: Synthetic oligonucleotide
aggcggaaggagucgaggg

SEQ ID NO: 1700716 - RNA, 19 nt, Artificial Sequence
  Description of Artificial Sequence: Synthetic oligonucleotide
cucuggauagccauggcga

SEQ ID NO: 1700717 - RNA, 19 nt, Artificial Sequence
  Description of Artificial Sequence: Synthetic oligonucleotide
agucaaucacucgaagaag

SEQ ID NO: 1700718 - RNA, 19 nt, Artificial Sequence
  Description of Artificial Sequence: Synthetic oligonucleotide
gacgguugcugcugcaugc

SEQ ID NO: 1700719 - RNA, 19 nt, Artificial Sequence
  Description of Artificial Sequence: Synthetic oligonucleotide
uuaacgcuugcauccggca

SEQ ID NO: 1700720 - RNA, 19 nt, Artificial Sequence
  Description of Artificial Sequence: Synthetic oligonucleotide
guugccggacauaugcugg

SEQ ID NO: 1700721 - RNA, 19 nt, Artificial Sequence
  Description of Artificial Sequence: Synthetic oligonucleotide
ucgcggggcaccuugacga

SEQ ID NO: 1700722 - RNA, 19 nt, Artificial Sequence
  Description of Artificial Sequence: Synthetic oligonucleotide
gaaugcugggcacggggag

SEQ ID NO: 1700723 - RNA, 19 nt, Artificial Sequence
  Description of Artificial Sequence: Synthetic oligonucleotide
gaacauuccugguguccgg

SEQ ID NO: 1700724 - RNA, 19 nt, Artificial Sequence
  Description of Artificial Sequence: Synthetic oligonucleotide
gaugcuguuuugccagccc

SEQ ID NO: 1700725 - RNA, 19 nt, Artificial Sequence
  Description of Artificial Sequence: Synthetic oligonucleotide
aagagauguucaaggcccg

SEQ ID NO: 1700726 - RNA, 19 nt, Artificial Sequence
  Description of Artificial Sequence: Synthetic oligonucleotide
guugugccgguaaaaggcg

SEQ ID NO: 1700727 - RNA, 19 nt, Artificial Sequence
  Description of Artificial Sequence: Synthetic oligonucleotide
cucccuuggacaugcagac

SEQ ID NO: 1700728 - RNA, 19 nt, Artificial Sequence
  Description of Artificial Sequence: Synthetic oligonucleotide
gaagcgucugcggcgacgg

SEQ ID NO: 1700729 - RNA, 19 nt, Artificial Sequence
  Description of Artificial Sequence: Synthetic oligonucleotide
ucaucccaaguuugucagg

SEQ ID NO: 1700730 - RNA, 19 nt, Artificial Sequence
  Description of Artificial Sequence: Synthetic oligonucleotide
cauaugcuggcuggcaacg

SEQ ID NO: 1700731 - RNA, 19 nt, Artificial Sequence
  Description of Artificial Sequence: Synthetic oligonucleotide
cagucaaucacucgaagaa

SEQ ID NO: 1700732 - RNA, 19 nt, Artificial Sequence
  Description of Artificial Sequence: Synthetic oligonucleotide
auggcggaugcuguuuugc

SEQ ID NO: 1700733 - RNA, 19 nt, Artificial Sequence
  Description of Artificial Sequence: Synthetic oligonucleotide
uccuugaagagugcccuag

SEQ ID NO: 1700734 - RNA, 19 nt, Artificial Sequence
  Description of Artificial Sequence: Synthetic oligonucleotide
cuggcaacgaccccaucag

SEQ ID NO: 1700735 - RNA, 19 nt, Artificial Sequence
  Description of Artificial Sequence: Synthetic oligonucleotide
ccguagaugccacugaggg

SEQ ID NO: 1700736 - RNA, 19 nt, Artificial Sequence
  Description of Artificial Sequence: Synthetic oligonucleotide
guacccggaaccucccugg

SEQ ID NO: 1700737 - RNA, 19 nt, Artificial Sequence
  Description of Artificial Sequence: Synthetic oligonucleotide
agcgacccaugauguagcc

SEQ ID NO: 1700738 - RNA, 19 nt, Artificial Sequence
  Description of Artificial Sequence: Synthetic oligonucleotide
agauguucaaggcccgagu

SEQ ID NO: 1700739 - RNA, 19 nt, Artificial Sequence
  Description of Artificial Sequence: Synthetic oligonucleotide
ccgaaaagcugaaugcugg

SEQ ID NO: 1700740 - RNA, 19 nt, Artificial Sequence
  Description of Artificial Sequence: Synthetic oligonucleotide
ugagcucccuuggacaugc

SEQ ID NO: 1700741 - RNA, 19 nt, Artificial Sequence
  Description of Artificial Sequence: Synthetic oligonucleotide
uaacgcuugcauccggcac

SEQ ID NO: 1700742 - RNA, 19 nt, Artificial Sequence
  Description of Artificial Sequence: Synthetic oligonucleotide
ugucguggcaguccggauc

SEQ ID NO: 1700743 - RNA, 19 nt, Artificial Sequence
  Description of Artificial Sequence: Synthetic oligonucleotide
cuuuggauucaguggccag

SEQ ID NO: 1700744 - RNA, 19 nt, Artificial Sequence
  Description of Artificial Sequence: Synthetic oligonucleotide
gucguggcaguccggaucc

SEQ ID NO: 1700745 - RNA, 19 nt, Artificial Sequence
  Description of Artificial Sequence: Synthetic oligonucleotide
caaggagguaacgccaggg

SEQ ID NO: 1700746 - RNA, 19 nt, Artificial Sequence
  Description of Artificial Sequence: Synthetic oligonucleotide
agagaguaguucacagagg

SEQ ID NO: 1700747 - RNA, 19 nt, Artificial Sequence
  Description of Artificial Sequence: Synthetic oligonucleotide
ccaaaguuuagacccuugg

SEQ ID NO: 1700748 - RNA, 19 nt, Artificial Sequence
  Description of Artificial Sequence: Synthetic oligonucleotide
ccaagagauguucaaggcc

SEQ ID NO: 1700749 - RNA, 19 nt, Artificial Sequence
  Description of Artificial Sequence: Synthetic oligonucleotide
guccgguaaaggcaaggag

SEQ ID NO: 1700750 - RNA, 19 nt, Artificial Sequence
  Description of Artificial Sequence: Synthetic oligonucleotide
auccggcacugguagcugc

SEQ ID NO: 1700751 - RNA, 19 nt, Artificial Sequence
  Description of Artificial Sequence: Synthetic oligonucleotide
aguuuagacccuugggguu

SEQ ID NO: 1700752 - RNA, 19 nt, Artificial Sequence
  Description of Artificial Sequence: Synthetic oligonucleotide
agugagcucccuuggacau

SEQ ID NO: 1700753 - RNA, 19 nt, Artificial Sequence
  Description of Artificial Sequence: Synthetic oligonucleotide
gccgguaaaaggcgaagcg

SEQ ID NO: 1700754 - RNA, 19 nt, Artificial Sequence
  Description of Artificial Sequence: Synthetic oligonucleotide
uuggauucaguggccagcu

SEQ ID NO: 1700755 - RNA, 19 nt, Artificial Sequence
  Description of Artificial Sequence: Synthetic oligonucleotide
uguccgguaaaggcaagga

SEQ ID NO: 1700756 - RNA, 19 nt, Artificial Sequence
  Description of Artificial Sequence: Synthetic oligonucleotide
ugugccgguaaaaggcgaa

SEQ ID NO: 1700757 - RNA, 19 nt, Artificial Sequence
  Description of Artificial Sequence: Synthetic oligonucleotide
ggcgaucagggcuauguag

SEQ ID NO: 1700758 - RNA, 19 nt, Artificial Sequence
  Description of Artificial Sequence: Synthetic oligonucleotide
ugaagcgucugcggcgacg

SEQ ID NO: 1700759 - RNA, 19 nt, Artificial Sequence
  Description of Artificial Sequence: Synthetic oligonucleotide
guagccguagaugccacug

SEQ ID NO: 1700760 - RNA, 19 nt, Artificial Sequence
  Description of Artificial Sequence: Synthetic oligonucleotide
cuugccuggcuugcggucg

SEQ ID NO: 1700761 - RNA, 19 nt, Artificial Sequence
  Description of Artificial Sequence: Synthetic oligonucleotide
uugugccgguaaaaggcga

SEQ ID NO: 1700762 - RNA, 19 nt, Artificial Sequence
  Description of Artificial Sequence: Synthetic oligonucleotide
uggcggaugcuguuuugcc

SEQ ID NO: 1700763 - RNA, 19 nt, Artificial Sequence
  Description of Artificial Sequence: Synthetic oligonucleotide
agcucccuuggacaugcag

SEQ ID NO: 1700764 - RNA, 19 nt, Artificial Sequence
  Description of Artificial Sequence: Synthetic oligonucleotide
uuauggcggaugcuguuuu

SEQ ID NO: 1700765 - RNA, 19 nt, Artificial Sequence
  Description of Artificial Sequence: Synthetic oligonucleotide
aaaaggcgaagcgacccau

SEQ ID NO: 1700766 - RNA, 19 nt, Artificial Sequence
  Description of Artificial Sequence: Synthetic oligonucleotide
gggcuauguagcuguaagg

SEQ ID NO: 1700767 - RNA, 19 nt, Artificial Sequence
  Description of Artificial Sequence: Synthetic oligonucleotide
uaguugccggacauaugcu

SEQ ID NO: 1700768 - RNA, 19 nt, Artificial Sequence
  Description of Artificial Sequence: Synthetic oligonucleotide
gaagaacauuccugguguc

SEQ ID NO: 1700769 - RNA, 19 nt, Artificial Sequence
  Description of Artificial Sequence: Synthetic oligonucleotide
aucagauccccaaaguuua

SEQ ID NO: 1700770 - RNA, 19 nt, Artificial Sequence
  Description of Artificial Sequence: Synthetic oligonucleotide
gaggcggaaggagucgagg

SEQ ID NO: 1700771 - RNA, 19 nt, Artificial Sequence
  Description of Artificial Sequence: Synthetic oligonucleotide
ugccgguaaaaggcgaagc

SEQ ID NO: 1700772 - RNA, 19 nt, Artificial Sequence
  Description of Artificial Sequence: Synthetic oligonucleotide
uugccggacauaugcuggc

SEQ ID NO: 1700773 - RNA, 19 nt, Artificial Sequence
  Description of Artificial Sequence: Synthetic oligonucleotide
uggcuugcggucgucgcgg

SEQ ID NO: 1700774 - RNA, 19 nt, Artificial Sequence
  Description of Artificial Sequence: Synthetic oligonucleotide
cuugcggucgucgcggggc

SEQ ID NO: 1700775 - RNA, 19 nt, Artificial Sequence
  Description of Artificial Sequence: Synthetic oligonucleotide
acggcauucagggcuggcg

SEQ ID NO: 1700776 - RNA, 19 nt, Artificial Sequence
  Description of Artificial Sequence: Synthetic oligonucleotide
guaaaggcaaggagguaac

SEQ ID NO: 1700777 - RNA, 19 nt, Artificial Sequence
  Description of Artificial Sequence: Synthetic oligonucleotide
guuuugccagcccggccgg

SEQ ID NO: 1700778 - RNA, 19 nt, Artificial Sequence
  Description of Artificial Sequence: Synthetic oligonucleotide
uggcgucacuaguugccgg

SEQ ID NO: 1700779 - RNA, 19 nt, Artificial Sequence
  Description of Artificial Sequence: Synthetic oligonucleotide
gcggaugcuguuuugccag

SEQ ID NO: 1700780 - RNA, 19 nt, Artificial Sequence
  Description of Artificial Sequence: Synthetic oligonucleotide
gaagcgacugcugcaguca

SEQ ID NO: 1700781 - RNA, 19 nt, Artificial Sequence
  Description of Artificial Sequence: Synthetic oligonucleotide
gacgaagcacucauugaga

SEQ ID NO: 1700782 - RNA, 19 nt, Artificial Sequence
  Description of Artificial Sequence: Synthetic oligonucleotide
ggcuuuauuagcccugaga

SEQ ID NO: 1700783 - RNA, 19 nt, Artificial Sequence
  Description of Artificial Sequence: Synthetic oligonucleotide
cauugagagacagguuaug

SEQ ID NO: 1700784 - RNA, 19 nt, Artificial Sequence
  Description of Artificial Sequence: Synthetic oligonucleotide
cacagaggcccugcgaagc

SEQ ID NO: 1700785 - RNA, 19 nt, Artificial Sequence
  Description of Artificial Sequence: Synthetic oligonucleotide
ugcgcuuggugaagcgucu

SEQ ID NO: 1700786 - RNA, 19 nt, Artificial Sequence
  Description of Artificial Sequence: Synthetic oligonucleotide
cagaaauuuaacgcuugca

SEQ ID NO: 1700787 - RNA, 19 nt, Artificial Sequence
  Description of Artificial Sequence: Synthetic oligonucleotide
ucuuggcgacgguugcugc

SEQ ID NO: 1700788 - RNA, 19 nt, Artificial Sequence
  Description of Artificial Sequence: Synthetic oligonucleotide
cuggcuugcggucgucgcg

SEQ ID NO: 1700789 - RNA, 19 nt, Artificial Sequence
  Description of Artificial Sequence: Synthetic oligonucleotide
aucccaaguuugucaggag

SEQ ID NO: 1700790 - RNA, 19 nt, Artificial Sequence
  Description of Artificial Sequence: Synthetic oligonucleotide
gucgcggggcaccuugacg

SEQ ID NO: 1700791 - RNA, 19 nt, Artificial Sequence
  Description of Artificial Sequence: Synthetic oligonucleotide
ugggcgagcacaucucuuu

SEQ ID NO: 1700792 - RNA, 19 nt, Artificial Sequence
  Description of Artificial Sequence: Synthetic oligonucleotide
caguagcugcccuugccug

SEQ ID NO: 1700793 - RNA, 19 nt, Artificial Sequence
  Description of Artificial Sequence: Synthetic oligonucleotide
agcuggcaagggcaauggg

SEQ ID NO: 1700794 - RNA, 19 nt, Artificial Sequence
  Description of Artificial Sequence: Synthetic oligonucleotide
acuggcuuuauuagcccug

SEQ ID NO: 1700795 - RNA, 19 nt, Artificial Sequence
  Description of Artificial Sequence: Synthetic oligonucleotide
caguccggauccagggucc

SEQ ID NO: 1700796 - RNA, 19 nt, Artificial Sequence
  Description of Artificial Sequence: Synthetic oligonucleotide
acccggaaccucccuggac

SEQ ID NO: 1700797 - RNA, 19 nt, Artificial Sequence
  Description of Artificial Sequence: Synthetic oligonucleotide
caucccaaguuugucagga

SEQ ID NO: 1700798 - RNA, 19 nt, Artificial Sequence
  Description of Artificial Sequence: Synthetic oligonucleotide
gcagucaaucacucgaaga

SEQ ID NO: 1700799 - RNA, 19 nt, Artificial Sequence
  Description of Artificial Sequence: Synthetic oligonucleotide
caauggggcccggugagag

SEQ ID NO: 1700800 - RNA, 19 nt, Artificial Sequence
  Description of Artificial Sequence: Synthetic oligonucleotide
ugugcgcuuggugaagcgu

SEQ ID NO: 1700801 - RNA, 19 nt, Artificial Sequence
  Description of Artificial Sequence: Synthetic oligonucleotide
uuuagacccuugggguuug

SEQ ID NO: 1700802 - RNA, 19 nt, Artificial Sequence
  Description of Artificial Sequence: Synthetic oligonucleotide
gagucaguucccauacaga

SEQ ID NO: 1700803 - RNA, 19 nt, Artificial Sequence
  Description of Artificial Sequence: Synthetic oligonucleotide
guguccgguaaaggcaagg

SEQ ID NO: 1700804 - RNA, 19 nt, Artificial Sequence
  Description of Artificial Sequence: Synthetic oligonucleotide
gguaaaaggcgaagcgacc

SEQ ID NO: 1700805 - RNA, 19 nt, Artificial Sequence
  Description of Artificial Sequence: Synthetic oligonucleotide
gcgaucagggcuauguagc

SEQ ID NO: 1700806 - RNA, 19 nt, Artificial Sequence
  Description of Artificial Sequence: Synthetic oligonucleotide
ugccaguagugguguuggg

SEQ ID NO: 1700807 - RNA, 19 nt, Artificial Sequence
  Description of Artificial Sequence: Synthetic oligonucleotide
gaaaauccgagggccccac

SEQ ID NO: 1700808 - RNA, 19 nt, Artificial Sequence
  Description of Artificial Sequence: Synthetic oligonucleotide
agcgucugcggcgacggag

SEQ ID NO: 1700809 - RNA, 19 nt, Artificial Sequence
  Description of Artificial Sequence: Synthetic oligonucleotide
gcucccggcgcccucaggg

SEQ ID NO: 1700810 - RNA, 19 nt, Artificial Sequence
  Description of Artificial Sequence: Synthetic oligonucleotide
gcuggcaacgaccccauca

SEQ ID NO: 1700811 - RNA, 19 nt, Artificial Sequence
  Description of Artificial Sequence: Synthetic oligonucleotide
ccugcgaagcgacugcugc

SEQ ID NO: 1700812 - RNA, 19 nt, Artificial Sequence
  Description of Artificial Sequence: Synthetic oligonucleotide
cugugcgcuuggugaagcg

SEQ ID NO: 1700813 - RNA, 19 nt, Artificial Sequence
  Description of Artificial Sequence: Synthetic oligonucleotide
aguaguucacagaggcccu

SEQ ID NO: 1700814 - RNA, 19 nt, Artificial Sequence
  Description of Artificial Sequence: Synthetic oligonucleotide
ccggacauaugcuggcugg

SEQ ID NO: 1700815 - RNA, 19 nt, Artificial Sequence
  Description of Artificial Sequence: Synthetic oligonucleotide
gugaacucuggauagccau

SEQ ID NO: 1700816 - RNA, 19 nt, Artificial Sequence
  Description of Artificial Sequence: Synthetic oligonucleotide
uggcaacgaccccaucaga

SEQ ID NO: 1700817 - RNA, 19 nt, Artificial Sequence
  Description of Artificial Sequence: Synthetic oligonucleotide
agcccggccgguugugccg

SEQ ID NO: 1700818 - RNA, 19 nt, Artificial Sequence
  Description of Artificial Sequence: Synthetic oligonucleotide
cucgaagaagaacauuccu

SEQ ID NO: 1700819 - RNA, 19 nt, Artificial Sequence
  Description of Artificial Sequence: Synthetic oligonucleotide
gucgucgcggggcaccuug

SEQ ID NO: 1700820 - RNA, 19 nt, Artificial Sequence
  Description of Artificial Sequence: Synthetic oligonucleotide
gguacccggaaccucccug

SEQ ID NO: 1700821 - RNA, 19 nt, Artificial Sequence
  Description of Artificial Sequence: Synthetic oligonucleotide
cacccaggguuccuuggag

SEQ ID NO: 1700822 - RNA, 19 nt, Artificial Sequence
  Description of Artificial Sequence: Synthetic oligonucleotide
cccggugaacucuggauag

SEQ ID NO: 1700823 - RNA, 19 nt, Artificial Sequence
  Description of Artificial Sequence: Synthetic oligonucleotide
guucccauacagaaauuua

SEQ ID NO: 1700824 - RNA, 19 nt, Artificial Sequence
  Description of Artificial Sequence: Synthetic oligonucleotide
ugcauccggcacugguagc

SEQ ID NO: 1700825 - RNA, 19 nt, Artificial Sequence
  Description of Artificial Sequence: Synthetic oligonucleotide
uuuggcgccucugguggga

SEQ ID NO: 1700826 - RNA, 19 nt, Artificial Sequence
  Description of Artificial Sequence: Synthetic oligonucleotide
uugggcgagcacaucucuu

SEQ ID NO: 1700827 - RNA, 19 nt, Artificial Sequence
  Description of Artificial Sequence: Synthetic oligonucleotide
ugccccggugaacucugga

SEQ ID NO: 1700828 - RNA, 19 nt, Artificial Sequence
  Description of Artificial Sequence: Synthetic oligonucleotide
agucgagggugcaggggcg

SEQ ID NO: 1700829 - RNA, 19 nt, Artificial Sequence
  Description of Artificial Sequence: Synthetic oligonucleotide
uacccggaaccucccugga

SEQ ID NO: 1700830 - RNA, 19 nt, Artificial Sequence
  Description of Artificial Sequence: Synthetic oligonucleotide
caugucguggcaguccgga

SEQ ID NO: 1700831 - RNA, 19 nt, Artificial Sequence
  Description of Artificial Sequence: Synthetic oligonucleotide
acuaguugccggacauaug

SEQ ID NO: 1700832 - RNA, 19 nt, Artificial Sequence
  Description of Artificial Sequence: Synthetic oligonucleotide
gcaaggagguaacgccagg

SEQ ID NO: 1700833 - RNA, 19 nt, Artificial Sequence
  Description of Artificial Sequence: Synthetic oligonucleotide
guaguucacagaggcccug

SEQ ID NO: 1700834 - RNA, 19 nt, Artificial Sequence
  Description of Artificial Sequence: Synthetic oligonucleotide
uggcgaucagggcuaugua

SEQ ID NO: 1700835 - RNA, 19 nt, Artificial Sequence
  Description of Artificial Sequence: Synthetic oligonucleotide
agguuauggcggaugcugu

SEQ ID NO: 1700836 - RNA, 19 nt, Artificial Sequence
  Description of Artificial Sequence: Synthetic oligonucleotide
gaaugggcacagccugcca

SEQ ID NO: 1700837 - RNA, 19 nt, Artificial Sequence
  Description of Artificial Sequence: Synthetic oligonucleotide
ggcgagguggcuucaguga

SEQ ID NO: 1700838 - RNA, 19 nt, Artificial Sequence
  Description of Artificial Sequence: Synthetic oligonucleotide
cauuccugguguccgguaa

SEQ ID NO: 1700839 - RNA, 19 nt, Artificial Sequence
  Description of Artificial Sequence: Synthetic oligonucleotide
gcaguccggauccaggguc

SEQ ID NO: 1700840 - RNA, 19 nt, Artificial Sequence
  Description of Artificial Sequence: Synthetic oligonucleotide
agagauguucaaggcccga

SEQ ID NO: 1700841 - RNA, 19 nt, Artificial Sequence
  Description of Artificial Sequence: Synthetic oligonucleotide
ccuugaagagugcccuagg

SEQ ID NO: 1700842 - RNA, 19 nt, Artificial Sequence
  Description of Artificial Sequence: Synthetic oligonucleotide
gucacuaguugccggacau

SEQ ID NO: 1700843 - RNA, 19 nt, Artificial Sequence
  Description of Artificial Sequence: Synthetic oligonucleotide
uuagacccuugggguuugg

SEQ ID NO: 1700844 - RNA, 19 nt, Artificial Sequence
  Description of Artificial Sequence: Synthetic oligonucleotide
gugccgguaaaaggcgaag

SEQ ID NO: 1700845 - RNA, 19 nt, Artificial Sequence
  Description of Artificial Sequence: Synthetic oligonucleotide
uugcggucgucgcggggca

SEQ ID NO: 1700846 - RNA, 19 nt, Artificial Sequence
  Description of Artificial Sequence: Synthetic oligonucleotide
cccgagucaguucccauac

SEQ ID NO: 1700847 - RNA, 19 nt, Artificial Sequence
  Description of Artificial Sequence: Synthetic oligonucleotide
agagugcccuaggucccac

SEQ ID NO: 1700848 - RNA, 19 nt, Artificial Sequence
  Description of Artificial Sequence: Synthetic oligonucleotide
aagcacucauugagagaca

SEQ ID NO: 1700849 - RNA, 19 nt, Artificial Sequence
  Description of Artificial Sequence: Synthetic oligonucleotide
agggcgagguggcuucagu

SEQ ID NO: 1700850 - RNA, 19 nt, Artificial Sequence
  Description of Artificial Sequence: Synthetic oligonucleotide
gggcgagguggcuucagug

SEQ ID NO: 1700851 - RNA, 19 nt, Artificial Sequence
  Description of Artificial Sequence: Synthetic oligonucleotide
cuggauagccauggcgauc

SEQ ID NO: 1700852 - RNA, 19 nt, Artificial Sequence
  Description of Artificial Sequence: Synthetic oligonucleotide
ggcggaugcuguuuugcca

SEQ ID NO: 1700853 - RNA, 19 nt, Artificial Sequence
  Description of Artificial Sequence: Synthetic oligonucleotide
aggcccugcgaagcgacug

SEQ ID NO: 1700854 - RNA, 19 nt, Artificial Sequence
  Description of Artificial Sequence: Synthetic oligonucleotide
gucgagggugcaggggcgg

SEQ ID NO: 1700855 - RNA, 19 nt, Artificial Sequence
  Description of Artificial Sequence: Synthetic oligonucleotide
cgguugugccgguaaaagg

SEQ ID NO: 1700856 - RNA, 19 nt, Artificial Sequence
  Description of Artificial Sequence: Synthetic oligonucleotide
acauuccugguguccggua

SEQ ID NO: 1700857 - RNA, 19 nt, Artificial Sequence
  Description of Artificial Sequence: Synthetic oligonucleotide
ugcccuugccuggcuugcg

SEQ ID NO: 1700858 - RNA, 19 nt, Artificial Sequence
  Description of Artificial Sequence: Synthetic oligonucleotide
ucagggcuauguagcugua

SEQ ID NO: 1700859 - RNA, 19 nt, Artificial Sequence
  Description of Artificial Sequence: Synthetic oligonucleotide
gcgagcacaucucuuugga

SEQ ID NO: 1700860 - RNA, 19 nt, Artificial Sequence
  Description of Artificial Sequence: Synthetic oligonucleotide
cagcccggccgguugugcc

SEQ ID NO: 1700861 - RNA, 19 nt, Artificial Sequence
  Description of Artificial Sequence: Synthetic oligonucleotide
accucccuggacagggaag

SEQ ID NO: 1700862 - RNA, 19 nt, Artificial Sequence
  Description of Artificial Sequence: Synthetic oligonucleotide
ucacuaguugccggacaua

SEQ ID NO: 1700863 - RNA, 19 nt, Artificial Sequence
  Description of Artificial Sequence: Synthetic oligonucleotide
gccguagaugccacugagg

SEQ ID NO: 1700864 - RNA, 19 nt, Artificial Sequence
  Description of Artificial Sequence: Synthetic oligonucleotide
uggcuggcaacgaccccau

SEQ ID NO: 1700865 - RNA, 19 nt, Artificial Sequence
  Description of Artificial Sequence: Synthetic oligonucleotide
ugccggacauaugcuggcu

SEQ ID NO: 1700866 - RNA, 19 nt, Artificial Sequence
  Description of Artificial Sequence: Synthetic oligonucleotide
cugcgaagcgacugcugca

SEQ ID NO: 1700867 - RNA, 19 nt, Artificial Sequence
  Description of Artificial Sequence: Synthetic oligonucleotide
ugcucccggcgcccucagg

SEQ ID NO: 1700868 - RNA, 19 nt, Artificial Sequence
  Description of Artificial Sequence: Synthetic oligonucleotide
gcgacugcugcagucaauc

SEQ ID NO: 1700869 - RNA, 19 nt, Artificial Sequence
  Description of Artificial Sequence: Synthetic oligonucleotide
ggcgucacuaguugccgga

SEQ ID NO: 1700870 - RNA, 19 nt, Artificial Sequence
  Description of Artificial Sequence: Synthetic oligonucleotide
gucugccuugacagggccc

SEQ ID NO: 1700871 - RNA, 19 nt, Artificial Sequence
  Description of Artificial Sequence: Synthetic oligonucleotide
gcggguacugcagaggcca

SEQ ID NO: 1700872 - RNA, 19 nt, Artificial Sequence
  Description of Artificial Sequence: Synthetic oligonucleotide
cccaggguuccuuggaguc

SEQ ID NO: 1700873 - RNA, 19 nt, Artificial Sequence
  Description of Artificial Sequence: Synthetic oligonucleotide
ucccuuggacaugcagacu

SEQ ID NO: 1700874 - RNA, 19 nt, Artificial Sequence
  Description of Artificial Sequence: Synthetic oligonucleotide
gggcgagcacaucucuuug

SEQ ID NO: 1700875 - RNA, 19 nt, Artificial Sequence
  Description of Artificial Sequence: Synthetic oligonucleotide
ugccagcccggccgguugu

SEQ ID NO: 1700876 - RNA, 19 nt, Artificial Sequence
  Description of Artificial Sequence: Synthetic oligonucleotide
cccaaaguuuagacccuug

SEQ ID NO: 1700877 - RNA, 19 nt, Artificial Sequence
  Description of Artificial Sequence: Synthetic oligonucleotide
ccgguugugccgguaaaag

SEQ ID NO: 1700878 - RNA, 19 nt, Artificial Sequence
  Description of Artificial Sequence: Synthetic oligonucleotide
gcgucugcggcgacggagg

SEQ ID NO: 1700879 - RNA, 19 nt, Artificial Sequence
  Description of Artificial Sequence: Synthetic oligonucleotide
ggugaagcgucugcggcga

SEQ ID NO: 1700880 - RNA, 19 nt, Artificial Sequence
  Description of Artificial Sequence: Synthetic oligonucleotide
cacuggcuuuauuagcccu

SEQ ID NO: 1700881 - RNA, 19 nt, Artificial Sequence
  Description of Artificial Sequence: Synthetic oligonucleotide
uuugccagcccggccgguu

SEQ ID NO: 1700882 - RNA, 19 nt, Artificial Sequence
  Description of Artificial Sequence: Synthetic oligonucleotide
cacuaguugccggacauau

SEQ ID NO: 1700883 - RNA, 19 nt, Artificial Sequence
  Description of Artificial Sequence: Synthetic oligonucleotide
aagcgucugcggcgacgga

SEQ ID NO: 1700884 - RNA, 19 nt, Artificial Sequence
  Description of Artificial Sequence: Synthetic oligonucleotide
cauccggcacugguagcug

SEQ ID NO: 1700885 - RNA, 19 nt, Artificial Sequence
  Description of Artificial Sequence: Synthetic oligonucleotide
gagggcgagguggcuucag

SEQ ID NO: 1700886 - RNA, 19 nt, Artificial Sequence
  Description of Artificial Sequence: Synthetic oligonucleotide
gcgacccaugauguagccg

SEQ ID NO: 1700887 - RNA, 19 nt, Artificial Sequence
  Description of Artificial Sequence: Synthetic oligonucleotide
gagccaggcacggcauuca

SEQ ID NO: 1700888 - RNA, 19 nt, Artificial Sequence
  Description of Artificial Sequence: Synthetic oligonucleotide
cuugggcgagcacaucucu

SEQ ID NO: 1700889 - RNA, 19 nt, Artificial Sequence
  Description of Artificial Sequence: Synthetic oligonucleotide
ggacauaugcuggcuggca

SEQ ID NO: 1700890 - RNA, 19 nt, Artificial Sequence
  Description of Artificial Sequence: Synthetic oligonucleotide
cccggaaccucccuggaca

SEQ ID NO: 1700891 - RNA, 19 nt, Artificial Sequence
  Description of Artificial Sequence: Synthetic oligonucleotide
cugggcacggggagggcga

SEQ ID NO: 1700892 - RNA, 19 nt, Artificial Sequence
  Description of Artificial Sequence: Synthetic oligonucleotide
gugagcucccuuggacaug

SEQ ID NO: 1700893 - RNA, 19 nt, Artificial Sequence
  Description of Artificial Sequence: Synthetic oligonucleotide
ggcccugcgaagcgacugc

SEQ ID NO: 1700894 - RNA, 19 nt, Artificial Sequence
  Description of Artificial Sequence: Synthetic oligonucleotide
caccugugcgcuuggugaa

SEQ ID NO: 1700895 - RNA, 19 nt, Artificial Sequence
  Description of Artificial Sequence: Synthetic oligonucleotide
gauggcucacuucggccuu

SEQ ID NO: 1700896 - RNA, 19 nt, Artificial Sequence
  Description of Artificial Sequence: Synthetic oligonucleotide
cuuggcgacgguugcugcu

SEQ ID NO: 1700897 - RNA, 19 nt, Artificial Sequence
  Description of Artificial Sequence: Synthetic oligonucleotide
ggggcggguacugcagagg

SEQ ID NO: 1700898 - RNA, 19 nt, Artificial Sequence
  Description of Artificial Sequence: Synthetic oligonucleotide
gaucuuggcgacgguugcu

SEQ ID NO: 1700899 - RNA, 19 nt, Artificial Sequence
  Description of Artificial Sequence: Synthetic oligonucleotide
ccgguaaaggcaaggaggu

SEQ ID NO: 1700900 - RNA, 19 nt, Artificial Sequence
  Description of Artificial Sequence: Synthetic oligonucleotide
ccggaaccucccuggacag

SEQ ID NO: 1700901 - RNA, 19 nt, Artificial Sequence
  Description of Artificial Sequence: Synthetic oligonucleotide
cugccccggugaacucugg

SEQ ID NO: 1700902 - RNA, 19 nt, Artificial Sequence
  Description of Artificial Sequence: Synthetic oligonucleotide
ugggcacggggagggcgag

SEQ ID NO: 1700903 - RNA, 19 nt, Artificial Sequence
  Description of Artificial Sequence: Synthetic oligonucleotide
guuauggcggaugcuguuu

SEQ ID NO: 1700904 - RNA, 19 nt, Artificial Sequence
  Description of Artificial Sequence: Synthetic oligonucleotide
cauucagggcuggcgaucu

SEQ ID NO: 1700905 - RNA, 19 nt, Artificial Sequence
  Description of Artificial Sequence: Synthetic oligonucleotide
uuuugccagcccggccggu

SEQ ID NO: 1700906 - RNA, 19 nt, Artificial Sequence
  Description of Artificial Sequence: Synthetic oligonucleotide
ccgguaaaaggcgaagcga

SEQ ID NO: 1700907 - RNA, 19 nt, Artificial Sequence
  Description of Artificial Sequence: Synthetic oligonucleotide
cugcggcgacggaggaagc

SEQ ID NO: 1700908 - RNA, 19 nt, Artificial Sequence
  Description of Artificial Sequence: Synthetic oligonucleotide
gcuugcauccggcacuggu

SEQ ID NO: 1700909 - RNA, 19 nt, Artificial Sequence
  Description of Artificial Sequence: Synthetic oligonucleotide
gaaccucccuggacaggga

SEQ ID NO: 1700910 - RNA, 19 nt, Artificial Sequence
  Description of Artificial Sequence: Synthetic oligonucleotide
ggcccuuggugcccugggc

SEQ ID NO: 1700911 - RNA, 19 nt, Artificial Sequence
  Description of Artificial Sequence: Synthetic oligonucleotide
ggcaacgaccccaucagau

SEQ ID NO: 1700912 - RNA, 19 nt, Artificial Sequence
  Description of Artificial Sequence: Synthetic oligonucleotide
cgacccaugauguagccgu

SEQ ID NO: 1700913 - RNA, 19 nt, Artificial Sequence
  Description of Artificial Sequence: Synthetic oligonucleotide
cacugaggguggcccgcug

SEQ ID NO: 1700914 - RNA, 19 nt, Artificial Sequence
  Description of Artificial Sequence: Synthetic oligonucleotide
gguguccgguaaaggcaag

SEQ ID NO: 1700915 - RNA, 19 nt, Artificial Sequence
  Description of Artificial Sequence: Synthetic oligonucleotide
gcauucagggcuggcgauc

SEQ ID NO: 1700916 - RNA, 19 nt, Artificial Sequence
  Description of Artificial Sequence: Synthetic oligonucleotide
caggggcggguacugcaga

SEQ ID NO: 1700917 - RNA, 19 nt, Artificial Sequence
  Description of Artificial Sequence: Synthetic oligonucleotide
cuccccucaucccaaguuu

SEQ ID NO: 1700918 - RNA, 19 nt, Artificial Sequence
  Description of Artificial Sequence: Synthetic oligonucleotide
gcgccucuggugggaaugg

SEQ ID NO: 1700919 - RNA, 19 nt, Artificial Sequence
  Description of Artificial Sequence: Synthetic oligonucleotide
gcugacuguguugcuggga

SEQ ID NO: 1700920 - RNA, 19 nt, Artificial Sequence
  Description of Artificial Sequence: Synthetic oligonucleotide
gugaagcgucugcggcgac

SEQ ID NO: 1700921 - RNA, 19 nt, Artificial Sequence
  Description of Artificial Sequence: Synthetic oligonucleotide
cauggcgaucagggcuaug

SEQ ID NO: 1700922 - RNA, 19 nt, Artificial Sequence
  Description of Artificial Sequence: Synthetic oligonucleotide
ggaaggagucgagggugca

SEQ ID NO: 1700923 - RNA, 19 nt, Artificial Sequence
  Description of Artificial Sequence: Synthetic oligonucleotide
cgaagcacucauugagaga

SEQ ID NO: 1700924 - RNA, 19 nt, Artificial Sequence
  Description of Artificial Sequence: Synthetic oligonucleotide
gguuauggcggaugcuguu

SEQ ID NO: 1700925 - RNA, 19 nt, Artificial Sequence
  Description of Artificial Sequence: Synthetic oligonucleotide
gacccaugauguagccgua

SEQ ID NO: 1700926 - RNA, 19 nt, Artificial Sequence
  Description of Artificial Sequence: Synthetic oligonucleotide
gcgaagcgacccaugaugu

SEQ ID NO: 1700927 - RNA, 19 nt, Artificial Sequence
  Description of Artificial Sequence: Synthetic oligonucleotide
cagggcuauguagcuguaa

SEQ ID NO: 1700928 - RNA, 19 nt, Artificial Sequence
  Description of Artificial Sequence: Synthetic oligonucleotide
gcccgagucaguucccaua

SEQ ID NO: 1700929 - RNA, 19 nt, Artificial Sequence
  Description of Artificial Sequence: Synthetic oligonucleotide
cgacgguugcugcugcaug

SEQ ID NO: 1700930 - RNA, 19 nt, Artificial Sequence
  Description of Artificial Sequence: Synthetic oligonucleotide
ucguggcaguccggaucca

SEQ ID NO: 1700931 - RNA, 19 nt, Artificial Sequence
  Description of Artificial Sequence: Synthetic oligonucleotide
gccauggcgaucagggcua

SEQ ID NO: 1700932 - RNA, 19 nt, Artificial Sequence
  Description of Artificial Sequence: Synthetic oligonucleotide
cccugcgaagcgacugcug

SEQ ID NO: 1700933 - RNA, 19 nt, Artificial Sequence
  Description of Artificial Sequence: Synthetic oligonucleotide
cuuggugcccugggcaccu

SEQ ID NO: 1700934 - RNA, 19 nt, Artificial Sequence
  Description of Artificial Sequence: Synthetic oligonucleotide
ggccccaccuccccucauc

SEQ ID NO: 1700935 - RNA, 19 nt, Artificial Sequence
  Description of Artificial Sequence: Synthetic oligonucleotide
ccuuggagucagcuggcaa

SEQ ID NO: 1700936 - RNA, 19 nt, Artificial Sequence
  Description of Artificial Sequence: Synthetic oligonucleotide
cccagucacccaggguucc

SEQ ID NO: 1700937 - RNA, 19 nt, Artificial Sequence
  Description of Artificial Sequence: Synthetic oligonucleotide
cggacauaugcuggcuggc

SEQ ID NO: 1700938 - RNA, 19 nt, Artificial Sequence
  Description of Artificial Sequence: Synthetic oligonucleotide
gcgucacuaguugccggac

SEQ ID NO: 1700939 - RNA, 19 nt, Artificial Sequence
  Description of Artificial Sequence: Synthetic oligonucleotide
ccccggugaacucuggaua

SEQ ID NO: 1700940 - RNA, 19 nt, Artificial Sequence
  Description of Artificial Sequence: Synthetic oligonucleotide
ugcggucgucgcggggcac

SEQ ID NO: 1700941 - RNA, 19 nt, Artificial Sequence
  Description of Artificial Sequence: Synthetic oligonucleotide
aggcagccgaaaagcugaa

SEQ ID NO: 1700942 - RNA, 19 nt, Artificial Sequence
  Description of Artificial Sequence: Synthetic oligonucleotide
ccgagggccccaccucccc

SEQ ID NO: 1700943 - RNA, 19 nt, Artificial Sequence
  Description of Artificial Sequence: Synthetic oligonucleotide
gcggucgucgcggggcacc

SEQ ID NO: 1700944 - RNA, 19 nt, Artificial Sequence
  Description of Artificial Sequence: Synthetic oligonucleotide
ggguuccuuggagucagcu

SEQ ID NO: 1700945 - RNA, 19 nt, Artificial Sequence
  Description of Artificial Sequence: Synthetic oligonucleotide
ggcgacgguugcugcugca

SEQ ID NO: 1700946 - RNA, 19 nt, Artificial Sequence
  Description of Artificial Sequence: Synthetic oligonucleotide
ggggccuggcgucacuagu

SEQ ID NO: 1700947 - RNA, 19 nt, Artificial Sequence
  Description of Artificial Sequence: Synthetic oligonucleotide
gcccggccgguugugccgg

SEQ ID NO: 1700948 - RNA, 19 nt, Artificial Sequence
  Description of Artificial Sequence: Synthetic oligonucleotide
gcgcuuggugaagcgucug

SEQ ID NO: 1700949 - RNA, 19 nt, Artificial Sequence
  Description of Artificial Sequence: Synthetic oligonucleotide
gucugcggcgacggaggaa

SEQ ID NO: 1700950 - RNA, 19 nt, Artificial Sequence
  Description of Artificial Sequence: Synthetic oligonucleotide
gccgguugugccgguaaaa

SEQ ID NO: 1700951 - RNA, 19 nt, Artificial Sequence
  Description of Artificial Sequence: Synthetic oligonucleotide
gcacggcauucagggcugg

SEQ ID NO: 1700952 - RNA, 19 nt, Artificial Sequence
  Description of Artificial Sequence: Synthetic oligonucleotide
gccccggugaacucuggau

SEQ ID NO: 1700953 - RNA, 19 nt, Artificial Sequence
  Description of Artificial Sequence: Synthetic oligonucleotide
ccgggaccuggcugauggc

SEQ ID NO: 1700954 - RNA, 19 nt, Artificial Sequence
  Description of Artificial Sequence: Synthetic oligonucleotide
cgucacuaguugccggaca

SEQ ID NO: 1700955 - RNA, 19 nt, Artificial Sequence
  Description of Artificial Sequence: Synthetic oligonucleotide
ggguggcccgcugccccgg

SEQ ID NO: 1700956 - RNA, 19 nt, Artificial Sequence
  Description of Artificial Sequence: Synthetic oligonucleotide
gcccggugagaggcggaag

SEQ ID NO: 1700957 - RNA, 19 nt, Artificial Sequence
  Description of Artificial Sequence: Synthetic oligonucleotide
cgacugcugcagucaauca

SEQ ID NO: 1700958 - RNA, 19 nt, Artificial Sequence
  Description of Artificial Sequence: Synthetic oligonucleotide
cgaucagggcuauguagcu

SEQ ID NO: 1700959 - RNA, 19 nt, Artificial Sequence
  Description of Artificial Sequence: Synthetic oligonucleotide
ccgagucaguucccauaca

SEQ ID NO: 1700960 - RNA, 19 nt, Artificial Sequence
  Description of Artificial Sequence: Synthetic oligonucleotide
cggaaccucccuggacagg

SEQ ID NO: 1700961 - RNA, 19 nt, Artificial Sequence
  Description of Artificial Sequence: Synthetic oligonucleotide
cagcuggggccuggcguca

SEQ ID NO: 1700962 - RNA, 19 nt, Artificial Sequence
  Description of Artificial Sequence: Synthetic oligonucleotide
ccggauccaggguccagua

SEQ ID NO: 1700963 - RNA, 19 nt, Artificial Sequence
  Description of Artificial Sequence: Synthetic oligonucleotide
ccccucaucccaaguuugu

SEQ ID NO: 1700964 - RNA, 19 nt, Artificial Sequence
  Description of Artificial Sequence: Synthetic oligonucleotide
ggcccggugagaggcggaa

SEQ ID NO: 1700965 - RNA, 19 nt, Artificial Sequence
  Description of Artificial Sequence: Synthetic oligonucleotide
cgucgcggggcaccuugac

SEQ ID NO: 1700966 - RNA, 19 nt, Artificial Sequence
  Description of Artificial Sequence: Synthetic oligonucleotide
ggcuggcaacgaccccauc

SEQ ID NO: 1700967 - RNA, 19 nt, Artificial Sequence
  Description of Artificial Sequence: Synthetic oligonucleotide
ggagggcgagguggcuuca

SEQ ID NO: 1700968 - RNA, 19 nt, Artificial Sequence
  Description of Artificial Sequence: Synthetic oligonucleotide
gcgaagcgacugcugcagu

SEQ ID NO: 1700969 - RNA, 19 nt, Artificial Sequence
  Description of Artificial Sequence: Synthetic oligonucleotide
cccgcugccccggugaacu

SEQ ID NO: 1700970 - RNA, 19 nt, Artificial Sequence
  Description of Artificial Sequence: Synthetic oligonucleotide
cgaagcgacccaugaugua

SEQ ID NO: 1700971 - RNA, 19 nt, Artificial Sequence
  Description of Artificial Sequence: Synthetic oligonucleotide
ggguacccggaaccucccu

SEQ ID NO: 1700972 - RNA, 19 nt, Artificial Sequence
  Description of Artificial Sequence: Synthetic oligonucleotide
gggccuggcgucacuaguu

SEQ ID NO: 1700973 - RNA, 19 nt, Artificial Sequence
  Description of Artificial Sequence: Synthetic oligonucleotide
gccagcccggccgguugug

SEQ ID NO: 1700974 - RNA, 19 nt, Artificial Sequence
  Description of Artificial Sequence: Synthetic oligonucleotide
ggcccgagucaguucccau

SEQ ID NO: 1700975 - RNA, 19 nt, Artificial Sequence
  Description of Artificial Sequence: Synthetic oligonucleotide
gcgacgguugcugcugcau

SEQ ID NO: 1700976 - RNA, 19 nt, Artificial Sequence
  Description of Artificial Sequence: Synthetic oligonucleotide
ggcagccgaaaagcugaau

SEQ ID NO: 1700977 - RNA, 19 nt, Artificial Sequence
  Description of Artificial Sequence: Synthetic oligonucleotide
ggggagggcgagguggcuu

SEQ ID NO: 1700978 - RNA, 19 nt, Artificial Sequence
  Description of Artificial Sequence: Synthetic oligonucleotide
gcccugcgaagcgacugcu

SEQ ID NO: 1700979 - RNA, 19 nt, Artificial Sequence
  Description of Artificial Sequence: Synthetic oligonucleotide
ccgcugccccggugaacuc

SEQ ID NO: 1700980 - RNA, 19 nt, Artificial Sequence
  Description of Artificial Sequence: Synthetic oligonucleotide
gggcccggugagaggcgga

SEQ ID NO: 1700981 - RNA, 19 nt, Artificial Sequence
  Description of Artificial Sequence: Synthetic oligonucleotide
cggccgguugugccgguaa

SEQ ID NO: 1700982 - RNA, 19 nt, Artificial Sequence
  Description of Artificial Sequence: Synthetic oligonucleotide
cggguacugcagaggccaa

SEQ ID NO: 1700983 - RNA, 19 nt, Artificial Sequence
  Description of Artificial Sequence: Synthetic oligonucleotide
cgcggggcaccuugacgaa

SEQ ID NO: 1700984 - RNA, 19 nt, Artificial Sequence
  Description of Artificial Sequence: Synthetic oligonucleotide
ccccaaaguuuagacccuu

SEQ ID NO: 1700985 - RNA, 19 nt, Artificial Sequence
  Description of Artificial Sequence: Synthetic oligonucleotide
ccccgggaccuggcugaug

SEQ ID NO: 1700986 - RNA, 19 nt, Artificial Sequence
  Description of Artificial Sequence: Synthetic oligonucleotide
ggcgcccucaggggccacu

SEQ ID NO: 1700987 - RNA, 19 nt, Artificial Sequence
  Description of Artificial Sequence: Synthetic oligonucleotide
cugccuugacagggcccuu

SEQ ID NO: 1700988 - RNA, 19 nt, Artificial Sequence
  Description of Artificial Sequence: Synthetic oligonucleotide
ccacugaggguggcccgcu

SEQ ID NO: 1700989 - RNA, 19 nt, Artificial Sequence
  Description of Artificial Sequence: Synthetic oligonucleotide
ccauggcgaucagggcuau

SEQ ID NO: 1700990 - RNA, 19 nt, Artificial Sequence
  Description of Artificial Sequence: Synthetic oligonucleotide
ccggccgguugugccggua

SEQ ID NO: 1700991 - RNA, 19 nt, Artificial Sequence
  Description of Artificial Sequence: Synthetic oligonucleotide
gccccgggaccuggcugau

SEQ ID NO: 1700992 - RNA, 19 nt, Artificial Sequence
  Description of Artificial Sequence: Synthetic oligonucleotide
cggucgucgcggggcaccu

SEQ ID NO: 1700993 - RNA, 19 nt, Artificial Sequence
  Description of Artificial Sequence: Synthetic oligonucleotide
cggcgcccucaggggccac

SEQ ID NO: 1700994 - RNA, 19 nt, Artificial Sequence
  Description of Artificial Sequence: Synthetic oligonucleotide
uaaacuagaaacaauggca

SEQ ID NO: 1700995 - RNA, 19 nt, Artificial Sequence
  Description of Artificial Sequence: Synthetic oligonucleotide
cauaguaucgauaaugagg

SEQ ID NO: 1700996 - RNA, 19 nt, Artificial Sequence
  Description of Artificial Sequence: Synthetic oligonucleotide
aaggcaaucauacugacgu

SEQ ID NO: 1700997 - RNA, 19 nt, Artificial Sequence
  Description of Artificial Sequence: Synthetic oligonucleotide
aauaucuagucgaugaccc

SEQ ID NO: 1700998 - RNA, 19 nt, Artificial Sequence
  Description of Artificial Sequence: Synthetic oligonucleotide
aggauguaaauguagaaac

SEQ ID NO: 1700999 - RNA, 19 nt, Artificial Sequence
  Description of Artificial Sequence: Synthetic oligonucleotide
aaauguagaaaccgugucg

SEQ ID NO: 1701000 - RNA, 19 nt, Artificial Sequence
  Description of Artificial Sequence: Synthetic oligonucleotide
ucucauuucccuuacauag

SEQ ID NO: 1701001 - RNA, 19 nt, Artificial Sequence
  Description of Artificial Sequence: Synthetic oligonucleotide
ucaccuaucagacagaggu

SEQ ID NO: 1701002 - RNA, 19 nt, Artificial Sequence
  Description of Artificial Sequence: Synthetic oligonucleotide
uuaaacuagaaacaauggc

SEQ ID NO: 1701003 - RNA, 19 nt, Artificial Sequence
  Description of Artificial Sequence: Synthetic oligonucleotide
uuaaugaccuauaugauuc

SEQ ID NO: 1701004 - RNA, 19 nt, Artificial Sequence
  Description of Artificial Sequence: Synthetic oligonucleotide
ugaauaacggcauucguag

SEQ ID NO: 1701005 - RNA, 19 nt, Artificial Sequence
  Description of Artificial Sequence: Synthetic oligonucleotide
aaagagaccaauccuuagg

SEQ ID NO: 1701006 - RNA, 19 nt, Artificial Sequence
  Description of Artificial Sequence: Synthetic oligonucleotide
aaaacacaauaucuagucg

SEQ ID NO: 1701007 - RNA, 19 nt, Artificial Sequence
  Description of Artificial Sequence: Synthetic oligonucleotide
aaacacaauaucuagucga

SEQ ID NO: 1701008 - RNA, 19 nt, Artificial Sequence
  Description of Artificial Sequence: Synthetic oligonucleotide
aauaacggcauucguagag

SEQ ID NO: 1701009 - RNA, 19 nt, Artificial Sequence
  Description of Artificial Sequence: Synthetic oligonucleotide
aguaucgauaaugaggugc

SEQ ID NO: 1701010 - RNA, 19 nt, Artificial Sequence
  Description of Artificial Sequence: Synthetic oligonucleotide
gauacugccgaacugcugg

SEQ ID NO: 1701011 - RNA, 19 nt, Artificial Sequence
  Description of Artificial Sequence: Synthetic oligonucleotide
ucgaauuucacucucuccc

SEQ ID NO: 1701012 - RNA, 19 nt, Artificial Sequence
  Description of Artificial Sequence: Synthetic oligonucleotide
uucuaaggcaaucauacug

SEQ ID NO: 1701013 - RNA, 19 nt, Artificial Sequence
  Description of Artificial Sequence: Synthetic oligonucleotide
uaaugaggugcaaagagcc

SEQ ID NO: 1701014 - RNA, 19 nt, Artificial Sequence
  Description of Artificial Sequence: Synthetic oligonucleotide
gauugcuaaugauugaaag

SEQ ID NO: 1701015 - RNA, 19 nt, Artificial Sequence
  Description of Artificial Sequence: Synthetic oligonucleotide
auagccaaggguuaaugac

SEQ ID NO: 1701016 - RNA, 19 nt, Artificial Sequence
  Description of Artificial Sequence: Synthetic oligonucleotide
uguugauuacucuagacaa

SEQ ID NO: 1701017 - RNA, 19 nt, Artificial Sequence
  Description of Artificial Sequence: Synthetic oligonucleotide
uguuugaaaucacggauag

SEQ ID NO: 1701018 - RNA, 19 nt, Artificial Sequence
  Description of Artificial Sequence: Synthetic oligonucleotide
uguguuucgagugaugagg

SEQ ID NO: 1701019 - RNA, 19 nt, Artificial Sequence
  Description of Artificial Sequence: Synthetic oligonucleotide
aauccuuaggagauaaaac

SEQ ID NO: 1701020 - RNA, 19 nt, Artificial Sequence
  Description of Artificial Sequence: Synthetic oligonucleotide
cuugucaccuaucagacag

SEQ ID NO: 1701021 - RNA, 19 nt, Artificial Sequence
  Description of Artificial Sequence: Synthetic oligonucleotide
uuacauaguaucgauaaug

SEQ ID NO: 1701022 - RNA, 19 nt, Artificial Sequence
  Description of Artificial Sequence: Synthetic oligonucleotide
ucuagacaauuucugaacc

SEQ ID NO: 1701023 - RNA, 19 nt, Artificial Sequence
  Description of Artificial Sequence: Synthetic oligonucleotide
ucuauuagacucuuggccu

SEQ ID NO: 1701024 - RNA, 19 nt, Artificial Sequence
  Description of Artificial Sequence: Synthetic oligonucleotide
uuucccuuacauaguaucg

SEQ ID NO: 1701025 - RNA, 19 nt, Artificial Sequence
  Description of Artificial Sequence: Synthetic oligonucleotide
aaaacagauacugccgaac

SEQ ID NO: 1701026 - RNA, 19 nt, Artificial Sequence
  Description of Artificial Sequence: Synthetic oligonucleotide
ucauaggauguaaauguag

SEQ ID NO: 1701027 - RNA, 19 nt, Artificial Sequence
  Description of Artificial Sequence: Synthetic oligonucleotide
aaucauacugacguaaaca

SEQ ID NO: 1701028 - RNA, 19 nt, Artificial Sequence
  Description of Artificial Sequence: Synthetic oligonucleotide
agcguuucaacucuucuuc

SEQ ID NO: 1701029 - RNA, 19 nt, Artificial Sequence
  Description of Artificial Sequence: Synthetic oligonucleotide
acagauacugccgaacugc

SEQ ID NO: 1701030 - RNA, 19 nt, Artificial Sequence
  Description of Artificial Sequence: Synthetic oligonucleotide
uaucauaugucuuucgaaa

SEQ ID NO: 1701031 - RNA, 19 nt, Artificial Sequence
  Description of Artificial Sequence: Synthetic oligonucleotide
uuucgaaacgcugucagag

SEQ ID NO: 1701032 - RNA, 19 nt, Artificial Sequence
  Description of Artificial Sequence: Synthetic oligonucleotide
auaguaucgauaaugaggu

SEQ ID NO: 1701033 - RNA, 19 nt, Artificial Sequence
  Description of Artificial Sequence: Synthetic oligonucleotide
aauguagaaaccgugucga

SEQ ID NO: 1701034 - RNA, 19 nt, Artificial Sequence
  Description of Artificial Sequence: Synthetic oligonucleotide
accuauaugauuccagcag

SEQ ID NO: 1701035 - RNA, 19 nt, Artificial Sequence
  Description of Artificial Sequence: Synthetic oligonucleotide
cuaaugauugaaagaaaac

SEQ ID NO: 1701036 - RNA, 19 nt, Artificial Sequence
  Description of Artificial Sequence: Synthetic oligonucleotide
auaaugaggugcaaagagc

SEQ ID NO: 1701037 - RNA, 19 nt, Artificial Sequence
  Description of Artificial Sequence: Synthetic oligonucleotide
gaggucauuauccauauaa

SEQ ID NO: 1701038 - RNA, 19 nt, Artificial Sequence
  Description of Artificial Sequence: Synthetic oligonucleotide
aucacggauagccacacag

SEQ ID NO: 1701039 - RNA, 19 nt, Artificial Sequence
  Description of Artificial Sequence: Synthetic oligonucleotide
aaacagauacugccgaacu

SEQ ID NO: 1701040 - RNA, 19 nt, Artificial Sequence
  Description of Artificial Sequence: Synthetic oligonucleotide
uaugaaggcuucaaguaac

SEQ ID NO: 1701041 - RNA, 19 nt, Artificial Sequence
  Description of Artificial Sequence: Synthetic oligonucleotide
aacgcuucugccauauagc

SEQ ID NO: 1701042 - RNA, 19 nt, Artificial Sequence
  Description of Artificial Sequence: Synthetic oligonucleotide
uugcuaaugauugaaagaa

SEQ ID NO: 1701043 - RNA, 19 nt, Artificial Sequence
  Description of Artificial Sequence: Synthetic oligonucleotide
acagucuuaucauaugucu

SEQ ID NO: 1701044 - RNA, 19 nt, Artificial Sequence
  Description of Artificial Sequence: Synthetic oligonucleotide
agagguacucugcuuuugc

SEQ ID NO: 1701045 - RNA, 19 nt, Artificial Sequence
  Description of Artificial Sequence: Synthetic oligonucleotide
acgcuucugccauauagcc

SEQ ID NO: 1701046 - RNA, 19 nt, Artificial Sequence
  Description of Artificial Sequence: Synthetic oligonucleotide
ucgagggauuuacacaagg

SEQ ID NO: 1701047 - RNA, 19 nt, Artificial Sequence
  Description of Artificial Sequence: Synthetic oligonucleotide
ugaccuauaugauuccagc

SEQ ID NO: 1701048 - RNA, 19 nt, Artificial Sequence
  Description of Artificial Sequence: Synthetic oligonucleotide
uacacaaggcuucauaaua

SEQ ID NO: 1701049 - RNA, 19 nt, Artificial Sequence
  Description of Artificial Sequence: Synthetic oligonucleotide
uacgcaugaauucucauuu

SEQ ID NO: 1701050 - RNA, 19 nt, Artificial Sequence
  Description of Artificial Sequence: Synthetic oligonucleotide
aaccgugucgagaaagagc

SEQ ID NO: 1701051 - RNA, 19 nt, Artificial Sequence
  Description of Artificial Sequence: Synthetic oligonucleotide
uuuacauguugauuacucu

SEQ ID NO: 1701052 - RNA, 19 nt, Artificial Sequence
  Description of Artificial Sequence: Synthetic oligonucleotide
cauauuguuuucccggacc

SEQ ID NO: 1701053 - RNA, 19 nt, Artificial Sequence
  Description of Artificial Sequence: Synthetic oligonucleotide
gaaggcuucaaguaacauc

SEQ ID NO: 1701054 - RNA, 19 nt, Artificial Sequence
  Description of Artificial Sequence: Synthetic oligonucleotide
cuagacaauuucugaaccc

SEQ ID NO: 1701055 - RNA, 19 nt, Artificial Sequence
  Description of Artificial Sequence: Synthetic oligonucleotide
gacguaaacaguguaaguc

SEQ ID NO: 1701056 - RNA, 19 nt, Artificial Sequence
  Description of Artificial Sequence: Synthetic oligonucleotide
aacagauacugccgaacug

SEQ ID NO: 1701057 - RNA, 19 nt, Artificial Sequence
  Description of Artificial Sequence: Synthetic oligonucleotide
uucugaacccuguuuagca

SEQ ID NO: 1701058 - RNA, 19 nt, Artificial Sequence
  Description of Artificial Sequence: Synthetic oligonucleotide
agccuauuucuccuguccc

SEQ ID NO: 1701059 - RNA, 19 nt, Artificial Sequence
  Description of Artificial Sequence: Synthetic oligonucleotide
acguaaacaguguaaguca

SEQ ID NO: 1701060 - RNA, 19 nt, Artificial Sequence
  Description of Artificial Sequence: Synthetic oligonucleotide
accuaucagacagagguac

SEQ ID NO: 1701061 - RNA, 19 nt, Artificial Sequence
  Description of Artificial Sequence: Synthetic oligonucleotide
ucguagagagaaaacagau

SEQ ID NO: 1701062 - RNA, 19 nt, Artificial Sequence
  Description of Artificial Sequence: Synthetic oligonucleotide
agaaaacugaauaacggca

SEQ ID NO: 1701063 - RNA, 19 nt, Artificial Sequence
  Description of Artificial Sequence: Synthetic oligonucleotide
cacaauaucuagucgauga

SEQ ID NO: 1701064 - RNA, 19 nt, Artificial Sequence
  Description of Artificial Sequence: Synthetic oligonucleotide
uuaucauaugucuuucgaa

SEQ ID NO: 1701065 - RNA, 19 nt, Artificial Sequence
  Description of Artificial Sequence: Synthetic oligonucleotide
aacgucuuauaguccauga

SEQ ID NO: 1701066 - RNA, 19 nt, Artificial Sequence
  Description of Artificial Sequence: Synthetic oligonucleotide
aacccuguuuagcagcaag

SEQ ID NO: 1701067 - RNA, 19 nt, Artificial Sequence
  Description of Artificial Sequence: Synthetic oligonucleotide
gagaccaauccuuaggaga

SEQ ID NO: 1701068 - RNA, 19 nt, Artificial Sequence
  Description of Artificial Sequence: Synthetic oligonucleotide
uauuuauuugaugcuguug

SEQ ID NO: 1701069 - RNA, 19 nt, Artificial Sequence
  Description of Artificial Sequence: Synthetic oligonucleotide
cuucuauuagacucuuggc

SEQ ID NO: 1701070 - RNA, 19 nt, Artificial Sequence
  Description of Artificial Sequence: Synthetic oligonucleotide
aaaccuggacagcuccugg

SEQ ID NO: 1701071 - RNA, 19 nt, Artificial Sequence
  Description of Artificial Sequence: Synthetic oligonucleotide
auucguagagagaaaacag

SEQ ID NO: 1701072 - RNA, 19 nt, Artificial Sequence
  Description of Artificial Sequence: Synthetic oligonucleotide
uaucuagucgaugacccag

SEQ ID NO: 1701073 - RNA, 19 nt, Artificial Sequence
  Description of Artificial Sequence: Synthetic oligonucleotide
uccacgauugcuaaugauu

SEQ ID NO: 1701074 - RNA, 19 nt, Artificial Sequence
  Description of Artificial Sequence: Synthetic oligonucleotide
agucgagggauuuacacaa

SEQ ID NO: 1701075 - RNA, 19 nt, Artificial Sequence
  Description of Artificial Sequence: Synthetic oligonucleotide
cucuagacaauuucugaac

SEQ ID NO: 1701076 - RNA, 19 nt, Artificial Sequence
  Description of Artificial Sequence: Synthetic oligonucleotide
uaaacaguguaagucacaa

SEQ ID NO: 1701077 - RNA, 19 nt, Artificial Sequence
  Description of Artificial Sequence: Synthetic oligonucleotide
ucgaaacgcugucagagcu

SEQ ID NO: 1701078 - RNA, 19 nt, Artificial Sequence
  Description of Artificial Sequence: Synthetic oligonucleotide
acaguacagaccuugguau

SEQ ID NO: 1701079 - RNA, 19 nt, Artificial Sequence
  Description of Artificial Sequence: Synthetic oligonucleotide
uuaucgauuuugcagugua

SEQ ID NO: 1701080 - RNA, 19 nt, Artificial Sequence
  Description of Artificial Sequence: Synthetic oligonucleotide
uccuugucaccuaucagac

SEQ ID NO: 1701081 - RNA, 19 nt, Artificial Sequence
  Description of Artificial Sequence: Synthetic oligonucleotide
aggagauccauguccaucu

SEQ ID NO: 1701082 - RNA, 19 nt, Artificial Sequence
  Description of Artificial Sequence: Synthetic oligonucleotide
cauaggauguaaauguaga

SEQ ID NO: 1701083 - RNA, 19 nt, Artificial Sequence
  Description of Artificial Sequence: Synthetic oligonucleotide
acuagaaacaauggcauau

SEQ ID NO: 1701084 - RNA, 19 nt, Artificial Sequence
  Description of Artificial Sequence: Synthetic oligonucleotide
augauugaaagaaaacuga

SEQ ID NO: 1701085 - RNA, 19 nt, Artificial Sequence
  Description of Artificial Sequence: Synthetic oligonucleotide
caauaucuagucgaugacc

SEQ ID NO: 1701086 - RNA, 19 nt, Artificial Sequence
  Description of Artificial Sequence: Synthetic oligonucleotide
uaucgauuuugcaguguag

SEQ ID NO: 1701087 - RNA, 19 nt, Artificial Sequence
  Description of Artificial Sequence: Synthetic oligonucleotide
aggguuaaugaccuauaug

SEQ ID NO: 1701088 - RNA, 19 nt, Artificial Sequence
  Description of Artificial Sequence: Synthetic oligonucleotide
aaggguuaaugaccuauau

SEQ ID NO: 1701089 - RNA, 19 nt, Artificial Sequence
  Description of Artificial Sequence: Synthetic oligonucleotide
ucauacugacguaaacagu

SEQ ID NO: 1701090 - RNA, 19 nt, Artificial Sequence
  Description of Artificial Sequence: Synthetic oligonucleotide
uucauaauaaggagccaua

SEQ ID NO: 1701091 - RNA, 19 nt, Artificial Sequence
  Description of Artificial Sequence: Synthetic oligonucleotide
agacucuuggccuuuucug

SEQ ID NO: 1701092 - RNA, 19 nt, Artificial Sequence
  Description of Artificial Sequence: Synthetic oligonucleotide
cuucaaguaacaucuguga

SEQ ID NO: 1701093 - RNA, 19 nt, Artificial Sequence
  Description of Artificial Sequence: Synthetic oligonucleotide
cagaccuugguauacuuuc

SEQ ID NO: 1701094 - RNA, 19 nt, Artificial Sequence
  Description of Artificial Sequence: Synthetic oligonucleotide
auaggauguaaauguagaa

SEQ ID NO: 1701095 - RNA, 19 nt, Artificial Sequence
  Description of Artificial Sequence: Synthetic oligonucleotide
auaaaagagaccaauccuu

SEQ ID NO: 1701096 - RNA, 19 nt, Artificial Sequence
  Description of Artificial Sequence: Synthetic oligonucleotide
cugacguaaacaguguaag

SEQ ID NO: 1701097 - RNA, 19 nt, Artificial Sequence
  Description of Artificial Sequence: Synthetic oligonucleotide
guagaaaccgugucgagaa

SEQ ID NO: 1701098 - RNA, 19 nt, Artificial Sequence
  Description of Artificial Sequence: Synthetic oligonucleotide
gaauuccacgcccacacca

SEQ ID NO: 1701099 - RNA, 19 nt, Artificial Sequence
  Description of Artificial Sequence: Synthetic oligonucleotide
cuuauaguccaugagcuca

SEQ ID NO: 1701100 - RNA, 19 nt, Artificial Sequence
  Description of Artificial Sequence: Synthetic oligonucleotide
cuuaucauaugucuuucga

SEQ ID NO: 1701101 - RNA, 19 nt, Artificial Sequence
  Description of Artificial Sequence: Synthetic oligonucleotide
gaagugggcacacagugaa

SEQ ID NO: 1701102 - RNA, 19 nt, Artificial Sequence
  Description of Artificial Sequence: Synthetic oligonucleotide
gaaacgcugucagagcucc

SEQ ID NO: 1701103 - RNA, 19 nt, Artificial Sequence
  Description of Artificial Sequence: Synthetic oligonucleotide
auggcauauuuauuugaug

SEQ ID NO: 1701104 - RNA, 19 nt, Artificial Sequence
  Description of Artificial Sequence: Synthetic oligonucleotide
agauaaaacacaauaucua

SEQ ID NO: 1701105 - RNA, 19 nt, Artificial Sequence
  Description of Artificial Sequence: Synthetic oligonucleotide
aguguaagucacaaacguc

SEQ ID NO: 1701106 - RNA, 19 nt, Artificial Sequence
  Description of Artificial Sequence: Synthetic oligonucleotide
uaaugaccuauaugauucc

SEQ ID NO: 1701107 - RNA, 19 nt, Artificial Sequence
  Description of Artificial Sequence: Synthetic oligonucleotide
aaugaccuauaugauucca

SEQ ID NO: 1701108 - RNA, 19 nt, Artificial Sequence
  Description of Artificial Sequence: Synthetic oligonucleotide
aaaccgugucgagaaagag

SEQ ID NO: 1701109 - RNA, 19 nt, Artificial Sequence
  Description of Artificial Sequence: Synthetic oligonucleotide
ugaacccuguuuagcagca

SEQ ID NO: 1701110 - RNA, 19 nt, Artificial Sequence
  Description of Artificial Sequence: Synthetic oligonucleotide
ucuagguuuuccagcggca

SEQ ID NO: 1701111 - RNA, 19 nt, Artificial Sequence
  Description of Artificial Sequence: Synthetic oligonucleotide
uauaugauuccagcagcug

SEQ ID NO: 1701112 - RNA, 19 nt, Artificial Sequence
  Description of Artificial Sequence: Synthetic oligonucleotide
agcucauaggauguaaaug

SEQ ID NO: 1701113 - RNA, 19 nt, Artificial Sequence
  Description of Artificial Sequence: Synthetic oligonucleotide
gaccuugguauacuuucag

SEQ ID NO: 1701114 - RNA, 19 nt, Artificial Sequence
  Description of Artificial Sequence: Synthetic oligonucleotide
accgugucgagaaagagcu

SEQ ID NO: 1701115 - RNA, 19 nt, Artificial Sequence
  Description of Artificial Sequence: Synthetic oligonucleotide
ugucaccuaucagacagag

SEQ ID NO: 1701116 - RNA, 19 nt, Artificial Sequence
  Description of Artificial Sequence: Synthetic oligonucleotide
uuguuuucccggaccgccg

SEQ ID NO: 1701117 - RNA, 19 nt, Artificial Sequence
  Description of Artificial Sequence: Synthetic oligonucleotide
aagcguuucaacucuucuu

SEQ ID NO: 1701118 - RNA, 19 nt, Artificial Sequence
  Description of Artificial Sequence: Synthetic oligonucleotide
cauucguagagagaaaaca

SEQ ID NO: 1701119 - RNA, 19 nt, Artificial Sequence
  Description of Artificial Sequence: Synthetic oligonucleotide
acgucuuauaguccaugag

SEQ ID NO: 1701120 - RNA, 19 nt, Artificial Sequence
  Description of Artificial Sequence: Synthetic oligonucleotide
ucauaauaaggagccauau

SEQ ID NO: 1701121 - RNA, 19 nt, Artificial Sequence
  Description of Artificial Sequence: Synthetic oligonucleotide
ugagcucauaggauguaaa

SEQ ID NO: 1701122 - RNA, 19 nt, Artificial Sequence
  Description of Artificial Sequence: Synthetic oligonucleotide
ucgauuuugcaguguaguc

SEQ ID NO: 1701123 - RNA, 19 nt, Artificial Sequence
  Description of Artificial Sequence: Synthetic oligonucleotide
cuuuaucgauuuugcagug

SEQ ID NO: 1701124 - RNA, 19 nt, Artificial Sequence
  Description of Artificial Sequence: Synthetic oligonucleotide
uucgaaacgcugucagagc

SEQ ID NO: 1701125 - RNA, 19 nt, Artificial Sequence
  Description of Artificial Sequence: Synthetic oligonucleotide
gaccuauaugauuccagca

SEQ ID NO: 1701126 - RNA, 19 nt, Artificial Sequence
  Description of Artificial Sequence: Synthetic oligonucleotide
uuugcaguguagucuucca

SEQ ID NO: 1701127 - RNA, 19 nt, Artificial Sequence
  Description of Artificial Sequence: Synthetic oligonucleotide
aaacgucuuauaguccaug

SEQ ID NO: 1701128 - RNA, 19 nt, Artificial Sequence
  Description of Artificial Sequence: Synthetic oligonucleotide
gagggauuuacacaaggcu

SEQ ID NO: 1701129 - RNA, 19 nt, Artificial Sequence
  Description of Artificial Sequence: Synthetic oligonucleotide
acugaauaacggcauucgu

SEQ ID NO: 1701130 - RNA, 19 nt, Artificial Sequence
  Description of Artificial Sequence: Synthetic oligonucleotide
aggucuguugguuucuacu

SEQ ID NO: 1701131 - RNA, 19 nt, Artificial Sequence
  Description of Artificial Sequence: Synthetic oligonucleotide
uccuguuccacgauugcua

SEQ ID NO: 1701132 - RNA, 19 nt, Artificial Sequence
  Description of Artificial Sequence: Synthetic oligonucleotide
ucuugaugguuucuuggua

SEQ ID NO: 1701133 - RNA, 19 nt, Artificial Sequence
  Description of Artificial Sequence: Synthetic oligonucleotide
ugcgcgaugcgcaggucgg

SEQ ID NO: 1701134 - RNA, 19 nt, Artificial Sequence
  Description of Artificial Sequence: Synthetic oligonucleotide
ugacguaaacaguguaagu

SEQ ID NO: 1701135 - RNA, 19 nt, Artificial Sequence
  Description of Artificial Sequence: Synthetic oligonucleotide
aaggagccauauuguuuuc

SEQ ID NO: 1701136 - RNA, 19 nt, Artificial Sequence
  Description of Artificial Sequence: Synthetic oligonucleotide
acggcauucguagagagaa

SEQ ID NO: 1701137 - RNA, 19 nt, Artificial Sequence
  Description of Artificial Sequence: Synthetic oligonucleotide
ugucuuucgaaacgcuguc

SEQ ID NO: 1701138 - RNA, 19 nt, Artificial Sequence
  Description of Artificial Sequence: Synthetic oligonucleotide
caaucauacugacguaaac

SEQ ID NO: 1701139 - RNA, 19 nt, Artificial Sequence
  Description of Artificial Sequence: Synthetic oligonucleotide
aggagccauauuguuuucc

SEQ ID NO: 1701140 - RNA, 19 nt, Artificial Sequence
  Description of Artificial Sequence: Synthetic oligonucleotide
aacacaauaucuagucgau

SEQ ID NO: 1701141 - RNA, 19 nt, Artificial Sequence
  Description of Artificial Sequence: Synthetic oligonucleotide
cacagucuuaucauauguc

SEQ ID NO: 1701142 - RNA, 19 nt, Artificial Sequence
  Description of Artificial Sequence: Synthetic oligonucleotide
cacaaacgucuuauagucc

SEQ ID NO: 1701143 - RNA, 19 nt, Artificial Sequence
  Description of Artificial Sequence: Synthetic oligonucleotide
uucccuuacauaguaucga

SEQ ID NO: 1701144 - RNA, 19 nt, Artificial Sequence
  Description of Artificial Sequence: Synthetic oligonucleotide
acugccgaacugcuggaag

SEQ ID NO: 1701145 - RNA, 19 nt, Artificial Sequence
  Description of Artificial Sequence: Synthetic oligonucleotide
uguuuucccggaccgccgc

SEQ ID NO: 1701146 - RNA, 19 nt, Artificial Sequence
  Description of Artificial Sequence: Synthetic oligonucleotide
aucauugcaucucgaauuu

SEQ ID NO: 1701147 - RNA, 19 nt, Artificial Sequence
  Description of Artificial Sequence: Synthetic oligonucleotide
ucacggauagccacacagu

SEQ ID NO: 1701148 - RNA, 19 nt, Artificial Sequence
  Description of Artificial Sequence: Synthetic oligonucleotide
uuuagcagcaagucuccuu

SEQ ID NO: 1701149 - RNA, 19 nt, Artificial Sequence
  Description of Artificial Sequence: Synthetic oligonucleotide
uaaaccuggacagcuccug

SEQ ID NO: 1701150 - RNA, 19 nt, Artificial Sequence
  Description of Artificial Sequence: Synthetic oligonucleotide
augaauucucauuucccuu

SEQ ID NO: 1701151 - RNA, 19 nt, Artificial Sequence
  Description of Artificial Sequence: Synthetic oligonucleotide
uaucaggucuguugguuuc

SEQ ID NO: 1701152 - RNA, 19 nt, Artificial Sequence
  Description of Artificial Sequence: Synthetic oligonucleotide
uucagccuauuucuccugu

SEQ ID NO: 1701153 - RNA, 19 nt, Artificial Sequence
  Description of Artificial Sequence: Synthetic oligonucleotide
aaccuggacagcuccuggu

SEQ ID NO: 1701154 - RNA, 19 nt, Artificial Sequence
  Description of Artificial Sequence: Synthetic oligonucleotide
auguaaauguagaaaccgu

SEQ ID NO: 1701155 - RNA, 19 nt, Artificial Sequence
  Description of Artificial Sequence: Synthetic oligonucleotide
acgcaugaauucucauuuc

SEQ ID NO: 1701156 - RNA, 19 nt, Artificial Sequence
  Description of Artificial Sequence: Synthetic oligonucleotide
gucacaaacgucuuauagu

SEQ ID NO: 1701157 - RNA, 19 nt, Artificial Sequence
  Description of Artificial Sequence: Synthetic oligonucleotide
aacgcugucagagcucccu

SEQ ID NO: 1701158 - RNA, 19 nt, Artificial Sequence
  Description of Artificial Sequence: Synthetic oligonucleotide
ccacgauugcuaaugauug

SEQ ID NO: 1701159 - RNA, 19 nt, Artificial Sequence
  Description of Artificial Sequence: Synthetic oligonucleotide
cuaugaaggcuucaaguaa

SEQ ID NO: 1701160 - RNA, 19 nt, Artificial Sequence
  Description of Artificial Sequence: Synthetic oligonucleotide
gauuuugcaguguagucuu

SEQ ID NO: 1701161 - RNA, 19 nt, Artificial Sequence
  Description of Artificial Sequence: Synthetic oligonucleotide
cuguguuucgagugaugag

SEQ ID NO: 1701162 - RNA, 19 nt, Artificial Sequence
  Description of Artificial Sequence: Synthetic oligonucleotide
gaaaacagauacugccgaa

SEQ ID NO: 1701163 - RNA, 19 nt, Artificial Sequence
  Description of Artificial Sequence: Synthetic oligonucleotide
ugauuacucuagacaauuu

SEQ ID NO: 1701164 - RNA, 19 nt, Artificial Sequence
  Description of Artificial Sequence: Synthetic oligonucleotide
guaucgauaaugaggugca

SEQ ID NO: 1701165 - RNA, 19 nt, Artificial Sequence
  Description of Artificial Sequence: Synthetic oligonucleotide
uuuaucgauuuugcagugu

SEQ ID NO: 1701166 - RNA, 19 nt, Artificial Sequence
  Description of Artificial Sequence: Synthetic oligonucleotide
uacugacguaaacagugua

SEQ ID NO: 1701167 - RNA, 19 nt, Artificial Sequence
  Description of Artificial Sequence: Synthetic oligonucleotide
gagaaagagcuccgcugcc

SEQ ID NO: 1701168 - RNA, 19 nt, Artificial Sequence
  Description of Artificial Sequence: Synthetic oligonucleotide
caauaaaccuggacagcuc

SEQ ID NO: 1701169 - RNA, 19 nt, Artificial Sequence
  Description of Artificial Sequence: Synthetic oligonucleotide
ucccuuacauaguaucgau

SEQ ID NO: 1701170 - RNA, 19 nt, Artificial Sequence
  Description of Artificial Sequence: Synthetic oligonucleotide
auaucuagucgaugaccca

SEQ ID NO: 1701171 - RNA, 19 nt, Artificial Sequence
  Description of Artificial Sequence: Synthetic oligonucleotide
auguagaaaccgugucgag

SEQ ID NO: 1701172 - RNA, 19 nt, Artificial Sequence
  Description of Artificial Sequence: Synthetic oligonucleotide
acggauagccacacaguac

SEQ ID NO: 1701173 - RNA, 19 nt, Artificial Sequence
  Description of Artificial Sequence: Synthetic oligonucleotide
uauuguuuucccggaccgc

SEQ ID NO: 1701174 - RNA, 19 nt, Artificial Sequence
  Description of Artificial Sequence: Synthetic oligonucleotide
acgauugcuaaugauugaa

SEQ ID NO: 1701175 - RNA, 19 nt, Artificial Sequence
  Description of Artificial Sequence: Synthetic oligonucleotide
agaccaauccuuaggagau

SEQ ID NO: 1701176 - RNA, 19 nt, Artificial Sequence
  Description of Artificial Sequence: Synthetic oligonucleotide
cuagucgaugacccagggc

SEQ ID NO: 1701177 - RNA, 19 nt, Artificial Sequence
  Description of Artificial Sequence: Synthetic oligonucleotide
ugguuucuugguacugcca

SEQ ID NO: 1701178 - RNA, 19 nt, Artificial Sequence
  Description of Artificial Sequence: Synthetic oligonucleotide
acacaguacagaccuuggu

SEQ ID NO: 1701179 - RNA, 19 nt, Artificial Sequence
  Description of Artificial Sequence: Synthetic oligonucleotide
agggauuuacacaaggcuu

SEQ ID NO: 1701180 - RNA, 19 nt, Artificial Sequence
  Description of Artificial Sequence: Synthetic oligonucleotide
ugguauacuuucagccuau

SEQ ID NO: 1701181 - RNA, 19 nt, Artificial Sequence
  Description of Artificial Sequence: Synthetic oligonucleotide
gcuaaugauugaaagaaaa

SEQ ID NO: 1701182 - RNA, 19 nt, Artificial Sequence
  Description of Artificial Sequence: Synthetic oligonucleotide
uguacgcaugaauucucau

SEQ ID NO: 1701183 - RNA, 19 nt, Artificial Sequence
  Description of Artificial Sequence: Synthetic oligonucleotide
uggcuguacgcaugaauuc

SEQ ID NO: 1701184 - RNA, 19 nt, Artificial Sequence
  Description of Artificial Sequence: Synthetic oligonucleotide
gucuuauaguccaugagcu

SEQ ID NO: 1701185 - RNA, 19 nt, Artificial Sequence
  Description of Artificial Sequence: Synthetic oligonucleotide
gaauaacggcauucguaga

SEQ ID NO: 1701186 - RNA, 19 nt, Artificial Sequence
  Description of Artificial Sequence: Synthetic oligonucleotide
cugcgcgaugcgcaggucg

SEQ ID NO: 1701187 - RNA, 19 nt, Artificial Sequence
  Description of Artificial Sequence: Synthetic oligonucleotide
cuugguauacuuucagccu

SEQ ID NO: 1701188 - RNA, 19 nt, Artificial Sequence
  Description of Artificial Sequence: Synthetic oligonucleotide
gaaaccgugucgagaaaga

SEQ ID NO: 1701189 - RNA, 19 nt, Artificial Sequence
  Description of Artificial Sequence: Synthetic oligonucleotide
uuccacgcccacaccaaac

SEQ ID NO: 1701190 - RNA, 19 nt, Artificial Sequence
  Description of Artificial Sequence: Synthetic oligonucleotide
cuuuaaugaccuuuucccu

SEQ ID NO: 1701191 - RNA, 19 nt, Artificial Sequence
  Description of Artificial Sequence: Synthetic oligonucleotide
acugacguaaacaguguaa

SEQ ID NO: 1701192 - RNA, 19 nt, Artificial Sequence
  Description of Artificial Sequence: Synthetic oligonucleotide
aucuagucgaugacccagg

SEQ ID NO: 1701193 - RNA, 19 nt, Artificial Sequence
  Description of Artificial Sequence: Synthetic oligonucleotide
ggugcaaagagccaauccu

SEQ ID NO: 1701194 - RNA, 19 nt, Artificial Sequence
  Description of Artificial Sequence: Synthetic oligonucleotide
caucucgaauuucacucuc

SEQ ID NO: 1701195 - RNA, 19 nt, Artificial Sequence
  Description of Artificial Sequence: Synthetic oligonucleotide
caucauugcaucucgaauu

SEQ ID NO: 1701196 - RNA, 19 nt, Artificial Sequence
  Description of Artificial Sequence: Synthetic oligonucleotide
aaucacggauagccacaca

SEQ ID NO: 1701197 - RNA, 19 nt, Artificial Sequence
  Description of Artificial Sequence: Synthetic oligonucleotide
cucauccaagcguuucaac

SEQ ID NO: 1701198 - RNA, 19 nt, Artificial Sequence
  Description of Artificial Sequence: Synthetic oligonucleotide
uaguaucgauaaugaggug

SEQ ID NO: 1701199 - RNA, 19 nt, Artificial Sequence
  Description of Artificial Sequence: Synthetic oligonucleotide
agacaauuucugaacccug

SEQ ID NO: 1701200 - RNA, 19 nt, Artificial Sequence
  Description of Artificial Sequence: Synthetic oligonucleotide
gaggagauccauguccauc

SEQ ID NO: 1701201 - RNA, 19 nt, Artificial Sequence
  Description of Artificial Sequence: Synthetic oligonucleotide
caguguaagucacaaacgu

SEQ ID NO: 1701202 - RNA, 19 nt, Artificial Sequence
  Description of Artificial Sequence: Synthetic oligonucleotide
uuagacucuuggccuuuuc

SEQ ID NO: 1701203 - RNA, 19 nt, Artificial Sequence
  Description of Artificial Sequence: Synthetic oligonucleotide
uggucuuucuaaggcaauc

SEQ ID NO: 1701204 - RNA, 19 nt, Artificial Sequence
  Description of Artificial Sequence: Synthetic oligonucleotide
aauuccacgcccacaccaa

SEQ ID NO: 1701205 - RNA, 19 nt, Artificial Sequence
  Description of Artificial Sequence: Synthetic oligonucleotide
acacaauaucuagucgaug

SEQ ID NO: 1701206 - RNA, 19 nt, Artificial Sequence
  Description of Artificial Sequence: Synthetic oligonucleotide
ugucgagaaagagcuccgc

SEQ ID NO: 1701207 - RNA, 19 nt, Artificial Sequence
  Description of Artificial Sequence: Synthetic oligonucleotide
cagucgagggauuuacaca

SEQ ID NO: 1701208 - RNA, 19 nt, Artificial Sequence
  Description of Artificial Sequence: Synthetic oligonucleotide
uucuugguacugccaguuc

SEQ ID NO: 1701209 - RNA, 19 nt, Artificial Sequence
  Description of Artificial Sequence: Synthetic oligonucleotide
ccagucgagggauuuacac

SEQ ID NO: 1701210 - RNA, 19 nt, Artificial Sequence
  Description of Artificial Sequence: Synthetic oligonucleotide
uacagaccuugguauacuu

SEQ ID NO: 1701211 - RNA, 19 nt, Artificial Sequence
  Description of Artificial Sequence: Synthetic oligonucleotide
uuccacgauugcuaaugau

SEQ ID NO: 1701212 - RNA, 19 nt, Artificial Sequence
  Description of Artificial Sequence: Synthetic oligonucleotide
agccaaggguuaaugaccu

SEQ ID NO: 1701213 - RNA, 19 nt, Artificial Sequence
  Description of Artificial Sequence: Synthetic oligonucleotide
cuauaugauuccagcagcu

SEQ ID NO: 1701214 - RNA, 19 nt, Artificial Sequence
  Description of Artificial Sequence: Synthetic oligonucleotide
ugggcacacagugaagaaa

SEQ ID NO: 1701215 - RNA, 19 nt, Artificial Sequence
  Description of Artificial Sequence: Synthetic oligonucleotide
ugcuaucaggucuguuggu

SEQ ID NO: 1701216 - RNA, 19 nt, Artificial Sequence
  Description of Artificial Sequence: Synthetic oligonucleotide
ugccagucgagggauuuac

SEQ ID NO: 1701217 - RNA, 19 nt, Artificial Sequence
  Description of Artificial Sequence: Synthetic oligonucleotide
gugucgagaaagagcuccg

SEQ ID NO: 1701218 - RNA, 19 nt, Artificial Sequence
  Description of Artificial Sequence: Synthetic oligonucleotide
guaaacaguguaagucaca

SEQ ID NO: 1701219 - RNA, 19 nt, Artificial Sequence
  Description of Artificial Sequence: Synthetic oligonucleotide
aacggcauucguagagaga

SEQ ID NO: 1701220 - RNA, 19 nt, Artificial Sequence
  Description of Artificial Sequence: Synthetic oligonucleotide
cuuucgaaacgcugucaga

SEQ ID NO: 1701221 - RNA, 19 nt, Artificial Sequence
  Description of Artificial Sequence: Synthetic oligonucleotide
aaacgcugucagagcuccc

SEQ ID NO: 1701222 - RNA, 19 nt, Artificial Sequence
  Description of Artificial Sequence: Synthetic oligonucleotide
acgcugucagagcucccuc

SEQ ID NO: 1701223 - RNA, 19 nt, Artificial Sequence
  Description of Artificial Sequence: Synthetic oligonucleotide
gggguucuugggaagaccc

SEQ ID NO: 1701224 - RNA, 19 nt, Artificial Sequence
  Description of Artificial Sequence: Synthetic oligonucleotide
auacugacguaaacagugu

SEQ ID NO: 1701225 - RNA, 19 nt, Artificial Sequence
  Description of Artificial Sequence: Synthetic oligonucleotide
cuguacgcaugaauucuca

SEQ ID NO: 1701226 - RNA, 19 nt, Artificial Sequence
  Description of Artificial Sequence: Synthetic oligonucleotide
cgcaugaauucucauuucc

SEQ ID NO: 1701227 - RNA, 19 nt, Artificial Sequence
  Description of Artificial Sequence: Synthetic oligonucleotide
guucccgcggugcucgggc

SEQ ID NO: 1701228 - RNA, 19 nt, Artificial Sequence
  Description of Artificial Sequence: Synthetic oligonucleotide
auuuuacugaggagaucca

SEQ ID NO: 1701229 - RNA, 19 nt, Artificial Sequence
  Description of Artificial Sequence: Synthetic oligonucleotide
cguaaacaguguaagucac

SEQ ID NO: 1701230 - RNA, 19 nt, Artificial Sequence
  Description of Artificial Sequence: Synthetic oligonucleotide
guuccacgauugcuaauga

SEQ ID NO: 1701231 - RNA, 19 nt, Artificial Sequence
  Description of Artificial Sequence: Synthetic oligonucleotide
gucaccuaucagacagagg

SEQ ID NO: 1701232 - RNA, 19 nt, Artificial Sequence
  Description of Artificial Sequence: Synthetic oligonucleotide
gagcucauaggauguaaau

SEQ ID NO: 1701233 - RNA, 19 nt, Artificial Sequence
  Description of Artificial Sequence: Synthetic oligonucleotide
cgugucgagaaagagcucc

SEQ ID NO: 1701234 - RNA, 19 nt, Artificial Sequence
  Description of Artificial Sequence: Synthetic oligonucleotide
cacggauagccacacagua

SEQ ID NO: 1701235 - RNA, 19 nt, Artificial Sequence
  Description of Artificial Sequence: Synthetic oligonucleotide
agcugcgcgaugcgcaggu

SEQ ID NO: 1701236 - RNA, 19 nt, Artificial Sequence
  Description of Artificial Sequence: Synthetic oligonucleotide
cacgauugcuaaugauuga

SEQ ID NO: 1701237 - RNA, 19 nt, Artificial Sequence
  Description of Artificial Sequence: Synthetic oligonucleotide
cgagggauuuacacaaggc

SEQ ID NO: 1701238 - RNA, 19 nt, Artificial Sequence
  Description of Artificial Sequence: Synthetic oligonucleotide
uauuagacucuuggccuuu

SEQ ID NO: 1701239 - RNA, 19 nt, Artificial Sequence
  Description of Artificial Sequence: Synthetic oligonucleotide
ugaggagauccauguccau

SEQ ID NO: 1701240 - RNA, 19 nt, Artificial Sequence
  Description of Artificial Sequence: Synthetic oligonucleotide
agaccuugguauacuuuca

SEQ ID NO: 1701241 - RNA, 19 nt, Artificial Sequence
  Description of Artificial Sequence: Synthetic oligonucleotide
ucauugcaucucgaauuuc

SEQ ID NO: 1701242 - RNA, 19 nt, Artificial Sequence
  Description of Artificial Sequence: Synthetic oligonucleotide
ggucuuucuaaggcaauca

SEQ ID NO: 1701243 - RNA, 19 nt, Artificial Sequence
  Description of Artificial Sequence: Synthetic oligonucleotide
ucugccagucgagggauuu

SEQ ID NO: 1701244 - RNA, 19 nt, Artificial Sequence
  Description of Artificial Sequence: Synthetic oligonucleotide
caaggguuaaugaccuaua

SEQ ID NO: 1701245 - RNA, 19 nt, Artificial Sequence
  Description of Artificial Sequence: Synthetic oligonucleotide
auuccacgcccacaccaaa

SEQ ID NO: 1701246 - RNA, 19 nt, Artificial Sequence
  Description of Artificial Sequence: Synthetic oligonucleotide
ucgcgcaccgccgcguucc

SEQ ID NO: 1701247 - RNA, 19 nt, Artificial Sequence
  Description of Artificial Sequence: Synthetic oligonucleotide
ggcaaucauacugacguaa

SEQ ID NO: 1701248 - RNA, 19 nt, Artificial Sequence
  Description of Artificial Sequence: Synthetic oligonucleotide
ccuauuucuccugucccag

SEQ ID NO: 1701249 - RNA, 19 nt, Artificial Sequence
  Description of Artificial Sequence: Synthetic oligonucleotide
agauacugccgaacugcug

SEQ ID NO: 1701250 - RNA, 19 nt, Artificial Sequence
  Description of Artificial Sequence: Synthetic oligonucleotide
guuuucccggaccgccgcc

SEQ ID NO: 1701251 - RNA, 19 nt, Artificial Sequence
  Description of Artificial Sequence: Synthetic oligonucleotide
ggcauucguagagagaaaa

SEQ ID NO: 1701252 - RNA, 19 nt, Artificial Sequence
  Description of Artificial Sequence: Synthetic oligonucleotide
uaucgauaaugaggugcaa

SEQ ID NO: 1701253 - RNA, 19 nt, Artificial Sequence
  Description of Artificial Sequence: Synthetic oligonucleotide
guacgcaugaauucucauu

SEQ ID NO: 1701254 - RNA, 19 nt, Artificial Sequence
  Description of Artificial Sequence: Synthetic oligonucleotide
ucccgcggugcucgggcag

SEQ ID NO: 1701255 - RNA, 19 nt, Artificial Sequence
  Description of Artificial Sequence: Synthetic oligonucleotide
gucgagaaagagcuccgcu

SEQ ID NO: 1701256 - RNA, 19 nt, Artificial Sequence
  Description of Artificial Sequence: Synthetic oligonucleotide
aucaggucuguugguuucu

SEQ ID NO: 1701257 - RNA, 19 nt, Artificial Sequence
  Description of Artificial Sequence: Synthetic oligonucleotide
cauaauaaggagccauauu

SEQ ID NO: 1701258 - RNA, 19 nt, Artificial Sequence
  Description of Artificial Sequence: Synthetic oligonucleotide
cugccauauagccaagggu

SEQ ID NO: 1701259 - RNA, 19 nt, Artificial Sequence
  Description of Artificial Sequence: Synthetic oligonucleotide
caagcguuucaacucuucu

SEQ ID NO: 1701260 - RNA, 19 nt, Artificial Sequence
  Description of Artificial Sequence: Synthetic oligonucleotide
caucugugagggaauacau

SEQ ID NO: 1701261 - RNA, 19 nt, Artificial Sequence
  Description of Artificial Sequence: Synthetic oligonucleotide
gucgagggauuuacacaag

SEQ ID NO: 1701262 - RNA, 19 nt, Artificial Sequence
  Description of Artificial Sequence: Synthetic oligonucleotide
guacucugcuuuugccauc

SEQ ID NO: 1701263 - RNA, 19 nt, Artificial Sequence
  Description of Artificial Sequence: Synthetic oligonucleotide
gucuuucgaaacgcuguca

SEQ ID NO: 1701264 - RNA, 19 nt, Artificial Sequence
  Description of Artificial Sequence: Synthetic oligonucleotide
ccacacaguacagaccuug

SEQ ID NO: 1701265 - RNA, 19 nt, Artificial Sequence
  Description of Artificial Sequence: Synthetic oligonucleotide
guugaagugggcacacagu

SEQ ID NO: 1701266 - RNA, 19 nt, Artificial Sequence
  Description of Artificial Sequence: Synthetic oligonucleotide
cuuacauaguaucgauaau

SEQ ID NO: 1701267 - RNA, 19 nt, Artificial Sequence
  Description of Artificial Sequence: Synthetic oligonucleotide
ucgggguucuugggaagac

SEQ ID NO: 1701268 - RNA, 19 nt, Artificial Sequence
  Description of Artificial Sequence: Synthetic oligonucleotide
gcauucguagagagaaaac

SEQ ID NO: 1701269 - RNA, 19 nt, Artificial Sequence
  Description of Artificial Sequence: Synthetic oligonucleotide
ccauauuguuuucccggac

SEQ ID NO: 1701270 - RNA, 19 nt, Artificial Sequence
  Description of Artificial Sequence: Synthetic oligonucleotide
acagaccuugguauacuuu

SEQ ID NO: 1701271 - RNA, 19 nt, Artificial Sequence
  Description of Artificial Sequence: Synthetic oligonucleotide
guugauuacucuagacaau

SEQ ID NO: 1701272 - RNA, 19 nt, Artificial Sequence
  Description of Artificial Sequence: Synthetic oligonucleotide
caguacagaccuugguaua

SEQ ID NO: 1701273 - RNA, 19 nt, Artificial Sequence
  Description of Artificial Sequence: Synthetic oligonucleotide
gccaucauugcaucucgaa

SEQ ID NO: 1701274 - RNA, 19 nt, Artificial Sequence
  Description of Artificial Sequence: Synthetic oligonucleotide
ucgaugacccagggccaca

SEQ ID NO: 1701275 - RNA, 19 nt, Artificial Sequence
  Description of Artificial Sequence: Synthetic oligonucleotide
cuauuagacucuuggccuu

SEQ ID NO: 1701276 - RNA, 19 nt, Artificial Sequence
  Description of Artificial Sequence: Synthetic oligonucleotide
cagucuuaucauaugucuu

SEQ ID NO: 1701277 - RNA, 19 nt, Artificial Sequence
  Description of Artificial Sequence: Synthetic oligonucleotide
cacgcccacaccaaacgcu

SEQ ID NO: 1701278 - RNA, 19 nt, Artificial Sequence
  Description of Artificial Sequence: Synthetic oligonucleotide
guacugccaguucuugcua

SEQ ID NO: 1701279 - RNA, 19 nt, Artificial Sequence
  Description of Artificial Sequence: Synthetic oligonucleotide
uacugccgaacugcuggaa

SEQ ID NO: 1701280 - RNA, 19 nt, Artificial Sequence
  Description of Artificial Sequence: Synthetic oligonucleotide
gcguuucaacucuucuuca

SEQ ID NO: 1701281 - RNA, 19 nt, Artificial Sequence
  Description of Artificial Sequence: Synthetic oligonucleotide
uucccgcggugcucgggca

SEQ ID NO: 1701282 - RNA, 19 nt, Artificial Sequence
  Description of Artificial Sequence: Synthetic oligonucleotide
cccuguuuagcagcaaguc

SEQ ID NO: 1701283 - RNA, 19 nt, Artificial Sequence
  Description of Artificial Sequence: Synthetic oligonucleotide
gcaaucauacugacguaaa

SEQ ID NO: 1701284 - RNA, 19 nt, Artificial Sequence
  Description of Artificial Sequence: Synthetic oligonucleotide
gagcucccuccuugucacc

SEQ ID NO: 1701285 - RNA, 19 nt, Artificial Sequence
  Description of Artificial Sequence: Synthetic oligonucleotide
gcuguacgcaugaauucuc

SEQ ID NO: 1701286 - RNA, 19 nt, Artificial Sequence
  Description of Artificial Sequence: Synthetic oligonucleotide
caccaaacgcuucugccau

SEQ ID NO: 1701287 - RNA, 19 nt, Artificial Sequence
  Description of Artificial Sequence: Synthetic oligonucleotide
gguuaaugaccuauaugau

SEQ ID NO: 1701288 - RNA, 19 nt, Artificial Sequence
  Description of Artificial Sequence: Synthetic oligonucleotide
cauuucccuuacauaguau

SEQ ID NO: 1701289 - RNA, 19 nt, Artificial Sequence
  Description of Artificial Sequence: Synthetic oligonucleotide
accaaacgcuucugccaua

SEQ ID NO: 1701290 - RNA, 19 nt, Artificial Sequence
  Description of Artificial Sequence: Synthetic oligonucleotide
gcaucucgaauuucacucu

SEQ ID NO: 1701291 - RNA, 19 nt, Artificial Sequence
  Description of Artificial Sequence: Synthetic oligonucleotide
ggcuguacgcaugaauucu

SEQ ID NO: 1701292 - RNA, 19 nt, Artificial Sequence
  Description of Artificial Sequence: Synthetic oligonucleotide
ccuguuuagcagcaagucu

SEQ ID NO: 1701293 - RNA, 19 nt, Artificial Sequence
  Description of Artificial Sequence: Synthetic oligonucleotide
acgcccacaccaaacgcuu

SEQ ID NO: 1701294 - RNA, 19 nt, Artificial Sequence
  Description of Artificial Sequence: Synthetic oligonucleotide
caaacgucuuauaguccau

SEQ ID NO: 1701295 - RNA, 19 nt, Artificial Sequence
  Description of Artificial Sequence: Synthetic oligonucleotide
cguagagagaaaacagaua

SEQ ID NO: 1701296 - RNA, 19 nt, Artificial Sequence
  Description of Artificial Sequence: Synthetic oligonucleotide
gaccaauccuuaggagaua

SEQ ID NO: 1701297 - RNA, 19 nt, Artificial Sequence
  Description of Artificial Sequence: Synthetic oligonucleotide
cuagguuuuccagcggcau

SEQ ID NO: 1701298 - RNA, 19 nt, Artificial Sequence
  Description of Artificial Sequence: Synthetic oligonucleotide
cuccgcugccuguuugaaa

SEQ ID NO: 1701299 - RNA, 19 nt, Artificial Sequence
  Description of Artificial Sequence: Synthetic oligonucleotide
cgaaacgcugucagagcuc

SEQ ID NO: 1701300 - RNA, 19 nt, Artificial Sequence
  Description of Artificial Sequence: Synthetic oligonucleotide
gaacccuguuuagcagcaa

SEQ ID NO: 1701301 - RNA, 19 nt, Artificial Sequence
  Description of Artificial Sequence: Synthetic oligonucleotide
caccgccgcguucccgcgg

SEQ ID NO: 1701302 - RNA, 19 nt, Artificial Sequence
  Description of Artificial Sequence: Synthetic oligonucleotide
cagcugcgcgaugcgcagg

SEQ ID NO: 1701303 - RNA, 19 nt, Artificial Sequence
  Description of Artificial Sequence: Synthetic oligonucleotide
cuggucuuucuaaggcaau

SEQ ID NO: 1701304 - RNA, 19 nt, Artificial Sequence
  Description of Artificial Sequence: Synthetic oligonucleotide
cgauaaugaggugcaaaga

SEQ ID NO: 1701305 - RNA, 19 nt, Artificial Sequence
  Description of Artificial Sequence: Synthetic oligonucleotide
ccuugucaccuaucagaca

SEQ ID NO: 1701306 - RNA, 19 nt, Artificial Sequence
  Description of Artificial Sequence: Synthetic oligonucleotide
cccuuacauaguaucgaua

SEQ ID NO: 1701307 - RNA, 19 nt, Artificial Sequence
  Description of Artificial Sequence: Synthetic oligonucleotide
ccaaggguuaaugaccuau

SEQ ID NO: 1701308 - RNA, 19 nt, Artificial Sequence
  Description of Artificial Sequence: Synthetic oligonucleotide
gcuaucaggucuguugguu

SEQ ID NO: 1701309 - RNA, 19 nt, Artificial Sequence
  Description of Artificial Sequence: Synthetic oligonucleotide
ccuaucagacagagguacu

SEQ ID NO: 1701310 - RNA, 19 nt, Artificial Sequence
  Description of Artificial Sequence: Synthetic oligonucleotide
cgcguucccgcggugcucg

SEQ ID NO: 1701311 - RNA, 19 nt, Artificial Sequence
  Description of Artificial Sequence: Synthetic oligonucleotide
cggaccgccgccaucagcu

SEQ ID NO: 1701312 - RNA, 19 nt, Artificial Sequence
  Description of Artificial Sequence: Synthetic oligonucleotide
ccggaccgccgccaucagc

SEQ ID NO: 1701313 - RNA, 19 nt, Artificial Sequence
  Description of Artificial Sequence: Synthetic oligonucleotide
ccgugucgagaaagagcuc

SEQ ID NO: 1701314 - RNA, 19 nt, Artificial Sequence
  Description of Artificial Sequence: Synthetic oligonucleotide
cccgcggugcucgggcagg

SEQ ID NO: 1701315 - RNA, 19 nt, Artificial Sequence
  Description of Artificial Sequence: Synthetic oligonucleotide
cugccagucgagggauuua

SEQ ID NO: 1701316 - RNA, 19 nt, Artificial Sequence
  Description of Artificial Sequence: Synthetic oligonucleotide
cguuucaacucuucuucau

SEQ ID NO: 1701317 - RNA, 19 nt, Artificial Sequence
  Description of Artificial Sequence: Synthetic oligonucleotide
gcgaugcgcaggucggggu

SEQ ID NO: 1701318 - RNA, 19 nt, Artificial Sequence
  Description of Artificial Sequence: Synthetic oligonucleotide
gcguucccgcggugcucgg

SEQ ID NO: 1701319 - RNA, 19 nt, Artificial Sequence
  Description of Artificial Sequence: Synthetic oligonucleotide
ccaaacgcuucugccauau

SEQ ID NO: 1701320 - RNA, 19 nt, Artificial Sequence
  Description of Artificial Sequence: Synthetic oligonucleotide
gguauacuuucagccuauu

SEQ ID NO: 1701321 - RNA, 19 nt, Artificial Sequence
  Description of Artificial Sequence: Synthetic oligonucleotide
ugcgcaggucgggguucuu

SEQ ID NO: 1701322 - RNA, 19 nt, Artificial Sequence
  Description of Artificial Sequence: Synthetic oligonucleotide
gccgcguucccgcggugcu

SEQ ID NO: 1701323 - RNA, 19 nt, Artificial Sequence
  Description of Artificial Sequence: Synthetic oligonucleotide
gcgcaccgccgcguucccg

SEQ ID NO: 1701324 - RNA, 19 nt, Artificial Sequence
  Description of Artificial Sequence: Synthetic oligonucleotide
cguucccgcggugcucggg

SEQ ID NO: 1701325 - RNA, 19 nt, Artificial Sequence
  Description of Artificial Sequence: Synthetic oligonucleotide
gcugcgcgaugcgcagguc

SEQ ID NO: 1701326 - RNA, 19 nt, Artificial Sequence
  Description of Artificial Sequence: Synthetic oligonucleotide
cggcauucguagagagaaa

SEQ ID NO: 1701327 - RNA, 19 nt, Artificial Sequence
  Description of Artificial Sequence: Synthetic oligonucleotide
ccgcguucccgcggugcuc

SEQ ID NO: 1701328 - RNA, 19 nt, Artificial Sequence
  Description of Artificial Sequence: Synthetic oligonucleotide
cgcgcaccgccgcguuccc

SEQ ID NO: 1701329 - RNA, 19 nt, Artificial Sequence
  Description of Artificial Sequence: Synthetic oligonucleotide
cgaugcgcaggucgggguu

SEQ ID NO: 1701330 - RNA, 19 nt, Artificial Sequence
  Description of Artificial Sequence: Synthetic oligonucleotide
ccgccgcguucccgcggug

SEQ ID NO: 1701331 - RNA, 19 nt, Artificial Sequence
  Description of Artificial Sequence: Synthetic oligonucleotide
uuuagaaaggaacugaagg

SEQ ID NO: 1701332 - RNA, 19 nt, Artificial Sequence
  Description of Artificial Sequence: Synthetic oligonucleotide
guaggaaugauuuagaaag

SEQ ID NO: 1701333 - RNA, 19 nt, Artificial Sequence
  Description of Artificial Sequence: Synthetic oligonucleotide
aauaucacacuucaugaug

SEQ ID NO: 1701334 - RNA, 19 nt, Artificial Sequence
  Description of Artificial Sequence: Synthetic oligonucleotide
aaaacaagguaacaaguca

SEQ ID NO: 1701335 - RNA, 19 nt, Artificial Sequence
  Description of Artificial Sequence: Synthetic oligonucleotide
gacauugugaguuacacca

SEQ ID NO: 1701336 - RNA, 19 nt, Artificial Sequence
  Description of Artificial Sequence: Synthetic oligonucleotide
aacaagucaaagcuuuggg

SEQ ID NO: 1701337 - RNA, 19 nt, Artificial Sequence
  Description of Artificial Sequence: Synthetic oligonucleotide
guuauaggugguuucaugg

SEQ ID NO: 1701338 - RNA, 19 nt, Artificial Sequence
  Description of Artificial Sequence: Synthetic oligonucleotide
ucaauaucacacuucauga

SEQ ID NO: 1701339 - RNA, 19 nt, Artificial Sequence
  Description of Artificial Sequence: Synthetic oligonucleotide
aaugauuuagaaaggaacu

SEQ ID NO: 1701340 - RNA, 19 nt, Artificial Sequence
  Description of Artificial Sequence: Synthetic oligonucleotide
aauagccacguucagucag

SEQ ID NO: 1701341 - RNA, 19 nt, Artificial Sequence
  Description of Artificial Sequence: Synthetic oligonucleotide
gauagagacgccaggaugg

SEQ ID NO: 1701342 - RNA, 19 nt, Artificial Sequence
  Description of Artificial Sequence: Synthetic oligonucleotide
ucuaucggguacuucaagg

SEQ ID NO: 1701343 - RNA, 19 nt, Artificial Sequence
  Description of Artificial Sequence: Synthetic oligonucleotide
aaagaugguuggaagaggg

SEQ ID NO: 1701344 - RNA, 19 nt, Artificial Sequence
  Description of Artificial Sequence: Synthetic oligonucleotide
ugcuucaucgcccacguag

SEQ ID NO: 1701345 - RNA, 19 nt, Artificial Sequence
  Description of Artificial Sequence: Synthetic oligonucleotide
aagucaaagcuuuggguag

SEQ ID NO: 1701346 - RNA, 19 nt, Artificial Sequence
  Description of Artificial Sequence: Synthetic oligonucleotide
auaccagccgacuccaucc

SEQ ID NO: 1701347 - RNA, 19 nt, Artificial Sequence
  Description of Artificial Sequence: Synthetic oligonucleotide
ugugaguuacaccaucucc

SEQ ID NO: 1701348 - RNA, 19 nt, Artificial Sequence
  Description of Artificial Sequence: Synthetic oligonucleotide
uccucuucuucacacauag

SEQ ID NO: 1701349 - RNA, 19 nt, Artificial Sequence
  Description of Artificial Sequence: Synthetic oligonucleotide
auggauaccagccgacucc

SEQ ID NO: 1701350 - RNA, 19 nt, Artificial Sequence
  Description of Artificial Sequence: Synthetic oligonucleotide
aaagcuuuggguaggaaug

SEQ ID NO: 1701351 - RNA, 19 nt, Artificial Sequence
  Description of Artificial Sequence: Synthetic oligonucleotide
gaagcguucauucccaaug

SEQ ID NO: 1701352 - RNA, 19 nt, Artificial Sequence
  Description of Artificial Sequence: Synthetic oligonucleotide
auaucacacuucaugaugc

SEQ ID NO: 1701353 - RNA, 19 nt, Artificial Sequence
  Description of Artificial Sequence: Synthetic oligonucleotide
acguuguuagcauagaggu

SEQ ID NO: 1701354 - RNA, 19 nt, Artificial Sequence
  Description of Artificial Sequence: Synthetic oligonucleotide
gauuccgugcucuaucggg

SEQ ID NO: 1701355 - RNA, 19 nt, Artificial Sequence
  Description of Artificial Sequence: Synthetic oligonucleotide
gacguuagaagcauuugcg

SEQ ID NO: 1701356 - RNA, 19 nt, Artificial Sequence
  Description of Artificial Sequence: Synthetic oligonucleotide
ugacguuagaagcauuugc

SEQ ID NO: 1701357 - RNA, 19 nt, Artificial Sequence
  Description of Artificial Sequence: Synthetic oligonucleotide
cuggaagguagauagagac

SEQ ID NO: 1701358 - RNA, 19 nt, Artificial Sequence
  Description of Artificial Sequence: Synthetic oligonucleotide
uaggaaugauuuagaaagg

SEQ ID NO: 1701359 - RNA, 19 nt, Artificial Sequence
  Description of Artificial Sequence: Synthetic oligonucleotide
agcuacguagcacagcuuc

SEQ ID NO: 1701360 - RNA, 19 nt, Artificial Sequence
  Description of Artificial Sequence: Synthetic oligonucleotide
aagcguucauucccaaugg

SEQ ID NO: 1701361 - RNA, 19 nt, Artificial Sequence
  Description of Artificial Sequence: Synthetic oligonucleotide
uuggaagagggucucgggg

SEQ ID NO: 1701362 - RNA, 19 nt, Artificial Sequence
  Description of Artificial Sequence: Synthetic oligonucleotide
cacacgaagcucauuauag

SEQ ID NO: 1701363 - RNA, 19 nt, Artificial Sequence
  Description of Artificial Sequence: Synthetic oligonucleotide
uuggguaggaaugauuuag

SEQ ID NO: 1701364 - RNA, 19 nt, Artificial Sequence
  Description of Artificial Sequence: Synthetic oligonucleotide
uggaagguagauagagacg

SEQ ID NO: 1701365 - RNA, 19 nt, Artificial Sequence
  Description of Artificial Sequence: Synthetic oligonucleotide
caguuguacguccagaggc

SEQ ID NO: 1701366 - RNA, 19 nt, Artificial Sequence
  Description of Artificial Sequence: Synthetic oligonucleotide
gaaaacagacccugggagc

SEQ ID NO: 1701367 - RNA, 19 nt, Artificial Sequence
  Description of Artificial Sequence: Synthetic oligonucleotide
ugauuuagaaaggaacuga

SEQ ID NO: 1701368 - RNA, 19 nt, Artificial Sequence
  Description of Artificial Sequence: Synthetic oligonucleotide
uuauagaaggaguggugcc

SEQ ID NO: 1701369 - RNA, 19 nt, Artificial Sequence
  Description of Artificial Sequence: Synthetic oligonucleotide
gcauaucccucauagaugg

SEQ ID NO: 1701370 - RNA, 19 nt, Artificial Sequence
  Description of Artificial Sequence: Synthetic oligonucleotide
agagcuacguagcacagcu

SEQ ID NO: 1701371 - RNA, 19 nt, Artificial Sequence
  Description of Artificial Sequence: Synthetic oligonucleotide
gacaaucucacgcucagca

SEQ ID NO: 1701372 - RNA, 19 nt, Artificial Sequence
  Description of Artificial Sequence: Synthetic oligonucleotide
uacacgggguuccugacag

SEQ ID NO: 1701373 - RNA, 19 nt, Artificial Sequence
  Description of Artificial Sequence: Synthetic oligonucleotide
acguuagaagcauuugcgg

SEQ ID NO: 1701374 - RNA, 19 nt, Artificial Sequence
  Description of Artificial Sequence: Synthetic oligonucleotide
ucacgaaggaauagccacg

SEQ ID NO: 1701375 - RNA, 19 nt, Artificial Sequence
  Description of Artificial Sequence: Synthetic oligonucleotide
agaaaggaacugaaggcgc

SEQ ID NO: 1701376 - RNA, 19 nt, Artificial Sequence
  Description of Artificial Sequence: Synthetic oligonucleotide
aaguccagagcuacguagc

SEQ ID NO: 1701377 - RNA, 19 nt, Artificial Sequence
  Description of Artificial Sequence: Synthetic oligonucleotide
acagucgugugcuggagac

SEQ ID NO: 1701378 - RNA, 19 nt, Artificial Sequence
  Description of Artificial Sequence: Synthetic oligonucleotide
aaacauucacagucgugug

SEQ ID NO: 1701379 - RNA, 19 nt, Artificial Sequence
  Description of Artificial Sequence: Synthetic oligonucleotide
uagucacgaaggaauagcc

SEQ ID NO: 1701380 - RNA, 19 nt, Artificial Sequence
  Description of Artificial Sequence: Synthetic oligonucleotide
agauagagacgccaggaug

SEQ ID NO: 1701381 - RNA, 19 nt, Artificial Sequence
  Description of Artificial Sequence: Synthetic oligonucleotide
ucauuauagaaggaguggu

SEQ ID NO: 1701382 - RNA, 19 nt, Artificial Sequence
  Description of Artificial Sequence: Synthetic oligonucleotide
uguuauaggugguuucaug

SEQ ID NO: 1701383 - RNA, 19 nt, Artificial Sequence
  Description of Artificial Sequence: Synthetic oligonucleotide
cacguugaagguuucaaac

SEQ ID NO: 1701384 - RNA, 19 nt, Artificial Sequence
  Description of Artificial Sequence: Synthetic oligonucleotide
uccagcacaauaccaguug

SEQ ID NO: 1701385 - RNA, 19 nt, Artificial Sequence
  Description of Artificial Sequence: Synthetic oligonucleotide
aaggcgcugaaccacaaaa

SEQ ID NO: 1701386 - RNA, 19 nt, Artificial Sequence
  Description of Artificial Sequence: Synthetic oligonucleotide
cucauuauagaaggagugg

SEQ ID NO: 1701387 - RNA, 19 nt, Artificial Sequence
  Description of Artificial Sequence: Synthetic oligonucleotide
agcaucaucaccagcaaag

SEQ ID NO: 1701388 - RNA, 19 nt, Artificial Sequence
  Description of Artificial Sequence: Synthetic oligonucleotide
augauuccgugcucuaucg

SEQ ID NO: 1701389 - RNA, 19 nt, Artificial Sequence
  Description of Artificial Sequence: Synthetic oligonucleotide
agaugguuggaagaggguc

SEQ ID NO: 1701390 - RNA, 19 nt, Artificial Sequence
  Description of Artificial Sequence: Synthetic oligonucleotide
ugaccugcccgucaggcag

SEQ ID NO: 1701391 - RNA, 19 nt, Artificial Sequence
  Description of Artificial Sequence: Synthetic oligonucleotide
uucaaaguccagagcuacg

SEQ ID NO: 1701392 - RNA, 19 nt, Artificial Sequence
  Description of Artificial Sequence: Synthetic oligonucleotide
acaagucaaagcuuugggu

SEQ ID NO: 1701393 - RNA, 19 nt, Artificial Sequence
  Description of Artificial Sequence: Synthetic oligonucleotide
agagacgccaggauggagc

SEQ ID NO: 1701394 - RNA, 19 nt, Artificial Sequence
  Description of Artificial Sequence: Synthetic oligonucleotide
ucugggacgucccacgaug

SEQ ID NO: 1701395 - RNA, 19 nt, Artificial Sequence
  Description of Artificial Sequence: Synthetic oligonucleotide
uuauaggugguuucaugga

SEQ ID NO: 1701396 - RNA, 19 nt, Artificial Sequence
  Description of Artificial Sequence: Synthetic oligonucleotide
ggaaaacagacccugggag

SEQ ID NO: 1701397 - RNA, 19 nt, Artificial Sequence
  Description of Artificial Sequence: Synthetic oligonucleotide
agcuuuacagagcccagag

SEQ ID NO: 1701398 - RNA, 19 nt, Artificial Sequence
  Description of Artificial Sequence: Synthetic oligonucleotide
cauuauagaaggaguggug

SEQ ID NO: 1701399 - RNA, 19 nt, Artificial Sequence
  Description of Artificial Sequence: Synthetic oligonucleotide
gaugggagggaccagcuuc

SEQ ID NO: 1701400 - RNA, 19 nt, Artificial Sequence
  Description of Artificial Sequence: Synthetic oligonucleotide
auuugcgguggacggaugg

SEQ ID NO: 1701401 - RNA, 19 nt, Artificial Sequence
  Description of Artificial Sequence: Synthetic oligonucleotide
ugagaucucggccagccaa

SEQ ID NO: 1701402 - RNA, 19 nt, Artificial Sequence
  Description of Artificial Sequence: Synthetic oligonucleotide
accaguuguacguccagag

SEQ ID NO: 1701403 - RNA, 19 nt, Artificial Sequence
  Description of Artificial Sequence: Synthetic oligonucleotide
aaacaagguaacaagucaa

SEQ ID NO: 1701404 - RNA, 19 nt, Artificial Sequence
  Description of Artificial Sequence: Synthetic oligonucleotide
agacagaguauuugcgcuc

SEQ ID NO: 1701405 - RNA, 19 nt, Artificial Sequence
  Description of Artificial Sequence: Synthetic oligonucleotide
ggaauagccacguucaguc

SEQ ID NO: 1701406 - RNA, 19 nt, Artificial Sequence
  Description of Artificial Sequence: Synthetic oligonucleotide
uuucaaaguccagagcuac

SEQ ID NO: 1701407 - RNA, 19 nt, Artificial Sequence
  Description of Artificial Sequence: Synthetic oligonucleotide
uccuugaugucucggacaa

SEQ ID NO: 1701408 - RNA, 19 nt, Artificial Sequence
  Description of Artificial Sequence: Synthetic oligonucleotide
auuacucccugaugucugg

SEQ ID NO: 1701409 - RNA, 19 nt, Artificial Sequence
  Description of Artificial Sequence: Synthetic oligonucleotide
aagguagauagagacgcca

SEQ ID NO: 1701410 - RNA, 19 nt, Artificial Sequence
  Description of Artificial Sequence: Synthetic oligonucleotide
acaaaacauucacagucgu

SEQ ID NO: 1701411 - RNA, 19 nt, Artificial Sequence
  Description of Artificial Sequence: Synthetic oligonucleotide
gagccauugucacacacca

SEQ ID NO: 1701412 - RNA, 19 nt, Artificial Sequence
  Description of Artificial Sequence: Synthetic oligonucleotide
agagccauugucacacacc

SEQ ID NO: 1701413 - RNA, 19 nt, Artificial Sequence
  Description of Artificial Sequence: Synthetic oligonucleotide
acaagguaacaagucaaag

SEQ ID NO: 1701414 - RNA, 19 nt, Artificial Sequence
  Description of Artificial Sequence: Synthetic oligonucleotide
uuccugaugucaauaucac

SEQ ID NO: 1701415 - RNA, 19 nt, Artificial Sequence
  Description of Artificial Sequence: Synthetic oligonucleotide
ucaucgcccacguagcugu

SEQ ID NO: 1701416 - RNA, 19 nt, Artificial Sequence
  Description of Artificial Sequence: Synthetic oligonucleotide
accauuacucccugauguc

SEQ ID NO: 1701417 - RNA, 19 nt, Artificial Sequence
  Description of Artificial Sequence: Synthetic oligonucleotide
ugauuccgugcucuaucgg

SEQ ID NO: 1701418 - RNA, 19 nt, Artificial Sequence
  Description of Artificial Sequence: Synthetic oligonucleotide
uaggugguuucauggauac

SEQ ID NO: 1701419 - RNA, 19 nt, Artificial Sequence
  Description of Artificial Sequence: Synthetic oligonucleotide
caagucaaagcuuugggua

SEQ ID NO: 1701420 - RNA, 19 nt, Artificial Sequence
  Description of Artificial Sequence: Synthetic oligonucleotide
guagucacgaaggaauagc

SEQ ID NO: 1701421 - RNA, 19 nt, Artificial Sequence
  Description of Artificial Sequence: Synthetic oligonucleotide
caauaccaguuguacgucc

SEQ ID NO: 1701422 - RNA, 19 nt, Artificial Sequence
  Description of Artificial Sequence: Synthetic oligonucleotide
gguuucauggauaccagcc

SEQ ID NO: 1701423 - RNA, 19 nt, Artificial Sequence
  Description of Artificial Sequence: Synthetic oligonucleotide
agucgugugcuggagacag

SEQ ID NO: 1701424 - RNA, 19 nt, Artificial Sequence
  Description of Artificial Sequence: Synthetic oligonucleotide
cauuacucccugaugucug

SEQ ID NO: 1701425 - RNA, 19 nt, Artificial Sequence
  Description of Artificial Sequence: Synthetic oligonucleotide
gaggacguuguuagcauag

SEQ ID NO: 1701426 - RNA, 19 nt, Artificial Sequence
  Description of Artificial Sequence: Synthetic oligonucleotide
guuggaagagggucucggg

SEQ ID NO: 1701427 - RNA, 19 nt, Artificial Sequence
  Description of Artificial Sequence: Synthetic oligonucleotide
auaaucugggucauuuucu

SEQ ID NO: 1701428 - RNA, 19 nt, Artificial Sequence
  Description of Artificial Sequence: Synthetic oligonucleotide
aagacgaggaggcggcagu

SEQ ID NO: 1701429 - RNA, 19 nt, Artificial Sequence
  Description of Artificial Sequence: Synthetic oligonucleotide
uagucggugagaucucggc

SEQ ID NO: 1701430 - RNA, 19 nt, Artificial Sequence
  Description of Artificial Sequence: Synthetic oligonucleotide
uucauggauaccagccgac

SEQ ID NO: 1701431 - RNA, 19 nt, Artificial Sequence
  Description of Artificial Sequence: Synthetic oligonucleotide
gguagauagagacgccagg

SEQ ID NO: 1701432 - RNA, 19 nt, Artificial Sequence
  Description of Artificial Sequence: Synthetic oligonucleotide
gagguagucggugagaucu

SEQ ID NO: 1701433 - RNA, 19 nt, Artificial Sequence
  Description of Artificial Sequence: Synthetic oligonucleotide
cauucccaccauuacuccc

SEQ ID NO: 1701434 - RNA, 19 nt, Artificial Sequence
  Description of Artificial Sequence: Synthetic oligonucleotide
ucgugugcuggagacagag

SEQ ID NO: 1701435 - RNA, 19 nt, Artificial Sequence
  Description of Artificial Sequence: Synthetic oligonucleotide
cacaauaccaguuguacgu

SEQ ID NO: 1701436 - RNA, 19 nt, Artificial Sequence
  Description of Artificial Sequence: Synthetic oligonucleotide
cccaaugaaagaugguugg

SEQ ID NO: 1701437 - RNA, 19 nt, Artificial Sequence
  Description of Artificial Sequence: Synthetic oligonucleotide
acauucacagucgugugcu

SEQ ID NO: 1701438 - RNA, 19 nt, Artificial Sequence
  Description of Artificial Sequence: Synthetic oligonucleotide
uagauagagacgccaggau

SEQ ID NO: 1701439 - RNA, 19 nt, Artificial Sequence
  Description of Artificial Sequence: Synthetic oligonucleotide
gacgucccacgauggaugg

SEQ ID NO: 1701440 - RNA, 19 nt, Artificial Sequence
  Description of Artificial Sequence: Synthetic oligonucleotide
gggaggugacguuagaagc

SEQ ID NO: 1701441 - RNA, 19 nt, Artificial Sequence
  Description of Artificial Sequence: Synthetic oligonucleotide
gauaccagccgacuccauc

SEQ ID NO: 1701442 - RNA, 19 nt, Artificial Sequence
  Description of Artificial Sequence: Synthetic oligonucleotide
ugguuucauggauaccagc

SEQ ID NO: 1701443 - RNA, 19 nt, Artificial Sequence
  Description of Artificial Sequence: Synthetic oligonucleotide
ucggacaaucucacgcuca

SEQ ID NO: 1701444 - RNA, 19 nt, Artificial Sequence
  Description of Artificial Sequence: Synthetic oligonucleotide
uugaugucucggacaaucu

SEQ ID NO: 1701445 - RNA, 19 nt, Artificial Sequence
  Description of Artificial Sequence: Synthetic oligonucleotide
ggugguuucauggauacca

SEQ ID NO: 1701446 - RNA, 19 nt, Artificial Sequence
  Description of Artificial Sequence: Synthetic oligonucleotide
gagacgccaggauggagcc

SEQ ID NO: 1701447 - RNA, 19 nt, Artificial Sequence
  Description of Artificial Sequence: Synthetic oligonucleotide
ucuucacacauagcuggag

SEQ ID NO: 1701448 - RNA, 19 nt, Artificial Sequence
  Description of Artificial Sequence: Synthetic oligonucleotide
uugugaguuacaccaucuc

SEQ ID NO: 1701449 - RNA, 19 nt, Artificial Sequence
  Description of Artificial Sequence: Synthetic oligonucleotide
uucuucacacauagcugga

SEQ ID NO: 1701450 - RNA, 19 nt, Artificial Sequence
  Description of Artificial Sequence: Synthetic oligonucleotide
uuugcgguggacggauggg

SEQ ID NO: 1701451 - RNA, 19 nt, Artificial Sequence
  Description of Artificial Sequence: Synthetic oligonucleotide
cauugugaguuacaccauc

SEQ ID NO: 1701452 - RNA, 19 nt, Artificial Sequence
  Description of Artificial Sequence: Synthetic oligonucleotide
gcacaauaccaguuguacg

SEQ ID NO: 1701453 - RNA, 19 nt, Artificial Sequence
  Description of Artificial Sequence: Synthetic oligonucleotide
ugcgguggacggaugggag

SEQ ID NO: 1701454 - RNA, 19 nt, Artificial Sequence
  Description of Artificial Sequence: Synthetic oligonucleotide
acauacauggcaggcacgu

SEQ ID NO: 1701455 - RNA, 19 nt, Artificial Sequence
  Description of Artificial Sequence: Synthetic oligonucleotide
acggaugggagggaccagc

SEQ ID NO: 1701456 - RNA, 19 nt, Artificial Sequence
  Description of Artificial Sequence: Synthetic oligonucleotide
guagauagagacgccagga

SEQ ID NO: 1701457 - RNA, 19 nt, Artificial Sequence
  Description of Artificial Sequence: Synthetic oligonucleotide
agcucauuauagaaggagu

SEQ ID NO: 1701458 - RNA, 19 nt, Artificial Sequence
  Description of Artificial Sequence: Synthetic oligonucleotide
acuccaucccaaugaaaga

SEQ ID NO: 1701459 - RNA, 19 nt, Artificial Sequence
  Description of Artificial Sequence: Synthetic oligonucleotide
uaucacacuucaugaugcu

SEQ ID NO: 1701460 - RNA, 19 nt, Artificial Sequence
  Description of Artificial Sequence: Synthetic oligonucleotide
gccacguucagucaggauc

SEQ ID NO: 1701461 - RNA, 19 nt, Artificial Sequence
  Description of Artificial Sequence: Synthetic oligonucleotide
aacagacccugggagcauc

SEQ ID NO: 1701462 - RNA, 19 nt, Artificial Sequence
  Description of Artificial Sequence: Synthetic oligonucleotide
ugucucggacaaucucacg

SEQ ID NO: 1701463 - RNA, 19 nt, Artificial Sequence
  Description of Artificial Sequence: Synthetic oligonucleotide
auaccaguuguacguccag

SEQ ID NO: 1701464 - RNA, 19 nt, Artificial Sequence
  Description of Artificial Sequence: Synthetic oligonucleotide
ucggugagaucucggccag

SEQ ID NO: 1701465 - RNA, 19 nt, Artificial Sequence
  Description of Artificial Sequence: Synthetic oligonucleotide
uuuggguaggaaugauuua

SEQ ID NO: 1701466 - RNA, 19 nt, Artificial Sequence
  Description of Artificial Sequence: Synthetic oligonucleotide
ggggaggugacguuagaag

SEQ ID NO: 1701467 - RNA, 19 nt, Artificial Sequence
  Description of Artificial Sequence: Synthetic oligonucleotide
gucggugagaucucggcca

SEQ ID NO: 1701468 - RNA, 19 nt, Artificial Sequence
  Description of Artificial Sequence: Synthetic oligonucleotide
gguaggaaugauuuagaaa

SEQ ID NO: 1701469 - RNA, 19 nt, Artificial Sequence
  Description of Artificial Sequence: Synthetic oligonucleotide
cacgaagcucauuauagaa

SEQ ID NO: 1701470 - RNA, 19 nt, Artificial Sequence
  Description of Artificial Sequence: Synthetic oligonucleotide
cauggauaccagccgacuc

SEQ ID NO: 1701471 - RNA, 19 nt, Artificial Sequence
  Description of Artificial Sequence: Synthetic oligonucleotide
cucacgcucagcaguaguc

SEQ ID NO: 1701472 - RNA, 19 nt, Artificial Sequence
  Description of Artificial Sequence: Synthetic oligonucleotide
cacauacauggcaggcacg

SEQ ID NO: 1701473 - RNA, 19 nt, Artificial Sequence
  Description of Artificial Sequence: Synthetic oligonucleotide
ucucacgcucagcaguagu

SEQ ID NO: 1701474 - RNA, 19 nt, Artificial Sequence
  Description of Artificial Sequence: Synthetic oligonucleotide
gcucauuauagaaggagug

SEQ ID NO: 1701475 - RNA, 19 nt, Artificial Sequence
  Description of Artificial Sequence: Synthetic oligonucleotide
cuuuggguaggaaugauuu

SEQ ID NO: 1701476 - RNA, 19 nt, Artificial Sequence
  Description of Artificial Sequence: Synthetic oligonucleotide
gaagguagauagagacgcc

SEQ ID NO: 1701477 - RNA, 19 nt, Artificial Sequence
  Description of Artificial Sequence: Synthetic oligonucleotide
uuacagagcccagagccau

SEQ ID NO: 1701478 - RNA, 19 nt, Artificial Sequence
  Description of Artificial Sequence: Synthetic oligonucleotide
aggcgcugaaccacaaaac

SEQ ID NO: 1701479 - RNA, 19 nt, Artificial Sequence
  Description of Artificial Sequence: Synthetic oligonucleotide
agguagauagagacgccag

SEQ ID NO: 1701480 - RNA, 19 nt, Artificial Sequence
  Description of Artificial Sequence: Synthetic oligonucleotide
cauaucccucauagauggg

SEQ ID NO: 1701481 - RNA, 19 nt, Artificial Sequence
  Description of Artificial Sequence: Synthetic oligonucleotide
aggaauagccacguucagu

SEQ ID NO: 1701482 - RNA, 19 nt, Artificial Sequence
  Description of Artificial Sequence: Synthetic oligonucleotide
gauggggacauugugaguu

SEQ ID NO: 1701483 - RNA, 19 nt, Artificial Sequence
  Description of Artificial Sequence: Synthetic oligonucleotide
cugugcuucaucgcccacg

SEQ ID NO: 1701484 - RNA, 19 nt, Artificial Sequence
  Description of Artificial Sequence: Synthetic oligonucleotide
cucuaucggguacuucaag

SEQ ID NO: 1701485 - RNA, 19 nt, Artificial Sequence
  Description of Artificial Sequence: Synthetic oligonucleotide
cugggacgucccacgaugg

SEQ ID NO: 1701486 - RNA, 19 nt, Artificial Sequence
  Description of Artificial Sequence: Synthetic oligonucleotide
augguuggaagagggucuc

SEQ ID NO: 1701487 - RNA, 19 nt, Artificial Sequence
  Description of Artificial Sequence: Synthetic oligonucleotide
uggacggaugggagggacc

SEQ ID NO: 1701488 - RNA, 19 nt, Artificial Sequence
  Description of Artificial Sequence: Synthetic oligonucleotide
ucauggauaccagccgacu

SEQ ID NO: 1701489 - RNA, 19 nt, Artificial Sequence
  Description of Artificial Sequence: Synthetic oligonucleotide
aagaugguuggaagagggu

SEQ ID NO: 1701490 - RNA, 19 nt, Artificial Sequence
  Description of Artificial Sequence: Synthetic oligonucleotide
caccauuacucccugaugu

SEQ ID NO: 1701491 - RNA, 19 nt, Artificial Sequence
  Description of Artificial Sequence: Synthetic oligonucleotide
uggauaccagccgacucca

SEQ ID NO: 1701492 - RNA, 19 nt, Artificial Sequence
  Description of Artificial Sequence: Synthetic oligonucleotide
ucauuuucucccgguuggc

SEQ ID NO: 1701493 - RNA, 19 nt, Artificial Sequence
  Description of Artificial Sequence: Synthetic oligonucleotide
ugucugggacgucccacga

SEQ ID NO: 1701494 - RNA, 19 nt, Artificial Sequence
  Description of Artificial Sequence: Synthetic oligonucleotide
aguuguacguccagaggca

SEQ ID NO: 1701495 - RNA, 19 nt, Artificial Sequence
  Description of Artificial Sequence: Synthetic oligonucleotide
gguuggaagagggucucgg

SEQ ID NO: 1701496 - RNA, 19 nt, Artificial Sequence
  Description of Artificial Sequence: Synthetic oligonucleotide
caaugaaagaugguuggaa

SEQ ID NO: 1701497 - RNA, 19 nt, Artificial Sequence
  Description of Artificial Sequence: Synthetic oligonucleotide
cccauucccaccauuacuc

SEQ ID NO: 1701498 - RNA, 19 nt, Artificial Sequence
  Description of Artificial Sequence: Synthetic oligonucleotide
ggcgcugaaccacaaaaca

SEQ ID NO: 1701499 - RNA, 19 nt, Artificial Sequence
  Description of Artificial Sequence: Synthetic oligonucleotide
uugcucugugcuucaucgc

SEQ ID NO: 1701500 - RNA, 19 nt, Artificial Sequence
  Description of Artificial Sequence: Synthetic oligonucleotide
gacgccaggauggagccuc

SEQ ID NO: 1701501 - RNA, 19 nt, Artificial Sequence
  Description of Artificial Sequence: Synthetic oligonucleotide
agcguucauucccaauggu

SEQ ID NO: 1701502 - RNA, 19 nt, Artificial Sequence
  Description of Artificial Sequence: Synthetic oligonucleotide
cugaaccacaaaacauuca

SEQ ID NO: 1701503 - RNA, 19 nt, Artificial Sequence
  Description of Artificial Sequence: Synthetic oligonucleotide
gaugguuggaagagggucu

SEQ ID NO: 1701504 - RNA, 19 nt, Artificial Sequence
  Description of Artificial Sequence: Synthetic oligonucleotide
guagucggugagaucucgg

SEQ ID NO: 1701505 - RNA, 19 nt, Artificial Sequence
  Description of Artificial Sequence: Synthetic oligonucleotide
gugacguuagaagcauuug

SEQ ID NO: 1701506 - RNA, 19 nt, Artificial Sequence
  Description of Artificial Sequence: Synthetic oligonucleotide
augagguagucggugagau

SEQ ID NO: 1701507 - RNA, 19 nt, Artificial Sequence
  Description of Artificial Sequence: Synthetic oligonucleotide
augggaaaacagacccugg

SEQ ID NO: 1701508 - RNA, 19 nt, Artificial Sequence
  Description of Artificial Sequence: Synthetic oligonucleotide
agggucucggggcagcgga

SEQ ID NO: 1701509 - RNA, 19 nt, Artificial Sequence
  Description of Artificial Sequence: Synthetic oligonucleotide
agucacgaaggaauagcca

SEQ ID NO: 1701510 - RNA, 19 nt, Artificial Sequence
  Description of Artificial Sequence: Synthetic oligonucleotide
gugguuucauggauaccag

SEQ ID NO: 1701511 - RNA, 19 nt, Artificial Sequence
  Description of Artificial Sequence: Synthetic oligonucleotide
uggccaucucauuuucaaa

SEQ ID NO: 1701512 - RNA, 19 nt, Artificial Sequence
  Description of Artificial Sequence: Synthetic oligonucleotide
uaccaguuguacguccaga

SEQ ID NO: 1701513 - RNA, 19 nt, Artificial Sequence
  Description of Artificial Sequence: Synthetic oligonucleotide
gggacauugugaguuacac

SEQ ID NO: 1701514 - RNA, 19 nt, Artificial Sequence
  Description of Artificial Sequence: Synthetic oligonucleotide
cuaucggguacuucaaggu

SEQ ID NO: 1701515 - RNA, 19 nt, Artificial Sequence
  Description of Artificial Sequence: Synthetic oligonucleotide
ggcauaucccucauagaug

SEQ ID NO: 1701516 - RNA, 19 nt, Artificial Sequence
  Description of Artificial Sequence: Synthetic oligonucleotide
ugaugauuccgugcucuau

SEQ ID NO: 1701517 - RNA, 19 nt, Artificial Sequence
  Description of Artificial Sequence: Synthetic oligonucleotide
gggaaaacagacccuggga

SEQ ID NO: 1701518 - RNA, 19 nt, Artificial Sequence
  Description of Artificial Sequence: Synthetic oligonucleotide
agcaguagucacgaaggaa

SEQ ID NO: 1701519 - RNA, 19 nt, Artificial Sequence
  Description of Artificial Sequence: Synthetic oligonucleotide
aggugguuucauggauacc

SEQ ID NO: 1701520 - RNA, 19 nt, Artificial Sequence
  Description of Artificial Sequence: Synthetic oligonucleotide
gcagcggaagcguucauuc

SEQ ID NO: 1701521 - RNA, 19 nt, Artificial Sequence
  Description of Artificial Sequence: Synthetic oligonucleotide
cgaaggaauagccacguuc

SEQ ID NO: 1701522 - RNA, 19 nt, Artificial Sequence
  Description of Artificial Sequence: Synthetic oligonucleotide
ucacagucgugugcuggag

SEQ ID NO: 1701523 - RNA, 19 nt, Artificial Sequence
  Description of Artificial Sequence: Synthetic oligonucleotide
cagcggaagcguucauucc

SEQ ID NO: 1701524 - RNA, 19 nt, Artificial Sequence
  Description of Artificial Sequence: Synthetic oligonucleotide
cacgggguuccugacagug

SEQ ID NO: 1701525 - RNA, 19 nt, Artificial Sequence
  Description of Artificial Sequence: Synthetic oligonucleotide
cuacguagcacagcuucuc

SEQ ID NO: 1701526 - RNA, 19 nt, Artificial Sequence
  Description of Artificial Sequence: Synthetic oligonucleotide
ccacauacauggcaggcac

SEQ ID NO: 1701527 - RNA, 19 nt, Artificial Sequence
  Description of Artificial Sequence: Synthetic oligonucleotide
ugggacgucccacgaugga

SEQ ID NO: 1701528 - RNA, 19 nt, Artificial Sequence
  Description of Artificial Sequence: Synthetic oligonucleotide
ggaaugauuuagaaaggaa

SEQ ID NO: 1701529 - RNA, 19 nt, Artificial Sequence
  Description of Artificial Sequence: Synthetic oligonucleotide
gguagucggugagaucucg

SEQ ID NO: 1701530 - RNA, 19 nt, Artificial Sequence
  Description of Artificial Sequence: Synthetic oligonucleotide
agauggggacauugugagu

SEQ ID NO: 1701531 - RNA, 19 nt, Artificial Sequence
  Description of Artificial Sequence: Synthetic oligonucleotide
ugguuggaagagggucucg

SEQ ID NO: 1701532 - RNA, 19 nt, Artificial Sequence
  Description of Artificial Sequence: Synthetic oligonucleotide
uugcgguggacggauggga

SEQ ID NO: 1701533 - RNA, 19 nt, Artificial Sequence
  Description of Artificial Sequence: Synthetic oligonucleotide
acguucagucaggaucuuc

SEQ ID NO: 1701534 - RNA, 19 nt, Artificial Sequence
  Description of Artificial Sequence: Synthetic oligonucleotide
agaggacguuguuagcaua

SEQ ID NO: 1701535 - RNA, 19 nt, Artificial Sequence
  Description of Artificial Sequence: Synthetic oligonucleotide
cucggacaaucucacgcuc

SEQ ID NO: 1701536 - RNA, 19 nt, Artificial Sequence
  Description of Artificial Sequence: Synthetic oligonucleotide
uagagacgccaggauggag

SEQ ID NO: 1701537 - RNA, 19 nt, Artificial Sequence
  Description of Artificial Sequence: Synthetic oligonucleotide
uuguacguccagaggcaua

SEQ ID NO: 1701538 - RNA, 19 nt, Artificial Sequence
  Description of Artificial Sequence: Synthetic oligonucleotide
cguucauucccaaugguga

SEQ ID NO: 1701539 - RNA, 19 nt, Artificial Sequence
  Description of Artificial Sequence: Synthetic oligonucleotide
gggcauaucccucauagau

SEQ ID NO: 1701540 - RNA, 19 nt, Artificial Sequence
  Description of Artificial Sequence: Synthetic oligonucleotide
auaggugguuucauggaua

SEQ ID NO: 1701541 - RNA, 19 nt, Artificial Sequence
  Description of Artificial Sequence: Synthetic oligonucleotide
acgcucagcaguagucacg

SEQ ID NO: 1701542 - RNA, 19 nt, Artificial Sequence
  Description of Artificial Sequence: Synthetic oligonucleotide
ugucacacaccagggcggu

SEQ ID NO: 1701543 - RNA, 19 nt, Artificial Sequence
  Description of Artificial Sequence: Synthetic oligonucleotide
acagaguauuugcgcucug

SEQ ID NO: 1701544 - RNA, 19 nt, Artificial Sequence
  Description of Artificial Sequence: Synthetic oligonucleotide
agccgacuccaucccaaug

SEQ ID NO: 1701545 - RNA, 19 nt, Artificial Sequence
  Description of Artificial Sequence: Synthetic oligonucleotide
gcugaaccacaaaacauuc

SEQ ID NO: 1701546 - RNA, 19 nt, Artificial Sequence
  Description of Artificial Sequence: Synthetic oligonucleotide
ugcugggcgcaagagcugu

SEQ ID NO: 1701547 - RNA, 19 nt, Artificial Sequence
  Description of Artificial Sequence: Synthetic oligonucleotide
cugaaggcgcugaaccaca

SEQ ID NO: 1701548 - RNA, 19 nt, Artificial Sequence
  Description of Artificial Sequence: Synthetic oligonucleotide
uggugaugauuccgugcuc

SEQ ID NO: 1701549 - RNA, 19 nt, Artificial Sequence
  Description of Artificial Sequence: Synthetic oligonucleotide
uggggacauugugaguuac

SEQ ID NO: 1701550 - RNA, 19 nt, Artificial Sequence
  Description of Artificial Sequence: Synthetic oligonucleotide
ugucagcaggguggggugc

SEQ ID NO: 1701551 - RNA, 19 nt, Artificial Sequence
  Description of Artificial Sequence: Synthetic oligonucleotide
gcguucauucccaauggug

SEQ ID NO: 1701552 - RNA, 19 nt, Artificial Sequence
  Description of Artificial Sequence: Synthetic oligonucleotide
ggguaggaaugauuuagaa

SEQ ID NO: 1701553 - RNA, 19 nt, Artificial Sequence
  Description of Artificial Sequence: Synthetic oligonucleotide
cagagcaggggaggugacg

SEQ ID NO: 1701554 - RNA, 19 nt, Artificial Sequence
  Description of Artificial Sequence: Synthetic oligonucleotide
aggaacugaaggcgcugaa

SEQ ID NO: 1701555 - RNA, 19 nt, Artificial Sequence
  Description of Artificial Sequence: Synthetic oligonucleotide
cagagcuacguagcacagc

SEQ ID NO: 1701556 - RNA, 19 nt, Artificial Sequence
  Description of Artificial Sequence: Synthetic oligonucleotide
gagaggacguuguuagcau

SEQ ID NO: 1701557 - RNA, 19 nt, Artificial Sequence
  Description of Artificial Sequence: Synthetic oligonucleotide
uuccgugcucuaucgggua

SEQ ID NO: 1701558 - RNA, 19 nt, Artificial Sequence
  Description of Artificial Sequence: Synthetic oligonucleotide
gccagcuuuacagagccca

SEQ ID NO: 1701559 - RNA, 19 nt, Artificial Sequence
  Description of Artificial Sequence: Synthetic oligonucleotide
ugggcgcaagagcugugau

SEQ ID NO: 1701560 - RNA, 19 nt, Artificial Sequence
  Description of Artificial Sequence: Synthetic oligonucleotide
gggaagacgaggaggcggc

SEQ ID NO: 1701561 - RNA, 19 nt, Artificial Sequence
  Description of Artificial Sequence: Synthetic oligonucleotide
caguggccaucucauuuuc

SEQ ID NO: 1701562 - RNA, 19 nt, Artificial Sequence
  Description of Artificial Sequence: Synthetic oligonucleotide
ccauucccaccauuacucc

SEQ ID NO: 1701563 - RNA, 19 nt, Artificial Sequence
  Description of Artificial Sequence: Synthetic oligonucleotide
ggacgucccacgauggaug

SEQ ID NO: 1701564 - RNA, 19 nt, Artificial Sequence
  Description of Artificial Sequence: Synthetic oligonucleotide
guucauucccaauggugau

SEQ ID NO: 1701565 - RNA, 19 nt, Artificial Sequence
  Description of Artificial Sequence: Synthetic oligonucleotide
gcuucaucgcccacguagc

SEQ ID NO: 1701566 - RNA, 19 nt, Artificial Sequence
  Description of Artificial Sequence: Synthetic oligonucleotide
aggggaggugacguuagaa

SEQ ID NO: 1701567 - RNA, 19 nt, Artificial Sequence
  Description of Artificial Sequence: Synthetic oligonucleotide
caguagucacgaaggaaua

SEQ ID NO: 1701568 - RNA, 19 nt, Artificial Sequence
  Description of Artificial Sequence: Synthetic oligonucleotide
gcgguggacggaugggagg

SEQ ID NO: 1701569 - RNA, 19 nt, Artificial Sequence
  Description of Artificial Sequence: Synthetic oligonucleotide
cguucagucaggaucuuca

SEQ ID NO: 1701570 - RNA, 19 nt, Artificial Sequence
  Description of Artificial Sequence: Synthetic oligonucleotide
cauuugcgguggacggaug

SEQ ID NO: 1701571 - RNA, 19 nt, Artificial Sequence
  Description of Artificial Sequence: Synthetic oligonucleotide
augcuguuauaggugguuu

SEQ ID NO: 1701572 - RNA, 19 nt, Artificial Sequence
  Description of Artificial Sequence: Synthetic oligonucleotide
cacguagcugucuuucugu

SEQ ID NO: 1701573 - RNA, 19 nt, Artificial Sequence
  Description of Artificial Sequence: Synthetic oligonucleotide
gaugcuguuauaggugguu

SEQ ID NO: 1701574 - RNA, 19 nt, Artificial Sequence
  Description of Artificial Sequence: Synthetic oligonucleotide
auggggacauugugaguua

SEQ ID NO: 1701575 - RNA, 19 nt, Artificial Sequence
  Description of Artificial Sequence: Synthetic oligonucleotide
agacgaggaggcggcagug

SEQ ID NO: 1701576 - RNA, 19 nt, Artificial Sequence
  Description of Artificial Sequence: Synthetic oligonucleotide
guccagagcuacguagcac

SEQ ID NO: 1701577 - RNA, 19 nt, Artificial Sequence
  Description of Artificial Sequence: Synthetic oligonucleotide
gagggucucggggcagcgg

SEQ ID NO: 1701578 - RNA, 19 nt, Artificial Sequence
  Description of Artificial Sequence: Synthetic oligonucleotide
acauugugaguuacaccau

SEQ ID NO: 1701579 - RNA, 19 nt, Artificial Sequence
  Description of Artificial Sequence: Synthetic oligonucleotide
accagccgacuccauccca

SEQ ID NO: 1701580 - RNA, 19 nt, Artificial Sequence
  Description of Artificial Sequence: Synthetic oligonucleotide
agguagucggugagaucuc

SEQ ID NO: 1701581 - RNA, 19 nt, Artificial Sequence
  Description of Artificial Sequence: Synthetic oligonucleotide
acaccagggcggugcuguc

SEQ ID NO: 1701582 - RNA, 19 nt, Artificial Sequence
  Description of Artificial Sequence: Synthetic oligonucleotide
cuacacgggguuccugaca

SEQ ID NO: 1701583 - RNA, 19 nt, Artificial Sequence
  Description of Artificial Sequence: Synthetic oligonucleotide
aucucacgcucagcaguag

SEQ ID NO: 1701584 - RNA, 19 nt, Artificial Sequence
  Description of Artificial Sequence: Synthetic oligonucleotide
agcaggggaggugacguua

SEQ ID NO: 1701585 - RNA, 19 nt, Artificial Sequence
  Description of Artificial Sequence: Synthetic oligonucleotide
cacagucgugugcuggaga

SEQ ID NO: 1701586 - RNA, 19 nt, Artificial Sequence
  Description of Artificial Sequence: Synthetic oligonucleotide
cagcaguagucacgaagga

SEQ ID NO: 1701587 - RNA, 19 nt, Artificial Sequence
  Description of Artificial Sequence: Synthetic oligonucleotide
ggugaugauuccgugcucu

SEQ ID NO: 1701588 - RNA, 19 nt, Artificial Sequence
  Description of Artificial Sequence: Synthetic oligonucleotide
cuccaucccaaugaaagau

SEQ ID NO: 1701589 - RNA, 19 nt, Artificial Sequence
  Description of Artificial Sequence: Synthetic oligonucleotide
gacggaugggagggaccag

SEQ ID NO: 1701590 - RNA, 19 nt, Artificial Sequence
  Description of Artificial Sequence: Synthetic oligonucleotide
gcacguugaagguuucaaa

SEQ ID NO: 1701591 - RNA, 19 nt, Artificial Sequence
  Description of Artificial Sequence: Synthetic oligonucleotide
ugacagugacgggcugggc

SEQ ID NO: 1701592 - RNA, 19 nt, Artificial Sequence
  Description of Artificial Sequence: Synthetic oligonucleotide
cgcaagagcugugauuucc

SEQ ID NO: 1701593 - RNA, 19 nt, Artificial Sequence
  Description of Artificial Sequence: Synthetic oligonucleotide
gaggugacguuagaagcau

SEQ ID NO: 1701594 - RNA, 19 nt, Artificial Sequence
  Description of Artificial Sequence: Synthetic oligonucleotide
gcucugugcuucaucgccc

SEQ ID NO: 1701595 - RNA, 19 nt, Artificial Sequence
  Description of Artificial Sequence: Synthetic oligonucleotide
gugaugauuccgugcucua

SEQ ID NO: 1701596 - RNA, 19 nt, Artificial Sequence
  Description of Artificial Sequence: Synthetic oligonucleotide
ccaccauuacucccugaug

SEQ ID NO: 1701597 - RNA, 19 nt, Artificial Sequence
  Description of Artificial Sequence: Synthetic oligonucleotide
acgaaggaauagccacguu

SEQ ID NO: 1701598 - RNA, 19 nt, Artificial Sequence
  Description of Artificial Sequence: Synthetic oligonucleotide
gcuacacgggguuccugac

SEQ ID NO: 1701599 - RNA, 19 nt, Artificial Sequence
  Description of Artificial Sequence: Synthetic oligonucleotide
caccagggcggugcugucc

SEQ ID NO: 1701600 - RNA, 19 nt, Artificial Sequence
  Description of Artificial Sequence: Synthetic oligonucleotide
cccugggagcaucaucacc

SEQ ID NO: 1701601 - RNA, 19 nt, Artificial Sequence
  Description of Artificial Sequence: Synthetic oligonucleotide
agccacguucagucaggau

SEQ ID NO: 1701602 - RNA, 19 nt, Artificial Sequence
  Description of Artificial Sequence: Synthetic oligonucleotide
ccucuucuucacacauagc

SEQ ID NO: 1701603 - RNA, 19 nt, Artificial Sequence
  Description of Artificial Sequence: Synthetic oligonucleotide
cggacaaucucacgcucag

SEQ ID NO: 1701604 - RNA, 19 nt, Artificial Sequence
  Description of Artificial Sequence: Synthetic oligonucleotide
cacgaaggaauagccacgu

SEQ ID NO: 1701605 - RNA, 19 nt, Artificial Sequence
  Description of Artificial Sequence: Synthetic oligonucleotide
gggguuccugacagugacg

SEQ ID NO: 1701606 - RNA, 19 nt, Artificial Sequence
  Description of Artificial Sequence: Synthetic oligonucleotide
aggcacguugaagguuuca

SEQ ID NO: 1701607 - RNA, 19 nt, Artificial Sequence
  Description of Artificial Sequence: Synthetic oligonucleotide
ccacguucagucaggaucu

SEQ ID NO: 1701608 - RNA, 19 nt, Artificial Sequence
  Description of Artificial Sequence: Synthetic oligonucleotide
ggucucggggcagcggaag

SEQ ID NO: 1701609 - RNA, 19 nt, Artificial Sequence
  Description of Artificial Sequence: Synthetic oligonucleotide
ggcaguggccaucucauuu

SEQ ID NO: 1701610 - RNA, 19 nt, Artificial Sequence
  Description of Artificial Sequence: Synthetic oligonucleotide
caggcacguugaagguuuc

SEQ ID NO: 1701611 - RNA, 19 nt, Artificial Sequence
  Description of Artificial Sequence: Synthetic oligonucleotide
ucggggcagcggaagcguu

SEQ ID NO: 1701612 - RNA, 19 nt, Artificial Sequence
  Description of Artificial Sequence: Synthetic oligonucleotide
ggugacguuagaagcauuu

SEQ ID NO: 1701613 - RNA, 19 nt, Artificial Sequence
  Description of Artificial Sequence: Synthetic oligonucleotide
acgggguuccugacaguga

SEQ ID NO: 1701614 - RNA, 19 nt, Artificial Sequence
  Description of Artificial Sequence: Synthetic oligonucleotide
gagcagcuacacgggguuc

SEQ ID NO: 1701615 - RNA, 19 nt, Artificial Sequence
  Description of Artificial Sequence: Synthetic oligonucleotide
ccaaugaaagaugguugga

SEQ ID NO: 1701616 - RNA, 19 nt, Artificial Sequence
  Description of Artificial Sequence: Synthetic oligonucleotide
cuucaucgcccacguagcu

SEQ ID NO: 1701617 - RNA, 19 nt, Artificial Sequence
  Description of Artificial Sequence: Synthetic oligonucleotide
guuguacguccagaggcau

SEQ ID NO: 1701618 - RNA, 19 nt, Artificial Sequence
  Description of Artificial Sequence: Synthetic oligonucleotide
ggggacauugugaguuaca

SEQ ID NO: 1701619 - RNA, 19 nt, Artificial Sequence
  Description of Artificial Sequence: Synthetic oligonucleotide
ccacacgaagcucauuaua

SEQ ID NO: 1701620 - RNA, 19 nt, Artificial Sequence
  Description of Artificial Sequence: Synthetic oligonucleotide
caucgcccacguagcuguc

SEQ ID NO: 1701621 - RNA, 19 nt, Artificial Sequence
  Description of Artificial Sequence: Synthetic oligonucleotide
ggggcagcggaagcguuca

SEQ ID NO: 1701622 - RNA, 19 nt, Artificial Sequence
  Description of Artificial Sequence: Synthetic oligonucleotide
cuguuauaggugguuucau

SEQ ID NO: 1701623 - RNA, 19 nt, Artificial Sequence
  Description of Artificial Sequence: Synthetic oligonucleotide
cagcuacacgggguuccug

SEQ ID NO: 1701624 - RNA, 19 nt, Artificial Sequence
  Description of Artificial Sequence: Synthetic oligonucleotide
gcaguggccaucucauuuu

SEQ ID NO: 1701625 - RNA, 19 nt, Artificial Sequence
  Description of Artificial Sequence: Synthetic oligonucleotide
ggaagcguucauucccaau

SEQ ID NO: 1701626 - RNA, 19 nt, Artificial Sequence
  Description of Artificial Sequence: Synthetic oligonucleotide
ccagcacaauaccaguugu

SEQ ID NO: 1701627 - RNA, 19 nt, Artificial Sequence
  Description of Artificial Sequence: Synthetic oligonucleotide
cagucgugugcuggagaca

SEQ ID NO: 1701628 - RNA, 19 nt, Artificial Sequence
  Description of Artificial Sequence: Synthetic oligonucleotide
caggggaggugacguuaga

SEQ ID NO: 1701629 - RNA, 19 nt, Artificial Sequence
  Description of Artificial Sequence: Synthetic oligonucleotide
gggaccagcuucaucguau

SEQ ID NO: 1701630 - RNA, 19 nt, Artificial Sequence
  Description of Artificial Sequence: Synthetic oligonucleotide
gugcucuaucggguacuuc

SEQ ID NO: 1701631 - RNA, 19 nt, Artificial Sequence
  Description of Artificial Sequence: Synthetic oligonucleotide
gcucuaucggguacuucaa

SEQ ID NO: 1701632 - RNA, 19 nt, Artificial Sequence
  Description of Artificial Sequence: Synthetic oligonucleotide
ccagccgacuccaucccaa

SEQ ID NO: 1701633 - RNA, 19 nt, Artificial Sequence
  Description of Artificial Sequence: Synthetic oligonucleotide
gcgcugaaccacaaaacau

SEQ ID NO: 1701634 - RNA, 19 nt, Artificial Sequence
  Description of Artificial Sequence: Synthetic oligonucleotide
guacguccagaggcauaga

SEQ ID NO: 1701635 - RNA, 19 nt, Artificial Sequence
  Description of Artificial Sequence: Synthetic oligonucleotide
cgcugaaccacaaaacauu

SEQ ID NO: 1701636 - RNA, 19 nt, Artificial Sequence
  Description of Artificial Sequence: Synthetic oligonucleotide
gucugggacgucccacgau

SEQ ID NO: 1701637 - RNA, 19 nt, Artificial Sequence
  Description of Artificial Sequence: Synthetic oligonucleotide
gcuacguagcacagcuucu

SEQ ID NO: 1701638 - RNA, 19 nt, Artificial Sequence
  Description of Artificial Sequence: Synthetic oligonucleotide
gucgugugcuggagacaga

SEQ ID NO: 1701639 - RNA, 19 nt, Artificial Sequence
  Description of Artificial Sequence: Synthetic oligonucleotide
gggucauuuucucccgguu

SEQ ID NO: 1701640 - RNA, 19 nt, Artificial Sequence
  Description of Artificial Sequence: Synthetic oligonucleotide
ggugcucuucaggggccac

SEQ ID NO: 1701641 - RNA, 19 nt, Artificial Sequence
  Description of Artificial Sequence: Synthetic oligonucleotide
cgcucagcaguagucacga

SEQ ID NO: 1701642 - RNA, 19 nt, Artificial Sequence
  Description of Artificial Sequence: Synthetic oligonucleotide
gcuuuggguaggaaugauu

SEQ ID NO: 1701643 - RNA, 19 nt, Artificial Sequence
  Description of Artificial Sequence: Synthetic oligonucleotide
gggacgucccacgauggau

SEQ ID NO: 1701644 - RNA, 19 nt, Artificial Sequence
  Description of Artificial Sequence: Synthetic oligonucleotide
cucggggcagcggaagcgu

SEQ ID NO: 1701645 - RNA, 19 nt, Artificial Sequence
  Description of Artificial Sequence: Synthetic oligonucleotide
ggaccagcuucaucguauu

SEQ ID NO: 1701646 - RNA, 19 nt, Artificial Sequence
  Description of Artificial Sequence: Synthetic oligonucleotide
gagcaggggaggugacguu

SEQ ID NO: 1701647 - RNA, 19 nt, Artificial Sequence
  Description of Artificial Sequence: Synthetic oligonucleotide
gcugggcgcaagagcugug

SEQ ID NO: 1701648 - RNA, 19 nt, Artificial Sequence
  Description of Artificial Sequence: Synthetic oligonucleotide
gcagggcauaucccucaua

SEQ ID NO: 1701649 - RNA, 19 nt, Artificial Sequence
  Description of Artificial Sequence: Synthetic oligonucleotide
gggcgcaagagcugugauu

SEQ ID NO: 1701650 - RNA, 19 nt, Artificial Sequence
  Description of Artificial Sequence: Synthetic oligonucleotide
gcauggggcagggcauauc

SEQ ID NO: 1701651 - RNA, 19 nt, Artificial Sequence
  Description of Artificial Sequence: Synthetic oligonucleotide
accugcccgucaggcaguu

SEQ ID NO: 1701652 - RNA, 19 nt, Artificial Sequence
  Description of Artificial Sequence: Synthetic oligonucleotide
gugcuucaucgcccacgua

SEQ ID NO: 1701653 - RNA, 19 nt, Artificial Sequence
  Description of Artificial Sequence: Synthetic oligonucleotide
cggggcagcggaagcguuc

SEQ ID NO: 1701654 - RNA, 19 nt, Artificial Sequence
  Description of Artificial Sequence: Synthetic oligonucleotide
ggaugggagggaccagcuu

SEQ ID NO: 1701655 - RNA, 19 nt, Artificial Sequence
  Description of Artificial Sequence: Synthetic oligonucleotide
gagcuacguagcacagcuu

SEQ ID NO: 1701656 - RNA, 19 nt, Artificial Sequence
  Description of Artificial Sequence: Synthetic oligonucleotide
cagccgacuccaucccaau

SEQ ID NO: 1701657 - RNA, 19 nt, Artificial Sequence
  Description of Artificial Sequence: Synthetic oligonucleotide
ggauaccagccgacuccau

SEQ ID NO: 1701658 - RNA, 19 nt, Artificial Sequence
  Description of Artificial Sequence: Synthetic oligonucleotide
cccugaugucugggacguc

SEQ ID NO: 1701659 - RNA, 19 nt, Artificial Sequence
  Description of Artificial Sequence: Synthetic oligonucleotide
gggcagcggaagcguucau

SEQ ID NO: 1701660 - RNA, 19 nt, Artificial Sequence
  Description of Artificial Sequence: Synthetic oligonucleotide
cgugcucuaucggguacuu

SEQ ID NO: 1701661 - RNA, 19 nt, Artificial Sequence
  Description of Artificial Sequence: Synthetic oligonucleotide
aaguaaaggacacauugcc

SEQ ID NO: 1701662 - RNA, 19 nt, Artificial Sequence
  Description of Artificial Sequence: Synthetic oligonucleotide
aauucagaccgcuauaaac

SEQ ID NO: 1701663 - RNA, 19 nt, Artificial Sequence
  Description of Artificial Sequence: Synthetic oligonucleotide
agggauguaacccacaacc

SEQ ID NO: 1701664 - RNA, 19 nt, Artificial Sequence
  Description of Artificial Sequence: Synthetic oligonucleotide
aguguucccauucauaucc

SEQ ID NO: 1701665 - RNA, 19 nt, Artificial Sequence
  Description of Artificial Sequence: Synthetic oligonucleotide
aauaaauuagguuguagaa

SEQ ID NO: 1701666 - RNA, 19 nt, Artificial Sequence
  Description of Artificial Sequence: Synthetic oligonucleotide
acaaccaucaggcuuugcc

SEQ ID NO: 1701667 - RNA, 19 nt, Artificial Sequence
  Description of Artificial Sequence: Synthetic oligonucleotide
aagggaaugcuuugggccc

SEQ ID NO: 1701668 - RNA, 19 nt, Artificial Sequence
  Description of Artificial Sequence: Synthetic oligonucleotide
gauccuaugccccauuugg

SEQ ID NO: 1701669 - RNA, 19 nt, Artificial Sequence
  Description of Artificial Sequence: Synthetic oligonucleotide
ugugguagaacauucgggc

SEQ ID NO: 1701670 - RNA, 19 nt, Artificial Sequence
  Description of Artificial Sequence: Synthetic oligonucleotide
aaagcaggcaauuggcuag

SEQ ID NO: 1701671 - RNA, 19 nt, Artificial Sequence
  Description of Artificial Sequence: Synthetic oligonucleotide
acguuggcaauucagaccg

SEQ ID NO: 1701672 - RNA, 19 nt, Artificial Sequence
  Description of Artificial Sequence: Synthetic oligonucleotide
auaguagugcgauaccagc

SEQ ID NO: 1701673 - RNA, 19 nt, Artificial Sequence
  Description of Artificial Sequence: Synthetic oligonucleotide
aacggugggaugcagagug

SEQ ID NO: 1701674 - RNA, 19 nt, Artificial Sequence
  Description of Artificial Sequence: Synthetic oligonucleotide
ugggaguccaauaaauuag

SEQ ID NO: 1701675 - RNA, 19 nt, Artificial Sequence
  Description of Artificial Sequence: Synthetic oligonucleotide
gaagggaaugcuuugggcc

SEQ ID NO: 1701676 - RNA, 19 nt, Artificial Sequence
  Description of Artificial Sequence: Synthetic oligonucleotide
cauucugggaguuaccacg

SEQ ID NO: 1701677 - RNA, 19 nt, Artificial Sequence
  Description of Artificial Sequence: Synthetic oligonucleotide
uguagaagguaaaggaaug

SEQ ID NO: 1701678 - RNA, 19 nt, Artificial Sequence
  Description of Artificial Sequence: Synthetic oligonucleotide
aacaccgugccauucuggg

SEQ ID NO: 1701679 - RNA, 19 nt, Artificial Sequence
  Description of Artificial Sequence: Synthetic oligonucleotide
aaccaucaggcuuugccac

SEQ ID NO: 1701680 - RNA, 19 nt, Artificial Sequence
  Description of Artificial Sequence: Synthetic oligonucleotide
auaaauuagguuguagaag

SEQ ID NO: 1701681 - RNA, 19 nt, Artificial Sequence
  Description of Artificial Sequence: Synthetic oligonucleotide
aaaggaacaagaacuuggg

SEQ ID NO: 1701682 - RNA, 19 nt, Artificial Sequence
  Description of Artificial Sequence: Synthetic oligonucleotide
agguaaagcaggcaauugg

SEQ ID NO: 1701683 - RNA, 19 nt, Artificial Sequence
  Description of Artificial Sequence: Synthetic oligonucleotide
auggauaguagugcgauac

SEQ ID NO: 1701684 - RNA, 19 nt, Artificial Sequence
  Description of Artificial Sequence: Synthetic oligonucleotide
acugcuguaggguuagaac

SEQ ID NO: 1701685 - RNA, 19 nt, Artificial Sequence
  Description of Artificial Sequence: Synthetic oligonucleotide
gaagggaccacccagucac

SEQ ID NO: 1701686 - RNA, 19 nt, Artificial Sequence
  Description of Artificial Sequence: Synthetic oligonucleotide
ugcacgaugccccaggaug

SEQ ID NO: 1701687 - RNA, 19 nt, Artificial Sequence
  Description of Artificial Sequence: Synthetic oligonucleotide
uguccugugggacaggggc

SEQ ID NO: 1701688 - RNA, 19 nt, Artificial Sequence
  Description of Artificial Sequence: Synthetic oligonucleotide
agaacauucgggccaugcc

SEQ ID NO: 1701689 - RNA, 19 nt, Artificial Sequence
  Description of Artificial Sequence: Synthetic oligonucleotide
ucauggcucagccauacug

SEQ ID NO: 1701690 - RNA, 19 nt, Artificial Sequence
  Description of Artificial Sequence: Synthetic oligonucleotide
cuagaggauggcaacaaag

SEQ ID NO: 1701691 - RNA, 19 nt, Artificial Sequence
  Description of Artificial Sequence: Synthetic oligonucleotide
ugugguacuuccauaggga

SEQ ID NO: 1701692 - RNA, 19 nt, Artificial Sequence
  Description of Artificial Sequence: Synthetic oligonucleotide
uuugggcccuguuugaucc

SEQ ID NO: 1701693 - RNA, 19 nt, Artificial Sequence
  Description of Artificial Sequence: Synthetic oligonucleotide
guaacccacaaccaucagg

SEQ ID NO: 1701694 - RNA, 19 nt, Artificial Sequence
  Description of Artificial Sequence: Synthetic oligonucleotide
gugaucugagaguauaaag

SEQ ID NO: 1701695 - RNA, 19 nt, Artificial Sequence
  Description of Artificial Sequence: Synthetic oligonucleotide
gacaguaagggaagggugg

SEQ ID NO: 1701696 - RNA, 19 nt, Artificial Sequence
  Description of Artificial Sequence: Synthetic oligonucleotide
uaggguuagaacuggggcc

SEQ ID NO: 1701697 - RNA, 19 nt, Artificial Sequence
  Description of Artificial Sequence: Synthetic oligonucleotide
accgcuauaaacugggagu

SEQ ID NO: 1701698 - RNA, 19 nt, Artificial Sequence
  Description of Artificial Sequence: Synthetic oligonucleotide
aguauaaagaagggugggg

SEQ ID NO: 1701699 - RNA, 19 nt, Artificial Sequence
  Description of Artificial Sequence: Synthetic oligonucleotide
ugggugauggauaguagug

SEQ ID NO: 1701700 - RNA, 19 nt, Artificial Sequence
  Description of Artificial Sequence: Synthetic oligonucleotide
agaguguucccauucauau

SEQ ID NO: 1701701 - RNA, 19 nt, Artificial Sequence
  Description of Artificial Sequence: Synthetic oligonucleotide
ugguacuuccauagggagg

SEQ ID NO: 1701702 - RNA, 19 nt, Artificial Sequence
  Description of Artificial Sequence: Synthetic oligonucleotide
ugguagaacauucgggcca

SEQ ID NO: 1701703 - RNA, 19 nt, Artificial Sequence
  Description of Artificial Sequence: Synthetic oligonucleotide
aaugcuuugggcccuguuu

SEQ ID NO: 1701704 - RNA, 19 nt, Artificial Sequence
  Description of Artificial Sequence: Synthetic oligonucleotide
ucagaccgcuauaaacugg

SEQ ID NO: 1701705 - RNA, 19 nt, Artificial Sequence
  Description of Artificial Sequence: Synthetic oligonucleotide
gugugguacuuccauaggg

SEQ ID NO: 1701706 - RNA, 19 nt, Artificial Sequence
  Description of Artificial Sequence: Synthetic oligonucleotide
gguacuuccauagggaggg

SEQ ID NO: 1701707 - RNA, 19 nt, Artificial Sequence
  Description of Artificial Sequence: Synthetic oligonucleotide
gauaguagugcgauaccag

SEQ ID NO: 1701708 - RNA, 19 nt, Artificial Sequence
  Description of Artificial Sequence: Synthetic oligonucleotide
cugugguagaacauucggg

SEQ ID NO: 1701709 - RNA, 19 nt, Artificial Sequence
  Description of Artificial Sequence: Synthetic oligonucleotide
uauaagggcacaguucaug

SEQ ID NO: 1701710 - RNA, 19 nt, Artificial Sequence
  Description of Artificial Sequence: Synthetic oligonucleotide
cagaccgcuauaaacuggg

SEQ ID NO: 1701711 - RNA, 19 nt, Artificial Sequence
  Description of Artificial Sequence: Synthetic oligonucleotide
caaagggauggaucaaagg

SEQ ID NO: 1701712 - RNA, 19 nt, Artificial Sequence
  Description of Artificial Sequence: Synthetic oligonucleotide
ugcaggacaguaagggaag

SEQ ID NO: 1701713 - RNA, 19 nt, Artificial Sequence
  Description of Artificial Sequence: Synthetic oligonucleotide
ugcuguuccgaacagcccu

SEQ ID NO: 1701714 - RNA, 19 nt, Artificial Sequence
  Description of Artificial Sequence: Synthetic oligonucleotide
ugcagucucgccaaggauc

SEQ ID NO: 1701715 - RNA, 19 nt, Artificial Sequence
  Description of Artificial Sequence: Synthetic oligonucleotide
aggagggcguacuuuggcc

SEQ ID NO: 1701716 - RNA, 19 nt, Artificial Sequence
  Description of Artificial Sequence: Synthetic oligonucleotide
auucagaccgcuauaaacu

SEQ ID NO: 1701717 - RNA, 19 nt, Artificial Sequence
  Description of Artificial Sequence: Synthetic oligonucleotide
guaacggugggaugcagag

SEQ ID NO: 1701718 - RNA, 19 nt, Artificial Sequence
  Description of Artificial Sequence: Synthetic oligonucleotide
cucggucaggcuuaggcgg

SEQ ID NO: 1701719 - RNA, 19 nt, Artificial Sequence
  Description of Artificial Sequence: Synthetic oligonucleotide
uugguggcggagaugcacg

SEQ ID NO: 1701720 - RNA, 19 nt, Artificial Sequence
  Description of Artificial Sequence: Synthetic oligonucleotide
gaccgcuauaaacugggag

SEQ ID NO: 1701721 - RNA, 19 nt, Artificial Sequence
  Description of Artificial Sequence: Synthetic oligonucleotide
ggugauggauaguagugcg

SEQ ID NO: 1701722 - RNA, 19 nt, Artificial Sequence
  Description of Artificial Sequence: Synthetic oligonucleotide
gucaaguggggacaccugg

SEQ ID NO: 1701723 - RNA, 19 nt, Artificial Sequence
  Description of Artificial Sequence: Synthetic oligonucleotide
gaacauucgggccaugcca

SEQ ID NO: 1701724 - RNA, 19 nt, Artificial Sequence
  Description of Artificial Sequence: Synthetic oligonucleotide
ucaaaggaacaagaacuug

SEQ ID NO: 1701725 - RNA, 19 nt, Artificial Sequence
  Description of Artificial Sequence: Synthetic oligonucleotide
cacguuggcaauucagacc

SEQ ID NO: 1701726 - RNA, 19 nt, Artificial Sequence
  Description of Artificial Sequence: Synthetic oligonucleotide
guaaaggacacauugcccu

SEQ ID NO: 1701727 - RNA, 19 nt, Artificial Sequence
  Description of Artificial Sequence: Synthetic oligonucleotide
agggauggaucaaaggaac

SEQ ID NO: 1701728 - RNA, 19 nt, Artificial Sequence
  Description of Artificial Sequence: Synthetic oligonucleotide
aauuagguuguagaaggua

SEQ ID NO: 1701729 - RNA, 19 nt, Artificial Sequence
  Description of Artificial Sequence: Synthetic oligonucleotide
uccccaucaaacugcagca

SEQ ID NO: 1701730 - RNA, 19 nt, Artificial Sequence
  Description of Artificial Sequence: Synthetic oligonucleotide
uucaugugaucugagagua

SEQ ID NO: 1701731 - RNA, 19 nt, Artificial Sequence
  Description of Artificial Sequence: Synthetic oligonucleotide
uuggcuggcuacccuagag

SEQ ID NO: 1701732 - RNA, 19 nt, Artificial Sequence
  Description of Artificial Sequence: Synthetic oligonucleotide
ggaguuaccacggggaagg

SEQ ID NO: 1701733 - RNA, 19 nt, Artificial Sequence
  Description of Artificial Sequence: Synthetic oligonucleotide
augcuuugggcccuguuug

SEQ ID NO: 1701734 - RNA, 19 nt, Artificial Sequence
  Description of Artificial Sequence: Synthetic oligonucleotide
uagugcgauaccagcaucu

SEQ ID NO: 1701735 - RNA, 19 nt, Artificial Sequence
  Description of Artificial Sequence: Synthetic oligonucleotide
aguaacaccgugccauucu

SEQ ID NO: 1701736 - RNA, 19 nt, Artificial Sequence
  Description of Artificial Sequence: Synthetic oligonucleotide
uuaggcggacugcagaguc

SEQ ID NO: 1701737 - RNA, 19 nt, Artificial Sequence
  Description of Artificial Sequence: Synthetic oligonucleotide
agaugcacgaugccccagg

SEQ ID NO: 1701738 - RNA, 19 nt, Artificial Sequence
  Description of Artificial Sequence: Synthetic oligonucleotide
ugauccuaugccccauuug

SEQ ID NO: 1701739 - RNA, 19 nt, Artificial Sequence
  Description of Artificial Sequence: Synthetic oligonucleotide
aaacugggaguccaauaaa

SEQ ID NO: 1701740 - RNA, 19 nt, Artificial Sequence
  Description of Artificial Sequence: Synthetic oligonucleotide
uccuaugccccauuuggcu

SEQ ID NO: 1701741 - RNA, 19 nt, Artificial Sequence
  Description of Artificial Sequence: Synthetic oligonucleotide
aggggcauuggcuggcuac

SEQ ID NO: 1701742 - RNA, 19 nt, Artificial Sequence
  Description of Artificial Sequence: Synthetic oligonucleotide
aagggauggaucaaaggaa

SEQ ID NO: 1701743 - RNA, 19 nt, Artificial Sequence
  Description of Artificial Sequence: Synthetic oligonucleotide
gaggauggcaacaaaggga

SEQ ID NO: 1701744 - RNA, 19 nt, Artificial Sequence
  Description of Artificial Sequence: Synthetic oligonucleotide
auuagguuguagaagguaa

SEQ ID NO: 1701745 - RNA, 19 nt, Artificial Sequence
  Description of Artificial Sequence: Synthetic oligonucleotide
uggcaauucagaccgcuau

SEQ ID NO: 1701746 - RNA, 19 nt, Artificial Sequence
  Description of Artificial Sequence: Synthetic oligonucleotide
ugaggggccagguuuggca

SEQ ID NO: 1701747 - RNA, 19 nt, Artificial Sequence
  Description of Artificial Sequence: Synthetic oligonucleotide
aguagugcgauaccagcau

SEQ ID NO: 1701748 - RNA, 19 nt, Artificial Sequence
  Description of Artificial Sequence: Synthetic oligonucleotide
uggauaguagugcgauacc

SEQ ID NO: 1701749 - RNA, 19 nt, Artificial Sequence
  Description of Artificial Sequence: Synthetic oligonucleotide
ucccauucauauccaguug

SEQ ID NO: 1701750 - RNA, 19 nt, Artificial Sequence
  Description of Artificial Sequence: Synthetic oligonucleotide
uggagcagaccucagggua

SEQ ID NO: 1701751 - RNA, 19 nt, Artificial Sequence
  Description of Artificial Sequence: Synthetic oligonucleotide
aacuuggguuucaggaggg

SEQ ID NO: 1701752 - RNA, 19 nt, Artificial Sequence
  Description of Artificial Sequence: Synthetic oligonucleotide
aggaguaacaccgugccau

SEQ ID NO: 1701753 - RNA, 19 nt, Artificial Sequence
  Description of Artificial Sequence: Synthetic oligonucleotide
caaacugcagcaaaugugu

SEQ ID NO: 1701754 - RNA, 19 nt, Artificial Sequence
  Description of Artificial Sequence: Synthetic oligonucleotide
guacuuuggccugugguag

SEQ ID NO: 1701755 - RNA, 19 nt, Artificial Sequence
  Description of Artificial Sequence: Synthetic oligonucleotide
ugcagaguguucccauuca

SEQ ID NO: 1701756 - RNA, 19 nt, Artificial Sequence
  Description of Artificial Sequence: Synthetic oligonucleotide
caggguaacggugggaugc

SEQ ID NO: 1701757 - RNA, 19 nt, Artificial Sequence
  Description of Artificial Sequence: Synthetic oligonucleotide
cugcuucucaccuccagac

SEQ ID NO: 1701758 - RNA, 19 nt, Artificial Sequence
  Description of Artificial Sequence: Synthetic oligonucleotide
auauccaguugcucuugag

SEQ ID NO: 1701759 - RNA, 19 nt, Artificial Sequence
  Description of Artificial Sequence: Synthetic oligonucleotide
aguugcucuugagaguggg

SEQ ID NO: 1701760 - RNA, 19 nt, Artificial Sequence
  Description of Artificial Sequence: Synthetic oligonucleotide
auaaacugggaguccaaua

SEQ ID NO: 1701761 - RNA, 19 nt, Artificial Sequence
  Description of Artificial Sequence: Synthetic oligonucleotide
ugugaucugagaguauaaa

SEQ ID NO: 1701762 - RNA, 19 nt, Artificial Sequence
  Description of Artificial Sequence: Synthetic oligonucleotide
agucucgccaaggaucugg

SEQ ID NO: 1701763 - RNA, 19 nt, Artificial Sequence
  Description of Artificial Sequence: Synthetic oligonucleotide
acuuccauagggagggccg

SEQ ID NO: 1701764 - RNA, 19 nt, Artificial Sequence
  Description of Artificial Sequence: Synthetic oligonucleotide
ucaaacuuccagccucccu

SEQ ID NO: 1701765 - RNA, 19 nt, Artificial Sequence
  Description of Artificial Sequence: Synthetic oligonucleotide
gugguagaacauucgggcc

SEQ ID NO: 1701766 - RNA, 19 nt, Artificial Sequence
  Description of Artificial Sequence: Synthetic oligonucleotide
aaauuagguuguagaaggu

SEQ ID NO: 1701767 - RNA, 19 nt, Artificial Sequence
  Description of Artificial Sequence: Synthetic oligonucleotide
uagaacauucgggccaugc

SEQ ID NO: 1701768 - RNA, 19 nt, Artificial Sequence
  Description of Artificial Sequence: Synthetic oligonucleotide
ggacacauugcccuauaag

SEQ ID NO: 1701769 - RNA, 19 nt, Artificial Sequence
  Description of Artificial Sequence: Synthetic oligonucleotide
gaccucaggguaacggugg

SEQ ID NO: 1701770 - RNA, 19 nt, Artificial Sequence
  Description of Artificial Sequence: Synthetic oligonucleotide
uggcggagaugcacgaugc

SEQ ID NO: 1701771 - RNA, 19 nt, Artificial Sequence
  Description of Artificial Sequence: Synthetic oligonucleotide
cagcaaaugugugugguac

SEQ ID NO: 1701772 - RNA, 19 nt, Artificial Sequence
  Description of Artificial Sequence: Synthetic oligonucleotide
uggcagggcgcucacguug

SEQ ID NO: 1701773 - RNA, 19 nt, Artificial Sequence
  Description of Artificial Sequence: Synthetic oligonucleotide
aauuggcuaggaggcuugg

SEQ ID NO: 1701774 - RNA, 19 nt, Artificial Sequence
  Description of Artificial Sequence: Synthetic oligonucleotide
gaugggugauggauaguag

SEQ ID NO: 1701775 - RNA, 19 nt, Artificial Sequence
  Description of Artificial Sequence: Synthetic oligonucleotide
cuggcuacccuagaggaug

SEQ ID NO: 1701776 - RNA, 19 nt, Artificial Sequence
  Description of Artificial Sequence: Synthetic oligonucleotide
auucugggaguuaccacgg

SEQ ID NO: 1701777 - RNA, 19 nt, Artificial Sequence
  Description of Artificial Sequence: Synthetic oligonucleotide
uccgaacagcccuuccucc

SEQ ID NO: 1701778 - RNA, 19 nt, Artificial Sequence
  Description of Artificial Sequence: Synthetic oligonucleotide
auccuaugccccauuuggc

SEQ ID NO: 1701779 - RNA, 19 nt, Artificial Sequence
  Description of Artificial Sequence: Synthetic oligonucleotide
cagaguuccugaaggcgcc

SEQ ID NO: 1701780 - RNA, 19 nt, Artificial Sequence
  Description of Artificial Sequence: Synthetic oligonucleotide
ucgccaaggaucuggcaga

SEQ ID NO: 1701781 - RNA, 19 nt, Artificial Sequence
  Description of Artificial Sequence: Synthetic oligonucleotide
aagcaggcaauuggcuagg

SEQ ID NO: 1701782 - RNA, 19 nt, Artificial Sequence
  Description of Artificial Sequence: Synthetic oligonucleotide
guaacaccgugccauucug

SEQ ID NO: 1701783 - RNA, 19 nt, Artificial Sequence
  Description of Artificial Sequence: Synthetic oligonucleotide
cugcuuggaagaucuugcc

SEQ ID NO: 1701784 - RNA, 19 nt, Artificial Sequence
  Description of Artificial Sequence: Synthetic oligonucleotide
uaagggcacaguucaugga

SEQ ID NO: 1701785 - RNA, 19 nt, Artificial Sequence
  Description of Artificial Sequence: Synthetic oligonucleotide
ccuauaagggcacaguuca

SEQ ID NO: 1701786 - RNA, 19 nt, Artificial Sequence
  Description of Artificial Sequence: Synthetic oligonucleotide
uguuccgaacagcccuucc

SEQ ID NO: 1701787 - RNA, 19 nt, Artificial Sequence
  Description of Artificial Sequence: Synthetic oligonucleotide
cugggaguccaauaaauua

SEQ ID NO: 1701788 - RNA, 19 nt, Artificial Sequence
  Description of Artificial Sequence: Synthetic oligonucleotide
uagggagggccgaugggug

SEQ ID NO: 1701789 - RNA, 19 nt, Artificial Sequence
  Description of Artificial Sequence: Synthetic oligonucleotide
uccccagucaaguggggac

SEQ ID NO: 1701790 - RNA, 19 nt, Artificial Sequence
  Description of Artificial Sequence: Synthetic oligonucleotide
cccauucauauccaguugc

SEQ ID NO: 1701791 - RNA, 19 nt, Artificial Sequence
  Description of Artificial Sequence: Synthetic oligonucleotide
uacccuagaggauggcaac

SEQ ID NO: 1701792 - RNA, 19 nt, Artificial Sequence
  Description of Artificial Sequence: Synthetic oligonucleotide
gggaguccaauaaauuagg

SEQ ID NO: 1701793 - RNA, 19 nt, Artificial Sequence
  Description of Artificial Sequence: Synthetic oligonucleotide
ugggaccaggggcugaacu

SEQ ID NO: 1701794 - RNA, 19 nt, Artificial Sequence
  Description of Artificial Sequence: Synthetic oligonucleotide
caaccaucaggcuuugcca

SEQ ID NO: 1701795 - RNA, 19 nt, Artificial Sequence
  Description of Artificial Sequence: Synthetic oligonucleotide
gaacuggggccuuccaaac

SEQ ID NO: 1701796 - RNA, 19 nt, Artificial Sequence
  Description of Artificial Sequence: Synthetic oligonucleotide
auagggagggccgaugggu

SEQ ID NO: 1701797 - RNA, 19 nt, Artificial Sequence
  Description of Artificial Sequence: Synthetic oligonucleotide
cccuguuugauccuaugcc

SEQ ID NO: 1701798 - RNA, 19 nt, Artificial Sequence
  Description of Artificial Sequence: Synthetic oligonucleotide
ccugugguagaacauucgg

SEQ ID NO: 1701799 - RNA, 19 nt, Artificial Sequence
  Description of Artificial Sequence: Synthetic oligonucleotide
cacaguucauggagcagac

SEQ ID NO: 1701800 - RNA, 19 nt, Artificial Sequence
  Description of Artificial Sequence: Synthetic oligonucleotide
aacauucgggccaugccaa

SEQ ID NO: 1701801 - RNA, 19 nt, Artificial Sequence
  Description of Artificial Sequence: Synthetic oligonucleotide
cuucucaccuccagaccag

SEQ ID NO: 1701802 - RNA, 19 nt, Artificial Sequence
  Description of Artificial Sequence: Synthetic oligonucleotide
cauagggagggccgauggg

SEQ ID NO: 1701803 - RNA, 19 nt, Artificial Sequence
  Description of Artificial Sequence: Synthetic oligonucleotide
uccugugcuggcagggcgc

SEQ ID NO: 1701804 - RNA, 19 nt, Artificial Sequence
  Description of Artificial Sequence: Synthetic oligonucleotide
ugggaugcagaguguuccc

SEQ ID NO: 1701805 - RNA, 19 nt, Artificial Sequence
  Description of Artificial Sequence: Synthetic oligonucleotide
cacccagucaccuccugug

SEQ ID NO: 1701806 - RNA, 19 nt, Artificial Sequence
  Description of Artificial Sequence: Synthetic oligonucleotide
guagaagguaaaggaauga

SEQ ID NO: 1701807 - RNA, 19 nt, Artificial Sequence
  Description of Artificial Sequence: Synthetic oligonucleotide
ugggaguuaccacggggaa

SEQ ID NO: 1701808 - RNA, 19 nt, Artificial Sequence
  Description of Artificial Sequence: Synthetic oligonucleotide
gaguguucccauucauauc

SEQ ID NO: 1701809 - RNA, 19 nt, Artificial Sequence
  Description of Artificial Sequence: Synthetic oligonucleotide
cugggaguuaccacgggga

SEQ ID NO: 1701810 - RNA, 19 nt, Artificial Sequence
  Description of Artificial Sequence: Synthetic oligonucleotide
cuugguggcggagaugcac

SEQ ID NO: 1701811 - RNA, 19 nt, Artificial Sequence
  Description of Artificial Sequence: Synthetic oligonucleotide
gaguccaauaaauuagguu

SEQ ID NO: 1701812 - RNA, 19 nt, Artificial Sequence
  Description of Artificial Sequence: Synthetic oligonucleotide
agguuuggcaccagaaacu

SEQ ID NO: 1701813 - RNA, 19 nt, Artificial Sequence
  Description of Artificial Sequence: Synthetic oligonucleotide
ugugcuggcagggcgcuca

SEQ ID NO: 1701814 - RNA, 19 nt, Artificial Sequence
  Description of Artificial Sequence: Synthetic oligonucleotide
acccacaaccaucaggcuu

SEQ ID NO: 1701815 - RNA, 19 nt, Artificial Sequence
  Description of Artificial Sequence: Synthetic oligonucleotide
gagggauguaacccacaac

SEQ ID NO: 1701816 - RNA, 19 nt, Artificial Sequence
  Description of Artificial Sequence: Synthetic oligonucleotide
uucuccucggucaggcuua

SEQ ID NO: 1701817 - RNA, 19 nt, Artificial Sequence
  Description of Artificial Sequence: Synthetic oligonucleotide
uugauccuaugccccauuu

SEQ ID NO: 1701818 - RNA, 19 nt, Artificial Sequence
  Description of Artificial Sequence: Synthetic oligonucleotide
gcuuaggcggacugcagag

SEQ ID NO: 1701819 - RNA, 19 nt, Artificial Sequence
  Description of Artificial Sequence: Synthetic oligonucleotide
cuacccuagaggauggcaa

SEQ ID NO: 1701820 - RNA, 19 nt, Artificial Sequence
  Description of Artificial Sequence: Synthetic oligonucleotide
auggagcagaccucagggu

SEQ ID NO: 1701821 - RNA, 19 nt, Artificial Sequence
  Description of Artificial Sequence: Synthetic oligonucleotide
cauugcccuauaagggcac

SEQ ID NO: 1701822 - RNA, 19 nt, Artificial Sequence
  Description of Artificial Sequence: Synthetic oligonucleotide
aacccacaaccaucaggcu

SEQ ID NO: 1701823 - RNA, 19 nt, Artificial Sequence
  Description of Artificial Sequence: Synthetic oligonucleotide
ugaaggcgccccugcaucu

SEQ ID NO: 1701824 - RNA, 19 nt, Artificial Sequence
  Description of Artificial Sequence: Synthetic oligonucleotide
cuuugggcccuguuugauc

SEQ ID NO: 1701825 - RNA, 19 nt, Artificial Sequence
  Description of Artificial Sequence: Synthetic oligonucleotide
gagggcguacuuuggccug

SEQ ID NO: 1701826 - RNA, 19 nt, Artificial Sequence
  Description of Artificial Sequence: Synthetic oligonucleotide
aaggcgccccugcaucuug

SEQ ID NO: 1701827 - RNA, 19 nt, Artificial Sequence
  Description of Artificial Sequence: Synthetic oligonucleotide
acauugcccuauaagggca

SEQ ID NO: 1701828 - RNA, 19 nt, Artificial Sequence
  Description of Artificial Sequence: Synthetic oligonucleotide
gcuucucaccuccagacca

SEQ ID NO: 1701829 - RNA, 19 nt, Artificial Sequence
  Description of Artificial Sequence: Synthetic oligonucleotide
agaguuccugaaggcgccc

SEQ ID NO: 1701830 - RNA, 19 nt, Artificial Sequence
  Description of Artificial Sequence: Synthetic oligonucleotide
ucggucaggcuuaggcgga

SEQ ID NO: 1701831 - RNA, 19 nt, Artificial Sequence
  Description of Artificial Sequence: Synthetic oligonucleotide
uacuuuggccugugguaga

SEQ ID NO: 1701832 - RNA, 19 nt, Artificial Sequence
  Description of Artificial Sequence: Synthetic oligonucleotide
ucaggcuuaggcggacugc

SEQ ID NO: 1701833 - RNA, 19 nt, Artificial Sequence
  Description of Artificial Sequence: Synthetic oligonucleotide
gcugcuuggaagaucuugc

SEQ ID NO: 1701834 - RNA, 19 nt, Artificial Sequence
  Description of Artificial Sequence: Synthetic oligonucleotide
auuggcuaggaggcuuggg

SEQ ID NO: 1701835 - RNA, 19 nt, Artificial Sequence
  Description of Artificial Sequence: Synthetic oligonucleotide
caggagggcguacuuuggc

SEQ ID NO: 1701836 - RNA, 19 nt, Artificial Sequence
  Description of Artificial Sequence: Synthetic oligonucleotide
uuggcaauucagaccgcua

SEQ ID NO: 1701837 - RNA, 19 nt, Artificial Sequence
  Description of Artificial Sequence: Synthetic oligonucleotide
uuugauccuaugccccauu

SEQ ID NO: 1701838 - RNA, 19 nt, Artificial Sequence
  Description of Artificial Sequence: Synthetic oligonucleotide
ggaccacccagucaccucc

SEQ ID NO: 1701839 - RNA, 19 nt, Artificial Sequence
  Description of Artificial Sequence: Synthetic oligonucleotide
ggaacaagaacuuggguuu

SEQ ID NO: 1701840 - RNA, 19 nt, Artificial Sequence
  Description of Artificial Sequence: Synthetic oligonucleotide
cugaaggcgccccugcauc

SEQ ID NO: 1701841 - RNA, 19 nt, Artificial Sequence
  Description of Artificial Sequence: Synthetic oligonucleotide
ccugcuuacuuuucauggc

SEQ ID NO: 1701842 - RNA, 19 nt, Artificial Sequence
  Description of Artificial Sequence: Synthetic oligonucleotide
agggcgcucacguuggcaa

SEQ ID NO: 1701843 - RNA, 19 nt, Artificial Sequence
  Description of Artificial Sequence: Synthetic oligonucleotide
uccaauaaauuagguugua

SEQ ID NO: 1701844 - RNA, 19 nt, Artificial Sequence
  Description of Artificial Sequence: Synthetic oligonucleotide
ucaugugaucugagaguau

SEQ ID NO: 1701845 - RNA, 19 nt, Artificial Sequence
  Description of Artificial Sequence: Synthetic oligonucleotide
ucccguugccaggacuugg

SEQ ID NO: 1701846 - RNA, 19 nt, Artificial Sequence
  Description of Artificial Sequence: Synthetic oligonucleotide
agaccucaggguaacggug

SEQ ID NO: 1701847 - RNA, 19 nt, Artificial Sequence
  Description of Artificial Sequence: Synthetic oligonucleotide
cuuccuucaugugaucuga

SEQ ID NO: 1701848 - RNA, 19 nt, Artificial Sequence
  Description of Artificial Sequence: Synthetic oligonucleotide
cugcuguuccgaacagccc

SEQ ID NO: 1701849 - RNA, 19 nt, Artificial Sequence
  Description of Artificial Sequence: Synthetic oligonucleotide
caagguccccagucaagug

SEQ ID NO: 1701850 - RNA, 19 nt, Artificial Sequence
  Description of Artificial Sequence: Synthetic oligonucleotide
gccgaugggugauggauag

SEQ ID NO: 1701851 - RNA, 19 nt, Artificial Sequence
  Description of Artificial Sequence: Synthetic oligonucleotide
ggauaguagugcgauacca

SEQ ID NO: 1701852 - RNA, 19 nt, Artificial Sequence
  Description of Artificial Sequence: Synthetic oligonucleotide
gcagaccucaggguaacgg

SEQ ID NO: 1701853 - RNA, 19 nt, Artificial Sequence
  Description of Artificial Sequence: Synthetic oligonucleotide
gaugcacgaugccccagga

SEQ ID NO: 1701854 - RNA, 19 nt, Artificial Sequence
  Description of Artificial Sequence: Synthetic oligonucleotide
ugcccuauaagggcacagu

SEQ ID NO: 1701855 - RNA, 19 nt, Artificial Sequence
  Description of Artificial Sequence: Synthetic oligonucleotide
caaacccuccaccccuccc

SEQ ID NO: 1701856 - RNA, 19 nt, Artificial Sequence
  Description of Artificial Sequence: Synthetic oligonucleotide
guagugcgauaccagcauc

SEQ ID NO: 1701857 - RNA, 19 nt, Artificial Sequence
  Description of Artificial Sequence: Synthetic oligonucleotide
uccagaccaggacauccuu

SEQ ID NO: 1701858 - RNA, 19 nt, Artificial Sequence
  Description of Artificial Sequence: Synthetic oligonucleotide
gagggccgaugggugaugg

SEQ ID NO: 1701859 - RNA, 19 nt, Artificial Sequence
  Description of Artificial Sequence: Synthetic oligonucleotide
ccucggucaggcuuaggcg

SEQ ID NO: 1701860 - RNA, 19 nt, Artificial Sequence
  Description of Artificial Sequence: Synthetic oligonucleotide
uaccacggggaagggaaug

SEQ ID NO: 1701861 - RNA, 19 nt, Artificial Sequence
  Description of Artificial Sequence: Synthetic oligonucleotide
uccauagggagggccgaug

SEQ ID NO: 1701862 - RNA, 19 nt, Artificial Sequence
  Description of Artificial Sequence: Synthetic oligonucleotide
gcgauaccagcaucuuugg

SEQ ID NO: 1701863 - RNA, 19 nt, Artificial Sequence
  Description of Artificial Sequence: Synthetic oligonucleotide
uucgggccaugccaauccu

SEQ ID NO: 1701864 - RNA, 19 nt, Artificial Sequence
  Description of Artificial Sequence: Synthetic oligonucleotide
gauggauaguagugcgaua

SEQ ID NO: 1701865 - RNA, 19 nt, Artificial Sequence
  Description of Artificial Sequence: Synthetic oligonucleotide
caucuuggggaugccugcc

SEQ ID NO: 1701866 - RNA, 19 nt, Artificial Sequence
  Description of Artificial Sequence: Synthetic oligonucleotide
ccauagggagggccgaugg

SEQ ID NO: 1701867 - RNA, 19 nt, Artificial Sequence
  Description of Artificial Sequence: Synthetic oligonucleotide
ggcuggcuacccuagagga

SEQ ID NO: 1701868 - RNA, 19 nt, Artificial Sequence
  Description of Artificial Sequence: Synthetic oligonucleotide
gugccauucugggaguuac

SEQ ID NO: 1701869 - RNA, 19 nt, Artificial Sequence
  Description of Artificial Sequence: Synthetic oligonucleotide
auuggcuggcuacccuaga

SEQ ID NO: 1701870 - RNA, 19 nt, Artificial Sequence
  Description of Artificial Sequence: Synthetic oligonucleotide
aggacacauugcccuauaa

SEQ ID NO: 1701871 - RNA, 19 nt, Artificial Sequence
  Description of Artificial Sequence: Synthetic oligonucleotide
gcccuguuugauccuaugc

SEQ ID NO: 1701872 - RNA, 19 nt, Artificial Sequence
  Description of Artificial Sequence: Synthetic oligonucleotide
gguguguccugugggacag

SEQ ID NO: 1701873 - RNA, 19 nt, Artificial Sequence
  Description of Artificial Sequence: Synthetic oligonucleotide
ucucgccaaggaucuggca

SEQ ID NO: 1701874 - RNA, 19 nt, Artificial Sequence
  Description of Artificial Sequence: Synthetic oligonucleotide
cuauaaacugggaguccaa

SEQ ID NO: 1701875 - RNA, 19 nt, Artificial Sequence
  Description of Artificial Sequence: Synthetic oligonucleotide
ggggaagggaaugcuuugg

SEQ ID NO: 1701876 - RNA, 19 nt, Artificial Sequence
  Description of Artificial Sequence: Synthetic oligonucleotide
uuaccacggggaagggaau

SEQ ID NO: 1701877 - RNA, 19 nt, Artificial Sequence
  Description of Artificial Sequence: Synthetic oligonucleotide
cccuauaagggcacaguuc

SEQ ID NO: 1701878 - RNA, 19 nt, Artificial Sequence
  Description of Artificial Sequence: Synthetic oligonucleotide
ggauggaucaaaggaacaa

SEQ ID NO: 1701879 - RNA, 19 nt, Artificial Sequence
  Description of Artificial Sequence: Synthetic oligonucleotide
ugguggcggagaugcacga

SEQ ID NO: 1701880 - RNA, 19 nt, Artificial Sequence
  Description of Artificial Sequence: Synthetic oligonucleotide
guccaauaaauuagguugu

SEQ ID NO: 1701881 - RNA, 19 nt, Artificial Sequence
  Description of Artificial Sequence: Synthetic oligonucleotide
gcacgaugccccaggaugg

SEQ ID NO: 1701882 - RNA, 19 nt, Artificial Sequence
  Description of Artificial Sequence: Synthetic oligonucleotide
ccuaugccccauuuggcug

SEQ ID NO: 1701883 - RNA, 19 nt, Artificial Sequence
  Description of Artificial Sequence: Synthetic oligonucleotide
caaguggggacaccuggga

SEQ ID NO: 1701884 - RNA, 19 nt, Artificial Sequence
  Description of Artificial Sequence: Synthetic oligonucleotide
gaguuccugaaggcgcccc

SEQ ID NO: 1701885 - RNA, 19 nt, Artificial Sequence
  Description of Artificial Sequence: Synthetic oligonucleotide
aguuaccacggggaaggga

SEQ ID NO: 1701886 - RNA, 19 nt, Artificial Sequence
  Description of Artificial Sequence: Synthetic oligonucleotide
ggcugcuuggaagaucuug

SEQ ID NO: 1701887 - RNA, 19 nt, Artificial Sequence
  Description of Artificial Sequence: Synthetic oligonucleotide
cagaguguucccauucaua

SEQ ID NO: 1701888 - RNA, 19 nt, Artificial Sequence
  Description of Artificial Sequence: Synthetic oligonucleotide
gaguaacaccgugccauuc

SEQ ID NO: 1701889 - RNA, 19 nt, Artificial Sequence
  Description of Artificial Sequence: Synthetic oligonucleotide
ucgggccaugccaauccuc

SEQ ID NO: 1701890 - RNA, 19 nt, Artificial Sequence
  Description of Artificial Sequence: Synthetic oligonucleotide
guuccgaacagcccuuccu

SEQ ID NO: 1701891 - RNA, 19 nt, Artificial Sequence
  Description of Artificial Sequence: Synthetic oligonucleotide
gaguuaccacggggaaggg

SEQ ID NO: 1701892 - RNA, 19 nt, Artificial Sequence
  Description of Artificial Sequence: Synthetic oligonucleotide
uggccugugguagaacauu

SEQ ID NO: 1701893 - RNA, 19 nt, Artificial Sequence
  Description of Artificial Sequence: Synthetic oligonucleotide
aggcggacugcagagucca

SEQ ID NO: 1701894 - RNA, 19 nt, Artificial Sequence
  Description of Artificial Sequence: Synthetic oligonucleotide
uaacggugggaugcagagu

SEQ ID NO: 1701895 - RNA, 19 nt, Artificial Sequence
  Description of Artificial Sequence: Synthetic oligonucleotide
ccaaccucccucccguugc

SEQ ID NO: 1701896 - RNA, 19 nt, Artificial Sequence
  Description of Artificial Sequence: Synthetic oligonucleotide
agggagggccgauggguga

SEQ ID NO: 1701897 - RNA, 19 nt, Artificial Sequence
  Description of Artificial Sequence: Synthetic oligonucleotide
cucaaacuuccagccuccc

SEQ ID NO: 1701898 - RNA, 19 nt, Artificial Sequence
  Description of Artificial Sequence: Synthetic oligonucleotide
augugaucugagaguauaa

SEQ ID NO: 1701899 - RNA, 19 nt, Artificial Sequence
  Description of Artificial Sequence: Synthetic oligonucleotide
gcaauucagaccgcuauaa

SEQ ID NO: 1701900 - RNA, 19 nt, Artificial Sequence
  Description of Artificial Sequence: Synthetic oligonucleotide
acccuagaggauggcaaca

SEQ ID NO: 1701901 - RNA, 19 nt, Artificial Sequence
  Description of Artificial Sequence: Synthetic oligonucleotide
gccuuccaaacccuccacc

SEQ ID NO: 1701902 - RNA, 19 nt, Artificial Sequence
  Description of Artificial Sequence: Synthetic oligonucleotide
cauucgggccaugccaauc

SEQ ID NO: 1701903 - RNA, 19 nt, Artificial Sequence
  Description of Artificial Sequence: Synthetic oligonucleotide
ccuccagaccaggacaucc

SEQ ID NO: 1701904 - RNA, 19 nt, Artificial Sequence
  Description of Artificial Sequence: Synthetic oligonucleotide
gagcagaccucaggguaac

SEQ ID NO: 1701905 - RNA, 19 nt, Artificial Sequence
  Description of Artificial Sequence: Synthetic oligonucleotide
acggggaagggaaugcuuu

SEQ ID NO: 1701906 - RNA, 19 nt, Artificial Sequence
  Description of Artificial Sequence: Synthetic oligonucleotide
gggaguuaccacggggaag

SEQ ID NO: 1701907 - RNA, 19 nt, Artificial Sequence
  Description of Artificial Sequence: Synthetic oligonucleotide
gccugugguagaacauucg

SEQ ID NO: 1701908 - RNA, 19 nt, Artificial Sequence
  Description of Artificial Sequence: Synthetic oligonucleotide
gcugcagucucgccaagga

SEQ ID NO: 1701909 - RNA, 19 nt, Artificial Sequence
  Description of Artificial Sequence: Synthetic oligonucleotide
agugcgauaccagcaucuu

SEQ ID NO: 1701910 - RNA, 19 nt, Artificial Sequence
  Description of Artificial Sequence: Synthetic oligonucleotide
ggcuucagguaaagcaggc

SEQ ID NO: 1701911 - RNA, 19 nt, Artificial Sequence
  Description of Artificial Sequence: Synthetic oligonucleotide
ccagcugcuguuccgaaca

SEQ ID NO: 1701912 - RNA, 19 nt, Artificial Sequence
  Description of Artificial Sequence: Synthetic oligonucleotide
agcagaccucaggguaacg

SEQ ID NO: 1701913 - RNA, 19 nt, Artificial Sequence
  Description of Artificial Sequence: Synthetic oligonucleotide
augcacgaugccccaggau

SEQ ID NO: 1701914 - RNA, 19 nt, Artificial Sequence
  Description of Artificial Sequence: Synthetic oligonucleotide
agggaaugcuuugggcccu

SEQ ID NO: 1701915 - RNA, 19 nt, Artificial Sequence
  Description of Artificial Sequence: Synthetic oligonucleotide
cuaugccccauuuggcugu

SEQ ID NO: 1701916 - RNA, 19 nt, Artificial Sequence
  Description of Artificial Sequence: Synthetic oligonucleotide
accgugccauucugggagu

SEQ ID NO: 1701917 - RNA, 19 nt, Artificial Sequence
  Description of Artificial Sequence: Synthetic oligonucleotide
cacgaugccccaggauggc

SEQ ID NO: 1701918 - RNA, 19 nt, Artificial Sequence
  Description of Artificial Sequence: Synthetic oligonucleotide
acauucgggccaugccaau

SEQ ID NO: 1701919 - RNA, 19 nt, Artificial Sequence
  Description of Artificial Sequence: Synthetic oligonucleotide
cagcugcuguuccgaacag

SEQ ID NO: 1701920 - RNA, 19 nt, Artificial Sequence
  Description of Artificial Sequence: Synthetic oligonucleotide
gccccauuuggcuguuucc

SEQ ID NO: 1701921 - RNA, 19 nt, Artificial Sequence
  Description of Artificial Sequence: Synthetic oligonucleotide
ccuuccagucacacacagc

SEQ ID NO: 1701922 - RNA, 19 nt, Artificial Sequence
  Description of Artificial Sequence: Synthetic oligonucleotide
gguaacggugggaugcaga

SEQ ID NO: 1701923 - RNA, 19 nt, Artificial Sequence
  Description of Artificial Sequence: Synthetic oligonucleotide
aggguaacggugggaugca

SEQ ID NO: 1701924 - RNA, 19 nt, Artificial Sequence
  Description of Artificial Sequence: Synthetic oligonucleotide
ccgcuauaaacugggaguc

SEQ ID NO: 1701925 - RNA, 19 nt, Artificial Sequence
  Description of Artificial Sequence: Synthetic oligonucleotide
cacucauccaggagggcgu

SEQ ID NO: 1701926 - RNA, 19 nt, Artificial Sequence
  Description of Artificial Sequence: Synthetic oligonucleotide
ggagaugcacgaugcccca

SEQ ID NO: 1701927 - RNA, 19 nt, Artificial Sequence
  Description of Artificial Sequence: Synthetic oligonucleotide
ugcuggcagggcgcucacg

SEQ ID NO: 1701928 - RNA, 19 nt, Artificial Sequence
  Description of Artificial Sequence: Synthetic oligonucleotide
ggcaauucagaccgcuaua

SEQ ID NO: 1701929 - RNA, 19 nt, Artificial Sequence
  Description of Artificial Sequence: Synthetic oligonucleotide
ccagaccaggacauccuuc

SEQ ID NO: 1701930 - RNA, 19 nt, Artificial Sequence
  Description of Artificial Sequence: Synthetic oligonucleotide
ggcguacuuuggccugugg

SEQ ID NO: 1701931 - RNA, 19 nt, Artificial Sequence
  Description of Artificial Sequence: Synthetic oligonucleotide
cuuccauagggagggccga

SEQ ID NO: 1701932 - RNA, 19 nt, Artificial Sequence
  Description of Artificial Sequence: Synthetic oligonucleotide
ggcugcagucucgccaagg

SEQ ID NO: 1701933 - RNA, 19 nt, Artificial Sequence
  Description of Artificial Sequence: Synthetic oligonucleotide
gggauggaucaaaggaaca

SEQ ID NO: 1701934 - RNA, 19 nt, Artificial Sequence
  Description of Artificial Sequence: Synthetic oligonucleotide
ggagggcguacuuuggccu

SEQ ID NO: 1701935 - RNA, 19 nt, Artificial Sequence
  Description of Artificial Sequence: Synthetic oligonucleotide
aggcuuaggcggacugcag

SEQ ID NO: 1701936 - RNA, 19 nt, Artificial Sequence
  Description of Artificial Sequence: Synthetic oligonucleotide
ggcccuguuugauccuaug

SEQ ID NO: 1701937 - RNA, 19 nt, Artificial Sequence
  Description of Artificial Sequence: Synthetic oligonucleotide
ggugaggggccagguuugg

SEQ ID NO: 1701938 - RNA, 19 nt, Artificial Sequence
  Description of Artificial Sequence: Synthetic oligonucleotide
gcuacccuagaggauggca

SEQ ID NO: 1701939 - RNA, 19 nt, Artificial Sequence
  Description of Artificial Sequence: Synthetic oligonucleotide
cagucaaguggggacaccu

SEQ ID NO: 1701940 - RNA, 19 nt, Artificial Sequence
  Description of Artificial Sequence: Synthetic oligonucleotide
agggccgaugggugaugga

SEQ ID NO: 1701941 - RNA, 19 nt, Artificial Sequence
  Description of Artificial Sequence: Synthetic oligonucleotide
ugggcccuguuugauccua

SEQ ID NO: 1701942 - RNA, 19 nt, Artificial Sequence
  Description of Artificial Sequence: Synthetic oligonucleotide
gugaggggccagguuuggc

SEQ ID NO: 1701943 - RNA, 19 nt, Artificial Sequence
  Description of Artificial Sequence: Synthetic oligonucleotide
acgaugccccaggauggcu

SEQ ID NO: 1701944 - RNA, 19 nt, Artificial Sequence
  Description of Artificial Sequence: Synthetic oligonucleotide
agaccgcuauaaacuggga

SEQ ID NO: 1701945 - RNA, 19 nt, Artificial Sequence
  Description of Artificial Sequence: Synthetic oligonucleotide
ccaaggaucuggcagaguu

SEQ ID NO: 1701946 - RNA, 19 nt, Artificial Sequence
  Description of Artificial Sequence: Synthetic oligonucleotide
agggcguacuuuggccugu

SEQ ID NO: 1701947 - RNA, 19 nt, Artificial Sequence
  Description of Artificial Sequence: Synthetic oligonucleotide
ggagcagaccucaggguaa

SEQ ID NO: 1701948 - RNA, 19 nt, Artificial Sequence
  Description of Artificial Sequence: Synthetic oligonucleotide
ugcuggcaguaaggggugu

SEQ ID NO: 1701949 - RNA, 19 nt, Artificial Sequence
  Description of Artificial Sequence: Synthetic oligonucleotide
gcguacuuuggccuguggu

SEQ ID NO: 1701950 - RNA, 19 nt, Artificial Sequence
  Description of Artificial Sequence: Synthetic oligonucleotide
cuuggguuucaggagggau

SEQ ID NO: 1701951 - RNA, 19 nt, Artificial Sequence
  Description of Artificial Sequence: Synthetic oligonucleotide
agcaggcaauuggcuagga

SEQ ID NO: 1701952 - RNA, 19 nt, Artificial Sequence
  Description of Artificial Sequence: Synthetic oligonucleotide
cuguuccgaacagcccuuc

SEQ ID NO: 1701953 - RNA, 19 nt, Artificial Sequence
  Description of Artificial Sequence: Synthetic oligonucleotide
gaaugcuuugggcccuguu

SEQ ID NO: 1701954 - RNA, 19 nt, Artificial Sequence
  Description of Artificial Sequence: Synthetic oligonucleotide
gcuggcagggcgcucacgu

SEQ ID NO: 1701955 - RNA, 19 nt, Artificial Sequence
  Description of Artificial Sequence: Synthetic oligonucleotide
ggccuuccaaacccuccac

SEQ ID NO: 1701956 - RNA, 19 nt, Artificial Sequence
  Description of Artificial Sequence: Synthetic oligonucleotide
gcuggcaguaaggggugug

SEQ ID NO: 1701957 - RNA, 19 nt, Artificial Sequence
  Description of Artificial Sequence: Synthetic oligonucleotide
cuauaagggcacaguucau

SEQ ID NO: 1701958 - RNA, 19 nt, Artificial Sequence
  Description of Artificial Sequence: Synthetic oligonucleotide
ccuccccagagaaaaguaa

SEQ ID NO: 1701959 - RNA, 19 nt, Artificial Sequence
  Description of Artificial Sequence: Synthetic oligonucleotide
gggguguguccugugggac

SEQ ID NO: 1701960 - RNA, 19 nt, Artificial Sequence
  Description of Artificial Sequence: Synthetic oligonucleotide
ccucccucccguugccagg

SEQ ID NO: 1701961 - RNA, 19 nt, Artificial Sequence
  Description of Artificial Sequence: Synthetic oligonucleotide
gggaugcagaguguuccca

SEQ ID NO: 1701962 - RNA, 19 nt, Artificial Sequence
  Description of Artificial Sequence: Synthetic oligonucleotide
gggaccacccagucaccuc

SEQ ID NO: 1701963 - RNA, 19 nt, Artificial Sequence
  Description of Artificial Sequence: Synthetic oligonucleotide
ccaaacccuccaccccucc

SEQ ID NO: 1701964 - RNA, 19 nt, Artificial Sequence
  Description of Artificial Sequence: Synthetic oligonucleotide
gcagucucgccaaggaucu

SEQ ID NO: 1701965 - RNA, 19 nt, Artificial Sequence
  Description of Artificial Sequence: Synthetic oligonucleotide
gccaauccucugcuucuca

SEQ ID NO: 1701966 - RNA, 19 nt, Artificial Sequence
  Description of Artificial Sequence: Synthetic oligonucleotide
gccagguuuggcaccagaa

SEQ ID NO: 1701967 - RNA, 19 nt, Artificial Sequence
  Description of Artificial Sequence: Synthetic oligonucleotide
gguccccagucaagugggg

SEQ ID NO: 1701968 - RNA, 19 nt, Artificial Sequence
  Description of Artificial Sequence: Synthetic oligonucleotide
ucccucccguugccaggac

SEQ ID NO: 1701969 - RNA, 19 nt, Artificial Sequence
  Description of Artificial Sequence: Synthetic oligonucleotide
cucccucccguugccagga

SEQ ID NO: 1701970 - RNA, 19 nt, Artificial Sequence
  Description of Artificial Sequence: Synthetic oligonucleotide
cccacaaccaucaggcuuu

SEQ ID NO: 1701971 - RNA, 19 nt, Artificial Sequence
  Description of Artificial Sequence: Synthetic oligonucleotide
acggugggaugcagagugu

SEQ ID NO: 1701972 - RNA, 19 nt, Artificial Sequence
  Description of Artificial Sequence: Synthetic oligonucleotide
ggguaacggugggaugcag

SEQ ID NO: 1701973 - RNA, 19 nt, Artificial Sequence
  Description of Artificial Sequence: Synthetic oligonucleotide
cuuaggcggacugcagagu

SEQ ID NO: 1701974 - RNA, 19 nt, Artificial Sequence
  Description of Artificial Sequence: Synthetic oligonucleotide
gugcgauaccagcaucuuu

SEQ ID NO: 1701975 - RNA, 19 nt, Artificial Sequence
  Description of Artificial Sequence: Synthetic oligonucleotide
gcagaguguucccauucau

SEQ ID NO: 1701976 - RNA, 19 nt, Artificial Sequence
  Description of Artificial Sequence: Synthetic oligonucleotide
ccuagaggauggcaacaaa

SEQ ID NO: 1701977 - RNA, 19 nt, Artificial Sequence
  Description of Artificial Sequence: Synthetic oligonucleotide
gcccuauaagggcacaguu

SEQ ID NO: 1701978 - RNA, 19 nt, Artificial Sequence
  Description of Artificial Sequence: Synthetic oligonucleotide
ggcauuggcuggcuacccu

SEQ ID NO: 1701979 - RNA, 19 nt, Artificial Sequence
  Description of Artificial Sequence: Synthetic oligonucleotide
ccguugccaggacuuggug

SEQ ID NO: 1701980 - RNA, 19 nt, Artificial Sequence
  Description of Artificial Sequence: Synthetic oligonucleotide
ccagggcuacauucuucuc

SEQ ID NO: 1701981 - RNA, 19 nt, Artificial Sequence
  Description of Artificial Sequence: Synthetic oligonucleotide
cacggggaagggaaugcuu

SEQ ID NO: 1701982 - RNA, 19 nt, Artificial Sequence
  Description of Artificial Sequence: Synthetic oligonucleotide
cugcagucucgccaaggau

SEQ ID NO: 1701983 - RNA, 19 nt, Artificial Sequence
  Description of Artificial Sequence: Synthetic oligonucleotide
ccagucaaguggggacacc

SEQ ID NO: 1701984 - RNA, 19 nt, Artificial Sequence
  Description of Artificial Sequence: Synthetic oligonucleotide
gcaauuggcuaggaggcuu

SEQ ID NO: 1701985 - RNA, 19 nt, Artificial Sequence
  Description of Artificial Sequence: Synthetic oligonucleotide
aucuugccuuccacaucaa

SEQ ID NO: 1701986 - RNA, 19 nt, Artificial Sequence
  Description of Artificial Sequence: Synthetic oligonucleotide
ggcuacccuagaggauggc

SEQ ID NO: 1701987 - RNA, 19 nt, Artificial Sequence
  Description of Artificial Sequence: Synthetic oligonucleotide
ccugcaucuuggggaugcc

SEQ ID NO: 1701988 - RNA, 19 nt, Artificial Sequence
  Description of Artificial Sequence: Synthetic oligonucleotide
cccuccccaucaaacugca

SEQ ID NO: 1701989 - RNA, 19 nt, Artificial Sequence
  Description of Artificial Sequence: Synthetic oligonucleotide
ggccgaugggugauggaua

SEQ ID NO: 1701990 - RNA, 19 nt, Artificial Sequence
  Description of Artificial Sequence: Synthetic oligonucleotide
gggccgaugggugauggau

SEQ ID NO: 1701991 - RNA, 19 nt, Artificial Sequence
  Description of Artificial Sequence: Synthetic oligonucleotide
cguuggcaauucagaccgc

SEQ ID NO: 1701992 - RNA, 19 nt, Artificial Sequence
  Description of Artificial Sequence: Synthetic oligonucleotide
ggagggccgaugggugaug

SEQ ID NO: 1701993 - RNA, 19 nt, Artificial Sequence
  Description of Artificial Sequence: Synthetic oligonucleotide
ggcaauuggcuaggaggcu

SEQ ID NO: 1701994 - RNA, 19 nt, Artificial Sequence
  Description of Artificial Sequence: Synthetic oligonucleotide
gcgcucacguuggcaauuc

SEQ ID NO: 1701995 - RNA, 19 nt, Artificial Sequence
  Description of Artificial Sequence: Synthetic oligonucleotide
gggcguacuuuggccugug

SEQ ID NO: 1701996 - RNA, 19 nt, Artificial Sequence
  Description of Artificial Sequence: Synthetic oligonucleotide
gaaggcgccccugcaucuu

SEQ ID NO: 1701997 - RNA, 19 nt, Artificial Sequence
  Description of Artificial Sequence: Synthetic oligonucleotide
ggcggacugcagaguccag

SEQ ID NO: 1701998 - RNA, 19 nt, Artificial Sequence
  Description of Artificial Sequence: Synthetic oligonucleotide
ccgaacagcccuuccuccu

SEQ ID NO: 1701999 - RNA, 19 nt, Artificial Sequence
  Description of Artificial Sequence: Synthetic oligonucleotide
caggggcauuggcuggcua

SEQ ID NO: 1702000 - RNA, 19 nt, Artificial Sequence
  Description of Artificial Sequence: Synthetic oligonucleotide
cccguugccaggacuuggu

SEQ ID NO: 1702001 - RNA, 19 nt, Artificial Sequence
  Description of Artificial Sequence: Synthetic oligonucleotide
ccugaaggcgccccugcau

SEQ ID NO: 1702002 - RNA, 19 nt, Artificial Sequence
  Description of Artificial Sequence: Synthetic oligonucleotide
ccucaggguaacgguggga

SEQ ID NO: 1702003 - RNA, 19 nt, Artificial Sequence
  Description of Artificial Sequence: Synthetic oligonucleotide
gcuggcuacccuagaggau

SEQ ID NO: 1702004 - RNA, 19 nt, Artificial Sequence
  Description of Artificial Sequence: Synthetic oligonucleotide
gcucagccauacugcugua

SEQ ID NO: 1702005 - RNA, 19 nt, Artificial Sequence
  Description of Artificial Sequence: Synthetic oligonucleotide
ccccaucaaacugcagcaa

SEQ ID NO: 1702006 - RNA, 19 nt, Artificial Sequence
  Description of Artificial Sequence: Synthetic oligonucleotide
gcuguuccgaacagcccuu

SEQ ID NO: 1702007 - RNA, 19 nt, Artificial Sequence
  Description of Artificial Sequence: Synthetic oligonucleotide
augccccauuuggcuguuu

SEQ ID NO: 1702008 - RNA, 19 nt, Artificial Sequence
  Description of Artificial Sequence: Synthetic oligonucleotide
gguggcggagaugcacgau

SEQ ID NO: 1702009 - RNA, 19 nt, Artificial Sequence
  Description of Artificial Sequence: Synthetic oligonucleotide
ccccuccccagagaaaagu

SEQ ID NO: 1702010 - RNA, 19 nt, Artificial Sequence
  Description of Artificial Sequence: Synthetic oligonucleotide
ggcgcucacguuggcaauu

SEQ ID NO: 1702011 - RNA, 19 nt, Artificial Sequence
  Description of Artificial Sequence: Synthetic oligonucleotide
ggaaugcuuugggcccugu

SEQ ID NO: 1702012 - RNA, 19 nt, Artificial Sequence
  Description of Artificial Sequence: Synthetic oligonucleotide
gggcgcucacguuggcaau

SEQ ID NO: 1702013 - RNA, 19 nt, Artificial Sequence
  Description of Artificial Sequence: Synthetic oligonucleotide
ggguuucaggagggaugua

SEQ ID NO: 1702014 - RNA, 19 nt, Artificial Sequence
  Description of Artificial Sequence: Synthetic oligonucleotide
gccaaggaucuggcagagu

SEQ ID NO: 1702015 - RNA, 19 nt, Artificial Sequence
  Description of Artificial Sequence: Synthetic oligonucleotide
cccucccguugccaggacu

SEQ ID NO: 1702016 - RNA, 19 nt, Artificial Sequence
  Description of Artificial Sequence: Synthetic oligonucleotide
ccccugcaucuuggggaug

SEQ ID NO: 1702017 - RNA, 19 nt, Artificial Sequence
  Description of Artificial Sequence: Synthetic oligonucleotide
gggcccuguuugauccuau

SEQ ID NO: 1702018 - RNA, 19 nt, Artificial Sequence
  Description of Artificial Sequence: Synthetic oligonucleotide
ccgaugggugauggauagu

SEQ ID NO: 1702019 - RNA, 19 nt, Artificial Sequence
  Description of Artificial Sequence: Synthetic oligonucleotide
ccgugccauucugggaguu

SEQ ID NO: 1702020 - RNA, 19 nt, Artificial Sequence
  Description of Artificial Sequence: Synthetic oligonucleotide
ccugugggacaggggcauu

SEQ ID NO: 1702021 - RNA, 19 nt, Artificial Sequence
  Description of Artificial Sequence: Synthetic oligonucleotide
aacaaaauuuaugauauac

SEQ ID NO: 1702022 - RNA, 19 nt, Artificial Sequence
  Description of Artificial Sequence: Synthetic oligonucleotide
auauaauagaauauuagcc

SEQ ID NO: 1702023 - RNA, 19 nt, Artificial Sequence
  Description of Artificial Sequence: Synthetic oligonucleotide
uauauaauagaauauuagc

SEQ ID NO: 1702024 - RNA, 19 nt, Artificial Sequence
  Description of Artificial Sequence: Synthetic oligonucleotide
uuuacaguaccacagaagc

SEQ ID NO: 1702025 - RNA, 19 nt, Artificial Sequence
  Description of Artificial Sequence: Synthetic oligonucleotide
aauagaauauuagccaugc

SEQ ID NO: 1702026 - RNA, 19 nt, Artificial Sequence
  Description of Artificial Sequence: Synthetic oligonucleotide
uguauaucaaaucugaauc

SEQ ID NO: 1702027 - RNA, 19 nt, Artificial Sequence
  Description of Artificial Sequence: Synthetic oligonucleotide
uauaauagaauauuagcca

SEQ ID NO: 1702028 - RNA, 19 nt, Artificial Sequence
  Description of Artificial Sequence: Synthetic oligonucleotide
uuuaugauauacaucauac

SEQ ID NO: 1702029 - RNA, 19 nt, Artificial Sequence
  Description of Artificial Sequence: Synthetic oligonucleotide
uuaggaauaaaauaucuca

SEQ ID NO: 1702030 - RNA, 19 nt, Artificial Sequence
  Description of Artificial Sequence: Synthetic oligonucleotide
uuauauuacacaauucuac

SEQ ID NO: 1702031 - RNA, 19 nt, Artificial Sequence
  Description of Artificial Sequence: Synthetic oligonucleotide
uagcuaaucauaaugacga

SEQ ID NO: 1702032 - RNA, 19 nt, Artificial Sequence
  Description of Artificial Sequence: Synthetic oligonucleotide
uagucuaguacucagaaac

SEQ ID NO: 1702033 - RNA, 19 nt, Artificial Sequence
  Description of Artificial Sequence: Synthetic oligonucleotide
aggaauaaaauaucucagc

SEQ ID NO: 1702034 - RNA, 19 nt, Artificial Sequence
  Description of Artificial Sequence: Synthetic oligonucleotide
aauuacugaauuauauuac

SEQ ID NO: 1702035 - RNA, 19 nt, Artificial Sequence
  Description of Artificial Sequence: Synthetic oligonucleotide
ucaaguauacaaacuaugc

SEQ ID NO: 1702036 - RNA, 19 nt, Artificial Sequence
  Description of Artificial Sequence: Synthetic oligonucleotide
aguacucagaaacacuacc

SEQ ID NO: 1702037 - RNA, 19 nt, Artificial Sequence
  Description of Artificial Sequence: Synthetic oligonucleotide
ugaauuauauuacacaauu

SEQ ID NO: 1702038 - RNA, 19 nt, Artificial Sequence
  Description of Artificial Sequence: Synthetic oligonucleotide
ucugauaacauccuuuacu

SEQ ID NO: 1702039 - RNA, 19 nt, Artificial Sequence
  Description of Artificial Sequence: Synthetic oligonucleotide
uacacauuggacacguucg

SEQ ID NO: 1702040 - RNA, 19 nt, Artificial Sequence
  Description of Artificial Sequence: Synthetic oligonucleotide
cuaaucauaaugacgacug

SEQ ID NO: 1702041 - RNA, 19 nt, Artificial Sequence
  Description of Artificial Sequence: Synthetic oligonucleotide
uggauagcuaaucauaaug

SEQ ID NO: 1702042 - RNA, 19 nt, Artificial Sequence
  Description of Artificial Sequence: Synthetic oligonucleotide
gaauaaaauaucucagccc

SEQ ID NO: 1702043 - RNA, 19 nt, Artificial Sequence
  Description of Artificial Sequence: Synthetic oligonucleotide
uaggaauaaaauaucucag

SEQ ID NO: 1702044 - RNA, 19 nt, Artificial Sequence
  Description of Artificial Sequence: Synthetic oligonucleotide
gacgcaacaaaauuuauga

SEQ ID NO: 1702045 - RNA, 19 nt, Artificial Sequence
  Description of Artificial Sequence: Synthetic oligonucleotide
uuuacaaguucuaaagagu

SEQ ID NO: 1702046 - RNA, 19 nt, Artificial Sequence
  Description of Artificial Sequence: Synthetic oligonucleotide
uugguuuacaguaccacag

SEQ ID NO: 1702047 - RNA, 19 nt, Artificial Sequence
  Description of Artificial Sequence: Synthetic oligonucleotide
aguucuaaagagucucugc

SEQ ID NO: 1702048 - RNA, 19 nt, Artificial Sequence
  Description of Artificial Sequence: Synthetic oligonucleotide
aauuaaauguccuguaguu

SEQ ID NO: 1702049 - RNA, 19 nt, Artificial Sequence
  Description of Artificial Sequence: Synthetic oligonucleotide
ugaauuccugcauaugacg

SEQ ID NO: 1702050 - RNA, 19 nt, Artificial Sequence
  Description of Artificial Sequence: Synthetic oligonucleotide
acagaagcuagucuaguac

SEQ ID NO: 1702051 - RNA, 19 nt, Artificial Sequence
  Description of Artificial Sequence: Synthetic oligonucleotide
auaaugacgacuguauuuc

SEQ ID NO: 1702052 - RNA, 19 nt, Artificial Sequence
  Description of Artificial Sequence: Synthetic oligonucleotide
uuuaggaauaaaauaucuc

SEQ ID NO: 1702053 - RNA, 19 nt, Artificial Sequence
  Description of Artificial Sequence: Synthetic oligonucleotide
guauauaauagaauauuag

SEQ ID NO: 1702054 - RNA, 19 nt, Artificial Sequence
  Description of Artificial Sequence: Synthetic oligonucleotide
ucaaguuuacacauuggac

SEQ ID NO: 1702055 - RNA, 19 nt, Artificial Sequence
  Description of Artificial Sequence: Synthetic oligonucleotide
aauauuagccaugcuaaug

SEQ ID NO: 1702056 - RNA, 19 nt, Artificial Sequence
  Description of Artificial Sequence: Synthetic oligonucleotide
uuguacaccaccaccgccg

SEQ ID NO: 1702057 - RNA, 19 nt, Artificial Sequence
  Description of Artificial Sequence: Synthetic oligonucleotide
auuacugaauuauauuaca

SEQ ID NO: 1702058 - RNA, 19 nt, Artificial Sequence
  Description of Artificial Sequence: Synthetic oligonucleotide
ggaauaaaauaucucagcc

SEQ ID NO: 1702059 - RNA, 19 nt, Artificial Sequence
  Description of Artificial Sequence: Synthetic oligonucleotide
ucccaauagaaacacuucc

SEQ ID NO: 1702060 - RNA, 19 nt, Artificial Sequence
  Description of Artificial Sequence: Synthetic oligonucleotide
ucuaaagagucucugcuuc

SEQ ID NO: 1702061 - RNA, 19 nt, Artificial Sequence
  Description of Artificial Sequence: Synthetic oligonucleotide
auaauagaauauuagccau

SEQ ID NO: 1702062 - RNA, 19 nt, Artificial Sequence
  Description of Artificial Sequence: Synthetic oligonucleotide
acugugagccaguauauag

SEQ ID NO: 1702063 - RNA, 19 nt, Artificial Sequence
  Description of Artificial Sequence: Synthetic oligonucleotide
caugcuaaugaaauaauca

SEQ ID NO: 1702064 - RNA, 19 nt, Artificial Sequence
  Description of Artificial Sequence: Synthetic oligonucleotide
uuacugaauuauauuacac

SEQ ID NO: 1702065 - RNA, 19 nt, Artificial Sequence
  Description of Artificial Sequence: Synthetic oligonucleotide
gauaacauccuuuacuuua

SEQ ID NO: 1702066 - RNA, 19 nt, Artificial Sequence
  Description of Artificial Sequence: Synthetic oligonucleotide
ugggaugucacacucagau

SEQ ID NO: 1702067 - RNA, 19 nt, Artificial Sequence
  Description of Artificial Sequence: Synthetic oligonucleotide
uuguauaucaaaucugaau

SEQ ID NO: 1702068 - RNA, 19 nt, Artificial Sequence
  Description of Artificial Sequence: Synthetic oligonucleotide
uaauagaauauuagccaug

SEQ ID NO: 1702069 - RNA, 19 nt, Artificial Sequence
  Description of Artificial Sequence: Synthetic oligonucleotide
aaauaauauccacuguuuu

SEQ ID NO: 1702070 - RNA, 19 nt, Artificial Sequence
  Description of Artificial Sequence: Synthetic oligonucleotide
gauagcuaaucauaaugac

SEQ ID NO: 1702071 - RNA, 19 nt, Artificial Sequence
  Description of Artificial Sequence: Synthetic oligonucleotide
caguauauaggaaacgcug

SEQ ID NO: 1702072 - RNA, 19 nt, Artificial Sequence
  Description of Artificial Sequence: Synthetic oligonucleotide
ugcgacaugggcucggugg

SEQ ID NO: 1702073 - RNA, 19 nt, Artificial Sequence
  Description of Artificial Sequence: Synthetic oligonucleotide
ugaucaauuacugaauuau

SEQ ID NO: 1702074 - RNA, 19 nt, Artificial Sequence
  Description of Artificial Sequence: Synthetic oligonucleotide
agaaacacuacccuccaca

SEQ ID NO: 1702075 - RNA, 19 nt, Artificial Sequence
  Description of Artificial Sequence: Synthetic oligonucleotide
gguaaaguaaaauaauauc

SEQ ID NO: 1702076 - RNA, 19 nt, Artificial Sequence
  Description of Artificial Sequence: Synthetic oligonucleotide
ugcuaaugaaauaaucauc

SEQ ID NO: 1702077 - RNA, 19 nt, Artificial Sequence
  Description of Artificial Sequence: Synthetic oligonucleotide
ugacgcaacaaaauuuaug

SEQ ID NO: 1702078 - RNA, 19 nt, Artificial Sequence
  Description of Artificial Sequence: Synthetic oligonucleotide
aauaucucagcccuuugua

SEQ ID NO: 1702079 - RNA, 19 nt, Artificial Sequence
  Description of Artificial Sequence: Synthetic oligonucleotide
ucuaaaagccugagaaaca

SEQ ID NO: 1702080 - RNA, 19 nt, Artificial Sequence
  Description of Artificial Sequence: Synthetic oligonucleotide
aaacgcuguauauaauaga

SEQ ID NO: 1702081 - RNA, 19 nt, Artificial Sequence
  Description of Artificial Sequence: Synthetic oligonucleotide
ucugacgcaacaaaauuua

SEQ ID NO: 1702082 - RNA, 19 nt, Artificial Sequence
  Description of Artificial Sequence: Synthetic oligonucleotide
auaugacggguaccaaucc

SEQ ID NO: 1702083 - RNA, 19 nt, Artificial Sequence
  Description of Artificial Sequence: Synthetic oligonucleotide
aaacaggggcgguuuggcc

SEQ ID NO: 1702084 - RNA, 19 nt, Artificial Sequence
  Description of Artificial Sequence: Synthetic oligonucleotide
ucuaguacucagaaacacu

SEQ ID NO: 1702085 - RNA, 19 nt, Artificial Sequence
  Description of Artificial Sequence: Synthetic oligonucleotide
uauacaaacuaugcccuag

SEQ ID NO: 1702086 - RNA, 19 nt, Artificial Sequence
  Description of Artificial Sequence: Synthetic oligonucleotide
auuuaugauauacaucaua

SEQ ID NO: 1702087 - RNA, 19 nt, Artificial Sequence
  Description of Artificial Sequence: Synthetic oligonucleotide
aacgcuguauauaauagaa

SEQ ID NO: 1702088 - RNA, 19 nt, Artificial Sequence
  Description of Artificial Sequence: Synthetic oligonucleotide
uucaauacacacugcacaa

SEQ ID NO: 1702089 - RNA, 19 nt, Artificial Sequence
  Description of Artificial Sequence: Synthetic oligonucleotide
caugggucaaugcauauuc

SEQ ID NO: 1702090 - RNA, 19 nt, Artificial Sequence
  Description of Artificial Sequence: Synthetic oligonucleotide
agaauauuagccaugcuaa

SEQ ID NO: 1702091 - RNA, 19 nt, Artificial Sequence
  Description of Artificial Sequence: Synthetic oligonucleotide
agggaaagcccauuugauc

SEQ ID NO: 1702092 - RNA, 19 nt, Artificial Sequence
  Description of Artificial Sequence: Synthetic oligonucleotide
cugugagccaguauauagg

SEQ ID NO: 1702093 - RNA, 19 nt, Artificial Sequence
  Description of Artificial Sequence: Synthetic oligonucleotide
aaacacuacccuccacauc

SEQ ID NO: 1702094 - RNA, 19 nt, Artificial Sequence
  Description of Artificial Sequence: Synthetic oligonucleotide
cauaugacggguaccaauc

SEQ ID NO: 1702095 - RNA, 19 nt, Artificial Sequence
  Description of Artificial Sequence: Synthetic oligonucleotide
uuuguauaucaaaucugaa

SEQ ID NO: 1702096 - RNA, 19 nt, Artificial Sequence
  Description of Artificial Sequence: Synthetic oligonucleotide
auacacacugcacaauucu

SEQ ID NO: 1702097 - RNA, 19 nt, Artificial Sequence
  Description of Artificial Sequence: Synthetic oligonucleotide
uaugacggguaccaauccc

SEQ ID NO: 1702098 - RNA, 19 nt, Artificial Sequence
  Description of Artificial Sequence: Synthetic oligonucleotide
ugacaucaaguuuacacau

SEQ ID NO: 1702099 - RNA, 19 nt, Artificial Sequence
  Description of Artificial Sequence: Synthetic oligonucleotide
uauaggaaacgcuguauau

SEQ ID NO: 1702100 - RNA, 19 nt, Artificial Sequence
  Description of Artificial Sequence: Synthetic oligonucleotide
aagguaaaguaaaauaaua

SEQ ID NO: 1702101 - RNA, 19 nt, Artificial Sequence
  Description of Artificial Sequence: Synthetic oligonucleotide
gaggugcacuagcagaugg

SEQ ID NO: 1702102 - RNA, 19 nt, Artificial Sequence
  Description of Artificial Sequence: Synthetic oligonucleotide
ucaucaucgugaugaaggc

SEQ ID NO: 1702103 - RNA, 19 nt, Artificial Sequence
  Description of Artificial Sequence: Synthetic oligonucleotide
ucuggaauagguagcuccu

SEQ ID NO: 1702104 - RNA, 19 nt, Artificial Sequence
  Description of Artificial Sequence: Synthetic oligonucleotide
ugcuuuacgguguguagug

SEQ ID NO: 1702105 - RNA, 19 nt, Artificial Sequence
  Description of Artificial Sequence: Synthetic oligonucleotide
uacaguaccacagaagcua

SEQ ID NO: 1702106 - RNA, 19 nt, Artificial Sequence
  Description of Artificial Sequence: Synthetic oligonucleotide
acgacuguauuuccuguuc

SEQ ID NO: 1702107 - RNA, 19 nt, Artificial Sequence
  Description of Artificial Sequence: Synthetic oligonucleotide
auggaagguugcuuucagc

SEQ ID NO: 1702108 - RNA, 19 nt, Artificial Sequence
  Description of Artificial Sequence: Synthetic oligonucleotide
uucuaugauucugacuucc

SEQ ID NO: 1702109 - RNA, 19 nt, Artificial Sequence
  Description of Artificial Sequence: Synthetic oligonucleotide
aaucauaaugacgacugua

SEQ ID NO: 1702110 - RNA, 19 nt, Artificial Sequence
  Description of Artificial Sequence: Synthetic oligonucleotide
uuucucguuuuacaaguuc

SEQ ID NO: 1702111 - RNA, 19 nt, Artificial Sequence
  Description of Artificial Sequence: Synthetic oligonucleotide
ucguuuuacaaguucuaaa

SEQ ID NO: 1702112 - RNA, 19 nt, Artificial Sequence
  Description of Artificial Sequence: Synthetic oligonucleotide
auucugauaacauccuuua

SEQ ID NO: 1702113 - RNA, 19 nt, Artificial Sequence
  Description of Artificial Sequence: Synthetic oligonucleotide
augacgacuguauuuccug

SEQ ID NO: 1702114 - RNA, 19 nt, Artificial Sequence
  Description of Artificial Sequence: Synthetic oligonucleotide
ucaagccaaggcucugucg

SEQ ID NO: 1702115 - RNA, 19 nt, Artificial Sequence
  Description of Artificial Sequence: Synthetic oligonucleotide
uucggugauccaaaagcca

SEQ ID NO: 1702116 - RNA, 19 nt, Artificial Sequence
  Description of Artificial Sequence: Synthetic oligonucleotide
uacgguguguaguggaagc

SEQ ID NO: 1702117 - RNA, 19 nt, Artificial Sequence
  Description of Artificial Sequence: Synthetic oligonucleotide
uuuggcccagauucacucg

SEQ ID NO: 1702118 - RNA, 19 nt, Artificial Sequence
  Description of Artificial Sequence: Synthetic oligonucleotide
ucuaugauucugacuucca

SEQ ID NO: 1702119 - RNA, 19 nt, Artificial Sequence
  Description of Artificial Sequence: Synthetic oligonucleotide
agcuaaucauaaugacgac

SEQ ID NO: 1702120 - RNA, 19 nt, Artificial Sequence
  Description of Artificial Sequence: Synthetic oligonucleotide
agguaaaguaaaauaauau

SEQ ID NO: 1702121 - RNA, 19 nt, Artificial Sequence
  Description of Artificial Sequence: Synthetic oligonucleotide
auauaggaaacgcuguaua

SEQ ID NO: 1702122 - RNA, 19 nt, Artificial Sequence
  Description of Artificial Sequence: Synthetic oligonucleotide
ccuauggcaagauuucucg

SEQ ID NO: 1702123 - RNA, 19 nt, Artificial Sequence
  Description of Artificial Sequence: Synthetic oligonucleotide
ucggugauccaaaagccau

SEQ ID NO: 1702124 - RNA, 19 nt, Artificial Sequence
  Description of Artificial Sequence: Synthetic oligonucleotide
ugucuaaaagccugagaaa

SEQ ID NO: 1702125 - RNA, 19 nt, Artificial Sequence
  Description of Artificial Sequence: Synthetic oligonucleotide
cugguuguacaccaccacc

SEQ ID NO: 1702126 - RNA, 19 nt, Artificial Sequence
  Description of Artificial Sequence: Synthetic oligonucleotide
uugaucaauuacugaauua

SEQ ID NO: 1702127 - RNA, 19 nt, Artificial Sequence
  Description of Artificial Sequence: Synthetic oligonucleotide
ggcgguuuggcccagauuc

SEQ ID NO: 1702128 - RNA, 19 nt, Artificial Sequence
  Description of Artificial Sequence: Synthetic oligonucleotide
cuaguacucagaaacacua

SEQ ID NO: 1702129 - RNA, 19 nt, Artificial Sequence
  Description of Artificial Sequence: Synthetic oligonucleotide
aguauauaggaaacgcugu

SEQ ID NO: 1702130 - RNA, 19 nt, Artificial Sequence
  Description of Artificial Sequence: Synthetic oligonucleotide
uaaucauaaugacgacugu

SEQ ID NO: 1702131 - RNA, 19 nt, Artificial Sequence
  Description of Artificial Sequence: Synthetic oligonucleotide
caugcuuuacgguguguag

SEQ ID NO: 1702132 - RNA, 19 nt, Artificial Sequence
  Description of Artificial Sequence: Synthetic oligonucleotide
uuuacgguguguaguggaa

SEQ ID NO: 1702133 - RNA, 19 nt, Artificial Sequence
  Description of Artificial Sequence: Synthetic oligonucleotide
uaaugacgacuguauuucc

SEQ ID NO: 1702134 - RNA, 19 nt, Artificial Sequence
  Description of Artificial Sequence: Synthetic oligonucleotide
uaucucagcccuuuguaua

SEQ ID NO: 1702135 - RNA, 19 nt, Artificial Sequence
  Description of Artificial Sequence: Synthetic oligonucleotide
cuugguuuacaguaccaca

SEQ ID NO: 1702136 - RNA, 19 nt, Artificial Sequence
  Description of Artificial Sequence: Synthetic oligonucleotide
gaaacagaaucuugguuua

SEQ ID NO: 1702137 - RNA, 19 nt, Artificial Sequence
  Description of Artificial Sequence: Synthetic oligonucleotide
ugcacaauucucggcauca

SEQ ID NO: 1702138 - RNA, 19 nt, Artificial Sequence
  Description of Artificial Sequence: Synthetic oligonucleotide
uaguacucagaaacacuac

SEQ ID NO: 1702139 - RNA, 19 nt, Artificial Sequence
  Description of Artificial Sequence: Synthetic oligonucleotide
uucugauaacauccuuuac

SEQ ID NO: 1702140 - RNA, 19 nt, Artificial Sequence
  Description of Artificial Sequence: Synthetic oligonucleotide
aacuaugcccuagaguaaa

SEQ ID NO: 1702141 - RNA, 19 nt, Artificial Sequence
  Description of Artificial Sequence: Synthetic oligonucleotide
uccugguuguacaccacca

SEQ ID NO: 1702142 - RNA, 19 nt, Artificial Sequence
  Description of Artificial Sequence: Synthetic oligonucleotide
agaagcuagucuaguacuc

SEQ ID NO: 1702143 - RNA, 19 nt, Artificial Sequence
  Description of Artificial Sequence: Synthetic oligonucleotide
acggguaccaaucccuaug

SEQ ID NO: 1702144 - RNA, 19 nt, Artificial Sequence
  Description of Artificial Sequence: Synthetic oligonucleotide
agcuuugucuaaaagccug

SEQ ID NO: 1702145 - RNA, 19 nt, Artificial Sequence
  Description of Artificial Sequence: Synthetic oligonucleotide
guucccguagcgcuccugg

SEQ ID NO: 1702146 - RNA, 19 nt, Artificial Sequence
  Description of Artificial Sequence: Synthetic oligonucleotide
auacaaacuaugcccuaga

SEQ ID NO: 1702147 - RNA, 19 nt, Artificial Sequence
  Description of Artificial Sequence: Synthetic oligonucleotide
cuucaguagauaaauagau

SEQ ID NO: 1702148 - RNA, 19 nt, Artificial Sequence
  Description of Artificial Sequence: Synthetic oligonucleotide
uuggcccagauucacucga

SEQ ID NO: 1702149 - RNA, 19 nt, Artificial Sequence
  Description of Artificial Sequence: Synthetic oligonucleotide
uauuuccuguucccgcgug

SEQ ID NO: 1702150 - RNA, 19 nt, Artificial Sequence
  Description of Artificial Sequence: Synthetic oligonucleotide
gaaucuugguuuacaguac

SEQ ID NO: 1702151 - RNA, 19 nt, Artificial Sequence
  Description of Artificial Sequence: Synthetic oligonucleotide
gaagguugcuuucagcacu

SEQ ID NO: 1702152 - RNA, 19 nt, Artificial Sequence
  Description of Artificial Sequence: Synthetic oligonucleotide
auaucaaaucugaaucuga

SEQ ID NO: 1702153 - RNA, 19 nt, Artificial Sequence
  Description of Artificial Sequence: Synthetic oligonucleotide
guuuggcccagauucacuc

SEQ ID NO: 1702154 - RNA, 19 nt, Artificial Sequence
  Description of Artificial Sequence: Synthetic oligonucleotide
acucagauucccaauagaa

SEQ ID NO: 1702155 - RNA, 19 nt, Artificial Sequence
  Description of Artificial Sequence: Synthetic oligonucleotide
guucuaaagagucucugcu

SEQ ID NO: 1702156 - RNA, 19 nt, Artificial Sequence
  Description of Artificial Sequence: Synthetic oligonucleotide
ugucacacucagauuccca

SEQ ID NO: 1702157 - RNA, 19 nt, Artificial Sequence
  Description of Artificial Sequence: Synthetic oligonucleotide
ugggucaaugcauauucua

SEQ ID NO: 1702158 - RNA, 19 nt, Artificial Sequence
  Description of Artificial Sequence: Synthetic oligonucleotide
aguuuacacauuggacacg

SEQ ID NO: 1702159 - RNA, 19 nt, Artificial Sequence
  Description of Artificial Sequence: Synthetic oligonucleotide
gguaccaaucccuaugguc

SEQ ID NO: 1702160 - RNA, 19 nt, Artificial Sequence
  Description of Artificial Sequence: Synthetic oligonucleotide
cuccuaguaaugcuguguc

SEQ ID NO: 1702161 - RNA, 19 nt, Artificial Sequence
  Description of Artificial Sequence: Synthetic oligonucleotide
guaguucaagccaaggcuc

SEQ ID NO: 1702162 - RNA, 19 nt, Artificial Sequence
  Description of Artificial Sequence: Synthetic oligonucleotide
uuacgguguguaguggaag

SEQ ID NO: 1702163 - RNA, 19 nt, Artificial Sequence
  Description of Artificial Sequence: Synthetic oligonucleotide
augucacacucagauuccc

SEQ ID NO: 1702164 - RNA, 19 nt, Artificial Sequence
  Description of Artificial Sequence: Synthetic oligonucleotide
uagcagauggauccuccac

SEQ ID NO: 1702165 - RNA, 19 nt, Artificial Sequence
  Description of Artificial Sequence: Synthetic oligonucleotide
gaaacaggggcgguuuggc

SEQ ID NO: 1702166 - RNA, 19 nt, Artificial Sequence
  Description of Artificial Sequence: Synthetic oligonucleotide
guucccgcgugcgacaugg

SEQ ID NO: 1702167 - RNA, 19 nt, Artificial Sequence
  Description of Artificial Sequence: Synthetic oligonucleotide
cagauucccaauagaaaca

SEQ ID NO: 1702168 - RNA, 19 nt, Artificial Sequence
  Description of Artificial Sequence: Synthetic oligonucleotide
ggauagcuaaucauaauga

SEQ ID NO: 1702169 - RNA, 19 nt, Artificial Sequence
  Description of Artificial Sequence: Synthetic oligonucleotide
auggcaagauuucucguuu

SEQ ID NO: 1702170 - RNA, 19 nt, Artificial Sequence
  Description of Artificial Sequence: Synthetic oligonucleotide
cuuuacgguguguagugga

SEQ ID NO: 1702171 - RNA, 19 nt, Artificial Sequence
  Description of Artificial Sequence: Synthetic oligonucleotide
auagguagcuccugugcau

SEQ ID NO: 1702172 - RNA, 19 nt, Artificial Sequence
  Description of Artificial Sequence: Synthetic oligonucleotide
aucucagcccuuuguauau

SEQ ID NO: 1702173 - RNA, 19 nt, Artificial Sequence
  Description of Artificial Sequence: Synthetic oligonucleotide
ugugacagucugacgcaac

SEQ ID NO: 1702174 - RNA, 19 nt, Artificial Sequence
  Description of Artificial Sequence: Synthetic oligonucleotide
cacaauucucggcaucaac

SEQ ID NO: 1702175 - RNA, 19 nt, Artificial Sequence
  Description of Artificial Sequence: Synthetic oligonucleotide
ggaaacgcuguauauaaua

SEQ ID NO: 1702176 - RNA, 19 nt, Artificial Sequence
  Description of Artificial Sequence: Synthetic oligonucleotide
uaaucaucaucgugaugaa

SEQ ID NO: 1702177 - RNA, 19 nt, Artificial Sequence
  Description of Artificial Sequence: Synthetic oligonucleotide
auucugacuuccaaacugu

SEQ ID NO: 1702178 - RNA, 19 nt, Artificial Sequence
  Description of Artificial Sequence: Synthetic oligonucleotide
gaaacacuuccuggggcag

SEQ ID NO: 1702179 - RNA, 19 nt, Artificial Sequence
  Description of Artificial Sequence: Synthetic oligonucleotide
gguguguaguggaagcugg

SEQ ID NO: 1702180 - RNA, 19 nt, Artificial Sequence
  Description of Artificial Sequence: Synthetic oligonucleotide
uccuaguaaugcugugucu

SEQ ID NO: 1702181 - RNA, 19 nt, Artificial Sequence
  Description of Artificial Sequence: Synthetic oligonucleotide
gccaguauauaggaaacgc

SEQ ID NO: 1702182 - RNA, 19 nt, Artificial Sequence
  Description of Artificial Sequence: Synthetic oligonucleotide
acguucggugauccaaaag

SEQ ID NO: 1702183 - RNA, 19 nt, Artificial Sequence
  Description of Artificial Sequence: Synthetic oligonucleotide
cuacccuccacaucuguga

SEQ ID NO: 1702184 - RNA, 19 nt, Artificial Sequence
  Description of Artificial Sequence: Synthetic oligonucleotide
cauaaugacgacuguauuu

SEQ ID NO: 1702185 - RNA, 19 nt, Artificial Sequence
  Description of Artificial Sequence: Synthetic oligonucleotide
cauacuucaguagauaaau

SEQ ID NO: 1702186 - RNA, 19 nt, Artificial Sequence
  Description of Artificial Sequence: Synthetic oligonucleotide
uggcaggauucugauaaca

SEQ ID NO: 1702187 - RNA, 19 nt, Artificial Sequence
  Description of Artificial Sequence: Synthetic oligonucleotide
ggaauagguagcuccugug

SEQ ID NO: 1702188 - RNA, 19 nt, Artificial Sequence
  Description of Artificial Sequence: Synthetic oligonucleotide
acgcaacaaaauuuaugau

SEQ ID NO: 1702189 - RNA, 19 nt, Artificial Sequence
  Description of Artificial Sequence: Synthetic oligonucleotide
uggacacguucggugaucc

SEQ ID NO: 1702190 - RNA, 19 nt, Artificial Sequence
  Description of Artificial Sequence: Synthetic oligonucleotide
uacccuccacaucugugac

SEQ ID NO: 1702191 - RNA, 19 nt, Artificial Sequence
  Description of Artificial Sequence: Synthetic oligonucleotide
cuaaagagucucugcuuca

SEQ ID NO: 1702192 - RNA, 19 nt, Artificial Sequence
  Description of Artificial Sequence: Synthetic oligonucleotide
agcccuuuguauaucaaau

SEQ ID NO: 1702193 - RNA, 19 nt, Artificial Sequence
  Description of Artificial Sequence: Synthetic oligonucleotide
ucucggcaucaacaucaag

SEQ ID NO: 1702194 - RNA, 19 nt, Artificial Sequence
  Description of Artificial Sequence: Synthetic oligonucleotide
gauucugauaacauccuuu

SEQ ID NO: 1702195 - RNA, 19 nt, Artificial Sequence
  Description of Artificial Sequence: Synthetic oligonucleotide
uccuccacgcugagguuca

SEQ ID NO: 1702196 - RNA, 19 nt, Artificial Sequence
  Description of Artificial Sequence: Synthetic oligonucleotide
auaugcuugcauggcagga

SEQ ID NO: 1702197 - RNA, 19 nt, Artificial Sequence
  Description of Artificial Sequence: Synthetic oligonucleotide
agucuaguacucagaaaca

SEQ ID NO: 1702198 - RNA, 19 nt, Artificial Sequence
  Description of Artificial Sequence: Synthetic oligonucleotide
gugacagucugacgcaaca

SEQ ID NO: 1702199 - RNA, 19 nt, Artificial Sequence
  Description of Artificial Sequence: Synthetic oligonucleotide
agccugagaaacagaaucu

SEQ ID NO: 1702200 - RNA, 19 nt, Artificial Sequence
  Description of Artificial Sequence: Synthetic oligonucleotide
augacggguaccaaucccu

SEQ ID NO: 1702201 - RNA, 19 nt, Artificial Sequence
  Description of Artificial Sequence: Synthetic oligonucleotide
gacacguucggugauccaa

SEQ ID NO: 1702202 - RNA, 19 nt, Artificial Sequence
  Description of Artificial Sequence: Synthetic oligonucleotide
ucccgcgugcgacaugggc

SEQ ID NO: 1702203 - RNA, 19 nt, Artificial Sequence
  Description of Artificial Sequence: Synthetic oligonucleotide
gaaacacuacccuccacau

SEQ ID NO: 1702204 - RNA, 19 nt, Artificial Sequence
  Description of Artificial Sequence: Synthetic oligonucleotide
aaacuaugcccuagaguaa

SEQ ID NO: 1702205 - RNA, 19 nt, Artificial Sequence
  Description of Artificial Sequence: Synthetic oligonucleotide
augaugauggaagguugcu

SEQ ID NO: 1702206 - RNA, 19 nt, Artificial Sequence
  Description of Artificial Sequence: Synthetic oligonucleotide
cuaugauucugacuuccaa

SEQ ID NO: 1702207 - RNA, 19 nt, Artificial Sequence
  Description of Artificial Sequence: Synthetic oligonucleotide
uaaauagaugaaggcuaau

SEQ ID NO: 1702208 - RNA, 19 nt, Artificial Sequence
  Description of Artificial Sequence: Synthetic oligonucleotide
augggcucgguggcguucc

SEQ ID NO: 1702209 - RNA, 19 nt, Artificial Sequence
  Description of Artificial Sequence: Synthetic oligonucleotide
gcuagucuaguacucagaa

SEQ ID NO: 1702210 - RNA, 19 nt, Artificial Sequence
  Description of Artificial Sequence: Synthetic oligonucleotide
cucgguggcguucccguag

SEQ ID NO: 1702211 - RNA, 19 nt, Artificial Sequence
  Description of Artificial Sequence: Synthetic oligonucleotide
cauuccugccggcuccuag

SEQ ID NO: 1702212 - RNA, 19 nt, Artificial Sequence
  Description of Artificial Sequence: Synthetic oligonucleotide
cacuccuguccucaucuug

SEQ ID NO: 1702213 - RNA, 19 nt, Artificial Sequence
  Description of Artificial Sequence: Synthetic oligonucleotide
uggcccagauucacucgag

SEQ ID NO: 1702214 - RNA, 19 nt, Artificial Sequence
  Description of Artificial Sequence: Synthetic oligonucleotide
uagugagcuuugucuaaaa

SEQ ID NO: 1702215 - RNA, 19 nt, Artificial Sequence
  Description of Artificial Sequence: Synthetic oligonucleotide
auuggacacguucggugau

SEQ ID NO: 1702216 - RNA, 19 nt, Artificial Sequence
  Description of Artificial Sequence: Synthetic oligonucleotide
cuuuuggauagcuaaucau

SEQ ID NO: 1702217 - RNA, 19 nt, Artificial Sequence
  Description of Artificial Sequence: Synthetic oligonucleotide
acugcacaauucucggcau

SEQ ID NO: 1702218 - RNA, 19 nt, Artificial Sequence
  Description of Artificial Sequence: Synthetic oligonucleotide
uagcgcuccugguuguaca

SEQ ID NO: 1702219 - RNA, 19 nt, Artificial Sequence
  Description of Artificial Sequence: Synthetic oligonucleotide
gaauauuagccaugcuaau

SEQ ID NO: 1702220 - RNA, 19 nt, Artificial Sequence
  Description of Artificial Sequence: Synthetic oligonucleotide
ucgguggcguucccguagc

SEQ ID NO: 1702221 - RNA, 19 nt, Artificial Sequence
  Description of Artificial Sequence: Synthetic oligonucleotide
cugcauaugacggguacca

SEQ ID NO: 1702222 - RNA, 19 nt, Artificial Sequence
  Description of Artificial Sequence: Synthetic oligonucleotide
cauagugagcuuugucuaa

SEQ ID NO: 1702223 - RNA, 19 nt, Artificial Sequence
  Description of Artificial Sequence: Synthetic oligonucleotide
cagaagcuagucuaguacu

SEQ ID NO: 1702224 - RNA, 19 nt, Artificial Sequence
  Description of Artificial Sequence: Synthetic oligonucleotide
gguuuacaguaccacagaa

SEQ ID NO: 1702225 - RNA, 19 nt, Artificial Sequence
  Description of Artificial Sequence: Synthetic oligonucleotide
ugacggguaccaaucccua

SEQ ID NO: 1702226 - RNA, 19 nt, Artificial Sequence
  Description of Artificial Sequence: Synthetic oligonucleotide
ugacagucugacgcaacaa

SEQ ID NO: 1702227 - RNA, 19 nt, Artificial Sequence
  Description of Artificial Sequence: Synthetic oligonucleotide
caaaagccaugggucaaug

SEQ ID NO: 1702228 - RNA, 19 nt, Artificial Sequence
  Description of Artificial Sequence: Synthetic oligonucleotide
cuagucuaguacucagaaa

SEQ ID NO: 1702229 - RNA, 19 nt, Artificial Sequence
  Description of Artificial Sequence: Synthetic oligonucleotide
aggaggugcacuagcagau

SEQ ID NO: 1702230 - RNA, 19 nt, Artificial Sequence
  Description of Artificial Sequence: Synthetic oligonucleotide
guauacaaacuaugcccua

SEQ ID NO: 1702231 - RNA, 19 nt, Artificial Sequence
  Description of Artificial Sequence: Synthetic oligonucleotide
cgcuguauauaauagaaua

SEQ ID NO: 1702232 - RNA, 19 nt, Artificial Sequence
  Description of Artificial Sequence: Synthetic oligonucleotide
uucacucgaggaugaugau

SEQ ID NO: 1702233 - RNA, 19 nt, Artificial Sequence
  Description of Artificial Sequence: Synthetic oligonucleotide
ugccggcuccuaguaaugc

SEQ ID NO: 1702234 - RNA, 19 nt, Artificial Sequence
  Description of Artificial Sequence: Synthetic oligonucleotide
uggcaagauuucucguuuu

SEQ ID NO: 1702235 - RNA, 19 nt, Artificial Sequence
  Description of Artificial Sequence: Synthetic oligonucleotide
cucguuuuacaaguucuaa

SEQ ID NO: 1702236 - RNA, 19 nt, Artificial Sequence
  Description of Artificial Sequence: Synthetic oligonucleotide
cgcaacaaaauuuaugaua

SEQ ID NO: 1702237 - RNA, 19 nt, Artificial Sequence
  Description of Artificial Sequence: Synthetic oligonucleotide
ggcccagauucacucgagg

SEQ ID NO: 1702238 - RNA, 19 nt, Artificial Sequence
  Description of Artificial Sequence: Synthetic oligonucleotide
gguucauuccugccggcuc

SEQ ID NO: 1702239 - RNA, 19 nt, Artificial Sequence
  Description of Artificial Sequence: Synthetic oligonucleotide
agcuagucuaguacucaga

SEQ ID NO: 1702240 - RNA, 19 nt, Artificial Sequence
  Description of Artificial Sequence: Synthetic oligonucleotide
cagcccuuuguauaucaaa

SEQ ID NO: 1702241 - RNA, 19 nt, Artificial Sequence
  Description of Artificial Sequence: Synthetic oligonucleotide
ccuuuuggauagcuaauca

SEQ ID NO: 1702242 - RNA, 19 nt, Artificial Sequence
  Description of Artificial Sequence: Synthetic oligonucleotide
cuccaugcuuuacggugug

SEQ ID NO: 1702243 - RNA, 19 nt, Artificial Sequence
  Description of Artificial Sequence: Synthetic oligonucleotide
cugcacaauucucggcauc

SEQ ID NO: 1702244 - RNA, 19 nt, Artificial Sequence
  Description of Artificial Sequence: Synthetic oligonucleotide
caaguucuaaagagucucu

SEQ ID NO: 1702245 - RNA, 19 nt, Artificial Sequence
  Description of Artificial Sequence: Synthetic oligonucleotide
acgguguguaguggaagcu

SEQ ID NO: 1702246 - RNA, 19 nt, Artificial Sequence
  Description of Artificial Sequence: Synthetic oligonucleotide
acgcuguauauaauagaau

SEQ ID NO: 1702247 - RNA, 19 nt, Artificial Sequence
  Description of Artificial Sequence: Synthetic oligonucleotide
guggcguucccguagcgcu

SEQ ID NO: 1702248 - RNA, 19 nt, Artificial Sequence
  Description of Artificial Sequence: Synthetic oligonucleotide
ugcauaugacggguaccaa

SEQ ID NO: 1702249 - RNA, 19 nt, Artificial Sequence
  Description of Artificial Sequence: Synthetic oligonucleotide
auacuucaguagauaaaua

SEQ ID NO: 1702250 - RNA, 19 nt, Artificial Sequence
  Description of Artificial Sequence: Synthetic oligonucleotide
caucauacuucaguagaua

SEQ ID NO: 1702251 - RNA, 19 nt, Artificial Sequence
  Description of Artificial Sequence: Synthetic oligonucleotide
uuggacacguucggugauc

SEQ ID NO: 1702252 - RNA, 19 nt, Artificial Sequence
  Description of Artificial Sequence: Synthetic oligonucleotide
cccuuuguauaucaaaucu

SEQ ID NO: 1702253 - RNA, 19 nt, Artificial Sequence
  Description of Artificial Sequence: Synthetic oligonucleotide
cacgcugagguucauuccu

SEQ ID NO: 1702254 - RNA, 19 nt, Artificial Sequence
  Description of Artificial Sequence: Synthetic oligonucleotide
gcccagauucacucgagga

SEQ ID NO: 1702255 - RNA, 19 nt, Artificial Sequence
  Description of Artificial Sequence: Synthetic oligonucleotide
gcuuuacgguguguagugg

SEQ ID NO: 1702256 - RNA, 19 nt, Artificial Sequence
  Description of Artificial Sequence: Synthetic oligonucleotide
gcuaaucauaaugacgacu

SEQ ID NO: 1702257 - RNA, 19 nt, Artificial Sequence
  Description of Artificial Sequence: Synthetic oligonucleotide
uucccguagcgcuccuggu

SEQ ID NO: 1702258 - RNA, 19 nt, Artificial Sequence
  Description of Artificial Sequence: Synthetic oligonucleotide
caucaucgugaugaaggca

SEQ ID NO: 1702259 - RNA, 19 nt, Artificial Sequence
  Description of Artificial Sequence: Synthetic oligonucleotide
cugccggcuccuaguaaug

SEQ ID NO: 1702260 - RNA, 19 nt, Artificial Sequence
  Description of Artificial Sequence: Synthetic oligonucleotide
uguucccgcgugcgacaug

SEQ ID NO: 1702261 - RNA, 19 nt, Artificial Sequence
  Description of Artificial Sequence: Synthetic oligonucleotide
gcuguauauaauagaauau

SEQ ID NO: 1702262 - RNA, 19 nt, Artificial Sequence
  Description of Artificial Sequence: Synthetic oligonucleotide
ggaaagcccauuugaucaa

SEQ ID NO: 1702263 - RNA, 19 nt, Artificial Sequence
  Description of Artificial Sequence: Synthetic oligonucleotide
uucccgcgugcgacauggg

SEQ ID NO: 1702264 - RNA, 19 nt, Artificial Sequence
  Description of Artificial Sequence: Synthetic oligonucleotide
cggguaccaaucccuaugg

SEQ ID NO: 1702265 - RNA, 19 nt, Artificial Sequence
  Description of Artificial Sequence: Synthetic oligonucleotide
gcccauuugaucaauuacu

SEQ ID NO: 1702266 - RNA, 19 nt, Artificial Sequence
  Description of Artificial Sequence: Synthetic oligonucleotide
uggcguucccguagcgcuc

SEQ ID NO: 1702267 - RNA, 19 nt, Artificial Sequence
  Description of Artificial Sequence: Synthetic oligonucleotide
cucgaggaugaugauggaa

SEQ ID NO: 1702268 - RNA, 19 nt, Artificial Sequence
  Description of Artificial Sequence: Synthetic oligonucleotide
gucugacgcaacaaaauuu

SEQ ID NO: 1702269 - RNA, 19 nt, Artificial Sequence
  Description of Artificial Sequence: Synthetic oligonucleotide
ccucaucuugggaugucac

SEQ ID NO: 1702270 - RNA, 19 nt, Artificial Sequence
  Description of Artificial Sequence: Synthetic oligonucleotide
gacgacuguauuuccuguu

SEQ ID NO: 1702271 - RNA, 19 nt, Artificial Sequence
  Description of Artificial Sequence: Synthetic oligonucleotide
cuauggcaagauuucucgu

SEQ ID NO: 1702272 - RNA, 19 nt, Artificial Sequence
  Description of Artificial Sequence: Synthetic oligonucleotide
gagcuuugucuaaaagccu

SEQ ID NO: 1702273 - RNA, 19 nt, Artificial Sequence
  Description of Artificial Sequence: Synthetic oligonucleotide
gugcacuagcagauggauc

SEQ ID NO: 1702274 - RNA, 19 nt, Artificial Sequence
  Description of Artificial Sequence: Synthetic oligonucleotide
cacuagcagauggauccuc

SEQ ID NO: 1702275 - RNA, 19 nt, Artificial Sequence
  Description of Artificial Sequence: Synthetic oligonucleotide
acacguucggugauccaaa

SEQ ID NO: 1702276 - RNA, 19 nt, Artificial Sequence
  Description of Artificial Sequence: Synthetic oligonucleotide
guagcgcuccugguuguac

SEQ ID NO: 1702277 - RNA, 19 nt, Artificial Sequence
  Description of Artificial Sequence: Synthetic oligonucleotide
gauucccaauagaaacacu

SEQ ID NO: 1702278 - RNA, 19 nt, Artificial Sequence
  Description of Artificial Sequence: Synthetic oligonucleotide
uggcguucuuccgcgccgc

SEQ ID NO: 1702279 - RNA, 19 nt, Artificial Sequence
  Description of Artificial Sequence: Synthetic oligonucleotide
ccugcauaugacggguacc

SEQ ID NO: 1702280 - RNA, 19 nt, Artificial Sequence
  Description of Artificial Sequence: Synthetic oligonucleotide
cccguagcgcuccugguug

SEQ ID NO: 1702281 - RNA, 19 nt, Artificial Sequence
  Description of Artificial Sequence: Synthetic oligonucleotide
aggaaacgcuguauauaau

SEQ ID NO: 1702282 - RNA, 19 nt, Artificial Sequence
  Description of Artificial Sequence: Synthetic oligonucleotide
ggcuccuaguaaugcugug

SEQ ID NO: 1702283 - RNA, 19 nt, Artificial Sequence
  Description of Artificial Sequence: Synthetic oligonucleotide
ccaguauauaggaaacgcu

SEQ ID NO: 1702284 - RNA, 19 nt, Artificial Sequence
  Description of Artificial Sequence: Synthetic oligonucleotide
accaccgccguggcguucu

SEQ ID NO: 1702285 - RNA, 19 nt, Artificial Sequence
  Description of Artificial Sequence: Synthetic oligonucleotide
gccuauggcaagauuucuc

SEQ ID NO: 1702286 - RNA, 19 nt, Artificial Sequence
  Description of Artificial Sequence: Synthetic oligonucleotide
gcuuugucuaaaagccuga

SEQ ID NO: 1702287 - RNA, 19 nt, Artificial Sequence
  Description of Artificial Sequence: Synthetic oligonucleotide
gcauaugacggguaccaau

SEQ ID NO: 1702288 - RNA, 19 nt, Artificial Sequence
  Description of Artificial Sequence: Synthetic oligonucleotide
acuaugcccuagaguaaaa

SEQ ID NO: 1702289 - RNA, 19 nt, Artificial Sequence
  Description of Artificial Sequence: Synthetic oligonucleotide
agauucacucgaggaugau

SEQ ID NO: 1702290 - RNA, 19 nt, Artificial Sequence
  Description of Artificial Sequence: Synthetic oligonucleotide
cacguucggugauccaaaa

SEQ ID NO: 1702291 - RNA, 19 nt, Artificial Sequence
  Description of Artificial Sequence: Synthetic oligonucleotide
cugacgcaacaaaauuuau

SEQ ID NO: 1702292 - RNA, 19 nt, Artificial Sequence
  Description of Artificial Sequence: Synthetic oligonucleotide
gacggguaccaaucccuau

SEQ ID NO: 1702293 - RNA, 19 nt, Artificial Sequence
  Description of Artificial Sequence: Synthetic oligonucleotide
gugcgacaugggcucggug

SEQ ID NO: 1702294 - RNA, 19 nt, Artificial Sequence
  Description of Artificial Sequence: Synthetic oligonucleotide
gggucaaugcauauucuau

SEQ ID NO: 1702295 - RNA, 19 nt, Artificial Sequence
  Description of Artificial Sequence: Synthetic oligonucleotide
gguugcuuucagcacuccu

SEQ ID NO: 1702296 - RNA, 19 nt, Artificial Sequence
  Description of Artificial Sequence: Synthetic oligonucleotide
ugggcucgguggcguuccc

SEQ ID NO: 1702297 - RNA, 19 nt, Artificial Sequence
  Description of Artificial Sequence: Synthetic oligonucleotide
gacugaccacugaugaauu

SEQ ID NO: 1702298 - RNA, 19 nt, Artificial Sequence
  Description of Artificial Sequence: Synthetic oligonucleotide
ggcguucccguagcgcucc

SEQ ID NO: 1702299 - RNA, 19 nt, Artificial Sequence
  Description of Artificial Sequence: Synthetic oligonucleotide
cugugacagucugacgcaa

SEQ ID NO: 1702300 - RNA, 19 nt, Artificial Sequence
  Description of Artificial Sequence: Synthetic oligonucleotide
ccgcgugcgacaugggcuc

SEQ ID NO: 1702301 - RNA, 19 nt, Artificial Sequence
  Description of Artificial Sequence: Synthetic oligonucleotide
cacauuggacacguucggu

SEQ ID NO: 1702302 - RNA, 19 nt, Artificial Sequence
  Description of Artificial Sequence: Synthetic oligonucleotide
accaaucccuauggucauu

SEQ ID NO: 1702303 - RNA, 19 nt, Artificial Sequence
  Description of Artificial Sequence: Synthetic oligonucleotide
caguaccacagaagcuagu

SEQ ID NO: 1702304 - RNA, 19 nt, Artificial Sequence
  Description of Artificial Sequence: Synthetic oligonucleotide
cgguguguaguggaagcug

SEQ ID NO: 1702305 - RNA, 19 nt, Artificial Sequence
  Description of Artificial Sequence: Synthetic oligonucleotide
gauccuccacgcugagguu

SEQ ID NO: 1702306 - RNA, 19 nt, Artificial Sequence
  Description of Artificial Sequence: Synthetic oligonucleotide
cacuacccuccacaucugu

SEQ ID NO: 1702307 - RNA, 19 nt, Artificial Sequence
  Description of Artificial Sequence: Synthetic oligonucleotide
ccaugcuuuacggugugua

SEQ ID NO: 1702308 - RNA, 19 nt, Artificial Sequence
  Description of Artificial Sequence: Synthetic oligonucleotide
cccagauucacucgaggau

SEQ ID NO: 1702309 - RNA, 19 nt, Artificial Sequence
  Description of Artificial Sequence: Synthetic oligonucleotide
ggacacguucggugaucca

SEQ ID NO: 1702310 - RNA, 19 nt, Artificial Sequence
  Description of Artificial Sequence: Synthetic oligonucleotide
gggcucgguggcguucccg

SEQ ID NO: 1702311 - RNA, 19 nt, Artificial Sequence
  Description of Artificial Sequence: Synthetic oligonucleotide
cgccguggcguucuuccgc

SEQ ID NO: 1702312 - RNA, 19 nt, Artificial Sequence
  Description of Artificial Sequence: Synthetic oligonucleotide
gguuuggcccagauucacu

SEQ ID NO: 1702313 - RNA, 19 nt, Artificial Sequence
  Description of Artificial Sequence: Synthetic oligonucleotide
gccggcuccuaguaaugcu

SEQ ID NO: 1702314 - RNA, 19 nt, Artificial Sequence
  Description of Artificial Sequence: Synthetic oligonucleotide
ccgccguggcguucuuccg

SEQ ID NO: 1702315 - RNA, 19 nt, Artificial Sequence
  Description of Artificial Sequence: Synthetic oligonucleotide
ccugccggcuccuaguaau

SEQ ID NO: 1702316 - RNA, 19 nt, Artificial Sequence
  Description of Artificial Sequence: Synthetic oligonucleotide
cccgcgugcgacaugggcu

SEQ ID NO: 1702317 - RNA, 19 nt, Artificial Sequence
  Description of Artificial Sequence: Synthetic oligonucleotide
cgguuuggcccagauucac

SEQ ID NO: 1702318 - RNA, 19 nt, Artificial Sequence
  Description of Artificial Sequence: Synthetic oligonucleotide
gcacaauucucggcaucaa

SEQ ID NO: 1702319 - RNA, 19 nt, Artificial Sequence
  Description of Artificial Sequence: Synthetic oligonucleotide
caaucccuauggucauuuu

SEQ ID NO: 1702320 - RNA, 19 nt, Artificial Sequence
  Description of Artificial Sequence: Synthetic oligonucleotide
cucugucggugaggcuguc

SEQ ID NO: 1702321 - RNA, 19 nt, Artificial Sequence
  Description of Artificial Sequence: Synthetic oligonucleotide
cacugccuauggcaagauu

SEQ ID NO: 1702322 - RNA, 19 nt, Artificial Sequence
  Description of Artificial Sequence: Synthetic oligonucleotide
gcacuagcagauggauccu

SEQ ID NO: 1702323 - RNA, 19 nt, Artificial Sequence
  Description of Artificial Sequence: Synthetic oligonucleotide
gcucugucggugaggcugu

SEQ ID NO: 1702324 - RNA, 19 nt, Artificial Sequence
  Description of Artificial Sequence: Synthetic oligonucleotide
ccaaucccuauggucauuu

SEQ ID NO: 1702325 - RNA, 19 nt, Artificial Sequence
  Description of Artificial Sequence: Synthetic oligonucleotide
cgguggcguucccguagcg

SEQ ID NO: 1702326 - RNA, 19 nt, Artificial Sequence
  Description of Artificial Sequence: Synthetic oligonucleotide
caccaccgccguggcguuc

SEQ ID NO: 1702327 - RNA, 19 nt, Artificial Sequence
  Description of Artificial Sequence: Synthetic oligonucleotide
gcucgguggcguucccgua

SEQ ID NO: 1702328 - RNA, 19 nt, Artificial Sequence
  Description of Artificial Sequence: Synthetic oligonucleotide
cuguucccgcgugcgacau

SEQ ID NO: 1702329 - RNA, 19 nt, Artificial Sequence
  Description of Artificial Sequence: Synthetic oligonucleotide
ggggcgguuuggcccagau

SEQ ID NO: 1702330 - RNA, 19 nt, Artificial Sequence
  Description of Artificial Sequence: Synthetic oligonucleotide
cggcuccuaguaaugcugu

SEQ ID NO: 1702331 - RNA, 19 nt, Artificial Sequence
  Description of Artificial Sequence: Synthetic oligonucleotide
cgcgugcgacaugggcucg

SEQ ID NO: 1702332 - RNA, 19 nt, Artificial Sequence
  Description of Artificial Sequence: Synthetic oligonucleotide
gggcgguuuggcccagauu

SEQ ID NO: 1702333 - RNA, 19 nt, Artificial Sequence
  Description of Artificial Sequence: Synthetic oligonucleotide
cguucccguagcgcuccug

SEQ ID NO: 1702334 - RNA, 19 nt, Artificial Sequence
  Description of Artificial Sequence: Synthetic oligonucleotide
ccacugccuauggcaagau

SEQ ID NO: 1702335 - RNA, 19 nt, Artificial Sequence
  Description of Artificial Sequence: Synthetic oligonucleotide
cgugcgacaugggcucggu

SEQ ID NO: 1702336 - RNA, 19 nt, Artificial Sequence
  Description of Artificial Sequence: Synthetic oligonucleotide
uuuaacuugauuuauaagu

SEQ ID NO: 1702337 - RNA, 19 nt, Artificial Sequence
  Description of Artificial Sequence: Synthetic oligonucleotide
auauccuugaaucacauac

SEQ ID NO: 1702338 - RNA, 19 nt, Artificial Sequence
  Description of Artificial Sequence: Synthetic oligonucleotide
ugagcauugaaaaugaugu

SEQ ID NO: 1702339 - RNA, 19 nt, Artificial Sequence
  Description of Artificial Sequence: Synthetic oligonucleotide
aaacuugaggcacauaauc

SEQ ID NO: 1702340 - RNA, 19 nt, Artificial Sequence
  Description of Artificial Sequence: Synthetic oligonucleotide
aaguccguuauucucaaac

SEQ ID NO: 1702341 - RNA, 19 nt, Artificial Sequence
  Description of Artificial Sequence: Synthetic oligonucleotide
ugguauucgaacaugaggc

SEQ ID NO: 1702342 - RNA, 19 nt, Artificial Sequence
  Description of Artificial Sequence: Synthetic oligonucleotide
aagguuuugaaauaagccu

SEQ ID NO: 1702343 - RNA, 19 nt, Artificial Sequence
  Description of Artificial Sequence: Synthetic oligonucleotide
uugguaaaaugguagacgg

SEQ ID NO: 1702344 - RNA, 19 nt, Artificial Sequence
  Description of Artificial Sequence: Synthetic oligonucleotide
agaaauucgauucaaggca

SEQ ID NO: 1702345 - RNA, 19 nt, Artificial Sequence
  Description of Artificial Sequence: Synthetic oligonucleotide
uccaaagaugaaaucaggg

SEQ ID NO: 1702346 - RNA, 19 nt, Artificial Sequence
  Description of Artificial Sequence: Synthetic oligonucleotide
ucauuuacauccuugagaa

SEQ ID NO: 1702347 - RNA, 19 nt, Artificial Sequence
  Description of Artificial Sequence: Synthetic oligonucleotide
gagaaauucgauucaaggc

SEQ ID NO: 1702348 - RNA, 19 nt, Artificial Sequence
  Description of Artificial Sequence: Synthetic oligonucleotide
guuauucucaaacaguuug

SEQ ID NO: 1702349 - RNA, 19 nt, Artificial Sequence
  Description of Artificial Sequence: Synthetic oligonucleotide
acuuaguccgaucaguaac

SEQ ID NO: 1702350 - RNA, 19 nt, Artificial Sequence
  Description of Artificial Sequence: Synthetic oligonucleotide
agauauguaggaauguugc

SEQ ID NO: 1702351 - RNA, 19 nt, Artificial Sequence
  Description of Artificial Sequence: Synthetic oligonucleotide
uucaccacaagcaggaggc

SEQ ID NO: 1702352 - RNA, 19 nt, Artificial Sequence
  Description of Artificial Sequence: Synthetic oligonucleotide
ugaaauaagccuucgcucu

SEQ ID NO: 1702353 - RNA, 19 nt, Artificial Sequence
  Description of Artificial Sequence: Synthetic oligonucleotide
agcauaaauuuccauguuc

SEQ ID NO: 1702354 - RNA, 19 nt, Artificial Sequence
  Description of Artificial Sequence: Synthetic oligonucleotide
ucaaaacugacagaaagga

SEQ ID NO: 1702355 - RNA, 19 nt, Artificial Sequence
  Description of Artificial Sequence: Synthetic oligonucleotide
aaugaugucccauuuuaau

SEQ ID NO: 1702356 - RNA, 19 nt, Artificial Sequence
  Description of Artificial Sequence: Synthetic oligonucleotide
uauaagucaccacuggaac

SEQ ID NO: 1702357 - RNA, 19 nt, Artificial Sequence
  Description of Artificial Sequence: Synthetic oligonucleotide
gguaugugcaguuugaagc

SEQ ID NO: 1702358 - RNA, 19 nt, Artificial Sequence
  Description of Artificial Sequence: Synthetic oligonucleotide
uauuccacgacaccugugc

SEQ ID NO: 1702359 - RNA, 19 nt, Artificial Sequence
  Description of Artificial Sequence: Synthetic oligonucleotide
uuauaagucaccacuggaa

SEQ ID NO: 1702360 - RNA, 19 nt, Artificial Sequence
  Description of Artificial Sequence: Synthetic oligonucleotide
aauauacucccuucuuuug

SEQ ID NO: 1702361 - RNA, 19 nt, Artificial Sequence
  Description of Artificial Sequence: Synthetic oligonucleotide
cuucccagcauaaauuucc

SEQ ID NO: 1702362 - RNA, 19 nt, Artificial Sequence
  Description of Artificial Sequence: Synthetic oligonucleotide
cauuggagaaauucgauuc

SEQ ID NO: 1702363 - RNA, 19 nt, Artificial Sequence
  Description of Artificial Sequence: Synthetic oligonucleotide
gaaaucuacagguaacuuc

SEQ ID NO: 1702364 - RNA, 19 nt, Artificial Sequence
  Description of Artificial Sequence: Synthetic oligonucleotide
ucaauguguacaaggaaac

SEQ ID NO: 1702365 - RNA, 19 nt, Artificial Sequence
  Description of Artificial Sequence: Synthetic oligonucleotide
agaaaggagggccacaucu

SEQ ID NO: 1702366 - RNA, 19 nt, Artificial Sequence
  Description of Artificial Sequence: Synthetic oligonucleotide
cagguggcaaacuugaggc

SEQ ID NO: 1702367 - RNA, 19 nt, Artificial Sequence
  Description of Artificial Sequence: Synthetic oligonucleotide
ucuacagguaacuucagua

SEQ ID NO: 1702368 - RNA, 19 nt, Artificial Sequence
  Description of Artificial Sequence: Synthetic oligonucleotide
guugguaaaaugguagacg

SEQ ID NO: 1702369 - RNA, 19 nt, Artificial Sequence
  Description of Artificial Sequence: Synthetic oligonucleotide
augaugucccauuuuaaug

SEQ ID NO: 1702370 - RNA, 19 nt, Artificial Sequence
  Description of Artificial Sequence: Synthetic oligonucleotide
guaacuucaguaggaaucg

SEQ ID NO: 1702371 - RNA, 19 nt, Artificial Sequence
  Description of Artificial Sequence: Synthetic oligonucleotide
cuuaguccgaucaguaacc

SEQ ID NO: 1702372 - RNA, 19 nt, Artificial Sequence
  Description of Artificial Sequence: Synthetic oligonucleotide
ugguagacggacugaaagg

SEQ ID NO: 1702373 - RNA, 19 nt, Artificial Sequence
  Description of Artificial Sequence: Synthetic oligonucleotide
uucuuuugugauauccuug

SEQ ID NO: 1702374 - RNA, 19 nt, Artificial Sequence
  Description of Artificial Sequence: Synthetic oligonucleotide
uucgauucaaggcaauuuc

SEQ ID NO: 1702375 - RNA, 19 nt, Artificial Sequence
  Description of Artificial Sequence: Synthetic oligonucleotide
ugugauauccuugaaucac

SEQ ID NO: 1702376 - RNA, 19 nt, Artificial Sequence
  Description of Artificial Sequence: Synthetic oligonucleotide
acuucaguaggaaucgagc

SEQ ID NO: 1702377 - RNA, 19 nt, Artificial Sequence
  Description of Artificial Sequence: Synthetic oligonucleotide
cuacagguaacuucaguag

SEQ ID NO: 1702378 - RNA, 19 nt, Artificial Sequence
  Description of Artificial Sequence: Synthetic oligonucleotide
uuauucucaaacaguuugu

SEQ ID NO: 1702379 - RNA, 19 nt, Artificial Sequence
  Description of Artificial Sequence: Synthetic oligonucleotide
agcagaguaaguuuuguaa

SEQ ID NO: 1702380 - RNA, 19 nt, Artificial Sequence
  Description of Artificial Sequence: Synthetic oligonucleotide
gagaagauauguaggaaug

SEQ ID NO: 1702381 - RNA, 19 nt, Artificial Sequence
  Description of Artificial Sequence: Synthetic oligonucleotide
uaugguaugugcaguuuga

SEQ ID NO: 1702382 - RNA, 19 nt, Artificial Sequence
  Description of Artificial Sequence: Synthetic oligonucleotide
cugagcauugaaaaugaug

SEQ ID NO: 1702383 - RNA, 19 nt, Artificial Sequence
  Description of Artificial Sequence: Synthetic oligonucleotide
auauguaggaauguugcug

SEQ ID NO: 1702384 - RNA, 19 nt, Artificial Sequence
  Description of Artificial Sequence: Synthetic oligonucleotide
uguaccuuguuggugagca

SEQ ID NO: 1702385 - RNA, 19 nt, Artificial Sequence
  Description of Artificial Sequence: Synthetic oligonucleotide
cagaguaaguuuuguaaag

SEQ ID NO: 1702386 - RNA, 19 nt, Artificial Sequence
  Description of Artificial Sequence: Synthetic oligonucleotide
gcugcauuggaacuggugg

SEQ ID NO: 1702387 - RNA, 19 nt, Artificial Sequence
  Description of Artificial Sequence: Synthetic oligonucleotide
uccguuauucucaaacagu

SEQ ID NO: 1702388 - RNA, 19 nt, Artificial Sequence
  Description of Artificial Sequence: Synthetic oligonucleotide
ucugguauucgaacaugag

SEQ ID NO: 1702389 - RNA, 19 nt, Artificial Sequence
  Description of Artificial Sequence: Synthetic oligonucleotide
uauacucccuucuuuugug

SEQ ID NO: 1702390 - RNA, 19 nt, Artificial Sequence
  Description of Artificial Sequence: Synthetic oligonucleotide
guaggaaucgagcugaaaa

SEQ ID NO: 1702391 - RNA, 19 nt, Artificial Sequence
  Description of Artificial Sequence: Synthetic oligonucleotide
ugaggcacauaaucaauga

SEQ ID NO: 1702392 - RNA, 19 nt, Artificial Sequence
  Description of Artificial Sequence: Synthetic oligonucleotide
auaugguaugugcaguuug

SEQ ID NO: 1702393 - RNA, 19 nt, Artificial Sequence
  Description of Artificial Sequence: Synthetic oligonucleotide
uccauacugagguucuucc

SEQ ID NO: 1702394 - RNA, 19 nt, Artificial Sequence
  Description of Artificial Sequence: Synthetic oligonucleotide
caaaacugacagaaaggag

SEQ ID NO: 1702395 - RNA, 19 nt, Artificial Sequence
  Description of Artificial Sequence: Synthetic oligonucleotide
aucauauuccacgacaccu

SEQ ID NO: 1702396 - RNA, 19 nt, Artificial Sequence
  Description of Artificial Sequence: Synthetic oligonucleotide
aagguuauguagagcagag

SEQ ID NO: 1702397 - RNA, 19 nt, Artificial Sequence
  Description of Artificial Sequence: Synthetic oligonucleotide
uggagaaauucgauucaag

SEQ ID NO: 1702398 - RNA, 19 nt, Artificial Sequence
  Description of Artificial Sequence: Synthetic oligonucleotide
ugguaugugcaguuugaag

SEQ ID NO: 1702399 - RNA, 19 nt, Artificial Sequence
  Description of Artificial Sequence: Synthetic oligonucleotide
uuuacauccuugagaagau

SEQ ID NO: 1702400 - RNA, 19 nt, Artificial Sequence
  Description of Artificial Sequence: Synthetic oligonucleotide
ucgauucaaggcaauuucu

SEQ ID NO: 1702401 - RNA, 19 nt, Artificial Sequence
  Description of Artificial Sequence: Synthetic oligonucleotide
uagacggacugaaagguaa

SEQ ID NO: 1702402 - RNA, 19 nt, Artificial Sequence
  Description of Artificial Sequence: Synthetic oligonucleotide
ucgaacaugaggcgagagc

SEQ ID NO: 1702403 - RNA, 19 nt, Artificial Sequence
  Description of Artificial Sequence: Synthetic oligonucleotide
auuggagaaauucgauuca

SEQ ID NO: 1702404 - RNA, 19 nt, Artificial Sequence
  Description of Artificial Sequence: Synthetic oligonucleotide
gaggcgagagcucucgcgg

SEQ ID NO: 1702405 - RNA, 19 nt, Artificial Sequence
  Description of Artificial Sequence: Synthetic oligonucleotide
auauacucccuucuuuugu

SEQ ID NO: 1702406 - RNA, 19 nt, Artificial Sequence
  Description of Artificial Sequence: Synthetic oligonucleotide
aacuucaguaggaaucgag

SEQ ID NO: 1702407 - RNA, 19 nt, Artificial Sequence
  Description of Artificial Sequence: Synthetic oligonucleotide
gaggcaagguuauguagag

SEQ ID NO: 1702408 - RNA, 19 nt, Artificial Sequence
  Description of Artificial Sequence: Synthetic oligonucleotide
auuccacgacaccugugcc

SEQ ID NO: 1702409 - RNA, 19 nt, Artificial Sequence
  Description of Artificial Sequence: Synthetic oligonucleotide
uccauuucggaccacgcua

SEQ ID NO: 1702410 - RNA, 19 nt, Artificial Sequence
  Description of Artificial Sequence: Synthetic oligonucleotide
uccuagagcuuuccauugg

SEQ ID NO: 1702411 - RNA, 19 nt, Artificial Sequence
  Description of Artificial Sequence: Synthetic oligonucleotide
uugaaaaugaugucccauu

SEQ ID NO: 1702412 - RNA, 19 nt, Artificial Sequence
  Description of Artificial Sequence: Synthetic oligonucleotide
uggaacuuaguccgaucag

SEQ ID NO: 1702413 - RNA, 19 nt, Artificial Sequence
  Description of Artificial Sequence: Synthetic oligonucleotide
guccguuauucucaaacag

SEQ ID NO: 1702414 - RNA, 19 nt, Artificial Sequence
  Description of Artificial Sequence: Synthetic oligonucleotide
ugcaguuugaagcggucac

SEQ ID NO: 1702415 - RNA, 19 nt, Artificial Sequence
  Description of Artificial Sequence: Synthetic oligonucleotide
gguaaaaugguagacggac

SEQ ID NO: 1702416 - RNA, 19 nt, Artificial Sequence
  Description of Artificial Sequence: Synthetic oligonucleotide
uaggaaucgagcugaaaau

SEQ ID NO: 1702417 - RNA, 19 nt, Artificial Sequence
  Description of Artificial Sequence: Synthetic oligonucleotide
uuuccuagagcuuuccauu

SEQ ID NO: 1702418 - RNA, 19 nt, Artificial Sequence
  Description of Artificial Sequence: Synthetic oligonucleotide
aagcggucacaguuggguc

SEQ ID NO: 1702419 - RNA, 19 nt, Artificial Sequence
  Description of Artificial Sequence: Synthetic oligonucleotide
uuuccauuucggaccacgc

SEQ ID NO: 1702420 - RNA, 19 nt, Artificial Sequence
  Description of Artificial Sequence: Synthetic oligonucleotide
uguugguaaaaugguagac

SEQ ID NO: 1702421 - RNA, 19 nt, Artificial Sequence
  Description of Artificial Sequence: Synthetic oligonucleotide
aaaauucaccaguccaguu

SEQ ID NO: 1702422 - RNA, 19 nt, Artificial Sequence
  Description of Artificial Sequence: Synthetic oligonucleotide
ggugacaaguacaacuugg

SEQ ID NO: 1702423 - RNA, 19 nt, Artificial Sequence
  Description of Artificial Sequence: Synthetic oligonucleotide
aacuuaguccgaucaguaa

SEQ ID NO: 1702424 - RNA, 19 nt, Artificial Sequence
  Description of Artificial Sequence: Synthetic oligonucleotide
caguuuguagcauccaguc

SEQ ID NO: 1702425 - RNA, 19 nt, Artificial Sequence
  Description of Artificial Sequence: Synthetic oligonucleotide
uagagcuuuccauuggcaa

SEQ ID NO: 1702426 - RNA, 19 nt, Artificial Sequence
  Description of Artificial Sequence: Synthetic oligonucleotide
uuccuagagcuuuccauug

SEQ ID NO: 1702427 - RNA, 19 nt, Artificial Sequence
  Description of Artificial Sequence: Synthetic oligonucleotide
uuaguccgaucaguaaccg

SEQ ID NO: 1702428 - RNA, 19 nt, Artificial Sequence
  Description of Artificial Sequence: Synthetic oligonucleotide
aguccguuauucucaaaca

SEQ ID NO: 1702429 - RNA, 19 nt, Artificial Sequence
  Description of Artificial Sequence: Synthetic oligonucleotide
gaauguugcugaaaucuac

SEQ ID NO: 1702430 - RNA, 19 nt, Artificial Sequence
  Description of Artificial Sequence: Synthetic oligonucleotide
aggaggcaagguuauguag

SEQ ID NO: 1702431 - RNA, 19 nt, Artificial Sequence
  Description of Artificial Sequence: Synthetic oligonucleotide
aaaaugguagacggacuga

SEQ ID NO: 1702432 - RNA, 19 nt, Artificial Sequence
  Description of Artificial Sequence: Synthetic oligonucleotide
gguaacuucaguaggaauc

SEQ ID NO: 1702433 - RNA, 19 nt, Artificial Sequence
  Description of Artificial Sequence: Synthetic oligonucleotide
ucaauucggggugacaagu

SEQ ID NO: 1702434 - RNA, 19 nt, Artificial Sequence
  Description of Artificial Sequence: Synthetic oligonucleotide
gguauucgaacaugaggcg

SEQ ID NO: 1702435 - RNA, 19 nt, Artificial Sequence
  Description of Artificial Sequence: Synthetic oligonucleotide
ucaccacuggaacuuaguc

SEQ ID NO: 1702436 - RNA, 19 nt, Artificial Sequence
  Description of Artificial Sequence: Synthetic oligonucleotide
uuugugcuugggaguaaag

SEQ ID NO: 1702437 - RNA, 19 nt, Artificial Sequence
  Description of Artificial Sequence: Synthetic oligonucleotide
uuucggaccacgcuagaua

SEQ ID NO: 1702438 - RNA, 19 nt, Artificial Sequence
  Description of Artificial Sequence: Synthetic oligonucleotide
uaugugcaguuugaagcgg

SEQ ID NO: 1702439 - RNA, 19 nt, Artificial Sequence
  Description of Artificial Sequence: Synthetic oligonucleotide
aaaugguagacggacugaa

SEQ ID NO: 1702440 - RNA, 19 nt, Artificial Sequence
  Description of Artificial Sequence: Synthetic oligonucleotide
acuucaaguccguuauucu

SEQ ID NO: 1702441 - RNA, 19 nt, Artificial Sequence
  Description of Artificial Sequence: Synthetic oligonucleotide
uaaugucucuccagcauau

SEQ ID NO: 1702442 - RNA, 19 nt, Artificial Sequence
  Description of Artificial Sequence: Synthetic oligonucleotide
uccuugaaucacauacugu

SEQ ID NO: 1702443 - RNA, 19 nt, Artificial Sequence
  Description of Artificial Sequence: Synthetic oligonucleotide
ugauauccuugaaucacau

SEQ ID NO: 1702444 - RNA, 19 nt, Artificial Sequence
  Description of Artificial Sequence: Synthetic oligonucleotide
ucuucaaaacugacagaaa

SEQ ID NO: 1702445 - RNA, 19 nt, Artificial Sequence
  Description of Artificial Sequence: Synthetic oligonucleotide
ugguaaaaugguagacgga

SEQ ID NO: 1702446 - RNA, 19 nt, Artificial Sequence
  Description of Artificial Sequence: Synthetic oligonucleotide
uucggaccacgcuagauau

SEQ ID NO: 1702447 - RNA, 19 nt, Artificial Sequence
  Description of Artificial Sequence: Synthetic oligonucleotide
cacgcuagauaugaauggg

SEQ ID NO: 1702448 - RNA, 19 nt, Artificial Sequence
  Description of Artificial Sequence: Synthetic oligonucleotide
acuggaacuuaguccgauc

SEQ ID NO: 1702449 - RNA, 19 nt, Artificial Sequence
  Description of Artificial Sequence: Synthetic oligonucleotide
uuccaaguggcuuccggga

SEQ ID NO: 1702450 - RNA, 19 nt, Artificial Sequence
  Description of Artificial Sequence: Synthetic oligonucleotide
caucauauuccacgacacc

SEQ ID NO: 1702451 - RNA, 19 nt, Artificial Sequence
  Description of Artificial Sequence: Synthetic oligonucleotide
agagcucucgcggaggcgg

SEQ ID NO: 1702452 - RNA, 19 nt, Artificial Sequence
  Description of Artificial Sequence: Synthetic oligonucleotide
cugacacacauguggacug

SEQ ID NO: 1702453 - RNA, 19 nt, Artificial Sequence
  Description of Artificial Sequence: Synthetic oligonucleotide
uggagacauuuuaacuuga

SEQ ID NO: 1702454 - RNA, 19 nt, Artificial Sequence
  Description of Artificial Sequence: Synthetic oligonucleotide
aguccgaccuuuccauuuc

SEQ ID NO: 1702455 - RNA, 19 nt, Artificial Sequence
  Description of Artificial Sequence: Synthetic oligonucleotide
auugaaaaugaugucccau

SEQ ID NO: 1702456 - RNA, 19 nt, Artificial Sequence
  Description of Artificial Sequence: Synthetic oligonucleotide
uuccauuucggaccacgcu

SEQ ID NO: 1702457 - RNA, 19 nt, Artificial Sequence
  Description of Artificial Sequence: Synthetic oligonucleotide
agcugaaaauucaccaguc

SEQ ID NO: 1702458 - RNA, 19 nt, Artificial Sequence
  Description of Artificial Sequence: Synthetic oligonucleotide
gaaucgagcugaaaauuca

SEQ ID NO: 1702459 - RNA, 19 nt, Artificial Sequence
  Description of Artificial Sequence: Synthetic oligonucleotide
uaguccgaucaguaaccgg

SEQ ID NO: 1702460 - RNA, 19 nt, Artificial Sequence
  Description of Artificial Sequence: Synthetic oligonucleotide
gaaauaagccuucgcucuc

SEQ ID NO: 1702461 - RNA, 19 nt, Artificial Sequence
  Description of Artificial Sequence: Synthetic oligonucleotide
accacgcuagauaugaaug

SEQ ID NO: 1702462 - RNA, 19 nt, Artificial Sequence
  Description of Artificial Sequence: Synthetic oligonucleotide
auguggacugagcagucug

SEQ ID NO: 1702463 - RNA, 19 nt, Artificial Sequence
  Description of Artificial Sequence: Synthetic oligonucleotide
gcagguggcaaacuugagg

SEQ ID NO: 1702464 - RNA, 19 nt, Artificial Sequence
  Description of Artificial Sequence: Synthetic oligonucleotide
guagcauccaguccgaccu

SEQ ID NO: 1702465 - RNA, 19 nt, Artificial Sequence
  Description of Artificial Sequence: Synthetic oligonucleotide
agcgucugguauucgaaca

SEQ ID NO: 1702466 - RNA, 19 nt, Artificial Sequence
  Description of Artificial Sequence: Synthetic oligonucleotide
ggcaaaugcggccuccugg

SEQ ID NO: 1702467 - RNA, 19 nt, Artificial Sequence
  Description of Artificial Sequence: Synthetic oligonucleotide
agagccuccgagggcaugc

SEQ ID NO: 1702468 - RNA, 19 nt, Artificial Sequence
  Description of Artificial Sequence: Synthetic oligonucleotide
acggacugaaagguaagag

SEQ ID NO: 1702469 - RNA, 19 nt, Artificial Sequence
  Description of Artificial Sequence: Synthetic oligonucleotide
gaaauucgauucaaggcaa

SEQ ID NO: 1702470 - RNA, 19 nt, Artificial Sequence
  Description of Artificial Sequence: Synthetic oligonucleotide
acaguuggguccaggaguc

SEQ ID NO: 1702471 - RNA, 19 nt, Artificial Sequence
  Description of Artificial Sequence: Synthetic oligonucleotide
cccauuuuaaugucucucc

SEQ ID NO: 1702472 - RNA, 19 nt, Artificial Sequence
  Description of Artificial Sequence: Synthetic oligonucleotide
cucaauucggggugacaag

SEQ ID NO: 1702473 - RNA, 19 nt, Artificial Sequence
  Description of Artificial Sequence: Synthetic oligonucleotide
cugaaagguaagaguuggc

SEQ ID NO: 1702474 - RNA, 19 nt, Artificial Sequence
  Description of Artificial Sequence: Synthetic oligonucleotide
ucccauuuuaaugucucuc

SEQ ID NO: 1702475 - RNA, 19 nt, Artificial Sequence
  Description of Artificial Sequence: Synthetic oligonucleotide
ugaagcggucacaguuggg

SEQ ID NO: 1702476 - RNA, 19 nt, Artificial Sequence
  Description of Artificial Sequence: Synthetic oligonucleotide
gaguuggcugaucccgagg

SEQ ID NO: 1702477 - RNA, 19 nt, Artificial Sequence
  Description of Artificial Sequence: Synthetic oligonucleotide
uuccacgacaccugugcca

SEQ ID NO: 1702478 - RNA, 19 nt, Artificial Sequence
  Description of Artificial Sequence: Synthetic oligonucleotide
aaggcaauuucuggagaca

SEQ ID NO: 1702479 - RNA, 19 nt, Artificial Sequence
  Description of Artificial Sequence: Synthetic oligonucleotide
cuggaacuuaguccgauca

SEQ ID NO: 1702480 - RNA, 19 nt, Artificial Sequence
  Description of Artificial Sequence: Synthetic oligonucleotide
agcaauauacucccuucuu

SEQ ID NO: 1702481 - RNA, 19 nt, Artificial Sequence
  Description of Artificial Sequence: Synthetic oligonucleotide
agaguuggcugaucccgag

SEQ ID NO: 1702482 - RNA, 19 nt, Artificial Sequence
  Description of Artificial Sequence: Synthetic oligonucleotide
cuuggguggcuucaguauc

SEQ ID NO: 1702483 - RNA, 19 nt, Artificial Sequence
  Description of Artificial Sequence: Synthetic oligonucleotide
gauauguaggaauguugcu

SEQ ID NO: 1702484 - RNA, 19 nt, Artificial Sequence
  Description of Artificial Sequence: Synthetic oligonucleotide
acgcuagauaugaaugggg

SEQ ID NO: 1702485 - RNA, 19 nt, Artificial Sequence
  Description of Artificial Sequence: Synthetic oligonucleotide
ucaaguccguuauucucaa

SEQ ID NO: 1702486 - RNA, 19 nt, Artificial Sequence
  Description of Artificial Sequence: Synthetic oligonucleotide
uccaguccgaccuuuccau

SEQ ID NO: 1702487 - RNA, 19 nt, Artificial Sequence
  Description of Artificial Sequence: Synthetic oligonucleotide
uuggagaaauucgauucaa

SEQ ID NO: 1702488 - RNA, 19 nt, Artificial Sequence
  Description of Artificial Sequence: Synthetic oligonucleotide
acagguaacuucaguagga

SEQ ID NO: 1702489 - RNA, 19 nt, Artificial Sequence
  Description of Artificial Sequence: Synthetic oligonucleotide
ugaaaucuacagguaacuu

SEQ ID NO: 1702490 - RNA, 19 nt, Artificial Sequence
  Description of Artificial Sequence: Synthetic oligonucleotide
acaguuuguagcauccagu

SEQ ID NO: 1702491 - RNA, 19 nt, Artificial Sequence
  Description of Artificial Sequence: Synthetic oligonucleotide
caugaggcgagagcucucg

SEQ ID NO: 1702492 - RNA, 19 nt, Artificial Sequence
  Description of Artificial Sequence: Synthetic oligonucleotide
aaacaggggcaggucaaug

SEQ ID NO: 1702493 - RNA, 19 nt, Artificial Sequence
  Description of Artificial Sequence: Synthetic oligonucleotide
agauaugaauggggacagc

SEQ ID NO: 1702494 - RNA, 19 nt, Artificial Sequence
  Description of Artificial Sequence: Synthetic oligonucleotide
uccgagggcaugcucaauu

SEQ ID NO: 1702495 - RNA, 19 nt, Artificial Sequence
  Description of Artificial Sequence: Synthetic oligonucleotide
ccacgcuagauaugaaugg

SEQ ID NO: 1702496 - RNA, 19 nt, Artificial Sequence
  Description of Artificial Sequence: Synthetic oligonucleotide
augaggcgagagcucucgc

SEQ ID NO: 1702497 - RNA, 19 nt, Artificial Sequence
  Description of Artificial Sequence: Synthetic oligonucleotide
ugugcaguuugaagcgguc

SEQ ID NO: 1702498 - RNA, 19 nt, Artificial Sequence
  Description of Artificial Sequence: Synthetic oligonucleotide
uccaaguggcuuccgggaa

SEQ ID NO: 1702499 - RNA, 19 nt, Artificial Sequence
  Description of Artificial Sequence: Synthetic oligonucleotide
ggaacugagggacaaaggu

SEQ ID NO: 1702500 - RNA, 19 nt, Artificial Sequence
  Description of Artificial Sequence: Synthetic oligonucleotide
gagcgucugguauucgaac

SEQ ID NO: 1702501 - RNA, 19 nt, Artificial Sequence
  Description of Artificial Sequence: Synthetic oligonucleotide
auccaguccgaccuuucca

SEQ ID NO: 1702502 - RNA, 19 nt, Artificial Sequence
  Description of Artificial Sequence: Synthetic oligonucleotide
agguuauguagagcagagg

SEQ ID NO: 1702503 - RNA, 19 nt, Artificial Sequence
  Description of Artificial Sequence: Synthetic oligonucleotide
cauccaguccgaccuuucc

SEQ ID NO: 1702504 - RNA, 19 nt, Artificial Sequence
  Description of Artificial Sequence: Synthetic oligonucleotide
gaaaauucaccaguccagu

SEQ ID NO: 1702505 - RNA, 19 nt, Artificial Sequence
  Description of Artificial Sequence: Synthetic oligonucleotide
gcuagauaugaauggggac

SEQ ID NO: 1702506 - RNA, 19 nt, Artificial Sequence
  Description of Artificial Sequence: Synthetic oligonucleotide
uuggguccaggagucaaug

SEQ ID NO: 1702507 - RNA, 19 nt, Artificial Sequence
  Description of Artificial Sequence: Synthetic oligonucleotide
aggcaagguuauguagagc

SEQ ID NO: 1702508 - RNA, 19 nt, Artificial Sequence
  Description of Artificial Sequence: Synthetic oligonucleotide
caagguuauguagagcaga

SEQ ID NO: 1702509 - RNA, 19 nt, Artificial Sequence
  Description of Artificial Sequence: Synthetic oligonucleotide
agguaacuucaguaggaau

SEQ ID NO: 1702510 - RNA, 19 nt, Artificial Sequence
  Description of Artificial Sequence: Synthetic oligonucleotide
aguuugaagcggucacagu

SEQ ID NO: 1702511 - RNA, 19 nt, Artificial Sequence
  Description of Artificial Sequence: Synthetic oligonucleotide
uccacgacaccugugccaa

SEQ ID NO: 1702512 - RNA, 19 nt, Artificial Sequence
  Description of Artificial Sequence: Synthetic oligonucleotide
ucaacacugcuguuuccua

SEQ ID NO: 1702513 - RNA, 19 nt, Artificial Sequence
  Description of Artificial Sequence: Synthetic oligonucleotide
guaaguuuuguaaagccuu

SEQ ID NO: 1702514 - RNA, 19 nt, Artificial Sequence
  Description of Artificial Sequence: Synthetic oligonucleotide
aaaacaggggcaggucaau

SEQ ID NO: 1702515 - RNA, 19 nt, Artificial Sequence
  Description of Artificial Sequence: Synthetic oligonucleotide
gaagcggucacaguugggu

SEQ ID NO: 1702516 - RNA, 19 nt, Artificial Sequence
  Description of Artificial Sequence: Synthetic oligonucleotide
cuagagcuuuccauuggca

SEQ ID NO: 1702517 - RNA, 19 nt, Artificial Sequence
  Description of Artificial Sequence: Synthetic oligonucleotide
aggaaucgagcugaaaauu

SEQ ID NO: 1702518 - RNA, 19 nt, Artificial Sequence
  Description of Artificial Sequence: Synthetic oligonucleotide
uuguccacuguugguaaaa

SEQ ID NO: 1702519 - RNA, 19 nt, Artificial Sequence
  Description of Artificial Sequence: Synthetic oligonucleotide
ggaaucgagcugaaaauuc

SEQ ID NO: 1702520 - RNA, 19 nt, Artificial Sequence
  Description of Artificial Sequence: Synthetic oligonucleotide
gugauauccuugaaucaca

SEQ ID NO: 1702521 - RNA, 19 nt, Artificial Sequence
  Description of Artificial Sequence: Synthetic oligonucleotide
aagguaagaguuggcugau

SEQ ID NO: 1702522 - RNA, 19 nt, Artificial Sequence
  Description of Artificial Sequence: Synthetic oligonucleotide
aaauucgauucaaggcaau

SEQ ID NO: 1702523 - RNA, 19 nt, Artificial Sequence
  Description of Artificial Sequence: Synthetic oligonucleotide
guccgaccuuuccauuucg

SEQ ID NO: 1702524 - RNA, 19 nt, Artificial Sequence
  Description of Artificial Sequence: Synthetic oligonucleotide
cacgacaccugugccaaag

SEQ ID NO: 1702525 - RNA, 19 nt, Artificial Sequence
  Description of Artificial Sequence: Synthetic oligonucleotide
uggguccaggagucaauga

SEQ ID NO: 1702526 - RNA, 19 nt, Artificial Sequence
  Description of Artificial Sequence: Synthetic oligonucleotide
uggcaaaugcggccuccug

SEQ ID NO: 1702527 - RNA, 19 nt, Artificial Sequence
  Description of Artificial Sequence: Synthetic oligonucleotide
aggcaauuucuggagacau

SEQ ID NO: 1702528 - RNA, 19 nt, Artificial Sequence
  Description of Artificial Sequence: Synthetic oligonucleotide
ccuagagcuuuccauuggc

SEQ ID NO: 1702529 - RNA, 19 nt, Artificial Sequence
  Description of Artificial Sequence: Synthetic oligonucleotide
auucggggugacaaguaca

SEQ ID NO: 1702530 - RNA, 19 nt, Artificial Sequence
  Description of Artificial Sequence: Synthetic oligonucleotide
cugugugcugacacacaug

SEQ ID NO: 1702531 - RNA, 19 nt, Artificial Sequence
  Description of Artificial Sequence: Synthetic oligonucleotide
caauauacucccuucuuuu

SEQ ID NO: 1702532 - RNA, 19 nt, Artificial Sequence
  Description of Artificial Sequence: Synthetic oligonucleotide
agggauaugaagagcugaa

SEQ ID NO: 1702533 - RNA, 19 nt, Artificial Sequence
  Description of Artificial Sequence: Synthetic oligonucleotide
ucggaccacgcuagauaug

SEQ ID NO: 1702534 - RNA, 19 nt, Artificial Sequence
  Description of Artificial Sequence: Synthetic oligonucleotide
acauguggacugagcaguc

SEQ ID NO: 1702535 - RNA, 19 nt, Artificial Sequence
  Description of Artificial Sequence: Synthetic oligonucleotide
gacggacugaaagguaaga

SEQ ID NO: 1702536 - RNA, 19 nt, Artificial Sequence
  Description of Artificial Sequence: Synthetic oligonucleotide
ugacacacauguggacuga

SEQ ID NO: 1702537 - RNA, 19 nt, Artificial Sequence
  Description of Artificial Sequence: Synthetic oligonucleotide
agacggacugaaagguaag

SEQ ID NO: 1702538 - RNA, 19 nt, Artificial Sequence
  Description of Artificial Sequence: Synthetic oligonucleotide
gggauaugaagagcugaag

SEQ ID NO: 1702539 - RNA, 19 nt, Artificial Sequence
  Description of Artificial Sequence: Synthetic oligonucleotide
cgauucaaggcaauuucug

SEQ ID NO: 1702540 - RNA, 19 nt, Artificial Sequence
  Description of Artificial Sequence: Synthetic oligonucleotide
uccgggaagcagccugugu

SEQ ID NO: 1702541 - RNA, 19 nt, Artificial Sequence
  Description of Artificial Sequence: Synthetic oligonucleotide
cagggauaugaagagcuga

SEQ ID NO: 1702542 - RNA, 19 nt, Artificial Sequence
  Description of Artificial Sequence: Synthetic oligonucleotide
auuucggaccacgcuagau

SEQ ID NO: 1702543 - RNA, 19 nt, Artificial Sequence
  Description of Artificial Sequence: Synthetic oligonucleotide
cacuguugguaaaauggua

SEQ ID NO: 1702544 - RNA, 19 nt, Artificial Sequence
  Description of Artificial Sequence: Synthetic oligonucleotide
agcagcagaguaaguuuug

SEQ ID NO: 1702545 - RNA, 19 nt, Artificial Sequence
  Description of Artificial Sequence: Synthetic oligonucleotide
ggucaauguguacaaggaa

SEQ ID NO: 1702546 - RNA, 19 nt, Artificial Sequence
  Description of Artificial Sequence: Synthetic oligonucleotide
gcaaaugcggccuccugga

SEQ ID NO: 1702547 - RNA, 19 nt, Artificial Sequence
  Description of Artificial Sequence: Synthetic oligonucleotide
caccacaagcaggaggcac

SEQ ID NO: 1702548 - RNA, 19 nt, Artificial Sequence
  Description of Artificial Sequence: Synthetic oligonucleotide
cagacuucaaguccguuau

SEQ ID NO: 1702549 - RNA, 19 nt, Artificial Sequence
  Description of Artificial Sequence: Synthetic oligonucleotide
cuggguacugagcauugaa

SEQ ID NO: 1702550 - RNA, 19 nt, Artificial Sequence
  Description of Artificial Sequence: Synthetic oligonucleotide
acacuuggguggcuucagu

SEQ ID NO: 1702551 - RNA, 19 nt, Artificial Sequence
  Description of Artificial Sequence: Synthetic oligonucleotide
cugaaaucuacagguaacu

SEQ ID NO: 1702552 - RNA, 19 nt, Artificial Sequence
  Description of Artificial Sequence: Synthetic oligonucleotide
uuacauccuugagaagaua

SEQ ID NO: 1702553 - RNA, 19 nt, Artificial Sequence
  Description of Artificial Sequence: Synthetic oligonucleotide
uggacugagcagucugguu

SEQ ID NO: 1702554 - RNA, 19 nt, Artificial Sequence
  Description of Artificial Sequence: Synthetic oligonucleotide
acgacaccugugccaaagu

SEQ ID NO: 1702555 - RNA, 19 nt, Artificial Sequence
  Description of Artificial Sequence: Synthetic oligonucleotide
agguaagaguuggcugauc

SEQ ID NO: 1702556 - RNA, 19 nt, Artificial Sequence
  Description of Artificial Sequence: Synthetic oligonucleotide
auauuccacgacaccugug

SEQ ID NO: 1702557 - RNA, 19 nt, Artificial Sequence
  Description of Artificial Sequence: Synthetic oligonucleotide
gagagcucucgcggaggcg

SEQ ID NO: 1702558 - RNA, 19 nt, Artificial Sequence
  Description of Artificial Sequence: Synthetic oligonucleotide
augguaugugcaguuugaa

SEQ ID NO: 1702559 - RNA, 19 nt, Artificial Sequence
  Description of Artificial Sequence: Synthetic oligonucleotide
agucaccacuggaacuuag

SEQ ID NO: 1702560 - RNA, 19 nt, Artificial Sequence
  Description of Artificial Sequence: Synthetic oligonucleotide
ccgggaagcagccugugug

SEQ ID NO: 1702561 - RNA, 19 nt, Artificial Sequence
  Description of Artificial Sequence: Synthetic oligonucleotide
auucgaacaugaggcgaga

SEQ ID NO: 1702562 - RNA, 19 nt, Artificial Sequence
  Description of Artificial Sequence: Synthetic oligonucleotide
gcaagguuauguagagcag

SEQ ID NO: 1702563 - RNA, 19 nt, Artificial Sequence
  Description of Artificial Sequence: Synthetic oligonucleotide
cauauuccacgacaccugu

SEQ ID NO: 1702564 - RNA, 19 nt, Artificial Sequence
  Description of Artificial Sequence: Synthetic oligonucleotide
gguagacggacugaaaggu

SEQ ID NO: 1702565 - RNA, 19 nt, Artificial Sequence
  Description of Artificial Sequence: Synthetic oligonucleotide
aguaggaaucgagcugaaa

SEQ ID NO: 1702566 - RNA, 19 nt, Artificial Sequence
  Description of Artificial Sequence: Synthetic oligonucleotide
gcucaauucggggugacaa

SEQ ID NO: 1702567 - RNA, 19 nt, Artificial Sequence
  Description of Artificial Sequence: Synthetic oligonucleotide
caaacuugaggcacauaau

SEQ ID NO: 1702568 - RNA, 19 nt, Artificial Sequence
  Description of Artificial Sequence: Synthetic oligonucleotide
ggcaggucaauguguacaa

SEQ ID NO: 1702569 - RNA, 19 nt, Artificial Sequence
  Description of Artificial Sequence: Synthetic oligonucleotide
gugcaguuugaagcgguca

SEQ ID NO: 1702570 - RNA, 19 nt, Artificial Sequence
  Description of Artificial Sequence: Synthetic oligonucleotide
aggcgagagcucucgcgga

SEQ ID NO: 1702571 - RNA, 19 nt, Artificial Sequence
  Description of Artificial Sequence: Synthetic oligonucleotide
caauucggggugacaagua

SEQ ID NO: 1702572 - RNA, 19 nt, Artificial Sequence
  Description of Artificial Sequence: Synthetic oligonucleotide
aagucaccacuggaacuua

SEQ ID NO: 1702573 - RNA, 19 nt, Artificial Sequence
  Description of Artificial Sequence: Synthetic oligonucleotide
ggcgagagcucucgcggag

SEQ ID NO: 1702574 - RNA, 19 nt, Artificial Sequence
  Description of Artificial Sequence: Synthetic oligonucleotide
cagcagaguaaguuuugua

SEQ ID NO: 1702575 - RNA, 19 nt, Artificial Sequence
  Description of Artificial Sequence: Synthetic oligonucleotide
cuguaccuuguuggugagc

SEQ ID NO: 1702576 - RNA, 19 nt, Artificial Sequence
  Description of Artificial Sequence: Synthetic oligonucleotide
ggcaugcucaauucggggu

SEQ ID NO: 1702577 - RNA, 19 nt, Artificial Sequence
  Description of Artificial Sequence: Synthetic oligonucleotide
cagguaacuucaguaggaa

SEQ ID NO: 1702578 - RNA, 19 nt, Artificial Sequence
  Description of Artificial Sequence: Synthetic oligonucleotide
ucggggugacaaguacaac

SEQ ID NO: 1702579 - RNA, 19 nt, Artificial Sequence
  Description of Artificial Sequence: Synthetic oligonucleotide
ggaauguugcugaaaucua

SEQ ID NO: 1702580 - RNA, 19 nt, Artificial Sequence
  Description of Artificial Sequence: Synthetic oligonucleotide
aagcagcaauauacucccu

SEQ ID NO: 1702581 - RNA, 19 nt, Artificial Sequence
  Description of Artificial Sequence: Synthetic oligonucleotide
gcaauauacucccuucuuu

SEQ ID NO: 1702582 - RNA, 19 nt, Artificial Sequence
  Description of Artificial Sequence: Synthetic oligonucleotide
guagacggacugaaaggua

SEQ ID NO: 1702583 - RNA, 19 nt, Artificial Sequence
  Description of Artificial Sequence: Synthetic oligonucleotide
cgagggcaugcucaauucg

SEQ ID NO: 1702584 - RNA, 19 nt, Artificial Sequence
  Description of Artificial Sequence: Synthetic oligonucleotide
cucucgcggaggcggcugc

SEQ ID NO: 1702585 - RNA, 19 nt, Artificial Sequence
  Description of Artificial Sequence: Synthetic oligonucleotide
gcauuggaacuggugguac

SEQ ID NO: 1702586 - RNA, 19 nt, Artificial Sequence
  Description of Artificial Sequence: Synthetic oligonucleotide
gcagggauaugaagagcug

SEQ ID NO: 1702587 - RNA, 19 nt, Artificial Sequence
  Description of Artificial Sequence: Synthetic oligonucleotide
gaaaggagggccacaucuu

SEQ ID NO: 1702588 - RNA, 19 nt, Artificial Sequence
  Description of Artificial Sequence: Synthetic oligonucleotide
gcugacacacauguggacu

SEQ ID NO: 1702589 - RNA, 19 nt, Artificial Sequence
  Description of Artificial Sequence: Synthetic oligonucleotide
gccuucgcucucuuggcca

SEQ ID NO: 1702590 - RNA, 19 nt, Artificial Sequence
  Description of Artificial Sequence: Synthetic oligonucleotide
cauuucggaccacgcuaga

SEQ ID NO: 1702591 - RNA, 19 nt, Artificial Sequence
  Description of Artificial Sequence: Synthetic oligonucleotide
cagccugugugcugacaca

SEQ ID NO: 1702592 - RNA, 19 nt, Artificial Sequence
  Description of Artificial Sequence: Synthetic oligonucleotide
agcauccaguccgaccuuu

SEQ ID NO: 1702593 - RNA, 19 nt, Artificial Sequence
  Description of Artificial Sequence: Synthetic oligonucleotide
ccgagggcaugcucaauuc

SEQ ID NO: 1702594 - RNA, 19 nt, Artificial Sequence
  Description of Artificial Sequence: Synthetic oligonucleotide
ccguuauucucaaacaguu

SEQ ID NO: 1702595 - RNA, 19 nt, Artificial Sequence
  Description of Artificial Sequence: Synthetic oligonucleotide
uggggcuguauggguaauu

SEQ ID NO: 1702596 - RNA, 19 nt, Artificial Sequence
  Description of Artificial Sequence: Synthetic oligonucleotide
ccgaccuuuccauuucgga

SEQ ID NO: 1702597 - RNA, 19 nt, Artificial Sequence
  Description of Artificial Sequence: Synthetic oligonucleotide
ggagcgucugguauucgaa

SEQ ID NO: 1702598 - RNA, 19 nt, Artificial Sequence
  Description of Artificial Sequence: Synthetic oligonucleotide
caggagcgucugguauucg

SEQ ID NO: 1702599 - RNA, 19 nt, Artificial Sequence
  Description of Artificial Sequence: Synthetic oligonucleotide
gagcucucgcggaggcggc

SEQ ID NO: 1702600 - RNA, 19 nt, Artificial Sequence
  Description of Artificial Sequence: Synthetic oligonucleotide
gcgagagcucucgcggagg

SEQ ID NO: 1702601 - RNA, 19 nt, Artificial Sequence
  Description of Artificial Sequence: Synthetic oligonucleotide
auguacagccagacuucaa

SEQ ID NO: 1702602 - RNA, 19 nt, Artificial Sequence
  Description of Artificial Sequence: Synthetic oligonucleotide
cuuccgggaagcagccugu

SEQ ID NO: 1702603 - RNA, 19 nt, Artificial Sequence
  Description of Artificial Sequence: Synthetic oligonucleotide
gcauaugguaugugcaguu

SEQ ID NO: 1702604 - RNA, 19 nt, Artificial Sequence
  Description of Artificial Sequence: Synthetic oligonucleotide
caguccgaccuuuccauuu

SEQ ID NO: 1702605 - RNA, 19 nt, Artificial Sequence
  Description of Artificial Sequence: Synthetic oligonucleotide
cauaugguaugugcaguuu

SEQ ID NO: 1702606 - RNA, 19 nt, Artificial Sequence
  Description of Artificial Sequence: Synthetic oligonucleotide
caaguccguuauucucaaa

SEQ ID NO: 1702607 - RNA, 19 nt, Artificial Sequence
  Description of Artificial Sequence: Synthetic oligonucleotide
caguaggaaucgagcugaa

SEQ ID NO: 1702608 - RNA, 19 nt, Artificial Sequence
  Description of Artificial Sequence: Synthetic oligonucleotide
ccaggagcgucugguauuc

SEQ ID NO: 1702609 - RNA, 19 nt, Artificial Sequence
  Description of Artificial Sequence: Synthetic oligonucleotide
gcggccuccuggaacugag

SEQ ID NO: 1702610 - RNA, 19 nt, Artificial Sequence
  Description of Artificial Sequence: Synthetic oligonucleotide
cagcauaaauuuccauguu

SEQ ID NO: 1702611 - RNA, 19 nt, Artificial Sequence
  Description of Artificial Sequence: Synthetic oligonucleotide
ggagacauuuuaacuugau

SEQ ID NO: 1702612 - RNA, 19 nt, Artificial Sequence
  Description of Artificial Sequence: Synthetic oligonucleotide
cgucugguauucgaacaug

SEQ ID NO: 1702613 - RNA, 19 nt, Artificial Sequence
  Description of Artificial Sequence: Synthetic oligonucleotide
gcagcagaguaaguuuugu

SEQ ID NO: 1702614 - RNA, 19 nt, Artificial Sequence
  Description of Artificial Sequence: Synthetic oligonucleotide
gcgucugguauucgaacau

SEQ ID NO: 1702615 - RNA, 19 nt, Artificial Sequence
  Description of Artificial Sequence: Synthetic oligonucleotide
ccugugccaaagugacuga

SEQ ID NO: 1702616 - RNA, 19 nt, Artificial Sequence
  Description of Artificial Sequence: Synthetic oligonucleotide
cugagcagucugguuggcu

SEQ ID NO: 1702617 - RNA, 19 nt, Artificial Sequence
  Description of Artificial Sequence: Synthetic oligonucleotide
cacuggaacuuaguccgau

SEQ ID NO: 1702618 - RNA, 19 nt, Artificial Sequence
  Description of Artificial Sequence: Synthetic oligonucleotide
ggggcuguauggguaauuu

SEQ ID NO: 1702619 - RNA, 19 nt, Artificial Sequence
  Description of Artificial Sequence: Synthetic oligonucleotide
caucccaucuggggcugua

SEQ ID NO: 1702620 - RNA, 19 nt, Artificial Sequence
  Description of Artificial Sequence: Synthetic oligonucleotide
ccacuggaacuuaguccga

SEQ ID NO: 1702621 - RNA, 19 nt, Artificial Sequence
  Description of Artificial Sequence: Synthetic oligonucleotide
ggcaauuucuggagacauu

SEQ ID NO: 1702622 - RNA, 19 nt, Artificial Sequence
  Description of Artificial Sequence: Synthetic oligonucleotide
cguuauucucaaacaguuu

SEQ ID NO: 1702623 - RNA, 19 nt, Artificial Sequence
  Description of Artificial Sequence: Synthetic oligonucleotide
ggaccacgcuagauaugaa

SEQ ID NO: 1702624 - RNA, 19 nt, Artificial Sequence
  Description of Artificial Sequence: Synthetic oligonucleotide
ccaguccgaccuuuccauu

SEQ ID NO: 1702625 - RNA, 19 nt, Artificial Sequence
  Description of Artificial Sequence: Synthetic oligonucleotide
gccagacuucaaguccguu

SEQ ID NO: 1702626 - RNA, 19 nt, Artificial Sequence
  Description of Artificial Sequence: Synthetic oligonucleotide
ccacgacaccugugccaaa

SEQ ID NO: 1702627 - RNA, 19 nt, Artificial Sequence
  Description of Artificial Sequence: Synthetic oligonucleotide
ccaucccaucuggggcugu

SEQ ID NO: 1702628 - RNA, 19 nt, Artificial Sequence
  Description of Artificial Sequence: Synthetic oligonucleotide
aaaaguacaacucagcuuc

SEQ ID NO: 1702629 - RNA, 19 nt, Artificial Sequence
  Description of Artificial Sequence: Synthetic oligonucleotide
guuacuaccauuuugagag

SEQ ID NO: 1702630 - RNA, 19 nt, Artificial Sequence
  Description of Artificial Sequence: Synthetic oligonucleotide
aauuaaagacaucuguggc

SEQ ID NO: 1702631 - RNA, 19 nt, Artificial Sequence
  Description of Artificial Sequence: Synthetic oligonucleotide
uaaaagugaaucaagauac

SEQ ID NO: 1702632 - RNA, 19 nt, Artificial Sequence
  Description of Artificial Sequence: Synthetic oligonucleotide
uuaaacuucuccaucagcg

SEQ ID NO: 1702633 - RNA, 19 nt, Artificial Sequence
  Description of Artificial Sequence: Synthetic oligonucleotide
aguacuaccauuaaugucc

SEQ ID NO: 1702634 - RNA, 19 nt, Artificial Sequence
  Description of Artificial Sequence: Synthetic oligonucleotide
uuagaaauaucuaaugugc

SEQ ID NO: 1702635 - RNA, 19 nt, Artificial Sequence
  Description of Artificial Sequence: Synthetic oligonucleotide
ugaaucaagauacacaacu

SEQ ID NO: 1702636 - RNA, 19 nt, Artificial Sequence
  Description of Artificial Sequence: Synthetic oligonucleotide
gaauuaaagacaucugugg

SEQ ID NO: 1702637 - RNA, 19 nt, Artificial Sequence
  Description of Artificial Sequence: Synthetic oligonucleotide
uauuucaagacaaugacau

SEQ ID NO: 1702638 - RNA, 19 nt, Artificial Sequence
  Description of Artificial Sequence: Synthetic oligonucleotide
gauuauacaaggcagccag

SEQ ID NO: 1702639 - RNA, 19 nt, Artificial Sequence
  Description of Artificial Sequence: Synthetic oligonucleotide
uuuagauaccauuuuaccc

SEQ ID NO: 1702640 - RNA, 19 nt, Artificial Sequence
  Description of Artificial Sequence: Synthetic oligonucleotide
auuagaaauaucuaaugug

SEQ ID NO: 1702641 - RNA, 19 nt, Artificial Sequence
  Description of Artificial Sequence: Synthetic oligonucleotide
uuuaaauuuuccaaaggga

SEQ ID NO: 1702642 - RNA, 19 nt, Artificial Sequence
  Description of Artificial Sequence: Synthetic oligonucleotide
auacaaggcagccagaaac

SEQ ID NO: 1702643 - RNA, 19 nt, Artificial Sequence
  Description of Artificial Sequence: Synthetic oligonucleotide
aaagaauaaaagugaauca

SEQ ID NO: 1702644 - RNA, 19 nt, Artificial Sequence
  Description of Artificial Sequence: Synthetic oligonucleotide
aaugacagcaaagagaggu

SEQ ID NO: 1702645 - RNA, 19 nt, Artificial Sequence
  Description of Artificial Sequence: Synthetic oligonucleotide
auggauguuaauuucagag

SEQ ID NO: 1702646 - RNA, 19 nt, Artificial Sequence
  Description of Artificial Sequence: Synthetic oligonucleotide
aaagggauuauacaaggca

SEQ ID NO: 1702647 - RNA, 19 nt, Artificial Sequence
  Description of Artificial Sequence: Synthetic oligonucleotide
aucuaagugucacugaugg

SEQ ID NO: 1702648 - RNA, 19 nt, Artificial Sequence
  Description of Artificial Sequence: Synthetic oligonucleotide
uuaaauuuuccaaagggau

SEQ ID NO: 1702649 - RNA, 19 nt, Artificial Sequence
  Description of Artificial Sequence: Synthetic oligonucleotide
uguuucaaaaggaucaaug

SEQ ID NO: 1702650 - RNA, 19 nt, Artificial Sequence
  Description of Artificial Sequence: Synthetic oligonucleotide
uuuugaauuaccaaccguc

SEQ ID NO: 1702651 - RNA, 19 nt, Artificial Sequence
  Description of Artificial Sequence: Synthetic oligonucleotide
ucaacauaaguucaagaug

SEQ ID NO: 1702652 - RNA, 19 nt, Artificial Sequence
  Description of Artificial Sequence: Synthetic oligonucleotide
ucauauguucucuucaucc

SEQ ID NO: 1702653 - RNA, 19 nt, Artificial Sequence
  Description of Artificial Sequence: Synthetic oligonucleotide
aaagugaaucaagauacac

SEQ ID NO: 1702654 - RNA, 19 nt, Artificial Sequence
  Description of Artificial Sequence: Synthetic oligonucleotide
uucaacuacaacaagccac

SEQ ID NO: 1702655 - RNA, 19 nt, Artificial Sequence
  Description of Artificial Sequence: Synthetic oligonucleotide
uaauguccaacucauaugu

SEQ ID NO: 1702656 - RNA, 19 nt, Artificial Sequence
  Description of Artificial Sequence: Synthetic oligonucleotide
uuuugagagaucuaagugu

SEQ ID NO: 1702657 - RNA, 19 nt, Artificial Sequence
  Description of Artificial Sequence: Synthetic oligonucleotide
cacuaagacauuuucagcc

SEQ ID NO: 1702658 - RNA, 19 nt, Artificial Sequence
  Description of Artificial Sequence: Synthetic oligonucleotide
caaaguuucuguaagugag

SEQ ID NO: 1702659 - RNA, 19 nt, Artificial Sequence
  Description of Artificial Sequence: Synthetic oligonucleotide
aaaguacuaccauuaaugu

SEQ ID NO: 1702660 - RNA, 19 nt, Artificial Sequence
  Description of Artificial Sequence: Synthetic oligonucleotide
acuacaacaagccacacaa

SEQ ID NO: 1702661 - RNA, 19 nt, Artificial Sequence
  Description of Artificial Sequence: Synthetic oligonucleotide
ucaaagacauuguuaaccc

SEQ ID NO: 1702662 - RNA, 19 nt, Artificial Sequence
  Description of Artificial Sequence: Synthetic oligonucleotide
aagacaaugacauguuacu

SEQ ID NO: 1702663 - RNA, 19 nt, Artificial Sequence
  Description of Artificial Sequence: Synthetic oligonucleotide
uggcaauggauuuagauac

SEQ ID NO: 1702664 - RNA, 19 nt, Artificial Sequence
  Description of Artificial Sequence: Synthetic oligonucleotide
aaagguguauucuaccuga

SEQ ID NO: 1702665 - RNA, 19 nt, Artificial Sequence
  Description of Artificial Sequence: Synthetic oligonucleotide
ugugccaccaacaaaauuu

SEQ ID NO: 1702666 - RNA, 19 nt, Artificial Sequence
  Description of Artificial Sequence: Synthetic oligonucleotide
auuuugagagaucuaagug

SEQ ID NO: 1702667 - RNA, 19 nt, Artificial Sequence
  Description of Artificial Sequence: Synthetic oligonucleotide
auuucagagacauuuguca

SEQ ID NO: 1702668 - RNA, 19 nt, Artificial Sequence
  Description of Artificial Sequence: Synthetic oligonucleotide
gguguauucuaccugaugg

SEQ ID NO: 1702669 - RNA, 19 nt, Artificial Sequence
  Description of Artificial Sequence: Synthetic oligonucleotide
uauucuaccugauggaagc

SEQ ID NO: 1702670 - RNA, 19 nt, Artificial Sequence
  Description of Artificial Sequence: Synthetic oligonucleotide
gacauuguuaacccguccg

SEQ ID NO: 1702671 - RNA, 19 nt, Artificial Sequence
  Description of Artificial Sequence: Synthetic oligonucleotide
ucaaaguuaggcccuaagc

SEQ ID NO: 1702672 - RNA, 19 nt, Artificial Sequence
  Description of Artificial Sequence: Synthetic oligonucleotide
uucagaagcacuuucuuac

SEQ ID NO: 1702673 - RNA, 19 nt, Artificial Sequence
  Description of Artificial Sequence: Synthetic oligonucleotide
ugacaucaaaguuaggccc

SEQ ID NO: 1702674 - RNA, 19 nt, Artificial Sequence
  Description of Artificial Sequence: Synthetic oligonucleotide
uaagcaaguauuucaagac

SEQ ID NO: 1702675 - RNA, 19 nt, Artificial Sequence
  Description of Artificial Sequence: Synthetic oligonucleotide
aauggauuuagauaccauu

SEQ ID NO: 1702676 - RNA, 19 nt, Artificial Sequence
  Description of Artificial Sequence: Synthetic oligonucleotide
cuuccuaugugugaaaugg

SEQ ID NO: 1702677 - RNA, 19 nt, Artificial Sequence
  Description of Artificial Sequence: Synthetic oligonucleotide
ugauugaacugauuguucc

SEQ ID NO: 1702678 - RNA, 19 nt, Artificial Sequence
  Description of Artificial Sequence: Synthetic oligonucleotide
aaaguuaggcccuaagcaa

SEQ ID NO: 1702679 - RNA, 19 nt, Artificial Sequence
  Description of Artificial Sequence: Synthetic oligonucleotide
agcagaauuguuucaaaag

SEQ ID NO: 1702680 - RNA, 19 nt, Artificial Sequence
  Description of Artificial Sequence: Synthetic oligonucleotide
ugauugaagacacacucgu

SEQ ID NO: 1702681 - RNA, 19 nt, Artificial Sequence
  Description of Artificial Sequence: Synthetic oligonucleotide
aagaauaaaagugaaucaa

SEQ ID NO: 1702682 - RNA, 19 nt, Artificial Sequence
  Description of Artificial Sequence: Synthetic oligonucleotide
ucaacuacaacaagccaca

SEQ ID NO: 1702683 - RNA, 19 nt, Artificial Sequence
  Description of Artificial Sequence: Synthetic oligonucleotide
uccaaagggauuauacaag

SEQ ID NO: 1702684 - RNA, 19 nt, Artificial Sequence
  Description of Artificial Sequence: Synthetic oligonucleotide
uuugagagaucuaaguguc

SEQ ID NO: 1702685 - RNA, 19 nt, Artificial Sequence
  Description of Artificial Sequence: Synthetic oligonucleotide
cauuugucaacauaaguuc

SEQ ID NO: 1702686 - RNA, 19 nt, Artificial Sequence
  Description of Artificial Sequence: Synthetic oligonucleotide
caacauaaguucaagauga

SEQ ID NO: 1702687 - RNA, 19 nt, Artificial Sequence
  Description of Artificial Sequence: Synthetic oligonucleotide
acuaccauuaauguccaac

SEQ ID NO: 1702688 - RNA, 19 nt, Artificial Sequence
  Description of Artificial Sequence: Synthetic oligonucleotide
uuaauguccaacucauaug

SEQ ID NO: 1702689 - RNA, 19 nt, Artificial Sequence
  Description of Artificial Sequence: Synthetic oligonucleotide
agcacuuucuuacaagaag

SEQ ID NO: 1702690 - RNA, 19 nt, Artificial Sequence
  Description of Artificial Sequence: Synthetic oligonucleotide
auguccaacucauauguuc

SEQ ID NO: 1702691 - RNA, 19 nt, Artificial Sequence
  Description of Artificial Sequence: Synthetic oligonucleotide
gacaaugacauguuacuac

SEQ ID NO: 1702692 - RNA, 19 nt, Artificial Sequence
  Description of Artificial Sequence: Synthetic oligonucleotide
uuugaauuaccaaccgucu

SEQ ID NO: 1702693 - RNA, 19 nt, Artificial Sequence
  Description of Artificial Sequence: Synthetic oligonucleotide
aaguauuucaagacaauga

SEQ ID NO: 1702694 - RNA, 19 nt, Artificial Sequence
  Description of Artificial Sequence: Synthetic oligonucleotide
gcagaauuguuucaaaagg

SEQ ID NO: 1702695 - RNA, 19 nt, Artificial Sequence
  Description of Artificial Sequence: Synthetic oligonucleotide
guccuugccauuuuaaaag

SEQ ID NO: 1702696 - RNA, 19 nt, Artificial Sequence
  Description of Artificial Sequence: Synthetic oligonucleotide
aaugacauguuacuaccau

SEQ ID NO: 1702697 - RNA, 19 nt, Artificial Sequence
  Description of Artificial Sequence: Synthetic oligonucleotide
aaauuuuccaaagggauua

SEQ ID NO: 1702698 - RNA, 19 nt, Artificial Sequence
  Description of Artificial Sequence: Synthetic oligonucleotide
gaaauaucuaaugugccac

SEQ ID NO: 1702699 - RNA, 19 nt, Artificial Sequence
  Description of Artificial Sequence: Synthetic oligonucleotide
caagacaaugacauguuac

SEQ ID NO: 1702700 - RNA, 19 nt, Artificial Sequence
  Description of Artificial Sequence: Synthetic oligonucleotide
uuccaaagggauuauacaa

SEQ ID NO: 1702701 - RNA, 19 nt, Artificial Sequence
  Description of Artificial Sequence: Synthetic oligonucleotide
ugaauuaccaaccgucuau

SEQ ID NO: 1702702 - RNA, 19 nt, Artificial Sequence
  Description of Artificial Sequence: Synthetic oligonucleotide
gaugccaucgcaaaguuuc

SEQ ID NO: 1702703 - RNA, 19 nt, Artificial Sequence
  Description of Artificial Sequence: Synthetic oligonucleotide
gacauuuucagccagaauu

SEQ ID NO: 1702704 - RNA, 19 nt, Artificial Sequence
  Description of Artificial Sequence: Synthetic oligonucleotide
aagcaaguauuucaagaca

SEQ ID NO: 1702705 - RNA, 19 nt, Artificial Sequence
  Description of Artificial Sequence: Synthetic oligonucleotide
uucucuucauccaacauuu

SEQ ID NO: 1702706 - RNA, 19 nt, Artificial Sequence
  Description of Artificial Sequence: Synthetic oligonucleotide
gauuuagauaccauuuuac

SEQ ID NO: 1702707 - RNA, 19 nt, Artificial Sequence
  Description of Artificial Sequence: Synthetic oligonucleotide
aucgcaaaguuucuguaag

SEQ ID NO: 1702708 - RNA, 19 nt, Artificial Sequence
  Description of Artificial Sequence: Synthetic oligonucleotide
accauuaauguccaacuca

SEQ ID NO: 1702709 - RNA, 19 nt, Artificial Sequence
  Description of Artificial Sequence: Synthetic oligonucleotide
ugugaaauggauguuaauu

SEQ ID NO: 1702710 - RNA, 19 nt, Artificial Sequence
  Description of Artificial Sequence: Synthetic oligonucleotide
uguuacuaccauuuugaga

SEQ ID NO: 1702711 - RNA, 19 nt, Artificial Sequence
  Description of Artificial Sequence: Synthetic oligonucleotide
cauguuacuaccauuuuga

SEQ ID NO: 1702712 - RNA, 19 nt, Artificial Sequence
  Description of Artificial Sequence: Synthetic oligonucleotide
agaauuaaagacaucugug

SEQ ID NO: 1702713 - RNA, 19 nt, Artificial Sequence
  Description of Artificial Sequence: Synthetic oligonucleotide
uucuuuugcgccugaacag

SEQ ID NO: 1702714 - RNA, 19 nt, Artificial Sequence
  Description of Artificial Sequence: Synthetic oligonucleotide
ucuugauugaacugauugu

SEQ ID NO: 1702715 - RNA, 19 nt, Artificial Sequence
  Description of Artificial Sequence: Synthetic oligonucleotide
cauuuuguugaugccaucg

SEQ ID NO: 1702716 - RNA, 19 nt, Artificial Sequence
  Description of Artificial Sequence: Synthetic oligonucleotide
uggauguuaauuucagaga

SEQ ID NO: 1702717 - RNA, 19 nt, Artificial Sequence
  Description of Artificial Sequence: Synthetic oligonucleotide
ugacauguuacuaccauuu

SEQ ID NO: 1702718 - RNA, 19 nt, Artificial Sequence
  Description of Artificial Sequence: Synthetic oligonucleotide
caagaagcagaauuguuuc

SEQ ID NO: 1702719 - RNA, 19 nt, Artificial Sequence
  Description of Artificial Sequence: Synthetic oligonucleotide
uuuugcguguacuccuugg

SEQ ID NO: 1702720 - RNA, 19 nt, Artificial Sequence
  Description of Artificial Sequence: Synthetic oligonucleotide
ggugucaucgaucagggug

SEQ ID NO: 1702721 - RNA, 19 nt, Artificial Sequence
  Description of Artificial Sequence: Synthetic oligonucleotide
cugacauucacuaagacau

SEQ ID NO: 1702722 - RNA, 19 nt, Artificial Sequence
  Description of Artificial Sequence: Synthetic oligonucleotide
uaaauuuuccaaagggauu

SEQ ID NO: 1702723 - RNA, 19 nt, Artificial Sequence
  Description of Artificial Sequence: Synthetic oligonucleotide
cauucguucagcagccugg

SEQ ID NO: 1702724 - RNA, 19 nt, Artificial Sequence
  Description of Artificial Sequence: Synthetic oligonucleotide
aagugaaucaagauacaca

SEQ ID NO: 1702725 - RNA, 19 nt, Artificial Sequence
  Description of Artificial Sequence: Synthetic oligonucleotide
uuugucaacauaaguucaa

SEQ ID NO: 1702726 - RNA, 19 nt, Artificial Sequence
  Description of Artificial Sequence: Synthetic oligonucleotide
caaaguuaggcccuaagca

SEQ ID NO: 1702727 - RNA, 19 nt, Artificial Sequence
  Description of Artificial Sequence: Synthetic oligonucleotide
aacuuuguacauauuagaa

SEQ ID NO: 1702728 - RNA, 19 nt, Artificial Sequence
  Description of Artificial Sequence: Synthetic oligonucleotide
gauaccauuuuacccagga

SEQ ID NO: 1702729 - RNA, 19 nt, Artificial Sequence
  Description of Artificial Sequence: Synthetic oligonucleotide
aauggucaaagacauuguu

SEQ ID NO: 1702730 - RNA, 19 nt, Artificial Sequence
  Description of Artificial Sequence: Synthetic oligonucleotide
aacuacaacaagccacaca

SEQ ID NO: 1702731 - RNA, 19 nt, Artificial Sequence
  Description of Artificial Sequence: Synthetic oligonucleotide
cuugaugacccucucugcc

SEQ ID NO: 1702732 - RNA, 19 nt, Artificial Sequence
  Description of Artificial Sequence: Synthetic oligonucleotide
agagaucuaagugucacug

SEQ ID NO: 1702733 - RNA, 19 nt, Artificial Sequence
  Description of Artificial Sequence: Synthetic oligonucleotide
aagcagaauuguuucaaaa

SEQ ID NO: 1702734 - RNA, 19 nt, Artificial Sequence
  Description of Artificial Sequence: Synthetic oligonucleotide
ugucaacauaaguucaaga

SEQ ID NO: 1702735 - RNA, 19 nt, Artificial Sequence
  Description of Artificial Sequence: Synthetic oligonucleotide
uuguuaacccguccgugag

SEQ ID NO: 1702736 - RNA, 19 nt, Artificial Sequence
  Description of Artificial Sequence: Synthetic oligonucleotide
ugugugaaauggauguuaa

SEQ ID NO: 1702737 - RNA, 19 nt, Artificial Sequence
  Description of Artificial Sequence: Synthetic oligonucleotide
cacauugcggucaaaggug

SEQ ID NO: 1702738 - RNA, 19 nt, Artificial Sequence
  Description of Artificial Sequence: Synthetic oligonucleotide
aagaagcagaauuguuuca

SEQ ID NO: 1702739 - RNA, 19 nt, Artificial Sequence
  Description of Artificial Sequence: Synthetic oligonucleotide
ugcguguacuccuugguca

SEQ ID NO: 1702740 - RNA, 19 nt, Artificial Sequence
  Description of Artificial Sequence: Synthetic oligonucleotide
uagauaccauuuuacccag

SEQ ID NO: 1702741 - RNA, 19 nt, Artificial Sequence
  Description of Artificial Sequence: Synthetic oligonucleotide
cauaaguucaagaugacau

SEQ ID NO: 1702742 - RNA, 19 nt, Artificial Sequence
  Description of Artificial Sequence: Synthetic oligonucleotide
aaagccucagugauugaag

SEQ ID NO: 1702743 - RNA, 19 nt, Artificial Sequence
  Description of Artificial Sequence: Synthetic oligonucleotide
cuuguuuugcguguacucc

SEQ ID NO: 1702744 - RNA, 19 nt, Artificial Sequence
  Description of Artificial Sequence: Synthetic oligonucleotide
caaagacauuguuaacccg

SEQ ID NO: 1702745 - RNA, 19 nt, Artificial Sequence
  Description of Artificial Sequence: Synthetic oligonucleotide
agggauuauacaaggcagc

SEQ ID NO: 1702746 - RNA, 19 nt, Artificial Sequence
  Description of Artificial Sequence: Synthetic oligonucleotide
auuguuaacccguccguga

SEQ ID NO: 1702747 - RNA, 19 nt, Artificial Sequence
  Description of Artificial Sequence: Synthetic oligonucleotide
agaucuaagugucacugau

SEQ ID NO: 1702748 - RNA, 19 nt, Artificial Sequence
  Description of Artificial Sequence: Synthetic oligonucleotide
uacaaggcagccagaaacu

SEQ ID NO: 1702749 - RNA, 19 nt, Artificial Sequence
  Description of Artificial Sequence: Synthetic oligonucleotide
aacauaaguucaagaugac

SEQ ID NO: 1702750 - RNA, 19 nt, Artificial Sequence
  Description of Artificial Sequence: Synthetic oligonucleotide
aagccucagugauugaaga

SEQ ID NO: 1702751 - RNA, 19 nt, Artificial Sequence
  Description of Artificial Sequence: Synthetic oligonucleotide
caaguauuucaagacaaug

SEQ ID NO: 1702752 - RNA, 19 nt, Artificial Sequence
  Description of Artificial Sequence: Synthetic oligonucleotide
cacaguaaagaauaaaagu

SEQ ID NO: 1702753 - RNA, 19 nt, Artificial Sequence
  Description of Artificial Sequence: Synthetic oligonucleotide
accaacaaaauuucccuaa

SEQ ID NO: 1702754 - RNA, 19 nt, Artificial Sequence
  Description of Artificial Sequence: Synthetic oligonucleotide
ugagagaucuaagugucac

SEQ ID NO: 1702755 - RNA, 19 nt, Artificial Sequence
  Description of Artificial Sequence: Synthetic oligonucleotide
uucagagacauuugucaac

SEQ ID NO: 1702756 - RNA, 19 nt, Artificial Sequence
  Description of Artificial Sequence: Synthetic oligonucleotide
ucccuaaaacacagaaagc

SEQ ID NO: 1702757 - RNA, 19 nt, Artificial Sequence
  Description of Artificial Sequence: Synthetic oligonucleotide
aagacauuguuaacccguc

SEQ ID NO: 1702758 - RNA, 19 nt, Artificial Sequence
  Description of Artificial Sequence: Synthetic oligonucleotide
auggacgugaggcugcgag

SEQ ID NO: 1702759 - RNA, 19 nt, Artificial Sequence
  Description of Artificial Sequence: Synthetic oligonucleotide
cagaauuguuucaaaagga

SEQ ID NO: 1702760 - RNA, 19 nt, Artificial Sequence
  Description of Artificial Sequence: Synthetic oligonucleotide
uuguuuugcguguacuccu

SEQ ID NO: 1702761 - RNA, 19 nt, Artificial Sequence
  Description of Artificial Sequence: Synthetic oligonucleotide
guaagugagguuuaaauuu

SEQ ID NO: 1702762 - RNA, 19 nt, Artificial Sequence
  Description of Artificial Sequence: Synthetic oligonucleotide
uuauacaaggcagccagaa

SEQ ID NO: 1702763 - RNA, 19 nt, Artificial Sequence
  Description of Artificial Sequence: Synthetic oligonucleotide
cuaugugugaaauggaugu

SEQ ID NO: 1702764 - RNA, 19 nt, Artificial Sequence
  Description of Artificial Sequence: Synthetic oligonucleotide
cagccagaaacucacaauc

SEQ ID NO: 1702765 - RNA, 19 nt, Artificial Sequence
  Description of Artificial Sequence: Synthetic oligonucleotide
cacccuguagagcucaucc

SEQ ID NO: 1702766 - RNA, 19 nt, Artificial Sequence
  Description of Artificial Sequence: Synthetic oligonucleotide
cagaaagccucagugauug

SEQ ID NO: 1702767 - RNA, 19 nt, Artificial Sequence
  Description of Artificial Sequence: Synthetic oligonucleotide
gugucaucgaucagggugg

SEQ ID NO: 1702768 - RNA, 19 nt, Artificial Sequence
  Description of Artificial Sequence: Synthetic oligonucleotide
auugaacugauuguuccug

SEQ ID NO: 1702769 - RNA, 19 nt, Artificial Sequence
  Description of Artificial Sequence: Synthetic oligonucleotide
ucuuccuaugugugaaaug

SEQ ID NO: 1702770 - RNA, 19 nt, Artificial Sequence
  Description of Artificial Sequence: Synthetic oligonucleotide
ccaaagggauuauacaagg

SEQ ID NO: 1702771 - RNA, 19 nt, Artificial Sequence
  Description of Artificial Sequence: Synthetic oligonucleotide
ucuuuugcgccugaacagc

SEQ ID NO: 1702772 - RNA, 19 nt, Artificial Sequence
  Description of Artificial Sequence: Synthetic oligonucleotide
uuugcguguacuccuuggu

SEQ ID NO: 1702773 - RNA, 19 nt, Artificial Sequence
  Description of Artificial Sequence: Synthetic oligonucleotide
cauauuagaaauaucuaau

SEQ ID NO: 1702774 - RNA, 19 nt, Artificial Sequence
  Description of Artificial Sequence: Synthetic oligonucleotide
agccucagugauugaagac

SEQ ID NO: 1702775 - RNA, 19 nt, Artificial Sequence
  Description of Artificial Sequence: Synthetic oligonucleotide
uugucaacauaaguucaag

SEQ ID NO: 1702776 - RNA, 19 nt, Artificial Sequence
  Description of Artificial Sequence: Synthetic oligonucleotide
accauuuugagagaucuaa

SEQ ID NO: 1702777 - RNA, 19 nt, Artificial Sequence
  Description of Artificial Sequence: Synthetic oligonucleotide
uguauucuaccugauggaa

SEQ ID NO: 1702778 - RNA, 19 nt, Artificial Sequence
  Description of Artificial Sequence: Synthetic oligonucleotide
aaggaucaaugacagcaaa

SEQ ID NO: 1702779 - RNA, 19 nt, Artificial Sequence
  Description of Artificial Sequence: Synthetic oligonucleotide
gagauacacagacacagua

SEQ ID NO: 1702780 - RNA, 19 nt, Artificial Sequence
  Description of Artificial Sequence: Synthetic oligonucleotide
gaugacggucuugaugagg

SEQ ID NO: 1702781 - RNA, 19 nt, Artificial Sequence
  Description of Artificial Sequence: Synthetic oligonucleotide
caacuuuguacauauuaga

SEQ ID NO: 1702782 - RNA, 19 nt, Artificial Sequence
  Description of Artificial Sequence: Synthetic oligonucleotide
guacaacucagcuucagaa

SEQ ID NO: 1702783 - RNA, 19 nt, Artificial Sequence
  Description of Artificial Sequence: Synthetic oligonucleotide
aguacaacucagcuucaga

SEQ ID NO: 1702784 - RNA, 19 nt, Artificial Sequence
  Description of Artificial Sequence: Synthetic oligonucleotide
ucuugaugacccucucugc

SEQ ID NO: 1702785 - RNA, 19 nt, Artificial Sequence
  Description of Artificial Sequence: Synthetic oligonucleotide
gucaacauaaguucaagau

SEQ ID NO: 1702786 - RNA, 19 nt, Artificial Sequence
  Description of Artificial Sequence: Synthetic oligonucleotide
agcuggugaaccuucuucu

SEQ ID NO: 1702787 - RNA, 19 nt, Artificial Sequence
  Description of Artificial Sequence: Synthetic oligonucleotide
uugaauuaccaaccgucua

SEQ ID NO: 1702788 - RNA, 19 nt, Artificial Sequence
  Description of Artificial Sequence: Synthetic oligonucleotide
gaugucaugcagcagcucu

SEQ ID NO: 1702789 - RNA, 19 nt, Artificial Sequence
  Description of Artificial Sequence: Synthetic oligonucleotide
acauuguuaacccguccgu

SEQ ID NO: 1702790 - RNA, 19 nt, Artificial Sequence
  Description of Artificial Sequence: Synthetic oligonucleotide
aaaagugaaucaagauaca

SEQ ID NO: 1702791 - RNA, 19 nt, Artificial Sequence
  Description of Artificial Sequence: Synthetic oligonucleotide
uaccauuaauguccaacuc

SEQ ID NO: 1702792 - RNA, 19 nt, Artificial Sequence
  Description of Artificial Sequence: Synthetic oligonucleotide
auauguucucuucauccaa

SEQ ID NO: 1702793 - RNA, 19 nt, Artificial Sequence
  Description of Artificial Sequence: Synthetic oligonucleotide
cuuuugcgccugaacagcc

SEQ ID NO: 1702794 - RNA, 19 nt, Artificial Sequence
  Description of Artificial Sequence: Synthetic oligonucleotide
gacauuugucaacauaagu

SEQ ID NO: 1702795 - RNA, 19 nt, Artificial Sequence
  Description of Artificial Sequence: Synthetic oligonucleotide
uggugaaccuucuucuuaa

SEQ ID NO: 1702796 - RNA, 19 nt, Artificial Sequence
  Description of Artificial Sequence: Synthetic oligonucleotide
auuugucaacauaaguuca

SEQ ID NO: 1702797 - RNA, 19 nt, Artificial Sequence
  Description of Artificial Sequence: Synthetic oligonucleotide
ucaagacaaugacauguua

SEQ ID NO: 1702798 - RNA, 19 nt, Artificial Sequence
  Description of Artificial Sequence: Synthetic oligonucleotide
agagacauuugucaacaua

SEQ ID NO: 1702799 - RNA, 19 nt, Artificial Sequence
  Description of Artificial Sequence: Synthetic oligonucleotide
guauucuaccugauggaag

SEQ ID NO: 1702800 - RNA, 19 nt, Artificial Sequence
  Description of Artificial Sequence: Synthetic oligonucleotide
aauuaccaaccgucuauuu

SEQ ID NO: 1702801 - RNA, 19 nt, Artificial Sequence
  Description of Artificial Sequence: Synthetic oligonucleotide
uugaacugauuguuccugu

SEQ ID NO: 1702802 - RNA, 19 nt, Artificial Sequence
  Description of Artificial Sequence: Synthetic oligonucleotide
agcaaguauuucaagacaa

SEQ ID NO: 1702803 - RNA, 19 nt, Artificial Sequence
  Description of Artificial Sequence: Synthetic oligonucleotide
gaagcugaccacugucaug

SEQ ID NO: 1702804 - RNA, 19 nt, Artificial Sequence
  Description of Artificial Sequence: Synthetic oligonucleotide
acucauauguucucuucau

SEQ ID NO: 1702805 - RNA, 19 nt, Artificial Sequence
  Description of Artificial Sequence: Synthetic oligonucleotide
ugucuuugugucacucugu

SEQ ID NO: 1702806 - RNA, 19 nt, Artificial Sequence
  Description of Artificial Sequence: Synthetic oligonucleotide
uaggcccuaagcaaguauu

SEQ ID NO: 1702807 - RNA, 19 nt, Artificial Sequence
  Description of Artificial Sequence: Synthetic oligonucleotide
accaccgcggacauggacg

SEQ ID NO: 1702808 - RNA, 19 nt, Artificial Sequence
  Description of Artificial Sequence: Synthetic oligonucleotide
guggaggacggccagcuug

SEQ ID NO: 1702809 - RNA, 19 nt, Artificial Sequence
  Description of Artificial Sequence: Synthetic oligonucleotide
cauuuugagagaucuaagu

SEQ ID NO: 1702810 - RNA, 19 nt, Artificial Sequence
  Description of Artificial Sequence: Synthetic oligonucleotide
gaucuaagugucacugaug

SEQ ID NO: 1702811 - RNA, 19 nt, Artificial Sequence
  Description of Artificial Sequence: Synthetic oligonucleotide
aggaucaaugacagcaaag

SEQ ID NO: 1702812 - RNA, 19 nt, Artificial Sequence
  Description of Artificial Sequence: Synthetic oligonucleotide
uuugcgccugaacagccaa

SEQ ID NO: 1702813 - RNA, 19 nt, Artificial Sequence
  Description of Artificial Sequence: Synthetic oligonucleotide
cauuuuacccaggaucuuc

SEQ ID NO: 1702814 - RNA, 19 nt, Artificial Sequence
  Description of Artificial Sequence: Synthetic oligonucleotide
uuaggcccuaagcaaguau

SEQ ID NO: 1702815 - RNA, 19 nt, Artificial Sequence
  Description of Artificial Sequence: Synthetic oligonucleotide
caaaaggaucaaugacagc

SEQ ID NO: 1702816 - RNA, 19 nt, Artificial Sequence
  Description of Artificial Sequence: Synthetic oligonucleotide
uguuaacccguccgugaga

SEQ ID NO: 1702817 - RNA, 19 nt, Artificial Sequence
  Description of Artificial Sequence: Synthetic oligonucleotide
uucuaccugauggaagcug

SEQ ID NO: 1702818 - RNA, 19 nt, Artificial Sequence
  Description of Artificial Sequence: Synthetic oligonucleotide
uccugacauucacuaagac

SEQ ID NO: 1702819 - RNA, 19 nt, Artificial Sequence
  Description of Artificial Sequence: Synthetic oligonucleotide
uuuugcgccugaacagcca

SEQ ID NO: 1702820 - RNA, 19 nt, Artificial Sequence
  Description of Artificial Sequence: Synthetic oligonucleotide
ggaucaaugacagcaaaga

SEQ ID NO: 1702821 - RNA, 19 nt, Artificial Sequence
  Description of Artificial Sequence: Synthetic oligonucleotide
cuuugugucacucuguuuu

SEQ ID NO: 1702822 - RNA, 19 nt, Artificial Sequence
  Description of Artificial Sequence: Synthetic oligonucleotide
guuaacccguccgugagac

SEQ ID NO: 1702823 - RNA, 19 nt, Artificial Sequence
  Description of Artificial Sequence: Synthetic oligonucleotide
augacggucuugaugaggu

SEQ ID NO: 1702824 - RNA, 19 nt, Artificial Sequence
  Description of Artificial Sequence: Synthetic oligonucleotide
uggaggacggccagcuuga

SEQ ID NO: 1702825 - RNA, 19 nt, Artificial Sequence
  Description of Artificial Sequence: Synthetic oligonucleotide
ucgucugucuuugugucac

SEQ ID NO: 1702826 - RNA, 19 nt, Artificial Sequence
  Description of Artificial Sequence: Synthetic oligonucleotide
guguauucuaccugaugga

SEQ ID NO: 1702827 - RNA, 19 nt, Artificial Sequence
  Description of Artificial Sequence: Synthetic oligonucleotide
ugaugacccucucugccuc

SEQ ID NO: 1702828 - RNA, 19 nt, Artificial Sequence
  Description of Artificial Sequence: Synthetic oligonucleotide
cagaaacucacaaucugaa

SEQ ID NO: 1702829 - RNA, 19 nt, Artificial Sequence
  Description of Artificial Sequence: Synthetic oligonucleotide
cucauauguucucuucauc

SEQ ID NO: 1702830 - RNA, 19 nt, Artificial Sequence
  Description of Artificial Sequence: Synthetic oligonucleotide
gagaucuaagugucacuga

SEQ ID NO: 1702831 - RNA, 19 nt, Artificial Sequence
  Description of Artificial Sequence: Synthetic oligonucleotide
cacuuucuuacaagaagca

SEQ ID NO: 1702832 - RNA, 19 nt, Artificial Sequence
  Description of Artificial Sequence: Synthetic oligonucleotide
augacauguuacuaccauu

SEQ ID NO: 1702833 - RNA, 19 nt, Artificial Sequence
  Description of Artificial Sequence: Synthetic oligonucleotide
augacagcaaagagagguc

SEQ ID NO: 1702834 - RNA, 19 nt, Artificial Sequence
  Description of Artificial Sequence: Synthetic oligonucleotide
acuaccauuuugagagauc

SEQ ID NO: 1702835 - RNA, 19 nt, Artificial Sequence
  Description of Artificial Sequence: Synthetic oligonucleotide
ucgcaaaguuucuguaagu

SEQ ID NO: 1702836 - RNA, 19 nt, Artificial Sequence
  Description of Artificial Sequence: Synthetic oligonucleotide
cuaccauuaauguccaacu

SEQ ID NO: 1702837 - RNA, 19 nt, Artificial Sequence
  Description of Artificial Sequence: Synthetic oligonucleotide
gauugaacugauuguuccu

SEQ ID NO: 1702838 - RNA, 19 nt, Artificial Sequence
  Description of Artificial Sequence: Synthetic oligonucleotide
gacggucuugaugagguuc

SEQ ID NO: 1702839 - RNA, 19 nt, Artificial Sequence
  Description of Artificial Sequence: Synthetic oligonucleotide
ugucggggugcacagccac

SEQ ID NO: 1702840 - RNA, 19 nt, Artificial Sequence
  Description of Artificial Sequence: Synthetic oligonucleotide
gaaagccucagugauugaa

SEQ ID NO: 1702841 - RNA, 19 nt, Artificial Sequence
  Description of Artificial Sequence: Synthetic oligonucleotide
cauuguuaacccguccgug

SEQ ID NO: 1702842 - RNA, 19 nt, Artificial Sequence
  Description of Artificial Sequence: Synthetic oligonucleotide
uaacccguccgugagacuu

SEQ ID NO: 1702843 - RNA, 19 nt, Artificial Sequence
  Description of Artificial Sequence: Synthetic oligonucleotide
gccuggacagcacauugcg

SEQ ID NO: 1702844 - RNA, 19 nt, Artificial Sequence
  Description of Artificial Sequence: Synthetic oligonucleotide
uucuuccuaugugugaaau

SEQ ID NO: 1702845 - RNA, 19 nt, Artificial Sequence
  Description of Artificial Sequence: Synthetic oligonucleotide
uacuaccauuuugagagau

SEQ ID NO: 1702846 - RNA, 19 nt, Artificial Sequence
  Description of Artificial Sequence: Synthetic oligonucleotide
gggauuauacaaggcagcc

SEQ ID NO: 1702847 - RNA, 19 nt, Artificial Sequence
  Description of Artificial Sequence: Synthetic oligonucleotide
cucggcauucguucagcag

SEQ ID NO: 1702848 - RNA, 19 nt, Artificial Sequence
  Description of Artificial Sequence: Synthetic oligonucleotide
gcggacauggacgugaggc

SEQ ID NO: 1702849 - RNA, 19 nt, Artificial Sequence
  Description of Artificial Sequence: Synthetic oligonucleotide
agauacacagacacaguaa

SEQ ID NO: 1702850 - RNA, 19 nt, Artificial Sequence
  Description of Artificial Sequence: Synthetic oligonucleotide
uuacuaccauuuugagaga

SEQ ID NO: 1702851 - RNA, 19 nt, Artificial Sequence
  Description of Artificial Sequence: Synthetic oligonucleotide
caagauacacaacuuugua

SEQ ID NO: 1702852 - RNA, 19 nt, Artificial Sequence
  Description of Artificial Sequence: Synthetic oligonucleotide
agguccuugccauuuuaaa

SEQ ID NO: 1702853 - RNA, 19 nt, Artificial Sequence
  Description of Artificial Sequence: Synthetic oligonucleotide
ugcggucaaagguguauuc

SEQ ID NO: 1702854 - RNA, 19 nt, Artificial Sequence
  Description of Artificial Sequence: Synthetic oligonucleotide
caagccacacaaaaguacu

SEQ ID NO: 1702855 - RNA, 19 nt, Artificial Sequence
  Description of Artificial Sequence: Synthetic oligonucleotide
agccuggacagcacauugc

SEQ ID NO: 1702856 - RNA, 19 nt, Artificial Sequence
  Description of Artificial Sequence: Synthetic oligonucleotide
uguuuugcguguacuccuu

SEQ ID NO: 1702857 - RNA, 19 nt, Artificial Sequence
  Description of Artificial Sequence: Synthetic oligonucleotide
ggauuuagauaccauuuua

SEQ ID NO: 1702858 - RNA, 19 nt, Artificial Sequence
  Description of Artificial Sequence: Synthetic oligonucleotide
gauugaagacacacucguc

SEQ ID NO: 1702859 - RNA, 19 nt, Artificial Sequence
  Description of Artificial Sequence: Synthetic oligonucleotide
auugcggucaaagguguau

SEQ ID NO: 1702860 - RNA, 19 nt, Artificial Sequence
  Description of Artificial Sequence: Synthetic oligonucleotide
cagcucucggcauucguuc

SEQ ID NO: 1702861 - RNA, 19 nt, Artificial Sequence
  Description of Artificial Sequence: Synthetic oligonucleotide
guugaugccaucgcaaagu

SEQ ID NO: 1702862 - RNA, 19 nt, Artificial Sequence
  Description of Artificial Sequence: Synthetic oligonucleotide
uccaucagcgccagcucau

SEQ ID NO: 1702863 - RNA, 19 nt, Artificial Sequence
  Description of Artificial Sequence: Synthetic oligonucleotide
cuaaugugccaccaacaaa

SEQ ID NO: 1702864 - RNA, 19 nt, Artificial Sequence
  Description of Artificial Sequence: Synthetic oligonucleotide
gguccuugccauuuuaaaa

SEQ ID NO: 1702865 - RNA, 19 nt, Artificial Sequence
  Description of Artificial Sequence: Synthetic oligonucleotide
ugcgccugaacagccaagu

SEQ ID NO: 1702866 - RNA, 19 nt, Artificial Sequence
  Description of Artificial Sequence: Synthetic oligonucleotide
guuuugcguguacuccuug

SEQ ID NO: 1702867 - RNA, 19 nt, Artificial Sequence
  Description of Artificial Sequence: Synthetic oligonucleotide
ccaggaucuucuuuugcgc

SEQ ID NO: 1702868 - RNA, 19 nt, Artificial Sequence
  Description of Artificial Sequence: Synthetic oligonucleotide
agacacacucgucugucuu

SEQ ID NO: 1702869 - RNA, 19 nt, Artificial Sequence
  Description of Artificial Sequence: Synthetic oligonucleotide
gaugacccucucugccucc

SEQ ID NO: 1702870 - RNA, 19 nt, Artificial Sequence
  Description of Artificial Sequence: Synthetic oligonucleotide
caucgcaaaguuucuguaa

SEQ ID NO: 1702871 - RNA, 19 nt, Artificial Sequence
  Description of Artificial Sequence: Synthetic oligonucleotide
ccuaagcaaguauuucaag

SEQ ID NO: 1702872 - RNA, 19 nt, Artificial Sequence
  Description of Artificial Sequence: Synthetic oligonucleotide
augcugucggggugcacag

SEQ ID NO: 1702873 - RNA, 19 nt, Artificial Sequence
  Description of Artificial Sequence: Synthetic oligonucleotide
uugcgccugaacagccaag

SEQ ID NO: 1702874 - RNA, 19 nt, Artificial Sequence
  Description of Artificial Sequence: Synthetic oligonucleotide
gacggccagcuugaugacg

SEQ ID NO: 1702875 - RNA, 19 nt, Artificial Sequence
  Description of Artificial Sequence: Synthetic oligonucleotide
caacucagcuucagaagca

SEQ ID NO: 1702876 - RNA, 19 nt, Artificial Sequence
  Description of Artificial Sequence: Synthetic oligonucleotide
gcugucggggugcacagcc

SEQ ID NO: 1702877 - RNA, 19 nt, Artificial Sequence
  Description of Artificial Sequence: Synthetic oligonucleotide
agccagaaacucacaaucu

SEQ ID NO: 1702878 - RNA, 19 nt, Artificial Sequence
  Description of Artificial Sequence: Synthetic oligonucleotide
uaugugugaaauggauguu

SEQ ID NO: 1702879 - RNA, 19 nt, Artificial Sequence
  Description of Artificial Sequence: Synthetic oligonucleotide
agccaaucuuagaagauuu

SEQ ID NO: 1702880 - RNA, 19 nt, Artificial Sequence
  Description of Artificial Sequence: Synthetic oligonucleotide
gacaucaaaguuaggcccu

SEQ ID NO: 1702881 - RNA, 19 nt, Artificial Sequence
  Description of Artificial Sequence: Synthetic oligonucleotide
ugaugccaucgcaaaguuu

SEQ ID NO: 1702882 - RNA, 19 nt, Artificial Sequence
  Description of Artificial Sequence: Synthetic oligonucleotide
ccacacaaaaguacuacca

SEQ ID NO: 1702883 - RNA, 19 nt, Artificial Sequence
  Description of Artificial Sequence: Synthetic oligonucleotide
ugccaucgcaaaguuucug

SEQ ID NO: 1702884 - RNA, 19 nt, Artificial Sequence
  Description of Artificial Sequence: Synthetic oligonucleotide
caaaaguacuaccauuaau

SEQ ID NO: 1702885 - RNA, 19 nt, Artificial Sequence
  Description of Artificial Sequence: Synthetic oligonucleotide
agugucacugaugguagua

SEQ ID NO: 1702886 - RNA, 19 nt, Artificial Sequence
  Description of Artificial Sequence: Synthetic oligonucleotide
ggucaaagguguauucuac

SEQ ID NO: 1702887 - RNA, 19 nt, Artificial Sequence
  Description of Artificial Sequence: Synthetic oligonucleotide
cucggagagcaugcugucg

SEQ ID NO: 1702888 - RNA, 19 nt, Artificial Sequence
  Description of Artificial Sequence: Synthetic oligonucleotide
auacacaacuuuguacaua

SEQ ID NO: 1702889 - RNA, 19 nt, Artificial Sequence
  Description of Artificial Sequence: Synthetic oligonucleotide
aauguccaacucauauguu

SEQ ID NO: 1702890 - RNA, 19 nt, Artificial Sequence
  Description of Artificial Sequence: Synthetic oligonucleotide
ccguccgugagacuuggcg

SEQ ID NO: 1702891 - RNA, 19 nt, Artificial Sequence
  Description of Artificial Sequence: Synthetic oligonucleotide
ccagaaacucacaaucuga

SEQ ID NO: 1702892 - RNA, 19 nt, Artificial Sequence
  Description of Artificial Sequence: Synthetic oligonucleotide
aguuaggcccuaagcaagu

SEQ ID NO: 1702893 - RNA, 19 nt, Artificial Sequence
  Description of Artificial Sequence: Synthetic oligonucleotide
auccugacauucacuaaga

SEQ ID NO: 1702894 - RNA, 19 nt, Artificial Sequence
  Description of Artificial Sequence: Synthetic oligonucleotide
augugccaccaacaaaauu

SEQ ID NO: 1702895 - RNA, 19 nt, Artificial Sequence
  Description of Artificial Sequence: Synthetic oligonucleotide
gagagaucuaagugucacu

SEQ ID NO: 1702896 - RNA, 19 nt, Artificial Sequence
  Description of Artificial Sequence: Synthetic oligonucleotide
agagagguccuugccauuu

SEQ ID NO: 1702897 - RNA, 19 nt, Artificial Sequence
  Description of Artificial Sequence: Synthetic oligonucleotide
accgcggacauggacguga

SEQ ID NO: 1702898 - RNA, 19 nt, Artificial Sequence
  Description of Artificial Sequence: Synthetic oligonucleotide
agauaccauuuuacccagg

SEQ ID NO: 1702899 - RNA, 19 nt, Artificial Sequence
  Description of Artificial Sequence: Synthetic oligonucleotide
gugccaccaacaaaauuuc

SEQ ID NO: 1702900 - RNA, 19 nt, Artificial Sequence
  Description of Artificial Sequence: Synthetic oligonucleotide
gcauucguucagcagccug

SEQ ID NO: 1702901 - RNA, 19 nt, Artificial Sequence
  Description of Artificial Sequence: Synthetic oligonucleotide
agcagcucucggcauucgu

SEQ ID NO: 1702902 - RNA, 19 nt, Artificial Sequence
  Description of Artificial Sequence: Synthetic oligonucleotide
auucuaccugauggaagcu

SEQ ID NO: 1702903 - RNA, 19 nt, Artificial Sequence
  Description of Artificial Sequence: Synthetic oligonucleotide
gguggcaauggauuuagau

SEQ ID NO: 1702904 - RNA, 19 nt, Artificial Sequence
  Description of Artificial Sequence: Synthetic oligonucleotide
aagccacacaaaaguacua

SEQ ID NO: 1702905 - RNA, 19 nt, Artificial Sequence
  Description of Artificial Sequence: Synthetic oligonucleotide
cacaggcgccaccaccgcg

SEQ ID NO: 1702906 - RNA, 19 nt, Artificial Sequence
  Description of Artificial Sequence: Synthetic oligonucleotide
cguccgugagacuuggcgg

SEQ ID NO: 1702907 - RNA, 19 nt, Artificial Sequence
  Description of Artificial Sequence: Synthetic oligonucleotide
gcaauggauuuagauacca

SEQ ID NO: 1702908 - RNA, 19 nt, Artificial Sequence
  Description of Artificial Sequence: Synthetic oligonucleotide
aagguguauucuaccugau

SEQ ID NO: 1702909 - RNA, 19 nt, Artificial Sequence
  Description of Artificial Sequence: Synthetic oligonucleotide
guacuaccauuaaugucca

SEQ ID NO: 1702910 - RNA, 19 nt, Artificial Sequence
  Description of Artificial Sequence: Synthetic oligonucleotide
agaaagccucagugauuga

SEQ ID NO: 1702911 - RNA, 19 nt, Artificial Sequence
  Description of Artificial Sequence: Synthetic oligonucleotide
ccuggacagcacauugcgg

SEQ ID NO: 1702912 - RNA, 19 nt, Artificial Sequence
  Description of Artificial Sequence: Synthetic oligonucleotide
uuaacccguccgugagacu

SEQ ID NO: 1702913 - RNA, 19 nt, Artificial Sequence
  Description of Artificial Sequence: Synthetic oligonucleotide
cuggugaaccuucuucuua

SEQ ID NO: 1702914 - RNA, 19 nt, Artificial Sequence
  Description of Artificial Sequence: Synthetic oligonucleotide
agcgccagcucaucuugau

SEQ ID NO: 1702915 - RNA, 19 nt, Artificial Sequence
  Description of Artificial Sequence: Synthetic oligonucleotide
ggauuauacaaggcagcca

SEQ ID NO: 1702916 - RNA, 19 nt, Artificial Sequence
  Description of Artificial Sequence: Synthetic oligonucleotide
caccaacaaaauuucccua

SEQ ID NO: 1702917 - RNA, 19 nt, Artificial Sequence
  Description of Artificial Sequence: Synthetic oligonucleotide
uugcggucaaagguguauu

SEQ ID NO: 1702918 - RNA, 19 nt, Artificial Sequence
  Description of Artificial Sequence: Synthetic oligonucleotide
gaccacugucauggcaagc

SEQ ID NO: 1702919 - RNA, 19 nt, Artificial Sequence
  Description of Artificial Sequence: Synthetic oligonucleotide
caccucggagagcaugcug

SEQ ID NO: 1702920 - RNA, 19 nt, Artificial Sequence
  Description of Artificial Sequence: Synthetic oligonucleotide
gucugucuuugugucacuc

SEQ ID NO: 1702921 - RNA, 19 nt, Artificial Sequence
  Description of Artificial Sequence: Synthetic oligonucleotide
ggcaauggauuuagauacc

SEQ ID NO: 1702922 - RNA, 19 nt, Artificial Sequence
  Description of Artificial Sequence: Synthetic oligonucleotide
aacccguccgugagacuug

SEQ ID NO: 1702923 - RNA, 19 nt, Artificial Sequence
  Description of Artificial Sequence: Synthetic oligonucleotide
uccgugagacuuggcggug

SEQ ID NO: 1702924 - RNA, 19 nt, Artificial Sequence
  Description of Artificial Sequence: Synthetic oligonucleotide
gacauguuacuaccauuuu

SEQ ID NO: 1702925 - RNA, 19 nt, Artificial Sequence
  Description of Artificial Sequence: Synthetic oligonucleotide
cgcaaaguuucuguaagug

SEQ ID NO: 1702926 - RNA, 19 nt, Artificial Sequence
  Description of Artificial Sequence: Synthetic oligonucleotide
gaauuaccaaccgucuauu

SEQ ID NO: 1702927 - RNA, 19 nt, Artificial Sequence
  Description of Artificial Sequence: Synthetic oligonucleotide
ucauggcaagcuggugaac

SEQ ID NO: 1702928 - RNA, 19 nt, Artificial Sequence
  Description of Artificial Sequence: Synthetic oligonucleotide
guccgugagacuuggcggu

SEQ ID NO: 1702929 - RNA, 19 nt, Artificial Sequence
  Description of Artificial Sequence: Synthetic oligonucleotide
gugucacugaugguaguaa

SEQ ID NO: 1702930 - RNA, 19 nt, Artificial Sequence
  Description of Artificial Sequence: Synthetic oligonucleotide
cucgucugucuuuguguca

SEQ ID NO: 1702931 - RNA, 19 nt, Artificial Sequence
  Description of Artificial Sequence: Synthetic oligonucleotide
acccguccgugagacuugg

SEQ ID NO: 1702932 - RNA, 19 nt, Artificial Sequence
  Description of Artificial Sequence: Synthetic oligonucleotide
uggucacccuguagagcuc

SEQ ID NO: 1702933 - RNA, 19 nt, Artificial Sequence
  Description of Artificial Sequence: Synthetic oligonucleotide
gucuuugugucacucuguu

SEQ ID NO: 1702934 - RNA, 19 nt, Artificial Sequence
  Description of Artificial Sequence: Synthetic oligonucleotide
caccaccgcggacauggac

SEQ ID NO: 1702935 - RNA, 19 nt, Artificial Sequence
  Description of Artificial Sequence: Synthetic oligonucleotide
caauggauuuagauaccau

SEQ ID NO: 1702936 - RNA, 19 nt, Artificial Sequence
  Description of Artificial Sequence: Synthetic oligonucleotide
ccauuaauguccaacucau

SEQ ID NO: 1702937 - RNA, 19 nt, Artificial Sequence
  Description of Artificial Sequence: Synthetic oligonucleotide
gcguguacuccuuggucac

SEQ ID NO: 1702938 - RNA, 19 nt, Artificial Sequence
  Description of Artificial Sequence: Synthetic oligonucleotide
cccuaagcaaguauuucaa

SEQ ID NO: 1702939 - RNA, 19 nt, Artificial Sequence
  Description of Artificial Sequence: Synthetic oligonucleotide
ucacccuguagagcucauc

SEQ ID NO: 1702940 - RNA, 19 nt, Artificial Sequence
  Description of Artificial Sequence: Synthetic oligonucleotide
gccaucgcaaaguuucugu

SEQ ID NO: 1702941 - RNA, 19 nt, Artificial Sequence
  Description of Artificial Sequence: Synthetic oligonucleotide
aggcccuaagcaaguauuu

SEQ ID NO: 1702942 - RNA, 19 nt, Artificial Sequence
  Description of Artificial Sequence: Synthetic oligonucleotide
augccaucgcaaaguuucu

SEQ ID NO: 1702943 - RNA, 19 nt, Artificial Sequence
  Description of Artificial Sequence: Synthetic oligonucleotide
cggcauucguucagcagcc

SEQ ID NO: 1702944 - RNA, 19 nt, Artificial Sequence
  Description of Artificial Sequence: Synthetic oligonucleotide
ggcccuaagcaaguauuuc

SEQ ID NO: 1702945 - RNA, 19 nt, Artificial Sequence
  Description of Artificial Sequence: Synthetic oligonucleotide
ggacagcacauugcgguca

SEQ ID NO: 1702946 - RNA, 19 nt, Artificial Sequence
  Description of Artificial Sequence: Synthetic oligonucleotide
ugcugucggggugcacagc

SEQ ID NO: 1702947 - RNA, 19 nt, Artificial Sequence
  Description of Artificial Sequence: Synthetic oligonucleotide
ggucacccuguagagcuca

SEQ ID NO: 1702948 - RNA, 19 nt, Artificial Sequence
  Description of Artificial Sequence: Synthetic oligonucleotide
guuaggcccuaagcaagua

SEQ ID NO: 1702949 - RNA, 19 nt, Artificial Sequence
  Description of Artificial Sequence: Synthetic oligonucleotide
gccugaacagccaaguuuu

SEQ ID NO: 1702950 - RNA, 19 nt, Artificial Sequence
  Description of Artificial Sequence: Synthetic oligonucleotide
gcagccagaaacucacaau

SEQ ID NO: 1702951 - RNA, 19 nt, Artificial Sequence
  Description of Artificial Sequence: Synthetic oligonucleotide
cauugcggucaaaggugua

SEQ ID NO: 1702952 - RNA, 19 nt, Artificial Sequence
  Description of Artificial Sequence: Synthetic oligonucleotide
gacgugaggcugcgaggcu

SEQ ID NO: 1702953 - RNA, 19 nt, Artificial Sequence
  Description of Artificial Sequence: Synthetic oligonucleotide
ccaucgcaaaguuucugua

SEQ ID NO: 1702954 - RNA, 19 nt, Artificial Sequence
  Description of Artificial Sequence: Synthetic oligonucleotide
caucaaaguuaggcccuaa

SEQ ID NO: 1702955 - RNA, 19 nt, Artificial Sequence
  Description of Artificial Sequence: Synthetic oligonucleotide
ccucggagagcaugcuguc

SEQ ID NO: 1702956 - RNA, 19 nt, Artificial Sequence
  Description of Artificial Sequence: Synthetic oligonucleotide
caucuugauugaacugauu

SEQ ID NO: 1702957 - RNA, 19 nt, Artificial Sequence
  Description of Artificial Sequence: Synthetic oligonucleotide
cagcgccagcucaucuuga

SEQ ID NO: 1702958 - RNA, 19 nt, Artificial Sequence
  Description of Artificial Sequence: Synthetic oligonucleotide
ggacggccagcuugaugac

SEQ ID NO: 1702959 - RNA, 19 nt, Artificial Sequence
  Description of Artificial Sequence: Synthetic oligonucleotide
cgugagacuuggcggugag

SEQ ID NO: 1702960 - RNA, 19 nt, Artificial Sequence
  Description of Artificial Sequence: Synthetic oligonucleotide
accucgcugcuggugucau

SEQ ID NO: 1702961 - RNA, 19 nt, Artificial Sequence
  Description of Artificial Sequence: Synthetic oligonucleotide
cagagacauuugucaacau

SEQ ID NO: 1702962 - RNA, 19 nt, Artificial Sequence
  Description of Artificial Sequence: Synthetic oligonucleotide
caccucgcugcugguguca

SEQ ID NO: 1702963 - RNA, 19 nt, Artificial Sequence
  Description of Artificial Sequence: Synthetic oligonucleotide
ccgcggacauggacgugag

SEQ ID NO: 1702964 - RNA, 19 nt, Artificial Sequence
  Description of Artificial Sequence: Synthetic oligonucleotide
ccacaggcgccaccaccgc

SEQ ID NO: 1702965 - RNA, 19 nt, Artificial Sequence
  Description of Artificial Sequence: Synthetic oligonucleotide
cguguacuccuuggucacc

SEQ ID NO: 1702966 - RNA, 19 nt, Artificial Sequence
  Description of Artificial Sequence: Synthetic oligonucleotide
cauggacgugaggcugcga

SEQ ID NO: 1702967 - RNA, 19 nt, Artificial Sequence
  Description of Artificial Sequence: Synthetic oligonucleotide
ccaucagcgccagcucauc

SEQ ID NO: 1702968 - RNA, 19 nt, Artificial Sequence
  Description of Artificial Sequence: Synthetic oligonucleotide
caccgcggacauggacgug

SEQ ID NO: 1702969 - RNA, 19 nt, Artificial Sequence
  Description of Artificial Sequence: Synthetic oligonucleotide
cgcggacauggacgugagg

SEQ ID NO: 1702970 - RNA, 19 nt, Artificial Sequence
  Description of Artificial Sequence: Synthetic oligonucleotide
ccaccgcggacauggacgu

SEQ ID NO: 1702971 - RNA, 19 nt, Artificial Sequence
  Description of Artificial Sequence: Synthetic oligonucleotide
cccguccgugagacuuggc

SEQ ID NO: 1702972 - RNA, 19 nt, Artificial Sequence
  Description of Artificial Sequence: Synthetic oligonucleotide
ccgugagacuuggcgguga

SEQ ID NO: 1702973 - RNA, 19 nt, Artificial Sequence
  Description of Artificial Sequence: Synthetic oligonucleotide
gucacccuguagagcucau

SEQ ID NO: 1702974 - RNA, 19 nt, Artificial Sequence
  Description of Artificial Sequence: Synthetic oligonucleotide
ggcauucguucagcagccu

SEQ ID NO: 1702975 - RNA, 19 nt, Artificial Sequence
  Description of Artificial Sequence: Synthetic oligonucleotide
gcgccagcucaucuugauu

SEQ ID NO: 1702976 - RNA, 19 nt, Artificial Sequence
  Description of Artificial Sequence: Synthetic oligonucleotide
gcgccugaacagccaaguu

SEQ ID NO: 1702977 - RNA, 19 nt, Artificial Sequence
  Description of Artificial Sequence: Synthetic oligonucleotide
cgucugucuuugugucacu

SEQ ID NO: 1702978 - RNA, 19 nt, Artificial Sequence
  Description of Artificial Sequence: Synthetic oligonucleotide
ggaggacggccagcuugau

SEQ ID NO: 1702979 - RNA, 19 nt, Artificial Sequence
  Description of Artificial Sequence: Synthetic oligonucleotide
ccaccucggagagcaugcu

SEQ ID NO: 1702980 - RNA, 19 nt, Artificial Sequence
  Description of Artificial Sequence: Synthetic oligonucleotide
aaugagaugacgcacccac

SEQ ID NO: 1702981 - RNA, 19 nt, Artificial Sequence
  Description of Artificial Sequence: Synthetic oligonucleotide
aggauguugugacagaucc

SEQ ID NO: 1702982 - RNA, 19 nt, Artificial Sequence
  Description of Artificial Sequence: Synthetic oligonucleotide
gauuucuagacuugaaggg

SEQ ID NO: 1702983 - RNA, 19 nt, Artificial Sequence
  Description of Artificial Sequence: Synthetic oligonucleotide
auaguauggauuucuagac

SEQ ID NO: 1702984 - RNA, 19 nt, Artificial Sequence
  Description of Artificial Sequence: Synthetic oligonucleotide
aaaagauguccuuggacuc

SEQ ID NO: 1702985 - RNA, 19 nt, Artificial Sequence
  Description of Artificial Sequence: Synthetic oligonucleotide
agaugacgcacccacaugc

SEQ ID NO: 1702986 - RNA, 19 nt, Artificial Sequence
  Description of Artificial Sequence: Synthetic oligonucleotide
gauaguauggauuucuaga

SEQ ID NO: 1702987 - RNA, 19 nt, Artificial Sequence
  Description of Artificial Sequence: Synthetic oligonucleotide
ugugcuuggggcuucaggg

SEQ ID NO: 1702988 - RNA, 19 nt, Artificial Sequence
  Description of Artificial Sequence: Synthetic oligonucleotide
gauguugugacagaucccg

SEQ ID NO: 1702989 - RNA, 19 nt, Artificial Sequence
  Description of Artificial Sequence: Synthetic oligonucleotide
aaagacgaagggcuuguac

SEQ ID NO: 1702990 - RNA, 19 nt, Artificial Sequence
  Description of Artificial Sequence: Synthetic oligonucleotide
ugguacuuggaaaugcagg

SEQ ID NO: 1702991 - RNA, 19 nt, Artificial Sequence
  Description of Artificial Sequence: Synthetic oligonucleotide
uguccuuggacucugcaag

SEQ ID NO: 1702992 - RNA, 19 nt, Artificial Sequence
  Description of Artificial Sequence: Synthetic oligonucleotide
aaggaugggacucuuguca

SEQ ID NO: 1702993 - RNA, 19 nt, Artificial Sequence
  Description of Artificial Sequence: Synthetic oligonucleotide
uggauuucuagacuugaag

SEQ ID NO: 1702994 - RNA, 19 nt, Artificial Sequence
  Description of Artificial Sequence: Synthetic oligonucleotide
aucacagucuggcaggccc

SEQ ID NO: 1702995 - RNA, 19 nt, Artificial Sequence
  Description of Artificial Sequence: Synthetic oligonucleotide
aagacgaagggcuuguaca

SEQ ID NO: 1702996 - RNA, 19 nt, Artificial Sequence
  Description of Artificial Sequence: Synthetic oligonucleotide
ucgcucauugagaugaggg

SEQ ID NO: 1702997 - RNA, 19 nt, Artificial Sequence
  Description of Artificial Sequence: Synthetic oligonucleotide
agggucacgguuucgacgc

SEQ ID NO: 1702998 - RNA, 19 nt, Artificial Sequence
  Description of Artificial Sequence: Synthetic oligonucleotide
ugagcacaaaccagcagcg

SEQ ID NO: 1702999 - RNA, 19 nt, Artificial Sequence
  Description of Artificial Sequence: Synthetic oligonucleotide
uggaaaugcagguaaugag

SEQ ID NO: 1703000 - RNA, 19 nt, Artificial Sequence
  Description of Artificial Sequence: Synthetic oligonucleotide
ugauaguauggauuucuag

SEQ ID NO: 1703001 - RNA, 19 nt, Artificial Sequence
  Description of Artificial Sequence: Synthetic oligonucleotide
uucuucugaccaaggaugg

SEQ ID NO: 1703002 - RNA, 19 nt, Artificial Sequence
  Description of Artificial Sequence: Synthetic oligonucleotide
ugucacuccaaguuggagc

SEQ ID NO: 1703003 - RNA, 19 nt, Artificial Sequence
  Description of Artificial Sequence: Synthetic oligonucleotide
uccaaguuggagcuggacc

SEQ ID NO: 1703004 - RNA, 19 nt, Artificial Sequence
  Description of Artificial Sequence: Synthetic oligonucleotide
agcgugggcccauaaagcc

SEQ ID NO: 1703005 - RNA, 19 nt, Artificial Sequence
  Description of Artificial Sequence: Synthetic oligonucleotide
uucgacgcaugaaagagcu

SEQ ID NO: 1703006 - RNA, 19 nt, Artificial Sequence
  Description of Artificial Sequence: Synthetic oligonucleotide
ucaugggucagcuggaaca

SEQ ID NO: 1703007 - RNA, 19 nt, Artificial Sequence
  Description of Artificial Sequence: Synthetic oligonucleotide
uuugccuugagugugcucu

SEQ ID NO: 1703008 - RNA, 19 nt, Artificial Sequence
  Description of Artificial Sequence: Synthetic oligonucleotide
agacgaagggcuuguacac

SEQ ID NO: 1703009 - RNA, 19 nt, Artificial Sequence
  Description of Artificial Sequence: Synthetic oligonucleotide
uaccuugcguaguagaagc

SEQ ID NO: 1703010 - RNA, 19 nt, Artificial Sequence
  Description of Artificial Sequence: Synthetic oligonucleotide
ugcaguuccugcaacuuug

SEQ ID NO: 1703011 - RNA, 19 nt, Artificial Sequence
  Description of Artificial Sequence: Synthetic oligonucleotide
uacucgcucauugagauga

SEQ ID NO: 1703012 - RNA, 19 nt, Artificial Sequence
  Description of Artificial Sequence: Synthetic oligonucleotide
aguauggauuucuagacuu

SEQ ID NO: 1703013 - RNA, 19 nt, Artificial Sequence
  Description of Artificial Sequence: Synthetic oligonucleotide
aguagaagccauccaucac

SEQ ID NO: 1703014 - RNA, 19 nt, Artificial Sequence
  Description of Artificial Sequence: Synthetic oligonucleotide
ugagaucagggucacccag

SEQ ID NO: 1703015 - RNA, 19 nt, Artificial Sequence
  Description of Artificial Sequence: Synthetic oligonucleotide
uuguugauaguauggauuu

SEQ ID NO: 1703016 - RNA, 19 nt, Artificial Sequence
  Description of Artificial Sequence: Synthetic oligonucleotide
uucuguuccuuccacuggc

SEQ ID NO: 1703017 - RNA, 19 nt, Artificial Sequence
  Description of Artificial Sequence: Synthetic oligonucleotide
uguacucgcucauugagau

SEQ ID NO: 1703018 - RNA, 19 nt, Artificial Sequence
  Description of Artificial Sequence: Synthetic oligonucleotide
guuucgacgcaugaaagag

SEQ ID NO: 1703019 - RNA, 19 nt, Artificial Sequence
  Description of Artificial Sequence: Synthetic oligonucleotide
ucuggggccgaauugggcc

SEQ ID NO: 1703020 - RNA, 19 nt, Artificial Sequence
  Description of Artificial Sequence: Synthetic oligonucleotide
ugauuucuucugaccaagg

SEQ ID NO: 1703021 - RNA, 19 nt, Artificial Sequence
  Description of Artificial Sequence: Synthetic oligonucleotide
uguugugacagaucccggc

SEQ ID NO: 1703022 - RNA, 19 nt, Artificial Sequence
  Description of Artificial Sequence: Synthetic oligonucleotide
aaaugcagguaaugagaug

SEQ ID NO: 1703023 - RNA, 19 nt, Artificial Sequence
  Description of Artificial Sequence: Synthetic oligonucleotide
cauaaagccacuggguacc

SEQ ID NO: 1703024 - RNA, 19 nt, Artificial Sequence
  Description of Artificial Sequence: Synthetic oligonucleotide
ugagaugacgcacccacau

SEQ ID NO: 1703025 - RNA, 19 nt, Artificial Sequence
  Description of Artificial Sequence: Synthetic oligonucleotide
uuucgacgcaugaaagagc

SEQ ID NO: 1703026 - RNA, 19 nt, Artificial Sequence
  Description of Artificial Sequence: Synthetic oligonucleotide
uagacuugaagggucgucc

SEQ ID NO: 1703027 - RNA, 19 nt, Artificial Sequence
  Description of Artificial Sequence: Synthetic oligonucleotide
uaguauggauuucuagacu

SEQ ID NO: 1703028 - RNA, 19 nt, Artificial Sequence
  Description of Artificial Sequence: Synthetic oligonucleotide
uuguacacgucauggguca

SEQ ID NO: 1703029 - RNA, 19 nt, Artificial Sequence
  Description of Artificial Sequence: Synthetic oligonucleotide
agguaaugagaugacgcac

SEQ ID NO: 1703030 - RNA, 19 nt, Artificial Sequence
  Description of Artificial Sequence: Synthetic oligonucleotide
gagggucacgguuucgacg

SEQ ID NO: 1703031 - RNA, 19 nt, Artificial Sequence
  Description of Artificial Sequence: Synthetic oligonucleotide
ugacgcacccacaugcuca

SEQ ID NO: 1703032 - RNA, 19 nt, Artificial Sequence
  Description of Artificial Sequence: Synthetic oligonucleotide
cuuggacucugcaagggug

SEQ ID NO: 1703033 - RNA, 19 nt, Artificial Sequence
  Description of Artificial Sequence: Synthetic oligonucleotide
caugaaagagcuccgccac

SEQ ID NO: 1703034 - RNA, 19 nt, Artificial Sequence
  Description of Artificial Sequence: Synthetic oligonucleotide
uauggauuucuagacuuga

SEQ ID NO: 1703035 - RNA, 19 nt, Artificial Sequence
  Description of Artificial Sequence: Synthetic oligonucleotide
ugaagagccaaaagauguc

SEQ ID NO: 1703036 - RNA, 19 nt, Artificial Sequence
  Description of Artificial Sequence: Synthetic oligonucleotide
cuuguacacgucauggguc

SEQ ID NO: 1703037 - RNA, 19 nt, Artificial Sequence
  Description of Artificial Sequence: Synthetic oligonucleotide
aacuuugccuugagugugc

SEQ ID NO: 1703038 - RNA, 19 nt, Artificial Sequence
  Description of Artificial Sequence: Synthetic oligonucleotide
aaauccucagaguguugcu

SEQ ID NO: 1703039 - RNA, 19 nt, Artificial Sequence
  Description of Artificial Sequence: Synthetic oligonucleotide
ugcagguaaugagaugacg

SEQ ID NO: 1703040 - RNA, 19 nt, Artificial Sequence
  Description of Artificial Sequence: Synthetic oligonucleotide
gagacugaccacuggaguc

SEQ ID NO: 1703041 - RNA, 19 nt, Artificial Sequence
  Description of Artificial Sequence: Synthetic oligonucleotide
guugugacagaucccggcc

SEQ ID NO: 1703042 - RNA, 19 nt, Artificial Sequence
  Description of Artificial Sequence: Synthetic oligonucleotide
guaaugagaugacgcaccc

SEQ ID NO: 1703043 - RNA, 19 nt, Artificial Sequence
  Description of Artificial Sequence: Synthetic oligonucleotide
gaggauguucucuggggcc

SEQ ID NO: 1703044 - RNA, 19 nt, Artificial Sequence
  Description of Artificial Sequence: Synthetic oligonucleotide
ugcguaguagaagccaucc

SEQ ID NO: 1703045 - RNA, 19 nt, Artificial Sequence
  Description of Artificial Sequence: Synthetic oligonucleotide
uccgccacugcucaugggu

SEQ ID NO: 1703046 - RNA, 19 nt, Artificial Sequence
  Description of Artificial Sequence: Synthetic oligonucleotide
ucccuugagcacaaaccag

SEQ ID NO: 1703047 - RNA, 19 nt, Artificial Sequence
  Description of Artificial Sequence: Synthetic oligonucleotide
aacuuugcucccgugagau

SEQ ID NO: 1703048 - RNA, 19 nt, Artificial Sequence
  Description of Artificial Sequence: Synthetic oligonucleotide
caugcucagaucagacagg

SEQ ID NO: 1703049 - RNA, 19 nt, Artificial Sequence
  Description of Artificial Sequence: Synthetic oligonucleotide
uguuccuuccacuggcgga

SEQ ID NO: 1703050 - RNA, 19 nt, Artificial Sequence
  Description of Artificial Sequence: Synthetic oligonucleotide
ucccgugagaucaggguca

SEQ ID NO: 1703051 - RNA, 19 nt, Artificial Sequence
  Description of Artificial Sequence: Synthetic oligonucleotide
cugaagagccaaaagaugu

SEQ ID NO: 1703052 - RNA, 19 nt, Artificial Sequence
  Description of Artificial Sequence: Synthetic oligonucleotide
cuucuggucauguccacuc

SEQ ID NO: 1703053 - RNA, 19 nt, Artificial Sequence
  Description of Artificial Sequence: Synthetic oligonucleotide
uccacuggcggaacuuugc

SEQ ID NO: 1703054 - RNA, 19 nt, Artificial Sequence
  Description of Artificial Sequence: Synthetic oligonucleotide
ggugaugugucacuccaag

SEQ ID NO: 1703055 - RNA, 19 nt, Artificial Sequence
  Description of Artificial Sequence: Synthetic oligonucleotide
gguguacucgcucauugag

SEQ ID NO: 1703056 - RNA, 19 nt, Artificial Sequence
  Description of Artificial Sequence: Synthetic oligonucleotide
augggucaggggcuguggc

SEQ ID NO: 1703057 - RNA, 19 nt, Artificial Sequence
  Description of Artificial Sequence: Synthetic oligonucleotide
augugucacuccaaguugg

SEQ ID NO: 1703058 - RNA, 19 nt, Artificial Sequence
  Description of Artificial Sequence: Synthetic oligonucleotide
cucauugagaugaggguca

SEQ ID NO: 1703059 - RNA, 19 nt, Artificial Sequence
  Description of Artificial Sequence: Synthetic oligonucleotide
acgguuucgacgcaugaaa

SEQ ID NO: 1703060 - RNA, 19 nt, Artificial Sequence
  Description of Artificial Sequence: Synthetic oligonucleotide
gagguugaugagcccuucg

SEQ ID NO: 1703061 - RNA, 19 nt, Artificial Sequence
  Description of Artificial Sequence: Synthetic oligonucleotide
aucccggccacguggcugc

SEQ ID NO: 1703062 - RNA, 19 nt, Artificial Sequence
  Description of Artificial Sequence: Synthetic oligonucleotide
gcaguuguugauaguaugg

SEQ ID NO: 1703063 - RNA, 19 nt, Artificial Sequence
  Description of Artificial Sequence: Synthetic oligonucleotide
uugauaguauggauuucua

SEQ ID NO: 1703064 - RNA, 19 nt, Artificial Sequence
  Description of Artificial Sequence: Synthetic oligonucleotide
acgggugaugugucacucc

SEQ ID NO: 1703065 - RNA, 19 nt, Artificial Sequence
  Description of Artificial Sequence: Synthetic oligonucleotide
cuuggaaaugcagguaaug

SEQ ID NO: 1703066 - RNA, 19 nt, Artificial Sequence
  Description of Artificial Sequence: Synthetic oligonucleotide
gucccuugagcacaaacca

SEQ ID NO: 1703067 - RNA, 19 nt, Artificial Sequence
  Description of Artificial Sequence: Synthetic oligonucleotide
gguaaugagaugacgcacc

SEQ ID NO: 1703068 - RNA, 19 nt, Artificial Sequence
  Description of Artificial Sequence: Synthetic oligonucleotide
cugagcgggacccagcuuc

SEQ ID NO: 1703069 - RNA, 19 nt, Artificial Sequence
  Description of Artificial Sequence: Synthetic oligonucleotide
ggcccauaaagccacuggg

SEQ ID NO: 1703070 - RNA, 19 nt, Artificial Sequence
  Description of Artificial Sequence: Synthetic oligonucleotide
gacuugaagggucguccag

SEQ ID NO: 1703071 - RNA, 19 nt, Artificial Sequence
  Description of Artificial Sequence: Synthetic oligonucleotide
augacgcacccacaugcuc

SEQ ID NO: 1703072 - RNA, 19 nt, Artificial Sequence
  Description of Artificial Sequence: Synthetic oligonucleotide
cuuugcucccgugagauca

SEQ ID NO: 1703073 - RNA, 19 nt, Artificial Sequence
  Description of Artificial Sequence: Synthetic oligonucleotide
gcagguaaugagaugacgc

SEQ ID NO: 1703074 - RNA, 19 nt, Artificial Sequence
  Description of Artificial Sequence: Synthetic oligonucleotide
cuugagcacaaaccagcag

SEQ ID NO: 1703075 - RNA, 19 nt, Artificial Sequence
  Description of Artificial Sequence: Synthetic oligonucleotide
ugugucacuccaaguugga

SEQ ID NO: 1703076 - RNA, 19 nt, Artificial Sequence
  Description of Artificial Sequence: Synthetic oligonucleotide
aggauguucucuggggccg

SEQ ID NO: 1703077 - RNA, 19 nt, Artificial Sequence
  Description of Artificial Sequence: Synthetic oligonucleotide
cagcucaggauguugugac

SEQ ID NO: 1703078 - RNA, 19 nt, Artificial Sequence
  Description of Artificial Sequence: Synthetic oligonucleotide
ucuucugaccaaggauggg

SEQ ID NO: 1703079 - RNA, 19 nt, Artificial Sequence
  Description of Artificial Sequence: Synthetic oligonucleotide
agaucagggucacccagca

SEQ ID NO: 1703080 - RNA, 19 nt, Artificial Sequence
  Description of Artificial Sequence: Synthetic oligonucleotide
aaguuggagcuggaccagg

SEQ ID NO: 1703081 - RNA, 19 nt, Artificial Sequence
  Description of Artificial Sequence: Synthetic oligonucleotide
uugucaggguguccugaag

SEQ ID NO: 1703082 - RNA, 19 nt, Artificial Sequence
  Description of Artificial Sequence: Synthetic oligonucleotide
uguucucuggggccgaauu

SEQ ID NO: 1703083 - RNA, 19 nt, Artificial Sequence
  Description of Artificial Sequence: Synthetic oligonucleotide
acucuugucaggguguccu

SEQ ID NO: 1703084 - RNA, 19 nt, Artificial Sequence
  Description of Artificial Sequence: Synthetic oligonucleotide
gacgcaugaaagagcuccg

SEQ ID NO: 1703085 - RNA, 19 nt, Artificial Sequence
  Description of Artificial Sequence: Synthetic oligonucleotide
guaccuugcguaguagaag

SEQ ID NO: 1703086 - RNA, 19 nt, Artificial Sequence
  Description of Artificial Sequence: Synthetic oligonucleotide
agagcuccgccacugcuca

SEQ ID NO: 1703087 - RNA, 19 nt, Artificial Sequence
  Description of Artificial Sequence: Synthetic oligonucleotide
ucggcuuccgucucacugu

SEQ ID NO: 1703088 - RNA, 19 nt, Artificial Sequence
  Description of Artificial Sequence: Synthetic oligonucleotide
gccgaauugggccaggcug

SEQ ID NO: 1703089 - RNA, 19 nt, Artificial Sequence
  Description of Artificial Sequence: Synthetic oligonucleotide
gagaugacgcacccacaug

SEQ ID NO: 1703090 - RNA, 19 nt, Artificial Sequence
  Description of Artificial Sequence: Synthetic oligonucleotide
gguacucaggcccucugag

SEQ ID NO: 1703091 - RNA, 19 nt, Artificial Sequence
  Description of Artificial Sequence: Synthetic oligonucleotide
ucauccugggguugguggu

SEQ ID NO: 1703092 - RNA, 19 nt, Artificial Sequence
  Description of Artificial Sequence: Synthetic oligonucleotide
ucaggagguuggaggaugu

SEQ ID NO: 1703093 - RNA, 19 nt, Artificial Sequence
  Description of Artificial Sequence: Synthetic oligonucleotide
gaaagagcuccgccacugc

SEQ ID NO: 1703094 - RNA, 19 nt, Artificial Sequence
  Description of Artificial Sequence: Synthetic oligonucleotide
ucugaccaaggaugggacu

SEQ ID NO: 1703095 - RNA, 19 nt, Artificial Sequence
  Description of Artificial Sequence: Synthetic oligonucleotide
cagcgugggcccauaaagc

SEQ ID NO: 1703096 - RNA, 19 nt, Artificial Sequence
  Description of Artificial Sequence: Synthetic oligonucleotide
ucacgguuucgacgcauga

SEQ ID NO: 1703097 - RNA, 19 nt, Artificial Sequence
  Description of Artificial Sequence: Synthetic oligonucleotide
ucaaccucguggccacacc

SEQ ID NO: 1703098 - RNA, 19 nt, Artificial Sequence
  Description of Artificial Sequence: Synthetic oligonucleotide
guaguagaagccauccauc

SEQ ID NO: 1703099 - RNA, 19 nt, Artificial Sequence
  Description of Artificial Sequence: Synthetic oligonucleotide
guugauaguauggauuucu

SEQ ID NO: 1703100 - RNA, 19 nt, Artificial Sequence
  Description of Artificial Sequence: Synthetic oligonucleotide
gguuggaggauguucucug

SEQ ID NO: 1703101 - RNA, 19 nt, Artificial Sequence
  Description of Artificial Sequence: Synthetic oligonucleotide
gucugguacuuggaaaugc

SEQ ID NO: 1703102 - RNA, 19 nt, Artificial Sequence
  Description of Artificial Sequence: Synthetic oligonucleotide
agugcaggcaguuguugau

SEQ ID NO: 1703103 - RNA, 19 nt, Artificial Sequence
  Description of Artificial Sequence: Synthetic oligonucleotide
uuccacuggcggaacuuug

SEQ ID NO: 1703104 - RNA, 19 nt, Artificial Sequence
  Description of Artificial Sequence: Synthetic oligonucleotide
gacgcacccacaugcucag

SEQ ID NO: 1703105 - RNA, 19 nt, Artificial Sequence
  Description of Artificial Sequence: Synthetic oligonucleotide
cugaccaaggaugggacuc

SEQ ID NO: 1703106 - RNA, 19 nt, Artificial Sequence
  Description of Artificial Sequence: Synthetic oligonucleotide
uacacgucaugggucagcu

SEQ ID NO: 1703107 - RNA, 19 nt, Artificial Sequence
  Description of Artificial Sequence: Synthetic oligonucleotide
uccucgucagggucuucgg

SEQ ID NO: 1703108 - RNA, 19 nt, Artificial Sequence
  Description of Artificial Sequence: Synthetic oligonucleotide
acgcaugaaagagcuccgc

SEQ ID NO: 1703109 - RNA, 19 nt, Artificial Sequence
  Description of Artificial Sequence: Synthetic oligonucleotide
gagucugguacuuggaaau

SEQ ID NO: 1703110 - RNA, 19 nt, Artificial Sequence
  Description of Artificial Sequence: Synthetic oligonucleotide
ggacacgaagugcaggcag

SEQ ID NO: 1703111 - RNA, 19 nt, Artificial Sequence
  Description of Artificial Sequence: Synthetic oligonucleotide
guauggauuucuagacuug

SEQ ID NO: 1703112 - RNA, 19 nt, Artificial Sequence
  Description of Artificial Sequence: Synthetic oligonucleotide
acggcucaaccucguggcc

SEQ ID NO: 1703113 - RNA, 19 nt, Artificial Sequence
  Description of Artificial Sequence: Synthetic oligonucleotide
uguccacucuccaggcugu

SEQ ID NO: 1703114 - RNA, 19 nt, Artificial Sequence
  Description of Artificial Sequence: Synthetic oligonucleotide
gagaucagggucacccagc

SEQ ID NO: 1703115 - RNA, 19 nt, Artificial Sequence
  Description of Artificial Sequence: Synthetic oligonucleotide
gaaaugcagguaaugagau

SEQ ID NO: 1703116 - RNA, 19 nt, Artificial Sequence
  Description of Artificial Sequence: Synthetic oligonucleotide
agcaaagacgaagggcuug

SEQ ID NO: 1703117 - RNA, 19 nt, Artificial Sequence
  Description of Artificial Sequence: Synthetic oligonucleotide
agacugaccacuggaguca

SEQ ID NO: 1703118 - RNA, 19 nt, Artificial Sequence
  Description of Artificial Sequence: Synthetic oligonucleotide
uccgucucacuguagcaau

SEQ ID NO: 1703119 - RNA, 19 nt, Artificial Sequence
  Description of Artificial Sequence: Synthetic oligonucleotide
agggcuuguacacgucaug

SEQ ID NO: 1703120 - RNA, 19 nt, Artificial Sequence
  Description of Artificial Sequence: Synthetic oligonucleotide
gcuuccgucucacuguagc

SEQ ID NO: 1703121 - RNA, 19 nt, Artificial Sequence
  Description of Artificial Sequence: Synthetic oligonucleotide
ugagcgggacccagcuucc

SEQ ID NO: 1703122 - RNA, 19 nt, Artificial Sequence
  Description of Artificial Sequence: Synthetic oligonucleotide
gaagccacgggugaugugu

SEQ ID NO: 1703123 - RNA, 19 nt, Artificial Sequence
  Description of Artificial Sequence: Synthetic oligonucleotide
cacuggguaccuugcguag

SEQ ID NO: 1703124 - RNA, 19 nt, Artificial Sequence
  Description of Artificial Sequence: Synthetic oligonucleotide
ugcagugcccgcacgcggu

SEQ ID NO: 1703125 - RNA, 19 nt, Artificial Sequence
  Description of Artificial Sequence: Synthetic oligonucleotide
agcccuucggccuuuucau

SEQ ID NO: 1703126 - RNA, 19 nt, Artificial Sequence
  Description of Artificial Sequence: Synthetic oligonucleotide
agagggugugucccuugag

SEQ ID NO: 1703127 - RNA, 19 nt, Artificial Sequence
  Description of Artificial Sequence: Synthetic oligonucleotide
accuugcguaguagaagcc

SEQ ID NO: 1703128 - RNA, 19 nt, Artificial Sequence
  Description of Artificial Sequence: Synthetic oligonucleotide
gucaggguguccugaaguc

SEQ ID NO: 1703129 - RNA, 19 nt, Artificial Sequence
  Description of Artificial Sequence: Synthetic oligonucleotide
acuuugcucccgugagauc

SEQ ID NO: 1703130 - RNA, 19 nt, Artificial Sequence
  Description of Artificial Sequence: Synthetic oligonucleotide
ccagcgugggcccauaaag

SEQ ID NO: 1703131 - RNA, 19 nt, Artificial Sequence
  Description of Artificial Sequence: Synthetic oligonucleotide
augaaagagcuccgccacu

SEQ ID NO: 1703132 - RNA, 19 nt, Artificial Sequence
  Description of Artificial Sequence: Synthetic oligonucleotide
uaaugagaugacgcaccca

SEQ ID NO: 1703133 - RNA, 19 nt, Artificial Sequence
  Description of Artificial Sequence: Synthetic oligonucleotide
uuccgucucacuguagcaa

SEQ ID NO: 1703134 - RNA, 19 nt, Artificial Sequence
  Description of Artificial Sequence: Synthetic oligonucleotide
gaacuuugcucccgugaga

SEQ ID NO: 1703135 - RNA, 19 nt, Artificial Sequence
  Description of Artificial Sequence: Synthetic oligonucleotide
uugcguaguagaagccauc

SEQ ID NO: 1703136 - RNA, 19 nt, Artificial Sequence
  Description of Artificial Sequence: Synthetic oligonucleotide
gaugagggucacgguuucg

SEQ ID NO: 1703137 - RNA, 19 nt, Artificial Sequence
  Description of Artificial Sequence: Synthetic oligonucleotide
gagcacaaaccagcagcgg

SEQ ID NO: 1703138 - RNA, 19 nt, Artificial Sequence
  Description of Artificial Sequence: Synthetic oligonucleotide
ccauaaagccacuggguac

SEQ ID NO: 1703139 - RNA, 19 nt, Artificial Sequence
  Description of Artificial Sequence: Synthetic oligonucleotide
guuguugauaguauggauu

SEQ ID NO: 1703140 - RNA, 19 nt, Artificial Sequence
  Description of Artificial Sequence: Synthetic oligonucleotide
agcugagcgggacccagcu

SEQ ID NO: 1703141 - RNA, 19 nt, Artificial Sequence
  Description of Artificial Sequence: Synthetic oligonucleotide
agcgggacccagcuuccuc

SEQ ID NO: 1703142 - RNA, 19 nt, Artificial Sequence
  Description of Artificial Sequence: Synthetic oligonucleotide
ccgaauugggccaggcugg

SEQ ID NO: 1703143 - RNA, 19 nt, Artificial Sequence
  Description of Artificial Sequence: Synthetic oligonucleotide
ccaaguuggagcuggacca

SEQ ID NO: 1703144 - RNA, 19 nt, Artificial Sequence
  Description of Artificial Sequence: Synthetic oligonucleotide
uguugauaguauggauuuc

SEQ ID NO: 1703145 - RNA, 19 nt, Artificial Sequence
  Description of Artificial Sequence: Synthetic oligonucleotide
gcaugaaagagcuccgcca

SEQ ID NO: 1703146 - RNA, 19 nt, Artificial Sequence
  Description of Artificial Sequence: Synthetic oligonucleotide
gguuucgacgcaugaaaga

SEQ ID NO: 1703147 - RNA, 19 nt, Artificial Sequence
  Description of Artificial Sequence: Synthetic oligonucleotide
augagggucacgguuucga

SEQ ID NO: 1703148 - RNA, 19 nt, Artificial Sequence
  Description of Artificial Sequence: Synthetic oligonucleotide
augcagguaaugagaugac

SEQ ID NO: 1703149 - RNA, 19 nt, Artificial Sequence
  Description of Artificial Sequence: Synthetic oligonucleotide
ugacagaucccggccacgu

SEQ ID NO: 1703150 - RNA, 19 nt, Artificial Sequence
  Description of Artificial Sequence: Synthetic oligonucleotide
cacguggcugcaaauccuc

SEQ ID NO: 1703151 - RNA, 19 nt, Artificial Sequence
  Description of Artificial Sequence: Synthetic oligonucleotide
uaccaguagaggguguguc

SEQ ID NO: 1703152 - RNA, 19 nt, Artificial Sequence
  Description of Artificial Sequence: Synthetic oligonucleotide
gggcccauaaagccacugg

SEQ ID NO: 1703153 - RNA, 19 nt, Artificial Sequence
  Description of Artificial Sequence: Synthetic oligonucleotide
agucugguacuuggaaaug

SEQ ID NO: 1703154 - RNA, 19 nt, Artificial Sequence
  Description of Artificial Sequence: Synthetic oligonucleotide
agguacucaggcccucuga

SEQ ID NO: 1703155 - RNA, 19 nt, Artificial Sequence
  Description of Artificial Sequence: Synthetic oligonucleotide
cacugcucaugggucaggg

SEQ ID NO: 1703156 - RNA, 19 nt, Artificial Sequence
  Description of Artificial Sequence: Synthetic oligonucleotide
uucuucuggucauguccac

SEQ ID NO: 1703157 - RNA, 19 nt, Artificial Sequence
  Description of Artificial Sequence: Synthetic oligonucleotide
cacaugcucagaucagaca

SEQ ID NO: 1703158 - RNA, 19 nt, Artificial Sequence
  Description of Artificial Sequence: Synthetic oligonucleotide
gcaaucuuccuuucuggca

SEQ ID NO: 1703159 - RNA, 19 nt, Artificial Sequence
  Description of Artificial Sequence: Synthetic oligonucleotide
ugaccaaggaugggacucu

SEQ ID NO: 1703160 - RNA, 19 nt, Artificial Sequence
  Description of Artificial Sequence: Synthetic oligonucleotide
cucgcucauugagaugagg

SEQ ID NO: 1703161 - RNA, 19 nt, Artificial Sequence
  Description of Artificial Sequence: Synthetic oligonucleotide
ucauugagaugagggucac

SEQ ID NO: 1703162 - RNA, 19 nt, Artificial Sequence
  Description of Artificial Sequence: Synthetic oligonucleotide
cuagacuugaagggucguc

SEQ ID NO: 1703163 - RNA, 19 nt, Artificial Sequence
  Description of Artificial Sequence: Synthetic oligonucleotide
ggaugggacucuugucagg

SEQ ID NO: 1703164 - RNA, 19 nt, Artificial Sequence
  Description of Artificial Sequence: Synthetic oligonucleotide
cccuucggccuuuucaucc

SEQ ID NO: 1703165 - RNA, 19 nt, Artificial Sequence
  Description of Artificial Sequence: Synthetic oligonucleotide
cuguggagacugaccacug

SEQ ID NO: 1703166 - RNA, 19 nt, Artificial Sequence
  Description of Artificial Sequence: Synthetic oligonucleotide
gaguguugcuuuccuucuc

SEQ ID NO: 1703167 - RNA, 19 nt, Artificial Sequence
  Description of Artificial Sequence: Synthetic oligonucleotide
cagcagcuccucuggacag

SEQ ID NO: 1703168 - RNA, 19 nt, Artificial Sequence
  Description of Artificial Sequence: Synthetic oligonucleotide
cgacgcaugaaagagcucc

SEQ ID NO: 1703169 - RNA, 19 nt, Artificial Sequence
  Description of Artificial Sequence: Synthetic oligonucleotide
uccucagaguguugcuuuc

SEQ ID NO: 1703170 - RNA, 19 nt, Artificial Sequence
  Description of Artificial Sequence: Synthetic oligonucleotide
gacagaucccggccacgug

SEQ ID NO: 1703171 - RNA, 19 nt, Artificial Sequence
  Description of Artificial Sequence: Synthetic oligonucleotide
uguacacgucaugggucag

SEQ ID NO: 1703172 - RNA, 19 nt, Artificial Sequence
  Description of Artificial Sequence: Synthetic oligonucleotide
guagagggugugucccuug

SEQ ID NO: 1703173 - RNA, 19 nt, Artificial Sequence
  Description of Artificial Sequence: Synthetic oligonucleotide
caaguuggagcuggaccag

SEQ ID NO: 1703174 - RNA, 19 nt, Artificial Sequence
  Description of Artificial Sequence: Synthetic oligonucleotide
agguuggaggauguucucu

SEQ ID NO: 1703175 - RNA, 19 nt, Artificial Sequence
  Description of Artificial Sequence: Synthetic oligonucleotide
ggugaagcugagcgggacc

SEQ ID NO: 1703176 - RNA, 19 nt, Artificial Sequence
  Description of Artificial Sequence: Synthetic oligonucleotide
gaucccggccacguggcug

SEQ ID NO: 1703177 - RNA, 19 nt, Artificial Sequence
  Description of Artificial Sequence: Synthetic oligonucleotide
ugcucagaucagacagggu

SEQ ID NO: 1703178 - RNA, 19 nt, Artificial Sequence
  Description of Artificial Sequence: Synthetic oligonucleotide
uccacucuccaggcuguag

SEQ ID NO: 1703179 - RNA, 19 nt, Artificial Sequence
  Description of Artificial Sequence: Synthetic oligonucleotide
caugggucaggggcugugg

SEQ ID NO: 1703180 - RNA, 19 nt, Artificial Sequence
  Description of Artificial Sequence: Synthetic oligonucleotide
cuugagugugcucugcagu

SEQ ID NO: 1703181 - RNA, 19 nt, Artificial Sequence
  Description of Artificial Sequence: Synthetic oligonucleotide
cuuccgucucacuguagca

SEQ ID NO: 1703182 - RNA, 19 nt, Artificial Sequence
  Description of Artificial Sequence: Synthetic oligonucleotide
cauugagaugagggucacg

SEQ ID NO: 1703183 - RNA, 19 nt, Artificial Sequence
  Description of Artificial Sequence: Synthetic oligonucleotide
cacuggcggaacuuugcuc

SEQ ID NO: 1703184 - RNA, 19 nt, Artificial Sequence
  Description of Artificial Sequence: Synthetic oligonucleotide
gacugaccacuggagucag

SEQ ID NO: 1703185 - RNA, 19 nt, Artificial Sequence
  Description of Artificial Sequence: Synthetic oligonucleotide
ggagucugguacuuggaaa

SEQ ID NO: 1703186 - RNA, 19 nt, Artificial Sequence
  Description of Artificial Sequence: Synthetic oligonucleotide
gugucacuccaaguuggag

SEQ ID NO: 1703187 - RNA, 19 nt, Artificial Sequence
  Description of Artificial Sequence: Synthetic oligonucleotide
uggguaccuugcguaguag

SEQ ID NO: 1703188 - RNA, 19 nt, Artificial Sequence
  Description of Artificial Sequence: Synthetic oligonucleotide
uuuucauccugggguuggu

SEQ ID NO: 1703189 - RNA, 19 nt, Artificial Sequence
  Description of Artificial Sequence: Synthetic oligonucleotide
ugucugcugaagagccaaa

SEQ ID NO: 1703190 - RNA, 19 nt, Artificial Sequence
  Description of Artificial Sequence: Synthetic oligonucleotide
guacucgcucauugagaug

SEQ ID NO: 1703191 - RNA, 19 nt, Artificial Sequence
  Description of Artificial Sequence: Synthetic oligonucleotide
gguaccaguagagggugug

SEQ ID NO: 1703192 - RNA, 19 nt, Artificial Sequence
  Description of Artificial Sequence: Synthetic oligonucleotide
uggcggaacuuugcucccg

SEQ ID NO: 1703193 - RNA, 19 nt, Artificial Sequence
  Description of Artificial Sequence: Synthetic oligonucleotide
gcccucugaguacagcucc

SEQ ID NO: 1703194 - RNA, 19 nt, Artificial Sequence
  Description of Artificial Sequence: Synthetic oligonucleotide
uccuuccacuggcggaacu

SEQ ID NO: 1703195 - RNA, 19 nt, Artificial Sequence
  Description of Artificial Sequence: Synthetic oligonucleotide
cucccggcaggacacccgc

SEQ ID NO: 1703196 - RNA, 19 nt, Artificial Sequence
  Description of Artificial Sequence: Synthetic oligonucleotide
ccccgucagggucagaagg

SEQ ID NO: 1703197 - RNA, 19 nt, Artificial Sequence
  Description of Artificial Sequence: Synthetic oligonucleotide
caggcaguuguugauagua

SEQ ID NO: 1703198 - RNA, 19 nt, Artificial Sequence
  Description of Artificial Sequence: Synthetic oligonucleotide
ccuuccagugcccugucac

SEQ ID NO: 1703199 - RNA, 19 nt, Artificial Sequence
  Description of Artificial Sequence: Synthetic oligonucleotide
cugggaggggccccgucag

SEQ ID NO: 1703200 - RNA, 19 nt, Artificial Sequence
  Description of Artificial Sequence: Synthetic oligonucleotide
cugcaagggugaagccacg

SEQ ID NO: 1703201 - RNA, 19 nt, Artificial Sequence
  Description of Artificial Sequence: Synthetic oligonucleotide
aagggucguccagcugcac

SEQ ID NO: 1703202 - RNA, 19 nt, Artificial Sequence
  Description of Artificial Sequence: Synthetic oligonucleotide
acccgccgacggcucaacc

SEQ ID NO: 1703203 - RNA, 19 nt, Artificial Sequence
  Description of Artificial Sequence: Synthetic oligonucleotide
ugggcccauaaagccacug

SEQ ID NO: 1703204 - RNA, 19 nt, Artificial Sequence
  Description of Artificial Sequence: Synthetic oligonucleotide
cccagcuuccucgucaggg

SEQ ID NO: 1703205 - RNA, 19 nt, Artificial Sequence
  Description of Artificial Sequence: Synthetic oligonucleotide
cacgcgguguacucgcuca

SEQ ID NO: 1703206 - RNA, 19 nt, Artificial Sequence
  Description of Artificial Sequence: Synthetic oligonucleotide
cucuugucaggguguccug

SEQ ID NO: 1703207 - RNA, 19 nt, Artificial Sequence
  Description of Artificial Sequence: Synthetic oligonucleotide
gcuuguacacgucaugggu

SEQ ID NO: 1703208 - RNA, 19 nt, Artificial Sequence
  Description of Artificial Sequence: Synthetic oligonucleotide
gcaacuuugccuugagugu

SEQ ID NO: 1703209 - RNA, 19 nt, Artificial Sequence
  Description of Artificial Sequence: Synthetic oligonucleotide
cucgucagggucuucggcu

SEQ ID NO: 1703210 - RNA, 19 nt, Artificial Sequence
  Description of Artificial Sequence: Synthetic oligonucleotide
acagucuggcaggcccagc

SEQ ID NO: 1703211 - RNA, 19 nt, Artificial Sequence
  Description of Artificial Sequence: Synthetic oligonucleotide
cuugaagggucguccagcu

SEQ ID NO: 1703212 - RNA, 19 nt, Artificial Sequence
  Description of Artificial Sequence: Synthetic oligonucleotide
ugccuugagugugcucugc

SEQ ID NO: 1703213 - RNA, 19 nt, Artificial Sequence
  Description of Artificial Sequence: Synthetic oligonucleotide
cuugucaggguguccugaa

SEQ ID NO: 1703214 - RNA, 19 nt, Artificial Sequence
  Description of Artificial Sequence: Synthetic oligonucleotide
gacucuugucagggugucc

SEQ ID NO: 1703215 - RNA, 19 nt, Artificial Sequence
  Description of Artificial Sequence: Synthetic oligonucleotide
uuccugcaacuuugccuug

SEQ ID NO: 1703216 - RNA, 19 nt, Artificial Sequence
  Description of Artificial Sequence: Synthetic oligonucleotide
cuugcguaguagaagccau

SEQ ID NO: 1703217 - RNA, 19 nt, Artificial Sequence
  Description of Artificial Sequence: Synthetic oligonucleotide
gugacagaucccggccacg

SEQ ID NO: 1703218 - RNA, 19 nt, Artificial Sequence
  Description of Artificial Sequence: Synthetic oligonucleotide
cucaaccucguggccacac

SEQ ID NO: 1703219 - RNA, 19 nt, Artificial Sequence
  Description of Artificial Sequence: Synthetic oligonucleotide
ugaagcugagcgggaccca

SEQ ID NO: 1703220 - RNA, 19 nt, Artificial Sequence
  Description of Artificial Sequence: Synthetic oligonucleotide
agcuccgccacugcucaug

SEQ ID NO: 1703221 - RNA, 19 nt, Artificial Sequence
  Description of Artificial Sequence: Synthetic oligonucleotide
caggacacccgccgacggc

SEQ ID NO: 1703222 - RNA, 19 nt, Artificial Sequence
  Description of Artificial Sequence: Synthetic oligonucleotide
cuuugccuugagugugcuc

SEQ ID NO: 1703223 - RNA, 19 nt, Artificial Sequence
  Description of Artificial Sequence: Synthetic oligonucleotide
ccggccuggagucugguac

SEQ ID NO: 1703224 - RNA, 19 nt, Artificial Sequence
  Description of Artificial Sequence: Synthetic oligonucleotide
accucguggccacaccuuu

SEQ ID NO: 1703225 - RNA, 19 nt, Artificial Sequence
  Description of Artificial Sequence: Synthetic oligonucleotide
cacugcugucugcugaaga

SEQ ID NO: 1703226 - RNA, 19 nt, Artificial Sequence
  Description of Artificial Sequence: Synthetic oligonucleotide
gucacgguuucgacgcaug

SEQ ID NO: 1703227 - RNA, 19 nt, Artificial Sequence
  Description of Artificial Sequence: Synthetic oligonucleotide
ucgacgcaugaaagagcuc

SEQ ID NO: 1703228 - RNA, 19 nt, Artificial Sequence
  Description of Artificial Sequence: Synthetic oligonucleotide
gguaccuugcguaguagaa

SEQ ID NO: 1703229 - RNA, 19 nt, Artificial Sequence
  Description of Artificial Sequence: Synthetic oligonucleotide
gaagggucguccagcugca

SEQ ID NO: 1703230 - RNA, 19 nt, Artificial Sequence
  Description of Artificial Sequence: Synthetic oligonucleotide
gcaggacacccgccgacgg

SEQ ID NO: 1703231 - RNA, 19 nt, Artificial Sequence
  Description of Artificial Sequence: Synthetic oligonucleotide
cagguacucaggcccucug

SEQ ID NO: 1703232 - RNA, 19 nt, Artificial Sequence
  Description of Artificial Sequence: Synthetic oligonucleotide
cacgggugaugugucacuc

SEQ ID NO: 1703233 - RNA, 19 nt, Artificial Sequence
  Description of Artificial Sequence: Synthetic oligonucleotide
gugaugugucacuccaagu

SEQ ID NO: 1703234 - RNA, 19 nt, Artificial Sequence
  Description of Artificial Sequence: Synthetic oligonucleotide
acacgucaugggucagcug

SEQ ID NO: 1703235 - RNA, 19 nt, Artificial Sequence
  Description of Artificial Sequence: Synthetic oligonucleotide
cacgaagugcaggcaguug

SEQ ID NO: 1703236 - RNA, 19 nt, Artificial Sequence
  Description of Artificial Sequence: Synthetic oligonucleotide
gcuccgccacugcucaugg

SEQ ID NO: 1703237 - RNA, 19 nt, Artificial Sequence
  Description of Artificial Sequence: Synthetic oligonucleotide
gggugugucccuugagcac

SEQ ID NO: 1703238 - RNA, 19 nt, Artificial Sequence
  Description of Artificial Sequence: Synthetic oligonucleotide
cgcaugaaagagcuccgcc

SEQ ID NO: 1703239 - RNA, 19 nt, Artificial Sequence
  Description of Artificial Sequence: Synthetic oligonucleotide
ggagguuggaggauguucu

SEQ ID NO: 1703240 - RNA, 19 nt, Artificial Sequence
  Description of Artificial Sequence: Synthetic oligonucleotide
ggcuggggagcuguucugg

SEQ ID NO: 1703241 - RNA, 19 nt, Artificial Sequence
  Description of Artificial Sequence: Synthetic oligonucleotide
caucacagucuggcaggcc

SEQ ID NO: 1703242 - RNA, 19 nt, Artificial Sequence
  Description of Artificial Sequence: Synthetic oligonucleotide
aggcaguuguugauaguau

SEQ ID NO: 1703243 - RNA, 19 nt, Artificial Sequence
  Description of Artificial Sequence: Synthetic oligonucleotide
ggagacugaccacuggagu

SEQ ID NO: 1703244 - RNA, 19 nt, Artificial Sequence
  Description of Artificial Sequence: Synthetic oligonucleotide
uuccuuccagugcccuguc

SEQ ID NO: 1703245 - RNA, 19 nt, Artificial Sequence
  Description of Artificial Sequence: Synthetic oligonucleotide
cuggggccgaauugggcca

SEQ ID NO: 1703246 - RNA, 19 nt, Artificial Sequence
  Description of Artificial Sequence: Synthetic oligonucleotide
agccacgggugauguguca

SEQ ID NO: 1703247 - RNA, 19 nt, Artificial Sequence
  Description of Artificial Sequence: Synthetic oligonucleotide
accaaggaugggacucuug

SEQ ID NO: 1703248 - RNA, 19 nt, Artificial Sequence
  Description of Artificial Sequence: Synthetic oligonucleotide
ggcaggacacccgccgacg

SEQ ID NO: 1703249 - RNA, 19 nt, Artificial Sequence
  Description of Artificial Sequence: Synthetic oligonucleotide
ggugguaccaguagagggu

SEQ ID NO: 1703250 - RNA, 19 nt, Artificial Sequence
  Description of Artificial Sequence: Synthetic oligonucleotide
gaugacgcacccacaugcu

SEQ ID NO: 1703251 - RNA, 19 nt, Artificial Sequence
  Description of Artificial Sequence: Synthetic oligonucleotide
uggggccgaauugggccag

SEQ ID NO: 1703252 - RNA, 19 nt, Artificial Sequence
  Description of Artificial Sequence: Synthetic oligonucleotide
aaccucguggccacaccuu

SEQ ID NO: 1703253 - RNA, 19 nt, Artificial Sequence
  Description of Artificial Sequence: Synthetic oligonucleotide
ucccggcaggacacccgcc

SEQ ID NO: 1703254 - RNA, 19 nt, Artificial Sequence
  Description of Artificial Sequence: Synthetic oligonucleotide
cuggguaccuugcguagua

SEQ ID NO: 1703255 - RNA, 19 nt, Artificial Sequence
  Description of Artificial Sequence: Synthetic oligonucleotide
ccugcaacuuugccuugag

SEQ ID NO: 1703256 - RNA, 19 nt, Artificial Sequence
  Description of Artificial Sequence: Synthetic oligonucleotide
cccggcaggacacccgccg

SEQ ID NO: 1703257 - RNA, 19 nt, Artificial Sequence
  Description of Artificial Sequence: Synthetic oligonucleotide
agaucccggccacguggcu

SEQ ID NO: 1703258 - RNA, 19 nt, Artificial Sequence
  Description of Artificial Sequence: Synthetic oligonucleotide
agugcccgcacgcggugua

SEQ ID NO: 1703259 - RNA, 19 nt, Artificial Sequence
  Description of Artificial Sequence: Synthetic oligonucleotide
gcagcucaggauguuguga

SEQ ID NO: 1703260 - RNA, 19 nt, Artificial Sequence
  Description of Artificial Sequence: Synthetic oligonucleotide
acucgcucauugagaugag

SEQ ID NO: 1703261 - RNA, 19 nt, Artificial Sequence
  Description of Artificial Sequence: Synthetic oligonucleotide
caaccucguggccacaccu

SEQ ID NO: 1703262 - RNA, 19 nt, Artificial Sequence
  Description of Artificial Sequence: Synthetic oligonucleotide
gucuucggcuuccgucuca

SEQ ID NO: 1703263 - RNA, 19 nt, Artificial Sequence
  Description of Artificial Sequence: Synthetic oligonucleotide
gcccgcaucccuccccagg

SEQ ID NO: 1703264 - RNA, 19 nt, Artificial Sequence
  Description of Artificial Sequence: Synthetic oligonucleotide
acgucaugggucagcugga

SEQ ID NO: 1703265 - RNA, 19 nt, Artificial Sequence
  Description of Artificial Sequence: Synthetic oligonucleotide
gacacccgccgacggcuca

SEQ ID NO: 1703266 - RNA, 19 nt, Artificial Sequence
  Description of Artificial Sequence: Synthetic oligonucleotide
cagugcccugucacugcug

SEQ ID NO: 1703267 - RNA, 19 nt, Artificial Sequence
  Description of Artificial Sequence: Synthetic oligonucleotide
gaauugggccaggcuggga

SEQ ID NO: 1703268 - RNA, 19 nt, Artificial Sequence
  Description of Artificial Sequence: Synthetic oligonucleotide
ccucgucagggucuucggc

SEQ ID NO: 1703269 - RNA, 19 nt, Artificial Sequence
  Description of Artificial Sequence: Synthetic oligonucleotide
cacgguuucgacgcaugaa

SEQ ID NO: 1703270 - RNA, 19 nt, Artificial Sequence
  Description of Artificial Sequence: Synthetic oligonucleotide
ggacucugcaagggugaag

SEQ ID NO: 1703271 - RNA, 19 nt, Artificial Sequence
  Description of Artificial Sequence: Synthetic oligonucleotide
cagucuggcaggcccagcu

SEQ ID NO: 1703272 - RNA, 19 nt, Artificial Sequence
  Description of Artificial Sequence: Synthetic oligonucleotide
gcuguggagacugaccacu

SEQ ID NO: 1703273 - RNA, 19 nt, Artificial Sequence
  Description of Artificial Sequence: Synthetic oligonucleotide
aggguguccugaagucucu

SEQ ID NO: 1703274 - RNA, 19 nt, Artificial Sequence
  Description of Artificial Sequence: Synthetic oligonucleotide
ccuugcguaguagaagcca

SEQ ID NO: 1703275 - RNA, 19 nt, Artificial Sequence
  Description of Artificial Sequence: Synthetic oligonucleotide
gcguaguagaagccaucca

SEQ ID NO: 1703276 - RNA, 19 nt, Artificial Sequence
  Description of Artificial Sequence: Synthetic oligonucleotide
ugcccgcacgcgguguacu

SEQ ID NO: 1703277 - RNA, 19 nt, Artificial Sequence
  Description of Artificial Sequence: Synthetic oligonucleotide
acgcgguguacucgcucau

SEQ ID NO: 1703278 - RNA, 19 nt, Artificial Sequence
  Description of Artificial Sequence: Synthetic oligonucleotide
cguaguagaagccauccau

SEQ ID NO: 1703279 - RNA, 19 nt, Artificial Sequence
  Description of Artificial Sequence: Synthetic oligonucleotide
gggagcuguucugggcccg

SEQ ID NO: 1703280 - RNA, 19 nt, Artificial Sequence
  Description of Artificial Sequence: Synthetic oligonucleotide
gccuugagugugcucugca

SEQ ID NO: 1703281 - RNA, 19 nt, Artificial Sequence
  Description of Artificial Sequence: Synthetic oligonucleotide
ccgcacgcgguguacucgc

SEQ ID NO: 1703282 - RNA, 19 nt, Artificial Sequence
  Description of Artificial Sequence: Synthetic oligonucleotide
gcaaauccucagaguguug

SEQ ID NO: 1703283 - RNA, 19 nt, Artificial Sequence
  Description of Artificial Sequence: Synthetic oligonucleotide
ggccacguggcugcaaauc

SEQ ID NO: 1703284 - RNA, 19 nt, Artificial Sequence
  Description of Artificial Sequence: Synthetic oligonucleotide
cagccccugaaccauuccu

SEQ ID NO: 1703285 - RNA, 19 nt, Artificial Sequence
  Description of Artificial Sequence: Synthetic oligonucleotide
ggcugcaaauccucagagu

SEQ ID NO: 1703286 - RNA, 19 nt, Artificial Sequence
  Description of Artificial Sequence: Synthetic oligonucleotide
cugggcccgcaucccuccc

SEQ ID NO: 1703287 - RNA, 19 nt, Artificial Sequence
  Description of Artificial Sequence: Synthetic oligonucleotide
gccacgggugaugugucac

SEQ ID NO: 1703288 - RNA, 19 nt, Artificial Sequence
  Description of Artificial Sequence: Synthetic oligonucleotide
ggaccaggugaagcugagc

SEQ ID NO: 1703289 - RNA, 19 nt, Artificial Sequence
  Description of Artificial Sequence: Synthetic oligonucleotide
gcagcggcgccagcguggg

SEQ ID NO: 1703290 - RNA, 19 nt, Artificial Sequence
  Description of Artificial Sequence: Synthetic oligonucleotide
gagagguugaugagcccuu

SEQ ID NO: 1703291 - RNA, 19 nt, Artificial Sequence
  Description of Artificial Sequence: Synthetic oligonucleotide
ccuuuucauccugggguug

SEQ ID NO: 1703292 - RNA, 19 nt, Artificial Sequence
  Description of Artificial Sequence: Synthetic oligonucleotide
ccgccgacggcucaaccuc

SEQ ID NO: 1703293 - RNA, 19 nt, Artificial Sequence
  Description of Artificial Sequence: Synthetic oligonucleotide
ugugucccuugagcacaaa

SEQ ID NO: 1703294 - RNA, 19 nt, Artificial Sequence
  Description of Artificial Sequence: Synthetic oligonucleotide
cauguccacucuccaggcu

SEQ ID NO: 1703295 - RNA, 19 nt, Artificial Sequence
  Description of Artificial Sequence: Synthetic oligonucleotide
cagaucagacagggucuca

SEQ ID NO: 1703296 - RNA, 19 nt, Artificial Sequence
  Description of Artificial Sequence: Synthetic oligonucleotide
gcucccggcaggacacccg

SEQ ID NO: 1703297 - RNA, 19 nt, Artificial Sequence
  Description of Artificial Sequence: Synthetic oligonucleotide
cgcaucccuccccagguac

SEQ ID NO: 1703298 - RNA, 19 nt, Artificial Sequence
  Description of Artificial Sequence: Synthetic oligonucleotide
ccgccacugcucauggguc

SEQ ID NO: 1703299 - RNA, 19 nt, Artificial Sequence
  Description of Artificial Sequence: Synthetic oligonucleotide
cggaacuuugcucccguga

SEQ ID NO: 1703300 - RNA, 19 nt, Artificial Sequence
  Description of Artificial Sequence: Synthetic oligonucleotide
ggccccgucagggucagaa

SEQ ID NO: 1703301 - RNA, 19 nt, Artificial Sequence
  Description of Artificial Sequence: Synthetic oligonucleotide
cugcaacuuugccuugagu

SEQ ID NO: 1703302 - RNA, 19 nt, Artificial Sequence
  Description of Artificial Sequence: Synthetic oligonucleotide
gucagcuggaacacauauu

SEQ ID NO: 1703303 - RNA, 19 nt, Artificial Sequence
  Description of Artificial Sequence: Synthetic oligonucleotide
cccugucacugcugucugc

SEQ ID NO: 1703304 - RNA, 19 nt, Artificial Sequence
  Description of Artificial Sequence: Synthetic oligonucleotide
ggagcuguucugggcccgc

SEQ ID NO: 1703305 - RNA, 19 nt, Artificial Sequence
  Description of Artificial Sequence: Synthetic oligonucleotide
cacucuccaggcuguaguu

SEQ ID NO: 1703306 - RNA, 19 nt, Artificial Sequence
  Description of Artificial Sequence: Synthetic oligonucleotide
cgaauugggccaggcuggg

SEQ ID NO: 1703307 - RNA, 19 nt, Artificial Sequence
  Description of Artificial Sequence: Synthetic oligonucleotide
cccgcacgcgguguacucg

SEQ ID NO: 1703308 - RNA, 19 nt, Artificial Sequence
  Description of Artificial Sequence: Synthetic oligonucleotide
gcacgcgguguacucgcuc

SEQ ID NO: 1703309 - RNA, 19 nt, Artificial Sequence
  Description of Artificial Sequence: Synthetic oligonucleotide
gccuuuucauccugggguu

SEQ ID NO: 1703310 - RNA, 19 nt, Artificial Sequence
  Description of Artificial Sequence: Synthetic oligonucleotide
caaagacgaagggcuugua

SEQ ID NO: 1703311 - RNA, 19 nt, Artificial Sequence
  Description of Artificial Sequence: Synthetic oligonucleotide
gcccuucggccuuuucauc

SEQ ID NO: 1703312 - RNA, 19 nt, Artificial Sequence
  Description of Artificial Sequence: Synthetic oligonucleotide
acacccgccgacggcucaa

SEQ ID NO: 1703313 - RNA, 19 nt, Artificial Sequence
  Description of Artificial Sequence: Synthetic oligonucleotide
gccagcgugggcccauaaa

SEQ ID NO: 1703314 - RNA, 19 nt, Artificial Sequence
  Description of Artificial Sequence: Synthetic oligonucleotide
gggccgaauugggccaggc

SEQ ID NO: 1703315 - RNA, 19 nt, Artificial Sequence
  Description of Artificial Sequence: Synthetic oligonucleotide
ggcuuccgucucacuguag

SEQ ID NO: 1703316 - RNA, 19 nt, Artificial Sequence
  Description of Artificial Sequence: Synthetic oligonucleotide
gggcccgcaucccucccca

SEQ ID NO: 1703317 - RNA, 19 nt, Artificial Sequence
  Description of Artificial Sequence: Synthetic oligonucleotide
cagcucccggcaggacacc

SEQ ID NO: 1703318 - RNA, 19 nt, Artificial Sequence
  Description of Artificial Sequence: Synthetic oligonucleotide
cgcucauugagaugagggu

SEQ ID NO: 1703319 - RNA, 19 nt, Artificial Sequence
  Description of Artificial Sequence: Synthetic oligonucleotide
ggccgaauugggccaggcu

SEQ ID NO: 1703320 - RNA, 19 nt, Artificial Sequence
  Description of Artificial Sequence: Synthetic oligonucleotide
ggggccgaauugggccagg

SEQ ID NO: 1703321 - RNA, 19 nt, Artificial Sequence
  Description of Artificial Sequence: Synthetic oligonucleotide
cgguguacucgcucauuga

SEQ ID NO: 1703322 - RNA, 19 nt, Artificial Sequence
  Description of Artificial Sequence: Synthetic oligonucleotide
gggugaugugucacuccaa

SEQ ID NO: 1703323 - RNA, 19 nt, Artificial Sequence
  Description of Artificial Sequence: Synthetic oligonucleotide
gccacaccuuuugauuucu

SEQ ID NO: 1703324 - RNA, 19 nt, Artificial Sequence
  Description of Artificial Sequence: Synthetic oligonucleotide
cacccgccgacggcucaac

SEQ ID NO: 1703325 - RNA, 19 nt, Artificial Sequence
  Description of Artificial Sequence: Synthetic oligonucleotide
gaccaaggaugggacucuu

SEQ ID NO: 1703326 - RNA, 19 nt, Artificial Sequence
  Description of Artificial Sequence: Synthetic oligonucleotide
gcccgcacgcgguguacuc

SEQ ID NO: 1703327 - RNA, 19 nt, Artificial Sequence
  Description of Artificial Sequence: Synthetic oligonucleotide
ccacguggcugcaaauccu

SEQ ID NO: 1703328 - RNA, 19 nt, Artificial Sequence
  Description of Artificial Sequence: Synthetic oligonucleotide
ccgacggcucaaccucgug

SEQ ID NO: 1703329 - RNA, 19 nt, Artificial Sequence
  Description of Artificial Sequence: Synthetic oligonucleotide
acgcacccacaugcucaga

SEQ ID NO: 1703330 - RNA, 19 nt, Artificial Sequence
  Description of Artificial Sequence: Synthetic oligonucleotide
gggucacgguuucgacgca

SEQ ID NO: 1703331 - RNA, 19 nt, Artificial Sequence
  Description of Artificial Sequence: Synthetic oligonucleotide
ggcccgcaucccuccccag

SEQ ID NO: 1703332 - RNA, 19 nt, Artificial Sequence
  Description of Artificial Sequence: Synthetic oligonucleotide
cuucggcuuccgucucacu

SEQ ID NO: 1703333 - RNA, 19 nt, Artificial Sequence
  Description of Artificial Sequence: Synthetic oligonucleotide
ccacuggcggaacuuugcu

SEQ ID NO: 1703334 - RNA, 19 nt, Artificial Sequence
  Description of Artificial Sequence: Synthetic oligonucleotide
ggcugggaggggccccguc

SEQ ID NO: 1703335 - RNA, 19 nt, Artificial Sequence
  Description of Artificial Sequence: Synthetic oligonucleotide
cggcaggacacccgccgac

SEQ ID NO: 1703336 - RNA, 19 nt, Artificial Sequence
  Description of Artificial Sequence: Synthetic oligonucleotide
cccgccgacggcucaaccu

SEQ ID NO: 1703337 - RNA, 19 nt, Artificial Sequence
  Description of Artificial Sequence: Synthetic oligonucleotide
ccggccacguggcugcaaa

SEQ ID NO: 1703338 - RNA, 19 nt, Artificial Sequence
  Description of Artificial Sequence: Synthetic oligonucleotide
gggucagcuggaacacaua

SEQ ID NO: 1703339 - RNA, 19 nt, Artificial Sequence
  Description of Artificial Sequence: Synthetic oligonucleotide
cguggccacaccuuuugau

SEQ ID NO: 1703340 - RNA, 19 nt, Artificial Sequence
  Description of Artificial Sequence: Synthetic oligonucleotide
ggucacgguuucgacgcau

SEQ ID NO: 1703341 - RNA, 19 nt, Artificial Sequence
  Description of Artificial Sequence: Synthetic oligonucleotide
gagcgggacccagcuuccu

SEQ ID NO: 1703342 - RNA, 19 nt, Artificial Sequence
  Description of Artificial Sequence: Synthetic oligonucleotide
cccgcaucccuccccaggu

SEQ ID NO: 1703343 - RNA, 19 nt, Artificial Sequence
  Description of Artificial Sequence: Synthetic oligonucleotide
ggacacccgccgacggcuc

SEQ ID NO: 1703344 - RNA, 19 nt, Artificial Sequence
  Description of Artificial Sequence: Synthetic oligonucleotide
ccacgggugaugugucacu

SEQ ID NO: 1703345 - RNA, 19 nt, Artificial Sequence
  Description of Artificial Sequence: Synthetic oligonucleotide
ccggcaggacacccgccga

SEQ ID NO: 1703346 - RNA, 19 nt, Artificial Sequence
  Description of Artificial Sequence: Synthetic oligonucleotide
ccgugagaucagggucacc

SEQ ID NO: 1703347 - RNA, 19 nt, Artificial Sequence
  Description of Artificial Sequence: Synthetic oligonucleotide
caggagguuggaggauguu

SEQ ID NO: 1703348 - RNA, 19 nt, Artificial Sequence
  Description of Artificial Sequence: Synthetic oligonucleotide
gcucaaccucguggccaca

SEQ ID NO: 1703349 - RNA, 19 nt, Artificial Sequence
  Description of Artificial Sequence: Synthetic oligonucleotide
cagugcccgcacgcggugu

SEQ ID NO: 1703350 - RNA, 19 nt, Artificial Sequence
  Description of Artificial Sequence: Synthetic oligonucleotide
gcugagcgggacccagcuu

SEQ ID NO: 1703351 - RNA, 19 nt, Artificial Sequence
  Description of Artificial Sequence: Synthetic oligonucleotide
cggcuuccgucucacugua

SEQ ID NO: 1703352 - RNA, 19 nt, Artificial Sequence
  Description of Artificial Sequence: Synthetic oligonucleotide
ccucguggccacaccuuuu

SEQ ID NO: 1703353 - RNA, 19 nt, Artificial Sequence
  Description of Artificial Sequence: Synthetic oligonucleotide
gccgacggcucaaccucgu

SEQ ID NO: 1703354 - RNA, 19 nt, Artificial Sequence
  Description of Artificial Sequence: Synthetic oligonucleotide
cccggccuggagucuggua

SEQ ID NO: 1703355 - RNA, 19 nt, Artificial Sequence
  Description of Artificial Sequence: Synthetic oligonucleotide
ccgcaucccuccccaggua

SEQ ID NO: 1703356 - RNA, 19 nt, Artificial Sequence
  Description of Artificial Sequence: Synthetic oligonucleotide
cgggacccagcuuccucgu

SEQ ID NO: 1703357 - RNA, 19 nt, Artificial Sequence
  Description of Artificial Sequence: Synthetic oligonucleotide
ggcgccagcgugggcccau

SEQ ID NO: 1703358 - RNA, 19 nt, Artificial Sequence
  Description of Artificial Sequence: Synthetic oligonucleotide
cgcacgcgguguacucgcu

SEQ ID NO: 1703359 - RNA, 19 nt, Artificial Sequence
  Description of Artificial Sequence: Synthetic oligonucleotide
gcgccagcgugggcccaua

SEQ ID NO: 1703360 - RNA, 19 nt, Artificial Sequence
  Description of Artificial Sequence: Synthetic oligonucleotide
gcccggccuggagucuggu

SEQ ID NO: 1703361 - RNA, 19 nt, Artificial Sequence
  Description of Artificial Sequence: Synthetic oligonucleotide
cgcgguguacucgcucauu

SEQ ID NO: 1703362 - RNA, 19 nt, Artificial Sequence
  Description of Artificial Sequence: Synthetic oligonucleotide
gggccccgucagggucaga

SEQ ID NO: 1703363 - RNA, 19 nt, Artificial Sequence
  Description of Artificial Sequence: Synthetic oligonucleotide
auaauagacacacuuauug

SEQ ID NO: 1703364 - RNA, 19 nt, Artificial Sequence
  Description of Artificial Sequence: Synthetic oligonucleotide
guagaugaaguccacaugg

SEQ ID NO: 1703365 - RNA, 19 nt, Artificial Sequence
  Description of Artificial Sequence: Synthetic oligonucleotide
aaucccacacuccugcugc

SEQ ID NO: 1703366 - RNA, 19 nt, Artificial Sequence
  Description of Artificial Sequence: Synthetic oligonucleotide
uuauugcgcagccagagag

SEQ ID NO: 1703367 - RNA, 19 nt, Artificial Sequence
  Description of Artificial Sequence: Synthetic oligonucleotide
aauauuucggggccggaag

SEQ ID NO: 1703368 - RNA, 19 nt, Artificial Sequence
  Description of Artificial Sequence: Synthetic oligonucleotide
uguuccaggaccgaaaucc

SEQ ID NO: 1703369 - RNA, 19 nt, Artificial Sequence
  Description of Artificial Sequence: Synthetic oligonucleotide
ugauaauagacacacuuau

SEQ ID NO: 1703370 - RNA, 19 nt, Artificial Sequence
  Description of Artificial Sequence: Synthetic oligonucleotide
ucauccuuauguauaacug

SEQ ID NO: 1703371 - RNA, 19 nt, Artificial Sequence
  Description of Artificial Sequence: Synthetic oligonucleotide
uaauagacacacuuauugc

SEQ ID NO: 1703372 - RNA, 19 nt, Artificial Sequence
  Description of Artificial Sequence: Synthetic oligonucleotide
cuggauaauauuucggggc

SEQ ID NO: 1703373 - RNA, 19 nt, Artificial Sequence
  Description of Artificial Sequence: Synthetic oligonucleotide
uggauuccuacaauguggg

SEQ ID NO: 1703374 - RNA, 19 nt, Artificial Sequence
  Description of Artificial Sequence: Synthetic oligonucleotide
ucaggaugugauaauagac

SEQ ID NO: 1703375 - RNA, 19 nt, Artificial Sequence
  Description of Artificial Sequence: Synthetic oligonucleotide
cauaacuccauaucucucc

SEQ ID NO: 1703376 - RNA, 19 nt, Artificial Sequence
  Description of Artificial Sequence: Synthetic oligonucleotide
ugugcguccaaauaucuga

SEQ ID NO: 1703377 - RNA, 19 nt, Artificial Sequence
  Description of Artificial Sequence: Synthetic oligonucleotide
uggauaauauuucggggcc

SEQ ID NO: 1703378 - RNA, 19 nt, Artificial Sequence
  Description of Artificial Sequence: Synthetic oligonucleotide
cuggauuccuacaaugugg

SEQ ID NO: 1703379 - RNA, 19 nt, Artificial Sequence
  Description of Artificial Sequence: Synthetic oligonucleotide
gauuccuacaauguggggc

SEQ ID NO: 1703380 - RNA, 19 nt, Artificial Sequence
  Description of Artificial Sequence: Synthetic oligonucleotide
cuuauguauaacugcacug

SEQ ID NO: 1703381 - RNA, 19 nt, Artificial Sequence
  Description of Artificial Sequence: Synthetic oligonucleotide
aacuugugcguccaaauau

SEQ ID NO: 1703382 - RNA, 19 nt, Artificial Sequence
  Description of Artificial Sequence: Synthetic oligonucleotide
auagacacacuuauugcgc

SEQ ID NO: 1703383 - RNA, 19 nt, Artificial Sequence
  Description of Artificial Sequence: Synthetic oligonucleotide
acacuuauugcgcagccag

SEQ ID NO: 1703384 - RNA, 19 nt, Artificial Sequence
  Description of Artificial Sequence: Synthetic oligonucleotide
caaagcugcgcaaugcacg

SEQ ID NO: 1703385 - RNA, 19 nt, Artificial Sequence
  Description of Artificial Sequence: Synthetic oligonucleotide
ugggcauaacuccauaucu

SEQ ID NO: 1703386 - RNA, 19 nt, Artificial Sequence
  Description of Artificial Sequence: Synthetic oligonucleotide
uucauuggauaguagagau

SEQ ID NO: 1703387 - RNA, 19 nt, Artificial Sequence
  Description of Artificial Sequence: Synthetic oligonucleotide
ugcgcuggauaauauuucg

SEQ ID NO: 1703388 - RNA, 19 nt, Artificial Sequence
  Description of Artificial Sequence: Synthetic oligonucleotide
ucuggcaucuugcgcaacg

SEQ ID NO: 1703389 - RNA, 19 nt, Artificial Sequence
  Description of Artificial Sequence: Synthetic oligonucleotide
aggucgaggaaccaacgac

SEQ ID NO: 1703390 - RNA, 19 nt, Artificial Sequence
  Description of Artificial Sequence: Synthetic oligonucleotide
gauaauauuucggggccgg

SEQ ID NO: 1703391 - RNA, 19 nt, Artificial Sequence
  Description of Artificial Sequence: Synthetic oligonucleotide
ugcacauggcgaaaacggg

SEQ ID NO: 1703392 - RNA, 19 nt, Artificial Sequence
  Description of Artificial Sequence: Synthetic oligonucleotide
auaguggacgaagaugcgc

SEQ ID NO: 1703393 - RNA, 19 nt, Artificial Sequence
  Description of Artificial Sequence: Synthetic oligonucleotide
uuagccagguccaaagggu

SEQ ID NO: 1703394 - RNA, 19 nt, Artificial Sequence
  Description of Artificial Sequence: Synthetic oligonucleotide
ugagcaugggguaacuugu

SEQ ID NO: 1703395 - RNA, 19 nt, Artificial Sequence
  Description of Artificial Sequence: Synthetic oligonucleotide
auuccuacaauguggggcu

SEQ ID NO: 1703396 - RNA, 19 nt, Artificial Sequence
  Description of Artificial Sequence: Synthetic oligonucleotide
cacuccuugaauauuccag

SEQ ID NO: 1703397 - RNA, 19 nt, Artificial Sequence
  Description of Artificial Sequence: Synthetic oligonucleotide
agcuucauuggauaguaga

SEQ ID NO: 1703398 - RNA, 19 nt, Artificial Sequence
  Description of Artificial Sequence: Synthetic oligonucleotide
aaacggggccuucugucac

SEQ ID NO: 1703399 - RNA, 19 nt, Artificial Sequence
  Description of Artificial Sequence: Synthetic oligonucleotide
aaagcugcgcaaugcacgu

SEQ ID NO: 1703400 - RNA, 19 nt, Artificial Sequence
  Description of Artificial Sequence: Synthetic oligonucleotide
auauucuugaagcggguga

SEQ ID NO: 1703401 - RNA, 19 nt, Artificial Sequence
  Description of Artificial Sequence: Synthetic oligonucleotide
ggguugauauucuugaagc

SEQ ID NO: 1703402 - RNA, 19 nt, Artificial Sequence
  Description of Artificial Sequence: Synthetic oligonucleotide
gagauuccauucuucuggg

SEQ ID NO: 1703403 - RNA, 19 nt, Artificial Sequence
  Description of Artificial Sequence: Synthetic oligonucleotide
agcaugggguaacuugugc

SEQ ID NO: 1703404 - RNA, 19 nt, Artificial Sequence
  Description of Artificial Sequence: Synthetic oligonucleotide
cacacugugcuccucaaag

SEQ ID NO: 1703405 - RNA, 19 nt, Artificial Sequence
  Description of Artificial Sequence: Synthetic oligonucleotide
acacugugcuccucaaagc

SEQ ID NO: 1703406 - RNA, 19 nt, Artificial Sequence
  Description of Artificial Sequence: Synthetic oligonucleotide
ugggauuuccucuacuuuc

SEQ ID NO: 1703407 - RNA, 19 nt, Artificial Sequence
  Description of Artificial Sequence: Synthetic oligonucleotide
acacacuuauugcgcagcc

SEQ ID NO: 1703408 - RNA, 19 nt, Artificial Sequence
  Description of Artificial Sequence: Synthetic oligonucleotide
uauugcgcagccagagagg

SEQ ID NO: 1703409 - RNA, 19 nt, Artificial Sequence
  Description of Artificial Sequence: Synthetic oligonucleotide
aaaucccacacuccugcug

SEQ ID NO: 1703410 - RNA, 19 nt, Artificial Sequence
  Description of Artificial Sequence: Synthetic oligonucleotide
aguacugcagaugcuuccc

SEQ ID NO: 1703411 - RNA, 19 nt, Artificial Sequence
  Description of Artificial Sequence: Synthetic oligonucleotide
ccuugaauauuccaggucc

SEQ ID NO: 1703412 - RNA, 19 nt, Artificial Sequence
  Description of Artificial Sequence: Synthetic oligonucleotide
aacgcuagguagaugaagu

SEQ ID NO: 1703413 - RNA, 19 nt, Artificial Sequence
  Description of Artificial Sequence: Synthetic oligonucleotide
aaccaacgacacgucaucc

SEQ ID NO: 1703414 - RNA, 19 nt, Artificial Sequence
  Description of Artificial Sequence: Synthetic oligonucleotide
uaguggacgaagaugcgcu

SEQ ID NO: 1703415 - RNA, 19 nt, Artificial Sequence
  Description of Artificial Sequence: Synthetic oligonucleotide
gauuggguuggucuccugc

SEQ ID NO: 1703416 - RNA, 19 nt, Artificial Sequence
  Description of Artificial Sequence: Synthetic oligonucleotide
uucguggagaacugggacc

SEQ ID NO: 1703417 - RNA, 19 nt, Artificial Sequence
  Description of Artificial Sequence: Synthetic oligonucleotide
aaugcacguaagaagcuug

SEQ ID NO: 1703418 - RNA, 19 nt, Artificial Sequence
  Description of Artificial Sequence: Synthetic oligonucleotide
uuggauaguagagauucca

SEQ ID NO: 1703419 - RNA, 19 nt, Artificial Sequence
  Description of Artificial Sequence: Synthetic oligonucleotide
uggauaguggacgaagaug

SEQ ID NO: 1703420 - RNA, 19 nt, Artificial Sequence
  Description of Artificial Sequence: Synthetic oligonucleotide
uuguacacugacagguccc

SEQ ID NO: 1703421 - RNA, 19 nt, Artificial Sequence
  Description of Artificial Sequence: Synthetic oligonucleotide
aagcccuggauccacuuga

SEQ ID NO: 1703422 - RNA, 19 nt, Artificial Sequence
  Description of Artificial Sequence: Synthetic oligonucleotide
aacuugagcaugggguaac

SEQ ID NO: 1703423 - RNA, 19 nt, Artificial Sequence
  Description of Artificial Sequence: Synthetic oligonucleotide
accgaaaucccacacuccu

SEQ ID NO: 1703424 - RNA, 19 nt, Artificial Sequence
  Description of Artificial Sequence: Synthetic oligonucleotide
cagaucagcucucaggaug

SEQ ID NO: 1703425 - RNA, 19 nt, Artificial Sequence
  Description of Artificial Sequence: Synthetic oligonucleotide
ucaaagcugcgcaaugcac

SEQ ID NO: 1703426 - RNA, 19 nt, Artificial Sequence
  Description of Artificial Sequence: Synthetic oligonucleotide
caggaugugauaauagaca

SEQ ID NO: 1703427 - RNA, 19 nt, Artificial Sequence
  Description of Artificial Sequence: Synthetic oligonucleotide
cacauggcgaaaacggggc

SEQ ID NO: 1703428 - RNA, 19 nt, Artificial Sequence
  Description of Artificial Sequence: Synthetic oligonucleotide
gaaaacggggccuucuguc

SEQ ID NO: 1703429 - RNA, 19 nt, Artificial Sequence
  Description of Artificial Sequence: Synthetic oligonucleotide
agguuguacacugacaggu

SEQ ID NO: 1703430 - RNA, 19 nt, Artificial Sequence
  Description of Artificial Sequence: Synthetic oligonucleotide
uugggcauaacuccauauc

SEQ ID NO: 1703431 - RNA, 19 nt, Artificial Sequence
  Description of Artificial Sequence: Synthetic oligonucleotide
aggguagggguugauauuc

SEQ ID NO: 1703432 - RNA, 19 nt, Artificial Sequence
  Description of Artificial Sequence: Synthetic oligonucleotide
ugaauauuccagguccagc

SEQ ID NO: 1703433 - RNA, 19 nt, Artificial Sequence
  Description of Artificial Sequence: Synthetic oligonucleotide
cuugcgcaacgcuagguag

SEQ ID NO: 1703434 - RNA, 19 nt, Artificial Sequence
  Description of Artificial Sequence: Synthetic oligonucleotide
uguacacugacaggucccg

SEQ ID NO: 1703435 - RNA, 19 nt, Artificial Sequence
  Description of Artificial Sequence: Synthetic oligonucleotide
acaggguagggguugauau

SEQ ID NO: 1703436 - RNA, 19 nt, Artificial Sequence
  Description of Artificial Sequence: Synthetic oligonucleotide
uucuugaagcgggugagcc

SEQ ID NO: 1703437 - RNA, 19 nt, Artificial Sequence
  Description of Artificial Sequence: Synthetic oligonucleotide
acgaagaugcgcuggauaa

SEQ ID NO: 1703438 - RNA, 19 nt, Artificial Sequence
  Description of Artificial Sequence: Synthetic oligonucleotide
agguagaugaaguccacau

SEQ ID NO: 1703439 - RNA, 19 nt, Artificial Sequence
  Description of Artificial Sequence: Synthetic oligonucleotide
gcuggauaauauuucgggg

SEQ ID NO: 1703440 - RNA, 19 nt, Artificial Sequence
  Description of Artificial Sequence: Synthetic oligonucleotide
ucuucguggagaacuggga

SEQ ID NO: 1703441 - RNA, 19 nt, Artificial Sequence
  Description of Artificial Sequence: Synthetic oligonucleotide
uagacacacuuauugcgca

SEQ ID NO: 1703442 - RNA, 19 nt, Artificial Sequence
  Description of Artificial Sequence: Synthetic oligonucleotide
acauggcgaaaacggggcc

SEQ ID NO: 1703443 - RNA, 19 nt, Artificial Sequence
  Description of Artificial Sequence: Synthetic oligonucleotide
caugcacauggcgaaaacg

SEQ ID NO: 1703444 - RNA, 19 nt, Artificial Sequence
  Description of Artificial Sequence: Synthetic oligonucleotide
auaacuccauaucucucca

SEQ ID NO: 1703445 - RNA, 19 nt, Artificial Sequence
  Description of Artificial Sequence: Synthetic oligonucleotide
uccacuugaccaguguugc

SEQ ID NO: 1703446 - RNA, 19 nt, Artificial Sequence
  Description of Artificial Sequence: Synthetic oligonucleotide
uccccaguugcugauggcg

SEQ ID NO: 1703447 - RNA, 19 nt, Artificial Sequence
  Description of Artificial Sequence: Synthetic oligonucleotide
ggcgaaauaccacagggac

SEQ ID NO: 1703448 - RNA, 19 nt, Artificial Sequence
  Description of Artificial Sequence: Synthetic oligonucleotide
uggauaguagagauuccau

SEQ ID NO: 1703449 - RNA, 19 nt, Artificial Sequence
  Description of Artificial Sequence: Synthetic oligonucleotide
aacgacacgucauccuuau

SEQ ID NO: 1703450 - RNA, 19 nt, Artificial Sequence
  Description of Artificial Sequence: Synthetic oligonucleotide
auuggauaguagagauucc

SEQ ID NO: 1703451 - RNA, 19 nt, Artificial Sequence
  Description of Artificial Sequence: Synthetic oligonucleotide
ucgaggaaccaacgacacg

SEQ ID NO: 1703452 - RNA, 19 nt, Artificial Sequence
  Description of Artificial Sequence: Synthetic oligonucleotide
guauaacugcacugcagug

SEQ ID NO: 1703453 - RNA, 19 nt, Artificial Sequence
  Description of Artificial Sequence: Synthetic oligonucleotide
agggaaagggcccucgaca

SEQ ID NO: 1703454 - RNA, 19 nt, Artificial Sequence
  Description of Artificial Sequence: Synthetic oligonucleotide
acuugugcguccaaauauc

SEQ ID NO: 1703455 - RNA, 19 nt, Artificial Sequence
  Description of Artificial Sequence: Synthetic oligonucleotide
ugggagaaccgugggaggg

SEQ ID NO: 1703456 - RNA, 19 nt, Artificial Sequence
  Description of Artificial Sequence: Synthetic oligonucleotide
gcuuagcuuagccaggucc

SEQ ID NO: 1703457 - RNA, 19 nt, Artificial Sequence
  Description of Artificial Sequence: Synthetic oligonucleotide
auuggguuggucuccugca

SEQ ID NO: 1703458 - RNA, 19 nt, Artificial Sequence
  Description of Artificial Sequence: Synthetic oligonucleotide
ugauauucuugaagcgggu

SEQ ID NO: 1703459 - RNA, 19 nt, Artificial Sequence
  Description of Artificial Sequence: Synthetic oligonucleotide
uugugcguccaaauaucug

SEQ ID NO: 1703460 - RNA, 19 nt, Artificial Sequence
  Description of Artificial Sequence: Synthetic oligonucleotide
ugcgcaaugcacguaagaa

SEQ ID NO: 1703461 - RNA, 19 nt, Artificial Sequence
  Description of Artificial Sequence: Synthetic oligonucleotide
aguguugccuggucauggg

SEQ ID NO: 1703462 - RNA, 19 nt, Artificial Sequence
  Description of Artificial Sequence: Synthetic oligonucleotide
cuugaagcgggugagccac

SEQ ID NO: 1703463 - RNA, 19 nt, Artificial Sequence
  Description of Artificial Sequence: Synthetic oligonucleotide
cuucguggagaacugggac

SEQ ID NO: 1703464 - RNA, 19 nt, Artificial Sequence
  Description of Artificial Sequence: Synthetic oligonucleotide
uggcgugaacaguucuucg

SEQ ID NO: 1703465 - RNA, 19 nt, Artificial Sequence
  Description of Artificial Sequence: Synthetic oligonucleotide
gggguugauauucuugaag

SEQ ID NO: 1703466 - RNA, 19 nt, Artificial Sequence
  Description of Artificial Sequence: Synthetic oligonucleotide
gaaccaacgacacgucauc

SEQ ID NO: 1703467 - RNA, 19 nt, Artificial Sequence
  Description of Artificial Sequence: Synthetic oligonucleotide
gcaugggguaacuugugcg

SEQ ID NO: 1703468 - RNA, 19 nt, Artificial Sequence
  Description of Artificial Sequence: Synthetic oligonucleotide
ugggaucugugccugugga

SEQ ID NO: 1703469 - RNA, 19 nt, Artificial Sequence
  Description of Artificial Sequence: Synthetic oligonucleotide
ugauggcgugaacaguucu

SEQ ID NO: 1703470 - RNA, 19 nt, Artificial Sequence
  Description of Artificial Sequence: Synthetic oligonucleotide
auauuucggggccggaaga

SEQ ID NO: 1703471 - RNA, 19 nt, Artificial Sequence
  Description of Artificial Sequence: Synthetic oligonucleotide
auggcgugaacaguucuuc

SEQ ID NO: 1703472 - RNA, 19 nt, Artificial Sequence
  Description of Artificial Sequence: Synthetic oligonucleotide
caguacugcagaugcuucc

SEQ ID NO: 1703473 - RNA, 19 nt, Artificial Sequence
  Description of Artificial Sequence: Synthetic oligonucleotide
agacacacuuauugcgcag

SEQ ID NO: 1703474 - RNA, 19 nt, Artificial Sequence
  Description of Artificial Sequence: Synthetic oligonucleotide
acguaagaagcuugccuug

SEQ ID NO: 1703475 - RNA, 19 nt, Artificial Sequence
  Description of Artificial Sequence: Synthetic oligonucleotide
cgcaaugcacguaagaagc

SEQ ID NO: 1703476 - RNA, 19 nt, Artificial Sequence
  Description of Artificial Sequence: Synthetic oligonucleotide
cugguagacagugaccuug

SEQ ID NO: 1703477 - RNA, 19 nt, Artificial Sequence
  Description of Artificial Sequence: Synthetic oligonucleotide
acgcuagguagaugaaguc

SEQ ID NO: 1703478 - RNA, 19 nt, Artificial Sequence
  Description of Artificial Sequence: Synthetic oligonucleotide
ugcacugcaguggaggccu

SEQ ID NO: 1703479 - RNA, 19 nt, Artificial Sequence
  Description of Artificial Sequence: Synthetic oligonucleotide
ucuugaagcgggugagcca

SEQ ID NO: 1703480 - RNA, 19 nt, Artificial Sequence
  Description of Artificial Sequence: Synthetic oligonucleotide
gagguugucagcagcuccc

SEQ ID NO: 1703481 - RNA, 19 nt, Artificial Sequence
  Description of Artificial Sequence: Synthetic oligonucleotide
augcacguaagaagcuugc

SEQ ID NO: 1703482 - RNA, 19 nt, Artificial Sequence
  Description of Artificial Sequence: Synthetic oligonucleotide
uaguagagauuccauucuu

SEQ ID NO: 1703483 - RNA, 19 nt, Artificial Sequence
  Description of Artificial Sequence: Synthetic oligonucleotide
auguauaacugcacugcag

SEQ ID NO: 1703484 - RNA, 19 nt, Artificial Sequence
  Description of Artificial Sequence: Synthetic oligonucleotide
uggacgaagaugcgcugga

SEQ ID NO: 1703485 - RNA, 19 nt, Artificial Sequence
  Description of Artificial Sequence: Synthetic oligonucleotide
gacacacuuauugcgcagc

SEQ ID NO: 1703486 - RNA, 19 nt, Artificial Sequence
  Description of Artificial Sequence: Synthetic oligonucleotide
uugcgcaacgcuagguaga

SEQ ID NO: 1703487 - RNA, 19 nt, Artificial Sequence
  Description of Artificial Sequence: Synthetic oligonucleotide
ugggcaccagccaugcaca

SEQ ID NO: 1703488 - RNA, 19 nt, Artificial Sequence
  Description of Artificial Sequence: Synthetic oligonucleotide
ucguggagaacugggaccu

SEQ ID NO: 1703489 - RNA, 19 nt, Artificial Sequence
  Description of Artificial Sequence: Synthetic oligonucleotide
guagggguugauauucuug

SEQ ID NO: 1703490 - RNA, 19 nt, Artificial Sequence
  Description of Artificial Sequence: Synthetic oligonucleotide
ugcgcagccagagagggaa

SEQ ID NO: 1703491 - RNA, 19 nt, Artificial Sequence
  Description of Artificial Sequence: Synthetic oligonucleotide
agguccaaaggguccuggg

SEQ ID NO: 1703492 - RNA, 19 nt, Artificial Sequence
  Description of Artificial Sequence: Synthetic oligonucleotide
gggcaaagacaucugguag

SEQ ID NO: 1703493 - RNA, 19 nt, Artificial Sequence
  Description of Artificial Sequence: Synthetic oligonucleotide
uaauauuucggggccggaa

SEQ ID NO: 1703494 - RNA, 19 nt, Artificial Sequence
  Description of Artificial Sequence: Synthetic oligonucleotide
cuccauaucucuccaucug

SEQ ID NO: 1703495 - RNA, 19 nt, Artificial Sequence
  Description of Artificial Sequence: Synthetic oligonucleotide
agcuugcugaucaggacuc

SEQ ID NO: 1703496 - RNA, 19 nt, Artificial Sequence
  Description of Artificial Sequence: Synthetic oligonucleotide
gguagaugaaguccacaug

SEQ ID NO: 1703497 - RNA, 19 nt, Artificial Sequence
  Description of Artificial Sequence: Synthetic oligonucleotide
ggagucacugggcaaagac

SEQ ID NO: 1703498 - RNA, 19 nt, Artificial Sequence
  Description of Artificial Sequence: Synthetic oligonucleotide
uccuacaauguggggcugg

SEQ ID NO: 1703499 - RNA, 19 nt, Artificial Sequence
  Description of Artificial Sequence: Synthetic oligonucleotide
accaacgacacgucauccu

SEQ ID NO: 1703500 - RNA, 19 nt, Artificial Sequence
  Description of Artificial Sequence: Synthetic oligonucleotide
uccacauggccacgcuugc

SEQ ID NO: 1703501 - RNA, 19 nt, Artificial Sequence
  Description of Artificial Sequence: Synthetic oligonucleotide
cuucauuggauaguagaga

SEQ ID NO: 1703502 - RNA, 19 nt, Artificial Sequence
  Description of Artificial Sequence: Synthetic oligonucleotide
caggacucuggauuccuac

SEQ ID NO: 1703503 - RNA, 19 nt, Artificial Sequence
  Description of Artificial Sequence: Synthetic oligonucleotide
cugccguggauaguggacg

SEQ ID NO: 1703504 - RNA, 19 nt, Artificial Sequence
  Description of Artificial Sequence: Synthetic oligonucleotide
ucgcaggcuuagcuuagcc

SEQ ID NO: 1703505 - RNA, 19 nt, Artificial Sequence
  Description of Artificial Sequence: Synthetic oligonucleotide
ugacaggucccgcuccaca

SEQ ID NO: 1703506 - RNA, 19 nt, Artificial Sequence
  Description of Artificial Sequence: Synthetic oligonucleotide
cucgggaggucgaggaacc

SEQ ID NO: 1703507 - RNA, 19 nt, Artificial Sequence
  Description of Artificial Sequence: Synthetic oligonucleotide
caggcuuagcuuagccagg

SEQ ID NO: 1703508 - RNA, 19 nt, Artificial Sequence
  Description of Artificial Sequence: Synthetic oligonucleotide
aggaccgaaaucccacacu

SEQ ID NO: 1703509 - RNA, 19 nt, Artificial Sequence
  Description of Artificial Sequence: Synthetic oligonucleotide
gaaagggcccucgacaaaa

SEQ ID NO: 1703510 - RNA, 19 nt, Artificial Sequence
  Description of Artificial Sequence: Synthetic oligonucleotide
cgcuggauaauauuucggg

SEQ ID NO: 1703511 - RNA, 19 nt, Artificial Sequence
  Description of Artificial Sequence: Synthetic oligonucleotide
uucugggauuuccucuacu

SEQ ID NO: 1703512 - RNA, 19 nt, Artificial Sequence
  Description of Artificial Sequence: Synthetic oligonucleotide
caacgcuagguagaugaag

SEQ ID NO: 1703513 - RNA, 19 nt, Artificial Sequence
  Description of Artificial Sequence: Synthetic oligonucleotide
aggaaccaacgacacguca

SEQ ID NO: 1703514 - RNA, 19 nt, Artificial Sequence
  Description of Artificial Sequence: Synthetic oligonucleotide
agcugcgcaaugcacguaa

SEQ ID NO: 1703515 - RNA, 19 nt, Artificial Sequence
  Description of Artificial Sequence: Synthetic oligonucleotide
ggaccgaaaucccacacuc

SEQ ID NO: 1703516 - RNA, 19 nt, Artificial Sequence
  Description of Artificial Sequence: Synthetic oligonucleotide
gaacucugucucuguguug

SEQ ID NO: 1703517 - RNA, 19 nt, Artificial Sequence
  Description of Artificial Sequence: Synthetic oligonucleotide
gaagaugcgcuggauaaua

SEQ ID NO: 1703518 - RNA, 19 nt, Artificial Sequence
  Description of Artificial Sequence: Synthetic oligonucleotide
ugcacguaagaagcuugcc

SEQ ID NO: 1703519 - RNA, 19 nt, Artificial Sequence
  Description of Artificial Sequence: Synthetic oligonucleotide
gcgcaaugcacguaagaag

SEQ ID NO: 1703520 - RNA, 19 nt, Artificial Sequence
  Description of Artificial Sequence: Synthetic oligonucleotide
guggacgaagaugcgcugg

SEQ ID NO: 1703521 - RNA, 19 nt, Artificial Sequence
  Description of Artificial Sequence: Synthetic oligonucleotide
gaucucggggcacagggua

SEQ ID NO: 1703522 - RNA, 19 nt, Artificial Sequence
  Description of Artificial Sequence: Synthetic oligonucleotide
aucccacacuccugcugcc

SEQ ID NO: 1703523 - RNA, 19 nt, Artificial Sequence
  Description of Artificial Sequence: Synthetic oligonucleotide
cagggaguggcagaucagc

SEQ ID NO: 1703524 - RNA, 19 nt, Artificial Sequence
  Description of Artificial Sequence: Synthetic oligonucleotide
agaucagcucucaggaugu

SEQ ID NO: 1703525 - RNA, 19 nt, Artificial Sequence
  Description of Artificial Sequence: Synthetic oligonucleotide
ugcguccaaauaucugagu

SEQ ID NO: 1703526 - RNA, 19 nt, Artificial Sequence
  Description of Artificial Sequence: Synthetic oligonucleotide
uccgcaggaacuugagcau

SEQ ID NO: 1703527 - RNA, 19 nt, Artificial Sequence
  Description of Artificial Sequence: Synthetic oligonucleotide
accgaacucuggcaucuug

SEQ ID NO: 1703528 - RNA, 19 nt, Artificial Sequence
  Description of Artificial Sequence: Synthetic oligonucleotide
auuucggggccggaagauc

SEQ ID NO: 1703529 - RNA, 19 nt, Artificial Sequence
  Description of Artificial Sequence: Synthetic oligonucleotide
gaggucgaggaaccaacga

SEQ ID NO: 1703530 - RNA, 19 nt, Artificial Sequence
  Description of Artificial Sequence: Synthetic oligonucleotide
gcacauggcgaaaacgggg

SEQ ID NO: 1703531 - RNA, 19 nt, Artificial Sequence
  Description of Artificial Sequence: Synthetic oligonucleotide
gacgaagaugcgcuggaua

SEQ ID NO: 1703532 - RNA, 19 nt, Artificial Sequence
  Description of Artificial Sequence: Synthetic oligonucleotide
uggcaucuugcgcaacgcu

SEQ ID NO: 1703533 - RNA, 19 nt, Artificial Sequence
  Description of Artificial Sequence: Synthetic oligonucleotide
caaacucauaguuguccca

SEQ ID NO: 1703534 - RNA, 19 nt, Artificial Sequence
  Description of Artificial Sequence: Synthetic oligonucleotide
ucucggggcacaggguagg

SEQ ID NO: 1703535 - RNA, 19 nt, Artificial Sequence
  Description of Artificial Sequence: Synthetic oligonucleotide
cacgucauccuuauguaua

SEQ ID NO: 1703536 - RNA, 19 nt, Artificial Sequence
  Description of Artificial Sequence: Synthetic oligonucleotide
guucuucguggagaacugg

SEQ ID NO: 1703537 - RNA, 19 nt, Artificial Sequence
  Description of Artificial Sequence: Synthetic oligonucleotide
agaugcgcuggauaauauu

SEQ ID NO: 1703538 - RNA, 19 nt, Artificial Sequence
  Description of Artificial Sequence: Synthetic oligonucleotide
aguucuucguggagaacug

SEQ ID NO: 1703539 - RNA, 19 nt, Artificial Sequence
  Description of Artificial Sequence: Synthetic oligonucleotide
uggccaggcgaaauaccac

SEQ ID NO: 1703540 - RNA, 19 nt, Artificial Sequence
  Description of Artificial Sequence: Synthetic oligonucleotide
cauccgcaggaacuugagc

SEQ ID NO: 1703541 - RNA, 19 nt, Artificial Sequence
  Description of Artificial Sequence: Synthetic oligonucleotide
caucuugcgcaacgcuagg

SEQ ID NO: 1703542 - RNA, 19 nt, Artificial Sequence
  Description of Artificial Sequence: Synthetic oligonucleotide
gaugcgcuggauaauauuu

SEQ ID NO: 1703543 - RNA, 19 nt, Artificial Sequence
  Description of Artificial Sequence: Synthetic oligonucleotide
aacggggccuucugucacu

SEQ ID NO: 1703544 - RNA, 19 nt, Artificial Sequence
  Description of Artificial Sequence: Synthetic oligonucleotide
guacugcagaugcuucccc

SEQ ID NO: 1703545 - RNA, 19 nt, Artificial Sequence
  Description of Artificial Sequence: Synthetic oligonucleotide
guaagaagcuugccuuguc

SEQ ID NO: 1703546 - RNA, 19 nt, Artificial Sequence
  Description of Artificial Sequence: Synthetic oligonucleotide
agugaccuuggcacugagg

SEQ ID NO: 1703547 - RNA, 19 nt, Artificial Sequence
  Description of Artificial Sequence: Synthetic oligonucleotide
gacuguuccuccagccuug

SEQ ID NO: 1703548 - RNA, 19 nt, Artificial Sequence
  Description of Artificial Sequence: Synthetic oligonucleotide
gaccgaaaucccacacucc

SEQ ID NO: 1703549 - RNA, 19 nt, Artificial Sequence
  Description of Artificial Sequence: Synthetic oligonucleotide
agaaccgugggaggggacu

SEQ ID NO: 1703550 - RNA, 19 nt, Artificial Sequence
  Description of Artificial Sequence: Synthetic oligonucleotide
agauuccauucuucuggga

SEQ ID NO: 1703551 - RNA, 19 nt, Artificial Sequence
  Description of Artificial Sequence: Synthetic oligonucleotide
uauuucggggccggaagau

SEQ ID NO: 1703552 - RNA, 19 nt, Artificial Sequence
  Description of Artificial Sequence: Synthetic oligonucleotide
gugcguccaaauaucugag

SEQ ID NO: 1703553 - RNA, 19 nt, Artificial Sequence
  Description of Artificial Sequence: Synthetic oligonucleotide
acaccgaacucuggcaucu

SEQ ID NO: 1703554 - RNA, 19 nt, Artificial Sequence
  Description of Artificial Sequence: Synthetic oligonucleotide
gcgugaacaguucuucgug

SEQ ID NO: 1703555 - RNA, 19 nt, Artificial Sequence
  Description of Artificial Sequence: Synthetic oligonucleotide
gucgaggaaccaacgacac

SEQ ID NO: 1703556 - RNA, 19 nt, Artificial Sequence
  Description of Artificial Sequence: Synthetic oligonucleotide
caggaccgaaaucccacac

SEQ ID NO: 1703557 - RNA, 19 nt, Artificial Sequence
  Description of Artificial Sequence: Synthetic oligonucleotide
aggccucggaccagcaggc

SEQ ID NO: 1703558 - RNA, 19 nt, Artificial Sequence
  Description of Artificial Sequence: Synthetic oligonucleotide
ugcugccguggauagugga

SEQ ID NO: 1703559 - RNA, 19 nt, Artificial Sequence
  Description of Artificial Sequence: Synthetic oligonucleotide
guaacuugugcguccaaau

SEQ ID NO: 1703560 - RNA, 19 nt, Artificial Sequence
  Description of Artificial Sequence: Synthetic oligonucleotide
gcaucuugcgcaacgcuag

SEQ ID NO: 1703561 - RNA, 19 nt, Artificial Sequence
  Description of Artificial Sequence: Synthetic oligonucleotide
ugccguggauaguggacga

SEQ ID NO: 1703562 - RNA, 19 nt, Artificial Sequence
  Description of Artificial Sequence: Synthetic oligonucleotide
acgcuugcgcacacugugc

SEQ ID NO: 1703563 - RNA, 19 nt, Artificial Sequence
  Description of Artificial Sequence: Synthetic oligonucleotide
ggcauaacuccauaucucu

SEQ ID NO: 1703564 - RNA, 19 nt, Artificial Sequence
  Description of Artificial Sequence: Synthetic oligonucleotide
aagaugcgcuggauaauau

SEQ ID NO: 1703565 - RNA, 19 nt, Artificial Sequence
  Description of Artificial Sequence: Synthetic oligonucleotide
ugcgucgcaggcuuagcuu

SEQ ID NO: 1703566 - RNA, 19 nt, Artificial Sequence
  Description of Artificial Sequence: Synthetic oligonucleotide
uuguggcgggccagggcag

SEQ ID NO: 1703567 - RNA, 19 nt, Artificial Sequence
  Description of Artificial Sequence: Synthetic oligonucleotide
cuuauugcgcagccagaga

SEQ ID NO: 1703568 - RNA, 19 nt, Artificial Sequence
  Description of Artificial Sequence: Synthetic oligonucleotide
uuagcuuagccagguccaa

SEQ ID NO: 1703569 - RNA, 19 nt, Artificial Sequence
  Description of Artificial Sequence: Synthetic oligonucleotide
agagggaaagggcccucga

SEQ ID NO: 1703570 - RNA, 19 nt, Artificial Sequence
  Description of Artificial Sequence: Synthetic oligonucleotide
ggguuggucuccugcaagc

SEQ ID NO: 1703571 - RNA, 19 nt, Artificial Sequence
  Description of Artificial Sequence: Synthetic oligonucleotide
gauaauagacacacuuauu

SEQ ID NO: 1703572 - RNA, 19 nt, Artificial Sequence
  Description of Artificial Sequence: Synthetic oligonucleotide
cuccugcugccguggauag

SEQ ID NO: 1703573 - RNA, 19 nt, Artificial Sequence
  Description of Artificial Sequence: Synthetic oligonucleotide
ccgaacucuggcaucuugc

SEQ ID NO: 1703574 - RNA, 19 nt, Artificial Sequence
  Description of Artificial Sequence: Synthetic oligonucleotide
auaucugagucagcaggaa

SEQ ID NO: 1703575 - RNA, 19 nt, Artificial Sequence
  Description of Artificial Sequence: Synthetic oligonucleotide
cacaccgaacucuggcauc

SEQ ID NO: 1703576 - RNA, 19 nt, Artificial Sequence
  Description of Artificial Sequence: Synthetic oligonucleotide
accugugccaggauugggu

SEQ ID NO: 1703577 - RNA, 19 nt, Artificial Sequence
  Description of Artificial Sequence: Synthetic oligonucleotide
gaaccgugggaggggacug

SEQ ID NO: 1703578 - RNA, 19 nt, Artificial Sequence
  Description of Artificial Sequence: Synthetic oligonucleotide
cacguaagaagcuugccuu

SEQ ID NO: 1703579 - RNA, 19 nt, Artificial Sequence
  Description of Artificial Sequence: Synthetic oligonucleotide
auggauuguggcgggccag

SEQ ID NO: 1703580 - RNA, 19 nt, Artificial Sequence
  Description of Artificial Sequence: Synthetic oligonucleotide
caugggguaacuugugcgu

SEQ ID NO: 1703581 - RNA, 19 nt, Artificial Sequence
  Description of Artificial Sequence: Synthetic oligonucleotide
cuggcaucuugcgcaacgc

SEQ ID NO: 1703582 - RNA, 19 nt, Artificial Sequence
  Description of Artificial Sequence: Synthetic oligonucleotide
gagcaugggguaacuugug

SEQ ID NO: 1703583 - RNA, 19 nt, Artificial Sequence
  Description of Artificial Sequence: Synthetic oligonucleotide
gaacuugagcaugggguaa

SEQ ID NO: 1703584 - RNA, 19 nt, Artificial Sequence
  Description of Artificial Sequence: Synthetic oligonucleotide
aucaggacucuggauuccu

SEQ ID NO: 1703585 - RNA, 19 nt, Artificial Sequence
  Description of Artificial Sequence: Synthetic oligonucleotide
ugugccugaagagcaucau

SEQ ID NO: 1703586 - RNA, 19 nt, Artificial Sequence
  Description of Artificial Sequence: Synthetic oligonucleotide
ugcgcaacgcuagguagau

SEQ ID NO: 1703587 - RNA, 19 nt, Artificial Sequence
  Description of Artificial Sequence: Synthetic oligonucleotide
cugugccugaagagcauca

SEQ ID NO: 1703588 - RNA, 19 nt, Artificial Sequence
  Description of Artificial Sequence: Synthetic oligonucleotide
cgcaacgcuagguagauga

SEQ ID NO: 1703589 - RNA, 19 nt, Artificial Sequence
  Description of Artificial Sequence: Synthetic oligonucleotide
gcgaaauaccacagggacc

SEQ ID NO: 1703590 - RNA, 19 nt, Artificial Sequence
  Description of Artificial Sequence: Synthetic oligonucleotide
ggccaggcgaaauaccaca

SEQ ID NO: 1703591 - RNA, 19 nt, Artificial Sequence
  Description of Artificial Sequence: Synthetic oligonucleotide
cuucauccgcaggaacuug

SEQ ID NO: 1703592 - RNA, 19 nt, Artificial Sequence
  Description of Artificial Sequence: Synthetic oligonucleotide
acuccugcugccguggaua

SEQ ID NO: 1703593 - RNA, 19 nt, Artificial Sequence
  Description of Artificial Sequence: Synthetic oligonucleotide
agggaguggcagaucagcu

SEQ ID NO: 1703594 - RNA, 19 nt, Artificial Sequence
  Description of Artificial Sequence: Synthetic oligonucleotide
ccugcugccguggauagug

SEQ ID NO: 1703595 - RNA, 19 nt, Artificial Sequence
  Description of Artificial Sequence: Synthetic oligonucleotide
cugcugccguggauagugg

SEQ ID NO: 1703596 - RNA, 19 nt, Artificial Sequence
  Description of Artificial Sequence: Synthetic oligonucleotide
cugcacugcaguggaggcc

SEQ ID NO: 1703597 - RNA, 19 nt, Artificial Sequence
  Description of Artificial Sequence: Synthetic oligonucleotide
ccaggauuggguuggucuc

SEQ ID NO: 1703598 - RNA, 19 nt, Artificial Sequence
  Description of Artificial Sequence: Synthetic oligonucleotide
cuguuccaggaccgaaauc

SEQ ID NO: 1703599 - RNA, 19 nt, Artificial Sequence
  Description of Artificial Sequence: Synthetic oligonucleotide
cgugggaggggacuguucc

SEQ ID NO: 1703600 - RNA, 19 nt, Artificial Sequence
  Description of Artificial Sequence: Synthetic oligonucleotide
cacuuauugcgcagccaga

SEQ ID NO: 1703601 - RNA, 19 nt, Artificial Sequence
  Description of Artificial Sequence: Synthetic oligonucleotide
gcgcuggauaauauuucgg

SEQ ID NO: 1703602 - RNA, 19 nt, Artificial Sequence
  Description of Artificial Sequence: Synthetic oligonucleotide
ccuggacaggccucggacc

SEQ ID NO: 1703603 - RNA, 19 nt, Artificial Sequence
  Description of Artificial Sequence: Synthetic oligonucleotide
gggaguggcagaucagcuc

SEQ ID NO: 1703604 - RNA, 19 nt, Artificial Sequence
  Description of Artificial Sequence: Synthetic oligonucleotide
cagcuugcugaucaggacu

SEQ ID NO: 1703605 - RNA, 19 nt, Artificial Sequence
  Description of Artificial Sequence: Synthetic oligonucleotide
aucucggggcacaggguag

SEQ ID NO: 1703606 - RNA, 19 nt, Artificial Sequence
  Description of Artificial Sequence: Synthetic oligonucleotide
gguuggucuccugcaagcc

SEQ ID NO: 1703607 - RNA, 19 nt, Artificial Sequence
  Description of Artificial Sequence: Synthetic oligonucleotide
ggauaguagagauuccauu

SEQ ID NO: 1703608 - RNA, 19 nt, Artificial Sequence
  Description of Artificial Sequence: Synthetic oligonucleotide
gaaauaccacagggaccug

SEQ ID NO: 1703609 - RNA, 19 nt, Artificial Sequence
  Description of Artificial Sequence: Synthetic oligonucleotide
uugcgcagccagagaggga

SEQ ID NO: 1703610 - RNA, 19 nt, Artificial Sequence
  Description of Artificial Sequence: Synthetic oligonucleotide
gacucuggauuccuacaau

SEQ ID NO: 1703611 - RNA, 19 nt, Artificial Sequence
  Description of Artificial Sequence: Synthetic oligonucleotide
agcuccccgguggaccugg

SEQ ID NO: 1703612 - RNA, 19 nt, Artificial Sequence
  Description of Artificial Sequence: Synthetic oligonucleotide
cagccaugcacauggcgaa

SEQ ID NO: 1703613 - RNA, 19 nt, Artificial Sequence
  Description of Artificial Sequence: Synthetic oligonucleotide
cucucaggaugugauaaua

SEQ ID NO: 1703614 - RNA, 19 nt, Artificial Sequence
  Description of Artificial Sequence: Synthetic oligonucleotide
cugcgcaaugcacguaaga

SEQ ID NO: 1703615 - RNA, 19 nt, Artificial Sequence
  Description of Artificial Sequence: Synthetic oligonucleotide
gcacguaagaagcuugccu

SEQ ID NO: 1703616 - RNA, 19 nt, Artificial Sequence
  Description of Artificial Sequence: Synthetic oligonucleotide
augugauaauagacacacu

SEQ ID NO: 1703617 - RNA, 19 nt, Artificial Sequence
  Description of Artificial Sequence: Synthetic oligonucleotide
guggauaguggacgaagau

SEQ ID NO: 1703618 - RNA, 19 nt, Artificial Sequence
  Description of Artificial Sequence: Synthetic oligonucleotide
gguggaccuggccaggcga

SEQ ID NO: 1703619 - RNA, 19 nt, Artificial Sequence
  Description of Artificial Sequence: Synthetic oligonucleotide
agaugcuuccccagccccu

SEQ ID NO: 1703620 - RNA, 19 nt, Artificial Sequence
  Description of Artificial Sequence: Synthetic oligonucleotide
uuccuacaauguggggcug

SEQ ID NO: 1703621 - RNA, 19 nt, Artificial Sequence
  Description of Artificial Sequence: Synthetic oligonucleotide
gguaacuugugcguccaaa

SEQ ID NO: 1703622 - RNA, 19 nt, Artificial Sequence
  Description of Artificial Sequence: Synthetic oligonucleotide
ggaccugugccaggauugg

SEQ ID NO: 1703623 - RNA, 19 nt, Artificial Sequence
  Description of Artificial Sequence: Synthetic oligonucleotide
gguccagcuucauuggaua

SEQ ID NO: 1703624 - RNA, 19 nt, Artificial Sequence
  Description of Artificial Sequence: Synthetic oligonucleotide
uggucccugggagaaccgu

SEQ ID NO: 1703625 - RNA, 19 nt, Artificial Sequence
  Description of Artificial Sequence: Synthetic oligonucleotide
gcgaaaacggggccuucug

SEQ ID NO: 1703626 - RNA, 19 nt, Artificial Sequence
  Description of Artificial Sequence: Synthetic oligonucleotide
acgacacgucauccuuaug

SEQ ID NO: 1703627 - RNA, 19 nt, Artificial Sequence
  Description of Artificial Sequence: Synthetic oligonucleotide
ccuuauguauaacugcacu

SEQ ID NO: 1703628 - RNA, 19 nt, Artificial Sequence
  Description of Artificial Sequence: Synthetic oligonucleotide
aaccgugggaggggacugu

SEQ ID NO: 1703629 - RNA, 19 nt, Artificial Sequence
  Description of Artificial Sequence: Synthetic oligonucleotide
guacacugacaggucccgc

SEQ ID NO: 1703630 - RNA, 19 nt, Artificial Sequence
  Description of Artificial Sequence: Synthetic oligonucleotide
cagugaccuuggcacugag

SEQ ID NO: 1703631 - RNA, 19 nt, Artificial Sequence
  Description of Artificial Sequence: Synthetic oligonucleotide
caacgacacgucauccuua

SEQ ID NO: 1703632 - RNA, 19 nt, Artificial Sequence
  Description of Artificial Sequence: Synthetic oligonucleotide
cguccaaauaucugaguca

SEQ ID NO: 1703633 - RNA, 19 nt, Artificial Sequence
  Description of Artificial Sequence: Synthetic oligonucleotide
gaccuggccaggcgaaaua

SEQ ID NO: 1703634 - RNA, 19 nt, Artificial Sequence
  Description of Artificial Sequence: Synthetic oligonucleotide
auggcgaaaacggggccuu

SEQ ID NO: 1703635 - RNA, 19 nt, Artificial Sequence
  Description of Artificial Sequence: Synthetic oligonucleotide
cugcaguggaggccucgug

SEQ ID NO: 1703636 - RNA, 19 nt, Artificial Sequence
  Description of Artificial Sequence: Synthetic oligonucleotide
ccgaaaucccacacuccug

SEQ ID NO: 1703637 - RNA, 19 nt, Artificial Sequence
  Description of Artificial Sequence: Synthetic oligonucleotide
cauaguugucccagccacu

SEQ ID NO: 1703638 - RNA, 19 nt, Artificial Sequence
  Description of Artificial Sequence: Synthetic oligonucleotide
gcauaacuccauaucucuc

SEQ ID NO: 1703639 - RNA, 19 nt, Artificial Sequence
  Description of Artificial Sequence: Synthetic oligonucleotide
ugucucuguguugggcaua

SEQ ID NO: 1703640 - RNA, 19 nt, Artificial Sequence
  Description of Artificial Sequence: Synthetic oligonucleotide
cgaaauaccacagggaccu

SEQ ID NO: 1703641 - RNA, 19 nt, Artificial Sequence
  Description of Artificial Sequence: Synthetic oligonucleotide
ccguggauaguggacgaag

SEQ ID NO: 1703642 - RNA, 19 nt, Artificial Sequence
  Description of Artificial Sequence: Synthetic oligonucleotide
gccucggaccagcaggcug

SEQ ID NO: 1703643 - RNA, 19 nt, Artificial Sequence
  Description of Artificial Sequence: Synthetic oligonucleotide
ggucccugggagaaccgug

SEQ ID NO: 1703644 - RNA, 19 nt, Artificial Sequence
  Description of Artificial Sequence: Synthetic oligonucleotide
gucgcaggcuuagcuuagc

SEQ ID NO: 1703645 - RNA, 19 nt, Artificial Sequence
  Description of Artificial Sequence: Synthetic oligonucleotide
gcucgggaggucgaggaac

SEQ ID NO: 1703646 - RNA, 19 nt, Artificial Sequence
  Description of Artificial Sequence: Synthetic oligonucleotide
gcugccguggauaguggac

SEQ ID NO: 1703647 - RNA, 19 nt, Artificial Sequence
  Description of Artificial Sequence: Synthetic oligonucleotide
ucgggaggucgaggaacca

SEQ ID NO: 1703648 - RNA, 19 nt, Artificial Sequence
  Description of Artificial Sequence: Synthetic oligonucleotide
cuguggagucacugggcaa

SEQ ID NO: 1703649 - RNA, 19 nt, Artificial Sequence
  Description of Artificial Sequence: Synthetic oligonucleotide
caucuguuccaggaccgaa

SEQ ID NO: 1703650 - RNA, 19 nt, Artificial Sequence
  Description of Artificial Sequence: Synthetic oligonucleotide
uccaugcgucgcaggcuua

SEQ ID NO: 1703651 - RNA, 19 nt, Artificial Sequence
  Description of Artificial Sequence: Synthetic oligonucleotide
gagaaccgugggaggggac

SEQ ID NO: 1703652 - RNA, 19 nt, Artificial Sequence
  Description of Artificial Sequence: Synthetic oligonucleotide
ggaaccaacgacacgucau

SEQ ID NO: 1703653 - RNA, 19 nt, Artificial Sequence
  Description of Artificial Sequence: Synthetic oligonucleotide
ccuggucaugggcaccagc

SEQ ID NO: 1703654 - RNA, 19 nt, Artificial Sequence
  Description of Artificial Sequence: Synthetic oligonucleotide
ggagggacaccugaguggu

SEQ ID NO: 1703655 - RNA, 19 nt, Artificial Sequence
  Description of Artificial Sequence: Synthetic oligonucleotide
cauggcgaaaacggggccu

SEQ ID NO: 1703656 - RNA, 19 nt, Artificial Sequence
  Description of Artificial Sequence: Synthetic oligonucleotide
gggcucgggaggucgagga

SEQ ID NO: 1703657 - RNA, 19 nt, Artificial Sequence
  Description of Artificial Sequence: Synthetic oligonucleotide
ggaggggacuguuccucca

SEQ ID NO: 1703658 - RNA, 19 nt, Artificial Sequence
  Description of Artificial Sequence: Synthetic oligonucleotide
cgaggaaccaacgacacgu

SEQ ID NO: 1703659 - RNA, 19 nt, Artificial Sequence
  Description of Artificial Sequence: Synthetic oligonucleotide
uuccuccagccuugagguu

SEQ ID NO: 1703660 - RNA, 19 nt, Artificial Sequence
  Description of Artificial Sequence: Synthetic oligonucleotide
ggacaggccucggaccagc

SEQ ID NO: 1703661 - RNA, 19 nt, Artificial Sequence
  Description of Artificial Sequence: Synthetic oligonucleotide
gcgucgcaggcuuagcuua

SEQ ID NO: 1703662 - RNA, 19 nt, Artificial Sequence
  Description of Artificial Sequence: Synthetic oligonucleotide
aagcugcgcaaugcacgua

SEQ ID NO: 1703663 - RNA, 19 nt, Artificial Sequence
  Description of Artificial Sequence: Synthetic oligonucleotide
gcugauggcgugaacaguu

SEQ ID NO: 1703664 - RNA, 19 nt, Artificial Sequence
  Description of Artificial Sequence: Synthetic oligonucleotide
ggauuggguuggucuccug

SEQ ID NO: 1703665 - RNA, 19 nt, Artificial Sequence
  Description of Artificial Sequence: Synthetic oligonucleotide
ggaaagggcccucgacaaa

SEQ ID NO: 1703666 - RNA, 19 nt, Artificial Sequence
  Description of Artificial Sequence: Synthetic oligonucleotide
caaugcacguaagaagcuu

SEQ ID NO: 1703667 - RNA, 19 nt, Artificial Sequence
  Description of Artificial Sequence: Synthetic oligonucleotide
gcugcgcaaugcacguaag

SEQ ID NO: 1703668 - RNA, 19 nt, Artificial Sequence
  Description of Artificial Sequence: Synthetic oligonucleotide
ccaugcgucgcaggcuuag

SEQ ID NO: 1703669 - RNA, 19 nt, Artificial Sequence
  Description of Artificial Sequence: Synthetic oligonucleotide
gcgcacacugugcuccuca

SEQ ID NO: 1703670 - RNA, 19 nt, Artificial Sequence
  Description of Artificial Sequence: Synthetic oligonucleotide
ggcaguacugcagaugcuu

SEQ ID NO: 1703671 - RNA, 19 nt, Artificial Sequence
  Description of Artificial Sequence: Synthetic oligonucleotide
cagcucucaggaugugaua

SEQ ID NO: 1703672 - RNA, 19 nt, Artificial Sequence
  Description of Artificial Sequence: Synthetic oligonucleotide
cugucucuguguugggcau

SEQ ID NO: 1703673 - RNA, 19 nt, Artificial Sequence
  Description of Artificial Sequence: Synthetic oligonucleotide
ggggcucgggaggucgagg

SEQ ID NO: 1703674 - RNA, 19 nt, Artificial Sequence
  Description of Artificial Sequence: Synthetic oligonucleotide
uggcgaaaacggggccuuc

SEQ ID NO: 1703675 - RNA, 19 nt, Artificial Sequence
  Description of Artificial Sequence: Synthetic oligonucleotide
guggaccuggccaggcgaa

SEQ ID NO: 1703676 - RNA, 19 nt, Artificial Sequence
  Description of Artificial Sequence: Synthetic oligonucleotide
cucuggcaucuugcgcaac

SEQ ID NO: 1703677 - RNA, 19 nt, Artificial Sequence
  Description of Artificial Sequence: Synthetic oligonucleotide
ccacacuccugcugccgug

SEQ ID NO: 1703678 - RNA, 19 nt, Artificial Sequence
  Description of Artificial Sequence: Synthetic oligonucleotide
agcgggugagccacagcuu

SEQ ID NO: 1703679 - RNA, 19 nt, Artificial Sequence
  Description of Artificial Sequence: Synthetic oligonucleotide
ggacaccugagugguggca

SEQ ID NO: 1703680 - RNA, 19 nt, Artificial Sequence
  Description of Artificial Sequence: Synthetic oligonucleotide
gguuuccucuggggcucgg

SEQ ID NO: 1703681 - RNA, 19 nt, Artificial Sequence
  Description of Artificial Sequence: Synthetic oligonucleotide
cgucgcaggcuuagcuuag

SEQ ID NO: 1703682 - RNA, 19 nt, Artificial Sequence
  Description of Artificial Sequence: Synthetic oligonucleotide
caggguagggguugauauu

SEQ ID NO: 1703683 - RNA, 19 nt, Artificial Sequence
  Description of Artificial Sequence: Synthetic oligonucleotide
accgugggaggggacuguu

SEQ ID NO: 1703684 - RNA, 19 nt, Artificial Sequence
  Description of Artificial Sequence: Synthetic oligonucleotide
caguugcugauggcgugaa

SEQ ID NO: 1703685 - RNA, 19 nt, Artificial Sequence
  Description of Artificial Sequence: Synthetic oligonucleotide
cugagucagcaggaacucu

SEQ ID NO: 1703686 - RNA, 19 nt, Artificial Sequence
  Description of Artificial Sequence: Synthetic oligonucleotide
gucccgcuccacaccgaac

SEQ ID NO: 1703687 - RNA, 19 nt, Artificial Sequence
  Description of Artificial Sequence: Synthetic oligonucleotide
acggggccuucugucacuu

SEQ ID NO: 1703688 - RNA, 19 nt, Artificial Sequence
  Description of Artificial Sequence: Synthetic oligonucleotide
guguugggcauaacuccau

SEQ ID NO: 1703689 - RNA, 19 nt, Artificial Sequence
  Description of Artificial Sequence: Synthetic oligonucleotide
ccaguugcugauggcguga

SEQ ID NO: 1703690 - RNA, 19 nt, Artificial Sequence
  Description of Artificial Sequence: Synthetic oligonucleotide
gcaacgcuagguagaugaa

SEQ ID NO: 1703691 - RNA, 19 nt, Artificial Sequence
  Description of Artificial Sequence: Synthetic oligonucleotide
cuugagcaugggguaacuu

SEQ ID NO: 1703692 - RNA, 19 nt, Artificial Sequence
  Description of Artificial Sequence: Synthetic oligonucleotide
ccaacgacacgucauccuu

SEQ ID NO: 1703693 - RNA, 19 nt, Artificial Sequence
  Description of Artificial Sequence: Synthetic oligonucleotide
gcagaucagcucucaggau

SEQ ID NO: 1703694 - RNA, 19 nt, Artificial Sequence
  Description of Artificial Sequence: Synthetic oligonucleotide
ggcgaaaacggggccuucu

SEQ ID NO: 1703695 - RNA, 19 nt, Artificial Sequence
  Description of Artificial Sequence: Synthetic oligonucleotide
ggcucgggaggucgaggaa

SEQ ID NO: 1703696 - RNA, 19 nt, Artificial Sequence
  Description of Artificial Sequence: Synthetic oligonucleotide
cgguggaccuggccaggcg

SEQ ID NO: 1703697 - RNA, 19 nt, Artificial Sequence
  Description of Artificial Sequence: Synthetic oligonucleotide
gccugaagagcaucaucuu

SEQ ID NO: 1703698 - RNA, 19 nt, Artificial Sequence
  Description of Artificial Sequence: Synthetic oligonucleotide
ggaggccucguggggccug

SEQ ID NO: 1703699 - RNA, 19 nt, Artificial Sequence
  Description of Artificial Sequence: Synthetic oligonucleotide
ggguaacuugugcguccaa

SEQ ID NO: 1703700 - RNA, 19 nt, Artificial Sequence
  Description of Artificial Sequence: Synthetic oligonucleotide
ggaccuugauggguuuccu

SEQ ID NO: 1703701 - RNA, 19 nt, Artificial Sequence
  Description of Artificial Sequence: Synthetic oligonucleotide
ccgguggaccuggccaggc

SEQ ID NO: 1703702 - RNA, 19 nt, Artificial Sequence
  Description of Artificial Sequence: Synthetic oligonucleotide
guugucccagccacuccuu

SEQ ID NO: 1703703 - RNA, 19 nt, Artificial Sequence
  Description of Artificial Sequence: Synthetic oligonucleotide
ggguagggguugauauucu

SEQ ID NO: 1703704 - RNA, 19 nt, Artificial Sequence
  Description of Artificial Sequence: Synthetic oligonucleotide
ccccaguugcugauggcgu

SEQ ID NO: 1703705 - RNA, 19 nt, Artificial Sequence
  Description of Artificial Sequence: Synthetic oligonucleotide
cuacaauguggggcuggau

SEQ ID NO: 1703706 - RNA, 19 nt, Artificial Sequence
  Description of Artificial Sequence: Synthetic oligonucleotide
ccugugccaggauuggguu

SEQ ID NO: 1703707 - RNA, 19 nt, Artificial Sequence
  Description of Artificial Sequence: Synthetic oligonucleotide
gcaagcccuggauccacuu

SEQ ID NO: 1703708 - RNA, 19 nt, Artificial Sequence
  Description of Artificial Sequence: Synthetic oligonucleotide
gcgcaacgcuagguagaug

SEQ ID NO: 1703709 - RNA, 19 nt, Artificial Sequence
  Description of Artificial Sequence: Synthetic oligonucleotide
ggaccuggccaggcgaaau

SEQ ID NO: 1703710 - RNA, 19 nt, Artificial Sequence
  Description of Artificial Sequence: Synthetic oligonucleotide
ggacgaagaugcgcuggau

SEQ ID NO: 1703711 - RNA, 19 nt, Artificial Sequence
  Description of Artificial Sequence: Synthetic oligonucleotide
ccacgcuugcgcacacugu

SEQ ID NO: 1703712 - RNA, 19 nt, Artificial Sequence
  Description of Artificial Sequence: Synthetic oligonucleotide
aggccucguggggccugga

SEQ ID NO: 1703713 - RNA, 19 nt, Artificial Sequence
  Description of Artificial Sequence: Synthetic oligonucleotide
ccccuggacaggccucgga

SEQ ID NO: 1703714 - RNA, 19 nt, Artificial Sequence
  Description of Artificial Sequence: Synthetic oligonucleotide
cgggaggucgaggaaccaa

SEQ ID NO: 1703715 - RNA, 19 nt, Artificial Sequence
  Description of Artificial Sequence: Synthetic oligonucleotide
cgaagaugcgcuggauaau

SEQ ID NO: 1703716 - RNA, 19 nt, Artificial Sequence
  Description of Artificial Sequence: Synthetic oligonucleotide
gcgcagccagagagggaaa

SEQ ID NO: 1703717 - RNA, 19 nt, Artificial Sequence
  Description of Artificial Sequence: Synthetic oligonucleotide
ggccucggaccagcaggcu

SEQ ID NO: 1703718 - RNA, 19 nt, Artificial Sequence
  Description of Artificial Sequence: Synthetic oligonucleotide
caccgaacucuggcaucuu

SEQ ID NO: 1703719 - RNA, 19 nt, Artificial Sequence
  Description of Artificial Sequence: Synthetic oligonucleotide
ggccacgcuugcgcacacu

SEQ ID NO: 1703720 - RNA, 19 nt, Artificial Sequence
  Description of Artificial Sequence: Synthetic oligonucleotide
agacagaccgauuuaaucg

SEQ ID NO: 1703721 - RNA, 19 nt, Artificial Sequence
  Description of Artificial Sequence: Synthetic oligonucleotide
aagguguucgaguugcggg

SEQ ID NO: 1703722 - RNA, 19 nt, Artificial Sequence
  Description of Artificial Sequence: Synthetic oligonucleotide
accgauuuaaucgagugcg

SEQ ID NO: 1703723 - RNA, 19 nt, Artificial Sequence
  Description of Artificial Sequence: Synthetic oligonucleotide
agugaugcaccauuagacg

SEQ ID NO: 1703724 - RNA, 19 nt, Artificial Sequence
  Description of Artificial Sequence: Synthetic oligonucleotide
acgucuuccggcuacaggg

SEQ ID NO: 1703725 - RNA, 19 nt, Artificial Sequence
  Description of Artificial Sequence: Synthetic oligonucleotide
ugaaauuccaggguggggc

SEQ ID NO: 1703726 - RNA, 19 nt, Artificial Sequence
  Description of Artificial Sequence: Synthetic oligonucleotide
aacgagaggcugcggaggc

SEQ ID NO: 1703727 - RNA, 19 nt, Artificial Sequence
  Description of Artificial Sequence: Synthetic oligonucleotide
uuaucggaaagcuuuccgc

SEQ ID NO: 1703728 - RNA, 19 nt, Artificial Sequence
  Description of Artificial Sequence: Synthetic oligonucleotide
acagcucagugucaggccc

SEQ ID NO: 1703729 - RNA, 19 nt, Artificial Sequence
  Description of Artificial Sequence: Synthetic oligonucleotide
ugcacgagcgcccggaagg

SEQ ID NO: 1703730 - RNA, 19 nt, Artificial Sequence
  Description of Artificial Sequence: Synthetic oligonucleotide
cagugaugcaccauuagac

SEQ ID NO: 1703731 - RNA, 19 nt, Artificial Sequence
  Description of Artificial Sequence: Synthetic oligonucleotide
ucuagccucggccuggaag

SEQ ID NO: 1703732 - RNA, 19 nt, Artificial Sequence
  Description of Artificial Sequence: Synthetic oligonucleotide
agguguucgaguugcgggc

SEQ ID NO: 1703733 - RNA, 19 nt, Artificial Sequence
  Description of Artificial Sequence: Synthetic oligonucleotide
uaucggaaagcuuuccgca

SEQ ID NO: 1703734 - RNA, 19 nt, Artificial Sequence
  Description of Artificial Sequence: Synthetic oligonucleotide
uuggcguugacagccaacg

SEQ ID NO: 1703735 - RNA, 19 nt, Artificial Sequence
  Description of Artificial Sequence: Synthetic oligonucleotide
cacccagucacagugagcg

SEQ ID NO: 1703736 - RNA, 19 nt, Artificial Sequence
  Description of Artificial Sequence: Synthetic oligonucleotide
accugugcggcgucgaagc

SEQ ID NO: 1703737 - RNA, 19 nt, Artificial Sequence
  Description of Artificial Sequence: Synthetic oligonucleotide
ucgguuucccuacagcuca

SEQ ID NO: 1703738 - RNA, 19 nt, Artificial Sequence
  Description of Artificial Sequence: Synthetic oligonucleotide
auuuaaucgagugcggucu

SEQ ID NO: 1703739 - RNA, 19 nt, Artificial Sequence
  Description of Artificial Sequence: Synthetic oligonucleotide
agaccgauuuaaucgagug

SEQ ID NO: 1703740 - RNA, 19 nt, Artificial Sequence
  Description of Artificial Sequence: Synthetic oligonucleotide
acaccaucgcuuccgacac

SEQ ID NO: 1703741 - RNA, 19 nt, Artificial Sequence
  Description of Artificial Sequence: Synthetic oligonucleotide
gauuuaaucgagugcgguc

SEQ ID NO: 1703742 - RNA, 19 nt, Artificial Sequence
  Description of Artificial Sequence: Synthetic oligonucleotide
gaaauucugucagaccugc

SEQ ID NO: 1703743 - RNA, 19 nt, Artificial Sequence
  Description of Artificial Sequence: Synthetic oligonucleotide
uuugaagagacagaccgau

SEQ ID NO: 1703744 - RNA, 19 nt, Artificial Sequence
  Description of Artificial Sequence: Synthetic oligonucleotide
gcuggguucggccacaugg

SEQ ID NO: 1703745 - RNA, 19 nt, Artificial Sequence
  Description of Artificial Sequence: Synthetic oligonucleotide
uccauugguggcuccgucg

SEQ ID NO: 1703746 - RNA, 19 nt, Artificial Sequence
  Description of Artificial Sequence: Synthetic oligonucleotide
uuccgcauggacccgaaac

SEQ ID NO: 1703747 - RNA, 19 nt, Artificial Sequence
  Description of Artificial Sequence: Synthetic oligonucleotide
uuucccuacagcucagugu

SEQ ID NO: 1703748 - RNA, 19 nt, Artificial Sequence
  Description of Artificial Sequence: Synthetic oligonucleotide
agcgaaaggcgcugcagac

SEQ ID NO: 1703749 - RNA, 19 nt, Artificial Sequence
  Description of Artificial Sequence: Synthetic oligonucleotide
gacaccaucgcuuccgaca

SEQ ID NO: 1703750 - RNA, 19 nt, Artificial Sequence
  Description of Artificial Sequence: Synthetic oligonucleotide
uccgucgcugucuacugcg

SEQ ID NO: 1703751 - RNA, 19 nt, Artificial Sequence
  Description of Artificial Sequence: Synthetic oligonucleotide
guugcgggcaguuucgagc

SEQ ID NO: 1703752 - RNA, 19 nt, Artificial Sequence
  Description of Artificial Sequence: Synthetic oligonucleotide
ugagaauccuuaucggaaa

SEQ ID NO: 1703753 - RNA, 19 nt, Artificial Sequence
  Description of Artificial Sequence: Synthetic oligonucleotide
uuccguaagcggcucaggc

SEQ ID NO: 1703754 - RNA, 19 nt, Artificial Sequence
  Description of Artificial Sequence: Synthetic oligonucleotide
acagugagcgagcgaaagg

SEQ ID NO: 1703755 - RNA, 19 nt, Artificial Sequence
  Description of Artificial Sequence: Synthetic oligonucleotide
aaagggugcgaagccugcc

SEQ ID NO: 1703756 - RNA, 19 nt, Artificial Sequence
  Description of Artificial Sequence: Synthetic oligonucleotide
gaccgauuuaaucgagugc

SEQ ID NO: 1703757 - RNA, 19 nt, Artificial Sequence
  Description of Artificial Sequence: Synthetic oligonucleotide
gacagaccgauuuaaucga

SEQ ID NO: 1703758 - RNA, 19 nt, Artificial Sequence
  Description of Artificial Sequence: Synthetic oligonucleotide
auucgugacacggagccag

SEQ ID NO: 1703759 - RNA, 19 nt, Artificial Sequence
  Description of Artificial Sequence: Synthetic oligonucleotide
ugaugcaccauuagacguc

SEQ ID NO: 1703760 - RNA, 19 nt, Artificial Sequence
  Description of Artificial Sequence: Synthetic oligonucleotide
uccgcauggacccgaaacu

SEQ ID NO: 1703761 - RNA, 19 nt, Artificial Sequence
  Description of Artificial Sequence: Synthetic oligonucleotide
caccauuagacgucuuccg

SEQ ID NO: 1703762 - RNA, 19 nt, Artificial Sequence
  Description of Artificial Sequence: Synthetic oligonucleotide
ugugcggcgucgaagcggc

SEQ ID NO: 1703763 - RNA, 19 nt, Artificial Sequence
  Description of Artificial Sequence: Synthetic oligonucleotide
ggcgguuaggucuagcucc

SEQ ID NO: 1703764 - RNA, 19 nt, Artificial Sequence
  Description of Artificial Sequence: Synthetic oligonucleotide
ucgaguugcgggcaguuuc

SEQ ID NO: 1703765 - RNA, 19 nt, Artificial Sequence
  Description of Artificial Sequence: Synthetic oligonucleotide
guugacaaagggugcgaag

SEQ ID NO: 1703766 - RNA, 19 nt, Artificial Sequence
  Description of Artificial Sequence: Synthetic oligonucleotide
ucggcgacucagcuggccg

SEQ ID NO: 1703767 - RNA, 19 nt, Artificial Sequence
  Description of Artificial Sequence: Synthetic oligonucleotide
uucugucagaccugcaggu

SEQ ID NO: 1703768 - RNA, 19 nt, Artificial Sequence
  Description of Artificial Sequence: Synthetic oligonucleotide
cagugagcgagcgaaaggc

SEQ ID NO: 1703769 - RNA, 19 nt, Artificial Sequence
  Description of Artificial Sequence: Synthetic oligonucleotide
uugaaauuccagggugggg

SEQ ID NO: 1703770 - RNA, 19 nt, Artificial Sequence
  Description of Artificial Sequence: Synthetic oligonucleotide
uugcgggcaguuucgagcc

SEQ ID NO: 1703771 - RNA, 19 nt, Artificial Sequence
  Description of Artificial Sequence: Synthetic oligonucleotide
aagagacagaccgauuuaa

SEQ ID NO: 1703772 - RNA, 19 nt, Artificial Sequence
  Description of Artificial Sequence: Synthetic oligonucleotide
guagcugcggguuccgugc

SEQ ID NO: 1703773 - RNA, 19 nt, Artificial Sequence
  Description of Artificial Sequence: Synthetic oligonucleotide
cuacagggcuugaagcccg

SEQ ID NO: 1703774 - RNA, 19 nt, Artificial Sequence
  Description of Artificial Sequence: Synthetic oligonucleotide
uuaaucgagugcggucucg

SEQ ID NO: 1703775 - RNA, 19 nt, Artificial Sequence
  Description of Artificial Sequence: Synthetic oligonucleotide
aucgcuuccgacacggagg

SEQ ID NO: 1703776 - RNA, 19 nt, Artificial Sequence
  Description of Artificial Sequence: Synthetic oligonucleotide
gguaccagguccucguccg

SEQ ID NO: 1703777 - RNA, 19 nt, Artificial Sequence
  Description of Artificial Sequence: Synthetic oligonucleotide
ugaguuggcgacaggcggu

SEQ ID NO: 1703778 - RNA, 19 nt, Artificial Sequence
  Description of Artificial Sequence: Synthetic oligonucleotide
caggaaauucugucagacc

SEQ ID NO: 1703779 - RNA, 19 nt, Artificial Sequence
  Description of Artificial Sequence: Synthetic oligonucleotide
cacaguucgguuucccuac

SEQ ID NO: 1703780 - RNA, 19 nt, Artificial Sequence
  Description of Artificial Sequence: Synthetic oligonucleotide
ugagcgagcgaaaggcgcu

SEQ ID NO: 1703781 - RNA, 19 nt, Artificial Sequence
  Description of Artificial Sequence: Synthetic oligonucleotide
uucgguuucccuacagcuc

SEQ ID NO: 1703782 - RNA, 19 nt, Artificial Sequence
  Description of Artificial Sequence: Synthetic oligonucleotide
ucgcuuccgacacggaggc

SEQ ID NO: 1703783 - RNA, 19 nt, Artificial Sequence
  Description of Artificial Sequence: Synthetic oligonucleotide
ucuucuagccucggccugg

SEQ ID NO: 1703784 - RNA, 19 nt, Artificial Sequence
  Description of Artificial Sequence: Synthetic oligonucleotide
aagggugcgaagccugcca

SEQ ID NO: 1703785 - RNA, 19 nt, Artificial Sequence
  Description of Artificial Sequence: Synthetic oligonucleotide
ugcggucucgcugagaauc

SEQ ID NO: 1703786 - RNA, 19 nt, Artificial Sequence
  Description of Artificial Sequence: Synthetic oligonucleotide
agugccgggcaguacuccg

SEQ ID NO: 1703787 - RNA, 19 nt, Artificial Sequence
  Description of Artificial Sequence: Synthetic oligonucleotide
uacgcuccguagcugcggg

SEQ ID NO: 1703788 - RNA, 19 nt, Artificial Sequence
  Description of Artificial Sequence: Synthetic oligonucleotide
uguggccccaccugugcgg

SEQ ID NO: 1703789 - RNA, 19 nt, Artificial Sequence
  Description of Artificial Sequence: Synthetic oligonucleotide
ugguaccagguccucgucc

SEQ ID NO: 1703790 - RNA, 19 nt, Artificial Sequence
  Description of Artificial Sequence: Synthetic oligonucleotide
ucaagguguucgaguugcg

SEQ ID NO: 1703791 - RNA, 19 nt, Artificial Sequence
  Description of Artificial Sequence: Synthetic oligonucleotide
ggcguugacagccaacgag

SEQ ID NO: 1703792 - RNA, 19 nt, Artificial Sequence
  Description of Artificial Sequence: Synthetic oligonucleotide
aggcgguuaggucuagcuc

SEQ ID NO: 1703793 - RNA, 19 nt, Artificial Sequence
  Description of Artificial Sequence: Synthetic oligonucleotide
caguagccgggcuagcgcg

SEQ ID NO: 1703794 - RNA, 19 nt, Artificial Sequence
  Description of Artificial Sequence: Synthetic oligonucleotide
ucgagccaacucuuggacc

SEQ ID NO: 1703795 - RNA, 19 nt, Artificial Sequence
  Description of Artificial Sequence: Synthetic oligonucleotide
caguacuccgccagugucc

SEQ ID NO: 1703796 - RNA, 19 nt, Artificial Sequence
  Description of Artificial Sequence: Synthetic oligonucleotide
cagcacugguaccaggucc

SEQ ID NO: 1703797 - RNA, 19 nt, Artificial Sequence
  Description of Artificial Sequence: Synthetic oligonucleotide
auccuuaucggaaagcuuu

SEQ ID NO: 1703798 - RNA, 19 nt, Artificial Sequence
  Description of Artificial Sequence: Synthetic oligonucleotide
aucgagugcggucucgcug

SEQ ID NO: 1703799 - RNA, 19 nt, Artificial Sequence
  Description of Artificial Sequence: Synthetic oligonucleotide
uuuaaucgagugcggucuc

SEQ ID NO: 1703800 - RNA, 19 nt, Artificial Sequence
  Description of Artificial Sequence: Synthetic oligonucleotide
caucgcuuccgacacggag

SEQ ID NO: 1703801 - RNA, 19 nt, Artificial Sequence
  Description of Artificial Sequence: Synthetic oligonucleotide
uccguaagcggcucaggcu

SEQ ID NO: 1703802 - RNA, 19 nt, Artificial Sequence
  Description of Artificial Sequence: Synthetic oligonucleotide
guuucccuacagcucagug

SEQ ID NO: 1703803 - RNA, 19 nt, Artificial Sequence
  Description of Artificial Sequence: Synthetic oligonucleotide
aaucgagugcggucucgcu

SEQ ID NO: 1703804 - RNA, 19 nt, Artificial Sequence
  Description of Artificial Sequence: Synthetic oligonucleotide
accacgcuuccguaagcgg

SEQ ID NO: 1703805 - RNA, 19 nt, Artificial Sequence
  Description of Artificial Sequence: Synthetic oligonucleotide
guuggcgacaggcgguuag

SEQ ID NO: 1703806 - RNA, 19 nt, Artificial Sequence
  Description of Artificial Sequence: Synthetic oligonucleotide
agcgcuacgcuccguagcu

SEQ ID NO: 1703807 - RNA, 19 nt, Artificial Sequence
  Description of Artificial Sequence: Synthetic oligonucleotide
uucaggacgugcgggagca

SEQ ID NO: 1703808 - RNA, 19 nt, Artificial Sequence
  Description of Artificial Sequence: Synthetic oligonucleotide
uccuuaucggaaagcuuuc

SEQ ID NO: 1703809 - RNA, 19 nt, Artificial Sequence
  Description of Artificial Sequence: Synthetic oligonucleotide
uccgacagccauucgugac

SEQ ID NO: 1703810 - RNA, 19 nt, Artificial Sequence
  Description of Artificial Sequence: Synthetic oligonucleotide
gacgugcgggagcagcacg

SEQ ID NO: 1703811 - RNA, 19 nt, Artificial Sequence
  Description of Artificial Sequence: Synthetic oligonucleotide
agcgggacccaguucagga

SEQ ID NO: 1703812 - RNA, 19 nt, Artificial Sequence
  Description of Artificial Sequence: Synthetic oligonucleotide
acugcgcgugcgcaguagg

SEQ ID NO: 1703813 - RNA, 19 nt, Artificial Sequence
  Description of Artificial Sequence: Synthetic oligonucleotide
acggaggcagccugugagg

SEQ ID NO: 1703814 - RNA, 19 nt, Artificial Sequence
  Description of Artificial Sequence: Synthetic oligonucleotide
uaaucgagugcggucucgc

SEQ ID NO: 1703815 - RNA, 19 nt, Artificial Sequence
  Description of Artificial Sequence: Synthetic oligonucleotide
acguagugccagcccgucc

SEQ ID NO: 1703816 - RNA, 19 nt, Artificial Sequence
  Description of Artificial Sequence: Synthetic oligonucleotide
uacuccgccaguguccuga

SEQ ID NO: 1703817 - RNA, 19 nt, Artificial Sequence
  Description of Artificial Sequence: Synthetic oligonucleotide
acaccagugaugcaccauu

SEQ ID NO: 1703818 - RNA, 19 nt, Artificial Sequence
  Description of Artificial Sequence: Synthetic oligonucleotide
ggacccgaaacugaggcag

SEQ ID NO: 1703819 - RNA, 19 nt, Artificial Sequence
  Description of Artificial Sequence: Synthetic oligonucleotide
gaagagacagaccgauuua

SEQ ID NO: 1703820 - RNA, 19 nt, Artificial Sequence
  Description of Artificial Sequence: Synthetic oligonucleotide
uggguucggccacauggug

SEQ ID NO: 1703821 - RNA, 19 nt, Artificial Sequence
  Description of Artificial Sequence: Synthetic oligonucleotide
gaccugcagguugacaaag

SEQ ID NO: 1703822 - RNA, 19 nt, Artificial Sequence
  Description of Artificial Sequence: Synthetic oligonucleotide
cucugcgccagguacacga

SEQ ID NO: 1703823 - RNA, 19 nt, Artificial Sequence
  Description of Artificial Sequence: Synthetic oligonucleotide
aguugcgggcaguuucgag

SEQ ID NO: 1703824 - RNA, 19 nt, Artificial Sequence
  Description of Artificial Sequence: Synthetic oligonucleotide
gguuaggucuagcuccucc

SEQ ID NO: 1703825 - RNA, 19 nt, Artificial Sequence
  Description of Artificial Sequence: Synthetic oligonucleotide
cagggguggcuccacgucg

SEQ ID NO: 1703826 - RNA, 19 nt, Artificial Sequence
  Description of Artificial Sequence: Synthetic oligonucleotide
ucggcgaggccacguagug

SEQ ID NO: 1703827 - RNA, 19 nt, Artificial Sequence
  Description of Artificial Sequence: Synthetic oligonucleotide
auuggcguugacagccaac

SEQ ID NO: 1703828 - RNA, 19 nt, Artificial Sequence
  Description of Artificial Sequence: Synthetic oligonucleotide
cacagugagcgagcgaaag

SEQ ID NO: 1703829 - RNA, 19 nt, Artificial Sequence
  Description of Artificial Sequence: Synthetic oligonucleotide
caacgagaggcugcggagg

SEQ ID NO: 1703830 - RNA, 19 nt, Artificial Sequence
  Description of Artificial Sequence: Synthetic oligonucleotide
gacggcucccgguucuugc

SEQ ID NO: 1703831 - RNA, 19 nt, Artificial Sequence
  Description of Artificial Sequence: Synthetic oligonucleotide
gugaugcaccauuagacgu

SEQ ID NO: 1703832 - RNA, 19 nt, Artificial Sequence
  Description of Artificial Sequence: Synthetic oligonucleotide
uuggcgacaggcgguuagg

SEQ ID NO: 1703833 - RNA, 19 nt, Artificial Sequence
  Description of Artificial Sequence: Synthetic oligonucleotide
uccggacugcuccauuggu

SEQ ID NO: 1703834 - RNA, 19 nt, Artificial Sequence
  Description of Artificial Sequence: Synthetic oligonucleotide
ucuacugcgcgugcgcagu

SEQ ID NO: 1703835 - RNA, 19 nt, Artificial Sequence
  Description of Artificial Sequence: Synthetic oligonucleotide
cacgucgauguccacacca

SEQ ID NO: 1703836 - RNA, 19 nt, Artificial Sequence
  Description of Artificial Sequence: Synthetic oligonucleotide
gugagcgagcgaaaggcgc

SEQ ID NO: 1703837 - RNA, 19 nt, Artificial Sequence
  Description of Artificial Sequence: Synthetic oligonucleotide
acgagcgcccggaaggcgc

SEQ ID NO: 1703838 - RNA, 19 nt, Artificial Sequence
  Description of Artificial Sequence: Synthetic oligonucleotide
cugucuacugcgcgugcgc

SEQ ID NO: 1703839 - RNA, 19 nt, Artificial Sequence
  Description of Artificial Sequence: Synthetic oligonucleotide
cuccggacugcuccauugg

SEQ ID NO: 1703840 - RNA, 19 nt, Artificial Sequence
  Description of Artificial Sequence: Synthetic oligonucleotide
aguacuccgccaguguccu

SEQ ID NO: 1703841 - RNA, 19 nt, Artificial Sequence
  Description of Artificial Sequence: Synthetic oligonucleotide
uucgugacacggagccagc

SEQ ID NO: 1703842 - RNA, 19 nt, Artificial Sequence
  Description of Artificial Sequence: Synthetic oligonucleotide
ucgugacacggagccagcg

SEQ ID NO: 1703843 - RNA, 19 nt, Artificial Sequence
  Description of Artificial Sequence: Synthetic oligonucleotide
gcuuccgacacggaggcag

SEQ ID NO: 1703844 - RNA, 19 nt, Artificial Sequence
  Description of Artificial Sequence: Synthetic oligonucleotide
ugcagacgcgggcagcccu

SEQ ID NO: 1703845 - RNA, 19 nt, Artificial Sequence
  Description of Artificial Sequence: Synthetic oligonucleotide
uugaagagacagaccgauu

SEQ ID NO: 1703846 - RNA, 19 nt, Artificial Sequence
  Description of Artificial Sequence: Synthetic oligonucleotide
guucaggacgugcgggagc

SEQ ID NO: 1703847 - RNA, 19 nt, Artificial Sequence
  Description of Artificial Sequence: Synthetic oligonucleotide
ugccgggcaguacuccgcc

SEQ ID NO: 1703848 - RNA, 19 nt, Artificial Sequence
  Description of Artificial Sequence: Synthetic oligonucleotide
cuuccgacacggaggcagc

SEQ ID NO: 1703849 - RNA, 19 nt, Artificial Sequence
  Description of Artificial Sequence: Synthetic oligonucleotide
acagaccgauuuaaucgag

SEQ ID NO: 1703850 - RNA, 19 nt, Artificial Sequence
  Description of Artificial Sequence: Synthetic oligonucleotide
ugucuacugcgcgugcgca

SEQ ID NO: 1703851 - RNA, 19 nt, Artificial Sequence
  Description of Artificial Sequence: Synthetic oligonucleotide
gcaguuucgagccaacucu

SEQ ID NO: 1703852 - RNA, 19 nt, Artificial Sequence
  Description of Artificial Sequence: Synthetic oligonucleotide
ggcaguuucgagccaacuc

SEQ ID NO: 1703853 - RNA, 19 nt, Artificial Sequence
  Description of Artificial Sequence: Synthetic oligonucleotide
ugcgcaguaggcucuucua

SEQ ID NO: 1703854 - RNA, 19 nt, Artificial Sequence
  Description of Artificial Sequence: Synthetic oligonucleotide
gcaccauuagacgucuucc

SEQ ID NO: 1703855 - RNA, 19 nt, Artificial Sequence
  Description of Artificial Sequence: Synthetic oligonucleotide
gacgcgggcagcccucagc

SEQ ID NO: 1703856 - RNA, 19 nt, Artificial Sequence
  Description of Artificial Sequence: Synthetic oligonucleotide
gucuacugcgcgugcgcag

SEQ ID NO: 1703857 - RNA, 19 nt, Artificial Sequence
  Description of Artificial Sequence: Synthetic oligonucleotide
cggacugcuccauuggugg

SEQ ID NO: 1703858 - RNA, 19 nt, Artificial Sequence
  Description of Artificial Sequence: Synthetic oligonucleotide
cugugcggcgucgaagcgg

SEQ ID NO: 1703859 - RNA, 19 nt, Artificial Sequence
  Description of Artificial Sequence: Synthetic oligonucleotide
uggcguugacagccaacga

SEQ ID NO: 1703860 - RNA, 19 nt, Artificial Sequence
  Description of Artificial Sequence: Synthetic oligonucleotide
cauuagacgucuuccggcu

SEQ ID NO: 1703861 - RNA, 19 nt, Artificial Sequence
  Description of Artificial Sequence: Synthetic oligonucleotide
aggccacguagugccagcc

SEQ ID NO: 1703862 - RNA, 19 nt, Artificial Sequence
  Description of Artificial Sequence: Synthetic oligonucleotide
gccucucaaccacacaggc

SEQ ID NO: 1703863 - RNA, 19 nt, Artificial Sequence
  Description of Artificial Sequence: Synthetic oligonucleotide
cagugccgcacccgcagcg

SEQ ID NO: 1703864 - RNA, 19 nt, Artificial Sequence
  Description of Artificial Sequence: Synthetic oligonucleotide
cgaaaggcgcugcagacgc

SEQ ID NO: 1703865 - RNA, 19 nt, Artificial Sequence
  Description of Artificial Sequence: Synthetic oligonucleotide
agcgagcgaaaggcgcugc

SEQ ID NO: 1703866 - RNA, 19 nt, Artificial Sequence
  Description of Artificial Sequence: Synthetic oligonucleotide
aaauucugucagaccugca

SEQ ID NO: 1703867 - RNA, 19 nt, Artificial Sequence
  Description of Artificial Sequence: Synthetic oligonucleotide
cagcgcuacgcuccguagc

SEQ ID NO: 1703868 - RNA, 19 nt, Artificial Sequence
  Description of Artificial Sequence: Synthetic oligonucleotide
gguggcuccacgucgaugu

SEQ ID NO: 1703869 - RNA, 19 nt, Artificial Sequence
  Description of Artificial Sequence: Synthetic oligonucleotide
ccguaagcggcucaggcug

SEQ ID NO: 1703870 - RNA, 19 nt, Artificial Sequence
  Description of Artificial Sequence: Synthetic oligonucleotide
ucgcugucuacugcgcgug

SEQ ID NO: 1703871 - RNA, 19 nt, Artificial Sequence
  Description of Artificial Sequence: Synthetic oligonucleotide
caguucgguuucccuacag

SEQ ID NO: 1703872 - RNA, 19 nt, Artificial Sequence
  Description of Artificial Sequence: Synthetic oligonucleotide
ugcgcgugcgcaguaggcu

SEQ ID NO: 1703873 - RNA, 19 nt, Artificial Sequence
  Description of Artificial Sequence: Synthetic oligonucleotide
ugcggcgucgaagcggcgc

SEQ ID NO: 1703874 - RNA, 19 nt, Artificial Sequence
  Description of Artificial Sequence: Synthetic oligonucleotide
agacaccagugaugcacca

SEQ ID NO: 1703875 - RNA, 19 nt, Artificial Sequence
  Description of Artificial Sequence: Synthetic oligonucleotide
gaucuguggccccaccugu

SEQ ID NO: 1703876 - RNA, 19 nt, Artificial Sequence
  Description of Artificial Sequence: Synthetic oligonucleotide
acaggcgguuaggucuagc

SEQ ID NO: 1703877 - RNA, 19 nt, Artificial Sequence
  Description of Artificial Sequence: Synthetic oligonucleotide
ugggaucuguggccccacc

SEQ ID NO: 1703878 - RNA, 19 nt, Artificial Sequence
  Description of Artificial Sequence: Synthetic oligonucleotide
agagccgggcagcggucgg

SEQ ID NO: 1703879 - RNA, 19 nt, Artificial Sequence
  Description of Artificial Sequence: Synthetic oligonucleotide
cugcgcgugcgcaguaggc

SEQ ID NO: 1703880 - RNA, 19 nt, Artificial Sequence
  Description of Artificial Sequence: Synthetic oligonucleotide
cuuccguaagcggcucagg

SEQ ID NO: 1703881 - RNA, 19 nt, Artificial Sequence
  Description of Artificial Sequence: Synthetic oligonucleotide
ugacaccaucgcuuccgac

SEQ ID NO: 1703882 - RNA, 19 nt, Artificial Sequence
  Description of Artificial Sequence: Synthetic oligonucleotide
gcgcaguaggcucuucuag

SEQ ID NO: 1703883 - RNA, 19 nt, Artificial Sequence
  Description of Artificial Sequence: Synthetic oligonucleotide
ccgauuuaaucgagugcgg

SEQ ID NO: 1703884 - RNA, 19 nt, Artificial Sequence
  Description of Artificial Sequence: Synthetic oligonucleotide
acaguucgguuucccuaca

SEQ ID NO: 1703885 - RNA, 19 nt, Artificial Sequence
  Description of Artificial Sequence: Synthetic oligonucleotide
gaaaggcgcugcagacgcg

SEQ ID NO: 1703886 - RNA, 19 nt, Artificial Sequence
  Description of Artificial Sequence: Synthetic oligonucleotide
agcgagcgcagugccgggc

SEQ ID NO: 1703887 - RNA, 19 nt, Artificial Sequence
  Description of Artificial Sequence: Synthetic oligonucleotide
uagcugcggguuccgugcc

SEQ ID NO: 1703888 - RNA, 19 nt, Artificial Sequence
  Description of Artificial Sequence: Synthetic oligonucleotide
gcauggacccgaaacugag

SEQ ID NO: 1703889 - RNA, 19 nt, Artificial Sequence
  Description of Artificial Sequence: Synthetic oligonucleotide
caggacgugcgggagcagc

SEQ ID NO: 1703890 - RNA, 19 nt, Artificial Sequence
  Description of Artificial Sequence: Synthetic oligonucleotide
ccaacgagaggcugcggag

SEQ ID NO: 1703891 - RNA, 19 nt, Artificial Sequence
  Description of Artificial Sequence: Synthetic oligonucleotide
guguucgaguugcgggcag

SEQ ID NO: 1703892 - RNA, 19 nt, Artificial Sequence
  Description of Artificial Sequence: Synthetic oligonucleotide
cuuccggcuacagggcuug

SEQ ID NO: 1703893 - RNA, 19 nt, Artificial Sequence
  Description of Artificial Sequence: Synthetic oligonucleotide
ucggccacaugguggcagu

SEQ ID NO: 1703894 - RNA, 19 nt, Artificial Sequence
  Description of Artificial Sequence: Synthetic oligonucleotide
gcaguagccgggcuagcgc

SEQ ID NO: 1703895 - RNA, 19 nt, Artificial Sequence
  Description of Artificial Sequence: Synthetic oligonucleotide
uagccucggccuggaagcg

SEQ ID NO: 1703896 - RNA, 19 nt, Artificial Sequence
  Description of Artificial Sequence: Synthetic oligonucleotide
ucugcgccagguacacgau

SEQ ID NO: 1703897 - RNA, 19 nt, Artificial Sequence
  Description of Artificial Sequence: Synthetic oligonucleotide
uguucgaguugcgggcagu

SEQ ID NO: 1703898 - RNA, 19 nt, Artificial Sequence
  Description of Artificial Sequence: Synthetic oligonucleotide
ucgaagcggcgcagccccg

SEQ ID NO: 1703899 - RNA, 19 nt, Artificial Sequence
  Description of Artificial Sequence: Synthetic oligonucleotide
agggugcgaagccugccau

SEQ ID NO: 1703900 - RNA, 19 nt, Artificial Sequence
  Description of Artificial Sequence: Synthetic oligonucleotide
uacugcgcgugcgcaguag

SEQ ID NO: 1703901 - RNA, 19 nt, Artificial Sequence
  Description of Artificial Sequence: Synthetic oligonucleotide
gcgacaggcgguuaggucu

SEQ ID NO: 1703902 - RNA, 19 nt, Artificial Sequence
  Description of Artificial Sequence: Synthetic oligonucleotide
uuuccgcauggacccgaaa

SEQ ID NO: 1703903 - RNA, 19 nt, Artificial Sequence
  Description of Artificial Sequence: Synthetic oligonucleotide
acggcucccgguucuugcu

SEQ ID NO: 1703904 - RNA, 19 nt, Artificial Sequence
  Description of Artificial Sequence: Synthetic oligonucleotide
cuccgucgcugucuacugc

SEQ ID NO: 1703905 - RNA, 19 nt, Artificial Sequence
  Description of Artificial Sequence: Synthetic oligonucleotide
ucccgcaguagccgggcua

SEQ ID NO: 1703906 - RNA, 19 nt, Artificial Sequence
  Description of Artificial Sequence: Synthetic oligonucleotide
uagacgucuuccggcuaca

SEQ ID NO: 1703907 - RNA, 19 nt, Artificial Sequence
  Description of Artificial Sequence: Synthetic oligonucleotide
gguuccgugccagcacugg

SEQ ID NO: 1703908 - RNA, 19 nt, Artificial Sequence
  Description of Artificial Sequence: Synthetic oligonucleotide
uccgacacggaggcagccu

SEQ ID NO: 1703909 - RNA, 19 nt, Artificial Sequence
  Description of Artificial Sequence: Synthetic oligonucleotide
uccucguccgacagccauu

SEQ ID NO: 1703910 - RNA, 19 nt, Artificial Sequence
  Description of Artificial Sequence: Synthetic oligonucleotide
gcgaaaggcgcugcagacg

SEQ ID NO: 1703911 - RNA, 19 nt, Artificial Sequence
  Description of Artificial Sequence: Synthetic oligonucleotide
uuccgacacggaggcagcc

SEQ ID NO: 1703912 - RNA, 19 nt, Artificial Sequence
  Description of Artificial Sequence: Synthetic oligonucleotide
ugucaggccccggcuacac

SEQ ID NO: 1703913 - RNA, 19 nt, Artificial Sequence
  Description of Artificial Sequence: Synthetic oligonucleotide
gagcgagcgaaaggcgcug

SEQ ID NO: 1703914 - RNA, 19 nt, Artificial Sequence
  Description of Artificial Sequence: Synthetic oligonucleotide
cuccauugguggcuccguc

SEQ ID NO: 1703915 - RNA, 19 nt, Artificial Sequence
  Description of Artificial Sequence: Synthetic oligonucleotide
cagccggccagcgcuacgc

SEQ ID NO: 1703916 - RNA, 19 nt, Artificial Sequence
  Description of Artificial Sequence: Synthetic oligonucleotide
guccgacagccauucguga

SEQ ID NO: 1703917 - RNA, 19 nt, Artificial Sequence
  Description of Artificial Sequence: Synthetic oligonucleotide
ggcucccgguucuugcucc

SEQ ID NO: 1703918 - RNA, 19 nt, Artificial Sequence
  Description of Artificial Sequence: Synthetic oligonucleotide
cuuggaccgcggugucccc

SEQ ID NO: 1703919 - RNA, 19 nt, Artificial Sequence
  Description of Artificial Sequence: Synthetic oligonucleotide
ccuuaucggaaagcuuucc

SEQ ID NO: 1703920 - RNA, 19 nt, Artificial Sequence
  Description of Artificial Sequence: Synthetic oligonucleotide
ggcgagcccgccuccuugg

SEQ ID NO: 1703921 - RNA, 19 nt, Artificial Sequence
  Description of Artificial Sequence: Synthetic oligonucleotide
uggcgacaggcgguuaggu

SEQ ID NO: 1703922 - RNA, 19 nt, Artificial Sequence
  Description of Artificial Sequence: Synthetic oligonucleotide
agcuuuccgcauggacccg

SEQ ID NO: 1703923 - RNA, 19 nt, Artificial Sequence
  Description of Artificial Sequence: Synthetic oligonucleotide
cagccauucgugacacgga

SEQ ID NO: 1703924 - RNA, 19 nt, Artificial Sequence
  Description of Artificial Sequence: Synthetic oligonucleotide
cguccgacagccauucgug

SEQ ID NO: 1703925 - RNA, 19 nt, Artificial Sequence
  Description of Artificial Sequence: Synthetic oligonucleotide
agcgcggcccgugggaucu

SEQ ID NO: 1703926 - RNA, 19 nt, Artificial Sequence
  Description of Artificial Sequence: Synthetic oligonucleotide
ugcgggcaguuucgagcca

SEQ ID NO: 1703927 - RNA, 19 nt, Artificial Sequence
  Description of Artificial Sequence: Synthetic oligonucleotide
caccaucgcuuccgacacg

SEQ ID NO: 1703928 - RNA, 19 nt, Artificial Sequence
  Description of Artificial Sequence: Synthetic oligonucleotide
caggcgguuaggucuagcu

SEQ ID NO: 1703929 - RNA, 19 nt, Artificial Sequence
  Description of Artificial Sequence: Synthetic oligonucleotide
ugacggcucccgguucuug

SEQ ID NO: 1703930 - RNA, 19 nt, Artificial Sequence
  Description of Artificial Sequence: Synthetic oligonucleotide
gugccgcacccgcagcgag

SEQ ID NO: 1703931 - RNA, 19 nt, Artificial Sequence
  Description of Artificial Sequence: Synthetic oligonucleotide
gucgcugucuacugcgcgu

SEQ ID NO: 1703932 - RNA, 19 nt, Artificial Sequence
  Description of Artificial Sequence: Synthetic oligonucleotide
acgucuucccagggcaggu

SEQ ID NO: 1703933 - RNA, 19 nt, Artificial Sequence
  Description of Artificial Sequence: Synthetic oligonucleotide
guguccugacaccaucgcu

SEQ ID NO: 1703934 - RNA, 19 nt, Artificial Sequence
  Description of Artificial Sequence: Synthetic oligonucleotide
ccuccggacugcuccauug

SEQ ID NO: 1703935 - RNA, 19 nt, Artificial Sequence
  Description of Artificial Sequence: Synthetic oligonucleotide
cagaccgauuuaaucgagu

SEQ ID NO: 1703936 - RNA, 19 nt, Artificial Sequence
  Description of Artificial Sequence: Synthetic oligonucleotide
ccggacugcuccauuggug

SEQ ID NO: 1703937 - RNA, 19 nt, Artificial Sequence
  Description of Artificial Sequence: Synthetic oligonucleotide
ccacauuggcguugacagc

SEQ ID NO: 1703938 - RNA, 19 nt, Artificial Sequence
  Description of Artificial Sequence: Synthetic oligonucleotide
cucguccgacagccauucg

SEQ ID NO: 1703939 - RNA, 19 nt, Artificial Sequence
  Description of Artificial Sequence: Synthetic oligonucleotide
uucgaguugcgggcaguuu

SEQ ID NO: 1703940 - RNA, 19 nt, Artificial Sequence
  Description of Artificial Sequence: Synthetic oligonucleotide
gcuccgucgcugucuacug

SEQ ID NO: 1703941 - RNA, 19 nt, Artificial Sequence
  Description of Artificial Sequence: Synthetic oligonucleotide
cacgagcgcccggaaggcg

SEQ ID NO: 1703942 - RNA, 19 nt, Artificial Sequence
  Description of Artificial Sequence: Synthetic oligonucleotide
acauuggcguugacagcca

SEQ ID NO: 1703943 - RNA, 19 nt, Artificial Sequence
  Description of Artificial Sequence: Synthetic oligonucleotide
cacgcuuccguaagcggcu

SEQ ID NO: 1703944 - RNA, 19 nt, Artificial Sequence
  Description of Artificial Sequence: Synthetic oligonucleotide
ggcgacaggcgguuagguc

SEQ ID NO: 1703945 - RNA, 19 nt, Artificial Sequence
  Description of Artificial Sequence: Synthetic oligonucleotide
agugccgcacccgcagcga

SEQ ID NO: 1703946 - RNA, 19 nt, Artificial Sequence
  Description of Artificial Sequence: Synthetic oligonucleotide
acgugcgggagcagcacgu

SEQ ID NO: 1703947 - RNA, 19 nt, Artificial Sequence
  Description of Artificial Sequence: Synthetic oligonucleotide
gccgcacccgcagcgagcg

SEQ ID NO: 1703948 - RNA, 19 nt, Artificial Sequence
  Description of Artificial Sequence: Synthetic oligonucleotide
caccagugaugcaccauua

SEQ ID NO: 1703949 - RNA, 19 nt, Artificial Sequence
  Description of Artificial Sequence: Synthetic oligonucleotide
agcccgccuccuugguuug

SEQ ID NO: 1703950 - RNA, 19 nt, Artificial Sequence
  Description of Artificial Sequence: Synthetic oligonucleotide
gacccgaaacugaggcaga

SEQ ID NO: 1703951 - RNA, 19 nt, Artificial Sequence
  Description of Artificial Sequence: Synthetic oligonucleotide
gcuacgcuccguagcugcg

SEQ ID NO: 1703952 - RNA, 19 nt, Artificial Sequence
  Description of Artificial Sequence: Synthetic oligonucleotide
cuggguucggccacauggu

SEQ ID NO: 1703953 - RNA, 19 nt, Artificial Sequence
  Description of Artificial Sequence: Synthetic oligonucleotide
cgcuacgcuccguagcugc

SEQ ID NO: 1703954 - RNA, 19 nt, Artificial Sequence
  Description of Artificial Sequence: Synthetic oligonucleotide
cccggcuacacaguccagc

SEQ ID NO: 1703955 - RNA, 19 nt, Artificial Sequence
  Description of Artificial Sequence: Synthetic oligonucleotide
ggccacguagugccagccc

SEQ ID NO: 1703956 - RNA, 19 nt, Artificial Sequence
  Description of Artificial Sequence: Synthetic oligonucleotide
ggcuagcgcggcccguggg

SEQ ID NO: 1703957 - RNA, 19 nt, Artificial Sequence
  Description of Artificial Sequence: Synthetic oligonucleotide
gacaggcgguuaggucuag

SEQ ID NO: 1703958 - RNA, 19 nt, Artificial Sequence
  Description of Artificial Sequence: Synthetic oligonucleotide
gggugcgaagccugccaug

SEQ ID NO: 1703959 - RNA, 19 nt, Artificial Sequence
  Description of Artificial Sequence: Synthetic oligonucleotide
agacgcgggcagcccucag

SEQ ID NO: 1703960 - RNA, 19 nt, Artificial Sequence
  Description of Artificial Sequence: Synthetic oligonucleotide
gguguucgaguugcgggca

SEQ ID NO: 1703961 - RNA, 19 nt, Artificial Sequence
  Description of Artificial Sequence: Synthetic oligonucleotide
cguagugccagcccgucca

SEQ ID NO: 1703962 - RNA, 19 nt, Artificial Sequence
  Description of Artificial Sequence: Synthetic oligonucleotide
cauuggcguugacagccaa

SEQ ID NO: 1703963 - RNA, 19 nt, Artificial Sequence
  Description of Artificial Sequence: Synthetic oligonucleotide
cguagcugcggguuccgug

SEQ ID NO: 1703964 - RNA, 19 nt, Artificial Sequence
  Description of Artificial Sequence: Synthetic oligonucleotide
agccaacgagaggcugcgg

SEQ ID NO: 1703965 - RNA, 19 nt, Artificial Sequence
  Description of Artificial Sequence: Synthetic oligonucleotide
ggugcgaagccugccaugu

SEQ ID NO: 1703966 - RNA, 19 nt, Artificial Sequence
  Description of Artificial Sequence: Synthetic oligonucleotide
ccgacacggaggcagccug

SEQ ID NO: 1703967 - RNA, 19 nt, Artificial Sequence
  Description of Artificial Sequence: Synthetic oligonucleotide
ccagcgcuacgcuccguag

SEQ ID NO: 1703968 - RNA, 19 nt, Artificial Sequence
  Description of Artificial Sequence: Synthetic oligonucleotide
ccgacagccauucgugaca

SEQ ID NO: 1703969 - RNA, 19 nt, Artificial Sequence
  Description of Artificial Sequence: Synthetic oligonucleotide
cauucgugacacggagcca

SEQ ID NO: 1703970 - RNA, 19 nt, Artificial Sequence
  Description of Artificial Sequence: Synthetic oligonucleotide
gcgggacccaguucaggac

SEQ ID NO: 1703971 - RNA, 19 nt, Artificial Sequence
  Description of Artificial Sequence: Synthetic oligonucleotide
ccgcauggacccgaaacug

SEQ ID NO: 1703972 - RNA, 19 nt, Artificial Sequence
  Description of Artificial Sequence: Synthetic oligonucleotide
gggcaguacuccgccagug

SEQ ID NO: 1703973 - RNA, 19 nt, Artificial Sequence
  Description of Artificial Sequence: Synthetic oligonucleotide
caguaggcucuucuagccu

SEQ ID NO: 1703974 - RNA, 19 nt, Artificial Sequence
  Description of Artificial Sequence: Synthetic oligonucleotide
cugcagacgcgggcagccc

SEQ ID NO: 1703975 - RNA, 19 nt, Artificial Sequence
  Description of Artificial Sequence: Synthetic oligonucleotide
gccaacucuuggaccgcgg

SEQ ID NO: 1703976 - RNA, 19 nt, Artificial Sequence
  Description of Artificial Sequence: Synthetic oligonucleotide
gcuagcgcggcccguggga

SEQ ID NO: 1703977 - RNA, 19 nt, Artificial Sequence
  Description of Artificial Sequence: Synthetic oligonucleotide
agccggccagcgcuacgcu

SEQ ID NO: 1703978 - RNA, 19 nt, Artificial Sequence
  Description of Artificial Sequence: Synthetic oligonucleotide
gcaucccgcaguagccggg

SEQ ID NO: 1703979 - RNA, 19 nt, Artificial Sequence
  Description of Artificial Sequence: Synthetic oligonucleotide
cccgcaguagccgggcuag

SEQ ID NO: 1703980 - RNA, 19 nt, Artificial Sequence
  Description of Artificial Sequence: Synthetic oligonucleotide
uagcgcggcccgugggauc

SEQ ID NO: 1703981 - RNA, 19 nt, Artificial Sequence
  Description of Artificial Sequence: Synthetic oligonucleotide
acgcuccguagcugcgggu

SEQ ID NO: 1703982 - RNA, 19 nt, Artificial Sequence
  Description of Artificial Sequence: Synthetic oligonucleotide
gcgcgugcgcaguaggcuc

SEQ ID NO: 1703983 - RNA, 19 nt, Artificial Sequence
  Description of Artificial Sequence: Synthetic oligonucleotide
gacaccagugaugcaccau

SEQ ID NO: 1703984 - RNA, 19 nt, Artificial Sequence
  Description of Artificial Sequence: Synthetic oligonucleotide
caguuucgagccaacucuu

SEQ ID NO: 1703985 - RNA, 19 nt, Artificial Sequence
  Description of Artificial Sequence: Synthetic oligonucleotide
gggcuagcgcggcccgugg

SEQ ID NO: 1703986 - RNA, 19 nt, Artificial Sequence
  Description of Artificial Sequence: Synthetic oligonucleotide
agcgcagugccgggcagua

SEQ ID NO: 1703987 - RNA, 19 nt, Artificial Sequence
  Description of Artificial Sequence: Synthetic oligonucleotide
gucaggccccggcuacaca

SEQ ID NO: 1703988 - RNA, 19 nt, Artificial Sequence
  Description of Artificial Sequence: Synthetic oligonucleotide
ccucguccgacagccauuc

SEQ ID NO: 1703989 - RNA, 19 nt, Artificial Sequence
  Description of Artificial Sequence: Synthetic oligonucleotide
gcgccagguacacgauggc

SEQ ID NO: 1703990 - RNA, 19 nt, Artificial Sequence
  Description of Artificial Sequence: Synthetic oligonucleotide
cgcaguagccgggcuagcg

SEQ ID NO: 1703991 - RNA, 19 nt, Artificial Sequence
  Description of Artificial Sequence: Synthetic oligonucleotide
aaggcgcggcugacgcgcu

SEQ ID NO: 1703992 - RNA, 19 nt, Artificial Sequence
  Description of Artificial Sequence: Synthetic oligonucleotide
ccgucgcugucuacugcgc

SEQ ID NO: 1703993 - RNA, 19 nt, Artificial Sequence
  Description of Artificial Sequence: Synthetic oligonucleotide
cggcccgugggaucugugg

SEQ ID NO: 1703994 - RNA, 19 nt, Artificial Sequence
  Description of Artificial Sequence: Synthetic oligonucleotide
gugggaucuguggccccac

SEQ ID NO: 1703995 - RNA, 19 nt, Artificial Sequence
  Description of Artificial Sequence: Synthetic oligonucleotide
cagcugcacgagcgcccgg

SEQ ID NO: 1703996 - RNA, 19 nt, Artificial Sequence
  Description of Artificial Sequence: Synthetic oligonucleotide
cgagcgaaaggcgcugcag

SEQ ID NO: 1703997 - RNA, 19 nt, Artificial Sequence
  Description of Artificial Sequence: Synthetic oligonucleotide
cugcggcgagcccgccucc

SEQ ID NO: 1703998 - RNA, 19 nt, Artificial Sequence
  Description of Artificial Sequence: Synthetic oligonucleotide
gcuccguagcugcggguuc

SEQ ID NO: 1703999 - RNA, 19 nt, Artificial Sequence
  Description of Artificial Sequence: Synthetic oligonucleotide
ggcgucgaagcggcgcagc

SEQ ID NO: 1704000 - RNA, 19 nt, Artificial Sequence
  Description of Artificial Sequence: Synthetic oligonucleotide
gcacgagcgcccggaaggc

SEQ ID NO: 1704001 - RNA, 19 nt, Artificial Sequence
  Description of Artificial Sequence: Synthetic oligonucleotide
gagugcggucucgcugaga

SEQ ID NO: 1704002 - RNA, 19 nt, Artificial Sequence
  Description of Artificial Sequence: Synthetic oligonucleotide
ggcucaggcuggguucggc

SEQ ID NO: 1704003 - RNA, 19 nt, Artificial Sequence
  Description of Artificial Sequence: Synthetic oligonucleotide
gcggcgucgaagcggcgca

SEQ ID NO: 1704004 - RNA, 19 nt, Artificial Sequence
  Description of Artificial Sequence: Synthetic oligonucleotide
agcggucggcgaggccacg

SEQ ID NO: 1704005 - RNA, 19 nt, Artificial Sequence
  Description of Artificial Sequence: Synthetic oligonucleotide
ccgggcagcggucggcgag

SEQ ID NO: 1704006 - RNA, 19 nt, Artificial Sequence
  Description of Artificial Sequence: Synthetic oligonucleotide
gccgggcuagcgcggcccg

SEQ ID NO: 1704007 - RNA, 19 nt, Artificial Sequence
  Description of Artificial Sequence: Synthetic oligonucleotide
cgcauggacccgaaacuga

SEQ ID NO: 1704008 - RNA, 19 nt, Artificial Sequence
  Description of Artificial Sequence: Synthetic oligonucleotide
uggcuccgucgcugucuac

SEQ ID NO: 1704009 - RNA, 19 nt, Artificial Sequence
  Description of Artificial Sequence: Synthetic oligonucleotide
gcuuuccgcauggacccga

SEQ ID NO: 1704010 - RNA, 19 nt, Artificial Sequence
  Description of Artificial Sequence: Synthetic oligonucleotide
gcgagcgaaaggcgcugca

SEQ ID NO: 1704011 - RNA, 19 nt, Artificial Sequence
  Description of Artificial Sequence: Synthetic oligonucleotide
ggcuccgucgcugucuacu

SEQ ID NO: 1704012 - RNA, 19 nt, Artificial Sequence
  Description of Artificial Sequence: Synthetic oligonucleotide
cccguccacccagucacag

SEQ ID NO: 1704013 - RNA, 19 nt, Artificial Sequence
  Description of Artificial Sequence: Synthetic oligonucleotide
cgagcgcccggaaggcgcg

SEQ ID NO: 1704014 - RNA, 19 nt, Artificial Sequence
  Description of Artificial Sequence: Synthetic oligonucleotide
gguggcuccgucgcugucu

SEQ ID NO: 1704015 - RNA, 19 nt, Artificial Sequence
  Description of Artificial Sequence: Synthetic oligonucleotide
aguuggcgacaggcgguua

SEQ ID NO: 1704016 - RNA, 19 nt, Artificial Sequence
  Description of Artificial Sequence: Synthetic oligonucleotide
ccgugccagcacugguacc

SEQ ID NO: 1704017 - RNA, 19 nt, Artificial Sequence
  Description of Artificial Sequence: Synthetic oligonucleotide
cggcgacucagcuggccgc

SEQ ID NO: 1704018 - RNA, 19 nt, Artificial Sequence
  Description of Artificial Sequence: Synthetic oligonucleotide
guucgaguugcgggcaguu

SEQ ID NO: 1704019 - RNA, 19 nt, Artificial Sequence
  Description of Artificial Sequence: Synthetic oligonucleotide
cggcaucccgcaguagccg

SEQ ID NO: 1704020 - RNA, 19 nt, Artificial Sequence
  Description of Artificial Sequence: Synthetic oligonucleotide
cuacugcgcgugcgcagua

SEQ ID NO: 1704021 - RNA, 19 nt, Artificial Sequence
  Description of Artificial Sequence: Synthetic oligonucleotide
cgacucagcuggccgcagc

SEQ ID NO: 1704022 - RNA, 19 nt, Artificial Sequence
  Description of Artificial Sequence: Synthetic oligonucleotide
ccacaccacgcuuccguaa

SEQ ID NO: 1704023 - RNA, 19 nt, Artificial Sequence
  Description of Artificial Sequence: Synthetic oligonucleotide
ccgugggaucuguggcccc

SEQ ID NO: 1704024 - RNA, 19 nt, Artificial Sequence
  Description of Artificial Sequence: Synthetic oligonucleotide
ggcagcggucggcgaggcc

SEQ ID NO: 1704025 - RNA, 19 nt, Artificial Sequence
  Description of Artificial Sequence: Synthetic oligonucleotide
gccugacggcucccgguuc

SEQ ID NO: 1704026 - RNA, 19 nt, Artificial Sequence
  Description of Artificial Sequence: Synthetic oligonucleotide
cgauuuaaucgagugcggu

SEQ ID NO: 1704027 - RNA, 19 nt, Artificial Sequence
  Description of Artificial Sequence: Synthetic oligonucleotide
cagacgcgggcagcccuca

SEQ ID NO: 1704028 - RNA, 19 nt, Artificial Sequence
  Description of Artificial Sequence: Synthetic oligonucleotide
gcagacgcgggcagcccuc

SEQ ID NO: 1704029 - RNA, 19 nt, Artificial Sequence
  Description of Artificial Sequence: Synthetic oligonucleotide
cgggcagcccucagccagc

SEQ ID NO: 1704030 - RNA, 19 nt, Artificial Sequence
  Description of Artificial Sequence: Synthetic oligonucleotide
caggccccggcuacacagu

SEQ ID NO: 1704031 - RNA, 19 nt, Artificial Sequence
  Description of Artificial Sequence: Synthetic oligonucleotide
gugcggcgucgaagcggcg

SEQ ID NO: 1704032 - RNA, 19 nt, Artificial Sequence
  Description of Artificial Sequence: Synthetic oligonucleotide
gggacccaguucaggacgu

SEQ ID NO: 1704033 - RNA, 19 nt, Artificial Sequence
  Description of Artificial Sequence: Synthetic oligonucleotide
gguuucccuacagcucagu

SEQ ID NO: 1704034 - RNA, 19 nt, Artificial Sequence
  Description of Artificial Sequence: Synthetic oligonucleotide
gcgguuaggucuagcuccu

SEQ ID NO: 1704035 - RNA, 19 nt, Artificial Sequence
  Description of Artificial Sequence: Synthetic oligonucleotide
gcgcuacgcuccguagcug

SEQ ID NO: 1704036 - RNA, 19 nt, Artificial Sequence
  Description of Artificial Sequence: Synthetic oligonucleotide
cuagcgcggcccgugggau

SEQ ID NO: 1704037 - RNA, 19 nt, Artificial Sequence
  Description of Artificial Sequence: Synthetic oligonucleotide
cgcagugccgggcaguacu

SEQ ID NO: 1704038 - RNA, 19 nt, Artificial Sequence
  Description of Artificial Sequence: Synthetic oligonucleotide
ccucugcgccagguacacg

SEQ ID NO: 1704039 - RNA, 19 nt, Artificial Sequence
  Description of Artificial Sequence: Synthetic oligonucleotide
cgagcgcagugccgggcag

SEQ ID NO: 1704040 - RNA, 19 nt, Artificial Sequence
  Description of Artificial Sequence: Synthetic oligonucleotide
cgaagcggcgcagccccgc

SEQ ID NO: 1704041 - RNA, 19 nt, Artificial Sequence
  Description of Artificial Sequence: Synthetic oligonucleotide
gggcaguuucgagccaacu

SEQ ID NO: 1704042 - RNA, 19 nt, Artificial Sequence
  Description of Artificial Sequence: Synthetic oligonucleotide
gccgggcaguacuccgcca

SEQ ID NO: 1704043 - RNA, 19 nt, Artificial Sequence
  Description of Artificial Sequence: Synthetic oligonucleotide
ccugacggcucccgguucu

SEQ ID NO: 1704044 - RNA, 19 nt, Artificial Sequence
  Description of Artificial Sequence: Synthetic oligonucleotide
cggcgaggccacguagugc

SEQ ID NO: 1704045 - RNA, 19 nt, Artificial Sequence
  Description of Artificial Sequence: Synthetic oligonucleotide
ccccggcuacacaguccag

SEQ ID NO: 1704046 - RNA, 19 nt, Artificial Sequence
  Description of Artificial Sequence: Synthetic oligonucleotide
ccccaccugugcggcgucg

SEQ ID NO: 1704047 - RNA, 19 nt, Artificial Sequence
  Description of Artificial Sequence: Synthetic oligonucleotide
ccaucgcuuccgacacgga

SEQ ID NO: 1704048 - RNA, 19 nt, Artificial Sequence
  Description of Artificial Sequence: Synthetic oligonucleotide
cgacaggcgguuaggucua

SEQ ID NO: 1704049 - RNA, 19 nt, Artificial Sequence
  Description of Artificial Sequence: Synthetic oligonucleotide
ccucggcaucccgcaguag

SEQ ID NO: 1704050 - RNA, 19 nt, Artificial Sequence
  Description of Artificial Sequence: Synthetic oligonucleotide
cccggaaggcgcggcugac

SEQ ID NO: 1704051 - RNA, 19 nt, Artificial Sequence
  Description of Artificial Sequence: Synthetic oligonucleotide
cgugcgggagcagcacguc

SEQ ID NO: 1704052 - RNA, 19 nt, Artificial Sequence
  Description of Artificial Sequence: Synthetic oligonucleotide
gcggcccgugggaucugug

SEQ ID NO: 1704053 - RNA, 19 nt, Artificial Sequence
  Description of Artificial Sequence: Synthetic oligonucleotide
cgggcuagcgcggcccgug

SEQ ID NO: 1704054 - RNA, 19 nt, Artificial Sequence
  Description of Artificial Sequence: Synthetic oligonucleotide
ccgcaguagccgggcuagc

SEQ ID NO: 1704055 - RNA, 19 nt, Artificial Sequence
  Description of Artificial Sequence: Synthetic oligonucleotide
gcgcagugccgggcaguac

SEQ ID NO: 1704056 - RNA, 19 nt, Artificial Sequence
  Description of Artificial Sequence: Synthetic oligonucleotide
cgcuuccguaagcggcuca

SEQ ID NO: 1704057 - RNA, 19 nt, Artificial Sequence
  Description of Artificial Sequence: Synthetic oligonucleotide
cgcggcugacgcgcugcag

SEQ ID NO: 1704058 - RNA, 19 nt, Artificial Sequence
  Description of Artificial Sequence: Synthetic oligonucleotide
gcgagcccgccuccuuggu

SEQ ID NO: 1704059 - RNA, 19 nt, Artificial Sequence
  Description of Artificial Sequence: Synthetic oligonucleotide
cgcgugcgcaguaggcucu

SEQ ID NO: 1704060 - RNA, 19 nt, Artificial Sequence
  Description of Artificial Sequence: Synthetic oligonucleotide
cugacggcucccgguucuu

SEQ ID NO: 1704061 - RNA, 19 nt, Artificial Sequence
  Description of Artificial Sequence: Synthetic oligonucleotide
gcggucggcgaggccacgu

SEQ ID NO: 1704062 - RNA, 19 nt, Artificial Sequence
  Description of Artificial Sequence: Synthetic oligonucleotide
ccccagcgcucggcgacuc

SEQ ID NO: 1704063 - RNA, 19 nt, Artificial Sequence
  Description of Artificial Sequence: Synthetic oligonucleotide
cggcgucgaagcggcgcag

SEQ ID NO: 1704064 - RNA, 19 nt, Artificial Sequence
  Description of Artificial Sequence: Synthetic oligonucleotide
cgacacggaggcagccugu

SEQ ID NO: 1704065 - RNA, 19 nt, Artificial Sequence
  Description of Artificial Sequence: Synthetic oligonucleotide
gcccgccuccuugguuuga

SEQ ID NO: 1704066 - RNA, 19 nt, Artificial Sequence
  Description of Artificial Sequence: Synthetic oligonucleotide
cgugcgcaguaggcucuuc

SEQ ID NO: 1704067 - RNA, 19 nt, Artificial Sequence
  Description of Artificial Sequence: Synthetic oligonucleotide
cgggcaguacuccgccagu

SEQ ID NO: 1704068 - RNA, 19 nt, Artificial Sequence
  Description of Artificial Sequence: Synthetic oligonucleotide
cggucggcgaggccacgua

SEQ ID NO: 1704069 - RNA, 19 nt, Artificial Sequence
  Description of Artificial Sequence: Synthetic oligonucleotide
ccgcagccggccagcgcua

SEQ ID NO: 1704070 - RNA, 19 nt, Artificial Sequence
  Description of Artificial Sequence: Synthetic oligonucleotide
cccuccggacugcuccauu

SEQ ID NO: 1704071 - RNA, 19 nt, Artificial Sequence
  Description of Artificial Sequence: Synthetic oligonucleotide
gcgugcgcaguaggcucuu

SEQ ID NO: 1704072 - RNA, 19 nt, Artificial Sequence
  Description of Artificial Sequence: Synthetic oligonucleotide
cgagcccgccuccuugguu

SEQ ID NO: 1704073 - RNA, 19 nt, Artificial Sequence
  Description of Artificial Sequence: Synthetic oligonucleotide
ccguagcugcggguuccgu

SEQ ID NO: 1704074 - RNA, 19 nt, Artificial Sequence
  Description of Artificial Sequence: Synthetic oligonucleotide
cgcuuccgacacggaggca

SEQ ID NO: 1704075 - RNA, 19 nt, Artificial Sequence
  Description of Artificial Sequence: Synthetic oligonucleotide
ccgggcuagcgcggcccgu

SEQ ID NO: 1704076 - RNA, 19 nt, Artificial Sequence
  Description of Artificial Sequence: Synthetic oligonucleotide
cgcggcccgugggaucugu

SEQ ID NO: 1704077 - RNA, 19 nt, Artificial Sequence
  Description of Artificial Sequence: Synthetic oligonucleotide
uauguuauuugaaugaagg

SEQ ID NO: 1704078 - RNA, 19 nt, Artificial Sequence
  Description of Artificial Sequence: Synthetic oligonucleotide
auuccuauaauuuaagaac

SEQ ID NO: 1704079 - RNA, 19 nt, Artificial Sequence
  Description of Artificial Sequence: Synthetic oligonucleotide
uuuacaagggacccgaugg

SEQ ID NO: 1704080 - RNA, 19 nt, Artificial Sequence
  Description of Artificial Sequence: Synthetic oligonucleotide
aaugucuagugucugcagc

SEQ ID NO: 1704081 - RNA, 19 nt, Artificial Sequence
  Description of Artificial Sequence: Synthetic oligonucleotide
aauuccuauaauuuaagaa

SEQ ID NO: 1704082 - RNA, 19 nt, Artificial Sequence
  Description of Artificial Sequence: Synthetic oligonucleotide
aaagcuagcaaacgauugg

SEQ ID NO: 1704083 - RNA, 19 nt, Artificial Sequence
  Description of Artificial Sequence: Synthetic oligonucleotide
uuuuggaaacuuaugguag

SEQ ID NO: 1704084 - RNA, 19 nt, Artificial Sequence
  Description of Artificial Sequence: Synthetic oligonucleotide
aaagucugcagacacuggg

SEQ ID NO: 1704085 - RNA, 19 nt, Artificial Sequence
  Description of Artificial Sequence: Synthetic oligonucleotide
aacuauguuauuugaauga

SEQ ID NO: 1704086 - RNA, 19 nt, Artificial Sequence
  Description of Artificial Sequence: Synthetic oligonucleotide
uucaauaacuccaauggga

SEQ ID NO: 1704087 - RNA, 19 nt, Artificial Sequence
  Description of Artificial Sequence: Synthetic oligonucleotide
aacaugucugaucacgcac

SEQ ID NO: 1704088 - RNA, 19 nt, Artificial Sequence
  Description of Artificial Sequence: Synthetic oligonucleotide
ucucagacgaccaauuucc

SEQ ID NO: 1704089 - RNA, 19 nt, Artificial Sequence
  Description of Artificial Sequence: Synthetic oligonucleotide
gauguuguuauccacguac

SEQ ID NO: 1704090 - RNA, 19 nt, Artificial Sequence
  Description of Artificial Sequence: Synthetic oligonucleotide
aauuguaguugguuguuag

SEQ ID NO: 1704091 - RNA, 19 nt, Artificial Sequence
  Description of Artificial Sequence: Synthetic oligonucleotide
aagaacaaauucuugugcu

SEQ ID NO: 1704092 - RNA, 19 nt, Artificial Sequence
  Description of Artificial Sequence: Synthetic oligonucleotide
ugaguguuuaucaacucag

SEQ ID NO: 1704093 - RNA, 19 nt, Artificial Sequence
  Description of Artificial Sequence: Synthetic oligonucleotide
uuccuauaauuuaagaaca

SEQ ID NO: 1704094 - RNA, 19 nt, Artificial Sequence
  Description of Artificial Sequence: Synthetic oligonucleotide
ucuggaaccacaacuaugu

SEQ ID NO: 1704095 - RNA, 19 nt, Artificial Sequence
  Description of Artificial Sequence: Synthetic oligonucleotide
uaaacaugggcucacuaca

SEQ ID NO: 1704096 - RNA, 19 nt, Artificial Sequence
  Description of Artificial Sequence: Synthetic oligonucleotide
aaacacuggaguuuuacaa

SEQ ID NO: 1704097 - RNA, 19 nt, Artificial Sequence
  Description of Artificial Sequence: Synthetic oligonucleotide
uuguuauccacguacacgu

SEQ ID NO: 1704098 - RNA, 19 nt, Artificial Sequence
  Description of Artificial Sequence: Synthetic oligonucleotide
uaaagcuagcaaacgauug

SEQ ID NO: 1704099 - RNA, 19 nt, Artificial Sequence
  Description of Artificial Sequence: Synthetic oligonucleotide
aacucagcaggucaaaagu

SEQ ID NO: 1704100 - RNA, 19 nt, Artificial Sequence
  Description of Artificial Sequence: Synthetic oligonucleotide
aagguacaguuccacaagg

SEQ ID NO: 1704101 - RNA, 19 nt, Artificial Sequence
  Description of Artificial Sequence: Synthetic oligonucleotide
aaauuccuauaauuuaaga

SEQ ID NO: 1704102 - RNA, 19 nt, Artificial Sequence
  Description of Artificial Sequence: Synthetic oligonucleotide
guuauuugaaugaagguac

SEQ ID NO: 1704103 - RNA, 19 nt, Artificial Sequence
  Description of Artificial Sequence: Synthetic oligonucleotide
gaucgucuuacaaaguucg

SEQ ID NO: 1704104 - RNA, 19 nt, Artificial Sequence
  Description of Artificial Sequence: Synthetic oligonucleotide
uuugaaugaagguacaguu

SEQ ID NO: 1704105 - RNA, 19 nt, Artificial Sequence
  Description of Artificial Sequence: Synthetic oligonucleotide
aaacgauugguagaaaugu

SEQ ID NO: 1704106 - RNA, 19 nt, Artificial Sequence
  Description of Artificial Sequence: Synthetic oligonucleotide
ucgaagaugacguaaugcu

SEQ ID NO: 1704107 - RNA, 19 nt, Artificial Sequence
  Description of Artificial Sequence: Synthetic oligonucleotide
aauaacuccaaugggaaau

SEQ ID NO: 1704108 - RNA, 19 nt, Artificial Sequence
  Description of Artificial Sequence: Synthetic oligonucleotide
aucggugucucucucaagg

SEQ ID NO: 1704109 - RNA, 19 nt, Artificial Sequence
  Description of Artificial Sequence: Synthetic oligonucleotide
ucaauaacuccaaugggaa

SEQ ID NO: 1704110 - RNA, 19 nt, Artificial Sequence
  Description of Artificial Sequence: Synthetic oligonucleotide
agcaguaagccacgaagcc

SEQ ID NO: 1704111 - RNA, 19 nt, Artificial Sequence
  Description of Artificial Sequence: Synthetic oligonucleotide
ugucugaucacgcacgcug

SEQ ID NO: 1704112 - RNA, 19 nt, Artificial Sequence
  Description of Artificial Sequence: Synthetic oligonucleotide
aaugagauuggagacaaaa

SEQ ID NO: 1704113 - RNA, 19 nt, Artificial Sequence
  Description of Artificial Sequence: Synthetic oligonucleotide
uguuauuugaaugaaggua

SEQ ID NO: 1704114 - RNA, 19 nt, Artificial Sequence
  Description of Artificial Sequence: Synthetic oligonucleotide
ucucucaaggggaagagcu

SEQ ID NO: 1704115 - RNA, 19 nt, Artificial Sequence
  Description of Artificial Sequence: Synthetic oligonucleotide
gacauggucauccugugug

SEQ ID NO: 1704116 - RNA, 19 nt, Artificial Sequence
  Description of Artificial Sequence: Synthetic oligonucleotide
aaugcaagacgguuuccag

SEQ ID NO: 1704117 - RNA, 19 nt, Artificial Sequence
  Description of Artificial Sequence: Synthetic oligonucleotide
cagagaucgucuuacaaag

SEQ ID NO: 1704118 - RNA, 19 nt, Artificial Sequence
  Description of Artificial Sequence: Synthetic oligonucleotide
aaauggugcaaauuccuau

SEQ ID NO: 1704119 - RNA, 19 nt, Artificial Sequence
  Description of Artificial Sequence: Synthetic oligonucleotide
gaugacguaaugcucucag

SEQ ID NO: 1704120 - RNA, 19 nt, Artificial Sequence
  Description of Artificial Sequence: Synthetic oligonucleotide
uagcuaaucgaagaugacg

SEQ ID NO: 1704121 - RNA, 19 nt, Artificial Sequence
  Description of Artificial Sequence: Synthetic oligonucleotide
acaacuauguuauuugaau

SEQ ID NO: 1704122 - RNA, 19 nt, Artificial Sequence
  Description of Artificial Sequence: Synthetic oligonucleotide
ugcaagacgguuuccagcc

SEQ ID NO: 1704123 - RNA, 19 nt, Artificial Sequence
  Description of Artificial Sequence: Synthetic oligonucleotide
uugguuguuagcuaaucga

SEQ ID NO: 1704124 - RNA, 19 nt, Artificial Sequence
  Description of Artificial Sequence: Synthetic oligonucleotide
uugaguguuuaucaacuca

SEQ ID NO: 1704125 - RNA, 19 nt, Artificial Sequence
  Description of Artificial Sequence: Synthetic oligonucleotide
gacguaaugcucucagacg

SEQ ID NO: 1704126 - RNA, 19 nt, Artificial Sequence
  Description of Artificial Sequence: Synthetic oligonucleotide
cuacaucuugucaaaauug

SEQ ID NO: 1704127 - RNA, 19 nt, Artificial Sequence
  Description of Artificial Sequence: Synthetic oligonucleotide
ugaacaugucugaucacgc

SEQ ID NO: 1704128 - RNA, 19 nt, Artificial Sequence
  Description of Artificial Sequence: Synthetic oligonucleotide
aguguuuaucaacucagca

SEQ ID NO: 1704129 - RNA, 19 nt, Artificial Sequence
  Description of Artificial Sequence: Synthetic oligonucleotide
aaaucgccaaccucuggag

SEQ ID NO: 1704130 - RNA, 19 nt, Artificial Sequence
  Description of Artificial Sequence: Synthetic oligonucleotide
aauuuccgggcaaacaauc

SEQ ID NO: 1704131 - RNA, 19 nt, Artificial Sequence
  Description of Artificial Sequence: Synthetic oligonucleotide
aaauucuugugcuuuucaa

SEQ ID NO: 1704132 - RNA, 19 nt, Artificial Sequence
  Description of Artificial Sequence: Synthetic oligonucleotide
accacaacuauguuauuug

SEQ ID NO: 1704133 - RNA, 19 nt, Artificial Sequence
  Description of Artificial Sequence: Synthetic oligonucleotide
cuuaugguaggugugguag

SEQ ID NO: 1704134 - RNA, 19 nt, Artificial Sequence
  Description of Artificial Sequence: Synthetic oligonucleotide
agcgcccuaaaucaagugg

SEQ ID NO: 1704135 - RNA, 19 nt, Artificial Sequence
  Description of Artificial Sequence: Synthetic oligonucleotide
ugaagguacaguuccacaa

SEQ ID NO: 1704136 - RNA, 19 nt, Artificial Sequence
  Description of Artificial Sequence: Synthetic oligonucleotide
caaacgauugguagaaaug

SEQ ID NO: 1704137 - RNA, 19 nt, Artificial Sequence
  Description of Artificial Sequence: Synthetic oligonucleotide
aaaguucggaugccaugac

SEQ ID NO: 1704138 - RNA, 19 nt, Artificial Sequence
  Description of Artificial Sequence: Synthetic oligonucleotide
aagaugacguaaugcucuc

SEQ ID NO: 1704139 - RNA, 19 nt, Artificial Sequence
  Description of Artificial Sequence: Synthetic oligonucleotide
acguaaugcucucagacga

SEQ ID NO: 1704140 - RNA, 19 nt, Artificial Sequence
  Description of Artificial Sequence: Synthetic oligonucleotide
aaucgaagaugacguaaug

SEQ ID NO: 1704141 - RNA, 19 nt, Artificial Sequence
  Description of Artificial Sequence: Synthetic oligonucleotide
aauggugcaaauuccuaua

SEQ ID NO: 1704142 - RNA, 19 nt, Artificial Sequence
  Description of Artificial Sequence: Synthetic oligonucleotide
guuguuagcuaaucgaaga

SEQ ID NO: 1704143 - RNA, 19 nt, Artificial Sequence
  Description of Artificial Sequence: Synthetic oligonucleotide
agauuuucuggcaagguug

SEQ ID NO: 1704144 - RNA, 19 nt, Artificial Sequence
  Description of Artificial Sequence: Synthetic oligonucleotide
cugaacaugucugaucacg

SEQ ID NO: 1704145 - RNA, 19 nt, Artificial Sequence
  Description of Artificial Sequence: Synthetic oligonucleotide
guaaacaugggcucacuac

SEQ ID NO: 1704146 - RNA, 19 nt, Artificial Sequence
  Description of Artificial Sequence: Synthetic oligonucleotide
uuguaguugguuguuagcu

SEQ ID NO: 1704147 - RNA, 19 nt, Artificial Sequence
  Description of Artificial Sequence: Synthetic oligonucleotide
ucggguaaagcuagcaaac

SEQ ID NO: 1704148 - RNA, 19 nt, Artificial Sequence
  Description of Artificial Sequence: Synthetic oligonucleotide
acauggucauccugugugc

SEQ ID NO: 1704149 - RNA, 19 nt, Artificial Sequence
  Description of Artificial Sequence: Synthetic oligonucleotide
ugguagagacuccgcaugg

SEQ ID NO: 1704150 - RNA, 19 nt, Artificial Sequence
  Description of Artificial Sequence: Synthetic oligonucleotide
aaacaugggcucacuacac

SEQ ID NO: 1704151 - RNA, 19 nt, Artificial Sequence
  Description of Artificial Sequence: Synthetic oligonucleotide
ugguuguuagcuaaucgaa

SEQ ID NO: 1704152 - RNA, 19 nt, Artificial Sequence
  Description of Artificial Sequence: Synthetic oligonucleotide
acagagaucgucuuacaaa

SEQ ID NO: 1704153 - RNA, 19 nt, Artificial Sequence
  Description of Artificial Sequence: Synthetic oligonucleotide
gggcaaacaaucucuaagg

SEQ ID NO: 1704154 - RNA, 19 nt, Artificial Sequence
  Description of Artificial Sequence: Synthetic oligonucleotide
uuauccacguacacguacu

SEQ ID NO: 1704155 - RNA, 19 nt, Artificial Sequence
  Description of Artificial Sequence: Synthetic oligonucleotide
uaaucgaagaugacguaau

SEQ ID NO: 1704156 - RNA, 19 nt, Artificial Sequence
  Description of Artificial Sequence: Synthetic oligonucleotide
ugguagaaaugucuagugu

SEQ ID NO: 1704157 - RNA, 19 nt, Artificial Sequence
  Description of Artificial Sequence: Synthetic oligonucleotide
aggaauuguaguugguugu

SEQ ID NO: 1704158 - RNA, 19 nt, Artificial Sequence
  Description of Artificial Sequence: Synthetic oligonucleotide
aaucucuaaggcauuguca

SEQ ID NO: 1704159 - RNA, 19 nt, Artificial Sequence
  Description of Artificial Sequence: Synthetic oligonucleotide
cuccuaaggcucuugagug

SEQ ID NO: 1704160 - RNA, 19 nt, Artificial Sequence
  Description of Artificial Sequence: Synthetic oligonucleotide
gaaacuuaugguaggugug

SEQ ID NO: 1704161 - RNA, 19 nt, Artificial Sequence
  Description of Artificial Sequence: Synthetic oligonucleotide
caaaagucugcagacacug

SEQ ID NO: 1704162 - RNA, 19 nt, Artificial Sequence
  Description of Artificial Sequence: Synthetic oligonucleotide
uuuggaagcuucugggcga

SEQ ID NO: 1704163 - RNA, 19 nt, Artificial Sequence
  Description of Artificial Sequence: Synthetic oligonucleotide
cucacuacaccggugacag

SEQ ID NO: 1704164 - RNA, 19 nt, Artificial Sequence
  Description of Artificial Sequence: Synthetic oligonucleotide
ucaaaucgccaaccucugg

SEQ ID NO: 1704165 - RNA, 19 nt, Artificial Sequence
  Description of Artificial Sequence: Synthetic oligonucleotide
gcuagcaaacgauugguag

SEQ ID NO: 1704166 - RNA, 19 nt, Artificial Sequence
  Description of Artificial Sequence: Synthetic oligonucleotide
cuuuuggaaacuuauggua

SEQ ID NO: 1704167 - RNA, 19 nt, Artificial Sequence
  Description of Artificial Sequence: Synthetic oligonucleotide
ugaucacgcacgcugcagc

SEQ ID NO: 1704168 - RNA, 19 nt, Artificial Sequence
  Description of Artificial Sequence: Synthetic oligonucleotide
uuguuagcuaaucgaagau

SEQ ID NO: 1704169 - RNA, 19 nt, Artificial Sequence
  Description of Artificial Sequence: Synthetic oligonucleotide
uuacaagggacccgauggc

SEQ ID NO: 1704170 - RNA, 19 nt, Artificial Sequence
  Description of Artificial Sequence: Synthetic oligonucleotide
gauggcgcggcacacacca

SEQ ID NO: 1704171 - RNA, 19 nt, Artificial Sequence
  Description of Artificial Sequence: Synthetic oligonucleotide
gauugcgguccacagugag

SEQ ID NO: 1704172 - RNA, 19 nt, Artificial Sequence
  Description of Artificial Sequence: Synthetic oligonucleotide
cuggguaaugagauuggag

SEQ ID NO: 1704173 - RNA, 19 nt, Artificial Sequence
  Description of Artificial Sequence: Synthetic oligonucleotide
uuccgggcaaacaaucucu

SEQ ID NO: 1704174 - RNA, 19 nt, Artificial Sequence
  Description of Artificial Sequence: Synthetic oligonucleotide
uucuuuucauauagagccu

SEQ ID NO: 1704175 - RNA, 19 nt, Artificial Sequence
  Description of Artificial Sequence: Synthetic oligonucleotide
cuggcagugcuccuaaggc

SEQ ID NO: 1704176 - RNA, 19 nt, Artificial Sequence
  Description of Artificial Sequence: Synthetic oligonucleotide
uggauguuguuauccacgu

SEQ ID NO: 1704177 - RNA, 19 nt, Artificial Sequence
  Description of Artificial Sequence: Synthetic oligonucleotide
guuauccacguacacguac

SEQ ID NO: 1704178 - RNA, 19 nt, Artificial Sequence
  Description of Artificial Sequence: Synthetic oligonucleotide
uuagcuaaucgaagaugac

SEQ ID NO: 1704179 - RNA, 19 nt, Artificial Sequence
  Description of Artificial Sequence: Synthetic oligonucleotide
gaagccaacaguuguccuc

SEQ ID NO: 1704180 - RNA, 19 nt, Artificial Sequence
  Description of Artificial Sequence: Synthetic oligonucleotide
agagacuccgcauggccag

SEQ ID NO: 1704181 - RNA, 19 nt, Artificial Sequence
  Description of Artificial Sequence: Synthetic oligonucleotide
cuucaaaucgccaaccucu

SEQ ID NO: 1704182 - RNA, 19 nt, Artificial Sequence
  Description of Artificial Sequence: Synthetic oligonucleotide
cagaugaaaaggacagcag

SEQ ID NO: 1704183 - RNA, 19 nt, Artificial Sequence
  Description of Artificial Sequence: Synthetic oligonucleotide
aguucggaugccaugacug

SEQ ID NO: 1704184 - RNA, 19 nt, Artificial Sequence
  Description of Artificial Sequence: Synthetic oligonucleotide
gagguaggaauuguaguug

SEQ ID NO: 1704185 - RNA, 19 nt, Artificial Sequence
  Description of Artificial Sequence: Synthetic oligonucleotide
augucuagugucugcagcu

SEQ ID NO: 1704186 - RNA, 19 nt, Artificial Sequence
  Description of Artificial Sequence: Synthetic oligonucleotide
uuuccgggcaaacaaucuc

SEQ ID NO: 1704187 - RNA, 19 nt, Artificial Sequence
  Description of Artificial Sequence: Synthetic oligonucleotide
auauagagccucuccagau

SEQ ID NO: 1704188 - RNA, 19 nt, Artificial Sequence
  Description of Artificial Sequence: Synthetic oligonucleotide
aaguucggaugccaugacu

SEQ ID NO: 1704189 - RNA, 19 nt, Artificial Sequence
  Description of Artificial Sequence: Synthetic oligonucleotide
agaucgucuuacaaaguuc

SEQ ID NO: 1704190 - RNA, 19 nt, Artificial Sequence
  Description of Artificial Sequence: Synthetic oligonucleotide
guagagacuccgcauggcc

SEQ ID NO: 1704191 - RNA, 19 nt, Artificial Sequence
  Description of Artificial Sequence: Synthetic oligonucleotide
cugggcgagauuuucuggc

SEQ ID NO: 1704192 - RNA, 19 nt, Artificial Sequence
  Description of Artificial Sequence: Synthetic oligonucleotide
ugugccgauggccuucacc

SEQ ID NO: 1704193 - RNA, 19 nt, Artificial Sequence
  Description of Artificial Sequence: Synthetic oligonucleotide
cuagcaaacgauugguaga

SEQ ID NO: 1704194 - RNA, 19 nt, Artificial Sequence
  Description of Artificial Sequence: Synthetic oligonucleotide
ucgucuuacaaaguucgga

SEQ ID NO: 1704195 - RNA, 19 nt, Artificial Sequence
  Description of Artificial Sequence: Synthetic oligonucleotide
uaucaacucagcaggucaa

SEQ ID NO: 1704196 - RNA, 19 nt, Artificial Sequence
  Description of Artificial Sequence: Synthetic oligonucleotide
acaugucugaucacgcacg

SEQ ID NO: 1704197 - RNA, 19 nt, Artificial Sequence
  Description of Artificial Sequence: Synthetic oligonucleotide
aaccacaacuauguuauuu

SEQ ID NO: 1704198 - RNA, 19 nt, Artificial Sequence
  Description of Artificial Sequence: Synthetic oligonucleotide
auagacgaagguaaacaug

SEQ ID NO: 1704199 - RNA, 19 nt, Artificial Sequence
  Description of Artificial Sequence: Synthetic oligonucleotide
cacuacaccggugacagug

SEQ ID NO: 1704200 - RNA, 19 nt, Artificial Sequence
  Description of Artificial Sequence: Synthetic oligonucleotide
gaagaugacguaaugcucu

SEQ ID NO: 1704201 - RNA, 19 nt, Artificial Sequence
  Description of Artificial Sequence: Synthetic oligonucleotide
gucuuacaaaguucggaug

SEQ ID NO: 1704202 - RNA, 19 nt, Artificial Sequence
  Description of Artificial Sequence: Synthetic oligonucleotide
uacaaaguucggaugccau

SEQ ID NO: 1704203 - RNA, 19 nt, Artificial Sequence
  Description of Artificial Sequence: Synthetic oligonucleotide
auggucauccugugugccg

SEQ ID NO: 1704204 - RNA, 19 nt, Artificial Sequence
  Description of Artificial Sequence: Synthetic oligonucleotide
cuuacaaaguucggaugcc

SEQ ID NO: 1704205 - RNA, 19 nt, Artificial Sequence
  Description of Artificial Sequence: Synthetic oligonucleotide
uguaguugguuguuagcua

SEQ ID NO: 1704206 - RNA, 19 nt, Artificial Sequence
  Description of Artificial Sequence: Synthetic oligonucleotide
caaucucuaaggcauuguc

SEQ ID NO: 1704207 - RNA, 19 nt, Artificial Sequence
  Description of Artificial Sequence: Synthetic oligonucleotide
gaagagcuugggauagacg

SEQ ID NO: 1704208 - RNA, 19 nt, Artificial Sequence
  Description of Artificial Sequence: Synthetic oligonucleotide
ucucggguaaagcuagcaa

SEQ ID NO: 1704209 - RNA, 19 nt, Artificial Sequence
  Description of Artificial Sequence: Synthetic oligonucleotide
uuuaucaacucagcagguc

SEQ ID NO: 1704210 - RNA, 19 nt, Artificial Sequence
  Description of Artificial Sequence: Synthetic oligonucleotide
acccgauggcuucuggaac

SEQ ID NO: 1704211 - RNA, 19 nt, Artificial Sequence
  Description of Artificial Sequence: Synthetic oligonucleotide
cucucagacgaccaauuuc

SEQ ID NO: 1704212 - RNA, 19 nt, Artificial Sequence
  Description of Artificial Sequence: Synthetic oligonucleotide
gagcuugggauagacgaag

SEQ ID NO: 1704213 - RNA, 19 nt, Artificial Sequence
  Description of Artificial Sequence: Synthetic oligonucleotide
acuauguuauuugaaugaa

SEQ ID NO: 1704214 - RNA, 19 nt, Artificial Sequence
  Description of Artificial Sequence: Synthetic oligonucleotide
ucggaugccaugacugaac

SEQ ID NO: 1704215 - RNA, 19 nt, Artificial Sequence
  Description of Artificial Sequence: Synthetic oligonucleotide
acugcagccgaugacuuug

SEQ ID NO: 1704216 - RNA, 19 nt, Artificial Sequence
  Description of Artificial Sequence: Synthetic oligonucleotide
guaguugguuguuagcuaa

SEQ ID NO: 1704217 - RNA, 19 nt, Artificial Sequence
  Description of Artificial Sequence: Synthetic oligonucleotide
acguacugcaguucucgag

SEQ ID NO: 1704218 - RNA, 19 nt, Artificial Sequence
  Description of Artificial Sequence: Synthetic oligonucleotide
aggaagacggucagcugcc

SEQ ID NO: 1704219 - RNA, 19 nt, Artificial Sequence
  Description of Artificial Sequence: Synthetic oligonucleotide
uagcaaacgauugguagaa

SEQ ID NO: 1704220 - RNA, 19 nt, Artificial Sequence
  Description of Artificial Sequence: Synthetic oligonucleotide
gauagacgaagguaaacau

SEQ ID NO: 1704221 - RNA, 19 nt, Artificial Sequence
  Description of Artificial Sequence: Synthetic oligonucleotide
cuugaguguuuaucaacuc

SEQ ID NO: 1704222 - RNA, 19 nt, Artificial Sequence
  Description of Artificial Sequence: Synthetic oligonucleotide
ugcaguucucgagagcgcc

SEQ ID NO: 1704223 - RNA, 19 nt, Artificial Sequence
  Description of Artificial Sequence: Synthetic oligonucleotide
ugcuccuaaggcucuugag

SEQ ID NO: 1704224 - RNA, 19 nt, Artificial Sequence
  Description of Artificial Sequence: Synthetic oligonucleotide
guaaugagauuggagacaa

SEQ ID NO: 1704225 - RNA, 19 nt, Artificial Sequence
  Description of Artificial Sequence: Synthetic oligonucleotide
gaugggauggaagggucug

SEQ ID NO: 1704226 - RNA, 19 nt, Artificial Sequence
  Description of Artificial Sequence: Synthetic oligonucleotide
ugagugaguuucuuuucau

SEQ ID NO: 1704227 - RNA, 19 nt, Artificial Sequence
  Description of Artificial Sequence: Synthetic oligonucleotide
gcaaacaaucucuaaggca

SEQ ID NO: 1704228 - RNA, 19 nt, Artificial Sequence
  Description of Artificial Sequence: Synthetic oligonucleotide
uuggaaacuuaugguaggu

SEQ ID NO: 1704229 - RNA, 19 nt, Artificial Sequence
  Description of Artificial Sequence: Synthetic oligonucleotide
agcacuacaucuugucaaa

SEQ ID NO: 1704230 - RNA, 19 nt, Artificial Sequence
  Description of Artificial Sequence: Synthetic oligonucleotide
aacuuaugguagguguggu

SEQ ID NO: 1704231 - RNA, 19 nt, Artificial Sequence
  Description of Artificial Sequence: Synthetic oligonucleotide
cucagacgaccaauuuccg

SEQ ID NO: 1704232 - RNA, 19 nt, Artificial Sequence
  Description of Artificial Sequence: Synthetic oligonucleotide
cucggguaaagcuagcaaa

SEQ ID NO: 1704233 - RNA, 19 nt, Artificial Sequence
  Description of Artificial Sequence: Synthetic oligonucleotide
acuacaccggugacagugc

SEQ ID NO: 1704234 - RNA, 19 nt, Artificial Sequence
  Description of Artificial Sequence: Synthetic oligonucleotide
caaaguucggaugccauga

SEQ ID NO: 1704235 - RNA, 19 nt, Artificial Sequence
  Description of Artificial Sequence: Synthetic oligonucleotide
auggugcaaauuccuauaa

SEQ ID NO: 1704236 - RNA, 19 nt, Artificial Sequence
  Description of Artificial Sequence: Synthetic oligonucleotide
uggugcaaauuccuauaau

SEQ ID NO: 1704237 - RNA, 19 nt, Artificial Sequence
  Description of Artificial Sequence: Synthetic oligonucleotide
ucuggguaaugagauugga

SEQ ID NO: 1704238 - RNA, 19 nt, Artificial Sequence
  Description of Artificial Sequence: Synthetic oligonucleotide
ggaaacuuaugguaggugu

SEQ ID NO: 1704239 - RNA, 19 nt, Artificial Sequence
  Description of Artificial Sequence: Synthetic oligonucleotide
ggauagacgaagguaaaca

SEQ ID NO: 1704240 - RNA, 19 nt, Artificial Sequence
  Description of Artificial Sequence: Synthetic oligonucleotide
cuaaucgaagaugacguaa

SEQ ID NO: 1704241 - RNA, 19 nt, Artificial Sequence
  Description of Artificial Sequence: Synthetic oligonucleotide
uacaccggugacagugccc

SEQ ID NO: 1704242 - RNA, 19 nt, Artificial Sequence
  Description of Artificial Sequence: Synthetic oligonucleotide
gguuguuagcuaaucgaag

SEQ ID NO: 1704243 - RNA, 19 nt, Artificial Sequence
  Description of Artificial Sequence: Synthetic oligonucleotide
uccuaaggcucuugagugu

SEQ ID NO: 1704244 - RNA, 19 nt, Artificial Sequence
  Description of Artificial Sequence: Synthetic oligonucleotide
gaagccucucggguaaagc

SEQ ID NO: 1704245 - RNA, 19 nt, Artificial Sequence
  Description of Artificial Sequence: Synthetic oligonucleotide
ugggcgagauuuucuggca

SEQ ID NO: 1704246 - RNA, 19 nt, Artificial Sequence
  Description of Artificial Sequence: Synthetic oligonucleotide
auugcgguccacagugagg

SEQ ID NO: 1704247 - RNA, 19 nt, Artificial Sequence
  Description of Artificial Sequence: Synthetic oligonucleotide
gagaucgucuuacaaaguu

SEQ ID NO: 1704248 - RNA, 19 nt, Artificial Sequence
  Description of Artificial Sequence: Synthetic oligonucleotide
cagccgaugacuuuguugu

SEQ ID NO: 1704249 - RNA, 19 nt, Artificial Sequence
  Description of Artificial Sequence: Synthetic oligonucleotide
cacgaagccaacaguuguc

SEQ ID NO: 1704250 - RNA, 19 nt, Artificial Sequence
  Description of Artificial Sequence: Synthetic oligonucleotide
augacguaaugcucucaga

SEQ ID NO: 1704251 - RNA, 19 nt, Artificial Sequence
  Description of Artificial Sequence: Synthetic oligonucleotide
guacugcagagaaaggcac

SEQ ID NO: 1704252 - RNA, 19 nt, Artificial Sequence
  Description of Artificial Sequence: Synthetic oligonucleotide
ucaacucagcaggucaaaa

SEQ ID NO: 1704253 - RNA, 19 nt, Artificial Sequence
  Description of Artificial Sequence: Synthetic oligonucleotide
gaucacgcacgcugcagca

SEQ ID NO: 1704254 - RNA, 19 nt, Artificial Sequence
  Description of Artificial Sequence: Synthetic oligonucleotide
cagcacuacaucuugucaa

SEQ ID NO: 1704255 - RNA, 19 nt, Artificial Sequence
  Description of Artificial Sequence: Synthetic oligonucleotide
accaauuuccgggcaaaca

SEQ ID NO: 1704256 - RNA, 19 nt, Artificial Sequence
  Description of Artificial Sequence: Synthetic oligonucleotide
agccgauugcgguccacag

SEQ ID NO: 1704257 - RNA, 19 nt, Artificial Sequence
  Description of Artificial Sequence: Synthetic oligonucleotide
ccgauugcgguccacagug

SEQ ID NO: 1704258 - RNA, 19 nt, Artificial Sequence
  Description of Artificial Sequence: Synthetic oligonucleotide
uggcaagguugugagugag

SEQ ID NO: 1704259 - RNA, 19 nt, Artificial Sequence
  Description of Artificial Sequence: Synthetic oligonucleotide
ggguaaagcuagcaaacga

SEQ ID NO: 1704260 - RNA, 19 nt, Artificial Sequence
  Description of Artificial Sequence: Synthetic oligonucleotide
gacccgauggcuucuggaa

SEQ ID NO: 1704261 - RNA, 19 nt, Artificial Sequence
  Description of Artificial Sequence: Synthetic oligonucleotide
cacacaccauagccgauug

SEQ ID NO: 1704262 - RNA, 19 nt, Artificial Sequence
  Description of Artificial Sequence: Synthetic oligonucleotide
cuacaccggugacagugcc

SEQ ID NO: 1704263 - RNA, 19 nt, Artificial Sequence
  Description of Artificial Sequence: Synthetic oligonucleotide
gguaaugagauuggagaca

SEQ ID NO: 1704264 - RNA, 19 nt, Artificial Sequence
  Description of Artificial Sequence: Synthetic oligonucleotide
uacacguacugcaguucuc

SEQ ID NO: 1704265 - RNA, 19 nt, Artificial Sequence
  Description of Artificial Sequence: Synthetic oligonucleotide
aucgucuuacaaaguucgg

SEQ ID NO: 1704266 - RNA, 19 nt, Artificial Sequence
  Description of Artificial Sequence: Synthetic oligonucleotide
uuggaagcuucugggcgag

SEQ ID NO: 1704267 - RNA, 19 nt, Artificial Sequence
  Description of Artificial Sequence: Synthetic oligonucleotide
ggauggcaggccuuucagg

SEQ ID NO: 1704268 - RNA, 19 nt, Artificial Sequence
  Description of Artificial Sequence: Synthetic oligonucleotide
auuuccgggcaaacaaucu

SEQ ID NO: 1704269 - RNA, 19 nt, Artificial Sequence
  Description of Artificial Sequence: Synthetic oligonucleotide
acuuaugguagguguggua

SEQ ID NO: 1704270 - RNA, 19 nt, Artificial Sequence
  Description of Artificial Sequence: Synthetic oligonucleotide
gagcgcccuaaaucaagug

SEQ ID NO: 1704271 - RNA, 19 nt, Artificial Sequence
  Description of Artificial Sequence: Synthetic oligonucleotide
ggcgagauuuucuggcaag

SEQ ID NO: 1704272 - RNA, 19 nt, Artificial Sequence
  Description of Artificial Sequence: Synthetic oligonucleotide
uaguugguuguuagcuaau

SEQ ID NO: 1704273 - RNA, 19 nt, Artificial Sequence
  Description of Artificial Sequence: Synthetic oligonucleotide
caagggacccgauggcuuc

SEQ ID NO: 1704274 - RNA, 19 nt, Artificial Sequence
  Description of Artificial Sequence: Synthetic oligonucleotide
acaaucucuaaggcauugu

SEQ ID NO: 1704275 - RNA, 19 nt, Artificial Sequence
  Description of Artificial Sequence: Synthetic oligonucleotide
ugaagccucucggguaaag

SEQ ID NO: 1704276 - RNA, 19 nt, Artificial Sequence
  Description of Artificial Sequence: Synthetic oligonucleotide
uguuauccacguacacgua

SEQ ID NO: 1704277 - RNA, 19 nt, Artificial Sequence
  Description of Artificial Sequence: Synthetic oligonucleotide
agcuugggauagacgaagg

SEQ ID NO: 1704278 - RNA, 19 nt, Artificial Sequence
  Description of Artificial Sequence: Synthetic oligonucleotide
acguacacguacugcaguu

SEQ ID NO: 1704279 - RNA, 19 nt, Artificial Sequence
  Description of Artificial Sequence: Synthetic oligonucleotide
gacuucuggguaaugagau

SEQ ID NO: 1704280 - RNA, 19 nt, Artificial Sequence
  Description of Artificial Sequence: Synthetic oligonucleotide
uucggaugccaugacugaa

SEQ ID NO: 1704281 - RNA, 19 nt, Artificial Sequence
  Description of Artificial Sequence: Synthetic oligonucleotide
uucucgagagcgcccuaaa

SEQ ID NO: 1704282 - RNA, 19 nt, Artificial Sequence
  Description of Artificial Sequence: Synthetic oligonucleotide
uccgggcaaacaaucucua

SEQ ID NO: 1704283 - RNA, 19 nt, Artificial Sequence
  Description of Artificial Sequence: Synthetic oligonucleotide
guacacguacugcaguucu

SEQ ID NO: 1704284 - RNA, 19 nt, Artificial Sequence
  Description of Artificial Sequence: Synthetic oligonucleotide
caauaacuccaaugggaaa

SEQ ID NO: 1704285 - RNA, 19 nt, Artificial Sequence
  Description of Artificial Sequence: Synthetic oligonucleotide
ugccaugacugaacauguc

SEQ ID NO: 1704286 - RNA, 19 nt, Artificial Sequence
  Description of Artificial Sequence: Synthetic oligonucleotide
cgggcaaacaaucucuaag

SEQ ID NO: 1704287 - RNA, 19 nt, Artificial Sequence
  Description of Artificial Sequence: Synthetic oligonucleotide
acgaccaauuuccgggcaa

SEQ ID NO: 1704288 - RNA, 19 nt, Artificial Sequence
  Description of Artificial Sequence: Synthetic oligonucleotide
cacagagaucgucuuacaa

SEQ ID NO: 1704289 - RNA, 19 nt, Artificial Sequence
  Description of Artificial Sequence: Synthetic oligonucleotide
gucugaucacgcacgcugc

SEQ ID NO: 1704290 - RNA, 19 nt, Artificial Sequence
  Description of Artificial Sequence: Synthetic oligonucleotide
cugcaguucucgagagcgc

SEQ ID NO: 1704291 - RNA, 19 nt, Artificial Sequence
  Description of Artificial Sequence: Synthetic oligonucleotide
aggugaagccucucgggua

SEQ ID NO: 1704292 - RNA, 19 nt, Artificial Sequence
  Description of Artificial Sequence: Synthetic oligonucleotide
gacgguuuccagccaugga

SEQ ID NO: 1704293 - RNA, 19 nt, Artificial Sequence
  Description of Artificial Sequence: Synthetic oligonucleotide
cccgauggcuucuggaacc

SEQ ID NO: 1704294 - RNA, 19 nt, Artificial Sequence
  Description of Artificial Sequence: Synthetic oligonucleotide
gacgaccaauuuccgggca

SEQ ID NO: 1704295 - RNA, 19 nt, Artificial Sequence
  Description of Artificial Sequence: Synthetic oligonucleotide
gaauuguaguugguuguua

SEQ ID NO: 1704296 - RNA, 19 nt, Artificial Sequence
  Description of Artificial Sequence: Synthetic oligonucleotide
ccaauuuccgggcaaacaa

SEQ ID NO: 1704297 - RNA, 19 nt, Artificial Sequence
  Description of Artificial Sequence: Synthetic oligonucleotide
cugaucacgcacgcugcag

SEQ ID NO: 1704298 - RNA, 19 nt, Artificial Sequence
  Description of Artificial Sequence: Synthetic oligonucleotide
gcgcccuaaaucaaguggc

SEQ ID NO: 1704299 - RNA, 19 nt, Artificial Sequence
  Description of Artificial Sequence: Synthetic oligonucleotide
uagccgauugcgguccaca

SEQ ID NO: 1704300 - RNA, 19 nt, Artificial Sequence
  Description of Artificial Sequence: Synthetic oligonucleotide
agguacaguuccacaaggu

SEQ ID NO: 1704301 - RNA, 19 nt, Artificial Sequence
  Description of Artificial Sequence: Synthetic oligonucleotide
ggagacuucuggguaauga

SEQ ID NO: 1704302 - RNA, 19 nt, Artificial Sequence
  Description of Artificial Sequence: Synthetic oligonucleotide
gcgagauuuucuggcaagg

SEQ ID NO: 1704303 - RNA, 19 nt, Artificial Sequence
  Description of Artificial Sequence: Synthetic oligonucleotide
gccgaugacuuuguuguag

SEQ ID NO: 1704304 - RNA, 19 nt, Artificial Sequence
  Description of Artificial Sequence: Synthetic oligonucleotide
guuguccuccccuggugca

SEQ ID NO: 1704305 - RNA, 19 nt, Artificial Sequence
  Description of Artificial Sequence: Synthetic oligonucleotide
ggucuguuccacccggcug

SEQ ID NO: 1704306 - RNA, 19 nt, Artificial Sequence
  Description of Artificial Sequence: Synthetic oligonucleotide
uggcgcggcacacaccaua

SEQ ID NO: 1704307 - RNA, 19 nt, Artificial Sequence
  Description of Artificial Sequence: Synthetic oligonucleotide
accggugacagugccccag

SEQ ID NO: 1704308 - RNA, 19 nt, Artificial Sequence
  Description of Artificial Sequence: Synthetic oligonucleotide
agagaucgucuuacaaagu

SEQ ID NO: 1704309 - RNA, 19 nt, Artificial Sequence
  Description of Artificial Sequence: Synthetic oligonucleotide
caguuguccuccccuggug

SEQ ID NO: 1704310 - RNA, 19 nt, Artificial Sequence
  Description of Artificial Sequence: Synthetic oligonucleotide
caucggugucucucucaag

SEQ ID NO: 1704311 - RNA, 19 nt, Artificial Sequence
  Description of Artificial Sequence: Synthetic oligonucleotide
auagccgauugcgguccac

SEQ ID NO: 1704312 - RNA, 19 nt, Artificial Sequence
  Description of Artificial Sequence: Synthetic oligonucleotide
gguaaagcuagcaaacgau

SEQ ID NO: 1704313 - RNA, 19 nt, Artificial Sequence
  Description of Artificial Sequence: Synthetic oligonucleotide
agaugacguaaugcucuca

SEQ ID NO: 1704314 - RNA, 19 nt, Artificial Sequence
  Description of Artificial Sequence: Synthetic oligonucleotide
cacacgcugggcgacagca

SEQ ID NO: 1704315 - RNA, 19 nt, Artificial Sequence
  Description of Artificial Sequence: Synthetic oligonucleotide
ggcagugcuccuaaggcuc

SEQ ID NO: 1704316 - RNA, 19 nt, Artificial Sequence
  Description of Artificial Sequence: Synthetic oligonucleotide
gcuccuaaggcucuugagu

SEQ ID NO: 1704317 - RNA, 19 nt, Artificial Sequence
  Description of Artificial Sequence: Synthetic oligonucleotide
guaaagcuagcaaacgauu

SEQ ID NO: 1704318 - RNA, 19 nt, Artificial Sequence
  Description of Artificial Sequence: Synthetic oligonucleotide
cgaagaugacguaaugcuc

SEQ ID NO: 1704319 - RNA, 19 nt, Artificial Sequence
  Description of Artificial Sequence: Synthetic oligonucleotide
cuggccacagagaucgucu

SEQ ID NO: 1704320 - RNA, 19 nt, Artificial Sequence
  Description of Artificial Sequence: Synthetic oligonucleotide
cgcggcacacaccauagcc

SEQ ID NO: 1704321 - RNA, 19 nt, Artificial Sequence
  Description of Artificial Sequence: Synthetic oligonucleotide
gguaaacaugggcucacua

SEQ ID NO: 1704322 - RNA, 19 nt, Artificial Sequence
  Description of Artificial Sequence: Synthetic oligonucleotide
guaggaauuguaguugguu

SEQ ID NO: 1704323 - RNA, 19 nt, Artificial Sequence
  Description of Artificial Sequence: Synthetic oligonucleotide
aucaacucagcaggucaaa

SEQ ID NO: 1704324 - RNA, 19 nt, Artificial Sequence
  Description of Artificial Sequence: Synthetic oligonucleotide
guugugagugaguuucuuu

SEQ ID NO: 1704325 - RNA, 19 nt, Artificial Sequence
  Description of Artificial Sequence: Synthetic oligonucleotide
ggaggaagacggucagcug

SEQ ID NO: 1704326 - RNA, 19 nt, Artificial Sequence
  Description of Artificial Sequence: Synthetic oligonucleotide
gggcucacuacaccgguga

SEQ ID NO: 1704327 - RNA, 19 nt, Artificial Sequence
  Description of Artificial Sequence: Synthetic oligonucleotide
ccacguacacguacugcag

SEQ ID NO: 1704328 - RNA, 19 nt, Artificial Sequence
  Description of Artificial Sequence: Synthetic oligonucleotide
caccauagccgauugcggu

SEQ ID NO: 1704329 - RNA, 19 nt, Artificial Sequence
  Description of Artificial Sequence: Synthetic oligonucleotide
gguacaguuccacaagguu

SEQ ID NO: 1704330 - RNA, 19 nt, Artificial Sequence
  Description of Artificial Sequence: Synthetic oligonucleotide
gugcuccuaaggcucuuga

SEQ ID NO: 1704331 - RNA, 19 nt, Artificial Sequence
  Description of Artificial Sequence: Synthetic oligonucleotide
gauaggauggcaggccuuu

SEQ ID NO: 1704332 - RNA, 19 nt, Artificial Sequence
  Description of Artificial Sequence: Synthetic oligonucleotide
cuccagauguugcagcccu

SEQ ID NO: 1704333 - RNA, 19 nt, Artificial Sequence
  Description of Artificial Sequence: Synthetic oligonucleotide
ccauagccgauugcggucc

SEQ ID NO: 1704334 - RNA, 19 nt, Artificial Sequence
  Description of Artificial Sequence: Synthetic oligonucleotide
cucucggguaaagcuagca

SEQ ID NO: 1704335 - RNA, 19 nt, Artificial Sequence
  Description of Artificial Sequence: Synthetic oligonucleotide
cguacugcaguucucgaga

SEQ ID NO: 1704336 - RNA, 19 nt, Artificial Sequence
  Description of Artificial Sequence: Synthetic oligonucleotide
ugccgauggccuucaccuc

SEQ ID NO: 1704337 - RNA, 19 nt, Artificial Sequence
  Description of Artificial Sequence: Synthetic oligonucleotide
cacguacugcaguucucga

SEQ ID NO: 1704338 - RNA, 19 nt, Artificial Sequence
  Description of Artificial Sequence: Synthetic oligonucleotide
agcuagcaaacgauuggua

SEQ ID NO: 1704339 - RNA, 19 nt, Artificial Sequence
  Description of Artificial Sequence: Synthetic oligonucleotide
cuccaggagacuucugggu

SEQ ID NO: 1704340 - RNA, 19 nt, Artificial Sequence
  Description of Artificial Sequence: Synthetic oligonucleotide
gagacuccgcauggccagc

SEQ ID NO: 1704341 - RNA, 19 nt, Artificial Sequence
  Description of Artificial Sequence: Synthetic oligonucleotide
augucugaucacgcacgcu

SEQ ID NO: 1704342 - RNA, 19 nt, Artificial Sequence
  Description of Artificial Sequence: Synthetic oligonucleotide
ccgccacacacgcugggcg

SEQ ID NO: 1704343 - RNA, 19 nt, Artificial Sequence
  Description of Artificial Sequence: Synthetic oligonucleotide
ggcgcggcacacaccauag

SEQ ID NO: 1704344 - RNA, 19 nt, Artificial Sequence
  Description of Artificial Sequence: Synthetic oligonucleotide
caggugaagccucucgggu

SEQ ID NO: 1704345 - RNA, 19 nt, Artificial Sequence
  Description of Artificial Sequence: Synthetic oligonucleotide
ucacuacaccggugacagu

SEQ ID NO: 1704346 - RNA, 19 nt, Artificial Sequence
  Description of Artificial Sequence: Synthetic oligonucleotide
ggacccgauggcuucugga

SEQ ID NO: 1704347 - RNA, 19 nt, Artificial Sequence
  Description of Artificial Sequence: Synthetic oligonucleotide
agacggucagcugcccaga

SEQ ID NO: 1704348 - RNA, 19 nt, Artificial Sequence
  Description of Artificial Sequence: Synthetic oligonucleotide
cggguaaagcuagcaaacg

SEQ ID NO: 1704349 - RNA, 19 nt, Artificial Sequence
  Description of Artificial Sequence: Synthetic oligonucleotide
agauaggauggcaggccuu

SEQ ID NO: 1704350 - RNA, 19 nt, Artificial Sequence
  Description of Artificial Sequence: Synthetic oligonucleotide
agcaaacgauugguagaaa

SEQ ID NO: 1704351 - RNA, 19 nt, Artificial Sequence
  Description of Artificial Sequence: Synthetic oligonucleotide
gcuaaucgaagaugacgua

SEQ ID NO: 1704352 - RNA, 19 nt, Artificial Sequence
  Description of Artificial Sequence: Synthetic oligonucleotide
ccgaugacuuuguuguaga

SEQ ID NO: 1704353 - RNA, 19 nt, Artificial Sequence
  Description of Artificial Sequence: Synthetic oligonucleotide
agguugugagugaguuucu

SEQ ID NO: 1704354 - RNA, 19 nt, Artificial Sequence
  Description of Artificial Sequence: Synthetic oligonucleotide
guucucgagagcgcccuaa

SEQ ID NO: 1704355 - RNA, 19 nt, Artificial Sequence
  Description of Artificial Sequence: Synthetic oligonucleotide
cacguacacguacugcagu

SEQ ID NO: 1704356 - RNA, 19 nt, Artificial Sequence
  Description of Artificial Sequence: Synthetic oligonucleotide
caagacgguuuccagccau

SEQ ID NO: 1704357 - RNA, 19 nt, Artificial Sequence
  Description of Artificial Sequence: Synthetic oligonucleotide
aguucucgagagcgcccua

SEQ ID NO: 1704358 - RNA, 19 nt, Artificial Sequence
  Description of Artificial Sequence: Synthetic oligonucleotide
gcucacuacaccggugaca

SEQ ID NO: 1704359 - RNA, 19 nt, Artificial Sequence
  Description of Artificial Sequence: Synthetic oligonucleotide
gggcgagauuuucuggcaa

SEQ ID NO: 1704360 - RNA, 19 nt, Artificial Sequence
  Description of Artificial Sequence: Synthetic oligonucleotide
ggauguuguuauccacgua

SEQ ID NO: 1704361 - RNA, 19 nt, Artificial Sequence
  Description of Artificial Sequence: Synthetic oligonucleotide
ccggugacagugccccagg

SEQ ID NO: 1704362 - RNA, 19 nt, Artificial Sequence
  Description of Artificial Sequence: Synthetic oligonucleotide
ggaagacggucagcugccc

SEQ ID NO: 1704363 - RNA, 19 nt, Artificial Sequence
  Description of Artificial Sequence: Synthetic oligonucleotide
cauagccgauugcggucca

SEQ ID NO: 1704364 - RNA, 19 nt, Artificial Sequence
  Description of Artificial Sequence: Synthetic oligonucleotide
gccaaccucuggagguagg

SEQ ID NO: 1704365 - RNA, 19 nt, Artificial Sequence
  Description of Artificial Sequence: Synthetic oligonucleotide
agggacccgauggcuucug

SEQ ID NO: 1704366 - RNA, 19 nt, Artificial Sequence
  Description of Artificial Sequence: Synthetic oligonucleotide
gcaagacgguuuccagcca

SEQ ID NO: 1704367 - RNA, 19 nt, Artificial Sequence
  Description of Artificial Sequence: Synthetic oligonucleotide
ggaauuguaguugguuguu

SEQ ID NO: 1704368 - RNA, 19 nt, Artificial Sequence
  Description of Artificial Sequence: Synthetic oligonucleotide
cucucaaggggaagagcuu

SEQ ID NO: 1704369 - RNA, 19 nt, Artificial Sequence
  Description of Artificial Sequence: Synthetic oligonucleotide
cugcagcacuacaucuugu

SEQ ID NO: 1704370 - RNA, 19 nt, Artificial Sequence
  Description of Artificial Sequence: Synthetic oligonucleotide
ccucucggguaaagcuagc

SEQ ID NO: 1704371 - RNA, 19 nt, Artificial Sequence
  Description of Artificial Sequence: Synthetic oligonucleotide
gguaggaauuguaguuggu

SEQ ID NO: 1704372 - RNA, 19 nt, Artificial Sequence
  Description of Artificial Sequence: Synthetic oligonucleotide
gcacuacaucuugucaaaa

SEQ ID NO: 1704373 - RNA, 19 nt, Artificial Sequence
  Description of Artificial Sequence: Synthetic oligonucleotide
cuaaggcucuugaguguuu

SEQ ID NO: 1704374 - RNA, 19 nt, Artificial Sequence
  Description of Artificial Sequence: Synthetic oligonucleotide
gggucuguuccacccggcu

SEQ ID NO: 1704375 - RNA, 19 nt, Artificial Sequence
  Description of Artificial Sequence: Synthetic oligonucleotide
gcgcggcacacaccauagc

SEQ ID NO: 1704376 - RNA, 19 nt, Artificial Sequence
  Description of Artificial Sequence: Synthetic oligonucleotide
ccaaugggaaauggugcaa

SEQ ID NO: 1704377 - RNA, 19 nt, Artificial Sequence
  Description of Artificial Sequence: Synthetic oligonucleotide
gccgauugcgguccacagu

SEQ ID NO: 1704378 - RNA, 19 nt, Artificial Sequence
  Description of Artificial Sequence: Synthetic oligonucleotide
cgcccuaaaucaaguggca

SEQ ID NO: 1704379 - RNA, 19 nt, Artificial Sequence
  Description of Artificial Sequence: Synthetic oligonucleotide
cugcagccgaugacuuugu

SEQ ID NO: 1704380 - RNA, 19 nt, Artificial Sequence
  Description of Artificial Sequence: Synthetic oligonucleotide
ccgggcaaacaaucucuaa

SEQ ID NO: 1704381 - RNA, 19 nt, Artificial Sequence
  Description of Artificial Sequence: Synthetic oligonucleotide
ccgauggcuucuggaacca

SEQ ID NO: 1704382 - RNA, 19 nt, Artificial Sequence
  Description of Artificial Sequence: Synthetic oligonucleotide
cgccaaccucuggagguag

SEQ ID NO: 1704383 - RNA, 19 nt, Artificial Sequence
  Description of Artificial Sequence: Synthetic oligonucleotide
auggcgcggcacacaccau

SEQ ID NO: 1704384 - RNA, 19 nt, Artificial Sequence
  Description of Artificial Sequence: Synthetic oligonucleotide
cgauugcgguccacaguga

SEQ ID NO: 1704385 - RNA, 19 nt, Artificial Sequence
  Description of Artificial Sequence: Synthetic oligonucleotide
cgaccaauuuccgggcaaa

SEQ ID NO: 1704386 - RNA, 19 nt, Artificial Sequence
  Description of Artificial Sequence: Synthetic oligonucleotide
ggccuuucagguggauguu

SEQ ID NO: 1704387 - RNA, 19 nt, Artificial Sequence
  Description of Artificial Sequence: Synthetic oligonucleotide
cagugcuccuaaggcucuu

SEQ ID NO: 1704388 - RNA, 19 nt, Artificial Sequence
  Description of Artificial Sequence: Synthetic oligonucleotide
ugagauuacacuuaggagg

SEQ ID NO: 1704389 - RNA, 19 nt, Artificial Sequence
  Description of Artificial Sequence: Synthetic oligonucleotide
aaugcauacaucuccauuc

SEQ ID NO: 1704390 - RNA, 19 nt, Artificial Sequence
  Description of Artificial Sequence: Synthetic oligonucleotide
aauucagacauucuguggg

SEQ ID NO: 1704391 - RNA, 19 nt, Artificial Sequence
  Description of Artificial Sequence: Synthetic oligonucleotide
uuugcuacccaauauaugc

SEQ ID NO: 1704392 - RNA, 19 nt, Artificial Sequence
  Description of Artificial Sequence: Synthetic oligonucleotide
aaugcgagaauucagacau

SEQ ID NO: 1704393 - RNA, 19 nt, Artificial Sequence
  Description of Artificial Sequence: Synthetic oligonucleotide
aguaaguuuucacugaggg

SEQ ID NO: 1704394 - RNA, 19 nt, Artificial Sequence
  Description of Artificial Sequence: Synthetic oligonucleotide
agaaucaauacagugaugg

SEQ ID NO: 1704395 - RNA, 19 nt, Artificial Sequence
  Description of Artificial Sequence: Synthetic oligonucleotide
aaagaaucaauacagugau

SEQ ID NO: 1704396 - RNA, 19 nt, Artificial Sequence
  Description of Artificial Sequence: Synthetic oligonucleotide
uucagcucaagcaucaagg

SEQ ID NO: 1704397 - RNA, 19 nt, Artificial Sequence
  Description of Artificial Sequence: Synthetic oligonucleotide
uuuccugauaaucucggcg

SEQ ID NO: 1704398 - RNA, 19 nt, Artificial Sequence
  Description of Artificial Sequence: Synthetic oligonucleotide
auauaugcagcacuugugg

SEQ ID NO: 1704399 - RNA, 19 nt, Artificial Sequence
  Description of Artificial Sequence: Synthetic oligonucleotide
aacggaagcguccacauug

SEQ ID NO: 1704400 - RNA, 19 nt, Artificial Sequence
  Description of Artificial Sequence: Synthetic oligonucleotide
agugagauuacacuuagga

SEQ ID NO: 1704401 - RNA, 19 nt, Artificial Sequence
  Description of Artificial Sequence: Synthetic oligonucleotide
uuaaguuuguuuuguuggg

SEQ ID NO: 1704402 - RNA, 19 nt, Artificial Sequence
  Description of Artificial Sequence: Synthetic oligonucleotide
auacaagucgucauaaagc

SEQ ID NO: 1704403 - RNA, 19 nt, Artificial Sequence
  Description of Artificial Sequence: Synthetic oligonucleotide
ucaagaaucugaagguagg

SEQ ID NO: 1704404 - RNA, 19 nt, Artificial Sequence
  Description of Artificial Sequence: Synthetic oligonucleotide
aaaggagcaaacugagauc

SEQ ID NO: 1704405 - RNA, 19 nt, Artificial Sequence
  Description of Artificial Sequence: Synthetic oligonucleotide
ggcacuuuaguuuugaugc

SEQ ID NO: 1704406 - RNA, 19 nt, Artificial Sequence
  Description of Artificial Sequence: Synthetic oligonucleotide
aacagacuaauucuucaag

SEQ ID NO: 1704407 - RNA, 19 nt, Artificial Sequence
  Description of Artificial Sequence: Synthetic oligonucleotide
ucauaaagcaaaucugagc

SEQ ID NO: 1704408 - RNA, 19 nt, Artificial Sequence
  Description of Artificial Sequence: Synthetic oligonucleotide
acagucggcaucuucuucc

SEQ ID NO: 1704409 - RNA, 19 nt, Artificial Sequence
  Description of Artificial Sequence: Synthetic oligonucleotide
ucauuaagcagugagauua

SEQ ID NO: 1704410 - RNA, 19 nt, Artificial Sequence
  Description of Artificial Sequence: Synthetic oligonucleotide
ugugccuugaaguagccgc

SEQ ID NO: 1704411 - RNA, 19 nt, Artificial Sequence
  Description of Artificial Sequence: Synthetic oligonucleotide
gaagcguccacauuggcug

SEQ ID NO: 1704412 - RNA, 19 nt, Artificial Sequence
  Description of Artificial Sequence: Synthetic oligonucleotide
uacaagucgucauaaagca

SEQ ID NO: 1704413 - RNA, 19 nt, Artificial Sequence
  Description of Artificial Sequence: Synthetic oligonucleotide
aauacagugauggaagggu

SEQ ID NO: 1704414 - RNA, 19 nt, Artificial Sequence
  Description of Artificial Sequence: Synthetic oligonucleotide
acacauugaugucuuaaac

SEQ ID NO: 1704415 - RNA, 19 nt, Artificial Sequence
  Description of Artificial Sequence: Synthetic oligonucleotide
ugaagaauugaaaugcaua

SEQ ID NO: 1704416 - RNA, 19 nt, Artificial Sequence
  Description of Artificial Sequence: Synthetic oligonucleotide
auaugcagcacuuguggac

SEQ ID NO: 1704417 - RNA, 19 nt, Artificial Sequence
  Description of Artificial Sequence: Synthetic oligonucleotide
aguuguagaggucggacuc

SEQ ID NO: 1704418 - RNA, 19 nt, Artificial Sequence
  Description of Artificial Sequence: Synthetic oligonucleotide
caaacugagauccgcaggg

SEQ ID NO: 1704419 - RNA, 19 nt, Artificial Sequence
  Description of Artificial Sequence: Synthetic oligonucleotide
ugaugucuuaaacagacua

SEQ ID NO: 1704420 - RNA, 19 nt, Artificial Sequence
  Description of Artificial Sequence: Synthetic oligonucleotide
gauggaagggugaagaaug

SEQ ID NO: 1704421 - RNA, 19 nt, Artificial Sequence
  Description of Artificial Sequence: Synthetic oligonucleotide
gaauucagacauucugugg

SEQ ID NO: 1704422 - RNA, 19 nt, Artificial Sequence
  Description of Artificial Sequence: Synthetic oligonucleotide
agaaugcgagaauucagac

SEQ ID NO: 1704423 - RNA, 19 nt, Artificial Sequence
  Description of Artificial Sequence: Synthetic oligonucleotide
gacuaauucuucaagaauc

SEQ ID NO: 1704424 - RNA, 19 nt, Artificial Sequence
  Description of Artificial Sequence: Synthetic oligonucleotide
uuaagcagugagauuacac

SEQ ID NO: 1704425 - RNA, 19 nt, Artificial Sequence
  Description of Artificial Sequence: Synthetic oligonucleotide
ucaauacagugauggaagg

SEQ ID NO: 1704426 - RNA, 19 nt, Artificial Sequence
  Description of Artificial Sequence: Synthetic oligonucleotide
aaucaauacagugauggaa

SEQ ID NO: 1704427 - RNA, 19 nt, Artificial Sequence
  Description of Artificial Sequence: Synthetic oligonucleotide
accauagauccccacuugc

SEQ ID NO: 1704428 - RNA, 19 nt, Artificial Sequence
  Description of Artificial Sequence: Synthetic oligonucleotide
aucaauacagugauggaag

SEQ ID NO: 1704429 - RNA, 19 nt, Artificial Sequence
  Description of Artificial Sequence: Synthetic oligonucleotide
uauggguugugccuugaag

SEQ ID NO: 1704430 - RNA, 19 nt, Artificial Sequence
  Description of Artificial Sequence: Synthetic oligonucleotide
uucguagaggguguuaggg

SEQ ID NO: 1704431 - RNA, 19 nt, Artificial Sequence
  Description of Artificial Sequence: Synthetic oligonucleotide
acagacuaauucuucaaga

SEQ ID NO: 1704432 - RNA, 19 nt, Artificial Sequence
  Description of Artificial Sequence: Synthetic oligonucleotide
uuucagcucaagcaucaag

SEQ ID NO: 1704433 - RNA, 19 nt, Artificial Sequence
  Description of Artificial Sequence: Synthetic oligonucleotide
ugaagaaugcgagaauuca

SEQ ID NO: 1704434 - RNA, 19 nt, Artificial Sequence
  Description of Artificial Sequence: Synthetic oligonucleotide
gugagauuacacuuaggag

SEQ ID NO: 1704435 - RNA, 19 nt, Artificial Sequence
  Description of Artificial Sequence: Synthetic oligonucleotide
aacguguuuugcugugaac

SEQ ID NO: 1704436 - RNA, 19 nt, Artificial Sequence
  Description of Artificial Sequence: Synthetic oligonucleotide
uuacugucccuccauuucc

SEQ ID NO: 1704437 - RNA, 19 nt, Artificial Sequence
  Description of Artificial Sequence: Synthetic oligonucleotide
ugaacauaacggaagcguc

SEQ ID NO: 1704438 - RNA, 19 nt, Artificial Sequence
  Description of Artificial Sequence: Synthetic oligonucleotide
cuuguggacucccaguggg

SEQ ID NO: 1704439 - RNA, 19 nt, Artificial Sequence
  Description of Artificial Sequence: Synthetic oligonucleotide
aaacagacuaauucuucaa

SEQ ID NO: 1704440 - RNA, 19 nt, Artificial Sequence
  Description of Artificial Sequence: Synthetic oligonucleotide
agaggucggacucauccac

SEQ ID NO: 1704441 - RNA, 19 nt, Artificial Sequence
  Description of Artificial Sequence: Synthetic oligonucleotide
uccugaacauaacggaagc

SEQ ID NO: 1704442 - RNA, 19 nt, Artificial Sequence
  Description of Artificial Sequence: Synthetic oligonucleotide
gauaaucucggcguacucc

SEQ ID NO: 1704443 - RNA, 19 nt, Artificial Sequence
  Description of Artificial Sequence: Synthetic oligonucleotide
aggauuccaccuuucagag

SEQ ID NO: 1704444 - RNA, 19 nt, Artificial Sequence
  Description of Artificial Sequence: Synthetic oligonucleotide
auaaucucggcguacuccu

SEQ ID NO: 1704445 - RNA, 19 nt, Artificial Sequence
  Description of Artificial Sequence: Synthetic oligonucleotide
uggucaagaaucugaaggu

SEQ ID NO: 1704446 - RNA, 19 nt, Artificial Sequence
  Description of Artificial Sequence: Synthetic oligonucleotide
aagaaugcgagaauucaga

SEQ ID NO: 1704447 - RNA, 19 nt, Artificial Sequence
  Description of Artificial Sequence: Synthetic oligonucleotide
ugcuacccaauauaugcag

SEQ ID NO: 1704448 - RNA, 19 nt, Artificial Sequence
  Description of Artificial Sequence: Synthetic oligonucleotide
aagaaucugaagguaggug

SEQ ID NO: 1704449 - RNA, 19 nt, Artificial Sequence
  Description of Artificial Sequence: Synthetic oligonucleotide
gaagaaugcgagaauucag

SEQ ID NO: 1704450 - RNA, 19 nt, Artificial Sequence
  Description of Artificial Sequence: Synthetic oligonucleotide
ucguagaggguguuagggg

SEQ ID NO: 1704451 - RNA, 19 nt, Artificial Sequence
  Description of Artificial Sequence: Synthetic oligonucleotide
auuacacuuaggaggauag

SEQ ID NO: 1704452 - RNA, 19 nt, Artificial Sequence
  Description of Artificial Sequence: Synthetic oligonucleotide
auuggaaggcacuuuaguu

SEQ ID NO: 1704453 - RNA, 19 nt, Artificial Sequence
  Description of Artificial Sequence: Synthetic oligonucleotide
uuuggucaagaaucugaag

SEQ ID NO: 1704454 - RNA, 19 nt, Artificial Sequence
  Description of Artificial Sequence: Synthetic oligonucleotide
uguguguuuccccacccca

SEQ ID NO: 1704455 - RNA, 19 nt, Artificial Sequence
  Description of Artificial Sequence: Synthetic oligonucleotide
uauaugcagcacuugugga

SEQ ID NO: 1704456 - RNA, 19 nt, Artificial Sequence
  Description of Artificial Sequence: Synthetic oligonucleotide
ucauuggaaggcacuuuag

SEQ ID NO: 1704457 - RNA, 19 nt, Artificial Sequence
  Description of Artificial Sequence: Synthetic oligonucleotide
cacauugaugucuuaaaca

SEQ ID NO: 1704458 - RNA, 19 nt, Artificial Sequence
  Description of Artificial Sequence: Synthetic oligonucleotide
uacaggguacugaaggaac

SEQ ID NO: 1704459 - RNA, 19 nt, Artificial Sequence
  Description of Artificial Sequence: Synthetic oligonucleotide
auaaagcaaaucugagcug

SEQ ID NO: 1704460 - RNA, 19 nt, Artificial Sequence
  Description of Artificial Sequence: Synthetic oligonucleotide
guaggauuccaccuuucag

SEQ ID NO: 1704461 - RNA, 19 nt, Artificial Sequence
  Description of Artificial Sequence: Synthetic oligonucleotide
guuguggggaccuucacuc

SEQ ID NO: 1704462 - RNA, 19 nt, Artificial Sequence
  Description of Artificial Sequence: Synthetic oligonucleotide
aacagacaaacguguuuug

SEQ ID NO: 1704463 - RNA, 19 nt, Artificial Sequence
  Description of Artificial Sequence: Synthetic oligonucleotide
aggcacuuuaguuuugaug

SEQ ID NO: 1704464 - RNA, 19 nt, Artificial Sequence
  Description of Artificial Sequence: Synthetic oligonucleotide
augucgucgucauacaagu

SEQ ID NO: 1704465 - RNA, 19 nt, Artificial Sequence
  Description of Artificial Sequence: Synthetic oligonucleotide
gaacauaacggaagcgucc

SEQ ID NO: 1704466 - RNA, 19 nt, Artificial Sequence
  Description of Artificial Sequence: Synthetic oligonucleotide
aacauaacggaagcgucca

SEQ ID NO: 1704467 - RNA, 19 nt, Artificial Sequence
  Description of Artificial Sequence: Synthetic oligonucleotide
gucaagaaucugaagguag

SEQ ID NO: 1704468 - RNA, 19 nt, Artificial Sequence
  Description of Artificial Sequence: Synthetic oligonucleotide
aaacacauugaugucuuaa

SEQ ID NO: 1704469 - RNA, 19 nt, Artificial Sequence
  Description of Artificial Sequence: Synthetic oligonucleotide
aguccucacauucugagua

SEQ ID NO: 1704470 - RNA, 19 nt, Artificial Sequence
  Description of Artificial Sequence: Synthetic oligonucleotide
auuuuggucaagaaucuga

SEQ ID NO: 1704471 - RNA, 19 nt, Artificial Sequence
  Description of Artificial Sequence: Synthetic oligonucleotide
gaggggccaccauagaucc

SEQ ID NO: 1704472 - RNA, 19 nt, Artificial Sequence
  Description of Artificial Sequence: Synthetic oligonucleotide
gaggugggaguuugaaggg

SEQ ID NO: 1704473 - RNA, 19 nt, Artificial Sequence
  Description of Artificial Sequence: Synthetic oligonucleotide
auaacagucggcaucuucu

SEQ ID NO: 1704474 - RNA, 19 nt, Artificial Sequence
  Description of Artificial Sequence: Synthetic oligonucleotide
uuuaguuuugaugcaguau

SEQ ID NO: 1704475 - RNA, 19 nt, Artificial Sequence
  Description of Artificial Sequence: Synthetic oligonucleotide
caucauaacagucggcauc

SEQ ID NO: 1704476 - RNA, 19 nt, Artificial Sequence
  Description of Artificial Sequence: Synthetic oligonucleotide
caagucgucauaaagcaaa

SEQ ID NO: 1704477 - RNA, 19 nt, Artificial Sequence
  Description of Artificial Sequence: Synthetic oligonucleotide
uacagugauggaaggguga

SEQ ID NO: 1704478 - RNA, 19 nt, Artificial Sequence
  Description of Artificial Sequence: Synthetic oligonucleotide
ugaggggccaccauagauc

SEQ ID NO: 1704479 - RNA, 19 nt, Artificial Sequence
  Description of Artificial Sequence: Synthetic oligonucleotide
gaaugcgagaauucagaca

SEQ ID NO: 1704480 - RNA, 19 nt, Artificial Sequence
  Description of Artificial Sequence: Synthetic oligonucleotide
aaggaacaugucacgacuc

SEQ ID NO: 1704481 - RNA, 19 nt, Artificial Sequence
  Description of Artificial Sequence: Synthetic oligonucleotide
cucauaaauguuggggugc

SEQ ID NO: 1704482 - RNA, 19 nt, Artificial Sequence
  Description of Artificial Sequence: Synthetic oligonucleotide
acgucagggcaguacaggg

SEQ ID NO: 1704483 - RNA, 19 nt, Artificial Sequence
  Description of Artificial Sequence: Synthetic oligonucleotide
ucuacaggcggaugaagaa

SEQ ID NO: 1704484 - RNA, 19 nt, Artificial Sequence
  Description of Artificial Sequence: Synthetic oligonucleotide
aguacaggguacugaagga

SEQ ID NO: 1704485 - RNA, 19 nt, Artificial Sequence
  Description of Artificial Sequence: Synthetic oligonucleotide
aaacguguuuugcugugaa

SEQ ID NO: 1704486 - RNA, 19 nt, Artificial Sequence
  Description of Artificial Sequence: Synthetic oligonucleotide
uugcuacccaauauaugca

SEQ ID NO: 1704487 - RNA, 19 nt, Artificial Sequence
  Description of Artificial Sequence: Synthetic oligonucleotide
aucauaacagucggcaucu

SEQ ID NO: 1704488 - RNA, 19 nt, Artificial Sequence
  Description of Artificial Sequence: Synthetic oligonucleotide
uaaauguuggggugccaca

SEQ ID NO: 1704489 - RNA, 19 nt, Artificial Sequence
  Description of Artificial Sequence: Synthetic oligonucleotide
uaugcagcacuuguggacu

SEQ ID NO: 1704490 - RNA, 19 nt, Artificial Sequence
  Description of Artificial Sequence: Synthetic oligonucleotide
ucgucgucauacaagucgu

SEQ ID NO: 1704491 - RNA, 19 nt, Artificial Sequence
  Description of Artificial Sequence: Synthetic oligonucleotide
uguguuuccccaccccaug

SEQ ID NO: 1704492 - RNA, 19 nt, Artificial Sequence
  Description of Artificial Sequence: Synthetic oligonucleotide
ggugaauauggguugugcc

SEQ ID NO: 1704493 - RNA, 19 nt, Artificial Sequence
  Description of Artificial Sequence: Synthetic oligonucleotide
caauacagugauggaaggg

SEQ ID NO: 1704494 - RNA, 19 nt, Artificial Sequence
  Description of Artificial Sequence: Synthetic oligonucleotide
augucacgacuccucauuc

SEQ ID NO: 1704495 - RNA, 19 nt, Artificial Sequence
  Description of Artificial Sequence: Synthetic oligonucleotide
acuuguggacucccagugg

SEQ ID NO: 1704496 - RNA, 19 nt, Artificial Sequence
  Description of Artificial Sequence: Synthetic oligonucleotide
aaacugagauccgcagggg

SEQ ID NO: 1704497 - RNA, 19 nt, Artificial Sequence
  Description of Artificial Sequence: Synthetic oligonucleotide
acaaacguguuuugcugug

SEQ ID NO: 1704498 - RNA, 19 nt, Artificial Sequence
  Description of Artificial Sequence: Synthetic oligonucleotide
gucacgacuccucauuccc

SEQ ID NO: 1704499 - RNA, 19 nt, Artificial Sequence
  Description of Artificial Sequence: Synthetic oligonucleotide
ugucuuaaacagacuaauu

SEQ ID NO: 1704500 - RNA, 19 nt, Artificial Sequence
  Description of Artificial Sequence: Synthetic oligonucleotide
ugcgagaauucagacauuc

SEQ ID NO: 1704501 - RNA, 19 nt, Artificial Sequence
  Description of Artificial Sequence: Synthetic oligonucleotide
cauagauccccacuugcuc

SEQ ID NO: 1704502 - RNA, 19 nt, Artificial Sequence
  Description of Artificial Sequence: Synthetic oligonucleotide
uggaagggugaagaaugcg

SEQ ID NO: 1704503 - RNA, 19 nt, Artificial Sequence
  Description of Artificial Sequence: Synthetic oligonucleotide
uguugucauuggaaggcac

SEQ ID NO: 1704504 - RNA, 19 nt, Artificial Sequence
  Description of Artificial Sequence: Synthetic oligonucleotide
agcuuuaaacacauugaug

SEQ ID NO: 1704505 - RNA, 19 nt, Artificial Sequence
  Description of Artificial Sequence: Synthetic oligonucleotide
gagaccuguuuccugauaa

SEQ ID NO: 1704506 - RNA, 19 nt, Artificial Sequence
  Description of Artificial Sequence: Synthetic oligonucleotide
uuccccauuuccuuuugcu

SEQ ID NO: 1704507 - RNA, 19 nt, Artificial Sequence
  Description of Artificial Sequence: Synthetic oligonucleotide
gaaggaacaugucacgacu

SEQ ID NO: 1704508 - RNA, 19 nt, Artificial Sequence
  Description of Artificial Sequence: Synthetic oligonucleotide
auaacggaagcguccacau

SEQ ID NO: 1704509 - RNA, 19 nt, Artificial Sequence
  Description of Artificial Sequence: Synthetic oligonucleotide
uacaggcggaugaagaauu

SEQ ID NO: 1704510 - RNA, 19 nt, Artificial Sequence
  Description of Artificial Sequence: Synthetic oligonucleotide
uggggaaaagguguugggc

SEQ ID NO: 1704511 - RNA, 19 nt, Artificial Sequence
  Description of Artificial Sequence: Synthetic oligonucleotide
uugcgagcuggucaucugc

SEQ ID NO: 1704512 - RNA, 19 nt, Artificial Sequence
  Description of Artificial Sequence: Synthetic oligonucleotide
aguggccgagaccuguuuc

SEQ ID NO: 1704513 - RNA, 19 nt, Artificial Sequence
  Description of Artificial Sequence: Synthetic oligonucleotide
gauuucagcucaagcauca

SEQ ID NO: 1704514 - RNA, 19 nt, Artificial Sequence
  Description of Artificial Sequence: Synthetic oligonucleotide
gucaucuacaggcggauga

SEQ ID NO: 1704515 - RNA, 19 nt, Artificial Sequence
  Description of Artificial Sequence: Synthetic oligonucleotide
agccuuaguggccgagacc

SEQ ID NO: 1704516 - RNA, 19 nt, Artificial Sequence
  Description of Artificial Sequence: Synthetic oligonucleotide
agguggugaauauggguug

SEQ ID NO: 1704517 - RNA, 19 nt, Artificial Sequence
  Description of Artificial Sequence: Synthetic oligonucleotide
ugucacgacuccucauucc

SEQ ID NO: 1704518 - RNA, 19 nt, Artificial Sequence
  Description of Artificial Sequence: Synthetic oligonucleotide
cuacccaauauaugcagca

SEQ ID NO: 1704519 - RNA, 19 nt, Artificial Sequence
  Description of Artificial Sequence: Synthetic oligonucleotide
uagccgccuucguagaggg

SEQ ID NO: 1704520 - RNA, 19 nt, Artificial Sequence
  Description of Artificial Sequence: Synthetic oligonucleotide
cccagcuuuaaacacauug

SEQ ID NO: 1704521 - RNA, 19 nt, Artificial Sequence
  Description of Artificial Sequence: Synthetic oligonucleotide
auggaagggugaagaaugc

SEQ ID NO: 1704522 - RNA, 19 nt, Artificial Sequence
  Description of Artificial Sequence: Synthetic oligonucleotide
acuugcucccucccuuugg

SEQ ID NO: 1704523 - RNA, 19 nt, Artificial Sequence
  Description of Artificial Sequence: Synthetic oligonucleotide
acauucugaguaggauucc

SEQ ID NO: 1704524 - RNA, 19 nt, Artificial Sequence
  Description of Artificial Sequence: Synthetic oligonucleotide
uggugaauauggguugugc

SEQ ID NO: 1704525 - RNA, 19 nt, Artificial Sequence
  Description of Artificial Sequence: Synthetic oligonucleotide
gagacgucagggcaguaca

SEQ ID NO: 1704526 - RNA, 19 nt, Artificial Sequence
  Description of Artificial Sequence: Synthetic oligonucleotide
gaugucuuaaacagacuaa

SEQ ID NO: 1704527 - RNA, 19 nt, Artificial Sequence
  Description of Artificial Sequence: Synthetic oligonucleotide
ugaauauggguugugccuu

SEQ ID NO: 1704528 - RNA, 19 nt, Artificial Sequence
  Description of Artificial Sequence: Synthetic oligonucleotide
gacgucagggcaguacagg

SEQ ID NO: 1704529 - RNA, 19 nt, Artificial Sequence
  Description of Artificial Sequence: Synthetic oligonucleotide
gacucauccaccaggguga

SEQ ID NO: 1704530 - RNA, 19 nt, Artificial Sequence
  Description of Artificial Sequence: Synthetic oligonucleotide
cauuaagcagugagauuac

SEQ ID NO: 1704531 - RNA, 19 nt, Artificial Sequence
  Description of Artificial Sequence: Synthetic oligonucleotide
gcugugaacauucugcaga

SEQ ID NO: 1704532 - RNA, 19 nt, Artificial Sequence
  Description of Artificial Sequence: Synthetic oligonucleotide
uccaccuuucagagggcag

SEQ ID NO: 1704533 - RNA, 19 nt, Artificial Sequence
  Description of Artificial Sequence: Synthetic oligonucleotide
ucaaugucgucgucauaca

SEQ ID NO: 1704534 - RNA, 19 nt, Artificial Sequence
  Description of Artificial Sequence: Synthetic oligonucleotide
cacuuguggacucccagug

SEQ ID NO: 1704535 - RNA, 19 nt, Artificial Sequence
  Description of Artificial Sequence: Synthetic oligonucleotide
gaauauggguugugccuug

SEQ ID NO: 1704536 - RNA, 19 nt, Artificial Sequence
  Description of Artificial Sequence: Synthetic oligonucleotide
aggagcuguguguguuucc

SEQ ID NO: 1704537 - RNA, 19 nt, Artificial Sequence
  Description of Artificial Sequence: Synthetic oligonucleotide
ccauuuccugaacauaacg

SEQ ID NO: 1704538 - RNA, 19 nt, Artificial Sequence
  Description of Artificial Sequence: Synthetic oligonucleotide
cauaacagucggcaucuuc

SEQ ID NO: 1704539 - RNA, 19 nt, Artificial Sequence
  Description of Artificial Sequence: Synthetic oligonucleotide
uuuugcgagcuggucaucu

SEQ ID NO: 1704540 - RNA, 19 nt, Artificial Sequence
  Description of Artificial Sequence: Synthetic oligonucleotide
gcaaacugagauccgcagg

SEQ ID NO: 1704541 - RNA, 19 nt, Artificial Sequence
  Description of Artificial Sequence: Synthetic oligonucleotide
gugaggugggaguuugaag

SEQ ID NO: 1704542 - RNA, 19 nt, Artificial Sequence
  Description of Artificial Sequence: Synthetic oligonucleotide
uuuccccauuuccuuuugc

SEQ ID NO: 1704543 - RNA, 19 nt, Artificial Sequence
  Description of Artificial Sequence: Synthetic oligonucleotide
aggugggaguuugaagggc

SEQ ID NO: 1704544 - RNA, 19 nt, Artificial Sequence
  Description of Artificial Sequence: Synthetic oligonucleotide
ucauacaagucgucauaaa

SEQ ID NO: 1704545 - RNA, 19 nt, Artificial Sequence
  Description of Artificial Sequence: Synthetic oligonucleotide
cacgacuccucauucccag

SEQ ID NO: 1704546 - RNA, 19 nt, Artificial Sequence
  Description of Artificial Sequence: Synthetic oligonucleotide
gguggugucuguuuuaaaa

SEQ ID NO: 1704547 - RNA, 19 nt, Artificial Sequence
  Description of Artificial Sequence: Synthetic oligonucleotide
agggugaagaaugcgagaa

SEQ ID NO: 1704548 - RNA, 19 nt, Artificial Sequence
  Description of Artificial Sequence: Synthetic oligonucleotide
uggguugugccuugaagua

SEQ ID NO: 1704549 - RNA, 19 nt, Artificial Sequence
  Description of Artificial Sequence: Synthetic oligonucleotide
gugggucaucuacaggcgg

SEQ ID NO: 1704550 - RNA, 19 nt, Artificial Sequence
  Description of Artificial Sequence: Synthetic oligonucleotide
ugauaaucucggcguacuc

SEQ ID NO: 1704551 - RNA, 19 nt, Artificial Sequence
  Description of Artificial Sequence: Synthetic oligonucleotide
aagaaucaauacagugaug

SEQ ID NO: 1704552 - RNA, 19 nt, Artificial Sequence
  Description of Artificial Sequence: Synthetic oligonucleotide
acauaacggaagcguccac

SEQ ID NO: 1704553 - RNA, 19 nt, Artificial Sequence
  Description of Artificial Sequence: Synthetic oligonucleotide
gugaauauggguugugccu

SEQ ID NO: 1704554 - RNA, 19 nt, Artificial Sequence
  Description of Artificial Sequence: Synthetic oligonucleotide
ucuccaguaaaaguccaua

SEQ ID NO: 1704555 - RNA, 19 nt, Artificial Sequence
  Description of Artificial Sequence: Synthetic oligonucleotide
uuugcgagcuggucaucug

SEQ ID NO: 1704556 - RNA, 19 nt, Artificial Sequence
  Description of Artificial Sequence: Synthetic oligonucleotide
ggaguuugaagggcggugg

SEQ ID NO: 1704557 - RNA, 19 nt, Artificial Sequence
  Description of Artificial Sequence: Synthetic oligonucleotide
aaguagccgccuucguaga

SEQ ID NO: 1704558 - RNA, 19 nt, Artificial Sequence
  Description of Artificial Sequence: Synthetic oligonucleotide
guggccgagaccuguuucc

SEQ ID NO: 1704559 - RNA, 19 nt, Artificial Sequence
  Description of Artificial Sequence: Synthetic oligonucleotide
ucacgacuccucauuccca

SEQ ID NO: 1704560 - RNA, 19 nt, Artificial Sequence
  Description of Artificial Sequence: Synthetic oligonucleotide
ugagacgucagggcaguac

SEQ ID NO: 1704561 - RNA, 19 nt, Artificial Sequence
  Description of Artificial Sequence: Synthetic oligonucleotide
uugugccuugaaguagccg

SEQ ID NO: 1704562 - RNA, 19 nt, Artificial Sequence
  Description of Artificial Sequence: Synthetic oligonucleotide
ucacugaggggccaccaua

SEQ ID NO: 1704563 - RNA, 19 nt, Artificial Sequence
  Description of Artificial Sequence: Synthetic oligonucleotide
cgagaauucagacauucug

SEQ ID NO: 1704564 - RNA, 19 nt, Artificial Sequence
  Description of Artificial Sequence: Synthetic oligonucleotide
gacaaacguguuuugcugu

SEQ ID NO: 1704565 - RNA, 19 nt, Artificial Sequence
  Description of Artificial Sequence: Synthetic oligonucleotide
aucuacaggcggaugaaga

SEQ ID NO: 1704566 - RNA, 19 nt, Artificial Sequence
  Description of Artificial Sequence: Synthetic oligonucleotide
aguagccgccuucguagag

SEQ ID NO: 1704567 - RNA, 19 nt, Artificial Sequence
  Description of Artificial Sequence: Synthetic oligonucleotide
ugccacauuuuggucaaga

SEQ ID NO: 1704568 - RNA, 19 nt, Artificial Sequence
  Description of Artificial Sequence: Synthetic oligonucleotide
guagccgccuucguagagg

SEQ ID NO: 1704569 - RNA, 19 nt, Artificial Sequence
  Description of Artificial Sequence: Synthetic oligonucleotide
auacagugauggaagggug

SEQ ID NO: 1704570 - RNA, 19 nt, Artificial Sequence
  Description of Artificial Sequence: Synthetic oligonucleotide
cagugagauuacacuuagg

SEQ ID NO: 1704571 - RNA, 19 nt, Artificial Sequence
  Description of Artificial Sequence: Synthetic oligonucleotide
ggugggaguuugaagggcg

SEQ ID NO: 1704572 - RNA, 19 nt, Artificial Sequence
  Description of Artificial Sequence: Synthetic oligonucleotide
auuaagcagugagauuaca

SEQ ID NO: 1704573 - RNA, 19 nt, Artificial Sequence
  Description of Artificial Sequence: Synthetic oligonucleotide
gauaguccucacauucuga

SEQ ID NO: 1704574 - RNA, 19 nt, Artificial Sequence
  Description of Artificial Sequence: Synthetic oligonucleotide
uacccaauauaugcagcac

SEQ ID NO: 1704575 - RNA, 19 nt, Artificial Sequence
  Description of Artificial Sequence: Synthetic oligonucleotide
ucccuuuacugucccucca

SEQ ID NO: 1704576 - RNA, 19 nt, Artificial Sequence
  Description of Artificial Sequence: Synthetic oligonucleotide
cuccaguaaaaguccauaa

SEQ ID NO: 1704577 - RNA, 19 nt, Artificial Sequence
  Description of Artificial Sequence: Synthetic oligonucleotide
uccugauaaucucggcgua

SEQ ID NO: 1704578 - RNA, 19 nt, Artificial Sequence
  Description of Artificial Sequence: Synthetic oligonucleotide
uuaggaggauaguccucac

SEQ ID NO: 1704579 - RNA, 19 nt, Artificial Sequence
  Description of Artificial Sequence: Synthetic oligonucleotide
ucggcguacuccuugucuu

SEQ ID NO: 1704580 - RNA, 19 nt, Artificial Sequence
  Description of Artificial Sequence: Synthetic oligonucleotide
gcuucagccuuaguggccg

SEQ ID NO: 1704581 - RNA, 19 nt, Artificial Sequence
  Description of Artificial Sequence: Synthetic oligonucleotide
gagcuguguguguuucccc

SEQ ID NO: 1704582 - RNA, 19 nt, Artificial Sequence
  Description of Artificial Sequence: Synthetic oligonucleotide
cggaugaagaauugaaaug

SEQ ID NO: 1704583 - RNA, 19 nt, Artificial Sequence
  Description of Artificial Sequence: Synthetic oligonucleotide
cauaacggaagcguccaca

SEQ ID NO: 1704584 - RNA, 19 nt, Artificial Sequence
  Description of Artificial Sequence: Synthetic oligonucleotide
uuacacuuaggaggauagu

SEQ ID NO: 1704585 - RNA, 19 nt, Artificial Sequence
  Description of Artificial Sequence: Synthetic oligonucleotide
ggagcaaacugagauccgc

SEQ ID NO: 1704586 - RNA, 19 nt, Artificial Sequence
  Description of Artificial Sequence: Synthetic oligonucleotide
cugaacauaacggaagcgu

SEQ ID NO: 1704587 - RNA, 19 nt, Artificial Sequence
  Description of Artificial Sequence: Synthetic oligonucleotide
uuucacugaggggccacca

SEQ ID NO: 1704588 - RNA, 19 nt, Artificial Sequence
  Description of Artificial Sequence: Synthetic oligonucleotide
ccagcuuuaaacacauuga

SEQ ID NO: 1704589 - RNA, 19 nt, Artificial Sequence
  Description of Artificial Sequence: Synthetic oligonucleotide
uaacagucggcaucuucuu

SEQ ID NO: 1704590 - RNA, 19 nt, Artificial Sequence
  Description of Artificial Sequence: Synthetic oligonucleotide
augcagcacuuguggacuc

SEQ ID NO: 1704591 - RNA, 19 nt, Artificial Sequence
  Description of Artificial Sequence: Synthetic oligonucleotide
aagucgucauaaagcaaau

SEQ ID NO: 1704592 - RNA, 19 nt, Artificial Sequence
  Description of Artificial Sequence: Synthetic oligonucleotide
ggaagggugaagaaugcga

SEQ ID NO: 1704593 - RNA, 19 nt, Artificial Sequence
  Description of Artificial Sequence: Synthetic oligonucleotide
aguucuccacucugugggu

SEQ ID NO: 1704594 - RNA, 19 nt, Artificial Sequence
  Description of Artificial Sequence: Synthetic oligonucleotide
cagacaaacguguuuugcu

SEQ ID NO: 1704595 - RNA, 19 nt, Artificial Sequence
  Description of Artificial Sequence: Synthetic oligonucleotide
gucauacaagucgucauaa

SEQ ID NO: 1704596 - RNA, 19 nt, Artificial Sequence
  Description of Artificial Sequence: Synthetic oligonucleotide
caccauagauccccacuug

SEQ ID NO: 1704597 - RNA, 19 nt, Artificial Sequence
  Description of Artificial Sequence: Synthetic oligonucleotide
ccucccuuuggccugagac

SEQ ID NO: 1704598 - RNA, 19 nt, Artificial Sequence
  Description of Artificial Sequence: Synthetic oligonucleotide
acaggguacugaaggaaca

SEQ ID NO: 1704599 - RNA, 19 nt, Artificial Sequence
  Description of Artificial Sequence: Synthetic oligonucleotide
cugaaggaacaugucacga

SEQ ID NO: 1704600 - RNA, 19 nt, Artificial Sequence
  Description of Artificial Sequence: Synthetic oligonucleotide
guguguguuuccccacccc

SEQ ID NO: 1704601 - RNA, 19 nt, Artificial Sequence
  Description of Artificial Sequence: Synthetic oligonucleotide
caucuacaggcggaugaag

SEQ ID NO: 1704602 - RNA, 19 nt, Artificial Sequence
  Description of Artificial Sequence: Synthetic oligonucleotide
caccccaugaguaaguuuu

SEQ ID NO: 1704603 - RNA, 19 nt, Artificial Sequence
  Description of Artificial Sequence: Synthetic oligonucleotide
ugucgucgucauacaaguc

SEQ ID NO: 1704604 - RNA, 19 nt, Artificial Sequence
  Description of Artificial Sequence: Synthetic oligonucleotide
uuccccaccccaugaguaa

SEQ ID NO: 1704605 - RNA, 19 nt, Artificial Sequence
  Description of Artificial Sequence: Synthetic oligonucleotide
acggaagcguccacauugg

SEQ ID NO: 1704606 - RNA, 19 nt, Artificial Sequence
  Description of Artificial Sequence: Synthetic oligonucleotide
ggauuccaccuuucagagg

SEQ ID NO: 1704607 - RNA, 19 nt, Artificial Sequence
  Description of Artificial Sequence: Synthetic oligonucleotide
auacaucuccauucucaua

SEQ ID NO: 1704608 - RNA, 19 nt, Artificial Sequence
  Description of Artificial Sequence: Synthetic oligonucleotide
uuaguggccgagaccuguu

SEQ ID NO: 1704609 - RNA, 19 nt, Artificial Sequence
  Description of Artificial Sequence: Synthetic oligonucleotide
uucagccuuaguggccgag

SEQ ID NO: 1704610 - RNA, 19 nt, Artificial Sequence
  Description of Artificial Sequence: Synthetic oligonucleotide
gaggucggacucauccacc

SEQ ID NO: 1704611 - RNA, 19 nt, Artificial Sequence
  Description of Artificial Sequence: Synthetic oligonucleotide
cauuggaaggcacuuuagu

SEQ ID NO: 1704612 - RNA, 19 nt, Artificial Sequence
  Description of Artificial Sequence: Synthetic oligonucleotide
ggggccaccauagaucccc

SEQ ID NO: 1704613 - RNA, 19 nt, Artificial Sequence
  Description of Artificial Sequence: Synthetic oligonucleotide
ggcaguucuccacucugug

SEQ ID NO: 1704614 - RNA, 19 nt, Artificial Sequence
  Description of Artificial Sequence: Synthetic oligonucleotide
acaugucacgacuccucau

SEQ ID NO: 1704615 - RNA, 19 nt, Artificial Sequence
  Description of Artificial Sequence: Synthetic oligonucleotide
cccaugaguaaguuuucac

SEQ ID NO: 1704616 - RNA, 19 nt, Artificial Sequence
  Description of Artificial Sequence: Synthetic oligonucleotide
aggcggaugaagaauugaa

SEQ ID NO: 1704617 - RNA, 19 nt, Artificial Sequence
  Description of Artificial Sequence: Synthetic oligonucleotide
uguagaggucggacucauc

SEQ ID NO: 1704618 - RNA, 19 nt, Artificial Sequence
  Description of Artificial Sequence: Synthetic oligonucleotide
guacaggguacugaaggaa

SEQ ID NO: 1704619 - RNA, 19 nt, Artificial Sequence
  Description of Artificial Sequence: Synthetic oligonucleotide
auccgcaggggagucagca

SEQ ID NO: 1704620 - RNA, 19 nt, Artificial Sequence
  Description of Artificial Sequence: Synthetic oligonucleotide
gcggaugaagaauugaaau

SEQ ID NO: 1704621 - RNA, 19 nt, Artificial Sequence
  Description of Artificial Sequence: Synthetic oligonucleotide
uaacggaagcguccacauu

SEQ ID NO: 1704622 - RNA, 19 nt, Artificial Sequence
  Description of Artificial Sequence: Synthetic oligonucleotide
cagcuuuaaacacauugau

SEQ ID NO: 1704623 - RNA, 19 nt, Artificial Sequence
  Description of Artificial Sequence: Synthetic oligonucleotide
gcuacccaauauaugcagc

SEQ ID NO: 1704624 - RNA, 19 nt, Artificial Sequence
  Description of Artificial Sequence: Synthetic oligonucleotide
aucgcggcggcggccgugc

SEQ ID NO: 1704625 - RNA, 19 nt, Artificial Sequence
  Description of Artificial Sequence: Synthetic oligonucleotide
agacgucagggcaguacag

SEQ ID NO: 1704626 - RNA, 19 nt, Artificial Sequence
  Description of Artificial Sequence: Synthetic oligonucleotide
ggauuucagcucaagcauc

SEQ ID NO: 1704627 - RNA, 19 nt, Artificial Sequence
  Description of Artificial Sequence: Synthetic oligonucleotide
acaagucgucauaaagcaa

SEQ ID NO: 1704628 - RNA, 19 nt, Artificial Sequence
  Description of Artificial Sequence: Synthetic oligonucleotide
ggguugugccuugaaguag

SEQ ID NO: 1704629 - RNA, 19 nt, Artificial Sequence
  Description of Artificial Sequence: Synthetic oligonucleotide
cagggugauccggaagccc

SEQ ID NO: 1704630 - RNA, 19 nt, Artificial Sequence
  Description of Artificial Sequence: Synthetic oligonucleotide
gccgccuucguagagggug

SEQ ID NO: 1704631 - RNA, 19 nt, Artificial Sequence
  Description of Artificial Sequence: Synthetic oligonucleotide
ggggaccuucacuccaucc

SEQ ID NO: 1704632 - RNA, 19 nt, Artificial Sequence
  Description of Artificial Sequence: Synthetic oligonucleotide
uaaucucggcguacuccuu

SEQ ID NO: 1704633 - RNA, 19 nt, Artificial Sequence
  Description of Artificial Sequence: Synthetic oligonucleotide
guggugaauauggguugug

SEQ ID NO: 1704634 - RNA, 19 nt, Artificial Sequence
  Description of Artificial Sequence: Synthetic oligonucleotide
gaguaggauuccaccuuuc

SEQ ID NO: 1704635 - RNA, 19 nt, Artificial Sequence
  Description of Artificial Sequence: Synthetic oligonucleotide
acgacuccucauucccaga

SEQ ID NO: 1704636 - RNA, 19 nt, Artificial Sequence
  Description of Artificial Sequence: Synthetic oligonucleotide
aguggguucccagcuuuaa

SEQ ID NO: 1704637 - RNA, 19 nt, Artificial Sequence
  Description of Artificial Sequence: Synthetic oligonucleotide
gccgagaccuguuuccuga

SEQ ID NO: 1704638 - RNA, 19 nt, Artificial Sequence
  Description of Artificial Sequence: Synthetic oligonucleotide
ucucggcguacuccuuguc

SEQ ID NO: 1704639 - RNA, 19 nt, Artificial Sequence
  Description of Artificial Sequence: Synthetic oligonucleotide
uaguggccgagaccuguuu

SEQ ID NO: 1704640 - RNA, 19 nt, Artificial Sequence
  Description of Artificial Sequence: Synthetic oligonucleotide
uggccgagaccuguuuccu

SEQ ID NO: 1704641 - RNA, 19 nt, Artificial Sequence
  Description of Artificial Sequence: Synthetic oligonucleotide
caguuguagaggucggacu

SEQ ID NO: 1704642 - RNA, 19 nt, Artificial Sequence
  Description of Artificial Sequence: Synthetic oligonucleotide
aggguuguggggaccuuca

SEQ ID NO: 1704643 - RNA, 19 nt, Artificial Sequence
  Description of Artificial Sequence: Synthetic oligonucleotide
ccaguuguagaggucggac

SEQ ID NO: 1704644 - RNA, 19 nt, Artificial Sequence
  Description of Artificial Sequence: Synthetic oligonucleotide
cuuuacugucccuccauuu

SEQ ID NO: 1704645 - RNA, 19 nt, Artificial Sequence
  Description of Artificial Sequence: Synthetic oligonucleotide
gcacuuuaguuuugaugca

SEQ ID NO: 1704646 - RNA, 19 nt, Artificial Sequence
  Description of Artificial Sequence: Synthetic oligonucleotide
ggugaagaaugcgagaauu

SEQ ID NO: 1704647 - RNA, 19 nt, Artificial Sequence
  Description of Artificial Sequence: Synthetic oligonucleotide
guggguucccagcuuuaaa

SEQ ID NO: 1704648 - RNA, 19 nt, Artificial Sequence
  Description of Artificial Sequence: Synthetic oligonucleotide
cuguugucauuggaaggca

SEQ ID NO: 1704649 - RNA, 19 nt, Artificial Sequence
  Description of Artificial Sequence: Synthetic oligonucleotide
caaacguguuuugcuguga

SEQ ID NO: 1704650 - RNA, 19 nt, Artificial Sequence
  Description of Artificial Sequence: Synthetic oligonucleotide
guuuccccaccccaugagu

SEQ ID NO: 1704651 - RNA, 19 nt, Artificial Sequence
  Description of Artificial Sequence: Synthetic oligonucleotide
caugucacgacuccucauu

SEQ ID NO: 1704652 - RNA, 19 nt, Artificial Sequence
  Description of Artificial Sequence: Synthetic oligonucleotide
caagaaucugaagguaggu

SEQ ID NO: 1704653 - RNA, 19 nt, Artificial Sequence
  Description of Artificial Sequence: Synthetic oligonucleotide
cagcucaagcaucaaggcu

SEQ ID NO: 1704654 - RNA, 19 nt, Artificial Sequence
  Description of Artificial Sequence: Synthetic oligonucleotide
ggucggacucauccaccag

SEQ ID NO: 1704655 - RNA, 19 nt, Artificial Sequence
  Description of Artificial Sequence: Synthetic oligonucleotide
cugcugggccaucgcggcg

SEQ ID NO: 1704656 - RNA, 19 nt, Artificial Sequence
  Description of Artificial Sequence: Synthetic oligonucleotide
cugauaaucucggcguacu

SEQ ID NO: 1704657 - RNA, 19 nt, Artificial Sequence
  Description of Artificial Sequence: Synthetic oligonucleotide
gcuguguguguuuccccac

SEQ ID NO: 1704658 - RNA, 19 nt, Artificial Sequence
  Description of Artificial Sequence: Synthetic oligonucleotide
ggcggaugaagaauugaaa

SEQ ID NO: 1704659 - RNA, 19 nt, Artificial Sequence
  Description of Artificial Sequence: Synthetic oligonucleotide
ggucaagaaucugaaggua

SEQ ID NO: 1704660 - RNA, 19 nt, Artificial Sequence
  Description of Artificial Sequence: Synthetic oligonucleotide
ccugauaaucucggcguac

SEQ ID NO: 1704661 - RNA, 19 nt, Artificial Sequence
  Description of Artificial Sequence: Synthetic oligonucleotide
cuuaguggccgagaccugu

SEQ ID NO: 1704662 - RNA, 19 nt, Artificial Sequence
  Description of Artificial Sequence: Synthetic oligonucleotide
gcaguacaggguacugaag

SEQ ID NO: 1704663 - RNA, 19 nt, Artificial Sequence
  Description of Artificial Sequence: Synthetic oligonucleotide
gguuguggggaccuucacu

SEQ ID NO: 1704664 - RNA, 19 nt, Artificial Sequence
  Description of Artificial Sequence: Synthetic oligonucleotide
caggguuguggggaccuuc

SEQ ID NO: 1704665 - RNA, 19 nt, Artificial Sequence
  Description of Artificial Sequence: Synthetic oligonucleotide
cucggcguacuccuugucu

SEQ ID NO: 1704666 - RNA, 19 nt, Artificial Sequence
  Description of Artificial Sequence: Synthetic oligonucleotide
aggggccaccauagauccc

SEQ ID NO: 1704667 - RNA, 19 nt, Artificial Sequence
  Description of Artificial Sequence: Synthetic oligonucleotide
aagggcgguggugucuguu

SEQ ID NO: 1704668 - RNA, 19 nt, Artificial Sequence
  Description of Artificial Sequence: Synthetic oligonucleotide
agauuacacuuaggaggau

SEQ ID NO: 1704669 - RNA, 19 nt, Artificial Sequence
  Description of Artificial Sequence: Synthetic oligonucleotide
cucauuaagcagugagauu

SEQ ID NO: 1704670 - RNA, 19 nt, Artificial Sequence
  Description of Artificial Sequence: Synthetic oligonucleotide
gcagcacuuguggacuccc

SEQ ID NO: 1704671 - RNA, 19 nt, Artificial Sequence
  Description of Artificial Sequence: Synthetic oligonucleotide
gugauccggaagcccucca

SEQ ID NO: 1704672 - RNA, 19 nt, Artificial Sequence
  Description of Artificial Sequence: Synthetic oligonucleotide
ccuuucagagggcaguucu

SEQ ID NO: 1704673 - RNA, 19 nt, Artificial Sequence
  Description of Artificial Sequence: Synthetic oligonucleotide
ggucaucuacaggcggaug

SEQ ID NO: 1704674 - RNA, 19 nt, Artificial Sequence
  Description of Artificial Sequence: Synthetic oligonucleotide
gccaccauagauccccacu

SEQ ID NO: 1704675 - RNA, 19 nt, Artificial Sequence
  Description of Artificial Sequence: Synthetic oligonucleotide
cuacaggcggaugaagaau

SEQ ID NO: 1704676 - RNA, 19 nt, Artificial Sequence
  Description of Artificial Sequence: Synthetic oligonucleotide
ucauaacagucggcaucuu

SEQ ID NO: 1704677 - RNA, 19 nt, Artificial Sequence
  Description of Artificial Sequence: Synthetic oligonucleotide
ggaacaugucacgacuccu

SEQ ID NO: 1704678 - RNA, 19 nt, Artificial Sequence
  Description of Artificial Sequence: Synthetic oligonucleotide
agauccccacuugcucccu

SEQ ID NO: 1704679 - RNA, 19 nt, Artificial Sequence
  Description of Artificial Sequence: Synthetic oligonucleotide
ccauagauccccacuugcu

SEQ ID NO: 1704680 - RNA, 19 nt, Artificial Sequence
  Description of Artificial Sequence: Synthetic oligonucleotide
ggcguacuccuugucuuuc

SEQ ID NO: 1704681 - RNA, 19 nt, Artificial Sequence
  Description of Artificial Sequence: Synthetic oligonucleotide
cuucagccuuaguggccga

SEQ ID NO: 1704682 - RNA, 19 nt, Artificial Sequence
  Description of Artificial Sequence: Synthetic oligonucleotide
ggaccuucacuccauccuu

SEQ ID NO: 1704683 - RNA, 19 nt, Artificial Sequence
  Description of Artificial Sequence: Synthetic oligonucleotide
cagucggcaucuucuuccu

SEQ ID NO: 1704684 - RNA, 19 nt, Artificial Sequence
  Description of Artificial Sequence: Synthetic oligonucleotide
guguguuuccccaccccau

SEQ ID NO: 1704685 - RNA, 19 nt, Artificial Sequence
  Description of Artificial Sequence: Synthetic oligonucleotide
caguggguucccagcuuua

SEQ ID NO: 1704686 - RNA, 19 nt, Artificial Sequence
  Description of Artificial Sequence: Synthetic oligonucleotide
caggguacugaaggaacau

SEQ ID NO: 1704687 - RNA, 19 nt, Artificial Sequence
  Description of Artificial Sequence: Synthetic oligonucleotide
gugccacauuuuggucaag

SEQ ID NO: 1704688 - RNA, 19 nt, Artificial Sequence
  Description of Artificial Sequence: Synthetic oligonucleotide
gcggccccagucccucgcg

SEQ ID NO: 1704689 - RNA, 19 nt, Artificial Sequence
  Description of Artificial Sequence: Synthetic oligonucleotide
ggccccagucccucgcgca

SEQ ID NO: 1704690 - RNA, 19 nt, Artificial Sequence
  Description of Artificial Sequence: Synthetic oligonucleotide
gcgguggugucuguuuuaa

SEQ ID NO: 1704691 - RNA, 19 nt, Artificial Sequence
  Description of Artificial Sequence: Synthetic oligonucleotide
augcgagaauucagacauu

SEQ ID NO: 1704692 - RNA, 19 nt, Artificial Sequence
  Description of Artificial Sequence: Synthetic oligonucleotide
gccccagucccucgcgcac

SEQ ID NO: 1704693 - RNA, 19 nt, Artificial Sequence
  Description of Artificial Sequence: Synthetic oligonucleotide
ggcgguggugucuguuuua

SEQ ID NO: 1704694 - RNA, 19 nt, Artificial Sequence
  Description of Artificial Sequence: Synthetic oligonucleotide
caucgcggcggcggccgug

SEQ ID NO: 1704695 - RNA, 19 nt, Artificial Sequence
  Description of Artificial Sequence: Synthetic oligonucleotide
cgucgucauacaagucguc

SEQ ID NO: 1704696 - RNA, 19 nt, Artificial Sequence
  Description of Artificial Sequence: Synthetic oligonucleotide
gcgagaauucagacauucu

SEQ ID NO: 1704697 - RNA, 19 nt, Artificial Sequence
  Description of Artificial Sequence: Synthetic oligonucleotide
gaagggcgguggugucugu

SEQ ID NO: 1704698 - RNA, 19 nt, Artificial Sequence
  Description of Artificial Sequence: Synthetic oligonucleotide
ucccucccuuuggccugag

SEQ ID NO: 1704699 - RNA, 19 nt, Artificial Sequence
  Description of Artificial Sequence: Synthetic oligonucleotide
cccuccauuuccugaacau

SEQ ID NO: 1704700 - RNA, 19 nt, Artificial Sequence
  Description of Artificial Sequence: Synthetic oligonucleotide
ccccagucccucgcgcacc

SEQ ID NO: 1704701 - RNA, 19 nt, Artificial Sequence
  Description of Artificial Sequence: Synthetic oligonucleotide
gggcaguucuccacucugu

SEQ ID NO: 1704702 - RNA, 19 nt, Artificial Sequence
  Description of Artificial Sequence: Synthetic oligonucleotide
gggucaucuacaggcggau

SEQ ID NO: 1704703 - RNA, 19 nt, Artificial Sequence
  Description of Artificial Sequence: Synthetic oligonucleotide
ccuuuacugucccuccauu

SEQ ID NO: 1704704 - RNA, 19 nt, Artificial Sequence
  Description of Artificial Sequence: Synthetic oligonucleotide
cccuuuacugucccuccau

SEQ ID NO: 1704705 - RNA, 19 nt, Artificial Sequence
  Description of Artificial Sequence: Synthetic oligonucleotide
ccugagacgucagggcagu

SEQ ID NO: 1704706 - RNA, 19 nt, Artificial Sequence
  Description of Artificial Sequence: Synthetic oligonucleotide
cugagacgucagggcagua

SEQ ID NO: 1704707 - RNA, 19 nt, Artificial Sequence
  Description of Artificial Sequence: Synthetic oligonucleotide
ccgccuucguagagggugu

SEQ ID NO: 1704708 - RNA, 19 nt, Artificial Sequence
  Description of Artificial Sequence: Synthetic oligonucleotide
cgagaccuguuuccugaua

SEQ ID NO: 1704709 - RNA, 19 nt, Artificial Sequence
  Description of Artificial Sequence: Synthetic oligonucleotide
ccaccccaugaguaaguuu

SEQ ID NO: 1704710 - RNA, 19 nt, Artificial Sequence
  Description of Artificial Sequence: Synthetic oligonucleotide
ccccaccccaugaguaagu

SEQ ID NO: 1704711 - RNA, 19 nt, Artificial Sequence
  Description of Artificial Sequence: Synthetic oligonucleotide
cucaagcaucaaggcuuuu

SEQ ID NO: 1704712 - RNA, 19 nt, Artificial Sequence
  Description of Artificial Sequence: Synthetic oligonucleotide
ccgagaccuguuuccugau

SEQ ID NO: 1704713 - RNA, 19 nt, Artificial Sequence
  Description of Artificial Sequence: Synthetic oligonucleotide
cccucccuuuggccugaga

SEQ ID NO: 1704714 - RNA, 19 nt, Artificial Sequence
  Description of Artificial Sequence: Synthetic oligonucleotide
cccaccccaugaguaaguu

SEQ ID NO: 1704715 - RNA, 19 nt, Artificial Sequence
  Description of Artificial Sequence: Synthetic oligonucleotide
cggcguacuccuugucuuu

SEQ ID NO: 1704716 - RNA, 19 nt, Artificial Sequence
  Description of Artificial Sequence: Synthetic oligonucleotide
gcggggccgcggccccagu

SEQ ID NO: 1704717 - RNA, 19 nt, Artificial Sequence
  Description of Artificial Sequence: Synthetic oligonucleotide
aacaacacuauccucagac

SEQ ID NO: 1704718 - RNA, 19 nt, Artificial Sequence
  Description of Artificial Sequence: Synthetic oligonucleotide
aaaucaaaguuaugucucc

SEQ ID NO: 1704719 - RNA, 19 nt, Artificial Sequence
  Description of Artificial Sequence: Synthetic oligonucleotide
uuacaauagauaauggagc

SEQ ID NO: 1704720 - RNA, 19 nt, Artificial Sequence
  Description of Artificial Sequence: Synthetic oligonucleotide
acaaccaaagcccaggaac

SEQ ID NO: 1704721 - RNA, 19 nt, Artificial Sequence
  Description of Artificial Sequence: Synthetic oligonucleotide
aauauauggggauaaaaua

SEQ ID NO: 1704722 - RNA, 19 nt, Artificial Sequence
  Description of Artificial Sequence: Synthetic oligonucleotide
uguccaaacaaacucacca

SEQ ID NO: 1704723 - RNA, 19 nt, Artificial Sequence
  Description of Artificial Sequence: Synthetic oligonucleotide
agugagaacagagugaagg

SEQ ID NO: 1704724 - RNA, 19 nt, Artificial Sequence
  Description of Artificial Sequence: Synthetic oligonucleotide
uuuggucucacacagaaau

SEQ ID NO: 1704725 - RNA, 19 nt, Artificial Sequence
  Description of Artificial Sequence: Synthetic oligonucleotide
gaucuccucgaauauaugg

SEQ ID NO: 1704726 - RNA, 19 nt, Artificial Sequence
  Description of Artificial Sequence: Synthetic oligonucleotide
caagaaagagcaaagcacc

SEQ ID NO: 1704727 - RNA, 19 nt, Artificial Sequence
  Description of Artificial Sequence: Synthetic oligonucleotide
aacgucauucgacugccgc

SEQ ID NO: 1704728 - RNA, 19 nt, Artificial Sequence
  Description of Artificial Sequence: Synthetic oligonucleotide
ugcauaaacaacaaccaaa

SEQ ID NO: 1704729 - RNA, 19 nt, Artificial Sequence
  Description of Artificial Sequence: Synthetic oligonucleotide
aaauuuugcacaaaauaca

SEQ ID NO: 1704730 - RNA, 19 nt, Artificial Sequence
  Description of Artificial Sequence: Synthetic oligonucleotide
uacaauagauaauggagca

SEQ ID NO: 1704731 - RNA, 19 nt, Artificial Sequence
  Description of Artificial Sequence: Synthetic oligonucleotide
acagaaauuaaagcgcccc

SEQ ID NO: 1704732 - RNA, 19 nt, Artificial Sequence
  Description of Artificial Sequence: Synthetic oligonucleotide
aaaugaguuaggcugucca

SEQ ID NO: 1704733 - RNA, 19 nt, Artificial Sequence
  Description of Artificial Sequence: Synthetic oligonucleotide
ucaacuuuccgccuaggug

SEQ ID NO: 1704734 - RNA, 19 nt, Artificial Sequence
  Description of Artificial Sequence: Synthetic oligonucleotide
caaucuaggcccuaauucc

SEQ ID NO: 1704735 - RNA, 19 nt, Artificial Sequence
  Description of Artificial Sequence: Synthetic oligonucleotide
aguuaugucucccaaacaa

SEQ ID NO: 1704736 - RNA, 19 nt, Artificial Sequence
  Description of Artificial Sequence: Synthetic oligonucleotide
auuaggucacccaagaaag

SEQ ID NO: 1704737 - RNA, 19 nt, Artificial Sequence
  Description of Artificial Sequence: Synthetic oligonucleotide
agccauguaaggcccaucc

SEQ ID NO: 1704738 - RNA, 19 nt, Artificial Sequence
  Description of Artificial Sequence: Synthetic oligonucleotide
aaucuaggcccuaauuccc

SEQ ID NO: 1704739 - RNA, 19 nt, Artificial Sequence
  Description of Artificial Sequence: Synthetic oligonucleotide
ucgaccagaauccauuggc

SEQ ID NO: 1704740 - RNA, 19 nt, Artificial Sequence
  Description of Artificial Sequence: Synthetic oligonucleotide
agucuuagccauguaaggc

SEQ ID NO: 1704741 - RNA, 19 nt, Artificial Sequence
  Description of Artificial Sequence: Synthetic oligonucleotide
ucuccucgaauauaugggg

SEQ ID NO: 1704742 - RNA, 19 nt, Artificial Sequence
  Description of Artificial Sequence: Synthetic oligonucleotide
gacagguuacaauagauaa

SEQ ID NO: 1704743 - RNA, 19 nt, Artificial Sequence
  Description of Artificial Sequence: Synthetic oligonucleotide
aaacguagugucaagugag

SEQ ID NO: 1704744 - RNA, 19 nt, Artificial Sequence
  Description of Artificial Sequence: Synthetic oligonucleotide
aaguaaaagaaggagggaa

SEQ ID NO: 1704745 - RNA, 19 nt, Artificial Sequence
  Description of Artificial Sequence: Synthetic oligonucleotide
acgaacgucauucgacugc

SEQ ID NO: 1704746 - RNA, 19 nt, Artificial Sequence
  Description of Artificial Sequence: Synthetic oligonucleotide
acaacacuauccucagacc

SEQ ID NO: 1704747 - RNA, 19 nt, Artificial Sequence
  Description of Artificial Sequence: Synthetic oligonucleotide
uaugugagcgcauuuucca

SEQ ID NO: 1704748 - RNA, 19 nt, Artificial Sequence
  Description of Artificial Sequence: Synthetic oligonucleotide
caacacuauccucagaccc

SEQ ID NO: 1704749 - RNA, 19 nt, Artificial Sequence
  Description of Artificial Sequence: Synthetic oligonucleotide
cagguuacaauagauaaug

SEQ ID NO: 1704750 - RNA, 19 nt, Artificial Sequence
  Description of Artificial Sequence: Synthetic oligonucleotide
agaaacguagugucaagug

SEQ ID NO: 1704751 - RNA, 19 nt, Artificial Sequence
  Description of Artificial Sequence: Synthetic oligonucleotide
uaauucccguaugugagcg

SEQ ID NO: 1704752 - RNA, 19 nt, Artificial Sequence
  Description of Artificial Sequence: Synthetic oligonucleotide
guagcagaaacguaguguc

SEQ ID NO: 1704753 - RNA, 19 nt, Artificial Sequence
  Description of Artificial Sequence: Synthetic oligonucleotide
gaaacguagugucaaguga

SEQ ID NO: 1704754 - RNA, 19 nt, Artificial Sequence
  Description of Artificial Sequence: Synthetic oligonucleotide
auuggcuggaaaccgcgcg

SEQ ID NO: 1704755 - RNA, 19 nt, Artificial Sequence
  Description of Artificial Sequence: Synthetic oligonucleotide
ucgucugcgagacacucag

SEQ ID NO: 1704756 - RNA, 19 nt, Artificial Sequence
  Description of Artificial Sequence: Synthetic oligonucleotide
aauacaucucuccuccuuu

SEQ ID NO: 1704757 - RNA, 19 nt, Artificial Sequence
  Description of Artificial Sequence: Synthetic oligonucleotide
aauucccguaugugagcgc

SEQ ID NO: 1704758 - RNA, 19 nt, Artificial Sequence
  Description of Artificial Sequence: Synthetic oligonucleotide
guagugucaagugagaaca

SEQ ID NO: 1704759 - RNA, 19 nt, Artificial Sequence
  Description of Artificial Sequence: Synthetic oligonucleotide
aguaaaaguaaaagaagga

SEQ ID NO: 1704760 - RNA, 19 nt, Artificial Sequence
  Description of Artificial Sequence: Synthetic oligonucleotide
uagaaaugaguuaggcugu

SEQ ID NO: 1704761 - RNA, 19 nt, Artificial Sequence
  Description of Artificial Sequence: Synthetic oligonucleotide
agacuaacaagaccucauc

SEQ ID NO: 1704762 - RNA, 19 nt, Artificial Sequence
  Description of Artificial Sequence: Synthetic oligonucleotide
aacaagaccucaucuccca

SEQ ID NO: 1704763 - RNA, 19 nt, Artificial Sequence
  Description of Artificial Sequence: Synthetic oligonucleotide
gaccguagcagaaacguag

SEQ ID NO: 1704764 - RNA, 19 nt, Artificial Sequence
  Description of Artificial Sequence: Synthetic oligonucleotide
aucgcaaguaucuuucacu

SEQ ID NO: 1704765 - RNA, 19 nt, Artificial Sequence
  Description of Artificial Sequence: Synthetic oligonucleotide
caacuuuccgccuagguga

SEQ ID NO: 1704766 - RNA, 19 nt, Artificial Sequence
  Description of Artificial Sequence: Synthetic oligonucleotide
ucauucgacugccgcaagg

SEQ ID NO: 1704767 - RNA, 19 nt, Artificial Sequence
  Description of Artificial Sequence: Synthetic oligonucleotide
aaugaguuaggcuguccaa

SEQ ID NO: 1704768 - RNA, 19 nt, Artificial Sequence
  Description of Artificial Sequence: Synthetic oligonucleotide
ucagugaccgagauccggc

SEQ ID NO: 1704769 - RNA, 19 nt, Artificial Sequence
  Description of Artificial Sequence: Synthetic oligonucleotide
gaugacgggcagcagaaac

SEQ ID NO: 1704770 - RNA, 19 nt, Artificial Sequence
  Description of Artificial Sequence: Synthetic oligonucleotide
ucaaccgcagaccguagca

SEQ ID NO: 1704771 - RNA, 19 nt, Artificial Sequence
  Description of Artificial Sequence: Synthetic oligonucleotide
acaauagauaauggagcac

SEQ ID NO: 1704772 - RNA, 19 nt, Artificial Sequence
  Description of Artificial Sequence: Synthetic oligonucleotide
gaguccucaaaacuuccgc

SEQ ID NO: 1704773 - RNA, 19 nt, Artificial Sequence
  Description of Artificial Sequence: Synthetic oligonucleotide
cacagggacccaaaguucc

SEQ ID NO: 1704774 - RNA, 19 nt, Artificial Sequence
  Description of Artificial Sequence: Synthetic oligonucleotide
auauuguccaucucccaca

SEQ ID NO: 1704775 - RNA, 19 nt, Artificial Sequence
  Description of Artificial Sequence: Synthetic oligonucleotide
uggagcacauaaaauuuaa

SEQ ID NO: 1704776 - RNA, 19 nt, Artificial Sequence
  Description of Artificial Sequence: Synthetic oligonucleotide
cauaccgaggucgucaacc

SEQ ID NO: 1704777 - RNA, 19 nt, Artificial Sequence
  Description of Artificial Sequence: Synthetic oligonucleotide
uuggcuggaaaccgcgcgg

SEQ ID NO: 1704778 - RNA, 19 nt, Artificial Sequence
  Description of Artificial Sequence: Synthetic oligonucleotide
aguuaggcuguccaaacaa

SEQ ID NO: 1704779 - RNA, 19 nt, Artificial Sequence
  Description of Artificial Sequence: Synthetic oligonucleotide
ucucuagggugucauguca

SEQ ID NO: 1704780 - RNA, 19 nt, Artificial Sequence
  Description of Artificial Sequence: Synthetic oligonucleotide
cagucuuagccauguaagg

SEQ ID NO: 1704781 - RNA, 19 nt, Artificial Sequence
  Description of Artificial Sequence: Synthetic oligonucleotide
gaucuggaucagcauauug

SEQ ID NO: 1704782 - RNA, 19 nt, Artificial Sequence
  Description of Artificial Sequence: Synthetic oligonucleotide
aucgccaucacucgaccag

SEQ ID NO: 1704783 - RNA, 19 nt, Artificial Sequence
  Description of Artificial Sequence: Synthetic oligonucleotide
cagccaaucgccaucacuc

SEQ ID NO: 1704784 - RNA, 19 nt, Artificial Sequence
  Description of Artificial Sequence: Synthetic oligonucleotide
auucgacugccgcaagggc

SEQ ID NO: 1704785 - RNA, 19 nt, Artificial Sequence
  Description of Artificial Sequence: Synthetic oligonucleotide
aaguuaugucucccaaaca

SEQ ID NO: 1704786 - RNA, 19 nt, Artificial Sequence
  Description of Artificial Sequence: Synthetic oligonucleotide
aacgaacgucauucgacug

SEQ ID NO: 1704787 - RNA, 19 nt, Artificial Sequence
  Description of Artificial Sequence: Synthetic oligonucleotide
uuuaugcccaggaucuccu

SEQ ID NO: 1704788 - RNA, 19 nt, Artificial Sequence
  Description of Artificial Sequence: Synthetic oligonucleotide
aucagucuuagccauguaa

SEQ ID NO: 1704789 - RNA, 19 nt, Artificial Sequence
  Description of Artificial Sequence: Synthetic oligonucleotide
gaccagaauccauuggcug

SEQ ID NO: 1704790 - RNA, 19 nt, Artificial Sequence
  Description of Artificial Sequence: Synthetic oligonucleotide
ugaguuaggcuguccaaac

SEQ ID NO: 1704791 - RNA, 19 nt, Artificial Sequence
  Description of Artificial Sequence: Synthetic oligonucleotide
uucgacugccgcaagggcu

SEQ ID NO: 1704792 - RNA, 19 nt, Artificial Sequence
  Description of Artificial Sequence: Synthetic oligonucleotide
uccucaaaacuuccgccgc

SEQ ID NO: 1704793 - RNA, 19 nt, Artificial Sequence
  Description of Artificial Sequence: Synthetic oligonucleotide
auaccgaggucgucaaccg

SEQ ID NO: 1704794 - RNA, 19 nt, Artificial Sequence
  Description of Artificial Sequence: Synthetic oligonucleotide
gagcgcauuuuccaaauca

SEQ ID NO: 1704795 - RNA, 19 nt, Artificial Sequence
  Description of Artificial Sequence: Synthetic oligonucleotide
acaaacucaccagacaggu

SEQ ID NO: 1704796 - RNA, 19 nt, Artificial Sequence
  Description of Artificial Sequence: Synthetic oligonucleotide
cuaauucccguaugugagc

SEQ ID NO: 1704797 - RNA, 19 nt, Artificial Sequence
  Description of Artificial Sequence: Synthetic oligonucleotide
gaauauauggggauaaaau

SEQ ID NO: 1704798 - RNA, 19 nt, Artificial Sequence
  Description of Artificial Sequence: Synthetic oligonucleotide
guaaggcccauccacaguc

SEQ ID NO: 1704799 - RNA, 19 nt, Artificial Sequence
  Description of Artificial Sequence: Synthetic oligonucleotide
cuggaucagcauauugucc

SEQ ID NO: 1704800 - RNA, 19 nt, Artificial Sequence
  Description of Artificial Sequence: Synthetic oligonucleotide
ucacccaagaaagagcaaa

SEQ ID NO: 1704801 - RNA, 19 nt, Artificial Sequence
  Description of Artificial Sequence: Synthetic oligonucleotide
auguaaggcccauccacag

SEQ ID NO: 1704802 - RNA, 19 nt, Artificial Sequence
  Description of Artificial Sequence: Synthetic oligonucleotide
caaagcaccuuaaaaugca

SEQ ID NO: 1704803 - RNA, 19 nt, Artificial Sequence
  Description of Artificial Sequence: Synthetic oligonucleotide
cugcgagacacucagugac

SEQ ID NO: 1704804 - RNA, 19 nt, Artificial Sequence
  Description of Artificial Sequence: Synthetic oligonucleotide
accgagauccggccgaguc

SEQ ID NO: 1704805 - RNA, 19 nt, Artificial Sequence
  Description of Artificial Sequence: Synthetic oligonucleotide
gaggucgucaaccgcagac

SEQ ID NO: 1704806 - RNA, 19 nt, Artificial Sequence
  Description of Artificial Sequence: Synthetic oligonucleotide
uuaggucacccaagaaaga

SEQ ID NO: 1704807 - RNA, 19 nt, Artificial Sequence
  Description of Artificial Sequence: Synthetic oligonucleotide
uccauuggcuggaaaccgc

SEQ ID NO: 1704808 - RNA, 19 nt, Artificial Sequence
  Description of Artificial Sequence: Synthetic oligonucleotide
aacacuauccucagacccu

SEQ ID NO: 1704809 - RNA, 19 nt, Artificial Sequence
  Description of Artificial Sequence: Synthetic oligonucleotide
augucagccaaucgccauc

SEQ ID NO: 1704810 - RNA, 19 nt, Artificial Sequence
  Description of Artificial Sequence: Synthetic oligonucleotide
cauucgacugccgcaaggg

SEQ ID NO: 1704811 - RNA, 19 nt, Artificial Sequence
  Description of Artificial Sequence: Synthetic oligonucleotide
agugaaccacugaauaauc

SEQ ID NO: 1704812 - RNA, 19 nt, Artificial Sequence
  Description of Artificial Sequence: Synthetic oligonucleotide
uacaaacaacacuauccuc

SEQ ID NO: 1704813 - RNA, 19 nt, Artificial Sequence
  Description of Artificial Sequence: Synthetic oligonucleotide
aacucaccagacagguuac

SEQ ID NO: 1704814 - RNA, 19 nt, Artificial Sequence
  Description of Artificial Sequence: Synthetic oligonucleotide
agaggccuccacuugcguc

SEQ ID NO: 1704815 - RNA, 19 nt, Artificial Sequence
  Description of Artificial Sequence: Synthetic oligonucleotide
ucuagggugucaugucagc

SEQ ID NO: 1704816 - RNA, 19 nt, Artificial Sequence
  Description of Artificial Sequence: Synthetic oligonucleotide
ucugcgagacacucaguga

SEQ ID NO: 1704817 - RNA, 19 nt, Artificial Sequence
  Description of Artificial Sequence: Synthetic oligonucleotide
aaccgcagaccguagcaga

SEQ ID NO: 1704818 - RNA, 19 nt, Artificial Sequence
  Description of Artificial Sequence: Synthetic oligonucleotide
ucgcaaguaucuuucacuu

SEQ ID NO: 1704819 - RNA, 19 nt, Artificial Sequence
  Description of Artificial Sequence: Synthetic oligonucleotide
agugaccgagauccggccg

SEQ ID NO: 1704820 - RNA, 19 nt, Artificial Sequence
  Description of Artificial Sequence: Synthetic oligonucleotide
cacagaaauuaaagcgccc

SEQ ID NO: 1704821 - RNA, 19 nt, Artificial Sequence
  Description of Artificial Sequence: Synthetic oligonucleotide
ucaucagucuuagccaugu

SEQ ID NO: 1704822 - RNA, 19 nt, Artificial Sequence
  Description of Artificial Sequence: Synthetic oligonucleotide
aauagauaauggagcacau

SEQ ID NO: 1704823 - RNA, 19 nt, Artificial Sequence
  Description of Artificial Sequence: Synthetic oligonucleotide
uggucucacacagaaauua

SEQ ID NO: 1704824 - RNA, 19 nt, Artificial Sequence
  Description of Artificial Sequence: Synthetic oligonucleotide
uccucgaauauauggggau

SEQ ID NO: 1704825 - RNA, 19 nt, Artificial Sequence
  Description of Artificial Sequence: Synthetic oligonucleotide
ugugagcgcauuuuccaaa

SEQ ID NO: 1704826 - RNA, 19 nt, Artificial Sequence
  Description of Artificial Sequence: Synthetic oligonucleotide
ucaaaacuuccgccgcggc

SEQ ID NO: 1704827 - RNA, 19 nt, Artificial Sequence
  Description of Artificial Sequence: Synthetic oligonucleotide
aaucgccaucacucgacca

SEQ ID NO: 1704828 - RNA, 19 nt, Artificial Sequence
  Description of Artificial Sequence: Synthetic oligonucleotide
aggucgucaaccgcagacc

SEQ ID NO: 1704829 - RNA, 19 nt, Artificial Sequence
  Description of Artificial Sequence: Synthetic oligonucleotide
cucuagggugucaugucag

SEQ ID NO: 1704830 - RNA, 19 nt, Artificial Sequence
  Description of Artificial Sequence: Synthetic oligonucleotide
agccaaucgccaucacucg

SEQ ID NO: 1704831 - RNA, 19 nt, Artificial Sequence
  Description of Artificial Sequence: Synthetic oligonucleotide
ucacagggacccaaaguuc

SEQ ID NO: 1704832 - RNA, 19 nt, Artificial Sequence
  Description of Artificial Sequence: Synthetic oligonucleotide
uguaaggcccauccacagu

SEQ ID NO: 1704833 - RNA, 19 nt, Artificial Sequence
  Description of Artificial Sequence: Synthetic oligonucleotide
guaugugagcgcauuuucc

SEQ ID NO: 1704834 - RNA, 19 nt, Artificial Sequence
  Description of Artificial Sequence: Synthetic oligonucleotide
cccagaugaagucuggucc

SEQ ID NO: 1704835 - RNA, 19 nt, Artificial Sequence
  Description of Artificial Sequence: Synthetic oligonucleotide
aaacaacacuauccucaga

SEQ ID NO: 1704836 - RNA, 19 nt, Artificial Sequence
  Description of Artificial Sequence: Synthetic oligonucleotide
gaagucuggucccuucuga

SEQ ID NO: 1704837 - RNA, 19 nt, Artificial Sequence
  Description of Artificial Sequence: Synthetic oligonucleotide
uagcagaaacguaguguca

SEQ ID NO: 1704838 - RNA, 19 nt, Artificial Sequence
  Description of Artificial Sequence: Synthetic oligonucleotide
uacagacuaacaagaccuc

SEQ ID NO: 1704839 - RNA, 19 nt, Artificial Sequence
  Description of Artificial Sequence: Synthetic oligonucleotide
cauguaaggcccauccaca

SEQ ID NO: 1704840 - RNA, 19 nt, Artificial Sequence
  Description of Artificial Sequence: Synthetic oligonucleotide
uucacgacgacucgcucuu

SEQ ID NO: 1704841 - RNA, 19 nt, Artificial Sequence
  Description of Artificial Sequence: Synthetic oligonucleotide
acucauaccgaggucguca

SEQ ID NO: 1704842 - RNA, 19 nt, Artificial Sequence
  Description of Artificial Sequence: Synthetic oligonucleotide
ucaccagacagguuacaau

SEQ ID NO: 1704843 - RNA, 19 nt, Artificial Sequence
  Description of Artificial Sequence: Synthetic oligonucleotide
uugcucgucugcgagacac

SEQ ID NO: 1704844 - RNA, 19 nt, Artificial Sequence
  Description of Artificial Sequence: Synthetic oligonucleotide
agaaaugaguuaggcuguc

SEQ ID NO: 1704845 - RNA, 19 nt, Artificial Sequence
  Description of Artificial Sequence: Synthetic oligonucleotide
ucgcgcaucucguggauga

SEQ ID NO: 1704846 - RNA, 19 nt, Artificial Sequence
  Description of Artificial Sequence: Synthetic oligonucleotide
cuguccaaacaaacucacc

SEQ ID NO: 1704847 - RNA, 19 nt, Artificial Sequence
  Description of Artificial Sequence: Synthetic oligonucleotide
gacgcgauguccucgcgca

SEQ ID NO: 1704848 - RNA, 19 nt, Artificial Sequence
  Description of Artificial Sequence: Synthetic oligonucleotide
ucccagaugaagucugguc

SEQ ID NO: 1704849 - RNA, 19 nt, Artificial Sequence
  Description of Artificial Sequence: Synthetic oligonucleotide
cucgaccagaauccauugg

SEQ ID NO: 1704850 - RNA, 19 nt, Artificial Sequence
  Description of Artificial Sequence: Synthetic oligonucleotide
gagcuauuaggucacccaa

SEQ ID NO: 1704851 - RNA, 19 nt, Artificial Sequence
  Description of Artificial Sequence: Synthetic oligonucleotide
ggucgucaaccgcagaccg

SEQ ID NO: 1704852 - RNA, 19 nt, Artificial Sequence
  Description of Artificial Sequence: Synthetic oligonucleotide
cucaaaacuuccgccgcgg

SEQ ID NO: 1704853 - RNA, 19 nt, Artificial Sequence
  Description of Artificial Sequence: Synthetic oligonucleotide
caucgcaaguaucuuucac

SEQ ID NO: 1704854 - RNA, 19 nt, Artificial Sequence
  Description of Artificial Sequence: Synthetic oligonucleotide
uuacaaucuaggcccuaau

SEQ ID NO: 1704855 - RNA, 19 nt, Artificial Sequence
  Description of Artificial Sequence: Synthetic oligonucleotide
caggaacgaacgucauucg

SEQ ID NO: 1704856 - RNA, 19 nt, Artificial Sequence
  Description of Artificial Sequence: Synthetic oligonucleotide
gaacgaacgucauucgacu

SEQ ID NO: 1704857 - RNA, 19 nt, Artificial Sequence
  Description of Artificial Sequence: Synthetic oligonucleotide
cuuugcucgucugcgagac

SEQ ID NO: 1704858 - RNA, 19 nt, Artificial Sequence
  Description of Artificial Sequence: Synthetic oligonucleotide
agcagaaacguagugucaa

SEQ ID NO: 1704859 - RNA, 19 nt, Artificial Sequence
  Description of Artificial Sequence: Synthetic oligonucleotide
caagugagaacagagugaa

SEQ ID NO: 1704860 - RNA, 19 nt, Artificial Sequence
  Description of Artificial Sequence: Synthetic oligonucleotide
acagacuaacaagaccuca

SEQ ID NO: 1704861 - RNA, 19 nt, Artificial Sequence
  Description of Artificial Sequence: Synthetic oligonucleotide
aaaggcucucugguuucag

SEQ ID NO: 1704862 - RNA, 19 nt, Artificial Sequence
  Description of Artificial Sequence: Synthetic oligonucleotide
ucugccgcuuugcucgucu

SEQ ID NO: 1704863 - RNA, 19 nt, Artificial Sequence
  Description of Artificial Sequence: Synthetic oligonucleotide
gccgcaagggcuuacaauc

SEQ ID NO: 1704864 - RNA, 19 nt, Artificial Sequence
  Description of Artificial Sequence: Synthetic oligonucleotide
acacucagugaccgagauc

SEQ ID NO: 1704865 - RNA, 19 nt, Artificial Sequence
  Description of Artificial Sequence: Synthetic oligonucleotide
aacucauaccgaggucguc

SEQ ID NO: 1704866 - RNA, 19 nt, Artificial Sequence
  Description of Artificial Sequence: Synthetic oligonucleotide
aaacucauaccgaggucgu

SEQ ID NO: 1704867 - RNA, 19 nt, Artificial Sequence
  Description of Artificial Sequence: Synthetic oligonucleotide
ugucagccaaucgccauca

SEQ ID NO: 1704868 - RNA, 19 nt, Artificial Sequence
  Description of Artificial Sequence: Synthetic oligonucleotide
auucccguaugugagcgca

SEQ ID NO: 1704869 - RNA, 19 nt, Artificial Sequence
  Description of Artificial Sequence: Synthetic oligonucleotide
acgucauucgacugccgca

SEQ ID NO: 1704870 - RNA, 19 nt, Artificial Sequence
  Description of Artificial Sequence: Synthetic oligonucleotide
cacagcuugccccgguugc

SEQ ID NO: 1704871 - RNA, 19 nt, Artificial Sequence
  Description of Artificial Sequence: Synthetic oligonucleotide
uuuuccuucccagcccaca

SEQ ID NO: 1704872 - RNA, 19 nt, Artificial Sequence
  Description of Artificial Sequence: Synthetic oligonucleotide
gaguuaggcuguccaaaca

SEQ ID NO: 1704873 - RNA, 19 nt, Artificial Sequence
  Description of Artificial Sequence: Synthetic oligonucleotide
agcuauuaggucacccaag

SEQ ID NO: 1704874 - RNA, 19 nt, Artificial Sequence
  Description of Artificial Sequence: Synthetic oligonucleotide
aaagcaccuuaaaaugcau

SEQ ID NO: 1704875 - RNA, 19 nt, Artificial Sequence
  Description of Artificial Sequence: Synthetic oligonucleotide
ggaacgaacgucauucgac

SEQ ID NO: 1704876 - RNA, 19 nt, Artificial Sequence
  Description of Artificial Sequence: Synthetic oligonucleotide
ccaucacucgaccagaauc

SEQ ID NO: 1704877 - RNA, 19 nt, Artificial Sequence
  Description of Artificial Sequence: Synthetic oligonucleotide
aggaucuccucgaauauau

SEQ ID NO: 1704878 - RNA, 19 nt, Artificial Sequence
  Description of Artificial Sequence: Synthetic oligonucleotide
aucuaggcccuaauucccg

SEQ ID NO: 1704879 - RNA, 19 nt, Artificial Sequence
  Description of Artificial Sequence: Synthetic oligonucleotide
gcuauuaggucacccaaga

SEQ ID NO: 1704880 - RNA, 19 nt, Artificial Sequence
  Description of Artificial Sequence: Synthetic oligonucleotide
uaggcccuaauucccguau

SEQ ID NO: 1704881 - RNA, 19 nt, Artificial Sequence
  Description of Artificial Sequence: Synthetic oligonucleotide
acgacgacucgcucuucuc

SEQ ID NO: 1704882 - RNA, 19 nt, Artificial Sequence
  Description of Artificial Sequence: Synthetic oligonucleotide
caaucgccaucacucgacc

SEQ ID NO: 1704883 - RNA, 19 nt, Artificial Sequence
  Description of Artificial Sequence: Synthetic oligonucleotide
guccucgcgcaucucgugg

SEQ ID NO: 1704884 - RNA, 19 nt, Artificial Sequence
  Description of Artificial Sequence: Synthetic oligonucleotide
cauuggcuggaaaccgcgc

SEQ ID NO: 1704885 - RNA, 19 nt, Artificial Sequence
  Description of Artificial Sequence: Synthetic oligonucleotide
ucgacugccgcaagggcuu

SEQ ID NO: 1704886 - RNA, 19 nt, Artificial Sequence
  Description of Artificial Sequence: Synthetic oligonucleotide
ccaggaacgaacgucauuc

SEQ ID NO: 1704887 - RNA, 19 nt, Artificial Sequence
  Description of Artificial Sequence: Synthetic oligonucleotide
agggugucaugucagccaa

SEQ ID NO: 1704888 - RNA, 19 nt, Artificial Sequence
  Description of Artificial Sequence: Synthetic oligonucleotide
uuggucucacacagaaauu

SEQ ID NO: 1704889 - RNA, 19 nt, Artificial Sequence
  Description of Artificial Sequence: Synthetic oligonucleotide
caaaguuaugucucccaaa

SEQ ID NO: 1704890 - RNA, 19 nt, Artificial Sequence
  Description of Artificial Sequence: Synthetic oligonucleotide
uugagcgcgcucuccucag

SEQ ID NO: 1704891 - RNA, 19 nt, Artificial Sequence
  Description of Artificial Sequence: Synthetic oligonucleotide
ggagcuauuaggucaccca

SEQ ID NO: 1704892 - RNA, 19 nt, Artificial Sequence
  Description of Artificial Sequence: Synthetic oligonucleotide
cagcccacaaagggcaucg

SEQ ID NO: 1704893 - RNA, 19 nt, Artificial Sequence
  Description of Artificial Sequence: Synthetic oligonucleotide
gagcgcgcucuccucagag

SEQ ID NO: 1704894 - RNA, 19 nt, Artificial Sequence
  Description of Artificial Sequence: Synthetic oligonucleotide
aaacuuccgccgcggcuca

SEQ ID NO: 1704895 - RNA, 19 nt, Artificial Sequence
  Description of Artificial Sequence: Synthetic oligonucleotide
acagguuacaauagauaau

SEQ ID NO: 1704896 - RNA, 19 nt, Artificial Sequence
  Description of Artificial Sequence: Synthetic oligonucleotide
ucgucaaccgcagaccgua

SEQ ID NO: 1704897 - RNA, 19 nt, Artificial Sequence
  Description of Artificial Sequence: Synthetic oligonucleotide
ugccgcuuugcucgucugc

SEQ ID NO: 1704898 - RNA, 19 nt, Artificial Sequence
  Description of Artificial Sequence: Synthetic oligonucleotide
augugagcgcauuuuccaa

SEQ ID NO: 1704899 - RNA, 19 nt, Artificial Sequence
  Description of Artificial Sequence: Synthetic oligonucleotide
guuaugucucccaaacaaa

SEQ ID NO: 1704900 - RNA, 19 nt, Artificial Sequence
  Description of Artificial Sequence: Synthetic oligonucleotide
acaaagggcaucgcaagua

SEQ ID NO: 1704901 - RNA, 19 nt, Artificial Sequence
  Description of Artificial Sequence: Synthetic oligonucleotide
uaccgaggucgucaaccgc

SEQ ID NO: 1704902 - RNA, 19 nt, Artificial Sequence
  Description of Artificial Sequence: Synthetic oligonucleotide
ugagcgcauuuuccaaauc

SEQ ID NO: 1704903 - RNA, 19 nt, Artificial Sequence
  Description of Artificial Sequence: Synthetic oligonucleotide
gucaaccgcagaccguagc

SEQ ID NO: 1704904 - RNA, 19 nt, Artificial Sequence
  Description of Artificial Sequence: Synthetic oligonucleotide
uccgccgcggcucaacuuu

SEQ ID NO: 1704905 - RNA, 19 nt, Artificial Sequence
  Description of Artificial Sequence: Synthetic oligonucleotide
agcgcgcucuccucagagg

SEQ ID NO: 1704906 - RNA, 19 nt, Artificial Sequence
  Description of Artificial Sequence: Synthetic oligonucleotide
aaaccgcgcggcccguuca

SEQ ID NO: 1704907 - RNA, 19 nt, Artificial Sequence
  Description of Artificial Sequence: Synthetic oligonucleotide
aagugagaacagagugaag

SEQ ID NO: 1704908 - RNA, 19 nt, Artificial Sequence
  Description of Artificial Sequence: Synthetic oligonucleotide
cagugaccgagauccggcc

SEQ ID NO: 1704909 - RNA, 19 nt, Artificial Sequence
  Description of Artificial Sequence: Synthetic oligonucleotide
ccauuggcuggaaaccgcg

SEQ ID NO: 1704910 - RNA, 19 nt, Artificial Sequence
  Description of Artificial Sequence: Synthetic oligonucleotide
ucgaauauauggggauaaa

SEQ ID NO: 1704911 - RNA, 19 nt, Artificial Sequence
  Description of Artificial Sequence: Synthetic oligonucleotide
uguccucgcgcaucucgug

SEQ ID NO: 1704912 - RNA, 19 nt, Artificial Sequence
  Description of Artificial Sequence: Synthetic oligonucleotide
gaggccuccacuugcgucu

SEQ ID NO: 1704913 - RNA, 19 nt, Artificial Sequence
  Description of Artificial Sequence: Synthetic oligonucleotide
accgaggucgucaaccgca

SEQ ID NO: 1704914 - RNA, 19 nt, Artificial Sequence
  Description of Artificial Sequence: Synthetic oligonucleotide
uccucgcgcaucucgugga

SEQ ID NO: 1704915 - RNA, 19 nt, Artificial Sequence
  Description of Artificial Sequence: Synthetic oligonucleotide
guugagcgcgcucuccuca

SEQ ID NO: 1704916 - RNA, 19 nt, Artificial Sequence
  Description of Artificial Sequence: Synthetic oligonucleotide
cucuauccgccgcaccagc

SEQ ID NO: 1704917 - RNA, 19 nt, Artificial Sequence
  Description of Artificial Sequence: Synthetic oligonucleotide
cucgaauauauggggauaa

SEQ ID NO: 1704918 - RNA, 19 nt, Artificial Sequence
  Description of Artificial Sequence: Synthetic oligonucleotide
uccggccgaguccucaaaa

SEQ ID NO: 1704919 - RNA, 19 nt, Artificial Sequence
  Description of Artificial Sequence: Synthetic oligonucleotide
gcagaaacguagugucaag

SEQ ID NO: 1704920 - RNA, 19 nt, Artificial Sequence
  Description of Artificial Sequence: Synthetic oligonucleotide
ucgcgcgucagcgacgcga

SEQ ID NO: 1704921 - RNA, 19 nt, Artificial Sequence
  Description of Artificial Sequence: Synthetic oligonucleotide
gugaccgagauccggccga

SEQ ID NO: 1704922 - RNA, 19 nt, Artificial Sequence
  Description of Artificial Sequence: Synthetic oligonucleotide
ucauaccgaggucgucaac

SEQ ID NO: 1704923 - RNA, 19 nt, Artificial Sequence
  Description of Artificial Sequence: Synthetic oligonucleotide
uuagccauguaaggcccau

SEQ ID NO: 1704924 - RNA, 19 nt, Artificial Sequence
  Description of Artificial Sequence: Synthetic oligonucleotide
cgcaucucguggaugacgg

SEQ ID NO: 1704925 - RNA, 19 nt, Artificial Sequence
  Description of Artificial Sequence: Synthetic oligonucleotide
gacgacucgcucuucucua

SEQ ID NO: 1704926 - RNA, 19 nt, Artificial Sequence
  Description of Artificial Sequence: Synthetic oligonucleotide
uggcuggaaaccgcgcggc

SEQ ID NO: 1704927 - RNA, 19 nt, Artificial Sequence
  Description of Artificial Sequence: Synthetic oligonucleotide
cguagugucaagugagaac

SEQ ID NO: 1704928 - RNA, 19 nt, Artificial Sequence
  Description of Artificial Sequence: Synthetic oligonucleotide
cuuacaaucuaggcccuaa

SEQ ID NO: 1704929 - RNA, 19 nt, Artificial Sequence
  Description of Artificial Sequence: Synthetic oligonucleotide
aggcccuaauucccguaug

SEQ ID NO: 1704930 - RNA, 19 nt, Artificial Sequence
  Description of Artificial Sequence: Synthetic oligonucleotide
caaccgcagaccguagcag

SEQ ID NO: 1704931 - RNA, 19 nt, Artificial Sequence
  Description of Artificial Sequence: Synthetic oligonucleotide
ccaaucgccaucacucgac

SEQ ID NO: 1704932 - RNA, 19 nt, Artificial Sequence
  Description of Artificial Sequence: Synthetic oligonucleotide
uuugcucgucugcgagaca

SEQ ID NO: 1704933 - RNA, 19 nt, Artificial Sequence
  Description of Artificial Sequence: Synthetic oligonucleotide
guucacgacgacucgcucu

SEQ ID NO: 1704934 - RNA, 19 nt, Artificial Sequence
  Description of Artificial Sequence: Synthetic oligonucleotide
acaagaccucaucucccau

SEQ ID NO: 1704935 - RNA, 19 nt, Artificial Sequence
  Description of Artificial Sequence: Synthetic oligonucleotide
acguagugucaagugagaa

SEQ ID NO: 1704936 - RNA, 19 nt, Artificial Sequence
  Description of Artificial Sequence: Synthetic oligonucleotide
cuauuaggucacccaagaa

SEQ ID NO: 1704937 - RNA, 19 nt, Artificial Sequence
  Description of Artificial Sequence: Synthetic oligonucleotide
gaaaccgcgcggcccguuc

SEQ ID NO: 1704938 - RNA, 19 nt, Artificial Sequence
  Description of Artificial Sequence: Synthetic oligonucleotide
ggugucaugucagccaauc

SEQ ID NO: 1704939 - RNA, 19 nt, Artificial Sequence
  Description of Artificial Sequence: Synthetic oligonucleotide
gucauucgacugccgcaag

SEQ ID NO: 1704940 - RNA, 19 nt, Artificial Sequence
  Description of Artificial Sequence: Synthetic oligonucleotide
guuaggcuguccaaacaaa

SEQ ID NO: 1704941 - RNA, 19 nt, Artificial Sequence
  Description of Artificial Sequence: Synthetic oligonucleotide
ccucaaaacuuccgccgcg

SEQ ID NO: 1704942 - RNA, 19 nt, Artificial Sequence
  Description of Artificial Sequence: Synthetic oligonucleotide
acuugcgucuugaucugga

SEQ ID NO: 1704943 - RNA, 19 nt, Artificial Sequence
  Description of Artificial Sequence: Synthetic oligonucleotide
cccuaauucccguauguga

SEQ ID NO: 1704944 - RNA, 19 nt, Artificial Sequence
  Description of Artificial Sequence: Synthetic oligonucleotide
accguagcagaaacguagu

SEQ ID NO: 1704945 - RNA, 19 nt, Artificial Sequence
  Description of Artificial Sequence: Synthetic oligonucleotide
cuuagccauguaaggccca

SEQ ID NO: 1704946 - RNA, 19 nt, Artificial Sequence
  Description of Artificial Sequence: Synthetic oligonucleotide
cagaccguagcagaaacgu

SEQ ID NO: 1704947 - RNA, 19 nt, Artificial Sequence
  Description of Artificial Sequence: Synthetic oligonucleotide
cagggacccaaaguuccag

SEQ ID NO: 1704948 - RNA, 19 nt, Artificial Sequence
  Description of Artificial Sequence: Synthetic oligonucleotide
aacuuuccgccuaggugaa

SEQ ID NO: 1704949 - RNA, 19 nt, Artificial Sequence
  Description of Artificial Sequence: Synthetic oligonucleotide
gcuguccaaacaaacucac

SEQ ID NO: 1704950 - RNA, 19 nt, Artificial Sequence
  Description of Artificial Sequence: Synthetic oligonucleotide
aaguuccagggagcuauua

SEQ ID NO: 1704951 - RNA, 19 nt, Artificial Sequence
  Description of Artificial Sequence: Synthetic oligonucleotide
ggcucaacuuuccgccuag

SEQ ID NO: 1704952 - RNA, 19 nt, Artificial Sequence
  Description of Artificial Sequence: Synthetic oligonucleotide
cagacuaacaagaccucau

SEQ ID NO: 1704953 - RNA, 19 nt, Artificial Sequence
  Description of Artificial Sequence: Synthetic oligonucleotide
ugagcgcgcucuccucaga

SEQ ID NO: 1704954 - RNA, 19 nt, Artificial Sequence
  Description of Artificial Sequence: Synthetic oligonucleotide
ugaccgagauccggccgag

SEQ ID NO: 1704955 - RNA, 19 nt, Artificial Sequence
  Description of Artificial Sequence: Synthetic oligonucleotide
gggaaaacaaaaggcucuc

SEQ ID NO: 1704956 - RNA, 19 nt, Artificial Sequence
  Description of Artificial Sequence: Synthetic oligonucleotide
gucaucagucuuagccaug

SEQ ID NO: 1704957 - RNA, 19 nt, Artificial Sequence
  Description of Artificial Sequence: Synthetic oligonucleotide
cgcggcucaacuuuccgcc

SEQ ID NO: 1704958 - RNA, 19 nt, Artificial Sequence
  Description of Artificial Sequence: Synthetic oligonucleotide
gcagaccguagcagaaacg

SEQ ID NO: 1704959 - RNA, 19 nt, Artificial Sequence
  Description of Artificial Sequence: Synthetic oligonucleotide
cucauaccgaggucgucaa

SEQ ID NO: 1704960 - RNA, 19 nt, Artificial Sequence
  Description of Artificial Sequence: Synthetic oligonucleotide
agcuugccccgguugcgca

SEQ ID NO: 1704961 - RNA, 19 nt, Artificial Sequence
  Description of Artificial Sequence: Synthetic oligonucleotide
ggggccgcaucucugccgc

SEQ ID NO: 1704962 - RNA, 19 nt, Artificial Sequence
  Description of Artificial Sequence: Synthetic oligonucleotide
gggagcuauuaggucaccc

SEQ ID NO: 1704963 - RNA, 19 nt, Artificial Sequence
  Description of Artificial Sequence: Synthetic oligonucleotide
cucaccagacagguuacaa

SEQ ID NO: 1704964 - RNA, 19 nt, Artificial Sequence
  Description of Artificial Sequence: Synthetic oligonucleotide
ugaucuggaucagcauauu

SEQ ID NO: 1704965 - RNA, 19 nt, Artificial Sequence
  Description of Artificial Sequence: Synthetic oligonucleotide
uugccccgguugcgcacgg

SEQ ID NO: 1704966 - RNA, 19 nt, Artificial Sequence
  Description of Artificial Sequence: Synthetic oligonucleotide
cguaugugagcgcauuuuc

SEQ ID NO: 1704967 - RNA, 19 nt, Artificial Sequence
  Description of Artificial Sequence: Synthetic oligonucleotide
caaaacuuccgccgcggcu

SEQ ID NO: 1704968 - RNA, 19 nt, Artificial Sequence
  Description of Artificial Sequence: Synthetic oligonucleotide
uucccguaugugagcgcau

SEQ ID NO: 1704969 - RNA, 19 nt, Artificial Sequence
  Description of Artificial Sequence: Synthetic oligonucleotide
cucgucugcgagacacuca

SEQ ID NO: 1704970 - RNA, 19 nt, Artificial Sequence
  Description of Artificial Sequence: Synthetic oligonucleotide
cucaacuuuccgccuaggu

SEQ ID NO: 1704971 - RNA, 19 nt, Artificial Sequence
  Description of Artificial Sequence: Synthetic oligonucleotide
auguccucgcgcaucucgu

SEQ ID NO: 1704972 - RNA, 19 nt, Artificial Sequence
  Description of Artificial Sequence: Synthetic oligonucleotide
gcuggaaaccgcgcggccc

SEQ ID NO: 1704973 - RNA, 19 nt, Artificial Sequence
  Description of Artificial Sequence: Synthetic oligonucleotide
acagggacccaaaguucca

SEQ ID NO: 1704974 - RNA, 19 nt, Artificial Sequence
  Description of Artificial Sequence: Synthetic oligonucleotide
gauccggccgaguccucaa

SEQ ID NO: 1704975 - RNA, 19 nt, Artificial Sequence
  Description of Artificial Sequence: Synthetic oligonucleotide
ggcccguucacgacgacuc

SEQ ID NO: 1704976 - RNA, 19 nt, Artificial Sequence
  Description of Artificial Sequence: Synthetic oligonucleotide
gugagcgcauuuuccaaau

SEQ ID NO: 1704977 - RNA, 19 nt, Artificial Sequence
  Description of Artificial Sequence: Synthetic oligonucleotide
caaagggcaucgcaaguau

SEQ ID NO: 1704978 - RNA, 19 nt, Artificial Sequence
  Description of Artificial Sequence: Synthetic oligonucleotide
ucccguaugugagcgcauu

SEQ ID NO: 1704979 - RNA, 19 nt, Artificial Sequence
  Description of Artificial Sequence: Synthetic oligonucleotide
cagaaacguagugucaagu

SEQ ID NO: 1704980 - RNA, 19 nt, Artificial Sequence
  Description of Artificial Sequence: Synthetic oligonucleotide
gcgcaucucguggaugacg

SEQ ID NO: 1704981 - RNA, 19 nt, Artificial Sequence
  Description of Artificial Sequence: Synthetic oligonucleotide
ggagcacauaaaauuuaaa

SEQ ID NO: 1704982 - RNA, 19 nt, Artificial Sequence
  Description of Artificial Sequence: Synthetic oligonucleotide
cagcuugccccgguugcgc

SEQ ID NO: 1704983 - RNA, 19 nt, Artificial Sequence
  Description of Artificial Sequence: Synthetic oligonucleotide
gcaucucguggaugacggg

SEQ ID NO: 1704984 - RNA, 19 nt, Artificial Sequence
  Description of Artificial Sequence: Synthetic oligonucleotide
ccgagauccggccgagucc

SEQ ID NO: 1704985 - RNA, 19 nt, Artificial Sequence
  Description of Artificial Sequence: Synthetic oligonucleotide
ggucaucagucuuagccau

SEQ ID NO: 1704986 - RNA, 19 nt, Artificial Sequence
  Description of Artificial Sequence: Synthetic oligonucleotide
caugucagccaaucgccau

SEQ ID NO: 1704987 - RNA, 19 nt, Artificial Sequence
  Description of Artificial Sequence: Synthetic oligonucleotide
ggaucuccucgaauauaug

SEQ ID NO: 1704988 - RNA, 19 nt, Artificial Sequence
  Description of Artificial Sequence: Synthetic oligonucleotide
cuucuccgcccuggggccg

SEQ ID NO: 1704989 - RNA, 19 nt, Artificial Sequence
  Description of Artificial Sequence: Synthetic oligonucleotide
gcccuaauucccguaugug

SEQ ID NO: 1704990 - RNA, 19 nt, Artificial Sequence
  Description of Artificial Sequence: Synthetic oligonucleotide
gcccgcgcccugcaggugg

SEQ ID NO: 1704991 - RNA, 19 nt, Artificial Sequence
  Description of Artificial Sequence: Synthetic oligonucleotide
accgcagaccguagcagaa

SEQ ID NO: 1704992 - RNA, 19 nt, Artificial Sequence
  Description of Artificial Sequence: Synthetic oligonucleotide
guugcgcacgggcgcgcgc

SEQ ID NO: 1704993 - RNA, 19 nt, Artificial Sequence
  Description of Artificial Sequence: Synthetic oligonucleotide
cucgcgcaucucguggaug

SEQ ID NO: 1704994 - RNA, 19 nt, Artificial Sequence
  Description of Artificial Sequence: Synthetic oligonucleotide
gccaaucgccaucacucga

SEQ ID NO: 1704995 - RNA, 19 nt, Artificial Sequence
  Description of Artificial Sequence: Synthetic oligonucleotide
gcccacaaagggcaucgca

SEQ ID NO: 1704996 - RNA, 19 nt, Artificial Sequence
  Description of Artificial Sequence: Synthetic oligonucleotide
uagccauguaaggcccauc

SEQ ID NO: 1704997 - RNA, 19 nt, Artificial Sequence
  Description of Artificial Sequence: Synthetic oligonucleotide
agaccguagcagaaacgua

SEQ ID NO: 1704998 - RNA, 19 nt, Artificial Sequence
  Description of Artificial Sequence: Synthetic oligonucleotide
guuuuccuucccagcccac

SEQ ID NO: 1704999 - RNA, 19 nt, Artificial Sequence
  Description of Artificial Sequence: Synthetic oligonucleotide
gcaucgcaaguaucuuuca

SEQ ID NO: 1705000 - RNA, 19 nt, Artificial Sequence
  Description of Artificial Sequence: Synthetic oligonucleotide
cuaggcccuaauucccgua

SEQ ID NO: 1705001 - RNA, 19 nt, Artificial Sequence
  Description of Artificial Sequence: Synthetic oligonucleotide
ccguagcagaaacguagug

SEQ ID NO: 1705002 - RNA, 19 nt, Artificial Sequence
  Description of Artificial Sequence: Synthetic oligonucleotide
gccauguaaggcccaucca

SEQ ID NO: 1705003 - RNA, 19 nt, Artificial Sequence
  Description of Artificial Sequence: Synthetic oligonucleotide
gcuuugcucgucugcgaga

SEQ ID NO: 1705004 - RNA, 19 nt, Artificial Sequence
  Description of Artificial Sequence: Synthetic oligonucleotide
ccacuugcgucuugaucug

SEQ ID NO: 1705005 - RNA, 19 nt, Artificial Sequence
  Description of Artificial Sequence: Synthetic oligonucleotide
ccggccgaguccucaaaac

SEQ ID NO: 1705006 - RNA, 19 nt, Artificial Sequence
  Description of Artificial Sequence: Synthetic oligonucleotide
gcccguucacgacgacucg

SEQ ID NO: 1705007 - RNA, 19 nt, Artificial Sequence
  Description of Artificial Sequence: Synthetic oligonucleotide
ccgcggcucaacuuuccgc

SEQ ID NO: 1705008 - RNA, 19 nt, Artificial Sequence
  Description of Artificial Sequence: Synthetic oligonucleotide
cgcagaccguagcagaaac

SEQ ID NO: 1705009 - RNA, 19 nt, Artificial Sequence
  Description of Artificial Sequence: Synthetic oligonucleotide
cccaggucaucagucuuag

SEQ ID NO: 1705010 - RNA, 19 nt, Artificial Sequence
  Description of Artificial Sequence: Synthetic oligonucleotide
gcgcggcccguucacgacg

SEQ ID NO: 1705011 - RNA, 19 nt, Artificial Sequence
  Description of Artificial Sequence: Synthetic oligonucleotide
ggugguugagcgcgcucuc

SEQ ID NO: 1705012 - RNA, 19 nt, Artificial Sequence
  Description of Artificial Sequence: Synthetic oligonucleotide
ggcccuaauucccguaugu

SEQ ID NO: 1705013 - RNA, 19 nt, Artificial Sequence
  Description of Artificial Sequence: Synthetic oligonucleotide
cccgguugcgcacgggcgc

SEQ ID NO: 1705014 - RNA, 19 nt, Artificial Sequence
  Description of Artificial Sequence: Synthetic oligonucleotide
ccgaggucgucaaccgcag

SEQ ID NO: 1705015 - RNA, 19 nt, Artificial Sequence
  Description of Artificial Sequence: Synthetic oligonucleotide
ccccgguugcgcacgggcg

SEQ ID NO: 1705016 - RNA, 19 nt, Artificial Sequence
  Description of Artificial Sequence: Synthetic oligonucleotide
gccccgguugcgcacgggc

SEQ ID NO: 1705017 - RNA, 19 nt, Artificial Sequence
  Description of Artificial Sequence: Synthetic oligonucleotide
auccggccgaguccucaaa

SEQ ID NO: 1705018 - RNA, 19 nt, Artificial Sequence
  Description of Artificial Sequence: Synthetic oligonucleotide
gcucaacuuuccgccuagg

SEQ ID NO: 1705019 - RNA, 19 nt, Artificial Sequence
  Description of Artificial Sequence: Synthetic oligonucleotide
cccguucacgacgacucgc

SEQ ID NO: 1705020 - RNA, 19 nt, Artificial Sequence
  Description of Artificial Sequence: Synthetic oligonucleotide
cacgacgacucgcucuucu

SEQ ID NO: 1705021 - RNA, 19 nt, Artificial Sequence
  Description of Artificial Sequence: Synthetic oligonucleotide
gcucgucugcgagacacuc

SEQ ID NO: 1705022 - RNA, 19 nt, Artificial Sequence
  Description of Artificial Sequence: Synthetic oligonucleotide
gguugcgcacgggcgcgcg

SEQ ID NO: 1705023 - RNA, 19 nt, Artificial Sequence
  Description of Artificial Sequence: Synthetic oligonucleotide
gacugccgcaagggcuuac

SEQ ID NO: 1705024 - RNA, 19 nt, Artificial Sequence
  Description of Artificial Sequence: Synthetic oligonucleotide
gcgucuugaucuggaucag

SEQ ID NO: 1705025 - RNA, 19 nt, Artificial Sequence
  Description of Artificial Sequence: Synthetic oligonucleotide
ggcucugcgccgcccgcgc

SEQ ID NO: 1705026 - RNA, 19 nt, Artificial Sequence
  Description of Artificial Sequence: Synthetic oligonucleotide
acgcgauguccucgcgcau

SEQ ID NO: 1705027 - RNA, 19 nt, Artificial Sequence
  Description of Artificial Sequence: Synthetic oligonucleotide
cugccgcaagggcuuacaa

SEQ ID NO: 1705028 - RNA, 19 nt, Artificial Sequence
  Description of Artificial Sequence: Synthetic oligonucleotide
gcgcucgcgcgucagcgac

SEQ ID NO: 1705029 - RNA, 19 nt, Artificial Sequence
  Description of Artificial Sequence: Synthetic oligonucleotide
accgcguccaggggccgca

SEQ ID NO: 1705030 - RNA, 19 nt, Artificial Sequence
  Description of Artificial Sequence: Synthetic oligonucleotide
ucacgacgacucgcucuuc

SEQ ID NO: 1705031 - RNA, 19 nt, Artificial Sequence
  Description of Artificial Sequence: Synthetic oligonucleotide
cguagcagaaacguagugu

SEQ ID NO: 1705032 - RNA, 19 nt, Artificial Sequence
  Description of Artificial Sequence: Synthetic oligonucleotide
cgacgcgauguccucgcgc

SEQ ID NO: 1705033 - RNA, 19 nt, Artificial Sequence
  Description of Artificial Sequence: Synthetic oligonucleotide
gcgucagcgacgcgauguc

SEQ ID NO: 1705034 - RNA, 19 nt, Artificial Sequence
  Description of Artificial Sequence: Synthetic oligonucleotide
cccauucuggauuccauuu

SEQ ID NO: 1705035 - RNA, 19 nt, Artificial Sequence
  Description of Artificial Sequence: Synthetic oligonucleotide
cucgcgcgucagcgacgcg

SEQ ID NO: 1705036 - RNA, 19 nt, Artificial Sequence
  Description of Artificial Sequence: Synthetic oligonucleotide
gcgauguccucgcgcaucu

SEQ ID NO: 1705037 - RNA, 19 nt, Artificial Sequence
  Description of Artificial Sequence: Synthetic oligonucleotide
gggcucugcgccgcccgcg

SEQ ID NO: 1705038 - RNA, 19 nt, Artificial Sequence
  Description of Artificial Sequence: Synthetic oligonucleotide
cacgggcgcgcgcccgcgc

SEQ ID NO: 1705039 - RNA, 19 nt, Artificial Sequence
  Description of Artificial Sequence: Synthetic oligonucleotide
cucccaggucaucagucuu

SEQ ID NO: 1705040 - RNA, 19 nt, Artificial Sequence
  Description of Artificial Sequence: Synthetic oligonucleotide
ccgguugcgcacgggcgcg

SEQ ID NO: 1705041 - RNA, 19 nt, Artificial Sequence
  Description of Artificial Sequence: Synthetic oligonucleotide
cuuccgccgcggcucaacu

SEQ ID NO: 1705042 - RNA, 19 nt, Artificial Sequence
  Description of Artificial Sequence: Synthetic oligonucleotide
gucgucaaccgcagaccgu

SEQ ID NO: 1705043 - RNA, 19 nt, Artificial Sequence
  Description of Artificial Sequence: Synthetic oligonucleotide
caccgcguccaggggccgc

SEQ ID NO: 1705044 - RNA, 19 nt, Artificial Sequence
  Description of Artificial Sequence: Synthetic oligonucleotide
ccucgaauauauggggaua

SEQ ID NO: 1705045 - RNA, 19 nt, Artificial Sequence
  Description of Artificial Sequence: Synthetic oligonucleotide
cgucaaccgcagaccguag

SEQ ID NO: 1705046 - RNA, 19 nt, Artificial Sequence
  Description of Artificial Sequence: Synthetic oligonucleotide
cgaccagaauccauuggcu

SEQ ID NO: 1705047 - RNA, 19 nt, Artificial Sequence
  Description of Artificial Sequence: Synthetic oligonucleotide
ccagcccacaaagggcauc

SEQ ID NO: 1705048 - RNA, 19 nt, Artificial Sequence
  Description of Artificial Sequence: Synthetic oligonucleotide
cgucauucgacugccgcaa

SEQ ID NO: 1705049 - RNA, 19 nt, Artificial Sequence
  Description of Artificial Sequence: Synthetic oligonucleotide
cguucacgacgacucgcuc

SEQ ID NO: 1705050 - RNA, 19 nt, Artificial Sequence
  Description of Artificial Sequence: Synthetic oligonucleotide
cgacucgcucuucucuauc

SEQ ID NO: 1705051 - RNA, 19 nt, Artificial Sequence
  Description of Artificial Sequence: Synthetic oligonucleotide
ccguucacgacgacucgcu

SEQ ID NO: 1705052 - RNA, 19 nt, Artificial Sequence
  Description of Artificial Sequence: Synthetic oligonucleotide
aggccuccacuugcgucuu

SEQ ID NO: 1705053 - RNA, 19 nt, Artificial Sequence
  Description of Artificial Sequence: Synthetic oligonucleotide
ccgcaucucugccgcuuug

SEQ ID NO: 1705054 - RNA, 19 nt, Artificial Sequence
  Description of Artificial Sequence: Synthetic oligonucleotide
cgcgauguccucgcgcauc

SEQ ID NO: 1705055 - RNA, 19 nt, Artificial Sequence
  Description of Artificial Sequence: Synthetic oligonucleotide
ccgcaagggcuuacaaucu

SEQ ID NO: 1705056 - RNA, 19 nt, Artificial Sequence
  Description of Artificial Sequence: Synthetic oligonucleotide
ccgcuuugcucgucugcga

SEQ ID NO: 1705057 - RNA, 19 nt, Artificial Sequence
  Description of Artificial Sequence: Synthetic oligonucleotide
cgagacacucagugaccga

SEQ ID NO: 1705058 - RNA, 19 nt, Artificial Sequence
  Description of Artificial Sequence: Synthetic oligonucleotide
gcggcucaacuuuccgccu

SEQ ID NO: 1705059 - RNA, 19 nt, Artificial Sequence
  Description of Artificial Sequence: Synthetic oligonucleotide
cgccgcggcucaacuuucc

SEQ ID NO: 1705060 - RNA, 19 nt, Artificial Sequence
  Description of Artificial Sequence: Synthetic oligonucleotide
cuccgcccuggggccgcgg

SEQ ID NO: 1705061 - RNA, 19 nt, Artificial Sequence
  Description of Artificial Sequence: Synthetic oligonucleotide
cgcaagggcuuacaaucua

SEQ ID NO: 1705062 - RNA, 19 nt, Artificial Sequence
  Description of Artificial Sequence: Synthetic oligonucleotide
ccgccgcggcucaacuuuc

SEQ ID NO: 1705063 - RNA, 19 nt, Artificial Sequence
  Description of Artificial Sequence: Synthetic oligonucleotide
gcacgggcgcgcgcccgcg

SEQ ID NO: 1705064 - RNA, 19 nt, Artificial Sequence
  Description of Artificial Sequence: Synthetic oligonucleotide
gaccgagauccggccgagu

SEQ ID NO: 1705065 - RNA, 19 nt, Artificial Sequence
  Description of Artificial Sequence: Synthetic oligonucleotide
cgacgacucgcucuucucu

SEQ ID NO: 1705066 - RNA, 19 nt, Artificial Sequence
  Description of Artificial Sequence: Synthetic oligonucleotide
cgagauccggccgaguccu

SEQ ID NO: 1705067 - RNA, 19 nt, Artificial Sequence
  Description of Artificial Sequence: Synthetic oligonucleotide
cgcgcggcccguucacgac

SEQ ID NO: 1705068 - RNA, 19 nt, Artificial Sequence
  Description of Artificial Sequence: Synthetic oligonucleotide
gcgcgucagcgacgcgaug

SEQ ID NO: 1705069 - RNA, 19 nt, Artificial Sequence
  Description of Artificial Sequence: Synthetic oligonucleotide
ccgcgcggcccguucacga

SEQ ID NO: 1705070 - RNA, 19 nt, Artificial Sequence
  Description of Artificial Sequence: Synthetic oligonucleotide
ccccuacaaacaacacuau

SEQ ID NO: 1705071 - RNA, 19 nt, Artificial Sequence
  Description of Artificial Sequence: Synthetic oligonucleotide
cgcgucagcgacgcgaugu

SEQ ID NO: 1705072 - RNA, 19 nt, Artificial Sequence
  Description of Artificial Sequence: Synthetic oligonucleotide
cgcggcccguucacgacga

SEQ ID NO: 1705073 - RNA, 19 nt, Artificial Sequence
  Description of Artificial Sequence: Synthetic oligonucleotide
ccaccgcguccaggggccg

SEQ ID NO: 1705074 - RNA, 19 nt, Artificial Sequence
  Description of Artificial Sequence: Synthetic oligonucleotide
cgcacgggcgcgcgcccgc

SEQ ID NO: 1705075 - RNA, 19 nt, Artificial Sequence
  Description of Artificial Sequence: Synthetic oligonucleotide
cgcgcaucucguggaugac

SEQ ID NO: 1705076 - RNA, 19 nt, Artificial Sequence
  Description of Artificial Sequence: Synthetic oligonucleotide
gccgcaucucugccgcuuu

SEQ ID NO: 1705077 - RNA, 19 nt, Artificial Sequence
  Description of Artificial Sequence: Synthetic oligonucleotide
cgcaaguaucuuucacuuu

SEQ ID NO: 1705078 - RNA, 19 nt, Artificial Sequence
  Description of Artificial Sequence: Synthetic oligonucleotide
cccaggaacgaacgucauu

SEQ ID NO: 1705079 - RNA, 19 nt, Artificial Sequence
  Description of Artificial Sequence: Synthetic oligonucleotide
cccguaugugagcgcauuu

SEQ ID NO: 1705080 - RNA, 19 nt, Artificial Sequence
  Description of Artificial Sequence: Synthetic oligonucleotide
cgaggucgucaaccgcaga

SEQ ID NO: 1705081 - RNA, 19 nt, Artificial Sequence
  Description of Artificial Sequence: Synthetic oligonucleotide
cggcucaacuuuccgccua

SEQ ID NO: 1705082 - RNA, 19 nt, Artificial Sequence
  Description of Artificial Sequence: Synthetic oligonucleotide
gcggcccguucacgacgac

SEQ ID NO: 1705083 - RNA, 19 nt, Artificial Sequence
  Description of Artificial Sequence: Synthetic oligonucleotide
cuggggccgcggggcucug

SEQ ID NO: 1705084 - RNA, 19 nt, Artificial Sequence
  Description of Artificial Sequence: Synthetic oligonucleotide
ccuccacuugcgucuugau

SEQ ID NO: 1705085 - RNA, 19 nt, Artificial Sequence
  Description of Artificial Sequence: Synthetic oligonucleotide
ggccgcaucucugccgcuu

SEQ ID NO: 1705086 - RNA, 19 nt, Artificial Sequence
  Description of Artificial Sequence: Synthetic oligonucleotide
gcccaggaacgaacgucau

SEQ ID NO: 1705087 - RNA, 19 nt, Artificial Sequence
  Description of Artificial Sequence: Synthetic oligonucleotide
cgguugcgcacgggcgcgc

SEQ ID NO: 1705088 - RNA, 19 nt, Artificial Sequence
  Description of Artificial Sequence: Synthetic oligonucleotide
ccucgcgcaucucguggau

SEQ ID NO: 1705089 - RNA, 19 nt, Artificial Sequence
  Description of Artificial Sequence: Synthetic oligonucleotide
ggaaaccgcgcggcccguu

SEQ ID NO: 1705090 - RNA, 19 nt, Artificial Sequence
  Description of Artificial Sequence: Synthetic oligonucleotide
cccacagcuugccccgguu

SEQ ID NO: 1705091 - RNA, 19 nt, Artificial Sequence
  Description of Artificial Sequence: Synthetic oligonucleotide
cgcgcgucagcgacgcgau

SEQ ID NO: 1705092 - RNA, 19 nt, Artificial Sequence
  Description of Artificial Sequence: Synthetic oligonucleotide
cgucugcgagacacucagu

SEQ ID NO: 1705093 - RNA, 19 nt, Artificial Sequence
  Description of Artificial Sequence: Synthetic oligonucleotide
ccucggccuucuccgcccu

SEQ ID NO: 1705094 - RNA, 19 nt, Artificial Sequence
  Description of Artificial Sequence: Synthetic oligonucleotide
cggcccguucacgacgacu

SEQ ID NO: 1705095 - RNA, 19 nt, Artificial Sequence
  Description of Artificial Sequence: Synthetic oligonucleotide
cgacugccgcaagggcuua

SEQ ID NO: 1705096 - RNA, 19 nt, Artificial Sequence
  Description of Artificial Sequence: Synthetic oligonucleotide
ccgcgcccugcaggugguu

SEQ ID NO: 1705097 - RNA, 19 nt, Artificial Sequence
  Description of Artificial Sequence: Synthetic oligonucleotide
auaaggaucgcccagucgc

SEQ ID NO: 1705098 - RNA, 19 nt, Artificial Sequence
  Description of Artificial Sequence: Synthetic oligonucleotide
  modified_base (5)..(5): a, c, u, g, unknown or other
uuuanagugaccagagagg

SEQ ID NO: 1705099 - RNA, 19 nt, Artificial Sequence
  Description of Artificial Sequence: Synthetic oligonucleotide
  modified_base (2)..(2): a, c, u, g, unknown or other
anagugaccagagaggaac

SEQ ID NO: 1705100 - RNA, 19 nt, Artificial Sequence
  Description of Artificial Sequence: Synthetic oligonucleotide
uguacaaacguucauaaaa

SEQ ID NO: 1705101 - RNA, 19 nt, Artificial Sequence
  Description of Artificial Sequence: Synthetic oligonucleotide
aagaaaaugucacuuacga

SEQ ID NO: 1705102 - RNA, 19 nt, Artificial Sequence
  Description of Artificial Sequence: Synthetic oligonucleotide
  modified_base (6)..(6): a, c, u, g, unknown or other
guuuanagugaccagagag

SEQ ID NO: 1705103 - RNA, 19 nt, Artificial Sequence
  Description of Artificial Sequence: Synthetic oligonucleotide
uuagcauguauagaaagcg

SEQ ID NO: 1705104 - RNA, 19 nt, Artificial Sequence
  Description of Artificial Sequence: Synthetic oligonucleotide
ucgaauauaaggaucgccc

SEQ ID NO: 1705105 - RNA, 19 nt, Artificial Sequence
  Description of Artificial Sequence: Synthetic oligonucleotide
aagucggugaguuuaaugu

SEQ ID NO: 1705106 - RNA, 19 nt, Artificial Sequence
  Description of Artificial Sequence: Synthetic oligonucleotide
uucuuugucggauacaggc

SEQ ID NO: 1705107 - RNA, 19 nt, Artificial Sequence
  Description of Artificial Sequence: Synthetic oligonucleotide
uguucauaguacauaaccc

SEQ ID NO: 1705108 - RNA, 19 nt, Artificial Sequence
  Description of Artificial Sequence: Synthetic oligonucleotide
auaacuugggcacaauggg

SEQ ID NO: 1705109 - RNA, 19 nt, Artificial Sequence
  Description of Artificial Sequence: Synthetic oligonucleotide
aaggcaaugauuauaacca

SEQ ID NO: 1705110 - RNA, 19 nt, Artificial Sequence
  Description of Artificial Sequence: Synthetic oligonucleotide
augauuauaaccagaauuc

SEQ ID NO: 1705111 - RNA, 19 nt, Artificial Sequence
  Description of Artificial Sequence: Synthetic oligonucleotide
gauaacuugggcacaaugg

SEQ ID NO: 1705112 - RNA, 19 nt, Artificial Sequence
  Description of Artificial Sequence: Synthetic oligonucleotide
uaguacauaacccaguuau

SEQ ID NO: 1705113 - RNA, 19 nt, Artificial Sequence
  Description of Artificial Sequence: Synthetic oligonucleotide
uccauuagcauguauagaa

SEQ ID NO: 1705114 - RNA, 19 nt, Artificial Sequence
  Description of Artificial Sequence: Synthetic oligonucleotide
ugacugaaaauacagcucu

SEQ ID NO: 1705115 - RNA, 19 nt, Artificial Sequence
  Description of Artificial Sequence: Synthetic oligonucleotide
ugcauauuggaaagguugg

SEQ ID NO: 1705116 - RNA, 19 nt, Artificial Sequence
  Description of Artificial Sequence: Synthetic oligonucleotide
uuaggaaaggauauuuuac

SEQ ID NO: 1705117 - RNA, 19 nt, Artificial Sequence
  Description of Artificial Sequence: Synthetic oligonucleotide
ugucacuuacgacaggagg

SEQ ID NO: 1705118 - RNA, 19 nt, Artificial Sequence
  Description of Artificial Sequence: Synthetic oligonucleotide
uucauaguacauaacccag

SEQ ID NO: 1705119 - RNA, 19 nt, Artificial Sequence
  Description of Artificial Sequence: Synthetic oligonucleotide
aaggcaaugcaguaugcag

SEQ ID NO: 1705120 - RNA, 19 nt, Artificial Sequence
  Description of Artificial Sequence: Synthetic oligonucleotide
aguuuaauguguccuuccc

SEQ ID NO: 1705121 - RNA, 19 nt, Artificial Sequence
  Description of Artificial Sequence: Synthetic oligonucleotide
aauucuaucuccuguguau

SEQ ID NO: 1705122 - RNA, 19 nt, Artificial Sequence
  Description of Artificial Sequence: Synthetic oligonucleotide
agaggaacuaaauaaacaa

SEQ ID NO: 1705123 - RNA, 19 nt, Artificial Sequence
  Description of Artificial Sequence: Synthetic oligonucleotide
aaggauauuuuacugcaga

SEQ ID NO: 1705124 - RNA, 19 nt, Artificial Sequence
  Description of Artificial Sequence: Synthetic oligonucleotide
ugcuaaguacauuaggagc

SEQ ID NO: 1705125 - RNA, 19 nt, Artificial Sequence
  Description of Artificial Sequence: Synthetic oligonucleotide
ugaugaagguccuuagagg

SEQ ID NO: 1705126 - RNA, 19 nt, Artificial Sequence
  Description of Artificial Sequence: Synthetic oligonucleotide
aauggguggcuucaauuuc

SEQ ID NO: 1705127 - RNA, 19 nt, Artificial Sequence
  Description of Artificial Sequence: Synthetic oligonucleotide
aacaggauugaguuuggug

SEQ ID NO: 1705128 - RNA, 19 nt, Artificial Sequence
  Description of Artificial Sequence: Synthetic oligonucleotide
agaaaaugucacuuacgac

SEQ ID NO: 1705129 - RNA, 19 nt, Artificial Sequence
  Description of Artificial Sequence: Synthetic oligonucleotide
  modified_base (4)..(4): a, c, u, g, unknown or other
uuanagugaccagagagga

SEQ ID NO: 1705130 - RNA, 19 nt, Artificial Sequence
  Description of Artificial Sequence: Synthetic oligonucleotide
gauauuuuacugcagacgu

SEQ ID NO: 1705131 - RNA, 19 nt, Artificial Sequence
  Description of Artificial Sequence: Synthetic oligonucleotide
uucccgaucuagaagaaug

SEQ ID NO: 1705132 - RNA, 19 nt, Artificial Sequence
  Description of Artificial Sequence: Synthetic oligonucleotide
uguguauguuuguucauag

SEQ ID NO: 1705133 - RNA, 19 nt, Artificial Sequence
  Description of Artificial Sequence: Synthetic oligonucleotide
uuuuacagauggacgaggc

SEQ ID NO: 1705134 - RNA, 19 nt, Artificial Sequence
  Description of Artificial Sequence: Synthetic oligonucleotide
agaauuaaggcaaugauua

SEQ ID NO: 1705135 - RNA, 19 nt, Artificial Sequence
  Description of Artificial Sequence: Synthetic oligonucleotide
aggauauuuuacugcagac

SEQ ID NO: 1705136 - RNA, 19 nt, Artificial Sequence
  Description of Artificial Sequence: Synthetic oligonucleotide
ugugccauauuugaauggg

SEQ ID NO: 1705137 - RNA, 19 nt, Artificial Sequence
  Description of Artificial Sequence: Synthetic oligonucleotide
ucuuugucggauacaggcg

SEQ ID NO: 1705138 - RNA, 19 nt, Artificial Sequence
  Description of Artificial Sequence: Synthetic oligonucleotide
uugcuaaguacauuaggag

SEQ ID NO: 1705139 - RNA, 19 nt, Artificial Sequence
  Description of Artificial Sequence: Synthetic oligonucleotide
aaacccagacagcaucucg

SEQ ID NO: 1705140 - RNA, 19 nt, Artificial Sequence
  Description of Artificial Sequence: Synthetic oligonucleotide
gaauauaaggaucgcccag

SEQ ID NO: 1705141 - RNA, 19 nt, Artificial Sequence
  Description of Artificial Sequence: Synthetic oligonucleotide
uguaaacccagacagcauc

SEQ ID NO: 1705142 - RNA, 19 nt, Artificial Sequence
  Description of Artificial Sequence: Synthetic oligonucleotide
uaggaaaggauauuuuacu

SEQ ID NO: 1705143 - RNA, 19 nt, Artificial Sequence
  Description of Artificial Sequence: Synthetic oligonucleotide
aacuaacuugcagaugugg

SEQ ID NO: 1705144 - RNA, 19 nt, Artificial Sequence
  Description of Artificial Sequence: Synthetic oligonucleotide
  modified_base (9)..(9): a, c, u, g, unknown or other
ugaguuuanagugaccaga

SEQ ID NO: 1705145 - RNA, 19 nt, Artificial Sequence
  Description of Artificial Sequence: Synthetic oligonucleotide
aaugucacuuacgacagga

SEQ ID NO: 1705146 - RNA, 19 nt, Artificial Sequence
  Description of Artificial Sequence: Synthetic oligonucleotide
uccauauguguuuagaauu

SEQ ID NO: 1705147 - RNA, 19 nt, Artificial Sequence
  Description of Artificial Sequence: Synthetic oligonucleotide
uauaaggaucgcccagucg

SEQ ID NO: 1705148 - RNA, 19 nt, Artificial Sequence
  Description of Artificial Sequence: Synthetic oligonucleotide
aucucgaauauaaggaucg

SEQ ID NO: 1705149 - RNA, 19 nt, Artificial Sequence
  Description of Artificial Sequence: Synthetic oligonucleotide
uuguuugugccauauuuga

SEQ ID NO: 1705150 - RNA, 19 nt, Artificial Sequence
  Description of Artificial Sequence: Synthetic oligonucleotide
cagcaucucgaauauaagg

SEQ ID NO: 1705151 - RNA, 19 nt, Artificial Sequence
  Description of Artificial Sequence: Synthetic oligonucleotide
cuuugucggauacaggcgg

SEQ ID NO: 1705152 - RNA, 19 nt, Artificial Sequence
  Description of Artificial Sequence: Synthetic oligonucleotide
cuugacaaggaagggaugg

SEQ ID NO: 1705153 - RNA, 19 nt, Artificial Sequence
  Description of Artificial Sequence: Synthetic oligonucleotide
aggaaaggauauuuuacug

SEQ ID NO: 1705154 - RNA, 19 nt, Artificial Sequence
  Description of Artificial Sequence: Synthetic oligonucleotide
uuugaacauuuccaguucu

SEQ ID NO: 1705155 - RNA, 19 nt, Artificial Sequence
  Description of Artificial Sequence: Synthetic oligonucleotide
cauguauagaaagcggugg

SEQ ID NO: 1705156 - RNA, 19 nt, Artificial Sequence
  Description of Artificial Sequence: Synthetic oligonucleotide
guaacuaacuugcagaugu

SEQ ID NO: 1705157 - RNA, 19 nt, Artificial Sequence
  Description of Artificial Sequence: Synthetic oligonucleotide
auuauaaccagaauucuau

SEQ ID NO: 1705158 - RNA, 19 nt, Artificial Sequence
  Description of Artificial Sequence: Synthetic oligonucleotide
uccuucccgaucuagaaga

SEQ ID NO: 1705159 - RNA, 19 nt, Artificial Sequence
  Description of Artificial Sequence: Synthetic oligonucleotide
uccuguguauguuuguuca

SEQ ID NO: 1705160 - RNA, 19 nt, Artificial Sequence
  Description of Artificial Sequence: Synthetic oligonucleotide
ucaauuuccucuguggcac

SEQ ID NO: 1705161 - RNA, 19 nt, Artificial Sequence
  Description of Artificial Sequence: Synthetic oligonucleotide
cauaacccaguuauuuugc

SEQ ID NO: 1705162 - RNA, 19 nt, Artificial Sequence
  Description of Artificial Sequence: Synthetic oligonucleotide
  modified_base (8)..(8): a, c, u, g, unknown or other
gaguuuanagugaccagag

SEQ ID NO: 1705163 - RNA, 19 nt, Artificial Sequence
  Description of Artificial Sequence: Synthetic oligonucleotide
cuaaauuuguauuaucaua

SEQ ID NO: 1705164 - RNA, 19 nt, Artificial Sequence
  Description of Artificial Sequence: Synthetic oligonucleotide
ggaaauguggcuaaauuug

SEQ ID NO: 1705165 - RNA, 19 nt, Artificial Sequence
  Description of Artificial Sequence: Synthetic oligonucleotide
aaauccaaguguaaaccca

SEQ ID NO: 1705166 - RNA, 19 nt, Artificial Sequence
  Description of Artificial Sequence: Synthetic oligonucleotide
acuaacuugcagauguggg

SEQ ID NO: 1705167 - RNA, 19 nt, Artificial Sequence
  Description of Artificial Sequence: Synthetic oligonucleotide
gucgauggcacacacaauc

SEQ ID NO: 1705168 - RNA, 19 nt, Artificial Sequence
  Description of Artificial Sequence: Synthetic oligonucleotide
gaagauuccagcagcugag

SEQ ID NO: 1705169 - RNA, 19 nt, Artificial Sequence
  Description of Artificial Sequence: Synthetic oligonucleotide
cagacgucuaaacuggaag

SEQ ID NO: 1705170 - RNA, 19 nt, Artificial Sequence
  Description of Artificial Sequence: Synthetic oligonucleotide
gaaagcgguggucauggcc

SEQ ID NO: 1705171 - RNA, 19 nt, Artificial Sequence
  Description of Artificial Sequence: Synthetic oligonucleotide
gaagucggugaguuuaaug

SEQ ID NO: 1705172 - RNA, 19 nt, Artificial Sequence
  Description of Artificial Sequence: Synthetic oligonucleotide
guuuguucauaguacauaa

SEQ ID NO: 1705173 - RNA, 19 nt, Artificial Sequence
  Description of Artificial Sequence: Synthetic oligonucleotide
auauaaggaucgcccaguc

SEQ ID NO: 1705174 - RNA, 19 nt, Artificial Sequence
  Description of Artificial Sequence: Synthetic oligonucleotide
uuugucggauacaggcggg

SEQ ID NO: 1705175 - RNA, 19 nt, Artificial Sequence
  Description of Artificial Sequence: Synthetic oligonucleotide
uccaaguguaaacccagac

SEQ ID NO: 1705176 - RNA, 19 nt, Artificial Sequence
  Description of Artificial Sequence: Synthetic oligonucleotide
  modified_base (10)..(10): a, c, u, g, unknown or other
cugaguuuanagugaccag

SEQ ID NO: 1705177 - RNA, 19 nt, Artificial Sequence
  Description of Artificial Sequence: Synthetic oligonucleotide
gaguuuaauguguccuucc

SEQ ID NO: 1705178 - RNA, 19 nt, Artificial Sequence
  Description of Artificial Sequence: Synthetic oligonucleotide
ugggagaacaggauugagu

SEQ ID NO: 1705179 - RNA, 19 nt, Artificial Sequence
  Description of Artificial Sequence: Synthetic oligonucleotide
aggaacuaaauaaacaaaa

SEQ ID NO: 1705180 - RNA, 19 nt, Artificial Sequence
  Description of Artificial Sequence: Synthetic oligonucleotide
ugauuauaaccagaauucu

SEQ ID NO: 1705181 - RNA, 19 nt, Artificial Sequence
  Description of Artificial Sequence: Synthetic oligonucleotide
agacgucuaaacuggaaga

SEQ ID NO: 1705182 - RNA, 19 nt, Artificial Sequence
  Description of Artificial Sequence: Synthetic oligonucleotide
ggauauuuuacugcagacg

SEQ ID NO: 1705183 - RNA, 19 nt, Artificial Sequence
  Description of Artificial Sequence: Synthetic oligonucleotide
guccuuagaggugaaaucc

SEQ ID NO: 1705184 - RNA, 19 nt, Artificial Sequence
  Description of Artificial Sequence: Synthetic oligonucleotide
uaucuccuguguauguuug

SEQ ID NO: 1705185 - RNA, 19 nt, Artificial Sequence
  Description of Artificial Sequence: Synthetic oligonucleotide
ggauaagucucgaaguugg

SEQ ID NO: 1705186 - RNA, 19 nt, Artificial Sequence
  Description of Artificial Sequence: Synthetic oligonucleotide
uuuacagauggacgaggcu

SEQ ID NO: 1705187 - RNA, 19 nt, Artificial Sequence
  Description of Artificial Sequence: Synthetic oligonucleotide
uaacuugggcacaaugggu

SEQ ID NO: 1705188 - RNA, 19 nt, Artificial Sequence
  Description of Artificial Sequence: Synthetic oligonucleotide
auaagucucgaaguuggag

SEQ ID NO: 1705189 - RNA, 19 nt, Artificial Sequence
  Description of Artificial Sequence: Synthetic oligonucleotide
cugacugaaaauacagcuc

SEQ ID NO: 1705190 - RNA, 19 nt, Artificial Sequence
  Description of Artificial Sequence: Synthetic oligonucleotide
aaaggauauuuuacugcag

SEQ ID NO: 1705191 - RNA, 19 nt, Artificial Sequence
  Description of Artificial Sequence: Synthetic oligonucleotide
cauuaggagcacacagugg

SEQ ID NO: 1705192 - RNA, 19 nt, Artificial Sequence
  Description of Artificial Sequence: Synthetic oligonucleotide
aacuccauuagcauguaua

SEQ ID NO: 1705193 - RNA, 19 nt, Artificial Sequence
  Description of Artificial Sequence: Synthetic oligonucleotide
gauugaguuuggugggaag

SEQ ID NO: 1705194 - RNA, 19 nt, Artificial Sequence
  Description of Artificial Sequence: Synthetic oligonucleotide
uggguucccauccucagaa

SEQ ID NO: 1705195 - RNA, 19 nt, Artificial Sequence
  Description of Artificial Sequence: Synthetic oligonucleotide
uccuuagaggugaaaucca

SEQ ID NO: 1705196 - RNA, 19 nt, Artificial Sequence
  Description of Artificial Sequence: Synthetic oligonucleotide
caucucgaauauaaggauc

SEQ ID NO: 1705197 - RNA, 19 nt, Artificial Sequence
  Description of Artificial Sequence: Synthetic oligonucleotide
  modified_base (7)..(7): a, c, u, g, unknown or other
aguuuanagugaccagaga

SEQ ID NO: 1705198 - RNA, 19 nt, Artificial Sequence
  Description of Artificial Sequence: Synthetic oligonucleotide
agaauucuaucuccugugu

SEQ ID NO: 1705199 - RNA, 19 nt, Artificial Sequence
  Description of Artificial Sequence: Synthetic oligonucleotide
  modified_base (17)..(17): a, c, u, g, unknown or other
ccaacuucugaguuuanag

SEQ ID NO: 1705200 - RNA, 19 nt, Artificial Sequence
  Description of Artificial Sequence: Synthetic oligonucleotide
ucuggggcgagguauucug

SEQ ID NO: 1705201 - RNA, 19 nt, Artificial Sequence
  Description of Artificial Sequence: Synthetic oligonucleotide
gaaagccacuuguuugugc

SEQ ID NO: 1705202 - RNA, 19 nt, Artificial Sequence
  Description of Artificial Sequence: Synthetic oligonucleotide
ugaucuccuccauaugugu

SEQ ID NO: 1705203 - RNA, 19 nt, Artificial Sequence
  Description of Artificial Sequence: Synthetic oligonucleotide
ggaguugugggguggaucc

SEQ ID NO: 1705204 - RNA, 19 nt, Artificial Sequence
  Description of Artificial Sequence: Synthetic oligonucleotide
cucgaauauaaggaucgcc

SEQ ID NO: 1705205 - RNA, 19 nt, Artificial Sequence
  Description of Artificial Sequence: Synthetic oligonucleotide
aggcaaugauuauaaccag

SEQ ID NO: 1705206 - RNA, 19 nt, Artificial Sequence
  Description of Artificial Sequence: Synthetic oligonucleotide
uccacggcccuccauggcc

SEQ ID NO: 1705207 - RNA, 19 nt, Artificial Sequence
  Description of Artificial Sequence: Synthetic oligonucleotide
guuuggugggaagaaaaug

SEQ ID NO: 1705208 - RNA, 19 nt, Artificial Sequence
  Description of Artificial Sequence: Synthetic oligonucleotide
ccaguuauuuugcauauug

SEQ ID NO: 1705209 - RNA, 19 nt, Artificial Sequence
  Description of Artificial Sequence: Synthetic oligonucleotide
auugaguuuggugggaaga

SEQ ID NO: 1705210 - RNA, 19 nt, Artificial Sequence
  Description of Artificial Sequence: Synthetic oligonucleotide
gaugucuucuaccccguuc

SEQ ID NO: 1705211 - RNA, 19 nt, Artificial Sequence
  Description of Artificial Sequence: Synthetic oligonucleotide
ugugcaugugugaucuccu

SEQ ID NO: 1705212 - RNA, 19 nt, Artificial Sequence
  Description of Artificial Sequence: Synthetic oligonucleotide
uguggguucccauccucag

SEQ ID NO: 1705213 - RNA, 19 nt, Artificial Sequence
  Description of Artificial Sequence: Synthetic oligonucleotide
uacgacaggagggaguugu

SEQ ID NO: 1705214 - RNA, 19 nt, Artificial Sequence
  Description of Artificial Sequence: Synthetic oligonucleotide
uaaggaucgcccagucgcc

SEQ ID NO: 1705215 - RNA, 19 nt, Artificial Sequence
  Description of Artificial Sequence: Synthetic oligonucleotide
uaacuaacuugcagaugug

SEQ ID NO: 1705216 - RNA, 19 nt, Artificial Sequence
  Description of Artificial Sequence: Synthetic oligonucleotide
agcauguauagaaagcggu

SEQ ID NO: 1705217 - RNA, 19 nt, Artificial Sequence
  Description of Artificial Sequence: Synthetic oligonucleotide
gauuauaaccagaauucua

SEQ ID NO: 1705218 - RNA, 19 nt, Artificial Sequence
  Description of Artificial Sequence: Synthetic oligonucleotide
acuugcagauguggguucc

SEQ ID NO: 1705219 - RNA, 19 nt, Artificial Sequence
  Description of Artificial Sequence: Synthetic oligonucleotide
uuaaggcaaugauuauaac

SEQ ID NO: 1705220 - RNA, 19 nt, Artificial Sequence
  Description of Artificial Sequence: Synthetic oligonucleotide
gacgucuaaacuggaagac

SEQ ID NO: 1705221 - RNA, 19 nt, Artificial Sequence
  Description of Artificial Sequence: Synthetic oligonucleotide
ucccgaucuagaagaaugu

SEQ ID NO: 1705222 - RNA, 19 nt, Artificial Sequence
  Description of Artificial Sequence: Synthetic oligonucleotide
uuacugcagacgucuaaac

SEQ ID NO: 1705223 - RNA, 19 nt, Artificial Sequence
  Description of Artificial Sequence: Synthetic oligonucleotide
accccguucuucaugcugc

SEQ ID NO: 1705224 - RNA, 19 nt, Artificial Sequence
  Description of Artificial Sequence: Synthetic oligonucleotide
  modified_base (3)..(3): a, c, u, g, unknown or other
uanagugaccagagaggaa

SEQ ID NO: 1705225 - RNA, 19 nt, Artificial Sequence
  Description of Artificial Sequence: Synthetic oligonucleotide
cuuaacuuuaggaaaggau

SEQ ID NO: 1705226 - RNA, 19 nt, Artificial Sequence
  Description of Artificial Sequence: Synthetic oligonucleotide
acaauggguggcuucaauu

SEQ ID NO: 1705227 - RNA, 19 nt, Artificial Sequence
  Description of Artificial Sequence: Synthetic oligonucleotide
agguauucuggugucccac

SEQ ID NO: 1705228 - RNA, 19 nt, Artificial Sequence
  Description of Artificial Sequence: Synthetic oligonucleotide
gcuaaguacauuaggagca

SEQ ID NO: 1705229 - RNA, 19 nt, Artificial Sequence
  Description of Artificial Sequence: Synthetic oligonucleotide
acgaacuccauuagcaugu

SEQ ID NO: 1705230 - RNA, 19 nt, Artificial Sequence
  Description of Artificial Sequence: Synthetic oligonucleotide
uaccccguucuucaugcug

SEQ ID NO: 1705231 - RNA, 19 nt, Artificial Sequence
  Description of Artificial Sequence: Synthetic oligonucleotide
auucuaucuccuguguaug

SEQ ID NO: 1705232 - RNA, 19 nt, Artificial Sequence
  Description of Artificial Sequence: Synthetic oligonucleotide
uaacccaguuauuuugcau

SEQ ID NO: 1705233 - RNA, 19 nt, Artificial Sequence
  Description of Artificial Sequence: Synthetic oligonucleotide
acacacaaucucuguggag

SEQ ID NO: 1705234 - RNA, 19 nt, Artificial Sequence
  Description of Artificial Sequence: Synthetic oligonucleotide
auguggcuaaauuuguauu

SEQ ID NO: 1705235 - RNA, 19 nt, Artificial Sequence
  Description of Artificial Sequence: Synthetic oligonucleotide
aguccacggcccuccaugg

SEQ ID NO: 1705236 - RNA, 19 nt, Artificial Sequence
  Description of Artificial Sequence: Synthetic oligonucleotide
guaggugaacagcucacca

SEQ ID NO: 1705237 - RNA, 19 nt, Artificial Sequence
  Description of Artificial Sequence: Synthetic oligonucleotide
aacccagacagcaucucga

SEQ ID NO: 1705238 - RNA, 19 nt, Artificial Sequence
  Description of Artificial Sequence: Synthetic oligonucleotide
ucggugaguuuaauguguc

SEQ ID NO: 1705239 - RNA, 19 nt, Artificial Sequence
  Description of Artificial Sequence: Synthetic oligonucleotide
ggauaacuugggcacaaug

SEQ ID NO: 1705240 - RNA, 19 nt, Artificial Sequence
  Description of Artificial Sequence: Synthetic oligonucleotide
cuaaguacauuaggagcac

SEQ ID NO: 1705241 - RNA, 19 nt, Artificial Sequence
  Description of Artificial Sequence: Synthetic oligonucleotide
ucggauacaggcggggucu

SEQ ID NO: 1705242 - RNA, 19 nt, Artificial Sequence
  Description of Artificial Sequence: Synthetic oligonucleotide
agcuugacaaggaagggau

SEQ ID NO: 1705243 - RNA, 19 nt, Artificial Sequence
  Description of Artificial Sequence: Synthetic oligonucleotide
uggcuaaauuuguauuauc

SEQ ID NO: 1705244 - RNA, 19 nt, Artificial Sequence
  Description of Artificial Sequence: Synthetic oligonucleotide
uuaauguguccuucccgau

SEQ ID NO: 1705245 - RNA, 19 nt, Artificial Sequence
  Description of Artificial Sequence: Synthetic oligonucleotide
gguggauccuugaaguucc

SEQ ID NO: 1705246 - RNA, 19 nt, Artificial Sequence
  Description of Artificial Sequence: Synthetic oligonucleotide
auaguacauaacccaguua

SEQ ID NO: 1705247 - RNA, 19 nt, Artificial Sequence
  Description of Artificial Sequence: Synthetic oligonucleotide
agguaggugaacagcucac

SEQ ID NO: 1705248 - RNA, 19 nt, Artificial Sequence
  Description of Artificial Sequence: Synthetic oligonucleotide
gaggugucgccgucacugg

SEQ ID NO: 1705249 - RNA, 19 nt, Artificial Sequence
  Description of Artificial Sequence: Synthetic oligonucleotide
uugucggauacaggcgggg

SEQ ID NO: 1705250 - RNA, 19 nt, Artificial Sequence
  Description of Artificial Sequence: Synthetic oligonucleotide
ucucgaauauaaggaucgc

SEQ ID NO: 1705251 - RNA, 19 nt, Artificial Sequence
  Description of Artificial Sequence: Synthetic oligonucleotide
cuugaugaagguccuuaga

SEQ ID NO: 1705252 - RNA, 19 nt, Artificial Sequence
  Description of Artificial Sequence: Synthetic oligonucleotide
guccuucccgaucuagaag

SEQ ID NO: 1705253 - RNA, 19 nt, Artificial Sequence
  Description of Artificial Sequence: Synthetic oligonucleotide
auacaggcggggucuuguc

SEQ ID NO: 1705254 - RNA, 19 nt, Artificial Sequence
  Description of Artificial Sequence: Synthetic oligonucleotide
agugggguacaugugugca

SEQ ID NO: 1705255 - RNA, 19 nt, Artificial Sequence
  Description of Artificial Sequence: Synthetic oligonucleotide
aggcaaugcaguaugcaga

SEQ ID NO: 1705256 - RNA, 19 nt, Artificial Sequence
  Description of Artificial Sequence: Synthetic oligonucleotide
gugccauauuugaaugggg

SEQ ID NO: 1705257 - RNA, 19 nt, Artificial Sequence
  Description of Artificial Sequence: Synthetic oligonucleotide
agguccuuagaggugaaau

SEQ ID NO: 1705258 - RNA, 19 nt, Artificial Sequence
  Description of Artificial Sequence: Synthetic oligonucleotide
gaaauguggcuaaauuugu

SEQ ID NO: 1705259 - RNA, 19 nt, Artificial Sequence
  Description of Artificial Sequence: Synthetic oligonucleotide
cuaacuugcagaugugggu

SEQ ID NO: 1705260 - RNA, 19 nt, Artificial Sequence
  Description of Artificial Sequence: Synthetic oligonucleotide
gguccuguccaccaccagc

SEQ ID NO: 1705261 - RNA, 19 nt, Artificial Sequence
  Description of Artificial Sequence: Synthetic oligonucleotide
ugcagacgucuaaacugga

SEQ ID NO: 1705262 - RNA, 19 nt, Artificial Sequence
  Description of Artificial Sequence: Synthetic oligonucleotide
acgucuaaacuggaagacu

SEQ ID NO: 1705263 - RNA, 19 nt, Artificial Sequence
  Description of Artificial Sequence: Synthetic oligonucleotide
gcaaugauuauaaccagaa

SEQ ID NO: 1705264 - RNA, 19 nt, Artificial Sequence
  Description of Artificial Sequence: Synthetic oligonucleotide
ggguccauguccuauccac

SEQ ID NO: 1705265 - RNA, 19 nt, Artificial Sequence
  Description of Artificial Sequence: Synthetic oligonucleotide
cagugggguacaugugugc

SEQ ID NO: 1705266 - RNA, 19 nt, Artificial Sequence
  Description of Artificial Sequence: Synthetic oligonucleotide
ucuaucuccuguguauguu

SEQ ID NO: 1705267 - RNA, 19 nt, Artificial Sequence
  Description of Artificial Sequence: Synthetic oligonucleotide
gguccuuagaggugaaauc

SEQ ID NO: 1705268 - RNA, 19 nt, Artificial Sequence
  Description of Artificial Sequence: Synthetic oligonucleotide
ggcacgaacuccauuagca

SEQ ID NO: 1705269 - RNA, 19 nt, Artificial Sequence
  Description of Artificial Sequence: Synthetic oligonucleotide
uccaguucuuugucggaua

SEQ ID NO: 1705270 - RNA, 19 nt, Artificial Sequence
  Description of Artificial Sequence: Synthetic oligonucleotide
ucucuggauaagucucgaa

SEQ ID NO: 1705271 - RNA, 19 nt, Artificial Sequence
  Description of Artificial Sequence: Synthetic oligonucleotide
cagaacagcuugacaagga

SEQ ID NO: 1705272 - RNA, 19 nt, Artificial Sequence
  Description of Artificial Sequence: Synthetic oligonucleotide
agcucuguacaaacguuca

SEQ ID NO: 1705273 - RNA, 19 nt, Artificial Sequence
  Description of Artificial Sequence: Synthetic oligonucleotide
uguagggcauguggcuucc

SEQ ID NO: 1705274 - RNA, 19 nt, Artificial Sequence
  Description of Artificial Sequence: Synthetic oligonucleotide
gcauguauagaaagcggug

SEQ ID NO: 1705275 - RNA, 19 nt, Artificial Sequence
  Description of Artificial Sequence: Synthetic oligonucleotide
ugacaaggaagggaugguu

SEQ ID NO: 1705276 - RNA, 19 nt, Artificial Sequence
  Description of Artificial Sequence: Synthetic oligonucleotide
caggcacgaacuccauuag

SEQ ID NO: 1705277 - RNA, 19 nt, Artificial Sequence
  Description of Artificial Sequence: Synthetic oligonucleotide
cacacacaaucucugugga

SEQ ID NO: 1705278 - RNA, 19 nt, Artificial Sequence
  Description of Artificial Sequence: Synthetic oligonucleotide
gauaagucucgaaguugga

SEQ ID NO: 1705279 - RNA, 19 nt, Artificial Sequence
  Description of Artificial Sequence: Synthetic oligonucleotide
guacauaacccaguuauuu

SEQ ID NO: 1705280 - RNA, 19 nt, Artificial Sequence
  Description of Artificial Sequence: Synthetic oligonucleotide
cuccauauguguuuagaau

SEQ ID NO: 1705281 - RNA, 19 nt, Artificial Sequence
  Description of Artificial Sequence: Synthetic oligonucleotide
gggagaacaggauugaguu

SEQ ID NO: 1705282 - RNA, 19 nt, Artificial Sequence
  Description of Artificial Sequence: Synthetic oligonucleotide
gaagcggccacgguuccuc

SEQ ID NO: 1705283 - RNA, 19 nt, Artificial Sequence
  Description of Artificial Sequence: Synthetic oligonucleotide
ccagaacagcuugacaagg

SEQ ID NO: 1705284 - RNA, 19 nt, Artificial Sequence
  Description of Artificial Sequence: Synthetic oligonucleotide
acuggauaacuugggcaca

SEQ ID NO: 1705285 - RNA, 19 nt, Artificial Sequence
  Description of Artificial Sequence: Synthetic oligonucleotide
gaaccaccggugccgcuug

SEQ ID NO: 1705286 - RNA, 19 nt, Artificial Sequence
  Description of Artificial Sequence: Synthetic oligonucleotide
gucggauacaggcgggguc

SEQ ID NO: 1705287 - RNA, 19 nt, Artificial Sequence
  Description of Artificial Sequence: Synthetic oligonucleotide
ggugaguuuaauguguccu

SEQ ID NO: 1705288 - RNA, 19 nt, Artificial Sequence
  Description of Artificial Sequence: Synthetic oligonucleotide
ugucggauacaggcggggu

SEQ ID NO: 1705289 - RNA, 19 nt, Artificial Sequence
  Description of Artificial Sequence: Synthetic oligonucleotide
acagauggacgaggcuggg

SEQ ID NO: 1705290 - RNA, 19 nt, Artificial Sequence
  Description of Artificial Sequence: Synthetic oligonucleotide
ggcaaugauuauaaccaga

SEQ ID NO: 1705291 - RNA, 19 nt, Artificial Sequence
  Description of Artificial Sequence: Synthetic oligonucleotide
aguacauaacccaguuauu

SEQ ID NO: 1705292 - RNA, 19 nt, Artificial Sequence
  Description of Artificial Sequence: Synthetic oligonucleotide
aggaucgcccagucgccca

SEQ ID NO: 1705293 - RNA, 19 nt, Artificial Sequence
  Description of Artificial Sequence: Synthetic oligonucleotide
caauggguggcuucaauuu

SEQ ID NO: 1705294 - RNA, 19 nt, Artificial Sequence
  Description of Artificial Sequence: Synthetic oligonucleotide
agggaugguugauuuccuu

SEQ ID NO: 1705295 - RNA, 19 nt, Artificial Sequence
  Description of Artificial Sequence: Synthetic oligonucleotide
guugugggguggauccuug

SEQ ID NO: 1705296 - RNA, 19 nt, Artificial Sequence
  Description of Artificial Sequence: Synthetic oligonucleotide
caccccggaaccaccggug

SEQ ID NO: 1705297 - RNA, 19 nt, Artificial Sequence
  Description of Artificial Sequence: Synthetic oligonucleotide
aggguccauguccuaucca

SEQ ID NO: 1705298 - RNA, 19 nt, Artificial Sequence
  Description of Artificial Sequence: Synthetic oligonucleotide
gucggugaguuuaaugugu

SEQ ID NO: 1705299 - RNA, 19 nt, Artificial Sequence
  Description of Artificial Sequence: Synthetic oligonucleotide
ugucgccgucacuggauaa

SEQ ID NO: 1705300 - RNA, 19 nt, Artificial Sequence
  Description of Artificial Sequence: Synthetic oligonucleotide
gauacaggcggggucuugu

SEQ ID NO: 1705301 - RNA, 19 nt, Artificial Sequence
  Description of Artificial Sequence: Synthetic oligonucleotide
ucccagucacucucuggau

SEQ ID NO: 1705302 - RNA, 19 nt, Artificial Sequence
  Description of Artificial Sequence: Synthetic oligonucleotide
gugcaugugugaucuccuc

SEQ ID NO: 1705303 - RNA, 19 nt, Artificial Sequence
  Description of Artificial Sequence: Synthetic oligonucleotide
guagaagauuccagcagcu

SEQ ID NO: 1705304 - RNA, 19 nt, Artificial Sequence
  Description of Artificial Sequence: Synthetic oligonucleotide
guaaacccagacagcaucu

SEQ ID NO: 1705305 - RNA, 19 nt, Artificial Sequence
  Description of Artificial Sequence: Synthetic oligonucleotide
ccauauguguuuagaauua

SEQ ID NO: 1705306 - RNA, 19 nt, Artificial Sequence
  Description of Artificial Sequence: Synthetic oligonucleotide
cacaccccggaaccaccgg

SEQ ID NO: 1705307 - RNA, 19 nt, Artificial Sequence
  Description of Artificial Sequence: Synthetic oligonucleotide
ucccauccucagaaauuuu

SEQ ID NO: 1705308 - RNA, 19 nt, Artificial Sequence
  Description of Artificial Sequence: Synthetic oligonucleotide
ccaggcacgaacuccauua

SEQ ID NO: 1705309 - RNA, 19 nt, Artificial Sequence
  Description of Artificial Sequence: Synthetic oligonucleotide
gcggccacgguuccucagg

SEQ ID NO: 1705310 - RNA, 19 nt, Artificial Sequence
  Description of Artificial Sequence: Synthetic oligonucleotide
cgaauauaaggaucgccca

SEQ ID NO: 1705311 - RNA, 19 nt, Artificial Sequence
  Description of Artificial Sequence: Synthetic oligonucleotide
gcuuaacuuuaggaaagga

SEQ ID NO: 1705312 - RNA, 19 nt, Artificial Sequence
  Description of Artificial Sequence: Synthetic oligonucleotide
aguugugggguggauccuu

SEQ ID NO: 1705313 - RNA, 19 nt, Artificial Sequence
  Description of Artificial Sequence: Synthetic oligonucleotide
cagucgcccaccaguccac

SEQ ID NO: 1705314 - RNA, 19 nt, Artificial Sequence
  Description of Artificial Sequence: Synthetic oligonucleotide
ucgcccagucgcccaccag

SEQ ID NO: 1705315 - RNA, 19 nt, Artificial Sequence
  Description of Artificial Sequence: Synthetic oligonucleotide
guagucgauggcacacaca

SEQ ID NO: 1705316 - RNA, 19 nt, Artificial Sequence
  Description of Artificial Sequence: Synthetic oligonucleotide
ccuccauauguguuuagaa

SEQ ID NO: 1705317 - RNA, 19 nt, Artificial Sequence
  Description of Artificial Sequence: Synthetic oligonucleotide
aggugaaauccaaguguaa

SEQ ID NO: 1705318 - RNA, 19 nt, Artificial Sequence
  Description of Artificial Sequence: Synthetic oligonucleotide
uggauaacuugggcacaau

SEQ ID NO: 1705319 - RNA, 19 nt, Artificial Sequence
  Description of Artificial Sequence: Synthetic oligonucleotide
ggcgagguauucugguguc

SEQ ID NO: 1705320 - RNA, 19 nt, Artificial Sequence
  Description of Artificial Sequence: Synthetic oligonucleotide
aucgcccagucgcccacca

SEQ ID NO: 1705321 - RNA, 19 nt, Artificial Sequence
  Description of Artificial Sequence: Synthetic oligonucleotide
cuggauaacuugggcacaa

SEQ ID NO: 1705322 - RNA, 19 nt, Artificial Sequence
  Description of Artificial Sequence: Synthetic oligonucleotide
  modified_base (19)..(19): a, c, u, g, unknown or other
ucccaacuucugaguuuan

SEQ ID NO: 1705323 - RNA, 19 nt, Artificial Sequence
  Description of Artificial Sequence: Synthetic oligonucleotide
ccguucuucaugcugccca

SEQ ID NO: 1705324 - RNA, 19 nt, Artificial Sequence
  Description of Artificial Sequence: Synthetic oligonucleotide
gguucccauccucagaaau

SEQ ID NO: 1705325 - RNA, 19 nt, Artificial Sequence
  Description of Artificial Sequence: Synthetic oligonucleotide
aaccaccggugccgcuuga

SEQ ID NO: 1705326 - RNA, 19 nt, Artificial Sequence
  Description of Artificial Sequence: Synthetic oligonucleotide
ccacaccccggaaccaccg

SEQ ID NO: 1705327 - RNA, 19 nt, Artificial Sequence
  Description of Artificial Sequence: Synthetic oligonucleotide
cccggaaccaccggugccg

SEQ ID NO: 1705328 - RNA, 19 nt, Artificial Sequence
  Description of Artificial Sequence: Synthetic oligonucleotide
uggacgaggcugggagaac

SEQ ID NO: 1705329 - RNA, 19 nt, Artificial Sequence
  Description of Artificial Sequence: Synthetic oligonucleotide
gaucgcccagucgcccacc

SEQ ID NO: 1705330 - RNA, 19 nt, Artificial Sequence
  Description of Artificial Sequence: Synthetic oligonucleotide
cgaucuagaagaauguuuu

SEQ ID NO: 1705331 - RNA, 19 nt, Artificial Sequence
  Description of Artificial Sequence: Synthetic oligonucleotide
gggcgagguauucuggugu

SEQ ID NO: 1705332 - RNA, 19 nt, Artificial Sequence
  Description of Artificial Sequence: Synthetic oligonucleotide
cggugaguuuaaugugucc

SEQ ID NO: 1705333 - RNA, 19 nt, Artificial Sequence
  Description of Artificial Sequence: Synthetic oligonucleotide
cauguccuauccaccaguu

SEQ ID NO: 1705334 - RNA, 19 nt, Artificial Sequence
  Description of Artificial Sequence: Synthetic oligonucleotide
ggauugaguuuggugggaa

SEQ ID NO: 1705335 - RNA, 19 nt, Artificial Sequence
  Description of Artificial Sequence: Synthetic oligonucleotide
gggaguugugggguggauc

SEQ ID NO: 1705336 - RNA, 19 nt, Artificial Sequence
  Description of Artificial Sequence: Synthetic oligonucleotide
gugucgccgucacuggaua

SEQ ID NO: 1705337 - RNA, 19 nt, Artificial Sequence
  Description of Artificial Sequence: Synthetic oligonucleotide
ggaucgcccagucgcccac

SEQ ID NO: 1705338 - RNA, 19 nt, Artificial Sequence
  Description of Artificial Sequence: Synthetic oligonucleotide
gcgagguauucuggugucc

SEQ ID NO: 1705339 - RNA, 19 nt, Artificial Sequence
  Description of Artificial Sequence: Synthetic oligonucleotide
gcagacgucuaaacuggaa

SEQ ID NO: 1705340 - RNA, 19 nt, Artificial Sequence
  Description of Artificial Sequence: Synthetic oligonucleotide
guagggcauguggcuuccc

SEQ ID NO: 1705341 - RNA, 19 nt, Artificial Sequence
  Description of Artificial Sequence: Synthetic oligonucleotide
ccaccggugccgcuugaug

SEQ ID NO: 1705342 - RNA, 19 nt, Artificial Sequence
  Description of Artificial Sequence: Synthetic oligonucleotide
ggauacaggcggggucuug

SEQ ID NO: 1705343 - RNA, 19 nt, Artificial Sequence
  Description of Artificial Sequence: Synthetic oligonucleotide
cacaauggguggcuucaau

SEQ ID NO: 1705344 - RNA, 19 nt, Artificial Sequence
  Description of Artificial Sequence: Synthetic oligonucleotide
guguaaacccagacagcau

SEQ ID NO: 1705345 - RNA, 19 nt, Artificial Sequence
  Description of Artificial Sequence: Synthetic oligonucleotide
cacgguuccucagguaggu

SEQ ID NO: 1705346 - RNA, 19 nt, Artificial Sequence
  Description of Artificial Sequence: Synthetic oligonucleotide
accaccggugccgcuugau

SEQ ID NO: 1705347 - RNA, 19 nt, Artificial Sequence
  Description of Artificial Sequence: Synthetic oligonucleotide
gccgggguccuguccacca

SEQ ID NO: 1705348 - RNA, 19 nt, Artificial Sequence
  Description of Artificial Sequence: Synthetic oligonucleotide
gaguugugggguggauccu

SEQ ID NO: 1705349 - RNA, 19 nt, Artificial Sequence
  Description of Artificial Sequence: Synthetic oligonucleotide
ccccggaaccaccggugcc

SEQ ID NO: 1705350 - RNA, 19 nt, Artificial Sequence
  Description of Artificial Sequence: Synthetic oligonucleotide
agcgguggucauggccagu

SEQ ID NO: 1705351 - RNA, 19 nt, Artificial Sequence
  Description of Artificial Sequence: Synthetic oligonucleotide
  modified_base (18)..(18): a, c, u, g, unknown or other
cccaacuucugaguuuana

SEQ ID NO: 1705352 - RNA, 19 nt, Artificial Sequence
  Description of Artificial Sequence: Synthetic oligonucleotide
cccagucacucucuggaua

SEQ ID NO: 1705353 - RNA, 19 nt, Artificial Sequence
  Description of Artificial Sequence: Synthetic oligonucleotide
cuucccgaucuagaagaau

SEQ ID NO: 1705354 - RNA, 19 nt, Artificial Sequence
  Description of Artificial Sequence: Synthetic oligonucleotide
gcucuguacaaacguucau

SEQ ID NO: 1705355 - RNA, 19 nt, Artificial Sequence
  Description of Artificial Sequence: Synthetic oligonucleotide
cuucuaccccguucuucau

SEQ ID NO: 1705356 - RNA, 19 nt, Artificial Sequence
  Description of Artificial Sequence: Synthetic oligonucleotide
ccuucccgaucuagaagaa

SEQ ID NO: 1705357 - RNA, 19 nt, Artificial Sequence
  Description of Artificial Sequence: Synthetic oligonucleotide
gcccagucgcccaccaguc

SEQ ID NO: 1705358 - RNA, 19 nt, Artificial Sequence
  Description of Artificial Sequence: Synthetic oligonucleotide
ccgaagucggugaguuuaa

SEQ ID NO: 1705359 - RNA, 19 nt, Artificial Sequence
  Description of Artificial Sequence: Synthetic oligonucleotide
cuaccccguucuucaugcu

SEQ ID NO: 1705360 - RNA, 19 nt, Artificial Sequence
  Description of Artificial Sequence: Synthetic oligonucleotide
ggaaccaccggugccgcuu

SEQ ID NO: 1705361 - RNA, 19 nt, Artificial Sequence
  Description of Artificial Sequence: Synthetic oligonucleotide
gccacuuguuugugccaua

SEQ ID NO: 1705362 - RNA, 19 nt, Artificial Sequence
  Description of Artificial Sequence: Synthetic oligonucleotide
ggccacgguuccucaggua

SEQ ID NO: 1705363 - RNA, 19 nt, Artificial Sequence
  Description of Artificial Sequence: Synthetic oligonucleotide
acggcccuccauggccuuu

SEQ ID NO: 1705364 - RNA, 19 nt, Artificial Sequence
  Description of Artificial Sequence: Synthetic oligonucleotide
gcgccgggguccuguccac

SEQ ID NO: 1705365 - RNA, 19 nt, Artificial Sequence
  Description of Artificial Sequence: Synthetic oligonucleotide
cgcccagucgcccaccagu

SEQ ID NO: 1705366 - RNA, 19 nt, Artificial Sequence
  Description of Artificial Sequence: Synthetic oligonucleotide
cccgaucuagaagaauguu

SEQ ID NO: 1705367 - RNA, 19 nt, Artificial Sequence
  Description of Artificial Sequence: Synthetic oligonucleotide
ccgccuggaaccugaguuu

SEQ ID NO: 1705368 - RNA, 19 nt, Artificial Sequence
  Description of Artificial Sequence: Synthetic oligonucleotide
cccaguuauuuugcauauu

SEQ ID NO: 1705369 - RNA, 19 nt, Artificial Sequence
  Description of Artificial Sequence: Synthetic oligonucleotide
cgccuggaaccugaguuuu

SEQ ID NO: 1705370 - RNA, 19 nt, Artificial Sequence
  Description of Artificial Sequence: Synthetic oligonucleotide
gcccaggcgccgggguccu

SEQ ID NO: 1705371 - RNA, 19 nt, Artificial Sequence
  Description of Artificial Sequence: Synthetic oligonucleotide
cccaggcgccgggguccug

SEQ ID NO: 1705372 - RNA, 19 nt, Artificial Sequence
  Description of Artificial Sequence: Synthetic oligonucleotide
cggaaccaccggugccgcu

SEQ ID NO: 1705373 - RNA, 19 nt, Artificial Sequence
  Description of Artificial Sequence: Synthetic oligonucleotide
uaaaacgucaaauaaauug

SEQ ID NO: 1705374 - RNA, 19 nt, Artificial Sequence
  Description of Artificial Sequence: Synthetic oligonucleotide
aaaugugucagggagagcc

SEQ ID NO: 1705375 - RNA, 19 nt, Artificial Sequence
  Description of Artificial Sequence: Synthetic oligonucleotide
aaauaaauuguauaggagu

SEQ ID NO: 1705376 - RNA, 19 nt, Artificial Sequence
  Description of Artificial Sequence: Synthetic oligonucleotide
aauaaauuguauaggaguc

SEQ ID NO: 1705377 - RNA, 19 nt, Artificial Sequence
  Description of Artificial Sequence: Synthetic oligonucleotide
ucaucugccauuuuaagag

SEQ ID NO: 1705378 - RNA, 19 nt, Artificial Sequence
  Description of Artificial Sequence: Synthetic oligonucleotide
uaacaaaugugucagggag

SEQ ID NO: 1705379 - RNA, 19 nt, Artificial Sequence
  Description of Artificial Sequence: Synthetic oligonucleotide
uguaguuuuauucagguuu

SEQ ID NO: 1705380 - RNA, 19 nt, Artificial Sequence
  Description of Artificial Sequence: Synthetic oligonucleotide
ggauaaaugggauaaaggg

SEQ ID NO: 1705381 - RNA, 19 nt, Artificial Sequence
  Description of Artificial Sequence: Synthetic oligonucleotide
cauauuaugaguugacggg

SEQ ID NO: 1705382 - RNA, 19 nt, Artificial Sequence
  Description of Artificial Sequence: Synthetic oligonucleotide
aaugucaauaccaaccagg

SEQ ID NO: 1705383 - RNA, 19 nt, Artificial Sequence
  Description of Artificial Sequence: Synthetic oligonucleotide
ucuuacguaaugcugagca

SEQ ID NO: 1705384 - RNA, 19 nt, Artificial Sequence
  Description of Artificial Sequence: Synthetic oligonucleotide
auuguauaggaguccagcc

SEQ ID NO: 1705385 - RNA, 19 nt, Artificial Sequence
  Description of Artificial Sequence: Synthetic oligonucleotide
ucugauuccaaauugaauu

SEQ ID NO: 1705386 - RNA, 19 nt, Artificial Sequence
  Description of Artificial Sequence: Synthetic oligonucleotide
uucgauuccaacucgcgcg

SEQ ID NO: 1705387 - RNA, 19 nt, Artificial Sequence
  Description of Artificial Sequence: Synthetic oligonucleotide
uuuuaagaggcuucgauuc

SEQ ID NO: 1705388 - RNA, 19 nt, Artificial Sequence
  Description of Artificial Sequence: Synthetic oligonucleotide
aaaacgucaaauaaauugu

SEQ ID NO: 1705389 - RNA, 19 nt, Artificial Sequence
  Description of Artificial Sequence: Synthetic oligonucleotide
gauaaaugggauaaagggc

SEQ ID NO: 1705390 - RNA, 19 nt, Artificial Sequence
  Description of Artificial Sequence: Synthetic oligonucleotide
aaccauucuuacguaaugc

SEQ ID NO: 1705391 - RNA, 19 nt, Artificial Sequence
  Description of Artificial Sequence: Synthetic oligonucleotide
gaaagggugaagcccaugg

SEQ ID NO: 1705392 - RNA, 19 nt, Artificial Sequence
  Description of Artificial Sequence: Synthetic oligonucleotide
auaaauuguauaggagucc

SEQ ID NO: 1705393 - RNA, 19 nt, Artificial Sequence
  Description of Artificial Sequence: Synthetic oligonucleotide
auauuaugaguugacgggc

SEQ ID NO: 1705394 - RNA, 19 nt, Artificial Sequence
  Description of Artificial Sequence: Synthetic oligonucleotide
gaaguagacaucucgacga

SEQ ID NO: 1705395 - RNA, 19 nt, Artificial Sequence
  Description of Artificial Sequence: Synthetic oligonucleotide
auaaaugggauaaagggca

SEQ ID NO: 1705396 - RNA, 19 nt, Artificial Sequence
  Description of Artificial Sequence: Synthetic oligonucleotide
agaacaggggaccagacca

SEQ ID NO: 1705397 - RNA, 19 nt, Artificial Sequence
  Description of Artificial Sequence: Synthetic oligonucleotide
gaagucauuccuuuugaug

SEQ ID NO: 1705398 - RNA, 19 nt, Artificial Sequence
  Description of Artificial Sequence: Synthetic oligonucleotide
aaucaucugccauuuuaag

SEQ ID NO: 1705399 - RNA, 19 nt, Artificial Sequence
  Description of Artificial Sequence: Synthetic oligonucleotide
aauacccaacucccuuucc

SEQ ID NO: 1705400 - RNA, 19 nt, Artificial Sequence
  Description of Artificial Sequence: Synthetic oligonucleotide
ugaguugacgggcagauau

SEQ ID NO: 1705401 - RNA, 19 nt, Artificial Sequence
  Description of Artificial Sequence: Synthetic oligonucleotide
aaccaagcagcccuaugac

SEQ ID NO: 1705402 - RNA, 19 nt, Artificial Sequence
  Description of Artificial Sequence: Synthetic oligonucleotide
ucgacgaucuuacauggcc

SEQ ID NO: 1705403 - RNA, 19 nt, Artificial Sequence
  Description of Artificial Sequence: Synthetic oligonucleotide
aaaccauucuuacguaaug

SEQ ID NO: 1705404 - RNA, 19 nt, Artificial Sequence
  Description of Artificial Sequence: Synthetic oligonucleotide
aaaugucaauaccaaccag

SEQ ID NO: 1705405 - RNA, 19 nt, Artificial Sequence
  Description of Artificial Sequence: Synthetic oligonucleotide
gaggaccuaaaccacaagc

SEQ ID NO: 1705406 - RNA, 19 nt, Artificial Sequence
  Description of Artificial Sequence: Synthetic oligonucleotide
aacgcacugacucgacccc

SEQ ID NO: 1705407 - RNA, 19 nt, Artificial Sequence
  Description of Artificial Sequence: Synthetic oligonucleotide
cuucgaaguagacaucucg

SEQ ID NO: 1705408 - RNA, 19 nt, Artificial Sequence
  Description of Artificial Sequence: Synthetic oligonucleotide
aaagggugaagcccauggg

SEQ ID NO: 1705409 - RNA, 19 nt, Artificial Sequence
  Description of Artificial Sequence: Synthetic oligonucleotide
ucucgacgaucuuacaugg

SEQ ID NO: 1705410 - RNA, 19 nt, Artificial Sequence
  Description of Artificial Sequence: Synthetic oligonucleotide
ugaccaaccaagcagcccu

SEQ ID NO: 1705411 - RNA, 19 nt, Artificial Sequence
  Description of Artificial Sequence: Synthetic oligonucleotide
cucaccaccccuaaagggg

SEQ ID NO: 1705412 - RNA, 19 nt, Artificial Sequence
  Description of Artificial Sequence: Synthetic oligonucleotide
ugagcauugcauugggaag

SEQ ID NO: 1705413 - RNA, 19 nt, Artificial Sequence
  Description of Artificial Sequence: Synthetic oligonucleotide
uaaauuguauaggagucca

SEQ ID NO: 1705414 - RNA, 19 nt, Artificial Sequence
  Description of Artificial Sequence: Synthetic oligonucleotide
gauugcaacagcugccucc

SEQ ID NO: 1705415 - RNA, 19 nt, Artificial Sequence
  Description of Artificial Sequence: Synthetic oligonucleotide
acugacucgaccccguccg

SEQ ID NO: 1705416 - RNA, 19 nt, Artificial Sequence
  Description of Artificial Sequence: Synthetic oligonucleotide
uccauauuaugaguugacg

SEQ ID NO: 1705417 - RNA, 19 nt, Artificial Sequence
  Description of Artificial Sequence: Synthetic oligonucleotide
acagucauacuucugcuca

SEQ ID NO: 1705418 - RNA, 19 nt, Artificial Sequence
  Description of Artificial Sequence: Synthetic oligonucleotide
uucgaaguagacaucucga

SEQ ID NO: 1705419 - RNA, 19 nt, Artificial Sequence
  Description of Artificial Sequence: Synthetic oligonucleotide
ucuguaggcucaaggauca

SEQ ID NO: 1705420 - RNA, 19 nt, Artificial Sequence
  Description of Artificial Sequence: Synthetic oligonucleotide
uucucaccaccccuaaagg

SEQ ID NO: 1705421 - RNA, 19 nt, Artificial Sequence
  Description of Artificial Sequence: Synthetic oligonucleotide
aguuauuuugccauggccu

SEQ ID NO: 1705422 - RNA, 19 nt, Artificial Sequence
  Description of Artificial Sequence: Synthetic oligonucleotide
uauuaugaguugacgggca

SEQ ID NO: 1705423 - RNA, 19 nt, Artificial Sequence
  Description of Artificial Sequence: Synthetic oligonucleotide
cuucucaccaccccuaaag

SEQ ID NO: 1705424 - RNA, 19 nt, Artificial Sequence
  Description of Artificial Sequence: Synthetic oligonucleotide
agaccauuugccagaaucc

SEQ ID NO: 1705425 - RNA, 19 nt, Artificial Sequence
  Description of Artificial Sequence: Synthetic oligonucleotide
aucucgacgaucuuacaug

SEQ ID NO: 1705426 - RNA, 19 nt, Artificial Sequence
  Description of Artificial Sequence: Synthetic oligonucleotide
auugcauugggaagguggc

SEQ ID NO: 1705427 - RNA, 19 nt, Artificial Sequence
  Description of Artificial Sequence: Synthetic oligonucleotide
acgaagguccucucguacc

SEQ ID NO: 1705428 - RNA, 19 nt, Artificial Sequence
  Description of Artificial Sequence: Synthetic oligonucleotide
uacguaaugcugagcauug

SEQ ID NO: 1705429 - RNA, 19 nt, Artificial Sequence
  Description of Artificial Sequence: Synthetic oligonucleotide
gacgaucuuacauggccgg

SEQ ID NO: 1705430 - RNA, 19 nt, Artificial Sequence
  Description of Artificial Sequence: Synthetic oligonucleotide
cauucuuacguaaugcuga

SEQ ID NO: 1705431 - RNA, 19 nt, Artificial Sequence
  Description of Artificial Sequence: Synthetic oligonucleotide
ucuccugucucgaagucca

SEQ ID NO: 1705432 - RNA, 19 nt, Artificial Sequence
  Description of Artificial Sequence: Synthetic oligonucleotide
acaaaugugucagggagag

SEQ ID NO: 1705433 - RNA, 19 nt, Artificial Sequence
  Description of Artificial Sequence: Synthetic oligonucleotide
cuaaaccacaagcaauacc

SEQ ID NO: 1705434 - RNA, 19 nt, Artificial Sequence
  Description of Artificial Sequence: Synthetic oligonucleotide
ucaauaccaaccaggugga

SEQ ID NO: 1705435 - RNA, 19 nt, Artificial Sequence
  Description of Artificial Sequence: Synthetic oligonucleotide
uagguacccauccuggaug

SEQ ID NO: 1705436 - RNA, 19 nt, Artificial Sequence
  Description of Artificial Sequence: Synthetic oligonucleotide
aguggaacccagcugggag

SEQ ID NO: 1705437 - RNA, 19 nt, Artificial Sequence
  Description of Artificial Sequence: Synthetic oligonucleotide
auaggaguccagccaaggg

SEQ ID NO: 1705438 - RNA, 19 nt, Artificial Sequence
  Description of Artificial Sequence: Synthetic oligonucleotide
auuuuaagaggcuucgauu

SEQ ID NO: 1705439 - RNA, 19 nt, Artificial Sequence
  Description of Artificial Sequence: Synthetic oligonucleotide
agaggcuucgauuccaacu

SEQ ID NO: 1705440 - RNA, 19 nt, Artificial Sequence
  Description of Artificial Sequence: Synthetic oligonucleotide
ggauaaagggcacaagacc

SEQ ID NO: 1705441 - RNA, 19 nt, Artificial Sequence
  Description of Artificial Sequence: Synthetic oligonucleotide
acuauggagaacaggggac

SEQ ID NO: 1705442 - RNA, 19 nt, Artificial Sequence
  Description of Artificial Sequence: Synthetic oligonucleotide
guacaaguggugcuugggg

SEQ ID NO: 1705443 - RNA, 19 nt, Artificial Sequence
  Description of Artificial Sequence: Synthetic oligonucleotide
aagagacacaggcagggaa

SEQ ID NO: 1705444 - RNA, 19 nt, Artificial Sequence
  Description of Artificial Sequence: Synthetic oligonucleotide
auacuucugcucaaucucc

SEQ ID NO: 1705445 - RNA, 19 nt, Artificial Sequence
  Description of Artificial Sequence: Synthetic oligonucleotide
uccccgacaguuugaaggg

SEQ ID NO: 1705446 - RNA, 19 nt, Artificial Sequence
  Description of Artificial Sequence: Synthetic oligonucleotide
uggaagucauuccuuuuga

SEQ ID NO: 1705447 - RNA, 19 nt, Artificial Sequence
  Description of Artificial Sequence: Synthetic oligonucleotide
auucuuacguaaugcugag

SEQ ID NO: 1705448 - RNA, 19 nt, Artificial Sequence
  Description of Artificial Sequence: Synthetic oligonucleotide
uauaggaguccagccaagg

SEQ ID NO: 1705449 - RNA, 19 nt, Artificial Sequence
  Description of Artificial Sequence: Synthetic oligonucleotide
aagaggcuucgauuccaac

SEQ ID NO: 1705450 - RNA, 19 nt, Artificial Sequence
  Description of Artificial Sequence: Synthetic oligonucleotide
caguuauuuugccauggcc

SEQ ID NO: 1705451 - RNA, 19 nt, Artificial Sequence
  Description of Artificial Sequence: Synthetic oligonucleotide
auuaugaguugacgggcag

SEQ ID NO: 1705452 - RNA, 19 nt, Artificial Sequence
  Description of Artificial Sequence: Synthetic oligonucleotide
gaggcuucgauuccaacuc

SEQ ID NO: 1705453 - RNA, 19 nt, Artificial Sequence
  Description of Artificial Sequence: Synthetic oligonucleotide
acgucaaauaaauuguaua

SEQ ID NO: 1705454 - RNA, 19 nt, Artificial Sequence
  Description of Artificial Sequence: Synthetic oligonucleotide
cacaaaaccauucuuacgu

SEQ ID NO: 1705455 - RNA, 19 nt, Artificial Sequence
  Description of Artificial Sequence: Synthetic oligonucleotide
uucugauuccaaauugaau

SEQ ID NO: 1705456 - RNA, 19 nt, Artificial Sequence
  Description of Artificial Sequence: Synthetic oligonucleotide
aaugggauaaagggcacaa

SEQ ID NO: 1705457 - RNA, 19 nt, Artificial Sequence
  Description of Artificial Sequence: Synthetic oligonucleotide
aucugccauuuuaagaggc

SEQ ID NO: 1705458 - RNA, 19 nt, Artificial Sequence
  Description of Artificial Sequence: Synthetic oligonucleotide
ucgaaguagacaucucgac

SEQ ID NO: 1705459 - RNA, 19 nt, Artificial Sequence
  Description of Artificial Sequence: Synthetic oligonucleotide
guuggggacauccauauua

SEQ ID NO: 1705460 - RNA, 19 nt, Artificial Sequence
  Description of Artificial Sequence: Synthetic oligonucleotide
acuuguaguuuuauucagg

SEQ ID NO: 1705461 - RNA, 19 nt, Artificial Sequence
  Description of Artificial Sequence: Synthetic oligonucleotide
aaccgcugccuccgaaccc

SEQ ID NO: 1705462 - RNA, 19 nt, Artificial Sequence
  Description of Artificial Sequence: Synthetic oligonucleotide
cucuguaggcucaaggauc

SEQ ID NO: 1705463 - RNA, 19 nt, Artificial Sequence
  Description of Artificial Sequence: Synthetic oligonucleotide
ggucuuaguacgcaggcgc

SEQ ID NO: 1705464 - RNA, 19 nt, Artificial Sequence
  Description of Artificial Sequence: Synthetic oligonucleotide
ugucaauaccaaccaggug

SEQ ID NO: 1705465 - RNA, 19 nt, Artificial Sequence
  Description of Artificial Sequence: Synthetic oligonucleotide
cuggaagucauuccuuuug

SEQ ID NO: 1705466 - RNA, 19 nt, Artificial Sequence
  Description of Artificial Sequence: Synthetic oligonucleotide
auuccaacucgcgcgaacg

SEQ ID NO: 1705467 - RNA, 19 nt, Artificial Sequence
  Description of Artificial Sequence: Synthetic oligonucleotide
uaaaugggauaaagggcac

SEQ ID NO: 1705468 - RNA, 19 nt, Artificial Sequence
  Description of Artificial Sequence: Synthetic oligonucleotide
cuucgauuccaacucgcgc

SEQ ID NO: 1705469 - RNA, 19 nt, Artificial Sequence
  Description of Artificial Sequence: Synthetic oligonucleotide
caagggcccagccagagug

SEQ ID NO: 1705470 - RNA, 19 nt, Artificial Sequence
  Description of Artificial Sequence: Synthetic oligonucleotide
gggauaaaugggauaaagg

SEQ ID NO: 1705471 - RNA, 19 nt, Artificial Sequence
  Description of Artificial Sequence: Synthetic oligonucleotide
ugcauugggaagguggcug

SEQ ID NO: 1705472 - RNA, 19 nt, Artificial Sequence
  Description of Artificial Sequence: Synthetic oligonucleotide
aaugugucagggagagccg

SEQ ID NO: 1705473 - RNA, 19 nt, Artificial Sequence
  Description of Artificial Sequence: Synthetic oligonucleotide
ucuuaguacgcaggcgccg

SEQ ID NO: 1705474 - RNA, 19 nt, Artificial Sequence
  Description of Artificial Sequence: Synthetic oligonucleotide
gacaucucgacgaucuuac

SEQ ID NO: 1705475 - RNA, 19 nt, Artificial Sequence
  Description of Artificial Sequence: Synthetic oligonucleotide
caucugccauuuuaagagg

SEQ ID NO: 1705476 - RNA, 19 nt, Artificial Sequence
  Description of Artificial Sequence: Synthetic oligonucleotide
ugacgggcagauaucuuca

SEQ ID NO: 1705477 - RNA, 19 nt, Artificial Sequence
  Description of Artificial Sequence: Synthetic oligonucleotide
aacgucaaauaaauuguau

SEQ ID NO: 1705478 - RNA, 19 nt, Artificial Sequence
  Description of Artificial Sequence: Synthetic oligonucleotide
uuaagaggcuucgauucca

SEQ ID NO: 1705479 - RNA, 19 nt, Artificial Sequence
  Description of Artificial Sequence: Synthetic oligonucleotide
agggauuguggcugcuccc

SEQ ID NO: 1705480 - RNA, 19 nt, Artificial Sequence
  Description of Artificial Sequence: Synthetic oligonucleotide
gagaacaggggaccagacc

SEQ ID NO: 1705481 - RNA, 19 nt, Artificial Sequence
  Description of Artificial Sequence: Synthetic oligonucleotide
uugccagucuucgaaguag

SEQ ID NO: 1705482 - RNA, 19 nt, Artificial Sequence
  Description of Artificial Sequence: Synthetic oligonucleotide
cagggauagguacccaucc

SEQ ID NO: 1705483 - RNA, 19 nt, Artificial Sequence
  Description of Artificial Sequence: Synthetic oligonucleotide
aacaaaugugucagggaga

SEQ ID NO: 1705484 - RNA, 19 nt, Artificial Sequence
  Description of Artificial Sequence: Synthetic oligonucleotide
auccauauuaugaguugac

SEQ ID NO: 1705485 - RNA, 19 nt, Artificial Sequence
  Description of Artificial Sequence: Synthetic oligonucleotide
uuacguaaugcugagcauu

SEQ ID NO: 1705486 - RNA, 19 nt, Artificial Sequence
  Description of Artificial Sequence: Synthetic oligonucleotide
cuauggagaacaggggacc

SEQ ID NO: 1705487 - RNA, 19 nt, Artificial Sequence
  Description of Artificial Sequence: Synthetic oligonucleotide
uugauugcaacagcugccu

SEQ ID NO: 1705488 - RNA, 19 nt, Artificial Sequence
  Description of Artificial Sequence: Synthetic oligonucleotide
gcuuucugauuccaaauug

SEQ ID NO: 1705489 - RNA, 19 nt, Artificial Sequence
  Description of Artificial Sequence: Synthetic oligonucleotide
uaugaguugacgggcagau

SEQ ID NO: 1705490 - RNA, 19 nt, Artificial Sequence
  Description of Artificial Sequence: Synthetic oligonucleotide
cugagcauugcauugggaa

SEQ ID NO: 1705491 - RNA, 19 nt, Artificial Sequence
  Description of Artificial Sequence: Synthetic oligonucleotide
ugauuccaaauugaauuaa

SEQ ID NO: 1705492 - RNA, 19 nt, Artificial Sequence
  Description of Artificial Sequence: Synthetic oligonucleotide
uuggggacauccauauuau

SEQ ID NO: 1705493 - RNA, 19 nt, Artificial Sequence
  Description of Artificial Sequence: Synthetic oligonucleotide
aggaccuaaaccacaagca

SEQ ID NO: 1705494 - RNA, 19 nt, Artificial Sequence
  Description of Artificial Sequence: Synthetic oligonucleotide
auguuggggacauccauau

SEQ ID NO: 1705495 - RNA, 19 nt, Artificial Sequence
  Description of Artificial Sequence: Synthetic oligonucleotide
uggaggaccuaaaccacaa

SEQ ID NO: 1705496 - RNA, 19 nt, Artificial Sequence
  Description of Artificial Sequence: Synthetic oligonucleotide
ucgauuccaacucgcgcga

SEQ ID NO: 1705497 - RNA, 19 nt, Artificial Sequence
  Description of Artificial Sequence: Synthetic oligonucleotide
uccuuuugauguuggggac

SEQ ID NO: 1705498 - RNA, 19 nt, Artificial Sequence
  Description of Artificial Sequence: Synthetic oligonucleotide
aaaugggauaaagggcaca

SEQ ID NO: 1705499 - RNA, 19 nt, Artificial Sequence
  Description of Artificial Sequence: Synthetic oligonucleotide
ccuugauugcaacagcugc

SEQ ID NO: 1705500 - RNA, 19 nt, Artificial Sequence
  Description of Artificial Sequence: Synthetic oligonucleotide
ugcacacgggucuuaguac

SEQ ID NO: 1705501 - RNA, 19 nt, Artificial Sequence
  Description of Artificial Sequence: Synthetic oligonucleotide
auagguacccauccuggau

SEQ ID NO: 1705502 - RNA, 19 nt, Artificial Sequence
  Description of Artificial Sequence: Synthetic oligonucleotide
agggagcuaggugaagggc

SEQ ID NO: 1705503 - RNA, 19 nt, Artificial Sequence
  Description of Artificial Sequence: Synthetic oligonucleotide
gaagggcagggucuccccg

SEQ ID NO: 1705504 - RNA, 19 nt, Artificial Sequence
  Description of Artificial Sequence: Synthetic oligonucleotide
ugcuugccagucuucgaag

SEQ ID NO: 1705505 - RNA, 19 nt, Artificial Sequence
  Description of Artificial Sequence: Synthetic oligonucleotide
aaguagacaucucgacgau

SEQ ID NO: 1705506 - RNA, 19 nt, Artificial Sequence
  Description of Artificial Sequence: Synthetic oligonucleotide
ccagaccagggauaaaugg

SEQ ID NO: 1705507 - RNA, 19 nt, Artificial Sequence
  Description of Artificial Sequence: Synthetic oligonucleotide
ucaccaccccuaaaggggu

SEQ ID NO: 1705508 - RNA, 19 nt, Artificial Sequence
  Description of Artificial Sequence: Synthetic oligonucleotide
caaccaagcagcccuauga

SEQ ID NO: 1705509 - RNA, 19 nt, Artificial Sequence
  Description of Artificial Sequence: Synthetic oligonucleotide
accauuugccagaauccac

SEQ ID NO: 1705510 - RNA, 19 nt, Artificial Sequence
  Description of Artificial Sequence: Synthetic oligonucleotide
gauagguacccauccugga

SEQ ID NO: 1705511 - RNA, 19 nt, Artificial Sequence
  Description of Artificial Sequence: Synthetic oligonucleotide
aaacgucaaauaaauugua

SEQ ID NO: 1705512 - RNA, 19 nt, Artificial Sequence
  Description of Artificial Sequence: Synthetic oligonucleotide
uguaggcucaaggaucacu

SEQ ID NO: 1705513 - RNA, 19 nt, Artificial Sequence
  Description of Artificial Sequence: Synthetic oligonucleotide
agcaauacccaacucccuu

SEQ ID NO: 1705514 - RNA, 19 nt, Artificial Sequence
  Description of Artificial Sequence: Synthetic oligonucleotide
gcagacagcaccgugauca

SEQ ID NO: 1705515 - RNA, 19 nt, Artificial Sequence
  Description of Artificial Sequence: Synthetic oligonucleotide
ucuguacaaguggugcuug

SEQ ID NO: 1705516 - RNA, 19 nt, Artificial Sequence
  Description of Artificial Sequence: Synthetic oligonucleotide
uuauuuugccauggccuug

SEQ ID NO: 1705517 - RNA, 19 nt, Artificial Sequence
  Description of Artificial Sequence: Synthetic oligonucleotide
aguugacgggcagauaucu

SEQ ID NO: 1705518 - RNA, 19 nt, Artificial Sequence
  Description of Artificial Sequence: Synthetic oligonucleotide
auggccaugcuugccaguc

SEQ ID NO: 1705519 - RNA, 19 nt, Artificial Sequence
  Description of Artificial Sequence: Synthetic oligonucleotide
ggauagguacccauccugg

SEQ ID NO: 1705520 - RNA, 19 nt, Artificial Sequence
  Description of Artificial Sequence: Synthetic oligonucleotide
cuuauuccuggccaaggga

SEQ ID NO: 1705521 - RNA, 19 nt, Artificial Sequence
  Description of Artificial Sequence: Synthetic oligonucleotide
aguagacaucucgacgauc

SEQ ID NO: 1705522 - RNA, 19 nt, Artificial Sequence
  Description of Artificial Sequence: Synthetic oligonucleotide
auugcaacagcugccuccu

SEQ ID NO: 1705523 - RNA, 19 nt, Artificial Sequence
  Description of Artificial Sequence: Synthetic oligonucleotide
cuguacaaguggugcuugg

SEQ ID NO: 1705524 - RNA, 19 nt, Artificial Sequence
  Description of Artificial Sequence: Synthetic oligonucleotide
aaaccacaagcaauaccca

SEQ ID NO: 1705525 - RNA, 19 nt, Artificial Sequence
  Description of Artificial Sequence: Synthetic oligonucleotide
ugccagaauccacagcuuu

SEQ ID NO: 1705526 - RNA, 19 nt, Artificial Sequence
  Description of Artificial Sequence: Synthetic oligonucleotide
uuccaacucgcgcgaacgc

SEQ ID NO: 1705527 - RNA, 19 nt, Artificial Sequence
  Description of Artificial Sequence: Synthetic oligonucleotide
augcuugccagucuucgaa

SEQ ID NO: 1705528 - RNA, 19 nt, Artificial Sequence
  Description of Artificial Sequence: Synthetic oligonucleotide
uauggagaacaggggacca

SEQ ID NO: 1705529 - RNA, 19 nt, Artificial Sequence
  Description of Artificial Sequence: Synthetic oligonucleotide
acaaaaccauucuuacgua

SEQ ID NO: 1705530 - RNA, 19 nt, Artificial Sequence
  Description of Artificial Sequence: Synthetic oligonucleotide
gcaaggcccuuccagaugc

SEQ ID NO: 1705531 - RNA, 19 nt, Artificial Sequence
  Description of Artificial Sequence: Synthetic oligonucleotide
gaucaggaucucuucucca

SEQ ID NO: 1705532 - RNA, 19 nt, Artificial Sequence
  Description of Artificial Sequence: Synthetic oligonucleotide
ucuucgaaguagacaucuc

SEQ ID NO: 1705533 - RNA, 19 nt, Artificial Sequence
  Description of Artificial Sequence: Synthetic oligonucleotide
caaaaccauucuuacguaa

SEQ ID NO: 1705534 - RNA, 19 nt, Artificial Sequence
  Description of Artificial Sequence: Synthetic oligonucleotide
ggagaggggccucuguagg

SEQ ID NO: 1705535 - RNA, 19 nt, Artificial Sequence
  Description of Artificial Sequence: Synthetic oligonucleotide
acgaucuuacauggccggc

SEQ ID NO: 1705536 - RNA, 19 nt, Artificial Sequence
  Description of Artificial Sequence: Synthetic oligonucleotide
ccuaaagggguuugggaag

SEQ ID NO: 1705537 - RNA, 19 nt, Artificial Sequence
  Description of Artificial Sequence: Synthetic oligonucleotide
guagacaucucgacgaucu

SEQ ID NO: 1705538 - RNA, 19 nt, Artificial Sequence
  Description of Artificial Sequence: Synthetic oligonucleotide
accuaaaccacaagcaaua

SEQ ID NO: 1705539 - RNA, 19 nt, Artificial Sequence
  Description of Artificial Sequence: Synthetic oligonucleotide
uacgcaggcgccgacuccc

SEQ ID NO: 1705540 - RNA, 19 nt, Artificial Sequence
  Description of Artificial Sequence: Synthetic oligonucleotide
cgaaguagacaucucgacg

SEQ ID NO: 1705541 - RNA, 19 nt, Artificial Sequence
  Description of Artificial Sequence: Synthetic oligonucleotide
aacucgcgcgaacgcacug

SEQ ID NO: 1705542 - RNA, 19 nt, Artificial Sequence
  Description of Artificial Sequence: Synthetic oligonucleotide
acguaaugcugagcauugc

SEQ ID NO: 1705543 - RNA, 19 nt, Artificial Sequence
  Description of Artificial Sequence: Synthetic oligonucleotide
ccacaaaaccauucuuacg

SEQ ID NO: 1705544 - RNA, 19 nt, Artificial Sequence
  Description of Artificial Sequence: Synthetic oligonucleotide
ucaggcagacgaagguccu

SEQ ID NO: 1705545 - RNA, 19 nt, Artificial Sequence
  Description of Artificial Sequence: Synthetic oligonucleotide
ggggacauccauauuauga

SEQ ID NO: 1705546 - RNA, 19 nt, Artificial Sequence
  Description of Artificial Sequence: Synthetic oligonucleotide
gaaggacuauggagaacag

SEQ ID NO: 1705547 - RNA, 19 nt, Artificial Sequence
  Description of Artificial Sequence: Synthetic oligonucleotide
ccugaggagggauuguggc

SEQ ID NO: 1705548 - RNA, 19 nt, Artificial Sequence
  Description of Artificial Sequence: Synthetic oligonucleotide
accccuaaagggguuuggg

SEQ ID NO: 1705549 - RNA, 19 nt, Artificial Sequence
  Description of Artificial Sequence: Synthetic oligonucleotide
uccaacucgcgcgaacgca

SEQ ID NO: 1705550 - RNA, 19 nt, Artificial Sequence
  Description of Artificial Sequence: Synthetic oligonucleotide
agggauagguacccauccu

SEQ ID NO: 1705551 - RNA, 19 nt, Artificial Sequence
  Description of Artificial Sequence: Synthetic oligonucleotide
accgcugccuccgaacccg

SEQ ID NO: 1705552 - RNA, 19 nt, Artificial Sequence
  Description of Artificial Sequence: Synthetic oligonucleotide
gggauaaagggcacaagac

SEQ ID NO: 1705553 - RNA, 19 nt, Artificial Sequence
  Description of Artificial Sequence: Synthetic oligonucleotide
cacacgggucuuaguacgc

SEQ ID NO: 1705554 - RNA, 19 nt, Artificial Sequence
  Description of Artificial Sequence: Synthetic oligonucleotide
cugucucgaaguccaaauc

SEQ ID NO: 1705555 - RNA, 19 nt, Artificial Sequence
  Description of Artificial Sequence: Synthetic oligonucleotide
uacccauccuggaugccaa

SEQ ID NO: 1705556 - RNA, 19 nt, Artificial Sequence
  Description of Artificial Sequence: Synthetic oligonucleotide
gaacaggggaccagaccag

SEQ ID NO: 1705557 - RNA, 19 nt, Artificial Sequence
  Description of Artificial Sequence: Synthetic oligonucleotide
ccuuauuccuggccaaggg

SEQ ID NO: 1705558 - RNA, 19 nt, Artificial Sequence
  Description of Artificial Sequence: Synthetic oligonucleotide
cacgggucuuaguacgcag

SEQ ID NO: 1705559 - RNA, 19 nt, Artificial Sequence
  Description of Artificial Sequence: Synthetic oligonucleotide
agccaguuauuuugccaug

SEQ ID NO: 1705560 - RNA, 19 nt, Artificial Sequence
  Description of Artificial Sequence: Synthetic oligonucleotide
uucuuacguaaugcugagc

SEQ ID NO: 1705561 - RNA, 19 nt, Artificial Sequence
  Description of Artificial Sequence: Synthetic oligonucleotide
ucuuacauggccggccuuu

SEQ ID NO: 1705562 - RNA, 19 nt, Artificial Sequence
  Description of Artificial Sequence: Synthetic oligonucleotide
cucgacgaucuuacauggc

SEQ ID NO: 1705563 - RNA, 19 nt, Artificial Sequence
  Description of Artificial Sequence: Synthetic oligonucleotide
uaguuuuauucagguuuga

SEQ ID NO: 1705564 - RNA, 19 nt, Artificial Sequence
  Description of Artificial Sequence: Synthetic oligonucleotide
aaagggcacaagaccauuu

SEQ ID NO: 1705565 - RNA, 19 nt, Artificial Sequence
  Description of Artificial Sequence: Synthetic oligonucleotide
ugauugcaacagcugccuc

SEQ ID NO: 1705566 - RNA, 19 nt, Artificial Sequence
  Description of Artificial Sequence: Synthetic oligonucleotide
gauguuggggacauccaua

SEQ ID NO: 1705567 - RNA, 19 nt, Artificial Sequence
  Description of Artificial Sequence: Synthetic oligonucleotide
ggcagguagcuucaccaag

SEQ ID NO: 1705568 - RNA, 19 nt, Artificial Sequence
  Description of Artificial Sequence: Synthetic oligonucleotide
gcagacgaagguccucucg

SEQ ID NO: 1705569 - RNA, 19 nt, Artificial Sequence
  Description of Artificial Sequence: Synthetic oligonucleotide
cacugacucgaccccgucc

SEQ ID NO: 1705570 - RNA, 19 nt, Artificial Sequence
  Description of Artificial Sequence: Synthetic oligonucleotide
acucgaccccguccgcucg

SEQ ID NO: 1705571 - RNA, 19 nt, Artificial Sequence
  Description of Artificial Sequence: Synthetic oligonucleotide
gccaguuauuuugccaugg

SEQ ID NO: 1705572 - RNA, 19 nt, Artificial Sequence
  Description of Artificial Sequence: Synthetic oligonucleotide
guuauuuugccauggccuu

SEQ ID NO: 1705573 - RNA, 19 nt, Artificial Sequence
  Description of Artificial Sequence: Synthetic oligonucleotide
cuucauauuucuucccagu

SEQ ID NO: 1705574 - RNA, 19 nt, Artificial Sequence
  Description of Artificial Sequence: Synthetic oligonucleotide
agggagagccgcaggaaag

SEQ ID NO: 1705575 - RNA, 19 nt, Artificial Sequence
  Description of Artificial Sequence: Synthetic oligonucleotide
aagcaauacccaacucccu

SEQ ID NO: 1705576 - RNA, 19 nt, Artificial Sequence
  Description of Artificial Sequence: Synthetic oligonucleotide
ucccuuauuccuggccaag

SEQ ID NO: 1705577 - RNA, 19 nt, Artificial Sequence
  Description of Artificial Sequence: Synthetic oligonucleotide
aaggggagauggaggaccu

SEQ ID NO: 1705578 - RNA, 19 nt, Artificial Sequence
  Description of Artificial Sequence: Synthetic oligonucleotide
gucuuaguacgcaggcgcc

SEQ ID NO: 1705579 - RNA, 19 nt, Artificial Sequence
  Description of Artificial Sequence: Synthetic oligonucleotide
gagcccaaccgcugccucc

SEQ ID NO: 1705580 - RNA, 19 nt, Artificial Sequence
  Description of Artificial Sequence: Synthetic oligonucleotide
augggauaaagggcacaag

SEQ ID NO: 1705581 - RNA, 19 nt, Artificial Sequence
  Description of Artificial Sequence: Synthetic oligonucleotide
aaggggugaggaaaaccaa

SEQ ID NO: 1705582 - RNA, 19 nt, Artificial Sequence
  Description of Artificial Sequence: Synthetic oligonucleotide
guauaggaguccagccaag

SEQ ID NO: 1705583 - RNA, 19 nt, Artificial Sequence
  Description of Artificial Sequence: Synthetic oligonucleotide
agcccaaccgcugccuccg

SEQ ID NO: 1705584 - RNA, 19 nt, Artificial Sequence
  Description of Artificial Sequence: Synthetic oligonucleotide
gucuucgaaguagacaucu

SEQ ID NO: 1705585 - RNA, 19 nt, Artificial Sequence
  Description of Artificial Sequence: Synthetic oligonucleotide
agacaucucgacgaucuua

SEQ ID NO: 1705586 - RNA, 19 nt, Artificial Sequence
  Description of Artificial Sequence: Synthetic oligonucleotide
ggugaaggacuauggagaa

SEQ ID NO: 1705587 - RNA, 19 nt, Artificial Sequence
  Description of Artificial Sequence: Synthetic oligonucleotide
accagaccagggauaaaug

SEQ ID NO: 1705588 - RNA, 19 nt, Artificial Sequence
  Description of Artificial Sequence: Synthetic oligonucleotide
cagguggaccuuggcaugg

SEQ ID NO: 1705589 - RNA, 19 nt, Artificial Sequence
  Description of Artificial Sequence: Synthetic oligonucleotide
acaggggaccagaccaggg

SEQ ID NO: 1705590 - RNA, 19 nt, Artificial Sequence
  Description of Artificial Sequence: Synthetic oligonucleotide
gcuucgauuccaacucgcg

SEQ ID NO: 1705591 - RNA, 19 nt, Artificial Sequence
  Description of Artificial Sequence: Synthetic oligonucleotide
uccucucguaccuccccac

SEQ ID NO: 1705592 - RNA, 19 nt, Artificial Sequence
  Description of Artificial Sequence: Synthetic oligonucleotide
gaccuaaaccacaagcaau

SEQ ID NO: 1705593 - RNA, 19 nt, Artificial Sequence
  Description of Artificial Sequence: Synthetic oligonucleotide
gugaagggcagggucuccc

SEQ ID NO: 1705594 - RNA, 19 nt, Artificial Sequence
  Description of Artificial Sequence: Synthetic oligonucleotide
ggagcuaggugaagggcag

SEQ ID NO: 1705595 - RNA, 19 nt, Artificial Sequence
  Description of Artificial Sequence: Synthetic oligonucleotide
gaccccguccgcucgccgc

SEQ ID NO: 1705596 - RNA, 19 nt, Artificial Sequence
  Description of Artificial Sequence: Synthetic oligonucleotide
ggcucaaggaucacugcug

SEQ ID NO: 1705597 - RNA, 19 nt, Artificial Sequence
  Description of Artificial Sequence: Synthetic oligonucleotide
ggccauggcucccuuauuc

SEQ ID NO: 1705598 - RNA, 19 nt, Artificial Sequence
  Description of Artificial Sequence: Synthetic oligonucleotide
acaucucgacgaucuuaca

SEQ ID NO: 1705599 - RNA, 19 nt, Artificial Sequence
  Description of Artificial Sequence: Synthetic oligonucleotide
cgacgaucuuacauggccg

SEQ ID NO: 1705600 - RNA, 19 nt, Artificial Sequence
  Description of Artificial Sequence: Synthetic oligonucleotide
aggucucccucaggcagac

SEQ ID NO: 1705601 - RNA, 19 nt, Artificial Sequence
  Description of Artificial Sequence: Synthetic oligonucleotide
uugcauugggaagguggcu

SEQ ID NO: 1705602 - RNA, 19 nt, Artificial Sequence
  Description of Artificial Sequence: Synthetic oligonucleotide
ccaguuauuuugccauggc

SEQ ID NO: 1705603 - RNA, 19 nt, Artificial Sequence
  Description of Artificial Sequence: Synthetic oligonucleotide
gggagagccgcaggaaagg

SEQ ID NO: 1705604 - RNA, 19 nt, Artificial Sequence
  Description of Artificial Sequence: Synthetic oligonucleotide
agguggaccuuggcauggc

SEQ ID NO: 1705605 - RNA, 19 nt, Artificial Sequence
  Description of Artificial Sequence: Synthetic oligonucleotide
gacucgaccccguccgcuc

SEQ ID NO: 1705606 - RNA, 19 nt, Artificial Sequence
  Description of Artificial Sequence: Synthetic oligonucleotide
gagcuaggugaagggcagg

SEQ ID NO: 1705607 - RNA, 19 nt, Artificial Sequence
  Description of Artificial Sequence: Synthetic oligonucleotide
ugguccccagucuguacaa

SEQ ID NO: 1705608 - RNA, 19 nt, Artificial Sequence
  Description of Artificial Sequence: Synthetic oligonucleotide
ccccagucuguacaagugg

SEQ ID NO: 1705609 - RNA, 19 nt, Artificial Sequence
  Description of Artificial Sequence: Synthetic oligonucleotide
aggggugaggaaaaccaaa

SEQ ID NO: 1705610 - RNA, 19 nt, Artificial Sequence
  Description of Artificial Sequence: Synthetic oligonucleotide
accgugaucaggaucucuu

SEQ ID NO: 1705611 - RNA, 19 nt, Artificial Sequence
  Description of Artificial Sequence: Synthetic oligonucleotide
cucgcgcgaacgcacugac

SEQ ID NO: 1705612 - RNA, 19 nt, Artificial Sequence
  Description of Artificial Sequence: Synthetic oligonucleotide
gaguugacgggcagauauc

SEQ ID NO: 1705613 - RNA, 19 nt, Artificial Sequence
  Description of Artificial Sequence: Synthetic oligonucleotide
cuuaguacgcaggcgccga

SEQ ID NO: 1705614 - RNA, 19 nt, Artificial Sequence
  Description of Artificial Sequence: Synthetic oligonucleotide
guaaugcugagcauugcau

SEQ ID NO: 1705615 - RNA, 19 nt, Artificial Sequence
  Description of Artificial Sequence: Synthetic oligonucleotide
gccgugagggaagaggcag

SEQ ID NO: 1705616 - RNA, 19 nt, Artificial Sequence
  Description of Artificial Sequence: Synthetic oligonucleotide
caugcuugccagucuucga

SEQ ID NO: 1705617 - RNA, 19 nt, Artificial Sequence
  Description of Artificial Sequence: Synthetic oligonucleotide
uguuggggacauccauauu

SEQ ID NO: 1705618 - RNA, 19 nt, Artificial Sequence
  Description of Artificial Sequence: Synthetic oligonucleotide
ugacucgaccccguccgcu

SEQ ID NO: 1705619 - RNA, 19 nt, Artificial Sequence
  Description of Artificial Sequence: Synthetic oligonucleotide
ggaggaccuaaaccacaag

SEQ ID NO: 1705620 - RNA, 19 nt, Artificial Sequence
  Description of Artificial Sequence: Synthetic oligonucleotide
caucucgacgaucuuacau

SEQ ID NO: 1705621 - RNA, 19 nt, Artificial Sequence
  Description of Artificial Sequence: Synthetic oligonucleotide
accaaccagguggaccuug

SEQ ID NO: 1705622 - RNA, 19 nt, Artificial Sequence
  Description of Artificial Sequence: Synthetic oligonucleotide
ggcagauaucuucauauuu

SEQ ID NO: 1705623 - RNA, 19 nt, Artificial Sequence
  Description of Artificial Sequence: Synthetic oligonucleotide
ccaacucgcgcgaacgcac

SEQ ID NO: 1705624 - RNA, 19 nt, Artificial Sequence
  Description of Artificial Sequence: Synthetic oligonucleotide
caaaugugucagggagagc

SEQ ID NO: 1705625 - RNA, 19 nt, Artificial Sequence
  Description of Artificial Sequence: Synthetic oligonucleotide
guacgcaggcgccgacucc

SEQ ID NO: 1705626 - RNA, 19 nt, Artificial Sequence
  Description of Artificial Sequence: Synthetic oligonucleotide
ccuccgaacccgcugcugc

SEQ ID NO: 1705627 - RNA, 19 nt, Artificial Sequence
  Description of Artificial Sequence: Synthetic oligonucleotide
caccccuaaagggguuugg

SEQ ID NO: 1705628 - RNA, 19 nt, Artificial Sequence
  Description of Artificial Sequence: Synthetic oligonucleotide
acacgggucuuaguacgca

SEQ ID NO: 1705629 - RNA, 19 nt, Artificial Sequence
  Description of Artificial Sequence: Synthetic oligonucleotide
gggccgugagggaagaggc

SEQ ID NO: 1705630 - RNA, 19 nt, Artificial Sequence
  Description of Artificial Sequence: Synthetic oligonucleotide
gacuccccacugaccaacc

SEQ ID NO: 1705631 - RNA, 19 nt, Artificial Sequence
  Description of Artificial Sequence: Synthetic oligonucleotide
cgcgcgaacgcacugacuc

SEQ ID NO: 1705632 - RNA, 19 nt, Artificial Sequence
  Description of Artificial Sequence: Synthetic oligonucleotide
ggcaaggcccuuccagaug

SEQ ID NO: 1705633 - RNA, 19 nt, Artificial Sequence
  Description of Artificial Sequence: Synthetic oligonucleotide
guaccuccccacuguccug

SEQ ID NO: 1705634 - RNA, 19 nt, Artificial Sequence
  Description of Artificial Sequence: Synthetic oligonucleotide
guccucucguaccucccca

SEQ ID NO: 1705635 - RNA, 19 nt, Artificial Sequence
  Description of Artificial Sequence: Synthetic oligonucleotide
gaguggaacccagcuggga

SEQ ID NO: 1705636 - RNA, 19 nt, Artificial Sequence
  Description of Artificial Sequence: Synthetic oligonucleotide
cuuacguaaugcugagcau

SEQ ID NO: 1705637 - RNA, 19 nt, Artificial Sequence
  Description of Artificial Sequence: Synthetic oligonucleotide
cugacucgaccccguccgc

SEQ ID NO: 1705638 - RNA, 19 nt, Artificial Sequence
  Description of Artificial Sequence: Synthetic oligonucleotide
gcgcgaacgcacugacucg

SEQ ID NO: 1705639 - RNA, 19 nt, Artificial Sequence
  Description of Artificial Sequence: Synthetic oligonucleotide
ucgcgcgaacgcacugacu

SEQ ID NO: 1705640 - RNA, 19 nt, Artificial Sequence
  Description of Artificial Sequence: Synthetic oligonucleotide
ccuaaaccacaagcaauac

SEQ ID NO: 1705641 - RNA, 19 nt, Artificial Sequence
  Description of Artificial Sequence: Synthetic oligonucleotide
acucgcgcgaacgcacuga

SEQ ID NO: 1705642 - RNA, 19 nt, Artificial Sequence
  Description of Artificial Sequence: Synthetic oligonucleotide
ccgcaggaaagggugaagc

SEQ ID NO: 1705643 - RNA, 19 nt, Artificial Sequence
  Description of Artificial Sequence: Synthetic oligonucleotide
ccaaccgcugccuccgaac

SEQ ID NO: 1705644 - RNA, 19 nt, Artificial Sequence
  Description of Artificial Sequence: Synthetic oligonucleotide
gccucuagcgccgccgccg

SEQ ID NO: 1705645 - RNA, 19 nt, Artificial Sequence
  Description of Artificial Sequence: Synthetic oligonucleotide
cccuuauuccuggccaagg

SEQ ID NO: 1705646 - RNA, 19 nt, Artificial Sequence
  Description of Artificial Sequence: Synthetic oligonucleotide
cacccugggagccaguuau

SEQ ID NO: 1705647 - RNA, 19 nt, Artificial Sequence
  Description of Artificial Sequence: Synthetic oligonucleotide
ccgacaguuugaaggggug

SEQ ID NO: 1705648 - RNA, 19 nt, Artificial Sequence
  Description of Artificial Sequence: Synthetic oligonucleotide
caauaccaaccagguggac

SEQ ID NO: 1705649 - RNA, 19 nt, Artificial Sequence
  Description of Artificial Sequence: Synthetic oligonucleotide
accgccgccgccgccgccg

SEQ ID NO: 1705650 - RNA, 19 nt, Artificial Sequence
  Description of Artificial Sequence: Synthetic oligonucleotide
cucgaccccguccgcucgc

SEQ ID NO: 1705651 - RNA, 19 nt, Artificial Sequence
  Description of Artificial Sequence: Synthetic oligonucleotide
ggagaacaggggaccagac

SEQ ID NO: 1705652 - RNA, 19 nt, Artificial Sequence
  Description of Artificial Sequence: Synthetic oligonucleotide
ccagucuucgaaguagaca

SEQ ID NO: 1705653 - RNA, 19 nt, Artificial Sequence
  Description of Artificial Sequence: Synthetic oligonucleotide
ccccacugaccaaccaagc

SEQ ID NO: 1705654 - RNA, 19 nt, Artificial Sequence
  Description of Artificial Sequence: Synthetic oligonucleotide
gccagaauccacagcuuuc

SEQ ID NO: 1705655 - RNA, 19 nt, Artificial Sequence
  Description of Artificial Sequence: Synthetic oligonucleotide
ggaaagggugaagcccaug

SEQ ID NO: 1705656 - RNA, 19 nt, Artificial Sequence
  Description of Artificial Sequence: Synthetic oligonucleotide
gagagccgcaggaaagggu

SEQ ID NO: 1705657 - RNA, 19 nt, Artificial Sequence
  Description of Artificial Sequence: Synthetic oligonucleotide
ccaaccaagcagcccuaug

SEQ ID NO: 1705658 - RNA, 19 nt, Artificial Sequence
  Description of Artificial Sequence: Synthetic oligonucleotide
agccgcaggaaagggugaa

SEQ ID NO: 1705659 - RNA, 19 nt, Artificial Sequence
  Description of Artificial Sequence: Synthetic oligonucleotide
gaccagggauaaaugggau

SEQ ID NO: 1705660 - RNA, 19 nt, Artificial Sequence
  Description of Artificial Sequence: Synthetic oligonucleotide
guagcuucaccaaggccau

SEQ ID NO: 1705661 - RNA, 19 nt, Artificial Sequence
  Description of Artificial Sequence: Synthetic oligonucleotide
ccgugaucaggaucucuuc

SEQ ID NO: 1705662 - RNA, 19 nt, Artificial Sequence
  Description of Artificial Sequence: Synthetic oligonucleotide
ccccuaaagggguuuggga

SEQ ID NO: 1705663 - RNA, 19 nt, Artificial Sequence
  Description of Artificial Sequence: Synthetic oligonucleotide
ucgaccccguccgcucgcc

SEQ ID NO: 1705664 - RNA, 19 nt, Artificial Sequence
  Description of Artificial Sequence: Synthetic oligonucleotide
accaaccaagcagcccuau

SEQ ID NO: 1705665 - RNA, 19 nt, Artificial Sequence
  Description of Artificial Sequence: Synthetic oligonucleotide
accaccccuaaagggguuu

SEQ ID NO: 1705666 - RNA, 19 nt, Artificial Sequence
  Description of Artificial Sequence: Synthetic oligonucleotide
ggccccugcaucuccuguc

SEQ ID NO: 1705667 - RNA, 19 nt, Artificial Sequence
  Description of Artificial Sequence: Synthetic oligonucleotide
gcuugccagucuucgaagu

SEQ ID NO: 1705668 - RNA, 19 nt, Artificial Sequence
  Description of Artificial Sequence: Synthetic oligonucleotide
gcaggcgccgacuccccac

SEQ ID NO: 1705669 - RNA, 19 nt, Artificial Sequence
  Description of Artificial Sequence: Synthetic oligonucleotide
gccgccucuagcgccgccg

SEQ ID NO: 1705670 - RNA, 19 nt, Artificial Sequence
  Description of Artificial Sequence: Synthetic oligonucleotide
aggccauggcucccuuauu

SEQ ID NO: 1705671 - RNA, 19 nt, Artificial Sequence
  Description of Artificial Sequence: Synthetic oligonucleotide
cuguaggcucaaggaucac

SEQ ID NO: 1705672 - RNA, 19 nt, Artificial Sequence
  Description of Artificial Sequence: Synthetic oligonucleotide
aggcgccgacuccccacug

SEQ ID NO: 1705673 - RNA, 19 nt, Artificial Sequence
  Description of Artificial Sequence: Synthetic oligonucleotide
ccaaggucucccucaggca

SEQ ID NO: 1705674 - RNA, 19 nt, Artificial Sequence
  Description of Artificial Sequence: Synthetic oligonucleotide
gcaauacccaacucccuuu

SEQ ID NO: 1705675 - RNA, 19 nt, Artificial Sequence
  Description of Artificial Sequence: Synthetic oligonucleotide
ggagggauuguggcugcuc

SEQ ID NO: 1705676 - RNA, 19 nt, Artificial Sequence
  Description of Artificial Sequence: Synthetic oligonucleotide
gcgccgacuccccacugac

SEQ ID NO: 1705677 - RNA, 19 nt, Artificial Sequence
  Description of Artificial Sequence: Synthetic oligonucleotide
ccugucucgaaguccaaau

SEQ ID NO: 1705678 - RNA, 19 nt, Artificial Sequence
  Description of Artificial Sequence: Synthetic oligonucleotide
ggcagacgaagguccucuc

SEQ ID NO: 1705679 - RNA, 19 nt, Artificial Sequence
  Description of Artificial Sequence: Synthetic oligonucleotide
gccgcaggaaagggugaag

SEQ ID NO: 1705680 - RNA, 19 nt, Artificial Sequence
  Description of Artificial Sequence: Synthetic oligonucleotide
cgggcagauaucuucauau

SEQ ID NO: 1705681 - RNA, 19 nt, Artificial Sequence
  Description of Artificial Sequence: Synthetic oligonucleotide
ccgccgcugcugcacacgg

SEQ ID NO: 1705682 - RNA, 19 nt, Artificial Sequence
  Description of Artificial Sequence: Synthetic oligonucleotide
caacucgcgcgaacgcacu

SEQ ID NO: 1705683 - RNA, 19 nt, Artificial Sequence
  Description of Artificial Sequence: Synthetic oligonucleotide
ggaccuuggcauggccaug

SEQ ID NO: 1705684 - RNA, 19 nt, Artificial Sequence
  Description of Artificial Sequence: Synthetic oligonucleotide
ccucuagcgccgccgccgc

SEQ ID NO: 1705685 - RNA, 19 nt, Artificial Sequence
  Description of Artificial Sequence: Synthetic oligonucleotide
ccgaacccgcugcugcuac

SEQ ID NO: 1705686 - RNA, 19 nt, Artificial Sequence
  Description of Artificial Sequence: Synthetic oligonucleotide
ccccgacaguuugaagggg

SEQ ID NO: 1705687 - RNA, 19 nt, Artificial Sequence
  Description of Artificial Sequence: Synthetic oligonucleotide
ggcgccgacuccccacuga

SEQ ID NO: 1705688 - RNA, 19 nt, Artificial Sequence
  Description of Artificial Sequence: Synthetic oligonucleotide
ccuggccaagggagcuagg

SEQ ID NO: 1705689 - RNA, 19 nt, Artificial Sequence
  Description of Artificial Sequence: Synthetic oligonucleotide
cuccgaacccgcugcugcu

SEQ ID NO: 1705690 - RNA, 19 nt, Artificial Sequence
  Description of Artificial Sequence: Synthetic oligonucleotide
ccucuguaggcucaaggau

SEQ ID NO: 1705691 - RNA, 19 nt, Artificial Sequence
  Description of Artificial Sequence: Synthetic oligonucleotide
uaccaaccagguggaccuu

SEQ ID NO: 1705692 - RNA, 19 nt, Artificial Sequence
  Description of Artificial Sequence: Synthetic oligonucleotide
gggcagauaucuucauauu

SEQ ID NO: 1705693 - RNA, 19 nt, Artificial Sequence
  Description of Artificial Sequence: Synthetic oligonucleotide
gcucgccgcgagcccaacc

SEQ ID NO: 1705694 - RNA, 19 nt, Artificial Sequence
  Description of Artificial Sequence: Synthetic oligonucleotide
uaccgccgccgccgccgcc

SEQ ID NO: 1705695 - RNA, 19 nt, Artificial Sequence
  Description of Artificial Sequence: Synthetic oligonucleotide
cguccgcucgccgcgagcc

SEQ ID NO: 1705696 - RNA, 19 nt, Artificial Sequence
  Description of Artificial Sequence: Synthetic oligonucleotide
caacagcugccuccucugu

SEQ ID NO: 1705697 - RNA, 19 nt, Artificial Sequence
  Description of Artificial Sequence: Synthetic oligonucleotide
cccgacaguuugaaggggu

SEQ ID NO: 1705698 - RNA, 19 nt, Artificial Sequence
  Description of Artificial Sequence: Synthetic oligonucleotide
ccgcgagcccaaccgcugc

SEQ ID NO: 1705699 - RNA, 19 nt, Artificial Sequence
  Description of Artificial Sequence: Synthetic oligonucleotide
cagggccgugagggaagag

SEQ ID NO: 1705700 - RNA, 19 nt, Artificial Sequence
  Description of Artificial Sequence: Synthetic oligonucleotide
gcacugacucgaccccguc

SEQ ID NO: 1705701 - RNA, 19 nt, Artificial Sequence
  Description of Artificial Sequence: Synthetic oligonucleotide
guugacgggcagauaucuu

SEQ ID NO: 1705702 - RNA, 19 nt, Artificial Sequence
  Description of Artificial Sequence: Synthetic oligonucleotide
cgacuccccacugaccaac

SEQ ID NO: 1705703 - RNA, 19 nt, Artificial Sequence
  Description of Artificial Sequence: Synthetic oligonucleotide
cguaccuccccacuguccu

SEQ ID NO: 1705704 - RNA, 19 nt, Artificial Sequence
  Description of Artificial Sequence: Synthetic oligonucleotide
gccgccgccgccgccgccg

SEQ ID NO: 1705705 - RNA, 19 nt, Artificial Sequence
  Description of Artificial Sequence: Synthetic oligonucleotide
ccaccccuaaagggguuug

SEQ ID NO: 1705706 - RNA, 19 nt, Artificial Sequence
  Description of Artificial Sequence: Synthetic oligonucleotide
ggucuccccgacaguuuga

SEQ ID NO: 1705707 - RNA, 19 nt, Artificial Sequence
  Description of Artificial Sequence: Synthetic oligonucleotide
ggucucccucaggcagacg

SEQ ID NO: 1705708 - RNA, 19 nt, Artificial Sequence
  Description of Artificial Sequence: Synthetic oligonucleotide
gccccugcaucuccugucu

SEQ ID NO: 1705709 - RNA, 19 nt, Artificial Sequence
  Description of Artificial Sequence: Synthetic oligonucleotide
gccuccgaacccgcugcug

SEQ ID NO: 1705710 - RNA, 19 nt, Artificial Sequence
  Description of Artificial Sequence: Synthetic oligonucleotide
caggcgccgacuccccacu

SEQ ID NO: 1705711 - RNA, 19 nt, Artificial Sequence
  Description of Artificial Sequence: Synthetic oligonucleotide
cgcgagcccaaccgcugcc

SEQ ID NO: 1705712 - RNA, 19 nt, Artificial Sequence
  Description of Artificial Sequence: Synthetic oligonucleotide
cgccgacuccccacugacc

SEQ ID NO: 1705713 - RNA, 19 nt, Artificial Sequence
  Description of Artificial Sequence: Synthetic oligonucleotide
gcugcacacgggucuuagu

SEQ ID NO: 1705714 - RNA, 19 nt, Artificial Sequence
  Description of Artificial Sequence: Synthetic oligonucleotide
cgcgaacgcacugacucga

SEQ ID NO: 1705715 - RNA, 19 nt, Artificial Sequence
  Description of Artificial Sequence: Synthetic oligonucleotide
ccugggagccaguuauuuu

SEQ ID NO: 1705716 - RNA, 19 nt, Artificial Sequence
  Description of Artificial Sequence: Synthetic oligonucleotide
ccguccgcucgccgcgagc

SEQ ID NO: 1705717 - RNA, 19 nt, Artificial Sequence
  Description of Artificial Sequence: Synthetic oligonucleotide
ggaccagaccagggauaaa

SEQ ID NO: 1705718 - RNA, 19 nt, Artificial Sequence
  Description of Artificial Sequence: Synthetic oligonucleotide
ccucucguaccuccccacu

SEQ ID NO: 1705719 - RNA, 19 nt, Artificial Sequence
  Description of Artificial Sequence: Synthetic oligonucleotide
caccaccccuaaagggguu

SEQ ID NO: 1705720 - RNA, 19 nt, Artificial Sequence
  Description of Artificial Sequence: Synthetic oligonucleotide
cugcugcacacgggucuua

SEQ ID NO: 1705721 - RNA, 19 nt, Artificial Sequence
  Description of Artificial Sequence: Synthetic oligonucleotide
ccgacuccccacugaccaa

SEQ ID NO: 1705722 - RNA, 19 nt, Artificial Sequence
  Description of Artificial Sequence: Synthetic oligonucleotide
cgaccccguccgcucgccg

SEQ ID NO: 1705723 - RNA, 19 nt, Artificial Sequence
  Description of Artificial Sequence: Synthetic oligonucleotide
cgccucuagcgccgccgcc

SEQ ID NO: 1705724 - RNA, 19 nt, Artificial Sequence
  Description of Artificial Sequence: Synthetic oligonucleotide
cccaaccgcugccuccgaa

SEQ ID NO: 1705725 - RNA, 19 nt, Artificial Sequence
  Description of Artificial Sequence: Synthetic oligonucleotide
ccacccugggagccaguua

SEQ ID NO: 1705726 - RNA, 19 nt, Artificial Sequence
  Description of Artificial Sequence: Synthetic oligonucleotide
gcgagcccaaccgcugccu

SEQ ID NO: 1705727 - RNA, 19 nt, Artificial Sequence
  Description of Artificial Sequence: Synthetic oligonucleotide
cucuagcgccgccgccgcu

SEQ ID NO: 1705728 - RNA, 19 nt, Artificial Sequence
  Description of Artificial Sequence: Synthetic oligonucleotide
ccaagggcccagccagagu

SEQ ID NO: 1705729 - RNA, 19 nt, Artificial Sequence
  Description of Artificial Sequence: Synthetic oligonucleotide
cgcacugacucgaccccgu

SEQ ID NO: 1705730 - RNA, 19 nt, Artificial Sequence
  Description of Artificial Sequence: Synthetic oligonucleotide
gccacccugggagccaguu

SEQ ID NO: 1705731 - RNA, 19 nt, Artificial Sequence
  Description of Artificial Sequence: Synthetic oligonucleotide
gccgccgccgccgccgccu

SEQ ID NO: 1705732 - RNA, 19 nt, Artificial Sequence
  Description of Artificial Sequence: Synthetic oligonucleotide
ccgccgccgccgccgccgc

SEQ ID NO: 1705733 - RNA, 19 nt, Artificial Sequence
  Description of Artificial Sequence: Synthetic oligonucleotide
ccgcucgccgcgagcccaa

SEQ ID NO: 1705734 - RNA, 19 nt, Artificial Sequence
  Description of Artificial Sequence: Synthetic oligonucleotide
ccgccgccgccgccgccuc

SEQ ID NO: 1705735 - RNA, 19 nt, Artificial Sequence
  Description of Artificial Sequence: Synthetic oligonucleotide
ccccguccgcucgccgcga

SEQ ID NO: 1705736 - RNA, 19 nt, Artificial Sequence
  Description of Artificial Sequence: Synthetic oligonucleotide
cgccgccgccgccgccgcc

SEQ ID NO: 1705737 - RNA, 19 nt, Artificial Sequence
  Description of Artificial Sequence: Synthetic oligonucleotide
aaauuaaugacagaaagcc

SEQ ID NO: 1705738 - RNA, 19 nt, Artificial Sequence
  Description of Artificial Sequence: Synthetic oligonucleotide
ucaauuauucccuagagug

SEQ ID NO: 1705739 - RNA, 19 nt, Artificial Sequence
  Description of Artificial Sequence: Synthetic oligonucleotide
cauacaaucaauuauuccc

SEQ ID NO: 1705740 - RNA, 19 nt, Artificial Sequence
  Description of Artificial Sequence: Synthetic oligonucleotide
aauuugaauguauugacca

SEQ ID NO: 1705741 - RNA, 19 nt, Artificial Sequence
  Description of Artificial Sequence: Synthetic oligonucleotide
acuaagucgaccuccaucc

SEQ ID NO: 1705742 - RNA, 19 nt, Artificial Sequence
  Description of Artificial Sequence: Synthetic oligonucleotide
ucuuaucugauuuuaaugc

SEQ ID NO: 1705743 - RNA, 19 nt, Artificial Sequence
  Description of Artificial Sequence: Synthetic oligonucleotide
aauuccucgguucuccucc

SEQ ID NO: 1705744 - RNA, 19 nt, Artificial Sequence
  Description of Artificial Sequence: Synthetic oligonucleotide
gauuuuaaugcauccacgg

SEQ ID NO: 1705745 - RNA, 19 nt, Artificial Sequence
  Description of Artificial Sequence: Synthetic oligonucleotide
auguauugaccauagacac

SEQ ID NO: 1705746 - RNA, 19 nt, Artificial Sequence
  Description of Artificial Sequence: Synthetic oligonucleotide
gaauguauugaccauagac

SEQ ID NO: 1705747 - RNA, 19 nt, Artificial Sequence
  Description of Artificial Sequence: Synthetic oligonucleotide
uuuauuuccuuaaugcagc

SEQ ID NO: 1705748 - RNA, 19 nt, Artificial Sequence
  Description of Artificial Sequence: Synthetic oligonucleotide
aaucaauuauucccuagag

SEQ ID NO: 1705749 - RNA, 19 nt, Artificial Sequence
  Description of Artificial Sequence: Synthetic oligonucleotide
ugugcaauauaaauuauuc

SEQ ID NO: 1705750 - RNA, 19 nt, Artificial Sequence
  Description of Artificial Sequence: Synthetic oligonucleotide
uacaacauggcgcacagug

SEQ ID NO: 1705751 - RNA, 19 nt, Artificial Sequence
  Description of Artificial Sequence: Synthetic oligonucleotide
uugauuaauugcuaguuug

SEQ ID NO: 1705752 - RNA, 19 nt, Artificial Sequence
  Description of Artificial Sequence: Synthetic oligonucleotide
uuauaaaucugaauaaaua

SEQ ID NO: 1705753 - RNA, 19 nt, Artificial Sequence
  Description of Artificial Sequence: Synthetic oligonucleotide
acauacaaucaauuauucc

SEQ ID NO: 1705754 - RNA, 19 nt, Artificial Sequence
  Description of Artificial Sequence: Synthetic oligonucleotide
auuuuaaugcauccacggc

SEQ ID NO: 1705755 - RNA, 19 nt, Artificial Sequence
  Description of Artificial Sequence: Synthetic oligonucleotide
ucuaacacguggcugauca

SEQ ID NO: 1705756 - RNA, 19 nt, Artificial Sequence
  Description of Artificial Sequence: Synthetic oligonucleotide
ugauuuuaaugcauccacg

SEQ ID NO: 1705757 - RNA, 19 nt, Artificial Sequence
  Description of Artificial Sequence: Synthetic oligonucleotide
ugagguagaaacucucugg

SEQ ID NO: 1705758 - RNA, 19 nt, Artificial Sequence
  Description of Artificial Sequence: Synthetic oligonucleotide
ucuauagcugcgaucgugg

SEQ ID NO: 1705759 - RNA, 19 nt, Artificial Sequence
  Description of Artificial Sequence: Synthetic oligonucleotide
cauacaccuaauuugaaug

SEQ ID NO: 1705760 - RNA, 19 nt, Artificial Sequence
  Description of Artificial Sequence: Synthetic oligonucleotide
aauacaacauggcgcacag

SEQ ID NO: 1705761 - RNA, 19 nt, Artificial Sequence
  Description of Artificial Sequence: Synthetic oligonucleotide
ucuuuuguggagauggucu

SEQ ID NO: 1705762 - RNA, 19 nt, Artificial Sequence
  Description of Artificial Sequence: Synthetic oligonucleotide
aguuuggccacucucauug

SEQ ID NO: 1705763 - RNA, 19 nt, Artificial Sequence
  Description of Artificial Sequence: Synthetic oligonucleotide
uugaauguauugaccauag

SEQ ID NO: 1705764 - RNA, 19 nt, Artificial Sequence
  Description of Artificial Sequence: Synthetic oligonucleotide
aaugcagcacaguagacau

SEQ ID NO: 1705765 - RNA, 19 nt, Artificial Sequence
  Description of Artificial Sequence: Synthetic oligonucleotide
aaaggggccgacuucacug

SEQ ID NO: 1705766 - RNA, 19 nt, Artificial Sequence
  Description of Artificial Sequence: Synthetic oligonucleotide
cuccuuaaaagcaagaaga

SEQ ID NO: 1705767 - RNA, 19 nt, Artificial Sequence
  Description of Artificial Sequence: Synthetic oligonucleotide
uguucuaacacguggcuga

SEQ ID NO: 1705768 - RNA, 19 nt, Artificial Sequence
  Description of Artificial Sequence: Synthetic oligonucleotide
gagguuagcaaugucauug

SEQ ID NO: 1705769 - RNA, 19 nt, Artificial Sequence
  Description of Artificial Sequence: Synthetic oligonucleotide
aaacauacaccuaauuuga

SEQ ID NO: 1705770 - RNA, 19 nt, Artificial Sequence
  Description of Artificial Sequence: Synthetic oligonucleotide
cugucuuuuguggagaugg

SEQ ID NO: 1705771 - RNA, 19 nt, Artificial Sequence
  Description of Artificial Sequence: Synthetic oligonucleotide
gacacugcuagcuuuauaa

SEQ ID NO: 1705772 - RNA, 19 nt, Artificial Sequence
  Description of Artificial Sequence: Synthetic oligonucleotide
uuaaugacagaaagccuga

SEQ ID NO: 1705773 - RNA, 19 nt, Artificial Sequence
  Description of Artificial Sequence: Synthetic oligonucleotide
cuuaaugcagcacaguaga

SEQ ID NO: 1705774 - RNA, 19 nt, Artificial Sequence
  Description of Artificial Sequence: Synthetic oligonucleotide
agcacuaggcuuugccucc

SEQ ID NO: 1705775 - RNA, 19 nt, Artificial Sequence
  Description of Artificial Sequence: Synthetic oligonucleotide
acuuuguuucaaccaggcc

SEQ ID NO: 1705776 - RNA, 19 nt, Artificial Sequence
  Description of Artificial Sequence: Synthetic oligonucleotide
accuaauuugaauguauug

SEQ ID NO: 1705777 - RNA, 19 nt, Artificial Sequence
  Description of Artificial Sequence: Synthetic oligonucleotide
cauaagcucuguuuauucc

SEQ ID NO: 1705778 - RNA, 19 nt, Artificial Sequence
  Description of Artificial Sequence: Synthetic oligonucleotide
uuggccaucaagaacccgu

SEQ ID NO: 1705779 - RNA, 19 nt, Artificial Sequence
  Description of Artificial Sequence: Synthetic oligonucleotide
cucucauugcaacaggccc

SEQ ID NO: 1705780 - RNA, 19 nt, Artificial Sequence
  Description of Artificial Sequence: Synthetic oligonucleotide
cuacacgaaugucacaugc

SEQ ID NO: 1705781 - RNA, 19 nt, Artificial Sequence
  Description of Artificial Sequence: Synthetic oligonucleotide
acaaucaauuauucccuag

SEQ ID NO: 1705782 - RNA, 19 nt, Artificial Sequence
  Description of Artificial Sequence: Synthetic oligonucleotide
uccugauuauaaugguccg

SEQ ID NO: 1705783 - RNA, 19 nt, Artificial Sequence
  Description of Artificial Sequence: Synthetic oligonucleotide
uauaaugguccgaacuuuc

SEQ ID NO: 1705784 - RNA, 19 nt, Artificial Sequence
  Description of Artificial Sequence: Synthetic oligonucleotide
aucaauuauucccuagagu

SEQ ID NO: 1705785 - RNA, 19 nt, Artificial Sequence
  Description of Artificial Sequence: Synthetic oligonucleotide
aaugauugccaacuuuguu

SEQ ID NO: 1705786 - RNA, 19 nt, Artificial Sequence
  Description of Artificial Sequence: Synthetic oligonucleotide
aauuaaugacagaaagccu

SEQ ID NO: 1705787 - RNA, 19 nt, Artificial Sequence
  Description of Artificial Sequence: Synthetic oligonucleotide
uucuucuauggcuaacccc

SEQ ID NO: 1705788 - RNA, 19 nt, Artificial Sequence
  Description of Artificial Sequence: Synthetic oligonucleotide
auacaccuaauuugaaugu

SEQ ID NO: 1705789 - RNA, 19 nt, Artificial Sequence
  Description of Artificial Sequence: Synthetic oligonucleotide
uaaugcagcacaguagaca

SEQ ID NO: 1705790 - RNA, 19 nt, Artificial Sequence
  Description of Artificial Sequence: Synthetic oligonucleotide
guagugagagcccacacuc

SEQ ID NO: 1705791 - RNA, 19 nt, Artificial Sequence
  Description of Artificial Sequence: Synthetic oligonucleotide
auuacugcucguaucuugg

SEQ ID NO: 1705792 - RNA, 19 nt, Artificial Sequence
  Description of Artificial Sequence: Synthetic oligonucleotide
uauagcugcgaucgugggc

SEQ ID NO: 1705793 - RNA, 19 nt, Artificial Sequence
  Description of Artificial Sequence: Synthetic oligonucleotide
ccaucuauagcugcgaucg

SEQ ID NO: 1705794 - RNA, 19 nt, Artificial Sequence
  Description of Artificial Sequence: Synthetic oligonucleotide
ucccuugauuaauugcuag

SEQ ID NO: 1705795 - RNA, 19 nt, Artificial Sequence
  Description of Artificial Sequence: Synthetic oligonucleotide
uaacacguggcugaucaag

SEQ ID NO: 1705796 - RNA, 19 nt, Artificial Sequence
  Description of Artificial Sequence: Synthetic oligonucleotide
uacugcucguaucuuggag

SEQ ID NO: 1705797 - RNA, 19 nt, Artificial Sequence
  Description of Artificial Sequence: Synthetic oligonucleotide
auagcugcgaucgugggca

SEQ ID NO: 1705798 - RNA, 19 nt, Artificial Sequence
  Description of Artificial Sequence: Synthetic oligonucleotide
uuaaggucagcaccagcac

SEQ ID NO: 1705799 - RNA, 19 nt, Artificial Sequence
  Description of Artificial Sequence: Synthetic oligonucleotide
uucccauaagcucuguuua

SEQ ID NO: 1705800 - RNA, 19 nt, Artificial Sequence
  Description of Artificial Sequence: Synthetic oligonucleotide
uuugaauguauugaccaua

SEQ ID NO: 1705801 - RNA, 19 nt, Artificial Sequence
  Description of Artificial Sequence: Synthetic oligonucleotide
aaggggccgacuucacugg

SEQ ID NO: 1705802 - RNA, 19 nt, Artificial Sequence
  Description of Artificial Sequence: Synthetic oligonucleotide
ugcggagaagaugaguucc

SEQ ID NO: 1705803 - RNA, 19 nt, Artificial Sequence
  Description of Artificial Sequence: Synthetic oligonucleotide
aaguccaucuauagcugcg

SEQ ID NO: 1705804 - RNA, 19 nt, Artificial Sequence
  Description of Artificial Sequence: Synthetic oligonucleotide
auacaaucaauuauucccu

SEQ ID NO: 1705805 - RNA, 19 nt, Artificial Sequence
  Description of Artificial Sequence: Synthetic oligonucleotide
acauacaccuaauuugaau

SEQ ID NO: 1705806 - RNA, 19 nt, Artificial Sequence
  Description of Artificial Sequence: Synthetic oligonucleotide
ugcuacacgaaugucacau

SEQ ID NO: 1705807 - RNA, 19 nt, Artificial Sequence
  Description of Artificial Sequence: Synthetic oligonucleotide
uuuguggagauggucugag

SEQ ID NO: 1705808 - RNA, 19 nt, Artificial Sequence
  Description of Artificial Sequence: Synthetic oligonucleotide
ugcgaucgugggcacaggg

SEQ ID NO: 1705809 - RNA, 19 nt, Artificial Sequence
  Description of Artificial Sequence: Synthetic oligonucleotide
uggaaugcauuuuggcucu

SEQ ID NO: 1705810 - RNA, 19 nt, Artificial Sequence
  Description of Artificial Sequence: Synthetic oligonucleotide
aaccccguuacuaagucga

SEQ ID NO: 1705811 - RNA, 19 nt, Artificial Sequence
  Description of Artificial Sequence: Synthetic oligonucleotide
acucucauugcaacaggcc

SEQ ID NO: 1705812 - RNA, 19 nt, Artificial Sequence
  Description of Artificial Sequence: Synthetic oligonucleotide
uaagucgaccuccaucccu

SEQ ID NO: 1705813 - RNA, 19 nt, Artificial Sequence
  Description of Artificial Sequence: Synthetic oligonucleotide
cuuccuguaggcagcgucc

SEQ ID NO: 1705814 - RNA, 19 nt, Artificial Sequence
  Description of Artificial Sequence: Synthetic oligonucleotide
uugaccauagacacugcua

SEQ ID NO: 1705815 - RNA, 19 nt, Artificial Sequence
  Description of Artificial Sequence: Synthetic oligonucleotide
uaaccccguuacuaagucg

SEQ ID NO: 1705816 - RNA, 19 nt, Artificial Sequence
  Description of Artificial Sequence: Synthetic oligonucleotide
ugacagaaagccugauaug

SEQ ID NO: 1705817 - RNA, 19 nt, Artificial Sequence
  Description of Artificial Sequence: Synthetic oligonucleotide
acgugguaaucucuguguc

SEQ ID NO: 1705818 - RNA, 19 nt, Artificial Sequence
  Description of Artificial Sequence: Synthetic oligonucleotide
uacacgaaugucacaugcu

SEQ ID NO: 1705819 - RNA, 19 nt, Artificial Sequence
  Description of Artificial Sequence: Synthetic oligonucleotide
uuuggccacucucauugca

SEQ ID NO: 1705820 - RNA, 19 nt, Artificial Sequence
  Description of Artificial Sequence: Synthetic oligonucleotide
uuaaugcagcacaguagac

SEQ ID NO: 1705821 - RNA, 19 nt, Artificial Sequence
  Description of Artificial Sequence: Synthetic oligonucleotide
caagcaccacaauuccucg

SEQ ID NO: 1705822 - RNA, 19 nt, Artificial Sequence
  Description of Artificial Sequence: Synthetic oligonucleotide
gacauacaaucaauuauuc

SEQ ID NO: 1705823 - RNA, 19 nt, Artificial Sequence
  Description of Artificial Sequence: Synthetic oligonucleotide
agacauacaaucaauuauu

SEQ ID NO: 1705824 - RNA, 19 nt, Artificial Sequence
  Description of Artificial Sequence: Synthetic oligonucleotide
acgaaugucacaugcuaaa

SEQ ID NO: 1705825 - RNA, 19 nt, Artificial Sequence
  Description of Artificial Sequence: Synthetic oligonucleotide
gacgcgacccguucgcagg

SEQ ID NO: 1705826 - RNA, 19 nt, Artificial Sequence
  Description of Artificial Sequence: Synthetic oligonucleotide
caaucaauuauucccuaga

SEQ ID NO: 1705827 - RNA, 19 nt, Artificial Sequence
  Description of Artificial Sequence: Synthetic oligonucleotide
acagaaagccugauaugcg

SEQ ID NO: 1705828 - RNA, 19 nt, Artificial Sequence
  Description of Artificial Sequence: Synthetic oligonucleotide
gcacaguagacauacaauc

SEQ ID NO: 1705829 - RNA, 19 nt, Artificial Sequence
  Description of Artificial Sequence: Synthetic oligonucleotide
aucaagaacccgugcggag

SEQ ID NO: 1705830 - RNA, 19 nt, Artificial Sequence
  Description of Artificial Sequence: Synthetic oligonucleotide
uuccagucugucuuuugug

SEQ ID NO: 1705831 - RNA, 19 nt, Artificial Sequence
  Description of Artificial Sequence: Synthetic oligonucleotide
uuuuggcucuuuccuuaag

SEQ ID NO: 1705832 - RNA, 19 nt, Artificial Sequence
  Description of Artificial Sequence: Synthetic oligonucleotide
ugcuaguuuggccacucuc

SEQ ID NO: 1705833 - RNA, 19 nt, Artificial Sequence
  Description of Artificial Sequence: Synthetic oligonucleotide
uaauugcuaguuuggccac

SEQ ID NO: 1705834 - RNA, 19 nt, Artificial Sequence
  Description of Artificial Sequence: Synthetic oligonucleotide
ugauuauaaugguccgaac

SEQ ID NO: 1705835 - RNA, 19 nt, Artificial Sequence
  Description of Artificial Sequence: Synthetic oligonucleotide
uccaggcguagugagagcc

SEQ ID NO: 1705836 - RNA, 19 nt, Artificial Sequence
  Description of Artificial Sequence: Synthetic oligonucleotide
ugaauguauugaccauaga

SEQ ID NO: 1705837 - RNA, 19 nt, Artificial Sequence
  Description of Artificial Sequence: Synthetic oligonucleotide
gaagcugcuacacgaaugu

SEQ ID NO: 1705838 - RNA, 19 nt, Artificial Sequence
  Description of Artificial Sequence: Synthetic oligonucleotide
ucaagaacccgugcggaga

SEQ ID NO: 1705839 - RNA, 19 nt, Artificial Sequence
  Description of Artificial Sequence: Synthetic oligonucleotide
cuauagcugcgaucguggg

SEQ ID NO: 1705840 - RNA, 19 nt, Artificial Sequence
  Description of Artificial Sequence: Synthetic oligonucleotide
cuauggcuaaccccguuac

SEQ ID NO: 1705841 - RNA, 19 nt, Artificial Sequence
  Description of Artificial Sequence: Synthetic oligonucleotide
gauggcacgugguaaucuc

SEQ ID NO: 1705842 - RNA, 19 nt, Artificial Sequence
  Description of Artificial Sequence: Synthetic oligonucleotide
cuauucuccuuuauagcga

SEQ ID NO: 1705843 - RNA, 19 nt, Artificial Sequence
  Description of Artificial Sequence: Synthetic oligonucleotide
auugcuaguuuggccacuc

SEQ ID NO: 1705844 - RNA, 19 nt, Artificial Sequence
  Description of Artificial Sequence: Synthetic oligonucleotide
uggcacgugguaaucucug

SEQ ID NO: 1705845 - RNA, 19 nt, Artificial Sequence
  Description of Artificial Sequence: Synthetic oligonucleotide
gaaagccugauaugcggga

SEQ ID NO: 1705846 - RNA, 19 nt, Artificial Sequence
  Description of Artificial Sequence: Synthetic oligonucleotide
agggagguuagcaauguca

SEQ ID NO: 1705847 - RNA, 19 nt, Artificial Sequence
  Description of Artificial Sequence: Synthetic oligonucleotide
gaauaucccagggacuuca

SEQ ID NO: 1705848 - RNA, 19 nt, Artificial Sequence
  Description of Artificial Sequence: Synthetic oligonucleotide
cugcucguaucuuggagac

SEQ ID NO: 1705849 - RNA, 19 nt, Artificial Sequence
  Description of Artificial Sequence: Synthetic oligonucleotide
uuccccgugccagacacag

SEQ ID NO: 1705850 - RNA, 19 nt, Artificial Sequence
  Description of Artificial Sequence: Synthetic oligonucleotide
gaccauagacacugcuagc

SEQ ID NO: 1705851 - RNA, 19 nt, Artificial Sequence
  Description of Artificial Sequence: Synthetic oligonucleotide
gacaaaggggccgacuuca

SEQ ID NO: 1705852 - RNA, 19 nt, Artificial Sequence
  Description of Artificial Sequence: Synthetic oligonucleotide
ucauugauuacugcucgua

SEQ ID NO: 1705853 - RNA, 19 nt, Artificial Sequence
  Description of Artificial Sequence: Synthetic oligonucleotide
ccuuaaugcagcacaguag

SEQ ID NO: 1705854 - RNA, 19 nt, Artificial Sequence
  Description of Artificial Sequence: Synthetic oligonucleotide
uccaucuauagcugcgauc

SEQ ID NO: 1705855 - RNA, 19 nt, Artificial Sequence
  Description of Artificial Sequence: Synthetic oligonucleotide
guaccgcacgcgcagcucg

SEQ ID NO: 1705856 - RNA, 19 nt, Artificial Sequence
  Description of Artificial Sequence: Synthetic oligonucleotide
agguuagcaaugucauuga

SEQ ID NO: 1705857 - RNA, 19 nt, Artificial Sequence
  Description of Artificial Sequence: Synthetic oligonucleotide
cuaaccccguuacuaaguc

SEQ ID NO: 1705858 - RNA, 19 nt, Artificial Sequence
  Description of Artificial Sequence: Synthetic oligonucleotide
uucgcagggcgcccaaagc

SEQ ID NO: 1705859 - RNA, 19 nt, Artificial Sequence
  Description of Artificial Sequence: Synthetic oligonucleotide
uauggcuaaccccguuacu

SEQ ID NO: 1705860 - RNA, 19 nt, Artificial Sequence
  Description of Artificial Sequence: Synthetic oligonucleotide
cacagggagguuagcaaug

SEQ ID NO: 1705861 - RNA, 19 nt, Artificial Sequence
  Description of Artificial Sequence: Synthetic oligonucleotide
agcugcuacacgaauguca

SEQ ID NO: 1705862 - RNA, 19 nt, Artificial Sequence
  Description of Artificial Sequence: Synthetic oligonucleotide
aagccugauaugcgggaaa

SEQ ID NO: 1705863 - RNA, 19 nt, Artificial Sequence
  Description of Artificial Sequence: Synthetic oligonucleotide
ucgaccuccaucccuugau

SEQ ID NO: 1705864 - RNA, 19 nt, Artificial Sequence
  Description of Artificial Sequence: Synthetic oligonucleotide
cugauuauaaugguccgaa

SEQ ID NO: 1705865 - RNA, 19 nt, Artificial Sequence
  Description of Artificial Sequence: Synthetic oligonucleotide
agggacuucacuccugauu

SEQ ID NO: 1705866 - RNA, 19 nt, Artificial Sequence
  Description of Artificial Sequence: Synthetic oligonucleotide
aucaagcccacagcuuugg

SEQ ID NO: 1705867 - RNA, 19 nt, Artificial Sequence
  Description of Artificial Sequence: Synthetic oligonucleotide
auucccuagagugugcaau

SEQ ID NO: 1705868 - RNA, 19 nt, Artificial Sequence
  Description of Artificial Sequence: Synthetic oligonucleotide
gaucgugggcacagggagg

SEQ ID NO: 1705869 - RNA, 19 nt, Artificial Sequence
  Description of Artificial Sequence: Synthetic oligonucleotide
uacaccuaauuugaaugua

SEQ ID NO: 1705870 - RNA, 19 nt, Artificial Sequence
  Description of Artificial Sequence: Synthetic oligonucleotide
acaucccgauggcacgugg

SEQ ID NO: 1705871 - RNA, 19 nt, Artificial Sequence
  Description of Artificial Sequence: Synthetic oligonucleotide
uagugagagcccacacucu

SEQ ID NO: 1705872 - RNA, 19 nt, Artificial Sequence
  Description of Artificial Sequence: Synthetic oligonucleotide
aaagccugauaugcgggaa

SEQ ID NO: 1705873 - RNA, 19 nt, Artificial Sequence
  Description of Artificial Sequence: Synthetic oligonucleotide
aagcugcuacacgaauguc

SEQ ID NO: 1705874 - RNA, 19 nt, Artificial Sequence
  Description of Artificial Sequence: Synthetic oligonucleotide
guucgcagggcgcccaaag

SEQ ID NO: 1705875 - RNA, 19 nt, Artificial Sequence
  Description of Artificial Sequence: Synthetic oligonucleotide
aacccgugcggagaagaug

SEQ ID NO: 1705876 - RNA, 19 nt, Artificial Sequence
  Description of Artificial Sequence: Synthetic oligonucleotide
agaauaucccagggacuuc

SEQ ID NO: 1705877 - RNA, 19 nt, Artificial Sequence
  Description of Artificial Sequence: Synthetic oligonucleotide
aauugcuaguuuggccacu

SEQ ID NO: 1705878 - RNA, 19 nt, Artificial Sequence
  Description of Artificial Sequence: Synthetic oligonucleotide
ccaucaagaacccgugcgg

SEQ ID NO: 1705879 - RNA, 19 nt, Artificial Sequence
  Description of Artificial Sequence: Synthetic oligonucleotide
caccacaauuccucgguuc

SEQ ID NO: 1705880 - RNA, 19 nt, Artificial Sequence
  Description of Artificial Sequence: Synthetic oligonucleotide
aaagcgcccggaaccgccg

SEQ ID NO: 1705881 - RNA, 19 nt, Artificial Sequence
  Description of Artificial Sequence: Synthetic oligonucleotide
ccuagagugugcaauauaa

SEQ ID NO: 1705882 - RNA, 19 nt, Artificial Sequence
  Description of Artificial Sequence: Synthetic oligonucleotide
gggacuucacuccugauua

SEQ ID NO: 1705883 - RNA, 19 nt, Artificial Sequence
  Description of Artificial Sequence: Synthetic oligonucleotide
auaaugguccgaacuuucu

SEQ ID NO: 1705884 - RNA, 19 nt, Artificial Sequence
  Description of Artificial Sequence: Synthetic oligonucleotide
agcacaguagacauacaau

SEQ ID NO: 1705885 - RNA, 19 nt, Artificial Sequence
  Description of Artificial Sequence: Synthetic oligonucleotide
aacauacaccuaauuugaa

SEQ ID NO: 1705886 - RNA, 19 nt, Artificial Sequence
  Description of Artificial Sequence: Synthetic oligonucleotide
ugcauccacggcuuuugaa

SEQ ID NO: 1705887 - RNA, 19 nt, Artificial Sequence
  Description of Artificial Sequence: Synthetic oligonucleotide
acacugcuagcuuuauaaa

SEQ ID NO: 1705888 - RNA, 19 nt, Artificial Sequence
  Description of Artificial Sequence: Synthetic oligonucleotide
cuaagucgaccuccauccc

SEQ ID NO: 1705889 - RNA, 19 nt, Artificial Sequence
  Description of Artificial Sequence: Synthetic oligonucleotide
ucccauaagcucuguuuau

SEQ ID NO: 1705890 - RNA, 19 nt, Artificial Sequence
  Description of Artificial Sequence: Synthetic oligonucleotide
accuccuaaggcaagucca

SEQ ID NO: 1705891 - RNA, 19 nt, Artificial Sequence
  Description of Artificial Sequence: Synthetic oligonucleotide
uuguggagauggucugagc

SEQ ID NO: 1705892 - RNA, 19 nt, Artificial Sequence
  Description of Artificial Sequence: Synthetic oligonucleotide
cuagagugugcaauauaaa

SEQ ID NO: 1705893 - RNA, 19 nt, Artificial Sequence
  Description of Artificial Sequence: Synthetic oligonucleotide
acccgugcggagaagauga

SEQ ID NO: 1705894 - RNA, 19 nt, Artificial Sequence
  Description of Artificial Sequence: Synthetic oligonucleotide
gcucuguuuauuccaagca

SEQ ID NO: 1705895 - RNA, 19 nt, Artificial Sequence
  Description of Artificial Sequence: Synthetic oligonucleotide
gaucaagcccacagcuuug

SEQ ID NO: 1705896 - RNA, 19 nt, Artificial Sequence
  Description of Artificial Sequence: Synthetic oligonucleotide
acaccuaauuugaauguau

SEQ ID NO: 1705897 - RNA, 19 nt, Artificial Sequence
  Description of Artificial Sequence: Synthetic oligonucleotide
gggacaucccgauggcacg

SEQ ID NO: 1705898 - RNA, 19 nt, Artificial Sequence
  Description of Artificial Sequence: Synthetic oligonucleotide
caauuauucccuagagugu

SEQ ID NO: 1705899 - RNA, 19 nt, Artificial Sequence
  Description of Artificial Sequence: Synthetic oligonucleotide
caccucagagcuguagccc

SEQ ID NO: 1705900 - RNA, 19 nt, Artificial Sequence
  Description of Artificial Sequence: Synthetic oligonucleotide
aggaagcugcuacacgaau

SEQ ID NO: 1705901 - RNA, 19 nt, Artificial Sequence
  Description of Artificial Sequence: Synthetic oligonucleotide
acuucacuccugauuauaa

SEQ ID NO: 1705902 - RNA, 19 nt, Artificial Sequence
  Description of Artificial Sequence: Synthetic oligonucleotide
ggaagcugcuacacgaaug

SEQ ID NO: 1705903 - RNA, 19 nt, Artificial Sequence
  Description of Artificial Sequence: Synthetic oligonucleotide
gccgacuucacuggaaugc

SEQ ID NO: 1705904 - RNA, 19 nt, Artificial Sequence
  Description of Artificial Sequence: Synthetic oligonucleotide
uuacuaagucgaccuccau

SEQ ID NO: 1705905 - RNA, 19 nt, Artificial Sequence
  Description of Artificial Sequence: Synthetic oligonucleotide
ucccagggacuucacuccu

SEQ ID NO: 1705906 - RNA, 19 nt, Artificial Sequence
  Description of Artificial Sequence: Synthetic oligonucleotide
ccauaagcucuguuuauuc

SEQ ID NO: 1705907 - RNA, 19 nt, Artificial Sequence
  Description of Artificial Sequence: Synthetic oligonucleotide
uuccuguaggcagcguccc

SEQ ID NO: 1705908 - RNA, 19 nt, Artificial Sequence
  Description of Artificial Sequence: Synthetic oligonucleotide
cacgaaugucacaugcuaa

SEQ ID NO: 1705909 - RNA, 19 nt, Artificial Sequence
  Description of Artificial Sequence: Synthetic oligonucleotide
cauccacggcuuuugaaaa

SEQ ID NO: 1705910 - RNA, 19 nt, Artificial Sequence
  Description of Artificial Sequence: Synthetic oligonucleotide
aacauggcgcacaguggcu

SEQ ID NO: 1705911 - RNA, 19 nt, Artificial Sequence
  Description of Artificial Sequence: Synthetic oligonucleotide
gcauccacggcuuuugaaa

SEQ ID NO: 1705912 - RNA, 19 nt, Artificial Sequence
  Description of Artificial Sequence: Synthetic oligonucleotide
gccacucucauugcaacag

SEQ ID NO: 1705913 - RNA, 19 nt, Artificial Sequence
  Description of Artificial Sequence: Synthetic oligonucleotide
cuguagccccuccucgggg

SEQ ID NO: 1705914 - RNA, 19 nt, Artificial Sequence
  Description of Artificial Sequence: Synthetic oligonucleotide
cugcuagcuuuauaaaucu

SEQ ID NO: 1705915 - RNA, 19 nt, Artificial Sequence
  Description of Artificial Sequence: Synthetic oligonucleotide
gcuccaggcguagugagag

SEQ ID NO: 1705916 - RNA, 19 nt, Artificial Sequence
  Description of Artificial Sequence: Synthetic oligonucleotide
acuaggcuuugccuccuau

SEQ ID NO: 1705917 - RNA, 19 nt, Artificial Sequence
  Description of Artificial Sequence: Synthetic oligonucleotide
uugcuaguuuggccacucu

SEQ ID NO: 1705918 - RNA, 19 nt, Artificial Sequence
  Description of Artificial Sequence: Synthetic oligonucleotide
uaaugacagaaagccugau

SEQ ID NO: 1705919 - RNA, 19 nt, Artificial Sequence
  Description of Artificial Sequence: Synthetic oligonucleotide
acgcgacccguucgcaggg

SEQ ID NO: 1705920 - RNA, 19 nt, Artificial Sequence
  Description of Artificial Sequence: Synthetic oligonucleotide
cauggcgcacaguggcuug

SEQ ID NO: 1705921 - RNA, 19 nt, Artificial Sequence
  Description of Artificial Sequence: Synthetic oligonucleotide
gagauuccccgugccagac

SEQ ID NO: 1705922 - RNA, 19 nt, Artificial Sequence
  Description of Artificial Sequence: Synthetic oligonucleotide
ugguaaucucugugucccu

SEQ ID NO: 1705923 - RNA, 19 nt, Artificial Sequence
  Description of Artificial Sequence: Synthetic oligonucleotide
cacaugcuaaagccagcuc

SEQ ID NO: 1705924 - RNA, 19 nt, Artificial Sequence
  Description of Artificial Sequence: Synthetic oligonucleotide
cuugauuaauugcuaguuu

SEQ ID NO: 1705925 - RNA, 19 nt, Artificial Sequence
  Description of Artificial Sequence: Synthetic oligonucleotide
gugcggagaagaugaguuc

SEQ ID NO: 1705926 - RNA, 19 nt, Artificial Sequence
  Description of Artificial Sequence: Synthetic oligonucleotide
caucaagaacccgugcgga

SEQ ID NO: 1705927 - RNA, 19 nt, Artificial Sequence
  Description of Artificial Sequence: Synthetic oligonucleotide
gacccguucgcagggcgcc

SEQ ID NO: 1705928 - RNA, 19 nt, Artificial Sequence
  Description of Artificial Sequence: Synthetic oligonucleotide
gcgcacaguggcuugagca

SEQ ID NO: 1705929 - RNA, 19 nt, Artificial Sequence
  Description of Artificial Sequence: Synthetic oligonucleotide
cgugguaaucucugugucc

SEQ ID NO: 1705930 - RNA, 19 nt, Artificial Sequence
  Description of Artificial Sequence: Synthetic oligonucleotide
auuccucgguucuccuccu

SEQ ID NO: 1705931 - RNA, 19 nt, Artificial Sequence
  Description of Artificial Sequence: Synthetic oligonucleotide
ugauuacugcucguaucuu

SEQ ID NO: 1705932 - RNA, 19 nt, Artificial Sequence
  Description of Artificial Sequence: Synthetic oligonucleotide
cgaucgugggcacagggag

SEQ ID NO: 1705933 - RNA, 19 nt, Artificial Sequence
  Description of Artificial Sequence: Synthetic oligonucleotide
aggcggacgcgacccguuc

SEQ ID NO: 1705934 - RNA, 19 nt, Artificial Sequence
  Description of Artificial Sequence: Synthetic oligonucleotide
aucccgauggcacguggua

SEQ ID NO: 1705935 - RNA, 19 nt, Artificial Sequence
  Description of Artificial Sequence: Synthetic oligonucleotide
agguaccgcacgcgcagcu

SEQ ID NO: 1705936 - RNA, 19 nt, Artificial Sequence
  Description of Artificial Sequence: Synthetic oligonucleotide
agcacgcggccaccaggcg

SEQ ID NO: 1705937 - RNA, 19 nt, Artificial Sequence
  Description of Artificial Sequence: Synthetic oligonucleotide
cauagacacugcuagcuuu

SEQ ID NO: 1705938 - RNA, 19 nt, Artificial Sequence
  Description of Artificial Sequence: Synthetic oligonucleotide
ucccgauggcacgugguaa

SEQ ID NO: 1705939 - RNA, 19 nt, Artificial Sequence
  Description of Artificial Sequence: Synthetic oligonucleotide
gcuacacgaaugucacaug

SEQ ID NO: 1705940 - RNA, 19 nt, Artificial Sequence
  Description of Artificial Sequence: Synthetic oligonucleotide
cauugauuacugcucguau

SEQ ID NO: 1705941 - RNA, 19 nt, Artificial Sequence
  Description of Artificial Sequence: Synthetic oligonucleotide
ucccuagagugugcaauau

SEQ ID NO: 1705942 - RNA, 19 nt, Artificial Sequence
  Description of Artificial Sequence: Synthetic oligonucleotide
gcugcgaucgugggcacag

SEQ ID NO: 1705943 - RNA, 19 nt, Artificial Sequence
  Description of Artificial Sequence: Synthetic oligonucleotide
gcacgcggccaccaggcgg

SEQ ID NO: 1705944 - RNA, 19 nt, Artificial Sequence
  Description of Artificial Sequence: Synthetic oligonucleotide
gcggccaccaggcggacgc

SEQ ID NO: 1705945 - RNA, 19 nt, Artificial Sequence
  Description of Artificial Sequence: Synthetic oligonucleotide
ggcacagggagguuagcaa

SEQ ID NO: 1705946 - RNA, 19 nt, Artificial Sequence
  Description of Artificial Sequence: Synthetic oligonucleotide
accaggcggacgcgacccg

SEQ ID NO: 1705947 - RNA, 19 nt, Artificial Sequence
  Description of Artificial Sequence: Synthetic oligonucleotide
cuccaggcguagugagagc

SEQ ID NO: 1705948 - RNA, 19 nt, Artificial Sequence
  Description of Artificial Sequence: Synthetic oligonucleotide
agggcgcccaaagcgcccg

SEQ ID NO: 1705949 - RNA, 19 nt, Artificial Sequence
  Description of Artificial Sequence: Synthetic oligonucleotide
ugcucguaucuuggagaca

SEQ ID NO: 1705950 - RNA, 19 nt, Artificial Sequence
  Description of Artificial Sequence: Synthetic oligonucleotide
accccguuacuaagucgac

SEQ ID NO: 1705951 - RNA, 19 nt, Artificial Sequence
  Description of Artificial Sequence: Synthetic oligonucleotide
gacaucccgauggcacgug

SEQ ID NO: 1705952 - RNA, 19 nt, Artificial Sequence
  Description of Artificial Sequence: Synthetic oligonucleotide
cagaauaucccagggacuu

SEQ ID NO: 1705953 - RNA, 19 nt, Artificial Sequence
  Description of Artificial Sequence: Synthetic oligonucleotide
ggacgcgacccguucgcag

SEQ ID NO: 1705954 - RNA, 19 nt, Artificial Sequence
  Description of Artificial Sequence: Synthetic oligonucleotide
uguuucaaccaggcccauu

SEQ ID NO: 1705955 - RNA, 19 nt, Artificial Sequence
  Description of Artificial Sequence: Synthetic oligonucleotide
uaccgcacgcgcagcucgu

SEQ ID NO: 1705956 - RNA, 19 nt, Artificial Sequence
  Description of Artificial Sequence: Synthetic oligonucleotide
aucccuugauuaauugcua

SEQ ID NO: 1705957 - RNA, 19 nt, Artificial Sequence
  Description of Artificial Sequence: Synthetic oligonucleotide
ggcggacgcgacccguucg

SEQ ID NO: 1705958 - RNA, 19 nt, Artificial Sequence
  Description of Artificial Sequence: Synthetic oligonucleotide
acauggcgcacaguggcuu

SEQ ID NO: 1705959 - RNA, 19 nt, Artificial Sequence
  Description of Artificial Sequence: Synthetic oligonucleotide
cagggcgcccaaagcgccc

SEQ ID NO: 1705960 - RNA, 19 nt, Artificial Sequence
  Description of Artificial Sequence: Synthetic oligonucleotide
caccuaauuugaauguauu

SEQ ID NO: 1705961 - RNA, 19 nt, Artificial Sequence
  Description of Artificial Sequence: Synthetic oligonucleotide
cugauaugcgggaaauauu

SEQ ID NO: 1705962 - RNA, 19 nt, Artificial Sequence
  Description of Artificial Sequence: Synthetic oligonucleotide
aggggccgacuucacugga

SEQ ID NO: 1705963 - RNA, 19 nt, Artificial Sequence
  Description of Artificial Sequence: Synthetic oligonucleotide
cccguuacuaagucgaccu

SEQ ID NO: 1705964 - RNA, 19 nt, Artificial Sequence
  Description of Artificial Sequence: Synthetic oligonucleotide
aggcguagugagagcccac

SEQ ID NO: 1705965 - RNA, 19 nt, Artificial Sequence
  Description of Artificial Sequence: Synthetic oligonucleotide
gucgaccuccaucccuuga

SEQ ID NO: 1705966 - RNA, 19 nt, Artificial Sequence
  Description of Artificial Sequence: Synthetic oligonucleotide
ggccgacuucacuggaaug

SEQ ID NO: 1705967 - RNA, 19 nt, Artificial Sequence
  Description of Artificial Sequence: Synthetic oligonucleotide
caggcguagugagagccca

SEQ ID NO: 1705968 - RNA, 19 nt, Artificial Sequence
  Description of Artificial Sequence: Synthetic oligonucleotide
gcgacccguucgcagggcg

SEQ ID NO: 1705969 - RNA, 19 nt, Artificial Sequence
  Description of Artificial Sequence: Synthetic oligonucleotide
ccaggcguagugagagccc

SEQ ID NO: 1705970 - RNA, 19 nt, Artificial Sequence
  Description of Artificial Sequence: Synthetic oligonucleotide
acccguucgcagggcgccc

SEQ ID NO: 1705971 - RNA, 19 nt, Artificial Sequence
  Description of Artificial Sequence: Synthetic oligonucleotide
cuaacacguggcugaucaa

SEQ ID NO: 1705972 - RNA, 19 nt, Artificial Sequence
  Description of Artificial Sequence: Synthetic oligonucleotide
uccccgugccagacacaga

SEQ ID NO: 1705973 - RNA, 19 nt, Artificial Sequence
  Description of Artificial Sequence: Synthetic oligonucleotide
gcguagugagagcccacac

SEQ ID NO: 1705974 - RNA, 19 nt, Artificial Sequence
  Description of Artificial Sequence: Synthetic oligonucleotide
ucauugcaacaggccccug

SEQ ID NO: 1705975 - RNA, 19 nt, Artificial Sequence
  Description of Artificial Sequence: Synthetic oligonucleotide
cugcuacacgaaugucaca

SEQ ID NO: 1705976 - RNA, 19 nt, Artificial Sequence
  Description of Artificial Sequence: Synthetic oligonucleotide
ccugauaugcgggaaauau

SEQ ID NO: 1705977 - RNA, 19 nt, Artificial Sequence
  Description of Artificial Sequence: Synthetic oligonucleotide
auggcgcacaguggcuuga

SEQ ID NO: 1705978 - RNA, 19 nt, Artificial Sequence
  Description of Artificial Sequence: Synthetic oligonucleotide
cuaggcuuugccuccuauu

SEQ ID NO: 1705979 - RNA, 19 nt, Artificial Sequence
  Description of Artificial Sequence: Synthetic oligonucleotide
gcggacgcgacccguucgc

SEQ ID NO: 1705980 - RNA, 19 nt, Artificial Sequence
  Description of Artificial Sequence: Synthetic oligonucleotide
gcuccagaccaccuccuaa

SEQ ID NO: 1705981 - RNA, 19 nt, Artificial Sequence
  Description of Artificial Sequence: Synthetic oligonucleotide
gggagguuagcaaugucau

SEQ ID NO: 1705982 - RNA, 19 nt, Artificial Sequence
  Description of Artificial Sequence: Synthetic oligonucleotide
cagguaccgcacgcgcagc

SEQ ID NO: 1705983 - RNA, 19 nt, Artificial Sequence
  Description of Artificial Sequence: Synthetic oligonucleotide
uuguuucaaccaggcccau

SEQ ID NO: 1705984 - RNA, 19 nt, Artificial Sequence
  Description of Artificial Sequence: Synthetic oligonucleotide
caaaggggccgacuucacu

SEQ ID NO: 1705985 - RNA, 19 nt, Artificial Sequence
  Description of Artificial Sequence: Synthetic oligonucleotide
ggcguagugagagcccaca

SEQ ID NO: 1705986 - RNA, 19 nt, Artificial Sequence
  Description of Artificial Sequence: Synthetic oligonucleotide
ccccguuacuaagucgacc

SEQ ID NO: 1705987 - RNA, 19 nt, Artificial Sequence
  Description of Artificial Sequence: Synthetic oligonucleotide
accgcacgcgcagcucguc

SEQ ID NO: 1705988 - RNA, 19 nt, Artificial Sequence
  Description of Artificial Sequence: Synthetic oligonucleotide
guccaucuauagcugcgau

SEQ ID NO: 1705989 - RNA, 19 nt, Artificial Sequence
  Description of Artificial Sequence: Synthetic oligonucleotide
cugcgaucgugggcacagg

SEQ ID NO: 1705990 - RNA, 19 nt, Artificial Sequence
  Description of Artificial Sequence: Synthetic oligonucleotide
gguuagcaaugucauugau

SEQ ID NO: 1705991 - RNA, 19 nt, Artificial Sequence
  Description of Artificial Sequence: Synthetic oligonucleotide
caucccgauggcacguggu

SEQ ID NO: 1705992 - RNA, 19 nt, Artificial Sequence
  Description of Artificial Sequence: Synthetic oligonucleotide
cacggcuuuugaaaacauu

SEQ ID NO: 1705993 - RNA, 19 nt, Artificial Sequence
  Description of Artificial Sequence: Synthetic oligonucleotide
cacugggccgagccgcgca

SEQ ID NO: 1705994 - RNA, 19 nt, Artificial Sequence
  Description of Artificial Sequence: Synthetic oligonucleotide
ccguuacuaagucgaccuc

SEQ ID NO: 1705995 - RNA, 19 nt, Artificial Sequence
  Description of Artificial Sequence: Synthetic oligonucleotide
agcugcgaucgugggcaca

SEQ ID NO: 1705996 - RNA, 19 nt, Artificial Sequence
  Description of Artificial Sequence: Synthetic oligonucleotide
cccagggacuucacuccug

SEQ ID NO: 1705997 - RNA, 19 nt, Artificial Sequence
  Description of Artificial Sequence: Synthetic oligonucleotide
gcgaucgugggcacaggga

SEQ ID NO: 1705998 - RNA, 19 nt, Artificial Sequence
  Description of Artificial Sequence: Synthetic oligonucleotide
cgugcggagaagaugaguu

SEQ ID NO: 1705999 - RNA, 19 nt, Artificial Sequence
  Description of Artificial Sequence: Synthetic oligonucleotide
auuccccgugccagacaca

SEQ ID NO: 1706000 - RNA, 19 nt, Artificial Sequence
  Description of Artificial Sequence: Synthetic oligonucleotide
guucuaacacguggcugau

SEQ ID NO: 1706001 - RNA, 19 nt, Artificial Sequence
  Description of Artificial Sequence: Synthetic oligonucleotide
caucuauagcugcgaucgu

SEQ ID NO: 1706002 - RNA, 19 nt, Artificial Sequence
  Description of Artificial Sequence: Synthetic oligonucleotide
gguaccgcacgcgcagcuc

SEQ ID NO: 1706003 - RNA, 19 nt, Artificial Sequence
  Description of Artificial Sequence: Synthetic oligonucleotide
ggagguuagcaaugucauu

SEQ ID NO: 1706004 - RNA, 19 nt, Artificial Sequence
  Description of Artificial Sequence: Synthetic oligonucleotide
ccgcacgcgcagcucgucc

SEQ ID NO: 1706005 - RNA, 19 nt, Artificial Sequence
  Description of Artificial Sequence: Synthetic oligonucleotide
gcagcguccccuucuuggu

SEQ ID NO: 1706006 - RNA, 19 nt, Artificial Sequence
  Description of Artificial Sequence: Synthetic oligonucleotide
ccacaauuccucgguucuc

SEQ ID NO: 1706007 - RNA, 19 nt, Artificial Sequence
  Description of Artificial Sequence: Synthetic oligonucleotide
ccgaacuuucuuaucugau

SEQ ID NO: 1706008 - RNA, 19 nt, Artificial Sequence
  Description of Artificial Sequence: Synthetic oligonucleotide
cgacccguucgcagggcgc

SEQ ID NO: 1706009 - RNA, 19 nt, Artificial Sequence
  Description of Artificial Sequence: Synthetic oligonucleotide
cccgugcggagaagaugag

SEQ ID NO: 1706010 - RNA, 19 nt, Artificial Sequence
  Description of Artificial Sequence: Synthetic oligonucleotide
cacuuuggucacugagauu

SEQ ID NO: 1706011 - RNA, 19 nt, Artificial Sequence
  Description of Artificial Sequence: Synthetic oligonucleotide
cccuagagugugcaauaua

SEQ ID NO: 1706012 - RNA, 19 nt, Artificial Sequence
  Description of Artificial Sequence: Synthetic oligonucleotide
ggacuucacuccugauuau

SEQ ID NO: 1706013 - RNA, 19 nt, Artificial Sequence
  Description of Artificial Sequence: Synthetic oligonucleotide
ggacaucccgauggcacgu

SEQ ID NO: 1706014 - RNA, 19 nt, Artificial Sequence
  Description of Artificial Sequence: Synthetic oligonucleotide
ggggccgacuucacuggaa

SEQ ID NO: 1706015 - RNA, 19 nt, Artificial Sequence
  Description of Artificial Sequence: Synthetic oligonucleotide
gccugauaugcgggaaaua

SEQ ID NO: 1706016 - RNA, 19 nt, Artificial Sequence
  Description of Artificial Sequence: Synthetic oligonucleotide
ggccccugagguagaaacu

SEQ ID NO: 1706017 - RNA, 19 nt, Artificial Sequence
  Description of Artificial Sequence: Synthetic oligonucleotide
gcgcccaaagcgcccggaa

SEQ ID NO: 1706018 - RNA, 19 nt, Artificial Sequence
  Description of Artificial Sequence: Synthetic oligonucleotide
cugggccgagccgcgcaca

SEQ ID NO: 1706019 - RNA, 19 nt, Artificial Sequence
  Description of Artificial Sequence: Synthetic oligonucleotide
cccgauggcacgugguaau

SEQ ID NO: 1706020 - RNA, 19 nt, Artificial Sequence
  Description of Artificial Sequence: Synthetic oligonucleotide
gcaccacaauuccucgguu

SEQ ID NO: 1706021 - RNA, 19 nt, Artificial Sequence
  Description of Artificial Sequence: Synthetic oligonucleotide
cccauaagcucuguuuauu

SEQ ID NO: 1706022 - RNA, 19 nt, Artificial Sequence
  Description of Artificial Sequence: Synthetic oligonucleotide
ggcgcccaaagcgcccgga

SEQ ID NO: 1706023 - RNA, 19 nt, Artificial Sequence
  Description of Artificial Sequence: Synthetic oligonucleotide
ccacggcuuuugaaaacau

SEQ ID NO: 1706024 - RNA, 19 nt, Artificial Sequence
  Description of Artificial Sequence: Synthetic oligonucleotide
gcguccccuucuugguucu

SEQ ID NO: 1706025 - RNA, 19 nt, Artificial Sequence
  Description of Artificial Sequence: Synthetic oligonucleotide
caggcggacgcgacccguu

SEQ ID NO: 1706026 - RNA, 19 nt, Artificial Sequence
  Description of Artificial Sequence: Synthetic oligonucleotide
cgauggcacgugguaaucu

SEQ ID NO: 1706027 - RNA, 19 nt, Artificial Sequence
  Description of Artificial Sequence: Synthetic oligonucleotide
ccgugcggagaagaugagu

SEQ ID NO: 1706028 - RNA, 19 nt, Artificial Sequence
  Description of Artificial Sequence: Synthetic oligonucleotide
cgacuucacuggaaugcau

SEQ ID NO: 1706029 - RNA, 19 nt, Artificial Sequence
  Description of Artificial Sequence: Synthetic oligonucleotide
cccguucgcagggcgccca

SEQ ID NO: 1706030 - RNA, 19 nt, Artificial Sequence
  Description of Artificial Sequence: Synthetic oligonucleotide
ccccuccucggggcgggac

SEQ ID NO: 1706031 - RNA, 19 nt, Artificial Sequence
  Description of Artificial Sequence: Synthetic oligonucleotide
ccguucgcagggcgcccaa

SEQ ID NO: 1706032 - RNA, 19 nt, Artificial Sequence
  Description of Artificial Sequence: Synthetic oligonucleotide
ccaggcggacgcgacccgu

SEQ ID NO: 1706033 - RNA, 19 nt, Artificial Sequence
  Description of Artificial Sequence: Synthetic oligonucleotide
cggacgcgacccguucgca

SEQ ID NO: 1706034 - RNA, 19 nt, Artificial Sequence
  Description of Artificial Sequence: Synthetic oligonucleotide
cguucgcagggcgcccaaa

SEQ ID NO: 1706035 - RNA, 19 nt, Artificial Sequence
  Description of Artificial Sequence: Synthetic oligonucleotide
aacagagaauccuaaaugc

SEQ ID NO: 1706036 - RNA, 19 nt, Artificial Sequence
  Description of Artificial Sequence: Synthetic oligonucleotide
uuuguuauuagccacuucu

SEQ ID NO: 1706037 - RNA, 19 nt, Artificial Sequence
  Description of Artificial Sequence: Synthetic oligonucleotide
uuuacagcagccaagguca

SEQ ID NO: 1706038 - RNA, 19 nt, Artificial Sequence
  Description of Artificial Sequence: Synthetic oligonucleotide
aagagcauagcaaauuucc

SEQ ID NO: 1706039 - RNA, 19 nt, Artificial Sequence
  Description of Artificial Sequence: Synthetic oligonucleotide
cuaaagaacagaauccugg

SEQ ID NO: 1706040 - RNA, 19 nt, Artificial Sequence
  Description of Artificial Sequence: Synthetic oligonucleotide
aaaguuuuaugggucaggc

SEQ ID NO: 1706041 - RNA, 19 nt, Artificial Sequence
  Description of Artificial Sequence: Synthetic oligonucleotide
agaagauggacgcaaauuc

SEQ ID NO: 1706042 - RNA, 19 nt, Artificial Sequence
  Description of Artificial Sequence: Synthetic oligonucleotide
gauguaaacccauaaauga

SEQ ID NO: 1706043 - RNA, 19 nt, Artificial Sequence
  Description of Artificial Sequence: Synthetic oligonucleotide
acaaucgaagcccauauuc

SEQ ID NO: 1706044 - RNA, 19 nt, Artificial Sequence
  Description of Artificial Sequence: Synthetic oligonucleotide
accauuaaugaacuucucc

SEQ ID NO: 1706045 - RNA, 19 nt, Artificial Sequence
  Description of Artificial Sequence: Synthetic oligonucleotide
uucgggaacauauaucugg

SEQ ID NO: 1706046 - RNA, 19 nt, Artificial Sequence
  Description of Artificial Sequence: Synthetic oligonucleotide
cauuaguuuguuauuagcc

SEQ ID NO: 1706047 - RNA, 19 nt, Artificial Sequence
  Description of Artificial Sequence: Synthetic oligonucleotide
aacaauaagagaucaaaua

SEQ ID NO: 1706048 - RNA, 19 nt, Artificial Sequence
  Description of Artificial Sequence: Synthetic oligonucleotide
uguuauuagccacuucugg

SEQ ID NO: 1706049 - RNA, 19 nt, Artificial Sequence
  Description of Artificial Sequence: Synthetic oligonucleotide
aauuccucaacaguguuuc

SEQ ID NO: 1706050 - RNA, 19 nt, Artificial Sequence
  Description of Artificial Sequence: Synthetic oligonucleotide
cuagugaagaagauggacg

SEQ ID NO: 1706051 - RNA, 19 nt, Artificial Sequence
  Description of Artificial Sequence: Synthetic oligonucleotide
aauccuaaaugccgguagc

SEQ ID NO: 1706052 - RNA, 19 nt, Artificial Sequence
  Description of Artificial Sequence: Synthetic oligonucleotide
cuuagcaccauuaaugaac

SEQ ID NO: 1706053 - RNA, 19 nt, Artificial Sequence
  Description of Artificial Sequence: Synthetic oligonucleotide
uguaaacccauaaaugaug

SEQ ID NO: 1706054 - RNA, 19 nt, Artificial Sequence
  Description of Artificial Sequence: Synthetic oligonucleotide
acaauaagagaucaaauau

SEQ ID NO: 1706055 - RNA, 19 nt, Artificial Sequence
  Description of Artificial Sequence: Synthetic oligonucleotide
uguucgggaacauauaucu

SEQ ID NO: 1706056 - RNA, 19 nt, Artificial Sequence
  Description of Artificial Sequence: Synthetic oligonucleotide
ugcaauuuugaaaucugag

SEQ ID NO: 1706057 - RNA, 19 nt, Artificial Sequence
  Description of Artificial Sequence: Synthetic oligonucleotide
aaggcuuuuggacugauaa

SEQ ID NO: 1706058 - RNA, 19 nt, Artificial Sequence
  Description of Artificial Sequence: Synthetic oligonucleotide
cacauuuugcagaacaugc

SEQ ID NO: 1706059 - RNA, 19 nt, Artificial Sequence
  Description of Artificial Sequence: Synthetic oligonucleotide
aauuaacaauaagagauca

SEQ ID NO: 1706060 - RNA, 19 nt, Artificial Sequence
  Description of Artificial Sequence: Synthetic oligonucleotide
aauagagcugcaauuauca

SEQ ID NO: 1706061 - RNA, 19 nt, Artificial Sequence
  Description of Artificial Sequence: Synthetic oligonucleotide
uaaugaacuucuccaagag

SEQ ID NO: 1706062 - RNA, 19 nt, Artificial Sequence
  Description of Artificial Sequence: Synthetic oligonucleotide
uaucacagggcauugcuag

SEQ ID NO: 1706063 - RNA, 19 nt, Artificial Sequence
  Description of Artificial Sequence: Synthetic oligonucleotide
cagagaauccuaaaugccg

SEQ ID NO: 1706064 - RNA, 19 nt, Artificial Sequence
  Description of Artificial Sequence: Synthetic oligonucleotide
uucauagccaaauguauga

SEQ ID NO: 1706065 - RNA, 19 nt, Artificial Sequence
  Description of Artificial Sequence: Synthetic oligonucleotide
agaaguugaauuccucaac

SEQ ID NO: 1706066 - RNA, 19 nt, Artificial Sequence
  Description of Artificial Sequence: Synthetic oligonucleotide
aaaaguguguuguuuguau

SEQ ID NO: 1706067 - RNA, 19 nt, Artificial Sequence
  Description of Artificial Sequence: Synthetic oligonucleotide
aaaguaaguuucugcacug

SEQ ID NO: 1706068 - RNA, 19 nt, Artificial Sequence
  Description of Artificial Sequence: Synthetic oligonucleotide
ggagaauuaacaauaagag

SEQ ID NO: 1706069 - RNA, 19 nt, Artificial Sequence
  Description of Artificial Sequence: Synthetic oligonucleotide
ugacggaucacuuuacagc

SEQ ID NO: 1706070 - RNA, 19 nt, Artificial Sequence
  Description of Artificial Sequence: Synthetic oligonucleotide
aguuuuaugggucaggcuu

SEQ ID NO: 1706071 - RNA, 19 nt, Artificial Sequence
  Description of Artificial Sequence: Synthetic oligonucleotide
agucaugucauuuucaguu

SEQ ID NO: 1706072 - RNA, 19 nt, Artificial Sequence
  Description of Artificial Sequence: Synthetic oligonucleotide
uuugaaaucugagucaccu

SEQ ID NO: 1706073 - RNA, 19 nt, Artificial Sequence
  Description of Artificial Sequence: Synthetic oligonucleotide
agcacuaacuccauuacac

SEQ ID NO: 1706074 - RNA, 19 nt, Artificial Sequence
  Description of Artificial Sequence: Synthetic oligonucleotide
ugucuuucgguugaaagag

SEQ ID NO: 1706075 - RNA, 19 nt, Artificial Sequence
  Description of Artificial Sequence: Synthetic oligonucleotide
uuaguuuguuauuagccac

SEQ ID NO: 1706076 - RNA, 19 nt, Artificial Sequence
  Description of Artificial Sequence: Synthetic oligonucleotide
ucuuucgguugaaagaggc

SEQ ID NO: 1706077 - RNA, 19 nt, Artificial Sequence
  Description of Artificial Sequence: Synthetic oligonucleotide
aauaccuagaaaccagaau

SEQ ID NO: 1706078 - RNA, 19 nt, Artificial Sequence
  Description of Artificial Sequence: Synthetic oligonucleotide
gaauccuaaaugccgguag

SEQ ID NO: 1706079 - RNA, 19 nt, Artificial Sequence
  Description of Artificial Sequence: Synthetic oligonucleotide
uccagaauaugaacuagca

SEQ ID NO: 1706080 - RNA, 19 nt, Artificial Sequence
  Description of Artificial Sequence: Synthetic oligonucleotide
caaagaaucccagcgaccg

SEQ ID NO: 1706081 - RNA, 19 nt, Artificial Sequence
  Description of Artificial Sequence: Synthetic oligonucleotide
auugcuaguuuccacugag

SEQ ID NO: 1706082 - RNA, 19 nt, Artificial Sequence
  Description of Artificial Sequence: Synthetic oligonucleotide
ugucucaaaaucucuuugc

SEQ ID NO: 1706083 - RNA, 19 nt, Artificial Sequence
  Description of Artificial Sequence: Synthetic oligonucleotide
cugaaacucguucacauac

SEQ ID NO: 1706084 - RNA, 19 nt, Artificial Sequence
  Description of Artificial Sequence: Synthetic oligonucleotide
agagaucaaauauacccug

SEQ ID NO: 1706085 - RNA, 19 nt, Artificial Sequence
  Description of Artificial Sequence: Synthetic oligonucleotide
acaugagccauuucuagug

SEQ ID NO: 1706086 - RNA, 19 nt, Artificial Sequence
  Description of Artificial Sequence: Synthetic oligonucleotide
aauuccucccuuuugcaaa

SEQ ID NO: 1706087 - RNA, 19 nt, Artificial Sequence
  Description of Artificial Sequence: Synthetic oligonucleotide
ucgggaacauauaucuggg

SEQ ID NO: 1706088 - RNA, 19 nt, Artificial Sequence
  Description of Artificial Sequence: Synthetic oligonucleotide
gaaguugaauuccucaaca

SEQ ID NO: 1706089 - RNA, 19 nt, Artificial Sequence
  Description of Artificial Sequence: Synthetic oligonucleotide
agagcacuaacuccauuac

SEQ ID NO: 1706090 - RNA, 19 nt, Artificial Sequence
  Description of Artificial Sequence: Synthetic oligonucleotide
ugcaaagaaucccagcgac

SEQ ID NO: 1706091 - RNA, 19 nt, Artificial Sequence
  Description of Artificial Sequence: Synthetic oligonucleotide
ugcuaguuuccacugagcu

SEQ ID NO: 1706092 - RNA, 19 nt, Artificial Sequence
  Description of Artificial Sequence: Synthetic oligonucleotide
acagagaauccuaaaugcc

SEQ ID NO: 1706093 - RNA, 19 nt, Artificial Sequence
  Description of Artificial Sequence: Synthetic oligonucleotide
aaacucaugucuuucgguu

SEQ ID NO: 1706094 - RNA, 19 nt, Artificial Sequence
  Description of Artificial Sequence: Synthetic oligonucleotide
uuauuagccacuucuggaa

SEQ ID NO: 1706095 - RNA, 19 nt, Artificial Sequence
  Description of Artificial Sequence: Synthetic oligonucleotide
gaugggucaaugaagucag

SEQ ID NO: 1706096 - RNA, 19 nt, Artificial Sequence
  Description of Artificial Sequence: Synthetic oligonucleotide
auaggaaaccagccuggcc

SEQ ID NO: 1706097 - RNA, 19 nt, Artificial Sequence
  Description of Artificial Sequence: Synthetic oligonucleotide
uccuacaaacacaugagua

SEQ ID NO: 1706098 - RNA, 19 nt, Artificial Sequence
  Description of Artificial Sequence: Synthetic oligonucleotide
caaucgaagcccauauucc

SEQ ID NO: 1706099 - RNA, 19 nt, Artificial Sequence
  Description of Artificial Sequence: Synthetic oligonucleotide
aaacacaugaguaccccag

SEQ ID NO: 1706100 - RNA, 19 nt, Artificial Sequence
  Description of Artificial Sequence: Synthetic oligonucleotide
ucaaaguaaguuucugcac

SEQ ID NO: 1706101 - RNA, 19 nt, Artificial Sequence
  Description of Artificial Sequence: Synthetic oligonucleotide
cucuuuucacuaaagaaca

SEQ ID NO: 1706102 - RNA, 19 nt, Artificial Sequence
  Description of Artificial Sequence: Synthetic oligonucleotide
aaucauuaguuuguuauua

SEQ ID NO: 1706103 - RNA, 19 nt, Artificial Sequence
  Description of Artificial Sequence: Synthetic oligonucleotide
acaugcucaacacguacuc

SEQ ID NO: 1706104 - RNA, 19 nt, Artificial Sequence
  Description of Artificial Sequence: Synthetic oligonucleotide
uuaugggucaggcuuuucu

SEQ ID NO: 1706105 - RNA, 19 nt, Artificial Sequence
  Description of Artificial Sequence: Synthetic oligonucleotide
gauggacgcaaauuccucc

SEQ ID NO: 1706106 - RNA, 19 nt, Artificial Sequence
  Description of Artificial Sequence: Synthetic oligonucleotide
aauauacccugguuacaug

SEQ ID NO: 1706107 - RNA, 19 nt, Artificial Sequence
  Description of Artificial Sequence: Synthetic oligonucleotide
uuguuauuagccacuucug

SEQ ID NO: 1706108 - RNA, 19 nt, Artificial Sequence
  Description of Artificial Sequence: Synthetic oligonucleotide
uaauuucuuguucgacagg

SEQ ID NO: 1706109 - RNA, 19 nt, Artificial Sequence
  Description of Artificial Sequence: Synthetic oligonucleotide
auauacccugguuacaugu

SEQ ID NO: 1706110 - RNA, 19 nt, Artificial Sequence
  Description of Artificial Sequence: Synthetic oligonucleotide
ucuaccucuucacuccaag

SEQ ID NO: 1706111 - RNA, 19 nt, Artificial Sequence
  Description of Artificial Sequence: Synthetic oligonucleotide
aaagaaucccagcgaccgg

SEQ ID NO: 1706112 - RNA, 19 nt, Artificial Sequence
  Description of Artificial Sequence: Synthetic oligonucleotide
gacggaucacuuuacagca

SEQ ID NO: 1706113 - RNA, 19 nt, Artificial Sequence
  Description of Artificial Sequence: Synthetic oligonucleotide
gacccugcaguugaaaagg

SEQ ID NO: 1706114 - RNA, 19 nt, Artificial Sequence
  Description of Artificial Sequence: Synthetic oligonucleotide
gaaaccagaaucccguaga

SEQ ID NO: 1706115 - RNA, 19 nt, Artificial Sequence
  Description of Artificial Sequence: Synthetic oligonucleotide
auaaaggggagaauuaaca

SEQ ID NO: 1706116 - RNA, 19 nt, Artificial Sequence
  Description of Artificial Sequence: Synthetic oligonucleotide
ucuagugaagaagauggac

SEQ ID NO: 1706117 - RNA, 19 nt, Artificial Sequence
  Description of Artificial Sequence: Synthetic oligonucleotide
augacggaucacuuuacag

SEQ ID NO: 1706118 - RNA, 19 nt, Artificial Sequence
  Description of Artificial Sequence: Synthetic oligonucleotide
accccagagacuaugacgg

SEQ ID NO: 1706119 - RNA, 19 nt, Artificial Sequence
  Description of Artificial Sequence: Synthetic oligonucleotide
agagaauccuaaaugccgg

SEQ ID NO: 1706120 - RNA, 19 nt, Artificial Sequence
  Description of Artificial Sequence: Synthetic oligonucleotide
agaaaccagaaucccguag

SEQ ID NO: 1706121 - RNA, 19 nt, Artificial Sequence
  Description of Artificial Sequence: Synthetic oligonucleotide
auuucuagugaagaagaug

SEQ ID NO: 1706122 - RNA, 19 nt, Artificial Sequence
  Description of Artificial Sequence: Synthetic oligonucleotide
acuaugacggaucacuuua

SEQ ID NO: 1706123 - RNA, 19 nt, Artificial Sequence
  Description of Artificial Sequence: Synthetic oligonucleotide
uagaaguugaauuccucaa

SEQ ID NO: 1706124 - RNA, 19 nt, Artificial Sequence
  Description of Artificial Sequence: Synthetic oligonucleotide
gaagauggacgcaaauucc

SEQ ID NO: 1706125 - RNA, 19 nt, Artificial Sequence
  Description of Artificial Sequence: Synthetic oligonucleotide
aaccucugauccugagggc

SEQ ID NO: 1706126 - RNA, 19 nt, Artificial Sequence
  Description of Artificial Sequence: Synthetic oligonucleotide
ucaucaacagagaauccua

SEQ ID NO: 1706127 - RNA, 19 nt, Artificial Sequence
  Description of Artificial Sequence: Synthetic oligonucleotide
uugaggugacaaucgaagc

SEQ ID NO: 1706128 - RNA, 19 nt, Artificial Sequence
  Description of Artificial Sequence: Synthetic oligonucleotide
uuuuggacugauaacucuu

SEQ ID NO: 1706129 - RNA, 19 nt, Artificial Sequence
  Description of Artificial Sequence: Synthetic oligonucleotide
guagaaguugaauuccuca

SEQ ID NO: 1706130 - RNA, 19 nt, Artificial Sequence
  Description of Artificial Sequence: Synthetic oligonucleotide
aaggggagaauuaacaaua

SEQ ID NO: 1706131 - RNA, 19 nt, Artificial Sequence
  Description of Artificial Sequence: Synthetic oligonucleotide
aucacuacucugaaacucg

SEQ ID NO: 1706132 - RNA, 19 nt, Artificial Sequence
  Description of Artificial Sequence: Synthetic oligonucleotide
ugacaaucgaagcccauau

SEQ ID NO: 1706133 - RNA, 19 nt, Artificial Sequence
  Description of Artificial Sequence: Synthetic oligonucleotide
ugugaagcagucccauuga

SEQ ID NO: 1706134 - RNA, 19 nt, Artificial Sequence
  Description of Artificial Sequence: Synthetic oligonucleotide
agcauagcaaauuuccuua

SEQ ID NO: 1706135 - RNA, 19 nt, Artificial Sequence
  Description of Artificial Sequence: Synthetic oligonucleotide
uuuccuuagcaccauuaau

SEQ ID NO: 1706136 - RNA, 19 nt, Artificial Sequence
  Description of Artificial Sequence: Synthetic oligonucleotide
agacccugcaguugaaaag

SEQ ID NO: 1706137 - RNA, 19 nt, Artificial Sequence
  Description of Artificial Sequence: Synthetic oligonucleotide
uaugacggaucacuuuaca

SEQ ID NO: 1706138 - RNA, 19 nt, Artificial Sequence
  Description of Artificial Sequence: Synthetic oligonucleotide
uugcaaagaaucccagcga

SEQ ID NO: 1706139 - RNA, 19 nt, Artificial Sequence
  Description of Artificial Sequence: Synthetic oligonucleotide
uuccuacaaacacaugagu

SEQ ID NO: 1706140 - RNA, 19 nt, Artificial Sequence
  Description of Artificial Sequence: Synthetic oligonucleotide
aaugccgguagcguucauc

SEQ ID NO: 1706141 - RNA, 19 nt, Artificial Sequence
  Description of Artificial Sequence: Synthetic oligonucleotide
acacaaauagagcugcaau

SEQ ID NO: 1706142 - RNA, 19 nt, Artificial Sequence
  Description of Artificial Sequence: Synthetic oligonucleotide
uggucccauaguuucauca

SEQ ID NO: 1706143 - RNA, 19 nt, Artificial Sequence
  Description of Artificial Sequence: Synthetic oligonucleotide
aaguuuuaugggucaggcu

SEQ ID NO: 1706144 - RNA, 19 nt, Artificial Sequence
  Description of Artificial Sequence: Synthetic oligonucleotide
cugugaagcagucccauug

SEQ ID NO: 1706145 - RNA, 19 nt, Artificial Sequence
  Description of Artificial Sequence: Synthetic oligonucleotide
auaugaacuagcauuugca

SEQ ID NO: 1706146 - RNA, 19 nt, Artificial Sequence
  Description of Artificial Sequence: Synthetic oligonucleotide
agaacagaauccugggaga

SEQ ID NO: 1706147 - RNA, 19 nt, Artificial Sequence
  Description of Artificial Sequence: Synthetic oligonucleotide
cagaauaugaacuagcauu

SEQ ID NO: 1706148 - RNA, 19 nt, Artificial Sequence
  Description of Artificial Sequence: Synthetic oligonucleotide
cuaaaugccgguagcguuc

SEQ ID NO: 1706149 - RNA, 19 nt, Artificial Sequence
  Description of Artificial Sequence: Synthetic oligonucleotide
gauaacucuuuucacuaaa

SEQ ID NO: 1706150 - RNA, 19 nt, Artificial Sequence
  Description of Artificial Sequence: Synthetic oligonucleotide
cauagcaaauuuccuuagc

SEQ ID NO: 1706151 - RNA, 19 nt, Artificial Sequence
  Description of Artificial Sequence: Synthetic oligonucleotide
aagauggacgcaaauuccu

SEQ ID NO: 1706152 - RNA, 19 nt, Artificial Sequence
  Description of Artificial Sequence: Synthetic oligonucleotide
aacacaugaguaccccaga

SEQ ID NO: 1706153 - RNA, 19 nt, Artificial Sequence
  Description of Artificial Sequence: Synthetic oligonucleotide
ugaaacucguucacauacu

SEQ ID NO: 1706154 - RNA, 19 nt, Artificial Sequence
  Description of Artificial Sequence: Synthetic oligonucleotide
acuguucgggaacauauau

SEQ ID NO: 1706155 - RNA, 19 nt, Artificial Sequence
  Description of Artificial Sequence: Synthetic oligonucleotide
augcucaacacguacucca

SEQ ID NO: 1706156 - RNA, 19 nt, Artificial Sequence
  Description of Artificial Sequence: Synthetic oligonucleotide
uuuucccaauaaaggggag

SEQ ID NO: 1706157 - RNA, 19 nt, Artificial Sequence
  Description of Artificial Sequence: Synthetic oligonucleotide
gcugcauuagugaagauac

SEQ ID NO: 1706158 - RNA, 19 nt, Artificial Sequence
  Description of Artificial Sequence: Synthetic oligonucleotide
agaugaugggucaaugaag

SEQ ID NO: 1706159 - RNA, 19 nt, Artificial Sequence
  Description of Artificial Sequence: Synthetic oligonucleotide
ucuggauuacacacucaac

SEQ ID NO: 1706160 - RNA, 19 nt, Artificial Sequence
  Description of Artificial Sequence: Synthetic oligonucleotide
ucccguagaaguugaauuc

SEQ ID NO: 1706161 - RNA, 19 nt, Artificial Sequence
  Description of Artificial Sequence: Synthetic oligonucleotide
gacugauaacucuuuucac

SEQ ID NO: 1706162 - RNA, 19 nt, Artificial Sequence
  Description of Artificial Sequence: Synthetic oligonucleotide
uggacugauaacucuuuuc

SEQ ID NO: 1706163 - RNA, 19 nt, Artificial Sequence
  Description of Artificial Sequence: Synthetic oligonucleotide
ucaugauauggcugucugc

SEQ ID NO: 1706164 - RNA, 19 nt, Artificial Sequence
  Description of Artificial Sequence: Synthetic oligonucleotide
ccuacaaacacaugaguac

SEQ ID NO: 1706165 - RNA, 19 nt, Artificial Sequence
  Description of Artificial Sequence: Synthetic oligonucleotide
ugcauuagugaagauacuu

SEQ ID NO: 1706166 - RNA, 19 nt, Artificial Sequence
  Description of Artificial Sequence: Synthetic oligonucleotide
guagcguucaucuguuuca

SEQ ID NO: 1706167 - RNA, 19 nt, Artificial Sequence
  Description of Artificial Sequence: Synthetic oligonucleotide
gugucucaaaaucucuuug

SEQ ID NO: 1706168 - RNA, 19 nt, Artificial Sequence
  Description of Artificial Sequence: Synthetic oligonucleotide
auaacucuuuucacuaaag

SEQ ID NO: 1706169 - RNA, 19 nt, Artificial Sequence
  Description of Artificial Sequence: Synthetic oligonucleotide
ucugagucaccucccgaug

SEQ ID NO: 1706170 - RNA, 19 nt, Artificial Sequence
  Description of Artificial Sequence: Synthetic oligonucleotide
cucaugauauggcugucug

SEQ ID NO: 1706171 - RNA, 19 nt, Artificial Sequence
  Description of Artificial Sequence: Synthetic oligonucleotide
uucgacaggugcaucacua

SEQ ID NO: 1706172 - RNA, 19 nt, Artificial Sequence
  Description of Artificial Sequence: Synthetic oligonucleotide
auacccugguuacauguug

SEQ ID NO: 1706173 - RNA, 19 nt, Artificial Sequence
  Description of Artificial Sequence: Synthetic oligonucleotide
cuuccucaugauauggcug

SEQ ID NO: 1706174 - RNA, 19 nt, Artificial Sequence
  Description of Artificial Sequence: Synthetic oligonucleotide
uucuagugaagaagaugga

SEQ ID NO: 1706175 - RNA, 19 nt, Artificial Sequence
  Description of Artificial Sequence: Synthetic oligonucleotide
aucccguagaaguugaauu

SEQ ID NO: 1706176 - RNA, 19 nt, Artificial Sequence
  Description of Artificial Sequence: Synthetic oligonucleotide
cccaguauccuucagcccg

SEQ ID NO: 1706177 - RNA, 19 nt, Artificial Sequence
  Description of Artificial Sequence: Synthetic oligonucleotide
aacaugcucaacacguacu

SEQ ID NO: 1706178 - RNA, 19 nt, Artificial Sequence
  Description of Artificial Sequence: Synthetic oligonucleotide
guuuguauaugguccaaaa

SEQ ID NO: 1706179 - RNA, 19 nt, Artificial Sequence
  Description of Artificial Sequence: Synthetic oligonucleotide
augaguaccccagagacua

SEQ ID NO: 1706180 - RNA, 19 nt, Artificial Sequence
  Description of Artificial Sequence: Synthetic oligonucleotide
guaaacccauaaaugauga

SEQ ID NO: 1706181 - RNA, 19 nt, Artificial Sequence
  Description of Artificial Sequence: Synthetic oligonucleotide
gaugaugggucaaugaagu

SEQ ID NO: 1706182 - RNA, 19 nt, Artificial Sequence
  Description of Artificial Sequence: Synthetic oligonucleotide
acagucagaaucauuaguu

SEQ ID NO: 1706183 - RNA, 19 nt, Artificial Sequence
  Description of Artificial Sequence: Synthetic oligonucleotide
auccuaaaugccgguagcg

SEQ ID NO: 1706184 - RNA, 19 nt, Artificial Sequence
  Description of Artificial Sequence: Synthetic oligonucleotide
aaccagaaucccguagaag

SEQ ID NO: 1706185 - RNA, 19 nt, Artificial Sequence
  Description of Artificial Sequence: Synthetic oligonucleotide
caguucuggacaugucugg

SEQ ID NO: 1706186 - RNA, 19 nt, Artificial Sequence
  Description of Artificial Sequence: Synthetic oligonucleotide
uuucccaauaaaggggaga

SEQ ID NO: 1706187 - RNA, 19 nt, Artificial Sequence
  Description of Artificial Sequence: Synthetic oligonucleotide
ccuagaaaccagaaucccg

SEQ ID NO: 1706188 - RNA, 19 nt, Artificial Sequence
  Description of Artificial Sequence: Synthetic oligonucleotide
ugcaauuaucacagggcau

SEQ ID NO: 1706189 - RNA, 19 nt, Artificial Sequence
  Description of Artificial Sequence: Synthetic oligonucleotide
ugaaagaggcucugcuaga

SEQ ID NO: 1706190 - RNA, 19 nt, Artificial Sequence
  Description of Artificial Sequence: Synthetic oligonucleotide
gagcacaugagccauuucu

SEQ ID NO: 1706191 - RNA, 19 nt, Artificial Sequence
  Description of Artificial Sequence: Synthetic oligonucleotide
aaauaccuagaaaccagaa

SEQ ID NO: 1706192 - RNA, 19 nt, Artificial Sequence
  Description of Artificial Sequence: Synthetic oligonucleotide
agcagucccauugagguga

SEQ ID NO: 1706193 - RNA, 19 nt, Artificial Sequence
  Description of Artificial Sequence: Synthetic oligonucleotide
uuuggacugauaacucuuu

SEQ ID NO: 1706194 - RNA, 19 nt, Artificial Sequence
  Description of Artificial Sequence: Synthetic oligonucleotide
cugcaauuaucacagggca

SEQ ID NO: 1706195 - RNA, 19 nt, Artificial Sequence
  Description of Artificial Sequence: Synthetic oligonucleotide
agaaccugaagacccugca

SEQ ID NO: 1706196 - RNA, 19 nt, Artificial Sequence
  Description of Artificial Sequence: Synthetic oligonucleotide
acuaaagaacagaauccug

SEQ ID NO: 1706197 - RNA, 19 nt, Artificial Sequence
  Description of Artificial Sequence: Synthetic oligonucleotide
uuaucacagggcauugcua

SEQ ID NO: 1706198 - RNA, 19 nt, Artificial Sequence
  Description of Artificial Sequence: Synthetic oligonucleotide
guuuucccaauaaagggga

SEQ ID NO: 1706199 - RNA, 19 nt, Artificial Sequence
  Description of Artificial Sequence: Synthetic oligonucleotide
cugggagauaggaaaccag

SEQ ID NO: 1706200 - RNA, 19 nt, Artificial Sequence
  Description of Artificial Sequence: Synthetic oligonucleotide
cuagaaaccagaaucccgu

SEQ ID NO: 1706201 - RNA, 19 nt, Artificial Sequence
  Description of Artificial Sequence: Synthetic oligonucleotide
aacuaagguuuucccaaua

SEQ ID NO: 1706202 - RNA, 19 nt, Artificial Sequence
  Description of Artificial Sequence: Synthetic oligonucleotide
gaagagcauagcaaauuuc

SEQ ID NO: 1706203 - RNA, 19 nt, Artificial Sequence
  Description of Artificial Sequence: Synthetic oligonucleotide
acuccagaauaugaacuag

SEQ ID NO: 1706204 - RNA, 19 nt, Artificial Sequence
  Description of Artificial Sequence: Synthetic oligonucleotide
aauggucccauaguuucau

SEQ ID NO: 1706205 - RNA, 19 nt, Artificial Sequence
  Description of Artificial Sequence: Synthetic oligonucleotide
cagggcauugcuaguuucc

SEQ ID NO: 1706206 - RNA, 19 nt, Artificial Sequence
  Description of Artificial Sequence: Synthetic oligonucleotide
aaucccguagaaguugaau

SEQ ID NO: 1706207 - RNA, 19 nt, Artificial Sequence
  Description of Artificial Sequence: Synthetic oligonucleotide
aacacguacuccagaauau

SEQ ID NO: 1706208 - RNA, 19 nt, Artificial Sequence
  Description of Artificial Sequence: Synthetic oligonucleotide
ggccacaugagacucauca

SEQ ID NO: 1706209 - RNA, 19 nt, Artificial Sequence
  Description of Artificial Sequence: Synthetic oligonucleotide
ucacuacucugaaacucgu

SEQ ID NO: 1706210 - RNA, 19 nt, Artificial Sequence
  Description of Artificial Sequence: Synthetic oligonucleotide
caaaguaaguuucugcacu

SEQ ID NO: 1706211 - RNA, 19 nt, Artificial Sequence
  Description of Artificial Sequence: Synthetic oligonucleotide
ugcugcauuagugaagaua

SEQ ID NO: 1706212 - RNA, 19 nt, Artificial Sequence
  Description of Artificial Sequence: Synthetic oligonucleotide
aucaacagagaauccuaaa

SEQ ID NO: 1706213 - RNA, 19 nt, Artificial Sequence
  Description of Artificial Sequence: Synthetic oligonucleotide
ucccauugaggugacaauc

SEQ ID NO: 1706214 - RNA, 19 nt, Artificial Sequence
  Description of Artificial Sequence: Synthetic oligonucleotide
aucugagucaccucccgau

SEQ ID NO: 1706215 - RNA, 19 nt, Artificial Sequence
  Description of Artificial Sequence: Synthetic oligonucleotide
uaugggucaggcuuuucuu

SEQ ID NO: 1706216 - RNA, 19 nt, Artificial Sequence
  Description of Artificial Sequence: Synthetic oligonucleotide
ucuggacaugucuggauua

SEQ ID NO: 1706217 - RNA, 19 nt, Artificial Sequence
  Description of Artificial Sequence: Synthetic oligonucleotide
ucccgauguaaacccauaa

SEQ ID NO: 1706218 - RNA, 19 nt, Artificial Sequence
  Description of Artificial Sequence: Synthetic oligonucleotide
ucaacacguacuccagaau

SEQ ID NO: 1706219 - RNA, 19 nt, Artificial Sequence
  Description of Artificial Sequence: Synthetic oligonucleotide
cuaacuccauuacacacaa

SEQ ID NO: 1706220 - RNA, 19 nt, Artificial Sequence
  Description of Artificial Sequence: Synthetic oligonucleotide
caaaccagaugauggguca

SEQ ID NO: 1706221 - RNA, 19 nt, Artificial Sequence
  Description of Artificial Sequence: Synthetic oligonucleotide
ucugaaacucguucacaua

SEQ ID NO: 1706222 - RNA, 19 nt, Artificial Sequence
  Description of Artificial Sequence: Synthetic oligonucleotide
cuaugacggaucacuuuac

SEQ ID NO: 1706223 - RNA, 19 nt, Artificial Sequence
  Description of Artificial Sequence: Synthetic oligonucleotide
auguaaacccauaaaugau

SEQ ID NO: 1706224 - RNA, 19 nt, Artificial Sequence
  Description of Artificial Sequence: Synthetic oligonucleotide
cuguucgggaacauauauc

SEQ ID NO: 1706225 - RNA, 19 nt, Artificial Sequence
  Description of Artificial Sequence: Synthetic oligonucleotide
acauacugagccaucacaa

SEQ ID NO: 1706226 - RNA, 19 nt, Artificial Sequence
  Description of Artificial Sequence: Synthetic oligonucleotide
ggucccauaguuucaucag

SEQ ID NO: 1706227 - RNA, 19 nt, Artificial Sequence
  Description of Artificial Sequence: Synthetic oligonucleotide
agauggacgcaaauuccuc

SEQ ID NO: 1706228 - RNA, 19 nt, Artificial Sequence
  Description of Artificial Sequence: Synthetic oligonucleotide
cacauacugagccaucaca

SEQ ID NO: 1706229 - RNA, 19 nt, Artificial Sequence
  Description of Artificial Sequence: Synthetic oligonucleotide
cgauguaaacccauaaaug

SEQ ID NO: 1706230 - RNA, 19 nt, Artificial Sequence
  Description of Artificial Sequence: Synthetic oligonucleotide
cugguuacauguugcugac

SEQ ID NO: 1706231 - RNA, 19 nt, Artificial Sequence
  Description of Artificial Sequence: Synthetic oligonucleotide
cacaugagacucaucagaa

SEQ ID NO: 1706232 - RNA, 19 nt, Artificial Sequence
  Description of Artificial Sequence: Synthetic oligonucleotide
cagaugaugggucaaugaa

SEQ ID NO: 1706233 - RNA, 19 nt, Artificial Sequence
  Description of Artificial Sequence: Synthetic oligonucleotide
gcugcaauuaucacagggc

SEQ ID NO: 1706234 - RNA, 19 nt, Artificial Sequence
  Description of Artificial Sequence: Synthetic oligonucleotide
uccuaaaugccgguagcgu

SEQ ID NO: 1706235 - RNA, 19 nt, Artificial Sequence
  Description of Artificial Sequence: Synthetic oligonucleotide
uguuuguauaugguccaaa

SEQ ID NO: 1706236 - RNA, 19 nt, Artificial Sequence
  Description of Artificial Sequence: Synthetic oligonucleotide
aaauggucccauaguuuca

SEQ ID NO: 1706237 - RNA, 19 nt, Artificial Sequence
  Description of Artificial Sequence: Synthetic oligonucleotide
gagccauuucuagugaaga

SEQ ID NO: 1706238 - RNA, 19 nt, Artificial Sequence
  Description of Artificial Sequence: Synthetic oligonucleotide
ccauaaaugaugaaauaaa

SEQ ID NO: 1706239 - RNA, 19 nt, Artificial Sequence
  Description of Artificial Sequence: Synthetic oligonucleotide
cucaacacguacuccagaa

SEQ ID NO: 1706240 - RNA, 19 nt, Artificial Sequence
  Description of Artificial Sequence: Synthetic oligonucleotide
cagaaucccguagaaguug

SEQ ID NO: 1706241 - RNA, 19 nt, Artificial Sequence
  Description of Artificial Sequence: Synthetic oligonucleotide
cauuugcaauuuugaaauc

SEQ ID NO: 1706242 - RNA, 19 nt, Artificial Sequence
  Description of Artificial Sequence: Synthetic oligonucleotide
auuaacaauaagagaucaa

SEQ ID NO: 1706243 - RNA, 19 nt, Artificial Sequence
  Description of Artificial Sequence: Synthetic oligonucleotide
caacacguacuccagaaua

SEQ ID NO: 1706244 - RNA, 19 nt, Artificial Sequence
  Description of Artificial Sequence: Synthetic oligonucleotide
agccaaauguaugauuuau

SEQ ID NO: 1706245 - RNA, 19 nt, Artificial Sequence
  Description of Artificial Sequence: Synthetic oligonucleotide
uccugggagauaggaaacc

SEQ ID NO: 1706246 - RNA, 19 nt, Artificial Sequence
  Description of Artificial Sequence: Synthetic oligonucleotide
agucagcccaguauccuuc

SEQ ID NO: 1706247 - RNA, 19 nt, Artificial Sequence
  Description of Artificial Sequence: Synthetic oligonucleotide
uacagagcacaugagccau

SEQ ID NO: 1706248 - RNA, 19 nt, Artificial Sequence
  Description of Artificial Sequence: Synthetic oligonucleotide
agagacuaugacggaucac

SEQ ID NO: 1706249 - RNA, 19 nt, Artificial Sequence
  Description of Artificial Sequence: Synthetic oligonucleotide
gcacaugagccauuucuag

SEQ ID NO: 1706250 - RNA, 19 nt, Artificial Sequence
  Description of Artificial Sequence: Synthetic oligonucleotide
agagcauagcaaauuuccu

SEQ ID NO: 1706251 - RNA, 19 nt, Artificial Sequence
  Description of Artificial Sequence: Synthetic oligonucleotide
uuggacugauaacucuuuu

SEQ ID NO: 1706252 - RNA, 19 nt, Artificial Sequence
  Description of Artificial Sequence: Synthetic oligonucleotide
uaaaugccgguagcguuca

SEQ ID NO: 1706253 - RNA, 19 nt, Artificial Sequence
  Description of Artificial Sequence: Synthetic oligonucleotide
caugcucaacacguacucc

SEQ ID NO: 1706254 - RNA, 19 nt, Artificial Sequence
  Description of Artificial Sequence: Synthetic oligonucleotide
gguagcguucaucuguuuc

SEQ ID NO: 1706255 - RNA, 19 nt, Artificial Sequence
  Description of Artificial Sequence: Synthetic oligonucleotide
guuacauguugcugaccac

SEQ ID NO: 1706256 - RNA, 19 nt, Artificial Sequence
  Description of Artificial Sequence: Synthetic oligonucleotide
gcauagcaaauuuccuuag

SEQ ID NO: 1706257 - RNA, 19 nt, Artificial Sequence
  Description of Artificial Sequence: Synthetic oligonucleotide
aguauccuucagcccgaag

SEQ ID NO: 1706258 - RNA, 19 nt, Artificial Sequence
  Description of Artificial Sequence: Synthetic oligonucleotide
gcuagaacaucaggcaaag

SEQ ID NO: 1706259 - RNA, 19 nt, Artificial Sequence
  Description of Artificial Sequence: Synthetic oligonucleotide
cauugaggugacaaucgaa

SEQ ID NO: 1706260 - RNA, 19 nt, Artificial Sequence
  Description of Artificial Sequence: Synthetic oligonucleotide
gaguaccccagagacuaug

SEQ ID NO: 1706261 - RNA, 19 nt, Artificial Sequence
  Description of Artificial Sequence: Synthetic oligonucleotide
agcgaccggagggacaccg

SEQ ID NO: 1706262 - RNA, 19 nt, Artificial Sequence
  Description of Artificial Sequence: Synthetic oligonucleotide
ggcaaaguuuuauggguca

SEQ ID NO: 1706263 - RNA, 19 nt, Artificial Sequence
  Description of Artificial Sequence: Synthetic oligonucleotide
guacuccagaauaugaacu

SEQ ID NO: 1706264 - RNA, 19 nt, Artificial Sequence
  Description of Artificial Sequence: Synthetic oligonucleotide
gucaucaacagagaauccu

SEQ ID NO: 1706265 - RNA, 19 nt, Artificial Sequence
  Description of Artificial Sequence: Synthetic oligonucleotide
aguucuggacaugucugga

SEQ ID NO: 1706266 - RNA, 19 nt, Artificial Sequence
  Description of Artificial Sequence: Synthetic oligonucleotide
gucuuucgguugaaagagg

SEQ ID NO: 1706267 - RNA, 19 nt, Artificial Sequence
  Description of Artificial Sequence: Synthetic oligonucleotide
aaaccagaugaugggucaa

SEQ ID NO: 1706268 - RNA, 19 nt, Artificial Sequence
  Description of Artificial Sequence: Synthetic oligonucleotide
gcauugcuaguuuccacug

SEQ ID NO: 1706269 - RNA, 19 nt, Artificial Sequence
  Description of Artificial Sequence: Synthetic oligonucleotide
agaaucccguagaaguuga

SEQ ID NO: 1706270 - RNA, 19 nt, Artificial Sequence
  Description of Artificial Sequence: Synthetic oligonucleotide
ggauuacacacucaacucu

SEQ ID NO: 1706271 - RNA, 19 nt, Artificial Sequence
  Description of Artificial Sequence: Synthetic oligonucleotide
aguuuguuauuagccacuu

SEQ ID NO: 1706272 - RNA, 19 nt, Artificial Sequence
  Description of Artificial Sequence: Synthetic oligonucleotide
gcauuagugaagauacuuc

SEQ ID NO: 1706273 - RNA, 19 nt, Artificial Sequence
  Description of Artificial Sequence: Synthetic oligonucleotide
acucugaaacucguucaca

SEQ ID NO: 1706274 - RNA, 19 nt, Artificial Sequence
  Description of Artificial Sequence: Synthetic oligonucleotide
uggacaugucuggauuaca

SEQ ID NO: 1706275 - RNA, 19 nt, Artificial Sequence
  Description of Artificial Sequence: Synthetic oligonucleotide
aaccagaugaugggucaau

SEQ ID NO: 1706276 - RNA, 19 nt, Artificial Sequence
  Description of Artificial Sequence: Synthetic oligonucleotide
agacucaucagaaccugaa

SEQ ID NO: 1706277 - RNA, 19 nt, Artificial Sequence
  Description of Artificial Sequence: Synthetic oligonucleotide
gaagaagauggacgcaaau

SEQ ID NO: 1706278 - RNA, 19 nt, Artificial Sequence
  Description of Artificial Sequence: Synthetic oligonucleotide
cacaaauagagcugcaauu

SEQ ID NO: 1706279 - RNA, 19 nt, Artificial Sequence
  Description of Artificial Sequence: Synthetic oligonucleotide
aucaggccacacuguucgg

SEQ ID NO: 1706280 - RNA, 19 nt, Artificial Sequence
  Description of Artificial Sequence: Synthetic oligonucleotide
ggcuuuuggacugauaacu

SEQ ID NO: 1706281 - RNA, 19 nt, Artificial Sequence
  Description of Artificial Sequence: Synthetic oligonucleotide
cuggacaugucuggauuac

SEQ ID NO: 1706282 - RNA, 19 nt, Artificial Sequence
  Description of Artificial Sequence: Synthetic oligonucleotide
cacuaaagaacagaauccu

SEQ ID NO: 1706283 - RNA, 19 nt, Artificial Sequence
  Description of Artificial Sequence: Synthetic oligonucleotide
uuguuuguauaugguccaa

SEQ ID NO: 1706284 - RNA, 19 nt, Artificial Sequence
  Description of Artificial Sequence: Synthetic oligonucleotide
acguacuccagaauaugaa

SEQ ID NO: 1706285 - RNA, 19 nt, Artificial Sequence
  Description of Artificial Sequence: Synthetic oligonucleotide
guucgggaacauauaucug

SEQ ID NO: 1706286 - RNA, 19 nt, Artificial Sequence
  Description of Artificial Sequence: Synthetic oligonucleotide
agggcauugcuaguuucca

SEQ ID NO: 1706287 - RNA, 19 nt, Artificial Sequence
  Description of Artificial Sequence: Synthetic oligonucleotide
agaauccuaaaugccggua

SEQ ID NO: 1706288 - RNA, 19 nt, Artificial Sequence
  Description of Artificial Sequence: Synthetic oligonucleotide
gcugcugcauuagugaaga

SEQ ID NO: 1706289 - RNA, 19 nt, Artificial Sequence
  Description of Artificial Sequence: Synthetic oligonucleotide
uagcguucaucuguuucaa

SEQ ID NO: 1706290 - RNA, 19 nt, Artificial Sequence
  Description of Artificial Sequence: Synthetic oligonucleotide
ccacaugagacucaucaga

SEQ ID NO: 1706291 - RNA, 19 nt, Artificial Sequence
  Description of Artificial Sequence: Synthetic oligonucleotide
cauugcuaguuuccacuga

SEQ ID NO: 1706292 - RNA, 19 nt, Artificial Sequence
  Description of Artificial Sequence: Synthetic oligonucleotide
agcacaugagccauuucua

SEQ ID NO: 1706293 - RNA, 19 nt, Artificial Sequence
  Description of Artificial Sequence: Synthetic oligonucleotide
ugguuacauguugcugacc

SEQ ID NO: 1706294 - RNA, 19 nt, Artificial Sequence
  Description of Artificial Sequence: Synthetic oligonucleotide
acgcaaauuccucccuuuu

SEQ ID NO: 1706295 - RNA, 19 nt, Artificial Sequence
  Description of Artificial Sequence: Synthetic oligonucleotide
agcccgaagagcauagcaa

SEQ ID NO: 1706296 - RNA, 19 nt, Artificial Sequence
  Description of Artificial Sequence: Synthetic oligonucleotide
ggcacuuucaaaguaaguu

SEQ ID NO: 1706297 - RNA, 19 nt, Artificial Sequence
  Description of Artificial Sequence: Synthetic oligonucleotide
ucaugucuuucgguugaaa

SEQ ID NO: 1706298 - RNA, 19 nt, Artificial Sequence
  Description of Artificial Sequence: Synthetic oligonucleotide
cccguagaaguugaauucc

SEQ ID NO: 1706299 - RNA, 19 nt, Artificial Sequence
  Description of Artificial Sequence: Synthetic oligonucleotide
cagcccgaagagcauagca

SEQ ID NO: 1706300 - RNA, 19 nt, Artificial Sequence
  Description of Artificial Sequence: Synthetic oligonucleotide
ccacauuuugcagaacaug

SEQ ID NO: 1706301 - RNA, 19 nt, Artificial Sequence
  Description of Artificial Sequence: Synthetic oligonucleotide
cacaugagccauuucuagu

SEQ ID NO: 1706302 - RNA, 19 nt, Artificial Sequence
  Description of Artificial Sequence: Synthetic oligonucleotide
augggucaaugaagucagc

SEQ ID NO: 1706303 - RNA, 19 nt, Artificial Sequence
  Description of Artificial Sequence: Synthetic oligonucleotide
ggacaccgcgcccaggccc

SEQ ID NO: 1706304 - RNA, 19 nt, Artificial Sequence
  Description of Artificial Sequence: Synthetic oligonucleotide
gacuaugacggaucacuuu

SEQ ID NO: 1706305 - RNA, 19 nt, Artificial Sequence
  Description of Artificial Sequence: Synthetic oligonucleotide
cggaucacuuuacagcagc

SEQ ID NO: 1706306 - RNA, 19 nt, Artificial Sequence
  Description of Artificial Sequence: Synthetic oligonucleotide
ucagcccgaagagcauagc

SEQ ID NO: 1706307 - RNA, 19 nt, Artificial Sequence
  Description of Artificial Sequence: Synthetic oligonucleotide
uaacuccauuacacacaaa

SEQ ID NO: 1706308 - RNA, 19 nt, Artificial Sequence
  Description of Artificial Sequence: Synthetic oligonucleotide
acggaucacuuuacagcag

SEQ ID NO: 1706309 - RNA, 19 nt, Artificial Sequence
  Description of Artificial Sequence: Synthetic oligonucleotide
cagaaucauuaguuuguua

SEQ ID NO: 1706310 - RNA, 19 nt, Artificial Sequence
  Description of Artificial Sequence: Synthetic oligonucleotide
uuuaugggucaggcuuuuc

SEQ ID NO: 1706311 - RNA, 19 nt, Artificial Sequence
  Description of Artificial Sequence: Synthetic oligonucleotide
ugaguaccccagagacuau

SEQ ID NO: 1706312 - RNA, 19 nt, Artificial Sequence
  Description of Artificial Sequence: Synthetic oligonucleotide
gcuuuuggacugauaacuc

SEQ ID NO: 1706313 - RNA, 19 nt, Artificial Sequence
  Description of Artificial Sequence: Synthetic oligonucleotide
agaacaugcucaacacgua

SEQ ID NO: 1706314 - RNA, 19 nt, Artificial Sequence
  Description of Artificial Sequence: Synthetic oligonucleotide
cuuguucgacaggugcauc

SEQ ID NO: 1706315 - RNA, 19 nt, Artificial Sequence
  Description of Artificial Sequence: Synthetic oligonucleotide
gugacaaucgaagcccaua

SEQ ID NO: 1706316 - RNA, 19 nt, Artificial Sequence
  Description of Artificial Sequence: Synthetic oligonucleotide
gaccggagggacaccgcgc

SEQ ID NO: 1706317 - RNA, 19 nt, Artificial Sequence
  Description of Artificial Sequence: Synthetic oligonucleotide
cauuucuagugaagaagau

SEQ ID NO: 1706318 - RNA, 19 nt, Artificial Sequence
  Description of Artificial Sequence: Synthetic oligonucleotide
agacuaugacggaucacuu

SEQ ID NO: 1706319 - RNA, 19 nt, Artificial Sequence
  Description of Artificial Sequence: Synthetic oligonucleotide
gacgcaaauuccucccuuu

SEQ ID NO: 1706320 - RNA, 19 nt, Artificial Sequence
  Description of Artificial Sequence: Synthetic oligonucleotide
caugaguaccccagagacu

SEQ ID NO: 1706321 - RNA, 19 nt, Artificial Sequence
  Description of Artificial Sequence: Synthetic oligonucleotide
uaguuucaucaggccacac

SEQ ID NO: 1706322 - RNA, 19 nt, Artificial Sequence
  Description of Artificial Sequence: Synthetic oligonucleotide
ggccacacuguucgggaac

SEQ ID NO: 1706323 - RNA, 19 nt, Artificial Sequence
  Description of Artificial Sequence: Synthetic oligonucleotide
gcaauuaucacagggcauu

SEQ ID NO: 1706324 - RNA, 19 nt, Artificial Sequence
  Description of Artificial Sequence: Synthetic oligonucleotide
cugagucaccucccgaugu

SEQ ID NO: 1706325 - RNA, 19 nt, Artificial Sequence
  Description of Artificial Sequence: Synthetic oligonucleotide
gacaaucgaagcccauauu

SEQ ID NO: 1706326 - RNA, 19 nt, Artificial Sequence
  Description of Artificial Sequence: Synthetic oligonucleotide
aaaugccgguagcguucau

SEQ ID NO: 1706327 - RNA, 19 nt, Artificial Sequence
  Description of Artificial Sequence: Synthetic oligonucleotide
gccaaauggucccauaguu

SEQ ID NO: 1706328 - RNA, 19 nt, Artificial Sequence
  Description of Artificial Sequence: Synthetic oligonucleotide
cgggaacauauaucugggg

SEQ ID NO: 1706329 - RNA, 19 nt, Artificial Sequence
  Description of Artificial Sequence: Synthetic oligonucleotide
uuccucccuuuugcaaaga

SEQ ID NO: 1706330 - RNA, 19 nt, Artificial Sequence
  Description of Artificial Sequence: Synthetic oligonucleotide
guuuuaugggucaggcuuu

SEQ ID NO: 1706331 - RNA, 19 nt, Artificial Sequence
  Description of Artificial Sequence: Synthetic oligonucleotide
uagcaccauuaaugaacuu

SEQ ID NO: 1706332 - RNA, 19 nt, Artificial Sequence
  Description of Artificial Sequence: Synthetic oligonucleotide
gcucaacacguacuccaga

SEQ ID NO: 1706333 - RNA, 19 nt, Artificial Sequence
  Description of Artificial Sequence: Synthetic oligonucleotide
guucgacaggugcaucacu

SEQ ID NO: 1706334 - RNA, 19 nt, Artificial Sequence
  Description of Artificial Sequence: Synthetic oligonucleotide
ccauugaggugacaaucga

SEQ ID NO: 1706335 - RNA, 19 nt, Artificial Sequence
  Description of Artificial Sequence: Synthetic oligonucleotide
ucugauccugagggccaaa

SEQ ID NO: 1706336 - RNA, 19 nt, Artificial Sequence
  Description of Artificial Sequence: Synthetic oligonucleotide
gaaucccguagaaguugaa

SEQ ID NO: 1706337 - RNA, 19 nt, Artificial Sequence
  Description of Artificial Sequence: Synthetic oligonucleotide
cucccgauguaaacccaua

SEQ ID NO: 1706338 - RNA, 19 nt, Artificial Sequence
  Description of Artificial Sequence: Synthetic oligonucleotide
cccgauguaaacccauaaa

SEQ ID NO: 1706339 - RNA, 19 nt, Artificial Sequence
  Description of Artificial Sequence: Synthetic oligonucleotide
cuucagcccgaagagcaua

SEQ ID NO: 1706340 - RNA, 19 nt, Artificial Sequence
  Description of Artificial Sequence: Synthetic oligonucleotide
cacacucaacucuggcacu

SEQ ID NO: 1706341 - RNA, 19 nt, Artificial Sequence
  Description of Artificial Sequence: Synthetic oligonucleotide
uggccacaugagacucauc

SEQ ID NO: 1706342 - RNA, 19 nt, Artificial Sequence
  Description of Artificial Sequence: Synthetic oligonucleotide
cgaccggagggacaccgcg

SEQ ID NO: 1706343 - RNA, 19 nt, Artificial Sequence
  Description of Artificial Sequence: Synthetic oligonucleotide
ccuuagcaccauuaaugaa

SEQ ID NO: 1706344 - RNA, 19 nt, Artificial Sequence
  Description of Artificial Sequence: Synthetic oligonucleotide
gucccauugaggugacaau

SEQ ID NO: 1706345 - RNA, 19 nt, Artificial Sequence
  Description of Artificial Sequence: Synthetic oligonucleotide
ucccagcgaccggagggac

SEQ ID NO: 1706346 - RNA, 19 nt, Artificial Sequence
  Description of Artificial Sequence: Synthetic oligonucleotide
accucccgauguaaaccca

SEQ ID NO: 1706347 - RNA, 19 nt, Artificial Sequence
  Description of Artificial Sequence: Synthetic oligonucleotide
ccugggagauaggaaacca

SEQ ID NO: 1706348 - RNA, 19 nt, Artificial Sequence
  Description of Artificial Sequence: Synthetic oligonucleotide
cacacuguucgggaacaua

SEQ ID NO: 1706349 - RNA, 19 nt, Artificial Sequence
  Description of Artificial Sequence: Synthetic oligonucleotide
gggacaccgcgcccaggcc

SEQ ID NO: 1706350 - RNA, 19 nt, Artificial Sequence
  Description of Artificial Sequence: Synthetic oligonucleotide
ccagaauaugaacuagcau

SEQ ID NO: 1706351 - RNA, 19 nt, Artificial Sequence
  Description of Artificial Sequence: Synthetic oligonucleotide
ccuaaaugccgguagcguu

SEQ ID NO: 1706352 - RNA, 19 nt, Artificial Sequence
  Description of Artificial Sequence: Synthetic oligonucleotide
gacaccgcgcccaggcccu

SEQ ID NO: 1706353 - RNA, 19 nt, Artificial Sequence
  Description of Artificial Sequence: Synthetic oligonucleotide
acagagcacaugagccauu

SEQ ID NO: 1706354 - RNA, 19 nt, Artificial Sequence
  Description of Artificial Sequence: Synthetic oligonucleotide
ccaaauggucccauaguuu

SEQ ID NO: 1706355 - RNA, 19 nt, Artificial Sequence
  Description of Artificial Sequence: Synthetic oligonucleotide
ccguagaaguugaauuccu

SEQ ID NO: 1706356 - RNA, 19 nt, Artificial Sequence
  Description of Artificial Sequence: Synthetic oligonucleotide
cuagaacaucaggcaaagu

SEQ ID NO: 1706357 - RNA, 19 nt, Artificial Sequence
  Description of Artificial Sequence: Synthetic oligonucleotide
cagagcacaugagccauuu

SEQ ID NO: 1706358 - RNA, 19 nt, Artificial Sequence
  Description of Artificial Sequence: Synthetic oligonucleotide
ggacgcaaauuccucccuu

SEQ ID NO: 1706359 - RNA, 19 nt, Artificial Sequence
  Description of Artificial Sequence: Synthetic oligonucleotide
cagcagccaaggucaucaa

SEQ ID NO: 1706360 - RNA, 19 nt, Artificial Sequence
  Description of Artificial Sequence: Synthetic oligonucleotide
cgaagagcauagcaaauuu

SEQ ID NO: 1706361 - RNA, 19 nt, Artificial Sequence
  Description of Artificial Sequence: Synthetic oligonucleotide
cccugcaguugaaaaggcu

SEQ ID NO: 1706362 - RNA, 19 nt, Artificial Sequence
  Description of Artificial Sequence: Synthetic oligonucleotide
cagcgaccggagggacacc

SEQ ID NO: 1706363 - RNA, 19 nt, Artificial Sequence
  Description of Artificial Sequence: Synthetic oligonucleotide
caguauccuucagcccgaa

SEQ ID NO: 1706364 - RNA, 19 nt, Artificial Sequence
  Description of Artificial Sequence: Synthetic oligonucleotide
gcgaccggagggacaccgc

SEQ ID NO: 1706365 - RNA, 19 nt, Artificial Sequence
  Description of Artificial Sequence: Synthetic oligonucleotide
ggugacaaucgaagcccau

SEQ ID NO: 1706366 - RNA, 19 nt, Artificial Sequence
  Description of Artificial Sequence: Synthetic oligonucleotide
ccucccgauguaaacccau

SEQ ID NO: 1706367 - RNA, 19 nt, Artificial Sequence
  Description of Artificial Sequence: Synthetic oligonucleotide
cccagcgaccggagggaca

SEQ ID NO: 1706368 - RNA, 19 nt, Artificial Sequence
  Description of Artificial Sequence: Synthetic oligonucleotide
cagucccauugaggugaca

SEQ ID NO: 1706369 - RNA, 19 nt, Artificial Sequence
  Description of Artificial Sequence: Synthetic oligonucleotide
ccgguagcguucaucuguu

SEQ ID NO: 1706370 - RNA, 19 nt, Artificial Sequence
  Description of Artificial Sequence: Synthetic oligonucleotide
cgguagcguucaucuguuu

SEQ ID NO: 1706371 - RNA, 19 nt, Artificial Sequence
  Description of Artificial Sequence: Synthetic oligonucleotide
aaauggauuagaauacucc

SEQ ID NO: 1706372 - RNA, 19 nt, Artificial Sequence
  Description of Artificial Sequence: Synthetic oligonucleotide
auuuuaggggcccagaggg

SEQ ID NO: 1706373 - RNA, 19 nt, Artificial Sequence
  Description of Artificial Sequence: Synthetic oligonucleotide
auuagaauacuccacaaca

SEQ ID NO: 1706374 - RNA, 19 nt, Artificial Sequence
  Description of Artificial Sequence: Synthetic oligonucleotide
aauggauuagaauacucca

SEQ ID NO: 1706375 - RNA, 19 nt, Artificial Sequence
  Description of Artificial Sequence: Synthetic oligonucleotide
uagaauacuccacaacagg

SEQ ID NO: 1706376 - RNA, 19 nt, Artificial Sequence
  Description of Artificial Sequence: Synthetic oligonucleotide
uuagaauacuccacaacag

SEQ ID NO: 1706377 - RNA, 19 nt, Artificial Sequence
  Description of Artificial Sequence: Synthetic oligonucleotide
uuguuggcgacaaaguggg

SEQ ID NO: 1706378 - RNA, 19 nt, Artificial Sequence
  Description of Artificial Sequence: Synthetic oligonucleotide
uaaggaauccaccgcgucg

SEQ ID NO: 1706379 - RNA, 19 nt, Artificial Sequence
  Description of Artificial Sequence: Synthetic oligonucleotide
aaaauggauuagaauacuc

SEQ ID NO: 1706380 - RNA, 19 nt, Artificial Sequence
  Description of Artificial Sequence: Synthetic oligonucleotide
aaggaauccaccgcgucgc

SEQ ID NO: 1706381 - RNA, 19 nt, Artificial Sequence
  Description of Artificial Sequence: Synthetic oligonucleotide
aacguucucagccucuuca

SEQ ID NO: 1706382 - RNA, 19 nt, Artificial Sequence
  Description of Artificial Sequence: Synthetic oligonucleotide
gagugcgucggauaucucg

SEQ ID NO: 1706383 - RNA, 19 nt, Artificial Sequence
  Description of Artificial Sequence: Synthetic oligonucleotide
gauuagaauacuccacaac

SEQ ID NO: 1706384 - RNA, 19 nt, Artificial Sequence
  Description of Artificial Sequence: Synthetic oligonucleotide
ucgccuaaggaauccaccg

SEQ ID NO: 1706385 - RNA, 19 nt, Artificial Sequence
  Description of Artificial Sequence: Synthetic oligonucleotide
uuaucugcagaugugcgcc

SEQ ID NO: 1706386 - RNA, 19 nt, Artificial Sequence
  Description of Artificial Sequence: Synthetic oligonucleotide
accguuggaaucaagacag

SEQ ID NO: 1706387 - RNA, 19 nt, Artificial Sequence
  Description of Artificial Sequence: Synthetic oligonucleotide
agaugugcgcccuugcccg

SEQ ID NO: 1706388 - RNA, 19 nt, Artificial Sequence
  Description of Artificial Sequence: Synthetic oligonucleotide
ucggauaucucggacuugg

SEQ ID NO: 1706389 - RNA, 19 nt, Artificial Sequence
  Description of Artificial Sequence: Synthetic oligonucleotide
uccuguuagcuccaccccg

SEQ ID NO: 1706390 - RNA, 19 nt, Artificial Sequence
  Description of Artificial Sequence: Synthetic oligonucleotide
gaccccaacguucucagcc

SEQ ID NO: 1706391 - RNA, 19 nt, Artificial Sequence
  Description of Artificial Sequence: Synthetic oligonucleotide
uccuaaagccccuagcacu

SEQ ID NO: 1706392 - RNA, 19 nt, Artificial Sequence
  Description of Artificial Sequence: Synthetic oligonucleotide
cagaucgcgacucagccgc

SEQ ID NO: 1706393 - RNA, 19 nt, Artificial Sequence
  Description of Artificial Sequence: Synthetic oligonucleotide
gccaaaauggauuagaaua

SEQ ID NO: 1706394 - RNA, 19 nt, Artificial Sequence
  Description of Artificial Sequence: Synthetic oligonucleotide
guuagcuccaccccguggc

SEQ ID NO: 1706395 - RNA, 19 nt, Artificial Sequence
  Description of Artificial Sequence: Synthetic oligonucleotide
gauaucucggacuuggcgu

SEQ ID NO: 1706396 - RNA, 19 nt, Artificial Sequence
  Description of Artificial Sequence: Synthetic oligonucleotide
agcuccuaaagccccuagc

SEQ ID NO: 1706397 - RNA, 19 nt, Artificial Sequence
  Description of Artificial Sequence: Synthetic oligonucleotide
guuaucugcagaugugcgc

SEQ ID NO: 1706398 - RNA, 19 nt, Artificial Sequence
  Description of Artificial Sequence: Synthetic oligonucleotide
gaagcagacgguccacccg

SEQ ID NO: 1706399 - RNA, 19 nt, Artificial Sequence
  Description of Artificial Sequence: Synthetic oligonucleotide
uucgccuaaggaauccacc

SEQ ID NO: 1706400 - RNA, 19 nt, Artificial Sequence
  Description of Artificial Sequence: Synthetic oligonucleotide
aggucugaccguuggaauc

SEQ ID NO: 1706401 - RNA, 19 nt, Artificial Sequence
  Description of Artificial Sequence: Synthetic oligonucleotide
aaucgugggagugggugcg

SEQ ID NO: 1706402 - RNA, 19 nt, Artificial Sequence
  Description of Artificial Sequence: Synthetic oligonucleotide
aagccccuagcacuugagg

SEQ ID NO: 1706403 - RNA, 19 nt, Artificial Sequence
  Description of Artificial Sequence: Synthetic oligonucleotide
ugaccguuggaaucaagac

SEQ ID NO: 1706404 - RNA, 19 nt, Artificial Sequence
  Description of Artificial Sequence: Synthetic oligonucleotide
ucuggauacagcccacgcu

SEQ ID NO: 1706405 - RNA, 19 nt, Artificial Sequence
  Description of Artificial Sequence: Synthetic oligonucleotide
accgucaaggccgagggcg

SEQ ID NO: 1706406 - RNA, 19 nt, Artificial Sequence
  Description of Artificial Sequence: Synthetic oligonucleotide
cacccggccgcccagaucg

SEQ ID NO: 1706407 - RNA, 19 nt, Artificial Sequence
  Description of Artificial Sequence: Synthetic oligonucleotide
agugagacaccucccaccu

SEQ ID NO: 1706408 - RNA, 19 nt, Artificial Sequence
  Description of Artificial Sequence: Synthetic oligonucleotide
uguuagcuccaccccgugg

SEQ ID NO: 1706409 - RNA, 19 nt, Artificial Sequence
  Description of Artificial Sequence: Synthetic oligonucleotide
cucaagcuccuaaagcccc

SEQ ID NO: 1706410 - RNA, 19 nt, Artificial Sequence
  Description of Artificial Sequence: Synthetic oligonucleotide
cuggauacagcccacgcuc

SEQ ID NO: 1706411 - RNA, 19 nt, Artificial Sequence
  Description of Artificial Sequence: Synthetic oligonucleotide
caaggaccacucaagcucc

SEQ ID NO: 1706412 - RNA, 19 nt, Artificial Sequence
  Description of Artificial Sequence: Synthetic oligonucleotide
gaccguuggaaucaagaca

SEQ ID NO: 1706413 - RNA, 19 nt, Artificial Sequence
  Description of Artificial Sequence: Synthetic oligonucleotide
ggauaucucggacuuggcg

SEQ ID NO: 1706414 - RNA, 19 nt, Artificial Sequence
  Description of Artificial Sequence: Synthetic oligonucleotide
gacggcgucgcccggaugc

SEQ ID NO: 1706415 - RNA, 19 nt, Artificial Sequence
  Description of Artificial Sequence: Synthetic oligonucleotide
ggaaucaagacagccacag

SEQ ID NO: 1706416 - RNA, 19 nt, Artificial Sequence
  Description of Artificial Sequence: Synthetic oligonucleotide
uggacgacgcugccgcucg

SEQ ID NO: 1706417 - RNA, 19 nt, Artificial Sequence
  Description of Artificial Sequence: Synthetic oligonucleotide
cagcccgcgaagcagacgg

SEQ ID NO: 1706418 - RNA, 19 nt, Artificial Sequence
  Description of Artificial Sequence: Synthetic oligonucleotide
uucuaccugagcagagagc

SEQ ID NO: 1706419 - RNA, 19 nt, Artificial Sequence
  Description of Artificial Sequence: Synthetic oligonucleotide
gaggaaucgugggaguggg

SEQ ID NO: 1706420 - RNA, 19 nt, Artificial Sequence
  Description of Artificial Sequence: Synthetic oligonucleotide
agugcgucggauaucucgg

SEQ ID NO: 1706421 - RNA, 19 nt, Artificial Sequence
  Description of Artificial Sequence: Synthetic oligonucleotide
guuggcgacaaagugggug

SEQ ID NO: 1706422 - RNA, 19 nt, Artificial Sequence
  Description of Artificial Sequence: Synthetic oligonucleotide
cagugagacaccucccacc

SEQ ID NO: 1706423 - RNA, 19 nt, Artificial Sequence
  Description of Artificial Sequence: Synthetic oligonucleotide
ugcgcccuugcccgaaugg

SEQ ID NO: 1706424 - RNA, 19 nt, Artificial Sequence
  Description of Artificial Sequence: Synthetic oligonucleotide
agccccuagcacuugaggu

SEQ ID NO: 1706425 - RNA, 19 nt, Artificial Sequence
  Description of Artificial Sequence: Synthetic oligonucleotide
uccacggcuucgccuaagg

SEQ ID NO: 1706426 - RNA, 19 nt, Artificial Sequence
  Description of Artificial Sequence: Synthetic oligonucleotide
gagcuguagguuguuggcg

SEQ ID NO: 1706427 - RNA, 19 nt, Artificial Sequence
  Description of Artificial Sequence: Synthetic oligonucleotide
gccuaaggaauccaccgcg

SEQ ID NO: 1706428 - RNA, 19 nt, Artificial Sequence
  Description of Artificial Sequence: Synthetic oligonucleotide
gaaccggcugcagagcccg

SEQ ID NO: 1706429 - RNA, 19 nt, Artificial Sequence
  Description of Artificial Sequence: Synthetic oligonucleotide
guuggaaucaagacagcca

SEQ ID NO: 1706430 - RNA, 19 nt, Artificial Sequence
  Description of Artificial Sequence: Synthetic oligonucleotide
cucgcagcgcgcaagcaag

SEQ ID NO: 1706431 - RNA, 19 nt, Artificial Sequence
  Description of Artificial Sequence: Synthetic oligonucleotide
caccccguggcauuuuagg

SEQ ID NO: 1706432 - RNA, 19 nt, Artificial Sequence
  Description of Artificial Sequence: Synthetic oligonucleotide
uucgagggcgucgggaccg

SEQ ID NO: 1706433 - RNA, 19 nt, Artificial Sequence
  Description of Artificial Sequence: Synthetic oligonucleotide
acaaagugggugaggucgc

SEQ ID NO: 1706434 - RNA, 19 nt, Artificial Sequence
  Description of Artificial Sequence: Synthetic oligonucleotide
gaagucgcggccugauggc

SEQ ID NO: 1706435 - RNA, 19 nt, Artificial Sequence
  Description of Artificial Sequence: Synthetic oligonucleotide
cugaccguuggaaucaaga

SEQ ID NO: 1706436 - RNA, 19 nt, Artificial Sequence
  Description of Artificial Sequence: Synthetic oligonucleotide
gucgggaccggcuugccgc

SEQ ID NO: 1706437 - RNA, 19 nt, Artificial Sequence
  Description of Artificial Sequence: Synthetic oligonucleotide
uaccugagcagagagcagu

SEQ ID NO: 1706438 - RNA, 19 nt, Artificial Sequence
  Description of Artificial Sequence: Synthetic oligonucleotide
gagguuaucugcagaugug

SEQ ID NO: 1706439 - RNA, 19 nt, Artificial Sequence
  Description of Artificial Sequence: Synthetic oligonucleotide
uguagguuguuggcgacaa

SEQ ID NO: 1706440 - RNA, 19 nt, Artificial Sequence
  Description of Artificial Sequence: Synthetic oligonucleotide
ucgcgguaggucuggauac

SEQ ID NO: 1706441 - RNA, 19 nt, Artificial Sequence
  Description of Artificial Sequence: Synthetic oligonucleotide
acggaggacgccccuccgc

SEQ ID NO: 1706442 - RNA, 19 nt, Artificial Sequence
  Description of Artificial Sequence: Synthetic oligonucleotide
cuaaggaauccaccgcguc

SEQ ID NO: 1706443 - RNA, 19 nt, Artificial Sequence
  Description of Artificial Sequence: Synthetic oligonucleotide
ugcgucggauaucucggac

SEQ ID NO: 1706444 - RNA, 19 nt, Artificial Sequence
  Description of Artificial Sequence: Synthetic oligonucleotide
cuugccgcuggaagucgcg

SEQ ID NO: 1706445 - RNA, 19 nt, Artificial Sequence
  Description of Artificial Sequence: Synthetic oligonucleotide
acggcucgcgaccccaacg

SEQ ID NO: 1706446 - RNA, 19 nt, Artificial Sequence
  Description of Artificial Sequence: Synthetic oligonucleotide
uccacaacaggugggcuuc

SEQ ID NO: 1706447 - RNA, 19 nt, Artificial Sequence
  Description of Artificial Sequence: Synthetic oligonucleotide
uccaccgcgucgcgguagg

SEQ ID NO: 1706448 - RNA, 19 nt, Artificial Sequence
  Description of Artificial Sequence: Synthetic oligonucleotide
aggcauccggcuccggccg

SEQ ID NO: 1706449 - RNA, 19 nt, Artificial Sequence
  Description of Artificial Sequence: Synthetic oligonucleotide
gcagcggcacuuuaauucc

SEQ ID NO: 1706450 - RNA, 19 nt, Artificial Sequence
  Description of Artificial Sequence: Synthetic oligonucleotide
ggaaucgugggagugggug

SEQ ID NO: 1706451 - RNA, 19 nt, Artificial Sequence
  Description of Artificial Sequence: Synthetic oligonucleotide
agacucccucagcacgucg

SEQ ID NO: 1706452 - RNA, 19 nt, Artificial Sequence
  Description of Artificial Sequence: Synthetic oligonucleotide
ugcccgaaugguguguggc

SEQ ID NO: 1706453 - RNA, 19 nt, Artificial Sequence
  Description of Artificial Sequence: Synthetic oligonucleotide
cacggcuucgccuaaggaa

SEQ ID NO: 1706454 - RNA, 19 nt, Artificial Sequence
  Description of Artificial Sequence: Synthetic oligonucleotide
aguucuaccugagcagaga

SEQ ID NO: 1706455 - RNA, 19 nt, Artificial Sequence
  Description of Artificial Sequence: Synthetic oligonucleotide
aagcuccccgggcaccguc

SEQ ID NO: 1706456 - RNA, 19 nt, Artificial Sequence
  Description of Artificial Sequence: Synthetic oligonucleotide
agcggcacuuuaauuccac

SEQ ID NO: 1706457 - RNA, 19 nt, Artificial Sequence
  Description of Artificial Sequence: Synthetic oligonucleotide
ucgcagcgcgcaagcaagg

SEQ ID NO: 1706458 - RNA, 19 nt, Artificial Sequence
  Description of Artificial Sequence: Synthetic oligonucleotide
acgacgcugccgcucgacg

SEQ ID NO: 1706459 - RNA, 19 nt, Artificial Sequence
  Description of Artificial Sequence: Synthetic oligonucleotide
ccacucaagcuccuaaagc

SEQ ID NO: 1706460 - RNA, 19 nt, Artificial Sequence
  Description of Artificial Sequence: Synthetic oligonucleotide
uugcccgaauggugugugg

SEQ ID NO: 1706461 - RNA, 19 nt, Artificial Sequence
  Description of Artificial Sequence: Synthetic oligonucleotide
gggucgaugggaggaaucg

SEQ ID NO: 1706462 - RNA, 19 nt, Artificial Sequence
  Description of Artificial Sequence: Synthetic oligonucleotide
uggaagucgcggccugaug

SEQ ID NO: 1706463 - RNA, 19 nt, Artificial Sequence
  Description of Artificial Sequence: Synthetic oligonucleotide
gaauccaccgcgucgcggu

SEQ ID NO: 1706464 - RNA, 19 nt, Artificial Sequence
  Description of Artificial Sequence: Synthetic oligonucleotide
acggcuucgccuaaggaau

SEQ ID NO: 1706465 - RNA, 19 nt, Artificial Sequence
  Description of Artificial Sequence: Synthetic oligonucleotide
aucucggacuuggcgugcc

SEQ ID NO: 1706466 - RNA, 19 nt, Artificial Sequence
  Description of Artificial Sequence: Synthetic oligonucleotide
guacaugcccuugaugcuc

SEQ ID NO: 1706467 - RNA, 19 nt, Artificial Sequence
  Description of Artificial Sequence: Synthetic oligonucleotide
uguacccgccccacccagc

SEQ ID NO: 1706468 - RNA, 19 nt, Artificial Sequence
  Description of Artificial Sequence: Synthetic oligonucleotide
cuucaagcuccccgggcac

SEQ ID NO: 1706469 - RNA, 19 nt, Artificial Sequence
  Description of Artificial Sequence: Synthetic oligonucleotide
ccccguggcauuuuagggg

SEQ ID NO: 1706470 - RNA, 19 nt, Artificial Sequence
  Description of Artificial Sequence: Synthetic oligonucleotide
aggaauccaccgcgucgcg

SEQ ID NO: 1706471 - RNA, 19 nt, Artificial Sequence
  Description of Artificial Sequence: Synthetic oligonucleotide
guacccgccccacccagcc

SEQ ID NO: 1706472 - RNA, 19 nt, Artificial Sequence
  Description of Artificial Sequence: Synthetic oligonucleotide
gcacgccccacucagcccg

SEQ ID NO: 1706473 - RNA, 19 nt, Artificial Sequence
  Description of Artificial Sequence: Synthetic oligonucleotide
ugccgcuggaagucgcggc

SEQ ID NO: 1706474 - RNA, 19 nt, Artificial Sequence
  Description of Artificial Sequence: Synthetic oligonucleotide
ucgacguccucggggacgc

SEQ ID NO: 1706475 - RNA, 19 nt, Artificial Sequence
  Description of Artificial Sequence: Synthetic oligonucleotide
ugaaggcggcuggggaacg

SEQ ID NO: 1706476 - RNA, 19 nt, Artificial Sequence
  Description of Artificial Sequence: Synthetic oligonucleotide
uugccgcuggaagucgcgg

SEQ ID NO: 1706477 - RNA, 19 nt, Artificial Sequence
  Description of Artificial Sequence: Synthetic oligonucleotide
cccagaucgcgacucagcc

SEQ ID NO: 1706478 - RNA, 19 nt, Artificial Sequence
  Description of Artificial Sequence: Synthetic oligonucleotide
gacgcugccgcucgacguc

SEQ ID NO: 1706479 - RNA, 19 nt, Artificial Sequence
  Description of Artificial Sequence: Synthetic oligonucleotide
cuacccgccgccccaggag

SEQ ID NO: 1706480 - RNA, 19 nt, Artificial Sequence
  Description of Artificial Sequence: Synthetic oligonucleotide
cucaccgugcccucgagcu

SEQ ID NO: 1706481 - RNA, 19 nt, Artificial Sequence
  Description of Artificial Sequence: Synthetic oligonucleotide
cauagggccuccaacacuu

SEQ ID NO: 1706482 - RNA, 19 nt, Artificial Sequence
  Description of Artificial Sequence: Synthetic oligonucleotide
cugaaggcggcuggggaac

SEQ ID NO: 1706483 - RNA, 19 nt, Artificial Sequence
  Description of Artificial Sequence: Synthetic oligonucleotide
ucgugggagugggugcggg

SEQ ID NO: 1706484 - RNA, 19 nt, Artificial Sequence
  Description of Artificial Sequence: Synthetic oligonucleotide
cucagcccguccaggcugc

SEQ ID NO: 1706485 - RNA, 19 nt, Artificial Sequence
  Description of Artificial Sequence: Synthetic oligonucleotide
uaucucggacuuggcgugc

SEQ ID NO: 1706486 - RNA, 19 nt, Artificial Sequence
  Description of Artificial Sequence: Synthetic oligonucleotide
aagucgcggccugauggcu

SEQ ID NO: 1706487 - RNA, 19 nt, Artificial Sequence
  Description of Artificial Sequence: Synthetic oligonucleotide
gagcggccggcccuacccg

SEQ ID NO: 1706488 - RNA, 19 nt, Artificial Sequence
  Description of Artificial Sequence: Synthetic oligonucleotide
gugccgucagcuccuguac

SEQ ID NO: 1706489 - RNA, 19 nt, Artificial Sequence
  Description of Artificial Sequence: Synthetic oligonucleotide
ucucggacuuggcgugcca

SEQ ID NO: 1706490 - RNA, 19 nt, Artificial Sequence
  Description of Artificial Sequence: Synthetic oligonucleotide
cguuggaaucaagacagcc

SEQ ID NO: 1706491 - RNA, 19 nt, Artificial Sequence
  Description of Artificial Sequence: Synthetic oligonucleotide
ccagaucgcgacucagccg

SEQ ID NO: 1706492 - RNA, 19 nt, Artificial Sequence
  Description of Artificial Sequence: Synthetic oligonucleotide
cuccucgcagcgcgcaagc

SEQ ID NO: 1706493 - RNA, 19 nt, Artificial Sequence
  Description of Artificial Sequence: Synthetic oligonucleotide
uguuggcgacaaagugggu

SEQ ID NO: 1706494 - RNA, 19 nt, Artificial Sequence
  Description of Artificial Sequence: Synthetic oligonucleotide
cucggacuuggcgugccag

SEQ ID NO: 1706495 - RNA, 19 nt, Artificial Sequence
  Description of Artificial Sequence: Synthetic oligonucleotide
acgagcggccggcccuacc

SEQ ID NO: 1706496 - RNA, 19 nt, Artificial Sequence
  Description of Artificial Sequence: Synthetic oligonucleotide
acgccccuccgccgcacgc

SEQ ID NO: 1706497 - RNA, 19 nt, Artificial Sequence
  Description of Artificial Sequence: Synthetic oligonucleotide
ggacgcucgugggugacgg

SEQ ID NO: 1706498 - RNA, 19 nt, Artificial Sequence
  Description of Artificial Sequence: Synthetic oligonucleotide
ggcaccgucaaggccgagg

SEQ ID NO: 1706499 - RNA, 19 nt, Artificial Sequence
  Description of Artificial Sequence: Synthetic oligonucleotide
cgugccagccccugaaccg

SEQ ID NO: 1706500 - RNA, 19 nt, Artificial Sequence
  Description of Artificial Sequence: Synthetic oligonucleotide
gucggggucgaugggagga

SEQ ID NO: 1706501 - RNA, 19 nt, Artificial Sequence
  Description of Artificial Sequence: Synthetic oligonucleotide
acagcggguggccucucau

SEQ ID NO: 1706502 - RNA, 19 nt, Artificial Sequence
  Description of Artificial Sequence: Synthetic oligonucleotide
cagcgcgcaagcaaggugu

SEQ ID NO: 1706503 - RNA, 19 nt, Artificial Sequence
  Description of Artificial Sequence: Synthetic oligonucleotide
ggucugaccguuggaauca

SEQ ID NO: 1706504 - RNA, 19 nt, Artificial Sequence
  Description of Artificial Sequence: Synthetic oligonucleotide
acgcucgugggugacggcu

SEQ ID NO: 1706505 - RNA, 19 nt, Artificial Sequence
  Description of Artificial Sequence: Synthetic oligonucleotide
uccaccccguggcauuuua

SEQ ID NO: 1706506 - RNA, 19 nt, Artificial Sequence
  Description of Artificial Sequence: Synthetic oligonucleotide
cuguuagcuccaccccgug

SEQ ID NO: 1706507 - RNA, 19 nt, Artificial Sequence
  Description of Artificial Sequence: Synthetic oligonucleotide
gaggucugaccguuggaau

SEQ ID NO: 1706508 - RNA, 19 nt, Artificial Sequence
  Description of Artificial Sequence: Synthetic oligonucleotide
gcgaccccaacguucucag

SEQ ID NO: 1706509 - RNA, 19 nt, Artificial Sequence
  Description of Artificial Sequence: Synthetic oligonucleotide
ggaauccaccgcgucgcgg

SEQ ID NO: 1706510 - RNA, 19 nt, Artificial Sequence
  Description of Artificial Sequence: Synthetic oligonucleotide
cucccucagcacgucgggg

SEQ ID NO: 1706511 - RNA, 19 nt, Artificial Sequence
  Description of Artificial Sequence: Synthetic oligonucleotide
gccccuagcacuugagguc

SEQ ID NO: 1706512 - RNA, 19 nt, Artificial Sequence
  Description of Artificial Sequence: Synthetic oligonucleotide
uccggccgguggacgacgc

SEQ ID NO: 1706513 - RNA, 19 nt, Artificial Sequence
  Description of Artificial Sequence: Synthetic oligonucleotide
cacggaggacgccccuccg

SEQ ID NO: 1706514 - RNA, 19 nt, Artificial Sequence
  Description of Artificial Sequence: Synthetic oligonucleotide
ggcgacaaagugggugagg

SEQ ID NO: 1706515 - RNA, 19 nt, Artificial Sequence
  Description of Artificial Sequence: Synthetic oligonucleotide
gcagcgcgcaagcaaggug

SEQ ID NO: 1706516 - RNA, 19 nt, Artificial Sequence
  Description of Artificial Sequence: Synthetic oligonucleotide
ucgcccggaugcccggcug

SEQ ID NO: 1706517 - RNA, 19 nt, Artificial Sequence
  Description of Artificial Sequence: Synthetic oligonucleotide
gacgccccuccgccgcacg

SEQ ID NO: 1706518 - RNA, 19 nt, Artificial Sequence
  Description of Artificial Sequence: Synthetic oligonucleotide
gcccgaaugguguguggcc

SEQ ID NO: 1706519 - RNA, 19 nt, Artificial Sequence
  Description of Artificial Sequence: Synthetic oligonucleotide
gaugugcgcccuugcccga

SEQ ID NO: 1706520 - RNA, 19 nt, Artificial Sequence
  Description of Artificial Sequence: Synthetic oligonucleotide
gcucgugggugacggcucg

SEQ ID NO: 1706521 - RNA, 19 nt, Artificial Sequence
  Description of Artificial Sequence: Synthetic oligonucleotide
ucgggaccggcuugccgcu

SEQ ID NO: 1706522 - RNA, 19 nt, Artificial Sequence
  Description of Artificial Sequence: Synthetic oligonucleotide
gaugcccggcugguccucc

SEQ ID NO: 1706523 - RNA, 19 nt, Artificial Sequence
  Description of Artificial Sequence: Synthetic oligonucleotide
ggcgugcucagaaccugcg

SEQ ID NO: 1706524 - RNA, 19 nt, Artificial Sequence
  Description of Artificial Sequence: Synthetic oligonucleotide
aaggaccacucaagcuccu

SEQ ID NO: 1706525 - RNA, 19 nt, Artificial Sequence
  Description of Artificial Sequence: Synthetic oligonucleotide
gccgcuggaagucgcggcc

SEQ ID NO: 1706526 - RNA, 19 nt, Artificial Sequence
  Description of Artificial Sequence: Synthetic oligonucleotide
gacggcucgcgaccccaac

SEQ ID NO: 1706527 - RNA, 19 nt, Artificial Sequence
  Description of Artificial Sequence: Synthetic oligonucleotide
gccguggcggcucaccgug

SEQ ID NO: 1706528 - RNA, 19 nt, Artificial Sequence
  Description of Artificial Sequence: Synthetic oligonucleotide
caugcccuugaugcucaug

SEQ ID NO: 1706529 - RNA, 19 nt, Artificial Sequence
  Description of Artificial Sequence: Synthetic oligonucleotide
ggaccacucaagcuccuaa

SEQ ID NO: 1706530 - RNA, 19 nt, Artificial Sequence
  Description of Artificial Sequence: Synthetic oligonucleotide
gacgcucgugggugacggc

SEQ ID NO: 1706531 - RNA, 19 nt, Artificial Sequence
  Description of Artificial Sequence: Synthetic oligonucleotide
cccgcgaagcagacggucc

SEQ ID NO: 1706532 - RNA, 19 nt, Artificial Sequence
  Description of Artificial Sequence: Synthetic oligonucleotide
uguccacggcuucgccuaa

SEQ ID NO: 1706533 - RNA, 19 nt, Artificial Sequence
  Description of Artificial Sequence: Synthetic oligonucleotide
cucgcgaccccaacguucu

SEQ ID NO: 1706534 - RNA, 19 nt, Artificial Sequence
  Description of Artificial Sequence: Synthetic oligonucleotide
cuccuguacccgccccacc

SEQ ID NO: 1706535 - RNA, 19 nt, Artificial Sequence
  Description of Artificial Sequence: Synthetic oligonucleotide
cagcggguggccucucauc

SEQ ID NO: 1706536 - RNA, 19 nt, Artificial Sequence
  Description of Artificial Sequence: Synthetic oligonucleotide
gggaagaagcaggagguua

SEQ ID NO: 1706537 - RNA, 19 nt, Artificial Sequence
  Description of Artificial Sequence: Synthetic oligonucleotide
gacgacgcugccgcucgac

SEQ ID NO: 1706538 - RNA, 19 nt, Artificial Sequence
  Description of Artificial Sequence: Synthetic oligonucleotide
ccggggcgugcucagaacc

SEQ ID NO: 1706539 - RNA, 19 nt, Artificial Sequence
  Description of Artificial Sequence: Synthetic oligonucleotide
ggcuucgccuaaggaaucc

SEQ ID NO: 1706540 - RNA, 19 nt, Artificial Sequence
  Description of Artificial Sequence: Synthetic oligonucleotide
gacguccucggggacgcuc

SEQ ID NO: 1706541 - RNA, 19 nt, Artificial Sequence
  Description of Artificial Sequence: Synthetic oligonucleotide
gucggauaucucggacuug

SEQ ID NO: 1706542 - RNA, 19 nt, Artificial Sequence
  Description of Artificial Sequence: Synthetic oligonucleotide
ugacggcgucgcccggaug

SEQ ID NO: 1706543 - RNA, 19 nt, Artificial Sequence
  Description of Artificial Sequence: Synthetic oligonucleotide
ugacggcucgcgaccccaa

SEQ ID NO: 1706544 - RNA, 19 nt, Artificial Sequence
  Description of Artificial Sequence: Synthetic oligonucleotide
ugugcgcccuugcccgaau

SEQ ID NO: 1706545 - RNA, 19 nt, Artificial Sequence
  Description of Artificial Sequence: Synthetic oligonucleotide
cagggccgcgcggaggccg

SEQ ID NO: 1706546 - RNA, 19 nt, Artificial Sequence
  Description of Artificial Sequence: Synthetic oligonucleotide
uggcuggcugcggccgacg

SEQ ID NO: 1706547 - RNA, 19 nt, Artificial Sequence
  Description of Artificial Sequence: Synthetic oligonucleotide
ucagugccgucagcuccug

SEQ ID NO: 1706548 - RNA, 19 nt, Artificial Sequence
  Description of Artificial Sequence: Synthetic oligonucleotide
ccgucaaggccgagggcgg

SEQ ID NO: 1706549 - RNA, 19 nt, Artificial Sequence
  Description of Artificial Sequence: Synthetic oligonucleotide
cgguggacgacgcugccgc

SEQ ID NO: 1706550 - RNA, 19 nt, Artificial Sequence
  Description of Artificial Sequence: Synthetic oligonucleotide
cacgucggggucgauggga

SEQ ID NO: 1706551 - RNA, 19 nt, Artificial Sequence
  Description of Artificial Sequence: Synthetic oligonucleotide
gaucgcgacucagccgcuc

SEQ ID NO: 1706552 - RNA, 19 nt, Artificial Sequence
  Description of Artificial Sequence: Synthetic oligonucleotide
agagugcgucggauaucuc

SEQ ID NO: 1706553 - RNA, 19 nt, Artificial Sequence
  Description of Artificial Sequence: Synthetic oligonucleotide
gugcgucggauaucucgga

SEQ ID NO: 1706554 - RNA, 19 nt, Artificial Sequence
  Description of Artificial Sequence: Synthetic oligonucleotide
ccgcacgccccacucagcc

SEQ ID NO: 1706555 - RNA, 19 nt, Artificial Sequence
  Description of Artificial Sequence: Synthetic oligonucleotide
gcgguaggucuggauacag

SEQ ID NO: 1706556 - RNA, 19 nt, Artificial Sequence
  Description of Artificial Sequence: Synthetic oligonucleotide
cagcggcacuuuaauucca

SEQ ID NO: 1706557 - RNA, 19 nt, Artificial Sequence
  Description of Artificial Sequence: Synthetic oligonucleotide
ucaaggccgagggcggcuu

SEQ ID NO: 1706558 - RNA, 19 nt, Artificial Sequence
  Description of Artificial Sequence: Synthetic oligonucleotide
gugcgggcgucaggcaggg

SEQ ID NO: 1706559 - RNA, 19 nt, Artificial Sequence
  Description of Artificial Sequence: Synthetic oligonucleotide
ccgcucgacguccucgggg

SEQ ID NO: 1706560 - RNA, 19 nt, Artificial Sequence
  Description of Artificial Sequence: Synthetic oligonucleotide
guggacgacgcugccgcuc

SEQ ID NO: 1706561 - RNA, 19 nt, Artificial Sequence
  Description of Artificial Sequence: Synthetic oligonucleotide
cccggggcggccuccauac

SEQ ID NO: 1706562 - RNA, 19 nt, Artificial Sequence
  Description of Artificial Sequence: Synthetic oligonucleotide
cuccggccgguggacgacg

SEQ ID NO: 1706563 - RNA, 19 nt, Artificial Sequence
  Description of Artificial Sequence: Synthetic oligonucleotide
gcgacaaagugggugaggu

SEQ ID NO: 1706564 - RNA, 19 nt, Artificial Sequence
  Description of Artificial Sequence: Synthetic oligonucleotide
cgccuaaggaauccaccgc

SEQ ID NO: 1706565 - RNA, 19 nt, Artificial Sequence
  Description of Artificial Sequence: Synthetic oligonucleotide
gugcgcccuugcccgaaug

SEQ ID NO: 1706566 - RNA, 19 nt, Artificial Sequence
  Description of Artificial Sequence: Synthetic oligonucleotide
gaaggcggcuggggaacga

SEQ ID NO: 1706567 - RNA, 19 nt, Artificial Sequence
  Description of Artificial Sequence: Synthetic oligonucleotide
guagguuguuggcgacaaa

SEQ ID NO: 1706568 - RNA, 19 nt, Artificial Sequence
  Description of Artificial Sequence: Synthetic oligonucleotide
gcagacgguccacccggcc

SEQ ID NO: 1706569 - RNA, 19 nt, Artificial Sequence
  Description of Artificial Sequence: Synthetic oligonucleotide
ccguuggaaucaagacagc

SEQ ID NO: 1706570 - RNA, 19 nt, Artificial Sequence
  Description of Artificial Sequence: Synthetic oligonucleotide
ggugacggcucgcgacccc

SEQ ID NO: 1706571 - RNA, 19 nt, Artificial Sequence
  Description of Artificial Sequence: Synthetic oligonucleotide
gugacggcucgcgacccca

SEQ ID NO: 1706572 - RNA, 19 nt, Artificial Sequence
  Description of Artificial Sequence: Synthetic oligonucleotide
ggaacgagcggccggcccu

SEQ ID NO: 1706573 - RNA, 19 nt, Artificial Sequence
  Description of Artificial Sequence: Synthetic oligonucleotide
guguggccaaggaccacuc

SEQ ID NO: 1706574 - RNA, 19 nt, Artificial Sequence
  Description of Artificial Sequence: Synthetic oligonucleotide
gcucgcgaccccaacguuc

SEQ ID NO: 1706575 - RNA, 19 nt, Artificial Sequence
  Description of Artificial Sequence: Synthetic oligonucleotide
cgagcggccggcccuaccc

SEQ ID NO: 1706576 - RNA, 19 nt, Artificial Sequence
  Description of Artificial Sequence: Synthetic oligonucleotide
gcggcacuuuaauuccaca

SEQ ID NO: 1706577 - RNA, 19 nt, Artificial Sequence
  Description of Artificial Sequence: Synthetic oligonucleotide
cucgugggugacggcucgc

SEQ ID NO: 1706578 - RNA, 19 nt, Artificial Sequence
  Description of Artificial Sequence: Synthetic oligonucleotide
acgguccacccggccgccc

SEQ ID NO: 1706579 - RNA, 19 nt, Artificial Sequence
  Description of Artificial Sequence: Synthetic oligonucleotide
gacgguccacccggccgcc

SEQ ID NO: 1706580 - RNA, 19 nt, Artificial Sequence
  Description of Artificial Sequence: Synthetic oligonucleotide
cuggcugcggccgacgggu

SEQ ID NO: 1706581 - RNA, 19 nt, Artificial Sequence
  Description of Artificial Sequence: Synthetic oligonucleotide
ggggcgugcucagaaccug

SEQ ID NO: 1706582 - RNA, 19 nt, Artificial Sequence
  Description of Artificial Sequence: Synthetic oligonucleotide
gcgucggauaucucggacu

SEQ ID NO: 1706583 - RNA, 19 nt, Artificial Sequence
  Description of Artificial Sequence: Synthetic oligonucleotide
ccucggggacgcucguggg

SEQ ID NO: 1706584 - RNA, 19 nt, Artificial Sequence
  Description of Artificial Sequence: Synthetic oligonucleotide
guccacggcuucgccuaag

SEQ ID NO: 1706585 - RNA, 19 nt, Artificial Sequence
  Description of Artificial Sequence: Synthetic oligonucleotide
ggcgcucagucggaucuug

SEQ ID NO: 1706586 - RNA, 19 nt, Artificial Sequence
  Description of Artificial Sequence: Synthetic oligonucleotide
aggaaucgugggagugggu

SEQ ID NO: 1706587 - RNA, 19 nt, Artificial Sequence
  Description of Artificial Sequence: Synthetic oligonucleotide
gcuccucgcagcgcgcaag

SEQ ID NO: 1706588 - RNA, 19 nt, Artificial Sequence
  Description of Artificial Sequence: Synthetic oligonucleotide
aggaccacucaagcuccua

SEQ ID NO: 1706589 - RNA, 19 nt, Artificial Sequence
  Description of Artificial Sequence: Synthetic oligonucleotide
ggccgguggacgacgcugc

SEQ ID NO: 1706590 - RNA, 19 nt, Artificial Sequence
  Description of Artificial Sequence: Synthetic oligonucleotide
agcccacgcucagugccgu

SEQ ID NO: 1706591 - RNA, 19 nt, Artificial Sequence
  Description of Artificial Sequence: Synthetic oligonucleotide
gggacgcucgugggugacg

SEQ ID NO: 1706592 - RNA, 19 nt, Artificial Sequence
  Description of Artificial Sequence: Synthetic oligonucleotide
ccacgcucagugccgucag

SEQ ID NO: 1706593 - RNA, 19 nt, Artificial Sequence
  Description of Artificial Sequence: Synthetic oligonucleotide
ggcgucgggaccggcuugc

SEQ ID NO: 1706594 - RNA, 19 nt, Artificial Sequence
  Description of Artificial Sequence: Synthetic oligonucleotide
gcuugccgcuggaagucgc

SEQ ID NO: 1706595 - RNA, 19 nt, Artificial Sequence
  Description of Artificial Sequence: Synthetic oligonucleotide
cggauaucucggacuuggc

SEQ ID NO: 1706596 - RNA, 19 nt, Artificial Sequence
  Description of Artificial Sequence: Synthetic oligonucleotide
ggcgugccagccccugaac

SEQ ID NO: 1706597 - RNA, 19 nt, Artificial Sequence
  Description of Artificial Sequence: Synthetic oligonucleotide
cgcccuugcccgaauggug

SEQ ID NO: 1706598 - RNA, 19 nt, Artificial Sequence
  Description of Artificial Sequence: Synthetic oligonucleotide
ccuaaggaauccaccgcgu

SEQ ID NO: 1706599 - RNA, 19 nt, Artificial Sequence
  Description of Artificial Sequence: Synthetic oligonucleotide
agaucgcgacucagccgcu

SEQ ID NO: 1706600 - RNA, 19 nt, Artificial Sequence
  Description of Artificial Sequence: Synthetic oligonucleotide
gaacgagcggccggcccua

SEQ ID NO: 1706601 - RNA, 19 nt, Artificial Sequence
  Description of Artificial Sequence: Synthetic oligonucleotide
ggccgacggguccgguucc

SEQ ID NO: 1706602 - RNA, 19 nt, Artificial Sequence
  Description of Artificial Sequence: Synthetic oligonucleotide
cccgaaugguguguggcca

SEQ ID NO: 1706603 - RNA, 19 nt, Artificial Sequence
  Description of Artificial Sequence: Synthetic oligonucleotide
ggcuccggccgguggacga

SEQ ID NO: 1706604 - RNA, 19 nt, Artificial Sequence
  Description of Artificial Sequence: Synthetic oligonucleotide
ccgguggacgacgcugccg

SEQ ID NO: 1706605 - RNA, 19 nt, Artificial Sequence
  Description of Artificial Sequence: Synthetic oligonucleotide
cacagcggguggccucuca

SEQ ID NO: 1706606 - RNA, 19 nt, Artificial Sequence
  Description of Artificial Sequence: Synthetic oligonucleotide
augugcgcccuugcccgaa

SEQ ID NO: 1706607 - RNA, 19 nt, Artificial Sequence
  Description of Artificial Sequence: Synthetic oligonucleotide
gccgcccagaucgcgacuc

SEQ ID NO: 1706608 - RNA, 19 nt, Artificial Sequence
  Description of Artificial Sequence: Synthetic oligonucleotide
accggcugcagagcccguu

SEQ ID NO: 1706609 - RNA, 19 nt, Artificial Sequence
  Description of Artificial Sequence: Synthetic oligonucleotide
acuuggcgugccagccccu

SEQ ID NO: 1706610 - RNA, 19 nt, Artificial Sequence
  Description of Artificial Sequence: Synthetic oligonucleotide
cggggcggccuccauacug

SEQ ID NO: 1706611 - RNA, 19 nt, Artificial Sequence
  Description of Artificial Sequence: Synthetic oligonucleotide
cgaaugguguguggccaag

SEQ ID NO: 1706612 - RNA, 19 nt, Artificial Sequence
  Description of Artificial Sequence: Synthetic oligonucleotide
acccggccgcccagaucgc

SEQ ID NO: 1706613 - RNA, 19 nt, Artificial Sequence
  Description of Artificial Sequence: Synthetic oligonucleotide
agcgcgcaagcaaggugua

SEQ ID NO: 1706614 - RNA, 19 nt, Artificial Sequence
  Description of Artificial Sequence: Synthetic oligonucleotide
cacuugaggucugaccguu

SEQ ID NO: 1706615 - RNA, 19 nt, Artificial Sequence
  Description of Artificial Sequence: Synthetic oligonucleotide
cgucgggaccggcuugccg

SEQ ID NO: 1706616 - RNA, 19 nt, Artificial Sequence
  Description of Artificial Sequence: Synthetic oligonucleotide
gccgguggacgacgcugcc

SEQ ID NO: 1706617 - RNA, 19 nt, Artificial Sequence
  Description of Artificial Sequence: Synthetic oligonucleotide
gccggggcgugcucagaac

SEQ ID NO: 1706618 - RNA, 19 nt, Artificial Sequence
  Description of Artificial Sequence: Synthetic oligonucleotide
cgccgcacgccccacucag

SEQ ID NO: 1706619 - RNA, 19 nt, Artificial Sequence
  Description of Artificial Sequence: Synthetic oligonucleotide
ggcggcgcucagucggauc

SEQ ID NO: 1706620 - RNA, 19 nt, Artificial Sequence
  Description of Artificial Sequence: Synthetic oligonucleotide
ggcccuacccgccgcccca

SEQ ID NO: 1706621 - RNA, 19 nt, Artificial Sequence
  Description of Artificial Sequence: Synthetic oligonucleotide
ggucgaugggaggaaucgu

SEQ ID NO: 1706622 - RNA, 19 nt, Artificial Sequence
  Description of Artificial Sequence: Synthetic oligonucleotide
gcaagguguacaugcccuu

SEQ ID NO: 1706623 - RNA, 19 nt, Artificial Sequence
  Description of Artificial Sequence: Synthetic oligonucleotide
ccagagugcgucggauauc

SEQ ID NO: 1706624 - RNA, 19 nt, Artificial Sequence
  Description of Artificial Sequence: Synthetic oligonucleotide
gcccgcgaagcagacgguc

SEQ ID NO: 1706625 - RNA, 19 nt, Artificial Sequence
  Description of Artificial Sequence: Synthetic oligonucleotide
gccgacggguccgguuccg

SEQ ID NO: 1706626 - RNA, 19 nt, Artificial Sequence
  Description of Artificial Sequence: Synthetic oligonucleotide
ccgaaugguguguggccaa

SEQ ID NO: 1706627 - RNA, 19 nt, Artificial Sequence
  Description of Artificial Sequence: Synthetic oligonucleotide
gaccggcuugccgcuggaa

SEQ ID NO: 1706628 - RNA, 19 nt, Artificial Sequence
  Description of Artificial Sequence: Synthetic oligonucleotide
cccuagcacuugaggucug

SEQ ID NO: 1706629 - RNA, 19 nt, Artificial Sequence
  Description of Artificial Sequence: Synthetic oligonucleotide
ccacggcuucgccuaagga

SEQ ID NO: 1706630 - RNA, 19 nt, Artificial Sequence
  Description of Artificial Sequence: Synthetic oligonucleotide
cgcacgccccacucagccc

SEQ ID NO: 1706631 - RNA, 19 nt, Artificial Sequence
  Description of Artificial Sequence: Synthetic oligonucleotide
cacuugcauagggccucca

SEQ ID NO: 1706632 - RNA, 19 nt, Artificial Sequence
  Description of Artificial Sequence: Synthetic oligonucleotide
ggggaacgagcggccggcc

SEQ ID NO: 1706633 - RNA, 19 nt, Artificial Sequence
  Description of Artificial Sequence: Synthetic oligonucleotide
cggccgacggguccgguuc

SEQ ID NO: 1706634 - RNA, 19 nt, Artificial Sequence
  Description of Artificial Sequence: Synthetic oligonucleotide
cuggaagucgcggccugau

SEQ ID NO: 1706635 - RNA, 19 nt, Artificial Sequence
  Description of Artificial Sequence: Synthetic oligonucleotide
gucgcccggaugcccggcu

SEQ ID NO: 1706636 - RNA, 19 nt, Artificial Sequence
  Description of Artificial Sequence: Synthetic oligonucleotide
gacggggccggggcgugcu

SEQ ID NO: 1706637 - RNA, 19 nt, Artificial Sequence
  Description of Artificial Sequence: Synthetic oligonucleotide
cgcucgugggugacggcuc

SEQ ID NO: 1706638 - RNA, 19 nt, Artificial Sequence
  Description of Artificial Sequence: Synthetic oligonucleotide
ggggacgcucgugggugac

SEQ ID NO: 1706639 - RNA, 19 nt, Artificial Sequence
  Description of Artificial Sequence: Synthetic oligonucleotide
ccuacccgccgccccagga

SEQ ID NO: 1706640 - RNA, 19 nt, Artificial Sequence
  Description of Artificial Sequence: Synthetic oligonucleotide
ccgacggguccgguuccgg

SEQ ID NO: 1706641 - RNA, 19 nt, Artificial Sequence
  Description of Artificial Sequence: Synthetic oligonucleotide
ggaccggcuugccgcugga

SEQ ID NO: 1706642 - RNA, 19 nt, Artificial Sequence
  Description of Artificial Sequence: Synthetic oligonucleotide
cggcuucgccuaaggaauc

SEQ ID NO: 1706643 - RNA, 19 nt, Artificial Sequence
  Description of Artificial Sequence: Synthetic oligonucleotide
ccccuagcacuugaggucu

SEQ ID NO: 1706644 - RNA, 19 nt, Artificial Sequence
  Description of Artificial Sequence: Synthetic oligonucleotide
gcgcgcaagcaagguguac

SEQ ID NO: 1706645 - RNA, 19 nt, Artificial Sequence
  Description of Artificial Sequence: Synthetic oligonucleotide
gggcgucaggcagggccgc

SEQ ID NO: 1706646 - RNA, 19 nt, Artificial Sequence
  Description of Artificial Sequence: Synthetic oligonucleotide
cccaacguucucagccucu

SEQ ID NO: 1706647 - RNA, 19 nt, Artificial Sequence
  Description of Artificial Sequence: Synthetic oligonucleotide
cgcgucgcgguaggucugg

SEQ ID NO: 1706648 - RNA, 19 nt, Artificial Sequence
  Description of Artificial Sequence: Synthetic oligonucleotide
gcggccggcccuacccgcc

SEQ ID NO: 1706649 - RNA, 19 nt, Artificial Sequence
  Description of Artificial Sequence: Synthetic oligonucleotide
gcuccggccgguggacgac

SEQ ID NO: 1706650 - RNA, 19 nt, Artificial Sequence
  Description of Artificial Sequence: Synthetic oligonucleotide
guccacccggccgcccaga

SEQ ID NO: 1706651 - RNA, 19 nt, Artificial Sequence
  Description of Artificial Sequence: Synthetic oligonucleotide
cccggccgcccagaucgcg

SEQ ID NO: 1706652 - RNA, 19 nt, Artificial Sequence
  Description of Artificial Sequence: Synthetic oligonucleotide
gcgcucagucggaucuuga

SEQ ID NO: 1706653 - RNA, 19 nt, Artificial Sequence
  Description of Artificial Sequence: Synthetic oligonucleotide
ggaugcccggcugguccuc

SEQ ID NO: 1706654 - RNA, 19 nt, Artificial Sequence
  Description of Artificial Sequence: Synthetic oligonucleotide
ggguggccucucaucuguc

SEQ ID NO: 1706655 - RNA, 19 nt, Artificial Sequence
  Description of Artificial Sequence: Synthetic oligonucleotide
cgucggauaucucggacuu

SEQ ID NO: 1706656 - RNA, 19 nt, Artificial Sequence
  Description of Artificial Sequence: Synthetic oligonucleotide
ccggccgcccagaucgcga

SEQ ID NO: 1706657 - RNA, 19 nt, Artificial Sequence
  Description of Artificial Sequence: Synthetic oligonucleotide
gccgcacgccccacucagc

SEQ ID NO: 1706658 - RNA, 19 nt, Artificial Sequence
  Description of Artificial Sequence: Synthetic oligonucleotide
gguggacgacgcugccgcu

SEQ ID NO: 1706659 - RNA, 19 nt, Artificial Sequence
  Description of Artificial Sequence: Synthetic oligonucleotide
cggccgcccagaucgcgac

SEQ ID NO: 1706660 - RNA, 19 nt, Artificial Sequence
  Description of Artificial Sequence: Synthetic oligonucleotide
cgcgaccccaacguucuca

SEQ ID NO: 1706661 - RNA, 19 nt, Artificial Sequence
  Description of Artificial Sequence: Synthetic oligonucleotide
ggacgacgcugccgcucga

SEQ ID NO: 1706662 - RNA, 19 nt, Artificial Sequence
  Description of Artificial Sequence: Synthetic oligonucleotide
gcgcccuugcccgaauggu

SEQ ID NO: 1706663 - RNA, 19 nt, Artificial Sequence
  Description of Artificial Sequence: Synthetic oligonucleotide
cccugacggcgucgcccgg

SEQ ID NO: 1706664 - RNA, 19 nt, Artificial Sequence
  Description of Artificial Sequence: Synthetic oligonucleotide
ccugacggcgucgcccgga

SEQ ID NO: 1706665 - RNA, 19 nt, Artificial Sequence
  Description of Artificial Sequence: Synthetic oligonucleotide
ggggcggcgcucagucgga

SEQ ID NO: 1706666 - RNA, 19 nt, Artificial Sequence
  Description of Artificial Sequence: Synthetic oligonucleotide
gcgucgggaccggcuugcc

SEQ ID NO: 1706667 - RNA, 19 nt, Artificial Sequence
  Description of Artificial Sequence: Synthetic oligonucleotide
cgggcccugacggcgucgc

SEQ ID NO: 1706668 - RNA, 19 nt, Artificial Sequence
  Description of Artificial Sequence: Synthetic oligonucleotide
ccucgccgcccacggagga

SEQ ID NO: 1706669 - RNA, 19 nt, Artificial Sequence
  Description of Artificial Sequence: Synthetic oligonucleotide
ccgggcccugacggcgucg

SEQ ID NO: 1706670 - RNA, 19 nt, Artificial Sequence
  Description of Artificial Sequence: Synthetic oligonucleotide
ccggcccuacccgccgccc

SEQ ID NO: 1706671 - RNA, 19 nt, Artificial Sequence
  Description of Artificial Sequence: Synthetic oligonucleotide
cacgccccacucagcccgu

SEQ ID NO: 1706672 - RNA, 19 nt, Artificial Sequence
  Description of Artificial Sequence: Synthetic oligonucleotide
cggguccgguuccggcccg

SEQ ID NO: 1706673 - RNA, 19 nt, Artificial Sequence
  Description of Artificial Sequence: Synthetic oligonucleotide
gcccacgcucagugccguc

SEQ ID NO: 1706674 - RNA, 19 nt, Artificial Sequence
  Description of Artificial Sequence: Synthetic oligonucleotide
cgacgcugccgcucgacgu

SEQ ID NO: 1706675 - RNA, 19 nt, Artificial Sequence
  Description of Artificial Sequence: Synthetic oligonucleotide
ggcucgcgaccccaacguu

SEQ ID NO: 1706676 - RNA, 19 nt, Artificial Sequence
  Description of Artificial Sequence: Synthetic oligonucleotide
caagcuccccgggcaccgu

SEQ ID NO: 1706677 - RNA, 19 nt, Artificial Sequence
  Description of Artificial Sequence: Synthetic oligonucleotide
cuccgccgcacgccccacu

SEQ ID NO: 1706678 - RNA, 19 nt, Artificial Sequence
  Description of Artificial Sequence: Synthetic oligonucleotide
ccgcccagaucgcgacuca

SEQ ID NO: 1706679 - RNA, 19 nt, Artificial Sequence
  Description of Artificial Sequence: Synthetic oligonucleotide
cggcucgcgaccccaacgu

SEQ ID NO: 1706680 - RNA, 19 nt, Artificial Sequence
  Description of Artificial Sequence: Synthetic oligonucleotide
cggggcgugcucagaaccu

SEQ ID NO: 1706681 - RNA, 19 nt, Artificial Sequence
  Description of Artificial Sequence: Synthetic oligonucleotide
ggccgcccagaucgcgacu

SEQ ID NO: 1706682 - RNA, 19 nt, Artificial Sequence
  Description of Artificial Sequence: Synthetic oligonucleotide
cgggcaccgucaaggccga

SEQ ID NO: 1706683 - RNA, 19 nt, Artificial Sequence
  Description of Artificial Sequence: Synthetic oligonucleotide
gggcaccgucaaggccgag

SEQ ID NO: 1706684 - RNA, 19 nt, Artificial Sequence
  Description of Artificial Sequence: Synthetic oligonucleotide
ccgccgcacgccccacuca

SEQ ID NO: 1706685 - RNA, 19 nt, Artificial Sequence
  Description of Artificial Sequence: Synthetic oligonucleotide
ggucgccguggcggcucac

SEQ ID NO: 1706686 - RNA, 19 nt, Artificial Sequence
  Description of Artificial Sequence: Synthetic oligonucleotide
cggcucaccgugcccucga

SEQ ID NO: 1706687 - RNA, 19 nt, Artificial Sequence
  Description of Artificial Sequence: Synthetic oligonucleotide
gcgucgcgguaggucugga

SEQ ID NO: 1706688 - RNA, 19 nt, Artificial Sequence
  Description of Artificial Sequence: Synthetic oligonucleotide
ccacagcggguggccucuc

SEQ ID NO: 1706689 - RNA, 19 nt, Artificial Sequence
  Description of Artificial Sequence: Synthetic oligonucleotide
ccgugcccucgagcuccag

SEQ ID NO: 1706690 - RNA, 19 nt, Artificial Sequence
  Description of Artificial Sequence: Synthetic oligonucleotide
cgucgcgguaggucuggau

SEQ ID NO: 1706691 - RNA, 19 nt, Artificial Sequence
  Description of Artificial Sequence: Synthetic oligonucleotide
cgggaccggcuugccgcug

SEQ ID NO: 1706692 - RNA, 19 nt, Artificial Sequence
  Description of Artificial Sequence: Synthetic oligonucleotide
cgccguggcggcucaccgu

SEQ ID NO: 1706693 - RNA, 19 nt, Artificial Sequence
  Description of Artificial Sequence: Synthetic oligonucleotide
gggcggcgcucagucggau

SEQ ID NO: 1706694 - RNA, 19 nt, Artificial Sequence
  Description of Artificial Sequence: Synthetic oligonucleotide
ccggggcggccuccauacu

SEQ ID NO: 1706695 - RNA, 19 nt, Artificial Sequence
  Description of Artificial Sequence: Synthetic oligonucleotide
ccaccgcgucgcgguaggu

SEQ ID NO: 1706696 - RNA, 19 nt, Artificial Sequence
  Description of Artificial Sequence: Synthetic oligonucleotide
cgacguccucggggacgcu

SEQ ID NO: 1706697 - RNA, 19 nt, Artificial Sequence
  Description of Artificial Sequence: Synthetic oligonucleotide
ugugaaaauaaucaugggg

SEQ ID NO: 1706698 - RNA, 19 nt, Artificial Sequence
  Description of Artificial Sequence: Synthetic oligonucleotide
aaaaccacuaauucuacag

SEQ ID NO: 1706699 - RNA, 19 nt, Artificial Sequence
  Description of Artificial Sequence: Synthetic oligonucleotide
uuaaaagucagcuuuccug

SEQ ID NO: 1706700 - RNA, 19 nt, Artificial Sequence
  Description of Artificial Sequence: Synthetic oligonucleotide
uauugcuagaaucugguca

SEQ ID NO: 1706701 - RNA, 19 nt, Artificial Sequence
  Description of Artificial Sequence: Synthetic oligonucleotide
uauaccucaguacaaaaga

SEQ ID NO: 1706702 - RNA, 19 nt, Artificial Sequence
  Description of Artificial Sequence: Synthetic oligonucleotide
ugguguuuuggcuagagcc

SEQ ID NO: 1706703 - RNA, 19 nt, Artificial Sequence
  Description of Artificial Sequence: Synthetic oligonucleotide
gugacagauacacugaugc

SEQ ID NO: 1706704 - RNA, 19 nt, Artificial Sequence
  Description of Artificial Sequence: Synthetic oligonucleotide
uuuauugcuagaaucuggu

SEQ ID NO: 1706705 - RNA, 19 nt, Artificial Sequence
  Description of Artificial Sequence: Synthetic oligonucleotide
uuuaccaaggagaucugcc

SEQ ID NO: 1706706 - RNA, 19 nt, Artificial Sequence
  Description of Artificial Sequence: Synthetic oligonucleotide
uuggcuagagccaagcgcc

SEQ ID NO: 1706707 - RNA, 19 nt, Artificial Sequence
  Description of Artificial Sequence: Synthetic oligonucleotide
guucuauguacucaggucc

SEQ ID NO: 1706708 - RNA, 19 nt, Artificial Sequence
  Description of Artificial Sequence: Synthetic oligonucleotide
uuuggcuagagccaagcgc

SEQ ID NO: 1706709 - RNA, 19 nt, Artificial Sequence
  Description of Artificial Sequence: Synthetic oligonucleotide
ucacaauugacaagggaug

SEQ ID NO: 1706710 - RNA, 19 nt, Artificial Sequence
  Description of Artificial Sequence: Synthetic oligonucleotide
auauguucuagggugauuc

SEQ ID NO: 1706711 - RNA, 19 nt, Artificial Sequence
  Description of Artificial Sequence: Synthetic oligonucleotide
aaucaugggguagacaaag

SEQ ID NO: 1706712 - RNA, 19 nt, Artificial Sequence
  Description of Artificial Sequence: Synthetic oligonucleotide
aguccguccccauugaaac

SEQ ID NO: 1706713 - RNA, 19 nt, Artificial Sequence
  Description of Artificial Sequence: Synthetic oligonucleotide
aucacugugaaaauaauca

SEQ ID NO: 1706714 - RNA, 19 nt, Artificial Sequence
  Description of Artificial Sequence: Synthetic oligonucleotide
agggaugcuacucagucuc

SEQ ID NO: 1706715 - RNA, 19 nt, Artificial Sequence
  Description of Artificial Sequence: Synthetic oligonucleotide
cagagugggaacuuaaaag

SEQ ID NO: 1706716 - RNA, 19 nt, Artificial Sequence
  Description of Artificial Sequence: Synthetic oligonucleotide
ucagaagaagaugacaucu

SEQ ID NO: 1706717 - RNA, 19 nt, Artificial Sequence
  Description of Artificial Sequence: Synthetic oligonucleotide
aguguucugauauaccuca

SEQ ID NO: 1706718 - RNA, 19 nt, Artificial Sequence
  Description of Artificial Sequence: Synthetic oligonucleotide
aaagaucacggucacaauu

SEQ ID NO: 1706719 - RNA, 19 nt, Artificial Sequence
  Description of Artificial Sequence: Synthetic oligonucleotide
ugagacccgacacuaacag

SEQ ID NO: 1706720 - RNA, 19 nt, Artificial Sequence
  Description of Artificial Sequence: Synthetic oligonucleotide
acggucacaauugacaagg

SEQ ID NO: 1706721 - RNA, 19 nt, Artificial Sequence
  Description of Artificial Sequence: Synthetic oligonucleotide
aaaccacuaauucuacaga

SEQ ID NO: 1706722 - RNA, 19 nt, Artificial Sequence
  Description of Artificial Sequence: Synthetic oligonucleotide
aaauaaucaugggguagac

SEQ ID NO: 1706723 - RNA, 19 nt, Artificial Sequence
  Description of Artificial Sequence: Synthetic oligonucleotide
ggucauauguucuagggug

SEQ ID NO: 1706724 - RNA, 19 nt, Artificial Sequence
  Description of Artificial Sequence: Synthetic oligonucleotide
cuugaagaaggccucgagg

SEQ ID NO: 1706725 - RNA, 19 nt, Artificial Sequence
  Description of Artificial Sequence: Synthetic oligonucleotide
uucuacagagagcugugag

SEQ ID NO: 1706726 - RNA, 19 nt, Artificial Sequence
  Description of Artificial Sequence: Synthetic oligonucleotide
ucgugacugcuucaggucg

SEQ ID NO: 1706727 - RNA, 19 nt, Artificial Sequence
  Description of Artificial Sequence: Synthetic oligonucleotide
uaacaggacaaccucagau

SEQ ID NO: 1706728 - RNA, 19 nt, Artificial Sequence
  Description of Artificial Sequence: Synthetic oligonucleotide
cagacaguaacagucaccc

SEQ ID NO: 1706729 - RNA, 19 nt, Artificial Sequence
  Description of Artificial Sequence: Synthetic oligonucleotide
cuuccggacuugaagaagg

SEQ ID NO: 1706730 - RNA, 19 nt, Artificial Sequence
  Description of Artificial Sequence: Synthetic oligonucleotide
aggacaaccucagaugagc

SEQ ID NO: 1706731 - RNA, 19 nt, Artificial Sequence
  Description of Artificial Sequence: Synthetic oligonucleotide
uccugaaguguucugauau

SEQ ID NO: 1706732 - RNA, 19 nt, Artificial Sequence
  Description of Artificial Sequence: Synthetic oligonucleotide
ugaagaaggccucgagggg

SEQ ID NO: 1706733 - RNA, 19 nt, Artificial Sequence
  Description of Artificial Sequence: Synthetic oligonucleotide
ugaaguguucugauauacc

SEQ ID NO: 1706734 - RNA, 19 nt, Artificial Sequence
  Description of Artificial Sequence: Synthetic oligonucleotide
accucagaugagcaagugc

SEQ ID NO: 1706735 - RNA, 19 nt, Artificial Sequence
  Description of Artificial Sequence: Synthetic oligonucleotide
aauugacaagggaugcuac

SEQ ID NO: 1706736 - RNA, 19 nt, Artificial Sequence
  Description of Artificial Sequence: Synthetic oligonucleotide
uuuuggcuagagccaagcg

SEQ ID NO: 1706737 - RNA, 19 nt, Artificial Sequence
  Description of Artificial Sequence: Synthetic oligonucleotide
cacugugaaaauaaucaug

SEQ ID NO: 1706738 - RNA, 19 nt, Artificial Sequence
  Description of Artificial Sequence: Synthetic oligonucleotide
gaagaagaugacaucuucc

SEQ ID NO: 1706739 - RNA, 19 nt, Artificial Sequence
  Description of Artificial Sequence: Synthetic oligonucleotide
gaugggacucgagugaccg

SEQ ID NO: 1706740 - RNA, 19 nt, Artificial Sequence
  Description of Artificial Sequence: Synthetic oligonucleotide
ucuggucauauguucuagg

SEQ ID NO: 1706741 - RNA, 19 nt, Artificial Sequence
  Description of Artificial Sequence: Synthetic oligonucleotide
auugcuagaaucuggucau

SEQ ID NO: 1706742 - RNA, 19 nt, Artificial Sequence
  Description of Artificial Sequence: Synthetic oligonucleotide
uggauacuuuuauugcuag

SEQ ID NO: 1706743 - RNA, 19 nt, Artificial Sequence
  Description of Artificial Sequence: Synthetic oligonucleotide
uccugugccagguaguagc

SEQ ID NO: 1706744 - RNA, 19 nt, Artificial Sequence
  Description of Artificial Sequence: Synthetic oligonucleotide
uuucgugacugcuucaggu

SEQ ID NO: 1706745 - RNA, 19 nt, Artificial Sequence
  Description of Artificial Sequence: Synthetic oligonucleotide
ugaaaauaaucauggggua

SEQ ID NO: 1706746 - RNA, 19 nt, Artificial Sequence
  Description of Artificial Sequence: Synthetic oligonucleotide
uuaccaaggagaucugcca

SEQ ID NO: 1706747 - RNA, 19 nt, Artificial Sequence
  Description of Artificial Sequence: Synthetic oligonucleotide
uggguggcggguaggaugg

SEQ ID NO: 1706748 - RNA, 19 nt, Artificial Sequence
  Description of Artificial Sequence: Synthetic oligonucleotide
guaggaugggacucgagug

SEQ ID NO: 1706749 - RNA, 19 nt, Artificial Sequence
  Description of Artificial Sequence: Synthetic oligonucleotide
acaaccucagaugagcaag

SEQ ID NO: 1706750 - RNA, 19 nt, Artificial Sequence
  Description of Artificial Sequence: Synthetic oligonucleotide
aaguguucugauauaccuc

SEQ ID NO: 1706751 - RNA, 19 nt, Artificial Sequence
  Description of Artificial Sequence: Synthetic oligonucleotide
agggugauuccagaguacc

SEQ ID NO: 1706752 - RNA, 19 nt, Artificial Sequence
  Description of Artificial Sequence: Synthetic oligonucleotide
ugugccagguaguagcaug

SEQ ID NO: 1706753 - RNA, 19 nt, Artificial Sequence
  Description of Artificial Sequence: Synthetic oligonucleotide
ugaguggugugguuggcag

SEQ ID NO: 1706754 - RNA, 19 nt, Artificial Sequence
  Description of Artificial Sequence: Synthetic oligonucleotide
gugaaaauaaucauggggu

SEQ ID NO: 1706755 - RNA, 19 nt, Artificial Sequence
  Description of Artificial Sequence: Synthetic oligonucleotide
gauacacugaugcuucaca

SEQ ID NO: 1706756 - RNA, 19 nt, Artificial Sequence
  Description of Artificial Sequence: Synthetic oligonucleotide
aguaacagucacccauggg

SEQ ID NO: 1706757 - RNA, 19 nt, Artificial Sequence
  Description of Artificial Sequence: Synthetic oligonucleotide
uguucugauauaccucagu

SEQ ID NO: 1706758 - RNA, 19 nt, Artificial Sequence
  Description of Artificial Sequence: Synthetic oligonucleotide
caucacugugaaaauaauc

SEQ ID NO: 1706759 - RNA, 19 nt, Artificial Sequence
  Description of Artificial Sequence: Synthetic oligonucleotide
uucuagggugauuccagag

SEQ ID NO: 1706760 - RNA, 19 nt, Artificial Sequence
  Description of Artificial Sequence: Synthetic oligonucleotide
ccaacuucauccuuggcgg

SEQ ID NO: 1706761 - RNA, 19 nt, Artificial Sequence
  Description of Artificial Sequence: Synthetic oligonucleotide
ucguucuauguacucaggu

SEQ ID NO: 1706762 - RNA, 19 nt, Artificial Sequence
  Description of Artificial Sequence: Synthetic oligonucleotide
uucuauguacucagguccu

SEQ ID NO: 1706763 - RNA, 19 nt, Artificial Sequence
  Description of Artificial Sequence: Synthetic oligonucleotide
uaggaugggacucgaguga

SEQ ID NO: 1706764 - RNA, 19 nt, Artificial Sequence
  Description of Artificial Sequence: Synthetic oligonucleotide
uggucauauguucuagggu

SEQ ID NO: 1706765 - RNA, 19 nt, Artificial Sequence
  Description of Artificial Sequence: Synthetic oligonucleotide
aauucuacagagagcugug

SEQ ID NO: 1706766 - RNA, 19 nt, Artificial Sequence
  Description of Artificial Sequence: Synthetic oligonucleotide
cucaggucguucuauguac

SEQ ID NO: 1706767 - RNA, 19 nt, Artificial Sequence
  Description of Artificial Sequence: Synthetic oligonucleotide
gaugcuacucagucucacc

SEQ ID NO: 1706768 - RNA, 19 nt, Artificial Sequence
  Description of Artificial Sequence: Synthetic oligonucleotide
ucacugugaaaauaaucau

SEQ ID NO: 1706769 - RNA, 19 nt, Artificial Sequence
  Description of Artificial Sequence: Synthetic oligonucleotide
gucuacugcacgcugggcc

SEQ ID NO: 1706770 - RNA, 19 nt, Artificial Sequence
  Description of Artificial Sequence: Synthetic oligonucleotide
augcuacucagucucacca

SEQ ID NO: 1706771 - RNA, 19 nt, Artificial Sequence
  Description of Artificial Sequence: Synthetic oligonucleotide
agagcugugagacccgaca

SEQ ID NO: 1706772 - RNA, 19 nt, Artificial Sequence
  Description of Artificial Sequence: Synthetic oligonucleotide
gugauuccagaguaccccg

SEQ ID NO: 1706773 - RNA, 19 nt, Artificial Sequence
  Description of Artificial Sequence: Synthetic oligonucleotide
aauaaucaugggguagaca

SEQ ID NO: 1706774 - RNA, 19 nt, Artificial Sequence
  Description of Artificial Sequence: Synthetic oligonucleotide
uauguucuagggugauucc

SEQ ID NO: 1706775 - RNA, 19 nt, Artificial Sequence
  Description of Artificial Sequence: Synthetic oligonucleotide
ucacggucacaauugacaa

SEQ ID NO: 1706776 - RNA, 19 nt, Artificial Sequence
  Description of Artificial Sequence: Synthetic oligonucleotide
auugacaagggaugcuacu

SEQ ID NO: 1706777 - RNA, 19 nt, Artificial Sequence
  Description of Artificial Sequence: Synthetic oligonucleotide
aaaggguuaucaggacagg

SEQ ID NO: 1706778 - RNA, 19 nt, Artificial Sequence
  Description of Artificial Sequence: Synthetic oligonucleotide
acuaacaggacaaccucag

SEQ ID NO: 1706779 - RNA, 19 nt, Artificial Sequence
  Description of Artificial Sequence: Synthetic oligonucleotide
aagggaugcuacucagucu

SEQ ID NO: 1706780 - RNA, 19 nt, Artificial Sequence
  Description of Artificial Sequence: Synthetic oligonucleotide
aaucuggucauauguucua

SEQ ID NO: 1706781 - RNA, 19 nt, Artificial Sequence
  Description of Artificial Sequence: Synthetic oligonucleotide
uguugcacggcugucugcc

SEQ ID NO: 1706782 - RNA, 19 nt, Artificial Sequence
  Description of Artificial Sequence: Synthetic oligonucleotide
ggguagacaaagaucacgg

SEQ ID NO: 1706783 - RNA, 19 nt, Artificial Sequence
  Description of Artificial Sequence: Synthetic oligonucleotide
agacccgacacuaacagga

SEQ ID NO: 1706784 - RNA, 19 nt, Artificial Sequence
  Description of Artificial Sequence: Synthetic oligonucleotide
ucuacugcacgcugggccu

SEQ ID NO: 1706785 - RNA, 19 nt, Artificial Sequence
  Description of Artificial Sequence: Synthetic oligonucleotide
accucaguacaaaagaaga

SEQ ID NO: 1706786 - RNA, 19 nt, Artificial Sequence
  Description of Artificial Sequence: Synthetic oligonucleotide
aucacggucacaauugaca

SEQ ID NO: 1706787 - RNA, 19 nt, Artificial Sequence
  Description of Artificial Sequence: Synthetic oligonucleotide
uucucggucuacugcacgc

SEQ ID NO: 1706788 - RNA, 19 nt, Artificial Sequence
  Description of Artificial Sequence: Synthetic oligonucleotide
ccagguaguagcaugcucc

SEQ ID NO: 1706789 - RNA, 19 nt, Artificial Sequence
  Description of Artificial Sequence: Synthetic oligonucleotide
uucaggucgaaggaugcug

SEQ ID NO: 1706790 - RNA, 19 nt, Artificial Sequence
  Description of Artificial Sequence: Synthetic oligonucleotide
ggggauuugcuguugcacg

SEQ ID NO: 1706791 - RNA, 19 nt, Artificial Sequence
  Description of Artificial Sequence: Synthetic oligonucleotide
cuagaaucuggucauaugu

SEQ ID NO: 1706792 - RNA, 19 nt, Artificial Sequence
  Description of Artificial Sequence: Synthetic oligonucleotide
gauuccagaguaccccgug

SEQ ID NO: 1706793 - RNA, 19 nt, Artificial Sequence
  Description of Artificial Sequence: Synthetic oligonucleotide
cugggccucgcguagacgc

SEQ ID NO: 1706794 - RNA, 19 nt, Artificial Sequence
  Description of Artificial Sequence: Synthetic oligonucleotide
ucgaaggaugcugagcucu

SEQ ID NO: 1706795 - RNA, 19 nt, Artificial Sequence
  Description of Artificial Sequence: Synthetic oligonucleotide
cauugaaacugggaggaug

SEQ ID NO: 1706796 - RNA, 19 nt, Artificial Sequence
  Description of Artificial Sequence: Synthetic oligonucleotide
acccaugggauccccagag

SEQ ID NO: 1706797 - RNA, 19 nt, Artificial Sequence
  Description of Artificial Sequence: Synthetic oligonucleotide
agauacacugaugcuucac

SEQ ID NO: 1706798 - RNA, 19 nt, Artificial Sequence
  Description of Artificial Sequence: Synthetic oligonucleotide
aaggguuaucaggacagga

SEQ ID NO: 1706799 - RNA, 19 nt, Artificial Sequence
  Description of Artificial Sequence: Synthetic oligonucleotide
ugcuacucagucucaccag

SEQ ID NO: 1706800 - RNA, 19 nt, Artificial Sequence
  Description of Artificial Sequence: Synthetic oligonucleotide
gagacccgacacuaacagg

SEQ ID NO: 1706801 - RNA, 19 nt, Artificial Sequence
  Description of Artificial Sequence: Synthetic oligonucleotide
guccuugccacccuuggug

SEQ ID NO: 1706802 - RNA, 19 nt, Artificial Sequence
  Description of Artificial Sequence: Synthetic oligonucleotide
ugagcaagugccuggggau

SEQ ID NO: 1706803 - RNA, 19 nt, Artificial Sequence
  Description of Artificial Sequence: Synthetic oligonucleotide
gguggaggcagccagcuug

SEQ ID NO: 1706804 - RNA, 19 nt, Artificial Sequence
  Description of Artificial Sequence: Synthetic oligonucleotide
cugcucuugggccauggcc

SEQ ID NO: 1706805 - RNA, 19 nt, Artificial Sequence
  Description of Artificial Sequence: Synthetic oligonucleotide
gacaaaggguuaucaggac

SEQ ID NO: 1706806 - RNA, 19 nt, Artificial Sequence
  Description of Artificial Sequence: Synthetic oligonucleotide
ugggaacuuaaaagucagc

SEQ ID NO: 1706807 - RNA, 19 nt, Artificial Sequence
  Description of Artificial Sequence: Synthetic oligonucleotide
ggucguucuauguacucag

SEQ ID NO: 1706808 - RNA, 19 nt, Artificial Sequence
  Description of Artificial Sequence: Synthetic oligonucleotide
acguucucggucuacugca

SEQ ID NO: 1706809 - RNA, 19 nt, Artificial Sequence
  Description of Artificial Sequence: Synthetic oligonucleotide
uccguccccauugaaacug

SEQ ID NO: 1706810 - RNA, 19 nt, Artificial Sequence
  Description of Artificial Sequence: Synthetic oligonucleotide
uaguagcaugcucccuugg

SEQ ID NO: 1706811 - RNA, 19 nt, Artificial Sequence
  Description of Artificial Sequence: Synthetic oligonucleotide
uguuuuggcuagagccaag

SEQ ID NO: 1706812 - RNA, 19 nt, Artificial Sequence
  Description of Artificial Sequence: Synthetic oligonucleotide
ucaggucguucuauguacu

SEQ ID NO: 1706813 - RNA, 19 nt, Artificial Sequence
  Description of Artificial Sequence: Synthetic oligonucleotide
uaaucaugggguagacaaa

SEQ ID NO: 1706814 - RNA, 19 nt, Artificial Sequence
  Description of Artificial Sequence: Synthetic oligonucleotide
ugggacucgagugaccggc

SEQ ID NO: 1706815 - RNA, 19 nt, Artificial Sequence
  Description of Artificial Sequence: Synthetic oligonucleotide
gacacugucccagcgggcc

SEQ ID NO: 1706816 - RNA, 19 nt, Artificial Sequence
  Description of Artificial Sequence: Synthetic oligonucleotide
gggauuugcuguugcacgg

SEQ ID NO: 1706817 - RNA, 19 nt, Artificial Sequence
  Description of Artificial Sequence: Synthetic oligonucleotide
aacuucauccuuggcggug

SEQ ID NO: 1706818 - RNA, 19 nt, Artificial Sequence
  Description of Artificial Sequence: Synthetic oligonucleotide
gacacuaacaggacaaccu

SEQ ID NO: 1706819 - RNA, 19 nt, Artificial Sequence
  Description of Artificial Sequence: Synthetic oligonucleotide
caguaacagucacccaugg

SEQ ID NO: 1706820 - RNA, 19 nt, Artificial Sequence
  Description of Artificial Sequence: Synthetic oligonucleotide
cagguaguagcaugcuccc

SEQ ID NO: 1706821 - RNA, 19 nt, Artificial Sequence
  Description of Artificial Sequence: Synthetic oligonucleotide
agggaugugcuuccggacu

SEQ ID NO: 1706822 - RNA, 19 nt, Artificial Sequence
  Description of Artificial Sequence: Synthetic oligonucleotide
ggugauuccagaguacccc

SEQ ID NO: 1706823 - RNA, 19 nt, Artificial Sequence
  Description of Artificial Sequence: Synthetic oligonucleotide
gaagaaggccucgagggga

SEQ ID NO: 1706824 - RNA, 19 nt, Artificial Sequence
  Description of Artificial Sequence: Synthetic oligonucleotide
guucucggucuacugcacg

SEQ ID NO: 1706825 - RNA, 19 nt, Artificial Sequence
  Description of Artificial Sequence: Synthetic oligonucleotide
aguucugugcgcuccuggu

SEQ ID NO: 1706826 - RNA, 19 nt, Artificial Sequence
  Description of Artificial Sequence: Synthetic oligonucleotide
aggaugggacucgagugac

SEQ ID NO: 1706827 - RNA, 19 nt, Artificial Sequence
  Description of Artificial Sequence: Synthetic oligonucleotide
guaguagcaugcucccuug

SEQ ID NO: 1706828 - RNA, 19 nt, Artificial Sequence
  Description of Artificial Sequence: Synthetic oligonucleotide
gggguagacaaagaucacg

SEQ ID NO: 1706829 - RNA, 19 nt, Artificial Sequence
  Description of Artificial Sequence: Synthetic oligonucleotide
gguccagccucucacguag

SEQ ID NO: 1706830 - RNA, 19 nt, Artificial Sequence
  Description of Artificial Sequence: Synthetic oligonucleotide
uuccggacuugaagaaggc

SEQ ID NO: 1706831 - RNA, 19 nt, Artificial Sequence
  Description of Artificial Sequence: Synthetic oligonucleotide
ucccugguguuuuggcuag

SEQ ID NO: 1706832 - RNA, 19 nt, Artificial Sequence
  Description of Artificial Sequence: Synthetic oligonucleotide
agaucacggucacaauuga

SEQ ID NO: 1706833 - RNA, 19 nt, Artificial Sequence
  Description of Artificial Sequence: Synthetic oligonucleotide
ugccgcucuaguucugugc

SEQ ID NO: 1706834 - RNA, 19 nt, Artificial Sequence
  Description of Artificial Sequence: Synthetic oligonucleotide
uacagagagcugugagacc

SEQ ID NO: 1706835 - RNA, 19 nt, Artificial Sequence
  Description of Artificial Sequence: Synthetic oligonucleotide
uggggauuugcuguugcac

SEQ ID NO: 1706836 - RNA, 19 nt, Artificial Sequence
  Description of Artificial Sequence: Synthetic oligonucleotide
caagcgccccuccaguccg

SEQ ID NO: 1706837 - RNA, 19 nt, Artificial Sequence
  Description of Artificial Sequence: Synthetic oligonucleotide
caggcgcucacguucucgg

SEQ ID NO: 1706838 - RNA, 19 nt, Artificial Sequence
  Description of Artificial Sequence: Synthetic oligonucleotide
gugcuuccggacuugaaga

SEQ ID NO: 1706839 - RNA, 19 nt, Artificial Sequence
  Description of Artificial Sequence: Synthetic oligonucleotide
cucagcggggacacugucc

SEQ ID NO: 1706840 - RNA, 19 nt, Artificial Sequence
  Description of Artificial Sequence: Synthetic oligonucleotide
gaucugccaaggaggaacc

SEQ ID NO: 1706841 - RNA, 19 nt, Artificial Sequence
  Description of Artificial Sequence: Synthetic oligonucleotide
cagaguaccccguggccag

SEQ ID NO: 1706842 - RNA, 19 nt, Artificial Sequence
  Description of Artificial Sequence: Synthetic oligonucleotide
ggcuguccggcucucagcg

SEQ ID NO: 1706843 - RNA, 19 nt, Artificial Sequence
  Description of Artificial Sequence: Synthetic oligonucleotide
gggauggccagacaguaac

SEQ ID NO: 1706844 - RNA, 19 nt, Artificial Sequence
  Description of Artificial Sequence: Synthetic oligonucleotide
uagggugauuccagaguac

SEQ ID NO: 1706845 - RNA, 19 nt, Artificial Sequence
  Description of Artificial Sequence: Synthetic oligonucleotide
ucucacguagcuggcgugc

SEQ ID NO: 1706846 - RNA, 19 nt, Artificial Sequence
  Description of Artificial Sequence: Synthetic oligonucleotide
acaucacucuuggcugucc

SEQ ID NO: 1706847 - RNA, 19 nt, Artificial Sequence
  Description of Artificial Sequence: Synthetic oligonucleotide
guuaucaggacaggagauc

SEQ ID NO: 1706848 - RNA, 19 nt, Artificial Sequence
  Description of Artificial Sequence: Synthetic oligonucleotide
gccgcucuaguucugugcg

SEQ ID NO: 1706849 - RNA, 19 nt, Artificial Sequence
  Description of Artificial Sequence: Synthetic oligonucleotide
uacucagguccugugccag

SEQ ID NO: 1706850 - RNA, 19 nt, Artificial Sequence
  Description of Artificial Sequence: Synthetic oligonucleotide
aucuggucauauguucuag

SEQ ID NO: 1706851 - RNA, 19 nt, Artificial Sequence
  Description of Artificial Sequence: Synthetic oligonucleotide
ucuauguacucagguccug

SEQ ID NO: 1706852 - RNA, 19 nt, Artificial Sequence
  Description of Artificial Sequence: Synthetic oligonucleotide
guaggccuggcguugccgc

SEQ ID NO: 1706853 - RNA, 19 nt, Artificial Sequence
  Description of Artificial Sequence: Synthetic oligonucleotide
cacggucacaauugacaag

SEQ ID NO: 1706854 - RNA, 19 nt, Artificial Sequence
  Description of Artificial Sequence: Synthetic oligonucleotide
cugaugcuucacagagugg

SEQ ID NO: 1706855 - RNA, 19 nt, Artificial Sequence
  Description of Artificial Sequence: Synthetic oligonucleotide
caggacaggagaucugcuc

SEQ ID NO: 1706856 - RNA, 19 nt, Artificial Sequence
  Description of Artificial Sequence: Synthetic oligonucleotide
cacuaacaggacaaccuca

SEQ ID NO: 1706857 - RNA, 19 nt, Artificial Sequence
  Description of Artificial Sequence: Synthetic oligonucleotide
ugaccggcgguuucgugac

SEQ ID NO: 1706858 - RNA, 19 nt, Artificial Sequence
  Description of Artificial Sequence: Synthetic oligonucleotide
cugguguuuuggcuagagc

SEQ ID NO: 1706859 - RNA, 19 nt, Artificial Sequence
  Description of Artificial Sequence: Synthetic oligonucleotide
caggacaaccucagaugag

SEQ ID NO: 1706860 - RNA, 19 nt, Artificial Sequence
  Description of Artificial Sequence: Synthetic oligonucleotide
auguucuagggugauucca

SEQ ID NO: 1706861 - RNA, 19 nt, Artificial Sequence
  Description of Artificial Sequence: Synthetic oligonucleotide
uccggacuugaagaaggcc

SEQ ID NO: 1706862 - RNA, 19 nt, Artificial Sequence
  Description of Artificial Sequence: Synthetic oligonucleotide
ccucaguacaaaagaagac

SEQ ID NO: 1706863 - RNA, 19 nt, Artificial Sequence
  Description of Artificial Sequence: Synthetic oligonucleotide
cuguuucuugaaccugcgc

SEQ ID NO: 1706864 - RNA, 19 nt, Artificial Sequence
  Description of Artificial Sequence: Synthetic oligonucleotide
gacaaccucagaugagcaa

SEQ ID NO: 1706865 - RNA, 19 nt, Artificial Sequence
  Description of Artificial Sequence: Synthetic oligonucleotide
gacagauacacugaugcuu

SEQ ID NO: 1706866 - RNA, 19 nt, Artificial Sequence
  Description of Artificial Sequence: Synthetic oligonucleotide
gcuagaaucuggucauaug

SEQ ID NO: 1706867 - RNA, 19 nt, Artificial Sequence
  Description of Artificial Sequence: Synthetic oligonucleotide
accucaggucguucuaugu

SEQ ID NO: 1706868 - RNA, 19 nt, Artificial Sequence
  Description of Artificial Sequence: Synthetic oligonucleotide
uggggaugcucaggcaggg

SEQ ID NO: 1706869 - RNA, 19 nt, Artificial Sequence
  Description of Artificial Sequence: Synthetic oligonucleotide
gugaccggcgguuucguga

SEQ ID NO: 1706870 - RNA, 19 nt, Artificial Sequence
  Description of Artificial Sequence: Synthetic oligonucleotide
ugggguagacaaagaucac

SEQ ID NO: 1706871 - RNA, 19 nt, Artificial Sequence
  Description of Artificial Sequence: Synthetic oligonucleotide
gaucacggucacaauugac

SEQ ID NO: 1706872 - RNA, 19 nt, Artificial Sequence
  Description of Artificial Sequence: Synthetic oligonucleotide
gguuucgugacugcuucag

SEQ ID NO: 1706873 - RNA, 19 nt, Artificial Sequence
  Description of Artificial Sequence: Synthetic oligonucleotide
aggucguucuauguacuca

SEQ ID NO: 1706874 - RNA, 19 nt, Artificial Sequence
  Description of Artificial Sequence: Synthetic oligonucleotide
ggucgaaggaugcugagcu

SEQ ID NO: 1706875 - RNA, 19 nt, Artificial Sequence
  Description of Artificial Sequence: Synthetic oligonucleotide
aucugccaaggaggaaccc

SEQ ID NO: 1706876 - RNA, 19 nt, Artificial Sequence
  Description of Artificial Sequence: Synthetic oligonucleotide
ugcuguugcacggcugucu

SEQ ID NO: 1706877 - RNA, 19 nt, Artificial Sequence
  Description of Artificial Sequence: Synthetic oligonucleotide
agcggggacacugucccag

SEQ ID NO: 1706878 - RNA, 19 nt, Artificial Sequence
  Description of Artificial Sequence: Synthetic oligonucleotide
auccccagagacaaagggu

SEQ ID NO: 1706879 - RNA, 19 nt, Artificial Sequence
  Description of Artificial Sequence: Synthetic oligonucleotide
ggguacaguguucuguuuc

SEQ ID NO: 1706880 - RNA, 19 nt, Artificial Sequence
  Description of Artificial Sequence: Synthetic oligonucleotide
uccaguccguccccauuga

SEQ ID NO: 1706881 - RNA, 19 nt, Artificial Sequence
  Description of Artificial Sequence: Synthetic oligonucleotide
acguagcuggcgugccucg

SEQ ID NO: 1706882 - RNA, 19 nt, Artificial Sequence
  Description of Artificial Sequence: Synthetic oligonucleotide
gggauccccagagacaaag

SEQ ID NO: 1706883 - RNA, 19 nt, Artificial Sequence
  Description of Artificial Sequence: Synthetic oligonucleotide
agagccaagcgccccucca

SEQ ID NO: 1706884 - RNA, 19 nt, Artificial Sequence
  Description of Artificial Sequence: Synthetic oligonucleotide
gucauauguucuaggguga

SEQ ID NO: 1706885 - RNA, 19 nt, Artificial Sequence
  Description of Artificial Sequence: Synthetic oligonucleotide
acccgacacuaacaggaca

SEQ ID NO: 1706886 - RNA, 19 nt, Artificial Sequence
  Description of Artificial Sequence: Synthetic oligonucleotide
uggcuagagccaagcgccc

SEQ ID NO: 1706887 - RNA, 19 nt, Artificial Sequence
  Description of Artificial Sequence: Synthetic oligonucleotide
ugccucgcccucucgcucc

SEQ ID NO: 1706888 - RNA, 19 nt, Artificial Sequence
  Description of Artificial Sequence: Synthetic oligonucleotide
uucacagagugggaacuua

SEQ ID NO: 1706889 - RNA, 19 nt, Artificial Sequence
  Description of Artificial Sequence: Synthetic oligonucleotide
ggucacaauugacaaggga

SEQ ID NO: 1706890 - RNA, 19 nt, Artificial Sequence
  Description of Artificial Sequence: Synthetic oligonucleotide
ugggucccugguguuuugg

SEQ ID NO: 1706891 - RNA, 19 nt, Artificial Sequence
  Description of Artificial Sequence: Synthetic oligonucleotide
auucuacagagagcuguga

SEQ ID NO: 1706892 - RNA, 19 nt, Artificial Sequence
  Description of Artificial Sequence: Synthetic oligonucleotide
cagugccccggguacagug

SEQ ID NO: 1706893 - RNA, 19 nt, Artificial Sequence
  Description of Artificial Sequence: Synthetic oligonucleotide
caggucguucuauguacuc

SEQ ID NO: 1706894 - RNA, 19 nt, Artificial Sequence
  Description of Artificial Sequence: Synthetic oligonucleotide
guagcaugcucccuugggu

SEQ ID NO: 1706895 - RNA, 19 nt, Artificial Sequence
  Description of Artificial Sequence: Synthetic oligonucleotide
ucacguagcuggcgugccu

SEQ ID NO: 1706896 - RNA, 19 nt, Artificial Sequence
  Description of Artificial Sequence: Synthetic oligonucleotide
uggcuguccggcucucagc

SEQ ID NO: 1706897 - RNA, 19 nt, Artificial Sequence
  Description of Artificial Sequence: Synthetic oligonucleotide
ucugugcgcuccuggucca

SEQ ID NO: 1706898 - RNA, 19 nt, Artificial Sequence
  Description of Artificial Sequence: Synthetic oligonucleotide
gacaucuuccuugccaacu

SEQ ID NO: 1706899 - RNA, 19 nt, Artificial Sequence
  Description of Artificial Sequence: Synthetic oligonucleotide
gguaggaugggacucgagu

SEQ ID NO: 1706900 - RNA, 19 nt, Artificial Sequence
  Description of Artificial Sequence: Synthetic oligonucleotide
uggcggguaggaugggacu

SEQ ID NO: 1706901 - RNA, 19 nt, Artificial Sequence
  Description of Artificial Sequence: Synthetic oligonucleotide
ggggacacugucccagcgg

SEQ ID NO: 1706902 - RNA, 19 nt, Artificial Sequence
  Description of Artificial Sequence: Synthetic oligonucleotide
cucggucuacugcacgcug

SEQ ID NO: 1706903 - RNA, 19 nt, Artificial Sequence
  Description of Artificial Sequence: Synthetic oligonucleotide
guaccccguggccaggaug

SEQ ID NO: 1706904 - RNA, 19 nt, Artificial Sequence
  Description of Artificial Sequence: Synthetic oligonucleotide
ucucggucuacugcacgcu

SEQ ID NO: 1706905 - RNA, 19 nt, Artificial Sequence
  Description of Artificial Sequence: Synthetic oligonucleotide
caccucaggucguucuaug

SEQ ID NO: 1706906 - RNA, 19 nt, Artificial Sequence
  Description of Artificial Sequence: Synthetic oligonucleotide
cucucacguagcuggcgug

SEQ ID NO: 1706907 - RNA, 19 nt, Artificial Sequence
  Description of Artificial Sequence: Synthetic oligonucleotide
ggauacuuuuauugcuaga

SEQ ID NO: 1706908 - RNA, 19 nt, Artificial Sequence
  Description of Artificial Sequence: Synthetic oligonucleotide
cguucuauguacucagguc

SEQ ID NO: 1706909 - RNA, 19 nt, Artificial Sequence
  Description of Artificial Sequence: Synthetic oligonucleotide
cuguugcacggcugucugc

SEQ ID NO: 1706910 - RNA, 19 nt, Artificial Sequence
  Description of Artificial Sequence: Synthetic oligonucleotide
ccaaggagaucugccaagg

SEQ ID NO: 1706911 - RNA, 19 nt, Artificial Sequence
  Description of Artificial Sequence: Synthetic oligonucleotide
ggugacagauacacugaug

SEQ ID NO: 1706912 - RNA, 19 nt, Artificial Sequence
  Description of Artificial Sequence: Synthetic oligonucleotide
cuaacaggacaaccucaga

SEQ ID NO: 1706913 - RNA, 19 nt, Artificial Sequence
  Description of Artificial Sequence: Synthetic oligonucleotide
cacugagcagcuggauggg

SEQ ID NO: 1706914 - RNA, 19 nt, Artificial Sequence
  Description of Artificial Sequence: Synthetic oligonucleotide
cucagucucaccagcuuua

SEQ ID NO: 1706915 - RNA, 19 nt, Artificial Sequence
  Description of Artificial Sequence: Synthetic oligonucleotide
agugaccggcgguuucgug

SEQ ID NO: 1706916 - RNA, 19 nt, Artificial Sequence
  Description of Artificial Sequence: Synthetic oligonucleotide
ggggaugcagguggcaggg

SEQ ID NO: 1706917 - RNA, 19 nt, Artificial Sequence
  Description of Artificial Sequence: Synthetic oligonucleotide
aaggccucgaggggacgug

SEQ ID NO: 1706918 - RNA, 19 nt, Artificial Sequence
  Description of Artificial Sequence: Synthetic oligonucleotide
ugcugguaggccuggcguu

SEQ ID NO: 1706919 - RNA, 19 nt, Artificial Sequence
  Description of Artificial Sequence: Synthetic oligonucleotide
gcucucccaacgcugggag

SEQ ID NO: 1706920 - RNA, 19 nt, Artificial Sequence
  Description of Artificial Sequence: Synthetic oligonucleotide
cucucccaacgcugggagc

SEQ ID NO: 1706921 - RNA, 19 nt, Artificial Sequence
  Description of Artificial Sequence: Synthetic oligonucleotide
cacgcugggccucgcguag

SEQ ID NO: 1706922 - RNA, 19 nt, Artificial Sequence
  Description of Artificial Sequence: Synthetic oligonucleotide
ggacucgagugaccggcgg

SEQ ID NO: 1706923 - RNA, 19 nt, Artificial Sequence
  Description of Artificial Sequence: Synthetic oligonucleotide
gaugugcuuccggacuuga

SEQ ID NO: 1706924 - RNA, 19 nt, Artificial Sequence
  Description of Artificial Sequence: Synthetic oligonucleotide
caguccguccccauugaaa

SEQ ID NO: 1706925 - RNA, 19 nt, Artificial Sequence
  Description of Artificial Sequence: Synthetic oligonucleotide
cucacguagcuggcgugcc

SEQ ID NO: 1706926 - RNA, 19 nt, Artificial Sequence
  Description of Artificial Sequence: Synthetic oligonucleotide
ugguaggccuggcguugcc

SEQ ID NO: 1706927 - RNA, 19 nt, Artificial Sequence
  Description of Artificial Sequence: Synthetic oligonucleotide
cucgcccucucgcuccugc

SEQ ID NO: 1706928 - RNA, 19 nt, Artificial Sequence
  Description of Artificial Sequence: Synthetic oligonucleotide
gcagggaugugcuuccgga

SEQ ID NO: 1706929 - RNA, 19 nt, Artificial Sequence
  Description of Artificial Sequence: Synthetic oligonucleotide
accggcgguuucgugacug

SEQ ID NO: 1706930 - RNA, 19 nt, Artificial Sequence
  Description of Artificial Sequence: Synthetic oligonucleotide
ggaacuuaaaagucagcuu

SEQ ID NO: 1706931 - RNA, 19 nt, Artificial Sequence
  Description of Artificial Sequence: Synthetic oligonucleotide
gacaaagaucacggucaca

SEQ ID NO: 1706932 - RNA, 19 nt, Artificial Sequence
  Description of Artificial Sequence: Synthetic oligonucleotide
aucaugggguagacaaaga

SEQ ID NO: 1706933 - RNA, 19 nt, Artificial Sequence
  Description of Artificial Sequence: Synthetic oligonucleotide
gucagcuuuccugaagugu

SEQ ID NO: 1706934 - RNA, 19 nt, Artificial Sequence
  Description of Artificial Sequence: Synthetic oligonucleotide
uugggucccugguguuuug

SEQ ID NO: 1706935 - RNA, 19 nt, Artificial Sequence
  Description of Artificial Sequence: Synthetic oligonucleotide
acacugucccagcgggcca

SEQ ID NO: 1706936 - RNA, 19 nt, Artificial Sequence
  Description of Artificial Sequence: Synthetic oligonucleotide
guggcggguaggaugggac

SEQ ID NO: 1706937 - RNA, 19 nt, Artificial Sequence
  Description of Artificial Sequence: Synthetic oligonucleotide
ugucccagcgggccaccuc

SEQ ID NO: 1706938 - RNA, 19 nt, Artificial Sequence
  Description of Artificial Sequence: Synthetic oligonucleotide
cagcuugguggggauuugc

SEQ ID NO: 1706939 - RNA, 19 nt, Artificial Sequence
  Description of Artificial Sequence: Synthetic oligonucleotide
gcuuccggacuugaagaag

SEQ ID NO: 1706940 - RNA, 19 nt, Artificial Sequence
  Description of Artificial Sequence: Synthetic oligonucleotide
gcgguuucgugacugcuuc

SEQ ID NO: 1706941 - RNA, 19 nt, Artificial Sequence
  Description of Artificial Sequence: Synthetic oligonucleotide
agaaggccucgaggggacg

SEQ ID NO: 1706942 - RNA, 19 nt, Artificial Sequence
  Description of Artificial Sequence: Synthetic oligonucleotide
gggugauuccagaguaccc

SEQ ID NO: 1706943 - RNA, 19 nt, Artificial Sequence
  Description of Artificial Sequence: Synthetic oligonucleotide
cuaguucugugcgcuccug

SEQ ID NO: 1706944 - RNA, 19 nt, Artificial Sequence
  Description of Artificial Sequence: Synthetic oligonucleotide
gguaguagcaugcucccuu

SEQ ID NO: 1706945 - RNA, 19 nt, Artificial Sequence
  Description of Artificial Sequence: Synthetic oligonucleotide
agcucucccaacgcuggga

SEQ ID NO: 1706946 - RNA, 19 nt, Artificial Sequence
  Description of Artificial Sequence: Synthetic oligonucleotide
ugguggggauuugcuguug

SEQ ID NO: 1706947 - RNA, 19 nt, Artificial Sequence
  Description of Artificial Sequence: Synthetic oligonucleotide
ucccagcgggccaccucag

SEQ ID NO: 1706948 - RNA, 19 nt, Artificial Sequence
  Description of Artificial Sequence: Synthetic oligonucleotide
uccggcucucagcggggac

SEQ ID NO: 1706949 - RNA, 19 nt, Artificial Sequence
  Description of Artificial Sequence: Synthetic oligonucleotide
agaguaccccguggccagg

SEQ ID NO: 1706950 - RNA, 19 nt, Artificial Sequence
  Description of Artificial Sequence: Synthetic oligonucleotide
cccgacacuaacaggacaa

SEQ ID NO: 1706951 - RNA, 19 nt, Artificial Sequence
  Description of Artificial Sequence: Synthetic oligonucleotide
ccaagcgccccuccagucc

SEQ ID NO: 1706952 - RNA, 19 nt, Artificial Sequence
  Description of Artificial Sequence: Synthetic oligonucleotide
acucgagugaccggcgguu

SEQ ID NO: 1706953 - RNA, 19 nt, Artificial Sequence
  Description of Artificial Sequence: Synthetic oligonucleotide
cugguaggccuggcguugc

SEQ ID NO: 1706954 - RNA, 19 nt, Artificial Sequence
  Description of Artificial Sequence: Synthetic oligonucleotide
gcggugaguggugugguug

SEQ ID NO: 1706955 - RNA, 19 nt, Artificial Sequence
  Description of Artificial Sequence: Synthetic oligonucleotide
gacucgagugaccggcggu

SEQ ID NO: 1706956 - RNA, 19 nt, Artificial Sequence
  Description of Artificial Sequence: Synthetic oligonucleotide
agguaguagcaugcucccu

SEQ ID NO: 1706957 - RNA, 19 nt, Artificial Sequence
  Description of Artificial Sequence: Synthetic oligonucleotide
caggggucugggacaggug

SEQ ID NO: 1706958 - RNA, 19 nt, Artificial Sequence
  Description of Artificial Sequence: Synthetic oligonucleotide
caaccucagaugagcaagu

SEQ ID NO: 1706959 - RNA, 19 nt, Artificial Sequence
  Description of Artificial Sequence: Synthetic oligonucleotide
cagaagaagaugacaucuu

SEQ ID NO: 1706960 - RNA, 19 nt, Artificial Sequence
  Description of Artificial Sequence: Synthetic oligonucleotide
agugccccggguacagugu

SEQ ID NO: 1706961 - RNA, 19 nt, Artificial Sequence
  Description of Artificial Sequence: Synthetic oligonucleotide
gcuggaugggcacaucacu

SEQ ID NO: 1706962 - RNA, 19 nt, Artificial Sequence
  Description of Artificial Sequence: Synthetic oligonucleotide
ucgcccucucgcuccugca

SEQ ID NO: 1706963 - RNA, 19 nt, Artificial Sequence
  Description of Artificial Sequence: Synthetic oligonucleotide
cgacacuaacaggacaacc

SEQ ID NO: 1706964 - RNA, 19 nt, Artificial Sequence
  Description of Artificial Sequence: Synthetic oligonucleotide
gcggguaggaugggacucg

SEQ ID NO: 1706965 - RNA, 19 nt, Artificial Sequence
  Description of Artificial Sequence: Synthetic oligonucleotide
ggacaaccucagaugagca

SEQ ID NO: 1706966 - RNA, 19 nt, Artificial Sequence
  Description of Artificial Sequence: Synthetic oligonucleotide
ggucugggacaggugcagg

SEQ ID NO: 1706967 - RNA, 19 nt, Artificial Sequence
  Description of Artificial Sequence: Synthetic oligonucleotide
gauccauggguggcgggua

SEQ ID NO: 1706968 - RNA, 19 nt, Artificial Sequence
  Description of Artificial Sequence: Synthetic oligonucleotide
aguaccccguggccaggau

SEQ ID NO: 1706969 - RNA, 19 nt, Artificial Sequence
  Description of Artificial Sequence: Synthetic oligonucleotide
cuauguacucagguccugu

SEQ ID NO: 1706970 - RNA, 19 nt, Artificial Sequence
  Description of Artificial Sequence: Synthetic oligonucleotide
agcuggcgugccucgcccu

SEQ ID NO: 1706971 - RNA, 19 nt, Artificial Sequence
  Description of Artificial Sequence: Synthetic oligonucleotide
cagcuuuaccaaggagauc

SEQ ID NO: 1706972 - RNA, 19 nt, Artificial Sequence
  Description of Artificial Sequence: Synthetic oligonucleotide
gcuguccggcucucagcgg

SEQ ID NO: 1706973 - RNA, 19 nt, Artificial Sequence
  Description of Artificial Sequence: Synthetic oligonucleotide
gguuaucaggacaggagau

SEQ ID NO: 1706974 - RNA, 19 nt, Artificial Sequence
  Description of Artificial Sequence: Synthetic oligonucleotide
gggacucgagugaccggcg

SEQ ID NO: 1706975 - RNA, 19 nt, Artificial Sequence
  Description of Artificial Sequence: Synthetic oligonucleotide
ccguccccauugaaacugg

SEQ ID NO: 1706976 - RNA, 19 nt, Artificial Sequence
  Description of Artificial Sequence: Synthetic oligonucleotide
cugugagacccgacacuaa

SEQ ID NO: 1706977 - RNA, 19 nt, Artificial Sequence
  Description of Artificial Sequence: Synthetic oligonucleotide
gaguaccccguggccagga

SEQ ID NO: 1706978 - RNA, 19 nt, Artificial Sequence
  Description of Artificial Sequence: Synthetic oligonucleotide
ggcuagagccaagcgcccc

SEQ ID NO: 1706979 - RNA, 19 nt, Artificial Sequence
  Description of Artificial Sequence: Synthetic oligonucleotide
ggacguggcagcuggggcu

SEQ ID NO: 1706980 - RNA, 19 nt, Artificial Sequence
  Description of Artificial Sequence: Synthetic oligonucleotide
caaagaucacggucacaau

SEQ ID NO: 1706981 - RNA, 19 nt, Artificial Sequence
  Description of Artificial Sequence: Synthetic oligonucleotide
uggcgugccucgcccucuc

SEQ ID NO: 1706982 - RNA, 19 nt, Artificial Sequence
  Description of Artificial Sequence: Synthetic oligonucleotide
gugccucgcccucucgcuc

SEQ ID NO: 1706983 - RNA, 19 nt, Artificial Sequence
  Description of Artificial Sequence: Synthetic oligonucleotide
gccucucacguagcuggcg

SEQ ID NO: 1706984 - RNA, 19 nt, Artificial Sequence
  Description of Artificial Sequence: Synthetic oligonucleotide
ggaugggacucgagugacc

SEQ ID NO: 1706985 - RNA, 19 nt, Artificial Sequence
  Description of Artificial Sequence: Synthetic oligonucleotide
ggcggguaggaugggacuc

SEQ ID NO: 1706986 - RNA, 19 nt, Artificial Sequence
  Description of Artificial Sequence: Synthetic oligonucleotide
gcgugccucgcccucucgc

SEQ ID NO: 1706987 - RNA, 19 nt, Artificial Sequence
  Description of Artificial Sequence: Synthetic oligonucleotide
cggucacaauugacaaggg

SEQ ID NO: 1706988 - RNA, 19 nt, Artificial Sequence
  Description of Artificial Sequence: Synthetic oligonucleotide
ccaggcgcucacguucucg

SEQ ID NO: 1706989 - RNA, 19 nt, Artificial Sequence
  Description of Artificial Sequence: Synthetic oligonucleotide
agcgccccuccaguccguc

SEQ ID NO: 1706990 - RNA, 19 nt, Artificial Sequence
  Description of Artificial Sequence: Synthetic oligonucleotide
cgagugaccggcgguuucg

SEQ ID NO: 1706991 - RNA, 19 nt, Artificial Sequence
  Description of Artificial Sequence: Synthetic oligonucleotide
ggggaugcucaggcagggg

SEQ ID NO: 1706992 - RNA, 19 nt, Artificial Sequence
  Description of Artificial Sequence: Synthetic oligonucleotide
guccguccccauugaaacu

SEQ ID NO: 1706993 - RNA, 19 nt, Artificial Sequence
  Description of Artificial Sequence: Synthetic oligonucleotide
caacuucauccuuggcggu

SEQ ID NO: 1706994 - RNA, 19 nt, Artificial Sequence
  Description of Artificial Sequence: Synthetic oligonucleotide
ccgcucuaguucugugcgc

SEQ ID NO: 1706995 - RNA, 19 nt, Artificial Sequence
  Description of Artificial Sequence: Synthetic oligonucleotide
ccuggcguugccgcucuag

SEQ ID NO: 1706996 - RNA, 19 nt, Artificial Sequence
  Description of Artificial Sequence: Synthetic oligonucleotide
gcucuaguucugugcgcuc

SEQ ID NO: 1706997 - RNA, 19 nt, Artificial Sequence
  Description of Artificial Sequence: Synthetic oligonucleotide
ccucaggucguucuaugua

SEQ ID NO: 1706998 - RNA, 19 nt, Artificial Sequence
  Description of Artificial Sequence: Synthetic oligonucleotide
gccaagcgccccuccaguc

SEQ ID NO: 1706999 - RNA, 19 nt, Artificial Sequence
  Description of Artificial Sequence: Synthetic oligonucleotide
ggguaggaugggacucgag

SEQ ID NO: 1707000 - RNA, 19 nt, Artificial Sequence
  Description of Artificial Sequence: Synthetic oligonucleotide
ccgacacuaacaggacaac

SEQ ID NO: 1707001 - RNA, 19 nt, Artificial Sequence
  Description of Artificial Sequence: Synthetic oligonucleotide
cguucucggucuacugcac

SEQ ID NO: 1707002 - RNA, 19 nt, Artificial Sequence
  Description of Artificial Sequence: Synthetic oligonucleotide
cugccaucacugugaaaau

SEQ ID NO: 1707003 - RNA, 19 nt, Artificial Sequence
  Description of Artificial Sequence: Synthetic oligonucleotide
guugcacggcugucugccu

SEQ ID NO: 1707004 - RNA, 19 nt, Artificial Sequence
  Description of Artificial Sequence: Synthetic oligonucleotide
cgccccuccaguccguccc

SEQ ID NO: 1707005 - RNA, 19 nt, Artificial Sequence
  Description of Artificial Sequence: Synthetic oligonucleotide
gguggcggguaggauggga

SEQ ID NO: 1707006 - RNA, 19 nt, Artificial Sequence
  Description of Artificial Sequence: Synthetic oligonucleotide
cuuggcuguccggcucuca

SEQ ID NO: 1707007 - RNA, 19 nt, Artificial Sequence
  Description of Artificial Sequence: Synthetic oligonucleotide
gcguugccgcucuaguucu

SEQ ID NO: 1707008 - RNA, 19 nt, Artificial Sequence
  Description of Artificial Sequence: Synthetic oligonucleotide
cggggacacugucccagcg

SEQ ID NO: 1707009 - RNA, 19 nt, Artificial Sequence
  Description of Artificial Sequence: Synthetic oligonucleotide
ccggcgguuucgugacugc

SEQ ID NO: 1707010 - RNA, 19 nt, Artificial Sequence
  Description of Artificial Sequence: Synthetic oligonucleotide
aagcgccccuccaguccgu

SEQ ID NO: 1707011 - RNA, 19 nt, Artificial Sequence
  Description of Artificial Sequence: Synthetic oligonucleotide
ggccucgcguagacgcucc

SEQ ID NO: 1707012 - RNA, 19 nt, Artificial Sequence
  Description of Artificial Sequence: Synthetic oligonucleotide
cccagcgggccaccucagg

SEQ ID NO: 1707013 - RNA, 19 nt, Artificial Sequence
  Description of Artificial Sequence: Synthetic oligonucleotide
ccucgcguagacgcuccag

SEQ ID NO: 1707014 - RNA, 19 nt, Artificial Sequence
  Description of Artificial Sequence: Synthetic oligonucleotide
gagugaccggcgguuucgu

SEQ ID NO: 1707015 - RNA, 19 nt, Artificial Sequence
  Description of Artificial Sequence: Synthetic oligonucleotide
ggccaggaugcucugccau

SEQ ID NO: 1707016 - RNA, 19 nt, Artificial Sequence
  Description of Artificial Sequence: Synthetic oligonucleotide
acgcugggccucgcguaga

SEQ ID NO: 1707017 - RNA, 19 nt, Artificial Sequence
  Description of Artificial Sequence: Synthetic oligonucleotide
gcucacguucucggucuac

SEQ ID NO: 1707018 - RNA, 19 nt, Artificial Sequence
  Description of Artificial Sequence: Synthetic oligonucleotide
gccaccucaggucguucua

SEQ ID NO: 1707019 - RNA, 19 nt, Artificial Sequence
  Description of Artificial Sequence: Synthetic oligonucleotide
gcacgcugggccucgcgua

SEQ ID NO: 1707020 - RNA, 19 nt, Artificial Sequence
  Description of Artificial Sequence: Synthetic oligonucleotide
cagcggggacacuguccca

SEQ ID NO: 1707021 - RNA, 19 nt, Artificial Sequence
  Description of Artificial Sequence: Synthetic oligonucleotide
ggggauggccagacaguaa

SEQ ID NO: 1707022 - RNA, 19 nt, Artificial Sequence
  Description of Artificial Sequence: Synthetic oligonucleotide
ccagcuugguggggauuug

SEQ ID NO: 1707023 - RNA, 19 nt, Artificial Sequence
  Description of Artificial Sequence: Synthetic oligonucleotide
accccguggccaggaugcu

SEQ ID NO: 1707024 - RNA, 19 nt, Artificial Sequence
  Description of Artificial Sequence: Synthetic oligonucleotide
gcgccccuccaguccgucc

SEQ ID NO: 1707025 - RNA, 19 nt, Artificial Sequence
  Description of Artificial Sequence: Synthetic oligonucleotide
ccagcgggccaccucaggu

SEQ ID NO: 1707026 - RNA, 19 nt, Artificial Sequence
  Description of Artificial Sequence: Synthetic oligonucleotide
gugccccggguacaguguu

SEQ ID NO: 1707027 - RNA, 19 nt, Artificial Sequence
  Description of Artificial Sequence: Synthetic oligonucleotide
gcccucucgcuccugcagu

SEQ ID NO: 1707028 - RNA, 19 nt, Artificial Sequence
  Description of Artificial Sequence: Synthetic oligonucleotide
ccccagagacaaaggguua

SEQ ID NO: 1707029 - RNA, 19 nt, Artificial Sequence
  Description of Artificial Sequence: Synthetic oligonucleotide
cguagcuggcgugccucgc

SEQ ID NO: 1707030 - RNA, 19 nt, Artificial Sequence
  Description of Artificial Sequence: Synthetic oligonucleotide
ccggguacaguguucuguu

SEQ ID NO: 1707031 - RNA, 19 nt, Artificial Sequence
  Description of Artificial Sequence: Synthetic oligonucleotide
gaccggcgguuucgugacu

SEQ ID NO: 1707032 - RNA, 19 nt, Artificial Sequence
  Description of Artificial Sequence: Synthetic oligonucleotide
ggcgguuucgugacugcuu

SEQ ID NO: 1707033 - RNA, 19 nt, Artificial Sequence
  Description of Artificial Sequence: Synthetic oligonucleotide
ccccggguacaguguucug

SEQ ID NO: 1707034 - RNA, 19 nt, Artificial Sequence
  Description of Artificial Sequence: Synthetic oligonucleotide
ccaguccguccccauugaa

SEQ ID NO: 1707035 - RNA, 19 nt, Artificial Sequence
  Description of Artificial Sequence: Synthetic oligonucleotide
cgcugggccucgcguagac

SEQ ID NO: 1707036 - RNA, 19 nt, Artificial Sequence
  Description of Artificial Sequence: Synthetic oligonucleotide
cucgagugaccggcgguuu

SEQ ID NO: 1707037 - RNA, 19 nt, Artificial Sequence
  Description of Artificial Sequence: Synthetic oligonucleotide
gccucgcguagacgcucca

SEQ ID NO: 1707038 - RNA, 19 nt, Artificial Sequence
  Description of Artificial Sequence: Synthetic oligonucleotide
cuggcgugccucgcccucu

SEQ ID NO: 1707039 - RNA, 19 nt, Artificial Sequence
  Description of Artificial Sequence: Synthetic oligonucleotide
cgcucuaguucugugcgcu

SEQ ID NO: 1707040 - RNA, 19 nt, Artificial Sequence
  Description of Artificial Sequence: Synthetic oligonucleotide
gcaagugccuggggaugcu

SEQ ID NO: 1707041 - RNA, 19 nt, Artificial Sequence
  Description of Artificial Sequence: Synthetic oligonucleotide
ggccuggcguugccgcucu

SEQ ID NO: 1707042 - RNA, 19 nt, Artificial Sequence
  Description of Artificial Sequence: Synthetic oligonucleotide
cgugccucgcccucucgcu

SEQ ID NO: 1707043 - RNA, 19 nt, Artificial Sequence
  Description of Artificial Sequence: Synthetic oligonucleotide
ccaccucaggucguucuau

SEQ ID NO: 1707044 - RNA, 19 nt, Artificial Sequence
  Description of Artificial Sequence: Synthetic oligonucleotide
ccauugaaacugggaggau

SEQ ID NO: 1707045 - RNA, 19 nt, Artificial Sequence
  Description of Artificial Sequence: Synthetic oligonucleotide
cggguaggaugggacucga

SEQ ID NO: 1707046 - RNA, 19 nt, Artificial Sequence
  Description of Artificial Sequence: Synthetic oligonucleotide
cccaacgcugggagccccu

SEQ ID NO: 1707047 - RNA, 19 nt, Artificial Sequence
  Description of Artificial Sequence: Synthetic oligonucleotide
gcagugccccggguacagu

SEQ ID NO: 1707048 - RNA, 19 nt, Artificial Sequence
  Description of Artificial Sequence: Synthetic oligonucleotide
ggcucucagcggggacacu

SEQ ID NO: 1707049 - RNA, 19 nt, Artificial Sequence
  Description of Artificial Sequence: Synthetic oligonucleotide
cgcucacguucucggucua

SEQ ID NO: 1707050 - RNA, 19 nt, Artificial Sequence
  Description of Artificial Sequence: Synthetic oligonucleotide
gccuggcguugccgcucua

SEQ ID NO: 1707051 - RNA, 19 nt, Artificial Sequence
  Description of Artificial Sequence: Synthetic oligonucleotide
auugcuucgggucacauuc

SEQ ID NO: 1707052 - RNA, 19 nt, Artificial Sequence
  Description of Artificial Sequence: Synthetic oligonucleotide
gauacaggaggccucaacg

SEQ ID NO: 1707053 - RNA, 19 nt, Artificial Sequence
  Description of Artificial Sequence: Synthetic oligonucleotide
ucuucuuaagggcagcagg

SEQ ID NO: 1707054 - RNA, 19 nt, Artificial Sequence
  Description of Artificial Sequence: Synthetic oligonucleotide
uaagugaacagauccaagc

SEQ ID NO: 1707055 - RNA, 19 nt, Artificial Sequence
  Description of Artificial Sequence: Synthetic oligonucleotide
aggagagucuucuuaaggg

SEQ ID NO: 1707056 - RNA, 19 nt, Artificial Sequence
  Description of Artificial Sequence: Synthetic oligonucleotide
gacucuaugccacuaagug

SEQ ID NO: 1707057 - RNA, 19 nt, Artificial Sequence
  Description of Artificial Sequence: Synthetic oligonucleotide
gauccgaagaccucggugc

SEQ ID NO: 1707058 - RNA, 19 nt, Artificial Sequence
  Description of Artificial Sequence: Synthetic oligonucleotide
cuucgggucacauucacgc

SEQ ID NO: 1707059 - RNA, 19 nt, Artificial Sequence
  Description of Artificial Sequence: Synthetic oligonucleotide
cuuguucggauacaggagg

SEQ ID NO: 1707060 - RNA, 19 nt, Artificial Sequence
  Description of Artificial Sequence: Synthetic oligonucleotide
uaugccacuaagugaacag

SEQ ID NO: 1707061 - RNA, 19 nt, Artificial Sequence
  Description of Artificial Sequence: Synthetic oligonucleotide
aucuccugagcgcagacac

SEQ ID NO: 1707062 - RNA, 19 nt, Artificial Sequence
  Description of Artificial Sequence: Synthetic oligonucleotide
cuucuuaagggcagcaggg

SEQ ID NO: 1707063 - RNA, 19 nt, Artificial Sequence
  Description of Artificial Sequence: Synthetic oligonucleotide
uaaaugcauaggcaggccc

SEQ ID NO: 1707064 - RNA, 19 nt, Artificial Sequence
  Description of Artificial Sequence: Synthetic oligonucleotide
ucaacggcauugaugagca

SEQ ID NO: 1707065 - RNA, 19 nt, Artificial Sequence
  Description of Artificial Sequence: Synthetic oligonucleotide
ucuuguucggauacaggag

SEQ ID NO: 1707066 - RNA, 19 nt, Artificial Sequence
  Description of Artificial Sequence: Synthetic oligonucleotide
agugcuaacacacgggccu

SEQ ID NO: 1707067 - RNA, 19 nt, Artificial Sequence
  Description of Artificial Sequence: Synthetic oligonucleotide
acagggagaccccacaccg

SEQ ID NO: 1707068 - RNA, 19 nt, Artificial Sequence
  Description of Artificial Sequence: Synthetic oligonucleotide
aaacccacacucauggccg

SEQ ID NO: 1707069 - RNA, 19 nt, Artificial Sequence
  Description of Artificial Sequence: Synthetic oligonucleotide
uccacuagagcaugggugc

SEQ ID NO: 1707070 - RNA, 19 nt, Artificial Sequence
  Description of Artificial Sequence: Synthetic oligonucleotide
augagcagagagcggaagc

SEQ ID NO: 1707071 - RNA, 19 nt, Artificial Sequence
  Description of Artificial Sequence: Synthetic oligonucleotide
cuugugagccgacaggacg

SEQ ID NO: 1707072 - RNA, 19 nt, Artificial Sequence
  Description of Artificial Sequence: Synthetic oligonucleotide
acauucacgcccaaucucc

SEQ ID NO: 1707073 - RNA, 19 nt, Artificial Sequence
  Description of Artificial Sequence: Synthetic oligonucleotide
aacgccugagcucccaguc

SEQ ID NO: 1707074 - RNA, 19 nt, Artificial Sequence
  Description of Artificial Sequence: Synthetic oligonucleotide
agagcugauggugacaccg

SEQ ID NO: 1707075 - RNA, 19 nt, Artificial Sequence
  Description of Artificial Sequence: Synthetic oligonucleotide
auacaggaggccucaacgg

SEQ ID NO: 1707076 - RNA, 19 nt, Artificial Sequence
  Description of Artificial Sequence: Synthetic oligonucleotide
aagacccggauccgaagac

SEQ ID NO: 1707077 - RNA, 19 nt, Artificial Sequence
  Description of Artificial Sequence: Synthetic oligonucleotide
agauccaagcagcuucccc

SEQ ID NO: 1707078 - RNA, 19 nt, Artificial Sequence
  Description of Artificial Sequence: Synthetic oligonucleotide
cauaaaugcauaggcaggc

SEQ ID NO: 1707079 - RNA, 19 nt, Artificial Sequence
  Description of Artificial Sequence: Synthetic oligonucleotide
aacacacgggccucccacc

SEQ ID NO: 1707080 - RNA, 19 nt, Artificial Sequence
  Description of Artificial Sequence: Synthetic oligonucleotide
aaagacccggauccgaaga

SEQ ID NO: 1707081 - RNA, 19 nt, Artificial Sequence
  Description of Artificial Sequence: Synthetic oligonucleotide
agaccuaagcuugaccgcc

SEQ ID NO: 1707082 - RNA, 19 nt, Artificial Sequence
  Description of Artificial Sequence: Synthetic oligonucleotide
ugggacaagagaaggacuc

SEQ ID NO: 1707083 - RNA, 19 nt, Artificial Sequence
  Description of Artificial Sequence: Synthetic oligonucleotide
uugugagccgacaggacgc

SEQ ID NO: 1707084 - RNA, 19 nt, Artificial Sequence
  Description of Artificial Sequence: Synthetic oligonucleotide
uuagccgcucccagcaacg

SEQ ID NO: 1707085 - RNA, 19 nt, Artificial Sequence
  Description of Artificial Sequence: Synthetic oligonucleotide
ucucuuguucggauacagg

SEQ ID NO: 1707086 - RNA, 19 nt, Artificial Sequence
  Description of Artificial Sequence: Synthetic oligonucleotide
aaugcauaggcaggcccac

SEQ ID NO: 1707087 - RNA, 19 nt, Artificial Sequence
  Description of Artificial Sequence: Synthetic oligonucleotide
aggugugcuggcuucgggc

SEQ ID NO: 1707088 - RNA, 19 nt, Artificial Sequence
  Description of Artificial Sequence: Synthetic oligonucleotide
uuggucaugcagcggauca

SEQ ID NO: 1707089 - RNA, 19 nt, Artificial Sequence
  Description of Artificial Sequence: Synthetic oligonucleotide
aacggcauugaugagcaga

SEQ ID NO: 1707090 - RNA, 19 nt, Artificial Sequence
  Description of Artificial Sequence: Synthetic oligonucleotide
ucacauucacgcccaaucu

SEQ ID NO: 1707091 - RNA, 19 nt, Artificial Sequence
  Description of Artificial Sequence: Synthetic oligonucleotide
ucagaugccucuccagagc

SEQ ID NO: 1707092 - RNA, 19 nt, Artificial Sequence
  Description of Artificial Sequence: Synthetic oligonucleotide
ugaacagauccaagcagcu

SEQ ID NO: 1707093 - RNA, 19 nt, Artificial Sequence
  Description of Artificial Sequence: Synthetic oligonucleotide
acgcccaaucuccugagcg

SEQ ID NO: 1707094 - RNA, 19 nt, Artificial Sequence
  Description of Artificial Sequence: Synthetic oligonucleotide
ccagaccuaagcuugaccg

SEQ ID NO: 1707095 - RNA, 19 nt, Artificial Sequence
  Description of Artificial Sequence: Synthetic oligonucleotide
ugugggacaagagaaggac

SEQ ID NO: 1707096 - RNA, 19 nt, Artificial Sequence
  Description of Artificial Sequence: Synthetic oligonucleotide
cucuuguucggauacagga

SEQ ID NO: 1707097 - RNA, 19 nt, Artificial Sequence
  Description of Artificial Sequence: Synthetic oligonucleotide
ugagccgacaggacgccgg

SEQ ID NO: 1707098 - RNA, 19 nt, Artificial Sequence
  Description of Artificial Sequence: Synthetic oligonucleotide
gacaucacugugccgcacg

SEQ ID NO: 1707099 - RNA, 19 nt, Artificial Sequence
  Description of Artificial Sequence: Synthetic oligonucleotide
ugagcgcagacaccguggg

SEQ ID NO: 1707100 - RNA, 19 nt, Artificial Sequence
  Description of Artificial Sequence: Synthetic oligonucleotide
uccgagccuggaaagaccc

SEQ ID NO: 1707101 - RNA, 19 nt, Artificial Sequence
  Description of Artificial Sequence: Synthetic oligonucleotide
caugcagcggaucacuuug

SEQ ID NO: 1707102 - RNA, 19 nt, Artificial Sequence
  Description of Artificial Sequence: Synthetic oligonucleotide
acgguguccuuauugcuuc

SEQ ID NO: 1707103 - RNA, 19 nt, Artificial Sequence
  Description of Artificial Sequence: Synthetic oligonucleotide
acucuaugccacuaaguga

SEQ ID NO: 1707104 - RNA, 19 nt, Artificial Sequence
  Description of Artificial Sequence: Synthetic oligonucleotide
gcuauuaucuugugagccg

SEQ ID NO: 1707105 - RNA, 19 nt, Artificial Sequence
  Description of Artificial Sequence: Synthetic oligonucleotide
aucacugugccgcacggug

SEQ ID NO: 1707106 - RNA, 19 nt, Artificial Sequence
  Description of Artificial Sequence: Synthetic oligonucleotide
ccacuaagugaacagaucc

SEQ ID NO: 1707107 - RNA, 19 nt, Artificial Sequence
  Description of Artificial Sequence: Synthetic oligonucleotide
cucggugcagcuuccaagc

SEQ ID NO: 1707108 - RNA, 19 nt, Artificial Sequence
  Description of Artificial Sequence: Synthetic oligonucleotide
ugcacgucggccccaaucu

SEQ ID NO: 1707109 - RNA, 19 nt, Artificial Sequence
  Description of Artificial Sequence: Synthetic oligonucleotide
gucacauucacgcccaauc

SEQ ID NO: 1707110 - RNA, 19 nt, Artificial Sequence
  Description of Artificial Sequence: Synthetic oligonucleotide
uuccaagcagggaugcacc

SEQ ID NO: 1707111 - RNA, 19 nt, Artificial Sequence
  Description of Artificial Sequence: Synthetic oligonucleotide
aaaugcauaggcaggccca

SEQ ID NO: 1707112 - RNA, 19 nt, Artificial Sequence
  Description of Artificial Sequence: Synthetic oligonucleotide
ugcugugggacaagagaag

SEQ ID NO: 1707113 - RNA, 19 nt, Artificial Sequence
  Description of Artificial Sequence: Synthetic oligonucleotide
ugcagcggaucacuuuggg

SEQ ID NO: 1707114 - RNA, 19 nt, Artificial Sequence
  Description of Artificial Sequence: Synthetic oligonucleotide
uaacacacgggccucccac

SEQ ID NO: 1707115 - RNA, 19 nt, Artificial Sequence
  Description of Artificial Sequence: Synthetic oligonucleotide
uguccuuauugcuucgggu

SEQ ID NO: 1707116 - RNA, 19 nt, Artificial Sequence
  Description of Artificial Sequence: Synthetic oligonucleotide
guggcauacaccguggccc

SEQ ID NO: 1707117 - RNA, 19 nt, Artificial Sequence
  Description of Artificial Sequence: Synthetic oligonucleotide
agcuugaccgccccugcac

SEQ ID NO: 1707118 - RNA, 19 nt, Artificial Sequence
  Description of Artificial Sequence: Synthetic oligonucleotide
aucuuagccgcucccagca

SEQ ID NO: 1707119 - RNA, 19 nt, Artificial Sequence
  Description of Artificial Sequence: Synthetic oligonucleotide
gaugugccucuccugcacg

SEQ ID NO: 1707120 - RNA, 19 nt, Artificial Sequence
  Description of Artificial Sequence: Synthetic oligonucleotide
aggacucuaugccacuaag

SEQ ID NO: 1707121 - RNA, 19 nt, Artificial Sequence
  Description of Artificial Sequence: Synthetic oligonucleotide
gaaagacccggauccgaag

SEQ ID NO: 1707122 - RNA, 19 nt, Artificial Sequence
  Description of Artificial Sequence: Synthetic oligonucleotide
ugccacuaagugaacagau

SEQ ID NO: 1707123 - RNA, 19 nt, Artificial Sequence
  Description of Artificial Sequence: Synthetic oligonucleotide
agacaccgugggcaggucc

SEQ ID NO: 1707124 - RNA, 19 nt, Artificial Sequence
  Description of Artificial Sequence: Synthetic oligonucleotide
uucccguccuccacuagag

SEQ ID NO: 1707125 - RNA, 19 nt, Artificial Sequence
  Description of Artificial Sequence: Synthetic oligonucleotide
agggccauaaaugcauagg

SEQ ID NO: 1707126 - RNA, 19 nt, Artificial Sequence
  Description of Artificial Sequence: Synthetic oligonucleotide
uggaacgccaucagcuucu

SEQ ID NO: 1707127 - RNA, 19 nt, Artificial Sequence
  Description of Artificial Sequence: Synthetic oligonucleotide
cuucaccccaccauccgcc

SEQ ID NO: 1707128 - RNA, 19 nt, Artificial Sequence
  Description of Artificial Sequence: Synthetic oligonucleotide
aucuucaccccaccauccg

SEQ ID NO: 1707129 - RNA, 19 nt, Artificial Sequence
  Description of Artificial Sequence: Synthetic oligonucleotide
ucuaggaagugcagggcau

SEQ ID NO: 1707130 - RNA, 19 nt, Artificial Sequence
  Description of Artificial Sequence: Synthetic oligonucleotide
accuaagcuugaccgcccc

SEQ ID NO: 1707131 - RNA, 19 nt, Artificial Sequence
  Description of Artificial Sequence: Synthetic oligonucleotide
cuccugagcgcagacaccg

SEQ ID NO: 1707132 - RNA, 19 nt, Artificial Sequence
  Description of Artificial Sequence: Synthetic oligonucleotide
ucgcggaccaccacgggug

SEQ ID NO: 1707133 - RNA, 19 nt, Artificial Sequence
  Description of Artificial Sequence: Synthetic oligonucleotide
acaucacugugccgcacgg

SEQ ID NO: 1707134 - RNA, 19 nt, Artificial Sequence
  Description of Artificial Sequence: Synthetic oligonucleotide
gagaaggacucuaugccac

SEQ ID NO: 1707135 - RNA, 19 nt, Artificial Sequence
  Description of Artificial Sequence: Synthetic oligonucleotide
uaagcuugaccgccccugc

SEQ ID NO: 1707136 - RNA, 19 nt, Artificial Sequence
  Description of Artificial Sequence: Synthetic oligonucleotide
cagcgcacaggccagcugg

SEQ ID NO: 1707137 - RNA, 19 nt, Artificial Sequence
  Description of Artificial Sequence: Synthetic oligonucleotide
agcagagagcggaagcccc

SEQ ID NO: 1707138 - RNA, 19 nt, Artificial Sequence
  Description of Artificial Sequence: Synthetic oligonucleotide
agcgccgacccggagacgc

SEQ ID NO: 1707139 - RNA, 19 nt, Artificial Sequence
  Description of Artificial Sequence: Synthetic oligonucleotide
augagguccuccuccaccu

SEQ ID NO: 1707140 - RNA, 19 nt, Artificial Sequence
  Description of Artificial Sequence: Synthetic oligonucleotide
uauuaucuugugagccgac

SEQ ID NO: 1707141 - RNA, 19 nt, Artificial Sequence
  Description of Artificial Sequence: Synthetic oligonucleotide
agcuuccaagcagggaugc

SEQ ID NO: 1707142 - RNA, 19 nt, Artificial Sequence
  Description of Artificial Sequence: Synthetic oligonucleotide
aucuugugagccgacagga

SEQ ID NO: 1707143 - RNA, 19 nt, Artificial Sequence
  Description of Artificial Sequence: Synthetic oligonucleotide
cagaccuaagcuugaccgc

SEQ ID NO: 1707144 - RNA, 19 nt, Artificial Sequence
  Description of Artificial Sequence: Synthetic oligonucleotide
ggggagugcuaacacacgg

SEQ ID NO: 1707145 - RNA, 19 nt, Artificial Sequence
  Description of Artificial Sequence: Synthetic oligonucleotide
acaccgcacuccucagucc

SEQ ID NO: 1707146 - RNA, 19 nt, Artificial Sequence
  Description of Artificial Sequence: Synthetic oligonucleotide
agacccggauccgaagacc

SEQ ID NO: 1707147 - RNA, 19 nt, Artificial Sequence
  Description of Artificial Sequence: Synthetic oligonucleotide
acaccggcugcacaggaca

SEQ ID NO: 1707148 - RNA, 19 nt, Artificial Sequence
  Description of Artificial Sequence: Synthetic oligonucleotide
caggauccccgcaagcgcc

SEQ ID NO: 1707149 - RNA, 19 nt, Artificial Sequence
  Description of Artificial Sequence: Synthetic oligonucleotide
uucggauacaggaggccuc

SEQ ID NO: 1707150 - RNA, 19 nt, Artificial Sequence
  Description of Artificial Sequence: Synthetic oligonucleotide
uguucggauacaggaggcc

SEQ ID NO: 1707151 - RNA, 19 nt, Artificial Sequence
  Description of Artificial Sequence: Synthetic oligonucleotide
acgccggcggccgugaagc

SEQ ID NO: 1707152 - RNA, 19 nt, Artificial Sequence
  Description of Artificial Sequence: Synthetic oligonucleotide
cucucuuguucggauacag

SEQ ID NO: 1707153 - RNA, 19 nt, Artificial Sequence
  Description of Artificial Sequence: Synthetic oligonucleotide
agggagaccccacaccgca

SEQ ID NO: 1707154 - RNA, 19 nt, Artificial Sequence
  Description of Artificial Sequence: Synthetic oligonucleotide
cacauucacgcccaaucuc

SEQ ID NO: 1707155 - RNA, 19 nt, Artificial Sequence
  Description of Artificial Sequence: Synthetic oligonucleotide
cuaagcuugaccgccccug

SEQ ID NO: 1707156 - RNA, 19 nt, Artificial Sequence
  Description of Artificial Sequence: Synthetic oligonucleotide
ggagccagcguggauacgg

SEQ ID NO: 1707157 - RNA, 19 nt, Artificial Sequence
  Description of Artificial Sequence: Synthetic oligonucleotide
cacuccucaguccuucuug

SEQ ID NO: 1707158 - RNA, 19 nt, Artificial Sequence
  Description of Artificial Sequence: Synthetic oligonucleotide
cagucggacugccaggcgc

SEQ ID NO: 1707159 - RNA, 19 nt, Artificial Sequence
  Description of Artificial Sequence: Synthetic oligonucleotide
cacuaagugaacagaucca

SEQ ID NO: 1707160 - RNA, 19 nt, Artificial Sequence
  Description of Artificial Sequence: Synthetic oligonucleotide
ggguguguuggucaugcag

SEQ ID NO: 1707161 - RNA, 19 nt, Artificial Sequence
  Description of Artificial Sequence: Synthetic oligonucleotide
agucggacugccaggcgcc

SEQ ID NO: 1707162 - RNA, 19 nt, Artificial Sequence
  Description of Artificial Sequence: Synthetic oligonucleotide
ucgugagcagcuucccuga

SEQ ID NO: 1707163 - RNA, 19 nt, Artificial Sequence
  Description of Artificial Sequence: Synthetic oligonucleotide
cuuagccgcucccagcaac

SEQ ID NO: 1707164 - RNA, 19 nt, Artificial Sequence
  Description of Artificial Sequence: Synthetic oligonucleotide
uggcauacaccguggcccc

SEQ ID NO: 1707165 - RNA, 19 nt, Artificial Sequence
  Description of Artificial Sequence: Synthetic oligonucleotide
ugcuucgggucacauucac

SEQ ID NO: 1707166 - RNA, 19 nt, Artificial Sequence
  Description of Artificial Sequence: Synthetic oligonucleotide
cugccaggcgccuuggcac

SEQ ID NO: 1707167 - RNA, 19 nt, Artificial Sequence
  Description of Artificial Sequence: Synthetic oligonucleotide
acgcugggaauccugggcu

SEQ ID NO: 1707168 - RNA, 19 nt, Artificial Sequence
  Description of Artificial Sequence: Synthetic oligonucleotide
ucuccugagcgcagacacc

SEQ ID NO: 1707169 - RNA, 19 nt, Artificial Sequence
  Description of Artificial Sequence: Synthetic oligonucleotide
gaggugugcuggcuucggg

SEQ ID NO: 1707170 - RNA, 19 nt, Artificial Sequence
  Description of Artificial Sequence: Synthetic oligonucleotide
caagcgccgacccggagac

SEQ ID NO: 1707171 - RNA, 19 nt, Artificial Sequence
  Description of Artificial Sequence: Synthetic oligonucleotide
ucccagcaacgccugagcu

SEQ ID NO: 1707172 - RNA, 19 nt, Artificial Sequence
  Description of Artificial Sequence: Synthetic oligonucleotide
aggguccgagccuggaaag

SEQ ID NO: 1707173 - RNA, 19 nt, Artificial Sequence
  Description of Artificial Sequence: Synthetic oligonucleotide
caucagaugccucuccaga

SEQ ID NO: 1707174 - RNA, 19 nt, Artificial Sequence
  Description of Artificial Sequence: Synthetic oligonucleotide
cacaccgcacuccucaguc

SEQ ID NO: 1707175 - RNA, 19 nt, Artificial Sequence
  Description of Artificial Sequence: Synthetic oligonucleotide
ucacugugccgcacggugu

SEQ ID NO: 1707176 - RNA, 19 nt, Artificial Sequence
  Description of Artificial Sequence: Synthetic oligonucleotide
gugccucuccugcacgucg

SEQ ID NO: 1707177 - RNA, 19 nt, Artificial Sequence
  Description of Artificial Sequence: Synthetic oligonucleotide
uuuccggggagcuggcuau

SEQ ID NO: 1707178 - RNA, 19 nt, Artificial Sequence
  Description of Artificial Sequence: Synthetic oligonucleotide
agccauggacugcagcucu

SEQ ID NO: 1707179 - RNA, 19 nt, Artificial Sequence
  Description of Artificial Sequence: Synthetic oligonucleotide
ucucgugagcagcuucccu

SEQ ID NO: 1707180 - RNA, 19 nt, Artificial Sequence
  Description of Artificial Sequence: Synthetic oligonucleotide
cuauuaucuugugagccga

SEQ ID NO: 1707181 - RNA, 19 nt, Artificial Sequence
  Description of Artificial Sequence: Synthetic oligonucleotide
ugccaggcgccuuggcacg

SEQ ID NO: 1707182 - RNA, 19 nt, Artificial Sequence
  Description of Artificial Sequence: Synthetic oligonucleotide
accauccgccagcgcaucc

SEQ ID NO: 1707183 - RNA, 19 nt, Artificial Sequence
  Description of Artificial Sequence: Synthetic oligonucleotide
cucagagaggugugcuggc

SEQ ID NO: 1707184 - RNA, 19 nt, Artificial Sequence
  Description of Artificial Sequence: Synthetic oligonucleotide
acgccugagcucccagucg

SEQ ID NO: 1707185 - RNA, 19 nt, Artificial Sequence
  Description of Artificial Sequence: Synthetic oligonucleotide
gagcagagagcggaagccc

SEQ ID NO: 1707186 - RNA, 19 nt, Artificial Sequence
  Description of Artificial Sequence: Synthetic oligonucleotide
auucacgcccaaucuccug

SEQ ID NO: 1707187 - RNA, 19 nt, Artificial Sequence
  Description of Artificial Sequence: Synthetic oligonucleotide
uggcccgcgccgaugaaac

SEQ ID NO: 1707188 - RNA, 19 nt, Artificial Sequence
  Description of Artificial Sequence: Synthetic oligonucleotide
ugacaccggcugcacagga

SEQ ID NO: 1707189 - RNA, 19 nt, Artificial Sequence
  Description of Artificial Sequence: Synthetic oligonucleotide
accucccucagagaggugu

SEQ ID NO: 1707190 - RNA, 19 nt, Artificial Sequence
  Description of Artificial Sequence: Synthetic oligonucleotide
agaccccacaccgcacucc

SEQ ID NO: 1707191 - RNA, 19 nt, Artificial Sequence
  Description of Artificial Sequence: Synthetic oligonucleotide
uauugcuucgggucacauu

SEQ ID NO: 1707192 - RNA, 19 nt, Artificial Sequence
  Description of Artificial Sequence: Synthetic oligonucleotide
auuuccggggagcuggcua

SEQ ID NO: 1707193 - RNA, 19 nt, Artificial Sequence
  Description of Artificial Sequence: Synthetic oligonucleotide
ucggauacaggaggccuca

SEQ ID NO: 1707194 - RNA, 19 nt, Artificial Sequence
  Description of Artificial Sequence: Synthetic oligonucleotide
cacucucuaggaagugcag

SEQ ID NO: 1707195 - RNA, 19 nt, Artificial Sequence
  Description of Artificial Sequence: Synthetic oligonucleotide
gcuggguggagccagcgug

SEQ ID NO: 1707196 - RNA, 19 nt, Artificial Sequence
  Description of Artificial Sequence: Synthetic oligonucleotide
gacaggacgccggcggccg

SEQ ID NO: 1707197 - RNA, 19 nt, Artificial Sequence
  Description of Artificial Sequence: Synthetic oligonucleotide
cacucauggccgcaggauc

SEQ ID NO: 1707198 - RNA, 19 nt, Artificial Sequence
  Description of Artificial Sequence: Synthetic oligonucleotide
aggacagggagaccccaca

SEQ ID NO: 1707199 - RNA, 19 nt, Artificial Sequence
  Description of Artificial Sequence: Synthetic oligonucleotide
acuagagcaugggugccug

SEQ ID NO: 1707200 - RNA, 19 nt, Artificial Sequence
  Description of Artificial Sequence: Synthetic oligonucleotide
cugaggacagggagacccc

SEQ ID NO: 1707201 - RNA, 19 nt, Artificial Sequence
  Description of Artificial Sequence: Synthetic oligonucleotide
gugagcagcuucccugagc

SEQ ID NO: 1707202 - RNA, 19 nt, Artificial Sequence
  Description of Artificial Sequence: Synthetic oligonucleotide
cuggaacgccaucagcuuc

SEQ ID NO: 1707203 - RNA, 19 nt, Artificial Sequence
  Description of Artificial Sequence: Synthetic oligonucleotide
auccccgcaagcgccgacc

SEQ ID NO: 1707204 - RNA, 19 nt, Artificial Sequence
  Description of Artificial Sequence: Synthetic oligonucleotide
uugcuucgggucacauuca

SEQ ID NO: 1707205 - RNA, 19 nt, Artificial Sequence
  Description of Artificial Sequence: Synthetic oligonucleotide
ucggugcagcuuccaagca

SEQ ID NO: 1707206 - RNA, 19 nt, Artificial Sequence
  Description of Artificial Sequence: Synthetic oligonucleotide
ucaggguccgagccuggaa

SEQ ID NO: 1707207 - RNA, 19 nt, Artificial Sequence
  Description of Artificial Sequence: Synthetic oligonucleotide
auccgaagaccucggugca

SEQ ID NO: 1707208 - RNA, 19 nt, Artificial Sequence
  Description of Artificial Sequence: Synthetic oligonucleotide
augccacuaagugaacaga

SEQ ID NO: 1707209 - RNA, 19 nt, Artificial Sequence
  Description of Artificial Sequence: Synthetic oligonucleotide
cagaugccucuccagagca

SEQ ID NO: 1707210 - RNA, 19 nt, Artificial Sequence
  Description of Artificial Sequence: Synthetic oligonucleotide
ugaagccccgcgccagcgc

SEQ ID NO: 1707211 - RNA, 19 nt, Artificial Sequence
  Description of Artificial Sequence: Synthetic oligonucleotide
cuugaccgccccugcacug

SEQ ID NO: 1707212 - RNA, 19 nt, Artificial Sequence
  Description of Artificial Sequence: Synthetic oligonucleotide
gacccggagacgcugggaa

SEQ ID NO: 1707213 - RNA, 19 nt, Artificial Sequence
  Description of Artificial Sequence: Synthetic oligonucleotide
cuaggaagugcagggcaug

SEQ ID NO: 1707214 - RNA, 19 nt, Artificial Sequence
  Description of Artificial Sequence: Synthetic oligonucleotide
agcaugggugccuguggca

SEQ ID NO: 1707215 - RNA, 19 nt, Artificial Sequence
  Description of Artificial Sequence: Synthetic oligonucleotide
guggagccagcguggauac

SEQ ID NO: 1707216 - RNA, 19 nt, Artificial Sequence
  Description of Artificial Sequence: Synthetic oligonucleotide
gggagugcuaacacacggg

SEQ ID NO: 1707217 - RNA, 19 nt, Artificial Sequence
  Description of Artificial Sequence: Synthetic oligonucleotide
ugugagccgacaggacgcc

SEQ ID NO: 1707218 - RNA, 19 nt, Artificial Sequence
  Description of Artificial Sequence: Synthetic oligonucleotide
gaagccccgcgccagcgca

SEQ ID NO: 1707219 - RNA, 19 nt, Artificial Sequence
  Description of Artificial Sequence: Synthetic oligonucleotide
agcuucccugagcugggug

SEQ ID NO: 1707220 - RNA, 19 nt, Artificial Sequence
  Description of Artificial Sequence: Synthetic oligonucleotide
acacacgggccucccaccu

SEQ ID NO: 1707221 - RNA, 19 nt, Artificial Sequence
  Description of Artificial Sequence: Synthetic oligonucleotide
cugugggacaagagaagga

SEQ ID NO: 1707222 - RNA, 19 nt, Artificial Sequence
  Description of Artificial Sequence: Synthetic oligonucleotide
ucggccccaaucucaucca

SEQ ID NO: 1707223 - RNA, 19 nt, Artificial Sequence
  Description of Artificial Sequence: Synthetic oligonucleotide
cuaugccacuaagugaaca

SEQ ID NO: 1707224 - RNA, 19 nt, Artificial Sequence
  Description of Artificial Sequence: Synthetic oligonucleotide
aggacaucacugugccgca

SEQ ID NO: 1707225 - RNA, 19 nt, Artificial Sequence
  Description of Artificial Sequence: Synthetic oligonucleotide
cuucccguccuccacuaga

SEQ ID NO: 1707226 - RNA, 19 nt, Artificial Sequence
  Description of Artificial Sequence: Synthetic oligonucleotide
ugcagcucucuuguucgga

SEQ ID NO: 1707227 - RNA, 19 nt, Artificial Sequence
  Description of Artificial Sequence: Synthetic oligonucleotide
acgaugugccucuccugca

SEQ ID NO: 1707228 - RNA, 19 nt, Artificial Sequence
  Description of Artificial Sequence: Synthetic oligonucleotide
ugggaauccugggcucagg

SEQ ID NO: 1707229 - RNA, 19 nt, Artificial Sequence
  Description of Artificial Sequence: Synthetic oligonucleotide
augugccucuccugcacgu

SEQ ID NO: 1707230 - RNA, 19 nt, Artificial Sequence
  Description of Artificial Sequence: Synthetic oligonucleotide
uugaccgccccugcacugc

SEQ ID NO: 1707231 - RNA, 19 nt, Artificial Sequence
  Description of Artificial Sequence: Synthetic oligonucleotide
gccgacaggacgccggcgg

SEQ ID NO: 1707232 - RNA, 19 nt, Artificial Sequence
  Description of Artificial Sequence: Synthetic oligonucleotide
ugcuaacacacgggccucc

SEQ ID NO: 1707233 - RNA, 19 nt, Artificial Sequence
  Description of Artificial Sequence: Synthetic oligonucleotide
gacaccgugggcaggucca

SEQ ID NO: 1707234 - RNA, 19 nt, Artificial Sequence
  Description of Artificial Sequence: Synthetic oligonucleotide
gaccuaagcuugaccgccc

SEQ ID NO: 1707235 - RNA, 19 nt, Artificial Sequence
  Description of Artificial Sequence: Synthetic oligonucleotide
cuggcuucgggcaucagau

SEQ ID NO: 1707236 - RNA, 19 nt, Artificial Sequence
  Description of Artificial Sequence: Synthetic oligonucleotide
cccgccagaccuaagcuug

SEQ ID NO: 1707237 - RNA, 19 nt, Artificial Sequence
  Description of Artificial Sequence: Synthetic oligonucleotide
gcaggauccccgcaagcgc

SEQ ID NO: 1707238 - RNA, 19 nt, Artificial Sequence
  Description of Artificial Sequence: Synthetic oligonucleotide
ggauacaggaggccucaac

SEQ ID NO: 1707239 - RNA, 19 nt, Artificial Sequence
  Description of Artificial Sequence: Synthetic oligonucleotide
uggcuucgggcaucagaug

SEQ ID NO: 1707240 - RNA, 19 nt, Artificial Sequence
  Description of Artificial Sequence: Synthetic oligonucleotide
accgugggcagguccauuu

SEQ ID NO: 1707241 - RNA, 19 nt, Artificial Sequence
  Description of Artificial Sequence: Synthetic oligonucleotide
cacgucggccccaaucuca

SEQ ID NO: 1707242 - RNA, 19 nt, Artificial Sequence
  Description of Artificial Sequence: Synthetic oligonucleotide
uggucaugcagcggaucac

SEQ ID NO: 1707243 - RNA, 19 nt, Artificial Sequence
  Description of Artificial Sequence: Synthetic oligonucleotide
gcgccgaugaaacccacac

SEQ ID NO: 1707244 - RNA, 19 nt, Artificial Sequence
  Description of Artificial Sequence: Synthetic oligonucleotide
agccagcguggauacggug

SEQ ID NO: 1707245 - RNA, 19 nt, Artificial Sequence
  Description of Artificial Sequence: Synthetic oligonucleotide
ccagcguggauacgguggg

SEQ ID NO: 1707246 - RNA, 19 nt, Artificial Sequence
  Description of Artificial Sequence: Synthetic oligonucleotide
ccaucuucaccccaccauc

SEQ ID NO: 1707247 - RNA, 19 nt, Artificial Sequence
  Description of Artificial Sequence: Synthetic oligonucleotide
accgccccugcacugcuga

SEQ ID NO: 1707248 - RNA, 19 nt, Artificial Sequence
  Description of Artificial Sequence: Synthetic oligonucleotide
gugacaccggcugcacagg

SEQ ID NO: 1707249 - RNA, 19 nt, Artificial Sequence
  Description of Artificial Sequence: Synthetic oligonucleotide
cagagcugauggugacacc

SEQ ID NO: 1707250 - RNA, 19 nt, Artificial Sequence
  Description of Artificial Sequence: Synthetic oligonucleotide
agcgcacaggccagcuggc

SEQ ID NO: 1707251 - RNA, 19 nt, Artificial Sequence
  Description of Artificial Sequence: Synthetic oligonucleotide
ccucggugcagcuuccaag

SEQ ID NO: 1707252 - RNA, 19 nt, Artificial Sequence
  Description of Artificial Sequence: Synthetic oligonucleotide
gagcgcagacaccgugggc

SEQ ID NO: 1707253 - RNA, 19 nt, Artificial Sequence
  Description of Artificial Sequence: Synthetic oligonucleotide
ugugcuggcuucgggcauc

SEQ ID NO: 1707254 - RNA, 19 nt, Artificial Sequence
  Description of Artificial Sequence: Synthetic oligonucleotide
augcagcggaucacuuugg

SEQ ID NO: 1707255 - RNA, 19 nt, Artificial Sequence
  Description of Artificial Sequence: Synthetic oligonucleotide
cgcacgguguccuuauugc

SEQ ID NO: 1707256 - RNA, 19 nt, Artificial Sequence
  Description of Artificial Sequence: Synthetic oligonucleotide
agaccucggugcagcuucc

SEQ ID NO: 1707257 - RNA, 19 nt, Artificial Sequence
  Description of Artificial Sequence: Synthetic oligonucleotide
gccagaccuaagcuugacc

SEQ ID NO: 1707258 - RNA, 19 nt, Artificial Sequence
  Description of Artificial Sequence: Synthetic oligonucleotide
ugaccgccccugcacugcu

SEQ ID NO: 1707259 - RNA, 19 nt, Artificial Sequence
  Description of Artificial Sequence: Synthetic oligonucleotide
ggccucaacggcauugaug

SEQ ID NO: 1707260 - RNA, 19 nt, Artificial Sequence
  Description of Artificial Sequence: Synthetic oligonucleotide
ugccuguggcauacaccgu

SEQ ID NO: 1707261 - RNA, 19 nt, Artificial Sequence
  Description of Artificial Sequence: Synthetic oligonucleotide
agcuggguggagccagcgu

SEQ ID NO: 1707262 - RNA, 19 nt, Artificial Sequence
  Description of Artificial Sequence: Synthetic oligonucleotide
guucggauacaggaggccu

SEQ ID NO: 1707263 - RNA, 19 nt, Artificial Sequence
  Description of Artificial Sequence: Synthetic oligonucleotide
auggcgucgaugagguccu

SEQ ID NO: 1707264 - RNA, 19 nt, Artificial Sequence
  Description of Artificial Sequence: Synthetic oligonucleotide
caggguccgagccuggaaa

SEQ ID NO: 1707265 - RNA, 19 nt, Artificial Sequence
  Description of Artificial Sequence: Synthetic oligonucleotide
gacaccggcugcacaggac

SEQ ID NO: 1707266 - RNA, 19 nt, Artificial Sequence
  Description of Artificial Sequence: Synthetic oligonucleotide
uccugagcgcagacaccgu

SEQ ID NO: 1707267 - RNA, 19 nt, Artificial Sequence
  Description of Artificial Sequence: Synthetic oligonucleotide
ggggcuucucgugagcagc

SEQ ID NO: 1707268 - RNA, 19 nt, Artificial Sequence
  Description of Artificial Sequence: Synthetic oligonucleotide
cacgcccaaucuccugagc

SEQ ID NO: 1707269 - RNA, 19 nt, Artificial Sequence
  Description of Artificial Sequence: Synthetic oligonucleotide
ggacagggagaccccacac

SEQ ID NO: 1707270 - RNA, 19 nt, Artificial Sequence
  Description of Artificial Sequence: Synthetic oligonucleotide
aggauccccgcaagcgccg

SEQ ID NO: 1707271 - RNA, 19 nt, Artificial Sequence
  Description of Artificial Sequence: Synthetic oligonucleotide
gcuucgggucacauucacg

SEQ ID NO: 1707272 - RNA, 19 nt, Artificial Sequence
  Description of Artificial Sequence: Synthetic oligonucleotide
gagcagcuucccugagcug

SEQ ID NO: 1707273 - RNA, 19 nt, Artificial Sequence
  Description of Artificial Sequence: Synthetic oligonucleotide
cucccucagagaggugugc

SEQ ID NO: 1707274 - RNA, 19 nt, Artificial Sequence
  Description of Artificial Sequence: Synthetic oligonucleotide
guuggucaugcagcggauc

SEQ ID NO: 1707275 - RNA, 19 nt, Artificial Sequence
  Description of Artificial Sequence: Synthetic oligonucleotide
cacacucauggccgcagga

SEQ ID NO: 1707276 - RNA, 19 nt, Artificial Sequence
  Description of Artificial Sequence: Synthetic oligonucleotide
caccggcugcacaggacac

SEQ ID NO: 1707277 - RNA, 19 nt, Artificial Sequence
  Description of Artificial Sequence: Synthetic oligonucleotide
ugccgcacgguguccuuau

SEQ ID NO: 1707278 - RNA, 19 nt, Artificial Sequence
  Description of Artificial Sequence: Synthetic oligonucleotide
ccacucucuaggaagugca

SEQ ID NO: 1707279 - RNA, 19 nt, Artificial Sequence
  Description of Artificial Sequence: Synthetic oligonucleotide
accucggugcagcuuccaa

SEQ ID NO: 1707280 - RNA, 19 nt, Artificial Sequence
  Description of Artificial Sequence: Synthetic oligonucleotide
gcuucucgugagcagcuuc

SEQ ID NO: 1707281 - RNA, 19 nt, Artificial Sequence
  Description of Artificial Sequence: Synthetic oligonucleotide
cugggaauccugggcucag

SEQ ID NO: 1707282 - RNA, 19 nt, Artificial Sequence
  Description of Artificial Sequence: Synthetic oligonucleotide
ggagacgcugggaauccug

SEQ ID NO: 1707283 - RNA, 19 nt, Artificial Sequence
  Description of Artificial Sequence: Synthetic oligonucleotide
cccguccuccacuagagca

SEQ ID NO: 1707284 - RNA, 19 nt, Artificial Sequence
  Description of Artificial Sequence: Synthetic oligonucleotide
uagccgcucccagcaacgc

SEQ ID NO: 1707285 - RNA, 19 nt, Artificial Sequence
  Description of Artificial Sequence: Synthetic oligonucleotide
gacccggauccgaagaccu

SEQ ID NO: 1707286 - RNA, 19 nt, Artificial Sequence
  Description of Artificial Sequence: Synthetic oligonucleotide
aagccccgcgccagcgcac

SEQ ID NO: 1707287 - RNA, 19 nt, Artificial Sequence
  Description of Artificial Sequence: Synthetic oligonucleotide
agcuucccguccuccacua

SEQ ID NO: 1707288 - RNA, 19 nt, Artificial Sequence
  Description of Artificial Sequence: Synthetic oligonucleotide
uggagccagcguggauacg

SEQ ID NO: 1707289 - RNA, 19 nt, Artificial Sequence
  Description of Artificial Sequence: Synthetic oligonucleotide
gaacgccaucagcuucuuc

SEQ ID NO: 1707290 - RNA, 19 nt, Artificial Sequence
  Description of Artificial Sequence: Synthetic oligonucleotide
cuuauugcuucgggucaca

SEQ ID NO: 1707291 - RNA, 19 nt, Artificial Sequence
  Description of Artificial Sequence: Synthetic oligonucleotide
gcuucgggcaucagaugcc

SEQ ID NO: 1707292 - RNA, 19 nt, Artificial Sequence
  Description of Artificial Sequence: Synthetic oligonucleotide
gugagccgacaggacgccg

SEQ ID NO: 1707293 - RNA, 19 nt, Artificial Sequence
  Description of Artificial Sequence: Synthetic oligonucleotide
gcaagcgccgacccggaga

SEQ ID NO: 1707294 - RNA, 19 nt, Artificial Sequence
  Description of Artificial Sequence: Synthetic oligonucleotide
gaccccacaccgcacuccu

SEQ ID NO: 1707295 - RNA, 19 nt, Artificial Sequence
  Description of Artificial Sequence: Synthetic oligonucleotide
cccgcaagcgccgacccgg

SEQ ID NO: 1707296 - RNA, 19 nt, Artificial Sequence
  Description of Artificial Sequence: Synthetic oligonucleotide
gagccuggaaagacccgga

SEQ ID NO: 1707297 - RNA, 19 nt, Artificial Sequence
  Description of Artificial Sequence: Synthetic oligonucleotide
gauccccgcaagcgccgac

SEQ ID NO: 1707298 - RNA, 19 nt, Artificial Sequence
  Description of Artificial Sequence: Synthetic oligonucleotide
ccugagcgcagacaccgug

SEQ ID NO: 1707299 - RNA, 19 nt, Artificial Sequence
  Description of Artificial Sequence: Synthetic oligonucleotide
gccacuaagugaacagauc

SEQ ID NO: 1707300 - RNA, 19 nt, Artificial Sequence
  Description of Artificial Sequence: Synthetic oligonucleotide
caacggcauugaugagcag

SEQ ID NO: 1707301 - RNA, 19 nt, Artificial Sequence
  Description of Artificial Sequence: Synthetic oligonucleotide
cccucgcggaccaccacgg

SEQ ID NO: 1707302 - RNA, 19 nt, Artificial Sequence
  Description of Artificial Sequence: Synthetic oligonucleotide
agcccacgcugcucaucag

SEQ ID NO: 1707303 - RNA, 19 nt, Artificial Sequence
  Description of Artificial Sequence: Synthetic oligonucleotide
uggccgcaggauccccgca

SEQ ID NO: 1707304 - RNA, 19 nt, Artificial Sequence
  Description of Artificial Sequence: Synthetic oligonucleotide
cgcaggauccccgcaagcg

SEQ ID NO: 1707305 - RNA, 19 nt, Artificial Sequence
  Description of Artificial Sequence: Synthetic oligonucleotide
acccggagacgcugggaau

SEQ ID NO: 1707306 - RNA, 19 nt, Artificial Sequence
  Description of Artificial Sequence: Synthetic oligonucleotide
cacgguguccuuauugcuu

SEQ ID NO: 1707307 - RNA, 19 nt, Artificial Sequence
  Description of Artificial Sequence: Synthetic oligonucleotide
cauucacgcccaaucuccu

SEQ ID NO: 1707308 - RNA, 19 nt, Artificial Sequence
  Description of Artificial Sequence: Synthetic oligonucleotide
cgccugagcucccagucgg

SEQ ID NO: 1707309 - RNA, 19 nt, Artificial Sequence
  Description of Artificial Sequence: Synthetic oligonucleotide
gcaacgccugagcucccag

SEQ ID NO: 1707310 - RNA, 19 nt, Artificial Sequence
  Description of Artificial Sequence: Synthetic oligonucleotide
gugggacaagagaaggacu

SEQ ID NO: 1707311 - RNA, 19 nt, Artificial Sequence
  Description of Artificial Sequence: Synthetic oligonucleotide
agcaacgccugagcuccca

SEQ ID NO: 1707312 - RNA, 19 nt, Artificial Sequence
  Description of Artificial Sequence: Synthetic oligonucleotide
ccuuggcacgcccaucuuc

SEQ ID NO: 1707313 - RNA, 19 nt, Artificial Sequence
  Description of Artificial Sequence: Synthetic oligonucleotide
agccgacaggacgccggcg

SEQ ID NO: 1707314 - RNA, 19 nt, Artificial Sequence
  Description of Artificial Sequence: Synthetic oligonucleotide
aggccucaacggcauugau

SEQ ID NO: 1707315 - RNA, 19 nt, Artificial Sequence
  Description of Artificial Sequence: Synthetic oligonucleotide
ccggauccgaagaccucgg

SEQ ID NO: 1707316 - RNA, 19 nt, Artificial Sequence
  Description of Artificial Sequence: Synthetic oligonucleotide
ccuuauugcuucgggucac

SEQ ID NO: 1707317 - RNA, 19 nt, Artificial Sequence
  Description of Artificial Sequence: Synthetic oligonucleotide
gccgcaggauccccgcaag

SEQ ID NO: 1707318 - RNA, 19 nt, Artificial Sequence
  Description of Artificial Sequence: Synthetic oligonucleotide
gcuaacacacgggccuccc

SEQ ID NO: 1707319 - RNA, 19 nt, Artificial Sequence
  Description of Artificial Sequence: Synthetic oligonucleotide
aagcgccgacccggagacg

SEQ ID NO: 1707320 - RNA, 19 nt, Artificial Sequence
  Description of Artificial Sequence: Synthetic oligonucleotide
cagcguggauacggugggg

SEQ ID NO: 1707321 - RNA, 19 nt, Artificial Sequence
  Description of Artificial Sequence: Synthetic oligonucleotide
ggacaagagaaggacucua

SEQ ID NO: 1707322 - RNA, 19 nt, Artificial Sequence
  Description of Artificial Sequence: Synthetic oligonucleotide
gugcuaacacacgggccuc

SEQ ID NO: 1707323 - RNA, 19 nt, Artificial Sequence
  Description of Artificial Sequence: Synthetic oligonucleotide
ugugccgcacgguguccuu

SEQ ID NO: 1707324 - RNA, 19 nt, Artificial Sequence
  Description of Artificial Sequence: Synthetic oligonucleotide
cgcccaaucuccugagcgc

SEQ ID NO: 1707325 - RNA, 19 nt, Artificial Sequence
  Description of Artificial Sequence: Synthetic oligonucleotide
caccgcacuccucaguccu

SEQ ID NO: 1707326 - RNA, 19 nt, Artificial Sequence
  Description of Artificial Sequence: Synthetic oligonucleotide
cacacgggccucccaccuc

SEQ ID NO: 1707327 - RNA, 19 nt, Artificial Sequence
  Description of Artificial Sequence: Synthetic oligonucleotide
gcagguccauuuccgggga

SEQ ID NO: 1707328 - RNA, 19 nt, Artificial Sequence
  Description of Artificial Sequence: Synthetic oligonucleotide
cccaaucuccugagcgcag

SEQ ID NO: 1707329 - RNA, 19 nt, Artificial Sequence
  Description of Artificial Sequence: Synthetic oligonucleotide
ggcgucgaugagguccucc

SEQ ID NO: 1707330 - RNA, 19 nt, Artificial Sequence
  Description of Artificial Sequence: Synthetic oligonucleotide
cucgcggaccaccacgggu

SEQ ID NO: 1707331 - RNA, 19 nt, Artificial Sequence
  Description of Artificial Sequence: Synthetic oligonucleotide
cccgcgccagcgcacaggc

SEQ ID NO: 1707332 - RNA, 19 nt, Artificial Sequence
  Description of Artificial Sequence: Synthetic oligonucleotide
caccacggguguguugguc

SEQ ID NO: 1707333 - RNA, 19 nt, Artificial Sequence
  Description of Artificial Sequence: Synthetic oligonucleotide
ccgagccuggaaagacccg

SEQ ID NO: 1707334 - RNA, 19 nt, Artificial Sequence
  Description of Artificial Sequence: Synthetic oligonucleotide
cgccagcgcauccagggcc

SEQ ID NO: 1707335 - RNA, 19 nt, Artificial Sequence
  Description of Artificial Sequence: Synthetic oligonucleotide
gcccaaucuccugagcgca

SEQ ID NO: 1707336 - RNA, 19 nt, Artificial Sequence
  Description of Artificial Sequence: Synthetic oligonucleotide
ggacucuaugccacuaagu

SEQ ID NO: 1707337 - RNA, 19 nt, Artificial Sequence
  Description of Artificial Sequence: Synthetic oligonucleotide
acgucggccccaaucucau

SEQ ID NO: 1707338 - RNA, 19 nt, Artificial Sequence
  Description of Artificial Sequence: Synthetic oligonucleotide
cccugggcggggcuucucg

SEQ ID NO: 1707339 - RNA, 19 nt, Artificial Sequence
  Description of Artificial Sequence: Synthetic oligonucleotide
ggucaugcagcggaucacu

SEQ ID NO: 1707340 - RNA, 19 nt, Artificial Sequence
  Description of Artificial Sequence: Synthetic oligonucleotide
acgggccucccaccucccu

SEQ ID NO: 1707341 - RNA, 19 nt, Artificial Sequence
  Description of Artificial Sequence: Synthetic oligonucleotide
ccagucggacugccaggcg

SEQ ID NO: 1707342 - RNA, 19 nt, Artificial Sequence
  Description of Artificial Sequence: Synthetic oligonucleotide
ccacuagagcaugggugcc

SEQ ID NO: 1707343 - RNA, 19 nt, Artificial Sequence
  Description of Artificial Sequence: Synthetic oligonucleotide
caugggugccuguggcaua

SEQ ID NO: 1707344 - RNA, 19 nt, Artificial Sequence
  Description of Artificial Sequence: Synthetic oligonucleotide
gggcggggcuucucgugag

SEQ ID NO: 1707345 - RNA, 19 nt, Artificial Sequence
  Description of Artificial Sequence: Synthetic oligonucleotide
cuucgggcaucagaugccu

SEQ ID NO: 1707346 - RNA, 19 nt, Artificial Sequence
  Description of Artificial Sequence: Synthetic oligonucleotide
gcuucccguccuccacuag

SEQ ID NO: 1707347 - RNA, 19 nt, Artificial Sequence
  Description of Artificial Sequence: Synthetic oligonucleotide
gcugggaauccugggcuca

SEQ ID NO: 1707348 - RNA, 19 nt, Artificial Sequence
  Description of Artificial Sequence: Synthetic oligonucleotide
cccggagacgcugggaauc

SEQ ID NO: 1707349 - RNA, 19 nt, Artificial Sequence
  Description of Artificial Sequence: Synthetic oligonucleotide
ggcggggcuucucgugagc

SEQ ID NO: 1707350 - RNA, 19 nt, Artificial Sequence
  Description of Artificial Sequence: Synthetic oligonucleotide
cgcgccagcgcacaggcca

SEQ ID NO: 1707351 - RNA, 19 nt, Artificial Sequence
  Description of Artificial Sequence: Synthetic oligonucleotide
gcgucgaugagguccuccu

SEQ ID NO: 1707352 - RNA, 19 nt, Artificial Sequence
  Description of Artificial Sequence: Synthetic oligonucleotide
gaccucggugcagcuucca

SEQ ID NO: 1707353 - RNA, 19 nt, Artificial Sequence
  Description of Artificial Sequence: Synthetic oligonucleotide
gaagaccucggugcagcuu

SEQ ID NO: 1707354 - RNA, 19 nt, Artificial Sequence
  Description of Artificial Sequence: Synthetic oligonucleotide
ccgacaggacgccggcggc

SEQ ID NO: 1707355 - RNA, 19 nt, Artificial Sequence
  Description of Artificial Sequence: Synthetic oligonucleotide
ugggugccuguggcauaca

SEQ ID NO: 1707356 - RNA, 19 nt, Artificial Sequence
  Description of Artificial Sequence: Synthetic oligonucleotide
gcagcucucuuguucggau

SEQ ID NO: 1707357 - RNA, 19 nt, Artificial Sequence
  Description of Artificial Sequence: Synthetic oligonucleotide
gggacaagagaaggacucu

SEQ ID NO: 1707358 - RNA, 19 nt, Artificial Sequence
  Description of Artificial Sequence: Synthetic oligonucleotide
gaccgccccugcacugcug

SEQ ID NO: 1707359 - RNA, 19 nt, Artificial Sequence
  Description of Artificial Sequence: Synthetic oligonucleotide
ggacaucacugugccgcac

SEQ ID NO: 1707360 - RNA, 19 nt, Artificial Sequence
  Description of Artificial Sequence: Synthetic oligonucleotide
caccauccgccagcgcauc

SEQ ID NO: 1707361 - RNA, 19 nt, Artificial Sequence
  Description of Artificial Sequence: Synthetic oligonucleotide
aggacgccggcggccguga

SEQ ID NO: 1707362 - RNA, 19 nt, Artificial Sequence
  Description of Artificial Sequence: Synthetic oligonucleotide
gagccagcguggauacggu

SEQ ID NO: 1707363 - RNA, 19 nt, Artificial Sequence
  Description of Artificial Sequence: Synthetic oligonucleotide
ucggacugccaggcgccuu

SEQ ID NO: 1707364 - RNA, 19 nt, Artificial Sequence
  Description of Artificial Sequence: Synthetic oligonucleotide
ccgcaggauccccgcaagc

SEQ ID NO: 1707365 - RNA, 19 nt, Artificial Sequence
  Description of Artificial Sequence: Synthetic oligonucleotide
gcugauggugacaccggcu

SEQ ID NO: 1707366 - RNA, 19 nt, Artificial Sequence
  Description of Artificial Sequence: Synthetic oligonucleotide
cuagagcaugggugccugu

SEQ ID NO: 1707367 - RNA, 19 nt, Artificial Sequence
  Description of Artificial Sequence: Synthetic oligonucleotide
cggacugccaggcgccuug

SEQ ID NO: 1707368 - RNA, 19 nt, Artificial Sequence
  Description of Artificial Sequence: Synthetic oligonucleotide
cuggcccgcgccgaugaaa

SEQ ID NO: 1707369 - RNA, 19 nt, Artificial Sequence
  Description of Artificial Sequence: Synthetic oligonucleotide
ggguccgagccuggaaaga

SEQ ID NO: 1707370 - RNA, 19 nt, Artificial Sequence
  Description of Artificial Sequence: Synthetic oligonucleotide
gcucucuuguucggauaca

SEQ ID NO: 1707371 - RNA, 19 nt, Artificial Sequence
  Description of Artificial Sequence: Synthetic oligonucleotide
ggcccgcgccgaugaaacc

SEQ ID NO: 1707372 - RNA, 19 nt, Artificial Sequence
  Description of Artificial Sequence: Synthetic oligonucleotide
ggucagccauggacugcag

SEQ ID NO: 1707373 - RNA, 19 nt, Artificial Sequence
  Description of Artificial Sequence: Synthetic oligonucleotide
caccucccucagagaggug

SEQ ID NO: 1707374 - RNA, 19 nt, Artificial Sequence
  Description of Artificial Sequence: Synthetic oligonucleotide
ccgacccggagacgcuggg

SEQ ID NO: 1707375 - RNA, 19 nt, Artificial Sequence
  Description of Artificial Sequence: Synthetic oligonucleotide
ccucgcggaccaccacggg

SEQ ID NO: 1707376 - RNA, 19 nt, Artificial Sequence
  Description of Artificial Sequence: Synthetic oligonucleotide
cagacaccgugggcagguc

SEQ ID NO: 1707377 - RNA, 19 nt, Artificial Sequence
  Description of Artificial Sequence: Synthetic oligonucleotide
gcggggcuucucgugagca

SEQ ID NO: 1707378 - RNA, 19 nt, Artificial Sequence
  Description of Artificial Sequence: Synthetic oligonucleotide
gccgcucccagcaacgccu

SEQ ID NO: 1707379 - RNA, 19 nt, Artificial Sequence
  Description of Artificial Sequence: Synthetic oligonucleotide
gccggcggccgugaagccc

SEQ ID NO: 1707380 - RNA, 19 nt, Artificial Sequence
  Description of Artificial Sequence: Synthetic oligonucleotide
gcuuccaagcagggaugca

SEQ ID NO: 1707381 - RNA, 19 nt, Artificial Sequence
  Description of Artificial Sequence: Synthetic oligonucleotide
ccggcugcacaggacacca

SEQ ID NO: 1707382 - RNA, 19 nt, Artificial Sequence
  Description of Artificial Sequence: Synthetic oligonucleotide
gccagcgcauccagggcca

SEQ ID NO: 1707383 - RNA, 19 nt, Artificial Sequence
  Description of Artificial Sequence: Synthetic oligonucleotide
cccgcgccgaugaaaccca

SEQ ID NO: 1707384 - RNA, 19 nt, Artificial Sequence
  Description of Artificial Sequence: Synthetic oligonucleotide
cauggacugcagcucucuu

SEQ ID NO: 1707385 - RNA, 19 nt, Artificial Sequence
  Description of Artificial Sequence: Synthetic oligonucleotide
cccaucuucaccccaccau

SEQ ID NO: 1707386 - RNA, 19 nt, Artificial Sequence
  Description of Artificial Sequence: Synthetic oligonucleotide
aggcgccuuggcacgccca

SEQ ID NO: 1707387 - RNA, 19 nt, Artificial Sequence
  Description of Artificial Sequence: Synthetic oligonucleotide
cagcuggcccgcgccgaug

SEQ ID NO: 1707388 - RNA, 19 nt, Artificial Sequence
  Description of Artificial Sequence: Synthetic oligonucleotide
ccgugggcagguccauuuc

SEQ ID NO: 1707389 - RNA, 19 nt, Artificial Sequence
  Description of Artificial Sequence: Synthetic oligonucleotide
caucacugugccgcacggu

SEQ ID NO: 1707390 - RNA, 19 nt, Artificial Sequence
  Description of Artificial Sequence: Synthetic oligonucleotide
accgcacuccucaguccuu

SEQ ID NO: 1707391 - RNA, 19 nt, Artificial Sequence
  Description of Artificial Sequence: Synthetic oligonucleotide
ccgcacuccucaguccuuc

SEQ ID NO: 1707392 - RNA, 19 nt, Artificial Sequence
  Description of Artificial Sequence: Synthetic oligonucleotide
cugugccgcacgguguccu

SEQ ID NO: 1707393 - RNA, 19 nt, Artificial Sequence
  Description of Artificial Sequence: Synthetic oligonucleotide
cgcccaucuucaccccacc

SEQ ID NO: 1707394 - RNA, 19 nt, Artificial Sequence
  Description of Artificial Sequence: Synthetic oligonucleotide
ccgcucccagcaacgccug

SEQ ID NO: 1707395 - RNA, 19 nt, Artificial Sequence
  Description of Artificial Sequence: Synthetic oligonucleotide
cgacaggacgccggcggcc

SEQ ID NO: 1707396 - RNA, 19 nt, Artificial Sequence
  Description of Artificial Sequence: Synthetic oligonucleotide
cauuuccggggagcuggcu

SEQ ID NO: 1707397 - RNA, 19 nt, Artificial Sequence
  Description of Artificial Sequence: Synthetic oligonucleotide
ggucacauucacgcccaau

SEQ ID NO: 1707398 - RNA, 19 nt, Artificial Sequence
  Description of Artificial Sequence: Synthetic oligonucleotide
ccguccuccacuagagcau

SEQ ID NO: 1707399 - RNA, 19 nt, Artificial Sequence
  Description of Artificial Sequence: Synthetic oligonucleotide
gccaggcgccuuggcacgc

SEQ ID NO: 1707400 - RNA, 19 nt, Artificial Sequence
  Description of Artificial Sequence: Synthetic oligonucleotide
ccacugccgcugagccccg

SEQ ID NO: 1707401 - RNA, 19 nt, Artificial Sequence
  Description of Artificial Sequence: Synthetic oligonucleotide
ggcgccuuggcacgcccau

SEQ ID NO: 1707402 - RNA, 19 nt, Artificial Sequence
  Description of Artificial Sequence: Synthetic oligonucleotide
ggauccccgcaagcgccga

SEQ ID NO: 1707403 - RNA, 19 nt, Artificial Sequence
  Description of Artificial Sequence: Synthetic oligonucleotide
uggcgucgaugagguccuc

SEQ ID NO: 1707404 - RNA, 19 nt, Artificial Sequence
  Description of Artificial Sequence: Synthetic oligonucleotide
ccaggcgccuuggcacgcc

SEQ ID NO: 1707405 - RNA, 19 nt, Artificial Sequence
  Description of Artificial Sequence: Synthetic oligonucleotide
ccgccagaccuaagcuuga

SEQ ID NO: 1707406 - RNA, 19 nt, Artificial Sequence
  Description of Artificial Sequence: Synthetic oligonucleotide
cgggccucccaccucccuc

SEQ ID NO: 1707407 - RNA, 19 nt, Artificial Sequence
  Description of Artificial Sequence: Synthetic oligonucleotide
cgggcaucagaugccucuc

SEQ ID NO: 1707408 - RNA, 19 nt, Artificial Sequence
  Description of Artificial Sequence: Synthetic oligonucleotide
ccgccccugcacugcugag

SEQ ID NO: 1707409 - RNA, 19 nt, Artificial Sequence
  Description of Artificial Sequence: Synthetic oligonucleotide
ccgcgccgaugaaacccac

SEQ ID NO: 1707410 - RNA, 19 nt, Artificial Sequence
  Description of Artificial Sequence: Synthetic oligonucleotide
cgcauccagggccauaaau

SEQ ID NO: 1707411 - RNA, 19 nt, Artificial Sequence
  Description of Artificial Sequence: Synthetic oligonucleotide
gcggaccaccacgggugug

SEQ ID NO: 1707412 - RNA, 19 nt, Artificial Sequence
  Description of Artificial Sequence: Synthetic oligonucleotide
ccuaagcuugaccgccccu

SEQ ID NO: 1707413 - RNA, 19 nt, Artificial Sequence
  Description of Artificial Sequence: Synthetic oligonucleotide
gcacuccucaguccuucuu

SEQ ID NO: 1707414 - RNA, 19 nt, Artificial Sequence
  Description of Artificial Sequence: Synthetic oligonucleotide
gucggacugccaggcgccu

SEQ ID NO: 1707415 - RNA, 19 nt, Artificial Sequence
  Description of Artificial Sequence: Synthetic oligonucleotide
cgccagaccuaagcuugac

SEQ ID NO: 1707416 - RNA, 19 nt, Artificial Sequence
  Description of Artificial Sequence: Synthetic oligonucleotide
cgcgccgaugaaacccaca

SEQ ID NO: 1707417 - RNA, 19 nt, Artificial Sequence
  Description of Artificial Sequence: Synthetic oligonucleotide
ccgcgccagcgcacaggcc

SEQ ID NO: 1707418 - RNA, 19 nt, Artificial Sequence
  Description of Artificial Sequence: Synthetic oligonucleotide
gccccgcgccagcgcacag

SEQ ID NO: 1707419 - RNA, 19 nt, Artificial Sequence
  Description of Artificial Sequence: Synthetic oligonucleotide
cagcgcauccagggccaua

SEQ ID NO: 1707420 - RNA, 19 nt, Artificial Sequence
  Description of Artificial Sequence: Synthetic oligonucleotide
gcgccuuggcacgcccauc

SEQ ID NO: 1707421 - RNA, 19 nt, Artificial Sequence
  Description of Artificial Sequence: Synthetic oligonucleotide
ccgcaagcgccgacccgga

SEQ ID NO: 1707422 - RNA, 19 nt, Artificial Sequence
  Description of Artificial Sequence: Synthetic oligonucleotide
gcuggcccgcgccgaugaa

SEQ ID NO: 1707423 - RNA, 19 nt, Artificial Sequence
  Description of Artificial Sequence: Synthetic oligonucleotide
cgccgacccggagacgcug

SEQ ID NO: 1707424 - RNA, 19 nt, Artificial Sequence
  Description of Artificial Sequence: Synthetic oligonucleotide
cgccgaugaaacccacacu

SEQ ID NO: 1707425 - RNA, 19 nt, Artificial Sequence
  Description of Artificial Sequence: Synthetic oligonucleotide
ggaacgccaucagcuucuu

SEQ ID NO: 1707426 - RNA, 19 nt, Artificial Sequence
  Description of Artificial Sequence: Synthetic oligonucleotide
ggcuucucgugagcagcuu

SEQ ID NO: 1707427 - RNA, 19 nt, Artificial Sequence
  Description of Artificial Sequence: Synthetic oligonucleotide
ggacgccggcggccgugaa

SEQ ID NO: 1707428 - RNA, 19 nt, Artificial Sequence
  Description of Artificial Sequence: Synthetic oligonucleotide
ggaccaccacggguguguu

SEQ ID NO: 1707429 - RNA, 19 nt, Artificial Sequence
  Description of Artificial Sequence: Synthetic oligonucleotide
gggcuggcuggaacgccau

SEQ ID NO: 1707430 - RNA, 19 nt, Artificial Sequence
  Description of Artificial Sequence: Synthetic oligonucleotide
caccgugggcagguccauu

SEQ ID NO: 1707431 - RNA, 19 nt, Artificial Sequence
  Description of Artificial Sequence: Synthetic oligonucleotide
ccaccacggguguguuggu

SEQ ID NO: 1707432 - RNA, 19 nt, Artificial Sequence
  Description of Artificial Sequence: Synthetic oligonucleotide
cggauccgaagaccucggu

SEQ ID NO: 1707433 - RNA, 19 nt, Artificial Sequence
  Description of Artificial Sequence: Synthetic oligonucleotide
gccgcacgguguccuuauu

SEQ ID NO: 1707434 - RNA, 19 nt, Artificial Sequence
  Description of Artificial Sequence: Synthetic oligonucleotide
cgcucccagcaacgccuga

SEQ ID NO: 1707435 - RNA, 19 nt, Artificial Sequence
  Description of Artificial Sequence: Synthetic oligonucleotide
cgcggaccaccacgggugu

SEQ ID NO: 1707436 - RNA, 19 nt, Artificial Sequence
  Description of Artificial Sequence: Synthetic oligonucleotide
gcgccgacccggagacgcu

SEQ ID NO: 1707437 - RNA, 19 nt, Artificial Sequence
  Description of Artificial Sequence: Synthetic oligonucleotide
aaauauacaucuuagaagu

SEQ ID NO: 1707438 - RNA, 19 nt, Artificial Sequence
  Description of Artificial Sequence: Synthetic oligonucleotide
aaauacaccauauacaaca

SEQ ID NO: 1707439 - RNA, 19 nt, Artificial Sequence
  Description of Artificial Sequence: Synthetic oligonucleotide
uacaacauuuacaagaggg

SEQ ID NO: 1707440 - RNA, 19 nt, Artificial Sequence
  Description of Artificial Sequence: Synthetic oligonucleotide
uauacaacauuuacaagag

SEQ ID NO: 1707441 - RNA, 19 nt, Artificial Sequence
  Description of Artificial Sequence: Synthetic oligonucleotide
ugccgaaucacuuccaugg

SEQ ID NO: 1707442 - RNA, 19 nt, Artificial Sequence
  Description of Artificial Sequence: Synthetic oligonucleotide
uauacaucuuagaaguacc

SEQ ID NO: 1707443 - RNA, 19 nt, Artificial Sequence
  Description of Artificial Sequence: Synthetic oligonucleotide
auauacaucuuagaaguac

SEQ ID NO: 1707444 - RNA, 19 nt, Artificial Sequence
  Description of Artificial Sequence: Synthetic oligonucleotide
uccaaauacacagucauca

SEQ ID NO: 1707445 - RNA, 19 nt, Artificial Sequence
  Description of Artificial Sequence: Synthetic oligonucleotide
cuuagaaguaccaaaauaa

SEQ ID NO: 1707446 - RNA, 19 nt, Artificial Sequence
  Description of Artificial Sequence: Synthetic oligonucleotide
uucucuucauggaugauug

SEQ ID NO: 1707447 - RNA, 19 nt, Artificial Sequence
  Description of Artificial Sequence: Synthetic oligonucleotide
uacaccauauacaacauuu

SEQ ID NO: 1707448 - RNA, 19 nt, Artificial Sequence
  Description of Artificial Sequence: Synthetic oligonucleotide
uacuccucguccuucaugg

SEQ ID NO: 1707449 - RNA, 19 nt, Artificial Sequence
  Description of Artificial Sequence: Synthetic oligonucleotide
auaaugucagacguuggcc

SEQ ID NO: 1707450 - RNA, 19 nt, Artificial Sequence
  Description of Artificial Sequence: Synthetic oligonucleotide
uuacaagaggguaacaaaa

SEQ ID NO: 1707451 - RNA, 19 nt, Artificial Sequence
  Description of Artificial Sequence: Synthetic oligonucleotide
ucuauugacgucagcacca

SEQ ID NO: 1707452 - RNA, 19 nt, Artificial Sequence
  Description of Artificial Sequence: Synthetic oligonucleotide
uacaugugaggacauacca

SEQ ID NO: 1707453 - RNA, 19 nt, Artificial Sequence
  Description of Artificial Sequence: Synthetic oligonucleotide
ugugucaggacuccuacac

SEQ ID NO: 1707454 - RNA, 19 nt, Artificial Sequence
  Description of Artificial Sequence: Synthetic oligonucleotide
aaugucagacguuggccuc

SEQ ID NO: 1707455 - RNA, 19 nt, Artificial Sequence
  Description of Artificial Sequence: Synthetic oligonucleotide
uuuacaagaggguaacaaa

SEQ ID NO: 1707456 - RNA, 19 nt, Artificial Sequence
  Description of Artificial Sequence: Synthetic oligonucleotide
acauaccaggcucagcuac

SEQ ID NO: 1707457 - RNA, 19 nt, Artificial Sequence
  Description of Artificial Sequence: Synthetic oligonucleotide
acucuauugacgucagcac

SEQ ID NO: 1707458 - RNA, 19 nt, Artificial Sequence
  Description of Artificial Sequence: Synthetic oligonucleotide
uuagaaguaccaaaauaau

SEQ ID NO: 1707459 - RNA, 19 nt, Artificial Sequence
  Description of Artificial Sequence: Synthetic oligonucleotide
aaagugccucagcaauucc

SEQ ID NO: 1707460 - RNA, 19 nt, Artificial Sequence
  Description of Artificial Sequence: Synthetic oligonucleotide
agggguauuuccucgaaag

SEQ ID NO: 1707461 - RNA, 19 nt, Artificial Sequence
  Description of Artificial Sequence: Synthetic oligonucleotide
ucagcuaccagaucuauuu

SEQ ID NO: 1707462 - RNA, 19 nt, Artificial Sequence
  Description of Artificial Sequence: Synthetic oligonucleotide
cauaaugucagacguuggc

SEQ ID NO: 1707463 - RNA, 19 nt, Artificial Sequence
  Description of Artificial Sequence: Synthetic oligonucleotide
uccuacacuggccaggcag

SEQ ID NO: 1707464 - RNA, 19 nt, Artificial Sequence
  Description of Artificial Sequence: Synthetic oligonucleotide
ugugucguagcucuccuca

SEQ ID NO: 1707465 - RNA, 19 nt, Artificial Sequence
  Description of Artificial Sequence: Synthetic oligonucleotide
ugaagauuuucccggguca

SEQ ID NO: 1707466 - RNA, 19 nt, Artificial Sequence
  Description of Artificial Sequence: Synthetic oligonucleotide
aaaaccucagucgggagug

SEQ ID NO: 1707467 - RNA, 19 nt, Artificial Sequence
  Description of Artificial Sequence: Synthetic oligonucleotide
accaaaugcuccacgaugc

SEQ ID NO: 1707468 - RNA, 19 nt, Artificial Sequence
  Description of Artificial Sequence: Synthetic oligonucleotide
auuuucccgggucagcugg

SEQ ID NO: 1707469 - RNA, 19 nt, Artificial Sequence
  Description of Artificial Sequence: Synthetic oligonucleotide
accacacuucaacaggagc

SEQ ID NO: 1707470 - RNA, 19 nt, Artificial Sequence
  Description of Artificial Sequence: Synthetic oligonucleotide
uagcacauaccacucaaca

SEQ ID NO: 1707471 - RNA, 19 nt, Artificial Sequence
  Description of Artificial Sequence: Synthetic oligonucleotide
cauaccacucaacaccugg

SEQ ID NO: 1707472 - RNA, 19 nt, Artificial Sequence
  Description of Artificial Sequence: Synthetic oligonucleotide
gaugauugccaagugcagg

SEQ ID NO: 1707473 - RNA, 19 nt, Artificial Sequence
  Description of Artificial Sequence: Synthetic oligonucleotide
auggauggaggcgaggugc

SEQ ID NO: 1707474 - RNA, 19 nt, Artificial Sequence
  Description of Artificial Sequence: Synthetic oligonucleotide
uggccauuguaguuggugg

SEQ ID NO: 1707475 - RNA, 19 nt, Artificial Sequence
  Description of Artificial Sequence: Synthetic oligonucleotide
agcaccacacuucaacagg

SEQ ID NO: 1707476 - RNA, 19 nt, Artificial Sequence
  Description of Artificial Sequence: Synthetic oligonucleotide
guauccggguacuuggucg

SEQ ID NO: 1707477 - RNA, 19 nt, Artificial Sequence
  Description of Artificial Sequence: Synthetic oligonucleotide
uagaaguaccaaaauaauu

SEQ ID NO: 1707478 - RNA, 19 nt, Artificial Sequence
  Description of Artificial Sequence: Synthetic oligonucleotide
aauucugacucugugucgu

SEQ ID NO: 1707479 - RNA, 19 nt, Artificial Sequence
  Description of Artificial Sequence: Synthetic oligonucleotide
gaauucugacucugugucg

SEQ ID NO: 1707480 - RNA, 19 nt, Artificial Sequence
  Description of Artificial Sequence: Synthetic oligonucleotide
acaucuuagaaguaccaaa

SEQ ID NO: 1707481 - RNA, 19 nt, Artificial Sequence
  Description of Artificial Sequence: Synthetic oligonucleotide
ucuacaugugaggacauac

SEQ ID NO: 1707482 - RNA, 19 nt, Artificial Sequence
  Description of Artificial Sequence: Synthetic oligonucleotide
uuccucgaaagucucggag

SEQ ID NO: 1707483 - RNA, 19 nt, Artificial Sequence
  Description of Artificial Sequence: Synthetic oligonucleotide
uaggucacucuauugacgu

SEQ ID NO: 1707484 - RNA, 19 nt, Artificial Sequence
  Description of Artificial Sequence: Synthetic oligonucleotide
auuuccucgaaagucucgg

SEQ ID NO: 1707485 - RNA, 19 nt, Artificial Sequence
  Description of Artificial Sequence: Synthetic oligonucleotide
ugacacuuuccacucauaa

SEQ ID NO: 1707486 - RNA, 19 nt, Artificial Sequence
  Description of Artificial Sequence: Synthetic oligonucleotide
cucauaaugucagacguug

SEQ ID NO: 1707487 - RNA, 19 nt, Artificial Sequence
  Description of Artificial Sequence: Synthetic oligonucleotide
gacguuggccuccaaauac

SEQ ID NO: 1707488 - RNA, 19 nt, Artificial Sequence
  Description of Artificial Sequence: Synthetic oligonucleotide
cucuauugacgucagcacc

SEQ ID NO: 1707489 - RNA, 19 nt, Artificial Sequence
  Description of Artificial Sequence: Synthetic oligonucleotide
aagauuuucccgggucagc

SEQ ID NO: 1707490 - RNA, 19 nt, Artificial Sequence
  Description of Artificial Sequence: Synthetic oligonucleotide
guagagggguauuuccucg

SEQ ID NO: 1707491 - RNA, 19 nt, Artificial Sequence
  Description of Artificial Sequence: Synthetic oligonucleotide
auugccaagugcaggaacg

SEQ ID NO: 1707492 - RNA, 19 nt, Artificial Sequence
  Description of Artificial Sequence: Synthetic oligonucleotide
aacauuuacaagaggguaa

SEQ ID NO: 1707493 - RNA, 19 nt, Artificial Sequence
  Description of Artificial Sequence: Synthetic oligonucleotide
auacaacauuuacaagagg

SEQ ID NO: 1707494 - RNA, 19 nt, Artificial Sequence
  Description of Artificial Sequence: Synthetic oligonucleotide
cuggcugaaacauggcugc

SEQ ID NO: 1707495 - RNA, 19 nt, Artificial Sequence
  Description of Artificial Sequence: Synthetic oligonucleotide
augauugccaagugcagga

SEQ ID NO: 1707496 - RNA, 19 nt, Artificial Sequence
  Description of Artificial Sequence: Synthetic oligonucleotide
ugugaggacauaccaggcu

SEQ ID NO: 1707497 - RNA, 19 nt, Artificial Sequence
  Description of Artificial Sequence: Synthetic oligonucleotide
ucggagcucaggaucacag

SEQ ID NO: 1707498 - RNA, 19 nt, Artificial Sequence
  Description of Artificial Sequence: Synthetic oligonucleotide
uucaccaucugcucguacu

SEQ ID NO: 1707499 - RNA, 19 nt, Artificial Sequence
  Description of Artificial Sequence: Synthetic oligonucleotide
uccucgaaagucucggagc

SEQ ID NO: 1707500 - RNA, 19 nt, Artificial Sequence
  Description of Artificial Sequence: Synthetic oligonucleotide
cuacaugugaggacauacc

SEQ ID NO: 1707501 - RNA, 19 nt, Artificial Sequence
  Description of Artificial Sequence: Synthetic oligonucleotide
uauccggguacuuggucgg

SEQ ID NO: 1707502 - RNA, 19 nt, Artificial Sequence
  Description of Artificial Sequence: Synthetic oligonucleotide
auuuacaagaggguaacaa

SEQ ID NO: 1707503 - RNA, 19 nt, Artificial Sequence
  Description of Artificial Sequence: Synthetic oligonucleotide
ucugugucaggacuccuac

SEQ ID NO: 1707504 - RNA, 19 nt, Artificial Sequence
  Description of Artificial Sequence: Synthetic oligonucleotide
cuugagagcgucccgcggg

SEQ ID NO: 1707505 - RNA, 19 nt, Artificial Sequence
  Description of Artificial Sequence: Synthetic oligonucleotide
caguucaggguucugcagg

SEQ ID NO: 1707506 - RNA, 19 nt, Artificial Sequence
  Description of Artificial Sequence: Synthetic oligonucleotide
ugcagguuguucuggaagu

SEQ ID NO: 1707507 - RNA, 19 nt, Artificial Sequence
  Description of Artificial Sequence: Synthetic oligonucleotide
gagugacuagcacauacca

SEQ ID NO: 1707508 - RNA, 19 nt, Artificial Sequence
  Description of Artificial Sequence: Synthetic oligonucleotide
uggagucugcugcagguug

SEQ ID NO: 1707509 - RNA, 19 nt, Artificial Sequence
  Description of Artificial Sequence: Synthetic oligonucleotide
caggauggaguggagaugc

SEQ ID NO: 1707510 - RNA, 19 nt, Artificial Sequence
  Description of Artificial Sequence: Synthetic oligonucleotide
ucuugagagcgucccgcgg

SEQ ID NO: 1707511 - RNA, 19 nt, Artificial Sequence
  Description of Artificial Sequence: Synthetic oligonucleotide
ucgaaagucucggagcuca

SEQ ID NO: 1707512 - RNA, 19 nt, Artificial Sequence
  Description of Artificial Sequence: Synthetic oligonucleotide
uccacucauaaugucagac

SEQ ID NO: 1707513 - RNA, 19 nt, Artificial Sequence
  Description of Artificial Sequence: Synthetic oligonucleotide
aucacagccagcuuccaaa

SEQ ID NO: 1707514 - RNA, 19 nt, Artificial Sequence
  Description of Artificial Sequence: Synthetic oligonucleotide
uguagagggguauuuccuc

SEQ ID NO: 1707515 - RNA, 19 nt, Artificial Sequence
  Description of Artificial Sequence: Synthetic oligonucleotide
cacccaaagacaccaaaug

SEQ ID NO: 1707516 - RNA, 19 nt, Artificial Sequence
  Description of Artificial Sequence: Synthetic oligonucleotide
auugcagggcuccugggca

SEQ ID NO: 1707517 - RNA, 19 nt, Artificial Sequence
  Description of Artificial Sequence: Synthetic oligonucleotide
gaagauuuucccgggucag

SEQ ID NO: 1707518 - RNA, 19 nt, Artificial Sequence
  Description of Artificial Sequence: Synthetic oligonucleotide
caucuuagaaguaccaaaa

SEQ ID NO: 1707519 - RNA, 19 nt, Artificial Sequence
  Description of Artificial Sequence: Synthetic oligonucleotide
ugaggacauaccaggcuca

SEQ ID NO: 1707520 - RNA, 19 nt, Artificial Sequence
  Description of Artificial Sequence: Synthetic oligonucleotide
uccuccgugaauucugacu

SEQ ID NO: 1707521 - RNA, 19 nt, Artificial Sequence
  Description of Artificial Sequence: Synthetic oligonucleotide
gcuguauccggguacuugg

SEQ ID NO: 1707522 - RNA, 19 nt, Artificial Sequence
  Description of Artificial Sequence: Synthetic oligonucleotide
guggcgaucguccaccagc

SEQ ID NO: 1707523 - RNA, 19 nt, Artificial Sequence
  Description of Artificial Sequence: Synthetic oligonucleotide
agugacuagcacauaccac

SEQ ID NO: 1707524 - RNA, 19 nt, Artificial Sequence
  Description of Artificial Sequence: Synthetic oligonucleotide
gucguagcucuccucaucc

SEQ ID NO: 1707525 - RNA, 19 nt, Artificial Sequence
  Description of Artificial Sequence: Synthetic oligonucleotide
ucauccucacucucgggca

SEQ ID NO: 1707526 - RNA, 19 nt, Artificial Sequence
  Description of Artificial Sequence: Synthetic oligonucleotide
uugguaggucacucuauug

SEQ ID NO: 1707527 - RNA, 19 nt, Artificial Sequence
  Description of Artificial Sequence: Synthetic oligonucleotide
ucgggagugacuagcacau

SEQ ID NO: 1707528 - RNA, 19 nt, Artificial Sequence
  Description of Artificial Sequence: Synthetic oligonucleotide
agcgacaccaguucagggu

SEQ ID NO: 1707529 - RNA, 19 nt, Artificial Sequence
  Description of Artificial Sequence: Synthetic oligonucleotide
aacgagucuccguccuccg

SEQ ID NO: 1707530 - RNA, 19 nt, Artificial Sequence
  Description of Artificial Sequence: Synthetic oligonucleotide
caccaaaugcuccacgaug

SEQ ID NO: 1707531 - RNA, 19 nt, Artificial Sequence
  Description of Artificial Sequence: Synthetic oligonucleotide
guaggucacucuauugacg

SEQ ID NO: 1707532 - RNA, 19 nt, Artificial Sequence
  Description of Artificial Sequence: Synthetic oligonucleotide
acaacauuuacaagagggu

SEQ ID NO: 1707533 - RNA, 19 nt, Artificial Sequence
  Description of Artificial Sequence: Synthetic oligonucleotide
agacaccaaaugcuccacg

SEQ ID NO: 1707534 - RNA, 19 nt, Artificial Sequence
  Description of Artificial Sequence: Synthetic oligonucleotide
gauugccaagugcaggaac

SEQ ID NO: 1707535 - RNA, 19 nt, Artificial Sequence
  Description of Artificial Sequence: Synthetic oligonucleotide
ucugaagauuuucccgggu

SEQ ID NO: 1707536 - RNA, 19 nt, Artificial Sequence
  Description of Artificial Sequence: Synthetic oligonucleotide
gcugaaacauggcugcgcg

SEQ ID NO: 1707537 - RNA, 19 nt, Artificial Sequence
  Description of Artificial Sequence: Synthetic oligonucleotide
acacguguggccauuguag

SEQ ID NO: 1707538 - RNA, 19 nt, Artificial Sequence
  Description of Artificial Sequence: Synthetic oligonucleotide
uucauggaguccaggccgc

SEQ ID NO: 1707539 - RNA, 19 nt, Artificial Sequence
  Description of Artificial Sequence: Synthetic oligonucleotide
aauacaccauauacaacau

SEQ ID NO: 1707540 - RNA, 19 nt, Artificial Sequence
  Description of Artificial Sequence: Synthetic oligonucleotide
uuuugacacuuuccacuca

SEQ ID NO: 1707541 - RNA, 19 nt, Artificial Sequence
  Description of Artificial Sequence: Synthetic oligonucleotide
ucagucgggagugacuagc

SEQ ID NO: 1707542 - RNA, 19 nt, Artificial Sequence
  Description of Artificial Sequence: Synthetic oligonucleotide
acuccuacacuggccaggc

SEQ ID NO: 1707543 - RNA, 19 nt, Artificial Sequence
  Description of Artificial Sequence: Synthetic oligonucleotide
ucagacguuggccuccaaa

SEQ ID NO: 1707544 - RNA, 19 nt, Artificial Sequence
  Description of Artificial Sequence: Synthetic oligonucleotide
gugaggacauaccaggcuc

SEQ ID NO: 1707545 - RNA, 19 nt, Artificial Sequence
  Description of Artificial Sequence: Synthetic oligonucleotide
ugacuagcacauaccacuc

SEQ ID NO: 1707546 - RNA, 19 nt, Artificial Sequence
  Description of Artificial Sequence: Synthetic oligonucleotide
cauaccaggcucagcuacc

SEQ ID NO: 1707547 - RNA, 19 nt, Artificial Sequence
  Description of Artificial Sequence: Synthetic oligonucleotide
auaaaacucuuguuuuaua

SEQ ID NO: 1707548 - RNA, 19 nt, Artificial Sequence
  Description of Artificial Sequence: Synthetic oligonucleotide
gaaagucucggagcucagg

SEQ ID NO: 1707549 - RNA, 19 nt, Artificial Sequence
  Description of Artificial Sequence: Synthetic oligonucleotide
ucuccguccuccgugagcu

SEQ ID NO: 1707550 - RNA, 19 nt, Artificial Sequence
  Description of Artificial Sequence: Synthetic oligonucleotide
acaugugaggacauaccag

SEQ ID NO: 1707551 - RNA, 19 nt, Artificial Sequence
  Description of Artificial Sequence: Synthetic oligonucleotide
cacucuauugacgucagca

SEQ ID NO: 1707552 - RNA, 19 nt, Artificial Sequence
  Description of Artificial Sequence: Synthetic oligonucleotide
aguucaggguucugcaggu

SEQ ID NO: 1707553 - RNA, 19 nt, Artificial Sequence
  Description of Artificial Sequence: Synthetic oligonucleotide
uugacgucagcaccacacu

SEQ ID NO: 1707554 - RNA, 19 nt, Artificial Sequence
  Description of Artificial Sequence: Synthetic oligonucleotide
caucggcacccaaagacac

SEQ ID NO: 1707555 - RNA, 19 nt, Artificial Sequence
  Description of Artificial Sequence: Synthetic oligonucleotide
ucggcacccaaagacacca

SEQ ID NO: 1707556 - RNA, 19 nt, Artificial Sequence
  Description of Artificial Sequence: Synthetic oligonucleotide
aaccucagucgggagugac

SEQ ID NO: 1707557 - RNA, 19 nt, Artificial Sequence
  Description of Artificial Sequence: Synthetic oligonucleotide
uguauccggguacuugguc

SEQ ID NO: 1707558 - RNA, 19 nt, Artificial Sequence
  Description of Artificial Sequence: Synthetic oligonucleotide
augucagacguuggccucc

SEQ ID NO: 1707559 - RNA, 19 nt, Artificial Sequence
  Description of Artificial Sequence: Synthetic oligonucleotide
gaacgagucuccguccucc

SEQ ID NO: 1707560 - RNA, 19 nt, Artificial Sequence
  Description of Artificial Sequence: Synthetic oligonucleotide
aggugcagacacguguggc

SEQ ID NO: 1707561 - RNA, 19 nt, Artificial Sequence
  Description of Artificial Sequence: Synthetic oligonucleotide
ucugugucguagcucuccu

SEQ ID NO: 1707562 - RNA, 19 nt, Artificial Sequence
  Description of Artificial Sequence: Synthetic oligonucleotide
gagcgacaccaguucaggg

SEQ ID NO: 1707563 - RNA, 19 nt, Artificial Sequence
  Description of Artificial Sequence: Synthetic oligonucleotide
gacuccuacacuggccagg

SEQ ID NO: 1707564 - RNA, 19 nt, Artificial Sequence
  Description of Artificial Sequence: Synthetic oligonucleotide
uggugaucacagccaagug

SEQ ID NO: 1707565 - RNA, 19 nt, Artificial Sequence
  Description of Artificial Sequence: Synthetic oligonucleotide
uggcgaucguccaccagcc

SEQ ID NO: 1707566 - RNA, 19 nt, Artificial Sequence
  Description of Artificial Sequence: Synthetic oligonucleotide
uggaguggagaugcugagg

SEQ ID NO: 1707567 - RNA, 19 nt, Artificial Sequence
  Description of Artificial Sequence: Synthetic oligonucleotide
aagugccucagcaauuccu

SEQ ID NO: 1707568 - RNA, 19 nt, Artificial Sequence
  Description of Artificial Sequence: Synthetic oligonucleotide
ugaggugugcacgucugug

SEQ ID NO: 1707569 - RNA, 19 nt, Artificial Sequence
  Description of Artificial Sequence: Synthetic oligonucleotide
caggcaagauguagagggg

SEQ ID NO: 1707570 - RNA, 19 nt, Artificial Sequence
  Description of Artificial Sequence: Synthetic oligonucleotide
ugguucuacaugugaggac

SEQ ID NO: 1707571 - RNA, 19 nt, Artificial Sequence
  Description of Artificial Sequence: Synthetic oligonucleotide
cuagcacauaccacucaac

SEQ ID NO: 1707572 - RNA, 19 nt, Artificial Sequence
  Description of Artificial Sequence: Synthetic oligonucleotide
caggucucccuucaccugc

SEQ ID NO: 1707573 - RNA, 19 nt, Artificial Sequence
  Description of Artificial Sequence: Synthetic oligonucleotide
aagauguagagggguauuu

SEQ ID NO: 1707574 - RNA, 19 nt, Artificial Sequence
  Description of Artificial Sequence: Synthetic oligonucleotide
ccacucauaaugucagacg

SEQ ID NO: 1707575 - RNA, 19 nt, Artificial Sequence
  Description of Artificial Sequence: Synthetic oligonucleotide
uagccauggauggaggcga

SEQ ID NO: 1707576 - RNA, 19 nt, Artificial Sequence
  Description of Artificial Sequence: Synthetic oligonucleotide
ucaucauagggcagcucau

SEQ ID NO: 1707577 - RNA, 19 nt, Artificial Sequence
  Description of Artificial Sequence: Synthetic oligonucleotide
uccgugaauucugacucug

SEQ ID NO: 1707578 - RNA, 19 nt, Artificial Sequence
  Description of Artificial Sequence: Synthetic oligonucleotide
ugcuguauccggguacuug

SEQ ID NO: 1707579 - RNA, 19 nt, Artificial Sequence
  Description of Artificial Sequence: Synthetic oligonucleotide
guguggccauuguaguugg

SEQ ID NO: 1707580 - RNA, 19 nt, Artificial Sequence
  Description of Artificial Sequence: Synthetic oligonucleotide
gucgggagugacuagcaca

SEQ ID NO: 1707581 - RNA, 19 nt, Artificial Sequence
  Description of Artificial Sequence: Synthetic oligonucleotide
cugcucacaggcaagaugu

SEQ ID NO: 1707582 - RNA, 19 nt, Artificial Sequence
  Description of Artificial Sequence: Synthetic oligonucleotide
accugguucuacaugugag

SEQ ID NO: 1707583 - RNA, 19 nt, Artificial Sequence
  Description of Artificial Sequence: Synthetic oligonucleotide
gggagugacuagcacauac

SEQ ID NO: 1707584 - RNA, 19 nt, Artificial Sequence
  Description of Artificial Sequence: Synthetic oligonucleotide
cugaaacauggcugcgcgg

SEQ ID NO: 1707585 - RNA, 19 nt, Artificial Sequence
  Description of Artificial Sequence: Synthetic oligonucleotide
ugucguagcucuccucauc

SEQ ID NO: 1707586 - RNA, 19 nt, Artificial Sequence
  Description of Artificial Sequence: Synthetic oligonucleotide
cugcucguacuccucgucc

SEQ ID NO: 1707587 - RNA, 19 nt, Artificial Sequence
  Description of Artificial Sequence: Synthetic oligonucleotide
aaucacuuccauggucaga

SEQ ID NO: 1707588 - RNA, 19 nt, Artificial Sequence
  Description of Artificial Sequence: Synthetic oligonucleotide
ugcucguacuccucguccu

SEQ ID NO: 1707589 - RNA, 19 nt, Artificial Sequence
  Description of Artificial Sequence: Synthetic oligonucleotide
uuuccucgaaagucucgga

SEQ ID NO: 1707590 - RNA, 19 nt, Artificial Sequence
  Description of Artificial Sequence: Synthetic oligonucleotide
cacucauaaugucagacgu

SEQ ID NO: 1707591 - RNA, 19 nt, Artificial Sequence
  Description of Artificial Sequence: Synthetic oligonucleotide
aggaacgagucuccguccu

SEQ ID NO: 1707592 - RNA, 19 nt, Artificial Sequence
  Description of Artificial Sequence: Synthetic oligonucleotide
gcgagcugcaagcugcugg

SEQ ID NO: 1707593 - RNA, 19 nt, Artificial Sequence
  Description of Artificial Sequence: Synthetic oligonucleotide
cuccaaauacacagucauc

SEQ ID NO: 1707594 - RNA, 19 nt, Artificial Sequence
  Description of Artificial Sequence: Synthetic oligonucleotide
uuggucggccccaggugag

SEQ ID NO: 1707595 - RNA, 19 nt, Artificial Sequence
  Description of Artificial Sequence: Synthetic oligonucleotide
ugcaggaacgagucuccgu

SEQ ID NO: 1707596 - RNA, 19 nt, Artificial Sequence
  Description of Artificial Sequence: Synthetic oligonucleotide
cucaacaccugguucuaca

SEQ ID NO: 1707597 - RNA, 19 nt, Artificial Sequence
  Description of Artificial Sequence: Synthetic oligonucleotide
gucaggacuccuacacugg

SEQ ID NO: 1707598 - RNA, 19 nt, Artificial Sequence
  Description of Artificial Sequence: Synthetic oligonucleotide
uaccacucaacaccugguu

SEQ ID NO: 1707599 - RNA, 19 nt, Artificial Sequence
  Description of Artificial Sequence: Synthetic oligonucleotide
cauuguaguugguggccug

SEQ ID NO: 1707600 - RNA, 19 nt, Artificial Sequence
  Description of Artificial Sequence: Synthetic oligonucleotide
gcaauuccuggcugguugg

SEQ ID NO: 1707601 - RNA, 19 nt, Artificial Sequence
  Description of Artificial Sequence: Synthetic oligonucleotide
gaucacagccaagugaagu

SEQ ID NO: 1707602 - RNA, 19 nt, Artificial Sequence
  Description of Artificial Sequence: Synthetic oligonucleotide
uccgugagcugcugcuucc

SEQ ID NO: 1707603 - RNA, 19 nt, Artificial Sequence
  Description of Artificial Sequence: Synthetic oligonucleotide
aguagccuugguaggucac

SEQ ID NO: 1707604 - RNA, 19 nt, Artificial Sequence
  Description of Artificial Sequence: Synthetic oligonucleotide
auacaccauauacaacauu

SEQ ID NO: 1707605 - RNA, 19 nt, Artificial Sequence
  Description of Artificial Sequence: Synthetic oligonucleotide
ccggcuggcugaaacaugg

SEQ ID NO: 1707606 - RNA, 19 nt, Artificial Sequence
  Description of Artificial Sequence: Synthetic oligonucleotide
auccuccgugaauucugac

SEQ ID NO: 1707607 - RNA, 19 nt, Artificial Sequence
  Description of Artificial Sequence: Synthetic oligonucleotide
auugacaucggcacccaaa

SEQ ID NO: 1707608 - RNA, 19 nt, Artificial Sequence
  Description of Artificial Sequence: Synthetic oligonucleotide
ggacauaccaggcucagcu

SEQ ID NO: 1707609 - RNA, 19 nt, Artificial Sequence
  Description of Artificial Sequence: Synthetic oligonucleotide
caccaguucaggguucugc

SEQ ID NO: 1707610 - RNA, 19 nt, Artificial Sequence
  Description of Artificial Sequence: Synthetic oligonucleotide
gugugcacgucugugucag

SEQ ID NO: 1707611 - RNA, 19 nt, Artificial Sequence
  Description of Artificial Sequence: Synthetic oligonucleotide
aggacauaccaggcucagc

SEQ ID NO: 1707612 - RNA, 19 nt, Artificial Sequence
  Description of Artificial Sequence: Synthetic oligonucleotide
uuuucccgggucagcuggc

SEQ ID NO: 1707613 - RNA, 19 nt, Artificial Sequence
  Description of Artificial Sequence: Synthetic oligonucleotide
auguagagggguauuuccu

SEQ ID NO: 1707614 - RNA, 19 nt, Artificial Sequence
  Description of Artificial Sequence: Synthetic oligonucleotide
caggaacgagucuccgucc

SEQ ID NO: 1707615 - RNA, 19 nt, Artificial Sequence
  Description of Artificial Sequence: Synthetic oligonucleotide
cugcaggcggaucuccugc

SEQ ID NO: 1707616 - RNA, 19 nt, Artificial Sequence
  Description of Artificial Sequence: Synthetic oligonucleotide
agcucauccuccgugaauu

SEQ ID NO: 1707617 - RNA, 19 nt, Artificial Sequence
  Description of Artificial Sequence: Synthetic oligonucleotide
uguccggccauugcagggc

SEQ ID NO: 1707618 - RNA, 19 nt, Artificial Sequence
  Description of Artificial Sequence: Synthetic oligonucleotide
gaguggagaugcugaggug

SEQ ID NO: 1707619 - RNA, 19 nt, Artificial Sequence
  Description of Artificial Sequence: Synthetic oligonucleotide
guacuccucguccuucaug

SEQ ID NO: 1707620 - RNA, 19 nt, Artificial Sequence
  Description of Artificial Sequence: Synthetic oligonucleotide
cuucauggaugauugccaa

SEQ ID NO: 1707621 - RNA, 19 nt, Artificial Sequence
  Description of Artificial Sequence: Synthetic oligonucleotide
gacuagcacauaccacuca

SEQ ID NO: 1707622 - RNA, 19 nt, Artificial Sequence
  Description of Artificial Sequence: Synthetic oligonucleotide
caacauuuacaagagggua

SEQ ID NO: 1707623 - RNA, 19 nt, Artificial Sequence
  Description of Artificial Sequence: Synthetic oligonucleotide
ccuccgugaauucugacuc

SEQ ID NO: 1707624 - RNA, 19 nt, Artificial Sequence
  Description of Artificial Sequence: Synthetic oligonucleotide
cacgucugugucaggacuc

SEQ ID NO: 1707625 - RNA, 19 nt, Artificial Sequence
  Description of Artificial Sequence: Synthetic oligonucleotide
ucccgcgggcccuccaugg

SEQ ID NO: 1707626 - RNA, 19 nt, Artificial Sequence
  Description of Artificial Sequence: Synthetic oligonucleotide
gaggacauaccaggcucag

SEQ ID NO: 1707627 - RNA, 19 nt, Artificial Sequence
  Description of Artificial Sequence: Synthetic oligonucleotide
gcuggcugaaacauggcug

SEQ ID NO: 1707628 - RNA, 19 nt, Artificial Sequence
  Description of Artificial Sequence: Synthetic oligonucleotide
caccacacuucaacaggag

SEQ ID NO: 1707629 - RNA, 19 nt, Artificial Sequence
  Description of Artificial Sequence: Synthetic oligonucleotide
ucacucuauugacgucagc

SEQ ID NO: 1707630 - RNA, 19 nt, Artificial Sequence
  Description of Artificial Sequence: Synthetic oligonucleotide
acgaugcccagguagccau

SEQ ID NO: 1707631 - RNA, 19 nt, Artificial Sequence
  Description of Artificial Sequence: Synthetic oligonucleotide
acaucggcacccaaagaca

SEQ ID NO: 1707632 - RNA, 19 nt, Artificial Sequence
  Description of Artificial Sequence: Synthetic oligonucleotide
gcaggaacgagucuccguc

SEQ ID NO: 1707633 - RNA, 19 nt, Artificial Sequence
  Description of Artificial Sequence: Synthetic oligonucleotide
ggggcugcgagcugcaagc

SEQ ID NO: 1707634 - RNA, 19 nt, Artificial Sequence
  Description of Artificial Sequence: Synthetic oligonucleotide
uuccacucauaaugucaga

SEQ ID NO: 1707635 - RNA, 19 nt, Artificial Sequence
  Description of Artificial Sequence: Synthetic oligonucleotide
aggcaagauguagaggggu

SEQ ID NO: 1707636 - RNA, 19 nt, Artificial Sequence
  Description of Artificial Sequence: Synthetic oligonucleotide
gacacuuuccacucauaau

SEQ ID NO: 1707637 - RNA, 19 nt, Artificial Sequence
  Description of Artificial Sequence: Synthetic oligonucleotide
ugucguggcgaucguccac

SEQ ID NO: 1707638 - RNA, 19 nt, Artificial Sequence
  Description of Artificial Sequence: Synthetic oligonucleotide
auacaaguccauguucuuu

SEQ ID NO: 1707639 - RNA, 19 nt, Artificial Sequence
  Description of Artificial Sequence: Synthetic oligonucleotide
cugguucuacaugugagga

SEQ ID NO: 1707640 - RNA, 19 nt, Artificial Sequence
  Description of Artificial Sequence: Synthetic oligonucleotide
cugccgaaucacuuccaug

SEQ ID NO: 1707641 - RNA, 19 nt, Artificial Sequence
  Description of Artificial Sequence: Synthetic oligonucleotide
uccguccuccgugagcugc

SEQ ID NO: 1707642 - RNA, 19 nt, Artificial Sequence
  Description of Artificial Sequence: Synthetic oligonucleotide
cuuggucggccccagguga

SEQ ID NO: 1707643 - RNA, 19 nt, Artificial Sequence
  Description of Artificial Sequence: Synthetic oligonucleotide
gagagcgucccgcgggccc

SEQ ID NO: 1707644 - RNA, 19 nt, Artificial Sequence
  Description of Artificial Sequence: Synthetic oligonucleotide
ggggaguagccuugguagg

SEQ ID NO: 1707645 - RNA, 19 nt, Artificial Sequence
  Description of Artificial Sequence: Synthetic oligonucleotide
ggucacucuauugacguca

SEQ ID NO: 1707646 - RNA, 19 nt, Artificial Sequence
  Description of Artificial Sequence: Synthetic oligonucleotide
cagguuguucuggaaguug

SEQ ID NO: 1707647 - RNA, 19 nt, Artificial Sequence
  Description of Artificial Sequence: Synthetic oligonucleotide
ggagugacuagcacauacc

SEQ ID NO: 1707648 - RNA, 19 nt, Artificial Sequence
  Description of Artificial Sequence: Synthetic oligonucleotide
acucaacaccugguucuac

SEQ ID NO: 1707649 - RNA, 19 nt, Artificial Sequence
  Description of Artificial Sequence: Synthetic oligonucleotide
agacguuggccuccaaaua

SEQ ID NO: 1707650 - RNA, 19 nt, Artificial Sequence
  Description of Artificial Sequence: Synthetic oligonucleotide
gucguggcgaucguccacc

SEQ ID NO: 1707651 - RNA, 19 nt, Artificial Sequence
  Description of Artificial Sequence: Synthetic oligonucleotide
ggagcgacaccaguucagg

SEQ ID NO: 1707652 - RNA, 19 nt, Artificial Sequence
  Description of Artificial Sequence: Synthetic oligonucleotide
gacacguguggccauugua

SEQ ID NO: 1707653 - RNA, 19 nt, Artificial Sequence
  Description of Artificial Sequence: Synthetic oligonucleotide
uugacacuuuccacucaua

SEQ ID NO: 1707654 - RNA, 19 nt, Artificial Sequence
  Description of Artificial Sequence: Synthetic oligonucleotide
gcgaucguccaccagccgc

SEQ ID NO: 1707655 - RNA, 19 nt, Artificial Sequence
  Description of Artificial Sequence: Synthetic oligonucleotide
gucacucuauugacgucag

SEQ ID NO: 1707656 - RNA, 19 nt, Artificial Sequence
  Description of Artificial Sequence: Synthetic oligonucleotide
ugcaggcggaucuccugca

SEQ ID NO: 1707657 - RNA, 19 nt, Artificial Sequence
  Description of Artificial Sequence: Synthetic oligonucleotide
gccgcugucguggcgaucg

SEQ ID NO: 1707658 - RNA, 19 nt, Artificial Sequence
  Description of Artificial Sequence: Synthetic oligonucleotide
ggcagcccugcucacaggc

SEQ ID NO: 1707659 - RNA, 19 nt, Artificial Sequence
  Description of Artificial Sequence: Synthetic oligonucleotide
agagggguauuuccucgaa

SEQ ID NO: 1707660 - RNA, 19 nt, Artificial Sequence
  Description of Artificial Sequence: Synthetic oligonucleotide
ugugcacgucugugucagg

SEQ ID NO: 1707661 - RNA, 19 nt, Artificial Sequence
  Description of Artificial Sequence: Synthetic oligonucleotide
cacauaccacucaacaccu

SEQ ID NO: 1707662 - RNA, 19 nt, Artificial Sequence
  Description of Artificial Sequence: Synthetic oligonucleotide
cagguggagggcuguccgg

SEQ ID NO: 1707663 - RNA, 19 nt, Artificial Sequence
  Description of Artificial Sequence: Synthetic oligonucleotide
auaccacucaacaccuggu

SEQ ID NO: 1707664 - RNA, 19 nt, Artificial Sequence
  Description of Artificial Sequence: Synthetic oligonucleotide
ccaggugagcugauagggg

SEQ ID NO: 1707665 - RNA, 19 nt, Artificial Sequence
  Description of Artificial Sequence: Synthetic oligonucleotide
gaggcgaggugcagacacg

SEQ ID NO: 1707666 - RNA, 19 nt, Artificial Sequence
  Description of Artificial Sequence: Synthetic oligonucleotide
ccuacacuggccaggcagc

SEQ ID NO: 1707667 - RNA, 19 nt, Artificial Sequence
  Description of Artificial Sequence: Synthetic oligonucleotide
ggaugauugccaagugcag

SEQ ID NO: 1707668 - RNA, 19 nt, Artificial Sequence
  Description of Artificial Sequence: Synthetic oligonucleotide
cuacacuggccaggcagcc

SEQ ID NO: 1707669 - RNA, 19 nt, Artificial Sequence
  Description of Artificial Sequence: Synthetic oligonucleotide
auaccaggcucagcuacca

SEQ ID NO: 1707670 - RNA, 19 nt, Artificial Sequence
  Description of Artificial Sequence: Synthetic oligonucleotide
ugauugccaagugcaggaa

SEQ ID NO: 1707671 - RNA, 19 nt, Artificial Sequence
  Description of Artificial Sequence: Synthetic oligonucleotide
gagggguauuuccucgaaa

SEQ ID NO: 1707672 - RNA, 19 nt, Artificial Sequence
  Description of Artificial Sequence: Synthetic oligonucleotide
cucagucgggagugacuag

SEQ ID NO: 1707673 - RNA, 19 nt, Artificial Sequence
  Description of Artificial Sequence: Synthetic oligonucleotide
uggccggcuggcugaaaca

SEQ ID NO: 1707674 - RNA, 19 nt, Artificial Sequence
  Description of Artificial Sequence: Synthetic oligonucleotide
cacuuuccacucauaaugu

SEQ ID NO: 1707675 - RNA, 19 nt, Artificial Sequence
  Description of Artificial Sequence: Synthetic oligonucleotide
gucuccguccuccgugagc

SEQ ID NO: 1707676 - RNA, 19 nt, Artificial Sequence
  Description of Artificial Sequence: Synthetic oligonucleotide
caccaucugcucguacucc

SEQ ID NO: 1707677 - RNA, 19 nt, Artificial Sequence
  Description of Artificial Sequence: Synthetic oligonucleotide
cugcgugcggggcugcgag

SEQ ID NO: 1707678 - RNA, 19 nt, Artificial Sequence
  Description of Artificial Sequence: Synthetic oligonucleotide
uacacuggccaggcagccc

SEQ ID NO: 1707679 - RNA, 19 nt, Artificial Sequence
  Description of Artificial Sequence: Synthetic oligonucleotide
uccggguacuuggucggcc

SEQ ID NO: 1707680 - RNA, 19 nt, Artificial Sequence
  Description of Artificial Sequence: Synthetic oligonucleotide
gcuguccggccauugcagg

SEQ ID NO: 1707681 - RNA, 19 nt, Artificial Sequence
  Description of Artificial Sequence: Synthetic oligonucleotide
gccccaggugagcugauag

SEQ ID NO: 1707682 - RNA, 19 nt, Artificial Sequence
  Description of Artificial Sequence: Synthetic oligonucleotide
uagccuugguaggucacuc

SEQ ID NO: 1707683 - RNA, 19 nt, Artificial Sequence
  Description of Artificial Sequence: Synthetic oligonucleotide
agacacguguggccauugu

SEQ ID NO: 1707684 - RNA, 19 nt, Artificial Sequence
  Description of Artificial Sequence: Synthetic oligonucleotide
acaccauauacaacauuua

SEQ ID NO: 1707685 - RNA, 19 nt, Artificial Sequence
  Description of Artificial Sequence: Synthetic oligonucleotide
ucggccccaggugagcuga

SEQ ID NO: 1707686 - RNA, 19 nt, Artificial Sequence
  Description of Artificial Sequence: Synthetic oligonucleotide
acguguggccauuguaguu

SEQ ID NO: 1707687 - RNA, 19 nt, Artificial Sequence
  Description of Artificial Sequence: Synthetic oligonucleotide
acguuggccuccaaauaca

SEQ ID NO: 1707688 - RNA, 19 nt, Artificial Sequence
  Description of Artificial Sequence: Synthetic oligonucleotide
cuucaccaucugcucguac

SEQ ID NO: 1707689 - RNA, 19 nt, Artificial Sequence
  Description of Artificial Sequence: Synthetic oligonucleotide
cgugaauucugacucugug

SEQ ID NO: 1707690 - RNA, 19 nt, Artificial Sequence
  Description of Artificial Sequence: Synthetic oligonucleotide
cucucgggcagcaucugaa

SEQ ID NO: 1707691 - RNA, 19 nt, Artificial Sequence
  Description of Artificial Sequence: Synthetic oligonucleotide
cagacguuggccuccaaau

SEQ ID NO: 1707692 - RNA, 19 nt, Artificial Sequence
  Description of Artificial Sequence: Synthetic oligonucleotide
cccaaagacaccaaaugcu

SEQ ID NO: 1707693 - RNA, 19 nt, Artificial Sequence
  Description of Artificial Sequence: Synthetic oligonucleotide
auccggguacuuggucggc

SEQ ID NO: 1707694 - RNA, 19 nt, Artificial Sequence
  Description of Artificial Sequence: Synthetic oligonucleotide
acucauaaugucagacguu

SEQ ID NO: 1707695 - RNA, 19 nt, Artificial Sequence
  Description of Artificial Sequence: Synthetic oligonucleotide
guacuuggucggccccagg

SEQ ID NO: 1707696 - RNA, 19 nt, Artificial Sequence
  Description of Artificial Sequence: Synthetic oligonucleotide
gugcacgucugugucagga

SEQ ID NO: 1707697 - RNA, 19 nt, Artificial Sequence
  Description of Artificial Sequence: Synthetic oligonucleotide
uguggccauuguaguuggu

SEQ ID NO: 1707698 - RNA, 19 nt, Artificial Sequence
  Description of Artificial Sequence: Synthetic oligonucleotide
aaaccucagucgggaguga

SEQ ID NO: 1707699 - RNA, 19 nt, Artificial Sequence
  Description of Artificial Sequence: Synthetic oligonucleotide
aggcgaggugcagacacgu

SEQ ID NO: 1707700 - RNA, 19 nt, Artificial Sequence
  Description of Artificial Sequence: Synthetic oligonucleotide
ggcugaaacauggcugcgc

SEQ ID NO: 1707701 - RNA, 19 nt, Artificial Sequence
  Description of Artificial Sequence: Synthetic oligonucleotide
ugcagacacguguggccau

SEQ ID NO: 1707702 - RNA, 19 nt, Artificial Sequence
  Description of Artificial Sequence: Synthetic oligonucleotide
uccugcggcugcaggcgga

SEQ ID NO: 1707703 - RNA, 19 nt, Artificial Sequence
  Description of Artificial Sequence: Synthetic oligonucleotide
acgagucuccguccuccgu

SEQ ID NO: 1707704 - RNA, 19 nt, Artificial Sequence
  Description of Artificial Sequence: Synthetic oligonucleotide
ggagaugcugaggugugca

SEQ ID NO: 1707705 - RNA, 19 nt, Artificial Sequence
  Description of Artificial Sequence: Synthetic oligonucleotide
cugugucguagcucuccuc

SEQ ID NO: 1707706 - RNA, 19 nt, Artificial Sequence
  Description of Artificial Sequence: Synthetic oligonucleotide
cagucgggagugacuagca

SEQ ID NO: 1707707 - RNA, 19 nt, Artificial Sequence
  Description of Artificial Sequence: Synthetic oligonucleotide
agguccacugccaggugga

SEQ ID NO: 1707708 - RNA, 19 nt, Artificial Sequence
  Description of Artificial Sequence: Synthetic oligonucleotide
auucugacucugugucgua

SEQ ID NO: 1707709 - RNA, 19 nt, Artificial Sequence
  Description of Artificial Sequence: Synthetic oligonucleotide
ugagagcgucccgcgggcc

SEQ ID NO: 1707710 - RNA, 19 nt, Artificial Sequence
  Description of Artificial Sequence: Synthetic oligonucleotide
aggcagcccugcucacagg

SEQ ID NO: 1707711 - RNA, 19 nt, Artificial Sequence
  Description of Artificial Sequence: Synthetic oligonucleotide
cugugucaggacuccuaca

SEQ ID NO: 1707712 - RNA, 19 nt, Artificial Sequence
  Description of Artificial Sequence: Synthetic oligonucleotide
ccgaaucacuuccaugguc

SEQ ID NO: 1707713 - RNA, 19 nt, Artificial Sequence
  Description of Artificial Sequence: Synthetic oligonucleotide
cuugguaggucacucuauu

SEQ ID NO: 1707714 - RNA, 19 nt, Artificial Sequence
  Description of Artificial Sequence: Synthetic oligonucleotide
acauaccacucaacaccug

SEQ ID NO: 1707715 - RNA, 19 nt, Artificial Sequence
  Description of Artificial Sequence: Synthetic oligonucleotide
ggacuccuacacuggccag

SEQ ID NO: 1707716 - RNA, 19 nt, Artificial Sequence
  Description of Artificial Sequence: Synthetic oligonucleotide
ggcuguccggccauugcag

SEQ ID NO: 1707717 - RNA, 19 nt, Artificial Sequence
  Description of Artificial Sequence: Synthetic oligonucleotide
ucauggaguccaggccgcu

SEQ ID NO: 1707718 - RNA, 19 nt, Artificial Sequence
  Description of Artificial Sequence: Synthetic oligonucleotide
auggcccaguccuggccgu

SEQ ID NO: 1707719 - RNA, 19 nt, Artificial Sequence
  Description of Artificial Sequence: Synthetic oligonucleotide
cuucucuucauggaugauu

SEQ ID NO: 1707720 - RNA, 19 nt, Artificial Sequence
  Description of Artificial Sequence: Synthetic oligonucleotide
ccaaaagugccucagcaau

SEQ ID NO: 1707721 - RNA, 19 nt, Artificial Sequence
  Description of Artificial Sequence: Synthetic oligonucleotide
cacguguggccauuguagu

SEQ ID NO: 1707722 - RNA, 19 nt, Artificial Sequence
  Description of Artificial Sequence: Synthetic oligonucleotide
accucagucgggagugacu

SEQ ID NO: 1707723 - RNA, 19 nt, Artificial Sequence
  Description of Artificial Sequence: Synthetic oligonucleotide
cucguccuucauggagucc

SEQ ID NO: 1707724 - RNA, 19 nt, Artificial Sequence
  Description of Artificial Sequence: Synthetic oligonucleotide
cucgaaagucucggagcuc

SEQ ID NO: 1707725 - RNA, 19 nt, Artificial Sequence
  Description of Artificial Sequence: Synthetic oligonucleotide
ugcgagcugcaagcugcug

SEQ ID NO: 1707726 - RNA, 19 nt, Artificial Sequence
  Description of Artificial Sequence: Synthetic oligonucleotide
gcaggauggaguggagaug

SEQ ID NO: 1707727 - RNA, 19 nt, Artificial Sequence
  Description of Artificial Sequence: Synthetic oligonucleotide
gugucaggacuccuacacu

SEQ ID NO: 1707728 - RNA, 19 nt, Artificial Sequence
  Description of Artificial Sequence: Synthetic oligonucleotide
ccggguacuuggucggccc

SEQ ID NO: 1707729 - RNA, 19 nt, Artificial Sequence
  Description of Artificial Sequence: Synthetic oligonucleotide
uggucggccccaggugagc

SEQ ID NO: 1707730 - RNA, 19 nt, Artificial Sequence
  Description of Artificial Sequence: Synthetic oligonucleotide
ccgcuccuucuugagagcg

SEQ ID NO: 1707731 - RNA, 19 nt, Artificial Sequence
  Description of Artificial Sequence: Synthetic oligonucleotide
gcgaggugcagacacgugu

SEQ ID NO: 1707732 - RNA, 19 nt, Artificial Sequence
  Description of Artificial Sequence: Synthetic oligonucleotide
gggcuguccggccauugca

SEQ ID NO: 1707733 - RNA, 19 nt, Artificial Sequence
  Description of Artificial Sequence: Synthetic oligonucleotide
ggcgaucguccaccagccg

SEQ ID NO: 1707734 - RNA, 19 nt, Artificial Sequence
  Description of Artificial Sequence: Synthetic oligonucleotide
gcaggcggaucuccugcag

SEQ ID NO: 1707735 - RNA, 19 nt, Artificial Sequence
  Description of Artificial Sequence: Synthetic oligonucleotide
cacgaugcccagguagcca

SEQ ID NO: 1707736 - RNA, 19 nt, Artificial Sequence
  Description of Artificial Sequence: Synthetic oligonucleotide
cuucaccugccgaaucacu

SEQ ID NO: 1707737 - RNA, 19 nt, Artificial Sequence
  Description of Artificial Sequence: Synthetic oligonucleotide
ggucucccuucaccugccg

SEQ ID NO: 1707738 - RNA, 19 nt, Artificial Sequence
  Description of Artificial Sequence: Synthetic oligonucleotide
gggguauuuccucgaaagu

SEQ ID NO: 1707739 - RNA, 19 nt, Artificial Sequence
  Description of Artificial Sequence: Synthetic oligonucleotide
cugcgcggggcugcgugcg

SEQ ID NO: 1707740 - RNA, 19 nt, Artificial Sequence
  Description of Artificial Sequence: Synthetic oligonucleotide
cguuggccuccaaauacac

SEQ ID NO: 1707741 - RNA, 19 nt, Artificial Sequence
  Description of Artificial Sequence: Synthetic oligonucleotide
auggcugcgcggggcugcg

SEQ ID NO: 1707742 - RNA, 19 nt, Artificial Sequence
  Description of Artificial Sequence: Synthetic oligonucleotide
uccuggccguggccggcug

SEQ ID NO: 1707743 - RNA, 19 nt, Artificial Sequence
  Description of Artificial Sequence: Synthetic oligonucleotide
agccauggauggaggcgag

SEQ ID NO: 1707744 - RNA, 19 nt, Artificial Sequence
  Description of Artificial Sequence: Synthetic oligonucleotide
cgagucuccguccuccgug

SEQ ID NO: 1707745 - RNA, 19 nt, Artificial Sequence
  Description of Artificial Sequence: Synthetic oligonucleotide
uggaggcgaggugcagaca

SEQ ID NO: 1707746 - RNA, 19 nt, Artificial Sequence
  Description of Artificial Sequence: Synthetic oligonucleotide
ggaacgagucuccguccuc

SEQ ID NO: 1707747 - RNA, 19 nt, Artificial Sequence
  Description of Artificial Sequence: Synthetic oligonucleotide
uccggccauugcagggcuc

SEQ ID NO: 1707748 - RNA, 19 nt, Artificial Sequence
  Description of Artificial Sequence: Synthetic oligonucleotide
guagccuugguaggucacu

SEQ ID NO: 1707749 - RNA, 19 nt, Artificial Sequence
  Description of Artificial Sequence: Synthetic oligonucleotide
caggccgcugucguggcga

SEQ ID NO: 1707750 - RNA, 19 nt, Artificial Sequence
  Description of Artificial Sequence: Synthetic oligonucleotide
caacaggagcgacaccagu

SEQ ID NO: 1707751 - RNA, 19 nt, Artificial Sequence
  Description of Artificial Sequence: Synthetic oligonucleotide
gcacgucugugucaggacu

SEQ ID NO: 1707752 - RNA, 19 nt, Artificial Sequence
  Description of Artificial Sequence: Synthetic oligonucleotide
gucccgcgggcccuccaug

SEQ ID NO: 1707753 - RNA, 19 nt, Artificial Sequence
  Description of Artificial Sequence: Synthetic oligonucleotide
ggcaagauguagaggggua

SEQ ID NO: 1707754 - RNA, 19 nt, Artificial Sequence
  Description of Artificial Sequence: Synthetic oligonucleotide
cauugacaucggcacccaa

SEQ ID NO: 1707755 - RNA, 19 nt, Artificial Sequence
  Description of Artificial Sequence: Synthetic oligonucleotide
ccucguccuucauggaguc

SEQ ID NO: 1707756 - RNA, 19 nt, Artificial Sequence
  Description of Artificial Sequence: Synthetic oligonucleotide
ccggccauugcagggcucc

SEQ ID NO: 1707757 - RNA, 19 nt, Artificial Sequence
  Description of Artificial Sequence: Synthetic oligonucleotide
cuguauccggguacuuggu

SEQ ID NO: 1707758 - RNA, 19 nt, Artificial Sequence
  Description of Artificial Sequence: Synthetic oligonucleotide
cagccgcuccuucuugaga

SEQ ID NO: 1707759 - RNA, 19 nt, Artificial Sequence
  Description of Artificial Sequence: Synthetic oligonucleotide
cuccgugaauucugacucu

SEQ ID NO: 1707760 - RNA, 19 nt, Artificial Sequence
  Description of Artificial Sequence: Synthetic oligonucleotide
cucagcuaccagaucuauu

SEQ ID NO: 1707761 - RNA, 19 nt, Artificial Sequence
  Description of Artificial Sequence: Synthetic oligonucleotide
caagauguagagggguauu

SEQ ID NO: 1707762 - RNA, 19 nt, Artificial Sequence
  Description of Artificial Sequence: Synthetic oligonucleotide
gcugcgcggggcugcgugc

SEQ ID NO: 1707763 - RNA, 19 nt, Artificial Sequence
  Description of Artificial Sequence: Synthetic oligonucleotide
ccaaauacacagucaucau

SEQ ID NO: 1707764 - RNA, 19 nt, Artificial Sequence
  Description of Artificial Sequence: Synthetic oligonucleotide
gcgacaccaguucaggguu

SEQ ID NO: 1707765 - RNA, 19 nt, Artificial Sequence
  Description of Artificial Sequence: Synthetic oligonucleotide
gggaguagccuugguaggu

SEQ ID NO: 1707766 - RNA, 19 nt, Artificial Sequence
  Description of Artificial Sequence: Synthetic oligonucleotide
gugucguagcucuccucau

SEQ ID NO: 1707767 - RNA, 19 nt, Artificial Sequence
  Description of Artificial Sequence: Synthetic oligonucleotide
cgaaagucucggagcucag

SEQ ID NO: 1707768 - RNA, 19 nt, Artificial Sequence
  Description of Artificial Sequence: Synthetic oligonucleotide
gcaagauguagagggguau

SEQ ID NO: 1707769 - RNA, 19 nt, Artificial Sequence
  Description of Artificial Sequence: Synthetic oligonucleotide
ccucagucgggagugacua

SEQ ID NO: 1707770 - RNA, 19 nt, Artificial Sequence
  Description of Artificial Sequence: Synthetic oligonucleotide
gcacccaaagacaccaaau

SEQ ID NO: 1707771 - RNA, 19 nt, Artificial Sequence
  Description of Artificial Sequence: Synthetic oligonucleotide
ggcgaggugcagacacgug

SEQ ID NO: 1707772 - RNA, 19 nt, Artificial Sequence
  Description of Artificial Sequence: Synthetic oligonucleotide
ggguacuuggucggcccca

SEQ ID NO: 1707773 - RNA, 19 nt, Artificial Sequence
  Description of Artificial Sequence: Synthetic oligonucleotide
ccgcgggcccuccauggcc

SEQ ID NO: 1707774 - RNA, 19 nt, Artificial Sequence
  Description of Artificial Sequence: Synthetic oligonucleotide
aggccgcugucguggcgau

SEQ ID NO: 1707775 - RNA, 19 nt, Artificial Sequence
  Description of Artificial Sequence: Synthetic oligonucleotide
gccaagugaaguggagucu

SEQ ID NO: 1707776 - RNA, 19 nt, Artificial Sequence
  Description of Artificial Sequence: Synthetic oligonucleotide
cagucaucauagggcagcu

SEQ ID NO: 1707777 - RNA, 19 nt, Artificial Sequence
  Description of Artificial Sequence: Synthetic oligonucleotide
guccggccauugcagggcu

SEQ ID NO: 1707778 - RNA, 19 nt, Artificial Sequence
  Description of Artificial Sequence: Synthetic oligonucleotide
cgcgggcccuccauggccc

SEQ ID NO: 1707779 - RNA, 19 nt, Artificial Sequence
  Description of Artificial Sequence: Synthetic oligonucleotide
cuccuacacuggccaggca

SEQ ID NO: 1707780 - RNA, 19 nt, Artificial Sequence
  Description of Artificial Sequence: Synthetic oligonucleotide
cggggcugcgagcugcaag

SEQ ID NO: 1707781 - RNA, 19 nt, Artificial Sequence
  Description of Artificial Sequence: Synthetic oligonucleotide
cagcuaccagaucuauuuu

SEQ ID NO: 1707782 - RNA, 19 nt, Artificial Sequence
  Description of Artificial Sequence: Synthetic oligonucleotide
caauuccuggcugguuggu

SEQ ID NO: 1707783 - RNA, 19 nt, Artificial Sequence
  Description of Artificial Sequence: Synthetic oligonucleotide
ggagucugcugcagguugu

SEQ ID NO: 1707784 - RNA, 19 nt, Artificial Sequence
  Description of Artificial Sequence: Synthetic oligonucleotide
cugcgagcugcaagcugcu

SEQ ID NO: 1707785 - RNA, 19 nt, Artificial Sequence
  Description of Artificial Sequence: Synthetic oligonucleotide
cggguacuuggucggcccc

SEQ ID NO: 1707786 - RNA, 19 nt, Artificial Sequence
  Description of Artificial Sequence: Synthetic oligonucleotide
cgacaccaguucaggguuc

SEQ ID NO: 1707787 - RNA, 19 nt, Artificial Sequence
  Description of Artificial Sequence: Synthetic oligonucleotide
ccuugguaggucacucuau

SEQ ID NO: 1707788 - RNA, 19 nt, Artificial Sequence
  Description of Artificial Sequence: Synthetic oligonucleotide
guggagucugcugcagguu

SEQ ID NO: 1707789 - RNA, 19 nt, Artificial Sequence
  Description of Artificial Sequence: Synthetic oligonucleotide
cccgcgggcccuccauggc

SEQ ID NO: 1707790 - RNA, 19 nt, Artificial Sequence
  Description of Artificial Sequence: Synthetic oligonucleotide
cgaucguccaccagccgcu

SEQ ID NO: 1707791 - RNA, 19 nt, Artificial Sequence
  Description of Artificial Sequence: Synthetic oligonucleotide
cugcggcugcaggcggauc

SEQ ID NO: 1707792 - RNA, 19 nt, Artificial Sequence
  Description of Artificial Sequence: Synthetic oligonucleotide
ccgugaauucugacucugu

SEQ ID NO: 1707793 - RNA, 19 nt, Artificial Sequence
  Description of Artificial Sequence: Synthetic oligonucleotide
gcucagcuaccagaucuau

SEQ ID NO: 1707794 - RNA, 19 nt, Artificial Sequence
  Description of Artificial Sequence: Synthetic oligonucleotide
gcugcgugcggggcugcga

SEQ ID NO: 1707795 - RNA, 19 nt, Artificial Sequence
  Description of Artificial Sequence: Synthetic oligonucleotide
gagcgucccgcgggcccuc

SEQ ID NO: 1707796 - RNA, 19 nt, Artificial Sequence
  Description of Artificial Sequence: Synthetic oligonucleotide
ggucggccccaggugagcu

SEQ ID NO: 1707797 - RNA, 19 nt, Artificial Sequence
  Description of Artificial Sequence: Synthetic oligonucleotide
gcgugcggggcugcgagcu

SEQ ID NO: 1707798 - RNA, 19 nt, Artificial Sequence
  Description of Artificial Sequence: Synthetic oligonucleotide
gggcagcaucugaagauuu

SEQ ID NO: 1707799 - RNA, 19 nt, Artificial Sequence
  Description of Artificial Sequence: Synthetic oligonucleotide
cagcaauuccuggcugguu

SEQ ID NO: 1707800 - RNA, 19 nt, Artificial Sequence
  Description of Artificial Sequence: Synthetic oligonucleotide
gcuccacgaugcccaggua

SEQ ID NO: 1707801 - RNA, 19 nt, Artificial Sequence
  Description of Artificial Sequence: Synthetic oligonucleotide
guccuggccguggccggcu

SEQ ID NO: 1707802 - RNA, 19 nt, Artificial Sequence
  Description of Artificial Sequence: Synthetic oligonucleotide
ccgugagcugcugcuucca

SEQ ID NO: 1707803 - RNA, 19 nt, Artificial Sequence
  Description of Artificial Sequence: Synthetic oligonucleotide
gcuggcggcugggcggcga

SEQ ID NO: 1707804 - RNA, 19 nt, Artificial Sequence
  Description of Artificial Sequence: Synthetic oligonucleotide
cgugcggggcugcgagcug

SEQ ID NO: 1707805 - RNA, 19 nt, Artificial Sequence
  Description of Artificial Sequence: Synthetic oligonucleotide
cgcugucguggcgaucguc

SEQ ID NO: 1707806 - RNA, 19 nt, Artificial Sequence
  Description of Artificial Sequence: Synthetic oligonucleotide
gggcugcgagcugcaagcu

SEQ ID NO: 1707807 - RNA, 19 nt, Artificial Sequence
  Description of Artificial Sequence: Synthetic oligonucleotide
cugcuguauccggguacuu

SEQ ID NO: 1707808 - RNA, 19 nt, Artificial Sequence
  Description of Artificial Sequence: Synthetic oligonucleotide
gggcccuccauggcccagu

SEQ ID NO: 1707809 - RNA, 19 nt, Artificial Sequence
  Description of Artificial Sequence: Synthetic oligonucleotide
ggccgcugucguggcgauc

SEQ ID NO: 1707810 - RNA, 19 nt, Artificial Sequence
  Description of Artificial Sequence: Synthetic oligonucleotide
cggcgccuccugcggcugc

SEQ ID NO: 1707811 - RNA, 19 nt, Artificial Sequence
  Description of Artificial Sequence: Synthetic oligonucleotide
cgggagugacuagcacaua

SEQ ID NO: 1707812 - RNA, 19 nt, Artificial Sequence
  Description of Artificial Sequence: Synthetic oligonucleotide
cggccauugcagggcuccu

SEQ ID NO: 1707813 - RNA, 19 nt, Artificial Sequence
  Description of Artificial Sequence: Synthetic oligonucleotide
cggccccaggugagcugau

SEQ ID NO: 1707814 - RNA, 19 nt, Artificial Sequence
  Description of Artificial Sequence: Synthetic oligonucleotide
aauaugaugauuuucaugc

SEQ ID NO: 1707815 - RNA, 19 nt, Artificial Sequence
  Description of Artificial Sequence: Synthetic oligonucleotide
aaaguuauuagugauacuc

SEQ ID NO: 1707816 - RNA, 19 nt, Artificial Sequence
  Description of Artificial Sequence: Synthetic oligonucleotide
uaaacuuugccgaagcccg

SEQ ID NO: 1707817 - RNA, 19 nt, Artificial Sequence
  Description of Artificial Sequence: Synthetic oligonucleotide
aauagcuacugcuaauuuc

SEQ ID NO: 1707818 - RNA, 19 nt, Artificial Sequence
  Description of Artificial Sequence: Synthetic oligonucleotide
uaguaauugaggcucacgg

SEQ ID NO: 1707819 - RNA, 19 nt, Artificial Sequence
  Description of Artificial Sequence: Synthetic oligonucleotide
aaaacugauaccauuagcu

SEQ ID NO: 1707820 - RNA, 19 nt, Artificial Sequence
  Description of Artificial Sequence: Synthetic oligonucleotide
aucgguguaaucuucaauc

SEQ ID NO: 1707821 - RNA, 19 nt, Artificial Sequence
  Description of Artificial Sequence: Synthetic oligonucleotide
uuuaauauccaguaguaau

SEQ ID NO: 1707822 - RNA, 19 nt, Artificial Sequence
  Description of Artificial Sequence: Synthetic oligonucleotide
ucuuugucuaguaagauau

SEQ ID NO: 1707823 - RNA, 19 nt, Artificial Sequence
  Description of Artificial Sequence: Synthetic oligonucleotide
gauaccauuagcugcaccc

SEQ ID NO: 1707824 - RNA, 19 nt, Artificial Sequence
  Description of Artificial Sequence: Synthetic oligonucleotide
gauauuugcacuuuuaaua

SEQ ID NO: 1707825 - RNA, 19 nt, Artificial Sequence
  Description of Artificial Sequence: Synthetic oligonucleotide
aacauugaggcuccguacg

SEQ ID NO: 1707826 - RNA, 19 nt, Artificial Sequence
  Description of Artificial Sequence: Synthetic oligonucleotide
ugaggaucaauaaaaucag

SEQ ID NO: 1707827 - RNA, 19 nt, Artificial Sequence
  Description of Artificial Sequence: Synthetic oligonucleotide
ugucuaguaagauauuugc

SEQ ID NO: 1707828 - RNA, 19 nt, Artificial Sequence
  Description of Artificial Sequence: Synthetic oligonucleotide
cucaguacugauuucaacc

SEQ ID NO: 1707829 - RNA, 19 nt, Artificial Sequence
  Description of Artificial Sequence: Synthetic oligonucleotide
ugugccaagaaaguggugg

SEQ ID NO: 1707830 - RNA, 19 nt, Artificial Sequence
  Description of Artificial Sequence: Synthetic oligonucleotide
aagcauauauuaaacacag

SEQ ID NO: 1707831 - RNA, 19 nt, Artificial Sequence
  Description of Artificial Sequence: Synthetic oligonucleotide
uaugaugauuuucaugcag

SEQ ID NO: 1707832 - RNA, 19 nt, Artificial Sequence
  Description of Artificial Sequence: Synthetic oligonucleotide
ucuaauaaaaccacaccaa

SEQ ID NO: 1707833 - RNA, 19 nt, Artificial Sequence
  Description of Artificial Sequence: Synthetic oligonucleotide
uagauauccgauuugggug

SEQ ID NO: 1707834 - RNA, 19 nt, Artificial Sequence
  Description of Artificial Sequence: Synthetic oligonucleotide
aaacugauaccauuagcug

SEQ ID NO: 1707835 - RNA, 19 nt, Artificial Sequence
  Description of Artificial Sequence: Synthetic oligonucleotide
uuaguucuaauaaaaccac

SEQ ID NO: 1707836 - RNA, 19 nt, Artificial Sequence
  Description of Artificial Sequence: Synthetic oligonucleotide
aaaucagacagcuuccuaa

SEQ ID NO: 1707837 - RNA, 19 nt, Artificial Sequence
  Description of Artificial Sequence: Synthetic oligonucleotide
acaguuguguuguucacac

SEQ ID NO: 1707838 - RNA, 19 nt, Artificial Sequence
  Description of Artificial Sequence: Synthetic oligonucleotide
uguaagcauauauuaaaca

SEQ ID NO: 1707839 - RNA, 19 nt, Artificial Sequence
  Description of Artificial Sequence: Synthetic oligonucleotide
uauagauauccgauuuggg

SEQ ID NO: 1707840 - RNA, 19 nt, Artificial Sequence
  Description of Artificial Sequence: Synthetic oligonucleotide
auagauauccgauuugggu

SEQ ID NO: 1707841 - RNA, 19 nt, Artificial Sequence
  Description of Artificial Sequence: Synthetic oligonucleotide
gaauaugaugauuuucaug

SEQ ID NO: 1707842 - RNA, 19 nt, Artificial Sequence
  Description of Artificial Sequence: Synthetic oligonucleotide
agcagauaucucuuguagc

SEQ ID NO: 1707843 - RNA, 19 nt, Artificial Sequence
  Description of Artificial Sequence: Synthetic oligonucleotide
uaaugaguccaacauugag

SEQ ID NO: 1707844 - RNA, 19 nt, Artificial Sequence
  Description of Artificial Sequence: Synthetic oligonucleotide
uuaauauccaguaguaauu

SEQ ID NO: 1707845 - RNA, 19 nt, Artificial Sequence
  Description of Artificial Sequence: Synthetic oligonucleotide
auuagugauacucuucagu

SEQ ID NO: 1707846 - RNA, 19 nt, Artificial Sequence
  Description of Artificial Sequence: Synthetic oligonucleotide
auaaaaucagacagcuucc

SEQ ID NO: 1707847 - RNA, 19 nt, Artificial Sequence
  Description of Artificial Sequence: Synthetic oligonucleotide
ugagcaaucuugcaucuca

SEQ ID NO: 1707848 - RNA, 19 nt, Artificial Sequence
  Description of Artificial Sequence: Synthetic oligonucleotide
aaacugugaaaacgaguuc

SEQ ID NO: 1707849 - RNA, 19 nt, Artificial Sequence
  Description of Artificial Sequence: Synthetic oligonucleotide
ucaaucucgucuuuaauau

SEQ ID NO: 1707850 - RNA, 19 nt, Artificial Sequence
  Description of Artificial Sequence: Synthetic oligonucleotide
cuauagauauccgauuugg

SEQ ID NO: 1707851 - RNA, 19 nt, Artificial Sequence
  Description of Artificial Sequence: Synthetic oligonucleotide
gaaaacugauaccauuagc

SEQ ID NO: 1707852 - RNA, 19 nt, Artificial Sequence
  Description of Artificial Sequence: Synthetic oligonucleotide
uguuauuucuccucgcaga

SEQ ID NO: 1707853 - RNA, 19 nt, Artificial Sequence
  Description of Artificial Sequence: Synthetic oligonucleotide
ucuccuuauaugaaauuga

SEQ ID NO: 1707854 - RNA, 19 nt, Artificial Sequence
  Description of Artificial Sequence: Synthetic oligonucleotide
cagguuuucaugcugacac

SEQ ID NO: 1707855 - RNA, 19 nt, Artificial Sequence
  Description of Artificial Sequence: Synthetic oligonucleotide
uugucuaguaagauauuug

SEQ ID NO: 1707856 - RNA, 19 nt, Artificial Sequence
  Description of Artificial Sequence: Synthetic oligonucleotide
acugcuaauuucuuccauc

SEQ ID NO: 1707857 - RNA, 19 nt, Artificial Sequence
  Description of Artificial Sequence: Synthetic oligonucleotide
uuagugauacucuucaguu

SEQ ID NO: 1707858 - RNA, 19 nt, Artificial Sequence
  Description of Artificial Sequence: Synthetic oligonucleotide
ucuuuaauauccaguagua

SEQ ID NO: 1707859 - RNA, 19 nt, Artificial Sequence
  Description of Artificial Sequence: Synthetic oligonucleotide
uauauuaaacacaggucau

SEQ ID NO: 1707860 - RNA, 19 nt, Artificial Sequence
  Description of Artificial Sequence: Synthetic oligonucleotide
agaaaacugauaccauuag

SEQ ID NO: 1707861 - RNA, 19 nt, Artificial Sequence
  Description of Artificial Sequence: Synthetic oligonucleotide
uaucucuaugaauaugaug

SEQ ID NO: 1707862 - RNA, 19 nt, Artificial Sequence
  Description of Artificial Sequence: Synthetic oligonucleotide
uuaagcagauaucucuugu

SEQ ID NO: 1707863 - RNA, 19 nt, Artificial Sequence
  Description of Artificial Sequence: Synthetic oligonucleotide
aagcccagugauuaguucu

SEQ ID NO: 1707864 - RNA, 19 nt, Artificial Sequence
  Description of Artificial Sequence: Synthetic oligonucleotide
cugauuucaaccaucgcuc

SEQ ID NO: 1707865 - RNA, 19 nt, Artificial Sequence
  Description of Artificial Sequence: Synthetic oligonucleotide
gaaaacgaguucuggauca

SEQ ID NO: 1707866 - RNA, 19 nt, Artificial Sequence
  Description of Artificial Sequence: Synthetic oligonucleotide
uuuguggugccccagucga

SEQ ID NO: 1707867 - RNA, 19 nt, Artificial Sequence
  Description of Artificial Sequence: Synthetic oligonucleotide
aagaaagugguggggugcc

SEQ ID NO: 1707868 - RNA, 19 nt, Artificial Sequence
  Description of Artificial Sequence: Synthetic oligonucleotide
aaccacaccaaagcuauag

SEQ ID NO: 1707869 - RNA, 19 nt, Artificial Sequence
  Description of Artificial Sequence: Synthetic oligonucleotide
aauauccaguaguaauuga

SEQ ID NO: 1707870 - RNA, 19 nt, Artificial Sequence
  Description of Artificial Sequence: Synthetic oligonucleotide
caacaaggaaccauugggc

SEQ ID NO: 1707871 - RNA, 19 nt, Artificial Sequence
  Description of Artificial Sequence: Synthetic oligonucleotide
uuauaugaaauugauugua

SEQ ID NO: 1707872 - RNA, 19 nt, Artificial Sequence
  Description of Artificial Sequence: Synthetic oligonucleotide
accuaucaucaccagacgg

SEQ ID NO: 1707873 - RNA, 19 nt, Artificial Sequence
  Description of Artificial Sequence: Synthetic oligonucleotide
uuccuaaugaguccaacau

SEQ ID NO: 1707874 - RNA, 19 nt, Artificial Sequence
  Description of Artificial Sequence: Synthetic oligonucleotide
cugcuaauuucuuccaucc

SEQ ID NO: 1707875 - RNA, 19 nt, Artificial Sequence
  Description of Artificial Sequence: Synthetic oligonucleotide
aagccaaguagcucuacca

SEQ ID NO: 1707876 - RNA, 19 nt, Artificial Sequence
  Description of Artificial Sequence: Synthetic oligonucleotide
caugacuuuaauuucuuga

SEQ ID NO: 1707877 - RNA, 19 nt, Artificial Sequence
  Description of Artificial Sequence: Synthetic oligonucleotide
accuucguaaugucuggcc

SEQ ID NO: 1707878 - RNA, 19 nt, Artificial Sequence
  Description of Artificial Sequence: Synthetic oligonucleotide
uguaccuaucaucaccaga

SEQ ID NO: 1707879 - RNA, 19 nt, Artificial Sequence
  Description of Artificial Sequence: Synthetic oligonucleotide
aucucaugugccaagaaag

SEQ ID NO: 1707880 - RNA, 19 nt, Artificial Sequence
  Description of Artificial Sequence: Synthetic oligonucleotide
ucgucuuuaauauccagua

SEQ ID NO: 1707881 - RNA, 19 nt, Artificial Sequence
  Description of Artificial Sequence: Synthetic oligonucleotide
auauuaaacacaggucauc

SEQ ID NO: 1707882 - RNA, 19 nt, Artificial Sequence
  Description of Artificial Sequence: Synthetic oligonucleotide
agauauuugcacuuuuaau

SEQ ID NO: 1707883 - RNA, 19 nt, Artificial Sequence
  Description of Artificial Sequence: Synthetic oligonucleotide
ugaaaacgaguucuggauc

SEQ ID NO: 1707884 - RNA, 19 nt, Artificial Sequence
  Description of Artificial Sequence: Synthetic oligonucleotide
guaaacuuugccgaagccc

SEQ ID NO: 1707885 - RNA, 19 nt, Artificial Sequence
  Description of Artificial Sequence: Synthetic oligonucleotide
auauccaguaguaauugag

SEQ ID NO: 1707886 - RNA, 19 nt, Artificial Sequence
  Description of Artificial Sequence: Synthetic oligonucleotide
guaccuaucaucaccagac

SEQ ID NO: 1707887 - RNA, 19 nt, Artificial Sequence
  Description of Artificial Sequence: Synthetic oligonucleotide
uuuaguuccucaguacuga

SEQ ID NO: 1707888 - RNA, 19 nt, Artificial Sequence
  Description of Artificial Sequence: Synthetic oligonucleotide
aucgcuucaacagaagcag

SEQ ID NO: 1707889 - RNA, 19 nt, Artificial Sequence
  Description of Artificial Sequence: Synthetic oligonucleotide
ccuaaugaguccaacauug

SEQ ID NO: 1707890 - RNA, 19 nt, Artificial Sequence
  Description of Artificial Sequence: Synthetic oligonucleotide
agauauccgauuugggugu

SEQ ID NO: 1707891 - RNA, 19 nt, Artificial Sequence
  Description of Artificial Sequence: Synthetic oligonucleotide
uuuaauagcuacugcuaau

SEQ ID NO: 1707892 - RNA, 19 nt, Artificial Sequence
  Description of Artificial Sequence: Synthetic oligonucleotide
uaguucuaauaaaaccaca

SEQ ID NO: 1707893 - RNA, 19 nt, Artificial Sequence
  Description of Artificial Sequence: Synthetic oligonucleotide
aauucggcucgucauuacu

SEQ ID NO: 1707894 - RNA, 19 nt, Artificial Sequence
  Description of Artificial Sequence: Synthetic oligonucleotide
ucuugaggaucaauaaaau

SEQ ID NO: 1707895 - RNA, 19 nt, Artificial Sequence
  Description of Artificial Sequence: Synthetic oligonucleotide
ugggcauguaagcauauau

SEQ ID NO: 1707896 - RNA, 19 nt, Artificial Sequence
  Description of Artificial Sequence: Synthetic oligonucleotide
aaguuauuagugauacucu

SEQ ID NO: 1707897 - RNA, 19 nt, Artificial Sequence
  Description of Artificial Sequence: Synthetic oligonucleotide
cucgcuuucugcacaaggc

SEQ ID NO: 1707898 - RNA, 19 nt, Artificial Sequence
  Description of Artificial Sequence: Synthetic oligonucleotide
guacugauuucaaccaucg

SEQ ID NO: 1707899 - RNA, 19 nt, Artificial Sequence
  Description of Artificial Sequence: Synthetic oligonucleotide
cucgucauuacugucuggg

SEQ ID NO: 1707900 - RNA, 19 nt, Artificial Sequence
  Description of Artificial Sequence: Synthetic oligonucleotide
aacaggucgcucgucaaag

SEQ ID NO: 1707901 - RNA, 19 nt, Artificial Sequence
  Description of Artificial Sequence: Synthetic oligonucleotide
aguaauugaggcucacggu

SEQ ID NO: 1707902 - RNA, 19 nt, Artificial Sequence
  Description of Artificial Sequence: Synthetic oligonucleotide
aaagugguggggugccauc

SEQ ID NO: 1707903 - RNA, 19 nt, Artificial Sequence
  Description of Artificial Sequence: Synthetic oligonucleotide
aguacugauuucaaccauc

SEQ ID NO: 1707904 - RNA, 19 nt, Artificial Sequence
  Description of Artificial Sequence: Synthetic oligonucleotide
gauacucuucaguucauaa

SEQ ID NO: 1707905 - RNA, 19 nt, Artificial Sequence
  Description of Artificial Sequence: Synthetic oligonucleotide
ucacugucgcuugagaagc

SEQ ID NO: 1707906 - RNA, 19 nt, Artificial Sequence
  Description of Artificial Sequence: Synthetic oligonucleotide
gacacugacuagcugcagc

SEQ ID NO: 1707907 - RNA, 19 nt, Artificial Sequence
  Description of Artificial Sequence: Synthetic oligonucleotide
auccaagcaggauagucug

SEQ ID NO: 1707908 - RNA, 19 nt, Artificial Sequence
  Description of Artificial Sequence: Synthetic oligonucleotide
ucagaagauccacaagguc

SEQ ID NO: 1707909 - RNA, 19 nt, Artificial Sequence
  Description of Artificial Sequence: Synthetic oligonucleotide
agcuguugaaccuucguaa

SEQ ID NO: 1707910 - RNA, 19 nt, Artificial Sequence
  Description of Artificial Sequence: Synthetic oligonucleotide
ugauuucaaccaucgcucc

SEQ ID NO: 1707911 - RNA, 19 nt, Artificial Sequence
  Description of Artificial Sequence: Synthetic oligonucleotide
aguuauuagugauacucuu

SEQ ID NO: 1707912 - RNA, 19 nt, Artificial Sequence
  Description of Artificial Sequence: Synthetic oligonucleotide
uccguacguauguggaugg

SEQ ID NO: 1707913 - RNA, 19 nt, Artificial Sequence
  Description of Artificial Sequence: Synthetic oligonucleotide
gaagccaaguagcucuacc

SEQ ID NO: 1707914 - RNA, 19 nt, Artificial Sequence
  Description of Artificial Sequence: Synthetic oligonucleotide
ugaauaugaugauuuucau

SEQ ID NO: 1707915 - RNA, 19 nt, Artificial Sequence
  Description of Artificial Sequence: Synthetic oligonucleotide
agcuauagauauccgauuu

SEQ ID NO: 1707916 - RNA, 19 nt, Artificial Sequence
  Description of Artificial Sequence: Synthetic oligonucleotide
ucuugcaucucaugugcca

SEQ ID NO: 1707917 - RNA, 19 nt, Artificial Sequence
  Description of Artificial Sequence: Synthetic oligonucleotide
aggcuuguucaucuucuac

SEQ ID NO: 1707918 - RNA, 19 nt, Artificial Sequence
  Description of Artificial Sequence: Synthetic oligonucleotide
agccaaguagcucuaccag

SEQ ID NO: 1707919 - RNA, 19 nt, Artificial Sequence
  Description of Artificial Sequence: Synthetic oligonucleotide
uguguuguucacacagccu

SEQ ID NO: 1707920 - RNA, 19 nt, Artificial Sequence
  Description of Artificial Sequence: Synthetic oligonucleotide
uccucucugacgucccucg

SEQ ID NO: 1707921 - RNA, 19 nt, Artificial Sequence
  Description of Artificial Sequence: Synthetic oligonucleotide
aagccucccucucccauuc

SEQ ID NO: 1707922 - RNA, 19 nt, Artificial Sequence
  Description of Artificial Sequence: Synthetic oligonucleotide
guuuguggugccccagucg

SEQ ID NO: 1707923 - RNA, 19 nt, Artificial Sequence
  Description of Artificial Sequence: Synthetic oligonucleotide
cuaauaaaaccacaccaaa

SEQ ID NO: 1707924 - RNA, 19 nt, Artificial Sequence
  Description of Artificial Sequence: Synthetic oligonucleotide
ugucgcuugagaagccaag

SEQ ID NO: 1707925 - RNA, 19 nt, Artificial Sequence
  Description of Artificial Sequence: Synthetic oligonucleotide
aguaaagucuuugucuagu

SEQ ID NO: 1707926 - RNA, 19 nt, Artificial Sequence
  Description of Artificial Sequence: Synthetic oligonucleotide
aguuuguggugccccaguc

SEQ ID NO: 1707927 - RNA, 19 nt, Artificial Sequence
  Description of Artificial Sequence: Synthetic oligonucleotide
ucuaccagguuuucaugcu

SEQ ID NO: 1707928 - RNA, 19 nt, Artificial Sequence
  Description of Artificial Sequence: Synthetic oligonucleotide
uuucugcacaaggcgaccg

SEQ ID NO: 1707929 - RNA, 19 nt, Artificial Sequence
  Description of Artificial Sequence: Synthetic oligonucleotide
auuguaccuaucaucacca

SEQ ID NO: 1707930 - RNA, 19 nt, Artificial Sequence
  Description of Artificial Sequence: Synthetic oligonucleotide
ugaggcuccguacguaugu

SEQ ID NO: 1707931 - RNA, 19 nt, Artificial Sequence
  Description of Artificial Sequence: Synthetic oligonucleotide
aagcuauagauauccgauu

SEQ ID NO: 1707932 - RNA, 19 nt, Artificial Sequence
  Description of Artificial Sequence: Synthetic oligonucleotide
uuccucaguacugauuuca

SEQ ID NO: 1707933 - RNA, 19 nt, Artificial Sequence
  Description of Artificial Sequence: Synthetic oligonucleotide
guguuauuucuccucgcag

SEQ ID NO: 1707934 - RNA, 19 nt, Artificial Sequence
  Description of Artificial Sequence: Synthetic oligonucleotide
uucugcacaaggcgaccgg

SEQ ID NO: 1707935 - RNA, 19 nt, Artificial Sequence
  Description of Artificial Sequence: Synthetic oligonucleotide
uucaaucgucuucucuuca

SEQ ID NO: 1707936 - RNA, 19 nt, Artificial Sequence
  Description of Artificial Sequence: Synthetic oligonucleotide
aaccaucgcuccaagcuuc

SEQ ID NO: 1707937 - RNA, 19 nt, Artificial Sequence
  Description of Artificial Sequence: Synthetic oligonucleotide
gugauuaguucuaauaaaa

SEQ ID NO: 1707938 - RNA, 19 nt, Artificial Sequence
  Description of Artificial Sequence: Synthetic oligonucleotide
auaugaugauuuucaugca

SEQ ID NO: 1707939 - RNA, 19 nt, Artificial Sequence
  Description of Artificial Sequence: Synthetic oligonucleotide
uccuuauaugaaauugauu

SEQ ID NO: 1707940 - RNA, 19 nt, Artificial Sequence
  Description of Artificial Sequence: Synthetic oligonucleotide
cagugauuaguucuaauaa

SEQ ID NO: 1707941 - RNA, 19 nt, Artificial Sequence
  Description of Artificial Sequence: Synthetic oligonucleotide
ccuaucaucaccagacggc

SEQ ID NO: 1707942 - RNA, 19 nt, Artificial Sequence
  Description of Artificial Sequence: Synthetic oligonucleotide
uaauugaggcucacgguuu

SEQ ID NO: 1707943 - RNA, 19 nt, Artificial Sequence
  Description of Artificial Sequence: Synthetic oligonucleotide
guaguaauugaggcucacg

SEQ ID NO: 1707944 - RNA, 19 nt, Artificial Sequence
  Description of Artificial Sequence: Synthetic oligonucleotide
aguccaacauugaggcucc

SEQ ID NO: 1707945 - RNA, 19 nt, Artificial Sequence
  Description of Artificial Sequence: Synthetic oligonucleotide
uggcaguaaagucuuuguc

SEQ ID NO: 1707946 - RNA, 19 nt, Artificial Sequence
  Description of Artificial Sequence: Synthetic oligonucleotide
guuauuagugauacucuuc

SEQ ID NO: 1707947 - RNA, 19 nt, Artificial Sequence
  Description of Artificial Sequence: Synthetic oligonucleotide
cauacaucgcuucaacaga

SEQ ID NO: 1707948 - RNA, 19 nt, Artificial Sequence
  Description of Artificial Sequence: Synthetic oligonucleotide
caacauugaggcuccguac

SEQ ID NO: 1707949 - RNA, 19 nt, Artificial Sequence
  Description of Artificial Sequence: Synthetic oligonucleotide
acuuugccgaagcccgggc

SEQ ID NO: 1707950 - RNA, 19 nt, Artificial Sequence
  Description of Artificial Sequence: Synthetic oligonucleotide
agcauacaucgcuucaaca

SEQ ID NO: 1707951 - RNA, 19 nt, Artificial Sequence
  Description of Artificial Sequence: Synthetic oligonucleotide
ugcuaauuucuuccauccu

SEQ ID NO: 1707952 - RNA, 19 nt, Artificial Sequence
  Description of Artificial Sequence: Synthetic oligonucleotide
cacaggucaucacugucgc

SEQ ID NO: 1707953 - RNA, 19 nt, Artificial Sequence
  Description of Artificial Sequence: Synthetic oligonucleotide
cuuccuaaugaguccaaca

SEQ ID NO: 1707954 - RNA, 19 nt, Artificial Sequence
  Description of Artificial Sequence: Synthetic oligonucleotide
caagaaagugguggggugc

SEQ ID NO: 1707955 - RNA, 19 nt, Artificial Sequence
  Description of Artificial Sequence: Synthetic oligonucleotide
aacgaguucuggaucagaa

SEQ ID NO: 1707956 - RNA, 19 nt, Artificial Sequence
  Description of Artificial Sequence: Synthetic oligonucleotide
cuucguaaugucuggccuc

SEQ ID NO: 1707957 - RNA, 19 nt, Artificial Sequence
  Description of Artificial Sequence: Synthetic oligonucleotide
caaggaaccauugggcaug

SEQ ID NO: 1707958 - RNA, 19 nt, Artificial Sequence
  Description of Artificial Sequence: Synthetic oligonucleotide
cugugaaaacgaguucugg

SEQ ID NO: 1707959 - RNA, 19 nt, Artificial Sequence
  Description of Artificial Sequence: Synthetic oligonucleotide
uucggcucgucauuacugu

SEQ ID NO: 1707960 - RNA, 19 nt, Artificial Sequence
  Description of Artificial Sequence: Synthetic oligonucleotide
gauuucaaccaucgcucca

SEQ ID NO: 1707961 - RNA, 19 nt, Artificial Sequence
  Description of Artificial Sequence: Synthetic oligonucleotide
ucaaucgucuucucuucau

SEQ ID NO: 1707962 - RNA, 19 nt, Artificial Sequence
  Description of Artificial Sequence: Synthetic oligonucleotide
uaagccguugugcccacaa

SEQ ID NO: 1707963 - RNA, 19 nt, Artificial Sequence
  Description of Artificial Sequence: Synthetic oligonucleotide
agggucaguaucauucauc

SEQ ID NO: 1707964 - RNA, 19 nt, Artificial Sequence
  Description of Artificial Sequence: Synthetic oligonucleotide
caagcaggauagucugucc

SEQ ID NO: 1707965 - RNA, 19 nt, Artificial Sequence
  Description of Artificial Sequence: Synthetic oligonucleotide
uggguaaacuuugccgaag

SEQ ID NO: 1707966 - RNA, 19 nt, Artificial Sequence
  Description of Artificial Sequence: Synthetic oligonucleotide
aaggcgaccggcgccccgc

SEQ ID NO: 1707967 - RNA, 19 nt, Artificial Sequence
  Description of Artificial Sequence: Synthetic oligonucleotide
gguguaaucuucaaucguc

SEQ ID NO: 1707968 - RNA, 19 nt, Artificial Sequence
  Description of Artificial Sequence: Synthetic oligonucleotide
aaacuuugccgaagcccgg

SEQ ID NO: 1707969 - RNA, 19 nt, Artificial Sequence
  Description of Artificial Sequence: Synthetic oligonucleotide
uucguaaugucuggccucu

SEQ ID NO: 1707970 - RNA, 19 nt, Artificial Sequence
  Description of Artificial Sequence: Synthetic oligonucleotide
uuguaccuaucaucaccag

SEQ ID NO: 1707971 - RNA, 19 nt, Artificial Sequence
  Description of Artificial Sequence: Synthetic oligonucleotide
ucgcucgucaaaguuauua

SEQ ID NO: 1707972 - RNA, 19 nt, Artificial Sequence
  Description of Artificial Sequence: Synthetic oligonucleotide
gcuugagaagccaaguagc

SEQ ID NO: 1707973 - RNA, 19 nt, Artificial Sequence
  Description of Artificial Sequence: Synthetic oligonucleotide
guaauugaggcucacgguu

SEQ ID NO: 1707974 - RNA, 19 nt, Artificial Sequence
  Description of Artificial Sequence: Synthetic oligonucleotide
ggaguaaggcuucaaaucu

SEQ ID NO: 1707975 - RNA, 19 nt, Artificial Sequence
  Description of Artificial Sequence: Synthetic oligonucleotide
uccucaguacugauuucaa

SEQ ID NO: 1707976 - RNA, 19 nt, Artificial Sequence
  Description of Artificial Sequence: Synthetic oligonucleotide
gcuauagauauccgauuug

SEQ ID NO: 1707977 - RNA, 19 nt, Artificial Sequence
  Description of Artificial Sequence: Synthetic oligonucleotide
uggugccccagucgaacag

SEQ ID NO: 1707978 - RNA, 19 nt, Artificial Sequence
  Description of Artificial Sequence: Synthetic oligonucleotide
aguaagauauuugcacuuu

SEQ ID NO: 1707979 - RNA, 19 nt, Artificial Sequence
  Description of Artificial Sequence: Synthetic oligonucleotide
cauucuguugccacccaca

SEQ ID NO: 1707980 - RNA, 19 nt, Artificial Sequence
  Description of Artificial Sequence: Synthetic oligonucleotide
uugaggcuccguacguaug

SEQ ID NO: 1707981 - RNA, 19 nt, Artificial Sequence
  Description of Artificial Sequence: Synthetic oligonucleotide
ucugcacaaggcgaccggc

SEQ ID NO: 1707982 - RNA, 19 nt, Artificial Sequence
  Description of Artificial Sequence: Synthetic oligonucleotide
gucuaguaagauauuugca

SEQ ID NO: 1707983 - RNA, 19 nt, Artificial Sequence
  Description of Artificial Sequence: Synthetic oligonucleotide
gugaaaacgaguucuggau

SEQ ID NO: 1707984 - RNA, 19 nt, Artificial Sequence
  Description of Artificial Sequence: Synthetic oligonucleotide
caaucucgucuuuaauauc

SEQ ID NO: 1707985 - RNA, 19 nt, Artificial Sequence
  Description of Artificial Sequence: Synthetic oligonucleotide
cagucgaacagcagcucac

SEQ ID NO: 1707986 - RNA, 19 nt, Artificial Sequence
  Description of Artificial Sequence: Synthetic oligonucleotide
guuguguuguucacacagc

SEQ ID NO: 1707987 - RNA, 19 nt, Artificial Sequence
  Description of Artificial Sequence: Synthetic oligonucleotide
auucggcucgucauuacug

SEQ ID NO: 1707988 - RNA, 19 nt, Artificial Sequence
  Description of Artificial Sequence: Synthetic oligonucleotide
acugugaaaacgaguucug

SEQ ID NO: 1707989 - RNA, 19 nt, Artificial Sequence
  Description of Artificial Sequence: Synthetic oligonucleotide
ucaucgguguaaucuucaa

SEQ ID NO: 1707990 - RNA, 19 nt, Artificial Sequence
  Description of Artificial Sequence: Synthetic oligonucleotide
cacacagccuuuguacacc

SEQ ID NO: 1707991 - RNA, 19 nt, Artificial Sequence
  Description of Artificial Sequence: Synthetic oligonucleotide
ugcaucucaugugccaaga

SEQ ID NO: 1707992 - RNA, 19 nt, Artificial Sequence
  Description of Artificial Sequence: Synthetic oligonucleotide
cuaaugaguccaacauuga

SEQ ID NO: 1707993 - RNA, 19 nt, Artificial Sequence
  Description of Artificial Sequence: Synthetic oligonucleotide
guuguucacacagccuuug

SEQ ID NO: 1707994 - RNA, 19 nt, Artificial Sequence
  Description of Artificial Sequence: Synthetic oligonucleotide
gucuuugucuaguaagaua

SEQ ID NO: 1707995 - RNA, 19 nt, Artificial Sequence
  Description of Artificial Sequence: Synthetic oligonucleotide
caucgcuccaagcuucuuc

SEQ ID NO: 1707996 - RNA, 19 nt, Artificial Sequence
  Description of Artificial Sequence: Synthetic oligonucleotide
cuccguacguauguggaug

SEQ ID NO: 1707997 - RNA, 19 nt, Artificial Sequence
  Description of Artificial Sequence: Synthetic oligonucleotide
uacguauguggaugguguc

SEQ ID NO: 1707998 - RNA, 19 nt, Artificial Sequence
  Description of Artificial Sequence: Synthetic oligonucleotide
caucacugucgcuugagaa

SEQ ID NO: 1707999 - RNA, 19 nt, Artificial Sequence
  Description of Artificial Sequence: Synthetic oligonucleotide
cacgguuuucauccacagc

SEQ ID NO: 1708000 - RNA, 19 nt, Artificial Sequence
  Description of Artificial Sequence: Synthetic oligonucleotide
auaccauuagcugcacccu

SEQ ID NO: 1708001 - RNA, 19 nt, Artificial Sequence
  Description of Artificial Sequence: Synthetic oligonucleotide
agccguugugcccacaauu

SEQ ID NO: 1708002 - RNA, 19 nt, Artificial Sequence
  Description of Artificial Sequence: Synthetic oligonucleotide
uauccgauuuggguguuau

SEQ ID NO: 1708003 - RNA, 19 nt, Artificial Sequence
  Description of Artificial Sequence: Synthetic oligonucleotide
ucccgcgaggacucgggag

SEQ ID NO: 1708004 - RNA, 19 nt, Artificial Sequence
  Description of Artificial Sequence: Synthetic oligonucleotide
cuuuaauauccaguaguaa

SEQ ID NO: 1708005 - RNA, 19 nt, Artificial Sequence
  Description of Artificial Sequence: Synthetic oligonucleotide
guaaagucuuugucuagua

SEQ ID NO: 1708006 - RNA, 19 nt, Artificial Sequence
  Description of Artificial Sequence: Synthetic oligonucleotide
acgucccucgcuuucugca

SEQ ID NO: 1708007 - RNA, 19 nt, Artificial Sequence
  Description of Artificial Sequence: Synthetic oligonucleotide
cucaucgguguaaucuuca

SEQ ID NO: 1708008 - RNA, 19 nt, Artificial Sequence
  Description of Artificial Sequence: Synthetic oligonucleotide
auacaucgcuucaacagaa

SEQ ID NO: 1708009 - RNA, 19 nt, Artificial Sequence
  Description of Artificial Sequence: Synthetic oligonucleotide
gguggggugccauccaagc

SEQ ID NO: 1708010 - RNA, 19 nt, Artificial Sequence
  Description of Artificial Sequence: Synthetic oligonucleotide
cucgucuuuaauauccagu

SEQ ID NO: 1708011 - RNA, 19 nt, Artificial Sequence
  Description of Artificial Sequence: Synthetic oligonucleotide
acguauguggaugguguca

SEQ ID NO: 1708012 - RNA, 19 nt, Artificial Sequence
  Description of Artificial Sequence: Synthetic oligonucleotide
ugaguccaacauugaggcu

SEQ ID NO: 1708013 - RNA, 19 nt, Artificial Sequence
  Description of Artificial Sequence: Synthetic oligonucleotide
cuacugcuaauuucuucca

SEQ ID NO: 1708014 - RNA, 19 nt, Artificial Sequence
  Description of Artificial Sequence: Synthetic oligonucleotide
caauucggcucgucauuac

SEQ ID NO: 1708015 - RNA, 19 nt, Artificial Sequence
  Description of Artificial Sequence: Synthetic oligonucleotide
caugugccaagaaaguggu

SEQ ID NO: 1708016 - RNA, 19 nt, Artificial Sequence
  Description of Artificial Sequence: Synthetic oligonucleotide
gacgucccucgcuuucugc

SEQ ID NO: 1708017 - RNA, 19 nt, Artificial Sequence
  Description of Artificial Sequence: Synthetic oligonucleotide
uugugcccacaauucggcu

SEQ ID NO: 1708018 - RNA, 19 nt, Artificial Sequence
  Description of Artificial Sequence: Synthetic oligonucleotide
cacguggggcuuuucccag

SEQ ID NO: 1708019 - RNA, 19 nt, Artificial Sequence
  Description of Artificial Sequence: Synthetic oligonucleotide
caggauagucuguccaaca

SEQ ID NO: 1708020 - RNA, 19 nt, Artificial Sequence
  Description of Artificial Sequence: Synthetic oligonucleotide
cauugggcauguaagcaua

SEQ ID NO: 1708021 - RNA, 19 nt, Artificial Sequence
  Description of Artificial Sequence: Synthetic oligonucleotide
ugauacucuucaguucaua

SEQ ID NO: 1708022 - RNA, 19 nt, Artificial Sequence
  Description of Artificial Sequence: Synthetic oligonucleotide
uccaacauugaggcuccgu

SEQ ID NO: 1708023 - RNA, 19 nt, Artificial Sequence
  Description of Artificial Sequence: Synthetic oligonucleotide
cguugugcccacaauucgg

SEQ ID NO: 1708024 - RNA, 19 nt, Artificial Sequence
  Description of Artificial Sequence: Synthetic oligonucleotide
gccccagucgaacagcagc

SEQ ID NO: 1708025 - RNA, 19 nt, Artificial Sequence
  Description of Artificial Sequence: Synthetic oligonucleotide
cauucaucuucucaucggu

SEQ ID NO: 1708026 - RNA, 19 nt, Artificial Sequence
  Description of Artificial Sequence: Synthetic oligonucleotide
guacguauguggauggugu

SEQ ID NO: 1708027 - RNA, 19 nt, Artificial Sequence
  Description of Artificial Sequence: Synthetic oligonucleotide
cacaaggcgaccggcgccc

SEQ ID NO: 1708028 - RNA, 19 nt, Artificial Sequence
  Description of Artificial Sequence: Synthetic oligonucleotide
acaggucgcucgucaaagu

SEQ ID NO: 1708029 - RNA, 19 nt, Artificial Sequence
  Description of Artificial Sequence: Synthetic oligonucleotide
aggcuucaaaucuccuuau

SEQ ID NO: 1708030 - RNA, 19 nt, Artificial Sequence
  Description of Artificial Sequence: Synthetic oligonucleotide
acaauucggcucgucauua

SEQ ID NO: 1708031 - RNA, 19 nt, Artificial Sequence
  Description of Artificial Sequence: Synthetic oligonucleotide
cuccuuauaugaaauugau

SEQ ID NO: 1708032 - RNA, 19 nt, Artificial Sequence
  Description of Artificial Sequence: Synthetic oligonucleotide
agucgaacagcagcucaca

SEQ ID NO: 1708033 - RNA, 19 nt, Artificial Sequence
  Description of Artificial Sequence: Synthetic oligonucleotide
ccucgcuuucugcacaagg

SEQ ID NO: 1708034 - RNA, 19 nt, Artificial Sequence
  Description of Artificial Sequence: Synthetic oligonucleotide
aagccguugugcccacaau

SEQ ID NO: 1708035 - RNA, 19 nt, Artificial Sequence
  Description of Artificial Sequence: Synthetic oligonucleotide
cacuuugccaugacuuuaa

SEQ ID NO: 1708036 - RNA, 19 nt, Artificial Sequence
  Description of Artificial Sequence: Synthetic oligonucleotide
gauggugucagaggcuugu

SEQ ID NO: 1708037 - RNA, 19 nt, Artificial Sequence
  Description of Artificial Sequence: Synthetic oligonucleotide
ugacuagcugcagcauaca

SEQ ID NO: 1708038 - RNA, 19 nt, Artificial Sequence
  Description of Artificial Sequence: Synthetic oligonucleotide
acugucgcuugagaagcca

SEQ ID NO: 1708039 - RNA, 19 nt, Artificial Sequence
  Description of Artificial Sequence: Synthetic oligonucleotide
gcuucaaaucuccuuauau

SEQ ID NO: 1708040 - RNA, 19 nt, Artificial Sequence
  Description of Artificial Sequence: Synthetic oligonucleotide
ccagugauuaguucuaaua

SEQ ID NO: 1708041 - RNA, 19 nt, Artificial Sequence
  Description of Artificial Sequence: Synthetic oligonucleotide
cacugucgcuugagaagcc

SEQ ID NO: 1708042 - RNA, 19 nt, Artificial Sequence
  Description of Artificial Sequence: Synthetic oligonucleotide
ucggcucgucauuacuguc

SEQ ID NO: 1708043 - RNA, 19 nt, Artificial Sequence
  Description of Artificial Sequence: Synthetic oligonucleotide
agacagcuuccuaaugagu

SEQ ID NO: 1708044 - RNA, 19 nt, Artificial Sequence
  Description of Artificial Sequence: Synthetic oligonucleotide
cugcaagcccagugauuag

SEQ ID NO: 1708045 - RNA, 19 nt, Artificial Sequence
  Description of Artificial Sequence: Synthetic oligonucleotide
cuugcaucucaugugccaa

SEQ ID NO: 1708046 - RNA, 19 nt, Artificial Sequence
  Description of Artificial Sequence: Synthetic oligonucleotide
cacaguuguguuguucaca

SEQ ID NO: 1708047 - RNA, 19 nt, Artificial Sequence
  Description of Artificial Sequence: Synthetic oligonucleotide
gcauguaagcauauauuaa

SEQ ID NO: 1708048 - RNA, 19 nt, Artificial Sequence
  Description of Artificial Sequence: Synthetic oligonucleotide
ccgauuuggguguuauuuc

SEQ ID NO: 1708049 - RNA, 19 nt, Artificial Sequence
  Description of Artificial Sequence: Synthetic oligonucleotide
guguaaucuucaaucgucu

SEQ ID NO: 1708050 - RNA, 19 nt, Artificial Sequence
  Description of Artificial Sequence: Synthetic oligonucleotide
ccguugugcccacaauucg

SEQ ID NO: 1708051 - RNA, 19 nt, Artificial Sequence
  Description of Artificial Sequence: Synthetic oligonucleotide
cauuacugucuggguaaac

SEQ ID NO: 1708052 - RNA, 19 nt, Artificial Sequence
  Description of Artificial Sequence: Synthetic oligonucleotide
ccuucuugaggaucaauaa

SEQ ID NO: 1708053 - RNA, 19 nt, Artificial Sequence
  Description of Artificial Sequence: Synthetic oligonucleotide
cuaucaucaccagacggcu

SEQ ID NO: 1708054 - RNA, 19 nt, Artificial Sequence
  Description of Artificial Sequence: Synthetic oligonucleotide
gaggcuccguacguaugug

SEQ ID NO: 1708055 - RNA, 19 nt, Artificial Sequence
  Description of Artificial Sequence: Synthetic oligonucleotide
cgcucgucaaaguuauuag

SEQ ID NO: 1708056 - RNA, 19 nt, Artificial Sequence
  Description of Artificial Sequence: Synthetic oligonucleotide
aguuuggaguaaggcuuca

SEQ ID NO: 1708057 - RNA, 19 nt, Artificial Sequence
  Description of Artificial Sequence: Synthetic oligonucleotide
ccucaguacugauuucaac

SEQ ID NO: 1708058 - RNA, 19 nt, Artificial Sequence
  Description of Artificial Sequence: Synthetic oligonucleotide
cccgcgaggacucgggagg

SEQ ID NO: 1708059 - RNA, 19 nt, Artificial Sequence
  Description of Artificial Sequence: Synthetic oligonucleotide
cuggguaaacuuugccgaa

SEQ ID NO: 1708060 - RNA, 19 nt, Artificial Sequence
  Description of Artificial Sequence: Synthetic oligonucleotide
cuuugccgaagcccgggca

SEQ ID NO: 1708061 - RNA, 19 nt, Artificial Sequence
  Description of Artificial Sequence: Synthetic oligonucleotide
cagcuguugaaccuucgua

SEQ ID NO: 1708062 - RNA, 19 nt, Artificial Sequence
  Description of Artificial Sequence: Synthetic oligonucleotide
ucccucgcuuucugcacaa

SEQ ID NO: 1708063 - RNA, 19 nt, Artificial Sequence
  Description of Artificial Sequence: Synthetic oligonucleotide
gaggcuuguucaucuucua

SEQ ID NO: 1708064 - RNA, 19 nt, Artificial Sequence
  Description of Artificial Sequence: Synthetic oligonucleotide
uugggcauguaagcauaua

SEQ ID NO: 1708065 - RNA, 19 nt, Artificial Sequence
  Description of Artificial Sequence: Synthetic oligonucleotide
cguauguggauggugucag

SEQ ID NO: 1708066 - RNA, 19 nt, Artificial Sequence
  Description of Artificial Sequence: Synthetic oligonucleotide
acaaggcgaccggcgcccc

SEQ ID NO: 1708067 - RNA, 19 nt, Artificial Sequence
  Description of Artificial Sequence: Synthetic oligonucleotide
aggucgcucgucaaaguua

SEQ ID NO: 1708068 - RNA, 19 nt, Artificial Sequence
  Description of Artificial Sequence: Synthetic oligonucleotide
gcacccugagcaaucuugc

SEQ ID NO: 1708069 - RNA, 19 nt, Artificial Sequence
  Description of Artificial Sequence: Synthetic oligonucleotide
gucccucgcuuucugcaca

SEQ ID NO: 1708070 - RNA, 19 nt, Artificial Sequence
  Description of Artificial Sequence: Synthetic oligonucleotide
cugucgcuugagaagccaa

SEQ ID NO: 1708071 - RNA, 19 nt, Artificial Sequence
  Description of Artificial Sequence: Synthetic oligonucleotide
cugauaccauuagcugcac

SEQ ID NO: 1708072 - RNA, 19 nt, Artificial Sequence
  Description of Artificial Sequence: Synthetic oligonucleotide
cugacacuuugccaugacu

SEQ ID NO: 1708073 - RNA, 19 nt, Artificial Sequence
  Description of Artificial Sequence: Synthetic oligonucleotide
gcucgucaaaguuauuagu

SEQ ID NO: 1708074 - RNA, 19 nt, Artificial Sequence
  Description of Artificial Sequence: Synthetic oligonucleotide
gccguugugcccacaauuc

SEQ ID NO: 1708075 - RNA, 19 nt, Artificial Sequence
  Description of Artificial Sequence: Synthetic oligonucleotide
auccgauuuggguguuauu

SEQ ID NO: 1708076 - RNA, 19 nt, Artificial Sequence
  Description of Artificial Sequence: Synthetic oligonucleotide
cacccugagcaaucuugca

SEQ ID NO: 1708077 - RNA, 19 nt, Artificial Sequence
  Description of Artificial Sequence: Synthetic oligonucleotide
caaggcgaccggcgccccg

SEQ ID NO: 1708078 - RNA, 19 nt, Artificial Sequence
  Description of Artificial Sequence: Synthetic oligonucleotide
gaaagugguggggugccau

SEQ ID NO: 1708079 - RNA, 19 nt, Artificial Sequence
  Description of Artificial Sequence: Synthetic oligonucleotide
gcucacgguuuucauccac

SEQ ID NO: 1708080 - RNA, 19 nt, Artificial Sequence
  Description of Artificial Sequence: Synthetic oligonucleotide
ggugccccagucgaacagc

SEQ ID NO: 1708081 - RNA, 19 nt, Artificial Sequence
  Description of Artificial Sequence: Synthetic oligonucleotide
caguuguguuguucacaca

SEQ ID NO: 1708082 - RNA, 19 nt, Artificial Sequence
  Description of Artificial Sequence: Synthetic oligonucleotide
guuuggaguaaggcuucaa

SEQ ID NO: 1708083 - RNA, 19 nt, Artificial Sequence
  Description of Artificial Sequence: Synthetic oligonucleotide
ccauucuguugccacccac

SEQ ID NO: 1708084 - RNA, 19 nt, Artificial Sequence
  Description of Artificial Sequence: Synthetic oligonucleotide
gcuuccuaaugaguccaac

SEQ ID NO: 1708085 - RNA, 19 nt, Artificial Sequence
  Description of Artificial Sequence: Synthetic oligonucleotide
cccacaauucggcucguca

SEQ ID NO: 1708086 - RNA, 19 nt, Artificial Sequence
  Description of Artificial Sequence: Synthetic oligonucleotide
gagaagccaaguagcucua

SEQ ID NO: 1708087 - RNA, 19 nt, Artificial Sequence
  Description of Artificial Sequence: Synthetic oligonucleotide
augugccaagaaaguggug

SEQ ID NO: 1708088 - RNA, 19 nt, Artificial Sequence
  Description of Artificial Sequence: Synthetic oligonucleotide
caucgguguaaucuucaau

SEQ ID NO: 1708089 - RNA, 19 nt, Artificial Sequence
  Description of Artificial Sequence: Synthetic oligonucleotide
aaaccacaccaaagcuaua

SEQ ID NO: 1708090 - RNA, 19 nt, Artificial Sequence
  Description of Artificial Sequence: Synthetic oligonucleotide
ccagucgaacagcagcuca

SEQ ID NO: 1708091 - RNA, 19 nt, Artificial Sequence
  Description of Artificial Sequence: Synthetic oligonucleotide
ggucccgcgaggacucggg

SEQ ID NO: 1708092 - RNA, 19 nt, Artificial Sequence
  Description of Artificial Sequence: Synthetic oligonucleotide
cguacguauguggauggug

SEQ ID NO: 1708093 - RNA, 19 nt, Artificial Sequence
  Description of Artificial Sequence: Synthetic oligonucleotide
accaucgcuccaagcuucu

SEQ ID NO: 1708094 - RNA, 19 nt, Artificial Sequence
  Description of Artificial Sequence: Synthetic oligonucleotide
cuguccaacaaggaaccau

SEQ ID NO: 1708095 - RNA, 19 nt, Artificial Sequence
  Description of Artificial Sequence: Synthetic oligonucleotide
cuuugucuaguaagauauu

SEQ ID NO: 1708096 - RNA, 19 nt, Artificial Sequence
  Description of Artificial Sequence: Synthetic oligonucleotide
cacaauucggcucgucauu

SEQ ID NO: 1708097 - RNA, 19 nt, Artificial Sequence
  Description of Artificial Sequence: Synthetic oligonucleotide
ggcuucaaaucuccuuaua

SEQ ID NO: 1708098 - RNA, 19 nt, Artificial Sequence
  Description of Artificial Sequence: Synthetic oligonucleotide
gguuuucaugcugacacuu

SEQ ID NO: 1708099 - RNA, 19 nt, Artificial Sequence
  Description of Artificial Sequence: Synthetic oligonucleotide
caaccaucgcuccaagcuu

SEQ ID NO: 1708100 - RNA, 19 nt, Artificial Sequence
  Description of Artificial Sequence: Synthetic oligonucleotide
cccgccacggucccgcgag

SEQ ID NO: 1708101 - RNA, 19 nt, Artificial Sequence
  Description of Artificial Sequence: Synthetic oligonucleotide
auauccgauuuggguguua

SEQ ID NO: 1708102 - RNA, 19 nt, Artificial Sequence
  Description of Artificial Sequence: Synthetic oligonucleotide
gagcaaucuugcaucucau

SEQ ID NO: 1708103 - RNA, 19 nt, Artificial Sequence
  Description of Artificial Sequence: Synthetic oligonucleotide
ccuucguaaugucuggccu

SEQ ID NO: 1708104 - RNA, 19 nt, Artificial Sequence
  Description of Artificial Sequence: Synthetic oligonucleotide
guccaacauugaggcuccg

SEQ ID NO: 1708105 - RNA, 19 nt, Artificial Sequence
  Description of Artificial Sequence: Synthetic oligonucleotide
gaccggcgccccgccacgg

SEQ ID NO: 1708106 - RNA, 19 nt, Artificial Sequence
  Description of Artificial Sequence: Synthetic oligonucleotide
caggucgcucgucaaaguu

SEQ ID NO: 1708107 - RNA, 19 nt, Artificial Sequence
  Description of Artificial Sequence: Synthetic oligonucleotide
ggucgcucgucaaaguuau

SEQ ID NO: 1708108 - RNA, 19 nt, Artificial Sequence
  Description of Artificial Sequence: Synthetic oligonucleotide
gggcauguaagcauauauu

SEQ ID NO: 1708109 - RNA, 19 nt, Artificial Sequence
  Description of Artificial Sequence: Synthetic oligonucleotide
gagcuucaggugccauaua

SEQ ID NO: 1708110 - RNA, 19 nt, Artificial Sequence
  Description of Artificial Sequence: Synthetic oligonucleotide
gucccgcgaggacucggga

SEQ ID NO: 1708111 - RNA, 19 nt, Artificial Sequence
  Description of Artificial Sequence: Synthetic oligonucleotide
cgaggacucgggaggggag

SEQ ID NO: 1708112 - RNA, 19 nt, Artificial Sequence
  Description of Artificial Sequence: Synthetic oligonucleotide
cgaagcccgggcaagucca

SEQ ID NO: 1708113 - RNA, 19 nt, Artificial Sequence
  Description of Artificial Sequence: Synthetic oligonucleotide
acggucccgcgaggacucg

SEQ ID NO: 1708114 - RNA, 19 nt, Artificial Sequence
  Description of Artificial Sequence: Synthetic oligonucleotide
gcgaccggcgccccgccac

SEQ ID NO: 1708115 - RNA, 19 nt, Artificial Sequence
  Description of Artificial Sequence: Synthetic oligonucleotide
ucguaaugucuggccucuu

SEQ ID NO: 1708116 - RNA, 19 nt, Artificial Sequence
  Description of Artificial Sequence: Synthetic oligonucleotide
ggcucacgguuuucaucca

SEQ ID NO: 1708117 - RNA, 19 nt, Artificial Sequence
  Description of Artificial Sequence: Synthetic oligonucleotide
gauauccgauuuggguguu

SEQ ID NO: 1708118 - RNA, 19 nt, Artificial Sequence
  Description of Artificial Sequence: Synthetic oligonucleotide
ccacaauucggcucgucau

SEQ ID NO: 1708119 - RNA, 19 nt, Artificial Sequence
  Description of Artificial Sequence: Synthetic oligonucleotide
cgucccucgcuuucugcac

SEQ ID NO: 1708120 - RNA, 19 nt, Artificial Sequence
  Description of Artificial Sequence: Synthetic oligonucleotide
gccacggucccgcgaggac

SEQ ID NO: 1708121 - RNA, 19 nt, Artificial Sequence
  Description of Artificial Sequence: Synthetic oligonucleotide
ugcccacaauucggcucgu

SEQ ID NO: 1708122 - RNA, 19 nt, Artificial Sequence
  Description of Artificial Sequence: Synthetic oligonucleotide
cagcugcaagcccagugau

SEQ ID NO: 1708123 - RNA, 19 nt, Artificial Sequence
  Description of Artificial Sequence: Synthetic oligonucleotide
cauccuucuugaggaucaa

SEQ ID NO: 1708124 - RNA, 19 nt, Artificial Sequence
  Description of Artificial Sequence: Synthetic oligonucleotide
ccccagucgaacagcagcu

SEQ ID NO: 1708125 - RNA, 19 nt, Artificial Sequence
  Description of Artificial Sequence: Synthetic oligonucleotide
cguaaugucuggccucuua

SEQ ID NO: 1708126 - RNA, 19 nt, Artificial Sequence
  Description of Artificial Sequence: Synthetic oligonucleotide
gcuccguacguauguggau

SEQ ID NO: 1708127 - RNA, 19 nt, Artificial Sequence
  Description of Artificial Sequence: Synthetic oligonucleotide
cccagucgaacagcagcuc

SEQ ID NO: 1708128 - RNA, 19 nt, Artificial Sequence
  Description of Artificial Sequence: Synthetic oligonucleotide
cgguguaaucuucaaucgu

SEQ ID NO: 1708129 - RNA, 19 nt, Artificial Sequence
  Description of Artificial Sequence: Synthetic oligonucleotide
gcaagcccagugauuaguu

SEQ ID NO: 1708130 - RNA, 19 nt, Artificial Sequence
  Description of Artificial Sequence: Synthetic oligonucleotide
cacugacuagcugcagcau

SEQ ID NO: 1708131 - RNA, 19 nt, Artificial Sequence
  Description of Artificial Sequence: Synthetic oligonucleotide
cggcucgucauuacugucu

SEQ ID NO: 1708132 - RNA, 19 nt, Artificial Sequence
  Description of Artificial Sequence: Synthetic oligonucleotide
cgaccggcgccccgccacg

SEQ ID NO: 1708133 - RNA, 19 nt, Artificial Sequence
  Description of Artificial Sequence: Synthetic oligonucleotide
cccucgcuuucugcacaag

SEQ ID NO: 1708134 - RNA, 19 nt, Artificial Sequence
  Description of Artificial Sequence: Synthetic oligonucleotide
ggucaccaacugugcaguu

SEQ ID NO: 1708135 - RNA, 19 nt, Artificial Sequence
  Description of Artificial Sequence: Synthetic oligonucleotide
ccgccacggucccgcgagg

SEQ ID NO: 1708136 - RNA, 19 nt, Artificial Sequence
  Description of Artificial Sequence: Synthetic oligonucleotide
gcccacaauucggcucguc

SEQ ID NO: 1708137 - RNA, 19 nt, Artificial Sequence
  Description of Artificial Sequence: Synthetic oligonucleotide
ggcgaccggcgccccgcca

SEQ ID NO: 1708138 - RNA, 19 nt, Artificial Sequence
  Description of Artificial Sequence: Synthetic oligonucleotide
cggucccgcgaggacucgg

SEQ ID NO: 1708139 - RNA, 19 nt, Artificial Sequence
  Description of Artificial Sequence: Synthetic oligonucleotide
gccauccaagcaggauagu

SEQ ID NO: 1708140 - RNA, 19 nt, Artificial Sequence
  Description of Artificial Sequence: Synthetic oligonucleotide
cugccacaguuguguuguu

SEQ ID NO: 1708141 - RNA, 19 nt, Artificial Sequence
  Description of Artificial Sequence: Synthetic oligonucleotide
gucgcucgucaaaguuauu

SEQ ID NO: 1708142 - RNA, 19 nt, Artificial Sequence
  Description of Artificial Sequence: Synthetic oligonucleotide
ccguacguauguggauggu

SEQ ID NO: 1708143 - RNA, 19 nt, Artificial Sequence
  Description of Artificial Sequence: Synthetic oligonucleotide
gaugauuaagauauggugg

SEQ ID NO: 1708144 - RNA, 19 nt, Artificial Sequence
  Description of Artificial Sequence: Synthetic oligonucleotide
acaagcuccacucagugac

SEQ ID NO: 1708145 - RNA, 19 nt, Artificial Sequence
  Description of Artificial Sequence: Synthetic oligonucleotide
gauacuguaucccagccag

SEQ ID NO: 1708146 - RNA, 19 nt, Artificial Sequence
  Description of Artificial Sequence: Synthetic oligonucleotide
agaugauuaagauauggug

SEQ ID NO: 1708147 - RNA, 19 nt, Artificial Sequence
  Description of Artificial Sequence: Synthetic oligonucleotide
agcuacagggcccugagcc

SEQ ID NO: 1708148 - RNA, 19 nt, Artificial Sequence
  Description of Artificial Sequence: Synthetic oligonucleotide
uaugguggcacuaagcaca

SEQ ID NO: 1708149 - RNA, 19 nt, Artificial Sequence
  Description of Artificial Sequence: Synthetic oligonucleotide
uagagagcuagaaucaucc

SEQ ID NO: 1708150 - RNA, 19 nt, Artificial Sequence
  Description of Artificial Sequence: Synthetic oligonucleotide
uuuaggugguccuugcugg

SEQ ID NO: 1708151 - RNA, 19 nt, Artificial Sequence
  Description of Artificial Sequence: Synthetic oligonucleotide
cucggugggaccuagaggg

SEQ ID NO: 1708152 - RNA, 19 nt, Artificial Sequence
  Description of Artificial Sequence: Synthetic oligonucleotide
ucagaugauuaagauaugg

SEQ ID NO: 1708153 - RNA, 19 nt, Artificial Sequence
  Description of Artificial Sequence: Synthetic oligonucleotide
acccuagagagcuagaauc

SEQ ID NO: 1708154 - RNA, 19 nt, Artificial Sequence
  Description of Artificial Sequence: Synthetic oligonucleotide
aauagcccuguucuggccg

SEQ ID NO: 1708155 - RNA, 19 nt, Artificial Sequence
  Description of Artificial Sequence: Synthetic oligonucleotide
aucagugucagccccacac

SEQ ID NO: 1708156 - RNA, 19 nt, Artificial Sequence
  Description of Artificial Sequence: Synthetic oligonucleotide
gacacaguccuuaaagugg

SEQ ID NO: 1708157 - RNA, 19 nt, Artificial Sequence
  Description of Artificial Sequence: Synthetic oligonucleotide
uuuggugcuuccucgaucc

SEQ ID NO: 1708158 - RNA, 19 nt, Artificial Sequence
  Description of Artificial Sequence: Synthetic oligonucleotide
uacacuguggaccugggac

SEQ ID NO: 1708159 - RNA, 19 nt, Artificial Sequence
  Description of Artificial Sequence: Synthetic oligonucleotide
uucuacagugcccagugcc

SEQ ID NO: 1708160 - RNA, 19 nt, Artificial Sequence
  Description of Artificial Sequence: Synthetic oligonucleotide
uauucgagguaucucaggu

SEQ ID NO: 1708161 - RNA, 19 nt, Artificial Sequence
  Description of Artificial Sequence: Synthetic oligonucleotide
uguucuacagugcccagug

SEQ ID NO: 1708162 - RNA, 19 nt, Artificial Sequence
  Description of Artificial Sequence: Synthetic oligonucleotide
gaauacuucagcauccagc

SEQ ID NO: 1708163 - RNA, 19 nt, Artificial Sequence
  Description of Artificial Sequence: Synthetic oligonucleotide
cuuguauacacgugggagc

SEQ ID NO: 1708164 - RNA, 19 nt, Artificial Sequence
  Description of Artificial Sequence: Synthetic oligonucleotide
acuggauccugauuucucg

SEQ ID NO: 1708165 - RNA, 19 nt, Artificial Sequence
  Description of Artificial Sequence: Synthetic oligonucleotide
auaugguggcacuaagcac

SEQ ID NO: 1708166 - RNA, 19 nt, Artificial Sequence
  Description of Artificial Sequence: Synthetic oligonucleotide
gagagcuagaaucauccug

SEQ ID NO: 1708167 - RNA, 19 nt, Artificial Sequence
  Description of Artificial Sequence: Synthetic oligonucleotide
aaagucuugccacgggucu

SEQ ID NO: 1708168 - RNA, 19 nt, Artificial Sequence
  Description of Artificial Sequence: Synthetic oligonucleotide
aguuacucccucuuuaggu

SEQ ID NO: 1708169 - RNA, 19 nt, Artificial Sequence
  Description of Artificial Sequence: Synthetic oligonucleotide
ggugcuuguauacacgugg

SEQ ID NO: 1708170 - RNA, 19 nt, Artificial Sequence
  Description of Artificial Sequence: Synthetic oligonucleotide
aagauaugguggcacuaag

SEQ ID NO: 1708171 - RNA, 19 nt, Artificial Sequence
  Description of Artificial Sequence: Synthetic oligonucleotide
ucuugugacugacacaguc

SEQ ID NO: 1708172 - RNA, 19 nt, Artificial Sequence
  Description of Artificial Sequence: Synthetic oligonucleotide
gguaucucagguuuggugc

SEQ ID NO: 1708173 - RNA, 19 nt, Artificial Sequence
  Description of Artificial Sequence: Synthetic oligonucleotide
aggcgcaucagugucagcc

SEQ ID NO: 1708174 - RNA, 19 nt, Artificial Sequence
  Description of Artificial Sequence: Synthetic oligonucleotide
aguaccuuggcacccucac

SEQ ID NO: 1708175 - RNA, 19 nt, Artificial Sequence
  Description of Artificial Sequence: Synthetic oligonucleotide
uuacucccucuuuaggugg

SEQ ID NO: 1708176 - RNA, 19 nt, Artificial Sequence
  Description of Artificial Sequence: Synthetic oligonucleotide
auagcggucagccuggcga

SEQ ID NO: 1708177 - RNA, 19 nt, Artificial Sequence
  Description of Artificial Sequence: Synthetic oligonucleotide
aucucucucagacagggcu

SEQ ID NO: 1708178 - RNA, 19 nt, Artificial Sequence
  Description of Artificial Sequence: Synthetic oligonucleotide
acaacuccccacaagcucc

SEQ ID NO: 1708179 - RNA, 19 nt, Artificial Sequence
  Description of Artificial Sequence: Synthetic oligonucleotide
agaagcaucaccccucacu

SEQ ID NO: 1708180 - RNA, 19 nt, Artificial Sequence
  Description of Artificial Sequence: Synthetic oligonucleotide
ugugcgcuguucuacagug

SEQ ID NO: 1708181 - RNA, 19 nt, Artificial Sequence
  Description of Artificial Sequence: Synthetic oligonucleotide
ugguguucccaacaagaag

SEQ ID NO: 1708182 - RNA, 19 nt, Artificial Sequence
  Description of Artificial Sequence: Synthetic oligonucleotide
cuugugacugacacagucc

SEQ ID NO: 1708183 - RNA, 19 nt, Artificial Sequence
  Description of Artificial Sequence: Synthetic oligonucleotide
ugcgcuguucuacagugcc

SEQ ID NO: 1708184 - RNA, 19 nt, Artificial Sequence
  Description of Artificial Sequence: Synthetic oligonucleotide
agaucucucucagacaggg

SEQ ID NO: 1708185 - RNA, 19 nt, Artificial Sequence
  Description of Artificial Sequence: Synthetic oligonucleotide
auuaagauaugguggcacu

SEQ ID NO: 1708186 - RNA, 19 nt, Artificial Sequence
  Description of Artificial Sequence: Synthetic oligonucleotide
agagggacccucaauaggg

SEQ ID NO: 1708187 - RNA, 19 nt, Artificial Sequence
  Description of Artificial Sequence: Synthetic oligonucleotide
uguucagaugauuaagaua

SEQ ID NO: 1708188 - RNA, 19 nt, Artificial Sequence
  Description of Artificial Sequence: Synthetic oligonucleotide
cuugccacgggucuguggc

SEQ ID NO: 1708189 - RNA, 19 nt, Artificial Sequence
  Description of Artificial Sequence: Synthetic oligonucleotide
gauuaagauaugguggcac

SEQ ID NO: 1708190 - RNA, 19 nt, Artificial Sequence
  Description of Artificial Sequence: Synthetic oligonucleotide
ucagugucagccccacacg

SEQ ID NO: 1708191 - RNA, 19 nt, Artificial Sequence
  Description of Artificial Sequence: Synthetic oligonucleotide
uucgagguaucucagguuu

SEQ ID NO: 1708192 - RNA, 19 nt, Artificial Sequence
  Description of Artificial Sequence: Synthetic oligonucleotide
agaccccagugucacaggc

SEQ ID NO: 1708193 - RNA, 19 nt, Artificial Sequence
  Description of Artificial Sequence: Synthetic oligonucleotide
gcagaucucucucagacag

SEQ ID NO: 1708194 - RNA, 19 nt, Artificial Sequence
  Description of Artificial Sequence: Synthetic oligonucleotide
cuuuaggugguccuugcug

SEQ ID NO: 1708195 - RNA, 19 nt, Artificial Sequence
  Description of Artificial Sequence: Synthetic oligonucleotide
ucuacagugcccagugcca

SEQ ID NO: 1708196 - RNA, 19 nt, Artificial Sequence
  Description of Artificial Sequence: Synthetic oligonucleotide
gaguuacucccucuuuagg

SEQ ID NO: 1708197 - RNA, 19 nt, Artificial Sequence
  Description of Artificial Sequence: Synthetic oligonucleotide
agagcuagaaucauccugu

SEQ ID NO: 1708198 - RNA, 19 nt, Artificial Sequence
  Description of Artificial Sequence: Synthetic oligonucleotide
uuaaaguggggaguuacuc

SEQ ID NO: 1708199 - RNA, 19 nt, Artificial Sequence
  Description of Artificial Sequence: Synthetic oligonucleotide
uuccuuuaucuugugacug

SEQ ID NO: 1708200 - RNA, 19 nt, Artificial Sequence
  Description of Artificial Sequence: Synthetic oligonucleotide
agaugcaugagcagcacag

SEQ ID NO: 1708201 - RNA, 19 nt, Artificial Sequence
  Description of Artificial Sequence: Synthetic oligonucleotide
uuguauacacgugggagca

SEQ ID NO: 1708202 - RNA, 19 nt, Artificial Sequence
  Description of Artificial Sequence: Synthetic oligonucleotide
uggaaagucuugccacggg

SEQ ID NO: 1708203 - RNA, 19 nt, Artificial Sequence
  Description of Artificial Sequence: Synthetic oligonucleotide
cuagagggacccucaauag

SEQ ID NO: 1708204 - RNA, 19 nt, Artificial Sequence
  Description of Artificial Sequence: Synthetic oligonucleotide
ucagaagcggguguccagg

SEQ ID NO: 1708205 - RNA, 19 nt, Artificial Sequence
  Description of Artificial Sequence: Synthetic oligonucleotide
agucagacccuagagagcu

SEQ ID NO: 1708206 - RNA, 19 nt, Artificial Sequence
  Description of Artificial Sequence: Synthetic oligonucleotide
cagguuuggugcuuccucg

SEQ ID NO: 1708207 - RNA, 19 nt, Artificial Sequence
  Description of Artificial Sequence: Synthetic oligonucleotide
cacuauucgagguaucuca

SEQ ID NO: 1708208 - RNA, 19 nt, Artificial Sequence
  Description of Artificial Sequence: Synthetic oligonucleotide
uggggauacuguaucccag

SEQ ID NO: 1708209 - RNA, 19 nt, Artificial Sequence
  Description of Artificial Sequence: Synthetic oligonucleotide
auauggacugggcccacuc

SEQ ID NO: 1708210 - RNA, 19 nt, Artificial Sequence
  Description of Artificial Sequence: Synthetic oligonucleotide
ucagugaccuuccuuuauc

SEQ ID NO: 1708211 - RNA, 19 nt, Artificial Sequence
  Description of Artificial Sequence: Synthetic oligonucleotide
uugucaggagcccauggaa

SEQ ID NO: 1708212 - RNA, 19 nt, Artificial Sequence
  Description of Artificial Sequence: Synthetic oligonucleotide
gucaggagcccauggaaag

SEQ ID NO: 1708213 - RNA, 19 nt, Artificial Sequence
  Description of Artificial Sequence: Synthetic oligonucleotide
ugcaggugcuuguauacac

SEQ ID NO: 1708214 - RNA, 19 nt, Artificial Sequence
  Description of Artificial Sequence: Synthetic oligonucleotide
ucagacccuagagagcuag

SEQ ID NO: 1708215 - RNA, 19 nt, Artificial Sequence
  Description of Artificial Sequence: Synthetic oligonucleotide
uugguguucccaacaagaa

SEQ ID NO: 1708216 - RNA, 19 nt, Artificial Sequence
  Description of Artificial Sequence: Synthetic oligonucleotide
agggagguagaccucgcag

SEQ ID NO: 1708217 - RNA, 19 nt, Artificial Sequence
  Description of Artificial Sequence: Synthetic oligonucleotide
uggcgauauggacugggcc

SEQ ID NO: 1708218 - RNA, 19 nt, Artificial Sequence
  Description of Artificial Sequence: Synthetic oligonucleotide
aaggccucuuccugaagcu

SEQ ID NO: 1708219 - RNA, 19 nt, Artificial Sequence
  Description of Artificial Sequence: Synthetic oligonucleotide
agcccauggaaagucuugc

SEQ ID NO: 1708220 - RNA, 19 nt, Artificial Sequence
  Description of Artificial Sequence: Synthetic oligonucleotide
uccuuuaucuugugacuga

SEQ ID NO: 1708221 - RNA, 19 nt, Artificial Sequence
  Description of Artificial Sequence: Synthetic oligonucleotide
cauguggggcccauaguag

SEQ ID NO: 1708222 - RNA, 19 nt, Artificial Sequence
  Description of Artificial Sequence: Synthetic oligonucleotide
uauacacgugggagcagcc

SEQ ID NO: 1708223 - RNA, 19 nt, Artificial Sequence
  Description of Artificial Sequence: Synthetic oligonucleotide
guggcuugcgccguggugg

SEQ ID NO: 1708224 - RNA, 19 nt, Artificial Sequence
  Description of Artificial Sequence: Synthetic oligonucleotide
ggcgauauggacugggccc

SEQ ID NO: 1708225 - RNA, 19 nt, Artificial Sequence
  Description of Artificial Sequence: Synthetic oligonucleotide
uucagaugauuaagauaug

SEQ ID NO: 1708226 - RNA, 19 nt, Artificial Sequence
  Description of Artificial Sequence: Synthetic oligonucleotide
cuagagagcuagaaucauc

SEQ ID NO: 1708227 - RNA, 19 nt, Artificial Sequence
  Description of Artificial Sequence: Synthetic oligonucleotide
ucucagacagggcuacacu

SEQ ID NO: 1708228 - RNA, 19 nt, Artificial Sequence
  Description of Artificial Sequence: Synthetic oligonucleotide
gacagggcuacacugugga

SEQ ID NO: 1708229 - RNA, 19 nt, Artificial Sequence
  Description of Artificial Sequence: Synthetic oligonucleotide
cagggcuacacuguggacc

SEQ ID NO: 1708230 - RNA, 19 nt, Artificial Sequence
  Description of Artificial Sequence: Synthetic oligonucleotide
ugcuuguauacacguggga

SEQ ID NO: 1708231 - RNA, 19 nt, Artificial Sequence
  Description of Artificial Sequence: Synthetic oligonucleotide
cuagaccccagugucacag

SEQ ID NO: 1708232 - RNA, 19 nt, Artificial Sequence
  Description of Artificial Sequence: Synthetic oligonucleotide
aggcuuuauuugguguucc

SEQ ID NO: 1708233 - RNA, 19 nt, Artificial Sequence
  Description of Artificial Sequence: Synthetic oligonucleotide
cccaaugaagccauagcgg

SEQ ID NO: 1708234 - RNA, 19 nt, Artificial Sequence
  Description of Artificial Sequence: Synthetic oligonucleotide
agaccucgcagaucugcac

SEQ ID NO: 1708235 - RNA, 19 nt, Artificial Sequence
  Description of Artificial Sequence: Synthetic oligonucleotide
gcuuguauacacgugggag

SEQ ID NO: 1708236 - RNA, 19 nt, Artificial Sequence
  Description of Artificial Sequence: Synthetic oligonucleotide
auggggauacuguauccca

SEQ ID NO: 1708237 - RNA, 19 nt, Artificial Sequence
  Description of Artificial Sequence: Synthetic oligonucleotide
ucgauccccugccagcugc

SEQ ID NO: 1708238 - RNA, 19 nt, Artificial Sequence
  Description of Artificial Sequence: Synthetic oligonucleotide
agcgggugaagagacacag

SEQ ID NO: 1708239 - RNA, 19 nt, Artificial Sequence
  Description of Artificial Sequence: Synthetic oligonucleotide
agggcuacacuguggaccu

SEQ ID NO: 1708240 - RNA, 19 nt, Artificial Sequence
  Description of Artificial Sequence: Synthetic oligonucleotide
ucaccccucacuccuucag

SEQ ID NO: 1708241 - RNA, 19 nt, Artificial Sequence
  Description of Artificial Sequence: Synthetic oligonucleotide
agccuggcgauauggacug

SEQ ID NO: 1708242 - RNA, 19 nt, Artificial Sequence
  Description of Artificial Sequence: Synthetic oligonucleotide
uauggacugggcccacuca

SEQ ID NO: 1708243 - RNA, 19 nt, Artificial Sequence
  Description of Artificial Sequence: Synthetic oligonucleotide
ugauuaagauaugguggca

SEQ ID NO: 1708244 - RNA, 19 nt, Artificial Sequence
  Description of Artificial Sequence: Synthetic oligonucleotide
acacggaacaguaccuugg

SEQ ID NO: 1708245 - RNA, 19 nt, Artificial Sequence
  Description of Artificial Sequence: Synthetic oligonucleotide
gucuccaagagcccugggc

SEQ ID NO: 1708246 - RNA, 19 nt, Artificial Sequence
  Description of Artificial Sequence: Synthetic oligonucleotide
uagaccucgcagaucugca

SEQ ID NO: 1708247 - RNA, 19 nt, Artificial Sequence
  Description of Artificial Sequence: Synthetic oligonucleotide
ucuuuaggugguccuugcu

SEQ ID NO: 1708248 - RNA, 19 nt, Artificial Sequence
  Description of Artificial Sequence: Synthetic oligonucleotide
ugcaccacuauucgaggua

SEQ ID NO: 1708249 - RNA, 19 nt, Artificial Sequence
  Description of Artificial Sequence: Synthetic oligonucleotide
cagguaccagacaacuccc

SEQ ID NO: 1708250 - RNA, 19 nt, Artificial Sequence
  Description of Artificial Sequence: Synthetic oligonucleotide
acuguaucccagccagaag

SEQ ID NO: 1708251 - RNA, 19 nt, Artificial Sequence
  Description of Artificial Sequence: Synthetic oligonucleotide
ggcaauagcccuguucugg

SEQ ID NO: 1708252 - RNA, 19 nt, Artificial Sequence
  Description of Artificial Sequence: Synthetic oligonucleotide
uccugauuucucguugcag

SEQ ID NO: 1708253 - RNA, 19 nt, Artificial Sequence
  Description of Artificial Sequence: Synthetic oligonucleotide
uuaagauaugguggcacua

SEQ ID NO: 1708254 - RNA, 19 nt, Artificial Sequence
  Description of Artificial Sequence: Synthetic oligonucleotide
acuauucgagguaucucag

SEQ ID NO: 1708255 - RNA, 19 nt, Artificial Sequence
  Description of Artificial Sequence: Synthetic oligonucleotide
agggccaugaauacuucag

SEQ ID NO: 1708256 - RNA, 19 nt, Artificial Sequence
  Description of Artificial Sequence: Synthetic oligonucleotide
acugcacacucagaagcgg

SEQ ID NO: 1708257 - RNA, 19 nt, Artificial Sequence
  Description of Artificial Sequence: Synthetic oligonucleotide
ucgagguaucucagguuug

SEQ ID NO: 1708258 - RNA, 19 nt, Artificial Sequence
  Description of Artificial Sequence: Synthetic oligonucleotide
gaaagucuugccacggguc

SEQ ID NO: 1708259 - RNA, 19 nt, Artificial Sequence
  Description of Artificial Sequence: Synthetic oligonucleotide
aguccuuaaaguggggagu

SEQ ID NO: 1708260 - RNA, 19 nt, Artificial Sequence
  Description of Artificial Sequence: Synthetic oligonucleotide
uuaggugguccuugcuggc

SEQ ID NO: 1708261 - RNA, 19 nt, Artificial Sequence
  Description of Artificial Sequence: Synthetic oligonucleotide
ucucagccaggcuuuauuu

SEQ ID NO: 1708262 - RNA, 19 nt, Artificial Sequence
  Description of Artificial Sequence: Synthetic oligonucleotide
uucucagccaggcuuuauu

SEQ ID NO: 1708263 - RNA, 19 nt, Artificial Sequence
  Description of Artificial Sequence: Synthetic oligonucleotide
ugggccaacuggauccuga

SEQ ID NO: 1708264 - RNA, 19 nt, Artificial Sequence
  Description of Artificial Sequence: Synthetic oligonucleotide
accacuauucgagguaucu

SEQ ID NO: 1708265 - RNA, 19 nt, Artificial Sequence
  Description of Artificial Sequence: Synthetic oligonucleotide
uguggcuugcgccguggug

SEQ ID NO: 1708266 - RNA, 19 nt, Artificial Sequence
  Description of Artificial Sequence: Synthetic oligonucleotide
cuggcaauagcccuguucu

SEQ ID NO: 1708267 - RNA, 19 nt, Artificial Sequence
  Description of Artificial Sequence: Synthetic oligonucleotide
accccucacuccuucagug

SEQ ID NO: 1708268 - RNA, 19 nt, Artificial Sequence
  Description of Artificial Sequence: Synthetic oligonucleotide
uccucgauccccugccagc

SEQ ID NO: 1708269 - RNA, 19 nt, Artificial Sequence
  Description of Artificial Sequence: Synthetic oligonucleotide
agcgagcgggugaagagac

SEQ ID NO: 1708270 - RNA, 19 nt, Artificial Sequence
  Description of Artificial Sequence: Synthetic oligonucleotide
gugcuuguauacacguggg

SEQ ID NO: 1708271 - RNA, 19 nt, Artificial Sequence
  Description of Artificial Sequence: Synthetic oligonucleotide
agccagaagcaucaccccu

SEQ ID NO: 1708272 - RNA, 19 nt, Artificial Sequence
  Description of Artificial Sequence: Synthetic oligonucleotide
agagagcuagaaucauccu

SEQ ID NO: 1708273 - RNA, 19 nt, Artificial Sequence
  Description of Artificial Sequence: Synthetic oligonucleotide
caugaaggccucuuccuga

SEQ ID NO: 1708274 - RNA, 19 nt, Artificial Sequence
  Description of Artificial Sequence: Synthetic oligonucleotide
acaguccuuaaagugggga

SEQ ID NO: 1708275 - RNA, 19 nt, Artificial Sequence
  Description of Artificial Sequence: Synthetic oligonucleotide
acucagcuccgagucagac

SEQ ID NO: 1708276 - RNA, 19 nt, Artificial Sequence
  Description of Artificial Sequence: Synthetic oligonucleotide
augcugugcgcuguucuac

SEQ ID NO: 1708277 - RNA, 19 nt, Artificial Sequence
  Description of Artificial Sequence: Synthetic oligonucleotide
ggcacccucacugaggaag

SEQ ID NO: 1708278 - RNA, 19 nt, Artificial Sequence
  Description of Artificial Sequence: Synthetic oligonucleotide
auacacgugggagcagccg

SEQ ID NO: 1708279 - RNA, 19 nt, Artificial Sequence
  Description of Artificial Sequence: Synthetic oligonucleotide
ggguccaacgcccaccugc

SEQ ID NO: 1708280 - RNA, 19 nt, Artificial Sequence
  Description of Artificial Sequence: Synthetic oligonucleotide
cuggcgauauggacugggc

SEQ ID NO: 1708281 - RNA, 19 nt, Artificial Sequence
  Description of Artificial Sequence: Synthetic oligonucleotide
gccgguacagaguguaggg

SEQ ID NO: 1708282 - RNA, 19 nt, Artificial Sequence
  Description of Artificial Sequence: Synthetic oligonucleotide
caauagcccuguucuggcc

SEQ ID NO: 1708283 - RNA, 19 nt, Artificial Sequence
  Description of Artificial Sequence: Synthetic oligonucleotide
acacucagaagcggguguc

SEQ ID NO: 1708284 - RNA, 19 nt, Artificial Sequence
  Description of Artificial Sequence: Synthetic oligonucleotide
uagcucugauggcaacacc

SEQ ID NO: 1708285 - RNA, 19 nt, Artificial Sequence
  Description of Artificial Sequence: Synthetic oligonucleotide
ggauccugauuucucguug

SEQ ID NO: 1708286 - RNA, 19 nt, Artificial Sequence
  Description of Artificial Sequence: Synthetic oligonucleotide
gacaugaaggccucuuccu

SEQ ID NO: 1708287 - RNA, 19 nt, Artificial Sequence
  Description of Artificial Sequence: Synthetic oligonucleotide
ggcugcaccacuauucgag

SEQ ID NO: 1708288 - RNA, 19 nt, Artificial Sequence
  Description of Artificial Sequence: Synthetic oligonucleotide
gagggacccucaauagggg

SEQ ID NO: 1708289 - RNA, 19 nt, Artificial Sequence
  Description of Artificial Sequence: Synthetic oligonucleotide
aagcuccacucagugaccu

SEQ ID NO: 1708290 - RNA, 19 nt, Artificial Sequence
  Description of Artificial Sequence: Synthetic oligonucleotide
ggggcugcaccacuauucg

SEQ ID NO: 1708291 - RNA, 19 nt, Artificial Sequence
  Description of Artificial Sequence: Synthetic oligonucleotide
cagaugauuaagauauggu

SEQ ID NO: 1708292 - RNA, 19 nt, Artificial Sequence
  Description of Artificial Sequence: Synthetic oligonucleotide
cucagaagcggguguccag

SEQ ID NO: 1708293 - RNA, 19 nt, Artificial Sequence
  Description of Artificial Sequence: Synthetic oligonucleotide
cagaucucucucagacagg

SEQ ID NO: 1708294 - RNA, 19 nt, Artificial Sequence
  Description of Artificial Sequence: Synthetic oligonucleotide
cacuaagcacacacugcac

SEQ ID NO: 1708295 - RNA, 19 nt, Artificial Sequence
  Description of Artificial Sequence: Synthetic oligonucleotide
caagcuccacucagugacc

SEQ ID NO: 1708296 - RNA, 19 nt, Artificial Sequence
  Description of Artificial Sequence: Synthetic oligonucleotide
uguauacacgugggagcag

SEQ ID NO: 1708297 - RNA, 19 nt, Artificial Sequence
  Description of Artificial Sequence: Synthetic oligonucleotide
aagucuugccacgggucug

SEQ ID NO: 1708298 - RNA, 19 nt, Artificial Sequence
  Description of Artificial Sequence: Synthetic oligonucleotide
guuuggugcuuccucgauc

SEQ ID NO: 1708299 - RNA, 19 nt, Artificial Sequence
  Description of Artificial Sequence: Synthetic oligonucleotide
guagcucugauggcaacac

SEQ ID NO: 1708300 - RNA, 19 nt, Artificial Sequence
  Description of Artificial Sequence: Synthetic oligonucleotide
ucucagguuuggugcuucc

SEQ ID NO: 1708301 - RNA, 19 nt, Artificial Sequence
  Description of Artificial Sequence: Synthetic oligonucleotide
ggcaauggcagguaccaga

SEQ ID NO: 1708302 - RNA, 19 nt, Artificial Sequence
  Description of Artificial Sequence: Synthetic oligonucleotide
ugcuggcaauggcagguac

SEQ ID NO: 1708303 - RNA, 19 nt, Artificial Sequence
  Description of Artificial Sequence: Synthetic oligonucleotide
auggcuguucagaugauua

SEQ ID NO: 1708304 - RNA, 19 nt, Artificial Sequence
  Description of Artificial Sequence: Synthetic oligonucleotide
uccauguggggcccauagu

SEQ ID NO: 1708305 - RNA, 19 nt, Artificial Sequence
  Description of Artificial Sequence: Synthetic oligonucleotide
uggcaauagcccuguucug

SEQ ID NO: 1708306 - RNA, 19 nt, Artificial Sequence
  Description of Artificial Sequence: Synthetic oligonucleotide
ucccucuuuaggugguccu

SEQ ID NO: 1708307 - RNA, 19 nt, Artificial Sequence
  Description of Artificial Sequence: Synthetic oligonucleotide
caaagauggcuugggcccc

SEQ ID NO: 1708308 - RNA, 19 nt, Artificial Sequence
  Description of Artificial Sequence: Synthetic oligonucleotide
uacucccucuuuagguggu

SEQ ID NO: 1708309 - RNA, 19 nt, Artificial Sequence
  Description of Artificial Sequence: Synthetic oligonucleotide
gagucagacccuagagagc

SEQ ID NO: 1708310 - RNA, 19 nt, Artificial Sequence
  Description of Artificial Sequence: Synthetic oligonucleotide
gggauacuguaucccagcc

SEQ ID NO: 1708311 - RNA, 19 nt, Artificial Sequence
  Description of Artificial Sequence: Synthetic oligonucleotide
acacgugggagcagccgcc

SEQ ID NO: 1708312 - RNA, 19 nt, Artificial Sequence
  Description of Artificial Sequence: Synthetic oligonucleotide
uggauccugauuucucguu

SEQ ID NO: 1708313 - RNA, 19 nt, Artificial Sequence
  Description of Artificial Sequence: Synthetic oligonucleotide
guguucccaacaagaagcc

SEQ ID NO: 1708314 - RNA, 19 nt, Artificial Sequence
  Description of Artificial Sequence: Synthetic oligonucleotide
aucucagguuuggugcuuc

SEQ ID NO: 1708315 - RNA, 19 nt, Artificial Sequence
  Description of Artificial Sequence: Synthetic oligonucleotide
gucagccccacacggaaca

SEQ ID NO: 1708316 - RNA, 19 nt, Artificial Sequence
  Description of Artificial Sequence: Synthetic oligonucleotide
ggggauacuguaucccagc

SEQ ID NO: 1708317 - RNA, 19 nt, Artificial Sequence
  Description of Artificial Sequence: Synthetic oligonucleotide
uggggaguuacucccucuu

SEQ ID NO: 1708318 - RNA, 19 nt, Artificial Sequence
  Description of Artificial Sequence: Synthetic oligonucleotide
gagcccauggaaagucuug

SEQ ID NO: 1708319 - RNA, 19 nt, Artificial Sequence
  Description of Artificial Sequence: Synthetic oligonucleotide
ucaggagcccauggaaagu

SEQ ID NO: 1708320 - RNA, 19 nt, Artificial Sequence
  Description of Artificial Sequence: Synthetic oligonucleotide
agguuuggugcuuccucga

SEQ ID NO: 1708321 - RNA, 19 nt, Artificial Sequence
  Description of Artificial Sequence: Synthetic oligonucleotide
ccugauuucucguugcaga

SEQ ID NO: 1708322 - RNA, 19 nt, Artificial Sequence
  Description of Artificial Sequence: Synthetic oligonucleotide
gguacagaguguagggccc

SEQ ID NO: 1708323 - RNA, 19 nt, Artificial Sequence
  Description of Artificial Sequence: Synthetic oligonucleotide
ugucagccccacacggaac

SEQ ID NO: 1708324 - RNA, 19 nt, Artificial Sequence
  Description of Artificial Sequence: Synthetic oligonucleotide
gugacugacacaguccuua

SEQ ID NO: 1708325 - RNA, 19 nt, Artificial Sequence
  Description of Artificial Sequence: Synthetic oligonucleotide
cuggcaauggcagguacca

SEQ ID NO: 1708326 - RNA, 19 nt, Artificial Sequence
  Description of Artificial Sequence: Synthetic oligonucleotide
agacagggcuacacugugg

SEQ ID NO: 1708327 - RNA, 19 nt, Artificial Sequence
  Description of Artificial Sequence: Synthetic oligonucleotide
cauagcggucagccuggcg

SEQ ID NO: 1708328 - RNA, 19 nt, Artificial Sequence
  Description of Artificial Sequence: Synthetic oligonucleotide
agggguccaacgcccaccu

SEQ ID NO: 1708329 - RNA, 19 nt, Artificial Sequence
  Description of Artificial Sequence: Synthetic oligonucleotide
agacccuagagagcuagaa

SEQ ID NO: 1708330 - RNA, 19 nt, Artificial Sequence
  Description of Artificial Sequence: Synthetic oligonucleotide
gguaccagacaacucccca

SEQ ID NO: 1708331 - RNA, 19 nt, Artificial Sequence
  Description of Artificial Sequence: Synthetic oligonucleotide
ggcacuaagcacacacugc

SEQ ID NO: 1708332 - RNA, 19 nt, Artificial Sequence
  Description of Artificial Sequence: Synthetic oligonucleotide
agagcccugggcaugcugu

SEQ ID NO: 1708333 - RNA, 19 nt, Artificial Sequence
  Description of Artificial Sequence: Synthetic oligonucleotide
ccccacacggaacaguacc

SEQ ID NO: 1708334 - RNA, 19 nt, Artificial Sequence
  Description of Artificial Sequence: Synthetic oligonucleotide
aaccacucgggcagguaga

SEQ ID NO: 1708335 - RNA, 19 nt, Artificial Sequence
  Description of Artificial Sequence: Synthetic oligonucleotide
uuggugcuuccucgauccc

SEQ ID NO: 1708336 - RNA, 19 nt, Artificial Sequence
  Description of Artificial Sequence: Synthetic oligonucleotide
cuacagggcccugagccug

SEQ ID NO: 1708337 - RNA, 19 nt, Artificial Sequence
  Description of Artificial Sequence: Synthetic oligonucleotide
ccuuaaaguggggaguuac

SEQ ID NO: 1708338 - RNA, 19 nt, Artificial Sequence
  Description of Artificial Sequence: Synthetic oligonucleotide
cucucucagacagggcuac

SEQ ID NO: 1708339 - RNA, 19 nt, Artificial Sequence
  Description of Artificial Sequence: Synthetic oligonucleotide
caggcuuuauuugguguuc

SEQ ID NO: 1708340 - RNA, 19 nt, Artificial Sequence
  Description of Artificial Sequence: Synthetic oligonucleotide
ggauacuguaucccagcca

SEQ ID NO: 1708341 - RNA, 19 nt, Artificial Sequence
  Description of Artificial Sequence: Synthetic oligonucleotide
acucagaagcgggugucca

SEQ ID NO: 1708342 - RNA, 19 nt, Artificial Sequence
  Description of Artificial Sequence: Synthetic oligonucleotide
cacucagugaccuuccuuu

SEQ ID NO: 1708343 - RNA, 19 nt, Artificial Sequence
  Description of Artificial Sequence: Synthetic oligonucleotide
ucggugggaccuagaggga

SEQ ID NO: 1708344 - RNA, 19 nt, Artificial Sequence
  Description of Artificial Sequence: Synthetic oligonucleotide
cuguagcucugauggcaac

SEQ ID NO: 1708345 - RNA, 19 nt, Artificial Sequence
  Description of Artificial Sequence: Synthetic oligonucleotide
ggccgguacagaguguagg

SEQ ID NO: 1708346 - RNA, 19 nt, Artificial Sequence
  Description of Artificial Sequence: Synthetic oligonucleotide
accuagagggacccucaau

SEQ ID NO: 1708347 - RNA, 19 nt, Artificial Sequence
  Description of Artificial Sequence: Synthetic oligonucleotide
guaucucagguuuggugcu

SEQ ID NO: 1708348 - RNA, 19 nt, Artificial Sequence
  Description of Artificial Sequence: Synthetic oligonucleotide
gggcccauaguagccaggg

SEQ ID NO: 1708349 - RNA, 19 nt, Artificial Sequence
  Description of Artificial Sequence: Synthetic oligonucleotide
gugucagccccacacggaa

SEQ ID NO: 1708350 - RNA, 19 nt, Artificial Sequence
  Description of Artificial Sequence: Synthetic oligonucleotide
ccauggggauacuguaucc

SEQ ID NO: 1708351 - RNA, 19 nt, Artificial Sequence
  Description of Artificial Sequence: Synthetic oligonucleotide
ggugguccuugcuggcugg

SEQ ID NO: 1708352 - RNA, 19 nt, Artificial Sequence
  Description of Artificial Sequence: Synthetic oligonucleotide
uggcuugcgccgugguggc

SEQ ID NO: 1708353 - RNA, 19 nt, Artificial Sequence
  Description of Artificial Sequence: Synthetic oligonucleotide
accacucgggcagguagag

SEQ ID NO: 1708354 - RNA, 19 nt, Artificial Sequence
  Description of Artificial Sequence: Synthetic oligonucleotide
uccccgggaccuugucagg

SEQ ID NO: 1708355 - RNA, 19 nt, Artificial Sequence
  Description of Artificial Sequence: Synthetic oligonucleotide
cacucagaagcgggugucc

SEQ ID NO: 1708356 - RNA, 19 nt, Artificial Sequence
  Description of Artificial Sequence: Synthetic oligonucleotide
gccaacuggauccugauuu

SEQ ID NO: 1708357 - RNA, 19 nt, Artificial Sequence
  Description of Artificial Sequence: Synthetic oligonucleotide
agaagcggguguccaggaa

SEQ ID NO: 1708358 - RNA, 19 nt, Artificial Sequence
  Description of Artificial Sequence: Synthetic oligonucleotide
cacaagcuccacucaguga

SEQ ID NO: 1708359 - RNA, 19 nt, Artificial Sequence
  Description of Artificial Sequence: Synthetic oligonucleotide
gcuuuauuugguguuccca

SEQ ID NO: 1708360 - RNA, 19 nt, Artificial Sequence
  Description of Artificial Sequence: Synthetic oligonucleotide
cauugugcccuagacccca

SEQ ID NO: 1708361 - RNA, 19 nt, Artificial Sequence
  Description of Artificial Sequence: Synthetic oligonucleotide
ccuugucaggagcccaugg

SEQ ID NO: 1708362 - RNA, 19 nt, Artificial Sequence
  Description of Artificial Sequence: Synthetic oligonucleotide
ggcgcaucagugucagccc

SEQ ID NO: 1708363 - RNA, 19 nt, Artificial Sequence
  Description of Artificial Sequence: Synthetic oligonucleotide
gccagggagguagaccucg

SEQ ID NO: 1708364 - RNA, 19 nt, Artificial Sequence
  Description of Artificial Sequence: Synthetic oligonucleotide
ucuggccgguacagagugu

SEQ ID NO: 1708365 - RNA, 19 nt, Artificial Sequence
  Description of Artificial Sequence: Synthetic oligonucleotide
cuguggaccugggacauga

SEQ ID NO: 1708366 - RNA, 19 nt, Artificial Sequence
  Description of Artificial Sequence: Synthetic oligonucleotide
uggcaauggcagguaccag

SEQ ID NO: 1708367 - RNA, 19 nt, Artificial Sequence
  Description of Artificial Sequence: Synthetic oligonucleotide
uagcggucagccuggcgau

SEQ ID NO: 1708368 - RNA, 19 nt, Artificial Sequence
  Description of Artificial Sequence: Synthetic oligonucleotide
gaagggccaugaauacuuc

SEQ ID NO: 1708369 - RNA, 19 nt, Artificial Sequence
  Description of Artificial Sequence: Synthetic oligonucleotide
caucaccccucacuccuuc

SEQ ID NO: 1708370 - RNA, 19 nt, Artificial Sequence
  Description of Artificial Sequence: Synthetic oligonucleotide
ugcgccgugguggccuggg

SEQ ID NO: 1708371 - RNA, 19 nt, Artificial Sequence
  Description of Artificial Sequence: Synthetic oligonucleotide
ccagacaacuccccacaag

SEQ ID NO: 1708372 - RNA, 19 nt, Artificial Sequence
  Description of Artificial Sequence: Synthetic oligonucleotide
cagggguccaacgcccacc

SEQ ID NO: 1708373 - RNA, 19 nt, Artificial Sequence
  Description of Artificial Sequence: Synthetic oligonucleotide
caggugcuuguauacacgu

SEQ ID NO: 1708374 - RNA, 19 nt, Artificial Sequence
  Description of Artificial Sequence: Synthetic oligonucleotide
cagaugcaugagcagcaca

SEQ ID NO: 1708375 - RNA, 19 nt, Artificial Sequence
  Description of Artificial Sequence: Synthetic oligonucleotide
cccuagagagcuagaauca

SEQ ID NO: 1708376 - RNA, 19 nt, Artificial Sequence
  Description of Artificial Sequence: Synthetic oligonucleotide
ggaaagucuugccacgggu

SEQ ID NO: 1708377 - RNA, 19 nt, Artificial Sequence
  Description of Artificial Sequence: Synthetic oligonucleotide
cccauggggauacuguauc

SEQ ID NO: 1708378 - RNA, 19 nt, Artificial Sequence
  Description of Artificial Sequence: Synthetic oligonucleotide
gggaguuacucccucuuua

SEQ ID NO: 1708379 - RNA, 19 nt, Artificial Sequence
  Description of Artificial Sequence: Synthetic oligonucleotide
ccuggcaauagcccuguuc

SEQ ID NO: 1708380 - RNA, 19 nt, Artificial Sequence
  Description of Artificial Sequence: Synthetic oligonucleotide
cugauuucucguugcagau

SEQ ID NO: 1708381 - RNA, 19 nt, Artificial Sequence
  Description of Artificial Sequence: Synthetic oligonucleotide
agcagcuacagggcccuga

SEQ ID NO: 1708382 - RNA, 19 nt, Artificial Sequence
  Description of Artificial Sequence: Synthetic oligonucleotide
cuccgagucagacccuaga

SEQ ID NO: 1708383 - RNA, 19 nt, Artificial Sequence
  Description of Artificial Sequence: Synthetic oligonucleotide
uccuuaaaguggggaguua

SEQ ID NO: 1708384 - RNA, 19 nt, Artificial Sequence
  Description of Artificial Sequence: Synthetic oligonucleotide
gagguagaccucgcagauc

SEQ ID NO: 1708385 - RNA, 19 nt, Artificial Sequence
  Description of Artificial Sequence: Synthetic oligonucleotide
ggugggaccuagagggacc

SEQ ID NO: 1708386 - RNA, 19 nt, Artificial Sequence
  Description of Artificial Sequence: Synthetic oligonucleotide
gcuggcaauggcagguacc

SEQ ID NO: 1708387 - RNA, 19 nt, Artificial Sequence
  Description of Artificial Sequence: Synthetic oligonucleotide
cacacacugcacacucaga

SEQ ID NO: 1708388 - RNA, 19 nt, Artificial Sequence
  Description of Artificial Sequence: Synthetic oligonucleotide
cacgugggagcagccgccg

SEQ ID NO: 1708389 - RNA, 19 nt, Artificial Sequence
  Description of Artificial Sequence: Synthetic oligonucleotide
uaucucagguuuggugcuu

SEQ ID NO: 1708390 - RNA, 19 nt, Artificial Sequence
  Description of Artificial Sequence: Synthetic oligonucleotide
caccacuauucgagguauc

SEQ ID NO: 1708391 - RNA, 19 nt, Artificial Sequence
  Description of Artificial Sequence: Synthetic oligonucleotide
cuacacuguggaccuggga

SEQ ID NO: 1708392 - RNA, 19 nt, Artificial Sequence
  Description of Artificial Sequence: Synthetic oligonucleotide
gaccuagagggacccucaa

SEQ ID NO: 1708393 - RNA, 19 nt, Artificial Sequence
  Description of Artificial Sequence: Synthetic oligonucleotide
gcuguucuacagugcccag

SEQ ID NO: 1708394 - RNA, 19 nt, Artificial Sequence
  Description of Artificial Sequence: Synthetic oligonucleotide
cagaagcggguguccagga

SEQ ID NO: 1708395 - RNA, 19 nt, Artificial Sequence
  Description of Artificial Sequence: Synthetic oligonucleotide
ugcuggcccaggugaugac

SEQ ID NO: 1708396 - RNA, 19 nt, Artificial Sequence
  Description of Artificial Sequence: Synthetic oligonucleotide
ccauugugcccuagacccc

SEQ ID NO: 1708397 - RNA, 19 nt, Artificial Sequence
  Description of Artificial Sequence: Synthetic oligonucleotide
cuggauccugauuucucgu

SEQ ID NO: 1708398 - RNA, 19 nt, Artificial Sequence
  Description of Artificial Sequence: Synthetic oligonucleotide
gugcccuagaccccagugu

SEQ ID NO: 1708399 - RNA, 19 nt, Artificial Sequence
  Description of Artificial Sequence: Synthetic oligonucleotide
auacuguaucccagccaga

SEQ ID NO: 1708400 - RNA, 19 nt, Artificial Sequence
  Description of Artificial Sequence: Synthetic oligonucleotide
gucagccuggcgauaugga

SEQ ID NO: 1708401 - RNA, 19 nt, Artificial Sequence
  Description of Artificial Sequence: Synthetic oligonucleotide
cucgauccccugccagcug

SEQ ID NO: 1708402 - RNA, 19 nt, Artificial Sequence
  Description of Artificial Sequence: Synthetic oligonucleotide
auugugcccuagaccccag

SEQ ID NO: 1708403 - RNA, 19 nt, Artificial Sequence
  Description of Artificial Sequence: Synthetic oligonucleotide
ccucuuuaggugguccuug

SEQ ID NO: 1708404 - RNA, 19 nt, Artificial Sequence
  Description of Artificial Sequence: Synthetic oligonucleotide
cacgggucuguggcuugcg

SEQ ID NO: 1708405 - RNA, 19 nt, Artificial Sequence
  Description of Artificial Sequence: Synthetic oligonucleotide
gagccucggugggaccuag

SEQ ID NO: 1708406 - RNA, 19 nt, Artificial Sequence
  Description of Artificial Sequence: Synthetic oligonucleotide
gugcgcuguucuacagugc

SEQ ID NO: 1708407 - RNA, 19 nt, Artificial Sequence
  Description of Artificial Sequence: Synthetic oligonucleotide
gagcgggugaagagacaca

SEQ ID NO: 1708408 - RNA, 19 nt, Artificial Sequence
  Description of Artificial Sequence: Synthetic oligonucleotide
cacccucacugaggaaggc

SEQ ID NO: 1708409 - RNA, 19 nt, Artificial Sequence
  Description of Artificial Sequence: Synthetic oligonucleotide
ugccacgggucuguggcuu

SEQ ID NO: 1708410 - RNA, 19 nt, Artificial Sequence
  Description of Artificial Sequence: Synthetic oligonucleotide
gggaccuugucaggagccc

SEQ ID NO: 1708411 - RNA, 19 nt, Artificial Sequence
  Description of Artificial Sequence: Synthetic oligonucleotide
cugcaggugcuuguauaca

SEQ ID NO: 1708412 - RNA, 19 nt, Artificial Sequence
  Description of Artificial Sequence: Synthetic oligonucleotide
gggaccuagagggacccuc

SEQ ID NO: 1708413 - RNA, 19 nt, Artificial Sequence
  Description of Artificial Sequence: Synthetic oligonucleotide
gcgauauggacugggccca

SEQ ID NO: 1708414 - RNA, 19 nt, Artificial Sequence
  Description of Artificial Sequence: Synthetic oligonucleotide
cuggccgguacagagugua

SEQ ID NO: 1708415 - RNA, 19 nt, Artificial Sequence
  Description of Artificial Sequence: Synthetic oligonucleotide
ccgguacagaguguagggc

SEQ ID NO: 1708416 - RNA, 19 nt, Artificial Sequence
  Description of Artificial Sequence: Synthetic oligonucleotide
caagaagcccauggggaua

SEQ ID NO: 1708417 - RNA, 19 nt, Artificial Sequence
  Description of Artificial Sequence: Synthetic oligonucleotide
ccgagucagacccuagaga

SEQ ID NO: 1708418 - RNA, 19 nt, Artificial Sequence
  Description of Artificial Sequence: Synthetic oligonucleotide
caccguggggaagggcagc

SEQ ID NO: 1708419 - RNA, 19 nt, Artificial Sequence
  Description of Artificial Sequence: Synthetic oligonucleotide
cgagcgggugaagagacac

SEQ ID NO: 1708420 - RNA, 19 nt, Artificial Sequence
  Description of Artificial Sequence: Synthetic oligonucleotide
acuguggaccugggacaug

SEQ ID NO: 1708421 - RNA, 19 nt, Artificial Sequence
  Description of Artificial Sequence: Synthetic oligonucleotide
guaccuuggcacccucacu

SEQ ID NO: 1708422 - RNA, 19 nt, Artificial Sequence
  Description of Artificial Sequence: Synthetic oligonucleotide
cagcgagcgggugaagaga

SEQ ID NO: 1708423 - RNA, 19 nt, Artificial Sequence
  Description of Artificial Sequence: Synthetic oligonucleotide
ccaagagcccugggcaugc

SEQ ID NO: 1708424 - RNA, 19 nt, Artificial Sequence
  Description of Artificial Sequence: Synthetic oligonucleotide
guccaacgcccaccugcug

SEQ ID NO: 1708425 - RNA, 19 nt, Artificial Sequence
  Description of Artificial Sequence: Synthetic oligonucleotide
gccgugguggccugggcuc

SEQ ID NO: 1708426 - RNA, 19 nt, Artificial Sequence
  Description of Artificial Sequence: Synthetic oligonucleotide
agcuccgagucagacccua

SEQ ID NO: 1708427 - RNA, 19 nt, Artificial Sequence
  Description of Artificial Sequence: Synthetic oligonucleotide
cagacccuagagagcuaga

SEQ ID NO: 1708428 - RNA, 19 nt, Artificial Sequence
  Description of Artificial Sequence: Synthetic oligonucleotide
ccacuauucgagguaucuc

SEQ ID NO: 1708429 - RNA, 19 nt, Artificial Sequence
  Description of Artificial Sequence: Synthetic oligonucleotide
cuugggcagaugggccaac

SEQ ID NO: 1708430 - RNA, 19 nt, Artificial Sequence
  Description of Artificial Sequence: Synthetic oligonucleotide
aggaaccacucgggcaggu

SEQ ID NO: 1708431 - RNA, 19 nt, Artificial Sequence
  Description of Artificial Sequence: Synthetic oligonucleotide
agcuccacucagugaccuu

SEQ ID NO: 1708432 - RNA, 19 nt, Artificial Sequence
  Description of Artificial Sequence: Synthetic oligonucleotide
agguagagcagggguccaa

SEQ ID NO: 1708433 - RNA, 19 nt, Artificial Sequence
  Description of Artificial Sequence: Synthetic oligonucleotide
gauauggacugggcccacu

SEQ ID NO: 1708434 - RNA, 19 nt, Artificial Sequence
  Description of Artificial Sequence: Synthetic oligonucleotide
gguccccgggaccuuguca

SEQ ID NO: 1708435 - RNA, 19 nt, Artificial Sequence
  Description of Artificial Sequence: Synthetic oligonucleotide
ggaccuagagggacccuca

SEQ ID NO: 1708436 - RNA, 19 nt, Artificial Sequence
  Description of Artificial Sequence: Synthetic oligonucleotide
ggcagguaccagacaacuc

SEQ ID NO: 1708437 - RNA, 19 nt, Artificial Sequence
  Description of Artificial Sequence: Synthetic oligonucleotide
guggcacuaagcacacacu

SEQ ID NO: 1708438 - RNA, 19 nt, Artificial Sequence
  Description of Artificial Sequence: Synthetic oligonucleotide
ggaccuugucaggagccca

SEQ ID NO: 1708439 - RNA, 19 nt, Artificial Sequence
  Description of Artificial Sequence: Synthetic oligonucleotide
agcagggguccaacgccca

SEQ ID NO: 1708440 - RNA, 19 nt, Artificial Sequence
  Description of Artificial Sequence: Synthetic oligonucleotide
cagccaggcuuuauuuggu

SEQ ID NO: 1708441 - RNA, 19 nt, Artificial Sequence
  Description of Artificial Sequence: Synthetic oligonucleotide
ugcuuccauguggggccca

SEQ ID NO: 1708442 - RNA, 19 nt, Artificial Sequence
  Description of Artificial Sequence: Synthetic oligonucleotide
cugugcgcuguucuacagu

SEQ ID NO: 1708443 - RNA, 19 nt, Artificial Sequence
  Description of Artificial Sequence: Synthetic oligonucleotide
cccgggaccuugucaggag

SEQ ID NO: 1708444 - RNA, 19 nt, Artificial Sequence
  Description of Artificial Sequence: Synthetic oligonucleotide
ugggaccuagagggacccu

SEQ ID NO: 1708445 - RNA, 19 nt, Artificial Sequence
  Description of Artificial Sequence: Synthetic oligonucleotide
caggcgcaucagugucagc

SEQ ID NO: 1708446 - RNA, 19 nt, Artificial Sequence
  Description of Artificial Sequence: Synthetic oligonucleotide
cacucagcuccgagucaga

SEQ ID NO: 1708447 - RNA, 19 nt, Artificial Sequence
  Description of Artificial Sequence: Synthetic oligonucleotide
uggcacccucacugaggaa

SEQ ID NO: 1708448 - RNA, 19 nt, Artificial Sequence
  Description of Artificial Sequence: Synthetic oligonucleotide
cuguucuacagugcccagu

SEQ ID NO: 1708449 - RNA, 19 nt, Artificial Sequence
  Description of Artificial Sequence: Synthetic oligonucleotide
gagguggggauggcucgaa

SEQ ID NO: 1708450 - RNA, 19 nt, Artificial Sequence
  Description of Artificial Sequence: Synthetic oligonucleotide
caacgcccaccugcugcag

SEQ ID NO: 1708451 - RNA, 19 nt, Artificial Sequence
  Description of Artificial Sequence: Synthetic oligonucleotide
uugcgccgugguggccugg

SEQ ID NO: 1708452 - RNA, 19 nt, Artificial Sequence
  Description of Artificial Sequence: Synthetic oligonucleotide
augcuggcaauggcaggua

SEQ ID NO: 1708453 - RNA, 19 nt, Artificial Sequence
  Description of Artificial Sequence: Synthetic oligonucleotide
cuccaagagcccugggcau

SEQ ID NO: 1708454 - RNA, 19 nt, Artificial Sequence
  Description of Artificial Sequence: Synthetic oligonucleotide
gguguccaggaaagaggca

SEQ ID NO: 1708455 - RNA, 19 nt, Artificial Sequence
  Description of Artificial Sequence: Synthetic oligonucleotide
cagcaccguggggaagggc

SEQ ID NO: 1708456 - RNA, 19 nt, Artificial Sequence
  Description of Artificial Sequence: Synthetic oligonucleotide
cuguucuggccgguacaga

SEQ ID NO: 1708457 - RNA, 19 nt, Artificial Sequence
  Description of Artificial Sequence: Synthetic oligonucleotide
gcgcuguucuacagugccc

SEQ ID NO: 1708458 - RNA, 19 nt, Artificial Sequence
  Description of Artificial Sequence: Synthetic oligonucleotide
gcuacagggcccugagccu

SEQ ID NO: 1708459 - RNA, 19 nt, Artificial Sequence
  Description of Artificial Sequence: Synthetic oligonucleotide
gggcugcaccacuauucga

SEQ ID NO: 1708460 - RNA, 19 nt, Artificial Sequence
  Description of Artificial Sequence: Synthetic oligonucleotide
gccacgggucuguggcuug

SEQ ID NO: 1708461 - RNA, 19 nt, Artificial Sequence
  Description of Artificial Sequence: Synthetic oligonucleotide
gguuuggugcuuccucgau

SEQ ID NO: 1708462 - RNA, 19 nt, Artificial Sequence
  Description of Artificial Sequence: Synthetic oligonucleotide
agagccucggugggaccua

SEQ ID NO: 1708463 - RNA, 19 nt, Artificial Sequence
  Description of Artificial Sequence: Synthetic oligonucleotide
cagguagagcaggggucca

SEQ ID NO: 1708464 - RNA, 19 nt, Artificial Sequence
  Description of Artificial Sequence: Synthetic oligonucleotide
cagagccucggugggaccu

SEQ ID NO: 1708465 - RNA, 19 nt, Artificial Sequence
  Description of Artificial Sequence: Synthetic oligonucleotide
caccccucacuccuucagu

SEQ ID NO: 1708466 - RNA, 19 nt, Artificial Sequence
  Description of Artificial Sequence: Synthetic oligonucleotide
ggagguggggauggcucga

SEQ ID NO: 1708467 - RNA, 19 nt, Artificial Sequence
  Description of Artificial Sequence: Synthetic oligonucleotide
cauggcuguucagaugauu

SEQ ID NO: 1708468 - RNA, 19 nt, Artificial Sequence
  Description of Artificial Sequence: Synthetic oligonucleotide
cagugcuggcuuugaugcu

SEQ ID NO: 1708469 - RNA, 19 nt, Artificial Sequence
  Description of Artificial Sequence: Synthetic oligonucleotide
ggugaugacuugggcagau

SEQ ID NO: 1708470 - RNA, 19 nt, Artificial Sequence
  Description of Artificial Sequence: Synthetic oligonucleotide
gguccaacgcccaccugcu

SEQ ID NO: 1708471 - RNA, 19 nt, Artificial Sequence
  Description of Artificial Sequence: Synthetic oligonucleotide
cggugggaccuagagggac

SEQ ID NO: 1708472 - RNA, 19 nt, Artificial Sequence
  Description of Artificial Sequence: Synthetic oligonucleotide
cccacaagcuccacucagu

SEQ ID NO: 1708473 - RNA, 19 nt, Artificial Sequence
  Description of Artificial Sequence: Synthetic oligonucleotide
gcccuagaccccaguguca

SEQ ID NO: 1708474 - RNA, 19 nt, Artificial Sequence
  Description of Artificial Sequence: Synthetic oligonucleotide
agcccuguucuggccggua

SEQ ID NO: 1708475 - RNA, 19 nt, Artificial Sequence
  Description of Artificial Sequence: Synthetic oligonucleotide
gggguccaacgcccaccug

SEQ ID NO: 1708476 - RNA, 19 nt, Artificial Sequence
  Description of Artificial Sequence: Synthetic oligonucleotide
ccacgggucuguggcuugc

SEQ ID NO: 1708477 - RNA, 19 nt, Artificial Sequence
  Description of Artificial Sequence: Synthetic oligonucleotide
ggggaguuacucccucuuu

SEQ ID NO: 1708478 - RNA, 19 nt, Artificial Sequence
  Description of Artificial Sequence: Synthetic oligonucleotide
gcuugcgccgugguggccu

SEQ ID NO: 1708479 - RNA, 19 nt, Artificial Sequence
  Description of Artificial Sequence: Synthetic oligonucleotide
agcggucagccuggcgaua

SEQ ID NO: 1708480 - RNA, 19 nt, Artificial Sequence
  Description of Artificial Sequence: Synthetic oligonucleotide
gccgcagaagggccaugaa

SEQ ID NO: 1708481 - RNA, 19 nt, Artificial Sequence
  Description of Artificial Sequence: Synthetic oligonucleotide
ccuagaccccagugucaca

SEQ ID NO: 1708482 - RNA, 19 nt, Artificial Sequence
  Description of Artificial Sequence: Synthetic oligonucleotide
gggccaacuggauccugau

SEQ ID NO: 1708483 - RNA, 19 nt, Artificial Sequence
  Description of Artificial Sequence: Synthetic oligonucleotide
agccucggugggaccuaga

SEQ ID NO: 1708484 - RNA, 19 nt, Artificial Sequence
  Description of Artificial Sequence: Synthetic oligonucleotide
ccuagagagcuagaaucau

SEQ ID NO: 1708485 - RNA, 19 nt, Artificial Sequence
  Description of Artificial Sequence: Synthetic oligonucleotide
ccgcagaagggccaugaau

SEQ ID NO: 1708486 - RNA, 19 nt, Artificial Sequence
  Description of Artificial Sequence: Synthetic oligonucleotide
gccuggcgauauggacugg

SEQ ID NO: 1708487 - RNA, 19 nt, Artificial Sequence
  Description of Artificial Sequence: Synthetic oligonucleotide
cuucucagccaggcuuuau

SEQ ID NO: 1708488 - RNA, 19 nt, Artificial Sequence
  Description of Artificial Sequence: Synthetic oligonucleotide
ggguccccgggaccuuguc

SEQ ID NO: 1708489 - RNA, 19 nt, Artificial Sequence
  Description of Artificial Sequence: Synthetic oligonucleotide
ggccaacuggauccugauu

SEQ ID NO: 1708490 - RNA, 19 nt, Artificial Sequence
  Description of Artificial Sequence: Synthetic oligonucleotide
gcgccgugguggccugggc

SEQ ID NO: 1708491 - RNA, 19 nt, Artificial Sequence
  Description of Artificial Sequence: Synthetic oligonucleotide
gggcccugagccuggcaau

SEQ ID NO: 1708492 - RNA, 19 nt, Artificial Sequence
  Description of Artificial Sequence: Synthetic oligonucleotide
ccccgggaccuugucagga

SEQ ID NO: 1708493 - RNA, 19 nt, Artificial Sequence
  Description of Artificial Sequence: Synthetic oligonucleotide
gcgagcgggugaagagaca

SEQ ID NO: 1708494 - RNA, 19 nt, Artificial Sequence
  Description of Artificial Sequence: Synthetic oligonucleotide
ccucgauccccugccagcu

SEQ ID NO: 1708495 - RNA, 19 nt, Artificial Sequence
  Description of Artificial Sequence: Synthetic oligonucleotide
cgauauggacugggcccac

SEQ ID NO: 1708496 - RNA, 19 nt, Artificial Sequence
  Description of Artificial Sequence: Synthetic oligonucleotide
gcggucagccuggcgauau

SEQ ID NO: 1708497 - RNA, 19 nt, Artificial Sequence
  Description of Artificial Sequence: Synthetic oligonucleotide
cgccgcagaagggccauga

SEQ ID NO: 1708498 - RNA, 19 nt, Artificial Sequence
  Description of Artificial Sequence: Synthetic oligonucleotide
gcuuccauguggggcccau

SEQ ID NO: 1708499 - RNA, 19 nt, Artificial Sequence
  Description of Artificial Sequence: Synthetic oligonucleotide
gcauggcuguucagaugau

SEQ ID NO: 1708500 - RNA, 19 nt, Artificial Sequence
  Description of Artificial Sequence: Synthetic oligonucleotide
cccagaugcgcagcaccgu

SEQ ID NO: 1708501 - RNA, 19 nt, Artificial Sequence
  Description of Artificial Sequence: Synthetic oligonucleotide
ccguggggaagggcagcga

SEQ ID NO: 1708502 - RNA, 19 nt, Artificial Sequence
  Description of Artificial Sequence: Synthetic oligonucleotide
gggguccccgggaccuugu

SEQ ID NO: 1708503 - RNA, 19 nt, Artificial Sequence
  Description of Artificial Sequence: Synthetic oligonucleotide
gccgccgcagaagggccau

SEQ ID NO: 1708504 - RNA, 19 nt, Artificial Sequence
  Description of Artificial Sequence: Synthetic oligonucleotide
gccuggcaauagcccuguu

SEQ ID NO: 1708505 - RNA, 19 nt, Artificial Sequence
  Description of Artificial Sequence: Synthetic oligonucleotide
uguauguucuuccagaggg

SEQ ID NO: 1708506 - RNA, 19 nt, Artificial Sequence
  Description of Artificial Sequence: Synthetic oligonucleotide
gagaagauauaacagaagg

SEQ ID NO: 1708507 - RNA, 19 nt, Artificial Sequence
  Description of Artificial Sequence: Synthetic oligonucleotide
uauguuuugagguacagcc

SEQ ID NO: 1708508 - RNA, 19 nt, Artificial Sequence
  Description of Artificial Sequence: Synthetic oligonucleotide
aucacucuggcauagaagc

SEQ ID NO: 1708509 - RNA, 19 nt, Artificial Sequence
  Description of Artificial Sequence: Synthetic oligonucleotide
uucaauuauauugacacgg

SEQ ID NO: 1708510 - RNA, 19 nt, Artificial Sequence
  Description of Artificial Sequence: Synthetic oligonucleotide
gaagguacaugcaagaggg

SEQ ID NO: 1708511 - RNA, 19 nt, Artificial Sequence
  Description of Artificial Sequence: Synthetic oligonucleotide
ugugagaaaguccaguuca

SEQ ID NO: 1708512 - RNA, 19 nt, Artificial Sequence
  Description of Artificial Sequence: Synthetic oligonucleotide
uuuccuuucgugcuaaaag

SEQ ID NO: 1708513 - RNA, 19 nt, Artificial Sequence
  Description of Artificial Sequence: Synthetic oligonucleotide
uuuugaagaggugacacgg

SEQ ID NO: 1708514 - RNA, 19 nt, Artificial Sequence
  Description of Artificial Sequence: Synthetic oligonucleotide
uauuuguaggguaauguca

SEQ ID NO: 1708515 - RNA, 19 nt, Artificial Sequence
  Description of Artificial Sequence: Synthetic oligonucleotide
uggacuagaaggcaggacc

SEQ ID NO: 1708516 - RNA, 19 nt, Artificial Sequence
  Description of Artificial Sequence: Synthetic oligonucleotide
gguaaugucaguuaccagc

SEQ ID NO: 1708517 - RNA, 19 nt, Artificial Sequence
  Description of Artificial Sequence: Synthetic oligonucleotide
auuauauugacacggccca

SEQ ID NO: 1708518 - RNA, 19 nt, Artificial Sequence
  Description of Artificial Sequence: Synthetic oligonucleotide
ugauggacugcacaaagca

SEQ ID NO: 1708519 - RNA, 19 nt, Artificial Sequence
  Description of Artificial Sequence: Synthetic oligonucleotide
uggucuuugauaaaucacu

SEQ ID NO: 1708520 - RNA, 19 nt, Artificial Sequence
  Description of Artificial Sequence: Synthetic oligonucleotide
agaguaaaggccccaacuc

SEQ ID NO: 1708521 - RNA, 19 nt, Artificial Sequence
  Description of Artificial Sequence: Synthetic oligonucleotide
agugcucucaucuauguca

SEQ ID NO: 1708522 - RNA, 19 nt, Artificial Sequence
  Description of Artificial Sequence: Synthetic oligonucleotide
auaaucugacccuugucuc

SEQ ID NO: 1708523 - RNA, 19 nt, Artificial Sequence
  Description of Artificial Sequence: Synthetic oligonucleotide
auccaaguacacuucaccg

SEQ ID NO: 1708524 - RNA, 19 nt, Artificial Sequence
  Description of Artificial Sequence: Synthetic oligonucleotide
cugcaaauggaguugacag

SEQ ID NO: 1708525 - RNA, 19 nt, Artificial Sequence
  Description of Artificial Sequence: Synthetic oligonucleotide
aaacccucuguacuacuac

SEQ ID NO: 1708526 - RNA, 19 nt, Artificial Sequence
  Description of Artificial Sequence: Synthetic oligonucleotide
aacuguauguucuuccaga

SEQ ID NO: 1708527 - RNA, 19 nt, Artificial Sequence
  Description of Artificial Sequence: Synthetic oligonucleotide
uuuaucucuucacugggcu

SEQ ID NO: 1708528 - RNA, 19 nt, Artificial Sequence
  Description of Artificial Sequence: Synthetic oligonucleotide
ucaauuauauugacacggc

SEQ ID NO: 1708529 - RNA, 19 nt, Artificial Sequence
  Description of Artificial Sequence: Synthetic oligonucleotide
acacuggucacacgaaggc

SEQ ID NO: 1708530 - RNA, 19 nt, Artificial Sequence
  Description of Artificial Sequence: Synthetic oligonucleotide
cacagagaagauauaacag

SEQ ID NO: 1708531 - RNA, 19 nt, Artificial Sequence
  Description of Artificial Sequence: Synthetic oligonucleotide
cuuucgugcuaaaagacug

SEQ ID NO: 1708532 - RNA, 19 nt, Artificial Sequence
  Description of Artificial Sequence: Synthetic oligonucleotide
agaagcugcaacgugcacc

SEQ ID NO: 1708533 - RNA, 19 nt, Artificial Sequence
  Description of Artificial Sequence: Synthetic oligonucleotide
gaagauauaacagaaggua

SEQ ID NO: 1708534 - RNA, 19 nt, Artificial Sequence
  Description of Artificial Sequence: Synthetic oligonucleotide
uaaucugacccuugucucg

SEQ ID NO: 1708535 - RNA, 19 nt, Artificial Sequence
  Description of Artificial Sequence: Synthetic oligonucleotide
uguggucuuugauaaauca

SEQ ID NO: 1708536 - RNA, 19 nt, Artificial Sequence
  Description of Artificial Sequence: Synthetic oligonucleotide
agaacucccauccuuggag

SEQ ID NO: 1708537 - RNA, 19 nt, Artificial Sequence
  Description of Artificial Sequence: Synthetic oligonucleotide
ugcaaauggaguugacagg

SEQ ID NO: 1708538 - RNA, 19 nt, Artificial Sequence
  Description of Artificial Sequence: Synthetic oligonucleotide
uguauuuguaggguaaugu

SEQ ID NO: 1708539 - RNA, 19 nt, Artificial Sequence
  Description of Artificial Sequence: Synthetic oligonucleotide
ugcuaaaagacuguuuagc

SEQ ID NO: 1708540 - RNA, 19 nt, Artificial Sequence
  Description of Artificial Sequence: Synthetic oligonucleotide
uguuuugagguacagccau

SEQ ID NO: 1708541 - RNA, 19 nt, Artificial Sequence
  Description of Artificial Sequence: Synthetic oligonucleotide
uugaccuucacaguacucc

SEQ ID NO: 1708542 - RNA, 19 nt, Artificial Sequence
  Description of Artificial Sequence: Synthetic oligonucleotide
gaaggccacgaguagacag

SEQ ID NO: 1708543 - RNA, 19 nt, Artificial Sequence
  Description of Artificial Sequence: Synthetic oligonucleotide
uucagaacucccauccuug

SEQ ID NO: 1708544 - RNA, 19 nt, Artificial Sequence
  Description of Artificial Sequence: Synthetic oligonucleotide
uucccaaggacauucuuca

SEQ ID NO: 1708545 - RNA, 19 nt, Artificial Sequence
  Description of Artificial Sequence: Synthetic oligonucleotide
aggacuguccgcucaacac

SEQ ID NO: 1708546 - RNA, 19 nt, Artificial Sequence
  Description of Artificial Sequence: Synthetic oligonucleotide
cuugucaugcccauggguc

SEQ ID NO: 1708547 - RNA, 19 nt, Artificial Sequence
  Description of Artificial Sequence: Synthetic oligonucleotide
gaguaaaggccccaacucc

SEQ ID NO: 1708548 - RNA, 19 nt, Artificial Sequence
  Description of Artificial Sequence: Synthetic oligonucleotide
acacauauaaucugacccu

SEQ ID NO: 1708549 - RNA, 19 nt, Artificial Sequence
  Description of Artificial Sequence: Synthetic oligonucleotide
ucuuuugaagaggugacac

SEQ ID NO: 1708550 - RNA, 19 nt, Artificial Sequence
  Description of Artificial Sequence: Synthetic oligonucleotide
ggauuucugggauaggagg

SEQ ID NO: 1708551 - RNA, 19 nt, Artificial Sequence
  Description of Artificial Sequence: Synthetic oligonucleotide
cuuuugaagaggugacacg

SEQ ID NO: 1708552 - RNA, 19 nt, Artificial Sequence
  Description of Artificial Sequence: Synthetic oligonucleotide
ucaacacauauaaucugac

SEQ ID NO: 1708553 - RNA, 19 nt, Artificial Sequence
  Description of Artificial Sequence: Synthetic oligonucleotide
gaagagaguuccucagggg

SEQ ID NO: 1708554 - RNA, 19 nt, Artificial Sequence
  Description of Artificial Sequence: Synthetic oligonucleotide
aucagcagugaagaaacac

SEQ ID NO: 1708555 - RNA, 19 nt, Artificial Sequence
  Description of Artificial Sequence: Synthetic oligonucleotide
auauugacacggcccagac

SEQ ID NO: 1708556 - RNA, 19 nt, Artificial Sequence
  Description of Artificial Sequence: Synthetic oligonucleotide
gagcucagaaauugggucc

SEQ ID NO: 1708557 - RNA, 19 nt, Artificial Sequence
  Description of Artificial Sequence: Synthetic oligonucleotide
agaaaguccaguucaucca

SEQ ID NO: 1708558 - RNA, 19 nt, Artificial Sequence
  Description of Artificial Sequence: Synthetic oligonucleotide
cauccaaguacacuucacc

SEQ ID NO: 1708559 - RNA, 19 nt, Artificial Sequence
  Description of Artificial Sequence: Synthetic oligonucleotide
gauauaacagaagguagga

SEQ ID NO: 1708560 - RNA, 19 nt, Artificial Sequence
  Description of Artificial Sequence: Synthetic oligonucleotide
augcaagagggauuucugg

SEQ ID NO: 1708561 - RNA, 19 nt, Artificial Sequence
  Description of Artificial Sequence: Synthetic oligonucleotide
cuaugucaaccacaguucc

SEQ ID NO: 1708562 - RNA, 19 nt, Artificial Sequence
  Description of Artificial Sequence: Synthetic oligonucleotide
uggaggauuucucguaagc

SEQ ID NO: 1708563 - RNA, 19 nt, Artificial Sequence
  Description of Artificial Sequence: Synthetic oligonucleotide
caacacauauaaucugacc

SEQ ID NO: 1708564 - RNA, 19 nt, Artificial Sequence
  Description of Artificial Sequence: Synthetic oligonucleotide
uccaaguacacuucaccga

SEQ ID NO: 1708565 - RNA, 19 nt, Artificial Sequence
  Description of Artificial Sequence: Synthetic oligonucleotide
gaaaguccaguucauccac

SEQ ID NO: 1708566 - RNA, 19 nt, Artificial Sequence
  Description of Artificial Sequence: Synthetic oligonucleotide
uuugaagaggugacacggc

SEQ ID NO: 1708567 - RNA, 19 nt, Artificial Sequence
  Description of Artificial Sequence: Synthetic oligonucleotide
ugacccuugucucgaagag

SEQ ID NO: 1708568 - RNA, 19 nt, Artificial Sequence
  Description of Artificial Sequence: Synthetic oligonucleotide
uccuuucgugcuaaaagac

SEQ ID NO: 1708569 - RNA, 19 nt, Artificial Sequence
  Description of Artificial Sequence: Synthetic oligonucleotide
cacuucaccgaacaucccg

SEQ ID NO: 1708570 - RNA, 19 nt, Artificial Sequence
  Description of Artificial Sequence: Synthetic oligonucleotide
ucagaacucccauccuugg

SEQ ID NO: 1708571 - RNA, 19 nt, Artificial Sequence
  Description of Artificial Sequence: Synthetic oligonucleotide
guauuuguaggguaauguc

SEQ ID NO: 1708572 - RNA, 19 nt, Artificial Sequence
  Description of Artificial Sequence: Synthetic oligonucleotide
acuacucggaccccggcuc

SEQ ID NO: 1708573 - RNA, 19 nt, Artificial Sequence
  Description of Artificial Sequence: Synthetic oligonucleotide
gaacucccauccuuggagg

SEQ ID NO: 1708574 - RNA, 19 nt, Artificial Sequence
  Description of Artificial Sequence: Synthetic oligonucleotide
agacuguuuagcugugguc

SEQ ID NO: 1708575 - RNA, 19 nt, Artificial Sequence
  Description of Artificial Sequence: Synthetic oligonucleotide
agaacuucuggguccagca

SEQ ID NO: 1708576 - RNA, 19 nt, Artificial Sequence
  Description of Artificial Sequence: Synthetic oligonucleotide
cuuuaucucuucacugggc

SEQ ID NO: 1708577 - RNA, 19 nt, Artificial Sequence
  Description of Artificial Sequence: Synthetic oligonucleotide
acccuugucucgaagagcg

SEQ ID NO: 1708578 - RNA, 19 nt, Artificial Sequence
  Description of Artificial Sequence: Synthetic oligonucleotide
ucgaagagcgucccugaag

SEQ ID NO: 1708579 - RNA, 19 nt, Artificial Sequence
  Description of Artificial Sequence: Synthetic oligonucleotide
aguaaacccucuguacuac

SEQ ID NO: 1708580 - RNA, 19 nt, Artificial Sequence
  Description of Artificial Sequence: Synthetic oligonucleotide
auaacagaagguaggagga

SEQ ID NO: 1708581 - RNA, 19 nt, Artificial Sequence
  Description of Artificial Sequence: Synthetic oligonucleotide
gcuacauagaucgggaggg

SEQ ID NO: 1708582 - RNA, 19 nt, Artificial Sequence
  Description of Artificial Sequence: Synthetic oligonucleotide
gaggguuuugggaaggcag

SEQ ID NO: 1708583 - RNA, 19 nt, Artificial Sequence
  Description of Artificial Sequence: Synthetic oligonucleotide
auuucucguaagcagugga

SEQ ID NO: 1708584 - RNA, 19 nt, Artificial Sequence
  Description of Artificial Sequence: Synthetic oligonucleotide
aggaccucccuucuaacug

SEQ ID NO: 1708585 - RNA, 19 nt, Artificial Sequence
  Description of Artificial Sequence: Synthetic oligonucleotide
aauggaguugacaggugug

SEQ ID NO: 1708586 - RNA, 19 nt, Artificial Sequence
  Description of Artificial Sequence: Synthetic oligonucleotide
ugcacccagaaacucaauc

SEQ ID NO: 1708587 - RNA, 19 nt, Artificial Sequence
  Description of Artificial Sequence: Synthetic oligonucleotide
aacccucuguacuacuacu

SEQ ID NO: 1708588 - RNA, 19 nt, Artificial Sequence
  Description of Artificial Sequence: Synthetic oligonucleotide
acuucaccgaacaucccgc

SEQ ID NO: 1708589 - RNA, 19 nt, Artificial Sequence
  Description of Artificial Sequence: Synthetic oligonucleotide
cuguacuacuacucggacc

SEQ ID NO: 1708590 - RNA, 19 nt, Artificial Sequence
  Description of Artificial Sequence: Synthetic oligonucleotide
uguaggguaaugucaguua

SEQ ID NO: 1708591 - RNA, 19 nt, Artificial Sequence
  Description of Artificial Sequence: Synthetic oligonucleotide
ucuguacuacuacucggac

SEQ ID NO: 1708592 - RNA, 19 nt, Artificial Sequence
  Description of Artificial Sequence: Synthetic oligonucleotide
ucaggggagcaccaacugc

SEQ ID NO: 1708593 - RNA, 19 nt, Artificial Sequence
  Description of Artificial Sequence: Synthetic oligonucleotide
uugucaugcccaugggucc

SEQ ID NO: 1708594 - RNA, 19 nt, Artificial Sequence
  Description of Artificial Sequence: Synthetic oligonucleotide
uuuagcuguggucuuugau

SEQ ID NO: 1708595 - RNA, 19 nt, Artificial Sequence
  Description of Artificial Sequence: Synthetic oligonucleotide
uauauugacacggcccaga

SEQ ID NO: 1708596 - RNA, 19 nt, Artificial Sequence
  Description of Artificial Sequence: Synthetic oligonucleotide
gauuucucguaagcagugg

SEQ ID NO: 1708597 - RNA, 19 nt, Artificial Sequence
  Description of Artificial Sequence: Synthetic oligonucleotide
gauggacugcacaaagcag

SEQ ID NO: 1708598 - RNA, 19 nt, Artificial Sequence
  Description of Artificial Sequence: Synthetic oligonucleotide
ggguccagcauacaugagg

SEQ ID NO: 1708599 - RNA, 19 nt, Artificial Sequence
  Description of Artificial Sequence: Synthetic oligonucleotide
caugcaagagggauuucug

SEQ ID NO: 1708600 - RNA, 19 nt, Artificial Sequence
  Description of Artificial Sequence: Synthetic oligonucleotide
uucucguaagcaguggaca

SEQ ID NO: 1708601 - RNA, 19 nt, Artificial Sequence
  Description of Artificial Sequence: Synthetic oligonucleotide
uucugggauaggaggacug

SEQ ID NO: 1708602 - RNA, 19 nt, Artificial Sequence
  Description of Artificial Sequence: Synthetic oligonucleotide
ucacacgaaggccacgagu

SEQ ID NO: 1708603 - RNA, 19 nt, Artificial Sequence
  Description of Artificial Sequence: Synthetic oligonucleotide
agagaagauauaacagaag

SEQ ID NO: 1708604 - RNA, 19 nt, Artificial Sequence
  Description of Artificial Sequence: Synthetic oligonucleotide
aggguaaugucaguuacca

SEQ ID NO: 1708605 - RNA, 19 nt, Artificial Sequence
  Description of Artificial Sequence: Synthetic oligonucleotide
ggcuacauagaucgggagg

SEQ ID NO: 1708606 - RNA, 19 nt, Artificial Sequence
  Description of Artificial Sequence: Synthetic oligonucleotide
agaucgggaggguuuuggg

SEQ ID NO: 1708607 - RNA, 19 nt, Artificial Sequence
  Description of Artificial Sequence: Synthetic oligonucleotide
gcacagagaagauauaaca

SEQ ID NO: 1708608 - RNA, 19 nt, Artificial Sequence
  Description of Artificial Sequence: Synthetic oligonucleotide
uagaucgggaggguuuugg

SEQ ID NO: 1708609 - RNA, 19 nt, Artificial Sequence
  Description of Artificial Sequence: Synthetic oligonucleotide
gugcuaaaagacuguuuag

SEQ ID NO: 1708610 - RNA, 19 nt, Artificial Sequence
  Description of Artificial Sequence: Synthetic oligonucleotide
aagagcgucccugaagagu

SEQ ID NO: 1708611 - RNA, 19 nt, Artificial Sequence
  Description of Artificial Sequence: Synthetic oligonucleotide
uucaccgaacaucccgcag

SEQ ID NO: 1708612 - RNA, 19 nt, Artificial Sequence
  Description of Artificial Sequence: Synthetic oligonucleotide
cauagcaaguccuucuaga

SEQ ID NO: 1708613 - RNA, 19 nt, Artificial Sequence
  Description of Artificial Sequence: Synthetic oligonucleotide
ucaucagucuggaggauuu

SEQ ID NO: 1708614 - RNA, 19 nt, Artificial Sequence
  Description of Artificial Sequence: Synthetic oligonucleotide
cuguauguucuuccagagg

SEQ ID NO: 1708615 - RNA, 19 nt, Artificial Sequence
  Description of Artificial Sequence: Synthetic oligonucleotide
ucucguaagcaguggacaa

SEQ ID NO: 1708616 - RNA, 19 nt, Artificial Sequence
  Description of Artificial Sequence: Synthetic oligonucleotide
guagacagugcucucaucu

SEQ ID NO: 1708617 - RNA, 19 nt, Artificial Sequence
  Description of Artificial Sequence: Synthetic oligonucleotide
acuucuggguccagcauac

SEQ ID NO: 1708618 - RNA, 19 nt, Artificial Sequence
  Description of Artificial Sequence: Synthetic oligonucleotide
uacuacuacucggaccccg

SEQ ID NO: 1708619 - RNA, 19 nt, Artificial Sequence
  Description of Artificial Sequence: Synthetic oligonucleotide
ugaccuucacaguacuccu

SEQ ID NO: 1708620 - RNA, 19 nt, Artificial Sequence
  Description of Artificial Sequence: Synthetic oligonucleotide
agccagauuuccuuucgug

SEQ ID NO: 1708621 - RNA, 19 nt, Artificial Sequence
  Description of Artificial Sequence: Synthetic oligonucleotide
aucgggaggguuuugggaa

SEQ ID NO: 1708622 - RNA, 19 nt, Artificial Sequence
  Description of Artificial Sequence: Synthetic oligonucleotide
ucguaagcaguggacaacu

SEQ ID NO: 1708623 - RNA, 19 nt, Artificial Sequence
  Description of Artificial Sequence: Synthetic oligonucleotide
ucugacccuugucucgaag

SEQ ID NO: 1708624 - RNA, 19 nt, Artificial Sequence
  Description of Artificial Sequence: Synthetic oligonucleotide
gaguugacaggugugagaa

SEQ ID NO: 1708625 - RNA, 19 nt, Artificial Sequence
  Description of Artificial Sequence: Synthetic oligonucleotide
uaaacccucuguacuacua

SEQ ID NO: 1708626 - RNA, 19 nt, Artificial Sequence
  Description of Artificial Sequence: Synthetic oligonucleotide
auggacugcacaaagcaga

SEQ ID NO: 1708627 - RNA, 19 nt, Artificial Sequence
  Description of Artificial Sequence: Synthetic oligonucleotide
ugcaugucccacugugugc

SEQ ID NO: 1708628 - RNA, 19 nt, Artificial Sequence
  Description of Artificial Sequence: Synthetic oligonucleotide
cagugaagaaacacugguc

SEQ ID NO: 1708629 - RNA, 19 nt, Artificial Sequence
  Description of Artificial Sequence: Synthetic oligonucleotide
acaugcaagagggauuucu

SEQ ID NO: 1708630 - RNA, 19 nt, Artificial Sequence
  Description of Artificial Sequence: Synthetic oligonucleotide
auuggguccccuucaauua

SEQ ID NO: 1708631 - RNA, 19 nt, Artificial Sequence
  Description of Artificial Sequence: Synthetic oligonucleotide
agucuggaggauuucucgu

SEQ ID NO: 1708632 - RNA, 19 nt, Artificial Sequence
  Description of Artificial Sequence: Synthetic oligonucleotide
gaagaggugacacggccaa

SEQ ID NO: 1708633 - RNA, 19 nt, Artificial Sequence
  Description of Artificial Sequence: Synthetic oligonucleotide
acugcaaauggaguugaca

SEQ ID NO: 1708634 - RNA, 19 nt, Artificial Sequence
  Description of Artificial Sequence: Synthetic oligonucleotide
agggauuucugggauagga

SEQ ID NO: 1708635 - RNA, 19 nt, Artificial Sequence
  Description of Artificial Sequence: Synthetic oligonucleotide
gggauaggaggacuguccg

SEQ ID NO: 1708636 - RNA, 19 nt, Artificial Sequence
  Description of Artificial Sequence: Synthetic oligonucleotide
uugacaggugugagaaagu

SEQ ID NO: 1708637 - RNA, 19 nt, Artificial Sequence
  Description of Artificial Sequence: Synthetic oligonucleotide
aguaaaggccccaacuccu

SEQ ID NO: 1708638 - RNA, 19 nt, Artificial Sequence
  Description of Artificial Sequence: Synthetic oligonucleotide
uuauauugacacggcccag

SEQ ID NO: 1708639 - RNA, 19 nt, Artificial Sequence
  Description of Artificial Sequence: Synthetic oligonucleotide
uacuccugggccucgugug

SEQ ID NO: 1708640 - RNA, 19 nt, Artificial Sequence
  Description of Artificial Sequence: Synthetic oligonucleotide
aaaagacuguuuagcugug

SEQ ID NO: 1708641 - RNA, 19 nt, Artificial Sequence
  Description of Artificial Sequence: Synthetic oligonucleotide
uacuacucggaccccggcu

SEQ ID NO: 1708642 - RNA, 19 nt, Artificial Sequence
  Description of Artificial Sequence: Synthetic oligonucleotide
gaucgggaggguuuuggga

SEQ ID NO: 1708643 - RNA, 19 nt, Artificial Sequence
  Description of Artificial Sequence: Synthetic oligonucleotide
uuuguaggguaaugucagu

SEQ ID NO: 1708644 - RNA, 19 nt, Artificial Sequence
  Description of Artificial Sequence: Synthetic oligonucleotide
uugacacggcccagacucg

SEQ ID NO: 1708645 - RNA, 19 nt, Artificial Sequence
  Description of Artificial Sequence: Synthetic oligonucleotide
uauugacacggcccagacu

SEQ ID NO: 1708646 - RNA, 19 nt, Artificial Sequence
  Description of Artificial Sequence: Synthetic oligonucleotide
caccgucucugcuaggaag

SEQ ID NO: 1708647 - RNA, 19 nt, Artificial Sequence
  Description of Artificial Sequence: Synthetic oligonucleotide
gaggugacacggccaauug

SEQ ID NO: 1708648 - RNA, 19 nt, Artificial Sequence
  Description of Artificial Sequence: Synthetic oligonucleotide
gcuaggaagggaguaaacc

SEQ ID NO: 1708649 - RNA, 19 nt, Artificial Sequence
  Description of Artificial Sequence: Synthetic oligonucleotide
ggugacacggccaauugug

SEQ ID NO: 1708650 - RNA, 19 nt, Artificial Sequence
  Description of Artificial Sequence: Synthetic oligonucleotide
gaguaaacccucuguacua

SEQ ID NO: 1708651 - RNA, 19 nt, Artificial Sequence
  Description of Artificial Sequence: Synthetic oligonucleotide
cucuguacuacuacucgga

SEQ ID NO: 1708652 - RNA, 19 nt, Artificial Sequence
  Description of Artificial Sequence: Synthetic oligonucleotide
aggauuucucguaagcagu

SEQ ID NO: 1708653 - RNA, 19 nt, Artificial Sequence
  Description of Artificial Sequence: Synthetic oligonucleotide
gaagagcgucccugaagag

SEQ ID NO: 1708654 - RNA, 19 nt, Artificial Sequence
  Description of Artificial Sequence: Synthetic oligonucleotide
agggaguaaacccucugua

SEQ ID NO: 1708655 - RNA, 19 nt, Artificial Sequence
  Description of Artificial Sequence: Synthetic oligonucleotide
agcugcaacgugcacccug

SEQ ID NO: 1708656 - RNA, 19 nt, Artificial Sequence
  Description of Artificial Sequence: Synthetic oligonucleotide
ugcuucuuuugaagaggug

SEQ ID NO: 1708657 - RNA, 19 nt, Artificial Sequence
  Description of Artificial Sequence: Synthetic oligonucleotide
agcuugaccuucacaguac

SEQ ID NO: 1708658 - RNA, 19 nt, Artificial Sequence
  Description of Artificial Sequence: Synthetic oligonucleotide
ucucgaagagcgucccuga

SEQ ID NO: 1708659 - RNA, 19 nt, Artificial Sequence
  Description of Artificial Sequence: Synthetic oligonucleotide
cucggaggcacagagaaga

SEQ ID NO: 1708660 - RNA, 19 nt, Artificial Sequence
  Description of Artificial Sequence: Synthetic oligonucleotide
acgugcacccugcucauca

SEQ ID NO: 1708661 - RNA, 19 nt, Artificial Sequence
  Description of Artificial Sequence: Synthetic oligonucleotide
ccgcucaacacauauaauc

SEQ ID NO: 1708662 - RNA, 19 nt, Artificial Sequence
  Description of Artificial Sequence: Synthetic oligonucleotide
cacacugcaaauggaguug

SEQ ID NO: 1708663 - RNA, 19 nt, Artificial Sequence
  Description of Artificial Sequence: Synthetic oligonucleotide
aggaagggaguaaacccuc

SEQ ID NO: 1708664 - RNA, 19 nt, Artificial Sequence
  Description of Artificial Sequence: Synthetic oligonucleotide
auaggaggacuguccgcuc

SEQ ID NO: 1708665 - RNA, 19 nt, Artificial Sequence
  Description of Artificial Sequence: Synthetic oligonucleotide
gauaggaggacuguccgcu

SEQ ID NO: 1708666 - RNA, 19 nt, Artificial Sequence
  Description of Artificial Sequence: Synthetic oligonucleotide
ucagaaauuggguccccuu

SEQ ID NO: 1708667 - RNA, 19 nt, Artificial Sequence
  Description of Artificial Sequence: Synthetic oligonucleotide
ugacacggccaauugugaa

SEQ ID NO: 1708668 - RNA, 19 nt, Artificial Sequence
  Description of Artificial Sequence: Synthetic oligonucleotide
gcaacgugcacccugcuca

SEQ ID NO: 1708669 - RNA, 19 nt, Artificial Sequence
  Description of Artificial Sequence: Synthetic oligonucleotide
uuguaggguaaugucaguu

SEQ ID NO: 1708670 - RNA, 19 nt, Artificial Sequence
  Description of Artificial Sequence: Synthetic oligonucleotide
gcucaacacauauaaucug

SEQ ID NO: 1708671 - RNA, 19 nt, Artificial Sequence
  Description of Artificial Sequence: Synthetic oligonucleotide
auagaagcugcaacgugca

SEQ ID NO: 1708672 - RNA, 19 nt, Artificial Sequence
  Description of Artificial Sequence: Synthetic oligonucleotide
ucgggaggguuuugggaag

SEQ ID NO: 1708673 - RNA, 19 nt, Artificial Sequence
  Description of Artificial Sequence: Synthetic oligonucleotide
acgaguagacagugcucuc

SEQ ID NO: 1708674 - RNA, 19 nt, Artificial Sequence
  Description of Artificial Sequence: Synthetic oligonucleotide
aaggccacgaguagacagu

SEQ ID NO: 1708675 - RNA, 19 nt, Artificial Sequence
  Description of Artificial Sequence: Synthetic oligonucleotide
gugugagaaaguccaguuc

SEQ ID NO: 1708676 - RNA, 19 nt, Artificial Sequence
  Description of Artificial Sequence: Synthetic oligonucleotide
auucuucacuucagaacuc

SEQ ID NO: 1708677 - RNA, 19 nt, Artificial Sequence
  Description of Artificial Sequence: Synthetic oligonucleotide
ugacacggcccagacucgg

SEQ ID NO: 1708678 - RNA, 19 nt, Artificial Sequence
  Description of Artificial Sequence: Synthetic oligonucleotide
uuggguccccuucaauuau

SEQ ID NO: 1708679 - RNA, 19 nt, Artificial Sequence
  Description of Artificial Sequence: Synthetic oligonucleotide
uuucugggauaggaggacu

SEQ ID NO: 1708680 - RNA, 19 nt, Artificial Sequence
  Description of Artificial Sequence: Synthetic oligonucleotide
uccagagggugccauccaa

SEQ ID NO: 1708681 - RNA, 19 nt, Artificial Sequence
  Description of Artificial Sequence: Synthetic oligonucleotide
acuacuacucggaccccgg

SEQ ID NO: 1708682 - RNA, 19 nt, Artificial Sequence
  Description of Artificial Sequence: Synthetic oligonucleotide
caccgaacaucccgcaggc

SEQ ID NO: 1708683 - RNA, 19 nt, Artificial Sequence
  Description of Artificial Sequence: Synthetic oligonucleotide
ucucugcuaggaagggagu

SEQ ID NO: 1708684 - RNA, 19 nt, Artificial Sequence
  Description of Artificial Sequence: Synthetic oligonucleotide
ugcaacgugcacccugcuc

SEQ ID NO: 1708685 - RNA, 19 nt, Artificial Sequence
  Description of Artificial Sequence: Synthetic oligonucleotide
acauauaaucugacccuug

SEQ ID NO: 1708686 - RNA, 19 nt, Artificial Sequence
  Description of Artificial Sequence: Synthetic oligonucleotide
cuggcaccgucucugcuag

SEQ ID NO: 1708687 - RNA, 19 nt, Artificial Sequence
  Description of Artificial Sequence: Synthetic oligonucleotide
ucgugcuaaaagacuguuu

SEQ ID NO: 1708688 - RNA, 19 nt, Artificial Sequence
  Description of Artificial Sequence: Synthetic oligonucleotide
gguuuugggaaggcagugg

SEQ ID NO: 1708689 - RNA, 19 nt, Artificial Sequence
  Description of Artificial Sequence: Synthetic oligonucleotide
caaguacacuucaccgaac

SEQ ID NO: 1708690 - RNA, 19 nt, Artificial Sequence
  Description of Artificial Sequence: Synthetic oligonucleotide
gggagcaccaacugcaaga

SEQ ID NO: 1708691 - RNA, 19 nt, Artificial Sequence
  Description of Artificial Sequence: Synthetic oligonucleotide
cauauaaucugacccuugu

SEQ ID NO: 1708692 - RNA, 19 nt, Artificial Sequence
  Description of Artificial Sequence: Synthetic oligonucleotide
aggugacacggccaauugu

SEQ ID NO: 1708693 - RNA, 19 nt, Artificial Sequence
  Description of Artificial Sequence: Synthetic oligonucleotide
cucaggggagcaccaacug

SEQ ID NO: 1708694 - RNA, 19 nt, Artificial Sequence
  Description of Artificial Sequence: Synthetic oligonucleotide
caauugugaacaguuccca

SEQ ID NO: 1708695 - RNA, 19 nt, Artificial Sequence
  Description of Artificial Sequence: Synthetic oligonucleotide
guccagcauacaugagggg

SEQ ID NO: 1708696 - RNA, 19 nt, Artificial Sequence
  Description of Artificial Sequence: Synthetic oligonucleotide
gcagccagauuuccuuucg

SEQ ID NO: 1708697 - RNA, 19 nt, Artificial Sequence
  Description of Artificial Sequence: Synthetic oligonucleotide
ggaguaaacccucuguacu

SEQ ID NO: 1708698 - RNA, 19 nt, Artificial Sequence
  Description of Artificial Sequence: Synthetic oligonucleotide
aggcugguagagcucagaa

SEQ ID NO: 1708699 - RNA, 19 nt, Artificial Sequence
  Description of Artificial Sequence: Synthetic oligonucleotide
gacccuugucucgaagagc

SEQ ID NO: 1708700 - RNA, 19 nt, Artificial Sequence
  Description of Artificial Sequence: Synthetic oligonucleotide
uugucucgaagagcguccc

SEQ ID NO: 1708701 - RNA, 19 nt, Artificial Sequence
  Description of Artificial Sequence: Synthetic oligonucleotide
ugugugcccuugcuggcuc

SEQ ID NO: 1708702 - RNA, 19 nt, Artificial Sequence
  Description of Artificial Sequence: Synthetic oligonucleotide
auccuguauuuguagggua

SEQ ID NO: 1708703 - RNA, 19 nt, Artificial Sequence
  Description of Artificial Sequence: Synthetic oligonucleotide
agagcgucccugaagagua

SEQ ID NO: 1708704 - RNA, 19 nt, Artificial Sequence
  Description of Artificial Sequence: Synthetic oligonucleotide
uguccgcucaacacauaua

SEQ ID NO: 1708705 - RNA, 19 nt, Artificial Sequence
  Description of Artificial Sequence: Synthetic oligonucleotide
ugucaugcccaugggucca

SEQ ID NO: 1708706 - RNA, 19 nt, Artificial Sequence
  Description of Artificial Sequence: Synthetic oligonucleotide
ugggccucgugugacaguc

SEQ ID NO: 1708707 - RNA, 19 nt, Artificial Sequence
  Description of Artificial Sequence: Synthetic oligonucleotide
cccucuguacuacuacucg

SEQ ID NO: 1708708 - RNA, 19 nt, Artificial Sequence
  Description of Artificial Sequence: Synthetic oligonucleotide
uucgugcuaaaagacuguu

SEQ ID NO: 1708709 - RNA, 19 nt, Artificial Sequence
  Description of Artificial Sequence: Synthetic oligonucleotide
auguuuugagguacagcca

SEQ ID NO: 1708710 - RNA, 19 nt, Artificial Sequence
  Description of Artificial Sequence: Synthetic oligonucleotide
cucguaagcaguggacaac

SEQ ID NO: 1708711 - RNA, 19 nt, Artificial Sequence
  Description of Artificial Sequence: Synthetic oligonucleotide
ggauuucucguaagcagug

SEQ ID NO: 1708712 - RNA, 19 nt, Artificial Sequence
  Description of Artificial Sequence: Synthetic oligonucleotide
uacauagaucgggaggguu

SEQ ID NO: 1708713 - RNA, 19 nt, Artificial Sequence
  Description of Artificial Sequence: Synthetic oligonucleotide
cagaguaaaggccccaacu

SEQ ID NO: 1708714 - RNA, 19 nt, Artificial Sequence
  Description of Artificial Sequence: Synthetic oligonucleotide
cuacuacucggaccccggc

SEQ ID NO: 1708715 - RNA, 19 nt, Artificial Sequence
  Description of Artificial Sequence: Synthetic oligonucleotide
aguggacaacuggaggcug

SEQ ID NO: 1708716 - RNA, 19 nt, Artificial Sequence
  Description of Artificial Sequence: Synthetic oligonucleotide
ggaggauuucucguaagca

SEQ ID NO: 1708717 - RNA, 19 nt, Artificial Sequence
  Description of Artificial Sequence: Synthetic oligonucleotide
uggguccagcauacaugag

SEQ ID NO: 1708718 - RNA, 19 nt, Artificial Sequence
  Description of Artificial Sequence: Synthetic oligonucleotide
agaggugacacggccaauu

SEQ ID NO: 1708719 - RNA, 19 nt, Artificial Sequence
  Description of Artificial Sequence: Synthetic oligonucleotide
gaguauguuuugagguaca

SEQ ID NO: 1708720 - RNA, 19 nt, Artificial Sequence
  Description of Artificial Sequence: Synthetic oligonucleotide
caccagaagguacaugcaa

SEQ ID NO: 1708721 - RNA, 19 nt, Artificial Sequence
  Description of Artificial Sequence: Synthetic oligonucleotide
ggacuguccgcucaacaca

SEQ ID NO: 1708722 - RNA, 19 nt, Artificial Sequence
  Description of Artificial Sequence: Synthetic oligonucleotide
ucggaccccggcuccagac

SEQ ID NO: 1708723 - RNA, 19 nt, Artificial Sequence
  Description of Artificial Sequence: Synthetic oligonucleotide
gcaagucacaggaaccagc

SEQ ID NO: 1708724 - RNA, 19 nt, Artificial Sequence
  Description of Artificial Sequence: Synthetic oligonucleotide
gagcaccaacugcaagaug

SEQ ID NO: 1708725 - RNA, 19 nt, Artificial Sequence
  Description of Artificial Sequence: Synthetic oligonucleotide
gcaaauggaguugacaggu

SEQ ID NO: 1708726 - RNA, 19 nt, Artificial Sequence
  Description of Artificial Sequence: Synthetic oligonucleotide
gucacacgaaggccacgag

SEQ ID NO: 1708727 - RNA, 19 nt, Artificial Sequence
  Description of Artificial Sequence: Synthetic oligonucleotide
agguacagccauagcaagu

SEQ ID NO: 1708728 - RNA, 19 nt, Artificial Sequence
  Description of Artificial Sequence: Synthetic oligonucleotide
ggguaaugucaguuaccag

SEQ ID NO: 1708729 - RNA, 19 nt, Artificial Sequence
  Description of Artificial Sequence: Synthetic oligonucleotide
aacgugcacccugcucauc

SEQ ID NO: 1708730 - RNA, 19 nt, Artificial Sequence
  Description of Artificial Sequence: Synthetic oligonucleotide
gagggauuucugggauagg

SEQ ID NO: 1708731 - RNA, 19 nt, Artificial Sequence
  Description of Artificial Sequence: Synthetic oligonucleotide
cagcuugaccuucacagua

SEQ ID NO: 1708732 - RNA, 19 nt, Artificial Sequence
  Description of Artificial Sequence: Synthetic oligonucleotide
uggucacacgaaggccacg

SEQ ID NO: 1708733 - RNA, 19 nt, Artificial Sequence
  Description of Artificial Sequence: Synthetic oligonucleotide
aguugacaggugugagaaa

SEQ ID NO: 1708734 - RNA, 19 nt, Artificial Sequence
  Description of Artificial Sequence: Synthetic oligonucleotide
cgugcuaaaagacuguuua

SEQ ID NO: 1708735 - RNA, 19 nt, Artificial Sequence
  Description of Artificial Sequence: Synthetic oligonucleotide
cacugcaaauggaguugac

SEQ ID NO: 1708736 - RNA, 19 nt, Artificial Sequence
  Description of Artificial Sequence: Synthetic oligonucleotide
gcacccagaaacucaaucu

SEQ ID NO: 1708737 - RNA, 19 nt, Artificial Sequence
  Description of Artificial Sequence: Synthetic oligonucleotide
cagugcucucaucuauguc

SEQ ID NO: 1708738 - RNA, 19 nt, Artificial Sequence
  Description of Artificial Sequence: Synthetic oligonucleotide
gaguagacagugcucucau

SEQ ID NO: 1708739 - RNA, 19 nt, Artificial Sequence
  Description of Artificial Sequence: Synthetic oligonucleotide
cacgaguagacagugcucu

SEQ ID NO: 1708740 - RNA, 19 nt, Artificial Sequence
  Description of Artificial Sequence: Synthetic oligonucleotide
cuucaccgaacaucccgca

SEQ ID NO: 1708741 - RNA, 19 nt, Artificial Sequence
  Description of Artificial Sequence: Synthetic oligonucleotide
caggaccaugcuccagaag

SEQ ID NO: 1708742 - RNA, 19 nt, Artificial Sequence
  Description of Artificial Sequence: Synthetic oligonucleotide
ucccgcaggcauccuggac

SEQ ID NO: 1708743 - RNA, 19 nt, Artificial Sequence
  Description of Artificial Sequence: Synthetic oligonucleotide
ccaaguacacuucaccgaa

SEQ ID NO: 1708744 - RNA, 19 nt, Artificial Sequence
  Description of Artificial Sequence: Synthetic oligonucleotide
agcgucccugaagaguaug

SEQ ID NO: 1708745 - RNA, 19 nt, Artificial Sequence
  Description of Artificial Sequence: Synthetic oligonucleotide
cauccuggacuagaaggca

SEQ ID NO: 1708746 - RNA, 19 nt, Artificial Sequence
  Description of Artificial Sequence: Synthetic oligonucleotide
guacaugcaagagggauuu

SEQ ID NO: 1708747 - RNA, 19 nt, Artificial Sequence
  Description of Artificial Sequence: Synthetic oligonucleotide
ccagagggugccauccaag

SEQ ID NO: 1708748 - RNA, 19 nt, Artificial Sequence
  Description of Artificial Sequence: Synthetic oligonucleotide
cacggccaauugugaacag

SEQ ID NO: 1708749 - RNA, 19 nt, Artificial Sequence
  Description of Artificial Sequence: Synthetic oligonucleotide
auagaucgggaggguuuug

SEQ ID NO: 1708750 - RNA, 19 nt, Artificial Sequence
  Description of Artificial Sequence: Synthetic oligonucleotide
cgaagagcgucccugaaga

SEQ ID NO: 1708751 - RNA, 19 nt, Artificial Sequence
  Description of Artificial Sequence: Synthetic oligonucleotide
gcugcaacgugcacccugc

SEQ ID NO: 1708752 - RNA, 19 nt, Artificial Sequence
  Description of Artificial Sequence: Synthetic oligonucleotide
ggguuuugggaaggcagug

SEQ ID NO: 1708753 - RNA, 19 nt, Artificial Sequence
  Description of Artificial Sequence: Synthetic oligonucleotide
gugacacggccaauuguga

SEQ ID NO: 1708754 - RNA, 19 nt, Artificial Sequence
  Description of Artificial Sequence: Synthetic oligonucleotide
cuucagaacucccauccuu

SEQ ID NO: 1708755 - RNA, 19 nt, Artificial Sequence
  Description of Artificial Sequence: Synthetic oligonucleotide
ggucacacgaaggccacga

SEQ ID NO: 1708756 - RNA, 19 nt, Artificial Sequence
  Description of Artificial Sequence: Synthetic oligonucleotide
ugucccacugugugcccuu

SEQ ID NO: 1708757 - RNA, 19 nt, Artificial Sequence
  Description of Artificial Sequence: Synthetic oligonucleotide
ggccucgugugacagucca

SEQ ID NO: 1708758 - RNA, 19 nt, Artificial Sequence
  Description of Artificial Sequence: Synthetic oligonucleotide
ucaugcccauggguccagc

SEQ ID NO: 1708759 - RNA, 19 nt, Artificial Sequence
  Description of Artificial Sequence: Synthetic oligonucleotide
ggcaaggcuuuaucucuuc

SEQ ID NO: 1708760 - RNA, 19 nt, Artificial Sequence
  Description of Artificial Sequence: Synthetic oligonucleotide
cagggugacgcagcugguc

SEQ ID NO: 1708761 - RNA, 19 nt, Artificial Sequence
  Description of Artificial Sequence: Synthetic oligonucleotide
guacuacuacucggacccc

SEQ ID NO: 1708762 - RNA, 19 nt, Artificial Sequence
  Description of Artificial Sequence: Synthetic oligonucleotide
gugugcccuugcuggcucc

SEQ ID NO: 1708763 - RNA, 19 nt, Artificial Sequence
  Description of Artificial Sequence: Synthetic oligonucleotide
cugcuaggaagggaguaaa

SEQ ID NO: 1708764 - RNA, 19 nt, Artificial Sequence
  Description of Artificial Sequence: Synthetic oligonucleotide
aucccgcaggcauccugga

SEQ ID NO: 1708765 - RNA, 19 nt, Artificial Sequence
  Description of Artificial Sequence: Synthetic oligonucleotide
uggcaccgucucugcuagg

SEQ ID NO: 1708766 - RNA, 19 nt, Artificial Sequence
  Description of Artificial Sequence: Synthetic oligonucleotide
ccccuucaauuauauugac

SEQ ID NO: 1708767 - RNA, 19 nt, Artificial Sequence
  Description of Artificial Sequence: Synthetic oligonucleotide
ggaccccggcuccagacca

SEQ ID NO: 1708768 - RNA, 19 nt, Artificial Sequence
  Description of Artificial Sequence: Synthetic oligonucleotide
uacaugcaagagggauuuc

SEQ ID NO: 1708769 - RNA, 19 nt, Artificial Sequence
  Description of Artificial Sequence: Synthetic oligonucleotide
guauguucuuccagagggu

SEQ ID NO: 1708770 - RNA, 19 nt, Artificial Sequence
  Description of Artificial Sequence: Synthetic oligonucleotide
caggaccucccuucuaacu

SEQ ID NO: 1708771 - RNA, 19 nt, Artificial Sequence
  Description of Artificial Sequence: Synthetic oligonucleotide
ccuuucgugcuaaaagacu

SEQ ID NO: 1708772 - RNA, 19 nt, Artificial Sequence
  Description of Artificial Sequence: Synthetic oligonucleotide
cccggcuccagaccauggg

SEQ ID NO: 1708773 - RNA, 19 nt, Artificial Sequence
  Description of Artificial Sequence: Synthetic oligonucleotide
cacauauaaucugacccuu

SEQ ID NO: 1708774 - RNA, 19 nt, Artificial Sequence
  Description of Artificial Sequence: Synthetic oligonucleotide
ggccaauugugaacaguuc

SEQ ID NO: 1708775 - RNA, 19 nt, Artificial Sequence
  Description of Artificial Sequence: Synthetic oligonucleotide
ggcauagaagcugcaacgu

SEQ ID NO: 1708776 - RNA, 19 nt, Artificial Sequence
  Description of Artificial Sequence: Synthetic oligonucleotide
gcacacugcaaauggaguu

SEQ ID NO: 1708777 - RNA, 19 nt, Artificial Sequence
  Description of Artificial Sequence: Synthetic oligonucleotide
cucgaagagcgucccugaa

SEQ ID NO: 1708778 - RNA, 19 nt, Artificial Sequence
  Description of Artificial Sequence: Synthetic oligonucleotide
ggugccauccaaguacacu

SEQ ID NO: 1708779 - RNA, 19 nt, Artificial Sequence
  Description of Artificial Sequence: Synthetic oligonucleotide
gaccaugcuccagaagaau

SEQ ID NO: 1708780 - RNA, 19 nt, Artificial Sequence
  Description of Artificial Sequence: Synthetic oligonucleotide
gacacggcccagacucgga

SEQ ID NO: 1708781 - RNA, 19 nt, Artificial Sequence
  Description of Artificial Sequence: Synthetic oligonucleotide
ggaccucccuucuaacugu

SEQ ID NO: 1708782 - RNA, 19 nt, Artificial Sequence
  Description of Artificial Sequence: Synthetic oligonucleotide
cgaacaucccgcaggcauc

SEQ ID NO: 1708783 - RNA, 19 nt, Artificial Sequence
  Description of Artificial Sequence: Synthetic oligonucleotide
ggccccaacuccuucccaa

SEQ ID NO: 1708784 - RNA, 19 nt, Artificial Sequence
  Description of Artificial Sequence: Synthetic oligonucleotide
aggcaaggcuuuaucucuu

SEQ ID NO: 1708785 - RNA, 19 nt, Artificial Sequence
  Description of Artificial Sequence: Synthetic oligonucleotide
ccucgugugacaguccaga

SEQ ID NO: 1708786 - RNA, 19 nt, Artificial Sequence
  Description of Artificial Sequence: Synthetic oligonucleotide
gguacaugcaagagggauu

SEQ ID NO: 1708787 - RNA, 19 nt, Artificial Sequence
  Description of Artificial Sequence: Synthetic oligonucleotide
gcuugaccuucacaguacu

SEQ ID NO: 1708788 - RNA, 19 nt, Artificial Sequence
  Description of Artificial Sequence: Synthetic oligonucleotide
aagcugcaacgugcacccu

SEQ ID NO: 1708789 - RNA, 19 nt, Artificial Sequence
  Description of Artificial Sequence: Synthetic oligonucleotide
gugagaaaguccaguucau

SEQ ID NO: 1708790 - RNA, 19 nt, Artificial Sequence
  Description of Artificial Sequence: Synthetic oligonucleotide
accccggcuccagaccaug

SEQ ID NO: 1708791 - RNA, 19 nt, Artificial Sequence
  Description of Artificial Sequence: Synthetic oligonucleotide
cugccuugucaugcccaug

SEQ ID NO: 1708792 - RNA, 19 nt, Artificial Sequence
  Description of Artificial Sequence: Synthetic oligonucleotide
gggaggguuuugggaaggc

SEQ ID NO: 1708793 - RNA, 19 nt, Artificial Sequence
  Description of Artificial Sequence: Synthetic oligonucleotide
agaccaugggccagcucuu

SEQ ID NO: 1708794 - RNA, 19 nt, Artificial Sequence
  Description of Artificial Sequence: Synthetic oligonucleotide
cauagaucgggaggguuuu

SEQ ID NO: 1708795 - RNA, 19 nt, Artificial Sequence
  Description of Artificial Sequence: Synthetic oligonucleotide
cucagaaauuggguccccu

SEQ ID NO: 1708796 - RNA, 19 nt, Artificial Sequence
  Description of Artificial Sequence: Synthetic oligonucleotide
ccgucucugcuaggaaggg

SEQ ID NO: 1708797 - RNA, 19 nt, Artificial Sequence
  Description of Artificial Sequence: Synthetic oligonucleotide
gaccucccuucuaacugua

SEQ ID NO: 1708798 - RNA, 19 nt, Artificial Sequence
  Description of Artificial Sequence: Synthetic oligonucleotide
gcucagaaauugggucccc

SEQ ID NO: 1708799 - RNA, 19 nt, Artificial Sequence
  Description of Artificial Sequence: Synthetic oligonucleotide
ggagcaccaacugcaagau

SEQ ID NO: 1708800 - RNA, 19 nt, Artificial Sequence
  Description of Artificial Sequence: Synthetic oligonucleotide
cuacauagaucgggagggu

SEQ ID NO: 1708801 - RNA, 19 nt, Artificial Sequence
  Description of Artificial Sequence: Synthetic oligonucleotide
ccgaacaucccgcaggcau

SEQ ID NO: 1708802 - RNA, 19 nt, Artificial Sequence
  Description of Artificial Sequence: Synthetic oligonucleotide
ggccacgaguagacagugc

SEQ ID NO: 1708803 - RNA, 19 nt, Artificial Sequence
  Description of Artificial Sequence: Synthetic oligonucleotide
guaaaggccccaacuccuu

SEQ ID NO: 1708804 - RNA, 19 nt, Artificial Sequence
  Description of Artificial Sequence: Synthetic oligonucleotide
cagccagauuuccuuucgu

SEQ ID NO: 1708805 - RNA, 19 nt, Artificial Sequence
  Description of Artificial Sequence: Synthetic oligonucleotide
accucccuucuaacuguau

SEQ ID NO: 1708806 - RNA, 19 nt, Artificial Sequence
  Description of Artificial Sequence: Synthetic oligonucleotide
ccccggcuccagaccaugg

SEQ ID NO: 1708807 - RNA, 19 nt, Artificial Sequence
  Description of Artificial Sequence: Synthetic oligonucleotide
gccucgugugacaguccag

SEQ ID NO: 1708808 - RNA, 19 nt, Artificial Sequence
  Description of Artificial Sequence: Synthetic oligonucleotide
caacgugcacccugcucau

SEQ ID NO: 1708809 - RNA, 19 nt, Artificial Sequence
  Description of Artificial Sequence: Synthetic oligonucleotide
cucggaccccggcuccaga

SEQ ID NO: 1708810 - RNA, 19 nt, Artificial Sequence
  Description of Artificial Sequence: Synthetic oligonucleotide
cgggaggguuuugggaagg

SEQ ID NO: 1708811 - RNA, 19 nt, Artificial Sequence
  Description of Artificial Sequence: Synthetic oligonucleotide
gcaccgucucugcuaggaa

SEQ ID NO: 1708812 - RNA, 19 nt, Artificial Sequence
  Description of Artificial Sequence: Synthetic oligonucleotide
gggccucgugugacagucc

SEQ ID NO: 1708813 - RNA, 19 nt, Artificial Sequence
  Description of Artificial Sequence: Synthetic oligonucleotide
cggccaauugugaacaguu

SEQ ID NO: 1708814 - RNA, 19 nt, Artificial Sequence
  Description of Artificial Sequence: Synthetic oligonucleotide
gcgucccugaagaguaugu

SEQ ID NO: 1708815 - RNA, 19 nt, Artificial Sequence
  Description of Artificial Sequence: Synthetic oligonucleotide
gguccccuucaauuauauu

SEQ ID NO: 1708816 - RNA, 19 nt, Artificial Sequence
  Description of Artificial Sequence: Synthetic oligonucleotide
ccgcaggcauccuggacua

SEQ ID NO: 1708817 - RNA, 19 nt, Artificial Sequence
  Description of Artificial Sequence: Synthetic oligonucleotide
ggacugcacaaagcagagu

SEQ ID NO: 1708818 - RNA, 19 nt, Artificial Sequence
  Description of Artificial Sequence: Synthetic oligonucleotide
cugggccucgugugacagu

SEQ ID NO: 1708819 - RNA, 19 nt, Artificial Sequence
  Description of Artificial Sequence: Synthetic oligonucleotide
ccagaccaugggccagcuc

SEQ ID NO: 1708820 - RNA, 19 nt, Artificial Sequence
  Description of Artificial Sequence: Synthetic oligonucleotide
cugcacccagaaacucaau

SEQ ID NO: 1708821 - RNA, 19 nt, Artificial Sequence
  Description of Artificial Sequence: Synthetic oligonucleotide
cugcaacgugcacccugcu

SEQ ID NO: 1708822 - RNA, 19 nt, Artificial Sequence
  Description of Artificial Sequence: Synthetic oligonucleotide
gagcgucccugaagaguau

SEQ ID NO: 1708823 - RNA, 19 nt, Artificial Sequence
  Description of Artificial Sequence: Synthetic oligonucleotide
ccagacucggaggcacaga

SEQ ID NO: 1708824 - RNA, 19 nt, Artificial Sequence
  Description of Artificial Sequence: Synthetic oligonucleotide
uucuaaaugacacugaugc

SEQ ID NO: 1708825 - RNA, 19 nt, Artificial Sequence
  Description of Artificial Sequence: Synthetic oligonucleotide
uuaaucacgacauuggugg

SEQ ID NO: 1708826 - RNA, 19 nt, Artificial Sequence
  Description of Artificial Sequence: Synthetic oligonucleotide
uggaguucaauaaacaacg

SEQ ID NO: 1708827 - RNA, 19 nt, Artificial Sequence
  Description of Artificial Sequence: Synthetic oligonucleotide
caaauugaagguuagagcc

SEQ ID NO: 1708828 - RNA, 19 nt, Artificial Sequence
  Description of Artificial Sequence: Synthetic oligonucleotide
ugugguacaagguagagug

SEQ ID NO: 1708829 - RNA, 19 nt, Artificial Sequence
  Description of Artificial Sequence: Synthetic oligonucleotide
uugacugacgcuaacaugc

SEQ ID NO: 1708830 - RNA, 19 nt, Artificial Sequence
  Description of Artificial Sequence: Synthetic oligonucleotide
ucuacuagcacccagcccu

SEQ ID NO: 1708831 - RNA, 19 nt, Artificial Sequence
  Description of Artificial Sequence: Synthetic oligonucleotide
ucgaucguaauacacacag

SEQ ID NO: 1708832 - RNA, 19 nt, Artificial Sequence
  Description of Artificial Sequence: Synthetic oligonucleotide
aguucaauaaacaacguag

SEQ ID NO: 1708833 - RNA, 19 nt, Artificial Sequence
  Description of Artificial Sequence: Synthetic oligonucleotide
uaagguacuagcuucucgg

SEQ ID NO: 1708834 - RNA, 19 nt, Artificial Sequence
  Description of Artificial Sequence: Synthetic oligonucleotide
uuuuccagaucacauggcg

SEQ ID NO: 1708835 - RNA, 19 nt, Artificial Sequence
  Description of Artificial Sequence: Synthetic oligonucleotide
agauauucagcccugcuuc

SEQ ID NO: 1708836 - RNA, 19 nt, Artificial Sequence
  Description of Artificial Sequence: Synthetic oligonucleotide
  modified_base (14)..(14): a, c, u, g, unknown or other
acugguuuguacunagggg

SEQ ID NO: 1708837 - RNA, 19 nt, Artificial Sequence
  Description of Artificial Sequence: Synthetic oligonucleotide
aaacaacguagucacaguc

SEQ ID NO: 1708838 - RNA, 19 nt, Artificial Sequence
  Description of Artificial Sequence: Synthetic oligonucleotide
auguaaaccucuguaaucc

SEQ ID NO: 1708839 - RNA, 19 nt, Artificial Sequence
  Description of Artificial Sequence: Synthetic oligonucleotide
ucguaauacacacagcuga

SEQ ID NO: 1708840 - RNA, 19 nt, Artificial Sequence
  Description of Artificial Sequence: Synthetic oligonucleotide
uuauuguugaccacaacgu

SEQ ID NO: 1708841 - RNA, 19 nt, Artificial Sequence
  Description of Artificial Sequence: Synthetic oligonucleotide
uuaaucaaagacagcacca

SEQ ID NO: 1708842 - RNA, 19 nt, Artificial Sequence
  Description of Artificial Sequence: Synthetic oligonucleotide
uccaaauugaagguuagag

SEQ ID NO: 1708843 - RNA, 19 nt, Artificial Sequence
  Description of Artificial Sequence: Synthetic oligonucleotide
acuagcuucucggagaagc

SEQ ID NO: 1708844 - RNA, 19 nt, Artificial Sequence
  Description of Artificial Sequence: Synthetic oligonucleotide
auaaacaacguagucacag

SEQ ID NO: 1708845 - RNA, 19 nt, Artificial Sequence
  Description of Artificial Sequence: Synthetic oligonucleotide
acucuguuuacaucaaggg

SEQ ID NO: 1708846 - RNA, 19 nt, Artificial Sequence
  Description of Artificial Sequence: Synthetic oligonucleotide
auauggaauauccacgaug

SEQ ID NO: 1708847 - RNA, 19 nt, Artificial Sequence
  Description of Artificial Sequence: Synthetic oligonucleotide
uauggcauguugauauggg

SEQ ID NO: 1708848 - RNA, 19 nt, Artificial Sequence
  Description of Artificial Sequence: Synthetic oligonucleotide
aaaugacacaaauccaccu

SEQ ID NO: 1708849 - RNA, 19 nt, Artificial Sequence
  Description of Artificial Sequence: Synthetic oligonucleotide
gaagguuagagccuguuuc

SEQ ID NO: 1708850 - RNA, 19 nt, Artificial Sequence
  Description of Artificial Sequence: Synthetic oligonucleotide
uguaucuggaguucaauaa

SEQ ID NO: 1708851 - RNA, 19 nt, Artificial Sequence
  Description of Artificial Sequence: Synthetic oligonucleotide
accgagucgaugaagaggc

SEQ ID NO: 1708852 - RNA, 19 nt, Artificial Sequence
  Description of Artificial Sequence: Synthetic oligonucleotide
aacguagaagugugaguac

SEQ ID NO: 1708853 - RNA, 19 nt, Artificial Sequence
  Description of Artificial Sequence: Synthetic oligonucleotide
uugaaucaaggccacaggu

SEQ ID NO: 1708854 - RNA, 19 nt, Artificial Sequence
  Description of Artificial Sequence: Synthetic oligonucleotide
ucgaucacuugcucgaagg

SEQ ID NO: 1708855 - RNA, 19 nt, Artificial Sequence
  Description of Artificial Sequence: Synthetic oligonucleotide
uguuucucgaucguaauac

SEQ ID NO: 1708856 - RNA, 19 nt, Artificial Sequence
  Description of Artificial Sequence: Synthetic oligonucleotide
caaaguguccaaauugaag

SEQ ID NO: 1708857 - RNA, 19 nt, Artificial Sequence
  Description of Artificial Sequence: Synthetic oligonucleotide
cuggaguucaauaaacaac

SEQ ID NO: 1708858 - RNA, 19 nt, Artificial Sequence
  Description of Artificial Sequence: Synthetic oligonucleotide
uucaauaaacaacguaguc

SEQ ID NO: 1708859 - RNA, 19 nt, Artificial Sequence
  Description of Artificial Sequence: Synthetic oligonucleotide
acaacguagucacagucag

SEQ ID NO: 1708860 - RNA, 19 nt, Artificial Sequence
  Description of Artificial Sequence: Synthetic oligonucleotide
ugguauggcauguugauau

SEQ ID NO: 1708861 - RNA, 19 nt, Artificial Sequence
  Description of Artificial Sequence: Synthetic oligonucleotide
gauauguaaaccucuguaa

SEQ ID NO: 1708862 - RNA, 19 nt, Artificial Sequence
  Description of Artificial Sequence: Synthetic oligonucleotide
uucucgaucguaauacaca

SEQ ID NO: 1708863 - RNA, 19 nt, Artificial Sequence
  Description of Artificial Sequence: Synthetic oligonucleotide
acgacauugguggaguugc

SEQ ID NO: 1708864 - RNA, 19 nt, Artificial Sequence
  Description of Artificial Sequence: Synthetic oligonucleotide
cucuccauugccuuugggg

SEQ ID NO: 1708865 - RNA, 19 nt, Artificial Sequence
  Description of Artificial Sequence: Synthetic oligonucleotide
aauugaagguuagagccug

SEQ ID NO: 1708866 - RNA, 19 nt, Artificial Sequence
  Description of Artificial Sequence: Synthetic oligonucleotide
cuuaaucacgacauuggug

SEQ ID NO: 1708867 - RNA, 19 nt, Artificial Sequence
  Description of Artificial Sequence: Synthetic oligonucleotide
auggcauguugauaugggc

SEQ ID NO: 1708868 - RNA, 19 nt, Artificial Sequence
  Description of Artificial Sequence: Synthetic oligonucleotide
agagccuguuucucgaucg

SEQ ID NO: 1708869 - RNA, 19 nt, Artificial Sequence
  Description of Artificial Sequence: Synthetic oligonucleotide
ucuuaaucaaagacagcac

SEQ ID NO: 1708870 - RNA, 19 nt, Artificial Sequence
  Description of Artificial Sequence: Synthetic oligonucleotide
gacgcuaacaugcagaggu

SEQ ID NO: 1708871 - RNA, 19 nt, Artificial Sequence
  Description of Artificial Sequence: Synthetic oligonucleotide
aagguuagagccuguuucu

SEQ ID NO: 1708872 - RNA, 19 nt, Artificial Sequence
  Description of Artificial Sequence: Synthetic oligonucleotide
ucucgaucguaauacacac

SEQ ID NO: 1708873 - RNA, 19 nt, Artificial Sequence
  Description of Artificial Sequence: Synthetic oligonucleotide
uagaguggaacucaguguu

SEQ ID NO: 1708874 - RNA, 19 nt, Artificial Sequence
  Description of Artificial Sequence: Synthetic oligonucleotide
  modified_base (16)..(16): a, c, u, g, unknown or other
ucacugguuuguacunagg

SEQ ID NO: 1708875 - RNA, 19 nt, Artificial Sequence
  Description of Artificial Sequence: Synthetic oligonucleotide
uuugacugacgcuaacaug

SEQ ID NO: 1708876 - RNA, 19 nt, Artificial Sequence
  Description of Artificial Sequence: Synthetic oligonucleotide
uuucucgaucguaauacac

SEQ ID NO: 1708877 - RNA, 19 nt, Artificial Sequence
  Description of Artificial Sequence: Synthetic oligonucleotide
uucaguuugacugacgcua

SEQ ID NO: 1708878 - RNA, 19 nt, Artificial Sequence
  Description of Artificial Sequence: Synthetic oligonucleotide
ugcugugcaauaauucugu

SEQ ID NO: 1708879 - RNA, 19 nt, Artificial Sequence
  Description of Artificial Sequence: Synthetic oligonucleotide
ucgcugucuucucugaucc

SEQ ID NO: 1708880 - RNA, 19 nt, Artificial Sequence
  Description of Artificial Sequence: Synthetic oligonucleotide
cuuuggggaggcaaagucc

SEQ ID NO: 1708881 - RNA, 19 nt, Artificial Sequence
  Description of Artificial Sequence: Synthetic oligonucleotide
uuggcgguaucucuacuag

SEQ ID NO: 1708882 - RNA, 19 nt, Artificial Sequence
  Description of Artificial Sequence: Synthetic oligonucleotide
uccagcgaaacacgaaggc

SEQ ID NO: 1708883 - RNA, 19 nt, Artificial Sequence
  Description of Artificial Sequence: Synthetic oligonucleotide
aacacaucgcugucuucuc

SEQ ID NO: 1708884 - RNA, 19 nt, Artificial Sequence
  Description of Artificial Sequence: Synthetic oligonucleotide
uucccacaagcuaaugaag

SEQ ID NO: 1708885 - RNA, 19 nt, Artificial Sequence
  Description of Artificial Sequence: Synthetic oligonucleotide
guugauaugggcaucuuga

SEQ ID NO: 1708886 - RNA, 19 nt, Artificial Sequence
  Description of Artificial Sequence: Synthetic oligonucleotide
cuaagguacuagcuucucg

SEQ ID NO: 1708887 - RNA, 19 nt, Artificial Sequence
  Description of Artificial Sequence: Synthetic oligonucleotide
cuugaaucaaggccacagg

SEQ ID NO: 1708888 - RNA, 19 nt, Artificial Sequence
  Description of Artificial Sequence: Synthetic oligonucleotide
guaaucccuuccuuggcgg

SEQ ID NO: 1708889 - RNA, 19 nt, Artificial Sequence
  Description of Artificial Sequence: Synthetic oligonucleotide
ucucuacuagcacccagcc

SEQ ID NO: 1708890 - RNA, 19 nt, Artificial Sequence
  Description of Artificial Sequence: Synthetic oligonucleotide
acauugguggaguugcaug

SEQ ID NO: 1708891 - RNA, 19 nt, Artificial Sequence
  Description of Artificial Sequence: Synthetic oligonucleotide
uccacuaagguacuagcuu

SEQ ID NO: 1708892 - RNA, 19 nt, Artificial Sequence
  Description of Artificial Sequence: Synthetic oligonucleotide
ucggagaagcaguucagug

SEQ ID NO: 1708893 - RNA, 19 nt, Artificial Sequence
  Description of Artificial Sequence: Synthetic oligonucleotide
aauauccacgauguucucu

SEQ ID NO: 1708894 - RNA, 19 nt, Artificial Sequence
  Description of Artificial Sequence: Synthetic oligonucleotide
ucccuucuaaaugacacug

SEQ ID NO: 1708895 - RNA, 19 nt, Artificial Sequence
  Description of Artificial Sequence: Synthetic oligonucleotide
guacacuccgcccagggug

SEQ ID NO: 1708896 - RNA, 19 nt, Artificial Sequence
  Description of Artificial Sequence: Synthetic oligonucleotide
gaauugacccuugaugcug

SEQ ID NO: 1708897 - RNA, 19 nt, Artificial Sequence
  Description of Artificial Sequence: Synthetic oligonucleotide
aaucacgacauugguggag

SEQ ID NO: 1708898 - RNA, 19 nt, Artificial Sequence
  Description of Artificial Sequence: Synthetic oligonucleotide
uguaaaccucuguaauccc

SEQ ID NO: 1708899 - RNA, 19 nt, Artificial Sequence
  Description of Artificial Sequence: Synthetic oligonucleotide
ugcagacgcagaauugacc

SEQ ID NO: 1708900 - RNA, 19 nt, Artificial Sequence
  Description of Artificial Sequence: Synthetic oligonucleotide
aaauugaagguuagagccu

SEQ ID NO: 1708901 - RNA, 19 nt, Artificial Sequence
  Description of Artificial Sequence: Synthetic oligonucleotide
aucgcugucuucucugauc

SEQ ID NO: 1708902 - RNA, 19 nt, Artificial Sequence
  Description of Artificial Sequence: Synthetic oligonucleotide
agcuucuuaaucaaagaca

SEQ ID NO: 1708903 - RNA, 19 nt, Artificial Sequence
  Description of Artificial Sequence: Synthetic oligonucleotide
cauccacuaagguacuagc

SEQ ID NO: 1708904 - RNA, 19 nt, Artificial Sequence
  Description of Artificial Sequence: Synthetic oligonucleotide
aacaacguagucacaguca

SEQ ID NO: 1708905 - RNA, 19 nt, Artificial Sequence
  Description of Artificial Sequence: Synthetic oligonucleotide
cuucuaaaugacacugaug

SEQ ID NO: 1708906 - RNA, 19 nt, Artificial Sequence
  Description of Artificial Sequence: Synthetic oligonucleotide
uacacuccgcccagggugg

SEQ ID NO: 1708907 - RNA, 19 nt, Artificial Sequence
  Description of Artificial Sequence: Synthetic oligonucleotide
uaaacaacguagucacagu

SEQ ID NO: 1708908 - RNA, 19 nt, Artificial Sequence
  Description of Artificial Sequence: Synthetic oligonucleotide
ccaaauugaagguuagagc

SEQ ID NO: 1708909 - RNA, 19 nt, Artificial Sequence
  Description of Artificial Sequence: Synthetic oligonucleotide
ugcucgaagguuucguucu

SEQ ID NO: 1708910 - RNA, 19 nt, Artificial Sequence
  Description of Artificial Sequence: Synthetic oligonucleotide
uugauguguaucuggaguu

SEQ ID NO: 1708911 - RNA, 19 nt, Artificial Sequence
  Description of Artificial Sequence: Synthetic oligonucleotide
gcagacgcagaauugaccc

SEQ ID NO: 1708912 - RNA, 19 nt, Artificial Sequence
  Description of Artificial Sequence: Synthetic oligonucleotide
ugauaugggcaucuugaau

SEQ ID NO: 1708913 - RNA, 19 nt, Artificial Sequence
  Description of Artificial Sequence: Synthetic oligonucleotide
agaauugacccuugaugcu

SEQ ID NO: 1708914 - RNA, 19 nt, Artificial Sequence
  Description of Artificial Sequence: Synthetic oligonucleotide
ugguacaagguagagugga

SEQ ID NO: 1708915 - RNA, 19 nt, Artificial Sequence
  Description of Artificial Sequence: Synthetic oligonucleotide
uacgaguagcugaggaccc

SEQ ID NO: 1708916 - RNA, 19 nt, Artificial Sequence
  Description of Artificial Sequence: Synthetic oligonucleotide
agcuuacucuucucgauca

SEQ ID NO: 1708917 - RNA, 19 nt, Artificial Sequence
  Description of Artificial Sequence: Synthetic oligonucleotide
aagguacuagcuucucgga

SEQ ID NO: 1708918 - RNA, 19 nt, Artificial Sequence
  Description of Artificial Sequence: Synthetic oligonucleotide
caggcuaacauucucaucu

SEQ ID NO: 1708919 - RNA, 19 nt, Artificial Sequence
  Description of Artificial Sequence: Synthetic oligonucleotide
aagugugaguacagggccg

SEQ ID NO: 1708920 - RNA, 19 nt, Artificial Sequence
  Description of Artificial Sequence: Synthetic oligonucleotide
guagaagugugaguacagg

SEQ ID NO: 1708921 - RNA, 19 nt, Artificial Sequence
  Description of Artificial Sequence: Synthetic oligonucleotide
accgcugaacaugaggagg

SEQ ID NO: 1708922 - RNA, 19 nt, Artificial Sequence
  Description of Artificial Sequence: Synthetic oligonucleotide
uggcacaccgagucgauga

SEQ ID NO: 1708923 - RNA, 19 nt, Artificial Sequence
  Description of Artificial Sequence: Synthetic oligonucleotide
agguacuagcuucucggag

SEQ ID NO: 1708924 - RNA, 19 nt, Artificial Sequence
  Description of Artificial Sequence: Synthetic oligonucleotide
gguuagagccuguuucucg

SEQ ID NO: 1708925 - RNA, 19 nt, Artificial Sequence
  Description of Artificial Sequence: Synthetic oligonucleotide
acaacguagaagugugagu

SEQ ID NO: 1708926 - RNA, 19 nt, Artificial Sequence
  Description of Artificial Sequence: Synthetic oligonucleotide
aacucaguguuguccuuga

SEQ ID NO: 1708927 - RNA, 19 nt, Artificial Sequence
  Description of Artificial Sequence: Synthetic oligonucleotide
gccgggaagauauucagcc

SEQ ID NO: 1708928 - RNA, 19 nt, Artificial Sequence
  Description of Artificial Sequence: Synthetic oligonucleotide
uugccgauaggccuucacu

SEQ ID NO: 1708929 - RNA, 19 nt, Artificial Sequence
  Description of Artificial Sequence: Synthetic oligonucleotide
cacaacguagaagugugag

SEQ ID NO: 1708930 - RNA, 19 nt, Artificial Sequence
  Description of Artificial Sequence: Synthetic oligonucleotide
cauauggcacaccgagucg

SEQ ID NO: 1708931 - RNA, 19 nt, Artificial Sequence
  Description of Artificial Sequence: Synthetic oligonucleotide
accaugugguacaagguag

SEQ ID NO: 1708932 - RNA, 19 nt, Artificial Sequence
  Description of Artificial Sequence: Synthetic oligonucleotide
gaguucaauaaacaacgua

SEQ ID NO: 1708933 - RNA, 19 nt, Artificial Sequence
  Description of Artificial Sequence: Synthetic oligonucleotide
cuccagcgaaacacgaagg

SEQ ID NO: 1708934 - RNA, 19 nt, Artificial Sequence
  Description of Artificial Sequence: Synthetic oligonucleotide
uugauaugggcaucuugaa

SEQ ID NO: 1708935 - RNA, 19 nt, Artificial Sequence
  Description of Artificial Sequence: Synthetic oligonucleotide
acaggcuaacauucucauc

SEQ ID NO: 1708936 - RNA, 19 nt, Artificial Sequence
  Description of Artificial Sequence: Synthetic oligonucleotide
agggcuauuugccgauagg

SEQ ID NO: 1708937 - RNA, 19 nt, Artificial Sequence
  Description of Artificial Sequence: Synthetic oligonucleotide
ucgaagguuucguucuucu

SEQ ID NO: 1708938 - RNA, 19 nt, Artificial Sequence
  Description of Artificial Sequence: Synthetic oligonucleotide
gaccuuauuguugaccaca

SEQ ID NO: 1708939 - RNA, 19 nt, Artificial Sequence
  Description of Artificial Sequence: Synthetic oligonucleotide
ucaguuugacugacgcuaa

SEQ ID NO: 1708940 - RNA, 19 nt, Artificial Sequence
  Description of Artificial Sequence: Synthetic oligonucleotide
accacaacguagaagugug

SEQ ID NO: 1708941 - RNA, 19 nt, Artificial Sequence
  Description of Artificial Sequence: Synthetic oligonucleotide
ugaagguuagagccuguuu

SEQ ID NO: 1708942 - RNA, 19 nt, Artificial Sequence
  Description of Artificial Sequence: Synthetic oligonucleotide
guaucuggaguucaauaaa

SEQ ID NO: 1708943 - RNA, 19 nt, Artificial Sequence
  Description of Artificial Sequence: Synthetic oligonucleotide
acgaaggcggagcucagca

SEQ ID NO: 1708944 - RNA, 19 nt, Artificial Sequence
  Description of Artificial Sequence: Synthetic oligonucleotide
accagcuuacucuucucga

SEQ ID NO: 1708945 - RNA, 19 nt, Artificial Sequence
  Description of Artificial Sequence: Synthetic oligonucleotide
aguuugacugacgcuaaca

SEQ ID NO: 1708946 - RNA, 19 nt, Artificial Sequence
  Description of Artificial Sequence: Synthetic oligonucleotide
acugacgcuaacaugcaga

SEQ ID NO: 1708947 - RNA, 19 nt, Artificial Sequence
  Description of Artificial Sequence: Synthetic oligonucleotide
aauaaacaacguagucaca

SEQ ID NO: 1708948 - RNA, 19 nt, Artificial Sequence
  Description of Artificial Sequence: Synthetic oligonucleotide
gguacuagcuucucggaga

SEQ ID NO: 1708949 - RNA, 19 nt, Artificial Sequence
  Description of Artificial Sequence: Synthetic oligonucleotide
aauugacccuugaugcugu

SEQ ID NO: 1708950 - RNA, 19 nt, Artificial Sequence
  Description of Artificial Sequence: Synthetic oligonucleotide
caccgagucgaugaagagg

SEQ ID NO: 1708951 - RNA, 19 nt, Artificial Sequence
  Description of Artificial Sequence: Synthetic oligonucleotide
ugccgauaggccuucacuu

SEQ ID NO: 1708952 - RNA, 19 nt, Artificial Sequence
  Description of Artificial Sequence: Synthetic oligonucleotide
gcauauggcacaccgaguc

SEQ ID NO: 1708953 - RNA, 19 nt, Artificial Sequence
  Description of Artificial Sequence: Synthetic oligonucleotide
gaacucaguguuguccuug

SEQ ID NO: 1708954 - RNA, 19 nt, Artificial Sequence
  Description of Artificial Sequence: Synthetic oligonucleotide
aaacacgaaggcggagcuc

SEQ ID NO: 1708955 - RNA, 19 nt, Artificial Sequence
  Description of Artificial Sequence: Synthetic oligonucleotide
ugcucugucaccgcugaac

SEQ ID NO: 1708956 - RNA, 19 nt, Artificial Sequence
  Description of Artificial Sequence: Synthetic oligonucleotide
ggauauguaaaccucugua

SEQ ID NO: 1708957 - RNA, 19 nt, Artificial Sequence
  Description of Artificial Sequence: Synthetic oligonucleotide
ugacugacgcuaacaugca

SEQ ID NO: 1708958 - RNA, 19 nt, Artificial Sequence
  Description of Artificial Sequence: Synthetic oligonucleotide
gcuccagcgaaacacgaag

SEQ ID NO: 1708959 - RNA, 19 nt, Artificial Sequence
  Description of Artificial Sequence: Synthetic oligonucleotide
uuugccgauaggccuucac

SEQ ID NO: 1708960 - RNA, 19 nt, Artificial Sequence
  Description of Artificial Sequence: Synthetic oligonucleotide
gacugacgcuaacaugcag

SEQ ID NO: 1708961 - RNA, 19 nt, Artificial Sequence
  Description of Artificial Sequence: Synthetic oligonucleotide
acguagucacagucaggac

SEQ ID NO: 1708962 - RNA, 19 nt, Artificial Sequence
  Description of Artificial Sequence: Synthetic oligonucleotide
gauguguaucuggaguuca

SEQ ID NO: 1708963 - RNA, 19 nt, Artificial Sequence
  Description of Artificial Sequence: Synthetic oligonucleotide
gcauauggaauauccacga

SEQ ID NO: 1708964 - RNA, 19 nt, Artificial Sequence
  Description of Artificial Sequence: Synthetic oligonucleotide
auauggcacaccgagucga

SEQ ID NO: 1708965 - RNA, 19 nt, Artificial Sequence
  Description of Artificial Sequence: Synthetic oligonucleotide
gaguugcaugccauguucc

SEQ ID NO: 1708966 - RNA, 19 nt, Artificial Sequence
  Description of Artificial Sequence: Synthetic oligonucleotide
caacguagaagugugagua

SEQ ID NO: 1708967 - RNA, 19 nt, Artificial Sequence
  Description of Artificial Sequence: Synthetic oligonucleotide
uaaucacgacauuggugga

SEQ ID NO: 1708968 - RNA, 19 nt, Artificial Sequence
  Description of Artificial Sequence: Synthetic oligonucleotide
ugaagaccucacccucucc

SEQ ID NO: 1708969 - RNA, 19 nt, Artificial Sequence
  Description of Artificial Sequence: Synthetic oligonucleotide
cacaccgagucgaugaaga

SEQ ID NO: 1708970 - RNA, 19 nt, Artificial Sequence
  Description of Artificial Sequence: Synthetic oligonucleotide
guacaagguagaguggaac

SEQ ID NO: 1708971 - RNA, 19 nt, Artificial Sequence
  Description of Artificial Sequence: Synthetic oligonucleotide
cacaggucccaaagugucc

SEQ ID NO: 1708972 - RNA, 19 nt, Artificial Sequence
  Description of Artificial Sequence: Synthetic oligonucleotide
caacguagucacagucagg

SEQ ID NO: 1708973 - RNA, 19 nt, Artificial Sequence
  Description of Artificial Sequence: Synthetic oligonucleotide
ugccgucugggauauguaa

SEQ ID NO: 1708974 - RNA, 19 nt, Artificial Sequence
  Description of Artificial Sequence: Synthetic oligonucleotide
caugugguacaagguagag

SEQ ID NO: 1708975 - RNA, 19 nt, Artificial Sequence
  Description of Artificial Sequence: Synthetic oligonucleotide
cacaagcuaaugaaggugu

SEQ ID NO: 1708976 - RNA, 19 nt, Artificial Sequence
  Description of Artificial Sequence: Synthetic oligonucleotide
cacaaauccaccuggaauu

SEQ ID NO: 1708977 - RNA, 19 nt, Artificial Sequence
  Description of Artificial Sequence: Synthetic oligonucleotide
ugauguguaucuggaguuc

SEQ ID NO: 1708978 - RNA, 19 nt, Artificial Sequence
  Description of Artificial Sequence: Synthetic oligonucleotide
aucacgacauugguggagu

SEQ ID NO: 1708979 - RNA, 19 nt, Artificial Sequence
  Description of Artificial Sequence: Synthetic oligonucleotide
ggaguugcaugccauguuc

SEQ ID NO: 1708980 - RNA, 19 nt, Artificial Sequence
  Description of Artificial Sequence: Synthetic oligonucleotide
gacugguauggcauguuga

SEQ ID NO: 1708981 - RNA, 19 nt, Artificial Sequence
  Description of Artificial Sequence: Synthetic oligonucleotide
cucuacuagcacccagccc

SEQ ID NO: 1708982 - RNA, 19 nt, Artificial Sequence
  Description of Artificial Sequence: Synthetic oligonucleotide
uggcgguaucucuacuagc

SEQ ID NO: 1708983 - RNA, 19 nt, Artificial Sequence
  Description of Artificial Sequence: Synthetic oligonucleotide
agguuagagccuguuucuc

SEQ ID NO: 1708984 - RNA, 19 nt, Artificial Sequence
  Description of Artificial Sequence: Synthetic oligonucleotide
ggaauauccacgauguucu

SEQ ID NO: 1708985 - RNA, 19 nt, Artificial Sequence
  Description of Artificial Sequence: Synthetic oligonucleotide
gaaacacgaaggcggagcu

SEQ ID NO: 1708986 - RNA, 19 nt, Artificial Sequence
  Description of Artificial Sequence: Synthetic oligonucleotide
cugcagacgcagaauugac

SEQ ID NO: 1708987 - RNA, 19 nt, Artificial Sequence
  Description of Artificial Sequence: Synthetic oligonucleotide
gggcuauuugccgauaggc

SEQ ID NO: 1708988 - RNA, 19 nt, Artificial Sequence
  Description of Artificial Sequence: Synthetic oligonucleotide
cagaucacauggcggaguc

SEQ ID NO: 1708989 - RNA, 19 nt, Artificial Sequence
  Description of Artificial Sequence: Synthetic oligonucleotide
guucaauaaacaacguagu

SEQ ID NO: 1708990 - RNA, 19 nt, Artificial Sequence
  Description of Artificial Sequence: Synthetic oligonucleotide
caggugguacacuccgccc

SEQ ID NO: 1708991 - RNA, 19 nt, Artificial Sequence
  Description of Artificial Sequence: Synthetic oligonucleotide
cagggcuauuugccgauag

SEQ ID NO: 1708992 - RNA, 19 nt, Artificial Sequence
  Description of Artificial Sequence: Synthetic oligonucleotide
uccaggugguacacuccgc

SEQ ID NO: 1708993 - RNA, 19 nt, Artificial Sequence
  Description of Artificial Sequence: Synthetic oligonucleotide
uccagaucacauggcggag

SEQ ID NO: 1708994 - RNA, 19 nt, Artificial Sequence
  Description of Artificial Sequence: Synthetic oligonucleotide
aucacauggcggagucucc

SEQ ID NO: 1708995 - RNA, 19 nt, Artificial Sequence
  Description of Artificial Sequence: Synthetic oligonucleotide
ggccacaggucccaaagug

SEQ ID NO: 1708996 - RNA, 19 nt, Artificial Sequence
  Description of Artificial Sequence: Synthetic oligonucleotide
ccacuaagguacuagcuuc

SEQ ID NO: 1708997 - RNA, 19 nt, Artificial Sequence
  Description of Artificial Sequence: Synthetic oligonucleotide
guuugacugacgcuaacau

SEQ ID NO: 1708998 - RNA, 19 nt, Artificial Sequence
  Description of Artificial Sequence: Synthetic oligonucleotide
uggaguugcaugccauguu

SEQ ID NO: 1708999 - RNA, 19 nt, Artificial Sequence
  Description of Artificial Sequence: Synthetic oligonucleotide
caagguagaguggaacuca

SEQ ID NO: 1709000 - RNA, 19 nt, Artificial Sequence
  Description of Artificial Sequence: Synthetic oligonucleotide
cucgaucacuugcucgaag

SEQ ID NO: 1709001 - RNA, 19 nt, Artificial Sequence
  Description of Artificial Sequence: Synthetic oligonucleotide
auccacuaagguacuagcu

SEQ ID NO: 1709002 - RNA, 19 nt, Artificial Sequence
  Description of Artificial Sequence: Synthetic oligonucleotide
augugguacaagguagagu

SEQ ID NO: 1709003 - RNA, 19 nt, Artificial Sequence
  Description of Artificial Sequence: Synthetic oligonucleotide
uugacccuugaugcugugc

SEQ ID NO: 1709004 - RNA, 19 nt, Artificial Sequence
  Description of Artificial Sequence: Synthetic oligonucleotide
gaauauccacgauguucuc

SEQ ID NO: 1709005 - RNA, 19 nt, Artificial Sequence
  Description of Artificial Sequence: Synthetic oligonucleotide
gcuauuugccgauaggccu

SEQ ID NO: 1709006 - RNA, 19 nt, Artificial Sequence
  Description of Artificial Sequence: Synthetic oligonucleotide
caccgcugaacaugaggag

SEQ ID NO: 1709007 - RNA, 19 nt, Artificial Sequence
  Description of Artificial Sequence: Synthetic oligonucleotide
gaugccgucugggauaugu

SEQ ID NO: 1709008 - RNA, 19 nt, Artificial Sequence
  Description of Artificial Sequence: Synthetic oligonucleotide
ugccuuuggggaggcaaag

SEQ ID NO: 1709009 - RNA, 19 nt, Artificial Sequence
  Description of Artificial Sequence: Synthetic oligonucleotide
gcuaacauucucaucuuga

SEQ ID NO: 1709010 - RNA, 19 nt, Artificial Sequence
  Description of Artificial Sequence: Synthetic oligonucleotide
gccacgguccaucuucagg

SEQ ID NO: 1709011 - RNA, 19 nt, Artificial Sequence
  Description of Artificial Sequence: Synthetic oligonucleotide
uauggcacaccgagucgau

SEQ ID NO: 1709012 - RNA, 19 nt, Artificial Sequence
  Description of Artificial Sequence: Synthetic oligonucleotide
cuagcacccagcccuucac

SEQ ID NO: 1709013 - RNA, 19 nt, Artificial Sequence
  Description of Artificial Sequence: Synthetic oligonucleotide
cuagcuucucggagaagca

SEQ ID NO: 1709014 - RNA, 19 nt, Artificial Sequence
  Description of Artificial Sequence: Synthetic oligonucleotide
uggcggagucuccaguaaa

SEQ ID NO: 1709015 - RNA, 19 nt, Artificial Sequence
  Description of Artificial Sequence: Synthetic oligonucleotide
guacuagcuucucggagaa

SEQ ID NO: 1709016 - RNA, 19 nt, Artificial Sequence
  Description of Artificial Sequence: Synthetic oligonucleotide
uuagagccuguuucucgau

SEQ ID NO: 1709017 - RNA, 19 nt, Artificial Sequence
  Description of Artificial Sequence: Synthetic oligonucleotide
ucaccuuaaucacgacauu

SEQ ID NO: 1709018 - RNA, 19 nt, Artificial Sequence
  Description of Artificial Sequence: Synthetic oligonucleotide
ucuugccccuucaguuuga

SEQ ID NO: 1709019 - RNA, 19 nt, Artificial Sequence
  Description of Artificial Sequence: Synthetic oligonucleotide
auauucagcccugcuuccu

SEQ ID NO: 1709020 - RNA, 19 nt, Artificial Sequence
  Description of Artificial Sequence: Synthetic oligonucleotide
gaccacaacguagaagugu

SEQ ID NO: 1709021 - RNA, 19 nt, Artificial Sequence
  Description of Artificial Sequence: Synthetic oligonucleotide
ccagcgaaacacgaaggcg

SEQ ID NO: 1709022 - RNA, 19 nt, Artificial Sequence
  Description of Artificial Sequence: Synthetic oligonucleotide
cacgacauugguggaguug

SEQ ID NO: 1709023 - RNA, 19 nt, Artificial Sequence
  Description of Artificial Sequence: Synthetic oligonucleotide
ggcgguaucucuacuagca

SEQ ID NO: 1709024 - RNA, 19 nt, Artificial Sequence
  Description of Artificial Sequence: Synthetic oligonucleotide
cugucaccgcugaacauga

SEQ ID NO: 1709025 - RNA, 19 nt, Artificial Sequence
  Description of Artificial Sequence: Synthetic oligonucleotide
ggcuaacauucucaucuug

SEQ ID NO: 1709026 - RNA, 19 nt, Artificial Sequence
  Description of Artificial Sequence: Synthetic oligonucleotide
ugucaccgcugaacaugag

SEQ ID NO: 1709027 - RNA, 19 nt, Artificial Sequence
  Description of Artificial Sequence: Synthetic oligonucleotide
cuuggcgguaucucuacua

SEQ ID NO: 1709028 - RNA, 19 nt, Artificial Sequence
  Description of Artificial Sequence: Synthetic oligonucleotide
guguccaaauugaagguua

SEQ ID NO: 1709029 - RNA, 19 nt, Artificial Sequence
  Description of Artificial Sequence: Synthetic oligonucleotide
ggugguacacuccgcccag

SEQ ID NO: 1709030 - RNA, 19 nt, Artificial Sequence
  Description of Artificial Sequence: Synthetic oligonucleotide
caccaugugguacaaggua

SEQ ID NO: 1709031 - RNA, 19 nt, Artificial Sequence
  Description of Artificial Sequence: Synthetic oligonucleotide
acgaguagcugaggacccg

SEQ ID NO: 1709032 - RNA, 19 nt, Artificial Sequence
  Description of Artificial Sequence: Synthetic oligonucleotide
agcagggcuauuugccgau

SEQ ID NO: 1709033 - RNA, 19 nt, Artificial Sequence
  Description of Artificial Sequence: Synthetic oligonucleotide
ccuuuggggaggcaaaguc

SEQ ID NO: 1709034 - RNA, 19 nt, Artificial Sequence
  Description of Artificial Sequence: Synthetic oligonucleotide
gggccgggaagauauucag

SEQ ID NO: 1709035 - RNA, 19 nt, Artificial Sequence
  Description of Artificial Sequence: Synthetic oligonucleotide
caaaggcauauggaauauc

SEQ ID NO: 1709036 - RNA, 19 nt, Artificial Sequence
  Description of Artificial Sequence: Synthetic oligonucleotide
auugacccuugaugcugug

SEQ ID NO: 1709037 - RNA, 19 nt, Artificial Sequence
  Description of Artificial Sequence: Synthetic oligonucleotide
ccgauaggccuucacuucc

SEQ ID NO: 1709038 - RNA, 19 nt, Artificial Sequence
  Description of Artificial Sequence: Synthetic oligonucleotide
uuccgccugguacuccuuc

SEQ ID NO: 1709039 - RNA, 19 nt, Artificial Sequence
  Description of Artificial Sequence: Synthetic oligonucleotide
gacgcagaauugacccuug

SEQ ID NO: 1709040 - RNA, 19 nt, Artificial Sequence
  Description of Artificial Sequence: Synthetic oligonucleotide
cucgaucguaauacacaca

SEQ ID NO: 1709041 - RNA, 19 nt, Artificial Sequence
  Description of Artificial Sequence: Synthetic oligonucleotide
cguagaagugugaguacag

SEQ ID NO: 1709042 - RNA, 19 nt, Artificial Sequence
  Description of Artificial Sequence: Synthetic oligonucleotide
uauuugccgauaggccuuc

SEQ ID NO: 1709043 - RNA, 19 nt, Artificial Sequence
  Description of Artificial Sequence: Synthetic oligonucleotide
ugcaugccauguuccacuu

SEQ ID NO: 1709044 - RNA, 19 nt, Artificial Sequence
  Description of Artificial Sequence: Synthetic oligonucleotide
ccacaagcuaaugaaggug

SEQ ID NO: 1709045 - RNA, 19 nt, Artificial Sequence
  Description of Artificial Sequence: Synthetic oligonucleotide
auggcggagucuccaguaa

SEQ ID NO: 1709046 - RNA, 19 nt, Artificial Sequence
  Description of Artificial Sequence: Synthetic oligonucleotide
guaaaccucuguaaucccu

SEQ ID NO: 1709047 - RNA, 19 nt, Artificial Sequence
  Description of Artificial Sequence: Synthetic oligonucleotide
caguuugacugacgcuaac

SEQ ID NO: 1709048 - RNA, 19 nt, Artificial Sequence
  Description of Artificial Sequence: Synthetic oligonucleotide
accuuauuguugaccacaa

SEQ ID NO: 1709049 - RNA, 19 nt, Artificial Sequence
  Description of Artificial Sequence: Synthetic oligonucleotide
agcgaaacacgaaggcgga

SEQ ID NO: 1709050 - RNA, 19 nt, Artificial Sequence
  Description of Artificial Sequence: Synthetic oligonucleotide
ggacaacucuguuuacauc

SEQ ID NO: 1709051 - RNA, 19 nt, Artificial Sequence
  Description of Artificial Sequence: Synthetic oligonucleotide
uaugggcaucuugaaucaa

SEQ ID NO: 1709052 - RNA, 19 nt, Artificial Sequence
  Description of Artificial Sequence: Synthetic oligonucleotide
cuguuucucgaucguaaua

SEQ ID NO: 1709053 - RNA, 19 nt, Artificial Sequence
  Description of Artificial Sequence: Synthetic oligonucleotide
acccuugaugcugugcaau

SEQ ID NO: 1709054 - RNA, 19 nt, Artificial Sequence
  Description of Artificial Sequence: Synthetic oligonucleotide
acgcagaauugacccuuga

SEQ ID NO: 1709055 - RNA, 19 nt, Artificial Sequence
  Description of Artificial Sequence: Synthetic oligonucleotide
cauggcggagucuccagua

SEQ ID NO: 1709056 - RNA, 19 nt, Artificial Sequence
  Description of Artificial Sequence: Synthetic oligonucleotide
aggcugucugaagaccuca

SEQ ID NO: 1709057 - RNA, 19 nt, Artificial Sequence
  Description of Artificial Sequence: Synthetic oligonucleotide
agggccgggaagauauuca

SEQ ID NO: 1709058 - RNA, 19 nt, Artificial Sequence
  Description of Artificial Sequence: Synthetic oligonucleotide
gggaagauauucagcccug

SEQ ID NO: 1709059 - RNA, 19 nt, Artificial Sequence
  Description of Artificial Sequence: Synthetic oligonucleotide
cuuccuuggcgguaucucu

SEQ ID NO: 1709060 - RNA, 19 nt, Artificial Sequence
  Description of Artificial Sequence: Synthetic oligonucleotide
ucucgaucacuugcucgaa

SEQ ID NO: 1709061 - RNA, 19 nt, Artificial Sequence
  Description of Artificial Sequence: Synthetic oligonucleotide
cacuaagguacuagcuucu

SEQ ID NO: 1709062 - RNA, 19 nt, Artificial Sequence
  Description of Artificial Sequence: Synthetic oligonucleotide
agggaccagggacgguucu

SEQ ID NO: 1709063 - RNA, 19 nt, Artificial Sequence
  Description of Artificial Sequence: Synthetic oligonucleotide
cuucacuuagcaaccgcau

SEQ ID NO: 1709064 - RNA, 19 nt, Artificial Sequence
  Description of Artificial Sequence: Synthetic oligonucleotide
ccgggaagauauucagccc

SEQ ID NO: 1709065 - RNA, 19 nt, Artificial Sequence
  Description of Artificial Sequence: Synthetic oligonucleotide
cagcagggcuauuugccga

SEQ ID NO: 1709066 - RNA, 19 nt, Artificial Sequence
  Description of Artificial Sequence: Synthetic oligonucleotide
accgcaucuccaguucaca

SEQ ID NO: 1709067 - RNA, 19 nt, Artificial Sequence
  Description of Artificial Sequence: Synthetic oligonucleotide
accuuccgccugguacucc

SEQ ID NO: 1709068 - RNA, 19 nt, Artificial Sequence
  Description of Artificial Sequence: Synthetic oligonucleotide
cuucaccaugugguacaag

SEQ ID NO: 1709069 - RNA, 19 nt, Artificial Sequence
  Description of Artificial Sequence: Synthetic oligonucleotide
cuccucuucccacaagcua

SEQ ID NO: 1709070 - RNA, 19 nt, Artificial Sequence
  Description of Artificial Sequence: Synthetic oligonucleotide
ggaccuuauuguugaccac

SEQ ID NO: 1709071 - RNA, 19 nt, Artificial Sequence
  Description of Artificial Sequence: Synthetic oligonucleotide
ggauauccaggugguacac

SEQ ID NO: 1709072 - RNA, 19 nt, Artificial Sequence
  Description of Artificial Sequence: Synthetic oligonucleotide
gccgauaggccuucacuuc

SEQ ID NO: 1709073 - RNA, 19 nt, Artificial Sequence
  Description of Artificial Sequence: Synthetic oligonucleotide
gcaaccgcaucuccaguuc

SEQ ID NO: 1709074 - RNA, 19 nt, Artificial Sequence
  Description of Artificial Sequence: Synthetic oligonucleotide
agaucacauggcggagucu

SEQ ID NO: 1709075 - RNA, 19 nt, Artificial Sequence
  Description of Artificial Sequence: Synthetic oligonucleotide
cacgaaggcggagcucagc

SEQ ID NO: 1709076 - RNA, 19 nt, Artificial Sequence
  Description of Artificial Sequence: Synthetic oligonucleotide
cagggccgggaagauauuc

SEQ ID NO: 1709077 - RNA, 19 nt, Artificial Sequence
  Description of Artificial Sequence: Synthetic oligonucleotide
auggcacaccgagucgaug

SEQ ID NO: 1709078 - RNA, 19 nt, Artificial Sequence
  Description of Artificial Sequence: Synthetic oligonucleotide
ucacgacauugguggaguu

SEQ ID NO: 1709079 - RNA, 19 nt, Artificial Sequence
  Description of Artificial Sequence: Synthetic oligonucleotide
gcgguaucucuacuagcac

SEQ ID NO: 1709080 - RNA, 19 nt, Artificial Sequence
  Description of Artificial Sequence: Synthetic oligonucleotide
gacauugguggaguugcau

SEQ ID NO: 1709081 - RNA, 19 nt, Artificial Sequence
  Description of Artificial Sequence: Synthetic oligonucleotide
cgaucguaauacacacagc

SEQ ID NO: 1709082 - RNA, 19 nt, Artificial Sequence
  Description of Artificial Sequence: Synthetic oligonucleotide
gggauauguaaaccucugu

SEQ ID NO: 1709083 - RNA, 19 nt, Artificial Sequence
  Description of Artificial Sequence: Synthetic oligonucleotide
ccaugugguacaagguaga

SEQ ID NO: 1709084 - RNA, 19 nt, Artificial Sequence
  Description of Artificial Sequence: Synthetic oligonucleotide
ccugcagacgcagaauuga

SEQ ID NO: 1709085 - RNA, 19 nt, Artificial Sequence
  Description of Artificial Sequence: Synthetic oligonucleotide
ccagggacgguucucugca

SEQ ID NO: 1709086 - RNA, 19 nt, Artificial Sequence
  Description of Artificial Sequence: Synthetic oligonucleotide
cuugcucgaagguuucguu

SEQ ID NO: 1709087 - RNA, 19 nt, Artificial Sequence
  Description of Artificial Sequence: Synthetic oligonucleotide
uagucacagucaggacaac

SEQ ID NO: 1709088 - RNA, 19 nt, Artificial Sequence
  Description of Artificial Sequence: Synthetic oligonucleotide
acuccgcccaggguggaaa

SEQ ID NO: 1709089 - RNA, 19 nt, Artificial Sequence
  Description of Artificial Sequence: Synthetic oligonucleotide
cgucugggauauguaaacc

SEQ ID NO: 1709090 - RNA, 19 nt, Artificial Sequence
  Description of Artificial Sequence: Synthetic oligonucleotide
gagccuguuucucgaucgu

SEQ ID NO: 1709091 - RNA, 19 nt, Artificial Sequence
  Description of Artificial Sequence: Synthetic oligonucleotide
cgagucgaugaagaggcug

SEQ ID NO: 1709092 - RNA, 19 nt, Artificial Sequence
  Description of Artificial Sequence: Synthetic oligonucleotide
gcacaccgagucgaugaag

SEQ ID NO: 1709093 - RNA, 19 nt, Artificial Sequence
  Description of Artificial Sequence: Synthetic oligonucleotide
acacgaaggcggagcucag

SEQ ID NO: 1709094 - RNA, 19 nt, Artificial Sequence
  Description of Artificial Sequence: Synthetic oligonucleotide
cacuugcuccagcgaaaca

SEQ ID NO: 1709095 - RNA, 19 nt, Artificial Sequence
  Description of Artificial Sequence: Synthetic oligonucleotide
ccuucuaaaugacacugau

SEQ ID NO: 1709096 - RNA, 19 nt, Artificial Sequence
  Description of Artificial Sequence: Synthetic oligonucleotide
uacuagcacccagcccuuc

SEQ ID NO: 1709097 - RNA, 19 nt, Artificial Sequence
  Description of Artificial Sequence: Synthetic oligonucleotide
ccuuaaucacgacauuggu

SEQ ID NO: 1709098 - RNA, 19 nt, Artificial Sequence
  Description of Artificial Sequence: Synthetic oligonucleotide
ccacuugcuccagcgaaac

SEQ ID NO: 1709099 - RNA, 19 nt, Artificial Sequence
  Description of Artificial Sequence: Synthetic oligonucleotide
ccuuccuuggcgguaucuc

SEQ ID NO: 1709100 - RNA, 19 nt, Artificial Sequence
  Description of Artificial Sequence: Synthetic oligonucleotide
cagacgcagaauugacccu

SEQ ID NO: 1709101 - RNA, 19 nt, Artificial Sequence
  Description of Artificial Sequence: Synthetic oligonucleotide
ccucacccucuccauugcc

SEQ ID NO: 1709102 - RNA, 19 nt, Artificial Sequence
  Description of Artificial Sequence: Synthetic oligonucleotide
gcccuucacugguuuguac

SEQ ID NO: 1709103 - RNA, 19 nt, Artificial Sequence
  Description of Artificial Sequence: Synthetic oligonucleotide
ggcggagucuccaguaaaa

SEQ ID NO: 1709104 - RNA, 19 nt, Artificial Sequence
  Description of Artificial Sequence: Synthetic oligonucleotide
cgaagguuucguucuucuc

SEQ ID NO: 1709105 - RNA, 19 nt, Artificial Sequence
  Description of Artificial Sequence: Synthetic oligonucleotide
ggaguucaauaaacaacgu

SEQ ID NO: 1709106 - RNA, 19 nt, Artificial Sequence
  Description of Artificial Sequence: Synthetic oligonucleotide
auuugccgauaggccuuca

SEQ ID NO: 1709107 - RNA, 19 nt, Artificial Sequence
  Description of Artificial Sequence: Synthetic oligonucleotide
gcgaaacacgaaggcggag

SEQ ID NO: 1709108 - RNA, 19 nt, Artificial Sequence
  Description of Artificial Sequence: Synthetic oligonucleotide
cacaguucccaggacuggu

SEQ ID NO: 1709109 - RNA, 19 nt, Artificial Sequence
  Description of Artificial Sequence: Synthetic oligonucleotide
cgaaggcggagcucagcag

SEQ ID NO: 1709110 - RNA, 19 nt, Artificial Sequence
  Description of Artificial Sequence: Synthetic oligonucleotide
cccacaagcuaaugaaggu

SEQ ID NO: 1709111 - RNA, 19 nt, Artificial Sequence
  Description of Artificial Sequence: Synthetic oligonucleotide
cagcagcauauggcacacc

SEQ ID NO: 1709112 - RNA, 19 nt, Artificial Sequence
  Description of Artificial Sequence: Synthetic oligonucleotide
acgcuaacaugcagagguu

SEQ ID NO: 1709113 - RNA, 19 nt, Artificial Sequence
  Description of Artificial Sequence: Synthetic oligonucleotide
ggcacaccgagucgaugaa

SEQ ID NO: 1709114 - RNA, 19 nt, Artificial Sequence
  Description of Artificial Sequence: Synthetic oligonucleotide
caccuuccgccugguacuc

SEQ ID NO: 1709115 - RNA, 19 nt, Artificial Sequence
  Description of Artificial Sequence: Synthetic oligonucleotide
gguacacuccgcccagggu

SEQ ID NO: 1709116 - RNA, 19 nt, Artificial Sequence
  Description of Artificial Sequence: Synthetic oligonucleotide
gcuaacaugcagagguuuu

SEQ ID NO: 1709117 - RNA, 19 nt, Artificial Sequence
  Description of Artificial Sequence: Synthetic oligonucleotide
augccgucugggauaugua

SEQ ID NO: 1709118 - RNA, 19 nt, Artificial Sequence
  Description of Artificial Sequence: Synthetic oligonucleotide
cucugucaccgcugaacau

SEQ ID NO: 1709119 - RNA, 19 nt, Artificial Sequence
  Description of Artificial Sequence: Synthetic oligonucleotide
ccgccugguacuccuucac

SEQ ID NO: 1709120 - RNA, 19 nt, Artificial Sequence
  Description of Artificial Sequence: Synthetic oligonucleotide
cuccgcccaggguggaaaa

SEQ ID NO: 1709121 - RNA, 19 nt, Artificial Sequence
  Description of Artificial Sequence: Synthetic oligonucleotide
ggaccagggacgguucucu

SEQ ID NO: 1709122 - RNA, 19 nt, Artificial Sequence
  Description of Artificial Sequence: Synthetic oligonucleotide
ccacaacguagaaguguga

SEQ ID NO: 1709123 - RNA, 19 nt, Artificial Sequence
  Description of Artificial Sequence: Synthetic oligonucleotide
ugaugccgucugggauaug

SEQ ID NO: 1709124 - RNA, 19 nt, Artificial Sequence
  Description of Artificial Sequence: Synthetic oligonucleotide
cccuugaugcugugcaaua

SEQ ID NO: 1709125 - RNA, 19 nt, Artificial Sequence
  Description of Artificial Sequence: Synthetic oligonucleotide
cacauccacuaagguacua

SEQ ID NO: 1709126 - RNA, 19 nt, Artificial Sequence
  Description of Artificial Sequence: Synthetic oligonucleotide
cugaugccgucugggauau

SEQ ID NO: 1709127 - RNA, 19 nt, Artificial Sequence
  Description of Artificial Sequence: Synthetic oligonucleotide
cuacuagcacccagcccuu

SEQ ID NO: 1709128 - RNA, 19 nt, Artificial Sequence
  Description of Artificial Sequence: Synthetic oligonucleotide
acacuccgcccagggugga

SEQ ID NO: 1709129 - RNA, 19 nt, Artificial Sequence
  Description of Artificial Sequence: Synthetic oligonucleotide
ccggauggacagcagcaua

SEQ ID NO: 1709130 - RNA, 19 nt, Artificial Sequence
  Description of Artificial Sequence: Synthetic oligonucleotide
gcggagucuccaguaaaau

SEQ ID NO: 1709131 - RNA, 19 nt, Artificial Sequence
  Description of Artificial Sequence: Synthetic oligonucleotide
ccagaucacauggcggagu

SEQ ID NO: 1709132 - RNA, 19 nt, Artificial Sequence
  Description of Artificial Sequence: Synthetic oligonucleotide
cgcagaauugacccuugau

SEQ ID NO: 1709133 - RNA, 19 nt, Artificial Sequence
  Description of Artificial Sequence: Synthetic oligonucleotide
ccacauccacuaagguacu

SEQ ID NO: 1709134 - RNA, 19 nt, Artificial Sequence
  Description of Artificial Sequence: Synthetic oligonucleotide
cacuccgcccaggguggaa

SEQ ID NO: 1709135 - RNA, 19 nt, Artificial Sequence
  Description of Artificial Sequence: Synthetic oligonucleotide
gcagggcuauuugccgaua

SEQ ID NO: 1709136 - RNA, 19 nt, Artificial Sequence
  Description of Artificial Sequence: Synthetic oligonucleotide
ccuuggcgguaucucuacu

SEQ ID NO: 1709137 - RNA, 19 nt, Artificial Sequence
  Description of Artificial Sequence: Synthetic oligonucleotide
ggacgguucucugcaccuu

SEQ ID NO: 1709138 - RNA, 19 nt, Artificial Sequence
  Description of Artificial Sequence: Synthetic oligonucleotide
ccgagucgaugaagaggcu

SEQ ID NO: 1709139 - RNA, 19 nt, Artificial Sequence
  Description of Artificial Sequence: Synthetic oligonucleotide
aaacuauacaccugcaucc

SEQ ID NO: 1709140 - RNA, 19 nt, Artificial Sequence
  Description of Artificial Sequence: Synthetic oligonucleotide
uuuauauggcacuagagug

SEQ ID NO: 1709141 - RNA, 19 nt, Artificial Sequence
  Description of Artificial Sequence: Synthetic oligonucleotide
agaguggaaaacuauacac

SEQ ID NO: 1709142 - RNA, 19 nt, Artificial Sequence
  Description of Artificial Sequence: Synthetic oligonucleotide
agaucauacacagagaugg

SEQ ID NO: 1709143 - RNA, 19 nt, Artificial Sequence
  Description of Artificial Sequence: Synthetic oligonucleotide
aaacagcaugaucacaugc

SEQ ID NO: 1709144 - RNA, 19 nt, Artificial Sequence
  Description of Artificial Sequence: Synthetic oligonucleotide
aagcggacagacuugaugg

SEQ ID NO: 1709145 - RNA, 19 nt, Artificial Sequence
  Description of Artificial Sequence: Synthetic oligonucleotide
cacaagaucauacacagag

SEQ ID NO: 1709146 - RNA, 19 nt, Artificial Sequence
  Description of Artificial Sequence: Synthetic oligonucleotide
uuauauggcacuagagugg

SEQ ID NO: 1709147 - RNA, 19 nt, Artificial Sequence
  Description of Artificial Sequence: Synthetic oligonucleotide
uagaguaccacuaggaaga

SEQ ID NO: 1709148 - RNA, 19 nt, Artificial Sequence
  Description of Artificial Sequence: Synthetic oligonucleotide
uggaaaacuauacaccugc

SEQ ID NO: 1709149 - RNA, 19 nt, Artificial Sequence
  Description of Artificial Sequence: Synthetic oligonucleotide
auuuauauggcacuagagu

SEQ ID NO: 1709150 - RNA, 19 nt, Artificial Sequence
  Description of Artificial Sequence: Synthetic oligonucleotide
ucuguggagaaguagaaga

SEQ ID NO: 1709151 - RNA, 19 nt, Artificial Sequence
  Description of Artificial Sequence: Synthetic oligonucleotide
agugaaugcauaccaugcc

SEQ ID NO: 1709152 - RNA, 19 nt, Artificial Sequence
  Description of Artificial Sequence: Synthetic oligonucleotide
uacaccugcauccagagaa

SEQ ID NO: 1709153 - RNA, 19 nt, Artificial Sequence
  Description of Artificial Sequence: Synthetic oligonucleotide
accacgaugacgcugauca

SEQ ID NO: 1709154 - RNA, 19 nt, Artificial Sequence
  Description of Artificial Sequence: Synthetic oligonucleotide
aaggcuucgggguaugagg

SEQ ID NO: 1709155 - RNA, 19 nt, Artificial Sequence
  Description of Artificial Sequence: Synthetic oligonucleotide
agcaugaucacaugcuucg

SEQ ID NO: 1709156 - RNA, 19 nt, Artificial Sequence
  Description of Artificial Sequence: Synthetic oligonucleotide
gagaaguagaagaugagcc

SEQ ID NO: 1709157 - RNA, 19 nt, Artificial Sequence
  Description of Artificial Sequence: Synthetic oligonucleotide
aacguguccaugaaaggcc

SEQ ID NO: 1709158 - RNA, 19 nt, Artificial Sequence
  Description of Artificial Sequence: Synthetic oligonucleotide
aguggaaaacuauacaccu

SEQ ID NO: 1709159 - RNA, 19 nt, Artificial Sequence
  Description of Artificial Sequence: Synthetic oligonucleotide
guagcaucgauacuuguag

SEQ ID NO: 1709160 - RNA, 19 nt, Artificial Sequence
  Description of Artificial Sequence: Synthetic oligonucleotide
aagagugugggguagucca

SEQ ID NO: 1709161 - RNA, 19 nt, Artificial Sequence
  Description of Artificial Sequence: Synthetic oligonucleotide
guagaguaccacuaggaag

SEQ ID NO: 1709162 - RNA, 19 nt, Artificial Sequence
  Description of Artificial Sequence: Synthetic oligonucleotide
aaaacugucauaggagucu

SEQ ID NO: 1709163 - RNA, 19 nt, Artificial Sequence
  Description of Artificial Sequence: Synthetic oligonucleotide
uggcagaugaguauaucag

SEQ ID NO: 1709164 - RNA, 19 nt, Artificial Sequence
  Description of Artificial Sequence: Synthetic oligonucleotide
agaugaguauaucagggca

SEQ ID NO: 1709165 - RNA, 19 nt, Artificial Sequence
  Description of Artificial Sequence: Synthetic oligonucleotide
aaaccaaugaggauggcga

SEQ ID NO: 1709166 - RNA, 19 nt, Artificial Sequence
  Description of Artificial Sequence: Synthetic oligonucleotide
gauguaggugaacaagaag

SEQ ID NO: 1709167 - RNA, 19 nt, Artificial Sequence
  Description of Artificial Sequence: Synthetic oligonucleotide
acacaaaccaaugaggaug

SEQ ID NO: 1709168 - RNA, 19 nt, Artificial Sequence
  Description of Artificial Sequence: Synthetic oligonucleotide
cuagaguggaaaacuauac

SEQ ID NO: 1709169 - RNA, 19 nt, Artificial Sequence
  Description of Artificial Sequence: Synthetic oligonucleotide
uuguagaguaccacuagga

SEQ ID NO: 1709170 - RNA, 19 nt, Artificial Sequence
  Description of Artificial Sequence: Synthetic oligonucleotide
auggcgauaaagcaggcca

SEQ ID NO: 1709171 - RNA, 19 nt, Artificial Sequence
  Description of Artificial Sequence: Synthetic oligonucleotide
gucaugaccacgaugacgc

SEQ ID NO: 1709172 - RNA, 19 nt, Artificial Sequence
  Description of Artificial Sequence: Synthetic oligonucleotide
augcauaccaugcccacgg

SEQ ID NO: 1709173 - RNA, 19 nt, Artificial Sequence
  Description of Artificial Sequence: Synthetic oligonucleotide
auguaggugaacaagaaga

SEQ ID NO: 1709174 - RNA, 19 nt, Artificial Sequence
  Description of Artificial Sequence: Synthetic oligonucleotide
aauaugggcucguuucucu

SEQ ID NO: 1709175 - RNA, 19 nt, Artificial Sequence
  Description of Artificial Sequence: Synthetic oligonucleotide
uagaguggaaaacuauaca

SEQ ID NO: 1709176 - RNA, 19 nt, Artificial Sequence
  Description of Artificial Sequence: Synthetic oligonucleotide
gacgcuggcccacugaggg

SEQ ID NO: 1709177 - RNA, 19 nt, Artificial Sequence
  Description of Artificial Sequence: Synthetic oligonucleotide
ugaaugcauaccaugccca

SEQ ID NO: 1709178 - RNA, 19 nt, Artificial Sequence
  Description of Artificial Sequence: Synthetic oligonucleotide
uugaguacuuccccgaggu

SEQ ID NO: 1709179 - RNA, 19 nt, Artificial Sequence
  Description of Artificial Sequence: Synthetic oligonucleotide
caaaauuccagacggccag

SEQ ID NO: 1709180 - RNA, 19 nt, Artificial Sequence
  Description of Artificial Sequence: Synthetic oligonucleotide
agcaucgauacuuguagag

SEQ ID NO: 1709181 - RNA, 19 nt, Artificial Sequence
  Description of Artificial Sequence: Synthetic oligonucleotide
aagacaggaucagccagcc

SEQ ID NO: 1709182 - RNA, 19 nt, Artificial Sequence
  Description of Artificial Sequence: Synthetic oligonucleotide
ugaacuuguagcaucgaua

SEQ ID NO: 1709183 - RNA, 19 nt, Artificial Sequence
  Description of Artificial Sequence: Synthetic oligonucleotide
gcuccaaaauuccagacgg

SEQ ID NO: 1709184 - RNA, 19 nt, Artificial Sequence
  Description of Artificial Sequence: Synthetic oligonucleotide
cuuguagaguaccacuagg

SEQ ID NO: 1709185 - RNA, 19 nt, Artificial Sequence
  Description of Artificial Sequence: Synthetic oligonucleotide
uccugucagauguagagcu

SEQ ID NO: 1709186 - RNA, 19 nt, Artificial Sequence
  Description of Artificial Sequence: Synthetic oligonucleotide
aguauaucagggcaggaaa

SEQ ID NO: 1709187 - RNA, 19 nt, Artificial Sequence
  Description of Artificial Sequence: Synthetic oligonucleotide
uccaaaauuccagacggcc

SEQ ID NO: 1709188 - RNA, 19 nt, Artificial Sequence
  Description of Artificial Sequence: Synthetic oligonucleotide
ugcacagugugacagggac

SEQ ID NO: 1709189 - RNA, 19 nt, Artificial Sequence
  Description of Artificial Sequence: Synthetic oligonucleotide
uguagaguaccacuaggaa

SEQ ID NO: 1709190 - RNA, 19 nt, Artificial Sequence
  Description of Artificial Sequence: Synthetic oligonucleotide
cagugaaugcauaccaugc

SEQ ID NO: 1709191 - RNA, 19 nt, Artificial Sequence
  Description of Artificial Sequence: Synthetic oligonucleotide
acgcugaucaugaugaggg

SEQ ID NO: 1709192 - RNA, 19 nt, Artificial Sequence
  Description of Artificial Sequence: Synthetic oligonucleotide
gaugaguauaucagggcag

SEQ ID NO: 1709193 - RNA, 19 nt, Artificial Sequence
  Description of Artificial Sequence: Synthetic oligonucleotide
gaagcggacagacuugaug

SEQ ID NO: 1709194 - RNA, 19 nt, Artificial Sequence
  Description of Artificial Sequence: Synthetic oligonucleotide
aaauaugggcucguuucuc

SEQ ID NO: 1709195 - RNA, 19 nt, Artificial Sequence
  Description of Artificial Sequence: Synthetic oligonucleotide
cagacggccaggaagagug

SEQ ID NO: 1709196 - RNA, 19 nt, Artificial Sequence
  Description of Artificial Sequence: Synthetic oligonucleotide
uaggucuugaguacuuccc

SEQ ID NO: 1709197 - RNA, 19 nt, Artificial Sequence
  Description of Artificial Sequence: Synthetic oligonucleotide
acuuccccgagguagaugu

SEQ ID NO: 1709198 - RNA, 19 nt, Artificial Sequence
  Description of Artificial Sequence: Synthetic oligonucleotide
guagauguaggugaacaag

SEQ ID NO: 1709199 - RNA, 19 nt, Artificial Sequence
  Description of Artificial Sequence: Synthetic oligonucleotide
aaugcauaccaugcccacg

SEQ ID NO: 1709200 - RNA, 19 nt, Artificial Sequence
  Description of Artificial Sequence: Synthetic oligonucleotide
uucgccccguacuugaggg

SEQ ID NO: 1709201 - RNA, 19 nt, Artificial Sequence
  Description of Artificial Sequence: Synthetic oligonucleotide
auggcacccaagaugaccc

SEQ ID NO: 1709202 - RNA, 19 nt, Artificial Sequence
  Description of Artificial Sequence: Synthetic oligonucleotide
ucccuuagggcacagcaca

SEQ ID NO: 1709203 - RNA, 19 nt, Artificial Sequence
  Description of Artificial Sequence: Synthetic oligonucleotide
agagccacgcucugucucc

SEQ ID NO: 1709204 - RNA, 19 nt, Artificial Sequence
  Description of Artificial Sequence: Synthetic oligonucleotide
uccuuaguggucccuuagg

SEQ ID NO: 1709205 - RNA, 19 nt, Artificial Sequence
  Description of Artificial Sequence: Synthetic oligonucleotide
uaucagggcaggaaauaug

SEQ ID NO: 1709206 - RNA, 19 nt, Artificial Sequence
  Description of Artificial Sequence: Synthetic oligonucleotide
gacgcuguagaagaugaag

SEQ ID NO: 1709207 - RNA, 19 nt, Artificial Sequence
  Description of Artificial Sequence: Synthetic oligonucleotide
uggugagaagccaacgugu

SEQ ID NO: 1709208 - RNA, 19 nt, Artificial Sequence
  Description of Artificial Sequence: Synthetic oligonucleotide
uguagcaucgauacuugua

SEQ ID NO: 1709209 - RNA, 19 nt, Artificial Sequence
  Description of Artificial Sequence: Synthetic oligonucleotide
gggacaaacagcaugauca

SEQ ID NO: 1709210 - RNA, 19 nt, Artificial Sequence
  Description of Artificial Sequence: Synthetic oligonucleotide
ucauaggggagcugcagug

SEQ ID NO: 1709211 - RNA, 19 nt, Artificial Sequence
  Description of Artificial Sequence: Synthetic oligonucleotide
aucaugcacagugugacag

SEQ ID NO: 1709212 - RNA, 19 nt, Artificial Sequence
  Description of Artificial Sequence: Synthetic oligonucleotide
accaggacgcuguagaaga

SEQ ID NO: 1709213 - RNA, 19 nt, Artificial Sequence
  Description of Artificial Sequence: Synthetic oligonucleotide
gauacuuguagaguaccac

SEQ ID NO: 1709214 - RNA, 19 nt, Artificial Sequence
  Description of Artificial Sequence: Synthetic oligonucleotide
caugagggaagacaggauc

SEQ ID NO: 1709215 - RNA, 19 nt, Artificial Sequence
  Description of Artificial Sequence: Synthetic oligonucleotide
uccacaccauggcagauga

SEQ ID NO: 1709216 - RNA, 19 nt, Artificial Sequence
  Description of Artificial Sequence: Synthetic oligonucleotide
ucuugaguacuuccccgag

SEQ ID NO: 1709217 - RNA, 19 nt, Artificial Sequence
  Description of Artificial Sequence: Synthetic oligonucleotide
agaccacucuggcagguac

SEQ ID NO: 1709218 - RNA, 19 nt, Artificial Sequence
  Description of Artificial Sequence: Synthetic oligonucleotide
caugaucacaugcuucgcc

SEQ ID NO: 1709219 - RNA, 19 nt, Artificial Sequence
  Description of Artificial Sequence: Synthetic oligonucleotide
agugcgcugaucaugauga

SEQ ID NO: 1709220 - RNA, 19 nt, Artificial Sequence
  Description of Artificial Sequence: Synthetic oligonucleotide
caugaugagguaagccugc

SEQ ID NO: 1709221 - RNA, 19 nt, Artificial Sequence
  Description of Artificial Sequence: Synthetic oligonucleotide
agggacaaacagcaugauc

SEQ ID NO: 1709222 - RNA, 19 nt, Artificial Sequence
  Description of Artificial Sequence: Synthetic oligonucleotide
accacuaggaagaugguca

SEQ ID NO: 1709223 - RNA, 19 nt, Artificial Sequence
  Description of Artificial Sequence: Synthetic oligonucleotide
augaguauaucagggcagg

SEQ ID NO: 1709224 - RNA, 19 nt, Artificial Sequence
  Description of Artificial Sequence: Synthetic oligonucleotide
gaugaggguguucagcaca

SEQ ID NO: 1709225 - RNA, 19 nt, Artificial Sequence
  Description of Artificial Sequence: Synthetic oligonucleotide
caacguguccaugaaaggc

SEQ ID NO: 1709226 - RNA, 19 nt, Artificial Sequence
  Description of Artificial Sequence: Synthetic oligonucleotide
caaucaugcacagugugac

SEQ ID NO: 1709227 - RNA, 19 nt, Artificial Sequence
  Description of Artificial Sequence: Synthetic oligonucleotide
auggccacguuguaggucu

SEQ ID NO: 1709228 - RNA, 19 nt, Artificial Sequence
  Description of Artificial Sequence: Synthetic oligonucleotide
aaaggcuucgggguaugag

SEQ ID NO: 1709229 - RNA, 19 nt, Artificial Sequence
  Description of Artificial Sequence: Synthetic oligonucleotide
aacacagccagcagcagga

SEQ ID NO: 1709230 - RNA, 19 nt, Artificial Sequence
  Description of Artificial Sequence: Synthetic oligonucleotide
guaggugaacaagaagagg

SEQ ID NO: 1709231 - RNA, 19 nt, Artificial Sequence
  Description of Artificial Sequence: Synthetic oligonucleotide
caaaacugucauaggaguc

SEQ ID NO: 1709232 - RNA, 19 nt, Artificial Sequence
  Description of Artificial Sequence: Synthetic oligonucleotide
uaugagggcuccccaaaac

SEQ ID NO: 1709233 - RNA, 19 nt, Artificial Sequence
  Description of Artificial Sequence: Synthetic oligonucleotide
aagaggagcaugagggaag

SEQ ID NO: 1709234 - RNA, 19 nt, Artificial Sequence
  Description of Artificial Sequence: Synthetic oligonucleotide
aagaucauacacagagaug

SEQ ID NO: 1709235 - RNA, 19 nt, Artificial Sequence
  Description of Artificial Sequence: Synthetic oligonucleotide
acguuguaggucuugagua

SEQ ID NO: 1709236 - RNA, 19 nt, Artificial Sequence
  Description of Artificial Sequence: Synthetic oligonucleotide
gacgcugaucaugaugagg

SEQ ID NO: 1709237 - RNA, 19 nt, Artificial Sequence
  Description of Artificial Sequence: Synthetic oligonucleotide
cacaaucaugcacagugug

SEQ ID NO: 1709238 - RNA, 19 nt, Artificial Sequence
  Description of Artificial Sequence: Synthetic oligonucleotide
ucgauacuuguagaguacc

SEQ ID NO: 1709239 - RNA, 19 nt, Artificial Sequence
  Description of Artificial Sequence: Synthetic oligonucleotide
aagucucccaggccaagcu

SEQ ID NO: 1709240 - RNA, 19 nt, Artificial Sequence
  Description of Artificial Sequence: Synthetic oligonucleotide
cugucagauguagagcugg

SEQ ID NO: 1709241 - RNA, 19 nt, Artificial Sequence
  Description of Artificial Sequence: Synthetic oligonucleotide
ugcgcugaucaugaugagg

SEQ ID NO: 1709242 - RNA, 19 nt, Artificial Sequence
  Description of Artificial Sequence: Synthetic oligonucleotide
ugggucauaggggagcugc

SEQ ID NO: 1709243 - RNA, 19 nt, Artificial Sequence
  Description of Artificial Sequence: Synthetic oligonucleotide
ccauuucugggucauaggg

SEQ ID NO: 1709244 - RNA, 19 nt, Artificial Sequence
  Description of Artificial Sequence: Synthetic oligonucleotide
acuauacaccugcauccag

SEQ ID NO: 1709245 - RNA, 19 nt, Artificial Sequence
  Description of Artificial Sequence: Synthetic oligonucleotide
caacucuuccccuggguag

SEQ ID NO: 1709246 - RNA, 19 nt, Artificial Sequence
  Description of Artificial Sequence: Synthetic oligonucleotide
uggcgauaaagcaggccag

SEQ ID NO: 1709247 - RNA, 19 nt, Artificial Sequence
  Description of Artificial Sequence: Synthetic oligonucleotide
ggcuccaaaauuccagacg

SEQ ID NO: 1709248 - RNA, 19 nt, Artificial Sequence
  Description of Artificial Sequence: Synthetic oligonucleotide
auaugggcucguuucucuc

SEQ ID NO: 1709249 - RNA, 19 nt, Artificial Sequence
  Description of Artificial Sequence: Synthetic oligonucleotide
cuggugagaagccaacgug

SEQ ID NO: 1709250 - RNA, 19 nt, Artificial Sequence
  Description of Artificial Sequence: Synthetic oligonucleotide
caugcacagugugacaggg

SEQ ID NO: 1709251 - RNA, 19 nt, Artificial Sequence
  Description of Artificial Sequence: Synthetic oligonucleotide
aacuauacaccugcaucca

SEQ ID NO: 1709252 - RNA, 19 nt, Artificial Sequence
  Description of Artificial Sequence: Synthetic oligonucleotide
aucgauacuuguagaguac

SEQ ID NO: 1709253 - RNA, 19 nt, Artificial Sequence
  Description of Artificial Sequence: Synthetic oligonucleotide
gugaacaagaagaggagca

SEQ ID NO: 1709254 - RNA, 19 nt, Artificial Sequence
  Description of Artificial Sequence: Synthetic oligonucleotide
acugucauaggagucuucu

SEQ ID NO: 1709255 - RNA, 19 nt, Artificial Sequence
  Description of Artificial Sequence: Synthetic oligonucleotide
gaaugcauaccaugcccac

SEQ ID NO: 1709256 - RNA, 19 nt, Artificial Sequence
  Description of Artificial Sequence: Synthetic oligonucleotide
aagggcguguagaugagcu

SEQ ID NO: 1709257 - RNA, 19 nt, Artificial Sequence
  Description of Artificial Sequence: Synthetic oligonucleotide
gcgaccaccacaaucaugc

SEQ ID NO: 1709258 - RNA, 19 nt, Artificial Sequence
  Description of Artificial Sequence: Synthetic oligonucleotide
aaagcaggccaguguggug

SEQ ID NO: 1709259 - RNA, 19 nt, Artificial Sequence
  Description of Artificial Sequence: Synthetic oligonucleotide
ggagcaugagggaagacag

SEQ ID NO: 1709260 - RNA, 19 nt, Artificial Sequence
  Description of Artificial Sequence: Synthetic oligonucleotide
gagugcgcugaucaugaug

SEQ ID NO: 1709261 - RNA, 19 nt, Artificial Sequence
  Description of Artificial Sequence: Synthetic oligonucleotide
ggagaaguagaagaugagc

SEQ ID NO: 1709262 - RNA, 19 nt, Artificial Sequence
  Description of Artificial Sequence: Synthetic oligonucleotide
uuucugggucauaggggag

SEQ ID NO: 1709263 - RNA, 19 nt, Artificial Sequence
  Description of Artificial Sequence: Synthetic oligonucleotide
ucguuucucuccugggcag

SEQ ID NO: 1709264 - RNA, 19 nt, Artificial Sequence
  Description of Artificial Sequence: Synthetic oligonucleotide
ggucuugaguacuuccccg

SEQ ID NO: 1709265 - RNA, 19 nt, Artificial Sequence
  Description of Artificial Sequence: Synthetic oligonucleotide
ugaagggcguguagaugag

SEQ ID NO: 1709266 - RNA, 19 nt, Artificial Sequence
  Description of Artificial Sequence: Synthetic oligonucleotide
auaggagucuucuuccauu

SEQ ID NO: 1709267 - RNA, 19 nt, Artificial Sequence
  Description of Artificial Sequence: Synthetic oligonucleotide
auaaagcaggccagugugg

SEQ ID NO: 1709268 - RNA, 19 nt, Artificial Sequence
  Description of Artificial Sequence: Synthetic oligonucleotide
ugcauccagagaagcuucc

SEQ ID NO: 1709269 - RNA, 19 nt, Artificial Sequence
  Description of Artificial Sequence: Synthetic oligonucleotide
cccaaaacugucauaggag

SEQ ID NO: 1709270 - RNA, 19 nt, Artificial Sequence
  Description of Artificial Sequence: Synthetic oligonucleotide
cuauacaccugcauccaga

SEQ ID NO: 1709271 - RNA, 19 nt, Artificial Sequence
  Description of Artificial Sequence: Synthetic oligonucleotide
aaccaaugaggauggcgau

SEQ ID NO: 1709272 - RNA, 19 nt, Artificial Sequence
  Description of Artificial Sequence: Synthetic oligonucleotide
ugaucaugaugagguaagc

SEQ ID NO: 1709273 - RNA, 19 nt, Artificial Sequence
  Description of Artificial Sequence: Synthetic oligonucleotide
caagaucauacacagagau

SEQ ID NO: 1709274 - RNA, 19 nt, Artificial Sequence
  Description of Artificial Sequence: Synthetic oligonucleotide
ugagggcguguccucagug

SEQ ID NO: 1709275 - RNA, 19 nt, Artificial Sequence
  Description of Artificial Sequence: Synthetic oligonucleotide
caucgauacuuguagagua

SEQ ID NO: 1709276 - RNA, 19 nt, Artificial Sequence
  Description of Artificial Sequence: Synthetic oligonucleotide
gccaacguguccaugaaag

SEQ ID NO: 1709277 - RNA, 19 nt, Artificial Sequence
  Description of Artificial Sequence: Synthetic oligonucleotide
uuccccgagguagauguag

SEQ ID NO: 1709278 - RNA, 19 nt, Artificial Sequence
  Description of Artificial Sequence: Synthetic oligonucleotide
gaguugaggagacgcuggc

SEQ ID NO: 1709279 - RNA, 19 nt, Artificial Sequence
  Description of Artificial Sequence: Synthetic oligonucleotide
auaggggagcugcagugcu

SEQ ID NO: 1709280 - RNA, 19 nt, Artificial Sequence
  Description of Artificial Sequence: Synthetic oligonucleotide
agucuccguugccagccgc

SEQ ID NO: 1709281 - RNA, 19 nt, Artificial Sequence
  Description of Artificial Sequence: Synthetic oligonucleotide
uccguugccagccgccgcc

SEQ ID NO: 1709282 - RNA, 19 nt, Artificial Sequence
  Description of Artificial Sequence: Synthetic oligonucleotide
gauguagagcuggugagaa

SEQ ID NO: 1709283 - RNA, 19 nt, Artificial Sequence
  Description of Artificial Sequence: Synthetic oligonucleotide
gaaauaugggcucguuucu

SEQ ID NO: 1709284 - RNA, 19 nt, Artificial Sequence
  Description of Artificial Sequence: Synthetic oligonucleotide
gaagagugugggguagucc

SEQ ID NO: 1709285 - RNA, 19 nt, Artificial Sequence
  Description of Artificial Sequence: Synthetic oligonucleotide
gauggcgauaaagcaggcc

SEQ ID NO: 1709286 - RNA, 19 nt, Artificial Sequence
  Description of Artificial Sequence: Synthetic oligonucleotide
ccuuaguggucccuuaggg

SEQ ID NO: 1709287 - RNA, 19 nt, Artificial Sequence
  Description of Artificial Sequence: Synthetic oligonucleotide
cuucuuccauuucuggguc

SEQ ID NO: 1709288 - RNA, 19 nt, Artificial Sequence
  Description of Artificial Sequence: Synthetic oligonucleotide
gagggucagcucuuccucc

SEQ ID NO: 1709289 - RNA, 19 nt, Artificial Sequence
  Description of Artificial Sequence: Synthetic oligonucleotide
agacuugaugguggcgacc

SEQ ID NO: 1709290 - RNA, 19 nt, Artificial Sequence
  Description of Artificial Sequence: Synthetic oligonucleotide
cacgaugacgcugaucaug

SEQ ID NO: 1709291 - RNA, 19 nt, Artificial Sequence
  Description of Artificial Sequence: Synthetic oligonucleotide
guagaugagcugcccauuc

SEQ ID NO: 1709292 - RNA, 19 nt, Artificial Sequence
  Description of Artificial Sequence: Synthetic oligonucleotide
acuagaguggaaaacuaua

SEQ ID NO: 1709293 - RNA, 19 nt, Artificial Sequence
  Description of Artificial Sequence: Synthetic oligonucleotide
uagcaucgauacuuguaga

SEQ ID NO: 1709294 - RNA, 19 nt, Artificial Sequence
  Description of Artificial Sequence: Synthetic oligonucleotide
ugaaaggccgcaccagguu

SEQ ID NO: 1709295 - RNA, 19 nt, Artificial Sequence
  Description of Artificial Sequence: Synthetic oligonucleotide
guggcgaccaccacaauca

SEQ ID NO: 1709296 - RNA, 19 nt, Artificial Sequence
  Description of Artificial Sequence: Synthetic oligonucleotide
guaguccauggccacguug

SEQ ID NO: 1709297 - RNA, 19 nt, Artificial Sequence
  Description of Artificial Sequence: Synthetic oligonucleotide
gacuugaugguggcgacca

SEQ ID NO: 1709298 - RNA, 19 nt, Artificial Sequence
  Description of Artificial Sequence: Synthetic oligonucleotide
acggcuccaaaauuccaga

SEQ ID NO: 1709299 - RNA, 19 nt, Artificial Sequence
  Description of Artificial Sequence: Synthetic oligonucleotide
cuccaaaauuccagacggc

SEQ ID NO: 1709300 - RNA, 19 nt, Artificial Sequence
  Description of Artificial Sequence: Synthetic oligonucleotide
aggaaauaugggcucguuu

SEQ ID NO: 1709301 - RNA, 19 nt, Artificial Sequence
  Description of Artificial Sequence: Synthetic oligonucleotide
aaguagaagaugagcccga

SEQ ID NO: 1709302 - RNA, 19 nt, Artificial Sequence
  Description of Artificial Sequence: Synthetic oligonucleotide
aguggucccuuccagugaa

SEQ ID NO: 1709303 - RNA, 19 nt, Artificial Sequence
  Description of Artificial Sequence: Synthetic oligonucleotide
aggagucuucuuccauuuc

SEQ ID NO: 1709304 - RNA, 19 nt, Artificial Sequence
  Description of Artificial Sequence: Synthetic oligonucleotide
aggcuucgggguaugaggg

SEQ ID NO: 1709305 - RNA, 19 nt, Artificial Sequence
  Description of Artificial Sequence: Synthetic oligonucleotide
cagcaugaucacaugcuuc

SEQ ID NO: 1709306 - RNA, 19 nt, Artificial Sequence
  Description of Artificial Sequence: Synthetic oligonucleotide
agccacaagaucauacaca

SEQ ID NO: 1709307 - RNA, 19 nt, Artificial Sequence
  Description of Artificial Sequence: Synthetic oligonucleotide
auaucagggcaggaaauau

SEQ ID NO: 1709308 - RNA, 19 nt, Artificial Sequence
  Description of Artificial Sequence: Synthetic oligonucleotide
gaguauaucagggcaggaa

SEQ ID NO: 1709309 - RNA, 19 nt, Artificial Sequence
  Description of Artificial Sequence: Synthetic oligonucleotide
agguugucuguggagaagu

SEQ ID NO: 1709310 - RNA, 19 nt, Artificial Sequence
  Description of Artificial Sequence: Synthetic oligonucleotide
augaccacgaugacgcuga

SEQ ID NO: 1709311 - RNA, 19 nt, Artificial Sequence
  Description of Artificial Sequence: Synthetic oligonucleotide
auguagagcuggugagaag

SEQ ID NO: 1709312 - RNA, 19 nt, Artificial Sequence
  Description of Artificial Sequence: Synthetic oligonucleotide
ucccugagaggagggaucc

SEQ ID NO: 1709313 - RNA, 19 nt, Artificial Sequence
  Description of Artificial Sequence: Synthetic oligonucleotide
acgaugacgcugaucauga

SEQ ID NO: 1709314 - RNA, 19 nt, Artificial Sequence
  Description of Artificial Sequence: Synthetic oligonucleotide
ggcguguccucagugaagg

SEQ ID NO: 1709315 - RNA, 19 nt, Artificial Sequence
  Description of Artificial Sequence: Synthetic oligonucleotide
cugaucaugaugagggugu

SEQ ID NO: 1709316 - RNA, 19 nt, Artificial Sequence
  Description of Artificial Sequence: Synthetic oligonucleotide
gaucagccagccguggaug

SEQ ID NO: 1709317 - RNA, 19 nt, Artificial Sequence
  Description of Artificial Sequence: Synthetic oligonucleotide
aagccaacguguccaugaa

SEQ ID NO: 1709318 - RNA, 19 nt, Artificial Sequence
  Description of Artificial Sequence: Synthetic oligonucleotide
aggacgcuguagaagauga

SEQ ID NO: 1709319 - RNA, 19 nt, Artificial Sequence
  Description of Artificial Sequence: Synthetic oligonucleotide
caagaugacccaggcagac

SEQ ID NO: 1709320 - RNA, 19 nt, Artificial Sequence
  Description of Artificial Sequence: Synthetic oligonucleotide
auggcacuagaguggaaaa

SEQ ID NO: 1709321 - RNA, 19 nt, Artificial Sequence
  Description of Artificial Sequence: Synthetic oligonucleotide
cucguuucucuccugggca

SEQ ID NO: 1709322 - RNA, 19 nt, Artificial Sequence
  Description of Artificial Sequence: Synthetic oligonucleotide
acguguccaugaaaggccg

SEQ ID NO: 1709323 - RNA, 19 nt, Artificial Sequence
  Description of Artificial Sequence: Synthetic oligonucleotide
uaccacuaggaagaugguc

SEQ ID NO: 1709324 - RNA, 19 nt, Artificial Sequence
  Description of Artificial Sequence: Synthetic oligonucleotide
cauaggggagcugcagugc

SEQ ID NO: 1709325 - RNA, 19 nt, Artificial Sequence
  Description of Artificial Sequence: Synthetic oligonucleotide
cuucgccccguacuugagg

SEQ ID NO: 1709326 - RNA, 19 nt, Artificial Sequence
  Description of Artificial Sequence: Synthetic oligonucleotide
ucuccguugccagccgccg

SEQ ID NO: 1709327 - RNA, 19 nt, Artificial Sequence
  Description of Artificial Sequence: Synthetic oligonucleotide
ugacgcugaucaugaugag

SEQ ID NO: 1709328 - RNA, 19 nt, Artificial Sequence
  Description of Artificial Sequence: Synthetic oligonucleotide
augcccacggcuccaaaau

SEQ ID NO: 1709329 - RNA, 19 nt, Artificial Sequence
  Description of Artificial Sequence: Synthetic oligonucleotide
gagcaugagggaagacagg

SEQ ID NO: 1709330 - RNA, 19 nt, Artificial Sequence
  Description of Artificial Sequence: Synthetic oligonucleotide
ugaguauaucagggcagga

SEQ ID NO: 1709331 - RNA, 19 nt, Artificial Sequence
  Description of Artificial Sequence: Synthetic oligonucleotide
aaaggccgcaccagguugu

SEQ ID NO: 1709332 - RNA, 19 nt, Artificial Sequence
  Description of Artificial Sequence: Synthetic oligonucleotide
gucuugaguacuuccccga

SEQ ID NO: 1709333 - RNA, 19 nt, Artificial Sequence
  Description of Artificial Sequence: Synthetic oligonucleotide
uggcacuagaguggaaaac

SEQ ID NO: 1709334 - RNA, 19 nt, Artificial Sequence
  Description of Artificial Sequence: Synthetic oligonucleotide
uggucccuuccagugaaug

SEQ ID NO: 1709335 - RNA, 19 nt, Artificial Sequence
  Description of Artificial Sequence: Synthetic oligonucleotide
caugaccacgaugacgcug

SEQ ID NO: 1709336 - RNA, 19 nt, Artificial Sequence
  Description of Artificial Sequence: Synthetic oligonucleotide
uagagcuggugagaagcca

SEQ ID NO: 1709337 - RNA, 19 nt, Artificial Sequence
  Description of Artificial Sequence: Synthetic oligonucleotide
cuccugucagauguagagc

SEQ ID NO: 1709338 - RNA, 19 nt, Artificial Sequence
  Description of Artificial Sequence: Synthetic oligonucleotide
gacaaacagcaugaucaca

SEQ ID NO: 1709339 - RNA, 19 nt, Artificial Sequence
  Description of Artificial Sequence: Synthetic oligonucleotide
ggucccuuagggcacagca

SEQ ID NO: 1709340 - RNA, 19 nt, Artificial Sequence
  Description of Artificial Sequence: Synthetic oligonucleotide
agauguaggugaacaagaa

SEQ ID NO: 1709341 - RNA, 19 nt, Artificial Sequence
  Description of Artificial Sequence: Synthetic oligonucleotide
augggcucguuucucuccu

SEQ ID NO: 1709342 - RNA, 19 nt, Artificial Sequence
  Description of Artificial Sequence: Synthetic oligonucleotide
gccaugagugcgcugauca

SEQ ID NO: 1709343 - RNA, 19 nt, Artificial Sequence
  Description of Artificial Sequence: Synthetic oligonucleotide
aggcguagccgucgggguc

SEQ ID NO: 1709344 - RNA, 19 nt, Artificial Sequence
  Description of Artificial Sequence: Synthetic oligonucleotide
ggacaaacagcaugaucac

SEQ ID NO: 1709345 - RNA, 19 nt, Artificial Sequence
  Description of Artificial Sequence: Synthetic oligonucleotide
uccagucuccguugccagc

SEQ ID NO: 1709346 - RNA, 19 nt, Artificial Sequence
  Description of Artificial Sequence: Synthetic oligonucleotide
cugcccauucuucucugug

SEQ ID NO: 1709347 - RNA, 19 nt, Artificial Sequence
  Description of Artificial Sequence: Synthetic oligonucleotide
gauccagcuuugccaugcc

SEQ ID NO: 1709348 - RNA, 19 nt, Artificial Sequence
  Description of Artificial Sequence: Synthetic oligonucleotide
aguacuuccccgagguaga

SEQ ID NO: 1709349 - RNA, 19 nt, Artificial Sequence
  Description of Artificial Sequence: Synthetic oligonucleotide
cuuugccaugcccacuguc

SEQ ID NO: 1709350 - RNA, 19 nt, Artificial Sequence
  Description of Artificial Sequence: Synthetic oligonucleotide
agagucagacacaaaccaa

SEQ ID NO: 1709351 - RNA, 19 nt, Artificial Sequence
  Description of Artificial Sequence: Synthetic oligonucleotide
gguggcgaccaccacaauc

SEQ ID NO: 1709352 - RNA, 19 nt, Artificial Sequence
  Description of Artificial Sequence: Synthetic oligonucleotide
uguccucagugaagggcgu

SEQ ID NO: 1709353 - RNA, 19 nt, Artificial Sequence
  Description of Artificial Sequence: Synthetic oligonucleotide
gcugaucaugaugagggug

SEQ ID NO: 1709354 - RNA, 19 nt, Artificial Sequence
  Description of Artificial Sequence: Synthetic oligonucleotide
ccaacguguccaugaaagg

SEQ ID NO: 1709355 - RNA, 19 nt, Artificial Sequence
  Description of Artificial Sequence: Synthetic oligonucleotide
agggcguguagaugagcug

SEQ ID NO: 1709356 - RNA, 19 nt, Artificial Sequence
  Description of Artificial Sequence: Synthetic oligonucleotide
acgcuggcccacugagggc

SEQ ID NO: 1709357 - RNA, 19 nt, Artificial Sequence
  Description of Artificial Sequence: Synthetic oligonucleotide
cccuggguagccaggaagg

SEQ ID NO: 1709358 - RNA, 19 nt, Artificial Sequence
  Description of Artificial Sequence: Synthetic oligonucleotide
cuuccccuggguagccagg

SEQ ID NO: 1709359 - RNA, 19 nt, Artificial Sequence
  Description of Artificial Sequence: Synthetic oligonucleotide
ugcaggcguagccgucggg

SEQ ID NO: 1709360 - RNA, 19 nt, Artificial Sequence
  Description of Artificial Sequence: Synthetic oligonucleotide
gagugugggguaguccaug

SEQ ID NO: 1709361 - RNA, 19 nt, Artificial Sequence
  Description of Artificial Sequence: Synthetic oligonucleotide
uguccaugaaaggccgcac

SEQ ID NO: 1709362 - RNA, 19 nt, Artificial Sequence
  Description of Artificial Sequence: Synthetic oligonucleotide
acucuuccccuggguagcc

SEQ ID NO: 1709363 - RNA, 19 nt, Artificial Sequence
  Description of Artificial Sequence: Synthetic oligonucleotide
caggccagugugguguucc

SEQ ID NO: 1709364 - RNA, 19 nt, Artificial Sequence
  Description of Artificial Sequence: Synthetic oligonucleotide
gucagauguagagcuggug

SEQ ID NO: 1709365 - RNA, 19 nt, Artificial Sequence
  Description of Artificial Sequence: Synthetic oligonucleotide
gaagggcguguagaugagc

SEQ ID NO: 1709366 - RNA, 19 nt, Artificial Sequence
  Description of Artificial Sequence: Synthetic oligonucleotide
uguagaugagcugcccauu

SEQ ID NO: 1709367 - RNA, 19 nt, Artificial Sequence
  Description of Artificial Sequence: Synthetic oligonucleotide
gggcguguagaugagcugc

SEQ ID NO: 1709368 - RNA, 19 nt, Artificial Sequence
  Description of Artificial Sequence: Synthetic oligonucleotide
accauggcagaugaguaua

SEQ ID NO: 1709369 - RNA, 19 nt, Artificial Sequence
  Description of Artificial Sequence: Synthetic oligonucleotide
agggcguguccucagugaa

SEQ ID NO: 1709370 - RNA, 19 nt, Artificial Sequence
  Description of Artificial Sequence: Synthetic oligonucleotide
acagaguugaggagacgcu

SEQ ID NO: 1709371 - RNA, 19 nt, Artificial Sequence
  Description of Artificial Sequence: Synthetic oligonucleotide
acuugagggucagcucuuc

SEQ ID NO: 1709372 - RNA, 19 nt, Artificial Sequence
  Description of Artificial Sequence: Synthetic oligonucleotide
ccgagguagauguagguga

SEQ ID NO: 1709373 - RNA, 19 nt, Artificial Sequence
  Description of Artificial Sequence: Synthetic oligonucleotide
cggacagacuugauggugg

SEQ ID NO: 1709374 - RNA, 19 nt, Artificial Sequence
  Description of Artificial Sequence: Synthetic oligonucleotide
uucgggguaugagggcucc

SEQ ID NO: 1709375 - RNA, 19 nt, Artificial Sequence
  Description of Artificial Sequence: Synthetic oligonucleotide
ugaguacuuccccgaggua

SEQ ID NO: 1709376 - RNA, 19 nt, Artificial Sequence
  Description of Artificial Sequence: Synthetic oligonucleotide
caggacgcuguagaagaug

SEQ ID NO: 1709377 - RNA, 19 nt, Artificial Sequence
  Description of Artificial Sequence: Synthetic oligonucleotide
gccguggaugaacuuguag

SEQ ID NO: 1709378 - RNA, 19 nt, Artificial Sequence
  Description of Artificial Sequence: Synthetic oligonucleotide
cacguuguaggucuugagu

SEQ ID NO: 1709379 - RNA, 19 nt, Artificial Sequence
  Description of Artificial Sequence: Synthetic oligonucleotide
caccugcauccagagaagc

SEQ ID NO: 1709380 - RNA, 19 nt, Artificial Sequence
  Description of Artificial Sequence: Synthetic oligonucleotide
agggcuccccaaaacuguc

SEQ ID NO: 1709381 - RNA, 19 nt, Artificial Sequence
  Description of Artificial Sequence: Synthetic oligonucleotide
cauggcagaugaguauauc

SEQ ID NO: 1709382 - RNA, 19 nt, Artificial Sequence
  Description of Artificial Sequence: Synthetic oligonucleotide
acaccugcauccagagaag

SEQ ID NO: 1709383 - RNA, 19 nt, Artificial Sequence
  Description of Artificial Sequence: Synthetic oligonucleotide
cagguugucuguggagaag

SEQ ID NO: 1709384 - RNA, 19 nt, Artificial Sequence
  Description of Artificial Sequence: Synthetic oligonucleotide
guaugagggcuccccaaaa

SEQ ID NO: 1709385 - RNA, 19 nt, Artificial Sequence
  Description of Artificial Sequence: Synthetic oligonucleotide
gaugagcccgaaggugaug

SEQ ID NO: 1709386 - RNA, 19 nt, Artificial Sequence
  Description of Artificial Sequence: Synthetic oligonucleotide
gcaggcguagccgucgggg

SEQ ID NO: 1709387 - RNA, 19 nt, Artificial Sequence
  Description of Artificial Sequence: Synthetic oligonucleotide
ugccaugcccacuguccac

SEQ ID NO: 1709388 - RNA, 19 nt, Artificial Sequence
  Description of Artificial Sequence: Synthetic oligonucleotide
ucaugaccacgaugacgcu

SEQ ID NO: 1709389 - RNA, 19 nt, Artificial Sequence
  Description of Artificial Sequence: Synthetic oligonucleotide
caugcccacuguccacacc

SEQ ID NO: 1709390 - RNA, 19 nt, Artificial Sequence
  Description of Artificial Sequence: Synthetic oligonucleotide
gacccgacugcaggcguag

SEQ ID NO: 1709391 - RNA, 19 nt, Artificial Sequence
  Description of Artificial Sequence: Synthetic oligonucleotide
gagguagauguaggugaac

SEQ ID NO: 1709392 - RNA, 19 nt, Artificial Sequence
  Description of Artificial Sequence: Synthetic oligonucleotide
ugcccacggcuccaaaauu

SEQ ID NO: 1709393 - RNA, 19 nt, Artificial Sequence
  Description of Artificial Sequence: Synthetic oligonucleotide
cuucgggguaugagggcuc

SEQ ID NO: 1709394 - RNA, 19 nt, Artificial Sequence
  Description of Artificial Sequence: Synthetic oligonucleotide
augacccaggcagaccacu

SEQ ID NO: 1709395 - RNA, 19 nt, Artificial Sequence
  Description of Artificial Sequence: Synthetic oligonucleotide
ccccaaaacugucauagga

SEQ ID NO: 1709396 - RNA, 19 nt, Artificial Sequence
  Description of Artificial Sequence: Synthetic oligonucleotide
uccagacggccaggaagag

SEQ ID NO: 1709397 - RNA, 19 nt, Artificial Sequence
  Description of Artificial Sequence: Synthetic oligonucleotide
cguggaugaacuuguagca

SEQ ID NO: 1709398 - RNA, 19 nt, Artificial Sequence
  Description of Artificial Sequence: Synthetic oligonucleotide
ggcacuagaguggaaaacu

SEQ ID NO: 1709399 - RNA, 19 nt, Artificial Sequence
  Description of Artificial Sequence: Synthetic oligonucleotide
cauccagagaagcuuccua

SEQ ID NO: 1709400 - RNA, 19 nt, Artificial Sequence
  Description of Artificial Sequence: Synthetic oligonucleotide
gguaugagggcuccccaaa

SEQ ID NO: 1709401 - RNA, 19 nt, Artificial Sequence
  Description of Artificial Sequence: Synthetic oligonucleotide
cauggccacguuguagguc

SEQ ID NO: 1709402 - RNA, 19 nt, Artificial Sequence
  Description of Artificial Sequence: Synthetic oligonucleotide
aguuuccaccagcauccuu

SEQ ID NO: 1709403 - RNA, 19 nt, Artificial Sequence
  Description of Artificial Sequence: Synthetic oligonucleotide
caugcccacggcuccaaaa

SEQ ID NO: 1709404 - RNA, 19 nt, Artificial Sequence
  Description of Artificial Sequence: Synthetic oligonucleotide
caggaucagccagccgugg

SEQ ID NO: 1709405 - RNA, 19 nt, Artificial Sequence
  Description of Artificial Sequence: Synthetic oligonucleotide
cacuagaguggaaaacuau

SEQ ID NO: 1709406 - RNA, 19 nt, Artificial Sequence
  Description of Artificial Sequence: Synthetic oligonucleotide
gaugacccaggcagaccac

SEQ ID NO: 1709407 - RNA, 19 nt, Artificial Sequence
  Description of Artificial Sequence: Synthetic oligonucleotide
ccagucuccguugccagcc

SEQ ID NO: 1709408 - RNA, 19 nt, Artificial Sequence
  Description of Artificial Sequence: Synthetic oligonucleotide
accaaugaggauggcgaua

SEQ ID NO: 1709409 - RNA, 19 nt, Artificial Sequence
  Description of Artificial Sequence: Synthetic oligonucleotide
gucccuuagggcacagcac

SEQ ID NO: 1709410 - RNA, 19 nt, Artificial Sequence
  Description of Artificial Sequence: Synthetic oligonucleotide
gcuuccuacagcccucaga

SEQ ID NO: 1709411 - RNA, 19 nt, Artificial Sequence
  Description of Artificial Sequence: Synthetic oligonucleotide
cagucuccguugccagccg

SEQ ID NO: 1709412 - RNA, 19 nt, Artificial Sequence
  Description of Artificial Sequence: Synthetic oligonucleotide
ccagccguggaugaacuug

SEQ ID NO: 1709413 - RNA, 19 nt, Artificial Sequence
  Description of Artificial Sequence: Synthetic oligonucleotide
gugcgcugaucaugaugag

SEQ ID NO: 1709414 - RNA, 19 nt, Artificial Sequence
  Description of Artificial Sequence: Synthetic oligonucleotide
cacuaggaagauggucaug

SEQ ID NO: 1709415 - RNA, 19 nt, Artificial Sequence
  Description of Artificial Sequence: Synthetic oligonucleotide
ggaaaacuauacaccugca

SEQ ID NO: 1709416 - RNA, 19 nt, Artificial Sequence
  Description of Artificial Sequence: Synthetic oligonucleotide
gucuccguugccagccgcc

SEQ ID NO: 1709417 - RNA, 19 nt, Artificial Sequence
  Description of Artificial Sequence: Synthetic oligonucleotide
agcuuccuacagcccucag

SEQ ID NO: 1709418 - RNA, 19 nt, Artificial Sequence
  Description of Artificial Sequence: Synthetic oligonucleotide
ccgacugcaggcguagccg

SEQ ID NO: 1709419 - RNA, 19 nt, Artificial Sequence
  Description of Artificial Sequence: Synthetic oligonucleotide
cacaugcuucgccccguac

SEQ ID NO: 1709420 - RNA, 19 nt, Artificial Sequence
  Description of Artificial Sequence: Synthetic oligonucleotide
uggcgaccaccacaaucau

SEQ ID NO: 1709421 - RNA, 19 nt, Artificial Sequence
  Description of Artificial Sequence: Synthetic oligonucleotide
cagccagccguggaugaac

SEQ ID NO: 1709422 - RNA, 19 nt, Artificial Sequence
  Description of Artificial Sequence: Synthetic oligonucleotide
aggaagagugugggguagu

SEQ ID NO: 1709423 - RNA, 19 nt, Artificial Sequence
  Description of Artificial Sequence: Synthetic oligonucleotide
ugcucccugagaggaggga

SEQ ID NO: 1709424 - RNA, 19 nt, Artificial Sequence
  Description of Artificial Sequence: Synthetic oligonucleotide
cuguguagaagcggacaga

SEQ ID NO: 1709425 - RNA, 19 nt, Artificial Sequence
  Description of Artificial Sequence: Synthetic oligonucleotide
gcgauaaagcaggccagug

SEQ ID NO: 1709426 - RNA, 19 nt, Artificial Sequence
  Description of Artificial Sequence: Synthetic oligonucleotide
cccauucuucucuguguag

SEQ ID NO: 1709427 - RNA, 19 nt, Artificial Sequence
  Description of Artificial Sequence: Synthetic oligonucleotide
cguguccucagugaagggc

SEQ ID NO: 1709428 - RNA, 19 nt, Artificial Sequence
  Description of Artificial Sequence: Synthetic oligonucleotide
gcgcugaucaugaugaggu

SEQ ID NO: 1709429 - RNA, 19 nt, Artificial Sequence
  Description of Artificial Sequence: Synthetic oligonucleotide
uguccacaccauggcagau

SEQ ID NO: 1709430 - RNA, 19 nt, Artificial Sequence
  Description of Artificial Sequence: Synthetic oligonucleotide
ggcacccaagaugacccag

SEQ ID NO: 1709431 - RNA, 19 nt, Artificial Sequence
  Description of Artificial Sequence: Synthetic oligonucleotide
agaguaccacuaggaagau

SEQ ID NO: 1709432 - RNA, 19 nt, Artificial Sequence
  Description of Artificial Sequence: Synthetic oligonucleotide
ucagccagccguggaugaa

SEQ ID NO: 1709433 - RNA, 19 nt, Artificial Sequence
  Description of Artificial Sequence: Synthetic oligonucleotide
agcauccuuaguggucccu

SEQ ID NO: 1709434 - RNA, 19 nt, Artificial Sequence
  Description of Artificial Sequence: Synthetic oligonucleotide
ccaaugaggauggcgauaa

SEQ ID NO: 1709435 - RNA, 19 nt, Artificial Sequence
  Description of Artificial Sequence: Synthetic oligonucleotide
aguccauggccacguugua

SEQ ID NO: 1709436 - RNA, 19 nt, Artificial Sequence
  Description of Artificial Sequence: Synthetic oligonucleotide
gacccaggcagaccacucu

SEQ ID NO: 1709437 - RNA, 19 nt, Artificial Sequence
  Description of Artificial Sequence: Synthetic oligonucleotide
ggcuucgggguaugagggc

SEQ ID NO: 1709438 - RNA, 19 nt, Artificial Sequence
  Description of Artificial Sequence: Synthetic oligonucleotide
cccgggacccgacugcagg

SEQ ID NO: 1709439 - RNA, 19 nt, Artificial Sequence
  Description of Artificial Sequence: Synthetic oligonucleotide
ggcguagccgucggggucc

SEQ ID NO: 1709440 - RNA, 19 nt, Artificial Sequence
  Description of Artificial Sequence: Synthetic oligonucleotide
ccaugaaaggccgcaccag

SEQ ID NO: 1709441 - RNA, 19 nt, Artificial Sequence
  Description of Artificial Sequence: Synthetic oligonucleotide
cauaggagucuucuuccau

SEQ ID NO: 1709442 - RNA, 19 nt, Artificial Sequence
  Description of Artificial Sequence: Synthetic oligonucleotide
cccgacugcaggcguagcc

SEQ ID NO: 1709443 - RNA, 19 nt, Artificial Sequence
  Description of Artificial Sequence: Synthetic oligonucleotide
gcaggagagucagacacaa

SEQ ID NO: 1709444 - RNA, 19 nt, Artificial Sequence
  Description of Artificial Sequence: Synthetic oligonucleotide
agaugagcccgaaggugau

SEQ ID NO: 1709445 - RNA, 19 nt, Artificial Sequence
  Description of Artificial Sequence: Synthetic oligonucleotide
ccaccacaaucaugcacag

SEQ ID NO: 1709446 - RNA, 19 nt, Artificial Sequence
  Description of Artificial Sequence: Synthetic oligonucleotide
cauccuuaguggucccuua

SEQ ID NO: 1709447 - RNA, 19 nt, Artificial Sequence
  Description of Artificial Sequence: Synthetic oligonucleotide
augcuucgccccguacuug

SEQ ID NO: 1709448 - RNA, 19 nt, Artificial Sequence
  Description of Artificial Sequence: Synthetic oligonucleotide
gugugguguuccagucucc

SEQ ID NO: 1709449 - RNA, 19 nt, Artificial Sequence
  Description of Artificial Sequence: Synthetic oligonucleotide
caguggucccuuccaguga

SEQ ID NO: 1709450 - RNA, 19 nt, Artificial Sequence
  Description of Artificial Sequence: Synthetic oligonucleotide
ggcguguagaugagcugcc

SEQ ID NO: 1709451 - RNA, 19 nt, Artificial Sequence
  Description of Artificial Sequence: Synthetic oligonucleotide
acccgacugcaggcguagc

SEQ ID NO: 1709452 - RNA, 19 nt, Artificial Sequence
  Description of Artificial Sequence: Synthetic oligonucleotide
agccagccguggaugaacu

SEQ ID NO: 1709453 - RNA, 19 nt, Artificial Sequence
  Description of Artificial Sequence: Synthetic oligonucleotide
gcaugaucacaugcuucgc

SEQ ID NO: 1709454 - RNA, 19 nt, Artificial Sequence
  Description of Artificial Sequence: Synthetic oligonucleotide
gaccacgaugacgcugauc

SEQ ID NO: 1709455 - RNA, 19 nt, Artificial Sequence
  Description of Artificial Sequence: Synthetic oligonucleotide
cagccguggaugaacuugu

SEQ ID NO: 1709456 - RNA, 19 nt, Artificial Sequence
  Description of Artificial Sequence: Synthetic oligonucleotide
uggucccuuagggcacagc

SEQ ID NO: 1709457 - RNA, 19 nt, Artificial Sequence
  Description of Artificial Sequence: Synthetic oligonucleotide
ccaggccaagcuucacgcc

SEQ ID NO: 1709458 - RNA, 19 nt, Artificial Sequence
  Description of Artificial Sequence: Synthetic oligonucleotide
caugcuucgccccguacuu

SEQ ID NO: 1709459 - RNA, 19 nt, Artificial Sequence
  Description of Artificial Sequence: Synthetic oligonucleotide
agccacgcucugucuccug

SEQ ID NO: 1709460 - RNA, 19 nt, Artificial Sequence
  Description of Artificial Sequence: Synthetic oligonucleotide
gagaagccaacguguccau

SEQ ID NO: 1709461 - RNA, 19 nt, Artificial Sequence
  Description of Artificial Sequence: Synthetic oligonucleotide
ugaccacgaugacgcugau

SEQ ID NO: 1709462 - RNA, 19 nt, Artificial Sequence
  Description of Artificial Sequence: Synthetic oligonucleotide
gcguguccucagugaaggg

SEQ ID NO: 1709463 - RNA, 19 nt, Artificial Sequence
  Description of Artificial Sequence: Synthetic oligonucleotide
gggguaugagggcucccca

SEQ ID NO: 1709464 - RNA, 19 nt, Artificial Sequence
  Description of Artificial Sequence: Synthetic oligonucleotide
ggguaugagggcuccccaa

SEQ ID NO: 1709465 - RNA, 19 nt, Artificial Sequence
  Description of Artificial Sequence: Synthetic oligonucleotide
ucgggguaugagggcuccc

SEQ ID NO: 1709466 - RNA, 19 nt, Artificial Sequence
  Description of Artificial Sequence: Synthetic oligonucleotide
caccauggcagaugaguau

SEQ ID NO: 1709467 - RNA, 19 nt, Artificial Sequence
  Description of Artificial Sequence: Synthetic oligonucleotide
ggcgaccaccacaaucaug

SEQ ID NO: 1709468 - RNA, 19 nt, Artificial Sequence
  Description of Artificial Sequence: Synthetic oligonucleotide
gcccauucuucucugugua

SEQ ID NO: 1709469 - RNA, 19 nt, Artificial Sequence
  Description of Artificial Sequence: Synthetic oligonucleotide
gccagugugguguuccagu

SEQ ID NO: 1709470 - RNA, 19 nt, Artificial Sequence
  Description of Artificial Sequence: Synthetic oligonucleotide
ccgggacccgacugcaggc

SEQ ID NO: 1709471 - RNA, 19 nt, Artificial Sequence
  Description of Artificial Sequence: Synthetic oligonucleotide
ccaacucuuccccugggua

SEQ ID NO: 1709472 - RNA, 19 nt, Artificial Sequence
  Description of Artificial Sequence: Synthetic oligonucleotide
gggcguguccucagugaag

SEQ ID NO: 1709473 - RNA, 19 nt, Artificial Sequence
  Description of Artificial Sequence: Synthetic oligonucleotide
gcacuagaguggaaaacua

SEQ ID NO: 1709474 - RNA, 19 nt, Artificial Sequence
  Description of Artificial Sequence: Synthetic oligonucleotide
agaagcggacagacuugau

SEQ ID NO: 1709475 - RNA, 19 nt, Artificial Sequence
  Description of Artificial Sequence: Synthetic oligonucleotide
ggccagugugguguuccag

SEQ ID NO: 1709476 - RNA, 19 nt, Artificial Sequence
  Description of Artificial Sequence: Synthetic oligonucleotide
gcguguagaugagcugccc

SEQ ID NO: 1709477 - RNA, 19 nt, Artificial Sequence
  Description of Artificial Sequence: Synthetic oligonucleotide
ccagguugucuguggagaa

SEQ ID NO: 1709478 - RNA, 19 nt, Artificial Sequence
  Description of Artificial Sequence: Synthetic oligonucleotide
ugguggcgaccaccacaau

SEQ ID NO: 1709479 - RNA, 19 nt, Artificial Sequence
  Description of Artificial Sequence: Synthetic oligonucleotide
agacggccaggaagagugu

SEQ ID NO: 1709480 - RNA, 19 nt, Artificial Sequence
  Description of Artificial Sequence: Synthetic oligonucleotide
gcuucgggguaugagggcu

SEQ ID NO: 1709481 - RNA, 19 nt, Artificial Sequence
  Description of Artificial Sequence: Synthetic oligonucleotide
gccgcccgggacccgacug

SEQ ID NO: 1709482 - RNA, 19 nt, Artificial Sequence
  Description of Artificial Sequence: Synthetic oligonucleotide
uggccacguuguaggucuu

SEQ ID NO: 1709483 - RNA, 19 nt, Artificial Sequence
  Description of Artificial Sequence: Synthetic oligonucleotide
caggcguagccgucggggu

SEQ ID NO: 1709484 - RNA, 19 nt, Artificial Sequence
  Description of Artificial Sequence: Synthetic oligonucleotide
cgggguaugagggcucccc

SEQ ID NO: 1709485 - RNA, 19 nt, Artificial Sequence
  Description of Artificial Sequence: Synthetic oligonucleotide
ggcgauaaagcaggccagu

SEQ ID NO: 1709486 - RNA, 19 nt, Artificial Sequence
  Description of Artificial Sequence: Synthetic oligonucleotide
ccacgcucugucuccuguc

SEQ ID NO: 1709487 - RNA, 19 nt, Artificial Sequence
  Description of Artificial Sequence: Synthetic oligonucleotide
gcuucgccccguacuugag

SEQ ID NO: 1709488 - RNA, 19 nt, Artificial Sequence
  Description of Artificial Sequence: Synthetic oligonucleotide
aggccgcaccagguugucu

SEQ ID NO: 1709489 - RNA, 19 nt, Artificial Sequence
  Description of Artificial Sequence: Synthetic oligonucleotide
cgauaaagcaggccagugu

SEQ ID NO: 1709490 - RNA, 19 nt, Artificial Sequence
  Description of Artificial Sequence: Synthetic oligonucleotide
ccgcuuugcccaccaggac

SEQ ID NO: 1709491 - RNA, 19 nt, Artificial Sequence
  Description of Artificial Sequence: Synthetic oligonucleotide
cuuccccgagguagaugua

SEQ ID NO: 1709492 - RNA, 19 nt, Artificial Sequence
  Description of Artificial Sequence: Synthetic oligonucleotide
cucuuccccuggguagcca

SEQ ID NO: 1709493 - RNA, 19 nt, Artificial Sequence
  Description of Artificial Sequence: Synthetic oligonucleotide
cugagggcguguccucagu

SEQ ID NO: 1709494 - RNA, 19 nt, Artificial Sequence
  Description of Artificial Sequence: Synthetic oligonucleotide
ggccaugagugcgcugauc

SEQ ID NO: 1709495 - RNA, 19 nt, Artificial Sequence
  Description of Artificial Sequence: Synthetic oligonucleotide
gccacgcucugucuccugu

SEQ ID NO: 1709496 - RNA, 19 nt, Artificial Sequence
  Description of Artificial Sequence: Synthetic oligonucleotide
cgcucugucuccugucaga

SEQ ID NO: 1709497 - RNA, 19 nt, Artificial Sequence
  Description of Artificial Sequence: Synthetic oligonucleotide
ccgcccgggacccgacugc

SEQ ID NO: 1709498 - RNA, 19 nt, Artificial Sequence
  Description of Artificial Sequence: Synthetic oligonucleotide
ggacgcuguagaagaugaa

SEQ ID NO: 1709499 - RNA, 19 nt, Artificial Sequence
  Description of Artificial Sequence: Synthetic oligonucleotide
gagccacgcucugucuccu

SEQ ID NO: 1709500 - RNA, 19 nt, Artificial Sequence
  Description of Artificial Sequence: Synthetic oligonucleotide
ccacucuggcagguacuug

SEQ ID NO: 1709501 - RNA, 19 nt, Artificial Sequence
  Description of Artificial Sequence: Synthetic oligonucleotide
cagaccacucuggcaggua

SEQ ID NO: 1709502 - RNA, 19 nt, Artificial Sequence
  Description of Artificial Sequence: Synthetic oligonucleotide
cgggacccgacugcaggcg

SEQ ID NO: 1709503 - RNA, 19 nt, Artificial Sequence
  Description of Artificial Sequence: Synthetic oligonucleotide
guacuuccccgagguagau

SEQ ID NO: 1709504 - RNA, 19 nt, Artificial Sequence
  Description of Artificial Sequence: Synthetic oligonucleotide
cgccccguacuugaggguc

SEQ ID NO: 1709505 - RNA, 19 nt, Artificial Sequence
  Description of Artificial Sequence: Synthetic oligonucleotide
ccccguacuugagggucag

SEQ ID NO: 1709506 - RNA, 19 nt, Artificial Sequence
  Description of Artificial Sequence: Synthetic oligonucleotide
gcugcccauucuucucugu

SEQ ID NO: 1709507 - RNA, 19 nt, Artificial Sequence
  Description of Artificial Sequence: Synthetic oligonucleotide
gggacccgacugcaggcgu

SEQ ID NO: 1709508 - RNA, 19 nt, Artificial Sequence
  Description of Artificial Sequence: Synthetic oligonucleotide
ccauggcagaugaguauau

SEQ ID NO: 1709509 - RNA, 19 nt, Artificial Sequence
  Description of Artificial Sequence: Synthetic oligonucleotide
ccguugccagccgccgccg

SEQ ID NO: 1709510 - RNA, 19 nt, Artificial Sequence
  Description of Artificial Sequence: Synthetic oligonucleotide
gcauccuuaguggucccuu

SEQ ID NO: 1709511 - RNA, 19 nt, Artificial Sequence
  Description of Artificial Sequence: Synthetic oligonucleotide
gcuuugccaugcccacugu

SEQ ID NO: 1709512 - RNA, 19 nt, Artificial Sequence
  Description of Artificial Sequence: Synthetic oligonucleotide
gcagaccacucuggcaggu

SEQ ID NO: 1709513 - RNA, 19 nt, Artificial Sequence
  Description of Artificial Sequence: Synthetic oligonucleotide
ccccgagguagauguaggu

SEQ ID NO: 1709514 - RNA, 19 nt, Artificial Sequence
  Description of Artificial Sequence: Synthetic oligonucleotide
ggacccgacugcaggcgua

SEQ ID NO: 1709515 - RNA, 19 nt, Artificial Sequence
  Description of Artificial Sequence: Synthetic oligonucleotide
cguugccagccgccgccgc

SEQ ID NO: 1709516 - RNA, 19 nt, Artificial Sequence
  Description of Artificial Sequence: Synthetic oligonucleotide
gguaguccauggccacguu

SEQ ID NO: 1709517 - RNA, 19 nt, Artificial Sequence
  Description of Artificial Sequence: Synthetic oligonucleotide
cuuugcccaccaggacgcu

SEQ ID NO: 1709518 - RNA, 19 nt, Artificial Sequence
  Description of Artificial Sequence: Synthetic oligonucleotide
ccaggacgcuguagaagau

SEQ ID NO: 1709519 - RNA, 19 nt, Artificial Sequence
  Description of Artificial Sequence: Synthetic oligonucleotide
guggucccuuccagugaau

SEQ ID NO: 1709520 - RNA, 19 nt, Artificial Sequence
  Description of Artificial Sequence: Synthetic oligonucleotide
ccagacggccaggaagagu

SEQ ID NO: 1709521 - RNA, 19 nt, Artificial Sequence
  Description of Artificial Sequence: Synthetic oligonucleotide
gggccaugagugcgcugau

SEQ ID NO: 1709522 - RNA, 19 nt, Artificial Sequence
  Description of Artificial Sequence: Synthetic oligonucleotide
ccucagagccacgcucugu

SEQ ID NO: 1709523 - RNA, 19 nt, Artificial Sequence
  Description of Artificial Sequence: Synthetic oligonucleotide
gcccgguggccgcccggga

SEQ ID NO: 1709524 - RNA, 19 nt, Artificial Sequence
  Description of Artificial Sequence: Synthetic oligonucleotide
cgcccgggacccgacugca

SEQ ID NO: 1709525 - RNA, 19 nt, Artificial Sequence
  Description of Artificial Sequence: Synthetic oligonucleotide
gcguagccgucgggguccu

SEQ ID NO: 1709526 - RNA, 19 nt, Artificial Sequence
  Description of Artificial Sequence: Synthetic oligonucleotide
uuuuccuuaguccagaugg

SEQ ID NO: 1709527 - RNA, 19 nt, Artificial Sequence
  Description of Artificial Sequence: Synthetic oligonucleotide
auuuguaaaguccacaugg

SEQ ID NO: 1709528 - RNA, 19 nt, Artificial Sequence
  Description of Artificial Sequence: Synthetic oligonucleotide
uuugucaacagauagagaa

SEQ ID NO: 1709529 - RNA, 19 nt, Artificial Sequence
  Description of Artificial Sequence: Synthetic oligonucleotide
aacagauagagaaagcccc

SEQ ID NO: 1709530 - RNA, 19 nt, Artificial Sequence
  Description of Artificial Sequence: Synthetic oligonucleotide
aaagauacaugucgcuucc

SEQ ID NO: 1709531 - RNA, 19 nt, Artificial Sequence
  Description of Artificial Sequence: Synthetic oligonucleotide
uaaaaguguaucauugggg

SEQ ID NO: 1709532 - RNA, 19 nt, Artificial Sequence
  Description of Artificial Sequence: Synthetic oligonucleotide
aaaaguguaucauuggggu

SEQ ID NO: 1709533 - RNA, 19 nt, Artificial Sequence
  Description of Artificial Sequence: Synthetic oligonucleotide
augaauagcagacugagcu

SEQ ID NO: 1709534 - RNA, 19 nt, Artificial Sequence
  Description of Artificial Sequence: Synthetic oligonucleotide
uuauuagcagccuugaaga

SEQ ID NO: 1709535 - RNA, 19 nt, Artificial Sequence
  Description of Artificial Sequence: Synthetic oligonucleotide
aguacaguccaauucauag

SEQ ID NO: 1709536 - RNA, 19 nt, Artificial Sequence
  Description of Artificial Sequence: Synthetic oligonucleotide
uuaagauuuuccuuagucc

SEQ ID NO: 1709537 - RNA, 19 nt, Artificial Sequence
  Description of Artificial Sequence: Synthetic oligonucleotide
ugaaguacaguccaauuca

SEQ ID NO: 1709538 - RNA, 19 nt, Artificial Sequence
  Description of Artificial Sequence: Synthetic oligonucleotide
aaugucuaaaaguguauca

SEQ ID NO: 1709539 - RNA, 19 nt, Artificial Sequence
  Description of Artificial Sequence: Synthetic oligonucleotide
ugaucuucuggacaaagcc

SEQ ID NO: 1709540 - RNA, 19 nt, Artificial Sequence
  Description of Artificial Sequence: Synthetic oligonucleotide
accagagaaauccacacgg

SEQ ID NO: 1709541 - RNA, 19 nt, Artificial Sequence
  Description of Artificial Sequence: Synthetic oligonucleotide
ucuaaaaguguaucauugg

SEQ ID NO: 1709542 - RNA, 19 nt, Artificial Sequence
  Description of Artificial Sequence: Synthetic oligonucleotide
aaccgagcauaccaguucc

SEQ ID NO: 1709543 - RNA, 19 nt, Artificial Sequence
  Description of Artificial Sequence: Synthetic oligonucleotide
augaaguacaguccaauuc

SEQ ID NO: 1709544 - RNA, 19 nt, Artificial Sequence
  Description of Artificial Sequence: Synthetic oligonucleotide
ugaucauugaucuucugga

SEQ ID NO: 1709545 - RNA, 19 nt, Artificial Sequence
  Description of Artificial Sequence: Synthetic oligonucleotide
accuccaccuuuuaggggc

SEQ ID NO: 1709546 - RNA, 19 nt, Artificial Sequence
  Description of Artificial Sequence: Synthetic oligonucleotide
ucaacagauagagaaagcc

SEQ ID NO: 1709547 - RNA, 19 nt, Artificial Sequence
  Description of Artificial Sequence: Synthetic oligonucleotide
uuggcgaaaagcuucagca

SEQ ID NO: 1709548 - RNA, 19 nt, Artificial Sequence
  Description of Artificial Sequence: Synthetic oligonucleotide
cauuaggccacucacuugg

SEQ ID NO: 1709549 - RNA, 19 nt, Artificial Sequence
  Description of Artificial Sequence: Synthetic oligonucleotide
ugucgcaccagucugcggg

SEQ ID NO: 1709550 - RNA, 19 nt, Artificial Sequence
  Description of Artificial Sequence: Synthetic oligonucleotide
uucuguucccaauaugagg

SEQ ID NO: 1709551 - RNA, 19 nt, Artificial Sequence
  Description of Artificial Sequence: Synthetic oligonucleotide
aaaagcuucagcacauuuc

SEQ ID NO: 1709552 - RNA, 19 nt, Artificial Sequence
  Description of Artificial Sequence: Synthetic oligonucleotide
uaugaggucagguacuggc

SEQ ID NO: 1709553 - RNA, 19 nt, Artificial Sequence
  Description of Artificial Sequence: Synthetic oligonucleotide
aguaggccuauacugggcc

SEQ ID NO: 1709554 - RNA, 19 nt, Artificial Sequence
  Description of Artificial Sequence: Synthetic oligonucleotide
acuguaguugccgaggccc

SEQ ID NO: 1709555 - RNA, 19 nt, Artificial Sequence
  Description of Artificial Sequence: Synthetic oligonucleotide
uuagcagccuugaagaggu

SEQ ID NO: 1709556 - RNA, 19 nt, Artificial Sequence
  Description of Artificial Sequence: Synthetic oligonucleotide
aagcagaugaucauugauc

SEQ ID NO: 1709557 - RNA, 19 nt, Artificial Sequence
  Description of Artificial Sequence: Synthetic oligonucleotide
aaguguaucauugggguug

SEQ ID NO: 1709558 - RNA, 19 nt, Artificial Sequence
  Description of Artificial Sequence: Synthetic oligonucleotide
uagagaccaagucuuagcc

SEQ ID NO: 1709559 - RNA, 19 nt, Artificial Sequence
  Description of Artificial Sequence: Synthetic oligonucleotide
cauaauggcgggcagcucg

SEQ ID NO: 1709560 - RNA, 19 nt, Artificial Sequence
  Description of Artificial Sequence: Synthetic oligonucleotide
ugaugaauagcagacugag

SEQ ID NO: 1709561 - RNA, 19 nt, Artificial Sequence
  Description of Artificial Sequence: Synthetic oligonucleotide
aggauauccaucauucgcc

SEQ ID NO: 1709562 - RNA, 19 nt, Artificial Sequence
  Description of Artificial Sequence: Synthetic oligonucleotide
agcagaugaucauugaucu

SEQ ID NO: 1709563 - RNA, 19 nt, Artificial Sequence
  Description of Artificial Sequence: Synthetic oligonucleotide
caacagauagagaaagccc

SEQ ID NO: 1709564 - RNA, 19 nt, Artificial Sequence
  Description of Artificial Sequence: Synthetic oligonucleotide
gauacaugucgcuuccuag

SEQ ID NO: 1709565 - RNA, 19 nt, Artificial Sequence
  Description of Artificial Sequence: Synthetic oligonucleotide
ucauucgccgcacagccag

SEQ ID NO: 1709566 - RNA, 19 nt, Artificial Sequence
  Description of Artificial Sequence: Synthetic oligonucleotide
aggugcacacuguaguugc

SEQ ID NO: 1709567 - RNA, 19 nt, Artificial Sequence
  Description of Artificial Sequence: Synthetic oligonucleotide
agccgccccaccuugaugc

SEQ ID NO: 1709568 - RNA, 19 nt, Artificial Sequence
  Description of Artificial Sequence: Synthetic oligonucleotide
caggauauccaucauucgc

SEQ ID NO: 1709569 - RNA, 19 nt, Artificial Sequence
  Description of Artificial Sequence: Synthetic oligonucleotide
gaauagcagacugagcucc

SEQ ID NO: 1709570 - RNA, 19 nt, Artificial Sequence
  Description of Artificial Sequence: Synthetic oligonucleotide
auggaguagagaccaaguc

SEQ ID NO: 1709571 - RNA, 19 nt, Artificial Sequence
  Description of Artificial Sequence: Synthetic oligonucleotide
caggcuuuggccauacacg

SEQ ID NO: 1709572 - RNA, 19 nt, Artificial Sequence
  Description of Artificial Sequence: Synthetic oligonucleotide
ucuuuccugggcaagcgcc

SEQ ID NO: 1709573 - RNA, 19 nt, Artificial Sequence
  Description of Artificial Sequence: Synthetic oligonucleotide
guccagauggaguagagac

SEQ ID NO: 1709574 - RNA, 19 nt, Artificial Sequence
  Description of Artificial Sequence: Synthetic oligonucleotide
agcucuaaguguugccugc

SEQ ID NO: 1709575 - RNA, 19 nt, Artificial Sequence
  Description of Artificial Sequence: Synthetic oligonucleotide
agagguaggugaugaauag

SEQ ID NO: 1709576 - RNA, 19 nt, Artificial Sequence
  Description of Artificial Sequence: Synthetic oligonucleotide
aguuuccuuggcgaaaagc

SEQ ID NO: 1709577 - RNA, 19 nt, Artificial Sequence
  Description of Artificial Sequence: Synthetic oligonucleotide
gucuaaaaguguaucauug

SEQ ID NO: 1709578 - RNA, 19 nt, Artificial Sequence
  Description of Artificial Sequence: Synthetic oligonucleotide
agcuucuagagccucuuuc

SEQ ID NO: 1709579 - RNA, 19 nt, Artificial Sequence
  Description of Artificial Sequence: Synthetic oligonucleotide
cuaguaggccuauacuggg

SEQ ID NO: 1709580 - RNA, 19 nt, Artificial Sequence
  Description of Artificial Sequence: Synthetic oligonucleotide
cuaacagaggcaaguuucc

SEQ ID NO: 1709581 - RNA, 19 nt, Artificial Sequence
  Description of Artificial Sequence: Synthetic oligonucleotide
uggccagucaugaaguaca

SEQ ID NO: 1709582 - RNA, 19 nt, Artificial Sequence
  Description of Artificial Sequence: Synthetic oligonucleotide
caaagauacaugucgcuuc

SEQ ID NO: 1709583 - RNA, 19 nt, Artificial Sequence
  Description of Artificial Sequence: Synthetic oligonucleotide
caucauucgccgcacagcc

SEQ ID NO: 1709584 - RNA, 19 nt, Artificial Sequence
  Description of Artificial Sequence: Synthetic oligonucleotide
guauaccagaagcagauga

SEQ ID NO: 1709585 - RNA, 19 nt, Artificial Sequence
  Description of Artificial Sequence: Synthetic oligonucleotide
aauggguggugugucacuc

SEQ ID NO: 1709586 - RNA, 19 nt, Artificial Sequence
  Description of Artificial Sequence: Synthetic oligonucleotide
gaggcaaguuuccuuggcg

SEQ ID NO: 1709587 - RNA, 19 nt, Artificial Sequence
  Description of Artificial Sequence: Synthetic oligonucleotide
ugggaugucaucacagccu

SEQ ID NO: 1709588 - RNA, 19 nt, Artificial Sequence
  Description of Artificial Sequence: Synthetic oligonucleotide
cuucagagggcccagcccc

SEQ ID NO: 1709589 - RNA, 19 nt, Artificial Sequence
  Description of Artificial Sequence: Synthetic oligonucleotide
uccuuugucaacagauaga

SEQ ID NO: 1709590 - RNA, 19 nt, Artificial Sequence
  Description of Artificial Sequence: Synthetic oligonucleotide
uuggccauacacgugagga

SEQ ID NO: 1709591 - RNA, 19 nt, Artificial Sequence
  Description of Artificial Sequence: Synthetic oligonucleotide
ugcugggaugucaucacag

SEQ ID NO: 1709592 - RNA, 19 nt, Artificial Sequence
  Description of Artificial Sequence: Synthetic oligonucleotide
aauggcgggcagcucgaac

SEQ ID NO: 1709593 - RNA, 19 nt, Artificial Sequence
  Description of Artificial Sequence: Synthetic oligonucleotide
uauaccagaagcagaugau

SEQ ID NO: 1709594 - RNA, 19 nt, Artificial Sequence
  Description of Artificial Sequence: Synthetic oligonucleotide
uauuagcagccuugaagag

SEQ ID NO: 1709595 - RNA, 19 nt, Artificial Sequence
  Description of Artificial Sequence: Synthetic oligonucleotide
ucugauugucaucccuucc

SEQ ID NO: 1709596 - RNA, 19 nt, Artificial Sequence
  Description of Artificial Sequence: Synthetic oligonucleotide
caugucgcuuccuagcagc

SEQ ID NO: 1709597 - RNA, 19 nt, Artificial Sequence
  Description of Artificial Sequence: Synthetic oligonucleotide
caagucuuagccauggcca

SEQ ID NO: 1709598 - RNA, 19 nt, Artificial Sequence
  Description of Artificial Sequence: Synthetic oligonucleotide
uccaucauucgccgcacag

SEQ ID NO: 1709599 - RNA, 19 nt, Artificial Sequence
  Description of Artificial Sequence: Synthetic oligonucleotide
uacaugucgcuuccuagca

SEQ ID NO: 1709600 - RNA, 19 nt, Artificial Sequence
  Description of Artificial Sequence: Synthetic oligonucleotide
guagagaccaagucuuagc

SEQ ID NO: 1709601 - RNA, 19 nt, Artificial Sequence
  Description of Artificial Sequence: Synthetic oligonucleotide
aagauuuuccuuaguccag

SEQ ID NO: 1709602 - RNA, 19 nt, Artificial Sequence
  Description of Artificial Sequence: Synthetic oligonucleotide
cagucaugaaguacagucc

SEQ ID NO: 1709603 - RNA, 19 nt, Artificial Sequence
  Description of Artificial Sequence: Synthetic oligonucleotide
ucuaaguguugccugcuuc

SEQ ID NO: 1709604 - RNA, 19 nt, Artificial Sequence
  Description of Artificial Sequence: Synthetic oligonucleotide
ugggccauggaauuuguaa

SEQ ID NO: 1709605 - RNA, 19 nt, Artificial Sequence
  Description of Artificial Sequence: Synthetic oligonucleotide
ugucaucccuuccaaggcc

SEQ ID NO: 1709606 - RNA, 19 nt, Artificial Sequence
  Description of Artificial Sequence: Synthetic oligonucleotide
uaccaguuccucaacacau

SEQ ID NO: 1709607 - RNA, 19 nt, Artificial Sequence
  Description of Artificial Sequence: Synthetic oligonucleotide
guaggugaugaauagcaga

SEQ ID NO: 1709608 - RNA, 19 nt, Artificial Sequence
  Description of Artificial Sequence: Synthetic oligonucleotide
aaauccacacgggcugggc

SEQ ID NO: 1709609 - RNA, 19 nt, Artificial Sequence
  Description of Artificial Sequence: Synthetic oligonucleotide
uuuggccauacacgugagg

SEQ ID NO: 1709610 - RNA, 19 nt, Artificial Sequence
  Description of Artificial Sequence: Synthetic oligonucleotide
uguagcucuaaguguugcc

SEQ ID NO: 1709611 - RNA, 19 nt, Artificial Sequence
  Description of Artificial Sequence: Synthetic oligonucleotide
uuuuaggggcaggugagcc

SEQ ID NO: 1709612 - RNA, 19 nt, Artificial Sequence
  Description of Artificial Sequence: Synthetic oligonucleotide
auaccagaagcagaugauc

SEQ ID NO: 1709613 - RNA, 19 nt, Artificial Sequence
  Description of Artificial Sequence: Synthetic oligonucleotide
uauacugggccauggaauu

SEQ ID NO: 1709614 - RNA, 19 nt, Artificial Sequence
  Description of Artificial Sequence: Synthetic oligonucleotide
acugagcuccacugaaggg

SEQ ID NO: 1709615 - RNA, 19 nt, Artificial Sequence
  Description of Artificial Sequence: Synthetic oligonucleotide
uccuuaguccagauggagu

SEQ ID NO: 1709616 - RNA, 19 nt, Artificial Sequence
  Description of Artificial Sequence: Synthetic oligonucleotide
ugucuaaaaguguaucauu

SEQ ID NO: 1709617 - RNA, 19 nt, Artificial Sequence
  Description of Artificial Sequence: Synthetic oligonucleotide
uggaauuuguaaaguccac

SEQ ID NO: 1709618 - RNA, 19 nt, Artificial Sequence
  Description of Artificial Sequence: Synthetic oligonucleotide
gauugucaucccuuccaag

SEQ ID NO: 1709619 - RNA, 19 nt, Artificial Sequence
  Description of Artificial Sequence: Synthetic oligonucleotide
uucucagucugucgcacca

SEQ ID NO: 1709620 - RNA, 19 nt, Artificial Sequence
  Description of Artificial Sequence: Synthetic oligonucleotide
ccagucaugaaguacaguc

SEQ ID NO: 1709621 - RNA, 19 nt, Artificial Sequence
  Description of Artificial Sequence: Synthetic oligonucleotide
gaauuuguaaaguccacau

SEQ ID NO: 1709622 - RNA, 19 nt, Artificial Sequence
  Description of Artificial Sequence: Synthetic oligonucleotide
cacauuucucagucugucg

SEQ ID NO: 1709623 - RNA, 19 nt, Artificial Sequence
  Description of Artificial Sequence: Synthetic oligonucleotide
cuucucaagucuugcuucc

SEQ ID NO: 1709624 - RNA, 19 nt, Artificial Sequence
  Description of Artificial Sequence: Synthetic oligonucleotide
cugggaugucaucacagcc

SEQ ID NO: 1709625 - RNA, 19 nt, Artificial Sequence
  Description of Artificial Sequence: Synthetic oligonucleotide
aaaguguaucauugggguu

SEQ ID NO: 1709626 - RNA, 19 nt, Artificial Sequence
  Description of Artificial Sequence: Synthetic oligonucleotide
ugaauagcagacugagcuc

SEQ ID NO: 1709627 - RNA, 19 nt, Artificial Sequence
  Description of Artificial Sequence: Synthetic oligonucleotide
uuuccuuaguccagaugga

SEQ ID NO: 1709628 - RNA, 19 nt, Artificial Sequence
  Description of Artificial Sequence: Synthetic oligonucleotide
cagguuccgagccagucgg

SEQ ID NO: 1709629 - RNA, 19 nt, Artificial Sequence
  Description of Artificial Sequence: Synthetic oligonucleotide
agccuggcggaucaggauc

SEQ ID NO: 1709630 - RNA, 19 nt, Artificial Sequence
  Description of Artificial Sequence: Synthetic oligonucleotide
ccuaguaggccuauacugg

SEQ ID NO: 1709631 - RNA, 19 nt, Artificial Sequence
  Description of Artificial Sequence: Synthetic oligonucleotide
cuggguggacacaaagugc

SEQ ID NO: 1709632 - RNA, 19 nt, Artificial Sequence
  Description of Artificial Sequence: Synthetic oligonucleotide
gaccaagucuuagccaugg

SEQ ID NO: 1709633 - RNA, 19 nt, Artificial Sequence
  Description of Artificial Sequence: Synthetic oligonucleotide
uuuaggggcaggugagccc

SEQ ID NO: 1709634 - RNA, 19 nt, Artificial Sequence
  Description of Artificial Sequence: Synthetic oligonucleotide
ccaauaugaggucagguac

SEQ ID NO: 1709635 - RNA, 19 nt, Artificial Sequence
  Description of Artificial Sequence: Synthetic oligonucleotide
uguggugacgcaccuguuc

SEQ ID NO: 1709636 - RNA, 19 nt, Artificial Sequence
  Description of Artificial Sequence: Synthetic oligonucleotide
ugcagcuguagcucuaagu

SEQ ID NO: 1709637 - RNA, 19 nt, Artificial Sequence
  Description of Artificial Sequence: Synthetic oligonucleotide
guaucauugggguuggucu

SEQ ID NO: 1709638 - RNA, 19 nt, Artificial Sequence
  Description of Artificial Sequence: Synthetic oligonucleotide
aguagagaccaagucuuag

SEQ ID NO: 1709639 - RNA, 19 nt, Artificial Sequence
  Description of Artificial Sequence: Synthetic oligonucleotide
gauauccaucauucgccgc

SEQ ID NO: 1709640 - RNA, 19 nt, Artificial Sequence
  Description of Artificial Sequence: Synthetic oligonucleotide
agucugucgcaccagucug

SEQ ID NO: 1709641 - RNA, 19 nt, Artificial Sequence
  Description of Artificial Sequence: Synthetic oligonucleotide
ucugccgugguuccuuugu

SEQ ID NO: 1709642 - RNA, 19 nt, Artificial Sequence
  Description of Artificial Sequence: Synthetic oligonucleotide
aggcuuuggccauacacgu

SEQ ID NO: 1709643 - RNA, 19 nt, Artificial Sequence
  Description of Artificial Sequence: Synthetic oligonucleotide
ccuaacagaggcaaguuuc

SEQ ID NO: 1709644 - RNA, 19 nt, Artificial Sequence
  Description of Artificial Sequence: Synthetic oligonucleotide
uuccuuaguccagauggag

SEQ ID NO: 1709645 - RNA, 19 nt, Artificial Sequence
  Description of Artificial Sequence: Synthetic oligonucleotide
uaguccagauggaguagag

SEQ ID NO: 1709646 - RNA, 19 nt, Artificial Sequence
  Description of Artificial Sequence: Synthetic oligonucleotide
agagaccaagucuuagcca

SEQ ID NO: 1709647 - RNA, 19 nt, Artificial Sequence
  Description of Artificial Sequence: Synthetic oligonucleotide
gaugaauagcagacugagc

SEQ ID NO: 1709648 - RNA, 19 nt, Artificial Sequence
  Description of Artificial Sequence: Synthetic oligonucleotide
cagcugcaagcucagaccc

SEQ ID NO: 1709649 - RNA, 19 nt, Artificial Sequence
  Description of Artificial Sequence: Synthetic oligonucleotide
uuaguccagauggaguaga

SEQ ID NO: 1709650 - RNA, 19 nt, Artificial Sequence
  Description of Artificial Sequence: Synthetic oligonucleotide
augucuaaaaguguaucau

SEQ ID NO: 1709651 - RNA, 19 nt, Artificial Sequence
  Description of Artificial Sequence: Synthetic oligonucleotide
auggccagucaugaaguac

SEQ ID NO: 1709652 - RNA, 19 nt, Artificial Sequence
  Description of Artificial Sequence: Synthetic oligonucleotide
ccuuugucaacagauagag

SEQ ID NO: 1709653 - RNA, 19 nt, Artificial Sequence
  Description of Artificial Sequence: Synthetic oligonucleotide
uaguaggccuauacugggc

SEQ ID NO: 1709654 - RNA, 19 nt, Artificial Sequence
  Description of Artificial Sequence: Synthetic oligonucleotide
ugagcuccacugaagggaa

SEQ ID NO: 1709655 - RNA, 19 nt, Artificial Sequence
  Description of Artificial Sequence: Synthetic oligonucleotide
uggucugauugucaucccu

SEQ ID NO: 1709656 - RNA, 19 nt, Artificial Sequence
  Description of Artificial Sequence: Synthetic oligonucleotide
uuccgagccagucgggucu

SEQ ID NO: 1709657 - RNA, 19 nt, Artificial Sequence
  Description of Artificial Sequence: Synthetic oligonucleotide
cucaacacauccugcagca

SEQ ID NO: 1709658 - RNA, 19 nt, Artificial Sequence
  Description of Artificial Sequence: Synthetic oligonucleotide
uggccauacacgugaggag

SEQ ID NO: 1709659 - RNA, 19 nt, Artificial Sequence
  Description of Artificial Sequence: Synthetic oligonucleotide
aaguguugccugcuucaga

SEQ ID NO: 1709660 - RNA, 19 nt, Artificial Sequence
  Description of Artificial Sequence: Synthetic oligonucleotide
aguguauaccagaagcaga

SEQ ID NO: 1709661 - RNA, 19 nt, Artificial Sequence
  Description of Artificial Sequence: Synthetic oligonucleotide
augggacacuaucauuaag

SEQ ID NO: 1709662 - RNA, 19 nt, Artificial Sequence
  Description of Artificial Sequence: Synthetic oligonucleotide
ucaugaaguacaguccaau

SEQ ID NO: 1709663 - RNA, 19 nt, Artificial Sequence
  Description of Artificial Sequence: Synthetic oligonucleotide
ugacgcaccuguuccaggu

SEQ ID NO: 1709664 - RNA, 19 nt, Artificial Sequence
  Description of Artificial Sequence: Synthetic oligonucleotide
ugcacacuguaguugccga

SEQ ID NO: 1709665 - RNA, 19 nt, Artificial Sequence
  Description of Artificial Sequence: Synthetic oligonucleotide
gagaccaagucuuagccau

SEQ ID NO: 1709666 - RNA, 19 nt, Artificial Sequence
  Description of Artificial Sequence: Synthetic oligonucleotide
gcucauaggcaaugggugg

SEQ ID NO: 1709667 - RNA, 19 nt, Artificial Sequence
  Description of Artificial Sequence: Synthetic oligonucleotide
gaugaucauugaucuucug

SEQ ID NO: 1709668 - RNA, 19 nt, Artificial Sequence
  Description of Artificial Sequence: Synthetic oligonucleotide
aguguaucauugggguugg

SEQ ID NO: 1709669 - RNA, 19 nt, Artificial Sequence
  Description of Artificial Sequence: Synthetic oligonucleotide
uuucucagucugucgcacc

SEQ ID NO: 1709670 - RNA, 19 nt, Artificial Sequence
  Description of Artificial Sequence: Synthetic oligonucleotide
ggccauggaauuuguaaag

SEQ ID NO: 1709671 - RNA, 19 nt, Artificial Sequence
  Description of Artificial Sequence: Synthetic oligonucleotide
caggcaaccgagcauacca

SEQ ID NO: 1709672 - RNA, 19 nt, Artificial Sequence
  Description of Artificial Sequence: Synthetic oligonucleotide
cugauugucaucccuucca

SEQ ID NO: 1709673 - RNA, 19 nt, Artificial Sequence
  Description of Artificial Sequence: Synthetic oligonucleotide
gagcauaccaguuccucaa

SEQ ID NO: 1709674 - RNA, 19 nt, Artificial Sequence
  Description of Artificial Sequence: Synthetic oligonucleotide
agauacaugucgcuuccua

SEQ ID NO: 1709675 - RNA, 19 nt, Artificial Sequence
  Description of Artificial Sequence: Synthetic oligonucleotide
ccaagucuuagccauggcc

SEQ ID NO: 1709676 - RNA, 19 nt, Artificial Sequence
  Description of Artificial Sequence: Synthetic oligonucleotide
agcucgaaccagcaaggca

SEQ ID NO: 1709677 - RNA, 19 nt, Artificial Sequence
  Description of Artificial Sequence: Synthetic oligonucleotide
gaaccagcaaggcaggccu

SEQ ID NO: 1709678 - RNA, 19 nt, Artificial Sequence
  Description of Artificial Sequence: Synthetic oligonucleotide
ucugcaccacagcaggcaa

SEQ ID NO: 1709679 - RNA, 19 nt, Artificial Sequence
  Description of Artificial Sequence: Synthetic oligonucleotide
uguauaccagaagcagaug

SEQ ID NO: 1709680 - RNA, 19 nt, Artificial Sequence
  Description of Artificial Sequence: Synthetic oligonucleotide
cucgaaccagcaaggcagg

SEQ ID NO: 1709681 - RNA, 19 nt, Artificial Sequence
  Description of Artificial Sequence: Synthetic oligonucleotide
auagacacugccucuucuu

SEQ ID NO: 1709682 - RNA, 19 nt, Artificial Sequence
  Description of Artificial Sequence: Synthetic oligonucleotide
ucgccgcacagccaguggc

SEQ ID NO: 1709683 - RNA, 19 nt, Artificial Sequence
  Description of Artificial Sequence: Synthetic oligonucleotide
gucaucacagccuggcgga

SEQ ID NO: 1709684 - RNA, 19 nt, Artificial Sequence
  Description of Artificial Sequence: Synthetic oligonucleotide
uucgccgcacagccagugg

SEQ ID NO: 1709685 - RNA, 19 nt, Artificial Sequence
  Description of Artificial Sequence: Synthetic oligonucleotide
ggcgaaaagcuucagcaca

SEQ ID NO: 1709686 - RNA, 19 nt, Artificial Sequence
  Description of Artificial Sequence: Synthetic oligonucleotide
gcuggugccauccacccgc

SEQ ID NO: 1709687 - RNA, 19 nt, Artificial Sequence
  Description of Artificial Sequence: Synthetic oligonucleotide
aguggcucacagccugggg

SEQ ID NO: 1709688 - RNA, 19 nt, Artificial Sequence
  Description of Artificial Sequence: Synthetic oligonucleotide
uuaggccacucacuugguc

SEQ ID NO: 1709689 - RNA, 19 nt, Artificial Sequence
  Description of Artificial Sequence: Synthetic oligonucleotide
caaccgagcauaccaguuc

SEQ ID NO: 1709690 - RNA, 19 nt, Artificial Sequence
  Description of Artificial Sequence: Synthetic oligonucleotide
cuagagccucuuucugccg

SEQ ID NO: 1709691 - RNA, 19 nt, Artificial Sequence
  Description of Artificial Sequence: Synthetic oligonucleotide
guucccaauaugaggucag

SEQ ID NO: 1709692 - RNA, 19 nt, Artificial Sequence
  Description of Artificial Sequence: Synthetic oligonucleotide
ugccgugguuccuuuguca

SEQ ID NO: 1709693 - RNA, 19 nt, Artificial Sequence
  Description of Artificial Sequence: Synthetic oligonucleotide
uccaaggcccuaguaggcc

SEQ ID NO: 1709694 - RNA, 19 nt, Artificial Sequence
  Description of Artificial Sequence: Synthetic oligonucleotide
gguggugugucacuccagc

SEQ ID NO: 1709695 - RNA, 19 nt, Artificial Sequence
  Description of Artificial Sequence: Synthetic oligonucleotide
ucagucugucgcaccaguc

SEQ ID NO: 1709696 - RNA, 19 nt, Artificial Sequence
  Description of Artificial Sequence: Synthetic oligonucleotide
acaaagugcugggauguca

SEQ ID NO: 1709697 - RNA, 19 nt, Artificial Sequence
  Description of Artificial Sequence: Synthetic oligonucleotide
gcuuuggccauacacguga

SEQ ID NO: 1709698 - RNA, 19 nt, Artificial Sequence
  Description of Artificial Sequence: Synthetic oligonucleotide
ugguuccuuugucaacaga

SEQ ID NO: 1709699 - RNA, 19 nt, Artificial Sequence
  Description of Artificial Sequence: Synthetic oligonucleotide
uacacgugaggagccagga

SEQ ID NO: 1709700 - RNA, 19 nt, Artificial Sequence
  Description of Artificial Sequence: Synthetic oligonucleotide
aguugccgaggcccucagc

SEQ ID NO: 1709701 - RNA, 19 nt, Artificial Sequence
  Description of Artificial Sequence: Synthetic oligonucleotide
cuuuggccauacacgugag

SEQ ID NO: 1709702 - RNA, 19 nt, Artificial Sequence
  Description of Artificial Sequence: Synthetic oligonucleotide
gucuugccaguguauacca

SEQ ID NO: 1709703 - RNA, 19 nt, Artificial Sequence
  Description of Artificial Sequence: Synthetic oligonucleotide
uaacagaggcaaguuuccu

SEQ ID NO: 1709704 - RNA, 19 nt, Artificial Sequence
  Description of Artificial Sequence: Synthetic oligonucleotide
ggaaaugcagcuguagcuc

SEQ ID NO: 1709705 - RNA, 19 nt, Artificial Sequence
  Description of Artificial Sequence: Synthetic oligonucleotide
guugccgaggcccucagcu

SEQ ID NO: 1709706 - RNA, 19 nt, Artificial Sequence
  Description of Artificial Sequence: Synthetic oligonucleotide
accaagcucauaggcaaug

SEQ ID NO: 1709707 - RNA, 19 nt, Artificial Sequence
  Description of Artificial Sequence: Synthetic oligonucleotide
aauagcagacugagcucca

SEQ ID NO: 1709708 - RNA, 19 nt, Artificial Sequence
  Description of Artificial Sequence: Synthetic oligonucleotide
ggaauuuguaaaguccaca

SEQ ID NO: 1709709 - RNA, 19 nt, Artificial Sequence
  Description of Artificial Sequence: Synthetic oligonucleotide
auacacgugaggagccagg

SEQ ID NO: 1709710 - RNA, 19 nt, Artificial Sequence
  Description of Artificial Sequence: Synthetic oligonucleotide
agccagucgggucuugcca

SEQ ID NO: 1709711 - RNA, 19 nt, Artificial Sequence
  Description of Artificial Sequence: Synthetic oligonucleotide
cagcacccucauaauggcg

SEQ ID NO: 1709712 - RNA, 19 nt, Artificial Sequence
  Description of Artificial Sequence: Synthetic oligonucleotide
cauacacgugaggagccag

SEQ ID NO: 1709713 - RNA, 19 nt, Artificial Sequence
  Description of Artificial Sequence: Synthetic oligonucleotide
cacuugguccugcccagcc

SEQ ID NO: 1709714 - RNA, 19 nt, Artificial Sequence
  Description of Artificial Sequence: Synthetic oligonucleotide
ccaguuccucaacacaucc

SEQ ID NO: 1709715 - RNA, 19 nt, Artificial Sequence
  Description of Artificial Sequence: Synthetic oligonucleotide
gcagguuccgagccagucg

SEQ ID NO: 1709716 - RNA, 19 nt, Artificial Sequence
  Description of Artificial Sequence: Synthetic oligonucleotide
accaguuccucaacacauc

SEQ ID NO: 1709717 - RNA, 19 nt, Artificial Sequence
  Description of Artificial Sequence: Synthetic oligonucleotide
cuauacugggccauggaau

SEQ ID NO: 1709718 - RNA, 19 nt, Artificial Sequence
  Description of Artificial Sequence: Synthetic oligonucleotide
gauggaguagagaccaagu

SEQ ID NO: 1709719 - RNA, 19 nt, Artificial Sequence
  Description of Artificial Sequence: Synthetic oligonucleotide
cugaagggaaaugcagcug

SEQ ID NO: 1709720 - RNA, 19 nt, Artificial Sequence
  Description of Artificial Sequence: Synthetic oligonucleotide
ggccauacacgugaggagc

SEQ ID NO: 1709721 - RNA, 19 nt, Artificial Sequence
  Description of Artificial Sequence: Synthetic oligonucleotide
agagccucuuucugccgug

SEQ ID NO: 1709722 - RNA, 19 nt, Artificial Sequence
  Description of Artificial Sequence: Synthetic oligonucleotide
cuuugucaacagauagaga

SEQ ID NO: 1709723 - RNA, 19 nt, Artificial Sequence
  Description of Artificial Sequence: Synthetic oligonucleotide
gguaggugaugaauagcag

SEQ ID NO: 1709724 - RNA, 19 nt, Artificial Sequence
  Description of Artificial Sequence: Synthetic oligonucleotide
gugaugaauagcagacuga

SEQ ID NO: 1709725 - RNA, 19 nt, Artificial Sequence
  Description of Artificial Sequence: Synthetic oligonucleotide
gugacgcaccuguuccagg

SEQ ID NO: 1709726 - RNA, 19 nt, Artificial Sequence
  Description of Artificial Sequence: Synthetic oligonucleotide
uuccugggcaagcgccucc

SEQ ID NO: 1709727 - RNA, 19 nt, Artificial Sequence
  Description of Artificial Sequence: Synthetic oligonucleotide
aagauacaugucgcuuccu

SEQ ID NO: 1709728 - RNA, 19 nt, Artificial Sequence
  Description of Artificial Sequence: Synthetic oligonucleotide
cacuguaguugccgaggcc

SEQ ID NO: 1709729 - RNA, 19 nt, Artificial Sequence
  Description of Artificial Sequence: Synthetic oligonucleotide
ucucagucugucgcaccag

SEQ ID NO: 1709730 - RNA, 19 nt, Artificial Sequence
  Description of Artificial Sequence: Synthetic oligonucleotide
acuugguccugcccagcca

SEQ ID NO: 1709731 - RNA, 19 nt, Artificial Sequence
  Description of Artificial Sequence: Synthetic oligonucleotide
aucccuuccaaggcccuag

SEQ ID NO: 1709732 - RNA, 19 nt, Artificial Sequence
  Description of Artificial Sequence: Synthetic oligonucleotide
acccucauaauggcgggca

SEQ ID NO: 1709733 - RNA, 19 nt, Artificial Sequence
  Description of Artificial Sequence: Synthetic oligonucleotide
agucugcgggcauucugca

SEQ ID NO: 1709734 - RNA, 19 nt, Artificial Sequence
  Description of Artificial Sequence: Synthetic oligonucleotide
uggugacgcaccuguucca

SEQ ID NO: 1709735 - RNA, 19 nt, Artificial Sequence
  Description of Artificial Sequence: Synthetic oligonucleotide
uaguugccgaggcccucag

SEQ ID NO: 1709736 - RNA, 19 nt, Artificial Sequence
  Description of Artificial Sequence: Synthetic oligonucleotide
aggugaugaauagcagacu

SEQ ID NO: 1709737 - RNA, 19 nt, Artificial Sequence
  Description of Artificial Sequence: Synthetic oligonucleotide
guguauaccagaagcagau

SEQ ID NO: 1709738 - RNA, 19 nt, Artificial Sequence
  Description of Artificial Sequence: Synthetic oligonucleotide
uucucaagucuugcuuccu

SEQ ID NO: 1709739 - RNA, 19 nt, Artificial Sequence
  Description of Artificial Sequence: Synthetic oligonucleotide
cacaaagauacaugucgcu

SEQ ID NO: 1709740 - RNA, 19 nt, Artificial Sequence
  Description of Artificial Sequence: Synthetic oligonucleotide
gggccauggaauuuguaaa

SEQ ID NO: 1709741 - RNA, 19 nt, Artificial Sequence
  Description of Artificial Sequence: Synthetic oligonucleotide
cagacugagcuccacugaa

SEQ ID NO: 1709742 - RNA, 19 nt, Artificial Sequence
  Description of Artificial Sequence: Synthetic oligonucleotide
gucuuagccauggccaguc

SEQ ID NO: 1709743 - RNA, 19 nt, Artificial Sequence
  Description of Artificial Sequence: Synthetic oligonucleotide
ggugccauccacccgcaca

SEQ ID NO: 1709744 - RNA, 19 nt, Artificial Sequence
  Description of Artificial Sequence: Synthetic oligonucleotide
guaggccuauacugggcca

SEQ ID NO: 1709745 - RNA, 19 nt, Artificial Sequence
  Description of Artificial Sequence: Synthetic oligonucleotide
uggggccauaagcuucuuc

SEQ ID NO: 1709746 - RNA, 19 nt, Artificial Sequence
  Description of Artificial Sequence: Synthetic oligonucleotide
uaggccuauacugggccau

SEQ ID NO: 1709747 - RNA, 19 nt, Artificial Sequence
  Description of Artificial Sequence: Synthetic oligonucleotide
guuccgagccagucggguc

SEQ ID NO: 1709748 - RNA, 19 nt, Artificial Sequence
  Description of Artificial Sequence: Synthetic oligonucleotide
aggcaaccgagcauaccag

SEQ ID NO: 1709749 - RNA, 19 nt, Artificial Sequence
  Description of Artificial Sequence: Synthetic oligonucleotide
gccagucgggucuugccag

SEQ ID NO: 1709750 - RNA, 19 nt, Artificial Sequence
  Description of Artificial Sequence: Synthetic oligonucleotide
cagugauuuccuccaccuc

SEQ ID NO: 1709751 - RNA, 19 nt, Artificial Sequence
  Description of Artificial Sequence: Synthetic oligonucleotide
gucgcaccagucugcgggc

SEQ ID NO: 1709752 - RNA, 19 nt, Artificial Sequence
  Description of Artificial Sequence: Synthetic oligonucleotide
uucugccgugguuccuuug

SEQ ID NO: 1709753 - RNA, 19 nt, Artificial Sequence
  Description of Artificial Sequence: Synthetic oligonucleotide
auaauggcgggcagcucga

SEQ ID NO: 1709754 - RNA, 19 nt, Artificial Sequence
  Description of Artificial Sequence: Synthetic oligonucleotide
ucgaaccagcaaggcaggc

SEQ ID NO: 1709755 - RNA, 19 nt, Artificial Sequence
  Description of Artificial Sequence: Synthetic oligonucleotide
auucgccgcacagccagug

SEQ ID NO: 1709756 - RNA, 19 nt, Artificial Sequence
  Description of Artificial Sequence: Synthetic oligonucleotide
gggccauaagcuucuucug

SEQ ID NO: 1709757 - RNA, 19 nt, Artificial Sequence
  Description of Artificial Sequence: Synthetic oligonucleotide
ccuuaguccagauggagua

SEQ ID NO: 1709758 - RNA, 19 nt, Artificial Sequence
  Description of Artificial Sequence: Synthetic oligonucleotide
acgugaggagccaggauau

SEQ ID NO: 1709759 - RNA, 19 nt, Artificial Sequence
  Description of Artificial Sequence: Synthetic oligonucleotide
ccauaagcuucuucuguuc

SEQ ID NO: 1709760 - RNA, 19 nt, Artificial Sequence
  Description of Artificial Sequence: Synthetic oligonucleotide
ugagcccgggagccgcccc

SEQ ID NO: 1709761 - RNA, 19 nt, Artificial Sequence
  Description of Artificial Sequence: Synthetic oligonucleotide
ccuccuguggugacgcacc

SEQ ID NO: 1709762 - RNA, 19 nt, Artificial Sequence
  Description of Artificial Sequence: Synthetic oligonucleotide
gcauuaggccacucacuug

SEQ ID NO: 1709763 - RNA, 19 nt, Artificial Sequence
  Description of Artificial Sequence: Synthetic oligonucleotide
ggugacgcaccuguuccag

SEQ ID NO: 1709764 - RNA, 19 nt, Artificial Sequence
  Description of Artificial Sequence: Synthetic oligonucleotide
gcacacuguaguugccgag

SEQ ID NO: 1709765 - RNA, 19 nt, Artificial Sequence
  Description of Artificial Sequence: Synthetic oligonucleotide
cucauaauggcgggcagcu

SEQ ID NO: 1709766 - RNA, 19 nt, Artificial Sequence
  Description of Artificial Sequence: Synthetic oligonucleotide
ccaagcucauaggcaaugg

SEQ ID NO: 1709767 - RNA, 19 nt, Artificial Sequence
  Description of Artificial Sequence: Synthetic oligonucleotide
gaggucagguacuggccua

SEQ ID NO: 1709768 - RNA, 19 nt, Artificial Sequence
  Description of Artificial Sequence: Synthetic oligonucleotide
cugucgcaccagucugcgg

SEQ ID NO: 1709769 - RNA, 19 nt, Artificial Sequence
  Description of Artificial Sequence: Synthetic oligonucleotide
cacccgcacagccaggcca

SEQ ID NO: 1709770 - RNA, 19 nt, Artificial Sequence
  Description of Artificial Sequence: Synthetic oligonucleotide
cuggcggaucaggaucugc

SEQ ID NO: 1709771 - RNA, 19 nt, Artificial Sequence
  Description of Artificial Sequence: Synthetic oligonucleotide
cccaauaugaggucaggua

SEQ ID NO: 1709772 - RNA, 19 nt, Artificial Sequence
  Description of Artificial Sequence: Synthetic oligonucleotide
ccaccaagcucauaggcaa

SEQ ID NO: 1709773 - RNA, 19 nt, Artificial Sequence
  Description of Artificial Sequence: Synthetic oligonucleotide
ucauaauggcgggcagcuc

SEQ ID NO: 1709774 - RNA, 19 nt, Artificial Sequence
  Description of Artificial Sequence: Synthetic oligonucleotide
agaccaagucuuagccaug

SEQ ID NO: 1709775 - RNA, 19 nt, Artificial Sequence
  Description of Artificial Sequence: Synthetic oligonucleotide
guaguugccgaggcccuca

SEQ ID NO: 1709776 - RNA, 19 nt, Artificial Sequence
  Description of Artificial Sequence: Synthetic oligonucleotide
ggcaaguuuccuuggcgaa

SEQ ID NO: 1709777 - RNA, 19 nt, Artificial Sequence
  Description of Artificial Sequence: Synthetic oligonucleotide
cauagacacugccucuucu

SEQ ID NO: 1709778 - RNA, 19 nt, Artificial Sequence
  Description of Artificial Sequence: Synthetic oligonucleotide
agccucuuucugccguggu

SEQ ID NO: 1709779 - RNA, 19 nt, Artificial Sequence
  Description of Artificial Sequence: Synthetic oligonucleotide
uuucugccgugguuccuuu

SEQ ID NO: 1709780 - RNA, 19 nt, Artificial Sequence
  Description of Artificial Sequence: Synthetic oligonucleotide
cagucugucgcaccagucu

SEQ ID NO: 1709781 - RNA, 19 nt, Artificial Sequence
  Description of Artificial Sequence: Synthetic oligonucleotide
gugcugggaugucaucaca

SEQ ID NO: 1709782 - RNA, 19 nt, Artificial Sequence
  Description of Artificial Sequence: Synthetic oligonucleotide
ggaucugcucagcacccuc

SEQ ID NO: 1709783 - RNA, 19 nt, Artificial Sequence
  Description of Artificial Sequence: Synthetic oligonucleotide
ggccuauacugggccaugg

SEQ ID NO: 1709784 - RNA, 19 nt, Artificial Sequence
  Description of Artificial Sequence: Synthetic oligonucleotide
gucugcgggcauucugcac

SEQ ID NO: 1709785 - RNA, 19 nt, Artificial Sequence
  Description of Artificial Sequence: Synthetic oligonucleotide
gccauacacgugaggagcc

SEQ ID NO: 1709786 - RNA, 19 nt, Artificial Sequence
  Description of Artificial Sequence: Synthetic oligonucleotide
gaagggaaaugcagcugua

SEQ ID NO: 1709787 - RNA, 19 nt, Artificial Sequence
  Description of Artificial Sequence: Synthetic oligonucleotide
ggcauuaggccacucacuu

SEQ ID NO: 1709788 - RNA, 19 nt, Artificial Sequence
  Description of Artificial Sequence: Synthetic oligonucleotide
ccuauacugggccauggaa

SEQ ID NO: 1709789 - RNA, 19 nt, Artificial Sequence
  Description of Artificial Sequence: Synthetic oligonucleotide
uccacacgggcugggcacu

SEQ ID NO: 1709790 - RNA, 19 nt, Artificial Sequence
  Description of Artificial Sequence: Synthetic oligonucleotide
cugccgugguuccuuuguc

SEQ ID NO: 1709791 - RNA, 19 nt, Artificial Sequence
  Description of Artificial Sequence: Synthetic oligonucleotide
gucaugaaguacaguccaa

SEQ ID NO: 1709792 - RNA, 19 nt, Artificial Sequence
  Description of Artificial Sequence: Synthetic oligonucleotide
gccccacaaagauacaugu

SEQ ID NO: 1709793 - RNA, 19 nt, Artificial Sequence
  Description of Artificial Sequence: Synthetic oligonucleotide
auuaggccacucacuuggu

SEQ ID NO: 1709794 - RNA, 19 nt, Artificial Sequence
  Description of Artificial Sequence: Synthetic oligonucleotide
ggacacaaagugcugggau

SEQ ID NO: 1709795 - RNA, 19 nt, Artificial Sequence
  Description of Artificial Sequence: Synthetic oligonucleotide
ccucauaauggcgggcagc

SEQ ID NO: 1709796 - RNA, 19 nt, Artificial Sequence
  Description of Artificial Sequence: Synthetic oligonucleotide
cacccucauaauggcgggc

SEQ ID NO: 1709797 - RNA, 19 nt, Artificial Sequence
  Description of Artificial Sequence: Synthetic oligonucleotide
ggcggaucaggaucugcuc

SEQ ID NO: 1709798 - RNA, 19 nt, Artificial Sequence
  Description of Artificial Sequence: Synthetic oligonucleotide
aaggcccuaguaggccuau

SEQ ID NO: 1709799 - RNA, 19 nt, Artificial Sequence
  Description of Artificial Sequence: Synthetic oligonucleotide
cacaaagugcugggauguc

SEQ ID NO: 1709800 - RNA, 19 nt, Artificial Sequence
  Description of Artificial Sequence: Synthetic oligonucleotide
gaguagagaccaagucuua

SEQ ID NO: 1709801 - RNA, 19 nt, Artificial Sequence
  Description of Artificial Sequence: Synthetic oligonucleotide
augucgcuuccuagcagcu

SEQ ID NO: 1709802 - RNA, 19 nt, Artificial Sequence
  Description of Artificial Sequence: Synthetic oligonucleotide
cuuagccauggccagucau

SEQ ID NO: 1709803 - RNA, 19 nt, Artificial Sequence
  Description of Artificial Sequence: Synthetic oligonucleotide
gccccugcuaggaugcugc

SEQ ID NO: 1709804 - RNA, 19 nt, Artificial Sequence
  Description of Artificial Sequence: Synthetic oligonucleotide
cucauaggcaauggguggu

SEQ ID NO: 1709805 - RNA, 19 nt, Artificial Sequence
  Description of Artificial Sequence: Synthetic oligonucleotide
aucauucgccgcacagcca

SEQ ID NO: 1709806 - RNA, 19 nt, Artificial Sequence
  Description of Artificial Sequence: Synthetic oligonucleotide
aggucagguacuggccuaa

SEQ ID NO: 1709807 - RNA, 19 nt, Artificial Sequence
  Description of Artificial Sequence: Synthetic oligonucleotide
aggccuauacugggccaug

SEQ ID NO: 1709808 - RNA, 19 nt, Artificial Sequence
  Description of Artificial Sequence: Synthetic oligonucleotide
ucaucacagccuggcggau

SEQ ID NO: 1709809 - RNA, 19 nt, Artificial Sequence
  Description of Artificial Sequence: Synthetic oligonucleotide
gcuguagcucuaaguguug

SEQ ID NO: 1709810 - RNA, 19 nt, Artificial Sequence
  Description of Artificial Sequence: Synthetic oligonucleotide
cauggccagucaugaagua

SEQ ID NO: 1709811 - RNA, 19 nt, Artificial Sequence
  Description of Artificial Sequence: Synthetic oligonucleotide
cagcuuuggccagcacagc

SEQ ID NO: 1709812 - RNA, 19 nt, Artificial Sequence
  Description of Artificial Sequence: Synthetic oligonucleotide
gccgugguuccuuugucaa

SEQ ID NO: 1709813 - RNA, 19 nt, Artificial Sequence
  Description of Artificial Sequence: Synthetic oligonucleotide
cugcgggcauucugcacca

SEQ ID NO: 1709814 - RNA, 19 nt, Artificial Sequence
  Description of Artificial Sequence: Synthetic oligonucleotide
caguuccucaacacauccu

SEQ ID NO: 1709815 - RNA, 19 nt, Artificial Sequence
  Description of Artificial Sequence: Synthetic oligonucleotide
uggugccauccacccgcac

SEQ ID NO: 1709816 - RNA, 19 nt, Artificial Sequence
  Description of Artificial Sequence: Synthetic oligonucleotide
ggugcacacuguaguugcc

SEQ ID NO: 1709817 - RNA, 19 nt, Artificial Sequence
  Description of Artificial Sequence: Synthetic oligonucleotide
ucgcaccagucugcgggca

SEQ ID NO: 1709818 - RNA, 19 nt, Artificial Sequence
  Description of Artificial Sequence: Synthetic oligonucleotide
cagucgggucuugccagug

SEQ ID NO: 1709819 - RNA, 19 nt, Artificial Sequence
  Description of Artificial Sequence: Synthetic oligonucleotide
gcucagacccugagugucc

SEQ ID NO: 1709820 - RNA, 19 nt, Artificial Sequence
  Description of Artificial Sequence: Synthetic oligonucleotide
cucagucugucgcaccagu

SEQ ID NO: 1709821 - RNA, 19 nt, Artificial Sequence
  Description of Artificial Sequence: Synthetic oligonucleotide
cgugguuccuuugucaaca

SEQ ID NO: 1709822 - RNA, 19 nt, Artificial Sequence
  Description of Artificial Sequence: Synthetic oligonucleotide
gccaccuccuguggugacg

SEQ ID NO: 1709823 - RNA, 19 nt, Artificial Sequence
  Description of Artificial Sequence: Synthetic oligonucleotide
accgagcauaccaguuccu

SEQ ID NO: 1709824 - RNA, 19 nt, Artificial Sequence
  Description of Artificial Sequence: Synthetic oligonucleotide
ggcuuuggccauacacgug

SEQ ID NO: 1709825 - RNA, 19 nt, Artificial Sequence
  Description of Artificial Sequence: Synthetic oligonucleotide
uaauggcgggcagcucgaa

SEQ ID NO: 1709826 - RNA, 19 nt, Artificial Sequence
  Description of Artificial Sequence: Synthetic oligonucleotide
cacaugggacacuaucauu

SEQ ID NO: 1709827 - RNA, 19 nt, Artificial Sequence
  Description of Artificial Sequence: Synthetic oligonucleotide
gcaaguuuccuuggcgaaa

SEQ ID NO: 1709828 - RNA, 19 nt, Artificial Sequence
  Description of Artificial Sequence: Synthetic oligonucleotide
caauggguggugugucacu

SEQ ID NO: 1709829 - RNA, 19 nt, Artificial Sequence
  Description of Artificial Sequence: Synthetic oligonucleotide
cauugaucuucuggacaaa

SEQ ID NO: 1709830 - RNA, 19 nt, Artificial Sequence
  Description of Artificial Sequence: Synthetic oligonucleotide
cuguaguugccgaggcccu

SEQ ID NO: 1709831 - RNA, 19 nt, Artificial Sequence
  Description of Artificial Sequence: Synthetic oligonucleotide
gcaagcgccuccacacccc

SEQ ID NO: 1709832 - RNA, 19 nt, Artificial Sequence
  Description of Artificial Sequence: Synthetic oligonucleotide
cgagcauaccaguuccuca

SEQ ID NO: 1709833 - RNA, 19 nt, Artificial Sequence
  Description of Artificial Sequence: Synthetic oligonucleotide
ccuguggugacgcaccugu

SEQ ID NO: 1709834 - RNA, 19 nt, Artificial Sequence
  Description of Artificial Sequence: Synthetic oligonucleotide
gagcccgggagccgcccca

SEQ ID NO: 1709835 - RNA, 19 nt, Artificial Sequence
  Description of Artificial Sequence: Synthetic oligonucleotide
ggcaaccgagcauaccagu

SEQ ID NO: 1709836 - RNA, 19 nt, Artificial Sequence
  Description of Artificial Sequence: Synthetic oligonucleotide
cugcaagcucagacccuga

SEQ ID NO: 1709837 - RNA, 19 nt, Artificial Sequence
  Description of Artificial Sequence: Synthetic oligonucleotide
gcgggcauucugcaccaca

SEQ ID NO: 1709838 - RNA, 19 nt, Artificial Sequence
  Description of Artificial Sequence: Synthetic oligonucleotide
ccgugguuccuuugucaac

SEQ ID NO: 1709839 - RNA, 19 nt, Artificial Sequence
  Description of Artificial Sequence: Synthetic oligonucleotide
ccgagcauaccaguuccuc

SEQ ID NO: 1709840 - RNA, 19 nt, Artificial Sequence
  Description of Artificial Sequence: Synthetic oligonucleotide
cauaggcaauggguggugu

SEQ ID NO: 1709841 - RNA, 19 nt, Artificial Sequence
  Description of Artificial Sequence: Synthetic oligonucleotide
gugagcccgggagccgccc

SEQ ID NO: 1709842 - RNA, 19 nt, Artificial Sequence
  Description of Artificial Sequence: Synthetic oligonucleotide
cuuucugccgugguuccuu

SEQ ID NO: 1709843 - RNA, 19 nt, Artificial Sequence
  Description of Artificial Sequence: Synthetic oligonucleotide
ccuugaugccaggcauuag

SEQ ID NO: 1709844 - RNA, 19 nt, Artificial Sequence
  Description of Artificial Sequence: Synthetic oligonucleotide
ggucugauugucaucccuu

SEQ ID NO: 1709845 - RNA, 19 nt, Artificial Sequence
  Description of Artificial Sequence: Synthetic oligonucleotide
uccgagccagucgggucuu

SEQ ID NO: 1709846 - RNA, 19 nt, Artificial Sequence
  Description of Artificial Sequence: Synthetic oligonucleotide
gccuaacagaggcaaguuu

SEQ ID NO: 1709847 - RNA, 19 nt, Artificial Sequence
  Description of Artificial Sequence: Synthetic oligonucleotide
gcgaaaagcuucagcacau

SEQ ID NO: 1709848 - RNA, 19 nt, Artificial Sequence
  Description of Artificial Sequence: Synthetic oligonucleotide
ugcgggcauucugcaccac

SEQ ID NO: 1709849 - RNA, 19 nt, Artificial Sequence
  Description of Artificial Sequence: Synthetic oligonucleotide
ggucagguacuggccuaac

SEQ ID NO: 1709850 - RNA, 19 nt, Artificial Sequence
  Description of Artificial Sequence: Synthetic oligonucleotide
caagcgccuccacaccccu

SEQ ID NO: 1709851 - RNA, 19 nt, Artificial Sequence
  Description of Artificial Sequence: Synthetic oligonucleotide
caccuugaugccaggcauu

SEQ ID NO: 1709852 - RNA, 19 nt, Artificial Sequence
  Description of Artificial Sequence: Synthetic oligonucleotide
gcugucagcuccacuggcu

SEQ ID NO: 1709853 - RNA, 19 nt, Artificial Sequence
  Description of Artificial Sequence: Synthetic oligonucleotide
gguuccgagccagucgggu

SEQ ID NO: 1709854 - RNA, 19 nt, Artificial Sequence
  Description of Artificial Sequence: Synthetic oligonucleotide
caccaagcucauaggcaau

SEQ ID NO: 1709855 - RNA, 19 nt, Artificial Sequence
  Description of Artificial Sequence: Synthetic oligonucleotide
gccgccccaccuugaugcc

SEQ ID NO: 1709856 - RNA, 19 nt, Artificial Sequence
  Description of Artificial Sequence: Synthetic oligonucleotide
ccacccgcacagccaggcc

SEQ ID NO: 1709857 - RNA, 19 nt, Artificial Sequence
  Description of Artificial Sequence: Synthetic oligonucleotide
gccgaggcccucagcuuug

SEQ ID NO: 1709858 - RNA, 19 nt, Artificial Sequence
  Description of Artificial Sequence: Synthetic oligonucleotide
ccuccaccuuuuaggggca

SEQ ID NO: 1709859 - RNA, 19 nt, Artificial Sequence
  Description of Artificial Sequence: Synthetic oligonucleotide
gcaaccgagcauaccaguu

SEQ ID NO: 1709860 - RNA, 19 nt, Artificial Sequence
  Description of Artificial Sequence: Synthetic oligonucleotide
ccauacacgugaggagcca

SEQ ID NO: 1709861 - RNA, 19 nt, Artificial Sequence
  Description of Artificial Sequence: Synthetic oligonucleotide
caucccuuccaaggcccua

SEQ ID NO: 1709862 - RNA, 19 nt, Artificial Sequence
  Description of Artificial Sequence: Synthetic oligonucleotide
cauucgccgcacagccagu

SEQ ID NO: 1709863 - RNA, 19 nt, Artificial Sequence
  Description of Artificial Sequence: Synthetic oligonucleotide
cgagccagucgggucuugc

SEQ ID NO: 1709864 - RNA, 19 nt, Artificial Sequence
  Description of Artificial Sequence: Synthetic oligonucleotide
gcucuaaguguugccugcu

SEQ ID NO: 1709865 - RNA, 19 nt, Artificial Sequence
  Description of Artificial Sequence: Synthetic oligonucleotide
caccuccuguggugacgca

SEQ ID NO: 1709866 - RNA, 19 nt, Artificial Sequence
  Description of Artificial Sequence: Synthetic oligonucleotide
gccuggcggaucaggaucu

SEQ ID NO: 1709867 - RNA, 19 nt, Artificial Sequence
  Description of Artificial Sequence: Synthetic oligonucleotide
gccucuuucugccgugguu

SEQ ID NO: 1709868 - RNA, 19 nt, Artificial Sequence
  Description of Artificial Sequence: Synthetic oligonucleotide
ccgaggcccucagcuuugg

SEQ ID NO: 1709869 - RNA, 19 nt, Artificial Sequence
  Description of Artificial Sequence: Synthetic oligonucleotide
ccaccuuuuaggggcaggu

SEQ ID NO: 1709870 - RNA, 19 nt, Artificial Sequence
  Description of Artificial Sequence: Synthetic oligonucleotide
ccgcacagccaguggcuca

SEQ ID NO: 1709871 - RNA, 19 nt, Artificial Sequence
  Description of Artificial Sequence: Synthetic oligonucleotide
ggccuaacagaggcaaguu

SEQ ID NO: 1709872 - RNA, 19 nt, Artificial Sequence
  Description of Artificial Sequence: Synthetic oligonucleotide
aggcccuaguaggccuaua

SEQ ID NO: 1709873 - RNA, 19 nt, Artificial Sequence
  Description of Artificial Sequence: Synthetic oligonucleotide
cccuuccaaggcccuagua

SEQ ID NO: 1709874 - RNA, 19 nt, Artificial Sequence
  Description of Artificial Sequence: Synthetic oligonucleotide
guguaucauugggguuggu

SEQ ID NO: 1709875 - RNA, 19 nt, Artificial Sequence
  Description of Artificial Sequence: Synthetic oligonucleotide
gggagccgccccaccuuga

SEQ ID NO: 1709876 - RNA, 19 nt, Artificial Sequence
  Description of Artificial Sequence: Synthetic oligonucleotide
cgggucuugccaguguaua

SEQ ID NO: 1709877 - RNA, 19 nt, Artificial Sequence
  Description of Artificial Sequence: Synthetic oligonucleotide
cccagccaccuccuguggu

SEQ ID NO: 1709878 - RNA, 19 nt, Artificial Sequence
  Description of Artificial Sequence: Synthetic oligonucleotide
ccacacgggcugggcacuc

SEQ ID NO: 1709879 - RNA, 19 nt, Artificial Sequence
  Description of Artificial Sequence: Synthetic oligonucleotide
cccgggagccgccccaccu

SEQ ID NO: 1709880 - RNA, 19 nt, Artificial Sequence
  Description of Artificial Sequence: Synthetic oligonucleotide
gcaccagucugcgggcauu

SEQ ID NO: 1709881 - RNA, 19 nt, Artificial Sequence
  Description of Artificial Sequence: Synthetic oligonucleotide
ccgccccaccuugaugcca

SEQ ID NO: 1709882 - RNA, 19 nt, Artificial Sequence
  Description of Artificial Sequence: Synthetic oligonucleotide
ccgagccagucgggucuug

SEQ ID NO: 1709883 - RNA, 19 nt, Artificial Sequence
  Description of Artificial Sequence: Synthetic oligonucleotide
cagccccugcuaggaugcu

SEQ ID NO: 1709884 - RNA, 19 nt, Artificial Sequence
  Description of Artificial Sequence: Synthetic oligonucleotide
cgcuuccuagcagcugcaa

SEQ ID NO: 1709885 - RNA, 19 nt, Artificial Sequence
  Description of Artificial Sequence: Synthetic oligonucleotide
  modified_base (10)..(10): a, c, u, g, unknown or other
aacaagaagnguuucucgc

SEQ ID NO: 1709886 - RNA, 19 nt, Artificial Sequence
  Description of Artificial Sequence: Synthetic oligonucleotide
uuuacagccagacugaucc

SEQ ID NO: 1709887 - RNA, 19 nt, Artificial Sequence
  Description of Artificial Sequence: Synthetic oligonucleotide
aauaauacagggccuauug

SEQ ID NO: 1709888 - RNA, 19 nt, Artificial Sequence
  Description of Artificial Sequence: Synthetic oligonucleotide
auuucuuuaaggcugaucu

SEQ ID NO: 1709889 - RNA, 19 nt, Artificial Sequence
  Description of Artificial Sequence: Synthetic oligonucleotide
uguuucugcacauagagga

SEQ ID NO: 1709890 - RNA, 19 nt, Artificial Sequence
  Description of Artificial Sequence: Synthetic oligonucleotide
uccaaaauuucuuuaaggc

SEQ ID NO: 1709891 - RNA, 19 nt, Artificial Sequence
  Description of Artificial Sequence: Synthetic oligonucleotide
ucgucuaccacccuaaaag

SEQ ID NO: 1709892 - RNA, 19 nt, Artificial Sequence
  Description of Artificial Sequence: Synthetic oligonucleotide
guguguacaaaccauaggg

SEQ ID NO: 1709893 - RNA, 19 nt, Artificial Sequence
  Description of Artificial Sequence: Synthetic oligonucleotide
uugcgaauaauacagggcc

SEQ ID NO: 1709894 - RNA, 19 nt, Artificial Sequence
  Description of Artificial Sequence: Synthetic oligonucleotide
  modified_base (3)..(3): a, c, u, g, unknown or other
agnguuucucgccagagac

SEQ ID NO: 1709895 - RNA, 19 nt, Artificial Sequence
  Description of Artificial Sequence: Synthetic oligonucleotide
uaauacagggccuauuggg

SEQ ID NO: 1709896 - RNA, 19 nt, Artificial Sequence
  Description of Artificial Sequence: Synthetic oligonucleotide
uuugcagugucugugaggg

SEQ ID NO: 1709897 - RNA, 19 nt, Artificial Sequence
  Description of Artificial Sequence: Synthetic oligonucleotide
uauuaucuccacuuuacag

SEQ ID NO: 1709898 - RNA, 19 nt, Artificial Sequence
  Description of Artificial Sequence: Synthetic oligonucleotide
uguguacaaaccauagggg

SEQ ID NO: 1709899 - RNA, 19 nt, Artificial Sequence
  Description of Artificial Sequence: Synthetic oligonucleotide
aaggucauagcacugguga

SEQ ID NO: 1709900 - RNA, 19 nt, Artificial Sequence
  Description of Artificial Sequence: Synthetic oligonucleotide
  modified_base (9)..(9): a, c, u, g, unknown or other
acaagaagnguuucucgcc

SEQ ID NO: 1709901 - RNA, 19 nt, Artificial Sequence
  Description of Artificial Sequence: Synthetic oligonucleotide
ucuaccacccuaaaagugc

SEQ ID NO: 1709902 - RNA, 19 nt, Artificial Sequence
  Description of Artificial Sequence: Synthetic oligonucleotide
ugucauaccagaaauucac

SEQ ID NO: 1709903 - RNA, 19 nt, Artificial Sequence
  Description of Artificial Sequence: Synthetic oligonucleotide
auugggacacacccaaucc

SEQ ID NO: 1709904 - RNA, 19 nt, Artificial Sequence
  Description of Artificial Sequence: Synthetic oligonucleotide
ucuucagucagcugguagg

SEQ ID NO: 1709905 - RNA, 19 nt, Artificial Sequence
  Description of Artificial Sequence: Synthetic oligonucleotide
aacaugcagugacucaccc

SEQ ID NO: 1709906 - RNA, 19 nt, Artificial Sequence
  Description of Artificial Sequence: Synthetic oligonucleotide
aaccauaggggaugaaggg

SEQ ID NO: 1709907 - RNA, 19 nt, Artificial Sequence
  Description of Artificial Sequence: Synthetic oligonucleotide
auuauuaucuccacuuuac

SEQ ID NO: 1709908 - RNA, 19 nt, Artificial Sequence
  Description of Artificial Sequence: Synthetic oligonucleotide
uuaucuccacuuuacagcc

SEQ ID NO: 1709909 - RNA, 19 nt, Artificial Sequence
  Description of Artificial Sequence: Synthetic oligonucleotide
aguagagauucucauagug

SEQ ID NO: 1709910 - RNA, 19 nt, Artificial Sequence
  Description of Artificial Sequence: Synthetic oligonucleotide
cauugcgaauaauacaggg

SEQ ID NO: 1709911 - RNA, 19 nt, Artificial Sequence
  Description of Artificial Sequence: Synthetic oligonucleotide
uuaaguaggauagggacca

SEQ ID NO: 1709912 - RNA, 19 nt, Artificial Sequence
  Description of Artificial Sequence: Synthetic oligonucleotide
uggcucuuaaguaggauag

SEQ ID NO: 1709913 - RNA, 19 nt, Artificial Sequence
  Description of Artificial Sequence: Synthetic oligonucleotide
cuuaaguaggauagggacc

SEQ ID NO: 1709914 - RNA, 19 nt, Artificial Sequence
  Description of Artificial Sequence: Synthetic oligonucleotide
auagaggacuccugggugc

SEQ ID NO: 1709915 - RNA, 19 nt, Artificial Sequence
  Description of Artificial Sequence: Synthetic oligonucleotide
uagagauucucauaguggu

SEQ ID NO: 1709916 - RNA, 19 nt, Artificial Sequence
  Description of Artificial Sequence: Synthetic oligonucleotide
auagcuggcagguacaaca

SEQ ID NO: 1709917 - RNA, 19 nt, Artificial Sequence
  Description of Artificial Sequence: Synthetic oligonucleotide
uuccuugucaccugugugg

SEQ ID NO: 1709918 - RNA, 19 nt, Artificial Sequence
  Description of Artificial Sequence: Synthetic oligonucleotide
acccaaucccgguagaagc

SEQ ID NO: 1709919 - RNA, 19 nt, Artificial Sequence
  Description of Artificial Sequence: Synthetic oligonucleotide
aguaacuguacuugagguc

SEQ ID NO: 1709920 - RNA, 19 nt, Artificial Sequence
  Description of Artificial Sequence: Synthetic oligonucleotide
auaauacagggccuauugg

SEQ ID NO: 1709921 - RNA, 19 nt, Artificial Sequence
  Description of Artificial Sequence: Synthetic oligonucleotide
uccagugggauccagggca

SEQ ID NO: 1709922 - RNA, 19 nt, Artificial Sequence
  Description of Artificial Sequence: Synthetic oligonucleotide
uguugguccacgucuaucc

SEQ ID NO: 1709923 - RNA, 19 nt, Artificial Sequence
  Description of Artificial Sequence: Synthetic oligonucleotide
cagacugaucccaacaugc

SEQ ID NO: 1709924 - RNA, 19 nt, Artificial Sequence
  Description of Artificial Sequence: Synthetic oligonucleotide
auuggagcacuguuucugc

SEQ ID NO: 1709925 - RNA, 19 nt, Artificial Sequence
  Description of Artificial Sequence: Synthetic oligonucleotide
uaggauagggaccacuucu

SEQ ID NO: 1709926 - RNA, 19 nt, Artificial Sequence
  Description of Artificial Sequence: Synthetic oligonucleotide
gaaguucacagcaucaggc

SEQ ID NO: 1709927 - RNA, 19 nt, Artificial Sequence
  Description of Artificial Sequence: Synthetic oligonucleotide
uugacugcuuccuauguug

SEQ ID NO: 1709928 - RNA, 19 nt, Artificial Sequence
  Description of Artificial Sequence: Synthetic oligonucleotide
  modified_base (7)..(7): a, c, u, g, unknown or other
aagaagnguuucucgccag

SEQ ID NO: 1709929 - RNA, 19 nt, Artificial Sequence
  Description of Artificial Sequence: Synthetic oligonucleotide
uuaaggcugaucucaacca

SEQ ID NO: 1709930 - RNA, 19 nt, Artificial Sequence
  Description of Artificial Sequence: Synthetic oligonucleotide
uucuuuaaggcugaucuca

SEQ ID NO: 1709931 - RNA, 19 nt, Artificial Sequence
  Description of Artificial Sequence: Synthetic oligonucleotide
uugugcaaggaugucaccg

SEQ ID NO: 1709932 - RNA, 19 nt, Artificial Sequence
  Description of Artificial Sequence: Synthetic oligonucleotide
aggaugucaccgcagcugc

SEQ ID NO: 1709933 - RNA, 19 nt, Artificial Sequence
  Description of Artificial Sequence: Synthetic oligonucleotide
uccaugucauaccagaaau

SEQ ID NO: 1709934 - RNA, 19 nt, Artificial Sequence
  Description of Artificial Sequence: Synthetic oligonucleotide
guagagauucucauagugg

SEQ ID NO: 1709935 - RNA, 19 nt, Artificial Sequence
  Description of Artificial Sequence: Synthetic oligonucleotide
uguacaaaccauaggggau

SEQ ID NO: 1709936 - RNA, 19 nt, Artificial Sequence
  Description of Artificial Sequence: Synthetic oligonucleotide
ugagaagcauugcuguacc

SEQ ID NO: 1709937 - RNA, 19 nt, Artificial Sequence
  Description of Artificial Sequence: Synthetic oligonucleotide
acgucuauccccaugacag

SEQ ID NO: 1709938 - RNA, 19 nt, Artificial Sequence
  Description of Artificial Sequence: Synthetic oligonucleotide
cacagcacgagguacacug

SEQ ID NO: 1709939 - RNA, 19 nt, Artificial Sequence
  Description of Artificial Sequence: Synthetic oligonucleotide
ucccgguagaagcagagug

SEQ ID NO: 1709940 - RNA, 19 nt, Artificial Sequence
  Description of Artificial Sequence: Synthetic oligonucleotide
cuguguggcaacuuccugg

SEQ ID NO: 1709941 - RNA, 19 nt, Artificial Sequence
  Description of Artificial Sequence: Synthetic oligonucleotide
uguaccugauccaugcuuc

SEQ ID NO: 1709942 - RNA, 19 nt, Artificial Sequence
  Description of Artificial Sequence: Synthetic oligonucleotide
uauuugacugcuuccuaug

SEQ ID NO: 1709943 - RNA, 19 nt, Artificial Sequence
  Description of Artificial Sequence: Synthetic oligonucleotide
  modified_base (18)..(18): a, c, u, g, unknown or other
guggauguaacaagaagng

SEQ ID NO: 1709944 - RNA, 19 nt, Artificial Sequence
  Description of Artificial Sequence: Synthetic oligonucleotide
ugcuguaccugauccaugc

SEQ ID NO: 1709945 - RNA, 19 nt, Artificial Sequence
  Description of Artificial Sequence: Synthetic oligonucleotide
ugacugcuuccuauguugg

SEQ ID NO: 1709946 - RNA, 19 nt, Artificial Sequence
  Description of Artificial Sequence: Synthetic oligonucleotide
uuauuugacugcuuccuau

SEQ ID NO: 1709947 - RNA, 19 nt, Artificial Sequence
  Description of Artificial Sequence: Synthetic oligonucleotide
agguacaacaguucgccug

SEQ ID NO: 1709948 - RNA, 19 nt, Artificial Sequence
  Description of Artificial Sequence: Synthetic oligonucleotide
aaaauuucuuuaaggcuga

SEQ ID NO: 1709949 - RNA, 19 nt, Artificial Sequence
  Description of Artificial Sequence: Synthetic oligonucleotide
agggcauugcgaauaauac

SEQ ID NO: 1709950 - RNA, 19 nt, Artificial Sequence
  Description of Artificial Sequence: Synthetic oligonucleotide
accauaggggaugaagggc

SEQ ID NO: 1709951 - RNA, 19 nt, Artificial Sequence
  Description of Artificial Sequence: Synthetic oligonucleotide
uugggacacacccaauccc

SEQ ID NO: 1709952 - RNA, 19 nt, Artificial Sequence
  Description of Artificial Sequence: Synthetic oligonucleotide
gaagcauugcuguaccuga

SEQ ID NO: 1709953 - RNA, 19 nt, Artificial Sequence
  Description of Artificial Sequence: Synthetic oligonucleotide
uuccgcaccguacccagcg

SEQ ID NO: 1709954 - RNA, 19 nt, Artificial Sequence
  Description of Artificial Sequence: Synthetic oligonucleotide
  modified_base (4)..(4): a, c, u, g, unknown or other
aagnguuucucgccagaga

SEQ ID NO: 1709955 - RNA, 19 nt, Artificial Sequence
  Description of Artificial Sequence: Synthetic oligonucleotide
acuggugagaagcauugcu

SEQ ID NO: 1709956 - RNA, 19 nt, Artificial Sequence
  Description of Artificial Sequence: Synthetic oligonucleotide
aauacagggccuauuggga

SEQ ID NO: 1709957 - RNA, 19 nt, Artificial Sequence
  Description of Artificial Sequence: Synthetic oligonucleotide
aagggcgugugccaggcug

SEQ ID NO: 1709958 - RNA, 19 nt, Artificial Sequence
  Description of Artificial Sequence: Synthetic oligonucleotide
ugugcaaggaugucaccgc

SEQ ID NO: 1709959 - RNA, 19 nt, Artificial Sequence
  Description of Artificial Sequence: Synthetic oligonucleotide
gauuggagcacuguuucug

SEQ ID NO: 1709960 - RNA, 19 nt, Artificial Sequence
  Description of Artificial Sequence: Synthetic oligonucleotide
aucuccacuuuacagccag

SEQ ID NO: 1709961 - RNA, 19 nt, Artificial Sequence
  Description of Artificial Sequence: Synthetic oligonucleotide
acuauggcucuuaaguagg

SEQ ID NO: 1709962 - RNA, 19 nt, Artificial Sequence
  Description of Artificial Sequence: Synthetic oligonucleotide
aacaccuuccgcaccguac

SEQ ID NO: 1709963 - RNA, 19 nt, Artificial Sequence
  Description of Artificial Sequence: Synthetic oligonucleotide
uccguggagcccacuaugg

SEQ ID NO: 1709964 - RNA, 19 nt, Artificial Sequence
  Description of Artificial Sequence: Synthetic oligonucleotide
uggugagaagcauugcugu

SEQ ID NO: 1709965 - RNA, 19 nt, Artificial Sequence
  Description of Artificial Sequence: Synthetic oligonucleotide
guguacaaaccauagggga

SEQ ID NO: 1709966 - RNA, 19 nt, Artificial Sequence
  Description of Artificial Sequence: Synthetic oligonucleotide
aaugcagccgugggacugc

SEQ ID NO: 1709967 - RNA, 19 nt, Artificial Sequence
  Description of Artificial Sequence: Synthetic oligonucleotide
acauagaggacuccugggu

SEQ ID NO: 1709968 - RNA, 19 nt, Artificial Sequence
  Description of Artificial Sequence: Synthetic oligonucleotide
cugacccuccaacacaucc

SEQ ID NO: 1709969 - RNA, 19 nt, Artificial Sequence
  Description of Artificial Sequence: Synthetic oligonucleotide
agcggaccaggucuggagc

SEQ ID NO: 1709970 - RNA, 19 nt, Artificial Sequence
  Description of Artificial Sequence: Synthetic oligonucleotide
uaaggcugaucucaaccac

SEQ ID NO: 1709971 - RNA, 19 nt, Artificial Sequence
  Description of Artificial Sequence: Synthetic oligonucleotide
cuggugagaagcauugcug

SEQ ID NO: 1709972 - RNA, 19 nt, Artificial Sequence
  Description of Artificial Sequence: Synthetic oligonucleotide
agagccauuauuaucucca

SEQ ID NO: 1709973 - RNA, 19 nt, Artificial Sequence
  Description of Artificial Sequence: Synthetic oligonucleotide
ucucaaccacacaggaacc

SEQ ID NO: 1709974 - RNA, 19 nt, Artificial Sequence
  Description of Artificial Sequence: Synthetic oligonucleotide
  modified_base (5)..(5): a, c, u, g, unknown or other
gaagnguuucucgccagag

SEQ ID NO: 1709975 - RNA, 19 nt, Artificial Sequence
  Description of Artificial Sequence: Synthetic oligonucleotide
ccacuuuacagccagacug

SEQ ID NO: 1709976 - RNA, 19 nt, Artificial Sequence
  Description of Artificial Sequence: Synthetic oligonucleotide
gaaccacauagcuggcagg

SEQ ID NO: 1709977 - RNA, 19 nt, Artificial Sequence
  Description of Artificial Sequence: Synthetic oligonucleotide
auauuccaaaauuucuuua

SEQ ID NO: 1709978 - RNA, 19 nt, Artificial Sequence
  Description of Artificial Sequence: Synthetic oligonucleotide
agaggcccagggcacaugg

SEQ ID NO: 1709979 - RNA, 19 nt, Artificial Sequence
  Description of Artificial Sequence: Synthetic oligonucleotide
  modified_base (12)..(12): a, c, u, g, unknown or other
guaacaagaagnguuucuc

SEQ ID NO: 1709980 - RNA, 19 nt, Artificial Sequence
  Description of Artificial Sequence: Synthetic oligonucleotide
ugguggaaccacauagcug

SEQ ID NO: 1709981 - RNA, 19 nt, Artificial Sequence
  Description of Artificial Sequence: Synthetic oligonucleotide
ugcgaauaauacagggccu

SEQ ID NO: 1709982 - RNA, 19 nt, Artificial Sequence
  Description of Artificial Sequence: Synthetic oligonucleotide
aaaccgguccccucgcaca

SEQ ID NO: 1709983 - RNA, 19 nt, Artificial Sequence
  Description of Artificial Sequence: Synthetic oligonucleotide
auuugacugcuuccuaugu

SEQ ID NO: 1709984 - RNA, 19 nt, Artificial Sequence
  Description of Artificial Sequence: Synthetic oligonucleotide
agcauugcuguaccugauc

SEQ ID NO: 1709985 - RNA, 19 nt, Artificial Sequence
  Description of Artificial Sequence: Synthetic oligonucleotide
agaagcauugcuguaccug

SEQ ID NO: 1709986 - RNA, 19 nt, Artificial Sequence
  Description of Artificial Sequence: Synthetic oligonucleotide
  modified_base (19)..(19): a, c, u, g, unknown or other
gguggauguaacaagaagn

SEQ ID NO: 1709987 - RNA, 19 nt, Artificial Sequence
  Description of Artificial Sequence: Synthetic oligonucleotide
acagcaucaggcaucuuuc

SEQ ID NO: 1709988 - RNA, 19 nt, Artificial Sequence
  Description of Artificial Sequence: Synthetic oligonucleotide
cuaccacccuaaaagugcc

SEQ ID NO: 1709989 - RNA, 19 nt, Artificial Sequence
  Description of Artificial Sequence: Synthetic oligonucleotide
ucuuuaaggcugaucucaa

SEQ ID NO: 1709990 - RNA, 19 nt, Artificial Sequence
  Description of Artificial Sequence: Synthetic oligonucleotide
uagagccauuauuaucucc

SEQ ID NO: 1709991 - RNA, 19 nt, Artificial Sequence
  Description of Artificial Sequence: Synthetic oligonucleotide
uccgcauauccaucugggg

SEQ ID NO: 1709992 - RNA, 19 nt, Artificial Sequence
  Description of Artificial Sequence: Synthetic oligonucleotide
cagauuggagcacuguuuc

SEQ ID NO: 1709993 - RNA, 19 nt, Artificial Sequence
  Description of Artificial Sequence: Synthetic oligonucleotide
ugcaaggaugucaccgcag

SEQ ID NO: 1709994 - RNA, 19 nt, Artificial Sequence
  Description of Artificial Sequence: Synthetic oligonucleotide
gaacucuugcaacaccuuc

SEQ ID NO: 1709995 - RNA, 19 nt, Artificial Sequence
  Description of Artificial Sequence: Synthetic oligonucleotide
cagcaggcaucacaaaccg

SEQ ID NO: 1709996 - RNA, 19 nt, Artificial Sequence
  Description of Artificial Sequence: Synthetic oligonucleotide
gguguguacaaaccauagg

SEQ ID NO: 1709997 - RNA, 19 nt, Artificial Sequence
  Description of Artificial Sequence: Synthetic oligonucleotide
cuuccuauguugguccacg

SEQ ID NO: 1709998 - RNA, 19 nt, Artificial Sequence
  Description of Artificial Sequence: Synthetic oligonucleotide
cauccgcauauccaucugg

SEQ ID NO: 1709999 - RNA, 19 nt, Artificial Sequence
  Description of Artificial Sequence: Synthetic oligonucleotide
guacaaaccauaggggaug

SEQ ID NO: 1710000 - RNA, 19 nt, Artificial Sequence
  Description of Artificial Sequence: Synthetic oligonucleotide
aagugcccucuucagucag

SEQ ID NO: 1710001 - RNA, 19 nt, Artificial Sequence
  Description of Artificial Sequence: Synthetic oligonucleotide
uuucuuuaaggcugaucuc

SEQ ID NO: 1710002 - RNA, 19 nt, Artificial Sequence
  Description of Artificial Sequence: Synthetic oligonucleotide
ugcuggacaugguggaacc

SEQ ID NO: 1710003 - RNA, 19 nt, Artificial Sequence
  Description of Artificial Sequence: Synthetic oligonucleotide
gguacaacaguucgccugc

SEQ ID NO: 1710004 - RNA, 19 nt, Artificial Sequence
  Description of Artificial Sequence: Synthetic oligonucleotide
aaucccgguagaagcagag

SEQ ID NO: 1710005 - RNA, 19 nt, Artificial Sequence
  Description of Artificial Sequence: Synthetic oligonucleotide
auggcucuuaaguaggaua

SEQ ID NO: 1710006 - RNA, 19 nt, Artificial Sequence
  Description of Artificial Sequence: Synthetic oligonucleotide
agcauccgcauauccaucu

SEQ ID NO: 1710007 - RNA, 19 nt, Artificial Sequence
  Description of Artificial Sequence: Synthetic oligonucleotide
cauaggggaugaagggccg

SEQ ID NO: 1710008 - RNA, 19 nt, Artificial Sequence
  Description of Artificial Sequence: Synthetic oligonucleotide
ggccuauugggacacaccc

SEQ ID NO: 1710009 - RNA, 19 nt, Artificial Sequence
  Description of Artificial Sequence: Synthetic oligonucleotide
acacacccaaucccgguag

SEQ ID NO: 1710010 - RNA, 19 nt, Artificial Sequence
  Description of Artificial Sequence: Synthetic oligonucleotide
aggucauagcacuggugag

SEQ ID NO: 1710011 - RNA, 19 nt, Artificial Sequence
  Description of Artificial Sequence: Synthetic oligonucleotide
ugcugcagggcauugcgaa

SEQ ID NO: 1710012 - RNA, 19 nt, Artificial Sequence
  Description of Artificial Sequence: Synthetic oligonucleotide
ucaccuguguggcaacuuc

SEQ ID NO: 1710013 - RNA, 19 nt, Artificial Sequence
  Description of Artificial Sequence: Synthetic oligonucleotide
aaccgguccccucgcacag

SEQ ID NO: 1710014 - RNA, 19 nt, Artificial Sequence
  Description of Artificial Sequence: Synthetic oligonucleotide
  modified_base (17)..(17): a, c, u, g, unknown or other
uggauguaacaagaagngu

SEQ ID NO: 1710015 - RNA, 19 nt, Artificial Sequence
  Description of Artificial Sequence: Synthetic oligonucleotide
gcauugcuguaccugaucc

SEQ ID NO: 1710016 - RNA, 19 nt, Artificial Sequence
  Description of Artificial Sequence: Synthetic oligonucleotide
uggagcacuguuucugcac

SEQ ID NO: 1710017 - RNA, 19 nt, Artificial Sequence
  Description of Artificial Sequence: Synthetic oligonucleotide
auugcuguaccugauccau

SEQ ID NO: 1710018 - RNA, 19 nt, Artificial Sequence
  Description of Artificial Sequence: Synthetic oligonucleotide
aaguaggauagggaccacu

SEQ ID NO: 1710019 - RNA, 19 nt, Artificial Sequence
  Description of Artificial Sequence: Synthetic oligonucleotide
cuuuaaggcugaucucaac

SEQ ID NO: 1710020 - RNA, 19 nt, Artificial Sequence
  Description of Artificial Sequence: Synthetic oligonucleotide
uagguugcugguguguaca

SEQ ID NO: 1710021 - RNA, 19 nt, Artificial Sequence
  Description of Artificial Sequence: Synthetic oligonucleotide
  modified_base (8)..(8): a, c, u, g, unknown or other
caagaagnguuucucgcca

SEQ ID NO: 1710022 - RNA, 19 nt, Artificial Sequence
  Description of Artificial Sequence: Synthetic oligonucleotide
caacaugcagugacucacc

SEQ ID NO: 1710023 - RNA, 19 nt, Artificial Sequence
  Description of Artificial Sequence: Synthetic oligonucleotide
guaacugggguagcggacc

SEQ ID NO: 1710024 - RNA, 19 nt, Artificial Sequence
  Description of Artificial Sequence: Synthetic oligonucleotide
  modified_base (6)..(6): a, c, u, g, unknown or other
agaagnguuucucgccaga

SEQ ID NO: 1710025 - RNA, 19 nt, Artificial Sequence
  Description of Artificial Sequence: Synthetic oligonucleotide
gucuauccccaugacagcc

SEQ ID NO: 1710026 - RNA, 19 nt, Artificial Sequence
  Description of Artificial Sequence: Synthetic oligonucleotide
agccauuauuaucuccacu

SEQ ID NO: 1710027 - RNA, 19 nt, Artificial Sequence
  Description of Artificial Sequence: Synthetic oligonucleotide
gguacacugaggucgcgag

SEQ ID NO: 1710028 - RNA, 19 nt, Artificial Sequence
  Description of Artificial Sequence: Synthetic oligonucleotide
gugagaagcauugcuguac

SEQ ID NO: 1710029 - RNA, 19 nt, Artificial Sequence
  Description of Artificial Sequence: Synthetic oligonucleotide
uucgccugcccgaacugug

SEQ ID NO: 1710030 - RNA, 19 nt, Artificial Sequence
  Description of Artificial Sequence: Synthetic oligonucleotide
uccuugucaccuguguggc

SEQ ID NO: 1710031 - RNA, 19 nt, Artificial Sequence
  Description of Artificial Sequence: Synthetic oligonucleotide
uagcggaccaggucuggag

SEQ ID NO: 1710032 - RNA, 19 nt, Artificial Sequence
  Description of Artificial Sequence: Synthetic oligonucleotide
uacagccagacugauccca

SEQ ID NO: 1710033 - RNA, 19 nt, Artificial Sequence
  Description of Artificial Sequence: Synthetic oligonucleotide
uccuauguugguccacguc

SEQ ID NO: 1710034 - RNA, 19 nt, Artificial Sequence
  Description of Artificial Sequence: Synthetic oligonucleotide
cuggguggauguaacaaga

SEQ ID NO: 1710035 - RNA, 19 nt, Artificial Sequence
  Description of Artificial Sequence: Synthetic oligonucleotide
caccuguguggcaacuucc

SEQ ID NO: 1710036 - RNA, 19 nt, Artificial Sequence
  Description of Artificial Sequence: Synthetic oligonucleotide
gaggcaguucagugggcag

SEQ ID NO: 1710037 - RNA, 19 nt, Artificial Sequence
  Description of Artificial Sequence: Synthetic oligonucleotide
gcagguacaacaguucgcc

SEQ ID NO: 1710038 - RNA, 19 nt, Artificial Sequence
  Description of Artificial Sequence: Synthetic oligonucleotide
ggauagggaccacuucugg

SEQ ID NO: 1710039 - RNA, 19 nt, Artificial Sequence
  Description of Artificial Sequence: Synthetic oligonucleotide
uaccagaaauucacagcaa

SEQ ID NO: 1710040 - RNA, 19 nt, Artificial Sequence
  Description of Artificial Sequence: Synthetic oligonucleotide
gucuaccacccuaaaagug

SEQ ID NO: 1710041 - RNA, 19 nt, Artificial Sequence
  Description of Artificial Sequence: Synthetic oligonucleotide
ggaaguaacuguacuugag

SEQ ID NO: 1710042 - RNA, 19 nt, Artificial Sequence
  Description of Artificial Sequence: Synthetic oligonucleotide
uggguggauguaacaagaa

SEQ ID NO: 1710043 - RNA, 19 nt, Artificial Sequence
  Description of Artificial Sequence: Synthetic oligonucleotide
uccucgucuaccacccuaa

SEQ ID NO: 1710044 - RNA, 19 nt, Artificial Sequence
  Description of Artificial Sequence: Synthetic oligonucleotide
  modified_base (2)..(2): a, c, u, g, unknown or other
gnguuucucgccagagacc

SEQ ID NO: 1710045 - RNA, 19 nt, Artificial Sequence
  Description of Artificial Sequence: Synthetic oligonucleotide
gguagggcacagcacgagg

SEQ ID NO: 1710046 - RNA, 19 nt, Artificial Sequence
  Description of Artificial Sequence: Synthetic oligonucleotide
acugaggucgcgagccgcc

SEQ ID NO: 1710047 - RNA, 19 nt, Artificial Sequence
  Description of Artificial Sequence: Synthetic oligonucleotide
ccagaaauucacagcaaug

SEQ ID NO: 1710048 - RNA, 19 nt, Artificial Sequence
  Description of Artificial Sequence: Synthetic oligonucleotide
ugagggaguccaccagcug

SEQ ID NO: 1710049 - RNA, 19 nt, Artificial Sequence
  Description of Artificial Sequence: Synthetic oligonucleotide
uggcucaugggcaggcgac

SEQ ID NO: 1710050 - RNA, 19 nt, Artificial Sequence
  Description of Artificial Sequence: Synthetic oligonucleotide
uacaaaccauaggggauga

SEQ ID NO: 1710051 - RNA, 19 nt, Artificial Sequence
  Description of Artificial Sequence: Synthetic oligonucleotide
acagccgcuguccuuugca

SEQ ID NO: 1710052 - RNA, 19 nt, Artificial Sequence
  Description of Artificial Sequence: Synthetic oligonucleotide
cacagcauccgcauaucca

SEQ ID NO: 1710053 - RNA, 19 nt, Artificial Sequence
  Description of Artificial Sequence: Synthetic oligonucleotide
ugggccugacccuccaaca

SEQ ID NO: 1710054 - RNA, 19 nt, Artificial Sequence
  Description of Artificial Sequence: Synthetic oligonucleotide
ucacuggguggauguaaca

SEQ ID NO: 1710055 - RNA, 19 nt, Artificial Sequence
  Description of Artificial Sequence: Synthetic oligonucleotide
augucauaccagaaauuca

SEQ ID NO: 1710056 - RNA, 19 nt, Artificial Sequence
  Description of Artificial Sequence: Synthetic oligonucleotide
agggccuauugggacacac

SEQ ID NO: 1710057 - RNA, 19 nt, Artificial Sequence
  Description of Artificial Sequence: Synthetic oligonucleotide
guaccugauccaugcuucc

SEQ ID NO: 1710058 - RNA, 19 nt, Artificial Sequence
  Description of Artificial Sequence: Synthetic oligonucleotide
augucugacagaagcugag

SEQ ID NO: 1710059 - RNA, 19 nt, Artificial Sequence
  Description of Artificial Sequence: Synthetic oligonucleotide
auguugguccacgucuauc

SEQ ID NO: 1710060 - RNA, 19 nt, Artificial Sequence
  Description of Artificial Sequence: Synthetic oligonucleotide
uauguugguccacgucuau

SEQ ID NO: 1710061 - RNA, 19 nt, Artificial Sequence
  Description of Artificial Sequence: Synthetic oligonucleotide
aaccaggcaacagccgcug

SEQ ID NO: 1710062 - RNA, 19 nt, Artificial Sequence
  Description of Artificial Sequence: Synthetic oligonucleotide
cagcacgagguacacugag

SEQ ID NO: 1710063 - RNA, 19 nt, Artificial Sequence
  Description of Artificial Sequence: Synthetic oligonucleotide
guaggauagggaccacuuc

SEQ ID NO: 1710064 - RNA, 19 nt, Artificial Sequence
  Description of Artificial Sequence: Synthetic oligonucleotide
cagggcauugcgaauaaua

SEQ ID NO: 1710065 - RNA, 19 nt, Artificial Sequence
  Description of Artificial Sequence: Synthetic oligonucleotide
accacccuaaaagugcccu

SEQ ID NO: 1710066 - RNA, 19 nt, Artificial Sequence
  Description of Artificial Sequence: Synthetic oligonucleotide
auggcucaugggcaggcga

SEQ ID NO: 1710067 - RNA, 19 nt, Artificial Sequence
  Description of Artificial Sequence: Synthetic oligonucleotide
augucaccgcagcugccuc

SEQ ID NO: 1710068 - RNA, 19 nt, Artificial Sequence
  Description of Artificial Sequence: Synthetic oligonucleotide
aguaggauagggaccacuu

SEQ ID NO: 1710069 - RNA, 19 nt, Artificial Sequence
  Description of Artificial Sequence: Synthetic oligonucleotide
ugggguagcggaccagguc

SEQ ID NO: 1710070 - RNA, 19 nt, Artificial Sequence
  Description of Artificial Sequence: Synthetic oligonucleotide
ucugcacauagaggacucc

SEQ ID NO: 1710071 - RNA, 19 nt, Artificial Sequence
  Description of Artificial Sequence: Synthetic oligonucleotide
agggcaccuuuuccauggc

SEQ ID NO: 1710072 - RNA, 19 nt, Artificial Sequence
  Description of Artificial Sequence: Synthetic oligonucleotide
acacugaggucgcgagccg

SEQ ID NO: 1710073 - RNA, 19 nt, Artificial Sequence
  Description of Artificial Sequence: Synthetic oligonucleotide
cccgguagaagcagagugg

SEQ ID NO: 1710074 - RNA, 19 nt, Artificial Sequence
  Description of Artificial Sequence: Synthetic oligonucleotide
ugcagggcauugcgaauaa

SEQ ID NO: 1710075 - RNA, 19 nt, Artificial Sequence
  Description of Artificial Sequence: Synthetic oligonucleotide
uaacuguacuugaggucau

SEQ ID NO: 1710076 - RNA, 19 nt, Artificial Sequence
  Description of Artificial Sequence: Synthetic oligonucleotide
guagguugcugguguguac

SEQ ID NO: 1710077 - RNA, 19 nt, Artificial Sequence
  Description of Artificial Sequence: Synthetic oligonucleotide
cuccguggagcccacuaug

SEQ ID NO: 1710078 - RNA, 19 nt, Artificial Sequence
  Description of Artificial Sequence: Synthetic oligonucleotide
uucucgccagagaccacac

SEQ ID NO: 1710079 - RNA, 19 nt, Artificial Sequence
  Description of Artificial Sequence: Synthetic oligonucleotide
ucgccugcccgaacugugc

SEQ ID NO: 1710080 - RNA, 19 nt, Artificial Sequence
  Description of Artificial Sequence: Synthetic oligonucleotide
uggaaccacauagcuggca

SEQ ID NO: 1710081 - RNA, 19 nt, Artificial Sequence
  Description of Artificial Sequence: Synthetic oligonucleotide
agcccuagugagggagucc

SEQ ID NO: 1710082 - RNA, 19 nt, Artificial Sequence
  Description of Artificial Sequence: Synthetic oligonucleotide
uuccuauguugguccacgu

SEQ ID NO: 1710083 - RNA, 19 nt, Artificial Sequence
  Description of Artificial Sequence: Synthetic oligonucleotide
acaguucgccugcccgaac

SEQ ID NO: 1710084 - RNA, 19 nt, Artificial Sequence
  Description of Artificial Sequence: Synthetic oligonucleotide
cauugcuguaccugaucca

SEQ ID NO: 1710085 - RNA, 19 nt, Artificial Sequence
  Description of Artificial Sequence: Synthetic oligonucleotide
aacaguucgccugcccgaa

SEQ ID NO: 1710086 - RNA, 19 nt, Artificial Sequence
  Description of Artificial Sequence: Synthetic oligonucleotide
ccaacaugcagugacucac

SEQ ID NO: 1710087 - RNA, 19 nt, Artificial Sequence
  Description of Artificial Sequence: Synthetic oligonucleotide
gaggucgcgagccgccgcc

SEQ ID NO: 1710088 - RNA, 19 nt, Artificial Sequence
  Description of Artificial Sequence: Synthetic oligonucleotide
agccgugggacugcuggac

SEQ ID NO: 1710089 - RNA, 19 nt, Artificial Sequence
  Description of Artificial Sequence: Synthetic oligonucleotide
gcuguaacugggguagcgg

SEQ ID NO: 1710090 - RNA, 19 nt, Artificial Sequence
  Description of Artificial Sequence: Synthetic oligonucleotide
ccaaaauuucuuuaaggcu

SEQ ID NO: 1710091 - RNA, 19 nt, Artificial Sequence
  Description of Artificial Sequence: Synthetic oligonucleotide
ugggcaggcgacguucagc

SEQ ID NO: 1710092 - RNA, 19 nt, Artificial Sequence
  Description of Artificial Sequence: Synthetic oligonucleotide
aaauuucuuuaaggcugau

SEQ ID NO: 1710093 - RNA, 19 nt, Artificial Sequence
  Description of Artificial Sequence: Synthetic oligonucleotide
cuccaugucauaccagaaa

SEQ ID NO: 1710094 - RNA, 19 nt, Artificial Sequence
  Description of Artificial Sequence: Synthetic oligonucleotide
cacaggaaccaggcaacag

SEQ ID NO: 1710095 - RNA, 19 nt, Artificial Sequence
  Description of Artificial Sequence: Synthetic oligonucleotide
aggaaccaggcaacagccg

SEQ ID NO: 1710096 - RNA, 19 nt, Artificial Sequence
  Description of Artificial Sequence: Synthetic oligonucleotide
gacacacccaaucccggua

SEQ ID NO: 1710097 - RNA, 19 nt, Artificial Sequence
  Description of Artificial Sequence: Synthetic oligonucleotide
cucuugcaacaccuuccgc

SEQ ID NO: 1710098 - RNA, 19 nt, Artificial Sequence
  Description of Artificial Sequence: Synthetic oligonucleotide
cuauggcucuuaaguagga

SEQ ID NO: 1710099 - RNA, 19 nt, Artificial Sequence
  Description of Artificial Sequence: Synthetic oligonucleotide
cacgagguacacugagguc

SEQ ID NO: 1710100 - RNA, 19 nt, Artificial Sequence
  Description of Artificial Sequence: Synthetic oligonucleotide
agacugaucccaacaugca

SEQ ID NO: 1710101 - RNA, 19 nt, Artificial Sequence
  Description of Artificial Sequence: Synthetic oligonucleotide
caggcaucacaaaccgguc

SEQ ID NO: 1710102 - RNA, 19 nt, Artificial Sequence
  Description of Artificial Sequence: Synthetic oligonucleotide
ugguagguugcuggugugu

SEQ ID NO: 1710103 - RNA, 19 nt, Artificial Sequence
  Description of Artificial Sequence: Synthetic oligonucleotide
ggagcacuguuucugcaca

SEQ ID NO: 1710104 - RNA, 19 nt, Artificial Sequence
  Description of Artificial Sequence: Synthetic oligonucleotide
caccuuuuccauggccucc

SEQ ID NO: 1710105 - RNA, 19 nt, Artificial Sequence
  Description of Artificial Sequence: Synthetic oligonucleotide
gccagaaguucacagcauc

SEQ ID NO: 1710106 - RNA, 19 nt, Artificial Sequence
  Description of Artificial Sequence: Synthetic oligonucleotide
uauccccaugacagcccug

SEQ ID NO: 1710107 - RNA, 19 nt, Artificial Sequence
  Description of Artificial Sequence: Synthetic oligonucleotide
aacugggguagcggaccag

SEQ ID NO: 1710108 - RNA, 19 nt, Artificial Sequence
  Description of Artificial Sequence: Synthetic oligonucleotide
agccgcuguccuuugcagu

SEQ ID NO: 1710109 - RNA, 19 nt, Artificial Sequence
  Description of Artificial Sequence: Synthetic oligonucleotide
guacccagcgccgccuccg

SEQ ID NO: 1710110 - RNA, 19 nt, Artificial Sequence
  Description of Artificial Sequence: Synthetic oligonucleotide
cuauguugguccacgucua

SEQ ID NO: 1710111 - RNA, 19 nt, Artificial Sequence
  Description of Artificial Sequence: Synthetic oligonucleotide
cacacucaccuccguggag

SEQ ID NO: 1710112 - RNA, 19 nt, Artificial Sequence
  Description of Artificial Sequence: Synthetic oligonucleotide
agcaggcaucacaaaccgg

SEQ ID NO: 1710113 - RNA, 19 nt, Artificial Sequence
  Description of Artificial Sequence: Synthetic oligonucleotide
agguagggcacagcacgag

SEQ ID NO: 1710114 - RNA, 19 nt, Artificial Sequence
  Description of Artificial Sequence: Synthetic oligonucleotide
gugcaaggaugucaccgca

SEQ ID NO: 1710115 - RNA, 19 nt, Artificial Sequence
  Description of Artificial Sequence: Synthetic oligonucleotide
auauccaucuggggucaca

SEQ ID NO: 1710116 - RNA, 19 nt, Artificial Sequence
  Description of Artificial Sequence: Synthetic oligonucleotide
ggcucuuaaguaggauagg

SEQ ID NO: 1710117 - RNA, 19 nt, Artificial Sequence
  Description of Artificial Sequence: Synthetic oligonucleotide
uccgcaccguacccagcgc

SEQ ID NO: 1710118 - RNA, 19 nt, Artificial Sequence
  Description of Artificial Sequence: Synthetic oligonucleotide
acucaccuccguggagccc

SEQ ID NO: 1710119 - RNA, 19 nt, Artificial Sequence
  Description of Artificial Sequence: Synthetic oligonucleotide
aggcaguucagugggcaga

SEQ ID NO: 1710120 - RNA, 19 nt, Artificial Sequence
  Description of Artificial Sequence: Synthetic oligonucleotide
uccccucgcacagcauccg

SEQ ID NO: 1710121 - RNA, 19 nt, Artificial Sequence
  Description of Artificial Sequence: Synthetic oligonucleotide
ccuauugggacacacccaa

SEQ ID NO: 1710122 - RNA, 19 nt, Artificial Sequence
  Description of Artificial Sequence: Synthetic oligonucleotide
cauagcuggcagguacaac

SEQ ID NO: 1710123 - RNA, 19 nt, Artificial Sequence
  Description of Artificial Sequence: Synthetic oligonucleotide
agguacacugaggucgcga

SEQ ID NO: 1710124 - RNA, 19 nt, Artificial Sequence
  Description of Artificial Sequence: Synthetic oligonucleotide
cauagugguccuugugcaa

SEQ ID NO: 1710125 - RNA, 19 nt, Artificial Sequence
  Description of Artificial Sequence: Synthetic oligonucleotide
cacccaaggucauagcacu

SEQ ID NO: 1710126 - RNA, 19 nt, Artificial Sequence
  Description of Artificial Sequence: Synthetic oligonucleotide
ucacagcaaugcagccgug

SEQ ID NO: 1710127 - RNA, 19 nt, Artificial Sequence
  Description of Artificial Sequence: Synthetic oligonucleotide
guccacgucuauccccaug

SEQ ID NO: 1710128 - RNA, 19 nt, Artificial Sequence
  Description of Artificial Sequence: Synthetic oligonucleotide
cgcauauccaucugggguc

SEQ ID NO: 1710129 - RNA, 19 nt, Artificial Sequence
  Description of Artificial Sequence: Synthetic oligonucleotide
ccuauguugguccacgucu

SEQ ID NO: 1710130 - RNA, 19 nt, Artificial Sequence
  Description of Artificial Sequence: Synthetic oligonucleotide
ggcagguacaacaguucgc

SEQ ID NO: 1710131 - RNA, 19 nt, Artificial Sequence
  Description of Artificial Sequence: Synthetic oligonucleotide
gcacagcauccgcauaucc

SEQ ID NO: 1710132 - RNA, 19 nt, Artificial Sequence
  Description of Artificial Sequence: Synthetic oligonucleotide
cugguaucuccuguuccuc

SEQ ID NO: 1710133 - RNA, 19 nt, Artificial Sequence
  Description of Artificial Sequence: Synthetic oligonucleotide
ugcccgaacugugcaguga

SEQ ID NO: 1710134 - RNA, 19 nt, Artificial Sequence
  Description of Artificial Sequence: Synthetic oligonucleotide
cugggugcugggccugacc

SEQ ID NO: 1710135 - RNA, 19 nt, Artificial Sequence
  Description of Artificial Sequence: Synthetic oligonucleotide
cacuggguggauguaacaa

SEQ ID NO: 1710136 - RNA, 19 nt, Artificial Sequence
  Description of Artificial Sequence: Synthetic oligonucleotide
cacugaggucgcgagccgc

SEQ ID NO: 1710137 - RNA, 19 nt, Artificial Sequence
  Description of Artificial Sequence: Synthetic oligonucleotide
gcgugugccaggcuguaac

SEQ ID NO: 1710138 - RNA, 19 nt, Artificial Sequence
  Description of Artificial Sequence: Synthetic oligonucleotide
guccccucgcacagcaucc

SEQ ID NO: 1710139 - RNA, 19 nt, Artificial Sequence
  Description of Artificial Sequence: Synthetic oligonucleotide
gggguagcggaccaggucu

SEQ ID NO: 1710140 - RNA, 19 nt, Artificial Sequence
  Description of Artificial Sequence: Synthetic oligonucleotide
caaucccgguagaagcaga

SEQ ID NO: 1710141 - RNA, 19 nt, Artificial Sequence
  Description of Artificial Sequence: Synthetic oligonucleotide
acacaggaaccaggcaaca

SEQ ID NO: 1710142 - RNA, 19 nt, Artificial Sequence
  Description of Artificial Sequence: Synthetic oligonucleotide
gucaccgcagcugccuccc

SEQ ID NO: 1710143 - RNA, 19 nt, Artificial Sequence
  Description of Artificial Sequence: Synthetic oligonucleotide
gaggcccagggcacauggg

SEQ ID NO: 1710144 - RNA, 19 nt, Artificial Sequence
  Description of Artificial Sequence: Synthetic oligonucleotide
cuuccgcaccguacccagc

SEQ ID NO: 1710145 - RNA, 19 nt, Artificial Sequence
  Description of Artificial Sequence: Synthetic oligonucleotide
aggcaacagccgcuguccu

SEQ ID NO: 1710146 - RNA, 19 nt, Artificial Sequence
  Description of Artificial Sequence: Synthetic oligonucleotide
accuccguggagcccacua

SEQ ID NO: 1710147 - RNA, 19 nt, Artificial Sequence
  Description of Artificial Sequence: Synthetic oligonucleotide
gcacgagguacacugaggu

SEQ ID NO: 1710148 - RNA, 19 nt, Artificial Sequence
  Description of Artificial Sequence: Synthetic oligonucleotide
gagaagcauugcuguaccu

SEQ ID NO: 1710149 - RNA, 19 nt, Artificial Sequence
  Description of Artificial Sequence: Synthetic oligonucleotide
cagugaagggcgugugcca

SEQ ID NO: 1710150 - RNA, 19 nt, Artificial Sequence
  Description of Artificial Sequence: Synthetic oligonucleotide
gcggaccaggucuggagcc

SEQ ID NO: 1710151 - RNA, 19 nt, Artificial Sequence
  Description of Artificial Sequence: Synthetic oligonucleotide
gcacaugggacuccauguc

SEQ ID NO: 1710152 - RNA, 19 nt, Artificial Sequence
  Description of Artificial Sequence: Synthetic oligonucleotide
gggacacacccaaucccgg

SEQ ID NO: 1710153 - RNA, 19 nt, Artificial Sequence
  Description of Artificial Sequence: Synthetic oligonucleotide
gacugcuuccuauguuggu

SEQ ID NO: 1710154 - RNA, 19 nt, Artificial Sequence
  Description of Artificial Sequence: Synthetic oligonucleotide
cacaugggacuccaugucu

SEQ ID NO: 1710155 - RNA, 19 nt, Artificial Sequence
  Description of Artificial Sequence: Synthetic oligonucleotide
cugaggucgcgagccgccg

SEQ ID NO: 1710156 - RNA, 19 nt, Artificial Sequence
  Description of Artificial Sequence: Synthetic oligonucleotide
acccuaaaagugcccucuu

SEQ ID NO: 1710157 - RNA, 19 nt, Artificial Sequence
  Description of Artificial Sequence: Synthetic oligonucleotide
caugggcaggcgacguuca

SEQ ID NO: 1710158 - RNA, 19 nt, Artificial Sequence
  Description of Artificial Sequence: Synthetic oligonucleotide
guagggcacagcacgaggu

SEQ ID NO: 1710159 - RNA, 19 nt, Artificial Sequence
  Description of Artificial Sequence: Synthetic oligonucleotide
gccgggaacucuugcaaca

SEQ ID NO: 1710160 - RNA, 19 nt, Artificial Sequence
  Description of Artificial Sequence: Synthetic oligonucleotide
acacccaaucccgguagaa

SEQ ID NO: 1710161 - RNA, 19 nt, Artificial Sequence
  Description of Artificial Sequence: Synthetic oligonucleotide
gggcaccuuuuccauggcc

SEQ ID NO: 1710162 - RNA, 19 nt, Artificial Sequence
  Description of Artificial Sequence: Synthetic oligonucleotide
caccuuuuauuugacugcu

SEQ ID NO: 1710163 - RNA, 19 nt, Artificial Sequence
  Description of Artificial Sequence: Synthetic oligonucleotide
caccguacccagcgccgcc

SEQ ID NO: 1710164 - RNA, 19 nt, Artificial Sequence
  Description of Artificial Sequence: Synthetic oligonucleotide
aucccgguagaagcagagu

SEQ ID NO: 1710165 - RNA, 19 nt, Artificial Sequence
  Description of Artificial Sequence: Synthetic oligonucleotide
gaaccaggcaacagccgcu

SEQ ID NO: 1710166 - RNA, 19 nt, Artificial Sequence
  Description of Artificial Sequence: Synthetic oligonucleotide
ggcucaugggcaggcgacg

SEQ ID NO: 1710167 - RNA, 19 nt, Artificial Sequence
  Description of Artificial Sequence: Synthetic oligonucleotide
ugcagccgugggacugcug

SEQ ID NO: 1710168 - RNA, 19 nt, Artificial Sequence
  Description of Artificial Sequence: Synthetic oligonucleotide
cagugacucagaggcccag

SEQ ID NO: 1710169 - RNA, 19 nt, Artificial Sequence
  Description of Artificial Sequence: Synthetic oligonucleotide
ggccugacccuccaacaca

SEQ ID NO: 1710170 - RNA, 19 nt, Artificial Sequence
  Description of Artificial Sequence: Synthetic oligonucleotide
agcccacuauggcucuuaa

SEQ ID NO: 1710171 - RNA, 19 nt, Artificial Sequence
  Description of Artificial Sequence: Synthetic oligonucleotide
acagcacgagguacacuga

SEQ ID NO: 1710172 - RNA, 19 nt, Artificial Sequence
  Description of Artificial Sequence: Synthetic oligonucleotide
gcauccgcauauccaucug

SEQ ID NO: 1710173 - RNA, 19 nt, Artificial Sequence
  Description of Artificial Sequence: Synthetic oligonucleotide
accgguccccucgcacagc

SEQ ID NO: 1710174 - RNA, 19 nt, Artificial Sequence
  Description of Artificial Sequence: Synthetic oligonucleotide
ccaaucccgguagaagcag

SEQ ID NO: 1710175 - RNA, 19 nt, Artificial Sequence
  Description of Artificial Sequence: Synthetic oligonucleotide
gguagcggaccaggucugg

SEQ ID NO: 1710176 - RNA, 19 nt, Artificial Sequence
  Description of Artificial Sequence: Synthetic oligonucleotide
cagugucugugaggguccc

SEQ ID NO: 1710177 - RNA, 19 nt, Artificial Sequence
  Description of Artificial Sequence: Synthetic oligonucleotide
accaggcaacagccgcugu

SEQ ID NO: 1710178 - RNA, 19 nt, Artificial Sequence
  Description of Artificial Sequence: Synthetic oligonucleotide
caacagccgcuguccuuug

SEQ ID NO: 1710179 - RNA, 19 nt, Artificial Sequence
  Description of Artificial Sequence: Synthetic oligonucleotide
ggcaccuuuuccauggccu

SEQ ID NO: 1710180 - RNA, 19 nt, Artificial Sequence
  Description of Artificial Sequence: Synthetic oligonucleotide
ugacucacccaaggucaua

SEQ ID NO: 1710181 - RNA, 19 nt, Artificial Sequence
  Description of Artificial Sequence: Synthetic oligonucleotide
caguagagauucucauagu

SEQ ID NO: 1710182 - RNA, 19 nt, Artificial Sequence
  Description of Artificial Sequence: Synthetic oligonucleotide
cccuaaaagugcccucuuc

SEQ ID NO: 1710183 - RNA, 19 nt, Artificial Sequence
  Description of Artificial Sequence: Synthetic oligonucleotide
gcgaauaauacagggccua

SEQ ID NO: 1710184 - RNA, 19 nt, Artificial Sequence
  Description of Artificial Sequence: Synthetic oligonucleotide
agucagcugguagguugcu

SEQ ID NO: 1710185 - RNA, 19 nt, Artificial Sequence
  Description of Artificial Sequence: Synthetic oligonucleotide
agccagaaguucacagcau

SEQ ID NO: 1710186 - RNA, 19 nt, Artificial Sequence
  Description of Artificial Sequence: Synthetic oligonucleotide
cugcagggcauugcgaaua

SEQ ID NO: 1710187 - RNA, 19 nt, Artificial Sequence
  Description of Artificial Sequence: Synthetic oligonucleotide
guagcggaccaggucugga

SEQ ID NO: 1710188 - RNA, 19 nt, Artificial Sequence
  Description of Artificial Sequence: Synthetic oligonucleotide
gcaucacaaaccggucccc

SEQ ID NO: 1710189 - RNA, 19 nt, Artificial Sequence
  Description of Artificial Sequence: Synthetic oligonucleotide
ccaggcaacagccgcuguc

SEQ ID NO: 1710190 - RNA, 19 nt, Artificial Sequence
  Description of Artificial Sequence: Synthetic oligonucleotide
acccucacccagaccuguc

SEQ ID NO: 1710191 - RNA, 19 nt, Artificial Sequence
  Description of Artificial Sequence: Synthetic oligonucleotide
cacccuaaaagugcccucu

SEQ ID NO: 1710192 - RNA, 19 nt, Artificial Sequence
  Description of Artificial Sequence: Synthetic oligonucleotide
cuccucgucuaccacccua

SEQ ID NO: 1710193 - RNA, 19 nt, Artificial Sequence
  Description of Artificial Sequence: Synthetic oligonucleotide
gggccuauugggacacacc

SEQ ID NO: 1710194 - RNA, 19 nt, Artificial Sequence
  Description of Artificial Sequence: Synthetic oligonucleotide
agggcgugugccaggcugu

SEQ ID NO: 1710195 - RNA, 19 nt, Artificial Sequence
  Description of Artificial Sequence: Synthetic oligonucleotide
gggagcuagagccauuauu

SEQ ID NO: 1710196 - RNA, 19 nt, Artificial Sequence
  Description of Artificial Sequence: Synthetic oligonucleotide
gcccuagugagggagucca

SEQ ID NO: 1710197 - RNA, 19 nt, Artificial Sequence
  Description of Artificial Sequence: Synthetic oligonucleotide
accguacccagcgccgccu

SEQ ID NO: 1710198 - RNA, 19 nt, Artificial Sequence
  Description of Artificial Sequence: Synthetic oligonucleotide
cauauccaucuggggucac

SEQ ID NO: 1710199 - RNA, 19 nt, Artificial Sequence
  Description of Artificial Sequence: Synthetic oligonucleotide
acaaaccauaggggaugaa

SEQ ID NO: 1710200 - RNA, 19 nt, Artificial Sequence
  Description of Artificial Sequence: Synthetic oligonucleotide
cugcacauagaggacuccu

SEQ ID NO: 1710201 - RNA, 19 nt, Artificial Sequence
  Description of Artificial Sequence: Synthetic oligonucleotide
gguagguugcuggugugua

SEQ ID NO: 1710202 - RNA, 19 nt, Artificial Sequence
  Description of Artificial Sequence: Synthetic oligonucleotide
gcuuccuugucaccugugu

SEQ ID NO: 1710203 - RNA, 19 nt, Artificial Sequence
  Description of Artificial Sequence: Synthetic oligonucleotide
caguucgccugcccgaacu

SEQ ID NO: 1710204 - RNA, 19 nt, Artificial Sequence
  Description of Artificial Sequence: Synthetic oligonucleotide
ggcagauuggagcacuguu

SEQ ID NO: 1710205 - RNA, 19 nt, Artificial Sequence
  Description of Artificial Sequence: Synthetic oligonucleotide
cgucuauccccaugacagc

SEQ ID NO: 1710206 - RNA, 19 nt, Artificial Sequence
  Description of Artificial Sequence: Synthetic oligonucleotide
cacacccaaucccgguaga

SEQ ID NO: 1710207 - RNA, 19 nt, Artificial Sequence
  Description of Artificial Sequence: Synthetic oligonucleotide
aggucgcgagccgccgccg

SEQ ID NO: 1710208 - RNA, 19 nt, Artificial Sequence
  Description of Artificial Sequence: Synthetic oligonucleotide
ggucacuggguggauguaa

SEQ ID NO: 1710209 - RNA, 19 nt, Artificial Sequence
  Description of Artificial Sequence: Synthetic oligonucleotide
cccaacaugcagugacuca

SEQ ID NO: 1710210 - RNA, 19 nt, Artificial Sequence
  Description of Artificial Sequence: Synthetic oligonucleotide
ccgcaccguacccagcgcc

SEQ ID NO: 1710211 - RNA, 19 nt, Artificial Sequence
  Description of Artificial Sequence: Synthetic oligonucleotide
gcccgaacugugcagugaa

SEQ ID NO: 1710212 - RNA, 19 nt, Artificial Sequence
  Description of Artificial Sequence: Synthetic oligonucleotide
cagaccugucugguaucuc

SEQ ID NO: 1710213 - RNA, 19 nt, Artificial Sequence
  Description of Artificial Sequence: Synthetic oligonucleotide
ccgcauauccaucuggggu

SEQ ID NO: 1710214 - RNA, 19 nt, Artificial Sequence
  Description of Artificial Sequence: Synthetic oligonucleotide
cccgaacugugcagugaag

SEQ ID NO: 1710215 - RNA, 19 nt, Artificial Sequence
  Description of Artificial Sequence: Synthetic oligonucleotide
guuucucgccagagaccac

SEQ ID NO: 1710216 - RNA, 19 nt, Artificial Sequence
  Description of Artificial Sequence: Synthetic oligonucleotide
ccgccaugacgcucgcggg

SEQ ID NO: 1710217 - RNA, 19 nt, Artificial Sequence
  Description of Artificial Sequence: Synthetic oligonucleotide
ccacccuaaaagugcccuc

SEQ ID NO: 1710218 - RNA, 19 nt, Artificial Sequence
  Description of Artificial Sequence: Synthetic oligonucleotide
cugucugguaucuccuguu

SEQ ID NO: 1710219 - RNA, 19 nt, Artificial Sequence
  Description of Artificial Sequence: Synthetic oligonucleotide
gccuauugggacacaccca

SEQ ID NO: 1710220 - RNA, 19 nt, Artificial Sequence
  Description of Artificial Sequence: Synthetic oligonucleotide
gagcccacuauggcucuua

SEQ ID NO: 1710221 - RNA, 19 nt, Artificial Sequence
  Description of Artificial Sequence: Synthetic oligonucleotide
cagguacaacaguucgccu

SEQ ID NO: 1710222 - RNA, 19 nt, Artificial Sequence
  Description of Artificial Sequence: Synthetic oligonucleotide
gcuuccuauguugguccac

SEQ ID NO: 1710223 - RNA, 19 nt, Artificial Sequence
  Description of Artificial Sequence: Synthetic oligonucleotide
caucacaaaccgguccccu

SEQ ID NO: 1710224 - RNA, 19 nt, Artificial Sequence
  Description of Artificial Sequence: Synthetic oligonucleotide
ggguagcggaccaggucug

SEQ ID NO: 1710225 - RNA, 19 nt, Artificial Sequence
  Description of Artificial Sequence: Synthetic oligonucleotide
cuauugggacacacccaau

SEQ ID NO: 1710226 - RNA, 19 nt, Artificial Sequence
  Description of Artificial Sequence: Synthetic oligonucleotide
ggacacacccaaucccggu

SEQ ID NO: 1710227 - RNA, 19 nt, Artificial Sequence
  Description of Artificial Sequence: Synthetic oligonucleotide
gcagauuggagcacuguuu

SEQ ID NO: 1710228 - RNA, 19 nt, Artificial Sequence
  Description of Artificial Sequence: Synthetic oligonucleotide
ggcgacguucagcaggcau

SEQ ID NO: 1710229 - RNA, 19 nt, Artificial Sequence
  Description of Artificial Sequence: Synthetic oligonucleotide
augcagccgugggacugcu

SEQ ID NO: 1710230 - RNA, 19 nt, Artificial Sequence
  Description of Artificial Sequence: Synthetic oligonucleotide
ccacacucaccuccgugga

SEQ ID NO: 1710231 - RNA, 19 nt, Artificial Sequence
  Description of Artificial Sequence: Synthetic oligonucleotide
gcaacagccgcuguccuuu

SEQ ID NO: 1710232 - RNA, 19 nt, Artificial Sequence
  Description of Artificial Sequence: Synthetic oligonucleotide
gggccggucacugggugga

SEQ ID NO: 1710233 - RNA, 19 nt, Artificial Sequence
  Description of Artificial Sequence: Synthetic oligonucleotide
gcaccguacccagcgccgc

SEQ ID NO: 1710234 - RNA, 19 nt, Artificial Sequence
  Description of Artificial Sequence: Synthetic oligonucleotide
cgucuaccacccuaaaagu

SEQ ID NO: 1710235 - RNA, 19 nt, Artificial Sequence
  Description of Artificial Sequence: Synthetic oligonucleotide
ggaugaagggccggucacu

SEQ ID NO: 1710236 - RNA, 19 nt, Artificial Sequence
  Description of Artificial Sequence: Synthetic oligonucleotide
gugacucacccaaggucau

SEQ ID NO: 1710237 - RNA, 19 nt, Artificial Sequence
  Description of Artificial Sequence: Synthetic oligonucleotide
gcacccucacccagaccug

SEQ ID NO: 1710238 - RNA, 19 nt, Artificial Sequence
  Description of Artificial Sequence: Synthetic oligonucleotide
cuguuccuccaacuauauu

SEQ ID NO: 1710239 - RNA, 19 nt, Artificial Sequence
  Description of Artificial Sequence: Synthetic oligonucleotide
cgacguucagcaggcauca

SEQ ID NO: 1710240 - RNA, 19 nt, Artificial Sequence
  Description of Artificial Sequence: Synthetic oligonucleotide
cugcagcccuagugaggga

SEQ ID NO: 1710241 - RNA, 19 nt, Artificial Sequence
  Description of Artificial Sequence: Synthetic oligonucleotide
ccggucacuggguggaugu

SEQ ID NO: 1710242 - RNA, 19 nt, Artificial Sequence
  Description of Artificial Sequence: Synthetic oligonucleotide
gcugcagggcauugcgaau

SEQ ID NO: 1710243 - RNA, 19 nt, Artificial Sequence
  Description of Artificial Sequence: Synthetic oligonucleotide
cguacccagcgccgccucc

SEQ ID NO: 1710244 - RNA, 19 nt, Artificial Sequence
  Description of Artificial Sequence: Synthetic oligonucleotide
ccgccgggaacucuugcaa

SEQ ID NO: 1710245 - RNA, 19 nt, Artificial Sequence
  Description of Artificial Sequence: Synthetic oligonucleotide
cgugggacugcuggacaug

SEQ ID NO: 1710246 - RNA, 19 nt, Artificial Sequence
  Description of Artificial Sequence: Synthetic oligonucleotide
cacccucacccagaccugu

SEQ ID NO: 1710247 - RNA, 19 nt, Artificial Sequence
  Description of Artificial Sequence: Synthetic oligonucleotide
aggcgacguucagcaggca

SEQ ID NO: 1710248 - RNA, 19 nt, Artificial Sequence
  Description of Artificial Sequence: Synthetic oligonucleotide
cucaugggcaggcgacguu

SEQ ID NO: 1710249 - RNA, 19 nt, Artificial Sequence
  Description of Artificial Sequence: Synthetic oligonucleotide
gcucaugggcaggcgacgu

SEQ ID NO: 1710250 - RNA, 19 nt, Artificial Sequence
  Description of Artificial Sequence: Synthetic oligonucleotide
gagccgccgccgggaacuc

SEQ ID NO: 1710251 - RNA, 19 nt, Artificial Sequence
  Description of Artificial Sequence: Synthetic oligonucleotide
cgcacagcauccgcauauc

SEQ ID NO: 1710252 - RNA, 19 nt, Artificial Sequence
  Description of Artificial Sequence: Synthetic oligonucleotide
cgccaugacgcucgcggga

SEQ ID NO: 1710253 - RNA, 19 nt, Artificial Sequence
  Description of Artificial Sequence: Synthetic oligonucleotide
gcgagccgccgccgggaac

SEQ ID NO: 1710254 - RNA, 19 nt, Artificial Sequence
  Description of Artificial Sequence: Synthetic oligonucleotide
ccguacccagcgccgccuc

SEQ ID NO: 1710255 - RNA, 19 nt, Artificial Sequence
  Description of Artificial Sequence: Synthetic oligonucleotide
ccucgucuaccacccuaaa

SEQ ID NO: 1710256 - RNA, 19 nt, Artificial Sequence
  Description of Artificial Sequence: Synthetic oligonucleotide
ggcgugugccaggcuguaa

SEQ ID NO: 1710257 - RNA, 19 nt, Artificial Sequence
  Description of Artificial Sequence: Synthetic oligonucleotide
ccgugggacugcuggacau

SEQ ID NO: 1710258 - RNA, 19 nt, Artificial Sequence
  Description of Artificial Sequence: Synthetic oligonucleotide
cgaauaauacagggccuau

SEQ ID NO: 1710259 - RNA, 19 nt, Artificial Sequence
  Description of Artificial Sequence: Synthetic oligonucleotide
ccuccguggagcccacuau

SEQ ID NO: 1710260 - RNA, 19 nt, Artificial Sequence
  Description of Artificial Sequence: Synthetic oligonucleotide
cgagccgccgccgggaacu

SEQ ID NO: 1710261 - RNA, 19 nt, Artificial Sequence
  Description of Artificial Sequence: Synthetic oligonucleotide
gggcgugugccaggcugua

SEQ ID NO: 1710262 - RNA, 19 nt, Artificial Sequence
  Description of Artificial Sequence: Synthetic oligonucleotide
gcagggcauugcgaauaau

SEQ ID NO: 1710263 - RNA, 19 nt, Artificial Sequence
  Description of Artificial Sequence: Synthetic oligonucleotide
cgccuccgccaugacgcuc

SEQ ID NO: 1710264 - RNA, 19 nt, Artificial Sequence
  Description of Artificial Sequence: Synthetic oligonucleotide
ggagcccacuauggcucuu

SEQ ID NO: 1710265 - RNA, 19 nt, Artificial Sequence
  Description of Artificial Sequence: Synthetic oligonucleotide
ccuccucgucuaccacccu

SEQ ID NO: 1710266 - RNA, 19 nt, Artificial Sequence
  Description of Artificial Sequence: Synthetic oligonucleotide
caccuccguggagcccacu

SEQ ID NO: 1710267 - RNA, 19 nt, Artificial Sequence
  Description of Artificial Sequence: Synthetic oligonucleotide
ccgccuccgccaugacgcu

SEQ ID NO: 1710268 - RNA, 19 nt, Artificial Sequence
  Description of Artificial Sequence: Synthetic oligonucleotide
cggucacuggguggaugua

SEQ ID NO: 1710269 - RNA, 19 nt, Artificial Sequence
  Description of Artificial Sequence: Synthetic oligonucleotide
ggccggucacuggguggau

SEQ ID NO: 1710270 - RNA, 19 nt, Artificial Sequence
  Description of Artificial Sequence: Synthetic oligonucleotide
  modified_base (1)..(1): a, c, u, g, unknown or other
nguuucucgccagagacca

SEQ ID NO: 1710271 - RNA, 19 nt, Artificial Sequence
  Description of Artificial Sequence: Synthetic oligonucleotide
acaccaauugucuucaacc

SEQ ID NO: 1710272 - RNA, 19 nt, Artificial Sequence
  Description of Artificial Sequence: Synthetic oligonucleotide
uucacuagugggcagauga

SEQ ID NO: 1710273 - RNA, 19 nt, Artificial Sequence
  Description of Artificial Sequence: Synthetic oligonucleotide
aaguacuucccguacauca

SEQ ID NO: 1710274 - RNA, 19 nt, Artificial Sequence
  Description of Artificial Sequence: Synthetic oligonucleotide
uuuggaaugggcagcggcg

SEQ ID NO: 1710275 - RNA, 19 nt, Artificial Sequence
  Description of Artificial Sequence: Synthetic oligonucleotide
aucauuuccaccugccucg

SEQ ID NO: 1710276 - RNA, 19 nt, Artificial Sequence
  Description of Artificial Sequence: Synthetic oligonucleotide
ugugggaccagcucggugg

SEQ ID NO: 1710277 - RNA, 19 nt, Artificial Sequence
  Description of Artificial Sequence: Synthetic oligonucleotide
uagaagacggcaucgaagc

SEQ ID NO: 1710278 - RNA, 19 nt, Artificial Sequence
  Description of Artificial Sequence: Synthetic oligonucleotide
uuuucguucaucugcaggu

SEQ ID NO: 1710279 - RNA, 19 nt, Artificial Sequence
  Description of Artificial Sequence: Synthetic oligonucleotide
agcgcgaagaugcaugggc

SEQ ID NO: 1710280 - RNA, 19 nt, Artificial Sequence
  Description of Artificial Sequence: Synthetic oligonucleotide
ucguacagcucuuugaucu

SEQ ID NO: 1710281 - RNA, 19 nt, Artificial Sequence
  Description of Artificial Sequence: Synthetic oligonucleotide
aauucgaucucaucugcgu

SEQ ID NO: 1710282 - RNA, 19 nt, Artificial Sequence
  Description of Artificial Sequence: Synthetic oligonucleotide
ggaaagguacaugagaugg

SEQ ID NO: 1710283 - RNA, 19 nt, Artificial Sequence
  Description of Artificial Sequence: Synthetic oligonucleotide
agguugaugggucugcagg

SEQ ID NO: 1710284 - RNA, 19 nt, Artificial Sequence
  Description of Artificial Sequence: Synthetic oligonucleotide
ugaucuucuugagagcucg

SEQ ID NO: 1710285 - RNA, 19 nt, Artificial Sequence
  Description of Artificial Sequence: Synthetic oligonucleotide
uugacaagugccuugcaga

SEQ ID NO: 1710286 - RNA, 19 nt, Artificial Sequence
  Description of Artificial Sequence: Synthetic oligonucleotide
uugccggggacccucaucg

SEQ ID NO: 1710287 - RNA, 19 nt, Artificial Sequence
  Description of Artificial Sequence: Synthetic oligonucleotide
gaucuuugacagcagcccg

SEQ ID NO: 1710288 - RNA, 19 nt, Artificial Sequence
  Description of Artificial Sequence: Synthetic oligonucleotide
uacaaugccacggaguagc

SEQ ID NO: 1710289 - RNA, 19 nt, Artificial Sequence
  Description of Artificial Sequence: Synthetic oligonucleotide
auucaaguacuucccguac

SEQ ID NO: 1710290 - RNA, 19 nt, Artificial Sequence
  Description of Artificial Sequence: Synthetic oligonucleotide
accugcacggcuuucacuc

SEQ ID NO: 1710291 - RNA, 19 nt, Artificial Sequence
  Description of Artificial Sequence: Synthetic oligonucleotide
ucacucaggaucuuugaca

SEQ ID NO: 1710292 - RNA, 19 nt, Artificial Sequence
  Description of Artificial Sequence: Synthetic oligonucleotide
ucggccaggaauucgaucu

SEQ ID NO: 1710293 - RNA, 19 nt, Artificial Sequence
  Description of Artificial Sequence: Synthetic oligonucleotide
uacaucacgggguagucca

SEQ ID NO: 1710294 - RNA, 19 nt, Artificial Sequence
  Description of Artificial Sequence: Synthetic oligonucleotide
aaagccgcaucuucacuag

SEQ ID NO: 1710295 - RNA, 19 nt, Artificial Sequence
  Description of Artificial Sequence: Synthetic oligonucleotide
aaagguacaugagaugggu

SEQ ID NO: 1710296 - RNA, 19 nt, Artificial Sequence
  Description of Artificial Sequence: Synthetic oligonucleotide
cuuuucguucaucugcagg

SEQ ID NO: 1710297 - RNA, 19 nt, Artificial Sequence
  Description of Artificial Sequence: Synthetic oligonucleotide
ugacaagugccuugcagag

SEQ ID NO: 1710298 - RNA, 19 nt, Artificial Sequence
  Description of Artificial Sequence: Synthetic oligonucleotide
gggcuugucacacacaggg

SEQ ID NO: 1710299 - RNA, 19 nt, Artificial Sequence
  Description of Artificial Sequence: Synthetic oligonucleotide
ucccaguccauucaaguac

SEQ ID NO: 1710300 - RNA, 19 nt, Artificial Sequence
  Description of Artificial Sequence: Synthetic oligonucleotide
cucacacucacucaggauc

SEQ ID NO: 1710301 - RNA, 19 nt, Artificial Sequence
  Description of Artificial Sequence: Synthetic oligonucleotide
augagggacacucguacuc

SEQ ID NO: 1710302 - RNA, 19 nt, Artificial Sequence
  Description of Artificial Sequence: Synthetic oligonucleotide
agguacaugagauggguga

SEQ ID NO: 1710303 - RNA, 19 nt, Artificial Sequence
  Description of Artificial Sequence: Synthetic oligonucleotide
gaugaugagcuguccagug

SEQ ID NO: 1710304 - RNA, 19 nt, Artificial Sequence
  Description of Artificial Sequence: Synthetic oligonucleotide
ggcaucgaagcacugaagg

SEQ ID NO: 1710305 - RNA, 19 nt, Artificial Sequence
  Description of Artificial Sequence: Synthetic oligonucleotide
accaauugucuucaaccuc

SEQ ID NO: 1710306 - RNA, 19 nt, Artificial Sequence
  Description of Artificial Sequence: Synthetic oligonucleotide
cuuggcauagcgugucucg

SEQ ID NO: 1710307 - RNA, 19 nt, Artificial Sequence
  Description of Artificial Sequence: Synthetic oligonucleotide
uacuucccguacaucacgg

SEQ ID NO: 1710308 - RNA, 19 nt, Artificial Sequence
  Description of Artificial Sequence: Synthetic oligonucleotide
cuugacaagugccuugcag

SEQ ID NO: 1710309 - RNA, 19 nt, Artificial Sequence
  Description of Artificial Sequence: Synthetic oligonucleotide
ugccggaccagguacaaug

SEQ ID NO: 1710310 - RNA, 19 nt, Artificial Sequence
  Description of Artificial Sequence: Synthetic oligonucleotide
uucaaguacuucccguaca

SEQ ID NO: 1710311 - RNA, 19 nt, Artificial Sequence
  Description of Artificial Sequence: Synthetic oligonucleotide
ggcuuaagggccuuagugg

SEQ ID NO: 1710312 - RNA, 19 nt, Artificial Sequence
  Description of Artificial Sequence: Synthetic oligonucleotide
gaaagguacaugagauggg

SEQ ID NO: 1710313 - RNA, 19 nt, Artificial Sequence
  Description of Artificial Sequence: Synthetic oligonucleotide
uucguucaucugcagguag

SEQ ID NO: 1710314 - RNA, 19 nt, Artificial Sequence
  Description of Artificial Sequence: Synthetic oligonucleotide
aagcacugaaggugugcac

SEQ ID NO: 1710315 - RNA, 19 nt, Artificial Sequence
  Description of Artificial Sequence: Synthetic oligonucleotide
aguugcggaucauuuccac

SEQ ID NO: 1710316 - RNA, 19 nt, Artificial Sequence
  Description of Artificial Sequence: Synthetic oligonucleotide
cuucccguacaucacgggg

SEQ ID NO: 1710317 - RNA, 19 nt, Artificial Sequence
  Description of Artificial Sequence: Synthetic oligonucleotide
ucuccgcacggauugggcg

SEQ ID NO: 1710318 - RNA, 19 nt, Artificial Sequence
  Description of Artificial Sequence: Synthetic oligonucleotide
gcugcagucaaacugcacc

SEQ ID NO: 1710319 - RNA, 19 nt, Artificial Sequence
  Description of Artificial Sequence: Synthetic oligonucleotide
gaauucgaucucaucugcg

SEQ ID NO: 1710320 - RNA, 19 nt, Artificial Sequence
  Description of Artificial Sequence: Synthetic oligonucleotide
gaugggugagguugauggg

SEQ ID NO: 1710321 - RNA, 19 nt, Artificial Sequence
  Description of Artificial Sequence: Synthetic oligonucleotide
guagaagacggcaucgaag

SEQ ID NO: 1710322 - RNA, 19 nt, Artificial Sequence
  Description of Artificial Sequence: Synthetic oligonucleotide
ggaguugcggaucauuucc

SEQ ID NO: 1710323 - RNA, 19 nt, Artificial Sequence
  Description of Artificial Sequence: Synthetic oligonucleotide
ggugucagcgcgaagaugc

SEQ ID NO: 1710324 - RNA, 19 nt, Artificial Sequence
  Description of Artificial Sequence: Synthetic oligonucleotide
acggcuuucacuccaggcu

SEQ ID NO: 1710325 - RNA, 19 nt, Artificial Sequence
  Description of Artificial Sequence: Synthetic oligonucleotide
caucgaagcacugaaggug

SEQ ID NO: 1710326 - RNA, 19 nt, Artificial Sequence
  Description of Artificial Sequence: Synthetic oligonucleotide
acuguccggaucuaggcga

SEQ ID NO: 1710327 - RNA, 19 nt, Artificial Sequence
  Description of Artificial Sequence: Synthetic oligonucleotide
cauagcgugucucguacag

SEQ ID NO: 1710328 - RNA, 19 nt, Artificial Sequence
  Description of Artificial Sequence: Synthetic oligonucleotide
ucugcguccucacacucac

SEQ ID NO: 1710329 - RNA, 19 nt, Artificial Sequence
  Description of Artificial Sequence: Synthetic oligonucleotide
agcucggugggcuucagca

SEQ ID NO: 1710330 - RNA, 19 nt, Artificial Sequence
  Description of Artificial Sequence: Synthetic oligonucleotide
cagugugagguccaccacg

SEQ ID NO: 1710331 - RNA, 19 nt, Artificial Sequence
  Description of Artificial Sequence: Synthetic oligonucleotide
gaagacggcaucgaagcac

SEQ ID NO: 1710332 - RNA, 19 nt, Artificial Sequence
  Description of Artificial Sequence: Synthetic oligonucleotide
aggaaagguacaugagaug

SEQ ID NO: 1710333 - RNA, 19 nt, Artificial Sequence
  Description of Artificial Sequence: Synthetic oligonucleotide
uucccguacaucacggggu

SEQ ID NO: 1710334 - RNA, 19 nt, Artificial Sequence
  Description of Artificial Sequence: Synthetic oligonucleotide
uuaagggccuuagugggca

SEQ ID NO: 1710335 - RNA, 19 nt, Artificial Sequence
  Description of Artificial Sequence: Synthetic oligonucleotide
uaggcugcgggcuugucac

SEQ ID NO: 1710336 - RNA, 19 nt, Artificial Sequence
  Description of Artificial Sequence: Synthetic oligonucleotide
gucugaggaggucagcugc

SEQ ID NO: 1710337 - RNA, 19 nt, Artificial Sequence
  Description of Artificial Sequence: Synthetic oligonucleotide
uccuguagcuucuccgugc

SEQ ID NO: 1710338 - RNA, 19 nt, Artificial Sequence
  Description of Artificial Sequence: Synthetic oligonucleotide
uacaugagaugggugaggu

SEQ ID NO: 1710339 - RNA, 19 nt, Artificial Sequence
  Description of Artificial Sequence: Synthetic oligonucleotide
cuuaagggccuuagugggc

SEQ ID NO: 1710340 - RNA, 19 nt, Artificial Sequence
  Description of Artificial Sequence: Synthetic oligonucleotide
gaaagccgcaucuucacua

SEQ ID NO: 1710341 - RNA, 19 nt, Artificial Sequence
  Description of Artificial Sequence: Synthetic oligonucleotide
acacucguacuccaguggu

SEQ ID NO: 1710342 - RNA, 19 nt, Artificial Sequence
  Description of Artificial Sequence: Synthetic oligonucleotide
ucucuggaguugcggauca

SEQ ID NO: 1710343 - RNA, 19 nt, Artificial Sequence
  Description of Artificial Sequence: Synthetic oligonucleotide
accacgucggcgccaggcc

SEQ ID NO: 1710344 - RNA, 19 nt, Artificial Sequence
  Description of Artificial Sequence: Synthetic oligonucleotide
ucguacuccagugguggcg

SEQ ID NO: 1710345 - RNA, 19 nt, Artificial Sequence
  Description of Artificial Sequence: Synthetic oligonucleotide
aucacgggguaguccacgg

SEQ ID NO: 1710346 - RNA, 19 nt, Artificial Sequence
  Description of Artificial Sequence: Synthetic oligonucleotide
augcuucacaccaauuguc

SEQ ID NO: 1710347 - RNA, 19 nt, Artificial Sequence
  Description of Artificial Sequence: Synthetic oligonucleotide
agaggugccgagaaccagg

SEQ ID NO: 1710348 - RNA, 19 nt, Artificial Sequence
  Description of Artificial Sequence: Synthetic oligonucleotide
gaugcaugggcgucuccug

SEQ ID NO: 1710349 - RNA, 19 nt, Artificial Sequence
  Description of Artificial Sequence: Synthetic oligonucleotide
ucuuuucguucaucugcag

SEQ ID NO: 1710350 - RNA, 19 nt, Artificial Sequence
  Description of Artificial Sequence: Synthetic oligonucleotide
ucauccucggaggaugaug

SEQ ID NO: 1710351 - RNA, 19 nt, Artificial Sequence
  Description of Artificial Sequence: Synthetic oligonucleotide
ggaauucgaucucaucugc

SEQ ID NO: 1710352 - RNA, 19 nt, Artificial Sequence
  Description of Artificial Sequence: Synthetic oligonucleotide
ucaucugcguccucacacu

SEQ ID NO: 1710353 - RNA, 19 nt, Artificial Sequence
  Description of Artificial Sequence: Synthetic oligonucleotide
cacuagugggcagaugagg

SEQ ID NO: 1710354 - RNA, 19 nt, Artificial Sequence
  Description of Artificial Sequence: Synthetic oligonucleotide
cacuguccggaucuaggcg

SEQ ID NO: 1710355 - RNA, 19 nt, Artificial Sequence
  Description of Artificial Sequence: Synthetic oligonucleotide
cacucacucaggaucuuug

SEQ ID NO: 1710356 - RNA, 19 nt, Artificial Sequence
  Description of Artificial Sequence: Synthetic oligonucleotide
gaagcacugaaggugugca

SEQ ID NO: 1710357 - RNA, 19 nt, Artificial Sequence
  Description of Artificial Sequence: Synthetic oligonucleotide
auaggcugcgggcuuguca

SEQ ID NO: 1710358 - RNA, 19 nt, Artificial Sequence
  Description of Artificial Sequence: Synthetic oligonucleotide
ccgagaaccaggauggggc

SEQ ID NO: 1710359 - RNA, 19 nt, Artificial Sequence
  Description of Artificial Sequence: Synthetic oligonucleotide
gaggccguuggcgucagag

SEQ ID NO: 1710360 - RNA, 19 nt, Artificial Sequence
  Description of Artificial Sequence: Synthetic oligonucleotide
cacggcuuucacuccaggc

SEQ ID NO: 1710361 - RNA, 19 nt, Artificial Sequence
  Description of Artificial Sequence: Synthetic oligonucleotide
uccggaucuaggcgaagcu

SEQ ID NO: 1710362 - RNA, 19 nt, Artificial Sequence
  Description of Artificial Sequence: Synthetic oligonucleotide
ucgucauccucggaggaug

SEQ ID NO: 1710363 - RNA, 19 nt, Artificial Sequence
  Description of Artificial Sequence: Synthetic oligonucleotide
ggaucuuugacagcagccc

SEQ ID NO: 1710364 - RNA, 19 nt, Artificial Sequence
  Description of Artificial Sequence: Synthetic oligonucleotide
aagguacaugagaugggug

SEQ ID NO: 1710365 - RNA, 19 nt, Artificial Sequence
  Description of Artificial Sequence: Synthetic oligonucleotide
ugggcagcggcgcuuugcc

SEQ ID NO: 1710366 - RNA, 19 nt, Artificial Sequence
  Description of Artificial Sequence: Synthetic oligonucleotide
aagugccuugcagagcucu

SEQ ID NO: 1710367 - RNA, 19 nt, Artificial Sequence
  Description of Artificial Sequence: Synthetic oligonucleotide
cagcccgucaaugaugagc

SEQ ID NO: 1710368 - RNA, 19 nt, Artificial Sequence
  Description of Artificial Sequence: Synthetic oligonucleotide
uccacggugggcccugaca

SEQ ID NO: 1710369 - RNA, 19 nt, Artificial Sequence
  Description of Artificial Sequence: Synthetic oligonucleotide
uucuccgcacggauugggc

SEQ ID NO: 1710370 - RNA, 19 nt, Artificial Sequence
  Description of Artificial Sequence: Synthetic oligonucleotide
guacaugagaugggugagg

SEQ ID NO: 1710371 - RNA, 19 nt, Artificial Sequence
  Description of Artificial Sequence: Synthetic oligonucleotide
agcucucuggaguugcgga

SEQ ID NO: 1710372 - RNA, 19 nt, Artificial Sequence
  Description of Artificial Sequence: Synthetic oligonucleotide
agggccucuuauccucagc

SEQ ID NO: 1710373 - RNA, 19 nt, Artificial Sequence
  Description of Artificial Sequence: Synthetic oligonucleotide
ugggugagguugauggguc

SEQ ID NO: 1710374 - RNA, 19 nt, Artificial Sequence
  Description of Artificial Sequence: Synthetic oligonucleotide
uggaguugcggaucauuuc

SEQ ID NO: 1710375 - RNA, 19 nt, Artificial Sequence
  Description of Artificial Sequence: Synthetic oligonucleotide
ucggaggaugaugagcugu

SEQ ID NO: 1710376 - RNA, 19 nt, Artificial Sequence
  Description of Artificial Sequence: Synthetic oligonucleotide
guuggcgucagaggugccg

SEQ ID NO: 1710377 - RNA, 19 nt, Artificial Sequence
  Description of Artificial Sequence: Synthetic oligonucleotide
cucugcacggcagggaacc

SEQ ID NO: 1710378 - RNA, 19 nt, Artificial Sequence
  Description of Artificial Sequence: Synthetic oligonucleotide
cagugaugcgguugguggc

SEQ ID NO: 1710379 - RNA, 19 nt, Artificial Sequence
  Description of Artificial Sequence: Synthetic oligonucleotide
acggcaucgaagcacugaa

SEQ ID NO: 1710380 - RNA, 19 nt, Artificial Sequence
  Description of Artificial Sequence: Synthetic oligonucleotide
augggcgucuccuguagcu

SEQ ID NO: 1710381 - RNA, 19 nt, Artificial Sequence
  Description of Artificial Sequence: Synthetic oligonucleotide
agcccgucaaugaugagcu

SEQ ID NO: 1710382 - RNA, 19 nt, Artificial Sequence
  Description of Artificial Sequence: Synthetic oligonucleotide
ugcggaucauuuccaccug

SEQ ID NO: 1710383 - RNA, 19 nt, Artificial Sequence
  Description of Artificial Sequence: Synthetic oligonucleotide
cacgggguaguccacggug

SEQ ID NO: 1710384 - RNA, 19 nt, Artificial Sequence
  Description of Artificial Sequence: Synthetic oligonucleotide
cucggugggcuucagcaac

SEQ ID NO: 1710385 - RNA, 19 nt, Artificial Sequence
  Description of Artificial Sequence: Synthetic oligonucleotide
uggucauaggcugcgggcu

SEQ ID NO: 1710386 - RNA, 19 nt, Artificial Sequence
  Description of Artificial Sequence: Synthetic oligonucleotide
cuccgcacggauugggcgc

SEQ ID NO: 1710387 - RNA, 19 nt, Artificial Sequence
  Description of Artificial Sequence: Synthetic oligonucleotide
gccucuuauccucagcacc

SEQ ID NO: 1710388 - RNA, 19 nt, Artificial Sequence
  Description of Artificial Sequence: Synthetic oligonucleotide
aggccguuggcgucagagg

SEQ ID NO: 1710389 - RNA, 19 nt, Artificial Sequence
  Description of Artificial Sequence: Synthetic oligonucleotide
acgccaggggugcuggagg

SEQ ID NO: 1710390 - RNA, 19 nt, Artificial Sequence
  Description of Artificial Sequence: Synthetic oligonucleotide
ugcacggcuuucacuccag

SEQ ID NO: 1710391 - RNA, 19 nt, Artificial Sequence
  Description of Artificial Sequence: Synthetic oligonucleotide
caucugcagguagaagacg

SEQ ID NO: 1710392 - RNA, 19 nt, Artificial Sequence
  Description of Artificial Sequence: Synthetic oligonucleotide
uucuccgugcucuguggga

SEQ ID NO: 1710393 - RNA, 19 nt, Artificial Sequence
  Description of Artificial Sequence: Synthetic oligonucleotide
agaagacggcaucgaagca

SEQ ID NO: 1710394 - RNA, 19 nt, Artificial Sequence
  Description of Artificial Sequence: Synthetic oligonucleotide
caauugucuucaaccucug

SEQ ID NO: 1710395 - RNA, 19 nt, Artificial Sequence
  Description of Artificial Sequence: Synthetic oligonucleotide
ucauuuccaccugccucgg

SEQ ID NO: 1710396 - RNA, 19 nt, Artificial Sequence
  Description of Artificial Sequence: Synthetic oligonucleotide
acggauugggcgccaggag

SEQ ID NO: 1710397 - RNA, 19 nt, Artificial Sequence
  Description of Artificial Sequence: Synthetic oligonucleotide
acggaguagcucuugccau

SEQ ID NO: 1710398 - RNA, 19 nt, Artificial Sequence
  Description of Artificial Sequence: Synthetic oligonucleotide
cacggaguagcucuugcca

SEQ ID NO: 1710399 - RNA, 19 nt, Artificial Sequence
  Description of Artificial Sequence: Synthetic oligonucleotide
ucucacuguccggaucuag

SEQ ID NO: 1710400 - RNA, 19 nt, Artificial Sequence
  Description of Artificial Sequence: Synthetic oligonucleotide
cagguacaaugccacggag

SEQ ID NO: 1710401 - RNA, 19 nt, Artificial Sequence
  Description of Artificial Sequence: Synthetic oligonucleotide
gguacaugagaugggugag

SEQ ID NO: 1710402 - RNA, 19 nt, Artificial Sequence
  Description of Artificial Sequence: Synthetic oligonucleotide
gcggaggaaagguacauga

SEQ ID NO: 1710403 - RNA, 19 nt, Artificial Sequence
  Description of Artificial Sequence: Synthetic oligonucleotide
cucggugucagcgcgaaga

SEQ ID NO: 1710404 - RNA, 19 nt, Artificial Sequence
  Description of Artificial Sequence: Synthetic oligonucleotide
gccgcaucuucacuagugg

SEQ ID NO: 1710405 - RNA, 19 nt, Artificial Sequence
  Description of Artificial Sequence: Synthetic oligonucleotide
agugugagguccaccacgu

SEQ ID NO: 1710406 - RNA, 19 nt, Artificial Sequence
  Description of Artificial Sequence: Synthetic oligonucleotide
guugaugggucugcagggc

SEQ ID NO: 1710407 - RNA, 19 nt, Artificial Sequence
  Description of Artificial Sequence: Synthetic oligonucleotide
ucgaagcacugaaggugug

SEQ ID NO: 1710408 - RNA, 19 nt, Artificial Sequence
  Description of Artificial Sequence: Synthetic oligonucleotide
gacaagugccuugcagagc

SEQ ID NO: 1710409 - RNA, 19 nt, Artificial Sequence
  Description of Artificial Sequence: Synthetic oligonucleotide
uccggcuuaagggccuuag

SEQ ID NO: 1710410 - RNA, 19 nt, Artificial Sequence
  Description of Artificial Sequence: Synthetic oligonucleotide
caucacgggguaguccacg

SEQ ID NO: 1710411 - RNA, 19 nt, Artificial Sequence
  Description of Artificial Sequence: Synthetic oligonucleotide
ugagguugaugggucugca

SEQ ID NO: 1710412 - RNA, 19 nt, Artificial Sequence
  Description of Artificial Sequence: Synthetic oligonucleotide
uucggccaggaauucgauc

SEQ ID NO: 1710413 - RNA, 19 nt, Artificial Sequence
  Description of Artificial Sequence: Synthetic oligonucleotide
cugccucggugucagcgcg

SEQ ID NO: 1710414 - RNA, 19 nt, Artificial Sequence
  Description of Artificial Sequence: Synthetic oligonucleotide
uggaaugggcagcggcgcu

SEQ ID NO: 1710415 - RNA, 19 nt, Artificial Sequence
  Description of Artificial Sequence: Synthetic oligonucleotide
ggcauagcgugucucguac

SEQ ID NO: 1710416 - RNA, 19 nt, Artificial Sequence
  Description of Artificial Sequence: Synthetic oligonucleotide
uuggcauagcgugucucgu

SEQ ID NO: 1710417 - RNA, 19 nt, Artificial Sequence
  Description of Artificial Sequence: Synthetic oligonucleotide
cuucuccgcacggauuggg

SEQ ID NO: 1710418 - RNA, 19 nt, Artificial Sequence
  Description of Artificial Sequence: Synthetic oligonucleotide
augcaugggcgucuccugu

SEQ ID NO: 1710419 - RNA, 19 nt, Artificial Sequence
  Description of Artificial Sequence: Synthetic oligonucleotide
caccuccggcuuaagggcc

SEQ ID NO: 1710420 - RNA, 19 nt, Artificial Sequence
  Description of Artificial Sequence: Synthetic oligonucleotide
ucucugcacggcagggaac

SEQ ID NO: 1710421 - RNA, 19 nt, Artificial Sequence
  Description of Artificial Sequence: Synthetic oligonucleotide
ucccguacaucacggggua

SEQ ID NO: 1710422 - RNA, 19 nt, Artificial Sequence
  Description of Artificial Sequence: Synthetic oligonucleotide
cccgucaaugaugagcugg

SEQ ID NO: 1710423 - RNA, 19 nt, Artificial Sequence
  Description of Artificial Sequence: Synthetic oligonucleotide
guacaucacgggguagucc

SEQ ID NO: 1710424 - RNA, 19 nt, Artificial Sequence
  Description of Artificial Sequence: Synthetic oligonucleotide
cuagugggcagaugaggga

SEQ ID NO: 1710425 - RNA, 19 nt, Artificial Sequence
  Description of Artificial Sequence: Synthetic oligonucleotide
agcgagcugcccacgcugc

SEQ ID NO: 1710426 - RNA, 19 nt, Artificial Sequence
  Description of Artificial Sequence: Synthetic oligonucleotide
ucuuggcauagcgugucuc

SEQ ID NO: 1710427 - RNA, 19 nt, Artificial Sequence
  Description of Artificial Sequence: Synthetic oligonucleotide
ucuggaguugcggaucauu

SEQ ID NO: 1710428 - RNA, 19 nt, Artificial Sequence
  Description of Artificial Sequence: Synthetic oligonucleotide
cucguacuccagugguggc

SEQ ID NO: 1710429 - RNA, 19 nt, Artificial Sequence
  Description of Artificial Sequence: Synthetic oligonucleotide
gaugagggacacucguacu

SEQ ID NO: 1710430 - RNA, 19 nt, Artificial Sequence
  Description of Artificial Sequence: Synthetic oligonucleotide
gcaccuccggcuuaagggc

SEQ ID NO: 1710431 - RNA, 19 nt, Artificial Sequence
  Description of Artificial Sequence: Synthetic oligonucleotide
cuuagugggcaggcguccc

SEQ ID NO: 1710432 - RNA, 19 nt, Artificial Sequence
  Description of Artificial Sequence: Synthetic oligonucleotide
uuucguucaucugcaggua

SEQ ID NO: 1710433 - RNA, 19 nt, Artificial Sequence
  Description of Artificial Sequence: Synthetic oligonucleotide
agccgcaucuucacuagug

SEQ ID NO: 1710434 - RNA, 19 nt, Artificial Sequence
  Description of Artificial Sequence: Synthetic oligonucleotide
guacaaugccacggaguag

SEQ ID NO: 1710435 - RNA, 19 nt, Artificial Sequence
  Description of Artificial Sequence: Synthetic oligonucleotide
ggauugggcgccaggagcc

SEQ ID NO: 1710436 - RNA, 19 nt, Artificial Sequence
  Description of Artificial Sequence: Synthetic oligonucleotide
aucuuugacagcagcccgu

SEQ ID NO: 1710437 - RNA, 19 nt, Artificial Sequence
  Description of Artificial Sequence: Synthetic oligonucleotide
caggccucccguucuccgg

SEQ ID NO: 1710438 - RNA, 19 nt, Artificial Sequence
  Description of Artificial Sequence: Synthetic oligonucleotide
caccaauugucuucaaccu

SEQ ID NO: 1710439 - RNA, 19 nt, Artificial Sequence
  Description of Artificial Sequence: Synthetic oligonucleotide
uagugggcaggcgucccag

SEQ ID NO: 1710440 - RNA, 19 nt, Artificial Sequence
  Description of Artificial Sequence: Synthetic oligonucleotide
auaguugccccaggugaca

SEQ ID NO: 1710441 - RNA, 19 nt, Artificial Sequence
  Description of Artificial Sequence: Synthetic oligonucleotide
gguggcggaggaaagguac

SEQ ID NO: 1710442 - RNA, 19 nt, Artificial Sequence
  Description of Artificial Sequence: Synthetic oligonucleotide
gaaggugugcacagcucuc

SEQ ID NO: 1710443 - RNA, 19 nt, Artificial Sequence
  Description of Artificial Sequence: Synthetic oligonucleotide
cagcugccggaccagguac

SEQ ID NO: 1710444 - RNA, 19 nt, Artificial Sequence
  Description of Artificial Sequence: Synthetic oligonucleotide
cugcgggcuugucacacac

SEQ ID NO: 1710445 - RNA, 19 nt, Artificial Sequence
  Description of Artificial Sequence: Synthetic oligonucleotide
gacggcaucgaagcacuga

SEQ ID NO: 1710446 - RNA, 19 nt, Artificial Sequence
  Description of Artificial Sequence: Synthetic oligonucleotide
ucuucacuagugggcagau

SEQ ID NO: 1710447 - RNA, 19 nt, Artificial Sequence
  Description of Artificial Sequence: Synthetic oligonucleotide
ucacgggguaguccacggu

SEQ ID NO: 1710448 - RNA, 19 nt, Artificial Sequence
  Description of Artificial Sequence: Synthetic oligonucleotide
guccggaucuaggcgaagc

SEQ ID NO: 1710449 - RNA, 19 nt, Artificial Sequence
  Description of Artificial Sequence: Synthetic oligonucleotide
caucugcguccucacacuc

SEQ ID NO: 1710450 - RNA, 19 nt, Artificial Sequence
  Description of Artificial Sequence: Synthetic oligonucleotide
cacgcugccucccacgcca

SEQ ID NO: 1710451 - RNA, 19 nt, Artificial Sequence
  Description of Artificial Sequence: Synthetic oligonucleotide
ggaaccgaaagccgcaucu

SEQ ID NO: 1710452 - RNA, 19 nt, Artificial Sequence
  Description of Artificial Sequence: Synthetic oligonucleotide
cucggggcugcagucaaac

SEQ ID NO: 1710453 - RNA, 19 nt, Artificial Sequence
  Description of Artificial Sequence: Synthetic oligonucleotide
gaagaugcaugggcgucuc

SEQ ID NO: 1710454 - RNA, 19 nt, Artificial Sequence
  Description of Artificial Sequence: Synthetic oligonucleotide
caggcgucccaguccauuc

SEQ ID NO: 1710455 - RNA, 19 nt, Artificial Sequence
  Description of Artificial Sequence: Synthetic oligonucleotide
ggggccguggcaccugugg

SEQ ID NO: 1710456 - RNA, 19 nt, Artificial Sequence
  Description of Artificial Sequence: Synthetic oligonucleotide
agguagaagacggcaucga

SEQ ID NO: 1710457 - RNA, 19 nt, Artificial Sequence
  Description of Artificial Sequence: Synthetic oligonucleotide
cucggcuccuucuccgcac

SEQ ID NO: 1710458 - RNA, 19 nt, Artificial Sequence
  Description of Artificial Sequence: Synthetic oligonucleotide
ccgcaucuucacuaguggg

SEQ ID NO: 1710459 - RNA, 19 nt, Artificial Sequence
  Description of Artificial Sequence: Synthetic oligonucleotide
uggcauagcgugucucgua

SEQ ID NO: 1710460 - RNA, 19 nt, Artificial Sequence
  Description of Artificial Sequence: Synthetic oligonucleotide
ugccucccacgccaggggu

SEQ ID NO: 1710461 - RNA, 19 nt, Artificial Sequence
  Description of Artificial Sequence: Synthetic oligonucleotide
ugcaugggcgucuccugua

SEQ ID NO: 1710462 - RNA, 19 nt, Artificial Sequence
  Description of Artificial Sequence: Synthetic oligonucleotide
ggaccagguacaaugccac

SEQ ID NO: 1710463 - RNA, 19 nt, Artificial Sequence
  Description of Artificial Sequence: Synthetic oligonucleotide
augagaugggugagguuga

SEQ ID NO: 1710464 - RNA, 19 nt, Artificial Sequence
  Description of Artificial Sequence: Synthetic oligonucleotide
ugagagcucggggcugcag

SEQ ID NO: 1710465 - RNA, 19 nt, Artificial Sequence
  Description of Artificial Sequence: Synthetic oligonucleotide
ccucuuauccucagcacca

SEQ ID NO: 1710466 - RNA, 19 nt, Artificial Sequence
  Description of Artificial Sequence: Synthetic oligonucleotide
ugcgggcuugucacacaca

SEQ ID NO: 1710467 - RNA, 19 nt, Artificial Sequence
  Description of Artificial Sequence: Synthetic oligonucleotide
cuccgugcucugugggacc

SEQ ID NO: 1710468 - RNA, 19 nt, Artificial Sequence
  Description of Artificial Sequence: Synthetic oligonucleotide
uugggcgccaggagccuuc

SEQ ID NO: 1710469 - RNA, 19 nt, Artificial Sequence
  Description of Artificial Sequence: Synthetic oligonucleotide
gcaucuucacuagugggca

SEQ ID NO: 1710470 - RNA, 19 nt, Artificial Sequence
  Description of Artificial Sequence: Synthetic oligonucleotide
uccgugcucugugggacca

SEQ ID NO: 1710471 - RNA, 19 nt, Artificial Sequence
  Description of Artificial Sequence: Synthetic oligonucleotide
cagggaaccgaaagccgca

SEQ ID NO: 1710472 - RNA, 19 nt, Artificial Sequence
  Description of Artificial Sequence: Synthetic oligonucleotide
ugguggcggaggaaaggua

SEQ ID NO: 1710473 - RNA, 19 nt, Artificial Sequence
  Description of Artificial Sequence: Synthetic oligonucleotide
aggcgucccaguccauuca

SEQ ID NO: 1710474 - RNA, 19 nt, Artificial Sequence
  Description of Artificial Sequence: Synthetic oligonucleotide
uccgcacggauugggcgcc

SEQ ID NO: 1710475 - RNA, 19 nt, Artificial Sequence
  Description of Artificial Sequence: Synthetic oligonucleotide
gcgcgaagaugcaugggcg

SEQ ID NO: 1710476 - RNA, 19 nt, Artificial Sequence
  Description of Artificial Sequence: Synthetic oligonucleotide
cucggaggaugaugagcug

SEQ ID NO: 1710477 - RNA, 19 nt, Artificial Sequence
  Description of Artificial Sequence: Synthetic oligonucleotide
ggagccuucggccaggaau

SEQ ID NO: 1710478 - RNA, 19 nt, Artificial Sequence
  Description of Artificial Sequence: Synthetic oligonucleotide
aguugccccaggugacagu

SEQ ID NO: 1710479 - RNA, 19 nt, Artificial Sequence
  Description of Artificial Sequence: Synthetic oligonucleotide
gccgagaaccaggaugggg

SEQ ID NO: 1710480 - RNA, 19 nt, Artificial Sequence
  Description of Artificial Sequence: Synthetic oligonucleotide
gccugcgccgcccagcgag

SEQ ID NO: 1710481 - RNA, 19 nt, Artificial Sequence
  Description of Artificial Sequence: Synthetic oligonucleotide
ucggggcugcagucaaacu

SEQ ID NO: 1710482 - RNA, 19 nt, Artificial Sequence
  Description of Artificial Sequence: Synthetic oligonucleotide
caccaggcgcaccuccggc

SEQ ID NO: 1710483 - RNA, 19 nt, Artificial Sequence
  Description of Artificial Sequence: Synthetic oligonucleotide
cugugggaccagcucggug

SEQ ID NO: 1710484 - RNA, 19 nt, Artificial Sequence
  Description of Artificial Sequence: Synthetic oligonucleotide
ugccgagaaccaggauggg

SEQ ID NO: 1710485 - RNA, 19 nt, Artificial Sequence
  Description of Artificial Sequence: Synthetic oligonucleotide
ugucagcgcgaagaugcau

SEQ ID NO: 1710486 - RNA, 19 nt, Artificial Sequence
  Description of Artificial Sequence: Synthetic oligonucleotide
ggugagguugaugggucug

SEQ ID NO: 1710487 - RNA, 19 nt, Artificial Sequence
  Description of Artificial Sequence: Synthetic oligonucleotide
gccggugggaggccguugg

SEQ ID NO: 1710488 - RNA, 19 nt, Artificial Sequence
  Description of Artificial Sequence: Synthetic oligonucleotide
gcggaucauuuccaccugc

SEQ ID NO: 1710489 - RNA, 19 nt, Artificial Sequence
  Description of Artificial Sequence: Synthetic oligonucleotide
agcgugucucguacagcuc

SEQ ID NO: 1710490 - RNA, 19 nt, Artificial Sequence
  Description of Artificial Sequence: Synthetic oligonucleotide
uucuccgggccgcccgcug

SEQ ID NO: 1710491 - RNA, 19 nt, Artificial Sequence
  Description of Artificial Sequence: Synthetic oligonucleotide
ccgaaagccgcaucuucac

SEQ ID NO: 1710492 - RNA, 19 nt, Artificial Sequence
  Description of Artificial Sequence: Synthetic oligonucleotide
aucgucauccucggaggau

SEQ ID NO: 1710493 - RNA, 19 nt, Artificial Sequence
  Description of Artificial Sequence: Synthetic oligonucleotide
cacggauugggcgccagga

SEQ ID NO: 1710494 - RNA, 19 nt, Artificial Sequence
  Description of Artificial Sequence: Synthetic oligonucleotide
uguccggaucuaggcgaag

SEQ ID NO: 1710495 - RNA, 19 nt, Artificial Sequence
  Description of Artificial Sequence: Synthetic oligonucleotide
gugggcaggcgucccaguc

SEQ ID NO: 1710496 - RNA, 19 nt, Artificial Sequence
  Description of Artificial Sequence: Synthetic oligonucleotide
cacgccaggggugcuggag

SEQ ID NO: 1710497 - RNA, 19 nt, Artificial Sequence
  Description of Artificial Sequence: Synthetic oligonucleotide
agugccuugcagagcucug

SEQ ID NO: 1710498 - RNA, 19 nt, Artificial Sequence
  Description of Artificial Sequence: Synthetic oligonucleotide
ugagaugggugagguugau

SEQ ID NO: 1710499 - RNA, 19 nt, Artificial Sequence
  Description of Artificial Sequence: Synthetic oligonucleotide
cagaugagggacacucgua

SEQ ID NO: 1710500 - RNA, 19 nt, Artificial Sequence
  Description of Artificial Sequence: Synthetic oligonucleotide
ggcgcuuugccggggaccc

SEQ ID NO: 1710501 - RNA, 19 nt, Artificial Sequence
  Description of Artificial Sequence: Synthetic oligonucleotide
ggcgaucucacuguccgga

SEQ ID NO: 1710502 - RNA, 19 nt, Artificial Sequence
  Description of Artificial Sequence: Synthetic oligonucleotide
ucggcgccaggccucccgu

SEQ ID NO: 1710503 - RNA, 19 nt, Artificial Sequence
  Description of Artificial Sequence: Synthetic oligonucleotide
ugccucggugucagcgcga

SEQ ID NO: 1710504 - RNA, 19 nt, Artificial Sequence
  Description of Artificial Sequence: Synthetic oligonucleotide
guccugggcauggagugca

SEQ ID NO: 1710505 - RNA, 19 nt, Artificial Sequence
  Description of Artificial Sequence: Synthetic oligonucleotide
gcgccaggagccuucggcc

SEQ ID NO: 1710506 - RNA, 19 nt, Artificial Sequence
  Description of Artificial Sequence: Synthetic oligonucleotide
cggaucauuuccaccugcc

SEQ ID NO: 1710507 - RNA, 19 nt, Artificial Sequence
  Description of Artificial Sequence: Synthetic oligonucleotide
gguugguggcggaggaaag

SEQ ID NO: 1710508 - RNA, 19 nt, Artificial Sequence
  Description of Artificial Sequence: Synthetic oligonucleotide
cacgucggcgccaggccuc

SEQ ID NO: 1710509 - RNA, 19 nt, Artificial Sequence
  Description of Artificial Sequence: Synthetic oligonucleotide
acgucggcgccaggccucc

SEQ ID NO: 1710510 - RNA, 19 nt, Artificial Sequence
  Description of Artificial Sequence: Synthetic oligonucleotide
cuucacuagugggcagaug

SEQ ID NO: 1710511 - RNA, 19 nt, Artificial Sequence
  Description of Artificial Sequence: Synthetic oligonucleotide
agugggcaggcgucccagu

SEQ ID NO: 1710512 - RNA, 19 nt, Artificial Sequence
  Description of Artificial Sequence: Synthetic oligonucleotide
ucugugggaccagcucggu

SEQ ID NO: 1710513 - RNA, 19 nt, Artificial Sequence
  Description of Artificial Sequence: Synthetic oligonucleotide
gcagaugagggacacucgu

SEQ ID NO: 1710514 - RNA, 19 nt, Artificial Sequence
  Description of Artificial Sequence: Synthetic oligonucleotide
cuggaguugcggaucauuu

SEQ ID NO: 1710515 - RNA, 19 nt, Artificial Sequence
  Description of Artificial Sequence: Synthetic oligonucleotide
gccacggaguagcucuugc

SEQ ID NO: 1710516 - RNA, 19 nt, Artificial Sequence
  Description of Artificial Sequence: Synthetic oligonucleotide
ugccacggaguagcucuug

SEQ ID NO: 1710517 - RNA, 19 nt, Artificial Sequence
  Description of Artificial Sequence: Synthetic oligonucleotide
agccuucggccaggaauuc

SEQ ID NO: 1710518 - RNA, 19 nt, Artificial Sequence
  Description of Artificial Sequence: Synthetic oligonucleotide
cugcacggcuuucacucca

SEQ ID NO: 1710519 - RNA, 19 nt, Artificial Sequence
  Description of Artificial Sequence: Synthetic oligonucleotide
cagcgcgaagaugcauggg

SEQ ID NO: 1710520 - RNA, 19 nt, Artificial Sequence
  Description of Artificial Sequence: Synthetic oligonucleotide
acaaugccacggaguagcu

SEQ ID NO: 1710521 - RNA, 19 nt, Artificial Sequence
  Description of Artificial Sequence: Synthetic oligonucleotide
cggaggaaagguacaugag

SEQ ID NO: 1710522 - RNA, 19 nt, Artificial Sequence
  Description of Artificial Sequence: Synthetic oligonucleotide
ggcgucagcaggcgggcac

SEQ ID NO: 1710523 - RNA, 19 nt, Artificial Sequence
  Description of Artificial Sequence: Synthetic oligonucleotide
cgagaaccaggauggggcc

SEQ ID NO: 1710524 - RNA, 19 nt, Artificial Sequence
  Description of Artificial Sequence: Synthetic oligonucleotide
ccguuggcgucagaggugc

SEQ ID NO: 1710525 - RNA, 19 nt, Artificial Sequence
  Description of Artificial Sequence: Synthetic oligonucleotide
gagccuucggccaggaauu

SEQ ID NO: 1710526 - RNA, 19 nt, Artificial Sequence
  Description of Artificial Sequence: Synthetic oligonucleotide
ggaucauuuccaccugccu

SEQ ID NO: 1710527 - RNA, 19 nt, Artificial Sequence
  Description of Artificial Sequence: Synthetic oligonucleotide
gcgcaccuccggcuuaagg

SEQ ID NO: 1710528 - RNA, 19 nt, Artificial Sequence
  Description of Artificial Sequence: Synthetic oligonucleotide
guggcggaggaaagguaca

SEQ ID NO: 1710529 - RNA, 19 nt, Artificial Sequence
  Description of Artificial Sequence: Synthetic oligonucleotide
caagugccuugcagagcuc

SEQ ID NO: 1710530 - RNA, 19 nt, Artificial Sequence
  Description of Artificial Sequence: Synthetic oligonucleotide
ccggaccagguacaaugcc

SEQ ID NO: 1710531 - RNA, 19 nt, Artificial Sequence
  Description of Artificial Sequence: Synthetic oligonucleotide
ccagguacaaugccacgga

SEQ ID NO: 1710532 - RNA, 19 nt, Artificial Sequence
  Description of Artificial Sequence: Synthetic oligonucleotide
ugggcgucuccuguagcuu

SEQ ID NO: 1710533 - RNA, 19 nt, Artificial Sequence
  Description of Artificial Sequence: Synthetic oligonucleotide
ggcggaggaaagguacaug

SEQ ID NO: 1710534 - RNA, 19 nt, Artificial Sequence
  Description of Artificial Sequence: Synthetic oligonucleotide
ccuuagugggcaggcgucc

SEQ ID NO: 1710535 - RNA, 19 nt, Artificial Sequence
  Description of Artificial Sequence: Synthetic oligonucleotide
gggcgucuccuguagcuuc

SEQ ID NO: 1710536 - RNA, 19 nt, Artificial Sequence
  Description of Artificial Sequence: Synthetic oligonucleotide
agcggcgcuuugccgggga

SEQ ID NO: 1710537 - RNA, 19 nt, Artificial Sequence
  Description of Artificial Sequence: Synthetic oligonucleotide
gcacggauugggcgccagg

SEQ ID NO: 1710538 - RNA, 19 nt, Artificial Sequence
  Description of Artificial Sequence: Synthetic oligonucleotide
ccugcacggcuuucacucc

SEQ ID NO: 1710539 - RNA, 19 nt, Artificial Sequence
  Description of Artificial Sequence: Synthetic oligonucleotide
cggcuuucacuccaggcug

SEQ ID NO: 1710540 - RNA, 19 nt, Artificial Sequence
  Description of Artificial Sequence: Synthetic oligonucleotide
gcgugucucguacagcucu

SEQ ID NO: 1710541 - RNA, 19 nt, Artificial Sequence
  Description of Artificial Sequence: Synthetic oligonucleotide
ggugggaggccguuggcgu

SEQ ID NO: 1710542 - RNA, 19 nt, Artificial Sequence
  Description of Artificial Sequence: Synthetic oligonucleotide
uugagagcucggggcugca

SEQ ID NO: 1710543 - RNA, 19 nt, Artificial Sequence
  Description of Artificial Sequence: Synthetic oligonucleotide
gccuucggccaggaauucg

SEQ ID NO: 1710544 - RNA, 19 nt, Artificial Sequence
  Description of Artificial Sequence: Synthetic oligonucleotide
ugccggggacccucaucgu

SEQ ID NO: 1710545 - RNA, 19 nt, Artificial Sequence
  Description of Artificial Sequence: Synthetic oligonucleotide
gggcagcggcgcuuugccg

SEQ ID NO: 1710546 - RNA, 19 nt, Artificial Sequence
  Description of Artificial Sequence: Synthetic oligonucleotide
agcugccggaccagguaca

SEQ ID NO: 1710547 - RNA, 19 nt, Artificial Sequence
  Description of Artificial Sequence: Synthetic oligonucleotide
gcgaagaugcaugggcguc

SEQ ID NO: 1710548 - RNA, 19 nt, Artificial Sequence
  Description of Artificial Sequence: Synthetic oligonucleotide
ccauucaaguacuucccgu

SEQ ID NO: 1710549 - RNA, 19 nt, Artificial Sequence
  Description of Artificial Sequence: Synthetic oligonucleotide
gcauagcgugucucguaca

SEQ ID NO: 1710550 - RNA, 19 nt, Artificial Sequence
  Description of Artificial Sequence: Synthetic oligonucleotide
ggccuuagugggcaggcgu

SEQ ID NO: 1710551 - RNA, 19 nt, Artificial Sequence
  Description of Artificial Sequence: Synthetic oligonucleotide
ggaugaugagcuguccagu

SEQ ID NO: 1710552 - RNA, 19 nt, Artificial Sequence
  Description of Artificial Sequence: Synthetic oligonucleotide
caaugaugagcuggucaua

SEQ ID NO: 1710553 - RNA, 19 nt, Artificial Sequence
  Description of Artificial Sequence: Synthetic oligonucleotide
cggaccagguacaaugcca

SEQ ID NO: 1710554 - RNA, 19 nt, Artificial Sequence
  Description of Artificial Sequence: Synthetic oligonucleotide
accuccggcuuaagggccu

SEQ ID NO: 1710555 - RNA, 19 nt, Artificial Sequence
  Description of Artificial Sequence: Synthetic oligonucleotide
gggacacucguacuccagu

SEQ ID NO: 1710556 - RNA, 19 nt, Artificial Sequence
  Description of Artificial Sequence: Synthetic oligonucleotide
aggcugcgggcuugucaca

SEQ ID NO: 1710557 - RNA, 19 nt, Artificial Sequence
  Description of Artificial Sequence: Synthetic oligonucleotide
cuaggcgaagcuucuccuu

SEQ ID NO: 1710558 - RNA, 19 nt, Artificial Sequence
  Description of Artificial Sequence: Synthetic oligonucleotide
caggggaguccugggcaug

SEQ ID NO: 1710559 - RNA, 19 nt, Artificial Sequence
  Description of Artificial Sequence: Synthetic oligonucleotide
ggccaggaauucgaucuca

SEQ ID NO: 1710560 - RNA, 19 nt, Artificial Sequence
  Description of Artificial Sequence: Synthetic oligonucleotide
gcguccucacacucacuca

SEQ ID NO: 1710561 - RNA, 19 nt, Artificial Sequence
  Description of Artificial Sequence: Synthetic oligonucleotide
gugucagcgcgaagaugca

SEQ ID NO: 1710562 - RNA, 19 nt, Artificial Sequence
  Description of Artificial Sequence: Synthetic oligonucleotide
gaaccgaaagccgcaucuu

SEQ ID NO: 1710563 - RNA, 19 nt, Artificial Sequence
  Description of Artificial Sequence: Synthetic oligonucleotide
ccggggacccucaucguca

SEQ ID NO: 1710564 - RNA, 19 nt, Artificial Sequence
  Description of Artificial Sequence: Synthetic oligonucleotide
ggcugcgggcuugucacac

SEQ ID NO: 1710565 - RNA, 19 nt, Artificial Sequence
  Description of Artificial Sequence: Synthetic oligonucleotide
uggaggccggugggaggcc

SEQ ID NO: 1710566 - RNA, 19 nt, Artificial Sequence
  Description of Artificial Sequence: Synthetic oligonucleotide
ccguucuccgggccgcccg

SEQ ID NO: 1710567 - RNA, 19 nt, Artificial Sequence
  Description of Artificial Sequence: Synthetic oligonucleotide
cugcacggcagggaaccga

SEQ ID NO: 1710568 - RNA, 19 nt, Artificial Sequence
  Description of Artificial Sequence: Synthetic oligonucleotide
gccuuagugggcaggcguc

SEQ ID NO: 1710569 - RNA, 19 nt, Artificial Sequence
  Description of Artificial Sequence: Synthetic oligonucleotide
gggccuuagugggcaggcg

SEQ ID NO: 1710570 - RNA, 19 nt, Artificial Sequence
  Description of Artificial Sequence: Synthetic oligonucleotide
gccguuggcgucagaggug

SEQ ID NO: 1710571 - RNA, 19 nt, Artificial Sequence
  Description of Artificial Sequence: Synthetic oligonucleotide
cugccccugccccgcugcc

SEQ ID NO: 1710572 - RNA, 19 nt, Artificial Sequence
  Description of Artificial Sequence: Synthetic oligonucleotide
ccucccacgccaggggugc

SEQ ID NO: 1710573 - RNA, 19 nt, Artificial Sequence
  Description of Artificial Sequence: Synthetic oligonucleotide
ggcgucccaguccauucaa

SEQ ID NO: 1710574 - RNA, 19 nt, Artificial Sequence
  Description of Artificial Sequence: Synthetic oligonucleotide
agacggcaucgaagcacug

SEQ ID NO: 1710575 - RNA, 19 nt, Artificial Sequence
  Description of Artificial Sequence: Synthetic oligonucleotide
auugggcgccaggagccuu

SEQ ID NO: 1710576 - RNA, 19 nt, Artificial Sequence
  Description of Artificial Sequence: Synthetic oligonucleotide
cauaggcugcgggcuuguc

SEQ ID NO: 1710577 - RNA, 19 nt, Artificial Sequence
  Description of Artificial Sequence: Synthetic oligonucleotide
cccagcgagcugcccacgc

SEQ ID NO: 1710578 - RNA, 19 nt, Artificial Sequence
  Description of Artificial Sequence: Synthetic oligonucleotide
gauugggcgccaggagccu

SEQ ID NO: 1710579 - RNA, 19 nt, Artificial Sequence
  Description of Artificial Sequence: Synthetic oligonucleotide
aggagccuucggccaggaa

SEQ ID NO: 1710580 - RNA, 19 nt, Artificial Sequence
  Description of Artificial Sequence: Synthetic oligonucleotide
ggaucuaggcgaagcuucu

SEQ ID NO: 1710581 - RNA, 19 nt, Artificial Sequence
  Description of Artificial Sequence: Synthetic oligonucleotide
gcgucccaguccauucaag

SEQ ID NO: 1710582 - RNA, 19 nt, Artificial Sequence
  Description of Artificial Sequence: Synthetic oligonucleotide
ccuucuccgcacggauugg

SEQ ID NO: 1710583 - RNA, 19 nt, Artificial Sequence
  Description of Artificial Sequence: Synthetic oligonucleotide
cgggguaguccacgguggg

SEQ ID NO: 1710584 - RNA, 19 nt, Artificial Sequence
  Description of Artificial Sequence: Synthetic oligonucleotide
gcugccugcgccgcccagc

SEQ ID NO: 1710585 - RNA, 19 nt, Artificial Sequence
  Description of Artificial Sequence: Synthetic oligonucleotide
augggucugcagggccucu

SEQ ID NO: 1710586 - RNA, 19 nt, Artificial Sequence
  Description of Artificial Sequence: Synthetic oligonucleotide
gcgucagcaggcgggcacc

SEQ ID NO: 1710587 - RNA, 19 nt, Artificial Sequence
  Description of Artificial Sequence: Synthetic oligonucleotide
guccacggugggcccugac

SEQ ID NO: 1710588 - RNA, 19 nt, Artificial Sequence
  Description of Artificial Sequence: Synthetic oligonucleotide
cccacgccaggggugcugg

SEQ ID NO: 1710589 - RNA, 19 nt, Artificial Sequence
  Description of Artificial Sequence: Synthetic oligonucleotide
ggcgucagaggugccgaga

SEQ ID NO: 1710590 - RNA, 19 nt, Artificial Sequence
  Description of Artificial Sequence: Synthetic oligonucleotide
gcagcccgucaaugaugag

SEQ ID NO: 1710591 - RNA, 19 nt, Artificial Sequence
  Description of Artificial Sequence: Synthetic oligonucleotide
caccugcacggcuuucacu

SEQ ID NO: 1710592 - RNA, 19 nt, Artificial Sequence
  Description of Artificial Sequence: Synthetic oligonucleotide
cuucggccaggaauucgau

SEQ ID NO: 1710593 - RNA, 19 nt, Artificial Sequence
  Description of Artificial Sequence: Synthetic oligonucleotide
cggugggaggccguuggcg

SEQ ID NO: 1710594 - RNA, 19 nt, Artificial Sequence
  Description of Artificial Sequence: Synthetic oligonucleotide
aggcgcaccuccggcuuaa

SEQ ID NO: 1710595 - RNA, 19 nt, Artificial Sequence
  Description of Artificial Sequence: Synthetic oligonucleotide
ccugcgccgcccagcgagc

SEQ ID NO: 1710596 - RNA, 19 nt, Artificial Sequence
  Description of Artificial Sequence: Synthetic oligonucleotide
gggugagguugaugggucu

SEQ ID NO: 1710597 - RNA, 19 nt, Artificial Sequence
  Description of Artificial Sequence: Synthetic oligonucleotide
gcucucugcacggcaggga

SEQ ID NO: 1710598 - RNA, 19 nt, Artificial Sequence
  Description of Artificial Sequence: Synthetic oligonucleotide
guaguccacggugggcccu

SEQ ID NO: 1710599 - RNA, 19 nt, Artificial Sequence
  Description of Artificial Sequence: Synthetic oligonucleotide
gcccgucaaugaugagcug

SEQ ID NO: 1710600 - RNA, 19 nt, Artificial Sequence
  Description of Artificial Sequence: Synthetic oligonucleotide
cgucagaggugccgagaac

SEQ ID NO: 1710601 - RNA, 19 nt, Artificial Sequence
  Description of Artificial Sequence: Synthetic oligonucleotide
gccucccacgccaggggug

SEQ ID NO: 1710602 - RNA, 19 nt, Artificial Sequence
  Description of Artificial Sequence: Synthetic oligonucleotide
cguacuccagugguggcga

SEQ ID NO: 1710603 - RNA, 19 nt, Artificial Sequence
  Description of Artificial Sequence: Synthetic oligonucleotide
acgcugccucccacgccag

SEQ ID NO: 1710604 - RNA, 19 nt, Artificial Sequence
  Description of Artificial Sequence: Synthetic oligonucleotide
cuccuucuccgcacggauu

SEQ ID NO: 1710605 - RNA, 19 nt, Artificial Sequence
  Description of Artificial Sequence: Synthetic oligonucleotide
gccaggccucccguucucc

SEQ ID NO: 1710606 - RNA, 19 nt, Artificial Sequence
  Description of Artificial Sequence: Synthetic oligonucleotide
cagcggcgcuuugccgggg

SEQ ID NO: 1710607 - RNA, 19 nt, Artificial Sequence
  Description of Artificial Sequence: Synthetic oligonucleotide
augccacggaguagcucuu

SEQ ID NO: 1710608 - RNA, 19 nt, Artificial Sequence
  Description of Artificial Sequence: Synthetic oligonucleotide
ccuugacaagugccuugca

SEQ ID NO: 1710609 - RNA, 19 nt, Artificial Sequence
  Description of Artificial Sequence: Synthetic oligonucleotide
gccccaggugacagugaug

SEQ ID NO: 1710610 - RNA, 19 nt, Artificial Sequence
  Description of Artificial Sequence: Synthetic oligonucleotide
cccguacaucacgggguag

SEQ ID NO: 1710611 - RNA, 19 nt, Artificial Sequence
  Description of Artificial Sequence: Synthetic oligonucleotide
cguucuccgggccgcccgc

SEQ ID NO: 1710612 - RNA, 19 nt, Artificial Sequence
  Description of Artificial Sequence: Synthetic oligonucleotide
cgucauccucggaggauga

SEQ ID NO: 1710613 - RNA, 19 nt, Artificial Sequence
  Description of Artificial Sequence: Synthetic oligonucleotide
gcugccggaccagguacaa

SEQ ID NO: 1710614 - RNA, 19 nt, Artificial Sequence
  Description of Artificial Sequence: Synthetic oligonucleotide
gcggcgcuuugccggggac

SEQ ID NO: 1710615 - RNA, 19 nt, Artificial Sequence
  Description of Artificial Sequence: Synthetic oligonucleotide
guacuccagugguggcgau

SEQ ID NO: 1710616 - RNA, 19 nt, Artificial Sequence
  Description of Artificial Sequence: Synthetic oligonucleotide
ccguacaucacgggguagu

SEQ ID NO: 1710617 - RNA, 19 nt, Artificial Sequence
  Description of Artificial Sequence: Synthetic oligonucleotide
caggcgcaccuccggcuua

SEQ ID NO: 1710618 - RNA, 19 nt, Artificial Sequence
  Description of Artificial Sequence: Synthetic oligonucleotide
gugucucguacagcucuuu

SEQ ID NO: 1710619 - RNA, 19 nt, Artificial Sequence
  Description of Artificial Sequence: Synthetic oligonucleotide
cggaguagcucuugccaua

SEQ ID NO: 1710620 - RNA, 19 nt, Artificial Sequence
  Description of Artificial Sequence: Synthetic oligonucleotide
gcgaucucacuguccggau

SEQ ID NO: 1710621 - RNA, 19 nt, Artificial Sequence
  Description of Artificial Sequence: Synthetic oligonucleotide
ccucggugucagcgcgaag

SEQ ID NO: 1710622 - RNA, 19 nt, Artificial Sequence
  Description of Artificial Sequence: Synthetic oligonucleotide
gcuuugccggggacccuca

SEQ ID NO: 1710623 - RNA, 19 nt, Artificial Sequence
  Description of Artificial Sequence: Synthetic oligonucleotide
ccucacacucacucaggau

SEQ ID NO: 1710624 - RNA, 19 nt, Artificial Sequence
  Description of Artificial Sequence: Synthetic oligonucleotide
ggggacccucaucgucauc

SEQ ID NO: 1710625 - RNA, 19 nt, Artificial Sequence
  Description of Artificial Sequence: Synthetic oligonucleotide
gggcccugacaggggaguc

SEQ ID NO: 1710626 - RNA, 19 nt, Artificial Sequence
  Description of Artificial Sequence: Synthetic oligonucleotide
ggccggugggaggccguug

SEQ ID NO: 1710627 - RNA, 19 nt, Artificial Sequence
  Description of Artificial Sequence: Synthetic oligonucleotide
gccucggugucagcgcgaa

SEQ ID NO: 1710628 - RNA, 19 nt, Artificial Sequence
  Description of Artificial Sequence: Synthetic oligonucleotide
ggaaugggcagcggcgcuu

SEQ ID NO: 1710629 - RNA, 19 nt, Artificial Sequence
  Description of Artificial Sequence: Synthetic oligonucleotide
cggcgcuuugccggggacc

SEQ ID NO: 1710630 - RNA, 19 nt, Artificial Sequence
  Description of Artificial Sequence: Synthetic oligonucleotide
cguuggcgucagaggugcc

SEQ ID NO: 1710631 - RNA, 19 nt, Artificial Sequence
  Description of Artificial Sequence: Synthetic oligonucleotide
cugcguccucacacucacu

SEQ ID NO: 1710632 - RNA, 19 nt, Artificial Sequence
  Description of Artificial Sequence: Synthetic oligonucleotide
cggugucagcgcgaagaug

SEQ ID NO: 1710633 - RNA, 19 nt, Artificial Sequence
  Description of Artificial Sequence: Synthetic oligonucleotide
cccugccccgcugccugcg

SEQ ID NO: 1710634 - RNA, 19 nt, Artificial Sequence
  Description of Artificial Sequence: Synthetic oligonucleotide
cgcgaagaugcaugggcgu

SEQ ID NO: 1710635 - RNA, 19 nt, Artificial Sequence
  Description of Artificial Sequence: Synthetic oligonucleotide
cuuugccggggacccucau

SEQ ID NO: 1710636 - RNA, 19 nt, Artificial Sequence
  Description of Artificial Sequence: Synthetic oligonucleotide
ggcgcaccuccggcuuaag

SEQ ID NO: 1710637 - RNA, 19 nt, Artificial Sequence
  Description of Artificial Sequence: Synthetic oligonucleotide
ggggaguccugggcaugga

SEQ ID NO: 1710638 - RNA, 19 nt, Artificial Sequence
  Description of Artificial Sequence: Synthetic oligonucleotide
guucuccgggccgcccgcu

SEQ ID NO: 1710639 - RNA, 19 nt, Artificial Sequence
  Description of Artificial Sequence: Synthetic oligonucleotide
ccggcuuaagggccuuagu

SEQ ID NO: 1710640 - RNA, 19 nt, Artificial Sequence
  Description of Artificial Sequence: Synthetic oligonucleotide
ccgugcucugugggaccag

SEQ ID NO: 1710641 - RNA, 19 nt, Artificial Sequence
  Description of Artificial Sequence: Synthetic oligonucleotide
gcgguugguggcggaggaa

SEQ ID NO: 1710642 - RNA, 19 nt, Artificial Sequence
  Description of Artificial Sequence: Synthetic oligonucleotide
gcaggcgucccaguccauu

SEQ ID NO: 1710643 - RNA, 19 nt, Artificial Sequence
  Description of Artificial Sequence: Synthetic oligonucleotide
ccacgucggcgccaggccu

SEQ ID NO: 1710644 - RNA, 19 nt, Artificial Sequence
  Description of Artificial Sequence: Synthetic oligonucleotide
cuccggcuuaagggccuua

SEQ ID NO: 1710645 - RNA, 19 nt, Artificial Sequence
  Description of Artificial Sequence: Synthetic oligonucleotide
cgcacggauugggcgccag

SEQ ID NO: 1710646 - RNA, 19 nt, Artificial Sequence
  Description of Artificial Sequence: Synthetic oligonucleotide
cucuggaguugcggaucau

SEQ ID NO: 1710647 - RNA, 19 nt, Artificial Sequence
  Description of Artificial Sequence: Synthetic oligonucleotide
ggaggccguuggcgucaga

SEQ ID NO: 1710648 - RNA, 19 nt, Artificial Sequence
  Description of Artificial Sequence: Synthetic oligonucleotide
gcacggcagggaaccgaaa

SEQ ID NO: 1710649 - RNA, 19 nt, Artificial Sequence
  Description of Artificial Sequence: Synthetic oligonucleotide
ccggaucuaggcgaagcuu

SEQ ID NO: 1710650 - RNA, 19 nt, Artificial Sequence
  Description of Artificial Sequence: Synthetic oligonucleotide
cugccggaccagguacaau

SEQ ID NO: 1710651 - RNA, 19 nt, Artificial Sequence
  Description of Artificial Sequence: Synthetic oligonucleotide
cugcgccgcccagcgagcu

SEQ ID NO: 1710652 - RNA, 19 nt, Artificial Sequence
  Description of Artificial Sequence: Synthetic oligonucleotide
gcucggggcugcagucaaa

SEQ ID NO: 1710653 - RNA, 19 nt, Artificial Sequence
  Description of Artificial Sequence: Synthetic oligonucleotide
ccacgccaggggugcugga

SEQ ID NO: 1710654 - RNA, 19 nt, Artificial Sequence
  Description of Artificial Sequence: Synthetic oligonucleotide
cgccgcccagcgagcugcc

SEQ ID NO: 1710655 - RNA, 19 nt, Artificial Sequence
  Description of Artificial Sequence: Synthetic oligonucleotide
cgugucucguacagcucuu

SEQ ID NO: 1710656 - RNA, 19 nt, Artificial Sequence
  Description of Artificial Sequence: Synthetic oligonucleotide
cucccacgccaggggugcu

SEQ ID NO: 1710657 - RNA, 19 nt, Artificial Sequence
  Description of Artificial Sequence: Synthetic oligonucleotide
ccgcugccugcgccgccca

SEQ ID NO: 1710658 - RNA, 19 nt, Artificial Sequence
  Description of Artificial Sequence: Synthetic oligonucleotide
cggggacccucaucgucau

SEQ ID NO: 1710659 - RNA, 19 nt, Artificial Sequence
  Description of Artificial Sequence: Synthetic oligonucleotide
gcgcuuugccggggacccu

SEQ ID NO: 1710660 - RNA, 19 nt, Artificial Sequence
  Description of Artificial Sequence: Synthetic oligonucleotide
ccgcacggauugggcgcca

SEQ ID NO: 1710661 - RNA, 19 nt, Artificial Sequence
  Description of Artificial Sequence: Synthetic oligonucleotide
ggcaggcgucccaguccau

SEQ ID NO: 1710662 - RNA, 19 nt, Artificial Sequence
  Description of Artificial Sequence: Synthetic oligonucleotide
cggcgucagcaggcgggca

SEQ ID NO: 1710663 - RNA, 19 nt, Artificial Sequence
  Description of Artificial Sequence: Synthetic oligonucleotide
cgggccgcccgcugccccu

SEQ ID NO: 1710664 - RNA, 19 nt, Artificial Sequence
  Description of Artificial Sequence: Synthetic oligonucleotide
cggcgccaggccucccguu

SEQ ID NO: 1710665 - RNA, 19 nt, Artificial Sequence
  Description of Artificial Sequence: Synthetic oligonucleotide
aauuaucuuagcuaaaggc

SEQ ID NO: 1710666 - RNA, 19 nt, Artificial Sequence
  Description of Artificial Sequence: Synthetic oligonucleotide
uauaaaauuaucuacuugg

SEQ ID NO: 1710667 - RNA, 19 nt, Artificial Sequence
  Description of Artificial Sequence: Synthetic oligonucleotide
augauuuuaauguagaugg

SEQ ID NO: 1710668 - RNA, 19 nt, Artificial Sequence
  Description of Artificial Sequence: Synthetic oligonucleotide
ucugguuacuuucaaaugg

SEQ ID NO: 1710669 - RNA, 19 nt, Artificial Sequence
  Description of Artificial Sequence: Synthetic oligonucleotide
acagagaagacuuggauac

SEQ ID NO: 1710670 - RNA, 19 nt, Artificial Sequence
  Description of Artificial Sequence: Synthetic oligonucleotide
aaaagaacgaccagcauac

SEQ ID NO: 1710671 - RNA, 19 nt, Artificial Sequence
  Description of Artificial Sequence: Synthetic oligonucleotide
ugaaauaagacuuugcuua

SEQ ID NO: 1710672 - RNA, 19 nt, Artificial Sequence
  Description of Artificial Sequence: Synthetic oligonucleotide
aacuuauuaucuuuagguc

SEQ ID NO: 1710673 - RNA, 19 nt, Artificial Sequence
  Description of Artificial Sequence: Synthetic oligonucleotide
uuuacuugcuccaucauca

SEQ ID NO: 1710674 - RNA, 19 nt, Artificial Sequence
  Description of Artificial Sequence: Synthetic oligonucleotide
uuauuaggcauuuugguug

SEQ ID NO: 1710675 - RNA, 19 nt, Artificial Sequence
  Description of Artificial Sequence: Synthetic oligonucleotide
uuuuaauguagauggaucc

SEQ ID NO: 1710676 - RNA, 19 nt, Artificial Sequence
  Description of Artificial Sequence: Synthetic oligonucleotide
aauauauccaccaauuaug

SEQ ID NO: 1710677 - RNA, 19 nt, Artificial Sequence
  Description of Artificial Sequence: Synthetic oligonucleotide
auauauacuccucaagaac

SEQ ID NO: 1710678 - RNA, 19 nt, Artificial Sequence
  Description of Artificial Sequence: Synthetic oligonucleotide
uauggaguuaccauguugc

SEQ ID NO: 1710679 - RNA, 19 nt, Artificial Sequence
  Description of Artificial Sequence: Synthetic oligonucleotide
uuaucuuagcuaaaggcag

SEQ ID NO: 1710680 - RNA, 19 nt, Artificial Sequence
  Description of Artificial Sequence: Synthetic oligonucleotide
uauauacuccucaagaacu

SEQ ID NO: 1710681 - RNA, 19 nt, Artificial Sequence
  Description of Artificial Sequence: Synthetic oligonucleotide
aauuauguuuaacuggacu

SEQ ID NO: 1710682 - RNA, 19 nt, Artificial Sequence
  Description of Artificial Sequence: Synthetic oligonucleotide
aagaaagucauuucuccag

SEQ ID NO: 1710683 - RNA, 19 nt, Artificial Sequence
  Description of Artificial Sequence: Synthetic oligonucleotide
aagaaggagaccuaugcug

SEQ ID NO: 1710684 - RNA, 19 nt, Artificial Sequence
  Description of Artificial Sequence: Synthetic oligonucleotide
uauccagguaaauauaucc

SEQ ID NO: 1710685 - RNA, 19 nt, Artificial Sequence
  Description of Artificial Sequence: Synthetic oligonucleotide
aaagcuguuagacucucag

SEQ ID NO: 1710686 - RNA, 19 nt, Artificial Sequence
  Description of Artificial Sequence: Synthetic oligonucleotide
ucuaguagccgacugaagc

SEQ ID NO: 1710687 - RNA, 19 nt, Artificial Sequence
  Description of Artificial Sequence: Synthetic oligonucleotide
uggacagacuauuuuaugg

SEQ ID NO: 1710688 - RNA, 19 nt, Artificial Sequence
  Description of Artificial Sequence: Synthetic oligonucleotide
uguugcauuauccagguaa

SEQ ID NO: 1710689 - RNA, 19 nt, Artificial Sequence
  Description of Artificial Sequence: Synthetic oligonucleotide
uguauuggcacagagaaga

SEQ ID NO: 1710690 - RNA, 19 nt, Artificial Sequence
  Description of Artificial Sequence: Synthetic oligonucleotide
uuuggaucagcuauccagg

SEQ ID NO: 1710691 - RNA, 19 nt, Artificial Sequence
  Description of Artificial Sequence: Synthetic oligonucleotide
aagaacgaccagcauacac

SEQ ID NO: 1710692 - RNA, 19 nt, Artificial Sequence
  Description of Artificial Sequence: Synthetic oligonucleotide
ugaaucuacuucauuauga

SEQ ID NO: 1710693 - RNA, 19 nt, Artificial Sequence
  Description of Artificial Sequence: Synthetic oligonucleotide
auuaaagccucucuuagug

SEQ ID NO: 1710694 - RNA, 19 nt, Artificial Sequence
  Description of Artificial Sequence: Synthetic oligonucleotide
ugcuccaaguccaaaaggg

SEQ ID NO: 1710695 - RNA, 19 nt, Artificial Sequence
  Description of Artificial Sequence: Synthetic oligonucleotide
acgaccagcauacacgugc

SEQ ID NO: 1710696 - RNA, 19 nt, Artificial Sequence
  Description of Artificial Sequence: Synthetic oligonucleotide
auuaucuuuagguccuccc

SEQ ID NO: 1710697 - RNA, 19 nt, Artificial Sequence
  Description of Artificial Sequence: Synthetic oligonucleotide
aagaauucuaauuucuuuu

SEQ ID NO: 1710698 - RNA, 19 nt, Artificial Sequence
  Description of Artificial Sequence: Synthetic oligonucleotide
auuuuauggaguuaccaug

SEQ ID NO: 1710699 - RNA, 19 nt, Artificial Sequence
  Description of Artificial Sequence: Synthetic oligonucleotide
guuuggaucagcuauccag

SEQ ID NO: 1710700 - RNA, 19 nt, Artificial Sequence
  Description of Artificial Sequence: Synthetic oligonucleotide
uugagaaguuuaauagugg

SEQ ID NO: 1710701 - RNA, 19 nt, Artificial Sequence
  Description of Artificial Sequence: Synthetic oligonucleotide
auuacauguauguauaaaa

SEQ ID NO: 1710702 - RNA, 19 nt, Artificial Sequence
  Description of Artificial Sequence: Synthetic oligonucleotide
uuauguuuaacuggacucg

SEQ ID NO: 1710703 - RNA, 19 nt, Artificial Sequence
  Description of Artificial Sequence: Synthetic oligonucleotide
uuagauacaccugaugaag

SEQ ID NO: 1710704 - RNA, 19 nt, Artificial Sequence
  Description of Artificial Sequence: Synthetic oligonucleotide
uuuuauggaguuaccaugu

SEQ ID NO: 1710705 - RNA, 19 nt, Artificial Sequence
  Description of Artificial Sequence: Synthetic oligonucleotide
uaagagaaacacuuccuag

SEQ ID NO: 1710706 - RNA, 19 nt, Artificial Sequence
  Description of Artificial Sequence: Synthetic oligonucleotide
acaauaaggugccaaauga

SEQ ID NO: 1710707 - RNA, 19 nt, Artificial Sequence
  Description of Artificial Sequence: Synthetic oligonucleotide
uccacaagaauucuaauuu

SEQ ID NO: 1710708 - RNA, 19 nt, Artificial Sequence
  Description of Artificial Sequence: Synthetic oligonucleotide
uuaucaauccaagaaggag

SEQ ID NO: 1710709 - RNA, 19 nt, Artificial Sequence
  Description of Artificial Sequence: Synthetic oligonucleotide
ucaaaugguacugucgccg

SEQ ID NO: 1710710 - RNA, 19 nt, Artificial Sequence
  Description of Artificial Sequence: Synthetic oligonucleotide
cuuaguguuggcagcaugg

SEQ ID NO: 1710711 - RNA, 19 nt, Artificial Sequence
  Description of Artificial Sequence: Synthetic oligonucleotide
aagcccauaggccugagcu

SEQ ID NO: 1710712 - RNA, 19 nt, Artificial Sequence
  Description of Artificial Sequence: Synthetic oligonucleotide
uuaugaaauaagacuuugc

SEQ ID NO: 1710713 - RNA, 19 nt, Artificial Sequence
  Description of Artificial Sequence: Synthetic oligonucleotide
uguuuaaacagguauucaa

SEQ ID NO: 1710714 - RNA, 19 nt, Artificial Sequence
  Description of Artificial Sequence: Synthetic oligonucleotide
auauccaccaauuauguuu

SEQ ID NO: 1710715 - RNA, 19 nt, Artificial Sequence
  Description of Artificial Sequence: Synthetic oligonucleotide
gguacuaaaagcuucguac

SEQ ID NO: 1710716 - RNA, 19 nt, Artificial Sequence
  Description of Artificial Sequence: Synthetic oligonucleotide
cuggacucgcaaaagaacg

SEQ ID NO: 1710717 - RNA, 19 nt, Artificial Sequence
  Description of Artificial Sequence: Synthetic oligonucleotide
uaugggaauuaucuuagcu

SEQ ID NO: 1710718 - RNA, 19 nt, Artificial Sequence
  Description of Artificial Sequence: Synthetic oligonucleotide
ucuugucucauugagaagu

SEQ ID NO: 1710719 - RNA, 19 nt, Artificial Sequence
  Description of Artificial Sequence: Synthetic oligonucleotide
auacacgugcuauauacag

SEQ ID NO: 1710720 - RNA, 19 nt, Artificial Sequence
  Description of Artificial Sequence: Synthetic oligonucleotide
ucucuugucucauugagaa

SEQ ID NO: 1710721 - RNA, 19 nt, Artificial Sequence
  Description of Artificial Sequence: Synthetic oligonucleotide
uaaggugccaaaugaaucu

SEQ ID NO: 1710722 - RNA, 19 nt, Artificial Sequence
  Description of Artificial Sequence: Synthetic oligonucleotide
aaugguacugucgccgagc

SEQ ID NO: 1710723 - RNA, 19 nt, Artificial Sequence
  Description of Artificial Sequence: Synthetic oligonucleotide
uuagcuaaaggcaggcuga

SEQ ID NO: 1710724 - RNA, 19 nt, Artificial Sequence
  Description of Artificial Sequence: Synthetic oligonucleotide
aagacuuggauacaucuuu

SEQ ID NO: 1710725 - RNA, 19 nt, Artificial Sequence
  Description of Artificial Sequence: Synthetic oligonucleotide
uuuagguccucccauauuu

SEQ ID NO: 1710726 - RNA, 19 nt, Artificial Sequence
  Description of Artificial Sequence: Synthetic oligonucleotide
uaagacuuugcuuaagaau

SEQ ID NO: 1710727 - RNA, 19 nt, Artificial Sequence
  Description of Artificial Sequence: Synthetic oligonucleotide
ugggaauuaucuuagcuaa

SEQ ID NO: 1710728 - RNA, 19 nt, Artificial Sequence
  Description of Artificial Sequence: Synthetic oligonucleotide
uauuuuauggaguuaccau

SEQ ID NO: 1710729 - RNA, 19 nt, Artificial Sequence
  Description of Artificial Sequence: Synthetic oligonucleotide
acgugcuauauacagcuac

SEQ ID NO: 1710730 - RNA, 19 nt, Artificial Sequence
  Description of Artificial Sequence: Synthetic oligonucleotide
uuuauuaggcauuuugguu

SEQ ID NO: 1710731 - RNA, 19 nt, Artificial Sequence
  Description of Artificial Sequence: Synthetic oligonucleotide
uguccguuuacuaugggaa

SEQ ID NO: 1710732 - RNA, 19 nt, Artificial Sequence
  Description of Artificial Sequence: Synthetic oligonucleotide
aucuacuugguuuggauca

SEQ ID NO: 1710733 - RNA, 19 nt, Artificial Sequence
  Description of Artificial Sequence: Synthetic oligonucleotide
agaaguuuaauagugguaa

SEQ ID NO: 1710734 - RNA, 19 nt, Artificial Sequence
  Description of Artificial Sequence: Synthetic oligonucleotide
cuucguacacguuagcagc

SEQ ID NO: 1710735 - RNA, 19 nt, Artificial Sequence
  Description of Artificial Sequence: Synthetic oligonucleotide
agguauucaaaacuguacu

SEQ ID NO: 1710736 - RNA, 19 nt, Artificial Sequence
  Description of Artificial Sequence: Synthetic oligonucleotide
aaacuguacuaaaaucugg

SEQ ID NO: 1710737 - RNA, 19 nt, Artificial Sequence
  Description of Artificial Sequence: Synthetic oligonucleotide
uaauguagauggauccuag

SEQ ID NO: 1710738 - RNA, 19 nt, Artificial Sequence
  Description of Artificial Sequence: Synthetic oligonucleotide
uuauggaguuaccauguug

SEQ ID NO: 1710739 - RNA, 19 nt, Artificial Sequence
  Description of Artificial Sequence: Synthetic oligonucleotide
uugcaauugucacucuagg

SEQ ID NO: 1710740 - RNA, 19 nt, Artificial Sequence
  Description of Artificial Sequence: Synthetic oligonucleotide
uuaagagaaacacuuccua

SEQ ID NO: 1710741 - RNA, 19 nt, Artificial Sequence
  Description of Artificial Sequence: Synthetic oligonucleotide
agaaggagaccuaugcugc

SEQ ID NO: 1710742 - RNA, 19 nt, Artificial Sequence
  Description of Artificial Sequence: Synthetic oligonucleotide
uuaucuuuagguccuccca

SEQ ID NO: 1710743 - RNA, 19 nt, Artificial Sequence
  Description of Artificial Sequence: Synthetic oligonucleotide
uguaauuugugcaccaguu

SEQ ID NO: 1710744 - RNA, 19 nt, Artificial Sequence
  Description of Artificial Sequence: Synthetic oligonucleotide
cuuagcuaaaggcaggcug

SEQ ID NO: 1710745 - RNA, 19 nt, Artificial Sequence
  Description of Artificial Sequence: Synthetic oligonucleotide
agaacgaccagcauacacg

SEQ ID NO: 1710746 - RNA, 19 nt, Artificial Sequence
  Description of Artificial Sequence: Synthetic oligonucleotide
uguuagacucucagaauug

SEQ ID NO: 1710747 - RNA, 19 nt, Artificial Sequence
  Description of Artificial Sequence: Synthetic oligonucleotide
acacgugcuauauacagcu

SEQ ID NO: 1710748 - RNA, 19 nt, Artificial Sequence
  Description of Artificial Sequence: Synthetic oligonucleotide
cauguauuggcacagagaa

SEQ ID NO: 1710749 - RNA, 19 nt, Artificial Sequence
  Description of Artificial Sequence: Synthetic oligonucleotide
aauacuucuugugaaacuu

SEQ ID NO: 1710750 - RNA, 19 nt, Artificial Sequence
  Description of Artificial Sequence: Synthetic oligonucleotide
accaguuagauacaccuga

SEQ ID NO: 1710751 - RNA, 19 nt, Artificial Sequence
  Description of Artificial Sequence: Synthetic oligonucleotide
accugcacaaaauagacua

SEQ ID NO: 1710752 - RNA, 19 nt, Artificial Sequence
  Description of Artificial Sequence: Synthetic oligonucleotide
cacaaaauagacuaggugu

SEQ ID NO: 1710753 - RNA, 19 nt, Artificial Sequence
  Description of Artificial Sequence: Synthetic oligonucleotide
uacuaugggaauuaucuua

SEQ ID NO: 1710754 - RNA, 19 nt, Artificial Sequence
  Description of Artificial Sequence: Synthetic oligonucleotide
acuaaaagcuucguacacg

SEQ ID NO: 1710755 - RNA, 19 nt, Artificial Sequence
  Description of Artificial Sequence: Synthetic oligonucleotide
ucauguauuggcacagaga

SEQ ID NO: 1710756 - RNA, 19 nt, Artificial Sequence
  Description of Artificial Sequence: Synthetic oligonucleotide
agcuguuagacucucagaa

SEQ ID NO: 1710757 - RNA, 19 nt, Artificial Sequence
  Description of Artificial Sequence: Synthetic oligonucleotide
ugugaaacuuauuaucuuu

SEQ ID NO: 1710758 - RNA, 19 nt, Artificial Sequence
  Description of Artificial Sequence: Synthetic oligonucleotide
aggagcaagaacuguagug

SEQ ID NO: 1710759 - RNA, 19 nt, Artificial Sequence
  Description of Artificial Sequence: Synthetic oligonucleotide
auaaggugccaaaugaauc

SEQ ID NO: 1710760 - RNA, 19 nt, Artificial Sequence
  Description of Artificial Sequence: Synthetic oligonucleotide
cuaguagccgacugaagcc

SEQ ID NO: 1710761 - RNA, 19 nt, Artificial Sequence
  Description of Artificial Sequence: Synthetic oligonucleotide
aauaaggugccaaaugaau

SEQ ID NO: 1710762 - RNA, 19 nt, Artificial Sequence
  Description of Artificial Sequence: Synthetic oligonucleotide
gguaauaucucuuggagaa

SEQ ID NO: 1710763 - RNA, 19 nt, Artificial Sequence
  Description of Artificial Sequence: Synthetic oligonucleotide
uauuaggcauuuugguugc

SEQ ID NO: 1710764 - RNA, 19 nt, Artificial Sequence
  Description of Artificial Sequence: Synthetic oligonucleotide
uacuaaaagcuucguacac

SEQ ID NO: 1710765 - RNA, 19 nt, Artificial Sequence
  Description of Artificial Sequence: Synthetic oligonucleotide
acacguuagcagcaaaguc

SEQ ID NO: 1710766 - RNA, 19 nt, Artificial Sequence
  Description of Artificial Sequence: Synthetic oligonucleotide
uguuuaacuggacucgcaa

SEQ ID NO: 1710767 - RNA, 19 nt, Artificial Sequence
  Description of Artificial Sequence: Synthetic oligonucleotide
uguucagugggccgaaaga

SEQ ID NO: 1710768 - RNA, 19 nt, Artificial Sequence
  Description of Artificial Sequence: Synthetic oligonucleotide
aacuguacuaaaaucugga

SEQ ID NO: 1710769 - RNA, 19 nt, Artificial Sequence
  Description of Artificial Sequence: Synthetic oligonucleotide
aggagaccuaugcugcucc

SEQ ID NO: 1710770 - RNA, 19 nt, Artificial Sequence
  Description of Artificial Sequence: Synthetic oligonucleotide
cuuccuaggagcaagaacu

SEQ ID NO: 1710771 - RNA, 19 nt, Artificial Sequence
  Description of Artificial Sequence: Synthetic oligonucleotide
ugucacucuagguauagau

SEQ ID NO: 1710772 - RNA, 19 nt, Artificial Sequence
  Description of Artificial Sequence: Synthetic oligonucleotide
gauacaccugaugaaguag

SEQ ID NO: 1710773 - RNA, 19 nt, Artificial Sequence
  Description of Artificial Sequence: Synthetic oligonucleotide
aaagauaccugcacaaaau

SEQ ID NO: 1710774 - RNA, 19 nt, Artificial Sequence
  Description of Artificial Sequence: Synthetic oligonucleotide
augaaucuacuucauuaug

SEQ ID NO: 1710775 - RNA, 19 nt, Artificial Sequence
  Description of Artificial Sequence: Synthetic oligonucleotide
acugucgccgagcuugggc

SEQ ID NO: 1710776 - RNA, 19 nt, Artificial Sequence
  Description of Artificial Sequence: Synthetic oligonucleotide
gaagaaagucauuucucca

SEQ ID NO: 1710777 - RNA, 19 nt, Artificial Sequence
  Description of Artificial Sequence: Synthetic oligonucleotide
acuaugggaauuaucuuag

SEQ ID NO: 1710778 - RNA, 19 nt, Artificial Sequence
  Description of Artificial Sequence: Synthetic oligonucleotide
guuacuuucaaaugguacu

SEQ ID NO: 1710779 - RNA, 19 nt, Artificial Sequence
  Description of Artificial Sequence: Synthetic oligonucleotide
aaagggacaaagaauguuu

SEQ ID NO: 1710780 - RNA, 19 nt, Artificial Sequence
  Description of Artificial Sequence: Synthetic oligonucleotide
uauccaccaauuauguuua

SEQ ID NO: 1710781 - RNA, 19 nt, Artificial Sequence
  Description of Artificial Sequence: Synthetic oligonucleotide
agcuacaauacuucuugug

SEQ ID NO: 1710782 - RNA, 19 nt, Artificial Sequence
  Description of Artificial Sequence: Synthetic oligonucleotide
uagacuaggugugucacug

SEQ ID NO: 1710783 - RNA, 19 nt, Artificial Sequence
  Description of Artificial Sequence: Synthetic oligonucleotide
uuaacuggacucgcaaaag

SEQ ID NO: 1710784 - RNA, 19 nt, Artificial Sequence
  Description of Artificial Sequence: Synthetic oligonucleotide
uagauacaccugaugaagu

SEQ ID NO: 1710785 - RNA, 19 nt, Artificial Sequence
  Description of Artificial Sequence: Synthetic oligonucleotide
augggaauuaucuuagcua

SEQ ID NO: 1710786 - RNA, 19 nt, Artificial Sequence
  Description of Artificial Sequence: Synthetic oligonucleotide
ugggccgaaagaauucugc

SEQ ID NO: 1710787 - RNA, 19 nt, Artificial Sequence
  Description of Artificial Sequence: Synthetic oligonucleotide
uugguugcaauugucacuc

SEQ ID NO: 1710788 - RNA, 19 nt, Artificial Sequence
  Description of Artificial Sequence: Synthetic oligonucleotide
uccuaggauauauacuccu

SEQ ID NO: 1710789 - RNA, 19 nt, Artificial Sequence
  Description of Artificial Sequence: Synthetic oligonucleotide
cuuggagaaagcccauagg

SEQ ID NO: 1710790 - RNA, 19 nt, Artificial Sequence
  Description of Artificial Sequence: Synthetic oligonucleotide
uuauccagguaaauauauc

SEQ ID NO: 1710791 - RNA, 19 nt, Artificial Sequence
  Description of Artificial Sequence: Synthetic oligonucleotide
agaaagucauuucuccagu

SEQ ID NO: 1710792 - RNA, 19 nt, Artificial Sequence
  Description of Artificial Sequence: Synthetic oligonucleotide
agauaccugcacaaaauag

SEQ ID NO: 1710793 - RNA, 19 nt, Artificial Sequence
  Description of Artificial Sequence: Synthetic oligonucleotide
uacaauacuucuugugaaa

SEQ ID NO: 1710794 - RNA, 19 nt, Artificial Sequence
  Description of Artificial Sequence: Synthetic oligonucleotide
ucgcaaaagaacgaccagc

SEQ ID NO: 1710795 - RNA, 19 nt, Artificial Sequence
  Description of Artificial Sequence: Synthetic oligonucleotide
ggaauuaucuuagcuaaag

SEQ ID NO: 1710796 - RNA, 19 nt, Artificial Sequence
  Description of Artificial Sequence: Synthetic oligonucleotide
uuccuaggauauauacucc

SEQ ID NO: 1710797 - RNA, 19 nt, Artificial Sequence
  Description of Artificial Sequence: Synthetic oligonucleotide
guacuaaaagcuucguaca

SEQ ID NO: 1710798 - RNA, 19 nt, Artificial Sequence
  Description of Artificial Sequence: Synthetic oligonucleotide
aaaugguacugucgccgag

SEQ ID NO: 1710799 - RNA, 19 nt, Artificial Sequence
  Description of Artificial Sequence: Synthetic oligonucleotide
ugcaauugucacucuaggu

SEQ ID NO: 1710800 - RNA, 19 nt, Artificial Sequence
  Description of Artificial Sequence: Synthetic oligonucleotide
agauccuguucagugggcc

SEQ ID NO: 1710801 - RNA, 19 nt, Artificial Sequence
  Description of Artificial Sequence: Synthetic oligonucleotide
auaaaauuaucuacuuggu

SEQ ID NO: 1710802 - RNA, 19 nt, Artificial Sequence
  Description of Artificial Sequence: Synthetic oligonucleotide
aagcuucguacacguuagc

SEQ ID NO: 1710803 - RNA, 19 nt, Artificial Sequence
  Description of Artificial Sequence: Synthetic oligonucleotide
gcauacacgugcuauauac

SEQ ID NO: 1710804 - RNA, 19 nt, Artificial Sequence
  Description of Artificial Sequence: Synthetic oligonucleotide
uacuucuugugaaacuuau

SEQ ID NO: 1710805 - RNA, 19 nt, Artificial Sequence
  Description of Artificial Sequence: Synthetic oligonucleotide
aaugaucccgauguuguaa

SEQ ID NO: 1710806 - RNA, 19 nt, Artificial Sequence
  Description of Artificial Sequence: Synthetic oligonucleotide
guuuaauagugguaauauc

SEQ ID NO: 1710807 - RNA, 19 nt, Artificial Sequence
  Description of Artificial Sequence: Synthetic oligonucleotide
aguguuggcagcauggaca

SEQ ID NO: 1710808 - RNA, 19 nt, Artificial Sequence
  Description of Artificial Sequence: Synthetic oligonucleotide
gacucucagaauugaguug

SEQ ID NO: 1710809 - RNA, 19 nt, Artificial Sequence
  Description of Artificial Sequence: Synthetic oligonucleotide
ggaucagcuauccaggcug

SEQ ID NO: 1710810 - RNA, 19 nt, Artificial Sequence
  Description of Artificial Sequence: Synthetic oligonucleotide
ucauguugcaaguccucug

SEQ ID NO: 1710811 - RNA, 19 nt, Artificial Sequence
  Description of Artificial Sequence: Synthetic oligonucleotide
ugcuaauggcguuucuuca

SEQ ID NO: 1710812 - RNA, 19 nt, Artificial Sequence
  Description of Artificial Sequence: Synthetic oligonucleotide
cagcuauccaggcugaaac

SEQ ID NO: 1710813 - RNA, 19 nt, Artificial Sequence
  Description of Artificial Sequence: Synthetic oligonucleotide
gaaauaagacuuugcuuaa

SEQ ID NO: 1710814 - RNA, 19 nt, Artificial Sequence
  Description of Artificial Sequence: Synthetic oligonucleotide
ugcugcuccacaagaauuc

SEQ ID NO: 1710815 - RNA, 19 nt, Artificial Sequence
  Description of Artificial Sequence: Synthetic oligonucleotide
aagccucucuuaguguugg

SEQ ID NO: 1710816 - RNA, 19 nt, Artificial Sequence
  Description of Artificial Sequence: Synthetic oligonucleotide
aaguagacugcugaugaau

SEQ ID NO: 1710817 - RNA, 19 nt, Artificial Sequence
  Description of Artificial Sequence: Synthetic oligonucleotide
uccagcuuguuugaaggcc

SEQ ID NO: 1710818 - RNA, 19 nt, Artificial Sequence
  Description of Artificial Sequence: Synthetic oligonucleotide
uggaguuaccauguugcag

SEQ ID NO: 1710819 - RNA, 19 nt, Artificial Sequence
  Description of Artificial Sequence: Synthetic oligonucleotide
uuaauguagauggauccua

SEQ ID NO: 1710820 - RNA, 19 nt, Artificial Sequence
  Description of Artificial Sequence: Synthetic oligonucleotide
uacuugguuuggaucagcu

SEQ ID NO: 1710821 - RNA, 19 nt, Artificial Sequence
  Description of Artificial Sequence: Synthetic oligonucleotide
aucccgauguuguaauuug

SEQ ID NO: 1710822 - RNA, 19 nt, Artificial Sequence
  Description of Artificial Sequence: Synthetic oligonucleotide
uagguccucccauauuucc

SEQ ID NO: 1710823 - RNA, 19 nt, Artificial Sequence
  Description of Artificial Sequence: Synthetic oligonucleotide
uggacucgcaaaagaacga

SEQ ID NO: 1710824 - RNA, 19 nt, Artificial Sequence
  Description of Artificial Sequence: Synthetic oligonucleotide
auauauccaccaauuaugu

SEQ ID NO: 1710825 - RNA, 19 nt, Artificial Sequence
  Description of Artificial Sequence: Synthetic oligonucleotide
guuagauacaccugaugaa

SEQ ID NO: 1710826 - RNA, 19 nt, Artificial Sequence
  Description of Artificial Sequence: Synthetic oligonucleotide
uucguacacguuagcagca

SEQ ID NO: 1710827 - RNA, 19 nt, Artificial Sequence
  Description of Artificial Sequence: Synthetic oligonucleotide
cuaggauauauacuccuca

SEQ ID NO: 1710828 - RNA, 19 nt, Artificial Sequence
  Description of Artificial Sequence: Synthetic oligonucleotide
acugaauggaucuguccgu

SEQ ID NO: 1710829 - RNA, 19 nt, Artificial Sequence
  Description of Artificial Sequence: Synthetic oligonucleotide
gcuacaauacuucuuguga

SEQ ID NO: 1710830 - RNA, 19 nt, Artificial Sequence
  Description of Artificial Sequence: Synthetic oligonucleotide
aagcuguuagacucucaga

SEQ ID NO: 1710831 - RNA, 19 nt, Artificial Sequence
  Description of Artificial Sequence: Synthetic oligonucleotide
gcauuaaagccucucuuag

SEQ ID NO: 1710832 - RNA, 19 nt, Artificial Sequence
  Description of Artificial Sequence: Synthetic oligonucleotide
cucugguuacuuucaaaug

SEQ ID NO: 1710833 - RNA, 19 nt, Artificial Sequence
  Description of Artificial Sequence: Synthetic oligonucleotide
uacacguuagcagcaaagu

SEQ ID NO: 1710834 - RNA, 19 nt, Artificial Sequence
  Description of Artificial Sequence: Synthetic oligonucleotide
uuagcagcaaagucuuuua

SEQ ID NO: 1710835 - RNA, 19 nt, Artificial Sequence
  Description of Artificial Sequence: Synthetic oligonucleotide
guauucaaaacuguacuaa

SEQ ID NO: 1710836 - RNA, 19 nt, Artificial Sequence
  Description of Artificial Sequence: Synthetic oligonucleotide
aaggagaccuaugcugcuc

SEQ ID NO: 1710837 - RNA, 19 nt, Artificial Sequence
  Description of Artificial Sequence: Synthetic oligonucleotide
guugucuaguagccgacug

SEQ ID NO: 1710838 - RNA, 19 nt, Artificial Sequence
  Description of Artificial Sequence: Synthetic oligonucleotide
agacuaggugugucacugc

SEQ ID NO: 1710839 - RNA, 19 nt, Artificial Sequence
  Description of Artificial Sequence: Synthetic oligonucleotide
uuccuaggagcaagaacug

SEQ ID NO: 1710840 - RNA, 19 nt, Artificial Sequence
  Description of Artificial Sequence: Synthetic oligonucleotide
ccaagaaggagaccuaugc

SEQ ID NO: 1710841 - RNA, 19 nt, Artificial Sequence
  Description of Artificial Sequence: Synthetic oligonucleotide
ugcaccaguuagauacacc

SEQ ID NO: 1710842 - RNA, 19 nt, Artificial Sequence
  Description of Artificial Sequence: Synthetic oligonucleotide
ucuuuagguccucccauau

SEQ ID NO: 1710843 - RNA, 19 nt, Artificial Sequence
  Description of Artificial Sequence: Synthetic oligonucleotide
gccaaaugaaucuacuuca

SEQ ID NO: 1710844 - RNA, 19 nt, Artificial Sequence
  Description of Artificial Sequence: Synthetic oligonucleotide
guagauggauccuagcucu

SEQ ID NO: 1710845 - RNA, 19 nt, Artificial Sequence
  Description of Artificial Sequence: Synthetic oligonucleotide
uaauggcguuucuucaucu

SEQ ID NO: 1710846 - RNA, 19 nt, Artificial Sequence
  Description of Artificial Sequence: Synthetic oligonucleotide
aauugaguugcugcauuaa

SEQ ID NO: 1710847 - RNA, 19 nt, Artificial Sequence
  Description of Artificial Sequence: Synthetic oligonucleotide
gcuucguacacguuagcag

SEQ ID NO: 1710848 - RNA, 19 nt, Artificial Sequence
  Description of Artificial Sequence: Synthetic oligonucleotide
uugugaaacuuauuaucuu

SEQ ID NO: 1710849 - RNA, 19 nt, Artificial Sequence
  Description of Artificial Sequence: Synthetic oligonucleotide
agguauagaugauuuuaau

SEQ ID NO: 1710850 - RNA, 19 nt, Artificial Sequence
  Description of Artificial Sequence: Synthetic oligonucleotide
uacagcuacaauacuucuu

SEQ ID NO: 1710851 - RNA, 19 nt, Artificial Sequence
  Description of Artificial Sequence: Synthetic oligonucleotide
acucgcaaaagaacgacca

SEQ ID NO: 1710852 - RNA, 19 nt, Artificial Sequence
  Description of Artificial Sequence: Synthetic oligonucleotide
uuacuaugggaauuaucuu

SEQ ID NO: 1710853 - RNA, 19 nt, Artificial Sequence
  Description of Artificial Sequence: Synthetic oligonucleotide
ucuguccguuuacuauggg

SEQ ID NO: 1710854 - RNA, 19 nt, Artificial Sequence
  Description of Artificial Sequence: Synthetic oligonucleotide
gcacaaaauagacuaggug

SEQ ID NO: 1710855 - RNA, 19 nt, Artificial Sequence
  Description of Artificial Sequence: Synthetic oligonucleotide
agaauugaguugcugcauu

SEQ ID NO: 1710856 - RNA, 19 nt, Artificial Sequence
  Description of Artificial Sequence: Synthetic oligonucleotide
aacuggacucgcaaaagaa

SEQ ID NO: 1710857 - RNA, 19 nt, Artificial Sequence
  Description of Artificial Sequence: Synthetic oligonucleotide
guacacguuagcagcaaag

SEQ ID NO: 1710858 - RNA, 19 nt, Artificial Sequence
  Description of Artificial Sequence: Synthetic oligonucleotide
uaccugcacaaaauagacu

SEQ ID NO: 1710859 - RNA, 19 nt, Artificial Sequence
  Description of Artificial Sequence: Synthetic oligonucleotide
agaccuaugcugcuccaca

SEQ ID NO: 1710860 - RNA, 19 nt, Artificial Sequence
  Description of Artificial Sequence: Synthetic oligonucleotide
aggugugucacugcaaacu

SEQ ID NO: 1710861 - RNA, 19 nt, Artificial Sequence
  Description of Artificial Sequence: Synthetic oligonucleotide
ugucuaguagccgacugaa

SEQ ID NO: 1710862 - RNA, 19 nt, Artificial Sequence
  Description of Artificial Sequence: Synthetic oligonucleotide
uggaucagcuauccaggcu

SEQ ID NO: 1710863 - RNA, 19 nt, Artificial Sequence
  Description of Artificial Sequence: Synthetic oligonucleotide
ucuagguauagaugauuuu

SEQ ID NO: 1710864 - RNA, 19 nt, Artificial Sequence
  Description of Artificial Sequence: Synthetic oligonucleotide
cuagguauagaugauuuua

SEQ ID NO: 1710865 - RNA, 19 nt, Artificial Sequence
  Description of Artificial Sequence: Synthetic oligonucleotide
agauacaccugaugaagua

SEQ ID NO: 1710866 - RNA, 19 nt, Artificial Sequence
  Description of Artificial Sequence: Synthetic oligonucleotide
ucuacuugguuuggaucag

SEQ ID NO: 1710867 - RNA, 19 nt, Artificial Sequence
  Description of Artificial Sequence: Synthetic oligonucleotide
ggcauuuugguugcaauug

SEQ ID NO: 1710868 - RNA, 19 nt, Artificial Sequence
  Description of Artificial Sequence: Synthetic oligonucleotide
cuaugggaauuaucuuagc

SEQ ID NO: 1710869 - RNA, 19 nt, Artificial Sequence
  Description of Artificial Sequence: Synthetic oligonucleotide
auuugugcaccaguuagau

SEQ ID NO: 1710870 - RNA, 19 nt, Artificial Sequence
  Description of Artificial Sequence: Synthetic oligonucleotide
cuaauggcguuucuucauc

SEQ ID NO: 1710871 - RNA, 19 nt, Artificial Sequence
  Description of Artificial Sequence: Synthetic oligonucleotide
uuaguguuggcagcaugga

SEQ ID NO: 1710872 - RNA, 19 nt, Artificial Sequence
  Description of Artificial Sequence: Synthetic oligonucleotide
uuagguccucccauauuuc

SEQ ID NO: 1710873 - RNA, 19 nt, Artificial Sequence
  Description of Artificial Sequence: Synthetic oligonucleotide
caucuggcaucauguauug

SEQ ID NO: 1710874 - RNA, 19 nt, Artificial Sequence
  Description of Artificial Sequence: Synthetic oligonucleotide
acaaagcuguuagacucuc

SEQ ID NO: 1710875 - RNA, 19 nt, Artificial Sequence
  Description of Artificial Sequence: Synthetic oligonucleotide
agguaaauauauccaccaa

SEQ ID NO: 1710876 - RNA, 19 nt, Artificial Sequence
  Description of Artificial Sequence: Synthetic oligonucleotide
aaaauacaauaaggugcca

SEQ ID NO: 1710877 - RNA, 19 nt, Artificial Sequence
  Description of Artificial Sequence: Synthetic oligonucleotide
accuaugcugcuccacaag

SEQ ID NO: 1710878 - RNA, 19 nt, Artificial Sequence
  Description of Artificial Sequence: Synthetic oligonucleotide
agaacuguagugccauuuu

SEQ ID NO: 1710879 - RNA, 19 nt, Artificial Sequence
  Description of Artificial Sequence: Synthetic oligonucleotide
auagacuaggugugucacu

SEQ ID NO: 1710880 - RNA, 19 nt, Artificial Sequence
  Description of Artificial Sequence: Synthetic oligonucleotide
uggcaucauguauuggcac

SEQ ID NO: 1710881 - RNA, 19 nt, Artificial Sequence
  Description of Artificial Sequence: Synthetic oligonucleotide
cucgcaaaagaacgaccag

SEQ ID NO: 1710882 - RNA, 19 nt, Artificial Sequence
  Description of Artificial Sequence: Synthetic oligonucleotide
ucucagaauugaguugcug

SEQ ID NO: 1710883 - RNA, 19 nt, Artificial Sequence
  Description of Artificial Sequence: Synthetic oligonucleotide
uuuauggaguuaccauguu

SEQ ID NO: 1710884 - RNA, 19 nt, Artificial Sequence
  Description of Artificial Sequence: Synthetic oligonucleotide
gauccuagcucuucuugaa

SEQ ID NO: 1710885 - RNA, 19 nt, Artificial Sequence
  Description of Artificial Sequence: Synthetic oligonucleotide
caauaaggugccaaaugaa

SEQ ID NO: 1710886 - RNA, 19 nt, Artificial Sequence
  Description of Artificial Sequence: Synthetic oligonucleotide
caguuagauacaccugaug

SEQ ID NO: 1710887 - RNA, 19 nt, Artificial Sequence
  Description of Artificial Sequence: Synthetic oligonucleotide
auuaucuacuugguuugga

SEQ ID NO: 1710888 - RNA, 19 nt, Artificial Sequence
  Description of Artificial Sequence: Synthetic oligonucleotide
agauggauccuagcucuuc

SEQ ID NO: 1710889 - RNA, 19 nt, Artificial Sequence
  Description of Artificial Sequence: Synthetic oligonucleotide
agcuauccaggcugaaaca

SEQ ID NO: 1710890 - RNA, 19 nt, Artificial Sequence
  Description of Artificial Sequence: Synthetic oligonucleotide
augaucccgauguuguaau

SEQ ID NO: 1710891 - RNA, 19 nt, Artificial Sequence
  Description of Artificial Sequence: Synthetic oligonucleotide
uccaccaauuauguuuaac

SEQ ID NO: 1710892 - RNA, 19 nt, Artificial Sequence
  Description of Artificial Sequence: Synthetic oligonucleotide
cauugagaaguuuaauagu

SEQ ID NO: 1710893 - RNA, 19 nt, Artificial Sequence
  Description of Artificial Sequence: Synthetic oligonucleotide
cuguucagugggccgaaag

SEQ ID NO: 1710894 - RNA, 19 nt, Artificial Sequence
  Description of Artificial Sequence: Synthetic oligonucleotide
agaucaugaaugaucccga

SEQ ID NO: 1710895 - RNA, 19 nt, Artificial Sequence
  Description of Artificial Sequence: Synthetic oligonucleotide
ccgauguuguaauuugugc

SEQ ID NO: 1710896 - RNA, 19 nt, Artificial Sequence
  Description of Artificial Sequence: Synthetic oligonucleotide
ucccgauguuguaauuugu

SEQ ID NO: 1710897 - RNA, 19 nt, Artificial Sequence
  Description of Artificial Sequence: Synthetic oligonucleotide
aucuguccguuuacuaugg

SEQ ID NO: 1710898 - RNA, 19 nt, Artificial Sequence
  Description of Artificial Sequence: Synthetic oligonucleotide
ucucauugagaaguuuaau

SEQ ID NO: 1710899 - RNA, 19 nt, Artificial Sequence
  Description of Artificial Sequence: Synthetic oligonucleotide
gaacgaccagcauacacgu

SEQ ID NO: 1710900 - RNA, 19 nt, Artificial Sequence
  Description of Artificial Sequence: Synthetic oligonucleotide
cauacacgugcuauauaca

SEQ ID NO: 1710901 - RNA, 19 nt, Artificial Sequence
  Description of Artificial Sequence: Synthetic oligonucleotide
guaauuugugcaccaguua

SEQ ID NO: 1710902 - RNA, 19 nt, Artificial Sequence
  Description of Artificial Sequence: Synthetic oligonucleotide
aggcauuuugguugcaauu

SEQ ID NO: 1710903 - RNA, 19 nt, Artificial Sequence
  Description of Artificial Sequence: Synthetic oligonucleotide
guuagacucucagaauuga

SEQ ID NO: 1710904 - RNA, 19 nt, Artificial Sequence
  Description of Artificial Sequence: Synthetic oligonucleotide
uggaucuguccguuuacua

SEQ ID NO: 1710905 - RNA, 19 nt, Artificial Sequence
  Description of Artificial Sequence: Synthetic oligonucleotide
auguugucuaguagccgac

SEQ ID NO: 1710906 - RNA, 19 nt, Artificial Sequence
  Description of Artificial Sequence: Synthetic oligonucleotide
augguacugucgccgagcu

SEQ ID NO: 1710907 - RNA, 19 nt, Artificial Sequence
  Description of Artificial Sequence: Synthetic oligonucleotide
gaugaaguagacugcugau

SEQ ID NO: 1710908 - RNA, 19 nt, Artificial Sequence
  Description of Artificial Sequence: Synthetic oligonucleotide
gcuauccaggcugaaacag

SEQ ID NO: 1710909 - RNA, 19 nt, Artificial Sequence
  Description of Artificial Sequence: Synthetic oligonucleotide
auacuccucaagaacugug

SEQ ID NO: 1710910 - RNA, 19 nt, Artificial Sequence
  Description of Artificial Sequence: Synthetic oligonucleotide
caccaguuagauacaccug

SEQ ID NO: 1710911 - RNA, 19 nt, Artificial Sequence
  Description of Artificial Sequence: Synthetic oligonucleotide
cuguccguuuacuauggga

SEQ ID NO: 1710912 - RNA, 19 nt, Artificial Sequence
  Description of Artificial Sequence: Synthetic oligonucleotide
uuacuugcuccaucaucaa

SEQ ID NO: 1710913 - RNA, 19 nt, Artificial Sequence
  Description of Artificial Sequence: Synthetic oligonucleotide
ucagcuauccaggcugaaa

SEQ ID NO: 1710914 - RNA, 19 nt, Artificial Sequence
  Description of Artificial Sequence: Synthetic oligonucleotide
agcuugggcaauguauucu

SEQ ID NO: 1710915 - RNA, 19 nt, Artificial Sequence
  Description of Artificial Sequence: Synthetic oligonucleotide
acuggacagacuauuuuau

SEQ ID NO: 1710916 - RNA, 19 nt, Artificial Sequence
  Description of Artificial Sequence: Synthetic oligonucleotide
ucuuagcuaaaggcaggcu

SEQ ID NO: 1710917 - RNA, 19 nt, Artificial Sequence
  Description of Artificial Sequence: Synthetic oligonucleotide
cuauccaggcugaaacaga

SEQ ID NO: 1710918 - RNA, 19 nt, Artificial Sequence
  Description of Artificial Sequence: Synthetic oligonucleotide
uccguuuacuaugggaauu

SEQ ID NO: 1710919 - RNA, 19 nt, Artificial Sequence
  Description of Artificial Sequence: Synthetic oligonucleotide
gagcuugggcaauguauuc

SEQ ID NO: 1710920 - RNA, 19 nt, Artificial Sequence
  Description of Artificial Sequence: Synthetic oligonucleotide
agcccauaggccugagcug

SEQ ID NO: 1710921 - RNA, 19 nt, Artificial Sequence
  Description of Artificial Sequence: Synthetic oligonucleotide
uguugucuaguagccgacu

SEQ ID NO: 1710922 - RNA, 19 nt, Artificial Sequence
  Description of Artificial Sequence: Synthetic oligonucleotide
agugggccgaaagaauucu

SEQ ID NO: 1710923 - RNA, 19 nt, Artificial Sequence
  Description of Artificial Sequence: Synthetic oligonucleotide
uuugugcaccaguuagaua

SEQ ID NO: 1710924 - RNA, 19 nt, Artificial Sequence
  Description of Artificial Sequence: Synthetic oligonucleotide
ggcaucauguauuggcaca

SEQ ID NO: 1710925 - RNA, 19 nt, Artificial Sequence
  Description of Artificial Sequence: Synthetic oligonucleotide
gaaguuuaauagugguaau

SEQ ID NO: 1710926 - RNA, 19 nt, Artificial Sequence
  Description of Artificial Sequence: Synthetic oligonucleotide
gggccgaaagaauucugcc

SEQ ID NO: 1710927 - RNA, 19 nt, Artificial Sequence
  Description of Artificial Sequence: Synthetic oligonucleotide
acugaagccucuguuuaaa

SEQ ID NO: 1710928 - RNA, 19 nt, Artificial Sequence
  Description of Artificial Sequence: Synthetic oligonucleotide
auguugcaaguccucuggu

SEQ ID NO: 1710929 - RNA, 19 nt, Artificial Sequence
  Description of Artificial Sequence: Synthetic oligonucleotide
auguauuggcacagagaag

SEQ ID NO: 1710930 - RNA, 19 nt, Artificial Sequence
  Description of Artificial Sequence: Synthetic oligonucleotide
agccucucuuaguguuggc

SEQ ID NO: 1710931 - RNA, 19 nt, Artificial Sequence
  Description of Artificial Sequence: Synthetic oligonucleotide
cagugggccgaaagaauuc

SEQ ID NO: 1710932 - RNA, 19 nt, Artificial Sequence
  Description of Artificial Sequence: Synthetic oligonucleotide
ccaacuguugcauuaucca

SEQ ID NO: 1710933 - RNA, 19 nt, Artificial Sequence
  Description of Artificial Sequence: Synthetic oligonucleotide
gagaagacuuggauacauc

SEQ ID NO: 1710934 - RNA, 19 nt, Artificial Sequence
  Description of Artificial Sequence: Synthetic oligonucleotide
aauugucacucuagguaua

SEQ ID NO: 1710935 - RNA, 19 nt, Artificial Sequence
  Description of Artificial Sequence: Synthetic oligonucleotide
aaagaacgaccagcauaca

SEQ ID NO: 1710936 - RNA, 19 nt, Artificial Sequence
  Description of Artificial Sequence: Synthetic oligonucleotide
gccugagcugcuaauggcg

SEQ ID NO: 1710937 - RNA, 19 nt, Artificial Sequence
  Description of Artificial Sequence: Synthetic oligonucleotide
ccacaagaauucuaauuuc

SEQ ID NO: 1710938 - RNA, 19 nt, Artificial Sequence
  Description of Artificial Sequence: Synthetic oligonucleotide
ggauccuagcucuucuuga

SEQ ID NO: 1710939 - RNA, 19 nt, Artificial Sequence
  Description of Artificial Sequence: Synthetic oligonucleotide
cuguuagacucucagaauu

SEQ ID NO: 1710940 - RNA, 19 nt, Artificial Sequence
  Description of Artificial Sequence: Synthetic oligonucleotide
gacuuuccaacaugucucu

SEQ ID NO: 1710941 - RNA, 19 nt, Artificial Sequence
  Description of Artificial Sequence: Synthetic oligonucleotide
cuaugcugcuccacaagaa

SEQ ID NO: 1710942 - RNA, 19 nt, Artificial Sequence
  Description of Artificial Sequence: Synthetic oligonucleotide
gacugaagccucuguuuaa

SEQ ID NO: 1710943 - RNA, 19 nt, Artificial Sequence
  Description of Artificial Sequence: Synthetic oligonucleotide
cuggacuuuccaacauguc

SEQ ID NO: 1710944 - RNA, 19 nt, Artificial Sequence
  Description of Artificial Sequence: Synthetic oligonucleotide
cugucgccgagcuugggca

SEQ ID NO: 1710945 - RNA, 19 nt, Artificial Sequence
  Description of Artificial Sequence: Synthetic oligonucleotide
ugaauggaucuguccguuu

SEQ ID NO: 1710946 - RNA, 19 nt, Artificial Sequence
  Description of Artificial Sequence: Synthetic oligonucleotide
gacugcugaugaauuaaaa

SEQ ID NO: 1710947 - RNA, 19 nt, Artificial Sequence
  Description of Artificial Sequence: Synthetic oligonucleotide
aguagccgacugaagccuc

SEQ ID NO: 1710948 - RNA, 19 nt, Artificial Sequence
  Description of Artificial Sequence: Synthetic oligonucleotide
agcaagaacuguagugcca

SEQ ID NO: 1710949 - RNA, 19 nt, Artificial Sequence
  Description of Artificial Sequence: Synthetic oligonucleotide
acucuagguauagaugauu

SEQ ID NO: 1710950 - RNA, 19 nt, Artificial Sequence
  Description of Artificial Sequence: Synthetic oligonucleotide
cccgauguuguaauuugug

SEQ ID NO: 1710951 - RNA, 19 nt, Artificial Sequence
  Description of Artificial Sequence: Synthetic oligonucleotide
agacuuugcuuaagaauau

SEQ ID NO: 1710952 - RNA, 19 nt, Artificial Sequence
  Description of Artificial Sequence: Synthetic oligonucleotide
gaccuaugcugcuccacaa

SEQ ID NO: 1710953 - RNA, 19 nt, Artificial Sequence
  Description of Artificial Sequence: Synthetic oligonucleotide
gucucauugagaaguuuaa

SEQ ID NO: 1710954 - RNA, 19 nt, Artificial Sequence
  Description of Artificial Sequence: Synthetic oligonucleotide
acguuagcagcaaagucuu

SEQ ID NO: 1710955 - RNA, 19 nt, Artificial Sequence
  Description of Artificial Sequence: Synthetic oligonucleotide
ggccgaaagaauucugcca

SEQ ID NO: 1710956 - RNA, 19 nt, Artificial Sequence
  Description of Artificial Sequence: Synthetic oligonucleotide
gaaacagaucaugaaugau

SEQ ID NO: 1710957 - RNA, 19 nt, Artificial Sequence
  Description of Artificial Sequence: Synthetic oligonucleotide
cucuagguauagaugauuu

SEQ ID NO: 1710958 - RNA, 19 nt, Artificial Sequence
  Description of Artificial Sequence: Synthetic oligonucleotide
ccugcacaaaauagacuag

SEQ ID NO: 1710959 - RNA, 19 nt, Artificial Sequence
  Description of Artificial Sequence: Synthetic oligonucleotide
auccaagaaggagaccuau

SEQ ID NO: 1710960 - RNA, 19 nt, Artificial Sequence
  Description of Artificial Sequence: Synthetic oligonucleotide
gaaugaucccgauguugua

SEQ ID NO: 1710961 - RNA, 19 nt, Artificial Sequence
  Description of Artificial Sequence: Synthetic oligonucleotide
ccuaggauauauacuccuc

SEQ ID NO: 1710962 - RNA, 19 nt, Artificial Sequence
  Description of Artificial Sequence: Synthetic oligonucleotide
ggcaauguauucugcagcu

SEQ ID NO: 1710963 - RNA, 19 nt, Artificial Sequence
  Description of Artificial Sequence: Synthetic oligonucleotide
gacuuggauacaucuuuau

SEQ ID NO: 1710964 - RNA, 19 nt, Artificial Sequence
  Description of Artificial Sequence: Synthetic oligonucleotide
cuccacaagaauucuaauu

SEQ ID NO: 1710965 - RNA, 19 nt, Artificial Sequence
  Description of Artificial Sequence: Synthetic oligonucleotide
aucuggcaucauguauugg

SEQ ID NO: 1710966 - RNA, 19 nt, Artificial Sequence
  Description of Artificial Sequence: Synthetic oligonucleotide
caagaaggagaccuaugcu

SEQ ID NO: 1710967 - RNA, 19 nt, Artificial Sequence
  Description of Artificial Sequence: Synthetic oligonucleotide
gucuaguagccgacugaag

SEQ ID NO: 1710968 - RNA, 19 nt, Artificial Sequence
  Description of Artificial Sequence: Synthetic oligonucleotide
gaucagcuauccaggcuga

SEQ ID NO: 1710969 - RNA, 19 nt, Artificial Sequence
  Description of Artificial Sequence: Synthetic oligonucleotide
uagauggauccuagcucuu

SEQ ID NO: 1710970 - RNA, 19 nt, Artificial Sequence
  Description of Artificial Sequence: Synthetic oligonucleotide
ugaucccgauguuguaauu

SEQ ID NO: 1710971 - RNA, 19 nt, Artificial Sequence
  Description of Artificial Sequence: Synthetic oligonucleotide
gaaggagaccuaugcugcu

SEQ ID NO: 1710972 - RNA, 19 nt, Artificial Sequence
  Description of Artificial Sequence: Synthetic oligonucleotide
ggacucgcaaaagaacgac

SEQ ID NO: 1710973 - RNA, 19 nt, Artificial Sequence
  Description of Artificial Sequence: Synthetic oligonucleotide
agacugcugaugaauuaaa

SEQ ID NO: 1710974 - RNA, 19 nt, Artificial Sequence
  Description of Artificial Sequence: Synthetic oligonucleotide
gcccauaggccugagcugc

SEQ ID NO: 1710975 - RNA, 19 nt, Artificial Sequence
  Description of Artificial Sequence: Synthetic oligonucleotide
guacugucgccgagcuugg

SEQ ID NO: 1710976 - RNA, 19 nt, Artificial Sequence
  Description of Artificial Sequence: Synthetic oligonucleotide
ucguacacguuagcagcaa

SEQ ID NO: 1710977 - RNA, 19 nt, Artificial Sequence
  Description of Artificial Sequence: Synthetic oligonucleotide
ggaucuguccguuuacuau

SEQ ID NO: 1710978 - RNA, 19 nt, Artificial Sequence
  Description of Artificial Sequence: Synthetic oligonucleotide
gaucccgauguuguaauuu

SEQ ID NO: 1710979 - RNA, 19 nt, Artificial Sequence
  Description of Artificial Sequence: Synthetic oligonucleotide
ugucgccgagcuugggcaa

SEQ ID NO: 1710980 - RNA, 19 nt, Artificial Sequence
  Description of Artificial Sequence: Synthetic oligonucleotide
aggcaggcugacacuggac

SEQ ID NO: 1710981 - RNA, 19 nt, Artificial Sequence
  Description of Artificial Sequence: Synthetic oligonucleotide
gccgaaagaauucugccau

SEQ ID NO: 1710982 - RNA, 19 nt, Artificial Sequence
  Description of Artificial Sequence: Synthetic oligonucleotide
ccuaugcugcuccacaaga

SEQ ID NO: 1710983 - RNA, 19 nt, Artificial Sequence
  Description of Artificial Sequence: Synthetic oligonucleotide
acuaggugugucacugcaa

SEQ ID NO: 1710984 - RNA, 19 nt, Artificial Sequence
  Description of Artificial Sequence: Synthetic oligonucleotide
uacugucgccgagcuuggg

SEQ ID NO: 1710985 - RNA, 19 nt, Artificial Sequence
  Description of Artificial Sequence: Synthetic oligonucleotide
gugggccgaaagaauucug

SEQ ID NO: 1710986 - RNA, 19 nt, Artificial Sequence
  Description of Artificial Sequence: Synthetic oligonucleotide
ggguacuaaaagcuucgua

SEQ ID NO: 1710987 - RNA, 19 nt, Artificial Sequence
  Description of Artificial Sequence: Synthetic oligonucleotide
cacauuccauuacauguau

SEQ ID NO: 1710988 - RNA, 19 nt, Artificial Sequence
  Description of Artificial Sequence: Synthetic oligonucleotide
auuaggcauuuugguugca

SEQ ID NO: 1710989 - RNA, 19 nt, Artificial Sequence
  Description of Artificial Sequence: Synthetic oligonucleotide
gaguuaccauguugcagau

SEQ ID NO: 1710990 - RNA, 19 nt, Artificial Sequence
  Description of Artificial Sequence: Synthetic oligonucleotide
gguuuggaucagcuaucca

SEQ ID NO: 1710991 - RNA, 19 nt, Artificial Sequence
  Description of Artificial Sequence: Synthetic oligonucleotide
ccgaaagaauucugccaug

SEQ ID NO: 1710992 - RNA, 19 nt, Artificial Sequence
  Description of Artificial Sequence: Synthetic oligonucleotide
auccaccaauuauguuuaa

SEQ ID NO: 1710993 - RNA, 19 nt, Artificial Sequence
  Description of Artificial Sequence: Synthetic oligonucleotide
guccguuuacuaugggaau

SEQ ID NO: 1710994 - RNA, 19 nt, Artificial Sequence
  Description of Artificial Sequence: Synthetic oligonucleotide
ucgccgagcuugggcaaug

SEQ ID NO: 1710995 - RNA, 19 nt, Artificial Sequence
  Description of Artificial Sequence: Synthetic oligonucleotide
gcuaauggcguuucuucau

SEQ ID NO: 1710996 - RNA, 19 nt, Artificial Sequence
  Description of Artificial Sequence: Synthetic oligonucleotide
uccuguucagugggccgaa

SEQ ID NO: 1710997 - RNA, 19 nt, Artificial Sequence
  Description of Artificial Sequence: Synthetic oligonucleotide
ugguacugucgccgagcuu

SEQ ID NO: 1710998 - RNA, 19 nt, Artificial Sequence
  Description of Artificial Sequence: Synthetic oligonucleotide
gccucucuuaguguuggca

SEQ ID NO: 1710999 - RNA, 19 nt, Artificial Sequence
  Description of Artificial Sequence: Synthetic oligonucleotide
gcuguuagacucucagaau

SEQ ID NO: 1711000 - RNA, 19 nt, Artificial Sequence
  Description of Artificial Sequence: Synthetic oligonucleotide
cacucuagguauagaugau

SEQ ID NO: 1711001 - RNA, 19 nt, Artificial Sequence
  Description of Artificial Sequence: Synthetic oligonucleotide
gaccagcauacacgugcua

SEQ ID NO: 1711002 - RNA, 19 nt, Artificial Sequence
  Description of Artificial Sequence: Synthetic oligonucleotide
gcaagaacuguagugccau

SEQ ID NO: 1711003 - RNA, 19 nt, Artificial Sequence
  Description of Artificial Sequence: Synthetic oligonucleotide
cagcuacaauacuucuugu

SEQ ID NO: 1711004 - RNA, 19 nt, Artificial Sequence
  Description of Artificial Sequence: Synthetic oligonucleotide
aucagcuauccaggcugaa

SEQ ID NO: 1711005 - RNA, 19 nt, Artificial Sequence
  Description of Artificial Sequence: Synthetic oligonucleotide
gggaauuaucuuagcuaaa

SEQ ID NO: 1711006 - RNA, 19 nt, Artificial Sequence
  Description of Artificial Sequence: Synthetic oligonucleotide
cuuuagguccucccauauu

SEQ ID NO: 1711007 - RNA, 19 nt, Artificial Sequence
  Description of Artificial Sequence: Synthetic oligonucleotide
cagaauugaguugcugcau

SEQ ID NO: 1711008 - RNA, 19 nt, Artificial Sequence
  Description of Artificial Sequence: Synthetic oligonucleotide
cacgugcuauauacagcua

SEQ ID NO: 1711009 - RNA, 19 nt, Artificial Sequence
  Description of Artificial Sequence: Synthetic oligonucleotide
cucuuggagaaagcccaua

SEQ ID NO: 1711010 - RNA, 19 nt, Artificial Sequence
  Description of Artificial Sequence: Synthetic oligonucleotide
ccgagcuugggcaauguau

SEQ ID NO: 1711011 - RNA, 19 nt, Artificial Sequence
  Description of Artificial Sequence: Synthetic oligonucleotide
cugaauggaucuguccguu

SEQ ID NO: 1711012 - RNA, 19 nt, Artificial Sequence
  Description of Artificial Sequence: Synthetic oligonucleotide
cgacugaagccucuguuua

SEQ ID NO: 1711013 - RNA, 19 nt, Artificial Sequence
  Description of Artificial Sequence: Synthetic oligonucleotide
ccguuuacuaugggaauua

SEQ ID NO: 1711014 - RNA, 19 nt, Artificial Sequence
  Description of Artificial Sequence: Synthetic oligonucleotide
ccaguuagauacaccugau

SEQ ID NO: 1711015 - RNA, 19 nt, Artificial Sequence
  Description of Artificial Sequence: Synthetic oligonucleotide
gccucuguuuaaacaggua

SEQ ID NO: 1711016 - RNA, 19 nt, Artificial Sequence
  Description of Artificial Sequence: Synthetic oligonucleotide
ccgacugaagccucuguuu

SEQ ID NO: 1711017 - RNA, 19 nt, Artificial Sequence
  Description of Artificial Sequence: Synthetic oligonucleotide
ccauguugcagauccuguu

SEQ ID NO: 1711018 - RNA, 19 nt, Artificial Sequence
  Description of Artificial Sequence: Synthetic oligonucleotide
gggguacuaaaagcuucgu

SEQ ID NO: 1711019 - RNA, 19 nt, Artificial Sequence
  Description of Artificial Sequence: Synthetic oligonucleotide
gccgagcuugggcaaugua

SEQ ID NO: 1711020 - RNA, 19 nt, Artificial Sequence
  Description of Artificial Sequence: Synthetic oligonucleotide
gucgccgagcuugggcaau

SEQ ID NO: 1711021 - RNA, 19 nt, Artificial Sequence
  Description of Artificial Sequence: Synthetic oligonucleotide
cccauaggccugagcugcu

SEQ ID NO: 1711022 - RNA, 19 nt, Artificial Sequence
  Description of Artificial Sequence: Synthetic oligonucleotide
cguuagcagcaaagucuuu

SEQ ID NO: 1711023 - RNA, 19 nt, Artificial Sequence
  Description of Artificial Sequence: Synthetic oligonucleotide
cgccgagcuugggcaaugu

SEQ ID NO: 1711024 - RNA, 19 nt, Artificial Sequence
  Description of Artificial Sequence: Synthetic oligonucleotide
aguuucaccaaguauacac

SEQ ID NO: 1711025 - RNA, 19 nt, Artificial Sequence
  Description of Artificial Sequence: Synthetic oligonucleotide
uuaaaguuacuucauauga

SEQ ID NO: 1711026 - RNA, 19 nt, Artificial Sequence
  Description of Artificial Sequence: Synthetic oligonucleotide
acaaccauggccuaauacc

SEQ ID NO: 1711027 - RNA, 19 nt, Artificial Sequence
  Description of Artificial Sequence: Synthetic oligonucleotide
ugaguaaucaacauacuug

SEQ ID NO: 1711028 - RNA, 19 nt, Artificial Sequence
  Description of Artificial Sequence: Synthetic oligonucleotide
auggaauuggcucauaacg

SEQ ID NO: 1711029 - RNA, 19 nt, Artificial Sequence
  Description of Artificial Sequence: Synthetic oligonucleotide
uauaaguuuaggaauggag

SEQ ID NO: 1711030 - RNA, 19 nt, Artificial Sequence
  Description of Artificial Sequence: Synthetic oligonucleotide
guaaucaacauacuugugg

SEQ ID NO: 1711031 - RNA, 19 nt, Artificial Sequence
  Description of Artificial Sequence: Synthetic oligonucleotide
aauauggucaguaauacca

SEQ ID NO: 1711032 - RNA, 19 nt, Artificial Sequence
  Description of Artificial Sequence: Synthetic oligonucleotide
uaagucacgaaaaccaggg

SEQ ID NO: 1711033 - RNA, 19 nt, Artificial Sequence
  Description of Artificial Sequence: Synthetic oligonucleotide
uuauucaccauaaacauua

SEQ ID NO: 1711034 - RNA, 19 nt, Artificial Sequence
  Description of Artificial Sequence: Synthetic oligonucleotide
aaaguaucccaugauacac

SEQ ID NO: 1711035 - RNA, 19 nt, Artificial Sequence
  Description of Artificial Sequence: Synthetic oligonucleotide
aaaguuacuucauaugacu

SEQ ID NO: 1711036 - RNA, 19 nt, Artificial Sequence
  Description of Artificial Sequence: Synthetic oligonucleotide
aaaaucagcccucccauuc

SEQ ID NO: 1711037 - RNA, 19 nt, Artificial Sequence
  Description of Artificial Sequence: Synthetic oligonucleotide
aauuccucauauguaauac

SEQ ID NO: 1711038 - RNA, 19 nt, Artificial Sequence
  Description of Artificial Sequence: Synthetic oligonucleotide
uauuuguuuacuuugacuu

SEQ ID NO: 1711039 - RNA, 19 nt, Artificial Sequence
  Description of Artificial Sequence: Synthetic oligonucleotide
uguuuaugaagacugcugc

SEQ ID NO: 1711040 - RNA, 19 nt, Artificial Sequence
  Description of Artificial Sequence: Synthetic oligonucleotide
uaaguuuaggaauggagcc

SEQ ID NO: 1711041 - RNA, 19 nt, Artificial Sequence
  Description of Artificial Sequence: Synthetic oligonucleotide
ucacuuauucucauguagg

SEQ ID NO: 1711042 - RNA, 19 nt, Artificial Sequence
  Description of Artificial Sequence: Synthetic oligonucleotide
uucucauguagguuuaucg

SEQ ID NO: 1711043 - RNA, 19 nt, Artificial Sequence
  Description of Artificial Sequence: Synthetic oligonucleotide
gagcauaaugcccaggugg

SEQ ID NO: 1711044 - RNA, 19 nt, Artificial Sequence
  Description of Artificial Sequence: Synthetic oligonucleotide
uaaucaacauacuuguggc

SEQ ID NO: 1711045 - RNA, 19 nt, Artificial Sequence
  Description of Artificial Sequence: Synthetic oligonucleotide
aaauauaaguuuaggaaug

SEQ ID NO: 1711046 - RNA, 19 nt, Artificial Sequence
  Description of Artificial Sequence: Synthetic oligonucleotide
aaguauacacaaccauggc

SEQ ID NO: 1711047 - RNA, 19 nt, Artificial Sequence
  Description of Artificial Sequence: Synthetic oligonucleotide
uuucacauaagaaagcuuu

SEQ ID NO: 1711048 - RNA, 19 nt, Artificial Sequence
  Description of Artificial Sequence: Synthetic oligonucleotide
aauauaaguuuaggaaugg

SEQ ID NO: 1711049 - RNA, 19 nt, Artificial Sequence
  Description of Artificial Sequence: Synthetic oligonucleotide
uuacuaauuaauccuugag

SEQ ID NO: 1711050 - RNA, 19 nt, Artificial Sequence
  Description of Artificial Sequence: Synthetic oligonucleotide
acuaauuaauccuugagua

SEQ ID NO: 1711051 - RNA, 19 nt, Artificial Sequence
  Description of Artificial Sequence: Synthetic oligonucleotide
uacuaauuaauccuugagu

SEQ ID NO: 1711052 - RNA, 19 nt, Artificial Sequence
  Description of Artificial Sequence: Synthetic oligonucleotide
uaaucagccccuauguggg

SEQ ID NO: 1711053 - RNA, 19 nt, Artificial Sequence
  Description of Artificial Sequence: Synthetic oligonucleotide
uccuuaauuccucauaugu

SEQ ID NO: 1711054 - RNA, 19 nt, Artificial Sequence
  Description of Artificial Sequence: Synthetic oligonucleotide
aauggagccaaauuuugga

SEQ ID NO: 1711055 - RNA, 19 nt, Artificial Sequence
  Description of Artificial Sequence: Synthetic oligonucleotide
auaaacauuaagaugcuag

SEQ ID NO: 1711056 - RNA, 19 nt, Artificial Sequence
  Description of Artificial Sequence: Synthetic oligonucleotide
uguucuuacuccuuaauuc

SEQ ID NO: 1711057 - RNA, 19 nt, Artificial Sequence
  Description of Artificial Sequence: Synthetic oligonucleotide
auaacgaggaagugucucc

SEQ ID NO: 1711058 - RNA, 19 nt, Artificial Sequence
  Description of Artificial Sequence: Synthetic oligonucleotide
uuugggacuuucuucaaag

SEQ ID NO: 1711059 - RNA, 19 nt, Artificial Sequence
  Description of Artificial Sequence: Synthetic oligonucleotide
aguaauaccagugggagug

SEQ ID NO: 1711060 - RNA, 19 nt, Artificial Sequence
  Description of Artificial Sequence: Synthetic oligonucleotide
uucaggagguccaaugacg

SEQ ID NO: 1711061 - RNA, 19 nt, Artificial Sequence
  Description of Artificial Sequence: Synthetic oligonucleotide
uguagguuuaucgagaguc

SEQ ID NO: 1711062 - RNA, 19 nt, Artificial Sequence
  Description of Artificial Sequence: Synthetic oligonucleotide
aacacuaaaaucuguguuu

SEQ ID NO: 1711063 - RNA, 19 nt, Artificial Sequence
  Description of Artificial Sequence: Synthetic oligonucleotide
uguuuguaaagcaucacau

SEQ ID NO: 1711064 - RNA, 19 nt, Artificial Sequence
  Description of Artificial Sequence: Synthetic oligonucleotide
aaagcuuuccagcaaagua

SEQ ID NO: 1711065 - RNA, 19 nt, Artificial Sequence
  Description of Artificial Sequence: Synthetic oligonucleotide
guuaaaguuacuucauaug

SEQ ID NO: 1711066 - RNA, 19 nt, Artificial Sequence
  Description of Artificial Sequence: Synthetic oligonucleotide
ucacaguugaguuucguca

SEQ ID NO: 1711067 - RNA, 19 nt, Artificial Sequence
  Description of Artificial Sequence: Synthetic oligonucleotide
acuaaauggaauuggcuca

SEQ ID NO: 1711068 - RNA, 19 nt, Artificial Sequence
  Description of Artificial Sequence: Synthetic oligonucleotide
uggucaguaauaccagugg

SEQ ID NO: 1711069 - RNA, 19 nt, Artificial Sequence
  Description of Artificial Sequence: Synthetic oligonucleotide
aacaguuucaccaaguaua

SEQ ID NO: 1711070 - RNA, 19 nt, Artificial Sequence
  Description of Artificial Sequence: Synthetic oligonucleotide
uuuacuaauuaauccuuga

SEQ ID NO: 1711071 - RNA, 19 nt, Artificial Sequence
  Description of Artificial Sequence: Synthetic oligonucleotide
aguuucgucagucucucuc

SEQ ID NO: 1711072 - RNA, 19 nt, Artificial Sequence
  Description of Artificial Sequence: Synthetic oligonucleotide
uggccuaauaccaucauuc

SEQ ID NO: 1711073 - RNA, 19 nt, Artificial Sequence
  Description of Artificial Sequence: Synthetic oligonucleotide
ugauacacgcaaauauaag

SEQ ID NO: 1711074 - RNA, 19 nt, Artificial Sequence
  Description of Artificial Sequence: Synthetic oligonucleotide
aguacauuugcccaacagu

SEQ ID NO: 1711075 - RNA, 19 nt, Artificial Sequence
  Description of Artificial Sequence: Synthetic oligonucleotide
aauuuuggaugacuugaca

SEQ ID NO: 1711076 - RNA, 19 nt, Artificial Sequence
  Description of Artificial Sequence: Synthetic oligonucleotide
acuuuugagcauaaugccc

SEQ ID NO: 1711077 - RNA, 19 nt, Artificial Sequence
  Description of Artificial Sequence: Synthetic oligonucleotide
guucuuacuccuuaauucc

SEQ ID NO: 1711078 - RNA, 19 nt, Artificial Sequence
  Description of Artificial Sequence: Synthetic oligonucleotide
aguggauucauucauugaa

SEQ ID NO: 1711079 - RNA, 19 nt, Artificial Sequence
  Description of Artificial Sequence: Synthetic oligonucleotide
aaauuuuggaugacuugac

SEQ ID NO: 1711080 - RNA, 19 nt, Artificial Sequence
  Description of Artificial Sequence: Synthetic oligonucleotide
cacuaaauggaauuggcuc

SEQ ID NO: 1711081 - RNA, 19 nt, Artificial Sequence
  Description of Artificial Sequence: Synthetic oligonucleotide
cucauaacgaggaaguguc

SEQ ID NO: 1711082 - RNA, 19 nt, Artificial Sequence
  Description of Artificial Sequence: Synthetic oligonucleotide
auauuuguuuacuuugacu

SEQ ID NO: 1711083 - RNA, 19 nt, Artificial Sequence
  Description of Artificial Sequence: Synthetic oligonucleotide
ucgaaaaucagcccuccca

SEQ ID NO: 1711084 - RNA, 19 nt, Artificial Sequence
  Description of Artificial Sequence: Synthetic oligonucleotide
ucuguguuuguaaagcauc

SEQ ID NO: 1711085 - RNA, 19 nt, Artificial Sequence
  Description of Artificial Sequence: Synthetic oligonucleotide
aaucuguguuuguaaagca

SEQ ID NO: 1711086 - RNA, 19 nt, Artificial Sequence
  Description of Artificial Sequence: Synthetic oligonucleotide
uguguguuaaaguuacuuc

SEQ ID NO: 1711087 - RNA, 19 nt, Artificial Sequence
  Description of Artificial Sequence: Synthetic oligonucleotide
aauuaauccuugaguaauc

SEQ ID NO: 1711088 - RNA, 19 nt, Artificial Sequence
  Description of Artificial Sequence: Synthetic oligonucleotide
aagagcgccuugcuuggcc

SEQ ID NO: 1711089 - RNA, 19 nt, Artificial Sequence
  Description of Artificial Sequence: Synthetic oligonucleotide
uaauuaauccuugaguaau

SEQ ID NO: 1711090 - RNA, 19 nt, Artificial Sequence
  Description of Artificial Sequence: Synthetic oligonucleotide
aagcacuaaauggaauugg

SEQ ID NO: 1711091 - RNA, 19 nt, Artificial Sequence
  Description of Artificial Sequence: Synthetic oligonucleotide
uguaaagcaucacaugaua

SEQ ID NO: 1711092 - RNA, 19 nt, Artificial Sequence
  Description of Artificial Sequence: Synthetic oligonucleotide
uuaucgagagucacaguug

SEQ ID NO: 1711093 - RNA, 19 nt, Artificial Sequence
  Description of Artificial Sequence: Synthetic oligonucleotide
uugaguaaucaacauacuu

SEQ ID NO: 1711094 - RNA, 19 nt, Artificial Sequence
  Description of Artificial Sequence: Synthetic oligonucleotide
uucauugcacucucggaag

SEQ ID NO: 1711095 - RNA, 19 nt, Artificial Sequence
  Description of Artificial Sequence: Synthetic oligonucleotide
ggagaugucacaaaagaag

SEQ ID NO: 1711096 - RNA, 19 nt, Artificial Sequence
  Description of Artificial Sequence: Synthetic oligonucleotide
gauacacgcaaauauaagu

SEQ ID NO: 1711097 - RNA, 19 nt, Artificial Sequence
  Description of Artificial Sequence: Synthetic oligonucleotide
ugaagcacuaaauggaauu

SEQ ID NO: 1711098 - RNA, 19 nt, Artificial Sequence
  Description of Artificial Sequence: Synthetic oligonucleotide
ucagucuuguguguuaaag

SEQ ID NO: 1711099 - RNA, 19 nt, Artificial Sequence
  Description of Artificial Sequence: Synthetic oligonucleotide
gauaagucacgaaaaccag

SEQ ID NO: 1711100 - RNA, 19 nt, Artificial Sequence
  Description of Artificial Sequence: Synthetic oligonucleotide
ugcgucaguacauuugccc

SEQ ID NO: 1711101 - RNA, 19 nt, Artificial Sequence
  Description of Artificial Sequence: Synthetic oligonucleotide
agcaucacaugauaaguca

SEQ ID NO: 1711102 - RNA, 19 nt, Artificial Sequence
  Description of Artificial Sequence: Synthetic oligonucleotide
caugauaagucacgaaaac

SEQ ID NO: 1711103 - RNA, 19 nt, Artificial Sequence
  Description of Artificial Sequence: Synthetic oligonucleotide
acagguaccucggacaacg

SEQ ID NO: 1711104 - RNA, 19 nt, Artificial Sequence
  Description of Artificial Sequence: Synthetic oligonucleotide
uguguuaaaguuacuucau

SEQ ID NO: 1711105 - RNA, 19 nt, Artificial Sequence
  Description of Artificial Sequence: Synthetic oligonucleotide
uguaaucagccccuaugug

SEQ ID NO: 1711106 - RNA, 19 nt, Artificial Sequence
  Description of Artificial Sequence: Synthetic oligonucleotide
uggaauguaaucagccccu

SEQ ID NO: 1711107 - RNA, 19 nt, Artificial Sequence
  Description of Artificial Sequence: Synthetic oligonucleotide
aacgcggccaggacgaccc

SEQ ID NO: 1711108 - RNA, 19 nt, Artificial Sequence
  Description of Artificial Sequence: Synthetic oligonucleotide
aauuggcucauaacgagga

SEQ ID NO: 1711109 - RNA, 19 nt, Artificial Sequence
  Description of Artificial Sequence: Synthetic oligonucleotide
uggagccaaauuuuggaug

SEQ ID NO: 1711110 - RNA, 19 nt, Artificial Sequence
  Description of Artificial Sequence: Synthetic oligonucleotide
uacuucauaugacucucug

SEQ ID NO: 1711111 - RNA, 19 nt, Artificial Sequence
  Description of Artificial Sequence: Synthetic oligonucleotide
uuucacucaucccaaguau

SEQ ID NO: 1711112 - RNA, 19 nt, Artificial Sequence
  Description of Artificial Sequence: Synthetic oligonucleotide
gaauuggcucauaacgagg

SEQ ID NO: 1711113 - RNA, 19 nt, Artificial Sequence
  Description of Artificial Sequence: Synthetic oligonucleotide
cauguagguuuaucgagag

SEQ ID NO: 1711114 - RNA, 19 nt, Artificial Sequence
  Description of Artificial Sequence: Synthetic oligonucleotide
uuucaccaaguauacacaa

SEQ ID NO: 1711115 - RNA, 19 nt, Artificial Sequence
  Description of Artificial Sequence: Synthetic oligonucleotide
gaaccagaagcuuucuuca

SEQ ID NO: 1711116 - RNA, 19 nt, Artificial Sequence
  Description of Artificial Sequence: Synthetic oligonucleotide
auaagucacgaaaaccagg

SEQ ID NO: 1711117 - RNA, 19 nt, Artificial Sequence
  Description of Artificial Sequence: Synthetic oligonucleotide
gaagcacuaaauggaauug

SEQ ID NO: 1711118 - RNA, 19 nt, Artificial Sequence
  Description of Artificial Sequence: Synthetic oligonucleotide
uuaauuccucauauguaau

SEQ ID NO: 1711119 - RNA, 19 nt, Artificial Sequence
  Description of Artificial Sequence: Synthetic oligonucleotide
ugcccaacaguaaacacua

SEQ ID NO: 1711120 - RNA, 19 nt, Artificial Sequence
  Description of Artificial Sequence: Synthetic oligonucleotide
ugaagccggguauggaagg

SEQ ID NO: 1711121 - RNA, 19 nt, Artificial Sequence
  Description of Artificial Sequence: Synthetic oligonucleotide
cuaauaccaucauucugag

SEQ ID NO: 1711122 - RNA, 19 nt, Artificial Sequence
  Description of Artificial Sequence: Synthetic oligonucleotide
ugaccacucacauuugagu

SEQ ID NO: 1711123 - RNA, 19 nt, Artificial Sequence
  Description of Artificial Sequence: Synthetic oligonucleotide
uuguaaagcaucacaugau

SEQ ID NO: 1711124 - RNA, 19 nt, Artificial Sequence
  Description of Artificial Sequence: Synthetic oligonucleotide
gaccacucacauuugaguc

SEQ ID NO: 1711125 - RNA, 19 nt, Artificial Sequence
  Description of Artificial Sequence: Synthetic oligonucleotide
uuggccugaccgaagagcu

SEQ ID NO: 1711126 - RNA, 19 nt, Artificial Sequence
  Description of Artificial Sequence: Synthetic oligonucleotide
aagcuuuccagcaaaguau

SEQ ID NO: 1711127 - RNA, 19 nt, Artificial Sequence
  Description of Artificial Sequence: Synthetic oligonucleotide
aaaucagcccucccauuca

SEQ ID NO: 1711128 - RNA, 19 nt, Artificial Sequence
  Description of Artificial Sequence: Synthetic oligonucleotide
cauauuuguuuacuuugac

SEQ ID NO: 1711129 - RNA, 19 nt, Artificial Sequence
  Description of Artificial Sequence: Synthetic oligonucleotide
agucacgaaaaccaggguu

SEQ ID NO: 1711130 - RNA, 19 nt, Artificial Sequence
  Description of Artificial Sequence: Synthetic oligonucleotide
cacgcaaauauaaguuuag

SEQ ID NO: 1711131 - RNA, 19 nt, Artificial Sequence
  Description of Artificial Sequence: Synthetic oligonucleotide
uugucuaugucgucugcug

SEQ ID NO: 1711132 - RNA, 19 nt, Artificial Sequence
  Description of Artificial Sequence: Synthetic oligonucleotide
agaugucacaaaagaagac

SEQ ID NO: 1711133 - RNA, 19 nt, Artificial Sequence
  Description of Artificial Sequence: Synthetic oligonucleotide
ucggcucucgaaaaucagc

SEQ ID NO: 1711134 - RNA, 19 nt, Artificial Sequence
  Description of Artificial Sequence: Synthetic oligonucleotide
cacaugauaagucacgaaa

SEQ ID NO: 1711135 - RNA, 19 nt, Artificial Sequence
  Description of Artificial Sequence: Synthetic oligonucleotide
ggaauuggcucauaacgag

SEQ ID NO: 1711136 - RNA, 19 nt, Artificial Sequence
  Description of Artificial Sequence: Synthetic oligonucleotide
cacaguugaguuucgucag

SEQ ID NO: 1711137 - RNA, 19 nt, Artificial Sequence
  Description of Artificial Sequence: Synthetic oligonucleotide
gguuuaucgagagucacag

SEQ ID NO: 1711138 - RNA, 19 nt, Artificial Sequence
  Description of Artificial Sequence: Synthetic oligonucleotide
caugcacuaucacuuauuc

SEQ ID NO: 1711139 - RNA, 19 nt, Artificial Sequence
  Description of Artificial Sequence: Synthetic oligonucleotide
ucuuacuccuuaauuccuc

SEQ ID NO: 1711140 - RNA, 19 nt, Artificial Sequence
  Description of Artificial Sequence: Synthetic oligonucleotide
uggggaauuggucuuggaa

SEQ ID NO: 1711141 - RNA, 19 nt, Artificial Sequence
  Description of Artificial Sequence: Synthetic oligonucleotide
ggucaguaauaccaguggg

SEQ ID NO: 1711142 - RNA, 19 nt, Artificial Sequence
  Description of Artificial Sequence: Synthetic oligonucleotide
uucaccaaguauacacaac

SEQ ID NO: 1711143 - RNA, 19 nt, Artificial Sequence
  Description of Artificial Sequence: Synthetic oligonucleotide
ccuaauaccaucauucuga

SEQ ID NO: 1711144 - RNA, 19 nt, Artificial Sequence
  Description of Artificial Sequence: Synthetic oligonucleotide
guuucgucagucucucucc

SEQ ID NO: 1711145 - RNA, 19 nt, Artificial Sequence
  Description of Artificial Sequence: Synthetic oligonucleotide
uacacgcaaauauaaguuu

SEQ ID NO: 1711146 - RNA, 19 nt, Artificial Sequence
  Description of Artificial Sequence: Synthetic oligonucleotide
uuuugagcauaaugcccag

SEQ ID NO: 1711147 - RNA, 19 nt, Artificial Sequence
  Description of Artificial Sequence: Synthetic oligonucleotide
uucacucaucccaaguauc

SEQ ID NO: 1711148 - RNA, 19 nt, Artificial Sequence
  Description of Artificial Sequence: Synthetic oligonucleotide
acauuugcccaacaguaaa

SEQ ID NO: 1711149 - RNA, 19 nt, Artificial Sequence
  Description of Artificial Sequence: Synthetic oligonucleotide
agcauaaugcccagguggg

SEQ ID NO: 1711150 - RNA, 19 nt, Artificial Sequence
  Description of Artificial Sequence: Synthetic oligonucleotide
uuaauccuugaguaaucaa

SEQ ID NO: 1711151 - RNA, 19 nt, Artificial Sequence
  Description of Artificial Sequence: Synthetic oligonucleotide
uccugcgucaguacauuug

SEQ ID NO: 1711152 - RNA, 19 nt, Artificial Sequence
  Description of Artificial Sequence: Synthetic oligonucleotide
ucgagagucacaguugagu

SEQ ID NO: 1711153 - RNA, 19 nt, Artificial Sequence
  Description of Artificial Sequence: Synthetic oligonucleotide
acuucauaugacucucugu

SEQ ID NO: 1711154 - RNA, 19 nt, Artificial Sequence
  Description of Artificial Sequence: Synthetic oligonucleotide
guugaguuucgucagucuc

SEQ ID NO: 1711155 - RNA, 19 nt, Artificial Sequence
  Description of Artificial Sequence: Synthetic oligonucleotide
gagacagguaccucggaca

SEQ ID NO: 1711156 - RNA, 19 nt, Artificial Sequence
  Description of Artificial Sequence: Synthetic oligonucleotide
aggagguccaaugacggag

SEQ ID NO: 1711157 - RNA, 19 nt, Artificial Sequence
  Description of Artificial Sequence: Synthetic oligonucleotide
ucgucagucucucucccug

SEQ ID NO: 1711158 - RNA, 19 nt, Artificial Sequence
  Description of Artificial Sequence: Synthetic oligonucleotide
aagccggguauggaaggcc

SEQ ID NO: 1711159 - RNA, 19 nt, Artificial Sequence
  Description of Artificial Sequence: Synthetic oligonucleotide
ucccauucauaguuccucc

SEQ ID NO: 1711160 - RNA, 19 nt, Artificial Sequence
  Description of Artificial Sequence: Synthetic oligonucleotide
gacaggauuccuuuacuaa

SEQ ID NO: 1711161 - RNA, 19 nt, Artificial Sequence
  Description of Artificial Sequence: Synthetic oligonucleotide
ucucccuguaacugaaaac

SEQ ID NO: 1711162 - RNA, 19 nt, Artificial Sequence
  Description of Artificial Sequence: Synthetic oligonucleotide
cuaauuaauccuugaguaa

SEQ ID NO: 1711163 - RNA, 19 nt, Artificial Sequence
  Description of Artificial Sequence: Synthetic oligonucleotide
cauucauugaagcacuaaa

SEQ ID NO: 1711164 - RNA, 19 nt, Artificial Sequence
  Description of Artificial Sequence: Synthetic oligonucleotide
cucccuguaacugaaaaca

SEQ ID NO: 1711165 - RNA, 19 nt, Artificial Sequence
  Description of Artificial Sequence: Synthetic oligonucleotide
uucggcucucgaaaaucag

SEQ ID NO: 1711166 - RNA, 19 nt, Artificial Sequence
  Description of Artificial Sequence: Synthetic oligonucleotide
acgcaaauauaaguuuagg

SEQ ID NO: 1711167 - RNA, 19 nt, Artificial Sequence
  Description of Artificial Sequence: Synthetic oligonucleotide
gauguaaagcugaacccca

SEQ ID NO: 1711168 - RNA, 19 nt, Artificial Sequence
  Description of Artificial Sequence: Synthetic oligonucleotide
uggaugacuugacaggauu

SEQ ID NO: 1711169 - RNA, 19 nt, Artificial Sequence
  Description of Artificial Sequence: Synthetic oligonucleotide
accacucacauuugaguca

SEQ ID NO: 1711170 - RNA, 19 nt, Artificial Sequence
  Description of Artificial Sequence: Synthetic oligonucleotide
cuagagcaaaugcugaaga

SEQ ID NO: 1711171 - RNA, 19 nt, Artificial Sequence
  Description of Artificial Sequence: Synthetic oligonucleotide
gggaagagcgccuugcuug

SEQ ID NO: 1711172 - RNA, 19 nt, Artificial Sequence
  Description of Artificial Sequence: Synthetic oligonucleotide
uugaagcacuaaauggaau

SEQ ID NO: 1711173 - RNA, 19 nt, Artificial Sequence
  Description of Artificial Sequence: Synthetic oligonucleotide
caaccauggccuaauacca

SEQ ID NO: 1711174 - RNA, 19 nt, Artificial Sequence
  Description of Artificial Sequence: Synthetic oligonucleotide
cucuguuggaauguaauca

SEQ ID NO: 1711175 - RNA, 19 nt, Artificial Sequence
  Description of Artificial Sequence: Synthetic oligonucleotide
uuugagcauaaugcccagg

SEQ ID NO: 1711176 - RNA, 19 nt, Artificial Sequence
  Description of Artificial Sequence: Synthetic oligonucleotide
augauacacgcaaauauaa

SEQ ID NO: 1711177 - RNA, 19 nt, Artificial Sequence
  Description of Artificial Sequence: Synthetic oligonucleotide
cauaguuccuccucacguc

SEQ ID NO: 1711178 - RNA, 19 nt, Artificial Sequence
  Description of Artificial Sequence: Synthetic oligonucleotide
cuucauugcacucucggaa

SEQ ID NO: 1711179 - RNA, 19 nt, Artificial Sequence
  Description of Artificial Sequence: Synthetic oligonucleotide
uucugaguguccugcguca

SEQ ID NO: 1711180 - RNA, 19 nt, Artificial Sequence
  Description of Artificial Sequence: Synthetic oligonucleotide
auucauugaagcacuaaau

SEQ ID NO: 1711181 - RNA, 19 nt, Artificial Sequence
  Description of Artificial Sequence: Synthetic oligonucleotide
auauggucaguaauaccag

SEQ ID NO: 1711182 - RNA, 19 nt, Artificial Sequence
  Description of Artificial Sequence: Synthetic oligonucleotide
gggacuuucuucaaaguug

SEQ ID NO: 1711183 - RNA, 19 nt, Artificial Sequence
  Description of Artificial Sequence: Synthetic oligonucleotide
aagucacgaaaaccagggu

SEQ ID NO: 1711184 - RNA, 19 nt, Artificial Sequence
  Description of Artificial Sequence: Synthetic oligonucleotide
auacacgcaaauauaaguu

SEQ ID NO: 1711185 - RNA, 19 nt, Artificial Sequence
  Description of Artificial Sequence: Synthetic oligonucleotide
gacgacccggggcagaggc

SEQ ID NO: 1711186 - RNA, 19 nt, Artificial Sequence
  Description of Artificial Sequence: Synthetic oligonucleotide
aguguccugcgucaguaca

SEQ ID NO: 1711187 - RNA, 19 nt, Artificial Sequence
  Description of Artificial Sequence: Synthetic oligonucleotide
uccucauauguaauacuuu

SEQ ID NO: 1711188 - RNA, 19 nt, Artificial Sequence
  Description of Artificial Sequence: Synthetic oligonucleotide
guacauuugcccaacagua

SEQ ID NO: 1711189 - RNA, 19 nt, Artificial Sequence
  Description of Artificial Sequence: Synthetic oligonucleotide
aguugaguuucgucagucu

SEQ ID NO: 1711190 - RNA, 19 nt, Artificial Sequence
  Description of Artificial Sequence: Synthetic oligonucleotide
ggcaaguuuucacauaaga

SEQ ID NO: 1711191 - RNA, 19 nt, Artificial Sequence
  Description of Artificial Sequence: Synthetic oligonucleotide
auggucaguaauaccagug

SEQ ID NO: 1711192 - RNA, 19 nt, Artificial Sequence
  Description of Artificial Sequence: Synthetic oligonucleotide
cugaccgaagagcuucucc

SEQ ID NO: 1711193 - RNA, 19 nt, Artificial Sequence
  Description of Artificial Sequence: Synthetic oligonucleotide
ggagccaaauuuuggauga

SEQ ID NO: 1711194 - RNA, 19 nt, Artificial Sequence
  Description of Artificial Sequence: Synthetic oligonucleotide
cauaacgaggaagugucuc

SEQ ID NO: 1711195 - RNA, 19 nt, Artificial Sequence
  Description of Artificial Sequence: Synthetic oligonucleotide
acaugauaagucacgaaaa

SEQ ID NO: 1711196 - RNA, 19 nt, Artificial Sequence
  Description of Artificial Sequence: Synthetic oligonucleotide
cuaucacuuauucucaugu

SEQ ID NO: 1711197 - RNA, 19 nt, Artificial Sequence
  Description of Artificial Sequence: Synthetic oligonucleotide
auauaaguuuaggaaugga

SEQ ID NO: 1711198 - RNA, 19 nt, Artificial Sequence
  Description of Artificial Sequence: Synthetic oligonucleotide
ugcuagagcaaaugcugaa

SEQ ID NO: 1711199 - RNA, 19 nt, Artificial Sequence
  Description of Artificial Sequence: Synthetic oligonucleotide
ucacaugauaagucacgaa

SEQ ID NO: 1711200 - RNA, 19 nt, Artificial Sequence
  Description of Artificial Sequence: Synthetic oligonucleotide
ucauaacgaggaagugucu

SEQ ID NO: 1711201 - RNA, 19 nt, Artificial Sequence
  Description of Artificial Sequence: Synthetic oligonucleotide
aaccagaagcuuucuucau

SEQ ID NO: 1711202 - RNA, 19 nt, Artificial Sequence
  Description of Artificial Sequence: Synthetic oligonucleotide
ucuaugucgucugcugcug

SEQ ID NO: 1711203 - RNA, 19 nt, Artificial Sequence
  Description of Artificial Sequence: Synthetic oligonucleotide
caacccuuucaacaugcac

SEQ ID NO: 1711204 - RNA, 19 nt, Artificial Sequence
  Description of Artificial Sequence: Synthetic oligonucleotide
cuuacuccuuaauuccuca

SEQ ID NO: 1711205 - RNA, 19 nt, Artificial Sequence
  Description of Artificial Sequence: Synthetic oligonucleotide
gucacaguugaguuucguc

SEQ ID NO: 1711206 - RNA, 19 nt, Artificial Sequence
  Description of Artificial Sequence: Synthetic oligonucleotide
ugggcaauauggucaguaa

SEQ ID NO: 1711207 - RNA, 19 nt, Artificial Sequence
  Description of Artificial Sequence: Synthetic oligonucleotide
uuguggcagccaaaggcac

SEQ ID NO: 1711208 - RNA, 19 nt, Artificial Sequence
  Description of Artificial Sequence: Synthetic oligonucleotide
cuucauaugacucucuguu

SEQ ID NO: 1711209 - RNA, 19 nt, Artificial Sequence
  Description of Artificial Sequence: Synthetic oligonucleotide
agcccucccauucauaguu

SEQ ID NO: 1711210 - RNA, 19 nt, Artificial Sequence
  Description of Artificial Sequence: Synthetic oligonucleotide
ucucgaaaaucagcccucc

SEQ ID NO: 1711211 - RNA, 19 nt, Artificial Sequence
  Description of Artificial Sequence: Synthetic oligonucleotide
uucugcauucggcucucga

SEQ ID NO: 1711212 - RNA, 19 nt, Artificial Sequence
  Description of Artificial Sequence: Synthetic oligonucleotide
agacagguaccucggacaa

SEQ ID NO: 1711213 - RNA, 19 nt, Artificial Sequence
  Description of Artificial Sequence: Synthetic oligonucleotide
ucauucauugaagcacuaa

SEQ ID NO: 1711214 - RNA, 19 nt, Artificial Sequence
  Description of Artificial Sequence: Synthetic oligonucleotide
cucucgaaaaucagcccuc

SEQ ID NO: 1711215 - RNA, 19 nt, Artificial Sequence
  Description of Artificial Sequence: Synthetic oligonucleotide
gaguggauucauucauuga

SEQ ID NO: 1711216 - RNA, 19 nt, Artificial Sequence
  Description of Artificial Sequence: Synthetic oligonucleotide
guaaagcaucacaugauaa

SEQ ID NO: 1711217 - RNA, 19 nt, Artificial Sequence
  Description of Artificial Sequence: Synthetic oligonucleotide
agucucucucccuguaacu

SEQ ID NO: 1711218 - RNA, 19 nt, Artificial Sequence
  Description of Artificial Sequence: Synthetic oligonucleotide
augaagccggguauggaag

SEQ ID NO: 1711219 - RNA, 19 nt, Artificial Sequence
  Description of Artificial Sequence: Synthetic oligonucleotide
uaacgaggaagugucuccu

SEQ ID NO: 1711220 - RNA, 19 nt, Artificial Sequence
  Description of Artificial Sequence: Synthetic oligonucleotide
ugaguuucgucagucucuc

SEQ ID NO: 1711221 - RNA, 19 nt, Artificial Sequence
  Description of Artificial Sequence: Synthetic oligonucleotide
gaauuggucuuggaacuuc

SEQ ID NO: 1711222 - RNA, 19 nt, Artificial Sequence
  Description of Artificial Sequence: Synthetic oligonucleotide
guaucuccauauuuguuua

SEQ ID NO: 1711223 - RNA, 19 nt, Artificial Sequence
  Description of Artificial Sequence: Synthetic oligonucleotide
ggaagagcgccuugcuugg

SEQ ID NO: 1711224 - RNA, 19 nt, Artificial Sequence
  Description of Artificial Sequence: Synthetic oligonucleotide
agucauauuuugacuuuug

SEQ ID NO: 1711225 - RNA, 19 nt, Artificial Sequence
  Description of Artificial Sequence: Synthetic oligonucleotide
cuaugucgucugcugcugg

SEQ ID NO: 1711226 - RNA, 19 nt, Artificial Sequence
  Description of Artificial Sequence: Synthetic oligonucleotide
ucggaggcggcaacgcggc

SEQ ID NO: 1711227 - RNA, 19 nt, Artificial Sequence
  Description of Artificial Sequence: Synthetic oligonucleotide
cauaggccugacugagggg

SEQ ID NO: 1711228 - RNA, 19 nt, Artificial Sequence
  Description of Artificial Sequence: Synthetic oligonucleotide
ccaaauuuuggaugacuug

SEQ ID NO: 1711229 - RNA, 19 nt, Artificial Sequence
  Description of Artificial Sequence: Synthetic oligonucleotide
ugaaccccaggugugugcu

SEQ ID NO: 1711230 - RNA, 19 nt, Artificial Sequence
  Description of Artificial Sequence: Synthetic oligonucleotide
ggaagugucuccuugucua

SEQ ID NO: 1711231 - RNA, 19 nt, Artificial Sequence
  Description of Artificial Sequence: Synthetic oligonucleotide
uuggaugacuugacaggau

SEQ ID NO: 1711232 - RNA, 19 nt, Artificial Sequence
  Description of Artificial Sequence: Synthetic oligonucleotide
uuacuccuuaauuccucau

SEQ ID NO: 1711233 - RNA, 19 nt, Artificial Sequence
  Description of Artificial Sequence: Synthetic oligonucleotide
gaagacugaccacucacau

SEQ ID NO: 1711234 - RNA, 19 nt, Artificial Sequence
  Description of Artificial Sequence: Synthetic oligonucleotide
ucugaguguccugcgucag

SEQ ID NO: 1711235 - RNA, 19 nt, Artificial Sequence
  Description of Artificial Sequence: Synthetic oligonucleotide
cugaaccccaggugugugc

SEQ ID NO: 1711236 - RNA, 19 nt, Artificial Sequence
  Description of Artificial Sequence: Synthetic oligonucleotide
aggugugugcuugcucccc

SEQ ID NO: 1711237 - RNA, 19 nt, Artificial Sequence
  Description of Artificial Sequence: Synthetic oligonucleotide
gucggaggcggcaacgcgg

SEQ ID NO: 1711238 - RNA, 19 nt, Artificial Sequence
  Description of Artificial Sequence: Synthetic oligonucleotide
ccugcgucaguacauuugc

SEQ ID NO: 1711239 - RNA, 19 nt, Artificial Sequence
  Description of Artificial Sequence: Synthetic oligonucleotide
aaacugauguaaagcugaa

SEQ ID NO: 1711240 - RNA, 19 nt, Artificial Sequence
  Description of Artificial Sequence: Synthetic oligonucleotide
cauucggcucucgaaaauc

SEQ ID NO: 1711241 - RNA, 19 nt, Artificial Sequence
  Description of Artificial Sequence: Synthetic oligonucleotide
gccuaauaccaucauucug

SEQ ID NO: 1711242 - RNA, 19 nt, Artificial Sequence
  Description of Artificial Sequence: Synthetic oligonucleotide
cauaaugcccaggugggga

SEQ ID NO: 1711243 - RNA, 19 nt, Artificial Sequence
  Description of Artificial Sequence: Synthetic oligonucleotide
cucgaaaaucagcccuccc

SEQ ID NO: 1711244 - RNA, 19 nt, Artificial Sequence
  Description of Artificial Sequence: Synthetic oligonucleotide
aaugcccagguggggaaga

SEQ ID NO: 1711245 - RNA, 19 nt, Artificial Sequence
  Description of Artificial Sequence: Synthetic oligonucleotide
agccaaauuuuggaugacu

SEQ ID NO: 1711246 - RNA, 19 nt, Artificial Sequence
  Description of Artificial Sequence: Synthetic oligonucleotide
uaauaccagugggagugga

SEQ ID NO: 1711247 - RNA, 19 nt, Artificial Sequence
  Description of Artificial Sequence: Synthetic oligonucleotide
gccuugcuuggccugaccg

SEQ ID NO: 1711248 - RNA, 19 nt, Artificial Sequence
  Description of Artificial Sequence: Synthetic oligonucleotide
acacgcaaauauaaguuua

SEQ ID NO: 1711249 - RNA, 19 nt, Artificial Sequence
  Description of Artificial Sequence: Synthetic oligonucleotide
ggaacuucugcauucggcu

SEQ ID NO: 1711250 - RNA, 19 nt, Artificial Sequence
  Description of Artificial Sequence: Synthetic oligonucleotide
aagcugaaccccaggugug

SEQ ID NO: 1711251 - RNA, 19 nt, Artificial Sequence
  Description of Artificial Sequence: Synthetic oligonucleotide
aauaccagugggaguggau

SEQ ID NO: 1711252 - RNA, 19 nt, Artificial Sequence
  Description of Artificial Sequence: Synthetic oligonucleotide
gcuagagcaaaugcugaag

SEQ ID NO: 1711253 - RNA, 19 nt, Artificial Sequence
  Description of Artificial Sequence: Synthetic oligonucleotide
gaggcggcaacgcggccag

SEQ ID NO: 1711254 - RNA, 19 nt, Artificial Sequence
  Description of Artificial Sequence: Synthetic oligonucleotide
auguagguuuaucgagagu

SEQ ID NO: 1711255 - RNA, 19 nt, Artificial Sequence
  Description of Artificial Sequence: Synthetic oligonucleotide
cacucucggaagacucucc

SEQ ID NO: 1711256 - RNA, 19 nt, Artificial Sequence
  Description of Artificial Sequence: Synthetic oligonucleotide
gaagccggguauggaaggc

SEQ ID NO: 1711257 - RNA, 19 nt, Artificial Sequence
  Description of Artificial Sequence: Synthetic oligonucleotide
aacgaggaagugucuccuu

SEQ ID NO: 1711258 - RNA, 19 nt, Artificial Sequence
  Description of Artificial Sequence: Synthetic oligonucleotide
ggagacagguaccucggac

SEQ ID NO: 1711259 - RNA, 19 nt, Artificial Sequence
  Description of Artificial Sequence: Synthetic oligonucleotide
agagcgccuugcuuggccu

SEQ ID NO: 1711260 - RNA, 19 nt, Artificial Sequence
  Description of Artificial Sequence: Synthetic oligonucleotide
cugcgucaguacauuugcc

SEQ ID NO: 1711261 - RNA, 19 nt, Artificial Sequence
  Description of Artificial Sequence: Synthetic oligonucleotide
guagguuuaucgagaguca

SEQ ID NO: 1711262 - RNA, 19 nt, Artificial Sequence
  Description of Artificial Sequence: Synthetic oligonucleotide
agguuuaucgagagucaca

SEQ ID NO: 1711263 - RNA, 19 nt, Artificial Sequence
  Description of Artificial Sequence: Synthetic oligonucleotide
accccaggugugugcuugc

SEQ ID NO: 1711264 - RNA, 19 nt, Artificial Sequence
  Description of Artificial Sequence: Synthetic oligonucleotide
caggugugugcuugcuccc

SEQ ID NO: 1711265 - RNA, 19 nt, Artificial Sequence
  Description of Artificial Sequence: Synthetic oligonucleotide
gucaguacauuugcccaac

SEQ ID NO: 1711266 - RNA, 19 nt, Artificial Sequence
  Description of Artificial Sequence: Synthetic oligonucleotide
caguugaguuucgucaguc

SEQ ID NO: 1711267 - RNA, 19 nt, Artificial Sequence
  Description of Artificial Sequence: Synthetic oligonucleotide
cugcauucggcucucgaaa

SEQ ID NO: 1711268 - RNA, 19 nt, Artificial Sequence
  Description of Artificial Sequence: Synthetic oligonucleotide
ggaggccggagacagguac

SEQ ID NO: 1711269 - RNA, 19 nt, Artificial Sequence
  Description of Artificial Sequence: Synthetic oligonucleotide
ccuauguggggaauugguc

SEQ ID NO: 1711270 - RNA, 19 nt, Artificial Sequence
  Description of Artificial Sequence: Synthetic oligonucleotide
gggaauuggucuuggaacu

SEQ ID NO: 1711271 - RNA, 19 nt, Artificial Sequence
  Description of Artificial Sequence: Synthetic oligonucleotide
gaguguccugcgucaguac

SEQ ID NO: 1711272 - RNA, 19 nt, Artificial Sequence
  Description of Artificial Sequence: Synthetic oligonucleotide
auaugacucucuguucuua

SEQ ID NO: 1711273 - RNA, 19 nt, Artificial Sequence
  Description of Artificial Sequence: Synthetic oligonucleotide
gcgucaguacauuugccca

SEQ ID NO: 1711274 - RNA, 19 nt, Artificial Sequence
  Description of Artificial Sequence: Synthetic oligonucleotide
cuuggcaaguuuucacaua

SEQ ID NO: 1711275 - RNA, 19 nt, Artificial Sequence
  Description of Artificial Sequence: Synthetic oligonucleotide
accagugggaguggauuca

SEQ ID NO: 1711276 - RNA, 19 nt, Artificial Sequence
  Description of Artificial Sequence: Synthetic oligonucleotide
ucacgaaaaccaggguuuu

SEQ ID NO: 1711277 - RNA, 19 nt, Artificial Sequence
  Description of Artificial Sequence: Synthetic oligonucleotide
gcaucacaugauaagucac

SEQ ID NO: 1711278 - RNA, 19 nt, Artificial Sequence
  Description of Artificial Sequence: Synthetic oligonucleotide
ucucucccuguaacugaaa

SEQ ID NO: 1711279 - RNA, 19 nt, Artificial Sequence
  Description of Artificial Sequence: Synthetic oligonucleotide
ggaagacucuccucucuuc

SEQ ID NO: 1711280 - RNA, 19 nt, Artificial Sequence
  Description of Artificial Sequence: Synthetic oligonucleotide
gucacgaaaaccaggguuu

SEQ ID NO: 1711281 - RNA, 19 nt, Artificial Sequence
  Description of Artificial Sequence: Synthetic oligonucleotide
agucacaguugaguuucgu

SEQ ID NO: 1711282 - RNA, 19 nt, Artificial Sequence
  Description of Artificial Sequence: Synthetic oligonucleotide
ccauucauaguuccuccuc

SEQ ID NO: 1711283 - RNA, 19 nt, Artificial Sequence
  Description of Artificial Sequence: Synthetic oligonucleotide
acaugcacuaucacuuauu

SEQ ID NO: 1711284 - RNA, 19 nt, Artificial Sequence
  Description of Artificial Sequence: Synthetic oligonucleotide
gcucucgaaaaucagcccu

SEQ ID NO: 1711285 - RNA, 19 nt, Artificial Sequence
  Description of Artificial Sequence: Synthetic oligonucleotide
cacgucggaggcggcaacg

SEQ ID NO: 1711286 - RNA, 19 nt, Artificial Sequence
  Description of Artificial Sequence: Synthetic oligonucleotide
ucacgucggaggcggcaac

SEQ ID NO: 1711287 - RNA, 19 nt, Artificial Sequence
  Description of Artificial Sequence: Synthetic oligonucleotide
cacgaaaaccaggguuuug

SEQ ID NO: 1711288 - RNA, 19 nt, Artificial Sequence
  Description of Artificial Sequence: Synthetic oligonucleotide
aggacgacccggggcagag

SEQ ID NO: 1711289 - RNA, 19 nt, Artificial Sequence
  Description of Artificial Sequence: Synthetic oligonucleotide
auacacaaccauggccuaa

SEQ ID NO: 1711290 - RNA, 19 nt, Artificial Sequence
  Description of Artificial Sequence: Synthetic oligonucleotide
uguccugcgucaguacauu

SEQ ID NO: 1711291 - RNA, 19 nt, Artificial Sequence
  Description of Artificial Sequence: Synthetic oligonucleotide
ccuuaauuccucauaugua

SEQ ID NO: 1711292 - RNA, 19 nt, Artificial Sequence
  Description of Artificial Sequence: Synthetic oligonucleotide
cagguaccucggacaacgc

SEQ ID NO: 1711293 - RNA, 19 nt, Artificial Sequence
  Description of Artificial Sequence: Synthetic oligonucleotide
gagcgccuugcuuggccug

SEQ ID NO: 1711294 - RNA, 19 nt, Artificial Sequence
  Description of Artificial Sequence: Synthetic oligonucleotide
ccggagacagguaccucgg

SEQ ID NO: 1711295 - RNA, 19 nt, Artificial Sequence
  Description of Artificial Sequence: Synthetic oligonucleotide
gcauaaugcccaggugggg

SEQ ID NO: 1711296 - RNA, 19 nt, Artificial Sequence
  Description of Artificial Sequence: Synthetic oligonucleotide
gaagagcgccuugcuuggc

SEQ ID NO: 1711297 - RNA, 19 nt, Artificial Sequence
  Description of Artificial Sequence: Synthetic oligonucleotide
gcacuaucacuuauucuca

SEQ ID NO: 1711298 - RNA, 19 nt, Artificial Sequence
  Description of Artificial Sequence: Synthetic oligonucleotide
ggccugaccgaagagcuuc

SEQ ID NO: 1711299 - RNA, 19 nt, Artificial Sequence
  Description of Artificial Sequence: Synthetic oligonucleotide
gcucauaacgaggaagugu

SEQ ID NO: 1711300 - RNA, 19 nt, Artificial Sequence
  Description of Artificial Sequence: Synthetic oligonucleotide
ggcaacgcggccaggacga

SEQ ID NO: 1711301 - RNA, 19 nt, Artificial Sequence
  Description of Artificial Sequence: Synthetic oligonucleotide
cuugucuaugucgucugcu

SEQ ID NO: 1711302 - RNA, 19 nt, Artificial Sequence
  Description of Artificial Sequence: Synthetic oligonucleotide
ggcucauaacgaggaagug

SEQ ID NO: 1711303 - RNA, 19 nt, Artificial Sequence
  Description of Artificial Sequence: Synthetic oligonucleotide
caacgcggccaggacgacc

SEQ ID NO: 1711304 - RNA, 19 nt, Artificial Sequence
  Description of Artificial Sequence: Synthetic oligonucleotide
caggagguccaaugacgga

SEQ ID NO: 1711305 - RNA, 19 nt, Artificial Sequence
  Description of Artificial Sequence: Synthetic oligonucleotide
caguaauaccagugggagu

SEQ ID NO: 1711306 - RNA, 19 nt, Artificial Sequence
  Description of Artificial Sequence: Synthetic oligonucleotide
ggccuaauaccaucauucu

SEQ ID NO: 1711307 - RNA, 19 nt, Artificial Sequence
  Description of Artificial Sequence: Synthetic oligonucleotide
uggccugaccgaagagcuu

SEQ ID NO: 1711308 - RNA, 19 nt, Artificial Sequence
  Description of Artificial Sequence: Synthetic oligonucleotide
cucacauuugagucauauu

SEQ ID NO: 1711309 - RNA, 19 nt, Artificial Sequence
  Description of Artificial Sequence: Synthetic oligonucleotide
agcgccuugcuuggccuga

SEQ ID NO: 1711310 - RNA, 19 nt, Artificial Sequence
  Description of Artificial Sequence: Synthetic oligonucleotide
gggcaauauggucaguaau

SEQ ID NO: 1711311 - RNA, 19 nt, Artificial Sequence
  Description of Artificial Sequence: Synthetic oligonucleotide
gcacuaaauggaauuggcu

SEQ ID NO: 1711312 - RNA, 19 nt, Artificial Sequence
  Description of Artificial Sequence: Synthetic oligonucleotide
caguuucaccaaguauaca

SEQ ID NO: 1711313 - RNA, 19 nt, Artificial Sequence
  Description of Artificial Sequence: Synthetic oligonucleotide
ccugacugaggggucaguc

SEQ ID NO: 1711314 - RNA, 19 nt, Artificial Sequence
  Description of Artificial Sequence: Synthetic oligonucleotide
cacuaucacuuauucucau

SEQ ID NO: 1711315 - RNA, 19 nt, Artificial Sequence
  Description of Artificial Sequence: Synthetic oligonucleotide
ggucagucuuguguguuaa

SEQ ID NO: 1711316 - RNA, 19 nt, Artificial Sequence
  Description of Artificial Sequence: Synthetic oligonucleotide
gccccuauguggggaauug

SEQ ID NO: 1711317 - RNA, 19 nt, Artificial Sequence
  Description of Artificial Sequence: Synthetic oligonucleotide
cacaggugugggcgaccac

SEQ ID NO: 1711318 - RNA, 19 nt, Artificial Sequence
  Description of Artificial Sequence: Synthetic oligonucleotide
gcugaaccccaggugugug

SEQ ID NO: 1711319 - RNA, 19 nt, Artificial Sequence
  Description of Artificial Sequence: Synthetic oligonucleotide
ggaugaagccggguaugga

SEQ ID NO: 1711320 - RNA, 19 nt, Artificial Sequence
  Description of Artificial Sequence: Synthetic oligonucleotide
ccauaaacauuaagaugcu

SEQ ID NO: 1711321 - RNA, 19 nt, Artificial Sequence
  Description of Artificial Sequence: Synthetic oligonucleotide
gcacucucggaagacucuc

SEQ ID NO: 1711322 - RNA, 19 nt, Artificial Sequence
  Description of Artificial Sequence: Synthetic oligonucleotide
ggaggcggcaacgcggcca

SEQ ID NO: 1711323 - RNA, 19 nt, Artificial Sequence
  Description of Artificial Sequence: Synthetic oligonucleotide
ccccuauguggggaauugg

SEQ ID NO: 1711324 - RNA, 19 nt, Artificial Sequence
  Description of Artificial Sequence: Synthetic oligonucleotide
cggcaacgcggccaggacg

SEQ ID NO: 1711325 - RNA, 19 nt, Artificial Sequence
  Description of Artificial Sequence: Synthetic oligonucleotide
cucacgucggaggcggcaa

SEQ ID NO: 1711326 - RNA, 19 nt, Artificial Sequence
  Description of Artificial Sequence: Synthetic oligonucleotide
gaguuucgucagucucucu

SEQ ID NO: 1711327 - RNA, 19 nt, Artificial Sequence
  Description of Artificial Sequence: Synthetic oligonucleotide
agccccuauguggggaauu

SEQ ID NO: 1711328 - RNA, 19 nt, Artificial Sequence
  Description of Artificial Sequence: Synthetic oligonucleotide
gggucagucuuguguguua

SEQ ID NO: 1711329 - RNA, 19 nt, Artificial Sequence
  Description of Artificial Sequence: Synthetic oligonucleotide
cccaaguaucuccauauuu

SEQ ID NO: 1711330 - RNA, 19 nt, Artificial Sequence
  Description of Artificial Sequence: Synthetic oligonucleotide
aucagcccucccauucaua

SEQ ID NO: 1711331 - RNA, 19 nt, Artificial Sequence
  Description of Artificial Sequence: Synthetic oligonucleotide
ggcggcaacgcggccagga

SEQ ID NO: 1711332 - RNA, 19 nt, Artificial Sequence
  Description of Artificial Sequence: Synthetic oligonucleotide
cugaguguccugcgucagu

SEQ ID NO: 1711333 - RNA, 19 nt, Artificial Sequence
  Description of Artificial Sequence: Synthetic oligonucleotide
ccaacccuuucaacaugca

SEQ ID NO: 1711334 - RNA, 19 nt, Artificial Sequence
  Description of Artificial Sequence: Synthetic oligonucleotide
ccggguauggaaggccuuc

SEQ ID NO: 1711335 - RNA, 19 nt, Artificial Sequence
  Description of Artificial Sequence: Synthetic oligonucleotide
cgaaaaucagcccucccau

SEQ ID NO: 1711336 - RNA, 19 nt, Artificial Sequence
  Description of Artificial Sequence: Synthetic oligonucleotide
cgucaguacauuugcccaa

SEQ ID NO: 1711337 - RNA, 19 nt, Artificial Sequence
  Description of Artificial Sequence: Synthetic oligonucleotide
ggacgacccggggcagagg

SEQ ID NO: 1711338 - RNA, 19 nt, Artificial Sequence
  Description of Artificial Sequence: Synthetic oligonucleotide
guccugcgucaguacauuu

SEQ ID NO: 1711339 - RNA, 19 nt, Artificial Sequence
  Description of Artificial Sequence: Synthetic oligonucleotide
ggaauuggucuuggaacuu

SEQ ID NO: 1711340 - RNA, 19 nt, Artificial Sequence
  Description of Artificial Sequence: Synthetic oligonucleotide
ggggaagagcgccuugcuu

SEQ ID NO: 1711341 - RNA, 19 nt, Artificial Sequence
  Description of Artificial Sequence: Synthetic oligonucleotide
gaaccccaggugugugcuu

SEQ ID NO: 1711342 - RNA, 19 nt, Artificial Sequence
  Description of Artificial Sequence: Synthetic oligonucleotide
caggacgacccggggcaga

SEQ ID NO: 1711343 - RNA, 19 nt, Artificial Sequence
  Description of Artificial Sequence: Synthetic oligonucleotide
aggcggcaacgcggccagg

SEQ ID NO: 1711344 - RNA, 19 nt, Artificial Sequence
  Description of Artificial Sequence: Synthetic oligonucleotide
ccaggacgacccggggcag

SEQ ID NO: 1711345 - RNA, 19 nt, Artificial Sequence
  Description of Artificial Sequence: Synthetic oligonucleotide
cgccuugcuuggccugacc

SEQ ID NO: 1711346 - RNA, 19 nt, Artificial Sequence
  Description of Artificial Sequence: Synthetic oligonucleotide
ggggucagucuuguguguu

SEQ ID NO: 1711347 - RNA, 19 nt, Artificial Sequence
  Description of Artificial Sequence: Synthetic oligonucleotide
ggccggagacagguaccuc

SEQ ID NO: 1711348 - RNA, 19 nt, Artificial Sequence
  Description of Artificial Sequence: Synthetic oligonucleotide
gcaacgcggccaggacgac

SEQ ID NO: 1711349 - RNA, 19 nt, Artificial Sequence
  Description of Artificial Sequence: Synthetic oligonucleotide
gcgccuugcuuggccugac

SEQ ID NO: 1711350 - RNA, 19 nt, Artificial Sequence
  Description of Artificial Sequence: Synthetic oligonucleotide
cggagacagguaccucgga

SEQ ID NO: 1711351 - RNA, 19 nt, Artificial Sequence
  Description of Artificial Sequence: Synthetic oligonucleotide
cggaagacucuccucucuu

SEQ ID NO: 1711352 - RNA, 19 nt, Artificial Sequence
  Description of Artificial Sequence: Synthetic oligonucleotide
ccccaggugugugcuugcu

SEQ ID NO: 1711353 - RNA, 19 nt, Artificial Sequence
  Description of Artificial Sequence: Synthetic oligonucleotide
aaucccuucaauuuuaccc

SEQ ID NO: 1711354 - RNA, 19 nt, Artificial Sequence
  Description of Artificial Sequence: Synthetic oligonucleotide
agcauuauaucuuuaagcc

SEQ ID NO: 1711355 - RNA, 19 nt, Artificial Sequence
  Description of Artificial Sequence: Synthetic oligonucleotide
aacuuuaaauggcugaugc

SEQ ID NO: 1711356 - RNA, 19 nt, Artificial Sequence
  Description of Artificial Sequence: Synthetic oligonucleotide
aacgcuuuugaauuuauuc

SEQ ID NO: 1711357 - RNA, 19 nt, Artificial Sequence
  Description of Artificial Sequence: Synthetic oligonucleotide
aauuaccuagcccuguugc

SEQ ID NO: 1711358 - RNA, 19 nt, Artificial Sequence
  Description of Artificial Sequence: Synthetic oligonucleotide
auaacaacacguuccaucc

SEQ ID NO: 1711359 - RNA, 19 nt, Artificial Sequence
  Description of Artificial Sequence: Synthetic oligonucleotide
ugugguauaagaaagugca

SEQ ID NO: 1711360 - RNA, 19 nt, Artificial Sequence
  Description of Artificial Sequence: Synthetic oligonucleotide
uuggauuugaauuaccuag

SEQ ID NO: 1711361 - RNA, 19 nt, Artificial Sequence
  Description of Artificial Sequence: Synthetic oligonucleotide
aaacucguaauucacuacg

SEQ ID NO: 1711362 - RNA, 19 nt, Artificial Sequence
  Description of Artificial Sequence: Synthetic oligonucleotide
uaauuaaacagccaucacc

SEQ ID NO: 1711363 - RNA, 19 nt, Artificial Sequence
  Description of Artificial Sequence: Synthetic oligonucleotide
uuuguaguuaguaacauaa

SEQ ID NO: 1711364 - RNA, 19 nt, Artificial Sequence
  Description of Artificial Sequence: Synthetic oligonucleotide
ugaaccuuaauuaaacagc

SEQ ID NO: 1711365 - RNA, 19 nt, Artificial Sequence
  Description of Artificial Sequence: Synthetic oligonucleotide
auuugaauuaccuagcccu

SEQ ID NO: 1711366 - RNA, 19 nt, Artificial Sequence
  Description of Artificial Sequence: Synthetic oligonucleotide
aggaucaugccuuaguacc

SEQ ID NO: 1711367 - RNA, 19 nt, Artificial Sequence
  Description of Artificial Sequence: Synthetic oligonucleotide
uauacaucugcaucuaacg

SEQ ID NO: 1711368 - RNA, 19 nt, Artificial Sequence
  Description of Artificial Sequence: Synthetic oligonucleotide
ucuaaaagcucugacaggg

SEQ ID NO: 1711369 - RNA, 19 nt, Artificial Sequence
  Description of Artificial Sequence: Synthetic oligonucleotide
uugccaaaacuuuaaaugg

SEQ ID NO: 1711370 - RNA, 19 nt, Artificial Sequence
  Description of Artificial Sequence: Synthetic oligonucleotide
aaagaaacgcuuuugaauu

SEQ ID NO: 1711371 - RNA, 19 nt, Artificial Sequence
  Description of Artificial Sequence: Synthetic oligonucleotide
ucguaauucacuacggagg

SEQ ID NO: 1711372 - RNA, 19 nt, Artificial Sequence
  Description of Artificial Sequence: Synthetic oligonucleotide
uguaguuaguaacauaaca

SEQ ID NO: 1711373 - RNA, 19 nt, Artificial Sequence
  Description of Artificial Sequence: Synthetic oligonucleotide
auaugugacuuuuaggagg

SEQ ID NO: 1711374 - RNA, 19 nt, Artificial Sequence
  Description of Artificial Sequence: Synthetic oligonucleotide
guugccaaaacuuuaaaug

SEQ ID NO: 1711375 - RNA, 19 nt, Artificial Sequence
  Description of Artificial Sequence: Synthetic oligonucleotide
acugauuaaacaaacacuc

SEQ ID NO: 1711376 - RNA, 19 nt, Artificial Sequence
  Description of Artificial Sequence: Synthetic oligonucleotide
accacaaugccauacaauc

SEQ ID NO: 1711377 - RNA, 19 nt, Artificial Sequence
  Description of Artificial Sequence: Synthetic oligonucleotide
ucauguaaguaucuggaag

SEQ ID NO: 1711378 - RNA, 19 nt, Artificial Sequence
  Description of Artificial Sequence: Synthetic oligonucleotide
uauaagaaagugcaauggc

SEQ ID NO: 1711379 - RNA, 19 nt, Artificial Sequence
  Description of Artificial Sequence: Synthetic oligonucleotide
aagccuaucaaauuucugu

SEQ ID NO: 1711380 - RNA, 19 nt, Artificial Sequence
  Description of Artificial Sequence: Synthetic oligonucleotide
uauaucuuuaagccuauca

SEQ ID NO: 1711381 - RNA, 19 nt, Artificial Sequence
  Description of Artificial Sequence: Synthetic oligonucleotide
ucauguuaacaauaacugg

SEQ ID NO: 1711382 - RNA, 19 nt, Artificial Sequence
  Description of Artificial Sequence: Synthetic oligonucleotide
cuauaugugacuuuuagga

SEQ ID NO: 1711383 - RNA, 19 nt, Artificial Sequence
  Description of Artificial Sequence: Synthetic oligonucleotide
uacaucaagcauuauaucu

SEQ ID NO: 1711384 - RNA, 19 nt, Artificial Sequence
  Description of Artificial Sequence: Synthetic oligonucleotide
uguaauguuaguaaauuuu

SEQ ID NO: 1711385 - RNA, 19 nt, Artificial Sequence
  Description of Artificial Sequence: Synthetic oligonucleotide
augaaccuuaauuaaacag

SEQ ID NO: 1711386 - RNA, 19 nt, Artificial Sequence
  Description of Artificial Sequence: Synthetic oligonucleotide
uuuugaagaaauugaagac

SEQ ID NO: 1711387 - RNA, 19 nt, Artificial Sequence
  Description of Artificial Sequence: Synthetic oligonucleotide
uauuuguuuagguucaugu

SEQ ID NO: 1711388 - RNA, 19 nt, Artificial Sequence
  Description of Artificial Sequence: Synthetic oligonucleotide
auucucuuagaacagaagu

SEQ ID NO: 1711389 - RNA, 19 nt, Artificial Sequence
  Description of Artificial Sequence: Synthetic oligonucleotide
uguucuauuuccuuugcug

SEQ ID NO: 1711390 - RNA, 19 nt, Artificial Sequence
  Description of Artificial Sequence: Synthetic oligonucleotide
auacaucugcaucuaacgc

SEQ ID NO: 1711391 - RNA, 19 nt, Artificial Sequence
  Description of Artificial Sequence: Synthetic oligonucleotide
aaauugaagaccugaagua

SEQ ID NO: 1711392 - RNA, 19 nt, Artificial Sequence
  Description of Artificial Sequence: Synthetic oligonucleotide
uuuguuuagguucauguua

SEQ ID NO: 1711393 - RNA, 19 nt, Artificial Sequence
  Description of Artificial Sequence: Synthetic oligonucleotide
uagguuuucugucuagccg

SEQ ID NO: 1711394 - RNA, 19 nt, Artificial Sequence
  Description of Artificial Sequence: Synthetic oligonucleotide
uuucuugcuuccuagcccg

SEQ ID NO: 1711395 - RNA, 19 nt, Artificial Sequence
  Description of Artificial Sequence: Synthetic oligonucleotide
ucuuuuguaauguuaguaa

SEQ ID NO: 1711396 - RNA, 19 nt, Artificial Sequence
  Description of Artificial Sequence: Synthetic oligonucleotide
uccuauaugugacuuuuag

SEQ ID NO: 1711397 - RNA, 19 nt, Artificial Sequence
  Description of Artificial Sequence: Synthetic oligonucleotide
uauaugugacuuuuaggag

SEQ ID NO: 1711398 - RNA, 19 nt, Artificial Sequence
  Description of Artificial Sequence: Synthetic oligonucleotide
uauggguuuccauugaugu

SEQ ID NO: 1711399 - RNA, 19 nt, Artificial Sequence
  Description of Artificial Sequence: Synthetic oligonucleotide
aaacacucauuaucaaaag

SEQ ID NO: 1711400 - RNA, 19 nt, Artificial Sequence
  Description of Artificial Sequence: Synthetic oligonucleotide
uaguuaguaacauaacaac

SEQ ID NO: 1711401 - RNA, 19 nt, Artificial Sequence
  Description of Artificial Sequence: Synthetic oligonucleotide
aaacaaacacucauuauca

SEQ ID NO: 1711402 - RNA, 19 nt, Artificial Sequence
  Description of Artificial Sequence: Synthetic oligonucleotide
gcauaaaccaagaugaugg

SEQ ID NO: 1711403 - RNA, 19 nt, Artificial Sequence
  Description of Artificial Sequence: Synthetic oligonucleotide
aaaguccaggcucaucagg

SEQ ID NO: 1711404 - RNA, 19 nt, Artificial Sequence
  Description of Artificial Sequence: Synthetic oligonucleotide
auaagaaagugcaauggcg

SEQ ID NO: 1711405 - RNA, 19 nt, Artificial Sequence
  Description of Artificial Sequence: Synthetic oligonucleotide
ucauauuuguuuagguuca

SEQ ID NO: 1711406 - RNA, 19 nt, Artificial Sequence
  Description of Artificial Sequence: Synthetic oligonucleotide
uuggaauucauguaaguau

SEQ ID NO: 1711407 - RNA, 19 nt, Artificial Sequence
  Description of Artificial Sequence: Synthetic oligonucleotide
aacaauaacugguuuggaa

SEQ ID NO: 1711408 - RNA, 19 nt, Artificial Sequence
  Description of Artificial Sequence: Synthetic oligonucleotide
aauaacugguuuggaauuc

SEQ ID NO: 1711409 - RNA, 19 nt, Artificial Sequence
  Description of Artificial Sequence: Synthetic oligonucleotide
gaaauugaagaccugaagu

SEQ ID NO: 1711410 - RNA, 19 nt, Artificial Sequence
  Description of Artificial Sequence: Synthetic oligonucleotide
uccgucacaaacacgcgcg

SEQ ID NO: 1711411 - RNA, 19 nt, Artificial Sequence
  Description of Artificial Sequence: Synthetic oligonucleotide
aauuuggauuugaauuacc

SEQ ID NO: 1711412 - RNA, 19 nt, Artificial Sequence
  Description of Artificial Sequence: Synthetic oligonucleotide
uuuuguaauguuaguaaau

SEQ ID NO: 1711413 - RNA, 19 nt, Artificial Sequence
  Description of Artificial Sequence: Synthetic oligonucleotide
uaguaacauaacaacacgu

SEQ ID NO: 1711414 - RNA, 19 nt, Artificial Sequence
  Description of Artificial Sequence: Synthetic oligonucleotide
uuuccauugauguucguuc

SEQ ID NO: 1711415 - RNA, 19 nt, Artificial Sequence
  Description of Artificial Sequence: Synthetic oligonucleotide
uucuuacuggaaaugcucc

SEQ ID NO: 1711416 - RNA, 19 nt, Artificial Sequence
  Description of Artificial Sequence: Synthetic oligonucleotide
gauuugaauuaccuagccc

SEQ ID NO: 1711417 - RNA, 19 nt, Artificial Sequence
  Description of Artificial Sequence: Synthetic oligonucleotide
cauaacaacacguuccauc

SEQ ID NO: 1711418 - RNA, 19 nt, Artificial Sequence
  Description of Artificial Sequence: Synthetic oligonucleotide
auaucuuuaagccuaucaa

SEQ ID NO: 1711419 - RNA, 19 nt, Artificial Sequence
  Description of Artificial Sequence: Synthetic oligonucleotide
uuuaagccuaucaaauuuc

SEQ ID NO: 1711420 - RNA, 19 nt, Artificial Sequence
  Description of Artificial Sequence: Synthetic oligonucleotide
gaaguggccagcauaaacc

SEQ ID NO: 1711421 - RNA, 19 nt, Artificial Sequence
  Description of Artificial Sequence: Synthetic oligonucleotide
uuucuuacuggaaaugcuc

SEQ ID NO: 1711422 - RNA, 19 nt, Artificial Sequence
  Description of Artificial Sequence: Synthetic oligonucleotide
aaagcucugacaggggcac

SEQ ID NO: 1711423 - RNA, 19 nt, Artificial Sequence
  Description of Artificial Sequence: Synthetic oligonucleotide
cucguaauucacuacggag

SEQ ID NO: 1711424 - RNA, 19 nt, Artificial Sequence
  Description of Artificial Sequence: Synthetic oligonucleotide
uucccuauuuauuacauuu

SEQ ID NO: 1711425 - RNA, 19 nt, Artificial Sequence
  Description of Artificial Sequence: Synthetic oligonucleotide
auuauaagaaagaagugaa

SEQ ID NO: 1711426 - RNA, 19 nt, Artificial Sequence
  Description of Artificial Sequence: Synthetic oligonucleotide
guaaguaucuggaaguggc

SEQ ID NO: 1711427 - RNA, 19 nt, Artificial Sequence
  Description of Artificial Sequence: Synthetic oligonucleotide
aguacaauuauaagaaaga

SEQ ID NO: 1711428 - RNA, 19 nt, Artificial Sequence
  Description of Artificial Sequence: Synthetic oligonucleotide
uuugaauuaccuagcccug

SEQ ID NO: 1711429 - RNA, 19 nt, Artificial Sequence
  Description of Artificial Sequence: Synthetic oligonucleotide
acaaauuuccaaaagucca

SEQ ID NO: 1711430 - RNA, 19 nt, Artificial Sequence
  Description of Artificial Sequence: Synthetic oligonucleotide
ugcucuaaaagcucugaca

SEQ ID NO: 1711431 - RNA, 19 nt, Artificial Sequence
  Description of Artificial Sequence: Synthetic oligonucleotide
ugauguucguuccuaucag

SEQ ID NO: 1711432 - RNA, 19 nt, Artificial Sequence
  Description of Artificial Sequence: Synthetic oligonucleotide
acgcuuuugaauuuauucu

SEQ ID NO: 1711433 - RNA, 19 nt, Artificial Sequence
  Description of Artificial Sequence: Synthetic oligonucleotide
cauuaucaaaagcacaguc

SEQ ID NO: 1711434 - RNA, 19 nt, Artificial Sequence
  Description of Artificial Sequence: Synthetic oligonucleotide
auuuccaaaaguccaggcu

SEQ ID NO: 1711435 - RNA, 19 nt, Artificial Sequence
  Description of Artificial Sequence: Synthetic oligonucleotide
uuaagccuaucaaauuucu

SEQ ID NO: 1711436 - RNA, 19 nt, Artificial Sequence
  Description of Artificial Sequence: Synthetic oligonucleotide
auaaaccaagaugauggcg

SEQ ID NO: 1711437 - RNA, 19 nt, Artificial Sequence
  Description of Artificial Sequence: Synthetic oligonucleotide
cauuauaucuuuaagccua

SEQ ID NO: 1711438 - RNA, 19 nt, Artificial Sequence
  Description of Artificial Sequence: Synthetic oligonucleotide
aaaaguccaggcucaucag

SEQ ID NO: 1711439 - RNA, 19 nt, Artificial Sequence
  Description of Artificial Sequence: Synthetic oligonucleotide
uuaauuaaacagccaucac

SEQ ID NO: 1711440 - RNA, 19 nt, Artificial Sequence
  Description of Artificial Sequence: Synthetic oligonucleotide
aggacagcaagucauugug

SEQ ID NO: 1711441 - RNA, 19 nt, Artificial Sequence
  Description of Artificial Sequence: Synthetic oligonucleotide
gaagaaauugaagaccuga

SEQ ID NO: 1711442 - RNA, 19 nt, Artificial Sequence
  Description of Artificial Sequence: Synthetic oligonucleotide
ugcuccaugugguauaaga

SEQ ID NO: 1711443 - RNA, 19 nt, Artificial Sequence
  Description of Artificial Sequence: Synthetic oligonucleotide
guaacauaacaacacguuc

SEQ ID NO: 1711444 - RNA, 19 nt, Artificial Sequence
  Description of Artificial Sequence: Synthetic oligonucleotide
uuuguucuauuuccuuugc

SEQ ID NO: 1711445 - RNA, 19 nt, Artificial Sequence
  Description of Artificial Sequence: Synthetic oligonucleotide
augugguauaagaaagugc

SEQ ID NO: 1711446 - RNA, 19 nt, Artificial Sequence
  Description of Artificial Sequence: Synthetic oligonucleotide
caaacacucauuaucaaaa

SEQ ID NO: 1711447 - RNA, 19 nt, Artificial Sequence
  Description of Artificial Sequence: Synthetic oligonucleotide
ugcaauugcauuguauaca

SEQ ID NO: 1711448 - RNA, 19 nt, Artificial Sequence
  Description of Artificial Sequence: Synthetic oligonucleotide
ucacuuagagucucaguug

SEQ ID NO: 1711449 - RNA, 19 nt, Artificial Sequence
  Description of Artificial Sequence: Synthetic oligonucleotide
auggcgaugaaccuuaauu

SEQ ID NO: 1711450 - RNA, 19 nt, Artificial Sequence
  Description of Artificial Sequence: Synthetic oligonucleotide
gguauaagaaagugcaaug

SEQ ID NO: 1711451 - RNA, 19 nt, Artificial Sequence
  Description of Artificial Sequence: Synthetic oligonucleotide
aacaauacugcuugcuguu

SEQ ID NO: 1711452 - RNA, 19 nt, Artificial Sequence
  Description of Artificial Sequence: Synthetic oligonucleotide
aguuaguaacauaacaaca

SEQ ID NO: 1711453 - RNA, 19 nt, Artificial Sequence
  Description of Artificial Sequence: Synthetic oligonucleotide
uuaguaccagggcaauucc

SEQ ID NO: 1711454 - RNA, 19 nt, Artificial Sequence
  Description of Artificial Sequence: Synthetic oligonucleotide
uucacuacggaggaaugcc

SEQ ID NO: 1711455 - RNA, 19 nt, Artificial Sequence
  Description of Artificial Sequence: Synthetic oligonucleotide
uaaguaucuggaaguggcc

SEQ ID NO: 1711456 - RNA, 19 nt, Artificial Sequence
  Description of Artificial Sequence: Synthetic oligonucleotide
aaguccuaauaauuucccu

SEQ ID NO: 1711457 - RNA, 19 nt, Artificial Sequence
  Description of Artificial Sequence: Synthetic oligonucleotide
uuuggaauucauguaagua

SEQ ID NO: 1711458 - RNA, 19 nt, Artificial Sequence
  Description of Artificial Sequence: Synthetic oligonucleotide
uuuggauuugaauuaccua

SEQ ID NO: 1711459 - RNA, 19 nt, Artificial Sequence
  Description of Artificial Sequence: Synthetic oligonucleotide
auucacuacggaggaaugc

SEQ ID NO: 1711460 - RNA, 19 nt, Artificial Sequence
  Description of Artificial Sequence: Synthetic oligonucleotide
aacucguaauucacuacgg

SEQ ID NO: 1711461 - RNA, 19 nt, Artificial Sequence
  Description of Artificial Sequence: Synthetic oligonucleotide
uguucaguucgcugggucc

SEQ ID NO: 1711462 - RNA, 19 nt, Artificial Sequence
  Description of Artificial Sequence: Synthetic oligonucleotide
ucucuuagaacagaaguua

SEQ ID NO: 1711463 - RNA, 19 nt, Artificial Sequence
  Description of Artificial Sequence: Synthetic oligonucleotide
uugcaauugcauuguauac

SEQ ID NO: 1711464 - RNA, 19 nt, Artificial Sequence
  Description of Artificial Sequence: Synthetic oligonucleotide
ugcuuguuagguuuucugu

SEQ ID NO: 1711465 - RNA, 19 nt, Artificial Sequence
  Description of Artificial Sequence: Synthetic oligonucleotide
uuuccacugguacccaacc

SEQ ID NO: 1711466 - RNA, 19 nt, Artificial Sequence
  Description of Artificial Sequence: Synthetic oligonucleotide
aaacacgcgcggcaucuuc

SEQ ID NO: 1711467 - RNA, 19 nt, Artificial Sequence
  Description of Artificial Sequence: Synthetic oligonucleotide
ucuagccgagcccaaaggu

SEQ ID NO: 1711468 - RNA, 19 nt, Artificial Sequence
  Description of Artificial Sequence: Synthetic oligonucleotide
aguccuaauaauuucccua

SEQ ID NO: 1711469 - RNA, 19 nt, Artificial Sequence
  Description of Artificial Sequence: Synthetic oligonucleotide
aagaaagugcaauggcgau

SEQ ID NO: 1711470 - RNA, 19 nt, Artificial Sequence
  Description of Artificial Sequence: Synthetic oligonucleotide
guugcaauugcauuguaua

SEQ ID NO: 1711471 - RNA, 19 nt, Artificial Sequence
  Description of Artificial Sequence: Synthetic oligonucleotide
uaagccuaucaaauuucug

SEQ ID NO: 1711472 - RNA, 19 nt, Artificial Sequence
  Description of Artificial Sequence: Synthetic oligonucleotide
cauaaaccaagaugauggc

SEQ ID NO: 1711473 - RNA, 19 nt, Artificial Sequence
  Description of Artificial Sequence: Synthetic oligonucleotide
uggagaaaguccuaauaau

SEQ ID NO: 1711474 - RNA, 19 nt, Artificial Sequence
  Description of Artificial Sequence: Synthetic oligonucleotide
gaauguguccguuuucauc

SEQ ID NO: 1711475 - RNA, 19 nt, Artificial Sequence
  Description of Artificial Sequence: Synthetic oligonucleotide
aaaccaggacagcaaguca

SEQ ID NO: 1711476 - RNA, 19 nt, Artificial Sequence
  Description of Artificial Sequence: Synthetic oligonucleotide
uccaaacucguaauucacu

SEQ ID NO: 1711477 - RNA, 19 nt, Artificial Sequence
  Description of Artificial Sequence: Synthetic oligonucleotide
cagucuucaaaccaggaca

SEQ ID NO: 1711478 - RNA, 19 nt, Artificial Sequence
  Description of Artificial Sequence: Synthetic oligonucleotide
cuuaguaccagggcaauuc

SEQ ID NO: 1711479 - RNA, 19 nt, Artificial Sequence
  Description of Artificial Sequence: Synthetic oligonucleotide
agucauauuuguuuagguu

SEQ ID NO: 1711480 - RNA, 19 nt, Artificial Sequence
  Description of Artificial Sequence: Synthetic oligonucleotide
cagggcaauuccaaacucg

SEQ ID NO: 1711481 - RNA, 19 nt, Artificial Sequence
  Description of Artificial Sequence: Synthetic oligonucleotide
gauguucguuccuaucagc

SEQ ID NO: 1711482 - RNA, 19 nt, Artificial Sequence
  Description of Artificial Sequence: Synthetic oligonucleotide
agcccaaagguauggcugg

SEQ ID NO: 1711483 - RNA, 19 nt, Artificial Sequence
  Description of Artificial Sequence: Synthetic oligonucleotide
uguuagguuuucugucuag

SEQ ID NO: 1711484 - RNA, 19 nt, Artificial Sequence
  Description of Artificial Sequence: Synthetic oligonucleotide
uuccaaacucguaauucac

SEQ ID NO: 1711485 - RNA, 19 nt, Artificial Sequence
  Description of Artificial Sequence: Synthetic oligonucleotide
ugcaucuaacgccuuuuca

SEQ ID NO: 1711486 - RNA, 19 nt, Artificial Sequence
  Description of Artificial Sequence: Synthetic oligonucleotide
uggcgaugaaccuuaauua

SEQ ID NO: 1711487 - RNA, 19 nt, Artificial Sequence
  Description of Artificial Sequence: Synthetic oligonucleotide
uguugcaauugcauuguau

SEQ ID NO: 1711488 - RNA, 19 nt, Artificial Sequence
  Description of Artificial Sequence: Synthetic oligonucleotide
ugaagaaauugaagaccug

SEQ ID NO: 1711489 - RNA, 19 nt, Artificial Sequence
  Description of Artificial Sequence: Synthetic oligonucleotide
acuacggaggaaugccaac

SEQ ID NO: 1711490 - RNA, 19 nt, Artificial Sequence
  Description of Artificial Sequence: Synthetic oligonucleotide
uuguaguuaguaacauaac

SEQ ID NO: 1711491 - RNA, 19 nt, Artificial Sequence
  Description of Artificial Sequence: Synthetic oligonucleotide
ugucuagccgagcccaaag

SEQ ID NO: 1711492 - RNA, 19 nt, Artificial Sequence
  Description of Artificial Sequence: Synthetic oligonucleotide
uguuaacaauaacugguuu

SEQ ID NO: 1711493 - RNA, 19 nt, Artificial Sequence
  Description of Artificial Sequence: Synthetic oligonucleotide
ucuuacuggaaaugcucca

SEQ ID NO: 1711494 - RNA, 19 nt, Artificial Sequence
  Description of Artificial Sequence: Synthetic oligonucleotide
guauggcuggccuuuguag

SEQ ID NO: 1711495 - RNA, 19 nt, Artificial Sequence
  Description of Artificial Sequence: Synthetic oligonucleotide
cucuaaaagcucugacagg

SEQ ID NO: 1711496 - RNA, 19 nt, Artificial Sequence
  Description of Artificial Sequence: Synthetic oligonucleotide
uugaagaccugaaguacaa

SEQ ID NO: 1711497 - RNA, 19 nt, Artificial Sequence
  Description of Artificial Sequence: Synthetic oligonucleotide
agcauaaaccaagaugaug

SEQ ID NO: 1711498 - RNA, 19 nt, Artificial Sequence
  Description of Artificial Sequence: Synthetic oligonucleotide
aaugccaacaauacugcuu

SEQ ID NO: 1711499 - RNA, 19 nt, Artificial Sequence
  Description of Artificial Sequence: Synthetic oligonucleotide
augccuuaguaccagggca

SEQ ID NO: 1711500 - RNA, 19 nt, Artificial Sequence
  Description of Artificial Sequence: Synthetic oligonucleotide
aguucgcuggguccuggcc

SEQ ID NO: 1711501 - RNA, 19 nt, Artificial Sequence
  Description of Artificial Sequence: Synthetic oligonucleotide
aaaugcuccaugugguaua

SEQ ID NO: 1711502 - RNA, 19 nt, Artificial Sequence
  Description of Artificial Sequence: Synthetic oligonucleotide
gccagcauaaaccaagaug

SEQ ID NO: 1711503 - RNA, 19 nt, Artificial Sequence
  Description of Artificial Sequence: Synthetic oligonucleotide
uguguccguuuucaucagg

SEQ ID NO: 1711504 - RNA, 19 nt, Artificial Sequence
  Description of Artificial Sequence: Synthetic oligonucleotide
auuuuacccucucugcagu

SEQ ID NO: 1711505 - RNA, 19 nt, Artificial Sequence
  Description of Artificial Sequence: Synthetic oligonucleotide
aacacgcgcggcaucuucc

SEQ ID NO: 1711506 - RNA, 19 nt, Artificial Sequence
  Description of Artificial Sequence: Synthetic oligonucleotide
aguguaggcagauuucuua

SEQ ID NO: 1711507 - RNA, 19 nt, Artificial Sequence
  Description of Artificial Sequence: Synthetic oligonucleotide
ucaguguaggcagauuucu

SEQ ID NO: 1711508 - RNA, 19 nt, Artificial Sequence
  Description of Artificial Sequence: Synthetic oligonucleotide
gaauuaccuagcccuguug

SEQ ID NO: 1711509 - RNA, 19 nt, Artificial Sequence
  Description of Artificial Sequence: Synthetic oligonucleotide
caugccuuaguaccagggc

SEQ ID NO: 1711510 - RNA, 19 nt, Artificial Sequence
  Description of Artificial Sequence: Synthetic oligonucleotide
guccguuuucaucagguac

SEQ ID NO: 1711511 - RNA, 19 nt, Artificial Sequence
  Description of Artificial Sequence: Synthetic oligonucleotide
caaacucguaauucacuac

SEQ ID NO: 1711512 - RNA, 19 nt, Artificial Sequence
  Description of Artificial Sequence: Synthetic oligonucleotide
agaccugaaguacaauuau

SEQ ID NO: 1711513 - RNA, 19 nt, Artificial Sequence
  Description of Artificial Sequence: Synthetic oligonucleotide
ugccauacaaucccuucaa

SEQ ID NO: 1711514 - RNA, 19 nt, Artificial Sequence
  Description of Artificial Sequence: Synthetic oligonucleotide
uuaccuagcccuguugcug

SEQ ID NO: 1711515 - RNA, 19 nt, Artificial Sequence
  Description of Artificial Sequence: Synthetic oligonucleotide
acacguuccauccacuuuu

SEQ ID NO: 1711516 - RNA, 19 nt, Artificial Sequence
  Description of Artificial Sequence: Synthetic oligonucleotide
guauacaucugcaucuaac

SEQ ID NO: 1711517 - RNA, 19 nt, Artificial Sequence
  Description of Artificial Sequence: Synthetic oligonucleotide
uaccagggcaauuccaaac

SEQ ID NO: 1711518 - RNA, 19 nt, Artificial Sequence
  Description of Artificial Sequence: Synthetic oligonucleotide
aucaggaucaugccuuagu

SEQ ID NO: 1711519 - RNA, 19 nt, Artificial Sequence
  Description of Artificial Sequence: Synthetic oligonucleotide
aagaccugaaguacaauua

SEQ ID NO: 1711520 - RNA, 19 nt, Artificial Sequence
  Description of Artificial Sequence: Synthetic oligonucleotide
uguaggcagauuucuuacu

SEQ ID NO: 1711521 - RNA, 19 nt, Artificial Sequence
  Description of Artificial Sequence: Synthetic oligonucleotide
aagaaacgcuuuugaauuu

SEQ ID NO: 1711522 - RNA, 19 nt, Artificial Sequence
  Description of Artificial Sequence: Synthetic oligonucleotide
aguaacauaacaacacguu

SEQ ID NO: 1711523 - RNA, 19 nt, Artificial Sequence
  Description of Artificial Sequence: Synthetic oligonucleotide
agguacuggcuucccauuc

SEQ ID NO: 1711524 - RNA, 19 nt, Artificial Sequence
  Description of Artificial Sequence: Synthetic oligonucleotide
aauucacuacggaggaaug

SEQ ID NO: 1711525 - RNA, 19 nt, Artificial Sequence
  Description of Artificial Sequence: Synthetic oligonucleotide
cauguaaguaucuggaagu

SEQ ID NO: 1711526 - RNA, 19 nt, Artificial Sequence
  Description of Artificial Sequence: Synthetic oligonucleotide
ggauuugaauuaccuagcc

SEQ ID NO: 1711527 - RNA, 19 nt, Artificial Sequence
  Description of Artificial Sequence: Synthetic oligonucleotide
auuaccuagcccuguugcu

SEQ ID NO: 1711528 - RNA, 19 nt, Artificial Sequence
  Description of Artificial Sequence: Synthetic oligonucleotide
ucauuaucaaaagcacagu

SEQ ID NO: 1711529 - RNA, 19 nt, Artificial Sequence
  Description of Artificial Sequence: Synthetic oligonucleotide
gcaucuaacgccuuuucac

SEQ ID NO: 1711530 - RNA, 19 nt, Artificial Sequence
  Description of Artificial Sequence: Synthetic oligonucleotide
gucauuguguuucagugua

SEQ ID NO: 1711531 - RNA, 19 nt, Artificial Sequence
  Description of Artificial Sequence: Synthetic oligonucleotide
uguauacaucugcaucuaa

SEQ ID NO: 1711532 - RNA, 19 nt, Artificial Sequence
  Description of Artificial Sequence: Synthetic oligonucleotide
accugaaguacaauuauaa

SEQ ID NO: 1711533 - RNA, 19 nt, Artificial Sequence
  Description of Artificial Sequence: Synthetic oligonucleotide
ugccuuaguaccagggcaa

SEQ ID NO: 1711534 - RNA, 19 nt, Artificial Sequence
  Description of Artificial Sequence: Synthetic oligonucleotide
augccauacaaucccuuca

SEQ ID NO: 1711535 - RNA, 19 nt, Artificial Sequence
  Description of Artificial Sequence: Synthetic oligonucleotide
auuucuuacuggaaaugcu

SEQ ID NO: 1711536 - RNA, 19 nt, Artificial Sequence
  Description of Artificial Sequence: Synthetic oligonucleotide
aacacguuccauccacuuu

SEQ ID NO: 1711537 - RNA, 19 nt, Artificial Sequence
  Description of Artificial Sequence: Synthetic oligonucleotide
aacugguuuggaauucaug

SEQ ID NO: 1711538 - RNA, 19 nt, Artificial Sequence
  Description of Artificial Sequence: Synthetic oligonucleotide
acucguaauucacuacgga

SEQ ID NO: 1711539 - RNA, 19 nt, Artificial Sequence
  Description of Artificial Sequence: Synthetic oligonucleotide
aggggcacggcacaaauuu

SEQ ID NO: 1711540 - RNA, 19 nt, Artificial Sequence
  Description of Artificial Sequence: Synthetic oligonucleotide
ucaccacaaugccauacaa

SEQ ID NO: 1711541 - RNA, 19 nt, Artificial Sequence
  Description of Artificial Sequence: Synthetic oligonucleotide
ucacuacggaggaaugcca

SEQ ID NO: 1711542 - RNA, 19 nt, Artificial Sequence
  Description of Artificial Sequence: Synthetic oligonucleotide
ugucagcuugcuuguuagg

SEQ ID NO: 1711543 - RNA, 19 nt, Artificial Sequence
  Description of Artificial Sequence: Synthetic oligonucleotide
gaucaugccuuaguaccag

SEQ ID NO: 1711544 - RNA, 19 nt, Artificial Sequence
  Description of Artificial Sequence: Synthetic oligonucleotide
uagccgagcccaaagguau

SEQ ID NO: 1711545 - RNA, 19 nt, Artificial Sequence
  Description of Artificial Sequence: Synthetic oligonucleotide
cuaacgccuuuucacuuag

SEQ ID NO: 1711546 - RNA, 19 nt, Artificial Sequence
  Description of Artificial Sequence: Synthetic oligonucleotide
uaccuagcccuguugcugc

SEQ ID NO: 1711547 - RNA, 19 nt, Artificial Sequence
  Description of Artificial Sequence: Synthetic oligonucleotide
ucucugcagucuucaaacc

SEQ ID NO: 1711548 - RNA, 19 nt, Artificial Sequence
  Description of Artificial Sequence: Synthetic oligonucleotide
uguucguuccuaucagcuc

SEQ ID NO: 1711549 - RNA, 19 nt, Artificial Sequence
  Description of Artificial Sequence: Synthetic oligonucleotide
ugaauuaccuagcccuguu

SEQ ID NO: 1711550 - RNA, 19 nt, Artificial Sequence
  Description of Artificial Sequence: Synthetic oligonucleotide
caaucccuucaauuuuacc

SEQ ID NO: 1711551 - RNA, 19 nt, Artificial Sequence
  Description of Artificial Sequence: Synthetic oligonucleotide
gucuagccgagcccaaagg

SEQ ID NO: 1711552 - RNA, 19 nt, Artificial Sequence
  Description of Artificial Sequence: Synthetic oligonucleotide
cagcaagucauuguguuuc

SEQ ID NO: 1711553 - RNA, 19 nt, Artificial Sequence
  Description of Artificial Sequence: Synthetic oligonucleotide
uaucaaaagcacagucaua

SEQ ID NO: 1711554 - RNA, 19 nt, Artificial Sequence
  Description of Artificial Sequence: Synthetic oligonucleotide
agauggagaaaguccugga

SEQ ID NO: 1711555 - RNA, 19 nt, Artificial Sequence
  Description of Artificial Sequence: Synthetic oligonucleotide
ucuaacgccuuuucacuua

SEQ ID NO: 1711556 - RNA, 19 nt, Artificial Sequence
  Description of Artificial Sequence: Synthetic oligonucleotide
aaagugcaauggcgauuuc

SEQ ID NO: 1711557 - RNA, 19 nt, Artificial Sequence
  Description of Artificial Sequence: Synthetic oligonucleotide
guguguucaguucgcuggg

SEQ ID NO: 1711558 - RNA, 19 nt, Artificial Sequence
  Description of Artificial Sequence: Synthetic oligonucleotide
cuuuuaggaggaaauuaaa

SEQ ID NO: 1711559 - RNA, 19 nt, Artificial Sequence
  Description of Artificial Sequence: Synthetic oligonucleotide
uuuccuuugcugguaucca

SEQ ID NO: 1711560 - RNA, 19 nt, Artificial Sequence
  Description of Artificial Sequence: Synthetic oligonucleotide
ucggaagauggagaaaguc

SEQ ID NO: 1711561 - RNA, 19 nt, Artificial Sequence
  Description of Artificial Sequence: Synthetic oligonucleotide
acaucaagcauuauaucuu

SEQ ID NO: 1711562 - RNA, 19 nt, Artificial Sequence
  Description of Artificial Sequence: Synthetic oligonucleotide
ccugaaguacaauuauaag

SEQ ID NO: 1711563 - RNA, 19 nt, Artificial Sequence
  Description of Artificial Sequence: Synthetic oligonucleotide
uggcugaugcucccgcuug

SEQ ID NO: 1711564 - RNA, 19 nt, Artificial Sequence
  Description of Artificial Sequence: Synthetic oligonucleotide
uuguuagguuuucugucua

SEQ ID NO: 1711565 - RNA, 19 nt, Artificial Sequence
  Description of Artificial Sequence: Synthetic oligonucleotide
acaauacugcuugcuguuc

SEQ ID NO: 1711566 - RNA, 19 nt, Artificial Sequence
  Description of Artificial Sequence: Synthetic oligonucleotide
uaacaauaacugguuugga

SEQ ID NO: 1711567 - RNA, 19 nt, Artificial Sequence
  Description of Artificial Sequence: Synthetic oligonucleotide
aaccuuaauuaaacagcca

SEQ ID NO: 1711568 - RNA, 19 nt, Artificial Sequence
  Description of Artificial Sequence: Synthetic oligonucleotide
auaacugguuuggaauuca

SEQ ID NO: 1711569 - RNA, 19 nt, Artificial Sequence
  Description of Artificial Sequence: Synthetic oligonucleotide
uugaauuaccuagcccugu

SEQ ID NO: 1711570 - RNA, 19 nt, Artificial Sequence
  Description of Artificial Sequence: Synthetic oligonucleotide
uucguuccuaucagcucca

SEQ ID NO: 1711571 - RNA, 19 nt, Artificial Sequence
  Description of Artificial Sequence: Synthetic oligonucleotide
auguucguuccuaucagcu

SEQ ID NO: 1711572 - RNA, 19 nt, Artificial Sequence
  Description of Artificial Sequence: Synthetic oligonucleotide
guauggguuuccauugaug

SEQ ID NO: 1711573 - RNA, 19 nt, Artificial Sequence
  Description of Artificial Sequence: Synthetic oligonucleotide
acaaacacgcgcggcaucu

SEQ ID NO: 1711574 - RNA, 19 nt, Artificial Sequence
  Description of Artificial Sequence: Synthetic oligonucleotide
auuucccuauuuauuacau

SEQ ID NO: 1711575 - RNA, 19 nt, Artificial Sequence
  Description of Artificial Sequence: Synthetic oligonucleotide
aaugcuccaugugguauaa

SEQ ID NO: 1711576 - RNA, 19 nt, Artificial Sequence
  Description of Artificial Sequence: Synthetic oligonucleotide
uuccgcugcaccgagccca

SEQ ID NO: 1711577 - RNA, 19 nt, Artificial Sequence
  Description of Artificial Sequence: Synthetic oligonucleotide
agcucugacaggggcacgg

SEQ ID NO: 1711578 - RNA, 19 nt, Artificial Sequence
  Description of Artificial Sequence: Synthetic oligonucleotide
uuccuagcccguauggguu

SEQ ID NO: 1711579 - RNA, 19 nt, Artificial Sequence
  Description of Artificial Sequence: Synthetic oligonucleotide
gaugcucccgcuuggccga

SEQ ID NO: 1711580 - RNA, 19 nt, Artificial Sequence
  Description of Artificial Sequence: Synthetic oligonucleotide
uaacugguuuggaauucau

SEQ ID NO: 1711581 - RNA, 19 nt, Artificial Sequence
  Description of Artificial Sequence: Synthetic oligonucleotide
uuucccuauuuauuacauu

SEQ ID NO: 1711582 - RNA, 19 nt, Artificial Sequence
  Description of Artificial Sequence: Synthetic oligonucleotide
cuuguuagguuuucugucu

SEQ ID NO: 1711583 - RNA, 19 nt, Artificial Sequence
  Description of Artificial Sequence: Synthetic oligonucleotide
gcgauuucuugcuuccuag

SEQ ID NO: 1711584 - RNA, 19 nt, Artificial Sequence
  Description of Artificial Sequence: Synthetic oligonucleotide
uuuuacccucucugcaguc

SEQ ID NO: 1711585 - RNA, 19 nt, Artificial Sequence
  Description of Artificial Sequence: Synthetic oligonucleotide
aucuaacgccuuuucacuu

SEQ ID NO: 1711586 - RNA, 19 nt, Artificial Sequence
  Description of Artificial Sequence: Synthetic oligonucleotide
uucgcuggguccuggccug

SEQ ID NO: 1711587 - RNA, 19 nt, Artificial Sequence
  Description of Artificial Sequence: Synthetic oligonucleotide
aguaccagggcaauuccaa

SEQ ID NO: 1711588 - RNA, 19 nt, Artificial Sequence
  Description of Artificial Sequence: Synthetic oligonucleotide
uccuaauaauuucccuauu

SEQ ID NO: 1711589 - RNA, 19 nt, Artificial Sequence
  Description of Artificial Sequence: Synthetic oligonucleotide
gguucauguuaacaauaac

SEQ ID NO: 1711590 - RNA, 19 nt, Artificial Sequence
  Description of Artificial Sequence: Synthetic oligonucleotide
agugcaauggcgauuucuu

SEQ ID NO: 1711591 - RNA, 19 nt, Artificial Sequence
  Description of Artificial Sequence: Synthetic oligonucleotide
gugcaauggcgauuucuug

SEQ ID NO: 1711592 - RNA, 19 nt, Artificial Sequence
  Description of Artificial Sequence: Synthetic oligonucleotide
auguuaacaauaacugguu

SEQ ID NO: 1711593 - RNA, 19 nt, Artificial Sequence
  Description of Artificial Sequence: Synthetic oligonucleotide
gaaagugcaauggcgauuu

SEQ ID NO: 1711594 - RNA, 19 nt, Artificial Sequence
  Description of Artificial Sequence: Synthetic oligonucleotide
agggcaauuccaaacucgu

SEQ ID NO: 1711595 - RNA, 19 nt, Artificial Sequence
  Description of Artificial Sequence: Synthetic oligonucleotide
uguuucaguguaggcagau

SEQ ID NO: 1711596 - RNA, 19 nt, Artificial Sequence
  Description of Artificial Sequence: Synthetic oligonucleotide
ggcacaaauuuccaaaagu

SEQ ID NO: 1711597 - RNA, 19 nt, Artificial Sequence
  Description of Artificial Sequence: Synthetic oligonucleotide
gcagucuucaaaccaggac

SEQ ID NO: 1711598 - RNA, 19 nt, Artificial Sequence
  Description of Artificial Sequence: Synthetic oligonucleotide
guccuaauaauuucccuau

SEQ ID NO: 1711599 - RNA, 19 nt, Artificial Sequence
  Description of Artificial Sequence: Synthetic oligonucleotide
guaucuggaaguggccagc

SEQ ID NO: 1711600 - RNA, 19 nt, Artificial Sequence
  Description of Artificial Sequence: Synthetic oligonucleotide
cucaguugccaaaacuuua

SEQ ID NO: 1711601 - RNA, 19 nt, Artificial Sequence
  Description of Artificial Sequence: Synthetic oligonucleotide
cuuugcugguauccagcac

SEQ ID NO: 1711602 - RNA, 19 nt, Artificial Sequence
  Description of Artificial Sequence: Synthetic oligonucleotide
ucugcaucuaacgccuuuu

SEQ ID NO: 1711603 - RNA, 19 nt, Artificial Sequence
  Description of Artificial Sequence: Synthetic oligonucleotide
uuacccucucugcagucuu

SEQ ID NO: 1711604 - RNA, 19 nt, Artificial Sequence
  Description of Artificial Sequence: Synthetic oligonucleotide
ccagggucugcucuaaaag

SEQ ID NO: 1711605 - RNA, 19 nt, Artificial Sequence
  Description of Artificial Sequence: Synthetic oligonucleotide
auguguccguuuucaucag

SEQ ID NO: 1711606 - RNA, 19 nt, Artificial Sequence
  Description of Artificial Sequence: Synthetic oligonucleotide
agaaacgcuuuugaauuua

SEQ ID NO: 1711607 - RNA, 19 nt, Artificial Sequence
  Description of Artificial Sequence: Synthetic oligonucleotide
uguccguuuucaucaggua

SEQ ID NO: 1711608 - RNA, 19 nt, Artificial Sequence
  Description of Artificial Sequence: Synthetic oligonucleotide
gagcaauuuggauuugaau

SEQ ID NO: 1711609 - RNA, 19 nt, Artificial Sequence
  Description of Artificial Sequence: Synthetic oligonucleotide
ucaguucgcuggguccugg

SEQ ID NO: 1711610 - RNA, 19 nt, Artificial Sequence
  Description of Artificial Sequence: Synthetic oligonucleotide
auuauaucuuuaagccuau

SEQ ID NO: 1711611 - RNA, 19 nt, Artificial Sequence
  Description of Artificial Sequence: Synthetic oligonucleotide
agaaaguccuggagaaagu

SEQ ID NO: 1711612 - RNA, 19 nt, Artificial Sequence
  Description of Artificial Sequence: Synthetic oligonucleotide
caucuaacgccuuuucacu

SEQ ID NO: 1711613 - RNA, 19 nt, Artificial Sequence
  Description of Artificial Sequence: Synthetic oligonucleotide
uccuggagaaaguccuaau

SEQ ID NO: 1711614 - RNA, 19 nt, Artificial Sequence
  Description of Artificial Sequence: Synthetic oligonucleotide
auggguuuccauugauguu

SEQ ID NO: 1711615 - RNA, 19 nt, Artificial Sequence
  Description of Artificial Sequence: Synthetic oligonucleotide
uagcccuguugcugcuucg

SEQ ID NO: 1711616 - RNA, 19 nt, Artificial Sequence
  Description of Artificial Sequence: Synthetic oligonucleotide
agaaagugcaauggcgauu

SEQ ID NO: 1711617 - RNA, 19 nt, Artificial Sequence
  Description of Artificial Sequence: Synthetic oligonucleotide
ggaagauggagaaaguccu

SEQ ID NO: 1711618 - RNA, 19 nt, Artificial Sequence
  Description of Artificial Sequence: Synthetic oligonucleotide
uuauaucuuuaagccuauc

SEQ ID NO: 1711619 - RNA, 19 nt, Artificial Sequence
  Description of Artificial Sequence: Synthetic oligonucleotide
cuagcccuguugcugcuuc

SEQ ID NO: 1711620 - RNA, 19 nt, Artificial Sequence
  Description of Artificial Sequence: Synthetic oligonucleotide
ccacugguacccaaccagg

SEQ ID NO: 1711621 - RNA, 19 nt, Artificial Sequence
  Description of Artificial Sequence: Synthetic oligonucleotide
guguucaguucgcuggguc

SEQ ID NO: 1711622 - RNA, 19 nt, Artificial Sequence
  Description of Artificial Sequence: Synthetic oligonucleotide
augauggcgaugaaccuua

SEQ ID NO: 1711623 - RNA, 19 nt, Artificial Sequence
  Description of Artificial Sequence: Synthetic oligonucleotide
cuacggaggaaugccaaca

SEQ ID NO: 1711624 - RNA, 19 nt, Artificial Sequence
  Description of Artificial Sequence: Synthetic oligonucleotide
acggaggaaugccaacaau

SEQ ID NO: 1711625 - RNA, 19 nt, Artificial Sequence
  Description of Artificial Sequence: Synthetic oligonucleotide
cuagccgagcccaaaggua

SEQ ID NO: 1711626 - RNA, 19 nt, Artificial Sequence
  Description of Artificial Sequence: Synthetic oligonucleotide
ggugcccacgcccagcgug

SEQ ID NO: 1711627 - RNA, 19 nt, Artificial Sequence
  Description of Artificial Sequence: Synthetic oligonucleotide
cuuccuagcccguaugggu

SEQ ID NO: 1711628 - RNA, 19 nt, Artificial Sequence
  Description of Artificial Sequence: Synthetic oligonucleotide
caucuuccgcugcaccgag

SEQ ID NO: 1711629 - RNA, 19 nt, Artificial Sequence
  Description of Artificial Sequence: Synthetic oligonucleotide
acccaaccaggaauguguc

SEQ ID NO: 1711630 - RNA, 19 nt, Artificial Sequence
  Description of Artificial Sequence: Synthetic oligonucleotide
agcccuguugcugcuucgg

SEQ ID NO: 1711631 - RNA, 19 nt, Artificial Sequence
  Description of Artificial Sequence: Synthetic oligonucleotide
cccguauggguuuccauug

SEQ ID NO: 1711632 - RNA, 19 nt, Artificial Sequence
  Description of Artificial Sequence: Synthetic oligonucleotide
caauaacugguuuggaauu

SEQ ID NO: 1711633 - RNA, 19 nt, Artificial Sequence
  Description of Artificial Sequence: Synthetic oligonucleotide
gcauuauaucuuuaagccu

SEQ ID NO: 1711634 - RNA, 19 nt, Artificial Sequence
  Description of Artificial Sequence: Synthetic oligonucleotide
cugcaucuaacgccuuuuc

SEQ ID NO: 1711635 - RNA, 19 nt, Artificial Sequence
  Description of Artificial Sequence: Synthetic oligonucleotide
ugaagaccugaaguacaau

SEQ ID NO: 1711636 - RNA, 19 nt, Artificial Sequence
  Description of Artificial Sequence: Synthetic oligonucleotide
accaggaauguguccguuu

SEQ ID NO: 1711637 - RNA, 19 nt, Artificial Sequence
  Description of Artificial Sequence: Synthetic oligonucleotide
cagauuucuuacuggaaau

SEQ ID NO: 1711638 - RNA, 19 nt, Artificial Sequence
  Description of Artificial Sequence: Synthetic oligonucleotide
gggcacggcacaaauuucc

SEQ ID NO: 1711639 - RNA, 19 nt, Artificial Sequence
  Description of Artificial Sequence: Synthetic oligonucleotide
cagucauauuuguuuaggu

SEQ ID NO: 1711640 - RNA, 19 nt, Artificial Sequence
  Description of Artificial Sequence: Synthetic oligonucleotide
gaccugaaguacaauuaua

SEQ ID NO: 1711641 - RNA, 19 nt, Artificial Sequence
  Description of Artificial Sequence: Synthetic oligonucleotide
cacugguacccaaccagga

SEQ ID NO: 1711642 - RNA, 19 nt, Artificial Sequence
  Description of Artificial Sequence: Synthetic oligonucleotide
uguugcugcuucggaagau

SEQ ID NO: 1711643 - RNA, 19 nt, Artificial Sequence
  Description of Artificial Sequence: Synthetic oligonucleotide
gaugauggcgaugaaccuu

SEQ ID NO: 1711644 - RNA, 19 nt, Artificial Sequence
  Description of Artificial Sequence: Synthetic oligonucleotide
gcuuccuagcccguauggg

SEQ ID NO: 1711645 - RNA, 19 nt, Artificial Sequence
  Description of Artificial Sequence: Synthetic oligonucleotide
uuggccgagggcucggcuu

SEQ ID NO: 1711646 - RNA, 19 nt, Artificial Sequence
  Description of Artificial Sequence: Synthetic oligonucleotide
gucagcuugcuuguuaggu

SEQ ID NO: 1711647 - RNA, 19 nt, Artificial Sequence
  Description of Artificial Sequence: Synthetic oligonucleotide
caccuccgucacaaacacg

SEQ ID NO: 1711648 - RNA, 19 nt, Artificial Sequence
  Description of Artificial Sequence: Synthetic oligonucleotide
uucuugcuuccuagcccgu

SEQ ID NO: 1711649 - RNA, 19 nt, Artificial Sequence
  Description of Artificial Sequence: Synthetic oligonucleotide
cacuacggaggaaugccaa

SEQ ID NO: 1711650 - RNA, 19 nt, Artificial Sequence
  Description of Artificial Sequence: Synthetic oligonucleotide
gccuuuguaguuaguaaca

SEQ ID NO: 1711651 - RNA, 19 nt, Artificial Sequence
  Description of Artificial Sequence: Synthetic oligonucleotide
uccuagcccguauggguuu

SEQ ID NO: 1711652 - RNA, 19 nt, Artificial Sequence
  Description of Artificial Sequence: Synthetic oligonucleotide
gucugcucuaaaagcucug

SEQ ID NO: 1711653 - RNA, 19 nt, Artificial Sequence
  Description of Artificial Sequence: Synthetic oligonucleotide
auguuccaaagaaacgcuu

SEQ ID NO: 1711654 - RNA, 19 nt, Artificial Sequence
  Description of Artificial Sequence: Synthetic oligonucleotide
caucaagcauuauaucuuu

SEQ ID NO: 1711655 - RNA, 19 nt, Artificial Sequence
  Description of Artificial Sequence: Synthetic oligonucleotide
acaacacguuccauccacu

SEQ ID NO: 1711656 - RNA, 19 nt, Artificial Sequence
  Description of Artificial Sequence: Synthetic oligonucleotide
cguaauucacuacggagga

SEQ ID NO: 1711657 - RNA, 19 nt, Artificial Sequence
  Description of Artificial Sequence: Synthetic oligonucleotide
cuaucagcuccagggucug

SEQ ID NO: 1711658 - RNA, 19 nt, Artificial Sequence
  Description of Artificial Sequence: Synthetic oligonucleotide
ggcugaugcucccgcuugg

SEQ ID NO: 1711659 - RNA, 19 nt, Artificial Sequence
  Description of Artificial Sequence: Synthetic oligonucleotide
guucgcuggguccuggccu

SEQ ID NO: 1711660 - RNA, 19 nt, Artificial Sequence
  Description of Artificial Sequence: Synthetic oligonucleotide
acauaacaacacguuccau

SEQ ID NO: 1711661 - RNA, 19 nt, Artificial Sequence
  Description of Artificial Sequence: Synthetic oligonucleotide
ugauggcgaugaaccuuaa

SEQ ID NO: 1711662 - RNA, 19 nt, Artificial Sequence
  Description of Artificial Sequence: Synthetic oligonucleotide
ggaucaugccuuaguacca

SEQ ID NO: 1711663 - RNA, 19 nt, Artificial Sequence
  Description of Artificial Sequence: Synthetic oligonucleotide
caguucgcuggguccuggc

SEQ ID NO: 1711664 - RNA, 19 nt, Artificial Sequence
  Description of Artificial Sequence: Synthetic oligonucleotide
cuguugcugcuucggaaga

SEQ ID NO: 1711665 - RNA, 19 nt, Artificial Sequence
  Description of Artificial Sequence: Synthetic oligonucleotide
acgcccagcguguguucag

SEQ ID NO: 1711666 - RNA, 19 nt, Artificial Sequence
  Description of Artificial Sequence: Synthetic oligonucleotide
uggccgagggcucggcuuu

SEQ ID NO: 1711667 - RNA, 19 nt, Artificial Sequence
  Description of Artificial Sequence: Synthetic oligonucleotide
uccaaaaguccaggcucau

SEQ ID NO: 1711668 - RNA, 19 nt, Artificial Sequence
  Description of Artificial Sequence: Synthetic oligonucleotide
ucuugcuuccuagcccgua

SEQ ID NO: 1711669 - RNA, 19 nt, Artificial Sequence
  Description of Artificial Sequence: Synthetic oligonucleotide
caucagguacuggcuuccc

SEQ ID NO: 1711670 - RNA, 19 nt, Artificial Sequence
  Description of Artificial Sequence: Synthetic oligonucleotide
gugguauaagaaagugcaa

SEQ ID NO: 1711671 - RNA, 19 nt, Artificial Sequence
  Description of Artificial Sequence: Synthetic oligonucleotide
cuuuuccacugguacccaa

SEQ ID NO: 1711672 - RNA, 19 nt, Artificial Sequence
  Description of Artificial Sequence: Synthetic oligonucleotide
ucguuccuaucagcuccag

SEQ ID NO: 1711673 - RNA, 19 nt, Artificial Sequence
  Description of Artificial Sequence: Synthetic oligonucleotide
gaaacgcuuuugaauuuau

SEQ ID NO: 1711674 - RNA, 19 nt, Artificial Sequence
  Description of Artificial Sequence: Synthetic oligonucleotide
gccaaaacuuuaaauggcu

SEQ ID NO: 1711675 - RNA, 19 nt, Artificial Sequence
  Description of Artificial Sequence: Synthetic oligonucleotide
aucaagcauuauaucuuua

SEQ ID NO: 1711676 - RNA, 19 nt, Artificial Sequence
  Description of Artificial Sequence: Synthetic oligonucleotide
cccuauuuauuacauuuua

SEQ ID NO: 1711677 - RNA, 19 nt, Artificial Sequence
  Description of Artificial Sequence: Synthetic oligonucleotide
uagcccguauggguuucca

SEQ ID NO: 1711678 - RNA, 19 nt, Artificial Sequence
  Description of Artificial Sequence: Synthetic oligonucleotide
accgagcccaggcggcuca

SEQ ID NO: 1711679 - RNA, 19 nt, Artificial Sequence
  Description of Artificial Sequence: Synthetic oligonucleotide
cccaaccaggaaugugucc

SEQ ID NO: 1711680 - RNA, 19 nt, Artificial Sequence
  Description of Artificial Sequence: Synthetic oligonucleotide
guaauucacuacggaggaa

SEQ ID NO: 1711681 - RNA, 19 nt, Artificial Sequence
  Description of Artificial Sequence: Synthetic oligonucleotide
cucugacaggggcacggca

SEQ ID NO: 1711682 - RNA, 19 nt, Artificial Sequence
  Description of Artificial Sequence: Synthetic oligonucleotide
ccuccgucacaaacacgcg

SEQ ID NO: 1711683 - RNA, 19 nt, Artificial Sequence
  Description of Artificial Sequence: Synthetic oligonucleotide
gauggcgaugaaccuuaau

SEQ ID NO: 1711684 - RNA, 19 nt, Artificial Sequence
  Description of Artificial Sequence: Synthetic oligonucleotide
cuagcccguauggguuucc

SEQ ID NO: 1711685 - RNA, 19 nt, Artificial Sequence
  Description of Artificial Sequence: Synthetic oligonucleotide
ggcgauuucuugcuuccua

SEQ ID NO: 1711686 - RNA, 19 nt, Artificial Sequence
  Description of Artificial Sequence: Synthetic oligonucleotide
caauuccaaacucguaauu

SEQ ID NO: 1711687 - RNA, 19 nt, Artificial Sequence
  Description of Artificial Sequence: Synthetic oligonucleotide
ccuaauaauuucccuauuu

SEQ ID NO: 1711688 - RNA, 19 nt, Artificial Sequence
  Description of Artificial Sequence: Synthetic oligonucleotide
cagcuugcuuguuagguuu

SEQ ID NO: 1711689 - RNA, 19 nt, Artificial Sequence
  Description of Artificial Sequence: Synthetic oligonucleotide
accuagcccuguugcugcu

SEQ ID NO: 1711690 - RNA, 19 nt, Artificial Sequence
  Description of Artificial Sequence: Synthetic oligonucleotide
caccacaaugccauacaau

SEQ ID NO: 1711691 - RNA, 19 nt, Artificial Sequence
  Description of Artificial Sequence: Synthetic oligonucleotide
gcucaucaggaucaugccu

SEQ ID NO: 1711692 - RNA, 19 nt, Artificial Sequence
  Description of Artificial Sequence: Synthetic oligonucleotide
cggcacaaauuuccaaaag

SEQ ID NO: 1711693 - RNA, 19 nt, Artificial Sequence
  Description of Artificial Sequence: Synthetic oligonucleotide
ccgucacaaacacgcgcgg

SEQ ID NO: 1711694 - RNA, 19 nt, Artificial Sequence
  Description of Artificial Sequence: Synthetic oligonucleotide
cuugcuuccuagcccguau

SEQ ID NO: 1711695 - RNA, 19 nt, Artificial Sequence
  Description of Artificial Sequence: Synthetic oligonucleotide
cggaggaaugccaacaaua

SEQ ID NO: 1711696 - RNA, 19 nt, Artificial Sequence
  Description of Artificial Sequence: Synthetic oligonucleotide
cguuccuaucagcuccagg

SEQ ID NO: 1711697 - RNA, 19 nt, Artificial Sequence
  Description of Artificial Sequence: Synthetic oligonucleotide
augcuccaugugguauaag

SEQ ID NO: 1711698 - RNA, 19 nt, Artificial Sequence
  Description of Artificial Sequence: Synthetic oligonucleotide
cgagggcucggcuuucacc

SEQ ID NO: 1711699 - RNA, 19 nt, Artificial Sequence
  Description of Artificial Sequence: Synthetic oligonucleotide
ccuaucagcuccagggucu

SEQ ID NO: 1711700 - RNA, 19 nt, Artificial Sequence
  Description of Artificial Sequence: Synthetic oligonucleotide
ggcacggcacaaauuucca

SEQ ID NO: 1711701 - RNA, 19 nt, Artificial Sequence
  Description of Artificial Sequence: Synthetic oligonucleotide
agccgagcccaaagguaug

SEQ ID NO: 1711702 - RNA, 19 nt, Artificial Sequence
  Description of Artificial Sequence: Synthetic oligonucleotide
ccguuuucaucagguacug

SEQ ID NO: 1711703 - RNA, 19 nt, Artificial Sequence
  Description of Artificial Sequence: Synthetic oligonucleotide
uggugcccacgcccagcgu

SEQ ID NO: 1711704 - RNA, 19 nt, Artificial Sequence
  Description of Artificial Sequence: Synthetic oligonucleotide
caacacguuccauccacuu

SEQ ID NO: 1711705 - RNA, 19 nt, Artificial Sequence
  Description of Artificial Sequence: Synthetic oligonucleotide
cagcauaaaccaagaugau

SEQ ID NO: 1711706 - RNA, 19 nt, Artificial Sequence
  Description of Artificial Sequence: Synthetic oligonucleotide
caaugccauacaaucccuu

SEQ ID NO: 1711707 - RNA, 19 nt, Artificial Sequence
  Description of Artificial Sequence: Synthetic oligonucleotide
caaccaggaauguguccgu

SEQ ID NO: 1711708 - RNA, 19 nt, Artificial Sequence
  Description of Artificial Sequence: Synthetic oligonucleotide
gcacggcacaaauuuccaa

SEQ ID NO: 1711709 - RNA, 19 nt, Artificial Sequence
  Description of Artificial Sequence: Synthetic oligonucleotide
gccaacaauacugcuugcu

SEQ ID NO: 1711710 - RNA, 19 nt, Artificial Sequence
  Description of Artificial Sequence: Synthetic oligonucleotide
ggaauguguccguuuucau

SEQ ID NO: 1711711 - RNA, 19 nt, Artificial Sequence
  Description of Artificial Sequence: Synthetic oligonucleotide
cacgcccagcguguguuca

SEQ ID NO: 1711712 - RNA, 19 nt, Artificial Sequence
  Description of Artificial Sequence: Synthetic oligonucleotide
cguuuucaucagguacugg

SEQ ID NO: 1711713 - RNA, 19 nt, Artificial Sequence
  Description of Artificial Sequence: Synthetic oligonucleotide
caguguaggcagauuucuu

SEQ ID NO: 1711714 - RNA, 19 nt, Artificial Sequence
  Description of Artificial Sequence: Synthetic oligonucleotide
cgucacaaacacgcgcggc

SEQ ID NO: 1711715 - RNA, 19 nt, Artificial Sequence
  Description of Artificial Sequence: Synthetic oligonucleotide
gcccguauggguuuccauu

SEQ ID NO: 1711716 - RNA, 19 nt, Artificial Sequence
  Description of Artificial Sequence: Synthetic oligonucleotide
cauauuuguuuagguucau

SEQ ID NO: 1711717 - RNA, 19 nt, Artificial Sequence
  Description of Artificial Sequence: Synthetic oligonucleotide
ggggcacggcacaaauuuc

SEQ ID NO: 1711718 - RNA, 19 nt, Artificial Sequence
  Description of Artificial Sequence: Synthetic oligonucleotide
gcccuguugcugcuucgga

SEQ ID NO: 1711719 - RNA, 19 nt, Artificial Sequence
  Description of Artificial Sequence: Synthetic oligonucleotide
ucgcuggguccuggccuga

SEQ ID NO: 1711720 - RNA, 19 nt, Artificial Sequence
  Description of Artificial Sequence: Synthetic oligonucleotide
cagguacuggcuucccauu

SEQ ID NO: 1711721 - RNA, 19 nt, Artificial Sequence
  Description of Artificial Sequence: Synthetic oligonucleotide
ccguauggguuuccauuga

SEQ ID NO: 1711722 - RNA, 19 nt, Artificial Sequence
  Description of Artificial Sequence: Synthetic oligonucleotide
gguacccaaccaggaaugu

SEQ ID NO: 1711723 - RNA, 19 nt, Artificial Sequence
  Description of Artificial Sequence: Synthetic oligonucleotide
cuuggccgagggcucggcu

SEQ ID NO: 1711724 - RNA, 19 nt, Artificial Sequence
  Description of Artificial Sequence: Synthetic oligonucleotide
ccuuuguaguuaguaacau

SEQ ID NO: 1711725 - RNA, 19 nt, Artificial Sequence
  Description of Artificial Sequence: Synthetic oligonucleotide
augcucccgcuuggccgag

SEQ ID NO: 1711726 - RNA, 19 nt, Artificial Sequence
  Description of Artificial Sequence: Synthetic oligonucleotide
gggcaauuccaaacucgua

SEQ ID NO: 1711727 - RNA, 19 nt, Artificial Sequence
  Description of Artificial Sequence: Synthetic oligonucleotide
cgcgcggcaucuuccgcug

SEQ ID NO: 1711728 - RNA, 19 nt, Artificial Sequence
  Description of Artificial Sequence: Synthetic oligonucleotide
ccuagcccguauggguuuc

SEQ ID NO: 1711729 - RNA, 19 nt, Artificial Sequence
  Description of Artificial Sequence: Synthetic oligonucleotide
gugcccacgcccagcgugu

SEQ ID NO: 1711730 - RNA, 19 nt, Artificial Sequence
  Description of Artificial Sequence: Synthetic oligonucleotide
ccgagggcucggcuuucac

SEQ ID NO: 1711731 - RNA, 19 nt, Artificial Sequence
  Description of Artificial Sequence: Synthetic oligonucleotide
gcgcggcaucuuccgcugc

SEQ ID NO: 1711732 - RNA, 19 nt, Artificial Sequence
  Description of Artificial Sequence: Synthetic oligonucleotide
caucugcaucuaacgccuu

SEQ ID NO: 1711733 - RNA, 19 nt, Artificial Sequence
  Description of Artificial Sequence: Synthetic oligonucleotide
cguauggguuuccauugau

SEQ ID NO: 1711734 - RNA, 19 nt, Artificial Sequence
  Description of Artificial Sequence: Synthetic oligonucleotide
cgcggcaucuuccgcugca

SEQ ID NO: 1711735 - RNA, 19 nt, Artificial Sequence
  Description of Artificial Sequence: Synthetic oligonucleotide
gccuuaguaccagggcaau

SEQ ID NO: 1711736 - RNA, 19 nt, Artificial Sequence
  Description of Artificial Sequence: Synthetic oligonucleotide
caaacacgcgcggcaucuu

SEQ ID NO: 1711737 - RNA, 19 nt, Artificial Sequence
  Description of Artificial Sequence: Synthetic oligonucleotide
gccgagggcucggcuuuca

SEQ ID NO: 1711738 - RNA, 19 nt, Artificial Sequence
  Description of Artificial Sequence: Synthetic oligonucleotide
ggccgagggcucggcuuuc

SEQ ID NO: 1711739 - RNA, 19 nt, Artificial Sequence
  Description of Artificial Sequence: Synthetic oligonucleotide
gcccagcguguguucaguu

SEQ ID NO: 1711740 - RNA, 19 nt, Artificial Sequence
  Description of Artificial Sequence: Synthetic oligonucleotide
ccuuaguaccagggcaauu

SEQ ID NO: 1711741 - RNA, 19 nt, Artificial Sequence
  Description of Artificial Sequence: Synthetic oligonucleotide
ccuagcccuguugcugcuu

SEQ ID NO: 1711742 - RNA, 19 nt, Artificial Sequence
  Description of Artificial Sequence: Synthetic oligonucleotide
ccgagcccaggcggcucau

SEQ ID NO: 1711743 - RNA, 19 nt, Artificial Sequence
  Description of Artificial Sequence: Synthetic oligonucleotide
aauggauucauaaugaagc

SEQ ID NO: 1711744 - RNA, 19 nt, Artificial Sequence
  Description of Artificial Sequence: Synthetic oligonucleotide
aaagucuuauauuuuauag

SEQ ID NO: 1711745 - RNA, 19 nt, Artificial Sequence
  Description of Artificial Sequence: Synthetic oligonucleotide
aguuguaugauuuugcuag

SEQ ID NO: 1711746 - RNA, 19 nt, Artificial Sequence
  Description of Artificial Sequence: Synthetic oligonucleotide
aaagacacaucacagggac

SEQ ID NO: 1711747 - RNA, 19 nt, Artificial Sequence
  Description of Artificial Sequence: Synthetic oligonucleotide
ucuuauauuuuauagcucc

SEQ ID NO: 1711748 - RNA, 19 nt, Artificial Sequence
  Description of Artificial Sequence: Synthetic oligonucleotide
uuuggauuaaaccugaauc

SEQ ID NO: 1711749 - RNA, 19 nt, Artificial Sequence
  Description of Artificial Sequence: Synthetic oligonucleotide
uacauuuaaggauugagcc

SEQ ID NO: 1711750 - RNA, 19 nt, Artificial Sequence
  Description of Artificial Sequence: Synthetic oligonucleotide
cuuguuucuacucugauag

SEQ ID NO: 1711751 - RNA, 19 nt, Artificial Sequence
  Description of Artificial Sequence: Synthetic oligonucleotide
uccacuuacagcuaaacag

SEQ ID NO: 1711752 - RNA, 19 nt, Artificial Sequence
  Description of Artificial Sequence: Synthetic oligonucleotide
agcuaaacagccuuggccc

SEQ ID NO: 1711753 - RNA, 19 nt, Artificial Sequence
  Description of Artificial Sequence: Synthetic oligonucleotide
agugaaugaauccacucgc

SEQ ID NO: 1711754 - RNA, 19 nt, Artificial Sequence
  Description of Artificial Sequence: Synthetic oligonucleotide
auaacuucaaagcuuccac

SEQ ID NO: 1711755 - RNA, 19 nt, Artificial Sequence
  Description of Artificial Sequence: Synthetic oligonucleotide
uguauguagguauaaagac

SEQ ID NO: 1711756 - RNA, 19 nt, Artificial Sequence
  Description of Artificial Sequence: Synthetic oligonucleotide
uuggauuaaaccugaaucc

SEQ ID NO: 1711757 - RNA, 19 nt, Artificial Sequence
  Description of Artificial Sequence: Synthetic oligonucleotide
auacuugcgauuuccauac

SEQ ID NO: 1711758 - RNA, 19 nt, Artificial Sequence
  Description of Artificial Sequence: Synthetic oligonucleotide
aaacgagaagcgcaugacc

SEQ ID NO: 1711759 - RNA, 19 nt, Artificial Sequence
  Description of Artificial Sequence: Synthetic oligonucleotide
ugucacuauagucugaagc

SEQ ID NO: 1711760 - RNA, 19 nt, Artificial Sequence
  Description of Artificial Sequence: Synthetic oligonucleotide
gucacuauagucugaagcg

SEQ ID NO: 1711761 - RNA, 19 nt, Artificial Sequence
  Description of Artificial Sequence: Synthetic oligonucleotide
aauaacagugauguuauca

SEQ ID NO: 1711762 - RNA, 19 nt, Artificial Sequence
  Description of Artificial Sequence: Synthetic oligonucleotide
agcacguugauuuggggcc

SEQ ID NO: 1711763 - RNA, 19 nt, Artificial Sequence
  Description of Artificial Sequence: Synthetic oligonucleotide
uaucauuacacuuuucuaa

SEQ ID NO: 1711764 - RNA, 19 nt, Artificial Sequence
  Description of Artificial Sequence: Synthetic oligonucleotide
uuuugagagugcuagcuag

SEQ ID NO: 1711765 - RNA, 19 nt, Artificial Sequence
  Description of Artificial Sequence: Synthetic oligonucleotide
uuaagaucugcuuucuuug

SEQ ID NO: 1711766 - RNA, 19 nt, Artificial Sequence
  Description of Artificial Sequence: Synthetic oligonucleotide
aacauaaaacuuuggauua

SEQ ID NO: 1711767 - RNA, 19 nt, Artificial Sequence
  Description of Artificial Sequence: Synthetic oligonucleotide
aaagcuuccacuagugacg

SEQ ID NO: 1711768 - RNA, 19 nt, Artificial Sequence
  Description of Artificial Sequence: Synthetic oligonucleotide
ucaguaauuugcauucucc

SEQ ID NO: 1711769 - RNA, 19 nt, Artificial Sequence
  Description of Artificial Sequence: Synthetic oligonucleotide
uacagcuuuguucaugucc

SEQ ID NO: 1711770 - RNA, 19 nt, Artificial Sequence
  Description of Artificial Sequence: Synthetic oligonucleotide
agauuaggcacaucauacc

SEQ ID NO: 1711771 - RNA, 19 nt, Artificial Sequence
  Description of Artificial Sequence: Synthetic oligonucleotide
auaccauguauucugacug

SEQ ID NO: 1711772 - RNA, 19 nt, Artificial Sequence
  Description of Artificial Sequence: Synthetic oligonucleotide
uccucacuaacauuuacag

SEQ ID NO: 1711773 - RNA, 19 nt, Artificial Sequence
  Description of Artificial Sequence: Synthetic oligonucleotide
uguacauuuaaggauugag

SEQ ID NO: 1711774 - RNA, 19 nt, Artificial Sequence
  Description of Artificial Sequence: Synthetic oligonucleotide
aaauugggcacugugaggu

SEQ ID NO: 1711775 - RNA, 19 nt, Artificial Sequence
  Description of Artificial Sequence: Synthetic oligonucleotide
uccaugauucuccuuauca

SEQ ID NO: 1711776 - RNA, 19 nt, Artificial Sequence
  Description of Artificial Sequence: Synthetic oligonucleotide
ucuaucagugaaugaaucc

SEQ ID NO: 1711777 - RNA, 19 nt, Artificial Sequence
  Description of Artificial Sequence: Synthetic oligonucleotide
ucuguugcccuguugaacc

SEQ ID NO: 1711778 - RNA, 19 nt, Artificial Sequence
  Description of Artificial Sequence: Synthetic oligonucleotide
cuuuagauuaggcacauca

SEQ ID NO: 1711779 - RNA, 19 nt, Artificial Sequence
  Description of Artificial Sequence: Synthetic oligonucleotide
ugauuccucacuaacauuu

SEQ ID NO: 1711780 - RNA, 19 nt, Artificial Sequence
  Description of Artificial Sequence: Synthetic oligonucleotide
ugacgugaagggauggugg

SEQ ID NO: 1711781 - RNA, 19 nt, Artificial Sequence
  Description of Artificial Sequence: Synthetic oligonucleotide
ugaaugaauccacucgccc

SEQ ID NO: 1711782 - RNA, 19 nt, Artificial Sequence
  Description of Artificial Sequence: Synthetic oligonucleotide
uggaauaucauuacacuuu

SEQ ID NO: 1711783 - RNA, 19 nt, Artificial Sequence
  Description of Artificial Sequence: Synthetic oligonucleotide
augucuaccuuguuucuac

SEQ ID NO: 1711784 - RNA, 19 nt, Artificial Sequence
  Description of Artificial Sequence: Synthetic oligonucleotide
augaccugucacuauaguc

SEQ ID NO: 1711785 - RNA, 19 nt, Artificial Sequence
  Description of Artificial Sequence: Synthetic oligonucleotide
caauggauucauaaugaag

SEQ ID NO: 1711786 - RNA, 19 nt, Artificial Sequence
  Description of Artificial Sequence: Synthetic oligonucleotide
aaaccugaauccacgcugc

SEQ ID NO: 1711787 - RNA, 19 nt, Artificial Sequence
  Description of Artificial Sequence: Synthetic oligonucleotide
ugcuagcuagccuacauug

SEQ ID NO: 1711788 - RNA, 19 nt, Artificial Sequence
  Description of Artificial Sequence: Synthetic oligonucleotide
acccaaauuaaaagaagcc

SEQ ID NO: 1711789 - RNA, 19 nt, Artificial Sequence
  Description of Artificial Sequence: Synthetic oligonucleotide
uuuauagcuccagggaagg

SEQ ID NO: 1711790 - RNA, 19 nt, Artificial Sequence
  Description of Artificial Sequence: Synthetic oligonucleotide
ugaaacgagaagcgcauga

SEQ ID NO: 1711791 - RNA, 19 nt, Artificial Sequence
  Description of Artificial Sequence: Synthetic oligonucleotide
uuuugcuagugaaaccgcc

SEQ ID NO: 1711792 - RNA, 19 nt, Artificial Sequence
  Description of Artificial Sequence: Synthetic oligonucleotide
auuuuauagcuccagggaa

SEQ ID NO: 1711793 - RNA, 19 nt, Artificial Sequence
  Description of Artificial Sequence: Synthetic oligonucleotide
auuaagaucugcuuucuuu

SEQ ID NO: 1711794 - RNA, 19 nt, Artificial Sequence
  Description of Artificial Sequence: Synthetic oligonucleotide
ugcgauuuccauaccaugu

SEQ ID NO: 1711795 - RNA, 19 nt, Artificial Sequence
  Description of Artificial Sequence: Synthetic oligonucleotide
cagugaaugaauccacucg

SEQ ID NO: 1711796 - RNA, 19 nt, Artificial Sequence
  Description of Artificial Sequence: Synthetic oligonucleotide
ugagaucuagguagucugg

SEQ ID NO: 1711797 - RNA, 19 nt, Artificial Sequence
  Description of Artificial Sequence: Synthetic oligonucleotide
uacuucauucccuugggga

SEQ ID NO: 1711798 - RNA, 19 nt, Artificial Sequence
  Description of Artificial Sequence: Synthetic oligonucleotide
gguauaaagacacaucaca

SEQ ID NO: 1711799 - RNA, 19 nt, Artificial Sequence
  Description of Artificial Sequence: Synthetic oligonucleotide
aguucuaucagugaaugaa

SEQ ID NO: 1711800 - RNA, 19 nt, Artificial Sequence
  Description of Artificial Sequence: Synthetic oligonucleotide
aucuagguagucuggaucu

SEQ ID NO: 1711801 - RNA, 19 nt, Artificial Sequence
  Description of Artificial Sequence: Synthetic oligonucleotide
auuccucacuaacauuuac

SEQ ID NO: 1711802 - RNA, 19 nt, Artificial Sequence
  Description of Artificial Sequence: Synthetic oligonucleotide
uccuagagaucuauguaca

SEQ ID NO: 1711803 - RNA, 19 nt, Artificial Sequence
  Description of Artificial Sequence: Synthetic oligonucleotide
ccuacauugaagaaaaguc

SEQ ID NO: 1711804 - RNA, 19 nt, Artificial Sequence
  Description of Artificial Sequence: Synthetic oligonucleotide
acauuuaaggauugagcca

SEQ ID NO: 1711805 - RNA, 19 nt, Artificial Sequence
  Description of Artificial Sequence: Synthetic oligonucleotide
acagacgggagacaagcuc

SEQ ID NO: 1711806 - RNA, 19 nt, Artificial Sequence
  Description of Artificial Sequence: Synthetic oligonucleotide
ucacuauagucugaagcgg

SEQ ID NO: 1711807 - RNA, 19 nt, Artificial Sequence
  Description of Artificial Sequence: Synthetic oligonucleotide
aacgagaagcgcaugaccu

SEQ ID NO: 1711808 - RNA, 19 nt, Artificial Sequence
  Description of Artificial Sequence: Synthetic oligonucleotide
guacauuuaaggauugagc

SEQ ID NO: 1711809 - RNA, 19 nt, Artificial Sequence
  Description of Artificial Sequence: Synthetic oligonucleotide
acagcuaaacagccuuggc

SEQ ID NO: 1711810 - RNA, 19 nt, Artificial Sequence
  Description of Artificial Sequence: Synthetic oligonucleotide
cacuauagucugaagcggg

SEQ ID NO: 1711811 - RNA, 19 nt, Artificial Sequence
  Description of Artificial Sequence: Synthetic oligonucleotide
cuguauguagguauaaaga

SEQ ID NO: 1711812 - RNA, 19 nt, Artificial Sequence
  Description of Artificial Sequence: Synthetic oligonucleotide
uucuaucagugaaugaauc

SEQ ID NO: 1711813 - RNA, 19 nt, Artificial Sequence
  Description of Artificial Sequence: Synthetic oligonucleotide
uguauucugacuggaauaa

SEQ ID NO: 1711814 - RNA, 19 nt, Artificial Sequence
  Description of Artificial Sequence: Synthetic oligonucleotide
uuugagagugcuagcuagc

SEQ ID NO: 1711815 - RNA, 19 nt, Artificial Sequence
  Description of Artificial Sequence: Synthetic oligonucleotide
aaaugucuaccuuguuucu

SEQ ID NO: 1711816 - RNA, 19 nt, Artificial Sequence
  Description of Artificial Sequence: Synthetic oligonucleotide
aaaagaguugucuguccaa

SEQ ID NO: 1711817 - RNA, 19 nt, Artificial Sequence
  Description of Artificial Sequence: Synthetic oligonucleotide
cagcuaaacagccuuggcc

SEQ ID NO: 1711818 - RNA, 19 nt, Artificial Sequence
  Description of Artificial Sequence: Synthetic oligonucleotide
gcuguauguagguauaaag

SEQ ID NO: 1711819 - RNA, 19 nt, Artificial Sequence
  Description of Artificial Sequence: Synthetic oligonucleotide
aauccacgcugccuuuugg

SEQ ID NO: 1711820 - RNA, 19 nt, Artificial Sequence
  Description of Artificial Sequence: Synthetic oligonucleotide
ucauaccagauacuugcga

SEQ ID NO: 1711821 - RNA, 19 nt, Artificial Sequence
  Description of Artificial Sequence: Synthetic oligonucleotide
agugaaaccgccaauacuu

SEQ ID NO: 1711822 - RNA, 19 nt, Artificial Sequence
  Description of Artificial Sequence: Synthetic oligonucleotide
gauacuugcgauuuccaua

SEQ ID NO: 1711823 - RNA, 19 nt, Artificial Sequence
  Description of Artificial Sequence: Synthetic oligonucleotide
ugccuuuuggaguaguggu

SEQ ID NO: 1711824 - RNA, 19 nt, Artificial Sequence
  Description of Artificial Sequence: Synthetic oligonucleotide
uaccauguauucugacugg

SEQ ID NO: 1711825 - RNA, 19 nt, Artificial Sequence
  Description of Artificial Sequence: Synthetic oligonucleotide
uuugugugagaucuaggua

SEQ ID NO: 1711826 - RNA, 19 nt, Artificial Sequence
  Description of Artificial Sequence: Synthetic oligonucleotide
uagugaaaccgccaauacu

SEQ ID NO: 1711827 - RNA, 19 nt, Artificial Sequence
  Description of Artificial Sequence: Synthetic oligonucleotide
uacagcuaaacagccuugg

SEQ ID NO: 1711828 - RNA, 19 nt, Artificial Sequence
  Description of Artificial Sequence: Synthetic oligonucleotide
uggcguaaaugauacaauc

SEQ ID NO: 1711829 - RNA, 19 nt, Artificial Sequence
  Description of Artificial Sequence: Synthetic oligonucleotide
aaccugaauccacgcugcc

SEQ ID NO: 1711830 - RNA, 19 nt, Artificial Sequence
  Description of Artificial Sequence: Synthetic oligonucleotide
agcuagccuacauugaaga

SEQ ID NO: 1711831 - RNA, 19 nt, Artificial Sequence
  Description of Artificial Sequence: Synthetic oligonucleotide
uagguagucuggaucuucc

SEQ ID NO: 1711832 - RNA, 19 nt, Artificial Sequence
  Description of Artificial Sequence: Synthetic oligonucleotide
ucuacucugauaguuguau

SEQ ID NO: 1711833 - RNA, 19 nt, Artificial Sequence
  Description of Artificial Sequence: Synthetic oligonucleotide
auuuugcuagugaaaccgc

SEQ ID NO: 1711834 - RNA, 19 nt, Artificial Sequence
  Description of Artificial Sequence: Synthetic oligonucleotide
cuaguucuaucagugaaug

SEQ ID NO: 1711835 - RNA, 19 nt, Artificial Sequence
  Description of Artificial Sequence: Synthetic oligonucleotide
ugagccaucaauggauuca

SEQ ID NO: 1711836 - RNA, 19 nt, Artificial Sequence
  Description of Artificial Sequence: Synthetic oligonucleotide
caggaauaccacaauaaca

SEQ ID NO: 1711837 - RNA, 19 nt, Artificial Sequence
  Description of Artificial Sequence: Synthetic oligonucleotide
guaauuugcauucuccugu

SEQ ID NO: 1711838 - RNA, 19 nt, Artificial Sequence
  Description of Artificial Sequence: Synthetic oligonucleotide
uagcuagccuacauugaag

SEQ ID NO: 1711839 - RNA, 19 nt, Artificial Sequence
  Description of Artificial Sequence: Synthetic oligonucleotide
ucuuucauguuuccacuau

SEQ ID NO: 1711840 - RNA, 19 nt, Artificial Sequence
  Description of Artificial Sequence: Synthetic oligonucleotide
acuugcgauuuccauacca

SEQ ID NO: 1711841 - RNA, 19 nt, Artificial Sequence
  Description of Artificial Sequence: Synthetic oligonucleotide
ugugagaucuagguagucu

SEQ ID NO: 1711842 - RNA, 19 nt, Artificial Sequence
  Description of Artificial Sequence: Synthetic oligonucleotide
agguauaaagacacaucac

SEQ ID NO: 1711843 - RNA, 19 nt, Artificial Sequence
  Description of Artificial Sequence: Synthetic oligonucleotide
uacucugauaguuguauuu

SEQ ID NO: 1711844 - RNA, 19 nt, Artificial Sequence
  Description of Artificial Sequence: Synthetic oligonucleotide
uuacagcuaaacagccuug

SEQ ID NO: 1711845 - RNA, 19 nt, Artificial Sequence
  Description of Artificial Sequence: Synthetic oligonucleotide
guagcuggacucuggcucg

SEQ ID NO: 1711846 - RNA, 19 nt, Artificial Sequence
  Description of Artificial Sequence: Synthetic oligonucleotide
ucugcauaucuguugcccu

SEQ ID NO: 1711847 - RNA, 19 nt, Artificial Sequence
  Description of Artificial Sequence: Synthetic oligonucleotide
cacucagccuccuucaaac

SEQ ID NO: 1711848 - RNA, 19 nt, Artificial Sequence
  Description of Artificial Sequence: Synthetic oligonucleotide
uuuaaggauugagccauca

SEQ ID NO: 1711849 - RNA, 19 nt, Artificial Sequence
  Description of Artificial Sequence: Synthetic oligonucleotide
uguuucuacucugauaguu

SEQ ID NO: 1711850 - RNA, 19 nt, Artificial Sequence
  Description of Artificial Sequence: Synthetic oligonucleotide
uugaaaagaguugucuguc

SEQ ID NO: 1711851 - RNA, 19 nt, Artificial Sequence
  Description of Artificial Sequence: Synthetic oligonucleotide
ucaggcuaguucuaucagu

SEQ ID NO: 1711852 - RNA, 19 nt, Artificial Sequence
  Description of Artificial Sequence: Synthetic oligonucleotide
ucaggcaaugaugacuuga

SEQ ID NO: 1711853 - RNA, 19 nt, Artificial Sequence
  Description of Artificial Sequence: Synthetic oligonucleotide
cuagugaaaccgccaauac

SEQ ID NO: 1711854 - RNA, 19 nt, Artificial Sequence
  Description of Artificial Sequence: Synthetic oligonucleotide
uugcgauuuccauaccaug

SEQ ID NO: 1711855 - RNA, 19 nt, Artificial Sequence
  Description of Artificial Sequence: Synthetic oligonucleotide
uuaaggauugagccaucaa

SEQ ID NO: 1711856 - RNA, 19 nt, Artificial Sequence
  Description of Artificial Sequence: Synthetic oligonucleotide
aacuuuggauuaaaccuga

SEQ ID NO: 1711857 - RNA, 19 nt, Artificial Sequence
  Description of Artificial Sequence: Synthetic oligonucleotide
cuaucagugaaugaaucca

SEQ ID NO: 1711858 - RNA, 19 nt, Artificial Sequence
  Description of Artificial Sequence: Synthetic oligonucleotide
aggccaagggcguuugcac

SEQ ID NO: 1711859 - RNA, 19 nt, Artificial Sequence
  Description of Artificial Sequence: Synthetic oligonucleotide
gagagugcuagcuagccua

SEQ ID NO: 1711860 - RNA, 19 nt, Artificial Sequence
  Description of Artificial Sequence: Synthetic oligonucleotide
cuacauugaagaaaagucu

SEQ ID NO: 1711861 - RNA, 19 nt, Artificial Sequence
  Description of Artificial Sequence: Synthetic oligonucleotide
cacaauaacagugauguua

SEQ ID NO: 1711862 - RNA, 19 nt, Artificial Sequence
  Description of Artificial Sequence: Synthetic oligonucleotide
agccuagaucggcuggugc

SEQ ID NO: 1711863 - RNA, 19 nt, Artificial Sequence
  Description of Artificial Sequence: Synthetic oligonucleotide
ucuagacgcuguuuucccc

SEQ ID NO: 1711864 - RNA, 19 nt, Artificial Sequence
  Description of Artificial Sequence: Synthetic oligonucleotide
uuuccauaccauguauucu

SEQ ID NO: 1711865 - RNA, 19 nt, Artificial Sequence
  Description of Artificial Sequence: Synthetic oligonucleotide
caggcaaugaugacuugac

SEQ ID NO: 1711866 - RNA, 19 nt, Artificial Sequence
  Description of Artificial Sequence: Synthetic oligonucleotide
uccauaccauguauucuga

SEQ ID NO: 1711867 - RNA, 19 nt, Artificial Sequence
  Description of Artificial Sequence: Synthetic oligonucleotide
cuuauauuuuauagcucca

SEQ ID NO: 1711868 - RNA, 19 nt, Artificial Sequence
  Description of Artificial Sequence: Synthetic oligonucleotide
uugcuagugaaaccgccaa

SEQ ID NO: 1711869 - RNA, 19 nt, Artificial Sequence
  Description of Artificial Sequence: Synthetic oligonucleotide
uuagcucauuaagaucugc

SEQ ID NO: 1711870 - RNA, 19 nt, Artificial Sequence
  Description of Artificial Sequence: Synthetic oligonucleotide
cuagugacgugaagggaug

SEQ ID NO: 1711871 - RNA, 19 nt, Artificial Sequence
  Description of Artificial Sequence: Synthetic oligonucleotide
ugagagugcuagcuagccu

SEQ ID NO: 1711872 - RNA, 19 nt, Artificial Sequence
  Description of Artificial Sequence: Synthetic oligonucleotide
acuagugacgugaagggau

SEQ ID NO: 1711873 - RNA, 19 nt, Artificial Sequence
  Description of Artificial Sequence: Synthetic oligonucleotide
ucauuaagaucugcuuucu

SEQ ID NO: 1711874 - RNA, 19 nt, Artificial Sequence
  Description of Artificial Sequence: Synthetic oligonucleotide
gaccaguuguaugauuuug

SEQ ID NO: 1711875 - RNA, 19 nt, Artificial Sequence
  Description of Artificial Sequence: Synthetic oligonucleotide
acuaacauuuacagcuuug

SEQ ID NO: 1711876 - RNA, 19 nt, Artificial Sequence
  Description of Artificial Sequence: Synthetic oligonucleotide
guagguauaaagacacauc

SEQ ID NO: 1711877 - RNA, 19 nt, Artificial Sequence
  Description of Artificial Sequence: Synthetic oligonucleotide
agcucauuaagaucugcuu

SEQ ID NO: 1711878 - RNA, 19 nt, Artificial Sequence
  Description of Artificial Sequence: Synthetic oligonucleotide
aagggcguuugcacucucc

SEQ ID NO: 1711879 - RNA, 19 nt, Artificial Sequence
  Description of Artificial Sequence: Synthetic oligonucleotide
gcuauuuucccuccauggc

SEQ ID NO: 1711880 - RNA, 19 nt, Artificial Sequence
  Description of Artificial Sequence: Synthetic oligonucleotide
cacugugagguuugcuugc

SEQ ID NO: 1711881 - RNA, 19 nt, Artificial Sequence
  Description of Artificial Sequence: Synthetic oligonucleotide
gauacaaucuagacgcugu

SEQ ID NO: 1711882 - RNA, 19 nt, Artificial Sequence
  Description of Artificial Sequence: Synthetic oligonucleotide
cauggaauaucauuacacu

SEQ ID NO: 1711883 - RNA, 19 nt, Artificial Sequence
  Description of Artificial Sequence: Synthetic oligonucleotide
gaauccacgcugccuuuug

SEQ ID NO: 1711884 - RNA, 19 nt, Artificial Sequence
  Description of Artificial Sequence: Synthetic oligonucleotide
aaugucuaccuuguuucua

SEQ ID NO: 1711885 - RNA, 19 nt, Artificial Sequence
  Description of Artificial Sequence: Synthetic oligonucleotide
gugguggcguaaaugauac

SEQ ID NO: 1711886 - RNA, 19 nt, Artificial Sequence
  Description of Artificial Sequence: Synthetic oligonucleotide
aucauaccagauacuugcg

SEQ ID NO: 1711887 - RNA, 19 nt, Artificial Sequence
  Description of Artificial Sequence: Synthetic oligonucleotide
aagaacuucuuaacauaaa

SEQ ID NO: 1711888 - RNA, 19 nt, Artificial Sequence
  Description of Artificial Sequence: Synthetic oligonucleotide
gacgugaagggauggugga

SEQ ID NO: 1711889 - RNA, 19 nt, Artificial Sequence
  Description of Artificial Sequence: Synthetic oligonucleotide
acgagaagcgcaugaccug

SEQ ID NO: 1711890 - RNA, 19 nt, Artificial Sequence
  Description of Artificial Sequence: Synthetic oligonucleotide
aagcuuccacuagugacgu

SEQ ID NO: 1711891 - RNA, 19 nt, Artificial Sequence
  Description of Artificial Sequence: Synthetic oligonucleotide
acuauauccuucccagcua

SEQ ID NO: 1711892 - RNA, 19 nt, Artificial Sequence
  Description of Artificial Sequence: Synthetic oligonucleotide
ugacuggaauaacuucaaa

SEQ ID NO: 1711893 - RNA, 19 nt, Artificial Sequence
  Description of Artificial Sequence: Synthetic oligonucleotide
cuagccuacauugaagaaa

SEQ ID NO: 1711894 - RNA, 19 nt, Artificial Sequence
  Description of Artificial Sequence: Synthetic oligonucleotide
gugaaugaauccacucgcc

SEQ ID NO: 1711895 - RNA, 19 nt, Artificial Sequence
  Description of Artificial Sequence: Synthetic oligonucleotide
uaccagauacuugcgauuu

SEQ ID NO: 1711896 - RNA, 19 nt, Artificial Sequence
  Description of Artificial Sequence: Synthetic oligonucleotide
auaccagauacuugcgauu

SEQ ID NO: 1711897 - RNA, 19 nt, Artificial Sequence
  Description of Artificial Sequence: Synthetic oligonucleotide
cuagcuagccuacauugaa

SEQ ID NO: 1711898 - RNA, 19 nt, Artificial Sequence
  Description of Artificial Sequence: Synthetic oligonucleotide
uagugacgugaagggaugg

SEQ ID NO: 1711899 - RNA, 19 nt, Artificial Sequence
  Description of Artificial Sequence: Synthetic oligonucleotide
ugaaaccgccaauacuuuu

SEQ ID NO: 1711900 - RNA, 19 nt, Artificial Sequence
  Description of Artificial Sequence: Synthetic oligonucleotide
accacuccguuucaggcaa

SEQ ID NO: 1711901 - RNA, 19 nt, Artificial Sequence
  Description of Artificial Sequence: Synthetic oligonucleotide
cuagacgcuguuuucccca

SEQ ID NO: 1711902 - RNA, 19 nt, Artificial Sequence
  Description of Artificial Sequence: Synthetic oligonucleotide
ugcccuguugaacccaaau

SEQ ID NO: 1711903 - RNA, 19 nt, Artificial Sequence
  Description of Artificial Sequence: Synthetic oligonucleotide
uaucuguugcccuguugaa

SEQ ID NO: 1711904 - RNA, 19 nt, Artificial Sequence
  Description of Artificial Sequence: Synthetic oligonucleotide
agggcguuugcacucucca

SEQ ID NO: 1711905 - RNA, 19 nt, Artificial Sequence
  Description of Artificial Sequence: Synthetic oligonucleotide
agaagcgcaugaccuguca

SEQ ID NO: 1711906 - RNA, 19 nt, Artificial Sequence
  Description of Artificial Sequence: Synthetic oligonucleotide
cacagggaccaguuguaug

SEQ ID NO: 1711907 - RNA, 19 nt, Artificial Sequence
  Description of Artificial Sequence: Synthetic oligonucleotide
ggacagacgggagacaagc

SEQ ID NO: 1711908 - RNA, 19 nt, Artificial Sequence
  Description of Artificial Sequence: Synthetic oligonucleotide
gguggcguaaaugauacaa

SEQ ID NO: 1711909 - RNA, 19 nt, Artificial Sequence
  Description of Artificial Sequence: Synthetic oligonucleotide
ugucuaccuuguuucuacu

SEQ ID NO: 1711910 - RNA, 19 nt, Artificial Sequence
  Description of Artificial Sequence: Synthetic oligonucleotide
aauccacucgccccucaua

SEQ ID NO: 1711911 - RNA, 19 nt, Artificial Sequence
  Description of Artificial Sequence: Synthetic oligonucleotide
uugagccaucaauggauuc

SEQ ID NO: 1711912 - RNA, 19 nt, Artificial Sequence
  Description of Artificial Sequence: Synthetic oligonucleotide
agagugcuagcuagccuac

SEQ ID NO: 1711913 - RNA, 19 nt, Artificial Sequence
  Description of Artificial Sequence: Synthetic oligonucleotide
cuuacagcuaaacagccuu

SEQ ID NO: 1711914 - RNA, 19 nt, Artificial Sequence
  Description of Artificial Sequence: Synthetic oligonucleotide
gagaucuagguagucugga

SEQ ID NO: 1711915 - RNA, 19 nt, Artificial Sequence
  Description of Artificial Sequence: Synthetic oligonucleotide
uuguuucuacucugauagu

SEQ ID NO: 1711916 - RNA, 19 nt, Artificial Sequence
  Description of Artificial Sequence: Synthetic oligonucleotide
gugacgugaagggauggug

SEQ ID NO: 1711917 - RNA, 19 nt, Artificial Sequence
  Description of Artificial Sequence: Synthetic oligonucleotide
gucuuauauuuuauagcuc

SEQ ID NO: 1711918 - RNA, 19 nt, Artificial Sequence
  Description of Artificial Sequence: Synthetic oligonucleotide
cacuauauccuucccagcu

SEQ ID NO: 1711919 - RNA, 19 nt, Artificial Sequence
  Description of Artificial Sequence: Synthetic oligonucleotide
aucggcuggugcugagcac

SEQ ID NO: 1711920 - RNA, 19 nt, Artificial Sequence
  Description of Artificial Sequence: Synthetic oligonucleotide
auacaaucuagacgcuguu

SEQ ID NO: 1711921 - RNA, 19 nt, Artificial Sequence
  Description of Artificial Sequence: Synthetic oligonucleotide
uugaaacgagaagcgcaug

SEQ ID NO: 1711922 - RNA, 19 nt, Artificial Sequence
  Description of Artificial Sequence: Synthetic oligonucleotide
cauaccagauacuugcgau

SEQ ID NO: 1711923 - RNA, 19 nt, Artificial Sequence
  Description of Artificial Sequence: Synthetic oligonucleotide
uccuuaucauccccaccau

SEQ ID NO: 1711924 - RNA, 19 nt, Artificial Sequence
  Description of Artificial Sequence: Synthetic oligonucleotide
ggauugagccaucaaugga

SEQ ID NO: 1711925 - RNA, 19 nt, Artificial Sequence
  Description of Artificial Sequence: Synthetic oligonucleotide
auuagcucauuaagaucug

SEQ ID NO: 1711926 - RNA, 19 nt, Artificial Sequence
  Description of Artificial Sequence: Synthetic oligonucleotide
uacaaucuagacgcuguuu

SEQ ID NO: 1711927 - RNA, 19 nt, Artificial Sequence
  Description of Artificial Sequence: Synthetic oligonucleotide
aauugggcacugugagguu

SEQ ID NO: 1711928 - RNA, 19 nt, Artificial Sequence
  Description of Artificial Sequence: Synthetic oligonucleotide
ggcuaguucuaucagugaa

SEQ ID NO: 1711929 - RNA, 19 nt, Artificial Sequence
  Description of Artificial Sequence: Synthetic oligonucleotide
cuguugcccuguugaaccc

SEQ ID NO: 1711930 - RNA, 19 nt, Artificial Sequence
  Description of Artificial Sequence: Synthetic oligonucleotide
acuuacagcuaaacagccu

SEQ ID NO: 1711931 - RNA, 19 nt, Artificial Sequence
  Description of Artificial Sequence: Synthetic oligonucleotide
cuagguagucuggaucuuc

SEQ ID NO: 1711932 - RNA, 19 nt, Artificial Sequence
  Description of Artificial Sequence: Synthetic oligonucleotide
auagccuagaucggcuggu

SEQ ID NO: 1711933 - RNA, 19 nt, Artificial Sequence
  Description of Artificial Sequence: Synthetic oligonucleotide
uccuuuagauuaggcacau

SEQ ID NO: 1711934 - RNA, 19 nt, Artificial Sequence
  Description of Artificial Sequence: Synthetic oligonucleotide
agugguggcguaaaugaua

SEQ ID NO: 1711935 - RNA, 19 nt, Artificial Sequence
  Description of Artificial Sequence: Synthetic oligonucleotide
aggcuaguucuaucaguga

SEQ ID NO: 1711936 - RNA, 19 nt, Artificial Sequence
  Description of Artificial Sequence: Synthetic oligonucleotide
ucccagcuauuuucccucc

SEQ ID NO: 1711937 - RNA, 19 nt, Artificial Sequence
  Description of Artificial Sequence: Synthetic oligonucleotide
uccacucgccccucauagc

SEQ ID NO: 1711938 - RNA, 19 nt, Artificial Sequence
  Description of Artificial Sequence: Synthetic oligonucleotide
cuugcccuccuugaaaaga

SEQ ID NO: 1711939 - RNA, 19 nt, Artificial Sequence
  Description of Artificial Sequence: Synthetic oligonucleotide
uacuugcgauuuccauacc

SEQ ID NO: 1711940 - RNA, 19 nt, Artificial Sequence
  Description of Artificial Sequence: Synthetic oligonucleotide
agacgcuguuuuccccagg

SEQ ID NO: 1711941 - RNA, 19 nt, Artificial Sequence
  Description of Artificial Sequence: Synthetic oligonucleotide
ugaugacuugacugauuuu

SEQ ID NO: 1711942 - RNA, 19 nt, Artificial Sequence
  Description of Artificial Sequence: Synthetic oligonucleotide
uguugcccuguugaaccca

SEQ ID NO: 1711943 - RNA, 19 nt, Artificial Sequence
  Description of Artificial Sequence: Synthetic oligonucleotide
caaucugauuccucacuaa

SEQ ID NO: 1711944 - RNA, 19 nt, Artificial Sequence
  Description of Artificial Sequence: Synthetic oligonucleotide
uugcacucuccaugauucu

SEQ ID NO: 1711945 - RNA, 19 nt, Artificial Sequence
  Description of Artificial Sequence: Synthetic oligonucleotide
gaggccaagggcguuugca

SEQ ID NO: 1711946 - RNA, 19 nt, Artificial Sequence
  Description of Artificial Sequence: Synthetic oligonucleotide
cagauacuugcgauuucca

SEQ ID NO: 1711947 - RNA, 19 nt, Artificial Sequence
  Description of Artificial Sequence: Synthetic oligonucleotide
uuauagcuccagggaaggu

SEQ ID NO: 1711948 - RNA, 19 nt, Artificial Sequence
  Description of Artificial Sequence: Synthetic oligonucleotide
auguacauuuaaggauuga

SEQ ID NO: 1711949 - RNA, 19 nt, Artificial Sequence
  Description of Artificial Sequence: Synthetic oligonucleotide
agugacgugaagggauggu

SEQ ID NO: 1711950 - RNA, 19 nt, Artificial Sequence
  Description of Artificial Sequence: Synthetic oligonucleotide
caguuguaugauuuugcua

SEQ ID NO: 1711951 - RNA, 19 nt, Artificial Sequence
  Description of Artificial Sequence: Synthetic oligonucleotide
cuuuggauuaaaccugaau

SEQ ID NO: 1711952 - RNA, 19 nt, Artificial Sequence
  Description of Artificial Sequence: Synthetic oligonucleotide
gucccucaggaauaccaca

SEQ ID NO: 1711953 - RNA, 19 nt, Artificial Sequence
  Description of Artificial Sequence: Synthetic oligonucleotide
uggaguagugguggcguaa

SEQ ID NO: 1711954 - RNA, 19 nt, Artificial Sequence
  Description of Artificial Sequence: Synthetic oligonucleotide
gucugggcauggaauauca

SEQ ID NO: 1711955 - RNA, 19 nt, Artificial Sequence
  Description of Artificial Sequence: Synthetic oligonucleotide
acgugaagggaugguggag

SEQ ID NO: 1711956 - RNA, 19 nt, Artificial Sequence
  Description of Artificial Sequence: Synthetic oligonucleotide
cuugcgauuuccauaccau

SEQ ID NO: 1711957 - RNA, 19 nt, Artificial Sequence
  Description of Artificial Sequence: Synthetic oligonucleotide
agucugaagcggguagcug

SEQ ID NO: 1711958 - RNA, 19 nt, Artificial Sequence
  Description of Artificial Sequence: Synthetic oligonucleotide
auugagccaucaauggauu

SEQ ID NO: 1711959 - RNA, 19 nt, Artificial Sequence
  Description of Artificial Sequence: Synthetic oligonucleotide
cacgcugccuuuuggagua

SEQ ID NO: 1711960 - RNA, 19 nt, Artificial Sequence
  Description of Artificial Sequence: Synthetic oligonucleotide
guuguaugauuuugcuagu

SEQ ID NO: 1711961 - RNA, 19 nt, Artificial Sequence
  Description of Artificial Sequence: Synthetic oligonucleotide
cuaaacagccuuggcccuc

SEQ ID NO: 1711962 - RNA, 19 nt, Artificial Sequence
  Description of Artificial Sequence: Synthetic oligonucleotide
cccuguugaacccaaauua

SEQ ID NO: 1711963 - RNA, 19 nt, Artificial Sequence
  Description of Artificial Sequence: Synthetic oligonucleotide
gcuucuauuugugugagau

SEQ ID NO: 1711964 - RNA, 19 nt, Artificial Sequence
  Description of Artificial Sequence: Synthetic oligonucleotide
gauuccucacuaacauuua

SEQ ID NO: 1711965 - RNA, 19 nt, Artificial Sequence
  Description of Artificial Sequence: Synthetic oligonucleotide
ucacagggaccaguuguau

SEQ ID NO: 1711966 - RNA, 19 nt, Artificial Sequence
  Description of Artificial Sequence: Synthetic oligonucleotide
ccuguugaacccaaauuaa

SEQ ID NO: 1711967 - RNA, 19 nt, Artificial Sequence
  Description of Artificial Sequence: Synthetic oligonucleotide
cuccaugauucuccuuauc

SEQ ID NO: 1711968 - RNA, 19 nt, Artificial Sequence
  Description of Artificial Sequence: Synthetic oligonucleotide
caccacuccguuucaggca

SEQ ID NO: 1711969 - RNA, 19 nt, Artificial Sequence
  Description of Artificial Sequence: Synthetic oligonucleotide
agcgcaugaccugucacua

SEQ ID NO: 1711970 - RNA, 19 nt, Artificial Sequence
  Description of Artificial Sequence: Synthetic oligonucleotide
uagccuagaucggcuggug

SEQ ID NO: 1711971 - RNA, 19 nt, Artificial Sequence
  Description of Artificial Sequence: Synthetic oligonucleotide
cucauagccuagaucggcu

SEQ ID NO: 1711972 - RNA, 19 nt, Artificial Sequence
  Description of Artificial Sequence: Synthetic oligonucleotide
ccucauagccuagaucggc

SEQ ID NO: 1711973 - RNA, 19 nt, Artificial Sequence
  Description of Artificial Sequence: Synthetic oligonucleotide
gcuagugaaaccgccaaua

SEQ ID NO: 1711974 - RNA, 19 nt, Artificial Sequence
  Description of Artificial Sequence: Synthetic oligonucleotide
ugguggcguaaaugauaca

SEQ ID NO: 1711975 - RNA, 19 nt, Artificial Sequence
  Description of Artificial Sequence: Synthetic oligonucleotide
acgcuguuuuccccaggga

SEQ ID NO: 1711976 - RNA, 19 nt, Artificial Sequence
  Description of Artificial Sequence: Synthetic oligonucleotide
gcguuugcacucuccauga

SEQ ID NO: 1711977 - RNA, 19 nt, Artificial Sequence
  Description of Artificial Sequence: Synthetic oligonucleotide
ugaauccacgcugccuuuu

SEQ ID NO: 1711978 - RNA, 19 nt, Artificial Sequence
  Description of Artificial Sequence: Synthetic oligonucleotide
ggcguaaaugauacaaucu

SEQ ID NO: 1711979 - RNA, 19 nt, Artificial Sequence
  Description of Artificial Sequence: Synthetic oligonucleotide
ucuagguagucuggaucuu

SEQ ID NO: 1711980 - RNA, 19 nt, Artificial Sequence
  Description of Artificial Sequence: Synthetic oligonucleotide
augauacaaucuagacgcu

SEQ ID NO: 1711981 - RNA, 19 nt, Artificial Sequence
  Description of Artificial Sequence: Synthetic oligonucleotide
aggacagacgggagacaag

SEQ ID NO: 1711982 - RNA, 19 nt, Artificial Sequence
  Description of Artificial Sequence: Synthetic oligonucleotide
caugucccucaggaauacc

SEQ ID NO: 1711983 - RNA, 19 nt, Artificial Sequence
  Description of Artificial Sequence: Synthetic oligonucleotide
acucgccccucauagccua

SEQ ID NO: 1711984 - RNA, 19 nt, Artificial Sequence
  Description of Artificial Sequence: Synthetic oligonucleotide
ccacuauauccuucccagc

SEQ ID NO: 1711985 - RNA, 19 nt, Artificial Sequence
  Description of Artificial Sequence: Synthetic oligonucleotide
cacuccguuucaggcaaug

SEQ ID NO: 1711986 - RNA, 19 nt, Artificial Sequence
  Description of Artificial Sequence: Synthetic oligonucleotide
agggaccaguuguaugauu

SEQ ID NO: 1711987 - RNA, 19 nt, Artificial Sequence
  Description of Artificial Sequence: Synthetic oligonucleotide
cuucauucccuuggggaaa

SEQ ID NO: 1711988 - RNA, 19 nt, Artificial Sequence
  Description of Artificial Sequence: Synthetic oligonucleotide
ccauaccauguauucugac

SEQ ID NO: 1711989 - RNA, 19 nt, Artificial Sequence
  Description of Artificial Sequence: Synthetic oligonucleotide
gccuacauugaagaaaagu

SEQ ID NO: 1711990 - RNA, 19 nt, Artificial Sequence
  Description of Artificial Sequence: Synthetic oligonucleotide
cuauagucugaagcgggua

SEQ ID NO: 1711991 - RNA, 19 nt, Artificial Sequence
  Description of Artificial Sequence: Synthetic oligonucleotide
gcgauuuccauaccaugua

SEQ ID NO: 1711992 - RNA, 19 nt, Artificial Sequence
  Description of Artificial Sequence: Synthetic oligonucleotide
gaguuuccuagagaucuau

SEQ ID NO: 1711993 - RNA, 19 nt, Artificial Sequence
  Description of Artificial Sequence: Synthetic oligonucleotide
gagaagcgcaugaccuguc

SEQ ID NO: 1711994 - RNA, 19 nt, Artificial Sequence
  Description of Artificial Sequence: Synthetic oligonucleotide
gcuagccuacauugaagaa

SEQ ID NO: 1711995 - RNA, 19 nt, Artificial Sequence
  Description of Artificial Sequence: Synthetic oligonucleotide
agccuacauugaagaaaag

SEQ ID NO: 1711996 - RNA, 19 nt, Artificial Sequence
  Description of Artificial Sequence: Synthetic oligonucleotide
cuagaucggcuggugcuga

SEQ ID NO: 1711997 - RNA, 19 nt, Artificial Sequence
  Description of Artificial Sequence: Synthetic oligonucleotide
uugcccuguugaacccaaa

SEQ ID NO: 1711998 - RNA, 19 nt, Artificial Sequence
  Description of Artificial Sequence: Synthetic oligonucleotide
acuuuggauuaaaccugaa

SEQ ID NO: 1711999 - RNA, 19 nt, Artificial Sequence
  Description of Artificial Sequence: Synthetic oligonucleotide
cucgccccucauagccuag

SEQ ID NO: 1712000 - RNA, 19 nt, Artificial Sequence
  Description of Artificial Sequence: Synthetic oligonucleotide
cacaucacagggaccaguu

SEQ ID NO: 1712001 - RNA, 19 nt, Artificial Sequence
  Description of Artificial Sequence: Synthetic oligonucleotide
gcuagcuagccuacauuga

SEQ ID NO: 1712002 - RNA, 19 nt, Artificial Sequence
  Description of Artificial Sequence: Synthetic oligonucleotide
ucgccccucauagccuaga

SEQ ID NO: 1712003 - RNA, 19 nt, Artificial Sequence
  Description of Artificial Sequence: Synthetic oligonucleotide
guugcccuguugaacccaa

SEQ ID NO: 1712004 - RNA, 19 nt, Artificial Sequence
  Description of Artificial Sequence: Synthetic oligonucleotide
gagugcuagcuagccuaca

SEQ ID NO: 1712005 - RNA, 19 nt, Artificial Sequence
  Description of Artificial Sequence: Synthetic oligonucleotide
ggcuguauguagguauaaa

SEQ ID NO: 1712006 - RNA, 19 nt, Artificial Sequence
  Description of Artificial Sequence: Synthetic oligonucleotide
gacagacgggagacaagcu

SEQ ID NO: 1712007 - RNA, 19 nt, Artificial Sequence
  Description of Artificial Sequence: Synthetic oligonucleotide
caaugaugacuugacugau

SEQ ID NO: 1712008 - RNA, 19 nt, Artificial Sequence
  Description of Artificial Sequence: Synthetic oligonucleotide
gggaccaguuguaugauuu

SEQ ID NO: 1712009 - RNA, 19 nt, Artificial Sequence
  Description of Artificial Sequence: Synthetic oligonucleotide
gcacguugauuuggggccc

SEQ ID NO: 1712010 - RNA, 19 nt, Artificial Sequence
  Description of Artificial Sequence: Synthetic oligonucleotide
caagggcguuugcacucuc

SEQ ID NO: 1712011 - RNA, 19 nt, Artificial Sequence
  Description of Artificial Sequence: Synthetic oligonucleotide
cuggguucucacucagccu

SEQ ID NO: 1712012 - RNA, 19 nt, Artificial Sequence
  Description of Artificial Sequence: Synthetic oligonucleotide
gaguagugguggcguaaau

SEQ ID NO: 1712013 - RNA, 19 nt, Artificial Sequence
  Description of Artificial Sequence: Synthetic oligonucleotide
gcuaaacagccuuggcccu

SEQ ID NO: 1712014 - RNA, 19 nt, Artificial Sequence
  Description of Artificial Sequence: Synthetic oligonucleotide
acguugauuuggggcccug

SEQ ID NO: 1712015 - RNA, 19 nt, Artificial Sequence
  Description of Artificial Sequence: Synthetic oligonucleotide
ccaauuacuucauucccuu

SEQ ID NO: 1712016 - RNA, 19 nt, Artificial Sequence
  Description of Artificial Sequence: Synthetic oligonucleotide
ggaguagugguggcguaaa

SEQ ID NO: 1712017 - RNA, 19 nt, Artificial Sequence
  Description of Artificial Sequence: Synthetic oligonucleotide
cacauggucucuggguucu

SEQ ID NO: 1712018 - RNA, 19 nt, Artificial Sequence
  Description of Artificial Sequence: Synthetic oligonucleotide
ccaugauucuccuuaucau

SEQ ID NO: 1712019 - RNA, 19 nt, Artificial Sequence
  Description of Artificial Sequence: Synthetic oligonucleotide
cguugauuuggggcccugg

SEQ ID NO: 1712020 - RNA, 19 nt, Artificial Sequence
  Description of Artificial Sequence: Synthetic oligonucleotide
ccugaauccacgcugccuu

SEQ ID NO: 1712021 - RNA, 19 nt, Artificial Sequence
  Description of Artificial Sequence: Synthetic oligonucleotide
cggguagcuggacucuggc

SEQ ID NO: 1712022 - RNA, 19 nt, Artificial Sequence
  Description of Artificial Sequence: Synthetic oligonucleotide
ggccaagggcguuugcacu

SEQ ID NO: 1712023 - RNA, 19 nt, Artificial Sequence
  Description of Artificial Sequence: Synthetic oligonucleotide
cacucgccccucauagccu

SEQ ID NO: 1712024 - RNA, 19 nt, Artificial Sequence
  Description of Artificial Sequence: Synthetic oligonucleotide
ggggcuguauguagguaua

SEQ ID NO: 1712025 - RNA, 19 nt, Artificial Sequence
  Description of Artificial Sequence: Synthetic oligonucleotide
gggcuguauguagguauaa

SEQ ID NO: 1712026 - RNA, 19 nt, Artificial Sequence
  Description of Artificial Sequence: Synthetic oligonucleotide
agccuccuucaaaccaauu

SEQ ID NO: 1712027 - RNA, 19 nt, Artificial Sequence
  Description of Artificial Sequence: Synthetic oligonucleotide
cugaauccacgcugccuuu

SEQ ID NO: 1712028 - RNA, 19 nt, Artificial Sequence
  Description of Artificial Sequence: Synthetic oligonucleotide
ccacgcugccuuuuggagu

SEQ ID NO: 1712029 - RNA, 19 nt, Artificial Sequence
  Description of Artificial Sequence: Synthetic oligonucleotide
ccuuuagauuaggcacauc

SEQ ID NO: 1712030 - RNA, 19 nt, Artificial Sequence
  Description of Artificial Sequence: Synthetic oligonucleotide
cccuuggggaaaacaauuu

SEQ ID NO: 1712031 - RNA, 19 nt, Artificial Sequence
  Description of Artificial Sequence: Synthetic oligonucleotide
ggcccucaguaauuugcau

SEQ ID NO: 1712032 - RNA, 19 nt, Artificial Sequence
  Description of Artificial Sequence: Synthetic oligonucleotide
cuggcucgucuuccacuua

SEQ ID NO: 1712033 - RNA, 19 nt, Artificial Sequence
  Description of Artificial Sequence: Synthetic oligonucleotide
gggcguuugcacucuccau

SEQ ID NO: 1712034 - RNA, 19 nt, Artificial Sequence
  Description of Artificial Sequence: Synthetic oligonucleotide
gcccuccuugaaaagaguu

SEQ ID NO: 1712035 - RNA, 19 nt, Artificial Sequence
  Description of Artificial Sequence: Synthetic oligonucleotide
cacguugauuuggggcccu

SEQ ID NO: 1712036 - RNA, 19 nt, Artificial Sequence
  Description of Artificial Sequence: Synthetic oligonucleotide
cgagaagcgcaugaccugu

SEQ ID NO: 1712037 - RNA, 19 nt, Artificial Sequence
  Description of Artificial Sequence: Synthetic oligonucleotide
ccaggacagacgggagaca

SEQ ID NO: 1712038 - RNA, 19 nt, Artificial Sequence
  Description of Artificial Sequence: Synthetic oligonucleotide
gcgcaugaccugucacuau

SEQ ID NO: 1712039 - RNA, 19 nt, Artificial Sequence
  Description of Artificial Sequence: Synthetic oligonucleotide
cccucaggaauaccacaau

SEQ ID NO: 1712040 - RNA, 19 nt, Artificial Sequence
  Description of Artificial Sequence: Synthetic oligonucleotide
cuggaucuuccagcacguu

SEQ ID NO: 1712041 - RNA, 19 nt, Artificial Sequence
  Description of Artificial Sequence: Synthetic oligonucleotide
ccaagggcguuugcacucu

SEQ ID NO: 1712042 - RNA, 19 nt, Artificial Sequence
  Description of Artificial Sequence: Synthetic oligonucleotide
ccuuggcccucaguaauuu

SEQ ID NO: 1712043 - RNA, 19 nt, Artificial Sequence
  Description of Artificial Sequence: Synthetic oligonucleotide
ccacuccguuucaggcaau

SEQ ID NO: 1712044 - RNA, 19 nt, Artificial Sequence
  Description of Artificial Sequence: Synthetic oligonucleotide
cgccccucauagccuagau

SEQ ID NO: 1712045 - RNA, 19 nt, Artificial Sequence
  Description of Artificial Sequence: Synthetic oligonucleotide
ucagguuuggcucauaugc

SEQ ID NO: 1712046 - RNA, 19 nt, Artificial Sequence
  Description of Artificial Sequence: Synthetic oligonucleotide
aaacauguacagaaaaucc

SEQ ID NO: 1712047 - RNA, 19 nt, Artificial Sequence
  Description of Artificial Sequence: Synthetic oligonucleotide
auaugcucuucacagaccc

SEQ ID NO: 1712048 - RNA, 19 nt, Artificial Sequence
  Description of Artificial Sequence: Synthetic oligonucleotide
aguccaguaugcuacaugg

SEQ ID NO: 1712049 - RNA, 19 nt, Artificial Sequence
  Description of Artificial Sequence: Synthetic oligonucleotide
gaagagauuguacaugacc

SEQ ID NO: 1712050 - RNA, 19 nt, Artificial Sequence
  Description of Artificial Sequence: Synthetic oligonucleotide
uguacagaaaauccauucc

SEQ ID NO: 1712051 - RNA, 19 nt, Artificial Sequence
  Description of Artificial Sequence: Synthetic oligonucleotide
uacagaaaauccauuccgg

SEQ ID NO: 1712052 - RNA, 19 nt, Artificial Sequence
  Description of Artificial Sequence: Synthetic oligonucleotide
guacagaaaauccauuccg

SEQ ID NO: 1712053 - RNA, 19 nt, Artificial Sequence
  Description of Artificial Sequence: Synthetic oligonucleotide
uuuaaccaaacauguacag

SEQ ID NO: 1712054 - RNA, 19 nt, Artificial Sequence
  Description of Artificial Sequence: Synthetic oligonucleotide
uucaaucugauuuuauuga

SEQ ID NO: 1712055 - RNA, 19 nt, Artificial Sequence
  Description of Artificial Sequence: Synthetic oligonucleotide
ucuaaaccuaugcaauggg

SEQ ID NO: 1712056 - RNA, 19 nt, Artificial Sequence
  Description of Artificial Sequence: Synthetic oligonucleotide
ucacuguucaaucugauuu

SEQ ID NO: 1712057 - RNA, 19 nt, Artificial Sequence
  Description of Artificial Sequence: Synthetic oligonucleotide
guucaaucugauuuuauug

SEQ ID NO: 1712058 - RNA, 19 nt, Artificial Sequence
  Description of Artificial Sequence: Synthetic oligonucleotide
aaaugaaugccagugguca

SEQ ID NO: 1712059 - RNA, 19 nt, Artificial Sequence
  Description of Artificial Sequence: Synthetic oligonucleotide
uccaguaugcuacauggug

SEQ ID NO: 1712060 - RNA, 19 nt, Artificial Sequence
  Description of Artificial Sequence: Synthetic oligonucleotide
aaugaaugccaguggucac

SEQ ID NO: 1712061 - RNA, 19 nt, Artificial Sequence
  Description of Artificial Sequence: Synthetic oligonucleotide
ucauaugcucuucacagac

SEQ ID NO: 1712062 - RNA, 19 nt, Artificial Sequence
  Description of Artificial Sequence: Synthetic oligonucleotide
agaaaauccauuccgguau

SEQ ID NO: 1712063 - RNA, 19 nt, Artificial Sequence
  Description of Artificial Sequence: Synthetic oligonucleotide
aaggcuuccgccaauaucu

SEQ ID NO: 1712064 - RNA, 19 nt, Artificial Sequence
  Description of Artificial Sequence: Synthetic oligonucleotide
ucuacagcagagcauguac

SEQ ID NO: 1712065 - RNA, 19 nt, Artificial Sequence
  Description of Artificial Sequence: Synthetic oligonucleotide
uaaaccuaugcaaugggau

SEQ ID NO: 1712066 - RNA, 19 nt, Artificial Sequence
  Description of Artificial Sequence: Synthetic oligonucleotide
acagggacggcugaggacc

SEQ ID NO: 1712067 - RNA, 19 nt, Artificial Sequence
  Description of Artificial Sequence: Synthetic oligonucleotide
auaucuacagcagagcaug

SEQ ID NO: 1712068 - RNA, 19 nt, Artificial Sequence
  Description of Artificial Sequence: Synthetic oligonucleotide
guugucagaaggcggaagg

SEQ ID NO: 1712069 - RNA, 19 nt, Artificial Sequence
  Description of Artificial Sequence: Synthetic oligonucleotide
uuccgguauaucuacagca

SEQ ID NO: 1712070 - RNA, 19 nt, Artificial Sequence
  Description of Artificial Sequence: Synthetic oligonucleotide
aacauguacagaaaaucca

SEQ ID NO: 1712071 - RNA, 19 nt, Artificial Sequence
  Description of Artificial Sequence: Synthetic oligonucleotide
agcgcuuugcccuggggcc

SEQ ID NO: 1712072 - RNA, 19 nt, Artificial Sequence
  Description of Artificial Sequence: Synthetic oligonucleotide
uccgguauaucuacagcag

SEQ ID NO: 1712073 - RNA, 19 nt, Artificial Sequence
  Description of Artificial Sequence: Synthetic oligonucleotide
uccgccaauaucuccaccc

SEQ ID NO: 1712074 - RNA, 19 nt, Artificial Sequence
  Description of Artificial Sequence: Synthetic oligonucleotide
ucucuaaaccuaugcaaug

SEQ ID NO: 1712075 - RNA, 19 nt, Artificial Sequence
  Description of Artificial Sequence: Synthetic oligonucleotide
uauaucuacagcagagcau

SEQ ID NO: 1712076 - RNA, 19 nt, Artificial Sequence
  Description of Artificial Sequence: Synthetic oligonucleotide
ucaaucugauuuuauugaa

SEQ ID NO: 1712077 - RNA, 19 nt, Artificial Sequence
  Description of Artificial Sequence: Synthetic oligonucleotide
aaauccauuccgguauauc

SEQ ID NO: 1712078 - RNA, 19 nt, Artificial Sequence
  Description of Artificial Sequence: Synthetic oligonucleotide
guauaucuacagcagagca

SEQ ID NO: 1712079 - RNA, 19 nt, Artificial Sequence
  Description of Artificial Sequence: Synthetic oligonucleotide
uguucaaucugauuuuauu

SEQ ID NO: 1712080 - RNA, 19 nt, Artificial Sequence
  Description of Artificial Sequence: Synthetic oligonucleotide
gaaggugaggcaggcaucg

SEQ ID NO: 1712081 - RNA, 19 nt, Artificial Sequence
  Description of Artificial Sequence: Synthetic oligonucleotide
ugucagaaggcggaagggg

SEQ ID NO: 1712082 - RNA, 19 nt, Artificial Sequence
  Description of Artificial Sequence: Synthetic oligonucleotide
caucagugcacccaggcug

SEQ ID NO: 1712083 - RNA, 19 nt, Artificial Sequence
  Description of Artificial Sequence: Synthetic oligonucleotide
acagaaaauccauuccggu

SEQ ID NO: 1712084 - RNA, 19 nt, Artificial Sequence
  Description of Artificial Sequence: Synthetic oligonucleotide
aaugggauggauggggacu

SEQ ID NO: 1712085 - RNA, 19 nt, Artificial Sequence
  Description of Artificial Sequence: Synthetic oligonucleotide
cauuccgguauaucuacag

SEQ ID NO: 1712086 - RNA, 19 nt, Artificial Sequence
  Description of Artificial Sequence: Synthetic oligonucleotide
agauuguacaugacccucc

SEQ ID NO: 1712087 - RNA, 19 nt, Artificial Sequence
  Description of Artificial Sequence: Synthetic oligonucleotide
uuugcccuggggccuaagg

SEQ ID NO: 1712088 - RNA, 19 nt, Artificial Sequence
  Description of Artificial Sequence: Synthetic oligonucleotide
cuaugcaaugggauggaug

SEQ ID NO: 1712089 - RNA, 19 nt, Artificial Sequence
  Description of Artificial Sequence: Synthetic oligonucleotide
ggauucacagucuggaccc

SEQ ID NO: 1712090 - RNA, 19 nt, Artificial Sequence
  Description of Artificial Sequence: Synthetic oligonucleotide
uccauuccgguauaucuac

SEQ ID NO: 1712091 - RNA, 19 nt, Artificial Sequence
  Description of Artificial Sequence: Synthetic oligonucleotide
aaguccguaucuccaucag

SEQ ID NO: 1712092 - RNA, 19 nt, Artificial Sequence
  Description of Artificial Sequence: Synthetic oligonucleotide
caugaagagauuguacaug

SEQ ID NO: 1712093 - RNA, 19 nt, Artificial Sequence
  Description of Artificial Sequence: Synthetic oligonucleotide
uaaggcuuccgccaauauc

SEQ ID NO: 1712094 - RNA, 19 nt, Artificial Sequence
  Description of Artificial Sequence: Synthetic oligonucleotide
augcuggucuucuugucuc

SEQ ID NO: 1712095 - RNA, 19 nt, Artificial Sequence
  Description of Artificial Sequence: Synthetic oligonucleotide
ucuuccgcagcgcuuugcc

SEQ ID NO: 1712096 - RNA, 19 nt, Artificial Sequence
  Description of Artificial Sequence: Synthetic oligonucleotide
acacgugcucucucuaaac

SEQ ID NO: 1712097 - RNA, 19 nt, Artificial Sequence
  Description of Artificial Sequence: Synthetic oligonucleotide
uuuccuugcuugccccugg

SEQ ID NO: 1712098 - RNA, 19 nt, Artificial Sequence
  Description of Artificial Sequence: Synthetic oligonucleotide
ucccaugaagagauuguac

SEQ ID NO: 1712099 - RNA, 19 nt, Artificial Sequence
  Description of Artificial Sequence: Synthetic oligonucleotide
aaggcuggcaguccaguau

SEQ ID NO: 1712100 - RNA, 19 nt, Artificial Sequence
  Description of Artificial Sequence: Synthetic oligonucleotide
cuggguaagggaaggaguc

SEQ ID NO: 1712101 - RNA, 19 nt, Artificial Sequence
  Description of Artificial Sequence: Synthetic oligonucleotide
guccguaucuccaucagug

SEQ ID NO: 1712102 - RNA, 19 nt, Artificial Sequence
  Description of Artificial Sequence: Synthetic oligonucleotide
aaguccccgacgucccucg

SEQ ID NO: 1712103 - RNA, 19 nt, Artificial Sequence
  Description of Artificial Sequence: Synthetic oligonucleotide
uugucagaaggcggaaggg

SEQ ID NO: 1712104 - RNA, 19 nt, Artificial Sequence
  Description of Artificial Sequence: Synthetic oligonucleotide
ggcgguucagggaagaugg

SEQ ID NO: 1712105 - RNA, 19 nt, Artificial Sequence
  Description of Artificial Sequence: Synthetic oligonucleotide
aggcccaaagugaaggcgc

SEQ ID NO: 1712106 - RNA, 19 nt, Artificial Sequence
  Description of Artificial Sequence: Synthetic oligonucleotide
acaggauucacagucugga

SEQ ID NO: 1712107 - RNA, 19 nt, Artificial Sequence
  Description of Artificial Sequence: Synthetic oligonucleotide
ugcugggccggugacaggg

SEQ ID NO: 1712108 - RNA, 19 nt, Artificial Sequence
  Description of Artificial Sequence: Synthetic oligonucleotide
cauaugcucuucacagacc

SEQ ID NO: 1712109 - RNA, 19 nt, Artificial Sequence
  Description of Artificial Sequence: Synthetic oligonucleotide
uucuugucuccgccgcucg

SEQ ID NO: 1712110 - RNA, 19 nt, Artificial Sequence
  Description of Artificial Sequence: Synthetic oligonucleotide
uugcccuggggccuaaggc

SEQ ID NO: 1712111 - RNA, 19 nt, Artificial Sequence
  Description of Artificial Sequence: Synthetic oligonucleotide
ugacccuccagggcgaggg

SEQ ID NO: 1712112 - RNA, 19 nt, Artificial Sequence
  Description of Artificial Sequence: Synthetic oligonucleotide
acggugucgaugcuggucu

SEQ ID NO: 1712113 - RNA, 19 nt, Artificial Sequence
  Description of Artificial Sequence: Synthetic oligonucleotide
uuggcucauaugcucuuca

SEQ ID NO: 1712114 - RNA, 19 nt, Artificial Sequence
  Description of Artificial Sequence: Synthetic oligonucleotide
ugaagagauuguacaugac

SEQ ID NO: 1712115 - RNA, 19 nt, Artificial Sequence
  Description of Artificial Sequence: Synthetic oligonucleotide
acgaccuccucccuccuuc

SEQ ID NO: 1712116 - RNA, 19 nt, Artificial Sequence
  Description of Artificial Sequence: Synthetic oligonucleotide
aguccgucagcccucccuc

SEQ ID NO: 1712117 - RNA, 19 nt, Artificial Sequence
  Description of Artificial Sequence: Synthetic oligonucleotide
cagcgcacaggauucacag

SEQ ID NO: 1712118 - RNA, 19 nt, Artificial Sequence
  Description of Artificial Sequence: Synthetic oligonucleotide
cacaggauucacagucugg

SEQ ID NO: 1712119 - RNA, 19 nt, Artificial Sequence
  Description of Artificial Sequence: Synthetic oligonucleotide
aaauuuaaccaaacaugua

SEQ ID NO: 1712120 - RNA, 19 nt, Artificial Sequence
  Description of Artificial Sequence: Synthetic oligonucleotide
uaagggaaggagucccaug

SEQ ID NO: 1712121 - RNA, 19 nt, Artificial Sequence
  Description of Artificial Sequence: Synthetic oligonucleotide
auuucuggggcuccgggau

SEQ ID NO: 1712122 - RNA, 19 nt, Artificial Sequence
  Description of Artificial Sequence: Synthetic oligonucleotide
cuaaaccuaugcaauggga

SEQ ID NO: 1712123 - RNA, 19 nt, Artificial Sequence
  Description of Artificial Sequence: Synthetic oligonucleotide
cacgugcucucucuaaacc

SEQ ID NO: 1712124 - RNA, 19 nt, Artificial Sequence
  Description of Artificial Sequence: Synthetic oligonucleotide
gauuguacaugacccucca

SEQ ID NO: 1712125 - RNA, 19 nt, Artificial Sequence
  Description of Artificial Sequence: Synthetic oligonucleotide
uccguaucuccaucagugc

SEQ ID NO: 1712126 - RNA, 19 nt, Artificial Sequence
  Description of Artificial Sequence: Synthetic oligonucleotide
uugaggucgucugccaucc

SEQ ID NO: 1712127 - RNA, 19 nt, Artificial Sequence
  Description of Artificial Sequence: Synthetic oligonucleotide
gagucccaugaagagauug

SEQ ID NO: 1712128 - RNA, 19 nt, Artificial Sequence
  Description of Artificial Sequence: Synthetic oligonucleotide
ugccauccgccgcagcugg

SEQ ID NO: 1712129 - RNA, 19 nt, Artificial Sequence
  Description of Artificial Sequence: Synthetic oligonucleotide
acgugcucucucuaaaccu

SEQ ID NO: 1712130 - RNA, 19 nt, Artificial Sequence
  Description of Artificial Sequence: Synthetic oligonucleotide
gagauuguacaugacccuc

SEQ ID NO: 1712131 - RNA, 19 nt, Artificial Sequence
  Description of Artificial Sequence: Synthetic oligonucleotide
acauguacagaaaauccau

SEQ ID NO: 1712132 - RNA, 19 nt, Artificial Sequence
  Description of Artificial Sequence: Synthetic oligonucleotide
gaggucgucugccauccgc

SEQ ID NO: 1712133 - RNA, 19 nt, Artificial Sequence
  Description of Artificial Sequence: Synthetic oligonucleotide
ccaguaugcuacauggugc

SEQ ID NO: 1712134 - RNA, 19 nt, Artificial Sequence
  Description of Artificial Sequence: Synthetic oligonucleotide
aagugaaggcgcacugggg

SEQ ID NO: 1712135 - RNA, 19 nt, Artificial Sequence
  Description of Artificial Sequence: Synthetic oligonucleotide
accuaguugggcuccauuu

SEQ ID NO: 1712136 - RNA, 19 nt, Artificial Sequence
  Description of Artificial Sequence: Synthetic oligonucleotide
uccucccuccuucugagua

SEQ ID NO: 1712137 - RNA, 19 nt, Artificial Sequence
  Description of Artificial Sequence: Synthetic oligonucleotide
ucgucugccauccgccgca

SEQ ID NO: 1712138 - RNA, 19 nt, Artificial Sequence
  Description of Artificial Sequence: Synthetic oligonucleotide
caccaugaguccgucagcc

SEQ ID NO: 1712139 - RNA, 19 nt, Artificial Sequence
  Description of Artificial Sequence: Synthetic oligonucleotide
ugggccggugacagggacg

SEQ ID NO: 1712140 - RNA, 19 nt, Artificial Sequence
  Description of Artificial Sequence: Synthetic oligonucleotide
uccccgacgucccucgagc

SEQ ID NO: 1712141 - RNA, 19 nt, Artificial Sequence
  Description of Artificial Sequence: Synthetic oligonucleotide
uuccugagauggugguggg

SEQ ID NO: 1712142 - RNA, 19 nt, Artificial Sequence
  Description of Artificial Sequence: Synthetic oligonucleotide
agcggguguaggcaccuag

SEQ ID NO: 1712143 - RNA, 19 nt, Artificial Sequence
  Description of Artificial Sequence: Synthetic oligonucleotide
gcaggcaucggucaccgcc

SEQ ID NO: 1712144 - RNA, 19 nt, Artificial Sequence
  Description of Artificial Sequence: Synthetic oligonucleotide
acgcuggccagguugucag

SEQ ID NO: 1712145 - RNA, 19 nt, Artificial Sequence
  Description of Artificial Sequence: Synthetic oligonucleotide
cagcgcuuugcccuggggc

SEQ ID NO: 1712146 - RNA, 19 nt, Artificial Sequence
  Description of Artificial Sequence: Synthetic oligonucleotide
caguaugcuacauggugca

SEQ ID NO: 1712147 - RNA, 19 nt, Artificial Sequence
  Description of Artificial Sequence: Synthetic oligonucleotide
gucagguuuggcucauaug

SEQ ID NO: 1712148 - RNA, 19 nt, Artificial Sequence
  Description of Artificial Sequence: Synthetic oligonucleotide
caggcaucggucaccgccc

SEQ ID NO: 1712149 - RNA, 19 nt, Artificial Sequence
  Description of Artificial Sequence: Synthetic oligonucleotide
uaucuacagcagagcaugu

SEQ ID NO: 1712150 - RNA, 19 nt, Artificial Sequence
  Description of Artificial Sequence: Synthetic oligonucleotide
gcucucucuaaaccuaugc

SEQ ID NO: 1712151 - RNA, 19 nt, Artificial Sequence
  Description of Artificial Sequence: Synthetic oligonucleotide
ugcucucucuaaaccuaug

SEQ ID NO: 1712152 - RNA, 19 nt, Artificial Sequence
  Description of Artificial Sequence: Synthetic oligonucleotide
ugaaugccaguggucacac

SEQ ID NO: 1712153 - RNA, 19 nt, Artificial Sequence
  Description of Artificial Sequence: Synthetic oligonucleotide
aguccguaucuccaucagu

SEQ ID NO: 1712154 - RNA, 19 nt, Artificial Sequence
  Description of Artificial Sequence: Synthetic oligonucleotide
uuacaggcugggcccgucc

SEQ ID NO: 1712155 - RNA, 19 nt, Artificial Sequence
  Description of Artificial Sequence: Synthetic oligonucleotide
uggguaagggaaggagucc

SEQ ID NO: 1712156 - RNA, 19 nt, Artificial Sequence
  Description of Artificial Sequence: Synthetic oligonucleotide
ucccgggcagcgcacagga

SEQ ID NO: 1712157 - RNA, 19 nt, Artificial Sequence
  Description of Artificial Sequence: Synthetic oligonucleotide
cucgaguggcuuuccuugc

SEQ ID NO: 1712158 - RNA, 19 nt, Artificial Sequence
  Description of Artificial Sequence: Synthetic oligonucleotide
uccaaguccguaucuccau

SEQ ID NO: 1712159 - RNA, 19 nt, Artificial Sequence
  Description of Artificial Sequence: Synthetic oligonucleotide
gcucgaguggcuuuccuug

SEQ ID NO: 1712160 - RNA, 19 nt, Artificial Sequence
  Description of Artificial Sequence: Synthetic oligonucleotide
ugcuggucuucuugucucc

SEQ ID NO: 1712161 - RNA, 19 nt, Artificial Sequence
  Description of Artificial Sequence: Synthetic oligonucleotide
ucgaguggcuuuccuugcu

SEQ ID NO: 1712162 - RNA, 19 nt, Artificial Sequence
  Description of Artificial Sequence: Synthetic oligonucleotide
uccauuucuggggcuccgg

SEQ ID NO: 1712163 - RNA, 19 nt, Artificial Sequence
  Description of Artificial Sequence: Synthetic oligonucleotide
cuaguggucagguuuggcu

SEQ ID NO: 1712164 - RNA, 19 nt, Artificial Sequence
  Description of Artificial Sequence: Synthetic oligonucleotide
gaucucccgggcccacucg

SEQ ID NO: 1712165 - RNA, 19 nt, Artificial Sequence
  Description of Artificial Sequence: Synthetic oligonucleotide
uccgucagcccucccuccc

SEQ ID NO: 1712166 - RNA, 19 nt, Artificial Sequence
  Description of Artificial Sequence: Synthetic oligonucleotide
gacagggacggcugaggac

SEQ ID NO: 1712167 - RNA, 19 nt, Artificial Sequence
  Description of Artificial Sequence: Synthetic oligonucleotide
uguaggcaccuaguugggc

SEQ ID NO: 1712168 - RNA, 19 nt, Artificial Sequence
  Description of Artificial Sequence: Synthetic oligonucleotide
cccaugaagagauuguaca

SEQ ID NO: 1712169 - RNA, 19 nt, Artificial Sequence
  Description of Artificial Sequence: Synthetic oligonucleotide
ucacacgugcucucucuaa

SEQ ID NO: 1712170 - RNA, 19 nt, Artificial Sequence
  Description of Artificial Sequence: Synthetic oligonucleotide
ggaaggagucccaugaaga

SEQ ID NO: 1712171 - RNA, 19 nt, Artificial Sequence
  Description of Artificial Sequence: Synthetic oligonucleotide
ggucuucuugucuccgccg

SEQ ID NO: 1712172 - RNA, 19 nt, Artificial Sequence
  Description of Artificial Sequence: Synthetic oligonucleotide
uggcucauaugcucuucac

SEQ ID NO: 1712173 - RNA, 19 nt, Artificial Sequence
  Description of Artificial Sequence: Synthetic oligonucleotide
uugucuccgccgcucguac

SEQ ID NO: 1712174 - RNA, 19 nt, Artificial Sequence
  Description of Artificial Sequence: Synthetic oligonucleotide
cuggucuucuugucuccgc

SEQ ID NO: 1712175 - RNA, 19 nt, Artificial Sequence
  Description of Artificial Sequence: Synthetic oligonucleotide
caugaguccgucagcccuc

SEQ ID NO: 1712176 - RNA, 19 nt, Artificial Sequence
  Description of Artificial Sequence: Synthetic oligonucleotide
ccagguugucagaaggcgg

SEQ ID NO: 1712177 - RNA, 19 nt, Artificial Sequence
  Description of Artificial Sequence: Synthetic oligonucleotide
cucauaugcucuucacaga

SEQ ID NO: 1712178 - RNA, 19 nt, Artificial Sequence
  Description of Artificial Sequence: Synthetic oligonucleotide
cucucuaaaccuaugcaau

SEQ ID NO: 1712179 - RNA, 19 nt, Artificial Sequence
  Description of Artificial Sequence: Synthetic oligonucleotide
gcgcacaggauucacaguc

SEQ ID NO: 1712180 - RNA, 19 nt, Artificial Sequence
  Description of Artificial Sequence: Synthetic oligonucleotide
ugaaggcgcacuggggaca

SEQ ID NO: 1712181 - RNA, 19 nt, Artificial Sequence
  Description of Artificial Sequence: Synthetic oligonucleotide
cuuccgcagcgcuuugccc

SEQ ID NO: 1712182 - RNA, 19 nt, Artificial Sequence
  Description of Artificial Sequence: Synthetic oligonucleotide
guaggcaccuaguugggcu

SEQ ID NO: 1712183 - RNA, 19 nt, Artificial Sequence
  Description of Artificial Sequence: Synthetic oligonucleotide
ugccccugggacaggcaag

SEQ ID NO: 1712184 - RNA, 19 nt, Artificial Sequence
  Description of Artificial Sequence: Synthetic oligonucleotide
augaguccgucagcccucc

SEQ ID NO: 1712185 - RNA, 19 nt, Artificial Sequence
  Description of Artificial Sequence: Synthetic oligonucleotide
uuccgccaauaucuccacc

SEQ ID NO: 1712186 - RNA, 19 nt, Artificial Sequence
  Description of Artificial Sequence: Synthetic oligonucleotide
cagaaggcggaaggggucc

SEQ ID NO: 1712187 - RNA, 19 nt, Artificial Sequence
  Description of Artificial Sequence: Synthetic oligonucleotide
ggguguaggcaccuaguug

SEQ ID NO: 1712188 - RNA, 19 nt, Artificial Sequence
  Description of Artificial Sequence: Synthetic oligonucleotide
uaggcaccuaguugggcuc

SEQ ID NO: 1712189 - RNA, 19 nt, Artificial Sequence
  Description of Artificial Sequence: Synthetic oligonucleotide
cucgagcggguguaggcac

SEQ ID NO: 1712190 - RNA, 19 nt, Artificial Sequence
  Description of Artificial Sequence: Synthetic oligonucleotide
ucgagcggguguaggcacc

SEQ ID NO: 1712191 - RNA, 19 nt, Artificial Sequence
  Description of Artificial Sequence: Synthetic oligonucleotide
agccuuuccugagauggug

SEQ ID NO: 1712192 - RNA, 19 nt, Artificial Sequence
  Description of Artificial Sequence: Synthetic oligonucleotide
uaucuccaucagugcaccc

SEQ ID NO: 1712193 - RNA, 19 nt, Artificial Sequence
  Description of Artificial Sequence: Synthetic oligonucleotide
gugaaggcgcacuggggac

SEQ ID NO: 1712194 - RNA, 19 nt, Artificial Sequence
  Description of Artificial Sequence: Synthetic oligonucleotide
ugccccucaaguccccgac

SEQ ID NO: 1712195 - RNA, 19 nt, Artificial Sequence
  Description of Artificial Sequence: Synthetic oligonucleotide
uuuggcucauaugcucuuc

SEQ ID NO: 1712196 - RNA, 19 nt, Artificial Sequence
  Description of Artificial Sequence: Synthetic oligonucleotide
gccagguugucagaaggcg

SEQ ID NO: 1712197 - RNA, 19 nt, Artificial Sequence
  Description of Artificial Sequence: Synthetic oligonucleotide
cuuccgccaauaucuccac

SEQ ID NO: 1712198 - RNA, 19 nt, Artificial Sequence
  Description of Artificial Sequence: Synthetic oligonucleotide
aggcaccuaguugggcucc

SEQ ID NO: 1712199 - RNA, 19 nt, Artificial Sequence
  Description of Artificial Sequence: Synthetic oligonucleotide
gggacggugucgaugcugg

SEQ ID NO: 1712200 - RNA, 19 nt, Artificial Sequence
  Description of Artificial Sequence: Synthetic oligonucleotide
augcaaugggauggauggg

SEQ ID NO: 1712201 - RNA, 19 nt, Artificial Sequence
  Description of Artificial Sequence: Synthetic oligonucleotide
cucguacugcgcguugagg

SEQ ID NO: 1712202 - RNA, 19 nt, Artificial Sequence
  Description of Artificial Sequence: Synthetic oligonucleotide
cuuuccugagaugguggug

SEQ ID NO: 1712203 - RNA, 19 nt, Artificial Sequence
  Description of Artificial Sequence: Synthetic oligonucleotide
aucggucaccgcccgccgg

SEQ ID NO: 1712204 - RNA, 19 nt, Artificial Sequence
  Description of Artificial Sequence: Synthetic oligonucleotide
ugaggucgucugccauccg

SEQ ID NO: 1712205 - RNA, 19 nt, Artificial Sequence
  Description of Artificial Sequence: Synthetic oligonucleotide
uccuugcuugccccuggga

SEQ ID NO: 1712206 - RNA, 19 nt, Artificial Sequence
  Description of Artificial Sequence: Synthetic oligonucleotide
ggguaagggaaggaguccc

SEQ ID NO: 1712207 - RNA, 19 nt, Artificial Sequence
  Description of Artificial Sequence: Synthetic oligonucleotide
gacggugucgaugcugguc

SEQ ID NO: 1712208 - RNA, 19 nt, Artificial Sequence
  Description of Artificial Sequence: Synthetic oligonucleotide
uccuccaaguccguaucuc

SEQ ID NO: 1712209 - RNA, 19 nt, Artificial Sequence
  Description of Artificial Sequence: Synthetic oligonucleotide
ccuccaaguccguaucucc

SEQ ID NO: 1712210 - RNA, 19 nt, Artificial Sequence
  Description of Artificial Sequence: Synthetic oligonucleotide
ggcucauaugcucuucaca

SEQ ID NO: 1712211 - RNA, 19 nt, Artificial Sequence
  Description of Artificial Sequence: Synthetic oligonucleotide
gagauggugguggggcggc

SEQ ID NO: 1712212 - RNA, 19 nt, Artificial Sequence
  Description of Artificial Sequence: Synthetic oligonucleotide
ggggccuaaggcuuccgcc

SEQ ID NO: 1712213 - RNA, 19 nt, Artificial Sequence
  Description of Artificial Sequence: Synthetic oligonucleotide
ccuugcuugccccugggac

SEQ ID NO: 1712214 - RNA, 19 nt, Artificial Sequence
  Description of Artificial Sequence: Synthetic oligonucleotide
ucaaguccccgacgucccu

SEQ ID NO: 1712215 - RNA, 19 nt, Artificial Sequence
  Description of Artificial Sequence: Synthetic oligonucleotide
gguggggcggcagaggcag

SEQ ID NO: 1712216 - RNA, 19 nt, Artificial Sequence
  Description of Artificial Sequence: Synthetic oligonucleotide
gucuggaccccuccuggac

SEQ ID NO: 1712217 - RNA, 19 nt, Artificial Sequence
  Description of Artificial Sequence: Synthetic oligonucleotide
aggcuaguggucagguuug

SEQ ID NO: 1712218 - RNA, 19 nt, Artificial Sequence
  Description of Artificial Sequence: Synthetic oligonucleotide
uccgcagcgcuuugcccug

SEQ ID NO: 1712219 - RNA, 19 nt, Artificial Sequence
  Description of Artificial Sequence: Synthetic oligonucleotide
agcgcacaggauucacagu

SEQ ID NO: 1712220 - RNA, 19 nt, Artificial Sequence
  Description of Artificial Sequence: Synthetic oligonucleotide
gaaggccgucacaugcccc

SEQ ID NO: 1712221 - RNA, 19 nt, Artificial Sequence
  Description of Artificial Sequence: Synthetic oligonucleotide
gucgucugccauccgccgc

SEQ ID NO: 1712222 - RNA, 19 nt, Artificial Sequence
  Description of Artificial Sequence: Synthetic oligonucleotide
ccucccacgaccuccuccc

SEQ ID NO: 1712223 - RNA, 19 nt, Artificial Sequence
  Description of Artificial Sequence: Synthetic oligonucleotide
gcacaggauucacagucug

SEQ ID NO: 1712224 - RNA, 19 nt, Artificial Sequence
  Description of Artificial Sequence: Synthetic oligonucleotide
uggucacacgugcucucuc

SEQ ID NO: 1712225 - RNA, 19 nt, Artificial Sequence
  Description of Artificial Sequence: Synthetic oligonucleotide
aggcaucggucaccgcccg

SEQ ID NO: 1712226 - RNA, 19 nt, Artificial Sequence
  Description of Artificial Sequence: Synthetic oligonucleotide
cguaucuccaucagugcac

SEQ ID NO: 1712227 - RNA, 19 nt, Artificial Sequence
  Description of Artificial Sequence: Synthetic oligonucleotide
auccauuccgguauaucua

SEQ ID NO: 1712228 - RNA, 19 nt, Artificial Sequence
  Description of Artificial Sequence: Synthetic oligonucleotide
uucuuccgcagcgcuuugc

SEQ ID NO: 1712229 - RNA, 19 nt, Artificial Sequence
  Description of Artificial Sequence: Synthetic oligonucleotide
gaugaaggugaggcaggca

SEQ ID NO: 1712230 - RNA, 19 nt, Artificial Sequence
  Description of Artificial Sequence: Synthetic oligonucleotide
ggucgucugccauccgccg

SEQ ID NO: 1712231 - RNA, 19 nt, Artificial Sequence
  Description of Artificial Sequence: Synthetic oligonucleotide
agggacggugucgaugcug

SEQ ID NO: 1712232 - RNA, 19 nt, Artificial Sequence
  Description of Artificial Sequence: Synthetic oligonucleotide
ucccucgagcggguguagg

SEQ ID NO: 1712233 - RNA, 19 nt, Artificial Sequence
  Description of Artificial Sequence: Synthetic oligonucleotide
aggaggcuaguggucaggu

SEQ ID NO: 1712234 - RNA, 19 nt, Artificial Sequence
  Description of Artificial Sequence: Synthetic oligonucleotide
caucggucaccgcccgccg

SEQ ID NO: 1712235 - RNA, 19 nt, Artificial Sequence
  Description of Artificial Sequence: Synthetic oligonucleotide
gguugucagaaggcggaag

SEQ ID NO: 1712236 - RNA, 19 nt, Artificial Sequence
  Description of Artificial Sequence: Synthetic oligonucleotide
gaaggcgcacuggggacac

SEQ ID NO: 1712237 - RNA, 19 nt, Artificial Sequence
  Description of Artificial Sequence: Synthetic oligonucleotide
ccuaguugggcuccauuuc

SEQ ID NO: 1712238 - RNA, 19 nt, Artificial Sequence
  Description of Artificial Sequence: Synthetic oligonucleotide
gggccggugacagggacgg

SEQ ID NO: 1712239 - RNA, 19 nt, Artificial Sequence
  Description of Artificial Sequence: Synthetic oligonucleotide
cauccgccgcagcugggcc

SEQ ID NO: 1712240 - RNA, 19 nt, Artificial Sequence
  Description of Artificial Sequence: Synthetic oligonucleotide
uuuuacaggcugggcccgu

SEQ ID NO: 1712241 - RNA, 19 nt, Artificial Sequence
  Description of Artificial Sequence: Synthetic oligonucleotide
gcggaagggguccugcccc

SEQ ID NO: 1712242 - RNA, 19 nt, Artificial Sequence
  Description of Artificial Sequence: Synthetic oligonucleotide
accuaugcaaugggaugga

SEQ ID NO: 1712243 - RNA, 19 nt, Artificial Sequence
  Description of Artificial Sequence: Synthetic oligonucleotide
ccauuucuggggcuccggg

SEQ ID NO: 1712244 - RNA, 19 nt, Artificial Sequence
  Description of Artificial Sequence: Synthetic oligonucleotide
aucuacagcagagcaugua

SEQ ID NO: 1712245 - RNA, 19 nt, Artificial Sequence
  Description of Artificial Sequence: Synthetic oligonucleotide
cugcagcuggaacgggcag

SEQ ID NO: 1712246 - RNA, 19 nt, Artificial Sequence
  Description of Artificial Sequence: Synthetic oligonucleotide
gacgcuggccagguuguca

SEQ ID NO: 1712247 - RNA, 19 nt, Artificial Sequence
  Description of Artificial Sequence: Synthetic oligonucleotide
cccacgaccuccucccucc

SEQ ID NO: 1712248 - RNA, 19 nt, Artificial Sequence
  Description of Artificial Sequence: Synthetic oligonucleotide
cauguacagaaaauccauu

SEQ ID NO: 1712249 - RNA, 19 nt, Artificial Sequence
  Description of Artificial Sequence: Synthetic oligonucleotide
ggcuuccgccaauaucucc

SEQ ID NO: 1712250 - RNA, 19 nt, Artificial Sequence
  Description of Artificial Sequence: Synthetic oligonucleotide
gaguccgucagcccucccu

SEQ ID NO: 1712251 - RNA, 19 nt, Artificial Sequence
  Description of Artificial Sequence: Synthetic oligonucleotide
uuuacaggcugggcccguc

SEQ ID NO: 1712252 - RNA, 19 nt, Artificial Sequence
  Description of Artificial Sequence: Synthetic oligonucleotide
aaggcgcacuggggacacc

SEQ ID NO: 1712253 - RNA, 19 nt, Artificial Sequence
  Description of Artificial Sequence: Synthetic oligonucleotide
ggcggaagggguccugccc

SEQ ID NO: 1712254 - RNA, 19 nt, Artificial Sequence
  Description of Artificial Sequence: Synthetic oligonucleotide
cacacgugcucucucuaaa

SEQ ID NO: 1712255 - RNA, 19 nt, Artificial Sequence
  Description of Artificial Sequence: Synthetic oligonucleotide
guccccgacgucccucgag

SEQ ID NO: 1712256 - RNA, 19 nt, Artificial Sequence
  Description of Artificial Sequence: Synthetic oligonucleotide
uccgccgcagcugggcccc

SEQ ID NO: 1712257 - RNA, 19 nt, Artificial Sequence
  Description of Artificial Sequence: Synthetic oligonucleotide
gugcacccaggcugccugg

SEQ ID NO: 1712258 - RNA, 19 nt, Artificial Sequence
  Description of Artificial Sequence: Synthetic oligonucleotide
ggcccacucguccuccucc

SEQ ID NO: 1712259 - RNA, 19 nt, Artificial Sequence
  Description of Artificial Sequence: Synthetic oligonucleotide
gcacugggcagagaaggcc

SEQ ID NO: 1712260 - RNA, 19 nt, Artificial Sequence
  Description of Artificial Sequence: Synthetic oligonucleotide
ccaaaugaaugccaguggu

SEQ ID NO: 1712261 - RNA, 19 nt, Artificial Sequence
  Description of Artificial Sequence: Synthetic oligonucleotide
ggaucccuggguaagggaa

SEQ ID NO: 1712262 - RNA, 19 nt, Artificial Sequence
  Description of Artificial Sequence: Synthetic oligonucleotide
ucuccgccgcucguacugc

SEQ ID NO: 1712263 - RNA, 19 nt, Artificial Sequence
  Description of Artificial Sequence: Synthetic oligonucleotide
acgucccucgagcgggugu

SEQ ID NO: 1712264 - RNA, 19 nt, Artificial Sequence
  Description of Artificial Sequence: Synthetic oligonucleotide
cugggccggugacagggac

SEQ ID NO: 1712265 - RNA, 19 nt, Artificial Sequence
  Description of Artificial Sequence: Synthetic oligonucleotide
cacgggcgacucgaggugc

SEQ ID NO: 1712266 - RNA, 19 nt, Artificial Sequence
  Description of Artificial Sequence: Synthetic oligonucleotide
aggcuuccgccaauaucuc

SEQ ID NO: 1712267 - RNA, 19 nt, Artificial Sequence
  Description of Artificial Sequence: Synthetic oligonucleotide
guccugccccucaaguccc

SEQ ID NO: 1712268 - RNA, 19 nt, Artificial Sequence
  Description of Artificial Sequence: Synthetic oligonucleotide
ucccugaccuccccaucuu

SEQ ID NO: 1712269 - RNA, 19 nt, Artificial Sequence
  Description of Artificial Sequence: Synthetic oligonucleotide
gaaggcggaagggguccug

SEQ ID NO: 1712270 - RNA, 19 nt, Artificial Sequence
  Description of Artificial Sequence: Synthetic oligonucleotide
ccacucguccuccuccccg

SEQ ID NO: 1712271 - RNA, 19 nt, Artificial Sequence
  Description of Artificial Sequence: Synthetic oligonucleotide
gaggccagggguccuccaa

SEQ ID NO: 1712272 - RNA, 19 nt, Artificial Sequence
  Description of Artificial Sequence: Synthetic oligonucleotide
cccgacgcuggccagguug

SEQ ID NO: 1712273 - RNA, 19 nt, Artificial Sequence
  Description of Artificial Sequence: Synthetic oligonucleotide
guccgucagcccucccucc

SEQ ID NO: 1712274 - RNA, 19 nt, Artificial Sequence
  Description of Artificial Sequence: Synthetic oligonucleotide
gcucguacugcgcguugag

SEQ ID NO: 1712275 - RNA, 19 nt, Artificial Sequence
  Description of Artificial Sequence: Synthetic oligonucleotide
cacucccggggcugccugg

SEQ ID NO: 1712276 - RNA, 19 nt, Artificial Sequence
  Description of Artificial Sequence: Synthetic oligonucleotide
gguggucccgggcagcgca

SEQ ID NO: 1712277 - RNA, 19 nt, Artificial Sequence
  Description of Artificial Sequence: Synthetic oligonucleotide
ugaguccgucagcccuccc

SEQ ID NO: 1712278 - RNA, 19 nt, Artificial Sequence
  Description of Artificial Sequence: Synthetic oligonucleotide
ucccgggcccacucguccu

SEQ ID NO: 1712279 - RNA, 19 nt, Artificial Sequence
  Description of Artificial Sequence: Synthetic oligonucleotide
ugucgaugcuggucuucuu

SEQ ID NO: 1712280 - RNA, 19 nt, Artificial Sequence
  Description of Artificial Sequence: Synthetic oligonucleotide
ggccagguugucagaaggc

SEQ ID NO: 1712281 - RNA, 19 nt, Artificial Sequence
  Description of Artificial Sequence: Synthetic oligonucleotide
ccgccaauaucuccacccc

SEQ ID NO: 1712282 - RNA, 19 nt, Artificial Sequence
  Description of Artificial Sequence: Synthetic oligonucleotide
ccucggucaccaugagucc

SEQ ID NO: 1712283 - RNA, 19 nt, Artificial Sequence
  Description of Artificial Sequence: Synthetic oligonucleotide
cugggcucgaguggcuuuc

SEQ ID NO: 1712284 - RNA, 19 nt, Artificial Sequence
  Description of Artificial Sequence: Synthetic oligonucleotide
cgacucgaggugcugcugg

SEQ ID NO: 1712285 - RNA, 19 nt, Artificial Sequence
  Description of Artificial Sequence: Synthetic oligonucleotide
ccguaucuccaucagugca

SEQ ID NO: 1712286 - RNA, 19 nt, Artificial Sequence
  Description of Artificial Sequence: Synthetic oligonucleotide
cccucgagcggguguaggc

SEQ ID NO: 1712287 - RNA, 19 nt, Artificial Sequence
  Description of Artificial Sequence: Synthetic oligonucleotide
ugggcucgaguggcuuucc

SEQ ID NO: 1712288 - RNA, 19 nt, Artificial Sequence
  Description of Artificial Sequence: Synthetic oligonucleotide
cuguucaaucugauuuuau

SEQ ID NO: 1712289 - RNA, 19 nt, Artificial Sequence
  Description of Artificial Sequence: Synthetic oligonucleotide
agaaggcggaagggguccu

SEQ ID NO: 1712290 - RNA, 19 nt, Artificial Sequence
  Description of Artificial Sequence: Synthetic oligonucleotide
cccuggguaagggaaggag

SEQ ID NO: 1712291 - RNA, 19 nt, Artificial Sequence
  Description of Artificial Sequence: Synthetic oligonucleotide
ggcacgggcgacucgaggu

SEQ ID NO: 1712292 - RNA, 19 nt, Artificial Sequence
  Description of Artificial Sequence: Synthetic oligonucleotide
caaggcuggcaguccagua

SEQ ID NO: 1712293 - RNA, 19 nt, Artificial Sequence
  Description of Artificial Sequence: Synthetic oligonucleotide
ccaaguccguaucuccauc

SEQ ID NO: 1712294 - RNA, 19 nt, Artificial Sequence
  Description of Artificial Sequence: Synthetic oligonucleotide
gcaaugggauggaugggga

SEQ ID NO: 1712295 - RNA, 19 nt, Artificial Sequence
  Description of Artificial Sequence: Synthetic oligonucleotide
cagggcgagggacgguguc

SEQ ID NO: 1712296 - RNA, 19 nt, Artificial Sequence
  Description of Artificial Sequence: Synthetic oligonucleotide
ggaccccuccuggacaccc

SEQ ID NO: 1712297 - RNA, 19 nt, Artificial Sequence
  Description of Artificial Sequence: Synthetic oligonucleotide
ccgguauaucuacagcaga

SEQ ID NO: 1712298 - RNA, 19 nt, Artificial Sequence
  Description of Artificial Sequence: Synthetic oligonucleotide
gccccucaaguccccgacg

SEQ ID NO: 1712299 - RNA, 19 nt, Artificial Sequence
  Description of Artificial Sequence: Synthetic oligonucleotide
gggaucccuggguaaggga

SEQ ID NO: 1712300 - RNA, 19 nt, Artificial Sequence
  Description of Artificial Sequence: Synthetic oligonucleotide
guuuggcucauaugcucuu

SEQ ID NO: 1712301 - RNA, 19 nt, Artificial Sequence
  Description of Artificial Sequence: Synthetic oligonucleotide
gugucgaugcuggucuucu

SEQ ID NO: 1712302 - RNA, 19 nt, Artificial Sequence
  Description of Artificial Sequence: Synthetic oligonucleotide
ggucacacgugcucucucu

SEQ ID NO: 1712303 - RNA, 19 nt, Artificial Sequence
  Description of Artificial Sequence: Synthetic oligonucleotide
cccgacgucccucgagcgg

SEQ ID NO: 1712304 - RNA, 19 nt, Artificial Sequence
  Description of Artificial Sequence: Synthetic oligonucleotide
ccggugacagggacggcug

SEQ ID NO: 1712305 - RNA, 19 nt, Artificial Sequence
  Description of Artificial Sequence: Synthetic oligonucleotide
cuugccccugggacaggca

SEQ ID NO: 1712306 - RNA, 19 nt, Artificial Sequence
  Description of Artificial Sequence: Synthetic oligonucleotide
guaagggaaggagucccau

SEQ ID NO: 1712307 - RNA, 19 nt, Artificial Sequence
  Description of Artificial Sequence: Synthetic oligonucleotide
gcgagggacggugucgaug

SEQ ID NO: 1712308 - RNA, 19 nt, Artificial Sequence
  Description of Artificial Sequence: Synthetic oligonucleotide
ccaugaagagauuguacau

SEQ ID NO: 1712309 - RNA, 19 nt, Artificial Sequence
  Description of Artificial Sequence: Synthetic oligonucleotide
cuugucuccgccgcucgua

SEQ ID NO: 1712310 - RNA, 19 nt, Artificial Sequence
  Description of Artificial Sequence: Synthetic oligonucleotide
ggcuccauuucuggggcuc

SEQ ID NO: 1712311 - RNA, 19 nt, Artificial Sequence
  Description of Artificial Sequence: Synthetic oligonucleotide
gcuccauuucuggggcucc

SEQ ID NO: 1712312 - RNA, 19 nt, Artificial Sequence
  Description of Artificial Sequence: Synthetic oligonucleotide
uggaccccuccuggacacc

SEQ ID NO: 1712313 - RNA, 19 nt, Artificial Sequence
  Description of Artificial Sequence: Synthetic oligonucleotide
guccuccaaguccguaucu

SEQ ID NO: 1712314 - RNA, 19 nt, Artificial Sequence
  Description of Artificial Sequence: Synthetic oligonucleotide
gacgucccucgagcgggug

SEQ ID NO: 1712315 - RNA, 19 nt, Artificial Sequence
  Description of Artificial Sequence: Synthetic oligonucleotide
guggggccgcccgccaggg

SEQ ID NO: 1712316 - RNA, 19 nt, Artificial Sequence
  Description of Artificial Sequence: Synthetic oligonucleotide
ugcuugccccugggacagg

SEQ ID NO: 1712317 - RNA, 19 nt, Artificial Sequence
  Description of Artificial Sequence: Synthetic oligonucleotide
ggucccgggcagcgcacag

SEQ ID NO: 1712318 - RNA, 19 nt, Artificial Sequence
  Description of Artificial Sequence: Synthetic oligonucleotide
gcuugccccugggacaggc

SEQ ID NO: 1712319 - RNA, 19 nt, Artificial Sequence
  Description of Artificial Sequence: Synthetic oligonucleotide
ggugucgaugcuggucuuc

SEQ ID NO: 1712320 - RNA, 19 nt, Artificial Sequence
  Description of Artificial Sequence: Synthetic oligonucleotide
cugggcccguccccucccc

SEQ ID NO: 1712321 - RNA, 19 nt, Artificial Sequence
  Description of Artificial Sequence: Synthetic oligonucleotide
gacccuccagggcgaggga

SEQ ID NO: 1712322 - RNA, 19 nt, Artificial Sequence
  Description of Artificial Sequence: Synthetic oligonucleotide
cuaaggcuuccgccaauau

SEQ ID NO: 1712323 - RNA, 19 nt, Artificial Sequence
  Description of Artificial Sequence: Synthetic oligonucleotide
ggucaccgcccgccggcgg

SEQ ID NO: 1712324 - RNA, 19 nt, Artificial Sequence
  Description of Artificial Sequence: Synthetic oligonucleotide
cugccccucaaguccccga

SEQ ID NO: 1712325 - RNA, 19 nt, Artificial Sequence
  Description of Artificial Sequence: Synthetic oligonucleotide
ccccgacgucccucgagcg

SEQ ID NO: 1712326 - RNA, 19 nt, Artificial Sequence
  Description of Artificial Sequence: Synthetic oligonucleotide
gcugggcacgggcgacucg

SEQ ID NO: 1712327 - RNA, 19 nt, Artificial Sequence
  Description of Artificial Sequence: Synthetic oligonucleotide
gggacaggcaaggcuggca

SEQ ID NO: 1712328 - RNA, 19 nt, Artificial Sequence
  Description of Artificial Sequence: Synthetic oligonucleotide
cuuugcccuggggccuaag

SEQ ID NO: 1712329 - RNA, 19 nt, Artificial Sequence
  Description of Artificial Sequence: Synthetic oligonucleotide
ggccccgaucucccgggcc

SEQ ID NO: 1712330 - RNA, 19 nt, Artificial Sequence
  Description of Artificial Sequence: Synthetic oligonucleotide
ccuccagggcgagggacgg

SEQ ID NO: 1712331 - RNA, 19 nt, Artificial Sequence
  Description of Artificial Sequence: Synthetic oligonucleotide
ggccuaaggcuuccgccaa

SEQ ID NO: 1712332 - RNA, 19 nt, Artificial Sequence
  Description of Artificial Sequence: Synthetic oligonucleotide
ccauccgccgcagcugggc

SEQ ID NO: 1712333 - RNA, 19 nt, Artificial Sequence
  Description of Artificial Sequence: Synthetic oligonucleotide
gucccucgagcggguguag

SEQ ID NO: 1712334 - RNA, 19 nt, Artificial Sequence
  Description of Artificial Sequence: Synthetic oligonucleotide
gcuggccagguugucagaa

SEQ ID NO: 1712335 - RNA, 19 nt, Artificial Sequence
  Description of Artificial Sequence: Synthetic oligonucleotide
ggcccaaagugaaggcgca

SEQ ID NO: 1712336 - RNA, 19 nt, Artificial Sequence
  Description of Artificial Sequence: Synthetic oligonucleotide
gcacccaggcugccugggc

SEQ ID NO: 1712337 - RNA, 19 nt, Artificial Sequence
  Description of Artificial Sequence: Synthetic oligonucleotide
gcguugaggucgucugcca

SEQ ID NO: 1712338 - RNA, 19 nt, Artificial Sequence
  Description of Artificial Sequence: Synthetic oligonucleotide
augcuacauggugcagaaa

SEQ ID NO: 1712339 - RNA, 19 nt, Artificial Sequence
  Description of Artificial Sequence: Synthetic oligonucleotide
ccauuccgguauaucuaca

SEQ ID NO: 1712340 - RNA, 19 nt, Artificial Sequence
  Description of Artificial Sequence: Synthetic oligonucleotide
caggcggcucgguccccac

SEQ ID NO: 1712341 - RNA, 19 nt, Artificial Sequence
  Description of Artificial Sequence: Synthetic oligonucleotide
cgugcucucucuaaaccua

SEQ ID NO: 1712342 - RNA, 19 nt, Artificial Sequence
  Description of Artificial Sequence: Synthetic oligonucleotide
ggcaucggucaccgcccgc

SEQ ID NO: 1712343 - RNA, 19 nt, Artificial Sequence
  Description of Artificial Sequence: Synthetic oligonucleotide
guggucacacgugcucucu

SEQ ID NO: 1712344 - RNA, 19 nt, Artificial Sequence
  Description of Artificial Sequence: Synthetic oligonucleotide
ccuccccgcgcacucccgg

SEQ ID NO: 1712345 - RNA, 19 nt, Artificial Sequence
  Description of Artificial Sequence: Synthetic oligonucleotide
gcacucccggggcugccug

SEQ ID NO: 1712346 - RNA, 19 nt, Artificial Sequence
  Description of Artificial Sequence: Synthetic oligonucleotide
cagccuuuccugagauggu

SEQ ID NO: 1712347 - RNA, 19 nt, Artificial Sequence
  Description of Artificial Sequence: Synthetic oligonucleotide
ccgucagcccucccucccc

SEQ ID NO: 1712348 - RNA, 19 nt, Artificial Sequence
  Description of Artificial Sequence: Synthetic oligonucleotide
ccgggaucccuggguaagg

SEQ ID NO: 1712349 - RNA, 19 nt, Artificial Sequence
  Description of Artificial Sequence: Synthetic oligonucleotide
gugcucucucuaaaccuau

SEQ ID NO: 1712350 - RNA, 19 nt, Artificial Sequence
  Description of Artificial Sequence: Synthetic oligonucleotide
ggcgacucgaggugcugcu

SEQ ID NO: 1712351 - RNA, 19 nt, Artificial Sequence
  Description of Artificial Sequence: Synthetic oligonucleotide
gcccgccggcgguucaggg

SEQ ID NO: 1712352 - RNA, 19 nt, Artificial Sequence
  Description of Artificial Sequence: Synthetic oligonucleotide
uggucagguuuggcucaua

SEQ ID NO: 1712353 - RNA, 19 nt, Artificial Sequence
  Description of Artificial Sequence: Synthetic oligonucleotide
gcccgccagggccuccggg

SEQ ID NO: 1712354 - RNA, 19 nt, Artificial Sequence
  Description of Artificial Sequence: Synthetic oligonucleotide
gggcgagggacggugucga

SEQ ID NO: 1712355 - RNA, 19 nt, Artificial Sequence
  Description of Artificial Sequence: Synthetic oligonucleotide
gcgguucagggaagauggc

SEQ ID NO: 1712356 - RNA, 19 nt, Artificial Sequence
  Description of Artificial Sequence: Synthetic oligonucleotide
ccuggguggggccgcccgc

SEQ ID NO: 1712357 - RNA, 19 nt, Artificial Sequence
  Description of Artificial Sequence: Synthetic oligonucleotide
guggucccgggcagcgcac

SEQ ID NO: 1712358 - RNA, 19 nt, Artificial Sequence
  Description of Artificial Sequence: Synthetic oligonucleotide
cccacucguccuccucccc

SEQ ID NO: 1712359 - RNA, 19 nt, Artificial Sequence
  Description of Artificial Sequence: Synthetic oligonucleotide
ggcgcacuggggacacccc

SEQ ID NO: 1712360 - RNA, 19 nt, Artificial Sequence
  Description of Artificial Sequence: Synthetic oligonucleotide
gcgacucgaggugcugcug

SEQ ID NO: 1712361 - RNA, 19 nt, Artificial Sequence
  Description of Artificial Sequence: Synthetic oligonucleotide
ggcucgaguggcuuuccuu

SEQ ID NO: 1712362 - RNA, 19 nt, Artificial Sequence
  Description of Artificial Sequence: Synthetic oligonucleotide
ccucgagcggguguaggca

SEQ ID NO: 1712363 - RNA, 19 nt, Artificial Sequence
  Description of Artificial Sequence: Synthetic oligonucleotide
gagggacggugucgaugcu

SEQ ID NO: 1712364 - RNA, 19 nt, Artificial Sequence
  Description of Artificial Sequence: Synthetic oligonucleotide
cggcgguucagggaagaug

SEQ ID NO: 1712365 - RNA, 19 nt, Artificial Sequence
  Description of Artificial Sequence: Synthetic oligonucleotide
cugccuggguggggccgcc

SEQ ID NO: 1712366 - RNA, 19 nt, Artificial Sequence
  Description of Artificial Sequence: Synthetic oligonucleotide
ggcaggcaucggucaccgc

SEQ ID NO: 1712367 - RNA, 19 nt, Artificial Sequence
  Description of Artificial Sequence: Synthetic oligonucleotide
ccgccggcgguucagggaa

SEQ ID NO: 1712368 - RNA, 19 nt, Artificial Sequence
  Description of Artificial Sequence: Synthetic oligonucleotide
agggguccuccaaguccgu

SEQ ID NO: 1712369 - RNA, 19 nt, Artificial Sequence
  Description of Artificial Sequence: Synthetic oligonucleotide
ccuaaggcuuccgccaaua

SEQ ID NO: 1712370 - RNA, 19 nt, Artificial Sequence
  Description of Artificial Sequence: Synthetic oligonucleotide
caccuaguugggcuccauu

SEQ ID NO: 1712371 - RNA, 19 nt, Artificial Sequence
  Description of Artificial Sequence: Synthetic oligonucleotide
gcuggcaguccaguaugcu

SEQ ID NO: 1712372 - RNA, 19 nt, Artificial Sequence
  Description of Artificial Sequence: Synthetic oligonucleotide
ccccgcgcacucccggggc

SEQ ID NO: 1712373 - RNA, 19 nt, Artificial Sequence
  Description of Artificial Sequence: Synthetic oligonucleotide
gccauccgccgcagcuggg

SEQ ID NO: 1712374 - RNA, 19 nt, Artificial Sequence
  Description of Artificial Sequence: Synthetic oligonucleotide
ggcaccuaguugggcucca

SEQ ID NO: 1712375 - RNA, 19 nt, Artificial Sequence
  Description of Artificial Sequence: Synthetic oligonucleotide
gggccccgaucucccgggc

SEQ ID NO: 1712376 - RNA, 19 nt, Artificial Sequence
  Description of Artificial Sequence: Synthetic oligonucleotide
ggaggcuaguggucagguu

SEQ ID NO: 1712377 - RNA, 19 nt, Artificial Sequence
  Description of Artificial Sequence: Synthetic oligonucleotide
ccgcucguacugcgcguug

SEQ ID NO: 1712378 - RNA, 19 nt, Artificial Sequence
  Description of Artificial Sequence: Synthetic oligonucleotide
guggucagguuuggcucau

SEQ ID NO: 1712379 - RNA, 19 nt, Artificial Sequence
  Description of Artificial Sequence: Synthetic oligonucleotide
cgcagcgcuuugcccuggg

SEQ ID NO: 1712380 - RNA, 19 nt, Artificial Sequence
  Description of Artificial Sequence: Synthetic oligonucleotide
gcggguguaggcaccuagu

SEQ ID NO: 1712381 - RNA, 19 nt, Artificial Sequence
  Description of Artificial Sequence: Synthetic oligonucleotide
ccgggcagcgcacaggauu

SEQ ID NO: 1712382 - RNA, 19 nt, Artificial Sequence
  Description of Artificial Sequence: Synthetic oligonucleotide
ggguggucccgggcagcgc

SEQ ID NO: 1712383 - RNA, 19 nt, Artificial Sequence
  Description of Artificial Sequence: Synthetic oligonucleotide
gccaguggucacacgugcu

SEQ ID NO: 1712384 - RNA, 19 nt, Artificial Sequence
  Description of Artificial Sequence: Synthetic oligonucleotide
gccggcgguucagggaaga

SEQ ID NO: 1712385 - RNA, 19 nt, Artificial Sequence
  Description of Artificial Sequence: Synthetic oligonucleotide
gagcggguguaggcaccua

SEQ ID NO: 1712386 - RNA, 19 nt, Artificial Sequence
  Description of Artificial Sequence: Synthetic oligonucleotide
cgcacaggauucacagucu

SEQ ID NO: 1712387 - RNA, 19 nt, Artificial Sequence
  Description of Artificial Sequence: Synthetic oligonucleotide
ccgacgcuggccagguugu

SEQ ID NO: 1712388 - RNA, 19 nt, Artificial Sequence
  Description of Artificial Sequence: Synthetic oligonucleotide
gggcucgaguggcuuuccu

SEQ ID NO: 1712389 - RNA, 19 nt, Artificial Sequence
  Description of Artificial Sequence: Synthetic oligonucleotide
cccgggcccacucguccuc

SEQ ID NO: 1712390 - RNA, 19 nt, Artificial Sequence
  Description of Artificial Sequence: Synthetic oligonucleotide
gcugggccggugacaggga

SEQ ID NO: 1712391 - RNA, 19 nt, Artificial Sequence
  Description of Artificial Sequence: Synthetic oligonucleotide
caccgcccgccggcgguuc

SEQ ID NO: 1712392 - RNA, 19 nt, Artificial Sequence
  Description of Artificial Sequence: Synthetic oligonucleotide
gcaguccaguaugcuacau

SEQ ID NO: 1712393 - RNA, 19 nt, Artificial Sequence
  Description of Artificial Sequence: Synthetic oligonucleotide
gggguccuccaaguccgua

SEQ ID NO: 1712394 - RNA, 19 nt, Artificial Sequence
  Description of Artificial Sequence: Synthetic oligonucleotide
ccgcagcugggccccgauc

SEQ ID NO: 1712395 - RNA, 19 nt, Artificial Sequence
  Description of Artificial Sequence: Synthetic oligonucleotide
gccuaaggcuuccgccaau

SEQ ID NO: 1712396 - RNA, 19 nt, Artificial Sequence
  Description of Artificial Sequence: Synthetic oligonucleotide
ggcaggcggcucggucccc

SEQ ID NO: 1712397 - RNA, 19 nt, Artificial Sequence
  Description of Artificial Sequence: Synthetic oligonucleotide
cgcucguacugcgcguuga

SEQ ID NO: 1712398 - RNA, 19 nt, Artificial Sequence
  Description of Artificial Sequence: Synthetic oligonucleotide
gcgcuuugcccuggggccu

SEQ ID NO: 1712399 - RNA, 19 nt, Artificial Sequence
  Description of Artificial Sequence: Synthetic oligonucleotide
ccgcgcacucccggggcug

SEQ ID NO: 1712400 - RNA, 19 nt, Artificial Sequence
  Description of Artificial Sequence: Synthetic oligonucleotide
ccuaugcaaugggauggau

SEQ ID NO: 1712401 - RNA, 19 nt, Artificial Sequence
  Description of Artificial Sequence: Synthetic oligonucleotide
cgcgcacucccggggcugc

SEQ ID NO: 1712402 - RNA, 19 nt, Artificial Sequence
  Description of Artificial Sequence: Synthetic oligonucleotide
gcgcacucccggggcugcc

SEQ ID NO: 1712403 - RNA, 19 nt, Artificial Sequence
  Description of Artificial Sequence: Synthetic oligonucleotide
cgccggcgguucagggaag

SEQ ID NO: 1712404 - RNA, 19 nt, Artificial Sequence
  Description of Artificial Sequence: Synthetic oligonucleotide
cggguguaggcaccuaguu

SEQ ID NO: 1712405 - RNA, 19 nt, Artificial Sequence
  Description of Artificial Sequence: Synthetic oligonucleotide
ggcgagggacggugucgau

SEQ ID NO: 1712406 - RNA, 19 nt, Artificial Sequence
  Description of Artificial Sequence: Synthetic oligonucleotide
ggagucccaugaagagauu

SEQ ID NO: 1712407 - RNA, 19 nt, Artificial Sequence
  Description of Artificial Sequence: Synthetic oligonucleotide
cgucccucgagcgggugua

SEQ ID NO: 1712408 - RNA, 19 nt, Artificial Sequence
  Description of Artificial Sequence: Synthetic oligonucleotide
cgggcgacucgaggugcug

SEQ ID NO: 1712409 - RNA, 19 nt, Artificial Sequence
  Description of Artificial Sequence: Synthetic oligonucleotide
cuccagggcgagggacggu

SEQ ID NO: 1712410 - RNA, 19 nt, Artificial Sequence
  Description of Artificial Sequence: Synthetic oligonucleotide
cgcccgccggcgguucagg

SEQ ID NO: 1712411 - RNA, 19 nt, Artificial Sequence
  Description of Artificial Sequence: Synthetic oligonucleotide
gccgcucguacugcgcguu

SEQ ID NO: 1712412 - RNA, 19 nt, Artificial Sequence
  Description of Artificial Sequence: Synthetic oligonucleotide
gccgcagcugggccccgau

SEQ ID NO: 1712413 - RNA, 19 nt, Artificial Sequence
  Description of Artificial Sequence: Synthetic oligonucleotide
ccccgaucucccgggccca

SEQ ID NO: 1712414 - RNA, 19 nt, Artificial Sequence
  Description of Artificial Sequence: Synthetic oligonucleotide
gcaccuaguugggcuccau

SEQ ID NO: 1712415 - RNA, 19 nt, Artificial Sequence
  Description of Artificial Sequence: Synthetic oligonucleotide
cgacgcuggccagguuguc

SEQ ID NO: 1712416 - RNA, 19 nt, Artificial Sequence
  Description of Artificial Sequence: Synthetic oligonucleotide
cccucccuccccuggcuuu

SEQ ID NO: 1712417 - RNA, 19 nt, Artificial Sequence
  Description of Artificial Sequence: Synthetic oligonucleotide
cgagcggguguaggcaccu

SEQ ID NO: 1712418 - RNA, 19 nt, Artificial Sequence
  Description of Artificial Sequence: Synthetic oligonucleotide
cccgcgcacucccggggcu

SEQ ID NO: 1712419 - RNA, 19 nt, Artificial Sequence
  Description of Artificial Sequence: Synthetic oligonucleotide
ccacgaccuccucccuccu

SEQ ID NO: 1712420 - RNA, 19 nt, Artificial Sequence
  Description of Artificial Sequence: Synthetic oligonucleotide
cgccgcucguacugcgcgu

SEQ ID NO: 1712421 - RNA, 19 nt, Artificial Sequence
  Description of Artificial Sequence: Synthetic oligonucleotide
cgacgucccucgagcgggu

SEQ ID NO: 1712422 - RNA, 19 nt, Artificial Sequence
  Description of Artificial Sequence: Synthetic oligonucleotide
ccggcgguucagggaagau

SEQ ID NO: 1712423 - RNA, 19 nt, Artificial Sequence
  Description of Artificial Sequence: Synthetic oligonucleotide
cccgggcagcgcacaggau

SEQ ID NO: 1712424 - RNA, 19 nt, Artificial Sequence
  Description of Artificial Sequence: Synthetic oligonucleotide
cggugucgaugcuggucuu

SEQ ID NO: 1712425 - RNA, 19 nt, Artificial Sequence
  Description of Artificial Sequence: Synthetic oligonucleotide
ccccgacgcuggccagguu

SEQ ID NO: 1712426 - RNA, 19 nt, Artificial Sequence
  Description of Artificial Sequence: Synthetic oligonucleotide
aaaacgucaaguucaaagc

SEQ ID NO: 1712427 - RNA, 19 nt, Artificial Sequence
  Description of Artificial Sequence: Synthetic oligonucleotide
auaugguagauuuaugggc

SEQ ID NO: 1712428 - RNA, 19 nt, Artificial Sequence
  Description of Artificial Sequence: Synthetic oligonucleotide
gaaaacgucaaguucaaag

SEQ ID NO: 1712429 - RNA, 19 nt, Artificial Sequence
  Description of Artificial Sequence: Synthetic oligonucleotide
aacuccaagcuacacaccc

SEQ ID NO: 1712430 - RNA, 19 nt, Artificial Sequence
  Description of Artificial Sequence: Synthetic oligonucleotide
aucguuacgaacuuggcac

SEQ ID NO: 1712431 - RNA, 19 nt, Artificial Sequence
  Description of Artificial Sequence: Synthetic oligonucleotide
aaguucaaagcauuggguc

SEQ ID NO: 1712432 - RNA, 19 nt, Artificial Sequence
  Description of Artificial Sequence: Synthetic oligonucleotide
acauuuaaugggcuuagcc

SEQ ID NO: 1712433 - RNA, 19 nt, Artificial Sequence
  Description of Artificial Sequence: Synthetic oligonucleotide
cuucguaacaaucagcacg

SEQ ID NO: 1712434 - RNA, 19 nt, Artificial Sequence
  Description of Artificial Sequence: Synthetic oligonucleotide
uaaccuggaaaccagacug

SEQ ID NO: 1712435 - RNA, 19 nt, Artificial Sequence
  Description of Artificial Sequence: Synthetic oligonucleotide
uaugguagauuuaugggcc

SEQ ID NO: 1712436 - RNA, 19 nt, Artificial Sequence
  Description of Artificial Sequence: Synthetic oligonucleotide
aauacacuggcaucucugg

SEQ ID NO: 1712437 - RNA, 19 nt, Artificial Sequence
  Description of Artificial Sequence: Synthetic oligonucleotide
auagccagcacaaacaaac

SEQ ID NO: 1712438 - RNA, 19 nt, Artificial Sequence
  Description of Artificial Sequence: Synthetic oligonucleotide
uuauucauacuuauguccu

SEQ ID NO: 1712439 - RNA, 19 nt, Artificial Sequence
  Description of Artificial Sequence: Synthetic oligonucleotide
cauaugguagauuuauggg

SEQ ID NO: 1712440 - RNA, 19 nt, Artificial Sequence
  Description of Artificial Sequence: Synthetic oligonucleotide
cagacaaacgcuaaccugg

SEQ ID NO: 1712441 - RNA, 19 nt, Artificial Sequence
  Description of Artificial Sequence: Synthetic oligonucleotide
uucguaacaaucagcacgc

SEQ ID NO: 1712442 - RNA, 19 nt, Artificial Sequence
  Description of Artificial Sequence: Synthetic oligonucleotide
accuauaccaucuauagua

SEQ ID NO: 1712443 - RNA, 19 nt, Artificial Sequence
  Description of Artificial Sequence: Synthetic oligonucleotide
uuucugucaaacuccaagc

SEQ ID NO: 1712444 - RNA, 19 nt, Artificial Sequence
  Description of Artificial Sequence: Synthetic oligonucleotide
aaagacguggaacuugccu

SEQ ID NO: 1712445 - RNA, 19 nt, Artificial Sequence
  Description of Artificial Sequence: Synthetic oligonucleotide
agaagcaaagccuuuggug

SEQ ID NO: 1712446 - RNA, 19 nt, Artificial Sequence
  Description of Artificial Sequence: Synthetic oligonucleotide
uguagcuacuaauuuauuc

SEQ ID NO: 1712447 - RNA, 19 nt, Artificial Sequence
  Description of Artificial Sequence: Synthetic oligonucleotide
uguaagcauugccaaaugc

SEQ ID NO: 1712448 - RNA, 19 nt, Artificial Sequence
  Description of Artificial Sequence: Synthetic oligonucleotide
ucaaagacguggaacuugc

SEQ ID NO: 1712449 - RNA, 19 nt, Artificial Sequence
  Description of Artificial Sequence: Synthetic oligonucleotide
aauuccaaguuccaccuau

SEQ ID NO: 1712450 - RNA, 19 nt, Artificial Sequence
  Description of Artificial Sequence: Synthetic oligonucleotide
uuacagaauacacuggcau

SEQ ID NO: 1712451 - RNA, 19 nt, Artificial Sequence
  Description of Artificial Sequence: Synthetic oligonucleotide
accuggauaacgccggugc

SEQ ID NO: 1712452 - RNA, 19 nt, Artificial Sequence
  Description of Artificial Sequence: Synthetic oligonucleotide
acgaacuuggcacugcagg

SEQ ID NO: 1712453 - RNA, 19 nt, Artificial Sequence
  Description of Artificial Sequence: Synthetic oligonucleotide
auacuuauguccuuucugu

SEQ ID NO: 1712454 - RNA, 19 nt, Artificial Sequence
  Description of Artificial Sequence: Synthetic oligonucleotide
uauaccaucuauaguauuu

SEQ ID NO: 1712455 - RNA, 19 nt, Artificial Sequence
  Description of Artificial Sequence: Synthetic oligonucleotide
gauuuaugggccuuuucug

SEQ ID NO: 1712456 - RNA, 19 nt, Artificial Sequence
  Description of Artificial Sequence: Synthetic oligonucleotide
aauguggacaaugaucuga

SEQ ID NO: 1712457 - RNA, 19 nt, Artificial Sequence
  Description of Artificial Sequence: Synthetic oligonucleotide
uuuacagaauacacuggca

SEQ ID NO: 1712458 - RNA, 19 nt, Artificial Sequence
  Description of Artificial Sequence: Synthetic oligonucleotide
uacaccuggauaacgccgg

SEQ ID NO: 1712459 - RNA, 19 nt, Artificial Sequence
  Description of Artificial Sequence: Synthetic oligonucleotide
auagcucaaauucugagua

SEQ ID NO: 1712460 - RNA, 19 nt, Artificial Sequence
  Description of Artificial Sequence: Synthetic oligonucleotide
uuucagguccccacgcugg

SEQ ID NO: 1712461 - RNA, 19 nt, Artificial Sequence
  Description of Artificial Sequence: Synthetic oligonucleotide
cagacugcaaacaucgcag

SEQ ID NO: 1712462 - RNA, 19 nt, Artificial Sequence
  Description of Artificial Sequence: Synthetic oligonucleotide
caaacgcuaaccuggaaac

SEQ ID NO: 1712463 - RNA, 19 nt, Artificial Sequence
  Description of Artificial Sequence: Synthetic oligonucleotide
ggauguagaacauagcuca

SEQ ID NO: 1712464 - RNA, 19 nt, Artificial Sequence
  Description of Artificial Sequence: Synthetic oligonucleotide
guauucauacuuccagagg

SEQ ID NO: 1712465 - RNA, 19 nt, Artificial Sequence
  Description of Artificial Sequence: Synthetic oligonucleotide
guaagcauugccaaaugcc

SEQ ID NO: 1712466 - RNA, 19 nt, Artificial Sequence
  Description of Artificial Sequence: Synthetic oligonucleotide
gcuacuaauuuauucauac

SEQ ID NO: 1712467 - RNA, 19 nt, Artificial Sequence
  Description of Artificial Sequence: Synthetic oligonucleotide
aaacgcuaaccuggaaacc

SEQ ID NO: 1712468 - RNA, 19 nt, Artificial Sequence
  Description of Artificial Sequence: Synthetic oligonucleotide
ugauuguaagcauugccaa

SEQ ID NO: 1712469 - RNA, 19 nt, Artificial Sequence
  Description of Artificial Sequence: Synthetic oligonucleotide
aagacguggaacuugccuu

SEQ ID NO: 1712470 - RNA, 19 nt, Artificial Sequence
  Description of Artificial Sequence: Synthetic oligonucleotide
acuuauguccuuucuguca

SEQ ID NO: 1712471 - RNA, 19 nt, Artificial Sequence
  Description of Artificial Sequence: Synthetic oligonucleotide
ccaaaugccaguuccaucc

SEQ ID NO: 1712472 - RNA, 19 nt, Artificial Sequence
  Description of Artificial Sequence: Synthetic oligonucleotide
guagugacauguuucugag

SEQ ID NO: 1712473 - RNA, 19 nt, Artificial Sequence
  Description of Artificial Sequence: Synthetic oligonucleotide
aacgcuaaccuggaaacca

SEQ ID NO: 1712474 - RNA, 19 nt, Artificial Sequence
  Description of Artificial Sequence: Synthetic oligonucleotide
acaaacgcuaaccuggaaa

SEQ ID NO: 1712475 - RNA, 19 nt, Artificial Sequence
  Description of Artificial Sequence: Synthetic oligonucleotide
ugacucucaggcuuugugc

SEQ ID NO: 1712476 - RNA, 19 nt, Artificial Sequence
  Description of Artificial Sequence: Synthetic oligonucleotide
cuauaguauuuauaauuuc

SEQ ID NO: 1712477 - RNA, 19 nt, Artificial Sequence
  Description of Artificial Sequence: Synthetic oligonucleotide
guaacaaucagcacgcgca

SEQ ID NO: 1712478 - RNA, 19 nt, Artificial Sequence
  Description of Artificial Sequence: Synthetic oligonucleotide
ucguacaccuggauaacgc

SEQ ID NO: 1712479 - RNA, 19 nt, Artificial Sequence
  Description of Artificial Sequence: Synthetic oligonucleotide
aaucagcacgcgcacuguc

SEQ ID NO: 1712480 - RNA, 19 nt, Artificial Sequence
  Description of Artificial Sequence: Synthetic oligonucleotide
aaugccaguuccaucccgg

SEQ ID NO: 1712481 - RNA, 19 nt, Artificial Sequence
  Description of Artificial Sequence: Synthetic oligonucleotide
ugaccgaugaguaggguau

SEQ ID NO: 1712482 - RNA, 19 nt, Artificial Sequence
  Description of Artificial Sequence: Synthetic oligonucleotide
ugcagacaaacgcuaaccu

SEQ ID NO: 1712483 - RNA, 19 nt, Artificial Sequence
  Description of Artificial Sequence: Synthetic oligonucleotide
gaucugaggcuucucaaac

SEQ ID NO: 1712484 - RNA, 19 nt, Artificial Sequence
  Description of Artificial Sequence: Synthetic oligonucleotide
uaccucugcugcaaagacg

SEQ ID NO: 1712485 - RNA, 19 nt, Artificial Sequence
  Description of Artificial Sequence: Synthetic oligonucleotide
caaagcauugggucaaaug

SEQ ID NO: 1712486 - RNA, 19 nt, Artificial Sequence
  Description of Artificial Sequence: Synthetic oligonucleotide
cuucaaugaggccagagga

SEQ ID NO: 1712487 - RNA, 19 nt, Artificial Sequence
  Description of Artificial Sequence: Synthetic oligonucleotide
gaaguugcccaucguuacg

SEQ ID NO: 1712488 - RNA, 19 nt, Artificial Sequence
  Description of Artificial Sequence: Synthetic oligonucleotide
guaggguauucauacuucc

SEQ ID NO: 1712489 - RNA, 19 nt, Artificial Sequence
  Description of Artificial Sequence: Synthetic oligonucleotide
ucauacuuauguccuuucu

SEQ ID NO: 1712490 - RNA, 19 nt, Artificial Sequence
  Description of Artificial Sequence: Synthetic oligonucleotide
agcagcauaccagucgggc

SEQ ID NO: 1712491 - RNA, 19 nt, Artificial Sequence
  Description of Artificial Sequence: Synthetic oligonucleotide
aucguagugacauguuucu

SEQ ID NO: 1712492 - RNA, 19 nt, Artificial Sequence
  Description of Artificial Sequence: Synthetic oligonucleotide
agauguagcuacuaauuua

SEQ ID NO: 1712493 - RNA, 19 nt, Artificial Sequence
  Description of Artificial Sequence: Synthetic oligonucleotide
uauccccauugucauagcc

SEQ ID NO: 1712494 - RNA, 19 nt, Artificial Sequence
  Description of Artificial Sequence: Synthetic oligonucleotide
caucguagugacauguuuc

SEQ ID NO: 1712495 - RNA, 19 nt, Artificial Sequence
  Description of Artificial Sequence: Synthetic oligonucleotide
cuuugaccgaugaguaggg

SEQ ID NO: 1712496 - RNA, 19 nt, Artificial Sequence
  Description of Artificial Sequence: Synthetic oligonucleotide
aagacgcggcaccaaaugu

SEQ ID NO: 1712497 - RNA, 19 nt, Artificial Sequence
  Description of Artificial Sequence: Synthetic oligonucleotide
ccaaguuccaccuauacca

SEQ ID NO: 1712498 - RNA, 19 nt, Artificial Sequence
  Description of Artificial Sequence: Synthetic oligonucleotide
ucucccaucguagugacau

SEQ ID NO: 1712499 - RNA, 19 nt, Artificial Sequence
  Description of Artificial Sequence: Synthetic oligonucleotide
aguaggguauucauacuuc

SEQ ID NO: 1712500 - RNA, 19 nt, Artificial Sequence
  Description of Artificial Sequence: Synthetic oligonucleotide
cauugggucaaauggucug

SEQ ID NO: 1712501 - RNA, 19 nt, Artificial Sequence
  Description of Artificial Sequence: Synthetic oligonucleotide
uucuuugaccgaugaguag

SEQ ID NO: 1712502 - RNA, 19 nt, Artificial Sequence
  Description of Artificial Sequence: Synthetic oligonucleotide
agacguggaacuugccuuc

SEQ ID NO: 1712503 - RNA, 19 nt, Artificial Sequence
  Description of Artificial Sequence: Synthetic oligonucleotide
agacugcaaacaucgcagg

SEQ ID NO: 1712504 - RNA, 19 nt, Artificial Sequence
  Description of Artificial Sequence: Synthetic oligonucleotide
uggucaaaggagcuacaga

SEQ ID NO: 1712505 - RNA, 19 nt, Artificial Sequence
  Description of Artificial Sequence: Synthetic oligonucleotide
uccaccuauaccaucuaua

SEQ ID NO: 1712506 - RNA, 19 nt, Artificial Sequence
  Description of Artificial Sequence: Synthetic oligonucleotide
uuccaaguuccaccuauac

SEQ ID NO: 1712507 - RNA, 19 nt, Artificial Sequence
  Description of Artificial Sequence: Synthetic oligonucleotide
uucauacuuccagagguga

SEQ ID NO: 1712508 - RNA, 19 nt, Artificial Sequence
  Description of Artificial Sequence: Synthetic oligonucleotide
ugccagucacaauuucagg

SEQ ID NO: 1712509 - RNA, 19 nt, Artificial Sequence
  Description of Artificial Sequence: Synthetic oligonucleotide
acuaauuuauucauacuua

SEQ ID NO: 1712510 - RNA, 19 nt, Artificial Sequence
  Description of Artificial Sequence: Synthetic oligonucleotide
ggucacauucugcaggagg

SEQ ID NO: 1712511 - RNA, 19 nt, Artificial Sequence
  Description of Artificial Sequence: Synthetic oligonucleotide
aaacuggcccugcugugug

SEQ ID NO: 1712512 - RNA, 19 nt, Artificial Sequence
  Description of Artificial Sequence: Synthetic oligonucleotide
caguccaaacuggagacgg

SEQ ID NO: 1712513 - RNA, 19 nt, Artificial Sequence
  Description of Artificial Sequence: Synthetic oligonucleotide
uagcuacuaauuuauucau

SEQ ID NO: 1712514 - RNA, 19 nt, Artificial Sequence
  Description of Artificial Sequence: Synthetic oligonucleotide
gccagucacaauuucaggc

SEQ ID NO: 1712515 - RNA, 19 nt, Artificial Sequence
  Description of Artificial Sequence: Synthetic oligonucleotide
caaauggucuggagcuucg

SEQ ID NO: 1712516 - RNA, 19 nt, Artificial Sequence
  Description of Artificial Sequence: Synthetic oligonucleotide
ugccauaugguagauuuau

SEQ ID NO: 1712517 - RNA, 19 nt, Artificial Sequence
  Description of Artificial Sequence: Synthetic oligonucleotide
guacaccuggauaacgccg

SEQ ID NO: 1712518 - RNA, 19 nt, Artificial Sequence
  Description of Artificial Sequence: Synthetic oligonucleotide
acccauuugcagucgaaca

SEQ ID NO: 1712519 - RNA, 19 nt, Artificial Sequence
  Description of Artificial Sequence: Synthetic oligonucleotide
aguaacccucuggaaaacg

SEQ ID NO: 1712520 - RNA, 19 nt, Artificial Sequence
  Description of Artificial Sequence: Synthetic oligonucleotide
aaguugcccaucguuacga

SEQ ID NO: 1712521 - RNA, 19 nt, Artificial Sequence
  Description of Artificial Sequence: Synthetic oligonucleotide
uugaccgaugaguagggua

SEQ ID NO: 1712522 - RNA, 19 nt, Artificial Sequence
  Description of Artificial Sequence: Synthetic oligonucleotide
uuuaaugggcuuagccuuu

SEQ ID NO: 1712523 - RNA, 19 nt, Artificial Sequence
  Description of Artificial Sequence: Synthetic oligonucleotide
ugucaaacuccaagcuaca

SEQ ID NO: 1712524 - RNA, 19 nt, Artificial Sequence
  Description of Artificial Sequence: Synthetic oligonucleotide
uacgaacuuggcacugcag

SEQ ID NO: 1712525 - RNA, 19 nt, Artificial Sequence
  Description of Artificial Sequence: Synthetic oligonucleotide
gaaccugcgacucccaucu

SEQ ID NO: 1712526 - RNA, 19 nt, Artificial Sequence
  Description of Artificial Sequence: Synthetic oligonucleotide
ggagcuucguaacaaucag

SEQ ID NO: 1712527 - RNA, 19 nt, Artificial Sequence
  Description of Artificial Sequence: Synthetic oligonucleotide
uggaaaacgucaaguucaa

SEQ ID NO: 1712528 - RNA, 19 nt, Artificial Sequence
  Description of Artificial Sequence: Synthetic oligonucleotide
cagucacaauuucaggcgc

SEQ ID NO: 1712529 - RNA, 19 nt, Artificial Sequence
  Description of Artificial Sequence: Synthetic oligonucleotide
ucugaguaacccucuggaa

SEQ ID NO: 1712530 - RNA, 19 nt, Artificial Sequence
  Description of Artificial Sequence: Synthetic oligonucleotide
acaugcagcagcauaccag

SEQ ID NO: 1712531 - RNA, 19 nt, Artificial Sequence
  Description of Artificial Sequence: Synthetic oligonucleotide
uaacccucuggaaaacguc

SEQ ID NO: 1712532 - RNA, 19 nt, Artificial Sequence
  Description of Artificial Sequence: Synthetic oligonucleotide
ccaccuauaccaucuauag

SEQ ID NO: 1712533 - RNA, 19 nt, Artificial Sequence
  Description of Artificial Sequence: Synthetic oligonucleotide
agagauguagcuacuaauu

SEQ ID NO: 1712534 - RNA, 19 nt, Artificial Sequence
  Description of Artificial Sequence: Synthetic oligonucleotide
gauguagcuacuaauuuau

SEQ ID NO: 1712535 - RNA, 19 nt, Artificial Sequence
  Description of Artificial Sequence: Synthetic oligonucleotide
uacuuauguccuuucuguc

SEQ ID NO: 1712536 - RNA, 19 nt, Artificial Sequence
  Description of Artificial Sequence: Synthetic oligonucleotide
uucauacuuauguccuuuc

SEQ ID NO: 1712537 - RNA, 19 nt, Artificial Sequence
  Description of Artificial Sequence: Synthetic oligonucleotide
auguuugucucccaucgua

SEQ ID NO: 1712538 - RNA, 19 nt, Artificial Sequence
  Description of Artificial Sequence: Synthetic oligonucleotide
uguauucccuccgaauccu

SEQ ID NO: 1712539 - RNA, 19 nt, Artificial Sequence
  Description of Artificial Sequence: Synthetic oligonucleotide
ucauacuuccagaggugaa

SEQ ID NO: 1712540 - RNA, 19 nt, Artificial Sequence
  Description of Artificial Sequence: Synthetic oligonucleotide
uggauaacgccggugcccc

SEQ ID NO: 1712541 - RNA, 19 nt, Artificial Sequence
  Description of Artificial Sequence: Synthetic oligonucleotide
gcagcagcauaccagucgg

SEQ ID NO: 1712542 - RNA, 19 nt, Artificial Sequence
  Description of Artificial Sequence: Synthetic oligonucleotide
cuugccauaugguagauuu

SEQ ID NO: 1712543 - RNA, 19 nt, Artificial Sequence
  Description of Artificial Sequence: Synthetic oligonucleotide
ugaguggacaaggucacau

SEQ ID NO: 1712544 - RNA, 19 nt, Artificial Sequence
  Description of Artificial Sequence: Synthetic oligonucleotide
augccaguuccaucccggc

SEQ ID NO: 1712545 - RNA, 19 nt, Artificial Sequence
  Description of Artificial Sequence: Synthetic oligonucleotide
uuaugggccuuuucuguaa

SEQ ID NO: 1712546 - RNA, 19 nt, Artificial Sequence
  Description of Artificial Sequence: Synthetic oligonucleotide
uguggcccuuuacagaaua

SEQ ID NO: 1712547 - RNA, 19 nt, Artificial Sequence
  Description of Artificial Sequence: Synthetic oligonucleotide
ugaguaggguauucauacu

SEQ ID NO: 1712548 - RNA, 19 nt, Artificial Sequence
  Description of Artificial Sequence: Synthetic oligonucleotide
auguggacaaugaucugag

SEQ ID NO: 1712549 - RNA, 19 nt, Artificial Sequence
  Description of Artificial Sequence: Synthetic oligonucleotide
ucaaauggucuggagcuuc

SEQ ID NO: 1712550 - RNA, 19 nt, Artificial Sequence
  Description of Artificial Sequence: Synthetic oligonucleotide
cccaucguuacgaacuugg

SEQ ID NO: 1712551 - RNA, 19 nt, Artificial Sequence
  Description of Artificial Sequence: Synthetic oligonucleotide
ugggcuuagccuuuucaau

SEQ ID NO: 1712552 - RNA, 19 nt, Artificial Sequence
  Description of Artificial Sequence: Synthetic oligonucleotide
cuccgaauccuucuuugac

SEQ ID NO: 1712553 - RNA, 19 nt, Artificial Sequence
  Description of Artificial Sequence: Synthetic oligonucleotide
uauucccuccgaauccuuc

SEQ ID NO: 1712554 - RNA, 19 nt, Artificial Sequence
  Description of Artificial Sequence: Synthetic oligonucleotide
caucgacugucauucauca

SEQ ID NO: 1712555 - RNA, 19 nt, Artificial Sequence
  Description of Artificial Sequence: Synthetic oligonucleotide
uaugggccuuuucuguaac

SEQ ID NO: 1712556 - RNA, 19 nt, Artificial Sequence
  Description of Artificial Sequence: Synthetic oligonucleotide
aguaccucugcugcaaaga

SEQ ID NO: 1712557 - RNA, 19 nt, Artificial Sequence
  Description of Artificial Sequence: Synthetic oligonucleotide
ugugccaucgacugucauu

SEQ ID NO: 1712558 - RNA, 19 nt, Artificial Sequence
  Description of Artificial Sequence: Synthetic oligonucleotide
caucguuacgaacuuggca

SEQ ID NO: 1712559 - RNA, 19 nt, Artificial Sequence
  Description of Artificial Sequence: Synthetic oligonucleotide
gcaaacaucgcaggggcgg

SEQ ID NO: 1712560 - RNA, 19 nt, Artificial Sequence
  Description of Artificial Sequence: Synthetic oligonucleotide
acuccaagcuacacacccc

SEQ ID NO: 1712561 - RNA, 19 nt, Artificial Sequence
  Description of Artificial Sequence: Synthetic oligonucleotide
gugccaucgacugucauuc

SEQ ID NO: 1712562 - RNA, 19 nt, Artificial Sequence
  Description of Artificial Sequence: Synthetic oligonucleotide
cauauaugaagauuuccau

SEQ ID NO: 1712563 - RNA, 19 nt, Artificial Sequence
  Description of Artificial Sequence: Synthetic oligonucleotide
gacggaaccugcgacuccc

SEQ ID NO: 1712564 - RNA, 19 nt, Artificial Sequence
  Description of Artificial Sequence: Synthetic oligonucleotide
agcgaaguugcccaucguu

SEQ ID NO: 1712565 - RNA, 19 nt, Artificial Sequence
  Description of Artificial Sequence: Synthetic oligonucleotide
ggucaaaggagcuacagau

SEQ ID NO: 1712566 - RNA, 19 nt, Artificial Sequence
  Description of Artificial Sequence: Synthetic oligonucleotide
ucguuacgaacuuggcacu

SEQ ID NO: 1712567 - RNA, 19 nt, Artificial Sequence
  Description of Artificial Sequence: Synthetic oligonucleotide
ucccaucguagugacaugu

SEQ ID NO: 1712568 - RNA, 19 nt, Artificial Sequence
  Description of Artificial Sequence: Synthetic oligonucleotide
uaccaucuauaguauuuau

SEQ ID NO: 1712569 - RNA, 19 nt, Artificial Sequence
  Description of Artificial Sequence: Synthetic oligonucleotide
ggucaaauggucuggagcu

SEQ ID NO: 1712570 - RNA, 19 nt, Artificial Sequence
  Description of Artificial Sequence: Synthetic oligonucleotide
cuggagcuucguaacaauc

SEQ ID NO: 1712571 - RNA, 19 nt, Artificial Sequence
  Description of Artificial Sequence: Synthetic oligonucleotide
ugcgacucccaucuguauu

SEQ ID NO: 1712572 - RNA, 19 nt, Artificial Sequence
  Description of Artificial Sequence: Synthetic oligonucleotide
augguagauuuaugggccu

SEQ ID NO: 1712573 - RNA, 19 nt, Artificial Sequence
  Description of Artificial Sequence: Synthetic oligonucleotide
ucuggagcuucguaacaau

SEQ ID NO: 1712574 - RNA, 19 nt, Artificial Sequence
  Description of Artificial Sequence: Synthetic oligonucleotide
aguuucagguccccacgcu

SEQ ID NO: 1712575 - RNA, 19 nt, Artificial Sequence
  Description of Artificial Sequence: Synthetic oligonucleotide
cucguacaccuggauaacg

SEQ ID NO: 1712576 - RNA, 19 nt, Artificial Sequence
  Description of Artificial Sequence: Synthetic oligonucleotide
ucucaaacgcggacauggu

SEQ ID NO: 1712577 - RNA, 19 nt, Artificial Sequence
  Description of Artificial Sequence: Synthetic oligonucleotide
aucgacugucauucaucag

SEQ ID NO: 1712578 - RNA, 19 nt, Artificial Sequence
  Description of Artificial Sequence: Synthetic oligonucleotide
cauagcucaaauucugagu

SEQ ID NO: 1712579 - RNA, 19 nt, Artificial Sequence
  Description of Artificial Sequence: Synthetic oligonucleotide
gcugcaaagacgcggcacc

SEQ ID NO: 1712580 - RNA, 19 nt, Artificial Sequence
  Description of Artificial Sequence: Synthetic oligonucleotide
acauguuucugagaucaaa

SEQ ID NO: 1712581 - RNA, 19 nt, Artificial Sequence
  Description of Artificial Sequence: Synthetic oligonucleotide
caguuucagguccccacgc

SEQ ID NO: 1712582 - RNA, 19 nt, Artificial Sequence
  Description of Artificial Sequence: Synthetic oligonucleotide
aaacaacgcucuuccugau

SEQ ID NO: 1712583 - RNA, 19 nt, Artificial Sequence
  Description of Artificial Sequence: Synthetic oligonucleotide
aacaacgcucuuccugauu

SEQ ID NO: 1712584 - RNA, 19 nt, Artificial Sequence
  Description of Artificial Sequence: Synthetic oligonucleotide
uuccaccuauaccaucuau

SEQ ID NO: 1712585 - RNA, 19 nt, Artificial Sequence
  Description of Artificial Sequence: Synthetic oligonucleotide
uccugauuguaagcauugc

SEQ ID NO: 1712586 - RNA, 19 nt, Artificial Sequence
  Description of Artificial Sequence: Synthetic oligonucleotide
gcuacagaugcagagcccc

SEQ ID NO: 1712587 - RNA, 19 nt, Artificial Sequence
  Description of Artificial Sequence: Synthetic oligonucleotide
acgggcugaguggacaagg

SEQ ID NO: 1712588 - RNA, 19 nt, Artificial Sequence
  Description of Artificial Sequence: Synthetic oligonucleotide
uagcucaaauucugaguaa

SEQ ID NO: 1712589 - RNA, 19 nt, Artificial Sequence
  Description of Artificial Sequence: Synthetic oligonucleotide
gaguaggguauucauacuu

SEQ ID NO: 1712590 - RNA, 19 nt, Artificial Sequence
  Description of Artificial Sequence: Synthetic oligonucleotide
guuacgaacuuggcacugc

SEQ ID NO: 1712591 - RNA, 19 nt, Artificial Sequence
  Description of Artificial Sequence: Synthetic oligonucleotide
caauuucaggcgcuccuuc

SEQ ID NO: 1712592 - RNA, 19 nt, Artificial Sequence
  Description of Artificial Sequence: Synthetic oligonucleotide
ugcagucgaacaccgugua

SEQ ID NO: 1712593 - RNA, 19 nt, Artificial Sequence
  Description of Artificial Sequence: Synthetic oligonucleotide
gagauguagcuacuaauuu

SEQ ID NO: 1712594 - RNA, 19 nt, Artificial Sequence
  Description of Artificial Sequence: Synthetic oligonucleotide
caaagacguggaacuugcc

SEQ ID NO: 1712595 - RNA, 19 nt, Artificial Sequence
  Description of Artificial Sequence: Synthetic oligonucleotide
accugcgacucccaucugu

SEQ ID NO: 1712596 - RNA, 19 nt, Artificial Sequence
  Description of Artificial Sequence: Synthetic oligonucleotide
gacauggugcagaugcaga

SEQ ID NO: 1712597 - RNA, 19 nt, Artificial Sequence
  Description of Artificial Sequence: Synthetic oligonucleotide
gaacaccguguaguugagg

SEQ ID NO: 1712598 - RNA, 19 nt, Artificial Sequence
  Description of Artificial Sequence: Synthetic oligonucleotide
uggagacgggcugagugga

SEQ ID NO: 1712599 - RNA, 19 nt, Artificial Sequence
  Description of Artificial Sequence: Synthetic oligonucleotide
ugcugcaaagacgcggcac

SEQ ID NO: 1712600 - RNA, 19 nt, Artificial Sequence
  Description of Artificial Sequence: Synthetic oligonucleotide
cuccaagcuacacacccca

SEQ ID NO: 1712601 - RNA, 19 nt, Artificial Sequence
  Description of Artificial Sequence: Synthetic oligonucleotide
aaauggucuggagcuucgu

SEQ ID NO: 1712602 - RNA, 19 nt, Artificial Sequence
  Description of Artificial Sequence: Synthetic oligonucleotide
ucguagugacauguuucug

SEQ ID NO: 1712603 - RNA, 19 nt, Artificial Sequence
  Description of Artificial Sequence: Synthetic oligonucleotide
gacgcggcaccaaauguuc

SEQ ID NO: 1712604 - RNA, 19 nt, Artificial Sequence
  Description of Artificial Sequence: Synthetic oligonucleotide
guucaaagcauugggucaa

SEQ ID NO: 1712605 - RNA, 19 nt, Artificial Sequence
  Description of Artificial Sequence: Synthetic oligonucleotide
caaauguuccacauuuaau

SEQ ID NO: 1712606 - RNA, 19 nt, Artificial Sequence
  Description of Artificial Sequence: Synthetic oligonucleotide
ggguauucauacuuccaga

SEQ ID NO: 1712607 - RNA, 19 nt, Artificial Sequence
  Description of Artificial Sequence: Synthetic oligonucleotide
uugccauaugguagauuua

SEQ ID NO: 1712608 - RNA, 19 nt, Artificial Sequence
  Description of Artificial Sequence: Synthetic oligonucleotide
ucguaacaaucagcacgcg

SEQ ID NO: 1712609 - RNA, 19 nt, Artificial Sequence
  Description of Artificial Sequence: Synthetic oligonucleotide
accaucuauaguauuuaua

SEQ ID NO: 1712610 - RNA, 19 nt, Artificial Sequence
  Description of Artificial Sequence: Synthetic oligonucleotide
ugccaaaugccaguuccau

SEQ ID NO: 1712611 - RNA, 19 nt, Artificial Sequence
  Description of Artificial Sequence: Synthetic oligonucleotide
caucccggcugccagucac

SEQ ID NO: 1712612 - RNA, 19 nt, Artificial Sequence
  Description of Artificial Sequence: Synthetic oligonucleotide
gcaggugucgaacuugcca

SEQ ID NO: 1712613 - RNA, 19 nt, Artificial Sequence
  Description of Artificial Sequence: Synthetic oligonucleotide
ucccgcugucagaaagagc

SEQ ID NO: 1712614 - RNA, 19 nt, Artificial Sequence
  Description of Artificial Sequence: Synthetic oligonucleotide
cuacuaauuuauucauacu

SEQ ID NO: 1712615 - RNA, 19 nt, Artificial Sequence
  Description of Artificial Sequence: Synthetic oligonucleotide
ucucguacaccuggauaac

SEQ ID NO: 1712616 - RNA, 19 nt, Artificial Sequence
  Description of Artificial Sequence: Synthetic oligonucleotide
auaacgccggugccccgag

SEQ ID NO: 1712617 - RNA, 19 nt, Artificial Sequence
  Description of Artificial Sequence: Synthetic oligonucleotide
ugauauccccauugucaua

SEQ ID NO: 1712618 - RNA, 19 nt, Artificial Sequence
  Description of Artificial Sequence: Synthetic oligonucleotide
caaacgcggacauggugca

SEQ ID NO: 1712619 - RNA, 19 nt, Artificial Sequence
  Description of Artificial Sequence: Synthetic oligonucleotide
ugucaggacuccaguccaa

SEQ ID NO: 1712620 - RNA, 19 nt, Artificial Sequence
  Description of Artificial Sequence: Synthetic oligonucleotide
uuugaccgaugaguagggu

SEQ ID NO: 1712621 - RNA, 19 nt, Artificial Sequence
  Description of Artificial Sequence: Synthetic oligonucleotide
cuaaguaccucugcugcaa

SEQ ID NO: 1712622 - RNA, 19 nt, Artificial Sequence
  Description of Artificial Sequence: Synthetic oligonucleotide
augggccuuuucuguaaca

SEQ ID NO: 1712623 - RNA, 19 nt, Artificial Sequence
  Description of Artificial Sequence: Synthetic oligonucleotide
cucccgcugucagaaagag

SEQ ID NO: 1712624 - RNA, 19 nt, Artificial Sequence
  Description of Artificial Sequence: Synthetic oligonucleotide
ucaaagcauugggucaaau

SEQ ID NO: 1712625 - RNA, 19 nt, Artificial Sequence
  Description of Artificial Sequence: Synthetic oligonucleotide
gauguagaacauagcucaa

SEQ ID NO: 1712626 - RNA, 19 nt, Artificial Sequence
  Description of Artificial Sequence: Synthetic oligonucleotide
agucacaauuucaggcgcu

SEQ ID NO: 1712627 - RNA, 19 nt, Artificial Sequence
  Description of Artificial Sequence: Synthetic oligonucleotide
guccccacgcuggaucucg

SEQ ID NO: 1712628 - RNA, 19 nt, Artificial Sequence
  Description of Artificial Sequence: Synthetic oligonucleotide
acgcuaaccuggaaaccag

SEQ ID NO: 1712629 - RNA, 19 nt, Artificial Sequence
  Description of Artificial Sequence: Synthetic oligonucleotide
ggaaaccagacugcaaaca

SEQ ID NO: 1712630 - RNA, 19 nt, Artificial Sequence
  Description of Artificial Sequence: Synthetic oligonucleotide
gaguaacccucuggaaaac

SEQ ID NO: 1712631 - RNA, 19 nt, Artificial Sequence
  Description of Artificial Sequence: Synthetic oligonucleotide
aacaucgcaggggcgguuu

SEQ ID NO: 1712632 - RNA, 19 nt, Artificial Sequence
  Description of Artificial Sequence: Synthetic oligonucleotide
gcgacucccaucuguauuc

SEQ ID NO: 1712633 - RNA, 19 nt, Artificial Sequence
  Description of Artificial Sequence: Synthetic oligonucleotide
agacaaacgcuaaccugga

SEQ ID NO: 1712634 - RNA, 19 nt, Artificial Sequence
  Description of Artificial Sequence: Synthetic oligonucleotide
guagaacauagcucaaauu

SEQ ID NO: 1712635 - RNA, 19 nt, Artificial Sequence
  Description of Artificial Sequence: Synthetic oligonucleotide
gucgggccaccaaacaccc

SEQ ID NO: 1712636 - RNA, 19 nt, Artificial Sequence
  Description of Artificial Sequence: Synthetic oligonucleotide
caucuauaguauuuauaau

SEQ ID NO: 1712637 - RNA, 19 nt, Artificial Sequence
  Description of Artificial Sequence: Synthetic oligonucleotide
acgcggcaccaaauguucc

SEQ ID NO: 1712638 - RNA, 19 nt, Artificial Sequence
  Description of Artificial Sequence: Synthetic oligonucleotide
caaacuggagacgggcuga

SEQ ID NO: 1712639 - RNA, 19 nt, Artificial Sequence
  Description of Artificial Sequence: Synthetic oligonucleotide
cagcagcauaccagucggg

SEQ ID NO: 1712640 - RNA, 19 nt, Artificial Sequence
  Description of Artificial Sequence: Synthetic oligonucleotide
ccaaacuggagacgggcug

SEQ ID NO: 1712641 - RNA, 19 nt, Artificial Sequence
  Description of Artificial Sequence: Synthetic oligonucleotide
acaauuucaggcgcuccuu

SEQ ID NO: 1712642 - RNA, 19 nt, Artificial Sequence
  Description of Artificial Sequence: Synthetic oligonucleotide
ugcccaucguuacgaacuu

SEQ ID NO: 1712643 - RNA, 19 nt, Artificial Sequence
  Description of Artificial Sequence: Synthetic oligonucleotide
aggcuuugugccaucgacu

SEQ ID NO: 1712644 - RNA, 19 nt, Artificial Sequence
  Description of Artificial Sequence: Synthetic oligonucleotide
cguagugacauguuucuga

SEQ ID NO: 1712645 - RNA, 19 nt, Artificial Sequence
  Description of Artificial Sequence: Synthetic oligonucleotide
uccaagcuacacaccccau

SEQ ID NO: 1712646 - RNA, 19 nt, Artificial Sequence
  Description of Artificial Sequence: Synthetic oligonucleotide
ccaucgacugucauucauc

SEQ ID NO: 1712647 - RNA, 19 nt, Artificial Sequence
  Description of Artificial Sequence: Synthetic oligonucleotide
gucacaauuucaggcgcuc

SEQ ID NO: 1712648 - RNA, 19 nt, Artificial Sequence
  Description of Artificial Sequence: Synthetic oligonucleotide
agcaccucccgcugucaga

SEQ ID NO: 1712649 - RNA, 19 nt, Artificial Sequence
  Description of Artificial Sequence: Synthetic oligonucleotide
aacuugccauaugguagau

SEQ ID NO: 1712650 - RNA, 19 nt, Artificial Sequence
  Description of Artificial Sequence: Synthetic oligonucleotide
agcuacuaauuuauucaua

SEQ ID NO: 1712651 - RNA, 19 nt, Artificial Sequence
  Description of Artificial Sequence: Synthetic oligonucleotide
uuaaugggcuuagccuuuu

SEQ ID NO: 1712652 - RNA, 19 nt, Artificial Sequence
  Description of Artificial Sequence: Synthetic oligonucleotide
gcuucguaacaaucagcac

SEQ ID NO: 1712653 - RNA, 19 nt, Artificial Sequence
  Description of Artificial Sequence: Synthetic oligonucleotide
caggugucgaacuugccau

SEQ ID NO: 1712654 - RNA, 19 nt, Artificial Sequence
  Description of Artificial Sequence: Synthetic oligonucleotide
cccaucuguauucccuccg

SEQ ID NO: 1712655 - RNA, 19 nt, Artificial Sequence
  Description of Artificial Sequence: Synthetic oligonucleotide
aguugcccaucguuacgaa

SEQ ID NO: 1712656 - RNA, 19 nt, Artificial Sequence
  Description of Artificial Sequence: Synthetic oligonucleotide
ugcaaagacgcggcaccaa

SEQ ID NO: 1712657 - RNA, 19 nt, Artificial Sequence
  Description of Artificial Sequence: Synthetic oligonucleotide
acaucgcaggggcgguuug

SEQ ID NO: 1712658 - RNA, 19 nt, Artificial Sequence
  Description of Artificial Sequence: Synthetic oligonucleotide
gacaaacgcuaaccuggaa

SEQ ID NO: 1712659 - RNA, 19 nt, Artificial Sequence
  Description of Artificial Sequence: Synthetic oligonucleotide
caagcuacacaccccauuu

SEQ ID NO: 1712660 - RNA, 19 nt, Artificial Sequence
  Description of Artificial Sequence: Synthetic oligonucleotide
ccaucguuacgaacuuggc

SEQ ID NO: 1712661 - RNA, 19 nt, Artificial Sequence
  Description of Artificial Sequence: Synthetic oligonucleotide
guaacccucuggaaaacgu

SEQ ID NO: 1712662 - RNA, 19 nt, Artificial Sequence
  Description of Artificial Sequence: Synthetic oligonucleotide
ucccuccgaauccuucuuu

SEQ ID NO: 1712663 - RNA, 19 nt, Artificial Sequence
  Description of Artificial Sequence: Synthetic oligonucleotide
cgaaguugcccaucguuac

SEQ ID NO: 1712664 - RNA, 19 nt, Artificial Sequence
  Description of Artificial Sequence: Synthetic oligonucleotide
ggaaccugcgacucccauc

SEQ ID NO: 1712665 - RNA, 19 nt, Artificial Sequence
  Description of Artificial Sequence: Synthetic oligonucleotide
ggugccccgagcgaaguug

SEQ ID NO: 1712666 - RNA, 19 nt, Artificial Sequence
  Description of Artificial Sequence: Synthetic oligonucleotide
uugugccaucgacugucau

SEQ ID NO: 1712667 - RNA, 19 nt, Artificial Sequence
  Description of Artificial Sequence: Synthetic oligonucleotide
gcagucgaacaccguguag

SEQ ID NO: 1712668 - RNA, 19 nt, Artificial Sequence
  Description of Artificial Sequence: Synthetic oligonucleotide
acguggaacuugccuucca

SEQ ID NO: 1712669 - RNA, 19 nt, Artificial Sequence
  Description of Artificial Sequence: Synthetic oligonucleotide
agacgcggcaccaaauguu

SEQ ID NO: 1712670 - RNA, 19 nt, Artificial Sequence
  Description of Artificial Sequence: Synthetic oligonucleotide
uuguggcccuuuacagaau

SEQ ID NO: 1712671 - RNA, 19 nt, Artificial Sequence
  Description of Artificial Sequence: Synthetic oligonucleotide
aacuggagacgggcugagu

SEQ ID NO: 1712672 - RNA, 19 nt, Artificial Sequence
  Description of Artificial Sequence: Synthetic oligonucleotide
caucuguauucccuccgaa

SEQ ID NO: 1712673 - RNA, 19 nt, Artificial Sequence
  Description of Artificial Sequence: Synthetic oligonucleotide
cucccaucguagugacaug

SEQ ID NO: 1712674 - RNA, 19 nt, Artificial Sequence
  Description of Artificial Sequence: Synthetic oligonucleotide
ugccaucgacugucauuca

SEQ ID NO: 1712675 - RNA, 19 nt, Artificial Sequence
  Description of Artificial Sequence: Synthetic oligonucleotide
ccuggauaacgccggugcc

SEQ ID NO: 1712676 - RNA, 19 nt, Artificial Sequence
  Description of Artificial Sequence: Synthetic oligonucleotide
cagcaccucccgcugucag

SEQ ID NO: 1712677 - RNA, 19 nt, Artificial Sequence
  Description of Artificial Sequence: Synthetic oligonucleotide
aggugucgaacuugccaua

SEQ ID NO: 1712678 - RNA, 19 nt, Artificial Sequence
  Description of Artificial Sequence: Synthetic oligonucleotide
cgggccaccaaacacccag

SEQ ID NO: 1712679 - RNA, 19 nt, Artificial Sequence
  Description of Artificial Sequence: Synthetic oligonucleotide
gccaaaugccaguuccauc

SEQ ID NO: 1712680 - RNA, 19 nt, Artificial Sequence
  Description of Artificial Sequence: Synthetic oligonucleotide
gcaaagacgcggcaccaaa

SEQ ID NO: 1712681 - RNA, 19 nt, Artificial Sequence
  Description of Artificial Sequence: Synthetic oligonucleotide
uaacgccggugccccgagc

SEQ ID NO: 1712682 - RNA, 19 nt, Artificial Sequence
  Description of Artificial Sequence: Synthetic oligonucleotide
aaacaucgcaggggcgguu

SEQ ID NO: 1712683 - RNA, 19 nt, Artificial Sequence
  Description of Artificial Sequence: Synthetic oligonucleotide
guggcccuuuacagaauac

SEQ ID NO: 1712684 - RNA, 19 nt, Artificial Sequence
  Description of Artificial Sequence: Synthetic oligonucleotide
cuauaccaucuauaguauu

SEQ ID NO: 1712685 - RNA, 19 nt, Artificial Sequence
  Description of Artificial Sequence: Synthetic oligonucleotide
auuccaaguuccaccuaua

SEQ ID NO: 1712686 - RNA, 19 nt, Artificial Sequence
  Description of Artificial Sequence: Synthetic oligonucleotide
gugccccgagcgaaguugc

SEQ ID NO: 1712687 - RNA, 19 nt, Artificial Sequence
  Description of Artificial Sequence: Synthetic oligonucleotide
ucgggccaccaaacaccca

SEQ ID NO: 1712688 - RNA, 19 nt, Artificial Sequence
  Description of Artificial Sequence: Synthetic oligonucleotide
caccuauaccaucuauagu

SEQ ID NO: 1712689 - RNA, 19 nt, Artificial Sequence
  Description of Artificial Sequence: Synthetic oligonucleotide
gucgaacuugccauauggu

SEQ ID NO: 1712690 - RNA, 19 nt, Artificial Sequence
  Description of Artificial Sequence: Synthetic oligonucleotide
auguagcuacuaauuuauu

SEQ ID NO: 1712691 - RNA, 19 nt, Artificial Sequence
  Description of Artificial Sequence: Synthetic oligonucleotide
acuugccauaugguagauu

SEQ ID NO: 1712692 - RNA, 19 nt, Artificial Sequence
  Description of Artificial Sequence: Synthetic oligonucleotide
caaagacgcggcaccaaau

SEQ ID NO: 1712693 - RNA, 19 nt, Artificial Sequence
  Description of Artificial Sequence: Synthetic oligonucleotide
uccccacgcuggaucucgu

SEQ ID NO: 1712694 - RNA, 19 nt, Artificial Sequence
  Description of Artificial Sequence: Synthetic oligonucleotide
cugcaaagacgcggcacca

SEQ ID NO: 1712695 - RNA, 19 nt, Artificial Sequence
  Description of Artificial Sequence: Synthetic oligonucleotide
cccgcagcaguuucagguc

SEQ ID NO: 1712696 - RNA, 19 nt, Artificial Sequence
  Description of Artificial Sequence: Synthetic oligonucleotide
ccaucuguauucccuccga

SEQ ID NO: 1712697 - RNA, 19 nt, Artificial Sequence
  Description of Artificial Sequence: Synthetic oligonucleotide
guagauuuaugggccuuuu

SEQ ID NO: 1712698 - RNA, 19 nt, Artificial Sequence
  Description of Artificial Sequence: Synthetic oligonucleotide
ggcacccauuugcagucga

SEQ ID NO: 1712699 - RNA, 19 nt, Artificial Sequence
  Description of Artificial Sequence: Synthetic oligonucleotide
ccuauaccaucuauaguau

SEQ ID NO: 1712700 - RNA, 19 nt, Artificial Sequence
  Description of Artificial Sequence: Synthetic oligonucleotide
ccuccgaauccuucuuuga

SEQ ID NO: 1712701 - RNA, 19 nt, Artificial Sequence
  Description of Artificial Sequence: Synthetic oligonucleotide
gcggcaccaaauguuccac

SEQ ID NO: 1712702 - RNA, 19 nt, Artificial Sequence
  Description of Artificial Sequence: Synthetic oligonucleotide
cugaguggacaaggucaca

SEQ ID NO: 1712703 - RNA, 19 nt, Artificial Sequence
  Description of Artificial Sequence: Synthetic oligonucleotide
ccccgagcgaaguugccca

SEQ ID NO: 1712704 - RNA, 19 nt, Artificial Sequence
  Description of Artificial Sequence: Synthetic oligonucleotide
ggaaaacgucaaguucaaa

SEQ ID NO: 1712705 - RNA, 19 nt, Artificial Sequence
  Description of Artificial Sequence: Synthetic oligonucleotide
cguuacgaacuuggcacug

SEQ ID NO: 1712706 - RNA, 19 nt, Artificial Sequence
  Description of Artificial Sequence: Synthetic oligonucleotide
ccugcgacucccaucugua

SEQ ID NO: 1712707 - RNA, 19 nt, Artificial Sequence
  Description of Artificial Sequence: Synthetic oligonucleotide
ccggcugccagucacaauu

SEQ ID NO: 1712708 - RNA, 19 nt, Artificial Sequence
  Description of Artificial Sequence: Synthetic oligonucleotide
caaacaucgcaggggcggu

SEQ ID NO: 1712709 - RNA, 19 nt, Artificial Sequence
  Description of Artificial Sequence: Synthetic oligonucleotide
gggcacccauuugcagucg

SEQ ID NO: 1712710 - RNA, 19 nt, Artificial Sequence
  Description of Artificial Sequence: Synthetic oligonucleotide
gcgcacugucuggucaaag

SEQ ID NO: 1712711 - RNA, 19 nt, Artificial Sequence
  Description of Artificial Sequence: Synthetic oligonucleotide
ccucccgcugucagaaaga

SEQ ID NO: 1712712 - RNA, 19 nt, Artificial Sequence
  Description of Artificial Sequence: Synthetic oligonucleotide
gguagauuuaugggccuuu

SEQ ID NO: 1712713 - RNA, 19 nt, Artificial Sequence
  Description of Artificial Sequence: Synthetic oligonucleotide
ggugucgaacuugccauau

SEQ ID NO: 1712714 - RNA, 19 nt, Artificial Sequence
  Description of Artificial Sequence: Synthetic oligonucleotide
acggaaccugcgacuccca

SEQ ID NO: 1712715 - RNA, 19 nt, Artificial Sequence
  Description of Artificial Sequence: Synthetic oligonucleotide
gucaaauggucuggagcuu

SEQ ID NO: 1712716 - RNA, 19 nt, Artificial Sequence
  Description of Artificial Sequence: Synthetic oligonucleotide
caaucagcacgcgcacugu

SEQ ID NO: 1712717 - RNA, 19 nt, Artificial Sequence
  Description of Artificial Sequence: Synthetic oligonucleotide
accguguaguugaggccuu

SEQ ID NO: 1712718 - RNA, 19 nt, Artificial Sequence
  Description of Artificial Sequence: Synthetic oligonucleotide
gcccaucguuacgaacuug

SEQ ID NO: 1712719 - RNA, 19 nt, Artificial Sequence
  Description of Artificial Sequence: Synthetic oligonucleotide
gucucccaucguagugaca

SEQ ID NO: 1712720 - RNA, 19 nt, Artificial Sequence
  Description of Artificial Sequence: Synthetic oligonucleotide
ccaucguagugacauguuu

SEQ ID NO: 1712721 - RNA, 19 nt, Artificial Sequence
  Description of Artificial Sequence: Synthetic oligonucleotide
cgaugaguaggguauucau

SEQ ID NO: 1712722 - RNA, 19 nt, Artificial Sequence
  Description of Artificial Sequence: Synthetic oligonucleotide
cgcuaaccuggaaaccaga

SEQ ID NO: 1712723 - RNA, 19 nt, Artificial Sequence
  Description of Artificial Sequence: Synthetic oligonucleotide
gccuuuggugggaugcugu

SEQ ID NO: 1712724 - RNA, 19 nt, Artificial Sequence
  Description of Artificial Sequence: Synthetic oligonucleotide
caaucucccgcagcaguuu

SEQ ID NO: 1712725 - RNA, 19 nt, Artificial Sequence
  Description of Artificial Sequence: Synthetic oligonucleotide
ccaagcuacacaccccauu

SEQ ID NO: 1712726 - RNA, 19 nt, Artificial Sequence
  Description of Artificial Sequence: Synthetic oligonucleotide
gcacccauuugcagucgaa

SEQ ID NO: 1712727 - RNA, 19 nt, Artificial Sequence
  Description of Artificial Sequence: Synthetic oligonucleotide
guauucccuccgaauccuu

SEQ ID NO: 1712728 - RNA, 19 nt, Artificial Sequence
  Description of Artificial Sequence: Synthetic oligonucleotide
gcauugccaaaugccaguu

SEQ ID NO: 1712729 - RNA, 19 nt, Artificial Sequence
  Description of Artificial Sequence: Synthetic oligonucleotide
ccgagcgaaguugcccauc

SEQ ID NO: 1712730 - RNA, 19 nt, Artificial Sequence
  Description of Artificial Sequence: Synthetic oligonucleotide
gcauaccagucgggccacc

SEQ ID NO: 1712731 - RNA, 19 nt, Artificial Sequence
  Description of Artificial Sequence: Synthetic oligonucleotide
caccucccgcugucagaaa

SEQ ID NO: 1712732 - RNA, 19 nt, Artificial Sequence
  Description of Artificial Sequence: Synthetic oligonucleotide
cccaucguagugacauguu

SEQ ID NO: 1712733 - RNA, 19 nt, Artificial Sequence
  Description of Artificial Sequence: Synthetic oligonucleotide
ccaucccggcugccaguca

SEQ ID NO: 1712734 - RNA, 19 nt, Artificial Sequence
  Description of Artificial Sequence: Synthetic oligonucleotide
cccgagcgaaguugcccau

SEQ ID NO: 1712735 - RNA, 19 nt, Artificial Sequence
  Description of Artificial Sequence: Synthetic oligonucleotide
cguguaguugaggccuuuu

SEQ ID NO: 1712736 - RNA, 19 nt, Artificial Sequence
  Description of Artificial Sequence: Synthetic oligonucleotide
cggaaccugcgacucccau

SEQ ID NO: 1712737 - RNA, 19 nt, Artificial Sequence
  Description of Artificial Sequence: Synthetic oligonucleotide
ccggugccccgagcgaagu

SEQ ID NO: 1712738 - RNA, 19 nt, Artificial Sequence
  Description of Artificial Sequence: Synthetic oligonucleotide
cggugccccgagcgaaguu

SEQ ID NO: 1712739 - RNA, 19 nt, Artificial Sequence
  Description of Artificial Sequence: Synthetic oligonucleotide
aauagccaaauacucaacc

SEQ ID NO: 1712740 - RNA, 19 nt, Artificial Sequence
  Description of Artificial Sequence: Synthetic oligonucleotide
agucauguauucuaaaugc

SEQ ID NO: 1712741 - RNA, 19 nt, Artificial Sequence
  Description of Artificial Sequence: Synthetic oligonucleotide
aaaacuacuagucauguau

SEQ ID NO: 1712742 - RNA, 19 nt, Artificial Sequence
  Description of Artificial Sequence: Synthetic oligonucleotide
uaacccuugaaaauaaggg

SEQ ID NO: 1712743 - RNA, 19 nt, Artificial Sequence
  Description of Artificial Sequence: Synthetic oligonucleotide
aacaaaaccaaucacugga

SEQ ID NO: 1712744 - RNA, 19 nt, Artificial Sequence
  Description of Artificial Sequence: Synthetic oligonucleotide
aacuauuacacgucauagc

SEQ ID NO: 1712745 - RNA, 19 nt, Artificial Sequence
  Description of Artificial Sequence: Synthetic oligonucleotide
uuguaaaagaaauucaaga

SEQ ID NO: 1712746 - RNA, 19 nt, Artificial Sequence
  Description of Artificial Sequence: Synthetic oligonucleotide
aaaugcguauguucaaggc

SEQ ID NO: 1712747 - RNA, 19 nt, Artificial Sequence
  Description of Artificial Sequence: Synthetic oligonucleotide
aacucuauaaccaugugag

SEQ ID NO: 1712748 - RNA, 19 nt, Artificial Sequence
  Description of Artificial Sequence: Synthetic oligonucleotide
uucauaaccaacuauuaca

SEQ ID NO: 1712749 - RNA, 19 nt, Artificial Sequence
  Description of Artificial Sequence: Synthetic oligonucleotide
aagcauuaaacacucugac

SEQ ID NO: 1712750 - RNA, 19 nt, Artificial Sequence
  Description of Artificial Sequence: Synthetic oligonucleotide
ucauauauaauacacugau

SEQ ID NO: 1712751 - RNA, 19 nt, Artificial Sequence
  Description of Artificial Sequence: Synthetic oligonucleotide
uguaaaagaaauucaagaa

SEQ ID NO: 1712752 - RNA, 19 nt, Artificial Sequence
  Description of Artificial Sequence: Synthetic oligonucleotide
uacacuaaaccaaagcgcc

SEQ ID NO: 1712753 - RNA, 19 nt, Artificial Sequence
  Description of Artificial Sequence: Synthetic oligonucleotide
uccuguaauagccaaauac

SEQ ID NO: 1712754 - RNA, 19 nt, Artificial Sequence
  Description of Artificial Sequence: Synthetic oligonucleotide
aaggagauaaccaagauuu

SEQ ID NO: 1712755 - RNA, 19 nt, Artificial Sequence
  Description of Artificial Sequence: Synthetic oligonucleotide
aaagcuuucuuuaaucuag

SEQ ID NO: 1712756 - RNA, 19 nt, Artificial Sequence
  Description of Artificial Sequence: Synthetic oligonucleotide
uucuaaaugcguauguuca

SEQ ID NO: 1712757 - RNA, 19 nt, Artificial Sequence
  Description of Artificial Sequence: Synthetic oligonucleotide
uaaauucuuauccgcaugc

SEQ ID NO: 1712758 - RNA, 19 nt, Artificial Sequence
  Description of Artificial Sequence: Synthetic oligonucleotide
gaaagaauaguuugucugc

SEQ ID NO: 1712759 - RNA, 19 nt, Artificial Sequence
  Description of Artificial Sequence: Synthetic oligonucleotide
uacauauguagaaaggaga

SEQ ID NO: 1712760 - RNA, 19 nt, Artificial Sequence
  Description of Artificial Sequence: Synthetic oligonucleotide
uauauaauacacugauugc

SEQ ID NO: 1712761 - RNA, 19 nt, Artificial Sequence
  Description of Artificial Sequence: Synthetic oligonucleotide
auucuaaaugcguauguuc

SEQ ID NO: 1712762 - RNA, 19 nt, Artificial Sequence
  Description of Artificial Sequence: Synthetic oligonucleotide
cacgucauagcuuauauug

SEQ ID NO: 1712763 - RNA, 19 nt, Artificial Sequence
  Description of Artificial Sequence: Synthetic oligonucleotide
aacuuuacuaauuugccua

SEQ ID NO: 1712764 - RNA, 19 nt, Artificial Sequence
  Description of Artificial Sequence: Synthetic oligonucleotide
ucauaaccaacuauuacac

SEQ ID NO: 1712765 - RNA, 19 nt, Artificial Sequence
  Description of Artificial Sequence: Synthetic oligonucleotide
uuaauucaugcuuauuuug

SEQ ID NO: 1712766 - RNA, 19 nt, Artificial Sequence
  Description of Artificial Sequence: Synthetic oligonucleotide
aacuacuagucauguauuc

SEQ ID NO: 1712767 - RNA, 19 nt, Artificial Sequence
  Description of Artificial Sequence: Synthetic oligonucleotide
aaccaguuaaauucuuauc

SEQ ID NO: 1712768 - RNA, 19 nt, Artificial Sequence
  Description of Artificial Sequence: Synthetic oligonucleotide
uaucccuuugcuaaguuca

SEQ ID NO: 1712769 - RNA, 19 nt, Artificial Sequence
  Description of Artificial Sequence: Synthetic oligonucleotide
uuuaaucuagcuugguggc

SEQ ID NO: 1712770 - RNA, 19 nt, Artificial Sequence
  Description of Artificial Sequence: Synthetic oligonucleotide
uagucauguauucuaaaug

SEQ ID NO: 1712771 - RNA, 19 nt, Artificial Sequence
  Description of Artificial Sequence: Synthetic oligonucleotide
aaugcguauguucaaggcu

SEQ ID NO: 1712772 - RNA, 19 nt, Artificial Sequence
  Description of Artificial Sequence: Synthetic oligonucleotide
aaagcgccaacagauuucc

SEQ ID NO: 1712773 - RNA, 19 nt, Artificial Sequence
  Description of Artificial Sequence: Synthetic oligonucleotide
ucugcuaucacacuaccau

SEQ ID NO: 1712774 - RNA, 19 nt, Artificial Sequence
  Description of Artificial Sequence: Synthetic oligonucleotide
aacccuugaaaauaaggga

SEQ ID NO: 1712775 - RNA, 19 nt, Artificial Sequence
  Description of Artificial Sequence: Synthetic oligonucleotide
auuuaaauaagaugguaaa

SEQ ID NO: 1712776 - RNA, 19 nt, Artificial Sequence
  Description of Artificial Sequence: Synthetic oligonucleotide
cuacacuaaaccaaagcgc

SEQ ID NO: 1712777 - RNA, 19 nt, Artificial Sequence
  Description of Artificial Sequence: Synthetic oligonucleotide
uuuacuaauuugccuaugu

SEQ ID NO: 1712778 - RNA, 19 nt, Artificial Sequence
  Description of Artificial Sequence: Synthetic oligonucleotide
uaaaugcguauguucaagg

SEQ ID NO: 1712779 - RNA, 19 nt, Artificial Sequence
  Description of Artificial Sequence: Synthetic oligonucleotide
uaaccaagauuuaaauaag

SEQ ID NO: 1712780 - RNA, 19 nt, Artificial Sequence
  Description of Artificial Sequence: Synthetic oligonucleotide
gcuacacuaaaccaaagcg

SEQ ID NO: 1712781 - RNA, 19 nt, Artificial Sequence
  Description of Artificial Sequence: Synthetic oligonucleotide
uaauucaugcuuauuuugu

SEQ ID NO: 1712782 - RNA, 19 nt, Artificial Sequence
  Description of Artificial Sequence: Synthetic oligonucleotide
gcuuaucugaauuucaggg

SEQ ID NO: 1712783 - RNA, 19 nt, Artificial Sequence
  Description of Artificial Sequence: Synthetic oligonucleotide
uuaaauucuuauccgcaug

SEQ ID NO: 1712784 - RNA, 19 nt, Artificial Sequence
  Description of Artificial Sequence: Synthetic oligonucleotide
ugcuaucacacuaccauag

SEQ ID NO: 1712785 - RNA, 19 nt, Artificial Sequence
  Description of Artificial Sequence: Synthetic oligonucleotide
aauuugccuauguuccaac

SEQ ID NO: 1712786 - RNA, 19 nt, Artificial Sequence
  Description of Artificial Sequence: Synthetic oligonucleotide
ugucugcucauuuuaaccc

SEQ ID NO: 1712787 - RNA, 19 nt, Artificial Sequence
  Description of Artificial Sequence: Synthetic oligonucleotide
uacuaauuugccuauguuc

SEQ ID NO: 1712788 - RNA, 19 nt, Artificial Sequence
  Description of Artificial Sequence: Synthetic oligonucleotide
acuacaauucauaaccaac

SEQ ID NO: 1712789 - RNA, 19 nt, Artificial Sequence
  Description of Artificial Sequence: Synthetic oligonucleotide
ucauguauucuaaaugcgu

SEQ ID NO: 1712790 - RNA, 19 nt, Artificial Sequence
  Description of Artificial Sequence: Synthetic oligonucleotide
gccacuacaauucauaacc

SEQ ID NO: 1712791 - RNA, 19 nt, Artificial Sequence
  Description of Artificial Sequence: Synthetic oligonucleotide
aagucugaucacuuuaccu

SEQ ID NO: 1712792 - RNA, 19 nt, Artificial Sequence
  Description of Artificial Sequence: Synthetic oligonucleotide
gaacuauugguugucauug

SEQ ID NO: 1712793 - RNA, 19 nt, Artificial Sequence
  Description of Artificial Sequence: Synthetic oligonucleotide
aagaauaguuugucugcuc

SEQ ID NO: 1712794 - RNA, 19 nt, Artificial Sequence
  Description of Artificial Sequence: Synthetic oligonucleotide
cuauugguugucauugucc

SEQ ID NO: 1712795 - RNA, 19 nt, Artificial Sequence
  Description of Artificial Sequence: Synthetic oligonucleotide
aaaggagauaaccaagauu

SEQ ID NO: 1712796 - RNA, 19 nt, Artificial Sequence
  Description of Artificial Sequence: Synthetic oligonucleotide
ggaaagaauaguuugucug

SEQ ID NO: 1712797 - RNA, 19 nt, Artificial Sequence
  Description of Artificial Sequence: Synthetic oligonucleotide
uuuggaagccaucauuacu

SEQ ID NO: 1712798 - RNA, 19 nt, Artificial Sequence
  Description of Artificial Sequence: Synthetic oligonucleotide
agcgccaacagauuuccac

SEQ ID NO: 1712799 - RNA, 19 nt, Artificial Sequence
  Description of Artificial Sequence: Synthetic oligonucleotide
ucauuacuccugaagacac

SEQ ID NO: 1712800 - RNA, 19 nt, Artificial Sequence
  Description of Artificial Sequence: Synthetic oligonucleotide
gauuuaaauaagaugguaa

SEQ ID NO: 1712801 - RNA, 19 nt, Artificial Sequence
  Description of Artificial Sequence: Synthetic oligonucleotide
agaauaguuugucugcuca

SEQ ID NO: 1712802 - RNA, 19 nt, Artificial Sequence
  Description of Artificial Sequence: Synthetic oligonucleotide
aucucuaucccuuugcuaa

SEQ ID NO: 1712803 - RNA, 19 nt, Artificial Sequence
  Description of Artificial Sequence: Synthetic oligonucleotide
auuguaaaagaaauucaag

SEQ ID NO: 1712804 - RNA, 19 nt, Artificial Sequence
  Description of Artificial Sequence: Synthetic oligonucleotide
ugaagacacauacucuagc

SEQ ID NO: 1712805 - RNA, 19 nt, Artificial Sequence
  Description of Artificial Sequence: Synthetic oligonucleotide
cuacgaaucauauauaaua

SEQ ID NO: 1712806 - RNA, 19 nt, Artificial Sequence
  Description of Artificial Sequence: Synthetic oligonucleotide
uuuuaacccuugaaaauaa

SEQ ID NO: 1712807 - RNA, 19 nt, Artificial Sequence
  Description of Artificial Sequence: Synthetic oligonucleotide
uauugguugucauuguccu

SEQ ID NO: 1712808 - RNA, 19 nt, Artificial Sequence
  Description of Artificial Sequence: Synthetic oligonucleotide
auaaccaugugagaaagcu

SEQ ID NO: 1712809 - RNA, 19 nt, Artificial Sequence
  Description of Artificial Sequence: Synthetic oligonucleotide
ucauuaaggaugucggaac

SEQ ID NO: 1712810 - RNA, 19 nt, Artificial Sequence
  Description of Artificial Sequence: Synthetic oligonucleotide
acuauugguugucauuguc

SEQ ID NO: 1712811 - RNA, 19 nt, Artificial Sequence
  Description of Artificial Sequence: Synthetic oligonucleotide
acuaccauagacauuauaa

SEQ ID NO: 1712812 - RNA, 19 nt, Artificial Sequence
  Description of Artificial Sequence: Synthetic oligonucleotide
agauacauucugcuaucac

SEQ ID NO: 1712813 - RNA, 19 nt, Artificial Sequence
  Description of Artificial Sequence: Synthetic oligonucleotide
ucuauaaccaugugagaaa

SEQ ID NO: 1712814 - RNA, 19 nt, Artificial Sequence
  Description of Artificial Sequence: Synthetic oligonucleotide
uguguguacauauguagaa

SEQ ID NO: 1712815 - RNA, 19 nt, Artificial Sequence
  Description of Artificial Sequence: Synthetic oligonucleotide
aaagggaucugaacuauug

SEQ ID NO: 1712816 - RNA, 19 nt, Artificial Sequence
  Description of Artificial Sequence: Synthetic oligonucleotide
caguuaaauucuuauccgc

SEQ ID NO: 1712817 - RNA, 19 nt, Artificial Sequence
  Description of Artificial Sequence: Synthetic oligonucleotide
uuuaacccuugaaaauaag

SEQ ID NO: 1712818 - RNA, 19 nt, Artificial Sequence
  Description of Artificial Sequence: Synthetic oligonucleotide
gaagacacauacucuagca

SEQ ID NO: 1712819 - RNA, 19 nt, Artificial Sequence
  Description of Artificial Sequence: Synthetic oligonucleotide
augucauuaaggaugucgg

SEQ ID NO: 1712820 - RNA, 19 nt, Artificial Sequence
  Description of Artificial Sequence: Synthetic oligonucleotide
cuucuugcaaaauaaggca

SEQ ID NO: 1712821 - RNA, 19 nt, Artificial Sequence
  Description of Artificial Sequence: Synthetic oligonucleotide
aucacacuaccauagacau

SEQ ID NO: 1712822 - RNA, 19 nt, Artificial Sequence
  Description of Artificial Sequence: Synthetic oligonucleotide
aaagaauaguuugucugcu

SEQ ID NO: 1712823 - RNA, 19 nt, Artificial Sequence
  Description of Artificial Sequence: Synthetic oligonucleotide
aauucaugcuuauuuuguu

SEQ ID NO: 1712824 - RNA, 19 nt, Artificial Sequence
  Description of Artificial Sequence: Synthetic oligonucleotide
ugauugcauuuucugagca

SEQ ID NO: 1712825 - RNA, 19 nt, Artificial Sequence
  Description of Artificial Sequence: Synthetic oligonucleotide
uaaccaguuaaauucuuau

SEQ ID NO: 1712826 - RNA, 19 nt, Artificial Sequence
  Description of Artificial Sequence: Synthetic oligonucleotide
guacauauguagaaaggag

SEQ ID NO: 1712827 - RNA, 19 nt, Artificial Sequence
  Description of Artificial Sequence: Synthetic oligonucleotide
uguuaagaaagggaucuga

SEQ ID NO: 1712828 - RNA, 19 nt, Artificial Sequence
  Description of Artificial Sequence: Synthetic oligonucleotide
uagacauuauaagugugug

SEQ ID NO: 1712829 - RNA, 19 nt, Artificial Sequence
  Description of Artificial Sequence: Synthetic oligonucleotide
uaaucuagcuugguggcag

SEQ ID NO: 1712830 - RNA, 19 nt, Artificial Sequence
  Description of Artificial Sequence: Synthetic oligonucleotide
cacaucuuaggcuccgugg

SEQ ID NO: 1712831 - RNA, 19 nt, Artificial Sequence
  Description of Artificial Sequence: Synthetic oligonucleotide
ugauaggugccacuguuaa

SEQ ID NO: 1712832 - RNA, 19 nt, Artificial Sequence
  Description of Artificial Sequence: Synthetic oligonucleotide
uguccucaauuccugagac

SEQ ID NO: 1712833 - RNA, 19 nt, Artificial Sequence
  Description of Artificial Sequence: Synthetic oligonucleotide
gacuacgaaucauauauaa

SEQ ID NO: 1712834 - RNA, 19 nt, Artificial Sequence
  Description of Artificial Sequence: Synthetic oligonucleotide
ggugccacuguuaagaaag

SEQ ID NO: 1712835 - RNA, 19 nt, Artificial Sequence
  Description of Artificial Sequence: Synthetic oligonucleotide
uuuaccuauuugugaaaca

SEQ ID NO: 1712836 - RNA, 19 nt, Artificial Sequence
  Description of Artificial Sequence: Synthetic oligonucleotide
aaccaacuauuacacguca

SEQ ID NO: 1712837 - RNA, 19 nt, Artificial Sequence
  Description of Artificial Sequence: Synthetic oligonucleotide
caauuccugagacaucccg

SEQ ID NO: 1712838 - RNA, 19 nt, Artificial Sequence
  Description of Artificial Sequence: Synthetic oligonucleotide
ggaagcauuaaacacucug

SEQ ID NO: 1712839 - RNA, 19 nt, Artificial Sequence
  Description of Artificial Sequence: Synthetic oligonucleotide
guagaaaggagauaaccaa

SEQ ID NO: 1712840 - RNA, 19 nt, Artificial Sequence
  Description of Artificial Sequence: Synthetic oligonucleotide
aagauuuaaauaagauggu

SEQ ID NO: 1712841 - RNA, 19 nt, Artificial Sequence
  Description of Artificial Sequence: Synthetic oligonucleotide
ucauuguccucaauuccug

SEQ ID NO: 1712842 - RNA, 19 nt, Artificial Sequence
  Description of Artificial Sequence: Synthetic oligonucleotide
cuauaaccaugugagaaag

SEQ ID NO: 1712843 - RNA, 19 nt, Artificial Sequence
  Description of Artificial Sequence: Synthetic oligonucleotide
caucauuacuccugaagac

SEQ ID NO: 1712844 - RNA, 19 nt, Artificial Sequence
  Description of Artificial Sequence: Synthetic oligonucleotide
uuugccuauguuccaacaa

SEQ ID NO: 1712845 - RNA, 19 nt, Artificial Sequence
  Description of Artificial Sequence: Synthetic oligonucleotide
caacuauuacacgucauag

SEQ ID NO: 1712846 - RNA, 19 nt, Artificial Sequence
  Description of Artificial Sequence: Synthetic oligonucleotide
ugggcaacuggcuucggag

SEQ ID NO: 1712847 - RNA, 19 nt, Artificial Sequence
  Description of Artificial Sequence: Synthetic oligonucleotide
cauagacauuauaagugug

SEQ ID NO: 1712848 - RNA, 19 nt, Artificial Sequence
  Description of Artificial Sequence: Synthetic oligonucleotide
aaccaugugagaaagcuuu

SEQ ID NO: 1712849 - RNA, 19 nt, Artificial Sequence
  Description of Artificial Sequence: Synthetic oligonucleotide
aucugaauuucaggggugc

SEQ ID NO: 1712850 - RNA, 19 nt, Artificial Sequence
  Description of Artificial Sequence: Synthetic oligonucleotide
agcagcuuuagccagggaa

SEQ ID NO: 1712851 - RNA, 19 nt, Artificial Sequence
  Description of Artificial Sequence: Synthetic oligonucleotide
agcauuaaacacucugacu

SEQ ID NO: 1712852 - RNA, 19 nt, Artificial Sequence
  Description of Artificial Sequence: Synthetic oligonucleotide
ugaauuucaggggugcaca

SEQ ID NO: 1712853 - RNA, 19 nt, Artificial Sequence
  Description of Artificial Sequence: Synthetic oligonucleotide
cuaucacacuaccauagac

SEQ ID NO: 1712854 - RNA, 19 nt, Artificial Sequence
  Description of Artificial Sequence: Synthetic oligonucleotide
cugacuacgaaucauauau

SEQ ID NO: 1712855 - RNA, 19 nt, Artificial Sequence
  Description of Artificial Sequence: Synthetic oligonucleotide
ucuugcaaaauaaggcaua

SEQ ID NO: 1712856 - RNA, 19 nt, Artificial Sequence
  Description of Artificial Sequence: Synthetic oligonucleotide
ccuauguuccaacaaaacc

SEQ ID NO: 1712857 - RNA, 19 nt, Artificial Sequence
  Description of Artificial Sequence: Synthetic oligonucleotide
cauuaaacacucugacuac

SEQ ID NO: 1712858 - RNA, 19 nt, Artificial Sequence
  Description of Artificial Sequence: Synthetic oligonucleotide
aagaacugaauaaaacuuu

SEQ ID NO: 1712859 - RNA, 19 nt, Artificial Sequence
  Description of Artificial Sequence: Synthetic oligonucleotide
uguucaucgcaucuccuuc

SEQ ID NO: 1712860 - RNA, 19 nt, Artificial Sequence
  Description of Artificial Sequence: Synthetic oligonucleotide
aauuucaggggugcacauc

SEQ ID NO: 1712861 - RNA, 19 nt, Artificial Sequence
  Description of Artificial Sequence: Synthetic oligonucleotide
uugccuauguuccaacaaa

SEQ ID NO: 1712862 - RNA, 19 nt, Artificial Sequence
  Description of Artificial Sequence: Synthetic oligonucleotide
ugaucacuuuaccuauuug

SEQ ID NO: 1712863 - RNA, 19 nt, Artificial Sequence
  Description of Artificial Sequence: Synthetic oligonucleotide
cauucugcuaucacacuac

SEQ ID NO: 1712864 - RNA, 19 nt, Artificial Sequence
  Description of Artificial Sequence: Synthetic oligonucleotide
aauucauaaccaacuauua

SEQ ID NO: 1712865 - RNA, 19 nt, Artificial Sequence
  Description of Artificial Sequence: Synthetic oligonucleotide
ucuuaggcuccguggaucc

SEQ ID NO: 1712866 - RNA, 19 nt, Artificial Sequence
  Description of Artificial Sequence: Synthetic oligonucleotide
uacacgucauagcuuauau

SEQ ID NO: 1712867 - RNA, 19 nt, Artificial Sequence
  Description of Artificial Sequence: Synthetic oligonucleotide
aacagauuuccaccuuccu

SEQ ID NO: 1712868 - RNA, 19 nt, Artificial Sequence
  Description of Artificial Sequence: Synthetic oligonucleotide
auaaacuggaaaagaagga

SEQ ID NO: 1712869 - RNA, 19 nt, Artificial Sequence
  Description of Artificial Sequence: Synthetic oligonucleotide
acaucuuaggcuccgugga

SEQ ID NO: 1712870 - RNA, 19 nt, Artificial Sequence
  Description of Artificial Sequence: Synthetic oligonucleotide
aaccaagauuuaaauaaga

SEQ ID NO: 1712871 - RNA, 19 nt, Artificial Sequence
  Description of Artificial Sequence: Synthetic oligonucleotide
acuaaaccaaagcgccaac

SEQ ID NO: 1712872 - RNA, 19 nt, Artificial Sequence
  Description of Artificial Sequence: Synthetic oligonucleotide
aguuaaauucuuauccgca

SEQ ID NO: 1712873 - RNA, 19 nt, Artificial Sequence
  Description of Artificial Sequence: Synthetic oligonucleotide
cuaaaugcguauguucaag

SEQ ID NO: 1712874 - RNA, 19 nt, Artificial Sequence
  Description of Artificial Sequence: Synthetic oligonucleotide
ccaguuaaauucuuauccg

SEQ ID NO: 1712875 - RNA, 19 nt, Artificial Sequence
  Description of Artificial Sequence: Synthetic oligonucleotide
gaugucggaacucagugcu

SEQ ID NO: 1712876 - RNA, 19 nt, Artificial Sequence
  Description of Artificial Sequence: Synthetic oligonucleotide
ugaacuauugguugucauu

SEQ ID NO: 1712877 - RNA, 19 nt, Artificial Sequence
  Description of Artificial Sequence: Synthetic oligonucleotide
uaaggaugucggaacucag

SEQ ID NO: 1712878 - RNA, 19 nt, Artificial Sequence
  Description of Artificial Sequence: Synthetic oligonucleotide
auagacauuauaagugugu

SEQ ID NO: 1712879 - RNA, 19 nt, Artificial Sequence
  Description of Artificial Sequence: Synthetic oligonucleotide
uuuccuguaauagccaaau

SEQ ID NO: 1712880 - RNA, 19 nt, Artificial Sequence
  Description of Artificial Sequence: Synthetic oligonucleotide
uaauagccaaauacucaac

SEQ ID NO: 1712881 - RNA, 19 nt, Artificial Sequence
  Description of Artificial Sequence: Synthetic oligonucleotide
caggaagcauuaaacacuc

SEQ ID NO: 1712882 - RNA, 19 nt, Artificial Sequence
  Description of Artificial Sequence: Synthetic oligonucleotide
ucuaaaugcguauguucaa

SEQ ID NO: 1712883 - RNA, 19 nt, Artificial Sequence
  Description of Artificial Sequence: Synthetic oligonucleotide
cagauuuccaccuuccuaa

SEQ ID NO: 1712884 - RNA, 19 nt, Artificial Sequence
  Description of Artificial Sequence: Synthetic oligonucleotide
gauugcauuuucugagcac

SEQ ID NO: 1712885 - RNA, 19 nt, Artificial Sequence
  Description of Artificial Sequence: Synthetic oligonucleotide
uuacuaauuugccuauguu

SEQ ID NO: 1712886 - RNA, 19 nt, Artificial Sequence
  Description of Artificial Sequence: Synthetic oligonucleotide
uuccuggcaacucuauaac

SEQ ID NO: 1712887 - RNA, 19 nt, Artificial Sequence
  Description of Artificial Sequence: Synthetic oligonucleotide
uaaacacucugacuacgaa

SEQ ID NO: 1712888 - RNA, 19 nt, Artificial Sequence
  Description of Artificial Sequence: Synthetic oligonucleotide
caucuguuuccuguaauag

SEQ ID NO: 1712889 - RNA, 19 nt, Artificial Sequence
  Description of Artificial Sequence: Synthetic oligonucleotide
auguauucuaaaugcguau

SEQ ID NO: 1712890 - RNA, 19 nt, Artificial Sequence
  Description of Artificial Sequence: Synthetic oligonucleotide
cacacuaccauagacauua

SEQ ID NO: 1712891 - RNA, 19 nt, Artificial Sequence
  Description of Artificial Sequence: Synthetic oligonucleotide
aaauacucuuuggaagcca

SEQ ID NO: 1712892 - RNA, 19 nt, Artificial Sequence
  Description of Artificial Sequence: Synthetic oligonucleotide
uccuggcaacucuauaacc

SEQ ID NO: 1712893 - RNA, 19 nt, Artificial Sequence
  Description of Artificial Sequence: Synthetic oligonucleotide
aaauucuuauccgcaugcu

SEQ ID NO: 1712894 - RNA, 19 nt, Artificial Sequence
  Description of Artificial Sequence: Synthetic oligonucleotide
gcuucggagagcuaauucc

SEQ ID NO: 1712895 - RNA, 19 nt, Artificial Sequence
  Description of Artificial Sequence: Synthetic oligonucleotide
uauguucaaggcuacuguu

SEQ ID NO: 1712896 - RNA, 19 nt, Artificial Sequence
  Description of Artificial Sequence: Synthetic oligonucleotide
gagauaaccaagauuuaaa

SEQ ID NO: 1712897 - RNA, 19 nt, Artificial Sequence
  Description of Artificial Sequence: Synthetic oligonucleotide
cuuuggaagccaucauuac

SEQ ID NO: 1712898 - RNA, 19 nt, Artificial Sequence
  Description of Artificial Sequence: Synthetic oligonucleotide
uaccuauuugugaaacaaa

SEQ ID NO: 1712899 - RNA, 19 nt, Artificial Sequence
  Description of Artificial Sequence: Synthetic oligonucleotide
cauuauaaguguguguaca

SEQ ID NO: 1712900 - RNA, 19 nt, Artificial Sequence
  Description of Artificial Sequence: Synthetic oligonucleotide
agccauaaacaacuuuacu

SEQ ID NO: 1712901 - RNA, 19 nt, Artificial Sequence
  Description of Artificial Sequence: Synthetic oligonucleotide
acuacuagucauguauucu

SEQ ID NO: 1712902 - RNA, 19 nt, Artificial Sequence
  Description of Artificial Sequence: Synthetic oligonucleotide
ucucuaucccuuugcuaag

SEQ ID NO: 1712903 - RNA, 19 nt, Artificial Sequence
  Description of Artificial Sequence: Synthetic oligonucleotide
acuuuacuaauuugccuau

SEQ ID NO: 1712904 - RNA, 19 nt, Artificial Sequence
  Description of Artificial Sequence: Synthetic oligonucleotide
uucggagagcuaauuccug

SEQ ID NO: 1712905 - RNA, 19 nt, Artificial Sequence
  Description of Artificial Sequence: Synthetic oligonucleotide
caacucuauaaccauguga

SEQ ID NO: 1712906 - RNA, 19 nt, Artificial Sequence
  Description of Artificial Sequence: Synthetic oligonucleotide
aauacucuuuggaagccau

SEQ ID NO: 1712907 - RNA, 19 nt, Artificial Sequence
  Description of Artificial Sequence: Synthetic oligonucleotide
auaaggcauacucaugcuu

SEQ ID NO: 1712908 - RNA, 19 nt, Artificial Sequence
  Description of Artificial Sequence: Synthetic oligonucleotide
accuauuugugaaacaaaa

SEQ ID NO: 1712909 - RNA, 19 nt, Artificial Sequence
  Description of Artificial Sequence: Synthetic oligonucleotide
acagauuuccaccuuccua

SEQ ID NO: 1712910 - RNA, 19 nt, Artificial Sequence
  Description of Artificial Sequence: Synthetic oligonucleotide
cauguauucuaaaugcgua

SEQ ID NO: 1712911 - RNA, 19 nt, Artificial Sequence
  Description of Artificial Sequence: Synthetic oligonucleotide
auuugccuauguuccaaca

SEQ ID NO: 1712912 - RNA, 19 nt, Artificial Sequence
  Description of Artificial Sequence: Synthetic oligonucleotide
cucuauaaccaugugagaa

SEQ ID NO: 1712913 - RNA, 19 nt, Artificial Sequence
  Description of Artificial Sequence: Synthetic oligonucleotide
cccacuacagccaggaagc

SEQ ID NO: 1712914 - RNA, 19 nt, Artificial Sequence
  Description of Artificial Sequence: Synthetic oligonucleotide
guucaucgcaucuccuucc

SEQ ID NO: 1712915 - RNA, 19 nt, Artificial Sequence
  Description of Artificial Sequence: Synthetic oligonucleotide
uauucuaaaugcguauguu

SEQ ID NO: 1712916 - RNA, 19 nt, Artificial Sequence
  Description of Artificial Sequence: Synthetic oligonucleotide
gaaucauauauaauacacu

SEQ ID NO: 1712917 - RNA, 19 nt, Artificial Sequence
  Description of Artificial Sequence: Synthetic oligonucleotide
ugccacuacaauucauaac

SEQ ID NO: 1712918 - RNA, 19 nt, Artificial Sequence
  Description of Artificial Sequence: Synthetic oligonucleotide
ucaugcuuauuuuguuccu

SEQ ID NO: 1712919 - RNA, 19 nt, Artificial Sequence
  Description of Artificial Sequence: Synthetic oligonucleotide
cuuccuggcaacucuauaa

SEQ ID NO: 1712920 - RNA, 19 nt, Artificial Sequence
  Description of Artificial Sequence: Synthetic oligonucleotide
caaagcgccaacagauuuc

SEQ ID NO: 1712921 - RNA, 19 nt, Artificial Sequence
  Description of Artificial Sequence: Synthetic oligonucleotide
caauucauaaccaacuauu

SEQ ID NO: 1712922 - RNA, 19 nt, Artificial Sequence
  Description of Artificial Sequence: Synthetic oligonucleotide
aucuuaggcuccguggauc

SEQ ID NO: 1712923 - RNA, 19 nt, Artificial Sequence
  Description of Artificial Sequence: Synthetic oligonucleotide
uucaucgcaucuccuucca

SEQ ID NO: 1712924 - RNA, 19 nt, Artificial Sequence
  Description of Artificial Sequence: Synthetic oligonucleotide
ucugacuacgaaucauaua

SEQ ID NO: 1712925 - RNA, 19 nt, Artificial Sequence
  Description of Artificial Sequence: Synthetic oligonucleotide
acccuugaaaauaagggau

SEQ ID NO: 1712926 - RNA, 19 nt, Artificial Sequence
  Description of Artificial Sequence: Synthetic oligonucleotide
uuaaucuagcuugguggca

SEQ ID NO: 1712927 - RNA, 19 nt, Artificial Sequence
  Description of Artificial Sequence: Synthetic oligonucleotide
cuaucccuuugcuaaguuc

SEQ ID NO: 1712928 - RNA, 19 nt, Artificial Sequence
  Description of Artificial Sequence: Synthetic oligonucleotide
cacuguuaagaaagggauc

SEQ ID NO: 1712929 - RNA, 19 nt, Artificial Sequence
  Description of Artificial Sequence: Synthetic oligonucleotide
ucuuauccgcaugcuaccc

SEQ ID NO: 1712930 - RNA, 19 nt, Artificial Sequence
  Description of Artificial Sequence: Synthetic oligonucleotide
cuuccuaagcugaggguuc

SEQ ID NO: 1712931 - RNA, 19 nt, Artificial Sequence
  Description of Artificial Sequence: Synthetic oligonucleotide
auaaguguguguacauaug

SEQ ID NO: 1712932 - RNA, 19 nt, Artificial Sequence
  Description of Artificial Sequence: Synthetic oligonucleotide
ccauaaacaacuuuacuaa

SEQ ID NO: 1712933 - RNA, 19 nt, Artificial Sequence
  Description of Artificial Sequence: Synthetic oligonucleotide
cuccguggauccuucagac

SEQ ID NO: 1712934 - RNA, 19 nt, Artificial Sequence
  Description of Artificial Sequence: Synthetic oligonucleotide
aaacuacuagucauguauu

SEQ ID NO: 1712935 - RNA, 19 nt, Artificial Sequence
  Description of Artificial Sequence: Synthetic oligonucleotide
ugcauuuucugagcacuca

SEQ ID NO: 1712936 - RNA, 19 nt, Artificial Sequence
  Description of Artificial Sequence: Synthetic oligonucleotide
uugauaggugccacuguua

SEQ ID NO: 1712937 - RNA, 19 nt, Artificial Sequence
  Description of Artificial Sequence: Synthetic oligonucleotide
uaaccaugugagaaagcuu

SEQ ID NO: 1712938 - RNA, 19 nt, Artificial Sequence
  Description of Artificial Sequence: Synthetic oligonucleotide
aaccaaucacuggacauuu

SEQ ID NO: 1712939 - RNA, 19 nt, Artificial Sequence
  Description of Artificial Sequence: Synthetic oligonucleotide
aaggaugucggaacucagu

SEQ ID NO: 1712940 - RNA, 19 nt, Artificial Sequence
  Description of Artificial Sequence: Synthetic oligonucleotide
cuacuagucauguauucua

SEQ ID NO: 1712941 - RNA, 19 nt, Artificial Sequence
  Description of Artificial Sequence: Synthetic oligonucleotide
ugacuacgaaucauauaua

SEQ ID NO: 1712942 - RNA, 19 nt, Artificial Sequence
  Description of Artificial Sequence: Synthetic oligonucleotide
gucauuaaggaugucggaa

SEQ ID NO: 1712943 - RNA, 19 nt, Artificial Sequence
  Description of Artificial Sequence: Synthetic oligonucleotide
aguugauaggugccacugu

SEQ ID NO: 1712944 - RNA, 19 nt, Artificial Sequence
  Description of Artificial Sequence: Synthetic oligonucleotide
acucuauaaccaugugaga

SEQ ID NO: 1712945 - RNA, 19 nt, Artificial Sequence
  Description of Artificial Sequence: Synthetic oligonucleotide
gacaucccggggaagacac

SEQ ID NO: 1712946 - RNA, 19 nt, Artificial Sequence
  Description of Artificial Sequence: Synthetic oligonucleotide
cugagcacucaaagaacug

SEQ ID NO: 1712947 - RNA, 19 nt, Artificial Sequence
  Description of Artificial Sequence: Synthetic oligonucleotide
uacucaaccacuggcuuau

SEQ ID NO: 1712948 - RNA, 19 nt, Artificial Sequence
  Description of Artificial Sequence: Synthetic oligonucleotide
cugaauuucaggggugcac

SEQ ID NO: 1712949 - RNA, 19 nt, Artificial Sequence
  Description of Artificial Sequence: Synthetic oligonucleotide
agccaaauacucaaccacu

SEQ ID NO: 1712950 - RNA, 19 nt, Artificial Sequence
  Description of Artificial Sequence: Synthetic oligonucleotide
ugcguauguucaaggcuac

SEQ ID NO: 1712951 - RNA, 19 nt, Artificial Sequence
  Description of Artificial Sequence: Synthetic oligonucleotide
acacauacucuagcaaucu

SEQ ID NO: 1712952 - RNA, 19 nt, Artificial Sequence
  Description of Artificial Sequence: Synthetic oligonucleotide
guauucuaaaugcguaugu

SEQ ID NO: 1712953 - RNA, 19 nt, Artificial Sequence
  Description of Artificial Sequence: Synthetic oligonucleotide
uacagauuuccugcacccc

SEQ ID NO: 1712954 - RNA, 19 nt, Artificial Sequence
  Description of Artificial Sequence: Synthetic oligonucleotide
guuaaauucuuauccgcau

SEQ ID NO: 1712955 - RNA, 19 nt, Artificial Sequence
  Description of Artificial Sequence: Synthetic oligonucleotide
gcuauagccauaaacaacu

SEQ ID NO: 1712956 - RNA, 19 nt, Artificial Sequence
  Description of Artificial Sequence: Synthetic oligonucleotide
uucccgugcuacacuaaac

SEQ ID NO: 1712957 - RNA, 19 nt, Artificial Sequence
  Description of Artificial Sequence: Synthetic oligonucleotide
caguugauaggugccacug

SEQ ID NO: 1712958 - RNA, 19 nt, Artificial Sequence
  Description of Artificial Sequence: Synthetic oligonucleotide
ugucggaacucagugcuuc

SEQ ID NO: 1712959 - RNA, 19 nt, Artificial Sequence
  Description of Artificial Sequence: Synthetic oligonucleotide
auucccgugcuacacuaaa

SEQ ID NO: 1712960 - RNA, 19 nt, Artificial Sequence
  Description of Artificial Sequence: Synthetic oligonucleotide
acuacgaaucauauauaau

SEQ ID NO: 1712961 - RNA, 19 nt, Artificial Sequence
  Description of Artificial Sequence: Synthetic oligonucleotide
uuccaguugauaggugcca

SEQ ID NO: 1712962 - RNA, 19 nt, Artificial Sequence
  Description of Artificial Sequence: Synthetic oligonucleotide
auacucaaccacuggcuua

SEQ ID NO: 1712963 - RNA, 19 nt, Artificial Sequence
  Description of Artificial Sequence: Synthetic oligonucleotide
agcuggugccacuacaauu

SEQ ID NO: 1712964 - RNA, 19 nt, Artificial Sequence
  Description of Artificial Sequence: Synthetic oligonucleotide
cuagucauguauucuaaau

SEQ ID NO: 1712965 - RNA, 19 nt, Artificial Sequence
  Description of Artificial Sequence: Synthetic oligonucleotide
caucccggggaagacacag

SEQ ID NO: 1712966 - RNA, 19 nt, Artificial Sequence
  Description of Artificial Sequence: Synthetic oligonucleotide
ugcccacccaagcuauagc

SEQ ID NO: 1712967 - RNA, 19 nt, Artificial Sequence
  Description of Artificial Sequence: Synthetic oligonucleotide
agagaguggcuuccuggca

SEQ ID NO: 1712968 - RNA, 19 nt, Artificial Sequence
  Description of Artificial Sequence: Synthetic oligonucleotide
aucgcaucuccuuccaguu

SEQ ID NO: 1712969 - RNA, 19 nt, Artificial Sequence
  Description of Artificial Sequence: Synthetic oligonucleotide
uacucaugcuuaucucuau

SEQ ID NO: 1712970 - RNA, 19 nt, Artificial Sequence
  Description of Artificial Sequence: Synthetic oligonucleotide
cuuuacuaauuugccuaug

SEQ ID NO: 1712971 - RNA, 19 nt, Artificial Sequence
  Description of Artificial Sequence: Synthetic oligonucleotide
augcguauguucaaggcua

SEQ ID NO: 1712972 - RNA, 19 nt, Artificial Sequence
  Description of Artificial Sequence: Synthetic oligonucleotide
cacuacaauucauaaccaa

SEQ ID NO: 1712973 - RNA, 19 nt, Artificial Sequence
  Description of Artificial Sequence: Synthetic oligonucleotide
ucugaucacuuuaccuauu

SEQ ID NO: 1712974 - RNA, 19 nt, Artificial Sequence
  Description of Artificial Sequence: Synthetic oligonucleotide
uccgcaugcuacccacuac

SEQ ID NO: 1712975 - RNA, 19 nt, Artificial Sequence
  Description of Artificial Sequence: Synthetic oligonucleotide
uccaguugauaggugccac

SEQ ID NO: 1712976 - RNA, 19 nt, Artificial Sequence
  Description of Artificial Sequence: Synthetic oligonucleotide
auaaccaguuaaauucuua

SEQ ID NO: 1712977 - RNA, 19 nt, Artificial Sequence
  Description of Artificial Sequence: Synthetic oligonucleotide
caacuuuacuaauuugccu

SEQ ID NO: 1712978 - RNA, 19 nt, Artificial Sequence
  Description of Artificial Sequence: Synthetic oligonucleotide
cuaaaccaaagcgccaaca

SEQ ID NO: 1712979 - RNA, 19 nt, Artificial Sequence
  Description of Artificial Sequence: Synthetic oligonucleotide
acgucauagcuuauauuga

SEQ ID NO: 1712980 - RNA, 19 nt, Artificial Sequence
  Description of Artificial Sequence: Synthetic oligonucleotide
gcgccaacagauuuccacc

SEQ ID NO: 1712981 - RNA, 19 nt, Artificial Sequence
  Description of Artificial Sequence: Synthetic oligonucleotide
ccguggauccuucagacuc

SEQ ID NO: 1712982 - RNA, 19 nt, Artificial Sequence
  Description of Artificial Sequence: Synthetic oligonucleotide
uuccuguaauagccaaaua

SEQ ID NO: 1712983 - RNA, 19 nt, Artificial Sequence
  Description of Artificial Sequence: Synthetic oligonucleotide
accaugugagaaagcuuuc

SEQ ID NO: 1712984 - RNA, 19 nt, Artificial Sequence
  Description of Artificial Sequence: Synthetic oligonucleotide
cuucggagagcuaauuccu

SEQ ID NO: 1712985 - RNA, 19 nt, Artificial Sequence
  Description of Artificial Sequence: Synthetic oligonucleotide
uccguggauccuucagacu

SEQ ID NO: 1712986 - RNA, 19 nt, Artificial Sequence
  Description of Artificial Sequence: Synthetic oligonucleotide
cuuauccgcaugcuaccca

SEQ ID NO: 1712987 - RNA, 19 nt, Artificial Sequence
  Description of Artificial Sequence: Synthetic oligonucleotide
uagcuggugccacuacaau

SEQ ID NO: 1712988 - RNA, 19 nt, Artificial Sequence
  Description of Artificial Sequence: Synthetic oligonucleotide
agcuuauauugaaaaguua

SEQ ID NO: 1712989 - RNA, 19 nt, Artificial Sequence
  Description of Artificial Sequence: Synthetic oligonucleotide
uauccgcaugcuacccacu

SEQ ID NO: 1712990 - RNA, 19 nt, Artificial Sequence
  Description of Artificial Sequence: Synthetic oligonucleotide
guugauaggugccacuguu

SEQ ID NO: 1712991 - RNA, 19 nt, Artificial Sequence
  Description of Artificial Sequence: Synthetic oligonucleotide
cauuaaggaugucggaacu

SEQ ID NO: 1712992 - RNA, 19 nt, Artificial Sequence
  Description of Artificial Sequence: Synthetic oligonucleotide
cuguuaagaaagggaucug

SEQ ID NO: 1712993 - RNA, 19 nt, Artificial Sequence
  Description of Artificial Sequence: Synthetic oligonucleotide
acucugacuacgaaucaua

SEQ ID NO: 1712994 - RNA, 19 nt, Artificial Sequence
  Description of Artificial Sequence: Synthetic oligonucleotide
ucacacuaccauagacauu

SEQ ID NO: 1712995 - RNA, 19 nt, Artificial Sequence
  Description of Artificial Sequence: Synthetic oligonucleotide
cuagcuugguggcagccaa

SEQ ID NO: 1712996 - RNA, 19 nt, Artificial Sequence
  Description of Artificial Sequence: Synthetic oligonucleotide
ucggaacucagugcuuccu

SEQ ID NO: 1712997 - RNA, 19 nt, Artificial Sequence
  Description of Artificial Sequence: Synthetic oligonucleotide
auguucaaggcuacuguuu

SEQ ID NO: 1712998 - RNA, 19 nt, Artificial Sequence
  Description of Artificial Sequence: Synthetic oligonucleotide
cacuaaaccaaagcgccaa

SEQ ID NO: 1712999 - RNA, 19 nt, Artificial Sequence
  Description of Artificial Sequence: Synthetic oligonucleotide
ucccuuugcuaaguucaac

SEQ ID NO: 1713000 - RNA, 19 nt, Artificial Sequence
  Description of Artificial Sequence: Synthetic oligonucleotide
gucugaucacuuuaccuau

SEQ ID NO: 1713001 - RNA, 19 nt, Artificial Sequence
  Description of Artificial Sequence: Synthetic oligonucleotide
cugcccacccaagcuauag

SEQ ID NO: 1713002 - RNA, 19 nt, Artificial Sequence
  Description of Artificial Sequence: Synthetic oligonucleotide
uggugccacuacaauucau

SEQ ID NO: 1713003 - RNA, 19 nt, Artificial Sequence
  Description of Artificial Sequence: Synthetic oligonucleotide
uuaggcuccguggauccuu

SEQ ID NO: 1713004 - RNA, 19 nt, Artificial Sequence
  Description of Artificial Sequence: Synthetic oligonucleotide
acacuaaaccaaagcgcca

SEQ ID NO: 1713005 - RNA, 19 nt, Artificial Sequence
  Description of Artificial Sequence: Synthetic oligonucleotide
gcaugcuacccacuacagc

SEQ ID NO: 1713006 - RNA, 19 nt, Artificial Sequence
  Description of Artificial Sequence: Synthetic oligonucleotide
caagaauaaccaguuaaau

SEQ ID NO: 1713007 - RNA, 19 nt, Artificial Sequence
  Description of Artificial Sequence: Synthetic oligonucleotide
auccgcaugcuacccacua

SEQ ID NO: 1713008 - RNA, 19 nt, Artificial Sequence
  Description of Artificial Sequence: Synthetic oligonucleotide
aggugccacuguuaagaaa

SEQ ID NO: 1713009 - RNA, 19 nt, Artificial Sequence
  Description of Artificial Sequence: Synthetic oligonucleotide
agcuuuagccagggaaaga

SEQ ID NO: 1713010 - RNA, 19 nt, Artificial Sequence
  Description of Artificial Sequence: Synthetic oligonucleotide
uaggcuccguggauccuuc

SEQ ID NO: 1713011 - RNA, 19 nt, Artificial Sequence
  Description of Artificial Sequence: Synthetic oligonucleotide
caucgcaucuccuuccagu

SEQ ID NO: 1713012 - RNA, 19 nt, Artificial Sequence
  Description of Artificial Sequence: Synthetic oligonucleotide
gcaacucuauaaccaugug

SEQ ID NO: 1713013 - RNA, 19 nt, Artificial Sequence
  Description of Artificial Sequence: Synthetic oligonucleotide
guacugcccacccaagcua

SEQ ID NO: 1713014 - RNA, 19 nt, Artificial Sequence
  Description of Artificial Sequence: Synthetic oligonucleotide
guggauccuucagacucag

SEQ ID NO: 1713015 - RNA, 19 nt, Artificial Sequence
  Description of Artificial Sequence: Synthetic oligonucleotide
aucccggggaagacacagc

SEQ ID NO: 1713016 - RNA, 19 nt, Artificial Sequence
  Description of Artificial Sequence: Synthetic oligonucleotide
gugcuacacuaaaccaaag

SEQ ID NO: 1713017 - RNA, 19 nt, Artificial Sequence
  Description of Artificial Sequence: Synthetic oligonucleotide
ggcuucggagagcuaauuc

SEQ ID NO: 1713018 - RNA, 19 nt, Artificial Sequence
  Description of Artificial Sequence: Synthetic oligonucleotide
gggaaagaauaguuugucu

SEQ ID NO: 1713019 - RNA, 19 nt, Artificial Sequence
  Description of Artificial Sequence: Synthetic oligonucleotide
cugcuaucacacuaccaua

SEQ ID NO: 1713020 - RNA, 19 nt, Artificial Sequence
  Description of Artificial Sequence: Synthetic oligonucleotide
cguauguucaaggcuacug

SEQ ID NO: 1713021 - RNA, 19 nt, Artificial Sequence
  Description of Artificial Sequence: Synthetic oligonucleotide
gcuaucacacuaccauaga

SEQ ID NO: 1713022 - RNA, 19 nt, Artificial Sequence
  Description of Artificial Sequence: Synthetic oligonucleotide
ggugccacuacaauucaua

SEQ ID NO: 1713023 - RNA, 19 nt, Artificial Sequence
  Description of Artificial Sequence: Synthetic oligonucleotide
gccuauguuccaacaaaac

SEQ ID NO: 1713024 - RNA, 19 nt, Artificial Sequence
  Description of Artificial Sequence: Synthetic oligonucleotide
accaacuauuacacgucau

SEQ ID NO: 1713025 - RNA, 19 nt, Artificial Sequence
  Description of Artificial Sequence: Synthetic oligonucleotide
gcagcuuuagccagggaaa

SEQ ID NO: 1713026 - RNA, 19 nt, Artificial Sequence
  Description of Artificial Sequence: Synthetic oligonucleotide
augcuacccacuacagcca

SEQ ID NO: 1713027 - RNA, 19 nt, Artificial Sequence
  Description of Artificial Sequence: Synthetic oligonucleotide
ccaacuauuacacgucaua

SEQ ID NO: 1713028 - RNA, 19 nt, Artificial Sequence
  Description of Artificial Sequence: Synthetic oligonucleotide
ccacuguuaagaaagggau

SEQ ID NO: 1713029 - RNA, 19 nt, Artificial Sequence
  Description of Artificial Sequence: Synthetic oligonucleotide
uacccacuacagccaggaa

SEQ ID NO: 1713030 - RNA, 19 nt, Artificial Sequence
  Description of Artificial Sequence: Synthetic oligonucleotide
cacuaccauagacauuaua

SEQ ID NO: 1713031 - RNA, 19 nt, Artificial Sequence
  Description of Artificial Sequence: Synthetic oligonucleotide
ccacuacaauucauaacca

SEQ ID NO: 1713032 - RNA, 19 nt, Artificial Sequence
  Description of Artificial Sequence: Synthetic oligonucleotide
ccuucuauguucaucgcau

SEQ ID NO: 1713033 - RNA, 19 nt, Artificial Sequence
  Description of Artificial Sequence: Synthetic oligonucleotide
cugaucacuuuaccuauuu

SEQ ID NO: 1713034 - RNA, 19 nt, Artificial Sequence
  Description of Artificial Sequence: Synthetic oligonucleotide
gggcaacuggcuucggaga

SEQ ID NO: 1713035 - RNA, 19 nt, Artificial Sequence
  Description of Artificial Sequence: Synthetic oligonucleotide
ccgugcuacacuaaaccaa

SEQ ID NO: 1713036 - RNA, 19 nt, Artificial Sequence
  Description of Artificial Sequence: Synthetic oligonucleotide
cuacagccaggaagcauua

SEQ ID NO: 1713037 - RNA, 19 nt, Artificial Sequence
  Description of Artificial Sequence: Synthetic oligonucleotide
auguuccaacaaaaccaau

SEQ ID NO: 1713038 - RNA, 19 nt, Artificial Sequence
  Description of Artificial Sequence: Synthetic oligonucleotide
ccuuugcuaaguucaacua

SEQ ID NO: 1713039 - RNA, 19 nt, Artificial Sequence
  Description of Artificial Sequence: Synthetic oligonucleotide
guuccuccguccugcucca

SEQ ID NO: 1713040 - RNA, 19 nt, Artificial Sequence
  Description of Artificial Sequence: Synthetic oligonucleotide
uacuuccauucccgugcua

SEQ ID NO: 1713041 - RNA, 19 nt, Artificial Sequence
  Description of Artificial Sequence: Synthetic oligonucleotide
cccuuugcuaaguucaacu

SEQ ID NO: 1713042 - RNA, 19 nt, Artificial Sequence
  Description of Artificial Sequence: Synthetic oligonucleotide
accaaagcgccaacagauu

SEQ ID NO: 1713043 - RNA, 19 nt, Artificial Sequence
  Description of Artificial Sequence: Synthetic oligonucleotide
ccaaucacuggacauuugu

SEQ ID NO: 1713044 - RNA, 19 nt, Artificial Sequence
  Description of Artificial Sequence: Synthetic oligonucleotide
cccgugcuacacuaaacca

SEQ ID NO: 1713045 - RNA, 19 nt, Artificial Sequence
  Description of Artificial Sequence: Synthetic oligonucleotide
cauucccgugcuacacuaa

SEQ ID NO: 1713046 - RNA, 19 nt, Artificial Sequence
  Description of Artificial Sequence: Synthetic oligonucleotide
gcaacuggcuucggagagc

SEQ ID NO: 1713047 - RNA, 19 nt, Artificial Sequence
  Description of Artificial Sequence: Synthetic oligonucleotide
uggcuucggagagcuaauu

SEQ ID NO: 1713048 - RNA, 19 nt, Artificial Sequence
  Description of Artificial Sequence: Synthetic oligonucleotide
cgcaugcuacccacuacag

SEQ ID NO: 1713049 - RNA, 19 nt, Artificial Sequence
  Description of Artificial Sequence: Synthetic oligonucleotide
gcuacccacuacagccagg

SEQ ID NO: 1713050 - RNA, 19 nt, Artificial Sequence
  Description of Artificial Sequence: Synthetic oligonucleotide
gggaucugaacuauugguu

SEQ ID NO: 1713051 - RNA, 19 nt, Artificial Sequence
  Description of Artificial Sequence: Synthetic oligonucleotide
cccacccaagcuauagcca

SEQ ID NO: 1713052 - RNA, 19 nt, Artificial Sequence
  Description of Artificial Sequence: Synthetic oligonucleotide
aggcuccguggauccuuca

SEQ ID NO: 1713053 - RNA, 19 nt, Artificial Sequence
  Description of Artificial Sequence: Synthetic oligonucleotide
caucuuaggcuccguggau

SEQ ID NO: 1713054 - RNA, 19 nt, Artificial Sequence
  Description of Artificial Sequence: Synthetic oligonucleotide
ggugcuagcuggugccacu

SEQ ID NO: 1713055 - RNA, 19 nt, Artificial Sequence
  Description of Artificial Sequence: Synthetic oligonucleotide
augucggaacucagugcuu

SEQ ID NO: 1713056 - RNA, 19 nt, Artificial Sequence
  Description of Artificial Sequence: Synthetic oligonucleotide
acacuaccauagacauuau

SEQ ID NO: 1713057 - RNA, 19 nt, Artificial Sequence
  Description of Artificial Sequence: Synthetic oligonucleotide
acaucccggggaagacaca

SEQ ID NO: 1713058 - RNA, 19 nt, Artificial Sequence
  Description of Artificial Sequence: Synthetic oligonucleotide
cguggauccuucagacuca

SEQ ID NO: 1713059 - RNA, 19 nt, Artificial Sequence
  Description of Artificial Sequence: Synthetic oligonucleotide
ccuuccuaagcugaggguu

SEQ ID NO: 1713060 - RNA, 19 nt, Artificial Sequence
  Description of Artificial Sequence: Synthetic oligonucleotide
cacuacagccaggaagcau

SEQ ID NO: 1713061 - RNA, 19 nt, Artificial Sequence
  Description of Artificial Sequence: Synthetic oligonucleotide
ccaugugagaaagcuuucu

SEQ ID NO: 1713062 - RNA, 19 nt, Artificial Sequence
  Description of Artificial Sequence: Synthetic oligonucleotide
aacuggcuucggagagcua

SEQ ID NO: 1713063 - RNA, 19 nt, Artificial Sequence
  Description of Artificial Sequence: Synthetic oligonucleotide
ggcaucagcuccucuccuu

SEQ ID NO: 1713064 - RNA, 19 nt, Artificial Sequence
  Description of Artificial Sequence: Synthetic oligonucleotide
ccaguugauaggugccacu

SEQ ID NO: 1713065 - RNA, 19 nt, Artificial Sequence
  Description of Artificial Sequence: Synthetic oligonucleotide
cuuaggcuccguggauccu

SEQ ID NO: 1713066 - RNA, 19 nt, Artificial Sequence
  Description of Artificial Sequence: Synthetic oligonucleotide
cgccaacagauuuccaccu

SEQ ID NO: 1713067 - RNA, 19 nt, Artificial Sequence
  Description of Artificial Sequence: Synthetic oligonucleotide
gcguauguucaaggcuacu

SEQ ID NO: 1713068 - RNA, 19 nt, Artificial Sequence
  Description of Artificial Sequence: Synthetic oligonucleotide
cccggggaagacacagcau

SEQ ID NO: 1713069 - RNA, 19 nt, Artificial Sequence
  Description of Artificial Sequence: Synthetic oligonucleotide
aauaauguaccucaggaag

SEQ ID NO: 1713070 - RNA, 19 nt, Artificial Sequence
  Description of Artificial Sequence: Synthetic oligonucleotide
aauagguugucauacuugg

SEQ ID NO: 1713071 - RNA, 19 nt, Artificial Sequence
  Description of Artificial Sequence: Synthetic oligonucleotide
auaguaaugagcauguagc

SEQ ID NO: 1713072 - RNA, 19 nt, Artificial Sequence
  Description of Artificial Sequence: Synthetic oligonucleotide
auaguguggauucaccucc

SEQ ID NO: 1713073 - RNA, 19 nt, Artificial Sequence
  Description of Artificial Sequence: Synthetic oligonucleotide
ugaaguuaaauccuccugc

SEQ ID NO: 1713074 - RNA, 19 nt, Artificial Sequence
  Description of Artificial Sequence: Synthetic oligonucleotide
uuuuauugaugucacacca

SEQ ID NO: 1713075 - RNA, 19 nt, Artificial Sequence
  Description of Artificial Sequence: Synthetic oligonucleotide
ucauacuuggucaauagcu

SEQ ID NO: 1713076 - RNA, 19 nt, Artificial Sequence
  Description of Artificial Sequence: Synthetic oligonucleotide
ugaauuuccggacaguagc

SEQ ID NO: 1713077 - RNA, 19 nt, Artificial Sequence
  Description of Artificial Sequence: Synthetic oligonucleotide
uuacaaacuccucuggccg

SEQ ID NO: 1713078 - RNA, 19 nt, Artificial Sequence
  Description of Artificial Sequence: Synthetic oligonucleotide
acuagauaagaccagacgu

SEQ ID NO: 1713079 - RNA, 19 nt, Artificial Sequence
  Description of Artificial Sequence: Synthetic oligonucleotide
uaaaauuuugagaugcagu

SEQ ID NO: 1713080 - RNA, 19 nt, Artificial Sequence
  Description of Artificial Sequence: Synthetic oligonucleotide
uuagaacagcccaucaugg

SEQ ID NO: 1713081 - RNA, 19 nt, Artificial Sequence
  Description of Artificial Sequence: Synthetic oligonucleotide
aguuaaauccuccugccuc

SEQ ID NO: 1713082 - RNA, 19 nt, Artificial Sequence
  Description of Artificial Sequence: Synthetic oligonucleotide
agcacaugaccuuacaaac

SEQ ID NO: 1713083 - RNA, 19 nt, Artificial Sequence
  Description of Artificial Sequence: Synthetic oligonucleotide
aauuuugagaugcaguuuu

SEQ ID NO: 1713084 - RNA, 19 nt, Artificial Sequence
  Description of Artificial Sequence: Synthetic oligonucleotide
aaagaugucucaaauaggu

SEQ ID NO: 1713085 - RNA, 19 nt, Artificial Sequence
  Description of Artificial Sequence: Synthetic oligonucleotide
uuauugaugucacaccagc

SEQ ID NO: 1713086 - RNA, 19 nt, Artificial Sequence
  Description of Artificial Sequence: Synthetic oligonucleotide
gauaguucugcugggaucg

SEQ ID NO: 1713087 - RNA, 19 nt, Artificial Sequence
  Description of Artificial Sequence: Synthetic oligonucleotide
ucgccuugaaguuaaaucc

SEQ ID NO: 1713088 - RNA, 19 nt, Artificial Sequence
  Description of Artificial Sequence: Synthetic oligonucleotide
aucaucuccguuuugcgac

SEQ ID NO: 1713089 - RNA, 19 nt, Artificial Sequence
  Description of Artificial Sequence: Synthetic oligonucleotide
ugcucacuagauaagacca

SEQ ID NO: 1713090 - RNA, 19 nt, Artificial Sequence
  Description of Artificial Sequence: Synthetic oligonucleotide
caaugguuaaaauuuugag

SEQ ID NO: 1713091 - RNA, 19 nt, Artificial Sequence
  Description of Artificial Sequence: Synthetic oligonucleotide
ugggccgacacuaacaccc

SEQ ID NO: 1713092 - RNA, 19 nt, Artificial Sequence
  Description of Artificial Sequence: Synthetic oligonucleotide
uuuauugaugucacaccag

SEQ ID NO: 1713093 - RNA, 19 nt, Artificial Sequence
  Description of Artificial Sequence: Synthetic oligonucleotide
agguagccgacguacaugc

SEQ ID NO: 1713094 - RNA, 19 nt, Artificial Sequence
  Description of Artificial Sequence: Synthetic oligonucleotide
guuagaacagcccaucaug

SEQ ID NO: 1713095 - RNA, 19 nt, Artificial Sequence
  Description of Artificial Sequence: Synthetic oligonucleotide
ugcaguuuuauugauguca

SEQ ID NO: 1713096 - RNA, 19 nt, Artificial Sequence
  Description of Artificial Sequence: Synthetic oligonucleotide
aaaagaugucucaaauagg

SEQ ID NO: 1713097 - RNA, 19 nt, Artificial Sequence
  Description of Artificial Sequence: Synthetic oligonucleotide
uagccaaccaugaauuucc

SEQ ID NO: 1713098 - RNA, 19 nt, Artificial Sequence
  Description of Artificial Sequence: Synthetic oligonucleotide
gaaguuaaauccuccugcc

SEQ ID NO: 1713099 - RNA, 19 nt, Artificial Sequence
  Description of Artificial Sequence: Synthetic oligonucleotide
aucgaugacagcucggauc

SEQ ID NO: 1713100 - RNA, 19 nt, Artificial Sequence
  Description of Artificial Sequence: Synthetic oligonucleotide
aagaucugcacccaaggau

SEQ ID NO: 1713101 - RNA, 19 nt, Artificial Sequence
  Description of Artificial Sequence: Synthetic oligonucleotide
gguugagugggucauagcg

SEQ ID NO: 1713102 - RNA, 19 nt, Artificial Sequence
  Description of Artificial Sequence: Synthetic oligonucleotide
ugccucaguaaaacaaugg

SEQ ID NO: 1713103 - RNA, 19 nt, Artificial Sequence
  Description of Artificial Sequence: Synthetic oligonucleotide
auaucuggcaggaaacugc

SEQ ID NO: 1713104 - RNA, 19 nt, Artificial Sequence
  Description of Artificial Sequence: Synthetic oligonucleotide
aguagugucuggaaaggcc

SEQ ID NO: 1713105 - RNA, 19 nt, Artificial Sequence
  Description of Artificial Sequence: Synthetic oligonucleotide
ucgaugacagcucggaucu

SEQ ID NO: 1713106 - RNA, 19 nt, Artificial Sequence
  Description of Artificial Sequence: Synthetic oligonucleotide
uaauguaccucaggaagcg

SEQ ID NO: 1713107 - RNA, 19 nt, Artificial Sequence
  Description of Artificial Sequence: Synthetic oligonucleotide
agcaguagugucuggaaag

SEQ ID NO: 1713108 - RNA, 19 nt, Artificial Sequence
  Description of Artificial Sequence: Synthetic oligonucleotide
uucacgcugggcaauaucu

SEQ ID NO: 1713109 - RNA, 19 nt, Artificial Sequence
  Description of Artificial Sequence: Synthetic oligonucleotide
auacuuggucaauagcuuc

SEQ ID NO: 1713110 - RNA, 19 nt, Artificial Sequence
  Description of Artificial Sequence: Synthetic oligonucleotide
uuuccggacaguagcagag

SEQ ID NO: 1713111 - RNA, 19 nt, Artificial Sequence
  Description of Artificial Sequence: Synthetic oligonucleotide
aaggggaccaggacuagcc

SEQ ID NO: 1713112 - RNA, 19 nt, Artificial Sequence
  Description of Artificial Sequence: Synthetic oligonucleotide
agauucaaagcucugcuau

SEQ ID NO: 1713113 - RNA, 19 nt, Artificial Sequence
  Description of Artificial Sequence: Synthetic oligonucleotide
aauaucuggcaggaaacug

SEQ ID NO: 1713114 - RNA, 19 nt, Artificial Sequence
  Description of Artificial Sequence: Synthetic oligonucleotide
uguucgcucgcccggaagg

SEQ ID NO: 1713115 - RNA, 19 nt, Artificial Sequence
  Description of Artificial Sequence: Synthetic oligonucleotide
aaauagguugucauacuug

SEQ ID NO: 1713116 - RNA, 19 nt, Artificial Sequence
  Description of Artificial Sequence: Synthetic oligonucleotide
cacuagauaagaccagacg

SEQ ID NO: 1713117 - RNA, 19 nt, Artificial Sequence
  Description of Artificial Sequence: Synthetic oligonucleotide
uugccaggcaauaauguac

SEQ ID NO: 1713118 - RNA, 19 nt, Artificial Sequence
  Description of Artificial Sequence: Synthetic oligonucleotide
ugggaagucauugucaaac

SEQ ID NO: 1713119 - RNA, 19 nt, Artificial Sequence
  Description of Artificial Sequence: Synthetic oligonucleotide
uccugaggaguucuuggcg

SEQ ID NO: 1713120 - RNA, 19 nt, Artificial Sequence
  Description of Artificial Sequence: Synthetic oligonucleotide
uggaggcuagaucaucacg

SEQ ID NO: 1713121 - RNA, 19 nt, Artificial Sequence
  Description of Artificial Sequence: Synthetic oligonucleotide
ucauaguguggauucaccu

SEQ ID NO: 1713122 - RNA, 19 nt, Artificial Sequence
  Description of Artificial Sequence: Synthetic oligonucleotide
guagccgacguacaugccg

SEQ ID NO: 1713123 - RNA, 19 nt, Artificial Sequence
  Description of Artificial Sequence: Synthetic oligonucleotide
ugccaggcaauaauguacc

SEQ ID NO: 1713124 - RNA, 19 nt, Artificial Sequence
  Description of Artificial Sequence: Synthetic oligonucleotide
auagccaaccaugaauuuc

SEQ ID NO: 1713125 - RNA, 19 nt, Artificial Sequence
  Description of Artificial Sequence: Synthetic oligonucleotide
uccguuuugcgacaugaga

SEQ ID NO: 1713126 - RNA, 19 nt, Artificial Sequence
  Description of Artificial Sequence: Synthetic oligonucleotide
cucgccuugaaguuaaauc

SEQ ID NO: 1713127 - RNA, 19 nt, Artificial Sequence
  Description of Artificial Sequence: Synthetic oligonucleotide
agcucugcuaucaucacgg

SEQ ID NO: 1713128 - RNA, 19 nt, Artificial Sequence
  Description of Artificial Sequence: Synthetic oligonucleotide
agacguuccuuccugagga

SEQ ID NO: 1713129 - RNA, 19 nt, Artificial Sequence
  Description of Artificial Sequence: Synthetic oligonucleotide
cuaacacccacucauccug

SEQ ID NO: 1713130 - RNA, 19 nt, Artificial Sequence
  Description of Artificial Sequence: Synthetic oligonucleotide
uaguaaugagcauguagcu

SEQ ID NO: 1713131 - RNA, 19 nt, Artificial Sequence
  Description of Artificial Sequence: Synthetic oligonucleotide
aaguuaaauccuccugccu

SEQ ID NO: 1713132 - RNA, 19 nt, Artificial Sequence
  Description of Artificial Sequence: Synthetic oligonucleotide
ugccaguggucauaggcgg

SEQ ID NO: 1713133 - RNA, 19 nt, Artificial Sequence
  Description of Artificial Sequence: Synthetic oligonucleotide
aguagggaaaagaugucuc

SEQ ID NO: 1713134 - RNA, 19 nt, Artificial Sequence
  Description of Artificial Sequence: Synthetic oligonucleotide
aauguaccucaggaagcgc

SEQ ID NO: 1713135 - RNA, 19 nt, Artificial Sequence
  Description of Artificial Sequence: Synthetic oligonucleotide
aaccaugaauuuccggaca

SEQ ID NO: 1713136 - RNA, 19 nt, Artificial Sequence
  Description of Artificial Sequence: Synthetic oligonucleotide
augagcauguagcugccag

SEQ ID NO: 1713137 - RNA, 19 nt, Artificial Sequence
  Description of Artificial Sequence: Synthetic oligonucleotide
uccccauuggcucgugugg

SEQ ID NO: 1713138 - RNA, 19 nt, Artificial Sequence
  Description of Artificial Sequence: Synthetic oligonucleotide
aauuuccggacaguagcag

SEQ ID NO: 1713139 - RNA, 19 nt, Artificial Sequence
  Description of Artificial Sequence: Synthetic oligonucleotide
gugcucacuagauaagacc

SEQ ID NO: 1713140 - RNA, 19 nt, Artificial Sequence
  Description of Artificial Sequence: Synthetic oligonucleotide
auguaccucaggaagcgcc

SEQ ID NO: 1713141 - RNA, 19 nt, Artificial Sequence
  Description of Artificial Sequence: Synthetic oligonucleotide
ucacuagauaagaccagac

SEQ ID NO: 1713142 - RNA, 19 nt, Artificial Sequence
  Description of Artificial Sequence: Synthetic oligonucleotide
gucacuggguccuggaucc

SEQ ID NO: 1713143 - RNA, 19 nt, Artificial Sequence
  Description of Artificial Sequence: Synthetic oligonucleotide
gaugggccgacacuaacac

SEQ ID NO: 1713144 - RNA, 19 nt, Artificial Sequence
  Description of Artificial Sequence: Synthetic oligonucleotide
cugccaguggucauaggcg

SEQ ID NO: 1713145 - RNA, 19 nt, Artificial Sequence
  Description of Artificial Sequence: Synthetic oligonucleotide
ugcacccaaggauacuggg

SEQ ID NO: 1713146 - RNA, 19 nt, Artificial Sequence
  Description of Artificial Sequence: Synthetic oligonucleotide
uucuuugccaggcaauaau

SEQ ID NO: 1713147 - RNA, 19 nt, Artificial Sequence
  Description of Artificial Sequence: Synthetic oligonucleotide
agauaagaccagacguucc

SEQ ID NO: 1713148 - RNA, 19 nt, Artificial Sequence
  Description of Artificial Sequence: Synthetic oligonucleotide
gaaggucgcugccauggcg

SEQ ID NO: 1713149 - RNA, 19 nt, Artificial Sequence
  Description of Artificial Sequence: Synthetic oligonucleotide
guugagugggucauagcgg

SEQ ID NO: 1713150 - RNA, 19 nt, Artificial Sequence
  Description of Artificial Sequence: Synthetic oligonucleotide
cugggaucgcucuucacgc

SEQ ID NO: 1713151 - RNA, 19 nt, Artificial Sequence
  Description of Artificial Sequence: Synthetic oligonucleotide
ugucacaccagcccaaauu

SEQ ID NO: 1713152 - RNA, 19 nt, Artificial Sequence
  Description of Artificial Sequence: Synthetic oligonucleotide
cauaguguggauucaccuc

SEQ ID NO: 1713153 - RNA, 19 nt, Artificial Sequence
  Description of Artificial Sequence: Synthetic oligonucleotide
ucacauccgaccagggaug

SEQ ID NO: 1713154 - RNA, 19 nt, Artificial Sequence
  Description of Artificial Sequence: Synthetic oligonucleotide
aucacguucagcagggguc

SEQ ID NO: 1713155 - RNA, 19 nt, Artificial Sequence
  Description of Artificial Sequence: Synthetic oligonucleotide
accuuacaaacuccucugg

SEQ ID NO: 1713156 - RNA, 19 nt, Artificial Sequence
  Description of Artificial Sequence: Synthetic oligonucleotide
uaacacccacucauccugg

SEQ ID NO: 1713157 - RNA, 19 nt, Artificial Sequence
  Description of Artificial Sequence: Synthetic oligonucleotide
uccuggagcggauuguagc

SEQ ID NO: 1713158 - RNA, 19 nt, Artificial Sequence
  Description of Artificial Sequence: Synthetic oligonucleotide
ucaugauggaggcuagauc

SEQ ID NO: 1713159 - RNA, 19 nt, Artificial Sequence
  Description of Artificial Sequence: Synthetic oligonucleotide
cacuaacacccacucaucc

SEQ ID NO: 1713160 - RNA, 19 nt, Artificial Sequence
  Description of Artificial Sequence: Synthetic oligonucleotide
caaccaugaauuuccggac

SEQ ID NO: 1713161 - RNA, 19 nt, Artificial Sequence
  Description of Artificial Sequence: Synthetic oligonucleotide
cuggcugugauaguucugc

SEQ ID NO: 1713162 - RNA, 19 nt, Artificial Sequence
  Description of Artificial Sequence: Synthetic oligonucleotide
uagauaagaccagacguuc

SEQ ID NO: 1713163 - RNA, 19 nt, Artificial Sequence
  Description of Artificial Sequence: Synthetic oligonucleotide
gucauacuuggucaauagc

SEQ ID NO: 1713164 - RNA, 19 nt, Artificial Sequence
  Description of Artificial Sequence: Synthetic oligonucleotide
gauucaaagcucugcuauc

SEQ ID NO: 1713165 - RNA, 19 nt, Artificial Sequence
  Description of Artificial Sequence: Synthetic oligonucleotide
uggucaauagcuucuucau

SEQ ID NO: 1713166 - RNA, 19 nt, Artificial Sequence
  Description of Artificial Sequence: Synthetic oligonucleotide
ucuccguuuugcgacauga

SEQ ID NO: 1713167 - RNA, 19 nt, Artificial Sequence
  Description of Artificial Sequence: Synthetic oligonucleotide
ugaagcccaggcaucgaug

SEQ ID NO: 1713168 - RNA, 19 nt, Artificial Sequence
  Description of Artificial Sequence: Synthetic oligonucleotide
aguaacagagguucuccau

SEQ ID NO: 1713169 - RNA, 19 nt, Artificial Sequence
  Description of Artificial Sequence: Synthetic oligonucleotide
ggcaauaauguaccucagg

SEQ ID NO: 1713170 - RNA, 19 nt, Artificial Sequence
  Description of Artificial Sequence: Synthetic oligonucleotide
uccacuuguccuugccagg

SEQ ID NO: 1713171 - RNA, 19 nt, Artificial Sequence
  Description of Artificial Sequence: Synthetic oligonucleotide
uuggcggccauauuccagu

SEQ ID NO: 1713172 - RNA, 19 nt, Artificial Sequence
  Description of Artificial Sequence: Synthetic oligonucleotide
acaugaccuuacaaacucc

SEQ ID NO: 1713173 - RNA, 19 nt, Artificial Sequence
  Description of Artificial Sequence: Synthetic oligonucleotide
cggauuguagcgaauaugc

SEQ ID NO: 1713174 - RNA, 19 nt, Artificial Sequence
  Description of Artificial Sequence: Synthetic oligonucleotide
guagggaaaagaugucuca

SEQ ID NO: 1713175 - RNA, 19 nt, Artificial Sequence
  Description of Artificial Sequence: Synthetic oligonucleotide
gauaagaccagacguuccu

SEQ ID NO: 1713176 - RNA, 19 nt, Artificial Sequence
  Description of Artificial Sequence: Synthetic oligonucleotide
agcaucgggcugcagagcu

SEQ ID NO: 1713177 - RNA, 19 nt, Artificial Sequence
  Description of Artificial Sequence: Synthetic oligonucleotide
aggcaucgaugacagcucg

SEQ ID NO: 1713178 - RNA, 19 nt, Artificial Sequence
  Description of Artificial Sequence: Synthetic oligonucleotide
ucccgugggagccccaugc

SEQ ID NO: 1713179 - RNA, 19 nt, Artificial Sequence
  Description of Artificial Sequence: Synthetic oligonucleotide
gaagcacaugaccuuacaa

SEQ ID NO: 1713180 - RNA, 19 nt, Artificial Sequence
  Description of Artificial Sequence: Synthetic oligonucleotide
aggacuagccagugcucac

SEQ ID NO: 1713181 - RNA, 19 nt, Artificial Sequence
  Description of Artificial Sequence: Synthetic oligonucleotide
augaauuuccggacaguag

SEQ ID NO: 1713182 - RNA, 19 nt, Artificial Sequence
  Description of Artificial Sequence: Synthetic oligonucleotide
augggccgacacuaacacc

SEQ ID NO: 1713183 - RNA, 19 nt, Artificial Sequence
  Description of Artificial Sequence: Synthetic oligonucleotide
gcgaauaugcugguguucg

SEQ ID NO: 1713184 - RNA, 19 nt, Artificial Sequence
  Description of Artificial Sequence: Synthetic oligonucleotide
uucaugauggaggcuagau

SEQ ID NO: 1713185 - RNA, 19 nt, Artificial Sequence
  Description of Artificial Sequence: Synthetic oligonucleotide
agggaaaagaugucucaaa

SEQ ID NO: 1713186 - RNA, 19 nt, Artificial Sequence
  Description of Artificial Sequence: Synthetic oligonucleotide
ggggauaguaaugagcaug

SEQ ID NO: 1713187 - RNA, 19 nt, Artificial Sequence
  Description of Artificial Sequence: Synthetic oligonucleotide
caauaauguaccucaggaa

SEQ ID NO: 1713188 - RNA, 19 nt, Artificial Sequence
  Description of Artificial Sequence: Synthetic oligonucleotide
augcaguuuuauugauguc

SEQ ID NO: 1713189 - RNA, 19 nt, Artificial Sequence
  Description of Artificial Sequence: Synthetic oligonucleotide
gauacugggcacccagauc

SEQ ID NO: 1713190 - RNA, 19 nt, Artificial Sequence
  Description of Artificial Sequence: Synthetic oligonucleotide
ccguuuugcgacaugagac

SEQ ID NO: 1713191 - RNA, 19 nt, Artificial Sequence
  Description of Artificial Sequence: Synthetic oligonucleotide
caagcauuucauagccaac

SEQ ID NO: 1713192 - RNA, 19 nt, Artificial Sequence
  Description of Artificial Sequence: Synthetic oligonucleotide
ucaugcgaugggccgacac

SEQ ID NO: 1713193 - RNA, 19 nt, Artificial Sequence
  Description of Artificial Sequence: Synthetic oligonucleotide
gggcaagcauuucauagcc

SEQ ID NO: 1713194 - RNA, 19 nt, Artificial Sequence
  Description of Artificial Sequence: Synthetic oligonucleotide
uggcguccgccucugacgc

SEQ ID NO: 1713195 - RNA, 19 nt, Artificial Sequence
  Description of Artificial Sequence: Synthetic oligonucleotide
cuuggcggccauauuccag

SEQ ID NO: 1713196 - RNA, 19 nt, Artificial Sequence
  Description of Artificial Sequence: Synthetic oligonucleotide
gaugacagcucggaucuca

SEQ ID NO: 1713197 - RNA, 19 nt, Artificial Sequence
  Description of Artificial Sequence: Synthetic oligonucleotide
aaggucgcugccauggcgu

SEQ ID NO: 1713198 - RNA, 19 nt, Artificial Sequence
  Description of Artificial Sequence: Synthetic oligonucleotide
gagugggucauagcggggc

SEQ ID NO: 1713199 - RNA, 19 nt, Artificial Sequence
  Description of Artificial Sequence: Synthetic oligonucleotide
uaguguggauucaccuccc

SEQ ID NO: 1713200 - RNA, 19 nt, Artificial Sequence
  Description of Artificial Sequence: Synthetic oligonucleotide
acguacaugccggcggggc

SEQ ID NO: 1713201 - RNA, 19 nt, Artificial Sequence
  Description of Artificial Sequence: Synthetic oligonucleotide
cugaggaguucuuggcggc

SEQ ID NO: 1713202 - RNA, 19 nt, Artificial Sequence
  Description of Artificial Sequence: Synthetic oligonucleotide
agcgaauaugcugguguuc

SEQ ID NO: 1713203 - RNA, 19 nt, Artificial Sequence
  Description of Artificial Sequence: Synthetic oligonucleotide
gaauuuccggacaguagca

SEQ ID NO: 1713204 - RNA, 19 nt, Artificial Sequence
  Description of Artificial Sequence: Synthetic oligonucleotide
gucauaggcggcuccaguc

SEQ ID NO: 1713205 - RNA, 19 nt, Artificial Sequence
  Description of Artificial Sequence: Synthetic oligonucleotide
gucauaguguggauucacc

SEQ ID NO: 1713206 - RNA, 19 nt, Artificial Sequence
  Description of Artificial Sequence: Synthetic oligonucleotide
cuggauccggagcaucggg

SEQ ID NO: 1713207 - RNA, 19 nt, Artificial Sequence
  Description of Artificial Sequence: Synthetic oligonucleotide
aggguugagugggucauag

SEQ ID NO: 1713208 - RNA, 19 nt, Artificial Sequence
  Description of Artificial Sequence: Synthetic oligonucleotide
ggugcugucauagugugga

SEQ ID NO: 1713209 - RNA, 19 nt, Artificial Sequence
  Description of Artificial Sequence: Synthetic oligonucleotide
agaugcaguuuuauugaug

SEQ ID NO: 1713210 - RNA, 19 nt, Artificial Sequence
  Description of Artificial Sequence: Synthetic oligonucleotide
agcagagcgcaggaguggg

SEQ ID NO: 1713211 - RNA, 19 nt, Artificial Sequence
  Description of Artificial Sequence: Synthetic oligonucleotide
uuaaucccgugggagcccc

SEQ ID NO: 1713212 - RNA, 19 nt, Artificial Sequence
  Description of Artificial Sequence: Synthetic oligonucleotide
ccuggagcggauuguagcg

SEQ ID NO: 1713213 - RNA, 19 nt, Artificial Sequence
  Description of Artificial Sequence: Synthetic oligonucleotide
ggucaauagcuucuucaug

SEQ ID NO: 1713214 - RNA, 19 nt, Artificial Sequence
  Description of Artificial Sequence: Synthetic oligonucleotide
gucacauccgaccagggau

SEQ ID NO: 1713215 - RNA, 19 nt, Artificial Sequence
  Description of Artificial Sequence: Synthetic oligonucleotide
ugucuggaaaggccacacu

SEQ ID NO: 1713216 - RNA, 19 nt, Artificial Sequence
  Description of Artificial Sequence: Synthetic oligonucleotide
ucugacgccugcuggcgcu

SEQ ID NO: 1713217 - RNA, 19 nt, Artificial Sequence
  Description of Artificial Sequence: Synthetic oligonucleotide
cacaccagcccaaauucca

SEQ ID NO: 1713218 - RNA, 19 nt, Artificial Sequence
  Description of Artificial Sequence: Synthetic oligonucleotide
gcuccagucuuuaaucccg

SEQ ID NO: 1713219 - RNA, 19 nt, Artificial Sequence
  Description of Artificial Sequence: Synthetic oligonucleotide
gaucgcucuucacgcuggg

SEQ ID NO: 1713220 - RNA, 19 nt, Artificial Sequence
  Description of Artificial Sequence: Synthetic oligonucleotide
ucuuggcggccauauucca

SEQ ID NO: 1713221 - RNA, 19 nt, Artificial Sequence
  Description of Artificial Sequence: Synthetic oligonucleotide
cuccccauuggcucgugug

SEQ ID NO: 1713222 - RNA, 19 nt, Artificial Sequence
  Description of Artificial Sequence: Synthetic oligonucleotide
cauggaguagggaaaagau

SEQ ID NO: 1713223 - RNA, 19 nt, Artificial Sequence
  Description of Artificial Sequence: Synthetic oligonucleotide
agaccagacguuccuuccu

SEQ ID NO: 1713224 - RNA, 19 nt, Artificial Sequence
  Description of Artificial Sequence: Synthetic oligonucleotide
acacuaacacccacucauc

SEQ ID NO: 1713225 - RNA, 19 nt, Artificial Sequence
  Description of Artificial Sequence: Synthetic oligonucleotide
gauccggagcaucgggcug

SEQ ID NO: 1713226 - RNA, 19 nt, Artificial Sequence
  Description of Artificial Sequence: Synthetic oligonucleotide
ucggaucucagggacugac

SEQ ID NO: 1713227 - RNA, 19 nt, Artificial Sequence
  Description of Artificial Sequence: Synthetic oligonucleotide
guuuugcgacaugagacca

SEQ ID NO: 1713228 - RNA, 19 nt, Artificial Sequence
  Description of Artificial Sequence: Synthetic oligonucleotide
gacguuccuuccugaggag

SEQ ID NO: 1713229 - RNA, 19 nt, Artificial Sequence
  Description of Artificial Sequence: Synthetic oligonucleotide
agcgcccuuagucucucug

SEQ ID NO: 1713230 - RNA, 19 nt, Artificial Sequence
  Description of Artificial Sequence: Synthetic oligonucleotide
cuccguuuugcgacaugag

SEQ ID NO: 1713231 - RNA, 19 nt, Artificial Sequence
  Description of Artificial Sequence: Synthetic oligonucleotide
cuagaucaucacguucagc

SEQ ID NO: 1713232 - RNA, 19 nt, Artificial Sequence
  Description of Artificial Sequence: Synthetic oligonucleotide
cucugcuaucaucacgguc

SEQ ID NO: 1713233 - RNA, 19 nt, Artificial Sequence
  Description of Artificial Sequence: Synthetic oligonucleotide
agcggauuguagcgaauau

SEQ ID NO: 1713234 - RNA, 19 nt, Artificial Sequence
  Description of Artificial Sequence: Synthetic oligonucleotide
gcaguagugucuggaaagg

SEQ ID NO: 1713235 - RNA, 19 nt, Artificial Sequence
  Description of Artificial Sequence: Synthetic oligonucleotide
gaaggugcugucauagugu

SEQ ID NO: 1713236 - RNA, 19 nt, Artificial Sequence
  Description of Artificial Sequence: Synthetic oligonucleotide
cucacuagauaagaccaga

SEQ ID NO: 1713237 - RNA, 19 nt, Artificial Sequence
  Description of Artificial Sequence: Synthetic oligonucleotide
caugaccuuacaaacuccu

SEQ ID NO: 1713238 - RNA, 19 nt, Artificial Sequence
  Description of Artificial Sequence: Synthetic oligonucleotide
auaguucugcugggaucgc

SEQ ID NO: 1713239 - RNA, 19 nt, Artificial Sequence
  Description of Artificial Sequence: Synthetic oligonucleotide
caguagugucuggaaaggc

SEQ ID NO: 1713240 - RNA, 19 nt, Artificial Sequence
  Description of Artificial Sequence: Synthetic oligonucleotide
caggcaucgaugacagcuc

SEQ ID NO: 1713241 - RNA, 19 nt, Artificial Sequence
  Description of Artificial Sequence: Synthetic oligonucleotide
cauuggcucguguggcccc

SEQ ID NO: 1713242 - RNA, 19 nt, Artificial Sequence
  Description of Artificial Sequence: Synthetic oligonucleotide
augucucaaauagguuguc

SEQ ID NO: 1713243 - RNA, 19 nt, Artificial Sequence
  Description of Artificial Sequence: Synthetic oligonucleotide
cuagauaagaccagacguu

SEQ ID NO: 1713244 - RNA, 19 nt, Artificial Sequence
  Description of Artificial Sequence: Synthetic oligonucleotide
cguuuugcgacaugagacc

SEQ ID NO: 1713245 - RNA, 19 nt, Artificial Sequence
  Description of Artificial Sequence: Synthetic oligonucleotide
ucggugacugaagcccagg

SEQ ID NO: 1713246 - RNA, 19 nt, Artificial Sequence
  Description of Artificial Sequence: Synthetic oligonucleotide
uagcgaauaugcugguguu

SEQ ID NO: 1713247 - RNA, 19 nt, Artificial Sequence
  Description of Artificial Sequence: Synthetic oligonucleotide
cagcucggaucucagggac

SEQ ID NO: 1713248 - RNA, 19 nt, Artificial Sequence
  Description of Artificial Sequence: Synthetic oligonucleotide
uuguagcgaauaugcuggu

SEQ ID NO: 1713249 - RNA, 19 nt, Artificial Sequence
  Description of Artificial Sequence: Synthetic oligonucleotide
gaauaugcugguguucgcu

SEQ ID NO: 1713250 - RNA, 19 nt, Artificial Sequence
  Description of Artificial Sequence: Synthetic oligonucleotide
agugggucauagcggggca

SEQ ID NO: 1713251 - RNA, 19 nt, Artificial Sequence
  Description of Artificial Sequence: Synthetic oligonucleotide
cagaaggggaccaggacua

SEQ ID NO: 1713252 - RNA, 19 nt, Artificial Sequence
  Description of Artificial Sequence: Synthetic oligonucleotide
agccgacguacaugccggc

SEQ ID NO: 1713253 - RNA, 19 nt, Artificial Sequence
  Description of Artificial Sequence: Synthetic oligonucleotide
gccauauuccaguaacaga

SEQ ID NO: 1713254 - RNA, 19 nt, Artificial Sequence
  Description of Artificial Sequence: Synthetic oligonucleotide
ggggaccaggacuagccag

SEQ ID NO: 1713255 - RNA, 19 nt, Artificial Sequence
  Description of Artificial Sequence: Synthetic oligonucleotide
agauccucggugacugaag

SEQ ID NO: 1713256 - RNA, 19 nt, Artificial Sequence
  Description of Artificial Sequence: Synthetic oligonucleotide
uagcggggcacugucuuca

SEQ ID NO: 1713257 - RNA, 19 nt, Artificial Sequence
  Description of Artificial Sequence: Synthetic oligonucleotide
guacaugccggcggggcag

SEQ ID NO: 1713258 - RNA, 19 nt, Artificial Sequence
  Description of Artificial Sequence: Synthetic oligonucleotide
cuucacgcugggcaauauc

SEQ ID NO: 1713259 - RNA, 19 nt, Artificial Sequence
  Description of Artificial Sequence: Synthetic oligonucleotide
gaccaggacuagccagugc

SEQ ID NO: 1713260 - RNA, 19 nt, Artificial Sequence
  Description of Artificial Sequence: Synthetic oligonucleotide
uggcagugucacauccgac

SEQ ID NO: 1713261 - RNA, 19 nt, Artificial Sequence
  Description of Artificial Sequence: Synthetic oligonucleotide
ugcugucauaguguggauu

SEQ ID NO: 1713262 - RNA, 19 nt, Artificial Sequence
  Description of Artificial Sequence: Synthetic oligonucleotide
cacauccgaccagggaugg

SEQ ID NO: 1713263 - RNA, 19 nt, Artificial Sequence
  Description of Artificial Sequence: Synthetic oligonucleotide
ugggucauagcggggcacu

SEQ ID NO: 1713264 - RNA, 19 nt, Artificial Sequence
  Description of Artificial Sequence: Synthetic oligonucleotide
auuggcucguguggccccg

SEQ ID NO: 1713265 - RNA, 19 nt, Artificial Sequence
  Description of Artificial Sequence: Synthetic oligonucleotide
cacggucaagcaacagcug

SEQ ID NO: 1713266 - RNA, 19 nt, Artificial Sequence
  Description of Artificial Sequence: Synthetic oligonucleotide
cucggugacugaagcccag

SEQ ID NO: 1713267 - RNA, 19 nt, Artificial Sequence
  Description of Artificial Sequence: Synthetic oligonucleotide
gcagugucacauccgacca

SEQ ID NO: 1713268 - RNA, 19 nt, Artificial Sequence
  Description of Artificial Sequence: Synthetic oligonucleotide
auagguugucauacuuggu

SEQ ID NO: 1713269 - RNA, 19 nt, Artificial Sequence
  Description of Artificial Sequence: Synthetic oligonucleotide
augacagcucggaucucag

SEQ ID NO: 1713270 - RNA, 19 nt, Artificial Sequence
  Description of Artificial Sequence: Synthetic oligonucleotide
guguucgcucgcccggaag

SEQ ID NO: 1713271 - RNA, 19 nt, Artificial Sequence
  Description of Artificial Sequence: Synthetic oligonucleotide
gacguacaugccggcgggg

SEQ ID NO: 1713272 - RNA, 19 nt, Artificial Sequence
  Description of Artificial Sequence: Synthetic oligonucleotide
aggcaauaauguaccucag

SEQ ID NO: 1713273 - RNA, 19 nt, Artificial Sequence
  Description of Artificial Sequence: Synthetic oligonucleotide
cuucaugcgaugggccgac

SEQ ID NO: 1713274 - RNA, 19 nt, Artificial Sequence
  Description of Artificial Sequence: Synthetic oligonucleotide
gacuagccagugcucacua

SEQ ID NO: 1713275 - RNA, 19 nt, Artificial Sequence
  Description of Artificial Sequence: Synthetic oligonucleotide
ccgacguacaugccggcgg

SEQ ID NO: 1713276 - RNA, 19 nt, Artificial Sequence
  Description of Artificial Sequence: Synthetic oligonucleotide
uaguucugcugggaucgcu

SEQ ID NO: 1713277 - RNA, 19 nt, Artificial Sequence
  Description of Artificial Sequence: Synthetic oligonucleotide
ggaucgcucuucacgcugg

SEQ ID NO: 1713278 - RNA, 19 nt, Artificial Sequence
  Description of Artificial Sequence: Synthetic oligonucleotide
cagugcucacuagauaaga

SEQ ID NO: 1713279 - RNA, 19 nt, Artificial Sequence
  Description of Artificial Sequence: Synthetic oligonucleotide
uggcucguguggccccggg

SEQ ID NO: 1713280 - RNA, 19 nt, Artificial Sequence
  Description of Artificial Sequence: Synthetic oligonucleotide
gcggauuguagcgaauaug

SEQ ID NO: 1713281 - RNA, 19 nt, Artificial Sequence
  Description of Artificial Sequence: Synthetic oligonucleotide
caggagugaggucccgcug

SEQ ID NO: 1713282 - RNA, 19 nt, Artificial Sequence
  Description of Artificial Sequence: Synthetic oligonucleotide
augcgaugggccgacacua

SEQ ID NO: 1713283 - RNA, 19 nt, Artificial Sequence
  Description of Artificial Sequence: Synthetic oligonucleotide
gguugucauacuuggucaa

SEQ ID NO: 1713284 - RNA, 19 nt, Artificial Sequence
  Description of Artificial Sequence: Synthetic oligonucleotide
cucagguagccgacguaca

SEQ ID NO: 1713285 - RNA, 19 nt, Artificial Sequence
  Description of Artificial Sequence: Synthetic oligonucleotide
gcggcuccagucuuuaauc

SEQ ID NO: 1713286 - RNA, 19 nt, Artificial Sequence
  Description of Artificial Sequence: Synthetic oligonucleotide
aucuccguuuugcgacaug

SEQ ID NO: 1713287 - RNA, 19 nt, Artificial Sequence
  Description of Artificial Sequence: Synthetic oligonucleotide
gugauaguucugcugggau

SEQ ID NO: 1713288 - RNA, 19 nt, Artificial Sequence
  Description of Artificial Sequence: Synthetic oligonucleotide
gagcggauuguagcgaaua

SEQ ID NO: 1713289 - RNA, 19 nt, Artificial Sequence
  Description of Artificial Sequence: Synthetic oligonucleotide
gcucacuagauaagaccag

SEQ ID NO: 1713290 - RNA, 19 nt, Artificial Sequence
  Description of Artificial Sequence: Synthetic oligonucleotide
gcucguguggccccgggac

SEQ ID NO: 1713291 - RNA, 19 nt, Artificial Sequence
  Description of Artificial Sequence: Synthetic oligonucleotide
acucgccuugaaguuaaau

SEQ ID NO: 1713292 - RNA, 19 nt, Artificial Sequence
  Description of Artificial Sequence: Synthetic oligonucleotide
cagcaguagugucuggaaa

SEQ ID NO: 1713293 - RNA, 19 nt, Artificial Sequence
  Description of Artificial Sequence: Synthetic oligonucleotide
gggauaguaaugagcaugu

SEQ ID NO: 1713294 - RNA, 19 nt, Artificial Sequence
  Description of Artificial Sequence: Synthetic oligonucleotide
gaccagggauggaagcaca

SEQ ID NO: 1713295 - RNA, 19 nt, Artificial Sequence
  Description of Artificial Sequence: Synthetic oligonucleotide
ggguuagaacagcccauca

SEQ ID NO: 1713296 - RNA, 19 nt, Artificial Sequence
  Description of Artificial Sequence: Synthetic oligonucleotide
gguuagaacagcccaucau

SEQ ID NO: 1713297 - RNA, 19 nt, Artificial Sequence
  Description of Artificial Sequence: Synthetic oligonucleotide
cacccagauccucggugac

SEQ ID NO: 1713298 - RNA, 19 nt, Artificial Sequence
  Description of Artificial Sequence: Synthetic oligonucleotide
caucacguucagcaggggu

SEQ ID NO: 1713299 - RNA, 19 nt, Artificial Sequence
  Description of Artificial Sequence: Synthetic oligonucleotide
ugguguucgcucgcccgga

SEQ ID NO: 1713300 - RNA, 19 nt, Artificial Sequence
  Description of Artificial Sequence: Synthetic oligonucleotide
cauugucaaacaggaaggu

SEQ ID NO: 1713301 - RNA, 19 nt, Artificial Sequence
  Description of Artificial Sequence: Synthetic oligonucleotide
cccaugccagcccauggag

SEQ ID NO: 1713302 - RNA, 19 nt, Artificial Sequence
  Description of Artificial Sequence: Synthetic oligonucleotide
uaaucccgugggagcccca

SEQ ID NO: 1713303 - RNA, 19 nt, Artificial Sequence
  Description of Artificial Sequence: Synthetic oligonucleotide
gcgcccuuagucucucugc

SEQ ID NO: 1713304 - RNA, 19 nt, Artificial Sequence
  Description of Artificial Sequence: Synthetic oligonucleotide
ggaaggucgcugccauggc

SEQ ID NO: 1713305 - RNA, 19 nt, Artificial Sequence
  Description of Artificial Sequence: Synthetic oligonucleotide
agcucagguagccgacgua

SEQ ID NO: 1713306 - RNA, 19 nt, Artificial Sequence
  Description of Artificial Sequence: Synthetic oligonucleotide
uacaugccggcggggcagc

SEQ ID NO: 1713307 - RNA, 19 nt, Artificial Sequence
  Description of Artificial Sequence: Synthetic oligonucleotide
gaagcgcccuuagucucuc

SEQ ID NO: 1713308 - RNA, 19 nt, Artificial Sequence
  Description of Artificial Sequence: Synthetic oligonucleotide
cccaaggauacugggcacc

SEQ ID NO: 1713309 - RNA, 19 nt, Artificial Sequence
  Description of Artificial Sequence: Synthetic oligonucleotide
caugcgaugggccgacacu

SEQ ID NO: 1713310 - RNA, 19 nt, Artificial Sequence
  Description of Artificial Sequence: Synthetic oligonucleotide
gcagcaguagugucuggaa

SEQ ID NO: 1713311 - RNA, 19 nt, Artificial Sequence
  Description of Artificial Sequence: Synthetic oligonucleotide
aagcgcccuuagucucucu

SEQ ID NO: 1713312 - RNA, 19 nt, Artificial Sequence
  Description of Artificial Sequence: Synthetic oligonucleotide
cccaaauuccaggucccag

SEQ ID NO: 1713313 - RNA, 19 nt, Artificial Sequence
  Description of Artificial Sequence: Synthetic oligonucleotide
ggguugagugggucauagc

SEQ ID NO: 1713314 - RNA, 19 nt, Artificial Sequence
  Description of Artificial Sequence: Synthetic oligonucleotide
guggucauaggcggcucca

SEQ ID NO: 1713315 - RNA, 19 nt, Artificial Sequence
  Description of Artificial Sequence: Synthetic oligonucleotide
gggguuagaacagcccauc

SEQ ID NO: 1713316 - RNA, 19 nt, Artificial Sequence
  Description of Artificial Sequence: Synthetic oligonucleotide
aucccgugggagccccaug

SEQ ID NO: 1713317 - RNA, 19 nt, Artificial Sequence
  Description of Artificial Sequence: Synthetic oligonucleotide
ccaggcaucgaugacagcu

SEQ ID NO: 1713318 - RNA, 19 nt, Artificial Sequence
  Description of Artificial Sequence: Synthetic oligonucleotide
uuggcucguguggccccgg

SEQ ID NO: 1713319 - RNA, 19 nt, Artificial Sequence
  Description of Artificial Sequence: Synthetic oligonucleotide
ccgcuucaugcgaugggcc

SEQ ID NO: 1713320 - RNA, 19 nt, Artificial Sequence
  Description of Artificial Sequence: Synthetic oligonucleotide
uggcggccauauuccagua

SEQ ID NO: 1713321 - RNA, 19 nt, Artificial Sequence
  Description of Artificial Sequence: Synthetic oligonucleotide
cuggagcggauuguagcga

SEQ ID NO: 1713322 - RNA, 19 nt, Artificial Sequence
  Description of Artificial Sequence: Synthetic oligonucleotide
cacugcccagaaggggacc

SEQ ID NO: 1713323 - RNA, 19 nt, Artificial Sequence
  Description of Artificial Sequence: Synthetic oligonucleotide
cagauccucggugacugaa

SEQ ID NO: 1713324 - RNA, 19 nt, Artificial Sequence
  Description of Artificial Sequence: Synthetic oligonucleotide
agccccaugccagcccaug

SEQ ID NO: 1713325 - RNA, 19 nt, Artificial Sequence
  Description of Artificial Sequence: Synthetic oligonucleotide
gccgacguacaugccggcg

SEQ ID NO: 1713326 - RNA, 19 nt, Artificial Sequence
  Description of Artificial Sequence: Synthetic oligonucleotide
cugccauggcguccgccuc

SEQ ID NO: 1713327 - RNA, 19 nt, Artificial Sequence
  Description of Artificial Sequence: Synthetic oligonucleotide
ggauccggagcaucgggcu

SEQ ID NO: 1713328 - RNA, 19 nt, Artificial Sequence
  Description of Artificial Sequence: Synthetic oligonucleotide
ccuggauccggagcaucgg

SEQ ID NO: 1713329 - RNA, 19 nt, Artificial Sequence
  Description of Artificial Sequence: Synthetic oligonucleotide
cauagccaaccaugaauuu

SEQ ID NO: 1713330 - RNA, 19 nt, Artificial Sequence
  Description of Artificial Sequence: Synthetic oligonucleotide
gcgaugggccgacacuaac

SEQ ID NO: 1713331 - RNA, 19 nt, Artificial Sequence
  Description of Artificial Sequence: Synthetic oligonucleotide
cgacguacaugccggcggg

SEQ ID NO: 1713332 - RNA, 19 nt, Artificial Sequence
  Description of Artificial Sequence: Synthetic oligonucleotide
ccucugacgccugcuggcg

SEQ ID NO: 1713333 - RNA, 19 nt, Artificial Sequence
  Description of Artificial Sequence: Synthetic oligonucleotide
cucgcccggaaggucgcug

SEQ ID NO: 1713334 - RNA, 19 nt, Artificial Sequence
  Description of Artificial Sequence: Synthetic oligonucleotide
ccagggauggaagcacaug

SEQ ID NO: 1713335 - RNA, 19 nt, Artificial Sequence
  Description of Artificial Sequence: Synthetic oligonucleotide
uccggagcaucgggcugca

SEQ ID NO: 1713336 - RNA, 19 nt, Artificial Sequence
  Description of Artificial Sequence: Synthetic oligonucleotide
gcuucaugcgaugggccga

SEQ ID NO: 1713337 - RNA, 19 nt, Artificial Sequence
  Description of Artificial Sequence: Synthetic oligonucleotide
acucauccuggagcggauu

SEQ ID NO: 1713338 - RNA, 19 nt, Artificial Sequence
  Description of Artificial Sequence: Synthetic oligonucleotide
cggacaguagcagagcgca

SEQ ID NO: 1713339 - RNA, 19 nt, Artificial Sequence
  Description of Artificial Sequence: Synthetic oligonucleotide
cucaggaagcgcccuuagu

SEQ ID NO: 1713340 - RNA, 19 nt, Artificial Sequence
  Description of Artificial Sequence: Synthetic oligonucleotide
ggucauaggcggcuccagu

SEQ ID NO: 1713341 - RNA, 19 nt, Artificial Sequence
  Description of Artificial Sequence: Synthetic oligonucleotide
aucgggcugcagagcuggg

SEQ ID NO: 1713342 - RNA, 19 nt, Artificial Sequence
  Description of Artificial Sequence: Synthetic oligonucleotide
ggcggcuccagucuuuaau

SEQ ID NO: 1713343 - RNA, 19 nt, Artificial Sequence
  Description of Artificial Sequence: Synthetic oligonucleotide
cgaugggccgacacuaaca

SEQ ID NO: 1713344 - RNA, 19 nt, Artificial Sequence
  Description of Artificial Sequence: Synthetic oligonucleotide
auaggcggcuccagucuuu

SEQ ID NO: 1713345 - RNA, 19 nt, Artificial Sequence
  Description of Artificial Sequence: Synthetic oligonucleotide
gccaguggucauaggcggc

SEQ ID NO: 1713346 - RNA, 19 nt, Artificial Sequence
  Description of Artificial Sequence: Synthetic oligonucleotide
ccugccucaguaaaacaau

SEQ ID NO: 1713347 - RNA, 19 nt, Artificial Sequence
  Description of Artificial Sequence: Synthetic oligonucleotide
uggccgccucugcucgaaa

SEQ ID NO: 1713348 - RNA, 19 nt, Artificial Sequence
  Description of Artificial Sequence: Synthetic oligonucleotide
cugacgccugcuggcgcug

SEQ ID NO: 1713349 - RNA, 19 nt, Artificial Sequence
  Description of Artificial Sequence: Synthetic oligonucleotide
caucgaugacagcucggau

SEQ ID NO: 1713350 - RNA, 19 nt, Artificial Sequence
  Description of Artificial Sequence: Synthetic oligonucleotide
ggucgcugccauggcgucc

SEQ ID NO: 1713351 - RNA, 19 nt, Artificial Sequence
  Description of Artificial Sequence: Synthetic oligonucleotide
cagcucagguagccgacgu

SEQ ID NO: 1713352 - RNA, 19 nt, Artificial Sequence
  Description of Artificial Sequence: Synthetic oligonucleotide
gcuggccaaaccuggcagu

SEQ ID NO: 1713353 - RNA, 19 nt, Artificial Sequence
  Description of Artificial Sequence: Synthetic oligonucleotide
ggcggccauauuccaguaa

SEQ ID NO: 1713354 - RNA, 19 nt, Artificial Sequence
  Description of Artificial Sequence: Synthetic oligonucleotide
cgaccagggauggaagcac

SEQ ID NO: 1713355 - RNA, 19 nt, Artificial Sequence
  Description of Artificial Sequence: Synthetic oligonucleotide
ucgcugccauggcguccgc

SEQ ID NO: 1713356 - RNA, 19 nt, Artificial Sequence
  Description of Artificial Sequence: Synthetic oligonucleotide
aggcggcuccagucuuuaa

SEQ ID NO: 1713357 - RNA, 19 nt, Artificial Sequence
  Description of Artificial Sequence: Synthetic oligonucleotide
gggaccaggacuagccagu

SEQ ID NO: 1713358 - RNA, 19 nt, Artificial Sequence
  Description of Artificial Sequence: Synthetic oligonucleotide
guucgcucgcccggaaggu

SEQ ID NO: 1713359 - RNA, 19 nt, Artificial Sequence
  Description of Artificial Sequence: Synthetic oligonucleotide
ggccgccucugcucgaaaa

SEQ ID NO: 1713360 - RNA, 19 nt, Artificial Sequence
  Description of Artificial Sequence: Synthetic oligonucleotide
ccgaccagggauggaagca

SEQ ID NO: 1713361 - RNA, 19 nt, Artificial Sequence
  Description of Artificial Sequence: Synthetic oligonucleotide
ggacuagccagugcucacu

SEQ ID NO: 1713362 - RNA, 19 nt, Artificial Sequence
  Description of Artificial Sequence: Synthetic oligonucleotide
ggcucguguggccccggga

SEQ ID NO: 1713363 - RNA, 19 nt, Artificial Sequence
  Description of Artificial Sequence: Synthetic oligonucleotide
cuugccagggccgcuucau

SEQ ID NO: 1713364 - RNA, 19 nt, Artificial Sequence
  Description of Artificial Sequence: Synthetic oligonucleotide
gccgacacuaacacccacu

SEQ ID NO: 1713365 - RNA, 19 nt, Artificial Sequence
  Description of Artificial Sequence: Synthetic oligonucleotide
cccgcugagccugggcaag

SEQ ID NO: 1713366 - RNA, 19 nt, Artificial Sequence
  Description of Artificial Sequence: Synthetic oligonucleotide
gguguucgcucgcccggaa

SEQ ID NO: 1713367 - RNA, 19 nt, Artificial Sequence
  Description of Artificial Sequence: Synthetic oligonucleotide
cacucauccuggagcggau

SEQ ID NO: 1713368 - RNA, 19 nt, Artificial Sequence
  Description of Artificial Sequence: Synthetic oligonucleotide
ggaagcgcccuuagucucu

SEQ ID NO: 1713369 - RNA, 19 nt, Artificial Sequence
  Description of Artificial Sequence: Synthetic oligonucleotide
acaugccggcggggcagca

SEQ ID NO: 1713370 - RNA, 19 nt, Artificial Sequence
  Description of Artificial Sequence: Synthetic oligonucleotide
gccggcggggcagcaguag

SEQ ID NO: 1713371 - RNA, 19 nt, Artificial Sequence
  Description of Artificial Sequence: Synthetic oligonucleotide
cguacaugccggcggggca

SEQ ID NO: 1713372 - RNA, 19 nt, Artificial Sequence
  Description of Artificial Sequence: Synthetic oligonucleotide
ccggaaggucgcugccaug

SEQ ID NO: 1713373 - RNA, 19 nt, Artificial Sequence
  Description of Artificial Sequence: Synthetic oligonucleotide
cuggccgccucugcucgaa

SEQ ID NO: 1713374 - RNA, 19 nt, Artificial Sequence
  Description of Artificial Sequence: Synthetic oligonucleotide
gcucugcuaucaucacggu

SEQ ID NO: 1713375 - RNA, 19 nt, Artificial Sequence
  Description of Artificial Sequence: Synthetic oligonucleotide
caaacuccucuggccgccu

SEQ ID NO: 1713376 - RNA, 19 nt, Artificial Sequence
  Description of Artificial Sequence: Synthetic oligonucleotide
ccagauccucggugacuga

SEQ ID NO: 1713377 - RNA, 19 nt, Artificial Sequence
  Description of Artificial Sequence: Synthetic oligonucleotide
cgcucgcccggaaggucgc

SEQ ID NO: 1713378 - RNA, 19 nt, Artificial Sequence
  Description of Artificial Sequence: Synthetic oligonucleotide
caucuccguuuugcgacau

SEQ ID NO: 1713379 - RNA, 19 nt, Artificial Sequence
  Description of Artificial Sequence: Synthetic oligonucleotide
ccgcugagccugggcaagc

SEQ ID NO: 1713380 - RNA, 19 nt, Artificial Sequence
  Description of Artificial Sequence: Synthetic oligonucleotide
ccuugccagggccgcuuca

SEQ ID NO: 1713381 - RNA, 19 nt, Artificial Sequence
  Description of Artificial Sequence: Synthetic oligonucleotide
guccuugccagggccgcuu

SEQ ID NO: 1713382 - RNA, 19 nt, Artificial Sequence
  Description of Artificial Sequence: Synthetic oligonucleotide
ccgggacacagaggguuga

SEQ ID NO: 1713383 - RNA, 19 nt, Artificial Sequence
  Description of Artificial Sequence: Synthetic oligonucleotide
ggagcggauuguagcgaau

SEQ ID NO: 1713384 - RNA, 19 nt, Artificial Sequence
  Description of Artificial Sequence: Synthetic oligonucleotide
ccggagcaucgggcugcag

SEQ ID NO: 1713385 - RNA, 19 nt, Artificial Sequence
  Description of Artificial Sequence: Synthetic oligonucleotide
ccuccccauuggcucgugu

SEQ ID NO: 1713386 - RNA, 19 nt, Artificial Sequence
  Description of Artificial Sequence: Synthetic oligonucleotide
gccccgggacacagagggu

SEQ ID NO: 1713387 - RNA, 19 nt, Artificial Sequence
  Description of Artificial Sequence: Synthetic oligonucleotide
gcucgcccggaaggucgcu

SEQ ID NO: 1713388 - RNA, 19 nt, Artificial Sequence
  Description of Artificial Sequence: Synthetic oligonucleotide
uacauaugcaguuagaagg

SEQ ID NO: 1713389 - RNA, 19 nt, Artificial Sequence
  Description of Artificial Sequence: Synthetic oligonucleotide
aaaccuaggccacauauuc

SEQ ID NO: 1713390 - RNA, 19 nt, Artificial Sequence
  Description of Artificial Sequence: Synthetic oligonucleotide
ugaaaugauccucugaggc

SEQ ID NO: 1713391 - RNA, 19 nt, Artificial Sequence
  Description of Artificial Sequence: Synthetic oligonucleotide
agaagcaccgcacacacac

SEQ ID NO: 1713392 - RNA, 19 nt, Artificial Sequence
  Description of Artificial Sequence: Synthetic oligonucleotide
uuuaguauucacaguggcg

SEQ ID NO: 1713393 - RNA, 19 nt, Artificial Sequence
  Description of Artificial Sequence: Synthetic oligonucleotide
uaugcaguuagaagggugg

SEQ ID NO: 1713394 - RNA, 19 nt, Artificial Sequence
  Description of Artificial Sequence: Synthetic oligonucleotide
ucaucgacaucccagaggc

SEQ ID NO: 1713395 - RNA, 19 nt, Artificial Sequence
  Description of Artificial Sequence: Synthetic oligonucleotide
uuggguguuaacuugacug

SEQ ID NO: 1713396 - RNA, 19 nt, Artificial Sequence
  Description of Artificial Sequence: Synthetic oligonucleotide
auguuauugucguuauucc

SEQ ID NO: 1713397 - RNA, 19 nt, Artificial Sequence
  Description of Artificial Sequence: Synthetic oligonucleotide
uuaguauucacaguggcga

SEQ ID NO: 1713398 - RNA, 19 nt, Artificial Sequence
  Description of Artificial Sequence: Synthetic oligonucleotide
agauauuaauguucucccc

SEQ ID NO: 1713399 - RNA, 19 nt, Artificial Sequence
  Description of Artificial Sequence: Synthetic oligonucleotide
ucguggcuaaaacugaggg

SEQ ID NO: 1713400 - RNA, 19 nt, Artificial Sequence
  Description of Artificial Sequence: Synthetic oligonucleotide
gagaauguugauacaaccg

SEQ ID NO: 1713401 - RNA, 19 nt, Artificial Sequence
  Description of Artificial Sequence: Synthetic oligonucleotide
agaauguugauacaaccgu

SEQ ID NO: 1713402 - RNA, 19 nt, Artificial Sequence
  Description of Artificial Sequence: Synthetic oligonucleotide
uaacucaucgacaucccag

SEQ ID NO: 1713403 - RNA, 19 nt, Artificial Sequence
  Description of Artificial Sequence: Synthetic oligonucleotide
aaucacugaaacccaacca

SEQ ID NO: 1713404 - RNA, 19 nt, Artificial Sequence
  Description of Artificial Sequence: Synthetic oligonucleotide
ugucgaaggaccccgaggc

SEQ ID NO: 1713405 - RNA, 19 nt, Artificial Sequence
  Description of Artificial Sequence: Synthetic oligonucleotide
uuauugucguuauuccagg

SEQ ID NO: 1713406 - RNA, 19 nt, Artificial Sequence
  Description of Artificial Sequence: Synthetic oligonucleotide
acauauucuaguggcagcc

SEQ ID NO: 1713407 - RNA, 19 nt, Artificial Sequence
  Description of Artificial Sequence: Synthetic oligonucleotide
agagaagcaccgcacacac

SEQ ID NO: 1713408 - RNA, 19 nt, Artificial Sequence
  Description of Artificial Sequence: Synthetic oligonucleotide
gauacaaccguugccauug

SEQ ID NO: 1713409 - RNA, 19 nt, Artificial Sequence
  Description of Artificial Sequence: Synthetic oligonucleotide
ugugucuuggcaucgauaa

SEQ ID NO: 1713410 - RNA, 19 nt, Artificial Sequence
  Description of Artificial Sequence: Synthetic oligonucleotide
aaaugauccucugaggcug

SEQ ID NO: 1713411 - RNA, 19 nt, Artificial Sequence
  Description of Artificial Sequence: Synthetic oligonucleotide
aauguucuccccuuuagua

SEQ ID NO: 1713412 - RNA, 19 nt, Artificial Sequence
  Description of Artificial Sequence: Synthetic oligonucleotide
guuauugucguuauuccag

SEQ ID NO: 1713413 - RNA, 19 nt, Artificial Sequence
  Description of Artificial Sequence: Synthetic oligonucleotide
uuuaucuccagaugcggug

SEQ ID NO: 1713414 - RNA, 19 nt, Artificial Sequence
  Description of Artificial Sequence: Synthetic oligonucleotide
cuuuguaguccucacgucc

SEQ ID NO: 1713415 - RNA, 19 nt, Artificial Sequence
  Description of Artificial Sequence: Synthetic oligonucleotide
ugaauuucccucucaggag

SEQ ID NO: 1713416 - RNA, 19 nt, Artificial Sequence
  Description of Artificial Sequence: Synthetic oligonucleotide
uuuguaguccucacguccc

SEQ ID NO: 1713417 - RNA, 19 nt, Artificial Sequence
  Description of Artificial Sequence: Synthetic oligonucleotide
uucggaagcccaaacagcu

SEQ ID NO: 1713418 - RNA, 19 nt, Artificial Sequence
  Description of Artificial Sequence: Synthetic oligonucleotide
cauucggaagcccaaacag

SEQ ID NO: 1713419 - RNA, 19 nt, Artificial Sequence
  Description of Artificial Sequence: Synthetic oligonucleotide
uucaguucgggguagcuga

SEQ ID NO: 1713420 - RNA, 19 nt, Artificial Sequence
  Description of Artificial Sequence: Synthetic oligonucleotide
agucaugugaugguuacuc

SEQ ID NO: 1713421 - RNA, 19 nt, Artificial Sequence
  Description of Artificial Sequence: Synthetic oligonucleotide
ugcucuuccgcuuuggaac

SEQ ID NO: 1713422 - RNA, 19 nt, Artificial Sequence
  Description of Artificial Sequence: Synthetic oligonucleotide
aucgauaaaggugacaaca

SEQ ID NO: 1713423 - RNA, 19 nt, Artificial Sequence
  Description of Artificial Sequence: Synthetic oligonucleotide
augcgaaugguuuuaucuc

SEQ ID NO: 1713424 - RNA, 19 nt, Artificial Sequence
  Description of Artificial Sequence: Synthetic oligonucleotide
uguuauugucguuauucca

SEQ ID NO: 1713425 - RNA, 19 nt, Artificial Sequence
  Description of Artificial Sequence: Synthetic oligonucleotide
ugcgaaugguuuuaucucc

SEQ ID NO: 1713426 - RNA, 19 nt, Artificial Sequence
  Description of Artificial Sequence: Synthetic oligonucleotide
aacucaucgacaucccaga

SEQ ID NO: 1713427 - RNA, 19 nt, Artificial Sequence
  Description of Artificial Sequence: Synthetic oligonucleotide
gaugcgaaugguuuuaucu

SEQ ID NO: 1713428 - RNA, 19 nt, Artificial Sequence
  Description of Artificial Sequence: Synthetic oligonucleotide
uucgggguagcugagaaug

SEQ ID NO: 1713429 - RNA, 19 nt, Artificial Sequence
  Description of Artificial Sequence: Synthetic oligonucleotide
cacgccacggugaaggucg

SEQ ID NO: 1713430 - RNA, 19 nt, Artificial Sequence
  Description of Artificial Sequence: Synthetic oligonucleotide
gauauuaauguucuccccu

SEQ ID NO: 1713431 - RNA, 19 nt, Artificial Sequence
  Description of Artificial Sequence: Synthetic oligonucleotide
cuugcuguggccucggaac

SEQ ID NO: 1713432 - RNA, 19 nt, Artificial Sequence
  Description of Artificial Sequence: Synthetic oligonucleotide
ucauucggaagcccaaaca

SEQ ID NO: 1713433 - RNA, 19 nt, Artificial Sequence
  Description of Artificial Sequence: Synthetic oligonucleotide
uccaaccuagagaagcacc

SEQ ID NO: 1713434 - RNA, 19 nt, Artificial Sequence
  Description of Artificial Sequence: Synthetic oligonucleotide
ugcggugacaaagagguca

SEQ ID NO: 1713435 - RNA, 19 nt, Artificial Sequence
  Description of Artificial Sequence: Synthetic oligonucleotide
acauaugcaguuagaaggg

SEQ ID NO: 1713436 - RNA, 19 nt, Artificial Sequence
  Description of Artificial Sequence: Synthetic oligonucleotide
caugugaugguuacucuug

SEQ ID NO: 1713437 - RNA, 19 nt, Artificial Sequence
  Description of Artificial Sequence: Synthetic oligonucleotide
agagcugauccacacuauc

SEQ ID NO: 1713438 - RNA, 19 nt, Artificial Sequence
  Description of Artificial Sequence: Synthetic oligonucleotide
aacauguuauugucguuau

SEQ ID NO: 1713439 - RNA, 19 nt, Artificial Sequence
  Description of Artificial Sequence: Synthetic oligonucleotide
cagcauuuucccaucgugg

SEQ ID NO: 1713440 - RNA, 19 nt, Artificial Sequence
  Description of Artificial Sequence: Synthetic oligonucleotide
aucccgagcacguagcgag

SEQ ID NO: 1713441 - RNA, 19 nt, Artificial Sequence
  Description of Artificial Sequence: Synthetic oligonucleotide
guggcuaaaacugaggguc

SEQ ID NO: 1713442 - RNA, 19 nt, Artificial Sequence
  Description of Artificial Sequence: Synthetic oligonucleotide
guggcgaugcacuuuguag

SEQ ID NO: 1713443 - RNA, 19 nt, Artificial Sequence
  Description of Artificial Sequence: Synthetic oligonucleotide
aguuccagcuucccgacug

SEQ ID NO: 1713444 - RNA, 19 nt, Artificial Sequence
  Description of Artificial Sequence: Synthetic oligonucleotide
auucggaagcccaaacagc

SEQ ID NO: 1713445 - RNA, 19 nt, Artificial Sequence
  Description of Artificial Sequence: Synthetic oligonucleotide
uuuggaacggugugucuug

SEQ ID NO: 1713446 - RNA, 19 nt, Artificial Sequence
  Description of Artificial Sequence: Synthetic oligonucleotide
aggucggggacucacacug

SEQ ID NO: 1713447 - RNA, 19 nt, Artificial Sequence
  Description of Artificial Sequence: Synthetic oligonucleotide
ucgauaaaggugacaacau

SEQ ID NO: 1713448 - RNA, 19 nt, Artificial Sequence
  Description of Artificial Sequence: Synthetic oligonucleotide
augugaugguuacucuugg

SEQ ID NO: 1713449 - RNA, 19 nt, Artificial Sequence
  Description of Artificial Sequence: Synthetic oligonucleotide
caggcaaacgccagcagag

SEQ ID NO: 1713450 - RNA, 19 nt, Artificial Sequence
  Description of Artificial Sequence: Synthetic oligonucleotide
cucaucgacaucccagagg

SEQ ID NO: 1713451 - RNA, 19 nt, Artificial Sequence
  Description of Artificial Sequence: Synthetic oligonucleotide
caguccaaccuagagaagc

SEQ ID NO: 1713452 - RNA, 19 nt, Artificial Sequence
  Description of Artificial Sequence: Synthetic oligonucleotide
acaguggcgaugcacuuug

SEQ ID NO: 1713453 - RNA, 19 nt, Artificial Sequence
  Description of Artificial Sequence: Synthetic oligonucleotide
uccgcuuuggaacggugug

SEQ ID NO: 1713454 - RNA, 19 nt, Artificial Sequence
  Description of Artificial Sequence: Synthetic oligonucleotide
acaaccguugccauugguc

SEQ ID NO: 1713455 - RNA, 19 nt, Artificial Sequence
  Description of Artificial Sequence: Synthetic oligonucleotide
acugaaacccaaccagcug

SEQ ID NO: 1713456 - RNA, 19 nt, Artificial Sequence
  Description of Artificial Sequence: Synthetic oligonucleotide
ggagauuucauugaccuca

SEQ ID NO: 1713457 - RNA, 19 nt, Artificial Sequence
  Description of Artificial Sequence: Synthetic oligonucleotide
aggccacauauucuagugg

SEQ ID NO: 1713458 - RNA, 19 nt, Artificial Sequence
  Description of Artificial Sequence: Synthetic oligonucleotide
agaggcuaaccaaagcauc

SEQ ID NO: 1713459 - RNA, 19 nt, Artificial Sequence
  Description of Artificial Sequence: Synthetic oligonucleotide
aaccaaagcaucugcgcuu

SEQ ID NO: 1713460 - RNA, 19 nt, Artificial Sequence
  Description of Artificial Sequence: Synthetic oligonucleotide
uauucuaguggcagccuau

SEQ ID NO: 1713461 - RNA, 19 nt, Artificial Sequence
  Description of Artificial Sequence: Synthetic oligonucleotide
acuaacucaucgacauccc

SEQ ID NO: 1713462 - RNA, 19 nt, Artificial Sequence
  Description of Artificial Sequence: Synthetic oligonucleotide
uggcuaaaacugagggucc

SEQ ID NO: 1713463 - RNA, 19 nt, Artificial Sequence
  Description of Artificial Sequence: Synthetic oligonucleotide
agaugcgaaugguuuuauc

SEQ ID NO: 1713464 - RNA, 19 nt, Artificial Sequence
  Description of Artificial Sequence: Synthetic oligonucleotide
uauugucguuauuccagga

SEQ ID NO: 1713465 - RNA, 19 nt, Artificial Sequence
  Description of Artificial Sequence: Synthetic oligonucleotide
ucaugugaugguuacucuu

SEQ ID NO: 1713466 - RNA, 19 nt, Artificial Sequence
  Description of Artificial Sequence: Synthetic oligonucleotide
caucguggcuaaaacugag

SEQ ID NO: 1713467 - RNA, 19 nt, Artificial Sequence
  Description of Artificial Sequence: Synthetic oligonucleotide
ucguuauuccaggagauuu

SEQ ID NO: 1713468 - RNA, 19 nt, Artificial Sequence
  Description of Artificial Sequence: Synthetic oligonucleotide
acacuaucuccguggcccc

SEQ ID NO: 1713469 - RNA, 19 nt, Artificial Sequence
  Description of Artificial Sequence: Synthetic oligonucleotide
agcacguagcgagacgggc

SEQ ID NO: 1713470 - RNA, 19 nt, Artificial Sequence
  Description of Artificial Sequence: Synthetic oligonucleotide
ccaaccuagagaagcaccg

SEQ ID NO: 1713471 - RNA, 19 nt, Artificial Sequence
  Description of Artificial Sequence: Synthetic oligonucleotide
gaugguuacucuugggugu

SEQ ID NO: 1713472 - RNA, 19 nt, Artificial Sequence
  Description of Artificial Sequence: Synthetic oligonucleotide
gaacauguuauugucguua

SEQ ID NO: 1713473 - RNA, 19 nt, Artificial Sequence
  Description of Artificial Sequence: Synthetic oligonucleotide
agcagauauuaauguucuc

SEQ ID NO: 1713474 - RNA, 19 nt, Artificial Sequence
  Description of Artificial Sequence: Synthetic oligonucleotide
gaaaugauccucugaggcu

SEQ ID NO: 1713475 - RNA, 19 nt, Artificial Sequence
  Description of Artificial Sequence: Synthetic oligonucleotide
uaaaacugaggguccucac

SEQ ID NO: 1713476 - RNA, 19 nt, Artificial Sequence
  Description of Artificial Sequence: Synthetic oligonucleotide
uuaucuccagaugcgguga

SEQ ID NO: 1713477 - RNA, 19 nt, Artificial Sequence
  Description of Artificial Sequence: Synthetic oligonucleotide
gaaggucggggacucacac

SEQ ID NO: 1713478 - RNA, 19 nt, Artificial Sequence
  Description of Artificial Sequence: Synthetic oligonucleotide
cacacugcaccucccacag

SEQ ID NO: 1713479 - RNA, 19 nt, Artificial Sequence
  Description of Artificial Sequence: Synthetic oligonucleotide
uagagaagcaccgcacaca

SEQ ID NO: 1713480 - RNA, 19 nt, Artificial Sequence
  Description of Artificial Sequence: Synthetic oligonucleotide
aagcaccgcacacacacua

SEQ ID NO: 1713481 - RNA, 19 nt, Artificial Sequence
  Description of Artificial Sequence: Synthetic oligonucleotide
cacguagcgagacgggccg

SEQ ID NO: 1713482 - RNA, 19 nt, Artificial Sequence
  Description of Artificial Sequence: Synthetic oligonucleotide
ugcaucccgagcacguagc

SEQ ID NO: 1713483 - RNA, 19 nt, Artificial Sequence
  Description of Artificial Sequence: Synthetic oligonucleotide
uccagcagauauuaauguu

SEQ ID NO: 1713484 - RNA, 19 nt, Artificial Sequence
  Description of Artificial Sequence: Synthetic oligonucleotide
uauuaauguucuccccuuu

SEQ ID NO: 1713485 - RNA, 19 nt, Artificial Sequence
  Description of Artificial Sequence: Synthetic oligonucleotide
agaugcggugacaaagagg

SEQ ID NO: 1713486 - RNA, 19 nt, Artificial Sequence
  Description of Artificial Sequence: Synthetic oligonucleotide
ugcuugggugccagcagag

SEQ ID NO: 1713487 - RNA, 19 nt, Artificial Sequence
  Description of Artificial Sequence: Synthetic oligonucleotide
cccaucguggcuaaaacug

SEQ ID NO: 1713488 - RNA, 19 nt, Artificial Sequence
  Description of Artificial Sequence: Synthetic oligonucleotide
auaugcaguuagaagggug

SEQ ID NO: 1713489 - RNA, 19 nt, Artificial Sequence
  Description of Artificial Sequence: Synthetic oligonucleotide
uggcaaaauacuuccccau

SEQ ID NO: 1713490 - RNA, 19 nt, Artificial Sequence
  Description of Artificial Sequence: Synthetic oligonucleotide
ccuuuaguauucacagugg

SEQ ID NO: 1713491 - RNA, 19 nt, Artificial Sequence
  Description of Artificial Sequence: Synthetic oligonucleotide
accuaggccacauauucua

SEQ ID NO: 1713492 - RNA, 19 nt, Artificial Sequence
  Description of Artificial Sequence: Synthetic oligonucleotide
gucuugucgaaggaccccg

SEQ ID NO: 1713493 - RNA, 19 nt, Artificial Sequence
  Description of Artificial Sequence: Synthetic oligonucleotide
ucgaaggaccccgaggcca

SEQ ID NO: 1713494 - RNA, 19 nt, Artificial Sequence
  Description of Artificial Sequence: Synthetic oligonucleotide
accuagagaagcaccgcac

SEQ ID NO: 1713495 - RNA, 19 nt, Artificial Sequence
  Description of Artificial Sequence: Synthetic oligonucleotide
cugacgccagcauuuuccc

SEQ ID NO: 1713496 - RNA, 19 nt, Artificial Sequence
  Description of Artificial Sequence: Synthetic oligonucleotide
uuccgcuuuggaacggugu

SEQ ID NO: 1713497 - RNA, 19 nt, Artificial Sequence
  Description of Artificial Sequence: Synthetic oligonucleotide
aguucgggguagcugagaa

SEQ ID NO: 1713498 - RNA, 19 nt, Artificial Sequence
  Description of Artificial Sequence: Synthetic oligonucleotide
acucaucgacaucccagag

SEQ ID NO: 1713499 - RNA, 19 nt, Artificial Sequence
  Description of Artificial Sequence: Synthetic oligonucleotide
auauucuaguggcagccua

SEQ ID NO: 1713500 - RNA, 19 nt, Artificial Sequence
  Description of Artificial Sequence: Synthetic oligonucleotide
aggccaguccaaccuagag

SEQ ID NO: 1713501 - RNA, 19 nt, Artificial Sequence
  Description of Artificial Sequence: Synthetic oligonucleotide
ugaaggucggggacucaca

SEQ ID NO: 1713502 - RNA, 19 nt, Artificial Sequence
  Description of Artificial Sequence: Synthetic oligonucleotide
gcuaaccaaagcaucugcg

SEQ ID NO: 1713503 - RNA, 19 nt, Artificial Sequence
  Description of Artificial Sequence: Synthetic oligonucleotide
caucgauaaaggugacaac

SEQ ID NO: 1713504 - RNA, 19 nt, Artificial Sequence
  Description of Artificial Sequence: Synthetic oligonucleotide
uucuaguggcagccuauaa

SEQ ID NO: 1713505 - RNA, 19 nt, Artificial Sequence
  Description of Artificial Sequence: Synthetic oligonucleotide
gaacucgcgcgucuugcug

SEQ ID NO: 1713506 - RNA, 19 nt, Artificial Sequence
  Description of Artificial Sequence: Synthetic oligonucleotide
caagcgacggccgucgcag

SEQ ID NO: 1713507 - RNA, 19 nt, Artificial Sequence
  Description of Artificial Sequence: Synthetic oligonucleotide
uugauacaaccguugccau

SEQ ID NO: 1713508 - RNA, 19 nt, Artificial Sequence
  Description of Artificial Sequence: Synthetic oligonucleotide
aucguggcuaaaacugagg

SEQ ID NO: 1713509 - RNA, 19 nt, Artificial Sequence
  Description of Artificial Sequence: Synthetic oligonucleotide
ccucucaggagucauucgg

SEQ ID NO: 1713510 - RNA, 19 nt, Artificial Sequence
  Description of Artificial Sequence: Synthetic oligonucleotide
aucgacaucccagaggcua

SEQ ID NO: 1713511 - RNA, 19 nt, Artificial Sequence
  Description of Artificial Sequence: Synthetic oligonucleotide
gucauucggaagcccaaac

SEQ ID NO: 1713512 - RNA, 19 nt, Artificial Sequence
  Description of Artificial Sequence: Synthetic oligonucleotide
uuggaacggugugucuugg

SEQ ID NO: 1713513 - RNA, 19 nt, Artificial Sequence
  Description of Artificial Sequence: Synthetic oligonucleotide
auacaaccguugccauugg

SEQ ID NO: 1713514 - RNA, 19 nt, Artificial Sequence
  Description of Artificial Sequence: Synthetic oligonucleotide
aagcgacggccgucgcagc

SEQ ID NO: 1713515 - RNA, 19 nt, Artificial Sequence
  Description of Artificial Sequence: Synthetic oligonucleotide
aaccuaggccacauauucu

SEQ ID NO: 1713516 - RNA, 19 nt, Artificial Sequence
  Description of Artificial Sequence: Synthetic oligonucleotide
ucgacaucccagaggcuaa

SEQ ID NO: 1713517 - RNA, 19 nt, Artificial Sequence
  Description of Artificial Sequence: Synthetic oligonucleotide
ugauacaaccguugccauu

SEQ ID NO: 1713518 - RNA, 19 nt, Artificial Sequence
  Description of Artificial Sequence: Synthetic oligonucleotide
ucaggguugcuugggugcc

SEQ ID NO: 1713519 - RNA, 19 nt, Artificial Sequence
  Description of Artificial Sequence: Synthetic oligonucleotide
cacuuuguaguccucacgu

SEQ ID NO: 1713520 - RNA, 19 nt, Artificial Sequence
  Description of Artificial Sequence: Synthetic oligonucleotide
gcaucgauaaaggugacaa

SEQ ID NO: 1713521 - RNA, 19 nt, Artificial Sequence
  Description of Artificial Sequence: Synthetic oligonucleotide
aacgccagcagaggccucu

SEQ ID NO: 1713522 - RNA, 19 nt, Artificial Sequence
  Description of Artificial Sequence: Synthetic oligonucleotide
ggcaaacgccagcagaggc

SEQ ID NO: 1713523 - RNA, 19 nt, Artificial Sequence
  Description of Artificial Sequence: Synthetic oligonucleotide
uugaacugcucuuccgcuu

SEQ ID NO: 1713524 - RNA, 19 nt, Artificial Sequence
  Description of Artificial Sequence: Synthetic oligonucleotide
gcacuuuguaguccucacg

SEQ ID NO: 1713525 - RNA, 19 nt, Artificial Sequence
  Description of Artificial Sequence: Synthetic oligonucleotide
gcucuuccgcuuuggaacg

SEQ ID NO: 1713526 - RNA, 19 nt, Artificial Sequence
  Description of Artificial Sequence: Synthetic oligonucleotide
guuacucuuggguguuaac

SEQ ID NO: 1713527 - RNA, 19 nt, Artificial Sequence
  Description of Artificial Sequence: Synthetic oligonucleotide
acuaucuccguggccccgg

SEQ ID NO: 1713528 - RNA, 19 nt, Artificial Sequence
  Description of Artificial Sequence: Synthetic oligonucleotide
cuuggggugccacgccacg

SEQ ID NO: 1713529 - RNA, 19 nt, Artificial Sequence
  Description of Artificial Sequence: Synthetic oligonucleotide
gcaucugcgcuuccugugg

SEQ ID NO: 1713530 - RNA, 19 nt, Artificial Sequence
  Description of Artificial Sequence: Synthetic oligonucleotide
ucgcgcgucuugcuguggc

SEQ ID NO: 1713531 - RNA, 19 nt, Artificial Sequence
  Description of Artificial Sequence: Synthetic oligonucleotide
cccaggaucgacgugggcg

SEQ ID NO: 1713532 - RNA, 19 nt, Artificial Sequence
  Description of Artificial Sequence: Synthetic oligonucleotide
gaccccgaggccaagcgac

SEQ ID NO: 1713533 - RNA, 19 nt, Artificial Sequence
  Description of Artificial Sequence: Synthetic oligonucleotide
ccacccuaaaccuaggcca

SEQ ID NO: 1713534 - RNA, 19 nt, Artificial Sequence
  Description of Artificial Sequence: Synthetic oligonucleotide
uggaacggugugucuuggc

SEQ ID NO: 1713535 - RNA, 19 nt, Artificial Sequence
  Description of Artificial Sequence: Synthetic oligonucleotide
gacgggccgcugcucauag

SEQ ID NO: 1713536 - RNA, 19 nt, Artificial Sequence
  Description of Artificial Sequence: Synthetic oligonucleotide
ggaacggugugucuuggca

SEQ ID NO: 1713537 - RNA, 19 nt, Artificial Sequence
  Description of Artificial Sequence: Synthetic oligonucleotide
gggaagacccacccuaaac

SEQ ID NO: 1713538 - RNA, 19 nt, Artificial Sequence
  Description of Artificial Sequence: Synthetic oligonucleotide
caaccuagagaagcaccgc

SEQ ID NO: 1713539 - RNA, 19 nt, Artificial Sequence
  Description of Artificial Sequence: Synthetic oligonucleotide
cugugcgccgggaacucgc

SEQ ID NO: 1713540 - RNA, 19 nt, Artificial Sequence
  Description of Artificial Sequence: Synthetic oligonucleotide
uuggggugccacgccacgg

SEQ ID NO: 1713541 - RNA, 19 nt, Artificial Sequence
  Description of Artificial Sequence: Synthetic oligonucleotide
ucgggguagcugagaaugu

SEQ ID NO: 1713542 - RNA, 19 nt, Artificial Sequence
  Description of Artificial Sequence: Synthetic oligonucleotide
cagcagauauuaauguucu

SEQ ID NO: 1713543 - RNA, 19 nt, Artificial Sequence
  Description of Artificial Sequence: Synthetic oligonucleotide
cuaacucaucgacauccca

SEQ ID NO: 1713544 - RNA, 19 nt, Artificial Sequence
  Description of Artificial Sequence: Synthetic oligonucleotide
acgcuggccgucuugucga

SEQ ID NO: 1713545 - RNA, 19 nt, Artificial Sequence
  Description of Artificial Sequence: Synthetic oligonucleotide
ccagaggcuaaccaaagca

SEQ ID NO: 1713546 - RNA, 19 nt, Artificial Sequence
  Description of Artificial Sequence: Synthetic oligonucleotide
aguccaaccuagagaagca

SEQ ID NO: 1713547 - RNA, 19 nt, Artificial Sequence
  Description of Artificial Sequence: Synthetic oligonucleotide
gaggcuaaccaaagcaucu

SEQ ID NO: 1713548 - RNA, 19 nt, Artificial Sequence
  Description of Artificial Sequence: Synthetic oligonucleotide
aguggcgaugcacuuugua

SEQ ID NO: 1713549 - RNA, 19 nt, Artificial Sequence
  Description of Artificial Sequence: Synthetic oligonucleotide
cagcuaugucaaugaaaug

SEQ ID NO: 1713550 - RNA, 19 nt, Artificial Sequence
  Description of Artificial Sequence: Synthetic oligonucleotide
ccacauauucuaguggcag

SEQ ID NO: 1713551 - RNA, 19 nt, Artificial Sequence
  Description of Artificial Sequence: Synthetic oligonucleotide
ugacugcaucuggaaauca

SEQ ID NO: 1713552 - RNA, 19 nt, Artificial Sequence
  Description of Artificial Sequence: Synthetic oligonucleotide
ccagcauuuucccaucgug

SEQ ID NO: 1713553 - RNA, 19 nt, Artificial Sequence
  Description of Artificial Sequence: Synthetic oligonucleotide
caggagucauucggaagcc

SEQ ID NO: 1713554 - RNA, 19 nt, Artificial Sequence
  Description of Artificial Sequence: Synthetic oligonucleotide
ugacagucaugugaugguu

SEQ ID NO: 1713555 - RNA, 19 nt, Artificial Sequence
  Description of Artificial Sequence: Synthetic oligonucleotide
aggcaaacgccagcagagg

SEQ ID NO: 1713556 - RNA, 19 nt, Artificial Sequence
  Description of Artificial Sequence: Synthetic oligonucleotide
gacaucccagaggcuaacc

SEQ ID NO: 1713557 - RNA, 19 nt, Artificial Sequence
  Description of Artificial Sequence: Synthetic oligonucleotide
ugacgccagcauuuuccca

SEQ ID NO: 1713558 - RNA, 19 nt, Artificial Sequence
  Description of Artificial Sequence: Synthetic oligonucleotide
caucugcgcuuccuguggc

SEQ ID NO: 1713559 - RNA, 19 nt, Artificial Sequence
  Description of Artificial Sequence: Synthetic oligonucleotide
ggugggaagacccacccua

SEQ ID NO: 1713560 - RNA, 19 nt, Artificial Sequence
  Description of Artificial Sequence: Synthetic oligonucleotide
uccucacgucccagaugcg

SEQ ID NO: 1713561 - RNA, 19 nt, Artificial Sequence
  Description of Artificial Sequence: Synthetic oligonucleotide
ccaggaucgacgugggcgc

SEQ ID NO: 1713562 - RNA, 19 nt, Artificial Sequence
  Description of Artificial Sequence: Synthetic oligonucleotide
cuuccgcuuuggaacggug

SEQ ID NO: 1713563 - RNA, 19 nt, Artificial Sequence
  Description of Artificial Sequence: Synthetic oligonucleotide
aguuagaagggugggcguu

SEQ ID NO: 1713564 - RNA, 19 nt, Artificial Sequence
  Description of Artificial Sequence: Synthetic oligonucleotide
gucgaaggaccccgaggcc

SEQ ID NO: 1713565 - RNA, 19 nt, Artificial Sequence
  Description of Artificial Sequence: Synthetic oligonucleotide
gugaaggucggggacucac

SEQ ID NO: 1713566 - RNA, 19 nt, Artificial Sequence
  Description of Artificial Sequence: Synthetic oligonucleotide
ccgacugcugucauauuug

SEQ ID NO: 1713567 - RNA, 19 nt, Artificial Sequence
  Description of Artificial Sequence: Synthetic oligonucleotide
ugcgcuuccuguggcaaaa

SEQ ID NO: 1713568 - RNA, 19 nt, Artificial Sequence
  Description of Artificial Sequence: Synthetic oligonucleotide
agcgagacgggccgcugcu

SEQ ID NO: 1713569 - RNA, 19 nt, Artificial Sequence
  Description of Artificial Sequence: Synthetic oligonucleotide
acauguuauugucguuauu

SEQ ID NO: 1713570 - RNA, 19 nt, Artificial Sequence
  Description of Artificial Sequence: Synthetic oligonucleotide
gugacagucaugugauggu

SEQ ID NO: 1713571 - RNA, 19 nt, Artificial Sequence
  Description of Artificial Sequence: Synthetic oligonucleotide
gacagucaugugaugguua

SEQ ID NO: 1713572 - RNA, 19 nt, Artificial Sequence
  Description of Artificial Sequence: Synthetic oligonucleotide
gaacggugugucuuggcau

SEQ ID NO: 1713573 - RNA, 19 nt, Artificial Sequence
  Description of Artificial Sequence: Synthetic oligonucleotide
gccacggugaaggucgggg

SEQ ID NO: 1713574 - RNA, 19 nt, Artificial Sequence
  Description of Artificial Sequence: Synthetic oligonucleotide
aagacccacccuaaaccua

SEQ ID NO: 1713575 - RNA, 19 nt, Artificial Sequence
  Description of Artificial Sequence: Synthetic oligonucleotide
gucggggacucacacugca

SEQ ID NO: 1713576 - RNA, 19 nt, Artificial Sequence
  Description of Artificial Sequence: Synthetic oligonucleotide
cucacgucccagaugcgaa

SEQ ID NO: 1713577 - RNA, 19 nt, Artificial Sequence
  Description of Artificial Sequence: Synthetic oligonucleotide
ggcguugauggacugcaca

SEQ ID NO: 1713578 - RNA, 19 nt, Artificial Sequence
  Description of Artificial Sequence: Synthetic oligonucleotide
ggcgccaucgagccggggc

SEQ ID NO: 1713579 - RNA, 19 nt, Artificial Sequence
  Description of Artificial Sequence: Synthetic oligonucleotide
uggcaucgauaaaggugac

SEQ ID NO: 1713580 - RNA, 19 nt, Artificial Sequence
  Description of Artificial Sequence: Synthetic oligonucleotide
aucugcgcuuccuguggca

SEQ ID NO: 1713581 - RNA, 19 nt, Artificial Sequence
  Description of Artificial Sequence: Synthetic oligonucleotide
acggugaaggucggggacu

SEQ ID NO: 1713582 - RNA, 19 nt, Artificial Sequence
  Description of Artificial Sequence: Synthetic oligonucleotide
acucgcgcgucuugcugug

SEQ ID NO: 1713583 - RNA, 19 nt, Artificial Sequence
  Description of Artificial Sequence: Synthetic oligonucleotide
agucauucggaagcccaaa

SEQ ID NO: 1713584 - RNA, 19 nt, Artificial Sequence
  Description of Artificial Sequence: Synthetic oligonucleotide
agcgacggccgucgcagcu

SEQ ID NO: 1713585 - RNA, 19 nt, Artificial Sequence
  Description of Artificial Sequence: Synthetic oligonucleotide
aggaucgacgugggcgccg

SEQ ID NO: 1713586 - RNA, 19 nt, Artificial Sequence
  Description of Artificial Sequence: Synthetic oligonucleotide
gcaucccgagcacguagcg

SEQ ID NO: 1713587 - RNA, 19 nt, Artificial Sequence
  Description of Artificial Sequence: Synthetic oligonucleotide
cuaggccacauauucuagu

SEQ ID NO: 1713588 - RNA, 19 nt, Artificial Sequence
  Description of Artificial Sequence: Synthetic oligonucleotide
ucgacgugggcgccgccau

SEQ ID NO: 1713589 - RNA, 19 nt, Artificial Sequence
  Description of Artificial Sequence: Synthetic oligonucleotide
acugugcgccgggaacucg

SEQ ID NO: 1713590 - RNA, 19 nt, Artificial Sequence
  Description of Artificial Sequence: Synthetic oligonucleotide
guccaaccuagagaagcac

SEQ ID NO: 1713591 - RNA, 19 nt, Artificial Sequence
  Description of Artificial Sequence: Synthetic oligonucleotide
ucccgagcacguagcgaga

SEQ ID NO: 1713592 - RNA, 19 nt, Artificial Sequence
  Description of Artificial Sequence: Synthetic oligonucleotide
gucaugugaugguuacucu

SEQ ID NO: 1713593 - RNA, 19 nt, Artificial Sequence
  Description of Artificial Sequence: Synthetic oligonucleotide
gagucauucggaagcccaa

SEQ ID NO: 1713594 - RNA, 19 nt, Artificial Sequence
  Description of Artificial Sequence: Synthetic oligonucleotide
auucuaguggcagccuaua

SEQ ID NO: 1713595 - RNA, 19 nt, Artificial Sequence
  Description of Artificial Sequence: Synthetic oligonucleotide
cucuggcugaccggcgggg

SEQ ID NO: 1713596 - RNA, 19 nt, Artificial Sequence
  Description of Artificial Sequence: Synthetic oligonucleotide
aggccucuuggggugccac

SEQ ID NO: 1713597 - RNA, 19 nt, Artificial Sequence
  Description of Artificial Sequence: Synthetic oligonucleotide
cguuauuccaggagauuuc

SEQ ID NO: 1713598 - RNA, 19 nt, Artificial Sequence
  Description of Artificial Sequence: Synthetic oligonucleotide
gaugcacuuuguaguccuc

SEQ ID NO: 1713599 - RNA, 19 nt, Artificial Sequence
  Description of Artificial Sequence: Synthetic oligonucleotide
cuccugcaucccgagcacg

SEQ ID NO: 1713600 - RNA, 19 nt, Artificial Sequence
  Description of Artificial Sequence: Synthetic oligonucleotide
ccgucuugucgaaggaccc

SEQ ID NO: 1713601 - RNA, 19 nt, Artificial Sequence
  Description of Artificial Sequence: Synthetic oligonucleotide
aggaacacgcuggccgucu

SEQ ID NO: 1713602 - RNA, 19 nt, Artificial Sequence
  Description of Artificial Sequence: Synthetic oligonucleotide
caccgagugcaccuuggca

SEQ ID NO: 1713603 - RNA, 19 nt, Artificial Sequence
  Description of Artificial Sequence: Synthetic oligonucleotide
gcaccgcacacacacuaac

SEQ ID NO: 1713604 - RNA, 19 nt, Artificial Sequence
  Description of Artificial Sequence: Synthetic oligonucleotide
aucgacgugggcgccgcca

SEQ ID NO: 1713605 - RNA, 19 nt, Artificial Sequence
  Description of Artificial Sequence: Synthetic oligonucleotide
cucugaggcugacgccagc

SEQ ID NO: 1713606 - RNA, 19 nt, Artificial Sequence
  Description of Artificial Sequence: Synthetic oligonucleotide
ccagaugcggugacaaaga

SEQ ID NO: 1713607 - RNA, 19 nt, Artificial Sequence
  Description of Artificial Sequence: Synthetic oligonucleotide
ggguguuaacuugacugca

SEQ ID NO: 1713608 - RNA, 19 nt, Artificial Sequence
  Description of Artificial Sequence: Synthetic oligonucleotide
aucgagccggggccgcucu

SEQ ID NO: 1713609 - RNA, 19 nt, Artificial Sequence
  Description of Artificial Sequence: Synthetic oligonucleotide
gcacguagcgagacgggcc

SEQ ID NO: 1713610 - RNA, 19 nt, Artificial Sequence
  Description of Artificial Sequence: Synthetic oligonucleotide
aucuccagaugcggugaca

SEQ ID NO: 1713611 - RNA, 19 nt, Artificial Sequence
  Description of Artificial Sequence: Synthetic oligonucleotide
gggaucaaacuugauacau

SEQ ID NO: 1713612 - RNA, 19 nt, Artificial Sequence
  Description of Artificial Sequence: Synthetic oligonucleotide
ggccaagcgacggccgucg

SEQ ID NO: 1713613 - RNA, 19 nt, Artificial Sequence
  Description of Artificial Sequence: Synthetic oligonucleotide
ggaucaaacuugauacaua

SEQ ID NO: 1713614 - RNA, 19 nt, Artificial Sequence
  Description of Artificial Sequence: Synthetic oligonucleotide
acggccgucgcagcuccag

SEQ ID NO: 1713615 - RNA, 19 nt, Artificial Sequence
  Description of Artificial Sequence: Synthetic oligonucleotide
gcgccaucgagccggggcc

SEQ ID NO: 1713616 - RNA, 19 nt, Artificial Sequence
  Description of Artificial Sequence: Synthetic oligonucleotide
gaggcugacgccagcauuu

SEQ ID NO: 1713617 - RNA, 19 nt, Artificial Sequence
  Description of Artificial Sequence: Synthetic oligonucleotide
caaacgccagcagaggccu

SEQ ID NO: 1713618 - RNA, 19 nt, Artificial Sequence
  Description of Artificial Sequence: Synthetic oligonucleotide
ccaucguggcuaaaacuga

SEQ ID NO: 1713619 - RNA, 19 nt, Artificial Sequence
  Description of Artificial Sequence: Synthetic oligonucleotide
ggugggcguugauggacug

SEQ ID NO: 1713620 - RNA, 19 nt, Artificial Sequence
  Description of Artificial Sequence: Synthetic oligonucleotide
uaucuccguggccccggua

SEQ ID NO: 1713621 - RNA, 19 nt, Artificial Sequence
  Description of Artificial Sequence: Synthetic oligonucleotide
acccuaaaccuaggccaca

SEQ ID NO: 1713622 - RNA, 19 nt, Artificial Sequence
  Description of Artificial Sequence: Synthetic oligonucleotide
gcgaaugguuuuaucucca

SEQ ID NO: 1713623 - RNA, 19 nt, Artificial Sequence
  Description of Artificial Sequence: Synthetic oligonucleotide
caccgcacacacacuaacu

SEQ ID NO: 1713624 - RNA, 19 nt, Artificial Sequence
  Description of Artificial Sequence: Synthetic oligonucleotide
gaucgacgugggcgccgcc

SEQ ID NO: 1713625 - RNA, 19 nt, Artificial Sequence
  Description of Artificial Sequence: Synthetic oligonucleotide
gcuaaaacugaggguccuc

SEQ ID NO: 1713626 - RNA, 19 nt, Artificial Sequence
  Description of Artificial Sequence: Synthetic oligonucleotide
ccgcugcucauagagcacc

SEQ ID NO: 1713627 - RNA, 19 nt, Artificial Sequence
  Description of Artificial Sequence: Synthetic oligonucleotide
gguuacucuuggguguuaa

SEQ ID NO: 1713628 - RNA, 19 nt, Artificial Sequence
  Description of Artificial Sequence: Synthetic oligonucleotide
caguuagaagggugggcgu

SEQ ID NO: 1713629 - RNA, 19 nt, Artificial Sequence
  Description of Artificial Sequence: Synthetic oligonucleotide
agcaccgcacacacacuaa

SEQ ID NO: 1713630 - RNA, 19 nt, Artificial Sequence
  Description of Artificial Sequence: Synthetic oligonucleotide
cauauucuaguggcagccu

SEQ ID NO: 1713631 - RNA, 19 nt, Artificial Sequence
  Description of Artificial Sequence: Synthetic oligonucleotide
gaggccaagcgacggccgu

SEQ ID NO: 1713632 - RNA, 19 nt, Artificial Sequence
  Description of Artificial Sequence: Synthetic oligonucleotide
caggaucgacgugggcgcc

SEQ ID NO: 1713633 - RNA, 19 nt, Artificial Sequence
  Description of Artificial Sequence: Synthetic oligonucleotide
caucccgagcacguagcga

SEQ ID NO: 1713634 - RNA, 19 nt, Artificial Sequence
  Description of Artificial Sequence: Synthetic oligonucleotide
ggcaucgauaaaggugaca

SEQ ID NO: 1713635 - RNA, 19 nt, Artificial Sequence
  Description of Artificial Sequence: Synthetic oligonucleotide
uuuucccaucguggcuaaa

SEQ ID NO: 1713636 - RNA, 19 nt, Artificial Sequence
  Description of Artificial Sequence: Synthetic oligonucleotide
ccaguccaaccuagagaag

SEQ ID NO: 1713637 - RNA, 19 nt, Artificial Sequence
  Description of Artificial Sequence: Synthetic oligonucleotide
ccacacuaucuccguggcc

SEQ ID NO: 1713638 - RNA, 19 nt, Artificial Sequence
  Description of Artificial Sequence: Synthetic oligonucleotide
ccgagcacguagcgagacg

SEQ ID NO: 1713639 - RNA, 19 nt, Artificial Sequence
  Description of Artificial Sequence: Synthetic oligonucleotide
cacugugcgccgggaacuc

SEQ ID NO: 1713640 - RNA, 19 nt, Artificial Sequence
  Description of Artificial Sequence: Synthetic oligonucleotide
gcgucuugcuguggccucg

SEQ ID NO: 1713641 - RNA, 19 nt, Artificial Sequence
  Description of Artificial Sequence: Synthetic oligonucleotide
ugguuacucuuggguguua

SEQ ID NO: 1713642 - RNA, 19 nt, Artificial Sequence
  Description of Artificial Sequence: Synthetic oligonucleotide
ggaucgacgugggcgccgc

SEQ ID NO: 1713643 - RNA, 19 nt, Artificial Sequence
  Description of Artificial Sequence: Synthetic oligonucleotide
ggccgcucuggcugaccgg

SEQ ID NO: 1713644 - RNA, 19 nt, Artificial Sequence
  Description of Artificial Sequence: Synthetic oligonucleotide
cucgcgcgucuugcugugg

SEQ ID NO: 1713645 - RNA, 19 nt, Artificial Sequence
  Description of Artificial Sequence: Synthetic oligonucleotide
ggggugccacgccacggug

SEQ ID NO: 1713646 - RNA, 19 nt, Artificial Sequence
  Description of Artificial Sequence: Synthetic oligonucleotide
caggaacacgcuggccguc

SEQ ID NO: 1713647 - RNA, 19 nt, Artificial Sequence
  Description of Artificial Sequence: Synthetic oligonucleotide
cuucccgacugcugucaua

SEQ ID NO: 1713648 - RNA, 19 nt, Artificial Sequence
  Description of Artificial Sequence: Synthetic oligonucleotide
guucgggguagcugagaau

SEQ ID NO: 1713649 - RNA, 19 nt, Artificial Sequence
  Description of Artificial Sequence: Synthetic oligonucleotide
ggaccccgaggccaagcga

SEQ ID NO: 1713650 - RNA, 19 nt, Artificial Sequence
  Description of Artificial Sequence: Synthetic oligonucleotide
gcaggaacacgcuggccgu

SEQ ID NO: 1713651 - RNA, 19 nt, Artificial Sequence
  Description of Artificial Sequence: Synthetic oligonucleotide
gcacaccugauggagauuu

SEQ ID NO: 1713652 - RNA, 19 nt, Artificial Sequence
  Description of Artificial Sequence: Synthetic oligonucleotide
ggccccgguaguuguuuuc

SEQ ID NO: 1713653 - RNA, 19 nt, Artificial Sequence
  Description of Artificial Sequence: Synthetic oligonucleotide
caucgagccggggccgcuc

SEQ ID NO: 1713654 - RNA, 19 nt, Artificial Sequence
  Description of Artificial Sequence: Synthetic oligonucleotide
ggcaugcugugacagucau

SEQ ID NO: 1713655 - RNA, 19 nt, Artificial Sequence
  Description of Artificial Sequence: Synthetic oligonucleotide
ggaacucgcgcgucuugcu

SEQ ID NO: 1713656 - RNA, 19 nt, Artificial Sequence
  Description of Artificial Sequence: Synthetic oligonucleotide
cgucuugucgaaggacccc

SEQ ID NO: 1713657 - RNA, 19 nt, Artificial Sequence
  Description of Artificial Sequence: Synthetic oligonucleotide
acgggccgcugcucauaga

SEQ ID NO: 1713658 - RNA, 19 nt, Artificial Sequence
  Description of Artificial Sequence: Synthetic oligonucleotide
gucguuauuccaggagauu

SEQ ID NO: 1713659 - RNA, 19 nt, Artificial Sequence
  Description of Artificial Sequence: Synthetic oligonucleotide
acgccacggugaaggucgg

SEQ ID NO: 1713660 - RNA, 19 nt, Artificial Sequence
  Description of Artificial Sequence: Synthetic oligonucleotide
ggucggggacucacacugc

SEQ ID NO: 1713661 - RNA, 19 nt, Artificial Sequence
  Description of Artificial Sequence: Synthetic oligonucleotide
caguucgggguagcugaga

SEQ ID NO: 1713662 - RNA, 19 nt, Artificial Sequence
  Description of Artificial Sequence: Synthetic oligonucleotide
ccucacgucccagaugcga

SEQ ID NO: 1713663 - RNA, 19 nt, Artificial Sequence
  Description of Artificial Sequence: Synthetic oligonucleotide
agacgggccgcugcucaua

SEQ ID NO: 1713664 - RNA, 19 nt, Artificial Sequence
  Description of Artificial Sequence: Synthetic oligonucleotide
ggguugcuugggugccagc

SEQ ID NO: 1713665 - RNA, 19 nt, Artificial Sequence
  Description of Artificial Sequence: Synthetic oligonucleotide
gggcaugcugugacaguca

SEQ ID NO: 1713666 - RNA, 19 nt, Artificial Sequence
  Description of Artificial Sequence: Synthetic oligonucleotide
caucgacaucccagaggcu

SEQ ID NO: 1713667 - RNA, 19 nt, Artificial Sequence
  Description of Artificial Sequence: Synthetic oligonucleotide
cugaggcugacgccagcau

SEQ ID NO: 1713668 - RNA, 19 nt, Artificial Sequence
  Description of Artificial Sequence: Synthetic oligonucleotide
gccgcugcucauagagcac

SEQ ID NO: 1713669 - RNA, 19 nt, Artificial Sequence
  Description of Artificial Sequence: Synthetic oligonucleotide
ccaagcgacggccgucgca

SEQ ID NO: 1713670 - RNA, 19 nt, Artificial Sequence
  Description of Artificial Sequence: Synthetic oligonucleotide
cagucaugugaugguuacu

SEQ ID NO: 1713671 - RNA, 19 nt, Artificial Sequence
  Description of Artificial Sequence: Synthetic oligonucleotide
cgcgcgucuugcuguggcc

SEQ ID NO: 1713672 - RNA, 19 nt, Artificial Sequence
  Description of Artificial Sequence: Synthetic oligonucleotide
cccgacugcugucauauuu

SEQ ID NO: 1713673 - RNA, 19 nt, Artificial Sequence
  Description of Artificial Sequence: Synthetic oligonucleotide
ccagggcgccaucgagccg

SEQ ID NO: 1713674 - RNA, 19 nt, Artificial Sequence
  Description of Artificial Sequence: Synthetic oligonucleotide
cgacggccgucgcagcucc

SEQ ID NO: 1713675 - RNA, 19 nt, Artificial Sequence
  Description of Artificial Sequence: Synthetic oligonucleotide
cagaugcgaaugguuuuau

SEQ ID NO: 1713676 - RNA, 19 nt, Artificial Sequence
  Description of Artificial Sequence: Synthetic oligonucleotide
ccuaaaccuaggccacaua

SEQ ID NO: 1713677 - RNA, 19 nt, Artificial Sequence
  Description of Artificial Sequence: Synthetic oligonucleotide
cuaucuccguggccccggu

SEQ ID NO: 1713678 - RNA, 19 nt, Artificial Sequence
  Description of Artificial Sequence: Synthetic oligonucleotide
ccgagugcaccuuggcacu

SEQ ID NO: 1713679 - RNA, 19 nt, Artificial Sequence
  Description of Artificial Sequence: Synthetic oligonucleotide
gccccgguaguuguuuucu

SEQ ID NO: 1713680 - RNA, 19 nt, Artificial Sequence
  Description of Artificial Sequence: Synthetic oligonucleotide
caguuccagcuucccgacu

SEQ ID NO: 1713681 - RNA, 19 nt, Artificial Sequence
  Description of Artificial Sequence: Synthetic oligonucleotide
gggcguugauggacugcac

SEQ ID NO: 1713682 - RNA, 19 nt, Artificial Sequence
  Description of Artificial Sequence: Synthetic oligonucleotide
gcgacggccgucgcagcuc

SEQ ID NO: 1713683 - RNA, 19 nt, Artificial Sequence
  Description of Artificial Sequence: Synthetic oligonucleotide
acgccagcagaggccucuu

SEQ ID NO: 1713684 - RNA, 19 nt, Artificial Sequence
  Description of Artificial Sequence: Synthetic oligonucleotide
cgggaacucgcgcgucuug

SEQ ID NO: 1713685 - RNA, 19 nt, Artificial Sequence
  Description of Artificial Sequence: Synthetic oligonucleotide
caguggcgaugcacuuugu

SEQ ID NO: 1713686 - RNA, 19 nt, Artificial Sequence
  Description of Artificial Sequence: Synthetic oligonucleotide
ggcgccgccaugccuccgu

SEQ ID NO: 1713687 - RNA, 19 nt, Artificial Sequence
  Description of Artificial Sequence: Synthetic oligonucleotide
ggggccgcucuggcugacc

SEQ ID NO: 1713688 - RNA, 19 nt, Artificial Sequence
  Description of Artificial Sequence: Synthetic oligonucleotide
gacggccgucgcagcucca

SEQ ID NO: 1713689 - RNA, 19 nt, Artificial Sequence
  Description of Artificial Sequence: Synthetic oligonucleotide
gccgggaacucgcgcgucu

SEQ ID NO: 1713690 - RNA, 19 nt, Artificial Sequence
  Description of Artificial Sequence: Synthetic oligonucleotide
gcgcgucuugcuguggccu

SEQ ID NO: 1713691 - RNA, 19 nt, Artificial Sequence
  Description of Artificial Sequence: Synthetic oligonucleotide
cccuaaaccuaggccacau

SEQ ID NO: 1713692 - RNA, 19 nt, Artificial Sequence
  Description of Artificial Sequence: Synthetic oligonucleotide
ccgcuuuggaacggugugu

SEQ ID NO: 1713693 - RNA, 19 nt, Artificial Sequence
  Description of Artificial Sequence: Synthetic oligonucleotide
cgacgugggcgccgccaug

SEQ ID NO: 1713694 - RNA, 19 nt, Artificial Sequence
  Description of Artificial Sequence: Synthetic oligonucleotide
cggugugucuuggcaucga

SEQ ID NO: 1713695 - RNA, 19 nt, Artificial Sequence
  Description of Artificial Sequence: Synthetic oligonucleotide
cguagcgagacgggccgcu

SEQ ID NO: 1713696 - RNA, 19 nt, Artificial Sequence
  Description of Artificial Sequence: Synthetic oligonucleotide
gcgcuuccuguggcaaaau

SEQ ID NO: 1713697 - RNA, 19 nt, Artificial Sequence
  Description of Artificial Sequence: Synthetic oligonucleotide
ccgggaacucgcgcgucuu

SEQ ID NO: 1713698 - RNA, 19 nt, Artificial Sequence
  Description of Artificial Sequence: Synthetic oligonucleotide
aauaaugcgaaucuucuac

SEQ ID NO: 1713699 - RNA, 19 nt, Artificial Sequence
  Description of Artificial Sequence: Synthetic oligonucleotide
aauguguuucaccacaguc

SEQ ID NO: 1713700 - RNA, 19 nt, Artificial Sequence
  Description of Artificial Sequence: Synthetic oligonucleotide
aagaaugugcaucagggag

SEQ ID NO: 1713701 - RNA, 19 nt, Artificial Sequence
  Description of Artificial Sequence: Synthetic oligonucleotide
acagcauccaacuaacacc

SEQ ID NO: 1713702 - RNA, 19 nt, Artificial Sequence
  Description of Artificial Sequence: Synthetic oligonucleotide
aaggcuucaacaugcaagg

SEQ ID NO: 1713703 - RNA, 19 nt, Artificial Sequence
  Description of Artificial Sequence: Synthetic oligonucleotide
auugcuguauccucgaacg

SEQ ID NO: 1713704 - RNA, 19 nt, Artificial Sequence
  Description of Artificial Sequence: Synthetic oligonucleotide
ucuagaauaggucacuucu

SEQ ID NO: 1713705 - RNA, 19 nt, Artificial Sequence
  Description of Artificial Sequence: Synthetic oligonucleotide
uguuccaucucgaaaagcc

SEQ ID NO: 1713706 - RNA, 19 nt, Artificial Sequence
  Description of Artificial Sequence: Synthetic oligonucleotide
agcuuuaggacucguagcc

SEQ ID NO: 1713707 - RNA, 19 nt, Artificial Sequence
  Description of Artificial Sequence: Synthetic oligonucleotide
gauggguucguuuggaagg

SEQ ID NO: 1713708 - RNA, 19 nt, Artificial Sequence
  Description of Artificial Sequence: Synthetic oligonucleotide
cucuuggacaaauugaagg

SEQ ID NO: 1713709 - RNA, 19 nt, Artificial Sequence
  Description of Artificial Sequence: Synthetic oligonucleotide
ucuucuacgagcucagagg

SEQ ID NO: 1713710 - RNA, 19 nt, Artificial Sequence
  Description of Artificial Sequence: Synthetic oligonucleotide
aaauugaagguccuguccu

SEQ ID NO: 1713711 - RNA, 19 nt, Artificial Sequence
  Description of Artificial Sequence: Synthetic oligonucleotide
aagcuuuaggacucguagc

SEQ ID NO: 1713712 - RNA, 19 nt, Artificial Sequence
  Description of Artificial Sequence: Synthetic oligonucleotide
augcgaaucuucuacgagc

SEQ ID NO: 1713713 - RNA, 19 nt, Artificial Sequence
  Description of Artificial Sequence: Synthetic oligonucleotide
aauaggucacuucucugag

SEQ ID NO: 1713714 - RNA, 19 nt, Artificial Sequence
  Description of Artificial Sequence: Synthetic oligonucleotide
uuggacaaauugaaggucc

SEQ ID NO: 1713715 - RNA, 19 nt, Artificial Sequence
  Description of Artificial Sequence: Synthetic oligonucleotide
uucagaauucgacacaggu

SEQ ID NO: 1713716 - RNA, 19 nt, Artificial Sequence
  Description of Artificial Sequence: Synthetic oligonucleotide
aaugcgaaucuucuacgag

SEQ ID NO: 1713717 - RNA, 19 nt, Artificial Sequence
  Description of Artificial Sequence: Synthetic oligonucleotide
ucuucuguagccuagcauc

SEQ ID NO: 1713718 - RNA, 19 nt, Artificial Sequence
  Description of Artificial Sequence: Synthetic oligonucleotide
uccagaucggcauacaaca

SEQ ID NO: 1713719 - RNA, 19 nt, Artificial Sequence
  Description of Artificial Sequence: Synthetic oligonucleotide
ugucuucuagaauagguca

SEQ ID NO: 1713720 - RNA, 19 nt, Artificial Sequence
  Description of Artificial Sequence: Synthetic oligonucleotide
ugcaguaagacuucaccag

SEQ ID NO: 1713721 - RNA, 19 nt, Artificial Sequence
  Description of Artificial Sequence: Synthetic oligonucleotide
auaaugcgaaucuucuacg

SEQ ID NO: 1713722 - RNA, 19 nt, Artificial Sequence
  Description of Artificial Sequence: Synthetic oligonucleotide
augucagucgggcugaagg

SEQ ID NO: 1713723 - RNA, 19 nt, Artificial Sequence
  Description of Artificial Sequence: Synthetic oligonucleotide
caauuuacaaaacugggca

SEQ ID NO: 1713724 - RNA, 19 nt, Artificial Sequence
  Description of Artificial Sequence: Synthetic oligonucleotide
aaggugguaguaaggaccc

SEQ ID NO: 1713725 - RNA, 19 nt, Artificial Sequence
  Description of Artificial Sequence: Synthetic oligonucleotide
ucuguagccuagcaucucg

SEQ ID NO: 1713726 - RNA, 19 nt, Artificial Sequence
  Description of Artificial Sequence: Synthetic oligonucleotide
ucuuggacaaauugaaggu

SEQ ID NO: 1713727 - RNA, 19 nt, Artificial Sequence
  Description of Artificial Sequence: Synthetic oligonucleotide
uuugauaguaggagauugc

SEQ ID NO: 1713728 - RNA, 19 nt, Artificial Sequence
  Description of Artificial Sequence: Synthetic oligonucleotide
auguguuucaccacagucc

SEQ ID NO: 1713729 - RNA, 19 nt, Artificial Sequence
  Description of Artificial Sequence: Synthetic oligonucleotide
uggccaauuuacaaaacug

SEQ ID NO: 1713730 - RNA, 19 nt, Artificial Sequence
  Description of Artificial Sequence: Synthetic oligonucleotide
gucacuguagaaauggagg

SEQ ID NO: 1713731 - RNA, 19 nt, Artificial Sequence
  Description of Artificial Sequence: Synthetic oligonucleotide
ugauuagaacacagcaucc

SEQ ID NO: 1713732 - RNA, 19 nt, Artificial Sequence
  Description of Artificial Sequence: Synthetic oligonucleotide
gaaggugguaguaaggacc

SEQ ID NO: 1713733 - RNA, 19 nt, Artificial Sequence
  Description of Artificial Sequence: Synthetic oligonucleotide
uuaucaagcuuuaggacuc

SEQ ID NO: 1713734 - RNA, 19 nt, Artificial Sequence
  Description of Artificial Sequence: Synthetic oligonucleotide
uagaauaggucacuucucu

SEQ ID NO: 1713735 - RNA, 19 nt, Artificial Sequence
  Description of Artificial Sequence: Synthetic oligonucleotide
caagcuuuaggacucguag

SEQ ID NO: 1713736 - RNA, 19 nt, Artificial Sequence
  Description of Artificial Sequence: Synthetic oligonucleotide
acuagaagggcguuuccuc

SEQ ID NO: 1713737 - RNA, 19 nt, Artificial Sequence
  Description of Artificial Sequence: Synthetic oligonucleotide
aguaagacuucaccaguuc

SEQ ID NO: 1713738 - RNA, 19 nt, Artificial Sequence
  Description of Artificial Sequence: Synthetic oligonucleotide
acggagaucucguugcugg

SEQ ID NO: 1713739 - RNA, 19 nt, Artificial Sequence
  Description of Artificial Sequence: Synthetic oligonucleotide
uuggccaauuuacaaaacu

SEQ ID NO: 1713740 - RNA, 19 nt, Artificial Sequence
  Description of Artificial Sequence: Synthetic oligonucleotide
ucggcauacaacagggugc

SEQ ID NO: 1713741 - RNA, 19 nt, Artificial Sequence
  Description of Artificial Sequence: Synthetic oligonucleotide
caaauugaagguccugucc

SEQ ID NO: 1713742 - RNA, 19 nt, Artificial Sequence
  Description of Artificial Sequence: Synthetic oligonucleotide
uuagaacacagcauccaac

SEQ ID NO: 1713743 - RNA, 19 nt, Artificial Sequence
  Description of Artificial Sequence: Synthetic oligonucleotide
gaauaggucacuucucuga

SEQ ID NO: 1713744 - RNA, 19 nt, Artificial Sequence
  Description of Artificial Sequence: Synthetic oligonucleotide
ugauaguaggagauugcug

SEQ ID NO: 1713745 - RNA, 19 nt, Artificial Sequence
  Description of Artificial Sequence: Synthetic oligonucleotide
aaagucccuaacuuccuga

SEQ ID NO: 1713746 - RNA, 19 nt, Artificial Sequence
  Description of Artificial Sequence: Synthetic oligonucleotide
agggaugccucccagucac

SEQ ID NO: 1713747 - RNA, 19 nt, Artificial Sequence
  Description of Artificial Sequence: Synthetic oligonucleotide
ucugagaauaaugcgaauc

SEQ ID NO: 1713748 - RNA, 19 nt, Artificial Sequence
  Description of Artificial Sequence: Synthetic oligonucleotide
auauugcucaauuucacua

SEQ ID NO: 1713749 - RNA, 19 nt, Artificial Sequence
  Description of Artificial Sequence: Synthetic oligonucleotide
aguaggagauugcuguauc

SEQ ID NO: 1713750 - RNA, 19 nt, Artificial Sequence
  Description of Artificial Sequence: Synthetic oligonucleotide
uguaggugccugaaaacac

SEQ ID NO: 1713751 - RNA, 19 nt, Artificial Sequence
  Description of Artificial Sequence: Synthetic oligonucleotide
aucggcauacaacagggug

SEQ ID NO: 1713752 - RNA, 19 nt, Artificial Sequence
  Description of Artificial Sequence: Synthetic oligonucleotide
agccuagcaucucggaugc

SEQ ID NO: 1713753 - RNA, 19 nt, Artificial Sequence
  Description of Artificial Sequence: Synthetic oligonucleotide
ucggaugccaggcagcuga

SEQ ID NO: 1713754 - RNA, 19 nt, Artificial Sequence
  Description of Artificial Sequence: Synthetic oligonucleotide
uugcccucgucguugaagg

SEQ ID NO: 1713755 - RNA, 19 nt, Artificial Sequence
  Description of Artificial Sequence: Synthetic oligonucleotide
cuuuaggacucguagccag

SEQ ID NO: 1713756 - RNA, 19 nt, Artificial Sequence
  Description of Artificial Sequence: Synthetic oligonucleotide
aaauggagggugugggaug

SEQ ID NO: 1713757 - RNA, 19 nt, Artificial Sequence
  Description of Artificial Sequence: Synthetic oligonucleotide
gaaaacacauccagaucgg

SEQ ID NO: 1713758 - RNA, 19 nt, Artificial Sequence
  Description of Artificial Sequence: Synthetic oligonucleotide
ugcgaaucuucuacgagcu

SEQ ID NO: 1713759 - RNA, 19 nt, Artificial Sequence
  Description of Artificial Sequence: Synthetic oligonucleotide
uagccuagcaucucggaug

SEQ ID NO: 1713760 - RNA, 19 nt, Artificial Sequence
  Description of Artificial Sequence: Synthetic oligonucleotide
aacuucagaauucgacaca

SEQ ID NO: 1713761 - RNA, 19 nt, Artificial Sequence
  Description of Artificial Sequence: Synthetic oligonucleotide
uguauccucgaacgugggg

SEQ ID NO: 1713762 - RNA, 19 nt, Artificial Sequence
  Description of Artificial Sequence: Synthetic oligonucleotide
aguaaggaccccuucugug

SEQ ID NO: 1713763 - RNA, 19 nt, Artificial Sequence
  Description of Artificial Sequence: Synthetic oligonucleotide
gagaauaaugcgaaucuuc

SEQ ID NO: 1713764 - RNA, 19 nt, Artificial Sequence
  Description of Artificial Sequence: Synthetic oligonucleotide
agaucggcauacaacaggg

SEQ ID NO: 1713765 - RNA, 19 nt, Artificial Sequence
  Description of Artificial Sequence: Synthetic oligonucleotide
uaaugcgaaucuucuacga

SEQ ID NO: 1713766 - RNA, 19 nt, Artificial Sequence
  Description of Artificial Sequence: Synthetic oligonucleotide
ugaauauacuuugaagaau

SEQ ID NO: 1713767 - RNA, 19 nt, Artificial Sequence
  Description of Artificial Sequence: Synthetic oligonucleotide
cagaucggcauacaacagg

SEQ ID NO: 1713768 - RNA, 19 nt, Artificial Sequence
  Description of Artificial Sequence: Synthetic oligonucleotide
gcuucaacaugcaaggugg

SEQ ID NO: 1713769 - RNA, 19 nt, Artificial Sequence
  Description of Artificial Sequence: Synthetic oligonucleotide
aauucgacacaggucucuc

SEQ ID NO: 1713770 - RNA, 19 nt, Artificial Sequence
  Description of Artificial Sequence: Synthetic oligonucleotide
ucguagccaggccagcugg

SEQ ID NO: 1713771 - RNA, 19 nt, Artificial Sequence
  Description of Artificial Sequence: Synthetic oligonucleotide
uugauaguaggagauugcu

SEQ ID NO: 1713772 - RNA, 19 nt, Artificial Sequence
  Description of Artificial Sequence: Synthetic oligonucleotide
auuagaacacagcauccaa

SEQ ID NO: 1713773 - RNA, 19 nt, Artificial Sequence
  Description of Artificial Sequence: Synthetic oligonucleotide
guaguaaggaccccuucug

SEQ ID NO: 1713774 - RNA, 19 nt, Artificial Sequence
  Description of Artificial Sequence: Synthetic oligonucleotide
cugaauauacuuugaagaa

SEQ ID NO: 1713775 - RNA, 19 nt, Artificial Sequence
  Description of Artificial Sequence: Synthetic oligonucleotide
ccaauuuacaaaacugggc

SEQ ID NO: 1713776 - RNA, 19 nt, Artificial Sequence
  Description of Artificial Sequence: Synthetic oligonucleotide
agcaucucggaugccaggc

SEQ ID NO: 1713777 - RNA, 19 nt, Artificial Sequence
  Description of Artificial Sequence: Synthetic oligonucleotide
cagaauucgacacaggucu

SEQ ID NO: 1713778 - RNA, 19 nt, Artificial Sequence
  Description of Artificial Sequence: Synthetic oligonucleotide
gaugacaggcaagggaugc

SEQ ID NO: 1713779 - RNA, 19 nt, Artificial Sequence
  Description of Artificial Sequence: Synthetic oligonucleotide
agggcguuuccucuuggac

SEQ ID NO: 1713780 - RNA, 19 nt, Artificial Sequence
  Description of Artificial Sequence: Synthetic oligonucleotide
uaggcccuuugauaguagg

SEQ ID NO: 1713781 - RNA, 19 nt, Artificial Sequence
  Description of Artificial Sequence: Synthetic oligonucleotide
gaggggugcgcaaauauug

SEQ ID NO: 1713782 - RNA, 19 nt, Artificial Sequence
  Description of Artificial Sequence: Synthetic oligonucleotide
gucggagcacaccagcugg

SEQ ID NO: 1713783 - RNA, 19 nt, Artificial Sequence
  Description of Artificial Sequence: Synthetic oligonucleotide
ugucagucgggcugaaggc

SEQ ID NO: 1713784 - RNA, 19 nt, Artificial Sequence
  Description of Artificial Sequence: Synthetic oligonucleotide
guaugggugaggaagcuug

SEQ ID NO: 1713785 - RNA, 19 nt, Artificial Sequence
  Description of Artificial Sequence: Synthetic oligonucleotide
ggccaauuuacaaaacugg

SEQ ID NO: 1713786 - RNA, 19 nt, Artificial Sequence
  Description of Artificial Sequence: Synthetic oligonucleotide
uuccaucucgaaaagccau

SEQ ID NO: 1713787 - RNA, 19 nt, Artificial Sequence
  Description of Artificial Sequence: Synthetic oligonucleotide
ugcuguauccucgaacgug

SEQ ID NO: 1713788 - RNA, 19 nt, Artificial Sequence
  Description of Artificial Sequence: Synthetic oligonucleotide
ucacucgacggagaucucg

SEQ ID NO: 1713789 - RNA, 19 nt, Artificial Sequence
  Description of Artificial Sequence: Synthetic oligonucleotide
caggugauuagaacacagc

SEQ ID NO: 1713790 - RNA, 19 nt, Artificial Sequence
  Description of Artificial Sequence: Synthetic oligonucleotide
gauuagaacacagcaucca

SEQ ID NO: 1713791 - RNA, 19 nt, Artificial Sequence
  Description of Artificial Sequence: Synthetic oligonucleotide
cauguaggugccugaaaac

SEQ ID NO: 1713792 - RNA, 19 nt, Artificial Sequence
  Description of Artificial Sequence: Synthetic oligonucleotide
caugcggaccagcaugugg

SEQ ID NO: 1713793 - RNA, 19 nt, Artificial Sequence
  Description of Artificial Sequence: Synthetic oligonucleotide
ugcaggacuagaagggcgu

SEQ ID NO: 1713794 - RNA, 19 nt, Artificial Sequence
  Description of Artificial Sequence: Synthetic oligonucleotide
gaaucuucuacgagcucag

SEQ ID NO: 1713795 - RNA, 19 nt, Artificial Sequence
  Description of Artificial Sequence: Synthetic oligonucleotide
gccaauuuacaaaacuggg

SEQ ID NO: 1713796 - RNA, 19 nt, Artificial Sequence
  Description of Artificial Sequence: Synthetic oligonucleotide
agccaugucucauuugcca

SEQ ID NO: 1713797 - RNA, 19 nt, Artificial Sequence
  Description of Artificial Sequence: Synthetic oligonucleotide
ucuucuagaauaggucacu

SEQ ID NO: 1713798 - RNA, 19 nt, Artificial Sequence
  Description of Artificial Sequence: Synthetic oligonucleotide
agaucucguugcuggcugc

SEQ ID NO: 1713799 - RNA, 19 nt, Artificial Sequence
  Description of Artificial Sequence: Synthetic oligonucleotide
aggacuagaagggcguuuc

SEQ ID NO: 1713800 - RNA, 19 nt, Artificial Sequence
  Description of Artificial Sequence: Synthetic oligonucleotide
ucgaaaagccaugcggacc

SEQ ID NO: 1713801 - RNA, 19 nt, Artificial Sequence
  Description of Artificial Sequence: Synthetic oligonucleotide
caggucucucacucgacgg

SEQ ID NO: 1713802 - RNA, 19 nt, Artificial Sequence
  Description of Artificial Sequence: Synthetic oligonucleotide
aaagccaugcggaccagca

SEQ ID NO: 1713803 - RNA, 19 nt, Artificial Sequence
  Description of Artificial Sequence: Synthetic oligonucleotide
uggaggaggucaccaaugu

SEQ ID NO: 1713804 - RNA, 19 nt, Artificial Sequence
  Description of Artificial Sequence: Synthetic oligonucleotide
ucccuaacuuccugagggg

SEQ ID NO: 1713805 - RNA, 19 nt, Artificial Sequence
  Description of Artificial Sequence: Synthetic oligonucleotide
aggugcaggacuagaaggg

SEQ ID NO: 1713806 - RNA, 19 nt, Artificial Sequence
  Description of Artificial Sequence: Synthetic oligonucleotide
ucguuuggaaggcuucaac

SEQ ID NO: 1713807 - RNA, 19 nt, Artificial Sequence
  Description of Artificial Sequence: Synthetic oligonucleotide
ucacuagcugcauguaggu

SEQ ID NO: 1713808 - RNA, 19 nt, Artificial Sequence
  Description of Artificial Sequence: Synthetic oligonucleotide
cuucuacgagcucagagga

SEQ ID NO: 1713809 - RNA, 19 nt, Artificial Sequence
  Description of Artificial Sequence: Synthetic oligonucleotide
acgagcucagaggagccgc

SEQ ID NO: 1713810 - RNA, 19 nt, Artificial Sequence
  Description of Artificial Sequence: Synthetic oligonucleotide
gaugccucccagucacuag

SEQ ID NO: 1713811 - RNA, 19 nt, Artificial Sequence
  Description of Artificial Sequence: Synthetic oligonucleotide
cuucaacaugcaagguggg

SEQ ID NO: 1713812 - RNA, 19 nt, Artificial Sequence
  Description of Artificial Sequence: Synthetic oligonucleotide
ggagauugcuguauccucg

SEQ ID NO: 1713813 - RNA, 19 nt, Artificial Sequence
  Description of Artificial Sequence: Synthetic oligonucleotide
cuuggacaaauugaagguc

SEQ ID NO: 1713814 - RNA, 19 nt, Artificial Sequence
  Description of Artificial Sequence: Synthetic oligonucleotide
ugugcaucagggaggguua

SEQ ID NO: 1713815 - RNA, 19 nt, Artificial Sequence
  Description of Artificial Sequence: Synthetic oligonucleotide
cugcaguaagacuucacca

SEQ ID NO: 1713816 - RNA, 19 nt, Artificial Sequence
  Description of Artificial Sequence: Synthetic oligonucleotide
aagggaugccucccaguca

SEQ ID NO: 1713817 - RNA, 19 nt, Artificial Sequence
  Description of Artificial Sequence: Synthetic oligonucleotide
caacguucgggacagcauc

SEQ ID NO: 1713818 - RNA, 19 nt, Artificial Sequence
  Description of Artificial Sequence: Synthetic oligonucleotide
cucgaaaagccaugcggac

SEQ ID NO: 1713819 - RNA, 19 nt, Artificial Sequence
  Description of Artificial Sequence: Synthetic oligonucleotide
uugugcugccggcagguga

SEQ ID NO: 1713820 - RNA, 19 nt, Artificial Sequence
  Description of Artificial Sequence: Synthetic oligonucleotide
uagccaugucucauuugcc

SEQ ID NO: 1713821 - RNA, 19 nt, Artificial Sequence
  Description of Artificial Sequence: Synthetic oligonucleotide
ucaagcuuuaggacucgua

SEQ ID NO: 1713822 - RNA, 19 nt, Artificial Sequence
  Description of Artificial Sequence: Synthetic oligonucleotide
gcauccaacuaacaccucc

SEQ ID NO: 1713823 - RNA, 19 nt, Artificial Sequence
  Description of Artificial Sequence: Synthetic oligonucleotide
cagaugguucccaugguca

SEQ ID NO: 1713824 - RNA, 19 nt, Artificial Sequence
  Description of Artificial Sequence: Synthetic oligonucleotide
aggggugcgcaaauauugc

SEQ ID NO: 1713825 - RNA, 19 nt, Artificial Sequence
  Description of Artificial Sequence: Synthetic oligonucleotide
gcagacgagaggcagccgg

SEQ ID NO: 1713826 - RNA, 19 nt, Artificial Sequence
  Description of Artificial Sequence: Synthetic oligonucleotide
ggauggguucguuuggaag

SEQ ID NO: 1713827 - RNA, 19 nt, Artificial Sequence
  Description of Artificial Sequence: Synthetic oligonucleotide
ggugaggaagcuuggaaca

SEQ ID NO: 1713828 - RNA, 19 nt, Artificial Sequence
  Description of Artificial Sequence: Synthetic oligonucleotide
gaauaaugcgaaucuucua

SEQ ID NO: 1713829 - RNA, 19 nt, Artificial Sequence
  Description of Artificial Sequence: Synthetic oligonucleotide
agacugccaugccaggaag

SEQ ID NO: 1713830 - RNA, 19 nt, Artificial Sequence
  Description of Artificial Sequence: Synthetic oligonucleotide
ggucacuucucugagguug

SEQ ID NO: 1713831 - RNA, 19 nt, Artificial Sequence
  Description of Artificial Sequence: Synthetic oligonucleotide
cugagaauaaugcgaaucu

SEQ ID NO: 1713832 - RNA, 19 nt, Artificial Sequence
  Description of Artificial Sequence: Synthetic oligonucleotide
agaggagccgcaguccggg

SEQ ID NO: 1713833 - RNA, 19 nt, Artificial Sequence
  Description of Artificial Sequence: Synthetic oligonucleotide
aggguuaggggacacucau

SEQ ID NO: 1713834 - RNA, 19 nt, Artificial Sequence
  Description of Artificial Sequence: Synthetic oligonucleotide
gcuguauccucgaacgugg

SEQ ID NO: 1713835 - RNA, 19 nt, Artificial Sequence
  Description of Artificial Sequence: Synthetic oligonucleotide
cucgacggagaucucguug

SEQ ID NO: 1713836 - RNA, 19 nt, Artificial Sequence
  Description of Artificial Sequence: Synthetic oligonucleotide
ucucguugcuggcugcgac

SEQ ID NO: 1713837 - RNA, 19 nt, Artificial Sequence
  Description of Artificial Sequence: Synthetic oligonucleotide
cuuggaacagucugaagcu

SEQ ID NO: 1713838 - RNA, 19 nt, Artificial Sequence
  Description of Artificial Sequence: Synthetic oligonucleotide
gaagggcguuuccucuugg

SEQ ID NO: 1713839 - RNA, 19 nt, Artificial Sequence
  Description of Artificial Sequence: Synthetic oligonucleotide
ugagaauaaugcgaaucuu

SEQ ID NO: 1713840 - RNA, 19 nt, Artificial Sequence
  Description of Artificial Sequence: Synthetic oligonucleotide
ucucucacucgacggagau

SEQ ID NO: 1713841 - RNA, 19 nt, Artificial Sequence
  Description of Artificial Sequence: Synthetic oligonucleotide
uuuccccggugucuucuag

SEQ ID NO: 1713842 - RNA, 19 nt, Artificial Sequence
  Description of Artificial Sequence: Synthetic oligonucleotide
uccccagucacuguagaaa

SEQ ID NO: 1713843 - RNA, 19 nt, Artificial Sequence
  Description of Artificial Sequence: Synthetic oligonucleotide
cuacgagcucagaggagcc

SEQ ID NO: 1713844 - RNA, 19 nt, Artificial Sequence
  Description of Artificial Sequence: Synthetic oligonucleotide
gagauugcuguauccucga

SEQ ID NO: 1713845 - RNA, 19 nt, Artificial Sequence
  Description of Artificial Sequence: Synthetic oligonucleotide
accacaguccgcuuaucaa

SEQ ID NO: 1713846 - RNA, 19 nt, Artificial Sequence
  Description of Artificial Sequence: Synthetic oligonucleotide
aagggcguuuccucuugga

SEQ ID NO: 1713847 - RNA, 19 nt, Artificial Sequence
  Description of Artificial Sequence: Synthetic oligonucleotide
agaagggcguuuccucuug

SEQ ID NO: 1713848 - RNA, 19 nt, Artificial Sequence
  Description of Artificial Sequence: Synthetic oligonucleotide
aagcuuggaacagucugaa

SEQ ID NO: 1713849 - RNA, 19 nt, Artificial Sequence
  Description of Artificial Sequence: Synthetic oligonucleotide
gaucucguugcuggcugcg

SEQ ID NO: 1713850 - RNA, 19 nt, Artificial Sequence
  Description of Artificial Sequence: Synthetic oligonucleotide
ugaggggugcgcaaauauu

SEQ ID NO: 1713851 - RNA, 19 nt, Artificial Sequence
  Description of Artificial Sequence: Synthetic oligonucleotide
uucgggacagcaucuuguc

SEQ ID NO: 1713852 - RNA, 19 nt, Artificial Sequence
  Description of Artificial Sequence: Synthetic oligonucleotide
ugcggaccagcauguggcg

SEQ ID NO: 1713853 - RNA, 19 nt, Artificial Sequence
  Description of Artificial Sequence: Synthetic oligonucleotide
gugcaggacuagaagggcg

SEQ ID NO: 1713854 - RNA, 19 nt, Artificial Sequence
  Description of Artificial Sequence: Synthetic oligonucleotide
ugauaggcccuuugauagu

SEQ ID NO: 1713855 - RNA, 19 nt, Artificial Sequence
  Description of Artificial Sequence: Synthetic oligonucleotide
ccgcuuaucaagcuuuagg

SEQ ID NO: 1713856 - RNA, 19 nt, Artificial Sequence
  Description of Artificial Sequence: Synthetic oligonucleotide
ggugcgcaaauauugcuca

SEQ ID NO: 1713857 - RNA, 19 nt, Artificial Sequence
  Description of Artificial Sequence: Synthetic oligonucleotide
cagacgagaggcagccggg

SEQ ID NO: 1713858 - RNA, 19 nt, Artificial Sequence
  Description of Artificial Sequence: Synthetic oligonucleotide
guuaggggacacucauggc

SEQ ID NO: 1713859 - RNA, 19 nt, Artificial Sequence
  Description of Artificial Sequence: Synthetic oligonucleotide
cuugggcucucugaaaguc

SEQ ID NO: 1713860 - RNA, 19 nt, Artificial Sequence
  Description of Artificial Sequence: Synthetic oligonucleotide
uaggacucguagccaggcc

SEQ ID NO: 1713861 - RNA, 19 nt, Artificial Sequence
  Description of Artificial Sequence: Synthetic oligonucleotide
cacacagccgcagucggag

SEQ ID NO: 1713862 - RNA, 19 nt, Artificial Sequence
  Description of Artificial Sequence: Synthetic oligonucleotide
uacgagcucagaggagccg

SEQ ID NO: 1713863 - RNA, 19 nt, Artificial Sequence
  Description of Artificial Sequence: Synthetic oligonucleotide
agucacuagccaugucuca

SEQ ID NO: 1713864 - RNA, 19 nt, Artificial Sequence
  Description of Artificial Sequence: Synthetic oligonucleotide
aacguucgggacagcaucu

SEQ ID NO: 1713865 - RNA, 19 nt, Artificial Sequence
  Description of Artificial Sequence: Synthetic oligonucleotide
cuggcugcgacuaacuugu

SEQ ID NO: 1713866 - RNA, 19 nt, Artificial Sequence
  Description of Artificial Sequence: Synthetic oligonucleotide
ucgggacagcaucuugucu

SEQ ID NO: 1713867 - RNA, 19 nt, Artificial Sequence
  Description of Artificial Sequence: Synthetic oligonucleotide
uugcuguauccucgaacgu

SEQ ID NO: 1713868 - RNA, 19 nt, Artificial Sequence
  Description of Artificial Sequence: Synthetic oligonucleotide
guugcccucgucguugaag

SEQ ID NO: 1713869 - RNA, 19 nt, Artificial Sequence
  Description of Artificial Sequence: Synthetic oligonucleotide
ggcccuuugauaguaggag

SEQ ID NO: 1713870 - RNA, 19 nt, Artificial Sequence
  Description of Artificial Sequence: Synthetic oligonucleotide
ggggcaacuucagaauucg

SEQ ID NO: 1713871 - RNA, 19 nt, Artificial Sequence
  Description of Artificial Sequence: Synthetic oligonucleotide
uaguaggagauugcuguau

SEQ ID NO: 1713872 - RNA, 19 nt, Artificial Sequence
  Description of Artificial Sequence: Synthetic oligonucleotide
cuguauccucgaacguggg

SEQ ID NO: 1713873 - RNA, 19 nt, Artificial Sequence
  Description of Artificial Sequence: Synthetic oligonucleotide
agaacacagcauccaacua

SEQ ID NO: 1713874 - RNA, 19 nt, Artificial Sequence
  Description of Artificial Sequence: Synthetic oligonucleotide
auucgacacaggucucuca

SEQ ID NO: 1713875 - RNA, 19 nt, Artificial Sequence
  Description of Artificial Sequence: Synthetic oligonucleotide
gcauguaggugccugaaaa

SEQ ID NO: 1713876 - RNA, 19 nt, Artificial Sequence
  Description of Artificial Sequence: Synthetic oligonucleotide
agcaacguucgggacagca

SEQ ID NO: 1713877 - RNA, 19 nt, Artificial Sequence
  Description of Artificial Sequence: Synthetic oligonucleotide
uccgcuuaucaagcuuuag

SEQ ID NO: 1713878 - RNA, 19 nt, Artificial Sequence
  Description of Artificial Sequence: Synthetic oligonucleotide
uccccggugucuucuagaa

SEQ ID NO: 1713879 - RNA, 19 nt, Artificial Sequence
  Description of Artificial Sequence: Synthetic oligonucleotide
agaauucgacacaggucuc

SEQ ID NO: 1713880 - RNA, 19 nt, Artificial Sequence
  Description of Artificial Sequence: Synthetic oligonucleotide
guaggugccugaaaacaca

SEQ ID NO: 1713881 - RNA, 19 nt, Artificial Sequence
  Description of Artificial Sequence: Synthetic oligonucleotide
ucgacacaggucucucacu

SEQ ID NO: 1713882 - RNA, 19 nt, Artificial Sequence
  Description of Artificial Sequence: Synthetic oligonucleotide
gucagucgggcugaaggcc

SEQ ID NO: 1713883 - RNA, 19 nt, Artificial Sequence
  Description of Artificial Sequence: Synthetic oligonucleotide
gauaggcccuuugauagua

SEQ ID NO: 1713884 - RNA, 19 nt, Artificial Sequence
  Description of Artificial Sequence: Synthetic oligonucleotide
agggugugggauggguucg

SEQ ID NO: 1713885 - RNA, 19 nt, Artificial Sequence
  Description of Artificial Sequence: Synthetic oligonucleotide
uuccccggugucuucuaga

SEQ ID NO: 1713886 - RNA, 19 nt, Artificial Sequence
  Description of Artificial Sequence: Synthetic oligonucleotide
guccacauuggccaauuua

SEQ ID NO: 1713887 - RNA, 19 nt, Artificial Sequence
  Description of Artificial Sequence: Synthetic oligonucleotide
ucacuagccaugucucauu

SEQ ID NO: 1713888 - RNA, 19 nt, Artificial Sequence
  Description of Artificial Sequence: Synthetic oligonucleotide
auuuuccccggugucuucu

SEQ ID NO: 1713889 - RNA, 19 nt, Artificial Sequence
  Description of Artificial Sequence: Synthetic oligonucleotide
gucacuucucugagguugc

SEQ ID NO: 1713890 - RNA, 19 nt, Artificial Sequence
  Description of Artificial Sequence: Synthetic oligonucleotide
aaucuucuacgagcucaga

SEQ ID NO: 1713891 - RNA, 19 nt, Artificial Sequence
  Description of Artificial Sequence: Synthetic oligonucleotide
caugcaaggugggaggaga

SEQ ID NO: 1713892 - RNA, 19 nt, Artificial Sequence
  Description of Artificial Sequence: Synthetic oligonucleotide
uagaagggcguuuccucuu

SEQ ID NO: 1713893 - RNA, 19 nt, Artificial Sequence
  Description of Artificial Sequence: Synthetic oligonucleotide
cucguagccaggccagcug

SEQ ID NO: 1713894 - RNA, 19 nt, Artificial Sequence
  Description of Artificial Sequence: Synthetic oligonucleotide
uucguuuggaaggcuucaa

SEQ ID NO: 1713895 - RNA, 19 nt, Artificial Sequence
  Description of Artificial Sequence: Synthetic oligonucleotide
gcagcaacguucgggacag

SEQ ID NO: 1713896 - RNA, 19 nt, Artificial Sequence
  Description of Artificial Sequence: Synthetic oligonucleotide
gguaguaaggaccccuucu

SEQ ID NO: 1713897 - RNA, 19 nt, Artificial Sequence
  Description of Artificial Sequence: Synthetic oligonucleotide
gggcguuuccucuuggaca

SEQ ID NO: 1713898 - RNA, 19 nt, Artificial Sequence
  Description of Artificial Sequence: Synthetic oligonucleotide
cguugaaggugguaguaag

SEQ ID NO: 1713899 - RNA, 19 nt, Artificial Sequence
  Description of Artificial Sequence: Synthetic oligonucleotide
cucauuugccagcuccaca

SEQ ID NO: 1713900 - RNA, 19 nt, Artificial Sequence
  Description of Artificial Sequence: Synthetic oligonucleotide
ggcguuuccucuuggacaa

SEQ ID NO: 1713901 - RNA, 19 nt, Artificial Sequence
  Description of Artificial Sequence: Synthetic oligonucleotide
gcugauaggcccuuugaua

SEQ ID NO: 1713902 - RNA, 19 nt, Artificial Sequence
  Description of Artificial Sequence: Synthetic oligonucleotide
ccuaacuuccugaggggug

SEQ ID NO: 1713903 - RNA, 19 nt, Artificial Sequence
  Description of Artificial Sequence: Synthetic oligonucleotide
ugagguugcccucgucguu

SEQ ID NO: 1713904 - RNA, 19 nt, Artificial Sequence
  Description of Artificial Sequence: Synthetic oligonucleotide
ugguaugggugaggaagcu

SEQ ID NO: 1713905 - RNA, 19 nt, Artificial Sequence
  Description of Artificial Sequence: Synthetic oligonucleotide
cuucucugagguugcccuc

SEQ ID NO: 1713906 - RNA, 19 nt, Artificial Sequence
  Description of Artificial Sequence: Synthetic oligonucleotide
cuagaagggcguuuccucu

SEQ ID NO: 1713907 - RNA, 19 nt, Artificial Sequence
  Description of Artificial Sequence: Synthetic oligonucleotide
cagugaugacaggcaaggg

SEQ ID NO: 1713908 - RNA, 19 nt, Artificial Sequence
  Description of Artificial Sequence: Synthetic oligonucleotide
aggaccccuucugugacca

SEQ ID NO: 1713909 - RNA, 19 nt, Artificial Sequence
  Description of Artificial Sequence: Synthetic oligonucleotide
cauccaacuaacaccuccu

SEQ ID NO: 1713910 - RNA, 19 nt, Artificial Sequence
  Description of Artificial Sequence: Synthetic oligonucleotide
aggugguaguaaggacccc

SEQ ID NO: 1713911 - RNA, 19 nt, Artificial Sequence
  Description of Artificial Sequence: Synthetic oligonucleotide
auccaacuaacaccuccuu

SEQ ID NO: 1713912 - RNA, 19 nt, Artificial Sequence
  Description of Artificial Sequence: Synthetic oligonucleotide
guucguuuggaaggcuuca

SEQ ID NO: 1713913 - RNA, 19 nt, Artificial Sequence
  Description of Artificial Sequence: Synthetic oligonucleotide
ugccggcaggugauuagaa

SEQ ID NO: 1713914 - RNA, 19 nt, Artificial Sequence
  Description of Artificial Sequence: Synthetic oligonucleotide
gaauucgacacaggucucu

SEQ ID NO: 1713915 - RNA, 19 nt, Artificial Sequence
  Description of Artificial Sequence: Synthetic oligonucleotide
gaaaagccaugcggaccag

SEQ ID NO: 1713916 - RNA, 19 nt, Artificial Sequence
  Description of Artificial Sequence: Synthetic oligonucleotide
aaacugggcaagagagcau

SEQ ID NO: 1713917 - RNA, 19 nt, Artificial Sequence
  Description of Artificial Sequence: Synthetic oligonucleotide
ggugucuucuagaauaggu

SEQ ID NO: 1713918 - RNA, 19 nt, Artificial Sequence
  Description of Artificial Sequence: Synthetic oligonucleotide
gacuagaagggcguuuccu

SEQ ID NO: 1713919 - RNA, 19 nt, Artificial Sequence
  Description of Artificial Sequence: Synthetic oligonucleotide
ucccagucacuagccaugu

SEQ ID NO: 1713920 - RNA, 19 nt, Artificial Sequence
  Description of Artificial Sequence: Synthetic oligonucleotide
cauccagaucggcauacaa

SEQ ID NO: 1713921 - RNA, 19 nt, Artificial Sequence
  Description of Artificial Sequence: Synthetic oligonucleotide
ggucucucacucgacggag

SEQ ID NO: 1713922 - RNA, 19 nt, Artificial Sequence
  Description of Artificial Sequence: Synthetic oligonucleotide
auaggcccuuugauaguag

SEQ ID NO: 1713923 - RNA, 19 nt, Artificial Sequence
  Description of Artificial Sequence: Synthetic oligonucleotide
uucuguagccuagcaucuc

SEQ ID NO: 1713924 - RNA, 19 nt, Artificial Sequence
  Description of Artificial Sequence: Synthetic oligonucleotide
ggaggguuaggggacacuc

SEQ ID NO: 1713925 - RNA, 19 nt, Artificial Sequence
  Description of Artificial Sequence: Synthetic oligonucleotide
gaggguuaggggacacuca

SEQ ID NO: 1713926 - RNA, 19 nt, Artificial Sequence
  Description of Artificial Sequence: Synthetic oligonucleotide
ccagaucggcauacaacag

SEQ ID NO: 1713927 - RNA, 19 nt, Artificial Sequence
  Description of Artificial Sequence: Synthetic oligonucleotide
cccggugucuucuagaaua

SEQ ID NO: 1713928 - RNA, 19 nt, Artificial Sequence
  Description of Artificial Sequence: Synthetic oligonucleotide
ggacaaauugaagguccug

SEQ ID NO: 1713929 - RNA, 19 nt, Artificial Sequence
  Description of Artificial Sequence: Synthetic oligonucleotide
gcucugagaauaaugcgaa

SEQ ID NO: 1713930 - RNA, 19 nt, Artificial Sequence
  Description of Artificial Sequence: Synthetic oligonucleotide
guagccuagcaucucggau

SEQ ID NO: 1713931 - RNA, 19 nt, Artificial Sequence
  Description of Artificial Sequence: Synthetic oligonucleotide
uuuuccccggugucuucua

SEQ ID NO: 1713932 - RNA, 19 nt, Artificial Sequence
  Description of Artificial Sequence: Synthetic oligonucleotide
cuaucagaaauguccucau

SEQ ID NO: 1713933 - RNA, 19 nt, Artificial Sequence
  Description of Artificial Sequence: Synthetic oligonucleotide
ccugcagacgagaggcagc

SEQ ID NO: 1713934 - RNA, 19 nt, Artificial Sequence
  Description of Artificial Sequence: Synthetic oligonucleotide
cugggcaagagagcauguc

SEQ ID NO: 1713935 - RNA, 19 nt, Artificial Sequence
  Description of Artificial Sequence: Synthetic oligonucleotide
ggacuagaagggcguuucc

SEQ ID NO: 1713936 - RNA, 19 nt, Artificial Sequence
  Description of Artificial Sequence: Synthetic oligonucleotide
ccggugucuucuagaauag

SEQ ID NO: 1713937 - RNA, 19 nt, Artificial Sequence
  Description of Artificial Sequence: Synthetic oligonucleotide
cgaaaagccaugcggacca

SEQ ID NO: 1713938 - RNA, 19 nt, Artificial Sequence
  Description of Artificial Sequence: Synthetic oligonucleotide
gcgacuaacuuguucauuu

SEQ ID NO: 1713939 - RNA, 19 nt, Artificial Sequence
  Description of Artificial Sequence: Synthetic oligonucleotide
ggacucguagccaggccag

SEQ ID NO: 1713940 - RNA, 19 nt, Artificial Sequence
  Description of Artificial Sequence: Synthetic oligonucleotide
cagucgggcugaaggccgc

SEQ ID NO: 1713941 - RNA, 19 nt, Artificial Sequence
  Description of Artificial Sequence: Synthetic oligonucleotide
gguucguuuggaaggcuuc

SEQ ID NO: 1713942 - RNA, 19 nt, Artificial Sequence
  Description of Artificial Sequence: Synthetic oligonucleotide
guucgggacagcaucuugu

SEQ ID NO: 1713943 - RNA, 19 nt, Artificial Sequence
  Description of Artificial Sequence: Synthetic oligonucleotide
caugucagucgggcugaag

SEQ ID NO: 1713944 - RNA, 19 nt, Artificial Sequence
  Description of Artificial Sequence: Synthetic oligonucleotide
gggugcgcaaauauugcuc

SEQ ID NO: 1713945 - RNA, 19 nt, Artificial Sequence
  Description of Artificial Sequence: Synthetic oligonucleotide
gacucguagccaggccagc

SEQ ID NO: 1713946 - RNA, 19 nt, Artificial Sequence
  Description of Artificial Sequence: Synthetic oligonucleotide
agcauccaacuaacaccuc

SEQ ID NO: 1713947 - RNA, 19 nt, Artificial Sequence
  Description of Artificial Sequence: Synthetic oligonucleotide
gacgagaggcagccgggua

SEQ ID NO: 1713948 - RNA, 19 nt, Artificial Sequence
  Description of Artificial Sequence: Synthetic oligonucleotide
ugcccucgucguugaaggu

SEQ ID NO: 1713949 - RNA, 19 nt, Artificial Sequence
  Description of Artificial Sequence: Synthetic oligonucleotide
uggguucguuuggaaggcu

SEQ ID NO: 1713950 - RNA, 19 nt, Artificial Sequence
  Description of Artificial Sequence: Synthetic oligonucleotide
acugggcaagagagcaugu

SEQ ID NO: 1713951 - RNA, 19 nt, Artificial Sequence
  Description of Artificial Sequence: Synthetic oligonucleotide
cugagguugcccucgucgu

SEQ ID NO: 1713952 - RNA, 19 nt, Artificial Sequence
  Description of Artificial Sequence: Synthetic oligonucleotide
cgacacaggucucucacuc

SEQ ID NO: 1713953 - RNA, 19 nt, Artificial Sequence
  Description of Artificial Sequence: Synthetic oligonucleotide
acucgacggagaucucguu

SEQ ID NO: 1713954 - RNA, 19 nt, Artificial Sequence
  Description of Artificial Sequence: Synthetic oligonucleotide
cacucgacggagaucucgu

SEQ ID NO: 1713955 - RNA, 19 nt, Artificial Sequence
  Description of Artificial Sequence: Synthetic oligonucleotide
caguaagacuucaccaguu

SEQ ID NO: 1713956 - RNA, 19 nt, Artificial Sequence
  Description of Artificial Sequence: Synthetic oligonucleotide
aucucguugcuggcugcga

SEQ ID NO: 1713957 - RNA, 19 nt, Artificial Sequence
  Description of Artificial Sequence: Synthetic oligonucleotide
ggugguaguaaggaccccu

SEQ ID NO: 1713958 - RNA, 19 nt, Artificial Sequence
  Description of Artificial Sequence: Synthetic oligonucleotide
gcccucgucguugaaggug

SEQ ID NO: 1713959 - RNA, 19 nt, Artificial Sequence
  Description of Artificial Sequence: Synthetic oligonucleotide
gaccagcauguggcggugc

SEQ ID NO: 1713960 - RNA, 19 nt, Artificial Sequence
  Description of Artificial Sequence: Synthetic oligonucleotide
gcuuuaggacucguagcca

SEQ ID NO: 1713961 - RNA, 19 nt, Artificial Sequence
  Description of Artificial Sequence: Synthetic oligonucleotide
ggagaggugcaggacuaga

SEQ ID NO: 1713962 - RNA, 19 nt, Artificial Sequence
  Description of Artificial Sequence: Synthetic oligonucleotide
ggcaagagagcaugucagu

SEQ ID NO: 1713963 - RNA, 19 nt, Artificial Sequence
  Description of Artificial Sequence: Synthetic oligonucleotide
cucugagguugcccucguc

SEQ ID NO: 1713964 - RNA, 19 nt, Artificial Sequence
  Description of Artificial Sequence: Synthetic oligonucleotide
ggguuaggggacacucaug

SEQ ID NO: 1713965 - RNA, 19 nt, Artificial Sequence
  Description of Artificial Sequence: Synthetic oligonucleotide
gaucggcauacaacagggu

SEQ ID NO: 1713966 - RNA, 19 nt, Artificial Sequence
  Description of Artificial Sequence: Synthetic oligonucleotide
cugccggcaggugauuaga

SEQ ID NO: 1713967 - RNA, 19 nt, Artificial Sequence
  Description of Artificial Sequence: Synthetic oligonucleotide
ggggugcgcaaauauugcu

SEQ ID NO: 1713968 - RNA, 19 nt, Artificial Sequence
  Description of Artificial Sequence: Synthetic oligonucleotide
cccuuugauaguaggagau

SEQ ID NO: 1713969 - RNA, 19 nt, Artificial Sequence
  Description of Artificial Sequence: Synthetic oligonucleotide
cagcuugggcucucugaaa

SEQ ID NO: 1713970 - RNA, 19 nt, Artificial Sequence
  Description of Artificial Sequence: Synthetic oligonucleotide
gcgcaaauauugcucaauu

SEQ ID NO: 1713971 - RNA, 19 nt, Artificial Sequence
  Description of Artificial Sequence: Synthetic oligonucleotide
cuucuagaauaggucacuu

SEQ ID NO: 1713972 - RNA, 19 nt, Artificial Sequence
  Description of Artificial Sequence: Synthetic oligonucleotide
cucugagaauaaugcgaau

SEQ ID NO: 1713973 - RNA, 19 nt, Artificial Sequence
  Description of Artificial Sequence: Synthetic oligonucleotide
caacuaacaccuccuucuu

SEQ ID NO: 1713974 - RNA, 19 nt, Artificial Sequence
  Description of Artificial Sequence: Synthetic oligonucleotide
ccacauauuuggcugguau

SEQ ID NO: 1713975 - RNA, 19 nt, Artificial Sequence
  Description of Artificial Sequence: Synthetic oligonucleotide
cacuagccaugucucauuu

SEQ ID NO: 1713976 - RNA, 19 nt, Artificial Sequence
  Description of Artificial Sequence: Synthetic oligonucleotide
gcgaaucuucuacgagcuc

SEQ ID NO: 1713977 - RNA, 19 nt, Artificial Sequence
  Description of Artificial Sequence: Synthetic oligonucleotide
ccgcagucggagcacacca

SEQ ID NO: 1713978 - RNA, 19 nt, Artificial Sequence
  Description of Artificial Sequence: Synthetic oligonucleotide
gccgcagucggagcacacc

SEQ ID NO: 1713979 - RNA, 19 nt, Artificial Sequence
  Description of Artificial Sequence: Synthetic oligonucleotide
gugugggauggguucguuu

SEQ ID NO: 1713980 - RNA, 19 nt, Artificial Sequence
  Description of Artificial Sequence: Synthetic oligonucleotide
gggucuccgcuucugcugu

SEQ ID NO: 1713981 - RNA, 19 nt, Artificial Sequence
  Description of Artificial Sequence: Synthetic oligonucleotide
guccgcuuaucaagcuuua

SEQ ID NO: 1713982 - RNA, 19 nt, Artificial Sequence
  Description of Artificial Sequence: Synthetic oligonucleotide
gcuugggcucucugaaagu

SEQ ID NO: 1713983 - RNA, 19 nt, Artificial Sequence
  Description of Artificial Sequence: Synthetic oligonucleotide
caguccgcuuaucaagcuu

SEQ ID NO: 1713984 - RNA, 19 nt, Artificial Sequence
  Description of Artificial Sequence: Synthetic oligonucleotide
gugguaguaaggaccccuu

SEQ ID NO: 1713985 - RNA, 19 nt, Artificial Sequence
  Description of Artificial Sequence: Synthetic oligonucleotide
ggcagccggguagggcagg

SEQ ID NO: 1713986 - RNA, 19 nt, Artificial Sequence
  Description of Artificial Sequence: Synthetic oligonucleotide
gggcaacuucagaauucga

SEQ ID NO: 1713987 - RNA, 19 nt, Artificial Sequence
  Description of Artificial Sequence: Synthetic oligonucleotide
gguagggcagguccacauu

SEQ ID NO: 1713988 - RNA, 19 nt, Artificial Sequence
  Description of Artificial Sequence: Synthetic oligonucleotide
gcagcggcuuccgcucggc

SEQ ID NO: 1713989 - RNA, 19 nt, Artificial Sequence
  Description of Artificial Sequence: Synthetic oligonucleotide
gguaugggugaggaagcuu

SEQ ID NO: 1713990 - RNA, 19 nt, Artificial Sequence
  Description of Artificial Sequence: Synthetic oligonucleotide
gcaacguucgggacagcau

SEQ ID NO: 1713991 - RNA, 19 nt, Artificial Sequence
  Description of Artificial Sequence: Synthetic oligonucleotide
cagcggcuuccgcucggca

SEQ ID NO: 1713992 - RNA, 19 nt, Artificial Sequence
  Description of Artificial Sequence: Synthetic oligonucleotide
cagccgcagucggagcaca

SEQ ID NO: 1713993 - RNA, 19 nt, Artificial Sequence
  Description of Artificial Sequence: Synthetic oligonucleotide
gccggguagggcaggucca

SEQ ID NO: 1713994 - RNA, 19 nt, Artificial Sequence
  Description of Artificial Sequence: Synthetic oligonucleotide
cagcaacguucgggacagc

SEQ ID NO: 1713995 - RNA, 19 nt, Artificial Sequence
  Description of Artificial Sequence: Synthetic oligonucleotide
ggguucguuuggaaggcuu

SEQ ID NO: 1713996 - RNA, 19 nt, Artificial Sequence
  Description of Artificial Sequence: Synthetic oligonucleotide
cccuaacuuccugaggggu

SEQ ID NO: 1713997 - RNA, 19 nt, Artificial Sequence
  Description of Artificial Sequence: Synthetic oligonucleotide
ccaugcggaccagcaugug

SEQ ID NO: 1713998 - RNA, 19 nt, Artificial Sequence
  Description of Artificial Sequence: Synthetic oligonucleotide
cgagcucagaggagccgca

SEQ ID NO: 1713999 - RNA, 19 nt, Artificial Sequence
  Description of Artificial Sequence: Synthetic oligonucleotide
cgucguugaaggugguagu

SEQ ID NO: 1714000 - RNA, 19 nt, Artificial Sequence
  Description of Artificial Sequence: Synthetic oligonucleotide
ccuuugauaguaggagauu

SEQ ID NO: 1714001 - RNA, 19 nt, Artificial Sequence
  Description of Artificial Sequence: Synthetic oligonucleotide
cggaccagcauguggcggu

SEQ ID NO: 1714002 - RNA, 19 nt, Artificial Sequence
  Description of Artificial Sequence: Synthetic oligonucleotide
gccuagcaucucggaugcc

SEQ ID NO: 1714003 - RNA, 19 nt, Artificial Sequence
  Description of Artificial Sequence: Synthetic oligonucleotide
gggugugggauggguucgu

SEQ ID NO: 1714004 - RNA, 19 nt, Artificial Sequence
  Description of Artificial Sequence: Synthetic oligonucleotide
ggugugggauggguucguu

SEQ ID NO: 1714005 - RNA, 19 nt, Artificial Sequence
  Description of Artificial Sequence: Synthetic oligonucleotide
gcaugucagucgggcugaa

SEQ ID NO: 1714006 - RNA, 19 nt, Artificial Sequence
  Description of Artificial Sequence: Synthetic oligonucleotide
gcguuuccucuuggacaaa

SEQ ID NO: 1714007 - RNA, 19 nt, Artificial Sequence
  Description of Artificial Sequence: Synthetic oligonucleotide
cccauggucaggggccagu

SEQ ID NO: 1714008 - RNA, 19 nt, Artificial Sequence
  Description of Artificial Sequence: Synthetic oligonucleotide
ggcuuccgcucggcaucuc

SEQ ID NO: 1714009 - RNA, 19 nt, Artificial Sequence
  Description of Artificial Sequence: Synthetic oligonucleotide
cguugcuggcugcgacuaa

SEQ ID NO: 1714010 - RNA, 19 nt, Artificial Sequence
  Description of Artificial Sequence: Synthetic oligonucleotide
ccccggugucuucuagaau

SEQ ID NO: 1714011 - RNA, 19 nt, Artificial Sequence
  Description of Artificial Sequence: Synthetic oligonucleotide
gugcugccggcaggugauu

SEQ ID NO: 1714012 - RNA, 19 nt, Artificial Sequence
  Description of Artificial Sequence: Synthetic oligonucleotide
cggcuuccgcucggcaucu

SEQ ID NO: 1714013 - RNA, 19 nt, Artificial Sequence
  Description of Artificial Sequence: Synthetic oligonucleotide
aaguuagucagguaaaggc

SEQ ID NO: 1714014 - RNA, 19 nt, Artificial Sequence
  Description of Artificial Sequence: Synthetic oligonucleotide
aaauaggacacagccaucc

SEQ ID NO: 1714015 - RNA, 19 nt, Artificial Sequence
  Description of Artificial Sequence: Synthetic oligonucleotide
ucaauuuagacaagucugg

SEQ ID NO: 1714016 - RNA, 19 nt, Artificial Sequence
  Description of Artificial Sequence: Synthetic oligonucleotide
acuagaaaugcauucuagc

SEQ ID NO: 1714017 - RNA, 19 nt, Artificial Sequence
  Description of Artificial Sequence: Synthetic oligonucleotide
aaauaucucccacugagug

SEQ ID NO: 1714018 - RNA, 19 nt, Artificial Sequence
  Description of Artificial Sequence: Synthetic oligonucleotide
auuuagacaagucugguga

SEQ ID NO: 1714019 - RNA, 19 nt, Artificial Sequence
  Description of Artificial Sequence: Synthetic oligonucleotide
cuagaaaugcauucuagcc

SEQ ID NO: 1714020 - RNA, 19 nt, Artificial Sequence
  Description of Artificial Sequence: Synthetic oligonucleotide
aauaucucccacugagugg

SEQ ID NO: 1714021 - RNA, 19 nt, Artificial Sequence
  Description of Artificial Sequence: Synthetic oligonucleotide
aaaagggccaacgugguuc

SEQ ID NO: 1714022 - RNA, 19 nt, Artificial Sequence
  Description of Artificial Sequence: Synthetic oligonucleotide
agaaaugcauucuagccug

SEQ ID NO: 1714023 - RNA, 19 nt, Artificial Sequence
  Description of Artificial Sequence: Synthetic oligonucleotide
aaugcauucuagccugggg

SEQ ID NO: 1714024 - RNA, 19 nt, Artificial Sequence
  Description of Artificial Sequence: Synthetic oligonucleotide
aaaguuagucagguaaagg

SEQ ID NO: 1714025 - RNA, 19 nt, Artificial Sequence
  Description of Artificial Sequence: Synthetic oligonucleotide
agcacguaacaccagugcc

SEQ ID NO: 1714026 - RNA, 19 nt, Artificial Sequence
  Description of Artificial Sequence: Synthetic oligonucleotide
agguaaauguggcaacccc

SEQ ID NO: 1714027 - RNA, 19 nt, Artificial Sequence
  Description of Artificial Sequence: Synthetic oligonucleotide
aacaccagugcccucaagu

SEQ ID NO: 1714028 - RNA, 19 nt, Artificial Sequence
  Description of Artificial Sequence: Synthetic oligonucleotide
aauccagacgugugaaguc

SEQ ID NO: 1714029 - RNA, 19 nt, Artificial Sequence
  Description of Artificial Sequence: Synthetic oligonucleotide
gucaauuuagacaagucug

SEQ ID NO: 1714030 - RNA, 19 nt, Artificial Sequence
  Description of Artificial Sequence: Synthetic oligonucleotide
agacgugugaaguccagac

SEQ ID NO: 1714031 - RNA, 19 nt, Artificial Sequence
  Description of Artificial Sequence: Synthetic oligonucleotide
gaagguuaaaggucucccg

SEQ ID NO: 1714032 - RNA, 19 nt, Artificial Sequence
  Description of Artificial Sequence: Synthetic oligonucleotide
acagcuaugagaaagucca

SEQ ID NO: 1714033 - RNA, 19 nt, Artificial Sequence
  Description of Artificial Sequence: Synthetic oligonucleotide
gguuaggaaaguuagucag

SEQ ID NO: 1714034 - RNA, 19 nt, Artificial Sequence
  Description of Artificial Sequence: Synthetic oligonucleotide
aacgugguucacucgcaac

SEQ ID NO: 1714035 - RNA, 19 nt, Artificial Sequence
  Description of Artificial Sequence: Synthetic oligonucleotide
guggcaaaggccuguaccg

SEQ ID NO: 1714036 - RNA, 19 nt, Artificial Sequence
  Description of Artificial Sequence: Synthetic oligonucleotide
uuuagacaagucuggugag

SEQ ID NO: 1714037 - RNA, 19 nt, Artificial Sequence
  Description of Artificial Sequence: Synthetic oligonucleotide
uaaaggucucccgaguccg

SEQ ID NO: 1714038 - RNA, 19 nt, Artificial Sequence
  Description of Artificial Sequence: Synthetic oligonucleotide
cagacgaccacgacggugg

SEQ ID NO: 1714039 - RNA, 19 nt, Artificial Sequence
  Description of Artificial Sequence: Synthetic oligonucleotide
gggcacaugauuuuaggcg

SEQ ID NO: 1714040 - RNA, 19 nt, Artificial Sequence
  Description of Artificial Sequence: Synthetic oligonucleotide
aauguggcaaccccucagu

SEQ ID NO: 1714041 - RNA, 19 nt, Artificial Sequence
  Description of Artificial Sequence: Synthetic oligonucleotide
ucuugguagcuuuccacag

SEQ ID NO: 1714042 - RNA, 19 nt, Artificial Sequence
  Description of Artificial Sequence: Synthetic oligonucleotide
ggcacaugauuuuaggcgg

SEQ ID NO: 1714043 - RNA, 19 nt, Artificial Sequence
  Description of Artificial Sequence: Synthetic oligonucleotide
gacacuaccaccacacggc

SEQ ID NO: 1714044 - RNA, 19 nt, Artificial Sequence
  Description of Artificial Sequence: Synthetic oligonucleotide
gacgugugaaguccagacg

SEQ ID NO: 1714045 - RNA, 19 nt, Artificial Sequence
  Description of Artificial Sequence: Synthetic oligonucleotide
uuggcuaguuugcugucag

SEQ ID NO: 1714046 - RNA, 19 nt, Artificial Sequence
  Description of Artificial Sequence: Synthetic oligonucleotide
uagcacguaacaccagugc

SEQ ID NO: 1714047 - RNA, 19 nt, Artificial Sequence
  Description of Artificial Sequence: Synthetic oligonucleotide
auccagacgugugaagucc

SEQ ID NO: 1714048 - RNA, 19 nt, Artificial Sequence
  Description of Artificial Sequence: Synthetic oligonucleotide
augauuuuaggcgggguag

SEQ ID NO: 1714049 - RNA, 19 nt, Artificial Sequence
  Description of Artificial Sequence: Synthetic oligonucleotide
uucacucgcaacagaaggu

SEQ ID NO: 1714050 - RNA, 19 nt, Artificial Sequence
  Description of Artificial Sequence: Synthetic oligonucleotide
agcgcugucaucuucccga

SEQ ID NO: 1714051 - RNA, 19 nt, Artificial Sequence
  Description of Artificial Sequence: Synthetic oligonucleotide
guaguagccaggccagugg

SEQ ID NO: 1714052 - RNA, 19 nt, Artificial Sequence
  Description of Artificial Sequence: Synthetic oligonucleotide
agacuggcuaaguccaagg

SEQ ID NO: 1714053 - RNA, 19 nt, Artificial Sequence
  Description of Artificial Sequence: Synthetic oligonucleotide
aaaugcauucuagccuggg

SEQ ID NO: 1714054 - RNA, 19 nt, Artificial Sequence
  Description of Artificial Sequence: Synthetic oligonucleotide
gcugugucaauuuagacaa

SEQ ID NO: 1714055 - RNA, 19 nt, Artificial Sequence
  Description of Artificial Sequence: Synthetic oligonucleotide
uguggcaaccccucagugc

SEQ ID NO: 1714056 - RNA, 19 nt, Artificial Sequence
  Description of Artificial Sequence: Synthetic oligonucleotide
ggcaaaauaucucccacug

SEQ ID NO: 1714057 - RNA, 19 nt, Artificial Sequence
  Description of Artificial Sequence: Synthetic oligonucleotide
auaucucccacugaguggu

SEQ ID NO: 1714058 - RNA, 19 nt, Artificial Sequence
  Description of Artificial Sequence: Synthetic oligonucleotide
ugagcugcauagcacguaa

SEQ ID NO: 1714059 - RNA, 19 nt, Artificial Sequence
  Description of Artificial Sequence: Synthetic oligonucleotide
aaaauaucucccacugagu

SEQ ID NO: 1714060 - RNA, 19 nt, Artificial Sequence
  Description of Artificial Sequence: Synthetic oligonucleotide
cgcaaaauaggacacagcc

SEQ ID NO: 1714061 - RNA, 19 nt, Artificial Sequence
  Description of Artificial Sequence: Synthetic oligonucleotide
aaguccagacgaccacgac

SEQ ID NO: 1714062 - RNA, 19 nt, Artificial Sequence
  Description of Artificial Sequence: Synthetic oligonucleotide
cuucgcugugucaauuuag

SEQ ID NO: 1714063 - RNA, 19 nt, Artificial Sequence
  Description of Artificial Sequence: Synthetic oligonucleotide
agcugcauagcacguaaca

SEQ ID NO: 1714064 - RNA, 19 nt, Artificial Sequence
  Description of Artificial Sequence: Synthetic oligonucleotide
ugaauucuucgcuguguca

SEQ ID NO: 1714065 - RNA, 19 nt, Artificial Sequence
  Description of Artificial Sequence: Synthetic oligonucleotide
uuagacaagucuggugagc

SEQ ID NO: 1714066 - RNA, 19 nt, Artificial Sequence
  Description of Artificial Sequence: Synthetic oligonucleotide
gugggcgcaaaauaggaca

SEQ ID NO: 1714067 - RNA, 19 nt, Artificial Sequence
  Description of Artificial Sequence: Synthetic oligonucleotide
ucugaguucacagguccug

SEQ ID NO: 1714068 - RNA, 19 nt, Artificial Sequence
  Description of Artificial Sequence: Synthetic oligonucleotide
agcagaaaagggccaacgu

SEQ ID NO: 1714069 - RNA, 19 nt, Artificial Sequence
  Description of Artificial Sequence: Synthetic oligonucleotide
aauucuucgcugugucaau

SEQ ID NO: 1714070 - RNA, 19 nt, Artificial Sequence
  Description of Artificial Sequence: Synthetic oligonucleotide
aggugcccggaguaguagc

SEQ ID NO: 1714071 - RNA, 19 nt, Artificial Sequence
  Description of Artificial Sequence: Synthetic oligonucleotide
ugggcgcaaaauaggacac

SEQ ID NO: 1714072 - RNA, 19 nt, Artificial Sequence
  Description of Artificial Sequence: Synthetic oligonucleotide
uaaaggccgagccuucauc

SEQ ID NO: 1714073 - RNA, 19 nt, Artificial Sequence
  Description of Artificial Sequence: Synthetic oligonucleotide
accaccgggcaauccagac

SEQ ID NO: 1714074 - RNA, 19 nt, Artificial Sequence
  Description of Artificial Sequence: Synthetic oligonucleotide
gcagaaaagggccaacgug

SEQ ID NO: 1714075 - RNA, 19 nt, Artificial Sequence
  Description of Artificial Sequence: Synthetic oligonucleotide
ugauuuuaggcgggguagc

SEQ ID NO: 1714076 - RNA, 19 nt, Artificial Sequence
  Description of Artificial Sequence: Synthetic oligonucleotide
gacaguuggcaaaauaucu

SEQ ID NO: 1714077 - RNA, 19 nt, Artificial Sequence
  Description of Artificial Sequence: Synthetic oligonucleotide
gagguaaauguggcaaccc

SEQ ID NO: 1714078 - RNA, 19 nt, Artificial Sequence
  Description of Artificial Sequence: Synthetic oligonucleotide
gagugguucaaugcccucc

SEQ ID NO: 1714079 - RNA, 19 nt, Artificial Sequence
  Description of Artificial Sequence: Synthetic oligonucleotide
agcccggacagcuaugaga

SEQ ID NO: 1714080 - RNA, 19 nt, Artificial Sequence
  Description of Artificial Sequence: Synthetic oligonucleotide
ucgcaacagaagguuaaag

SEQ ID NO: 1714081 - RNA, 19 nt, Artificial Sequence
  Description of Artificial Sequence: Synthetic oligonucleotide
agugggcgcaaaauaggac

SEQ ID NO: 1714082 - RNA, 19 nt, Artificial Sequence
  Description of Artificial Sequence: Synthetic oligonucleotide
ucuucgcugugucaauuua

SEQ ID NO: 1714083 - RNA, 19 nt, Artificial Sequence
  Description of Artificial Sequence: Synthetic oligonucleotide
uucugaguucacagguccu

SEQ ID NO: 1714084 - RNA, 19 nt, Artificial Sequence
  Description of Artificial Sequence: Synthetic oligonucleotide
guaaauguggcaaccccuc

SEQ ID NO: 1714085 - RNA, 19 nt, Artificial Sequence
  Description of Artificial Sequence: Synthetic oligonucleotide
cuguaccgaggccagacug

SEQ ID NO: 1714086 - RNA, 19 nt, Artificial Sequence
  Description of Artificial Sequence: Synthetic oligonucleotide
gaaaugcauucuagccugg

SEQ ID NO: 1714087 - RNA, 19 nt, Artificial Sequence
  Description of Artificial Sequence: Synthetic oligonucleotide
aguucccgggcaaagagca

SEQ ID NO: 1714088 - RNA, 19 nt, Artificial Sequence
  Description of Artificial Sequence: Synthetic oligonucleotide
gugguuuucucaggguagg

SEQ ID NO: 1714089 - RNA, 19 nt, Artificial Sequence
  Description of Artificial Sequence: Synthetic oligonucleotide
aguaguagccaggccagug

SEQ ID NO: 1714090 - RNA, 19 nt, Artificial Sequence
  Description of Artificial Sequence: Synthetic oligonucleotide
aggacacuaccaccacacg

SEQ ID NO: 1714091 - RNA, 19 nt, Artificial Sequence
  Description of Artificial Sequence: Synthetic oligonucleotide
aguccaaggccaugaagau

SEQ ID NO: 1714092 - RNA, 19 nt, Artificial Sequence
  Description of Artificial Sequence: Synthetic oligonucleotide
ugacgcaggaagaguucug

SEQ ID NO: 1714093 - RNA, 19 nt, Artificial Sequence
  Description of Artificial Sequence: Synthetic oligonucleotide
ugguuuucucaggguaggg

SEQ ID NO: 1714094 - RNA, 19 nt, Artificial Sequence
  Description of Artificial Sequence: Synthetic oligonucleotide
ucccaccgcacuagaaaug

SEQ ID NO: 1714095 - RNA, 19 nt, Artificial Sequence
  Description of Artificial Sequence: Synthetic oligonucleotide
agcacguaggcgcccagca

SEQ ID NO: 1714096 - RNA, 19 nt, Artificial Sequence
  Description of Artificial Sequence: Synthetic oligonucleotide
ugcccggaguaguagccag

SEQ ID NO: 1714097 - RNA, 19 nt, Artificial Sequence
  Description of Artificial Sequence: Synthetic oligonucleotide
cacagccgaggcuuugagg

SEQ ID NO: 1714098 - RNA, 19 nt, Artificial Sequence
  Description of Artificial Sequence: Synthetic oligonucleotide
uuggcgcccgugaccacgg

SEQ ID NO: 1714099 - RNA, 19 nt, Artificial Sequence
  Description of Artificial Sequence: Synthetic oligonucleotide
auaugcccgaagcuccugu

SEQ ID NO: 1714100 - RNA, 19 nt, Artificial Sequence
  Description of Artificial Sequence: Synthetic oligonucleotide
uaggcgggguagcaacaag

SEQ ID NO: 1714101 - RNA, 19 nt, Artificial Sequence
  Description of Artificial Sequence: Synthetic oligonucleotide
cuggcggaggucgaagacg

SEQ ID NO: 1714102 - RNA, 19 nt, Artificial Sequence
  Description of Artificial Sequence: Synthetic oligonucleotide
auagcacguaacaccagug

SEQ ID NO: 1714103 - RNA, 19 nt, Artificial Sequence
  Description of Artificial Sequence: Synthetic oligonucleotide
cuaguuugcugucagcaua

SEQ ID NO: 1714104 - RNA, 19 nt, Artificial Sequence
  Description of Artificial Sequence: Synthetic oligonucleotide
caaguugguuggcaaguuc

SEQ ID NO: 1714105 - RNA, 19 nt, Artificial Sequence
  Description of Artificial Sequence: Synthetic oligonucleotide
cacaugauuuuaggcgggg

SEQ ID NO: 1714106 - RNA, 19 nt, Artificial Sequence
  Description of Artificial Sequence: Synthetic oligonucleotide
ggggcacaugauuuuaggc

SEQ ID NO: 1714107 - RNA, 19 nt, Artificial Sequence
  Description of Artificial Sequence: Synthetic oligonucleotide
gccaacgugguucacucgc

SEQ ID NO: 1714108 - RNA, 19 nt, Artificial Sequence
  Description of Artificial Sequence: Synthetic oligonucleotide
acgcaggaagaguucugag

SEQ ID NO: 1714109 - RNA, 19 nt, Artificial Sequence
  Description of Artificial Sequence: Synthetic oligonucleotide
gauuuuaggcgggguagca

SEQ ID NO: 1714110 - RNA, 19 nt, Artificial Sequence
  Description of Artificial Sequence: Synthetic oligonucleotide
ggcgcaaaauaggacacag

SEQ ID NO: 1714111 - RNA, 19 nt, Artificial Sequence
  Description of Artificial Sequence: Synthetic oligonucleotide
ucacucgcaacagaagguu

SEQ ID NO: 1714112 - RNA, 19 nt, Artificial Sequence
  Description of Artificial Sequence: Synthetic oligonucleotide
ucgaagacggccgccuccc

SEQ ID NO: 1714113 - RNA, 19 nt, Artificial Sequence
  Description of Artificial Sequence: Synthetic oligonucleotide
accgaggccagacuggcua

SEQ ID NO: 1714114 - RNA, 19 nt, Artificial Sequence
  Description of Artificial Sequence: Synthetic oligonucleotide
gugaccacggccgugcgac

SEQ ID NO: 1714115 - RNA, 19 nt, Artificial Sequence
  Description of Artificial Sequence: Synthetic oligonucleotide
cuguugccagcccaccacc

SEQ ID NO: 1714116 - RNA, 19 nt, Artificial Sequence
  Description of Artificial Sequence: Synthetic oligonucleotide
ccagugggcgcaaaauagg

SEQ ID NO: 1714117 - RNA, 19 nt, Artificial Sequence
  Description of Artificial Sequence: Synthetic oligonucleotide
guuggcgcccgugaccacg

SEQ ID NO: 1714118 - RNA, 19 nt, Artificial Sequence
  Description of Artificial Sequence: Synthetic oligonucleotide
uucuucgcugugucaauuu

SEQ ID NO: 1714119 - RNA, 19 nt, Artificial Sequence
  Description of Artificial Sequence: Synthetic oligonucleotide
accacggccgugcgacccc

SEQ ID NO: 1714120 - RNA, 19 nt, Artificial Sequence
  Description of Artificial Sequence: Synthetic oligonucleotide
agaaaagggccaacguggu

SEQ ID NO: 1714121 - RNA, 19 nt, Artificial Sequence
  Description of Artificial Sequence: Synthetic oligonucleotide
gucgaagacggccgccucc

SEQ ID NO: 1714122 - RNA, 19 nt, Artificial Sequence
  Description of Artificial Sequence: Synthetic oligonucleotide
aggccgagccuucaucuga

SEQ ID NO: 1714123 - RNA, 19 nt, Artificial Sequence
  Description of Artificial Sequence: Synthetic oligonucleotide
cgggguagcaacaagugug

SEQ ID NO: 1714124 - RNA, 19 nt, Artificial Sequence
  Description of Artificial Sequence: Synthetic oligonucleotide
cagugggcgcaaaauagga

SEQ ID NO: 1714125 - RNA, 19 nt, Artificial Sequence
  Description of Artificial Sequence: Synthetic oligonucleotide
cugggugagcugcauagca

SEQ ID NO: 1714126 - RNA, 19 nt, Artificial Sequence
  Description of Artificial Sequence: Synthetic oligonucleotide
uaggaaaguuagucaggua

SEQ ID NO: 1714127 - RNA, 19 nt, Artificial Sequence
  Description of Artificial Sequence: Synthetic oligonucleotide
ugaggugcccggaguagua

SEQ ID NO: 1714128 - RNA, 19 nt, Artificial Sequence
  Description of Artificial Sequence: Synthetic oligonucleotide
guacaggggugucugggca

SEQ ID NO: 1714129 - RNA, 19 nt, Artificial Sequence
  Description of Artificial Sequence: Synthetic oligonucleotide
gagaccuccuccacgcgac

SEQ ID NO: 1714130 - RNA, 19 nt, Artificial Sequence
  Description of Artificial Sequence: Synthetic oligonucleotide
agcaccacgcgcgcucccc

SEQ ID NO: 1714131 - RNA, 19 nt, Artificial Sequence
  Description of Artificial Sequence: Synthetic oligonucleotide
cgagccuucaucugaauuc

SEQ ID NO: 1714132 - RNA, 19 nt, Artificial Sequence
  Description of Artificial Sequence: Synthetic oligonucleotide
uccuggcggaggucgaaga

SEQ ID NO: 1714133 - RNA, 19 nt, Artificial Sequence
  Description of Artificial Sequence: Synthetic oligonucleotide
agcacaguacagggguguc

SEQ ID NO: 1714134 - RNA, 19 nt, Artificial Sequence
  Description of Artificial Sequence: Synthetic oligonucleotide
accacgcgcgcuccccggc

SEQ ID NO: 1714135 - RNA, 19 nt, Artificial Sequence
  Description of Artificial Sequence: Synthetic oligonucleotide
uggcuaguuugcugucagc

SEQ ID NO: 1714136 - RNA, 19 nt, Artificial Sequence
  Description of Artificial Sequence: Synthetic oligonucleotide
ccggacagcuaugagaaag

SEQ ID NO: 1714137 - RNA, 19 nt, Artificial Sequence
  Description of Artificial Sequence: Synthetic oligonucleotide
cauagcacguaacaccagu

SEQ ID NO: 1714138 - RNA, 19 nt, Artificial Sequence
  Description of Artificial Sequence: Synthetic oligonucleotide
ggcuaguuugcugucagca

SEQ ID NO: 1714139 - RNA, 19 nt, Artificial Sequence
  Description of Artificial Sequence: Synthetic oligonucleotide
gguugaggcucuuccucag

SEQ ID NO: 1714140 - RNA, 19 nt, Artificial Sequence
  Description of Artificial Sequence: Synthetic oligonucleotide
ugagugguucaaugcccuc

SEQ ID NO: 1714141 - RNA, 19 nt, Artificial Sequence
  Description of Artificial Sequence: Synthetic oligonucleotide
uuaggcgggguagcaacaa

SEQ ID NO: 1714142 - RNA, 19 nt, Artificial Sequence
  Description of Artificial Sequence: Synthetic oligonucleotide
acaugauuuuaggcggggu

SEQ ID NO: 1714143 - RNA, 19 nt, Artificial Sequence
  Description of Artificial Sequence: Synthetic oligonucleotide
acaagucuggugagcccgg

SEQ ID NO: 1714144 - RNA, 19 nt, Artificial Sequence
  Description of Artificial Sequence: Synthetic oligonucleotide
gaggugcccggaguaguag

SEQ ID NO: 1714145 - RNA, 19 nt, Artificial Sequence
  Description of Artificial Sequence: Synthetic oligonucleotide
gaugccgcuguuggcgccc

SEQ ID NO: 1714146 - RNA, 19 nt, Artificial Sequence
  Description of Artificial Sequence: Synthetic oligonucleotide
gguucacucgcaacagaag

SEQ ID NO: 1714147 - RNA, 19 nt, Artificial Sequence
  Description of Artificial Sequence: Synthetic oligonucleotide
ccgggcaaagagcacauug

SEQ ID NO: 1714148 - RNA, 19 nt, Artificial Sequence
  Description of Artificial Sequence: Synthetic oligonucleotide
gcaauccagacgugugaag

SEQ ID NO: 1714149 - RNA, 19 nt, Artificial Sequence
  Description of Artificial Sequence: Synthetic oligonucleotide
ggaaaguuagucagguaaa

SEQ ID NO: 1714150 - RNA, 19 nt, Artificial Sequence
  Description of Artificial Sequence: Synthetic oligonucleotide
cagccuggucaucucuagc

SEQ ID NO: 1714151 - RNA, 19 nt, Artificial Sequence
  Description of Artificial Sequence: Synthetic oligonucleotide
ggccacaggaacugauccc

SEQ ID NO: 1714152 - RNA, 19 nt, Artificial Sequence
  Description of Artificial Sequence: Synthetic oligonucleotide
gaccuccuccacgcgacag

SEQ ID NO: 1714153 - RNA, 19 nt, Artificial Sequence
  Description of Artificial Sequence: Synthetic oligonucleotide
uccacgcgacaguuggcaa

SEQ ID NO: 1714154 - RNA, 19 nt, Artificial Sequence
  Description of Artificial Sequence: Synthetic oligonucleotide
caccgggcaauccagacgu

SEQ ID NO: 1714155 - RNA, 19 nt, Artificial Sequence
  Description of Artificial Sequence: Synthetic oligonucleotide
gcuguuggcgcccgugacc

SEQ ID NO: 1714156 - RNA, 19 nt, Artificial Sequence
  Description of Artificial Sequence: Synthetic oligonucleotide
gacaagcacguaggcgccc

SEQ ID NO: 1714157 - RNA, 19 nt, Artificial Sequence
  Description of Artificial Sequence: Synthetic oligonucleotide
aggcgggguagcaacaagu

SEQ ID NO: 1714158 - RNA, 19 nt, Artificial Sequence
  Description of Artificial Sequence: Synthetic oligonucleotide
gagcccggacagcuaugag

SEQ ID NO: 1714159 - RNA, 19 nt, Artificial Sequence
  Description of Artificial Sequence: Synthetic oligonucleotide
gaccacggccgugcgaccc

SEQ ID NO: 1714160 - RNA, 19 nt, Artificial Sequence
  Description of Artificial Sequence: Synthetic oligonucleotide
gcacaugauuuuaggcggg

SEQ ID NO: 1714161 - RNA, 19 nt, Artificial Sequence
  Description of Artificial Sequence: Synthetic oligonucleotide
acaagcacguaggcgccca

SEQ ID NO: 1714162 - RNA, 19 nt, Artificial Sequence
  Description of Artificial Sequence: Synthetic oligonucleotide
agggccaacgugguucacu

SEQ ID NO: 1714163 - RNA, 19 nt, Artificial Sequence
  Description of Artificial Sequence: Synthetic oligonucleotide
accacgacggugggcagcu

SEQ ID NO: 1714164 - RNA, 19 nt, Artificial Sequence
  Description of Artificial Sequence: Synthetic oligonucleotide
cgacaguuggcaaaauauc

SEQ ID NO: 1714165 - RNA, 19 nt, Artificial Sequence
  Description of Artificial Sequence: Synthetic oligonucleotide
cccgaugccgcuguuggcg

SEQ ID NO: 1714166 - RNA, 19 nt, Artificial Sequence
  Description of Artificial Sequence: Synthetic oligonucleotide
cccaccgcacuagaaaugc

SEQ ID NO: 1714167 - RNA, 19 nt, Artificial Sequence
  Description of Artificial Sequence: Synthetic oligonucleotide
ggucccaccgcacuagaaa

SEQ ID NO: 1714168 - RNA, 19 nt, Artificial Sequence
  Description of Artificial Sequence: Synthetic oligonucleotide
acguaacaccagugcccuc

SEQ ID NO: 1714169 - RNA, 19 nt, Artificial Sequence
  Description of Artificial Sequence: Synthetic oligonucleotide
auucuucgcugugucaauu

SEQ ID NO: 1714170 - RNA, 19 nt, Artificial Sequence
  Description of Artificial Sequence: Synthetic oligonucleotide
agagcacauuggcuaguuu

SEQ ID NO: 1714171 - RNA, 19 nt, Artificial Sequence
  Description of Artificial Sequence: Synthetic oligonucleotide
ccgcacuagaaaugcauuc

SEQ ID NO: 1714172 - RNA, 19 nt, Artificial Sequence
  Description of Artificial Sequence: Synthetic oligonucleotide
ccucauuguucccacuuuc

SEQ ID NO: 1714173 - RNA, 19 nt, Artificial Sequence
  Description of Artificial Sequence: Synthetic oligonucleotide
cuagcagcuggggagaccu

SEQ ID NO: 1714174 - RNA, 19 nt, Artificial Sequence
  Description of Artificial Sequence: Synthetic oligonucleotide
gguaaauguggcaaccccu

SEQ ID NO: 1714175 - RNA, 19 nt, Artificial Sequence
  Description of Artificial Sequence: Synthetic oligonucleotide
ucccgaugccgcuguuggc

SEQ ID NO: 1714176 - RNA, 19 nt, Artificial Sequence
  Description of Artificial Sequence: Synthetic oligonucleotide
aagggccaacgugguucac

SEQ ID NO: 1714177 - RNA, 19 nt, Artificial Sequence
  Description of Artificial Sequence: Synthetic oligonucleotide
ggcuuugaggggucccacc

SEQ ID NO: 1714178 - RNA, 19 nt, Artificial Sequence
  Description of Artificial Sequence: Synthetic oligonucleotide
gggccaacgugguucacuc

SEQ ID NO: 1714179 - RNA, 19 nt, Artificial Sequence
  Description of Artificial Sequence: Synthetic oligonucleotide
ggcgggguagcaacaagug

SEQ ID NO: 1714180 - RNA, 19 nt, Artificial Sequence
  Description of Artificial Sequence: Synthetic oligonucleotide
acgacggugggcagcugag

SEQ ID NO: 1714181 - RNA, 19 nt, Artificial Sequence
  Description of Artificial Sequence: Synthetic oligonucleotide
cuccacgcgacaguuggca

SEQ ID NO: 1714182 - RNA, 19 nt, Artificial Sequence
  Description of Artificial Sequence: Synthetic oligonucleotide
ggagaccuccuccacgcga

SEQ ID NO: 1714183 - RNA, 19 nt, Artificial Sequence
  Description of Artificial Sequence: Synthetic oligonucleotide
ggugcccggaguaguagcc

SEQ ID NO: 1714184 - RNA, 19 nt, Artificial Sequence
  Description of Artificial Sequence: Synthetic oligonucleotide
cugccgaugccgccgcaug

SEQ ID NO: 1714185 - RNA, 19 nt, Artificial Sequence
  Description of Artificial Sequence: Synthetic oligonucleotide
accgcacuagaaaugcauu

SEQ ID NO: 1714186 - RNA, 19 nt, Artificial Sequence
  Description of Artificial Sequence: Synthetic oligonucleotide
gguuggcaaguucccgggc

SEQ ID NO: 1714187 - RNA, 19 nt, Artificial Sequence
  Description of Artificial Sequence: Synthetic oligonucleotide
ccaccgggcaauccagacg

SEQ ID NO: 1714188 - RNA, 19 nt, Artificial Sequence
  Description of Artificial Sequence: Synthetic oligonucleotide
cacgacggugggcagcuga

SEQ ID NO: 1714189 - RNA, 19 nt, Artificial Sequence
  Description of Artificial Sequence: Synthetic oligonucleotide
gcacuagaaaugcauucua

SEQ ID NO: 1714190 - RNA, 19 nt, Artificial Sequence
  Description of Artificial Sequence: Synthetic oligonucleotide
gggcaauccagacguguga

SEQ ID NO: 1714191 - RNA, 19 nt, Artificial Sequence
  Description of Artificial Sequence: Synthetic oligonucleotide
gucccaccgcacuagaaau

SEQ ID NO: 1714192 - RNA, 19 nt, Artificial Sequence
  Description of Artificial Sequence: Synthetic oligonucleotide
uccagacgaccacgacggu

SEQ ID NO: 1714193 - RNA, 19 nt, Artificial Sequence
  Description of Artificial Sequence: Synthetic oligonucleotide
caccacgcgcgcuccccgg

SEQ ID NO: 1714194 - RNA, 19 nt, Artificial Sequence
  Description of Artificial Sequence: Synthetic oligonucleotide
caagcacguaggcgcccag

SEQ ID NO: 1714195 - RNA, 19 nt, Artificial Sequence
  Description of Artificial Sequence: Synthetic oligonucleotide
guaacaccagugcccucaa

SEQ ID NO: 1714196 - RNA, 19 nt, Artificial Sequence
  Description of Artificial Sequence: Synthetic oligonucleotide
ggccaacgugguucacucg

SEQ ID NO: 1714197 - RNA, 19 nt, Artificial Sequence
  Description of Artificial Sequence: Synthetic oligonucleotide
ugcccucaaguugguuggc

SEQ ID NO: 1714198 - RNA, 19 nt, Artificial Sequence
  Description of Artificial Sequence: Synthetic oligonucleotide
caccgcacuagaaaugcau

SEQ ID NO: 1714199 - RNA, 19 nt, Artificial Sequence
  Description of Artificial Sequence: Synthetic oligonucleotide
cuuuccuggcggaggucga

SEQ ID NO: 1714200 - RNA, 19 nt, Artificial Sequence
  Description of Artificial Sequence: Synthetic oligonucleotide
gcgacaguuggcaaaauau

SEQ ID NO: 1714201 - RNA, 19 nt, Artificial Sequence
  Description of Artificial Sequence: Synthetic oligonucleotide
gcccggacagcuaugagaa

SEQ ID NO: 1714202 - RNA, 19 nt, Artificial Sequence
  Description of Artificial Sequence: Synthetic oligonucleotide
cacguaacaccagugcccu

SEQ ID NO: 1714203 - RNA, 19 nt, Artificial Sequence
  Description of Artificial Sequence: Synthetic oligonucleotide
gugacgcaggaagaguucu

SEQ ID NO: 1714204 - RNA, 19 nt, Artificial Sequence
  Description of Artificial Sequence: Synthetic oligonucleotide
caacgugguucacucgcaa

SEQ ID NO: 1714205 - RNA, 19 nt, Artificial Sequence
  Description of Artificial Sequence: Synthetic oligonucleotide
gaggggucccaccgcacua

SEQ ID NO: 1714206 - RNA, 19 nt, Artificial Sequence
  Description of Artificial Sequence: Synthetic oligonucleotide
cacgcgacaguuggcaaaa

SEQ ID NO: 1714207 - RNA, 19 nt, Artificial Sequence
  Description of Artificial Sequence: Synthetic oligonucleotide
gaaaagggccaacgugguu

SEQ ID NO: 1714208 - RNA, 19 nt, Artificial Sequence
  Description of Artificial Sequence: Synthetic oligonucleotide
cgugcgaccccgcaggcug

SEQ ID NO: 1714209 - RNA, 19 nt, Artificial Sequence
  Description of Artificial Sequence: Synthetic oligonucleotide
uggcaaguucccgggcaaa

SEQ ID NO: 1714210 - RNA, 19 nt, Artificial Sequence
  Description of Artificial Sequence: Synthetic oligonucleotide
ggcaauccagacgugugaa

SEQ ID NO: 1714211 - RNA, 19 nt, Artificial Sequence
  Description of Artificial Sequence: Synthetic oligonucleotide
gggagaccuccuccacgcg

SEQ ID NO: 1714212 - RNA, 19 nt, Artificial Sequence
  Description of Artificial Sequence: Synthetic oligonucleotide
cccggaguaguagccaggc

SEQ ID NO: 1714213 - RNA, 19 nt, Artificial Sequence
  Description of Artificial Sequence: Synthetic oligonucleotide
cagacgugugaaguccaga

SEQ ID NO: 1714214 - RNA, 19 nt, Artificial Sequence
  Description of Artificial Sequence: Synthetic oligonucleotide
gcgcaaaauaggacacagc

SEQ ID NO: 1714215 - RNA, 19 nt, Artificial Sequence
  Description of Artificial Sequence: Synthetic oligonucleotide
acggccgugcgaccccgca

SEQ ID NO: 1714216 - RNA, 19 nt, Artificial Sequence
  Description of Artificial Sequence: Synthetic oligonucleotide
cucgcaacagaagguuaaa

SEQ ID NO: 1714217 - RNA, 19 nt, Artificial Sequence
  Description of Artificial Sequence: Synthetic oligonucleotide
gaguccggccacaggaacu

SEQ ID NO: 1714218 - RNA, 19 nt, Artificial Sequence
  Description of Artificial Sequence: Synthetic oligonucleotide
gucgcucccgccucggccu

SEQ ID NO: 1714219 - RNA, 19 nt, Artificial Sequence
  Description of Artificial Sequence: Synthetic oligonucleotide
ccagacgaccacgacggug

SEQ ID NO: 1714220 - RNA, 19 nt, Artificial Sequence
  Description of Artificial Sequence: Synthetic oligonucleotide
cgugugaaguccagacgac

SEQ ID NO: 1714221 - RNA, 19 nt, Artificial Sequence
  Description of Artificial Sequence: Synthetic oligonucleotide
cuccccgcgcucccggcug

SEQ ID NO: 1714222 - RNA, 19 nt, Artificial Sequence
  Description of Artificial Sequence: Synthetic oligonucleotide
cucgucgcucccgccucgg

SEQ ID NO: 1714223 - RNA, 19 nt, Artificial Sequence
  Description of Artificial Sequence: Synthetic oligonucleotide
gcauagcacguaacaccag

SEQ ID NO: 1714224 - RNA, 19 nt, Artificial Sequence
  Description of Artificial Sequence: Synthetic oligonucleotide
ugcgaccccgcaggcugcc

SEQ ID NO: 1714225 - RNA, 19 nt, Artificial Sequence
  Description of Artificial Sequence: Synthetic oligonucleotide
ccuggcggaggucgaagac

SEQ ID NO: 1714226 - RNA, 19 nt, Artificial Sequence
  Description of Artificial Sequence: Synthetic oligonucleotide
ggcgcccgugaccacggcc

SEQ ID NO: 1714227 - RNA, 19 nt, Artificial Sequence
  Description of Artificial Sequence: Synthetic oligonucleotide
caugccggcugugcuccug

SEQ ID NO: 1714228 - RNA, 19 nt, Artificial Sequence
  Description of Artificial Sequence: Synthetic oligonucleotide
gcaccacgcgcgcuccccg

SEQ ID NO: 1714229 - RNA, 19 nt, Artificial Sequence
  Description of Artificial Sequence: Synthetic oligonucleotide
ccgaugccgcuguuggcgc

SEQ ID NO: 1714230 - RNA, 19 nt, Artificial Sequence
  Description of Artificial Sequence: Synthetic oligonucleotide
gucucccgaguccggccac

SEQ ID NO: 1714231 - RNA, 19 nt, Artificial Sequence
  Description of Artificial Sequence: Synthetic oligonucleotide
gcuaguuugcugucagcau

SEQ ID NO: 1714232 - RNA, 19 nt, Artificial Sequence
  Description of Artificial Sequence: Synthetic oligonucleotide
ggugagcccggacagcuau

SEQ ID NO: 1714233 - RNA, 19 nt, Artificial Sequence
  Description of Artificial Sequence: Synthetic oligonucleotide
ggcuaaguccaaggccaug

SEQ ID NO: 1714234 - RNA, 19 nt, Artificial Sequence
  Description of Artificial Sequence: Synthetic oligonucleotide
cgggcaauccagacgugug

SEQ ID NO: 1714235 - RNA, 19 nt, Artificial Sequence
  Description of Artificial Sequence: Synthetic oligonucleotide
ccuuggcucagagcucagg

SEQ ID NO: 1714236 - RNA, 19 nt, Artificial Sequence
  Description of Artificial Sequence: Synthetic oligonucleotide
cccgugaccacggccgugc

SEQ ID NO: 1714237 - RNA, 19 nt, Artificial Sequence
  Description of Artificial Sequence: Synthetic oligonucleotide
caccaccgggcaauccaga

SEQ ID NO: 1714238 - RNA, 19 nt, Artificial Sequence
  Description of Artificial Sequence: Synthetic oligonucleotide
gugagcugcauagcacgua

SEQ ID NO: 1714239 - RNA, 19 nt, Artificial Sequence
  Description of Artificial Sequence: Synthetic oligonucleotide
caggaacugaucccugcau

SEQ ID NO: 1714240 - RNA, 19 nt, Artificial Sequence
  Description of Artificial Sequence: Synthetic oligonucleotide
gugcccggaguaguagcca

SEQ ID NO: 1714241 - RNA, 19 nt, Artificial Sequence
  Description of Artificial Sequence: Synthetic oligonucleotide
gaggccagacuggcuaagu

SEQ ID NO: 1714242 - RNA, 19 nt, Artificial Sequence
  Description of Artificial Sequence: Synthetic oligonucleotide
ggucgaagacggccgccuc

SEQ ID NO: 1714243 - RNA, 19 nt, Artificial Sequence
  Description of Artificial Sequence: Synthetic oligonucleotide
ccaacgugguucacucgca

SEQ ID NO: 1714244 - RNA, 19 nt, Artificial Sequence
  Description of Artificial Sequence: Synthetic oligonucleotide
ccggaguaguagccaggcc

SEQ ID NO: 1714245 - RNA, 19 nt, Artificial Sequence
  Description of Artificial Sequence: Synthetic oligonucleotide
caggggugucugggcaccc

SEQ ID NO: 1714246 - RNA, 19 nt, Artificial Sequence
  Description of Artificial Sequence: Synthetic oligonucleotide
gcccggaguaguagccagg

SEQ ID NO: 1714247 - RNA, 19 nt, Artificial Sequence
  Description of Artificial Sequence: Synthetic oligonucleotide
ggcaaccccucagugccca

SEQ ID NO: 1714248 - RNA, 19 nt, Artificial Sequence
  Description of Artificial Sequence: Synthetic oligonucleotide
cgaguccggccacaggaac

SEQ ID NO: 1714249 - RNA, 19 nt, Artificial Sequence
  Description of Artificial Sequence: Synthetic oligonucleotide
gcgggguagcaacaagugu

SEQ ID NO: 1714250 - RNA, 19 nt, Artificial Sequence
  Description of Artificial Sequence: Synthetic oligonucleotide
gccgccgcaugguggggcc

SEQ ID NO: 1714251 - RNA, 19 nt, Artificial Sequence
  Description of Artificial Sequence: Synthetic oligonucleotide
cgucgcucccgccucggcc

SEQ ID NO: 1714252 - RNA, 19 nt, Artificial Sequence
  Description of Artificial Sequence: Synthetic oligonucleotide
gggcgcaaaauaggacaca

SEQ ID NO: 1714253 - RNA, 19 nt, Artificial Sequence
  Description of Artificial Sequence: Synthetic oligonucleotide
ccccuugaggugcccggag

SEQ ID NO: 1714254 - RNA, 19 nt, Artificial Sequence
  Description of Artificial Sequence: Synthetic oligonucleotide
gugcgaccccgcaggcugc

SEQ ID NO: 1714255 - RNA, 19 nt, Artificial Sequence
  Description of Artificial Sequence: Synthetic oligonucleotide
cuccccggcgcgccagcuc

SEQ ID NO: 1714256 - RNA, 19 nt, Artificial Sequence
  Description of Artificial Sequence: Synthetic oligonucleotide
gcaaccccucagugcccag

SEQ ID NO: 1714257 - RNA, 19 nt, Artificial Sequence
  Description of Artificial Sequence: Synthetic oligonucleotide
ccacgcgacaguuggcaaa

SEQ ID NO: 1714258 - RNA, 19 nt, Artificial Sequence
  Description of Artificial Sequence: Synthetic oligonucleotide
ggugagcugcauagcacgu

SEQ ID NO: 1714259 - RNA, 19 nt, Artificial Sequence
  Description of Artificial Sequence: Synthetic oligonucleotide
ccgaugccgccgcauggug

SEQ ID NO: 1714260 - RNA, 19 nt, Artificial Sequence
  Description of Artificial Sequence: Synthetic oligonucleotide
ccucgucgcucccgccucg

SEQ ID NO: 1714261 - RNA, 19 nt, Artificial Sequence
  Description of Artificial Sequence: Synthetic oligonucleotide
accgggcaauccagacgug

SEQ ID NO: 1714262 - RNA, 19 nt, Artificial Sequence
  Description of Artificial Sequence: Synthetic oligonucleotide
gccgcuguuggcgcccgug

SEQ ID NO: 1714263 - RNA, 19 nt, Artificial Sequence
  Description of Artificial Sequence: Synthetic oligonucleotide
gcccucaaguugguuggca

SEQ ID NO: 1714264 - RNA, 19 nt, Artificial Sequence
  Description of Artificial Sequence: Synthetic oligonucleotide
gccgugcgaccccgcaggc

SEQ ID NO: 1714265 - RNA, 19 nt, Artificial Sequence
  Description of Artificial Sequence: Synthetic oligonucleotide
gaccccgcaggcugccgau

SEQ ID NO: 1714266 - RNA, 19 nt, Artificial Sequence
  Description of Artificial Sequence: Synthetic oligonucleotide
cucccgccucggccucgcg

SEQ ID NO: 1714267 - RNA, 19 nt, Artificial Sequence
  Description of Artificial Sequence: Synthetic oligonucleotide
cgcacuagaaaugcauucu

SEQ ID NO: 1714268 - RNA, 19 nt, Artificial Sequence
  Description of Artificial Sequence: Synthetic oligonucleotide
ccaccgcacuagaaaugca

SEQ ID NO: 1714269 - RNA, 19 nt, Artificial Sequence
  Description of Artificial Sequence: Synthetic oligonucleotide
ggccgagccuucaucugaa

SEQ ID NO: 1714270 - RNA, 19 nt, Artificial Sequence
  Description of Artificial Sequence: Synthetic oligonucleotide
cgaugccgcuguuggcgcc

SEQ ID NO: 1714271 - RNA, 19 nt, Artificial Sequence
  Description of Artificial Sequence: Synthetic oligonucleotide
ggccucgucgcucccgccu

SEQ ID NO: 1714272 - RNA, 19 nt, Artificial Sequence
  Description of Artificial Sequence: Synthetic oligonucleotide
acgcgacaguuggcaaaau

SEQ ID NO: 1714273 - RNA, 19 nt, Artificial Sequence
  Description of Artificial Sequence: Synthetic oligonucleotide
ccgugaccacggccgugcg

SEQ ID NO: 1714274 - RNA, 19 nt, Artificial Sequence
  Description of Artificial Sequence: Synthetic oligonucleotide
cgcgacaguuggcaaaaua

SEQ ID NO: 1714275 - RNA, 19 nt, Artificial Sequence
  Description of Artificial Sequence: Synthetic oligonucleotide
ccgaguccggccacaggaa

SEQ ID NO: 1714276 - RNA, 19 nt, Artificial Sequence
  Description of Artificial Sequence: Synthetic oligonucleotide
ccacggccgugcgaccccg

SEQ ID NO: 1714277 - RNA, 19 nt, Artificial Sequence
  Description of Artificial Sequence: Synthetic oligonucleotide
cucccgccugggccucguc

SEQ ID NO: 1714278 - RNA, 19 nt, Artificial Sequence
  Description of Artificial Sequence: Synthetic oligonucleotide
cgaagacggccgccucccc

SEQ ID NO: 1714279 - RNA, 19 nt, Artificial Sequence
  Description of Artificial Sequence: Synthetic oligonucleotide
gcccaccaccgggcaaucc

SEQ ID NO: 1714280 - RNA, 19 nt, Artificial Sequence
  Description of Artificial Sequence: Synthetic oligonucleotide
gcgaccccgcaggcugccg

SEQ ID NO: 1714281 - RNA, 19 nt, Artificial Sequence
  Description of Artificial Sequence: Synthetic oligonucleotide
ccuguaccgaggccagacu

SEQ ID NO: 1714282 - RNA, 19 nt, Artificial Sequence
  Description of Artificial Sequence: Synthetic oligonucleotide
gccgaugccgccgcauggu

SEQ ID NO: 1714283 - RNA, 19 nt, Artificial Sequence
  Description of Artificial Sequence: Synthetic oligonucleotide
gcccgugaccacggccgug

SEQ ID NO: 1714284 - RNA, 19 nt, Artificial Sequence
  Description of Artificial Sequence: Synthetic oligonucleotide
gcgucuccaugccggcugu

SEQ ID NO: 1714285 - RNA, 19 nt, Artificial Sequence
  Description of Artificial Sequence: Synthetic oligonucleotide
ccgggcaauccagacgugu

SEQ ID NO: 1714286 - RNA, 19 nt, Artificial Sequence
  Description of Artificial Sequence: Synthetic oligonucleotide
cgugaccacggccgugcga

SEQ ID NO: 1714287 - RNA, 19 nt, Artificial Sequence
  Description of Artificial Sequence: Synthetic oligonucleotide
ccagcccaccaccgggcaa

SEQ ID NO: 1714288 - RNA, 19 nt, Artificial Sequence
  Description of Artificial Sequence: Synthetic oligonucleotide
cccggacagcuaugagaaa

SEQ ID NO: 1714289 - RNA, 19 nt, Artificial Sequence
  Description of Artificial Sequence: Synthetic oligonucleotide
gccgcaugguggggccuuc

SEQ ID NO: 1714290 - RNA, 19 nt, Artificial Sequence
  Description of Artificial Sequence: Synthetic oligonucleotide
gcugccgaugccgccgcau

SEQ ID NO: 1714291 - RNA, 19 nt, Artificial Sequence
  Description of Artificial Sequence: Synthetic oligonucleotide
cagugcccucaaguugguu

SEQ ID NO: 1714292 - RNA, 19 nt, Artificial Sequence
  Description of Artificial Sequence: Synthetic oligonucleotide
ccgccugggccucgucgcu

SEQ ID NO: 1714293 - RNA, 19 nt, Artificial Sequence
  Description of Artificial Sequence: Synthetic oligonucleotide
ccgugcgaccccgcaggcu

SEQ ID NO: 1714294 - RNA, 19 nt, Artificial Sequence
  Description of Artificial Sequence: Synthetic oligonucleotide
ccaugccggcugugcuccu

SEQ ID NO: 1714295 - RNA, 19 nt, Artificial Sequence
  Description of Artificial Sequence: Synthetic oligonucleotide
cgcccgugaccacggccgu

SEQ ID NO: 1714296 - RNA, 19 nt, Artificial Sequence
  Description of Artificial Sequence: Synthetic oligonucleotide
cccgggcaaagagcacauu

SEQ ID NO: 1714297 - RNA, 19 nt, Artificial Sequence
  Description of Artificial Sequence: Synthetic oligonucleotide
ccgccgcaugguggggccu

SEQ ID NO: 1714298 - RNA, 19 nt, Artificial Sequence
  Description of Artificial Sequence: Synthetic oligonucleotide
cgccgcaugguggggccuu

SEQ ID NO: 1714299 - RNA, 19 nt, Artificial Sequence
  Description of Artificial Sequence: Synthetic oligonucleotide
aaaauagacuucuagccag

SEQ ID NO: 1714300 - RNA, 19 nt, Artificial Sequence
  Description of Artificial Sequence: Synthetic oligonucleotide
ucaacugcauuaaacaacg

SEQ ID NO: 1714301 - RNA, 19 nt, Artificial Sequence
  Description of Artificial Sequence: Synthetic oligonucleotide
auggaaaucaaguaucuac

SEQ ID NO: 1714302 - RNA, 19 nt, Artificial Sequence
  Description of Artificial Sequence: Synthetic oligonucleotide
aaacauccaucacaaaggc

SEQ ID NO: 1714303 - RNA, 19 nt, Artificial Sequence
  Description of Artificial Sequence: Synthetic oligonucleotide
ugcuuuuacagguuuaugg

SEQ ID NO: 1714304 - RNA, 19 nt, Artificial Sequence
  Description of Artificial Sequence: Synthetic oligonucleotide
aguggcaugauauuggcgg

SEQ ID NO: 1714305 - RNA, 19 nt, Artificial Sequence
  Description of Artificial Sequence: Synthetic oligonucleotide
cuaaguaugagucuguuug

SEQ ID NO: 1714306 - RNA, 19 nt, Artificial Sequence
  Description of Artificial Sequence: Synthetic oligonucleotide
uagacuucuagccagagac

SEQ ID NO: 1714307 - RNA, 19 nt, Artificial Sequence
  Description of Artificial Sequence: Synthetic oligonucleotide
aaccuggagagacuaaccc

SEQ ID NO: 1714308 - RNA, 19 nt, Artificial Sequence
  Description of Artificial Sequence: Synthetic oligonucleotide
aauaagucagccucuaagu

SEQ ID NO: 1714309 - RNA, 19 nt, Artificial Sequence
  Description of Artificial Sequence: Synthetic oligonucleotide
uuuccagagguuaaguggg

SEQ ID NO: 1714310 - RNA, 19 nt, Artificial Sequence
  Description of Artificial Sequence: Synthetic oligonucleotide
uaaacaacgcuggagaggg

SEQ ID NO: 1714311 - RNA, 19 nt, Artificial Sequence
  Description of Artificial Sequence: Synthetic oligonucleotide
aaguauugcuuuuacaggu

SEQ ID NO: 1714312 - RNA, 19 nt, Artificial Sequence
  Description of Artificial Sequence: Synthetic oligonucleotide
aacaagcccacguagaaca

SEQ ID NO: 1714313 - RNA, 19 nt, Artificial Sequence
  Description of Artificial Sequence: Synthetic oligonucleotide
caucguaaaggccagagcc

SEQ ID NO: 1714314 - RNA, 19 nt, Artificial Sequence
  Description of Artificial Sequence: Synthetic oligonucleotide
cuuuccagagguuaagugg

SEQ ID NO: 1714315 - RNA, 19 nt, Artificial Sequence
  Description of Artificial Sequence: Synthetic oligonucleotide
aaagacgaggcccacguug

SEQ ID NO: 1714316 - RNA, 19 nt, Artificial Sequence
  Description of Artificial Sequence: Synthetic oligonucleotide
aucaaagacgucgagcucc

SEQ ID NO: 1714317 - RNA, 19 nt, Artificial Sequence
  Description of Artificial Sequence: Synthetic oligonucleotide
aguucugucaaccuggaga

SEQ ID NO: 1714318 - RNA, 19 nt, Artificial Sequence
  Description of Artificial Sequence: Synthetic oligonucleotide
aaguaucuacaucacucac

SEQ ID NO: 1714319 - RNA, 19 nt, Artificial Sequence
  Description of Artificial Sequence: Synthetic oligonucleotide
aacugcauuaaacaacgcu

SEQ ID NO: 1714320 - RNA, 19 nt, Artificial Sequence
  Description of Artificial Sequence: Synthetic oligonucleotide
aagaccuuacuccaaauau

SEQ ID NO: 1714321 - RNA, 19 nt, Artificial Sequence
  Description of Artificial Sequence: Synthetic oligonucleotide
gacgauguauuccaugagg

SEQ ID NO: 1714322 - RNA, 19 nt, Artificial Sequence
  Description of Artificial Sequence: Synthetic oligonucleotide
aaauauccaucaaagacgu

SEQ ID NO: 1714323 - RNA, 19 nt, Artificial Sequence
  Description of Artificial Sequence: Synthetic oligonucleotide
aaagacgucgagcuccgag

SEQ ID NO: 1714324 - RNA, 19 nt, Artificial Sequence
  Description of Artificial Sequence: Synthetic oligonucleotide
uuaaacaacgcuggagagg

SEQ ID NO: 1714325 - RNA, 19 nt, Artificial Sequence
  Description of Artificial Sequence: Synthetic oligonucleotide
ccacguagaacauagaggg

SEQ ID NO: 1714326 - RNA, 19 nt, Artificial Sequence
  Description of Artificial Sequence: Synthetic oligonucleotide
auuaaacaacgcuggagag

SEQ ID NO: 1714327 - RNA, 19 nt, Artificial Sequence
  Description of Artificial Sequence: Synthetic oligonucleotide
agauccaggagucugagaa

SEQ ID NO: 1714328 - RNA, 19 nt, Artificial Sequence
  Description of Artificial Sequence: Synthetic oligonucleotide
uuauggaaaucaaguaucu

SEQ ID NO: 1714329 - RNA, 19 nt, Artificial Sequence
  Description of Artificial Sequence: Synthetic oligonucleotide
cugcauuaaacaacgcugg

SEQ ID NO: 1714330 - RNA, 19 nt, Artificial Sequence
  Description of Artificial Sequence: Synthetic oligonucleotide
guaucuacaucacucacac

SEQ ID NO: 1714331 - RNA, 19 nt, Artificial Sequence
  Description of Artificial Sequence: Synthetic oligonucleotide
guucugucaaccuggagag

SEQ ID NO: 1714332 - RNA, 19 nt, Artificial Sequence
  Description of Artificial Sequence: Synthetic oligonucleotide
aaaacaagcccacguagaa

SEQ ID NO: 1714333 - RNA, 19 nt, Artificial Sequence
  Description of Artificial Sequence: Synthetic oligonucleotide
ugauauuggcggcuggucc

SEQ ID NO: 1714334 - RNA, 19 nt, Artificial Sequence
  Description of Artificial Sequence: Synthetic oligonucleotide
uaugagucuguuugcaccc

SEQ ID NO: 1714335 - RNA, 19 nt, Artificial Sequence
  Description of Artificial Sequence: Synthetic oligonucleotide
acugcauuaaacaacgcug

SEQ ID NO: 1714336 - RNA, 19 nt, Artificial Sequence
  Description of Artificial Sequence: Synthetic oligonucleotide
cucaacugcauuaaacaac

SEQ ID NO: 1714337 - RNA, 19 nt, Artificial Sequence
  Description of Artificial Sequence: Synthetic oligonucleotide
accuggagagacuaacccc

SEQ ID NO: 1714338 - RNA, 19 nt, Artificial Sequence
  Description of Artificial Sequence: Synthetic oligonucleotide
aguaugagucuguuugcac

SEQ ID NO: 1714339 - RNA, 19 nt, Artificial Sequence
  Description of Artificial Sequence: Synthetic oligonucleotide
uguguucaacaauuuuggg

SEQ ID NO: 1714340 - RNA, 19 nt, Artificial Sequence
  Description of Artificial Sequence: Synthetic oligonucleotide
uccucgggcagaaagacga

SEQ ID NO: 1714341 - RNA, 19 nt, Artificial Sequence
  Description of Artificial Sequence: Synthetic oligonucleotide
aauuuuggggcugaagccu

SEQ ID NO: 1714342 - RNA, 19 nt, Artificial Sequence
  Description of Artificial Sequence: Synthetic oligonucleotide
uagaggaucagcacauuga

SEQ ID NO: 1714343 - RNA, 19 nt, Artificial Sequence
  Description of Artificial Sequence: Synthetic oligonucleotide
guaugagucuguuugcacc

SEQ ID NO: 1714344 - RNA, 19 nt, Artificial Sequence
  Description of Artificial Sequence: Synthetic oligonucleotide
cauuaaacaacgcuggaga

SEQ ID NO: 1714345 - RNA, 19 nt, Artificial Sequence
  Description of Artificial Sequence: Synthetic oligonucleotide
ucuaaguauugcuuuuaca

SEQ ID NO: 1714346 - RNA, 19 nt, Artificial Sequence
  Description of Artificial Sequence: Synthetic oligonucleotide
aaacaagcccacguagaac

SEQ ID NO: 1714347 - RNA, 19 nt, Artificial Sequence
  Description of Artificial Sequence: Synthetic oligonucleotide
cuucuagccagagacagcc

SEQ ID NO: 1714348 - RNA, 19 nt, Artificial Sequence
  Description of Artificial Sequence: Synthetic oligonucleotide
uccaaauauccaucaaaga

SEQ ID NO: 1714349 - RNA, 19 nt, Artificial Sequence
  Description of Artificial Sequence: Synthetic oligonucleotide
ucaaagacgucgagcuccg

SEQ ID NO: 1714350 - RNA, 19 nt, Artificial Sequence
  Description of Artificial Sequence: Synthetic oligonucleotide
aggacgauguauuccauga

SEQ ID NO: 1714351 - RNA, 19 nt, Artificial Sequence
  Description of Artificial Sequence: Synthetic oligonucleotide
uauccaucaaagacgucga

SEQ ID NO: 1714352 - RNA, 19 nt, Artificial Sequence
  Description of Artificial Sequence: Synthetic oligonucleotide
ugagucuucugguacacuc

SEQ ID NO: 1714353 - RNA, 19 nt, Artificial Sequence
  Description of Artificial Sequence: Synthetic oligonucleotide
agaaagacgaggcccacgu

SEQ ID NO: 1714354 - RNA, 19 nt, Artificial Sequence
  Description of Artificial Sequence: Synthetic oligonucleotide
agguuuauggaaaucaagu

SEQ ID NO: 1714355 - RNA, 19 nt, Artificial Sequence
  Description of Artificial Sequence: Synthetic oligonucleotide
aagacgucgagcuccgagu

SEQ ID NO: 1714356 - RNA, 19 nt, Artificial Sequence
  Description of Artificial Sequence: Synthetic oligonucleotide
ucugucaaccuggagagac

SEQ ID NO: 1714357 - RNA, 19 nt, Artificial Sequence
  Description of Artificial Sequence: Synthetic oligonucleotide
ucuacaucacucacacucu

SEQ ID NO: 1714358 - RNA, 19 nt, Artificial Sequence
  Description of Artificial Sequence: Synthetic oligonucleotide
ucagccucuaaguauugcu

SEQ ID NO: 1714359 - RNA, 19 nt, Artificial Sequence
  Description of Artificial Sequence: Synthetic oligonucleotide
agagaggugaccucuggcu

SEQ ID NO: 1714360 - RNA, 19 nt, Artificial Sequence
  Description of Artificial Sequence: Synthetic oligonucleotide
uuaaggcucaacugcauua

SEQ ID NO: 1714361 - RNA, 19 nt, Artificial Sequence
  Description of Artificial Sequence: Synthetic oligonucleotide
uuuacagguuuauggaaau

SEQ ID NO: 1714362 - RNA, 19 nt, Artificial Sequence
  Description of Artificial Sequence: Synthetic oligonucleotide
ucugguacacuccuggguu

SEQ ID NO: 1714363 - RNA, 19 nt, Artificial Sequence
  Description of Artificial Sequence: Synthetic oligonucleotide
aacaacgcuggagagggug

SEQ ID NO: 1714364 - RNA, 19 nt, Artificial Sequence
  Description of Artificial Sequence: Synthetic oligonucleotide
uucagagugacucccugaa

SEQ ID NO: 1714365 - RNA, 19 nt, Artificial Sequence
  Description of Artificial Sequence: Synthetic oligonucleotide
ucguaaaggccagagccgg

SEQ ID NO: 1714366 - RNA, 19 nt, Artificial Sequence
  Description of Artificial Sequence: Synthetic oligonucleotide
cagguuuauggaaaucaag

SEQ ID NO: 1714367 - RNA, 19 nt, Artificial Sequence
  Description of Artificial Sequence: Synthetic oligonucleotide
agaggugaccucuggcugg

SEQ ID NO: 1714368 - RNA, 19 nt, Artificial Sequence
  Description of Artificial Sequence: Synthetic oligonucleotide
uaggugagucuucugguac

SEQ ID NO: 1714369 - RNA, 19 nt, Artificial Sequence
  Description of Artificial Sequence: Synthetic oligonucleotide
uaguagaggaucagcacau

SEQ ID NO: 1714370 - RNA, 19 nt, Artificial Sequence
  Description of Artificial Sequence: Synthetic oligonucleotide
guuguuggcacaagcaggc

SEQ ID NO: 1714371 - RNA, 19 nt, Artificial Sequence
  Description of Artificial Sequence: Synthetic oligonucleotide
gauauuggcggcuggucca

SEQ ID NO: 1714372 - RNA, 19 nt, Artificial Sequence
  Description of Artificial Sequence: Synthetic oligonucleotide
guucucucggugcaccucg

SEQ ID NO: 1714373 - RNA, 19 nt, Artificial Sequence
  Description of Artificial Sequence: Synthetic oligonucleotide
ugcauuaaacaacgcugga

SEQ ID NO: 1714374 - RNA, 19 nt, Artificial Sequence
  Description of Artificial Sequence: Synthetic oligonucleotide
ggagaguacgccaaggucc

SEQ ID NO: 1714375 - RNA, 19 nt, Artificial Sequence
  Description of Artificial Sequence: Synthetic oligonucleotide
aaguaugagucuguuugca

SEQ ID NO: 1714376 - RNA, 19 nt, Artificial Sequence
  Description of Artificial Sequence: Synthetic oligonucleotide
agaugguacccgcaacuag

SEQ ID NO: 1714377 - RNA, 19 nt, Artificial Sequence
  Description of Artificial Sequence: Synthetic oligonucleotide
guuggcacaagcaggcggg

SEQ ID NO: 1714378 - RNA, 19 nt, Artificial Sequence
  Description of Artificial Sequence: Synthetic oligonucleotide
ucucggugcaccucgcuug

SEQ ID NO: 1714379 - RNA, 19 nt, Artificial Sequence
  Description of Artificial Sequence: Synthetic oligonucleotide
ggaagacgcgccuugaccc

SEQ ID NO: 1714380 - RNA, 19 nt, Artificial Sequence
  Description of Artificial Sequence: Synthetic oligonucleotide
aagaguugcggguggugga

SEQ ID NO: 1714381 - RNA, 19 nt, Artificial Sequence
  Description of Artificial Sequence: Synthetic oligonucleotide
caggcuuaaggcucaacug

SEQ ID NO: 1714382 - RNA, 19 nt, Artificial Sequence
  Description of Artificial Sequence: Synthetic oligonucleotide
agagugacucccugaaacu

SEQ ID NO: 1714383 - RNA, 19 nt, Artificial Sequence
  Description of Artificial Sequence: Synthetic oligonucleotide
agccuacccaggcuuaagg

SEQ ID NO: 1714384 - RNA, 19 nt, Artificial Sequence
  Description of Artificial Sequence: Synthetic oligonucleotide
ugcaccucgcuugagcucc

SEQ ID NO: 1714385 - RNA, 19 nt, Artificial Sequence
  Description of Artificial Sequence: Synthetic oligonucleotide
gguacccgcaacuaguggc

SEQ ID NO: 1714386 - RNA, 19 nt, Artificial Sequence
  Description of Artificial Sequence: Synthetic oligonucleotide
uccguguccuuuccagagg

SEQ ID NO: 1714387 - RNA, 19 nt, Artificial Sequence
  Description of Artificial Sequence: Synthetic oligonucleotide
agcaucucaguucugucaa

SEQ ID NO: 1714388 - RNA, 19 nt, Artificial Sequence
  Description of Artificial Sequence: Synthetic oligonucleotide
uuccagagguuaagugggg

SEQ ID NO: 1714389 - RNA, 19 nt, Artificial Sequence
  Description of Artificial Sequence: Synthetic oligonucleotide
caaguaucuacaucacuca

SEQ ID NO: 1714390 - RNA, 19 nt, Artificial Sequence
  Description of Artificial Sequence: Synthetic oligonucleotide
aguccucgggcagaaagac

SEQ ID NO: 1714391 - RNA, 19 nt, Artificial Sequence
  Description of Artificial Sequence: Synthetic oligonucleotide
agacgucgagcuccgaguc

SEQ ID NO: 1714392 - RNA, 19 nt, Artificial Sequence
  Description of Artificial Sequence: Synthetic oligonucleotide
aggcucaacugcauuaaac

SEQ ID NO: 1714393 - RNA, 19 nt, Artificial Sequence
  Description of Artificial Sequence: Synthetic oligonucleotide
aucguaaaggccagagccg

SEQ ID NO: 1714394 - RNA, 19 nt, Artificial Sequence
  Description of Artificial Sequence: Synthetic oligonucleotide
caagccagauccaggaguc

SEQ ID NO: 1714395 - RNA, 19 nt, Artificial Sequence
  Description of Artificial Sequence: Synthetic oligonucleotide
uggccuaaguaugagucug

SEQ ID NO: 1714396 - RNA, 19 nt, Artificial Sequence
  Description of Artificial Sequence: Synthetic oligonucleotide
uggcaugucccucuucaga

SEQ ID NO: 1714397 - RNA, 19 nt, Artificial Sequence
  Description of Artificial Sequence: Synthetic oligonucleotide
ggcaugucccucuucagag

SEQ ID NO: 1714398 - RNA, 19 nt, Artificial Sequence
  Description of Artificial Sequence: Synthetic oligonucleotide
gaaacuguguucaacaauu

SEQ ID NO: 1714399 - RNA, 19 nt, Artificial Sequence
  Description of Artificial Sequence: Synthetic oligonucleotide
cucuaaguauugcuuuuac

SEQ ID NO: 1714400 - RNA, 19 nt, Artificial Sequence
  Description of Artificial Sequence: Synthetic oligonucleotide
guuccuguaaacauccauc

SEQ ID NO: 1714401 - RNA, 19 nt, Artificial Sequence
  Description of Artificial Sequence: Synthetic oligonucleotide
ugguacccgcaacuagugg

SEQ ID NO: 1714402 - RNA, 19 nt, Artificial Sequence
  Description of Artificial Sequence: Synthetic oligonucleotide
ucggagaguacgccaaggu

SEQ ID NO: 1714403 - RNA, 19 nt, Artificial Sequence
  Description of Artificial Sequence: Synthetic oligonucleotide
acgaggcccacguugagga

SEQ ID NO: 1714404 - RNA, 19 nt, Artificial Sequence
  Description of Artificial Sequence: Synthetic oligonucleotide
uccuguaaacauccaucac

SEQ ID NO: 1714405 - RNA, 19 nt, Artificial Sequence
  Description of Artificial Sequence: Synthetic oligonucleotide
ggcucaacugcauuaaaca

SEQ ID NO: 1714406 - RNA, 19 nt, Artificial Sequence
  Description of Artificial Sequence: Synthetic oligonucleotide
aguugcgggugguggaggg

SEQ ID NO: 1714407 - RNA, 19 nt, Artificial Sequence
  Description of Artificial Sequence: Synthetic oligonucleotide
gaugcuccgggccggauca

SEQ ID NO: 1714408 - RNA, 19 nt, Artificial Sequence
  Description of Artificial Sequence: Synthetic oligonucleotide
aacgcuggagaggguggcc

SEQ ID NO: 1714409 - RNA, 19 nt, Artificial Sequence
  Description of Artificial Sequence: Synthetic oligonucleotide
acgauguauuccaugagga

SEQ ID NO: 1714410 - RNA, 19 nt, Artificial Sequence
  Description of Artificial Sequence: Synthetic oligonucleotide
aguacgccaagguccacca

SEQ ID NO: 1714411 - RNA, 19 nt, Artificial Sequence
  Description of Artificial Sequence: Synthetic oligonucleotide
gggagcaguagucaagacc

SEQ ID NO: 1714412 - RNA, 19 nt, Artificial Sequence
  Description of Artificial Sequence: Synthetic oligonucleotide
auagacuucuagccagaga

SEQ ID NO: 1714413 - RNA, 19 nt, Artificial Sequence
  Description of Artificial Sequence: Synthetic oligonucleotide
aaauagacuucuagccaga

SEQ ID NO: 1714414 - RNA, 19 nt, Artificial Sequence
  Description of Artificial Sequence: Synthetic oligonucleotide
aagucagccucuaaguauu

SEQ ID NO: 1714415 - RNA, 19 nt, Artificial Sequence
  Description of Artificial Sequence: Synthetic oligonucleotide
ugagucuguuugcacccca

SEQ ID NO: 1714416 - RNA, 19 nt, Artificial Sequence
  Description of Artificial Sequence: Synthetic oligonucleotide
gaagacgcgccuugacccc

SEQ ID NO: 1714417 - RNA, 19 nt, Artificial Sequence
  Description of Artificial Sequence: Synthetic oligonucleotide
ugaaauaagucagccucua

SEQ ID NO: 1714418 - RNA, 19 nt, Artificial Sequence
  Description of Artificial Sequence: Synthetic oligonucleotide
ugguacacuccuggguugg

SEQ ID NO: 1714419 - RNA, 19 nt, Artificial Sequence
  Description of Artificial Sequence: Synthetic oligonucleotide
uaaggcucaacugcauuaa

SEQ ID NO: 1714420 - RNA, 19 nt, Artificial Sequence
  Description of Artificial Sequence: Synthetic oligonucleotide
cagcucagagucgaggccg

SEQ ID NO: 1714421 - RNA, 19 nt, Artificial Sequence
  Description of Artificial Sequence: Synthetic oligonucleotide
gacgucgagcuccgagucg

SEQ ID NO: 1714422 - RNA, 19 nt, Artificial Sequence
  Description of Artificial Sequence: Synthetic oligonucleotide
acuucuagccagagacagc

SEQ ID NO: 1714423 - RNA, 19 nt, Artificial Sequence
  Description of Artificial Sequence: Synthetic oligonucleotide
caguggcaugauauuggcg

SEQ ID NO: 1714424 - RNA, 19 nt, Artificial Sequence
  Description of Artificial Sequence: Synthetic oligonucleotide
gcccacguagaacauagag

SEQ ID NO: 1714425 - RNA, 19 nt, Artificial Sequence
  Description of Artificial Sequence: Synthetic oligonucleotide
cacguagaacauagagggc

SEQ ID NO: 1714426 - RNA, 19 nt, Artificial Sequence
  Description of Artificial Sequence: Synthetic oligonucleotide
gagaggguggccuaaguau

SEQ ID NO: 1714427 - RNA, 19 nt, Artificial Sequence
  Description of Artificial Sequence: Synthetic oligonucleotide
gaucacggcgcccgggaug

SEQ ID NO: 1714428 - RNA, 19 nt, Artificial Sequence
  Description of Artificial Sequence: Synthetic oligonucleotide
gacgaggcccacguugagg

SEQ ID NO: 1714429 - RNA, 19 nt, Artificial Sequence
  Description of Artificial Sequence: Synthetic oligonucleotide
augagucuguuugcacccc

SEQ ID NO: 1714430 - RNA, 19 nt, Artificial Sequence
  Description of Artificial Sequence: Synthetic oligonucleotide
agccucuaaguauugcuuu

SEQ ID NO: 1714431 - RNA, 19 nt, Artificial Sequence
  Description of Artificial Sequence: Synthetic oligonucleotide
uauggaaaucaaguaucua

SEQ ID NO: 1714432 - RNA, 19 nt, Artificial Sequence
  Description of Artificial Sequence: Synthetic oligonucleotide
cuagccagagacagccuuc

SEQ ID NO: 1714433 - RNA, 19 nt, Artificial Sequence
  Description of Artificial Sequence: Synthetic oligonucleotide
aucggagaguacgccaagg

SEQ ID NO: 1714434 - RNA, 19 nt, Artificial Sequence
  Description of Artificial Sequence: Synthetic oligonucleotide
aaggcucaacugcauuaaa

SEQ ID NO: 1714435 - RNA, 19 nt, Artificial Sequence
  Description of Artificial Sequence: Synthetic oligonucleotide
acaccacucacacuuccaa

SEQ ID NO: 1714436 - RNA, 19 nt, Artificial Sequence
  Description of Artificial Sequence: Synthetic oligonucleotide
ggagcgguagcgcugggcc

SEQ ID NO: 1714437 - RNA, 19 nt, Artificial Sequence
  Description of Artificial Sequence: Synthetic oligonucleotide
ugguccaggccaagaguug

SEQ ID NO: 1714438 - RNA, 19 nt, Artificial Sequence
  Description of Artificial Sequence: Synthetic oligonucleotide
aggugagucuucugguaca

SEQ ID NO: 1714439 - RNA, 19 nt, Artificial Sequence
  Description of Artificial Sequence: Synthetic oligonucleotide
gaguacgccaagguccacc

SEQ ID NO: 1714440 - RNA, 19 nt, Artificial Sequence
  Description of Artificial Sequence: Synthetic oligonucleotide
guggcaugauauuggcggc

SEQ ID NO: 1714441 - RNA, 19 nt, Artificial Sequence
  Description of Artificial Sequence: Synthetic oligonucleotide
ggagcaguagucaagaccu

SEQ ID NO: 1714442 - RNA, 19 nt, Artificial Sequence
  Description of Artificial Sequence: Synthetic oligonucleotide
aaguccucgggcagaaaga

SEQ ID NO: 1714443 - RNA, 19 nt, Artificial Sequence
  Description of Artificial Sequence: Synthetic oligonucleotide
auccaucaaagacgucgag

SEQ ID NO: 1714444 - RNA, 19 nt, Artificial Sequence
  Description of Artificial Sequence: Synthetic oligonucleotide
aguggggagcaguagucaa

SEQ ID NO: 1714445 - RNA, 19 nt, Artificial Sequence
  Description of Artificial Sequence: Synthetic oligonucleotide
cucccugaaacuguguuca

SEQ ID NO: 1714446 - RNA, 19 nt, Artificial Sequence
  Description of Artificial Sequence: Synthetic oligonucleotide
gguggccuaaguaugaguc

SEQ ID NO: 1714447 - RNA, 19 nt, Artificial Sequence
  Description of Artificial Sequence: Synthetic oligonucleotide
auccaucacaaaggcagag

SEQ ID NO: 1714448 - RNA, 19 nt, Artificial Sequence
  Description of Artificial Sequence: Synthetic oligonucleotide
ugucaaccuggagagacua

SEQ ID NO: 1714449 - RNA, 19 nt, Artificial Sequence
  Description of Artificial Sequence: Synthetic oligonucleotide
agucuguuugcaccccacu

SEQ ID NO: 1714450 - RNA, 19 nt, Artificial Sequence
  Description of Artificial Sequence: Synthetic oligonucleotide
gaugguacccgcaacuagu

SEQ ID NO: 1714451 - RNA, 19 nt, Artificial Sequence
  Description of Artificial Sequence: Synthetic oligonucleotide
cuacaucacucacacucuc

SEQ ID NO: 1714452 - RNA, 19 nt, Artificial Sequence
  Description of Artificial Sequence: Synthetic oligonucleotide
ugaccucuggcuggguucc

SEQ ID NO: 1714453 - RNA, 19 nt, Artificial Sequence
  Description of Artificial Sequence: Synthetic oligonucleotide
acaacgcuggagagggugg

SEQ ID NO: 1714454 - RNA, 19 nt, Artificial Sequence
  Description of Artificial Sequence: Synthetic oligonucleotide
agccagagacagccuuccc

SEQ ID NO: 1714455 - RNA, 19 nt, Artificial Sequence
  Description of Artificial Sequence: Synthetic oligonucleotide
uuguuggcacaagcaggcg

SEQ ID NO: 1714456 - RNA, 19 nt, Artificial Sequence
  Description of Artificial Sequence: Synthetic oligonucleotide
gcacguaggagaccagggg

SEQ ID NO: 1714457 - RNA, 19 nt, Artificial Sequence
  Description of Artificial Sequence: Synthetic oligonucleotide
gagaguacgccaaggucca

SEQ ID NO: 1714458 - RNA, 19 nt, Artificial Sequence
  Description of Artificial Sequence: Synthetic oligonucleotide
uacccaggcuuaaggcuca

SEQ ID NO: 1714459 - RNA, 19 nt, Artificial Sequence
  Description of Artificial Sequence: Synthetic oligonucleotide
uuacagguuuauggaaauc

SEQ ID NO: 1714460 - RNA, 19 nt, Artificial Sequence
  Description of Artificial Sequence: Synthetic oligonucleotide
cugcacguaggagaccagg

SEQ ID NO: 1714461 - RNA, 19 nt, Artificial Sequence
  Description of Artificial Sequence: Synthetic oligonucleotide
gaucagcacauugacgaaa

SEQ ID NO: 1714462 - RNA, 19 nt, Artificial Sequence
  Description of Artificial Sequence: Synthetic oligonucleotide
caacugcauuaaacaacgc

SEQ ID NO: 1714463 - RNA, 19 nt, Artificial Sequence
  Description of Artificial Sequence: Synthetic oligonucleotide
ucgggagcgguagcgcugg

SEQ ID NO: 1714464 - RNA, 19 nt, Artificial Sequence
  Description of Artificial Sequence: Synthetic oligonucleotide
aacccuguuguuggcacaa

SEQ ID NO: 1714465 - RNA, 19 nt, Artificial Sequence
  Description of Artificial Sequence: Synthetic oligonucleotide
ugaagccuacccaggcuua

SEQ ID NO: 1714466 - RNA, 19 nt, Artificial Sequence
  Description of Artificial Sequence: Synthetic oligonucleotide
caggcgggccucuuccugg

SEQ ID NO: 1714467 - RNA, 19 nt, Artificial Sequence
  Description of Artificial Sequence: Synthetic oligonucleotide
ucggaagacgcgccuugac

SEQ ID NO: 1714468 - RNA, 19 nt, Artificial Sequence
  Description of Artificial Sequence: Synthetic oligonucleotide
cugguacacuccuggguug

SEQ ID NO: 1714469 - RNA, 19 nt, Artificial Sequence
  Description of Artificial Sequence: Synthetic oligonucleotide
aagccuacccaggcuuaag

SEQ ID NO: 1714470 - RNA, 19 nt, Artificial Sequence
  Description of Artificial Sequence: Synthetic oligonucleotide
gccgggaucggagaguacg

SEQ ID NO: 1714471 - RNA, 19 nt, Artificial Sequence
  Description of Artificial Sequence: Synthetic oligonucleotide
gugaccucuggcuggguuc

SEQ ID NO: 1714472 - RNA, 19 nt, Artificial Sequence
  Description of Artificial Sequence: Synthetic oligonucleotide
ccuuuccagagguuaagug

SEQ ID NO: 1714473 - RNA, 19 nt, Artificial Sequence
  Description of Artificial Sequence: Synthetic oligonucleotide
cagaaagacgaggcccacg

SEQ ID NO: 1714474 - RNA, 19 nt, Artificial Sequence
  Description of Artificial Sequence: Synthetic oligonucleotide
guagaacauagagggcagc

SEQ ID NO: 1714475 - RNA, 19 nt, Artificial Sequence
  Description of Artificial Sequence: Synthetic oligonucleotide
ugaggacgauguauuccau

SEQ ID NO: 1714476 - RNA, 19 nt, Artificial Sequence
  Description of Artificial Sequence: Synthetic oligonucleotide
ucccagcgaccucagccgc

SEQ ID NO: 1714477 - RNA, 19 nt, Artificial Sequence
  Description of Artificial Sequence: Synthetic oligonucleotide
ggacgauguauuccaugag

SEQ ID NO: 1714478 - RNA, 19 nt, Artificial Sequence
  Description of Artificial Sequence: Synthetic oligonucleotide
auauuggcggcugguccag

SEQ ID NO: 1714479 - RNA, 19 nt, Artificial Sequence
  Description of Artificial Sequence: Synthetic oligonucleotide
ucgagcuccgagucggcau

SEQ ID NO: 1714480 - RNA, 19 nt, Artificial Sequence
  Description of Artificial Sequence: Synthetic oligonucleotide
agccuuccccagcacagca

SEQ ID NO: 1714481 - RNA, 19 nt, Artificial Sequence
  Description of Artificial Sequence: Synthetic oligonucleotide
cacuucagcucuccguguc

SEQ ID NO: 1714482 - RNA, 19 nt, Artificial Sequence
  Description of Artificial Sequence: Synthetic oligonucleotide
gauggggacagcggccggc

SEQ ID NO: 1714483 - RNA, 19 nt, Artificial Sequence
  Description of Artificial Sequence: Synthetic oligonucleotide
uggcaugauauuggcggcu

SEQ ID NO: 1714484 - RNA, 19 nt, Artificial Sequence
  Description of Artificial Sequence: Synthetic oligonucleotide
guaggugagucuucuggua

SEQ ID NO: 1714485 - RNA, 19 nt, Artificial Sequence
  Description of Artificial Sequence: Synthetic oligonucleotide
augguacccgcaacuagug

SEQ ID NO: 1714486 - RNA, 19 nt, Artificial Sequence
  Description of Artificial Sequence: Synthetic oligonucleotide
guccuuuccagagguuaag

SEQ ID NO: 1714487 - RNA, 19 nt, Artificial Sequence
  Description of Artificial Sequence: Synthetic oligonucleotide
uucucucggugcaccucgc

SEQ ID NO: 1714488 - RNA, 19 nt, Artificial Sequence
  Description of Artificial Sequence: Synthetic oligonucleotide
cauccaucacaaaggcaga

SEQ ID NO: 1714489 - RNA, 19 nt, Artificial Sequence
  Description of Artificial Sequence: Synthetic oligonucleotide
ggcaggaacccuguuguug

SEQ ID NO: 1714490 - RNA, 19 nt, Artificial Sequence
  Description of Artificial Sequence: Synthetic oligonucleotide
gccuacccaggcuuaaggc

SEQ ID NO: 1714491 - RNA, 19 nt, Artificial Sequence
  Description of Artificial Sequence: Synthetic oligonucleotide
aggccaagaguugcgggug

SEQ ID NO: 1714492 - RNA, 19 nt, Artificial Sequence
  Description of Artificial Sequence: Synthetic oligonucleotide
uagaaguggccagggguuc

SEQ ID NO: 1714493 - RNA, 19 nt, Artificial Sequence
  Description of Artificial Sequence: Synthetic oligonucleotide
gguccaaguccucgggcag

SEQ ID NO: 1714494 - RNA, 19 nt, Artificial Sequence
  Description of Artificial Sequence: Synthetic oligonucleotide
ugcuccgggccggaucacg

SEQ ID NO: 1714495 - RNA, 19 nt, Artificial Sequence
  Description of Artificial Sequence: Synthetic oligonucleotide
agcgccugguccaaguccu

SEQ ID NO: 1714496 - RNA, 19 nt, Artificial Sequence
  Description of Artificial Sequence: Synthetic oligonucleotide
cucgggagcgguagcgcug

SEQ ID NO: 1714497 - RNA, 19 nt, Artificial Sequence
  Description of Artificial Sequence: Synthetic oligonucleotide
cguaguagaggaucagcac

SEQ ID NO: 1714498 - RNA, 19 nt, Artificial Sequence
  Description of Artificial Sequence: Synthetic oligonucleotide
agacgaggcccacguugag

SEQ ID NO: 1714499 - RNA, 19 nt, Artificial Sequence
  Description of Artificial Sequence: Synthetic oligonucleotide
acguugaggacgauguauu

SEQ ID NO: 1714500 - RNA, 19 nt, Artificial Sequence
  Description of Artificial Sequence: Synthetic oligonucleotide
gaggguggccuaaguauga

SEQ ID NO: 1714501 - RNA, 19 nt, Artificial Sequence
  Description of Artificial Sequence: Synthetic oligonucleotide
guccaggccaagaguugcg

SEQ ID NO: 1714502 - RNA, 19 nt, Artificial Sequence
  Description of Artificial Sequence: Synthetic oligonucleotide
gcaguagucaagaccuuac

SEQ ID NO: 1714503 - RNA, 19 nt, Artificial Sequence
  Description of Artificial Sequence: Synthetic oligonucleotide
ggcguaguagaggaucagc

SEQ ID NO: 1714504 - RNA, 19 nt, Artificial Sequence
  Description of Artificial Sequence: Synthetic oligonucleotide
uacccgcaacuaguggcag

SEQ ID NO: 1714505 - RNA, 19 nt, Artificial Sequence
  Description of Artificial Sequence: Synthetic oligonucleotide
guccucgggcagaaagacg

SEQ ID NO: 1714506 - RNA, 19 nt, Artificial Sequence
  Description of Artificial Sequence: Synthetic oligonucleotide
cuagaaguggccagggguu

SEQ ID NO: 1714507 - RNA, 19 nt, Artificial Sequence
  Description of Artificial Sequence: Synthetic oligonucleotide
gguccaggccaagaguugc

SEQ ID NO: 1714508 - RNA, 19 nt, Artificial Sequence
  Description of Artificial Sequence: Synthetic oligonucleotide
guagcgcugggccccgggc

SEQ ID NO: 1714509 - RNA, 19 nt, Artificial Sequence
  Description of Artificial Sequence: Synthetic oligonucleotide
guacccgcaacuaguggca

SEQ ID NO: 1714510 - RNA, 19 nt, Artificial Sequence
  Description of Artificial Sequence: Synthetic oligonucleotide
uauuggcggcugguccagg

SEQ ID NO: 1714511 - RNA, 19 nt, Artificial Sequence
  Description of Artificial Sequence: Synthetic oligonucleotide
caguucugucaaccuggag

SEQ ID NO: 1714512 - RNA, 19 nt, Artificial Sequence
  Description of Artificial Sequence: Synthetic oligonucleotide
cacaccacucacacuucca

SEQ ID NO: 1714513 - RNA, 19 nt, Artificial Sequence
  Description of Artificial Sequence: Synthetic oligonucleotide
gugguaggugagucuucug

SEQ ID NO: 1714514 - RNA, 19 nt, Artificial Sequence
  Description of Artificial Sequence: Synthetic oligonucleotide
uggcacaagcaggcgggcc

SEQ ID NO: 1714515 - RNA, 19 nt, Artificial Sequence
  Description of Artificial Sequence: Synthetic oligonucleotide
caacgcuggagaggguggc

SEQ ID NO: 1714516 - RNA, 19 nt, Artificial Sequence
  Description of Artificial Sequence: Synthetic oligonucleotide
agaaguggccagggguucu

SEQ ID NO: 1714517 - RNA, 19 nt, Artificial Sequence
  Description of Artificial Sequence: Synthetic oligonucleotide
accuuacuccaaauaucca

SEQ ID NO: 1714518 - RNA, 19 nt, Artificial Sequence
  Description of Artificial Sequence: Synthetic oligonucleotide
aagccagauccaggagucu

SEQ ID NO: 1714519 - RNA, 19 nt, Artificial Sequence
  Description of Artificial Sequence: Synthetic oligonucleotide
guccagaugguacccgcaa

SEQ ID NO: 1714520 - RNA, 19 nt, Artificial Sequence
  Description of Artificial Sequence: Synthetic oligonucleotide
ccagggguucucucggugc

SEQ ID NO: 1714521 - RNA, 19 nt, Artificial Sequence
  Description of Artificial Sequence: Synthetic oligonucleotide
gggaucggagaguacgcca

SEQ ID NO: 1714522 - RNA, 19 nt, Artificial Sequence
  Description of Artificial Sequence: Synthetic oligonucleotide
auuuuggggcugaagccua

SEQ ID NO: 1714523 - RNA, 19 nt, Artificial Sequence
  Description of Artificial Sequence: Synthetic oligonucleotide
ggcuuaaggcucaacugca

SEQ ID NO: 1714524 - RNA, 19 nt, Artificial Sequence
  Description of Artificial Sequence: Synthetic oligonucleotide
aggcguaguagaggaucag

SEQ ID NO: 1714525 - RNA, 19 nt, Artificial Sequence
  Description of Artificial Sequence: Synthetic oligonucleotide
guggccuaaguaugagucu

SEQ ID NO: 1714526 - RNA, 19 nt, Artificial Sequence
  Description of Artificial Sequence: Synthetic oligonucleotide
caugcaggggccggcgaug

SEQ ID NO: 1714527 - RNA, 19 nt, Artificial Sequence
  Description of Artificial Sequence: Synthetic oligonucleotide
guacgccaagguccaccag

SEQ ID NO: 1714528 - RNA, 19 nt, Artificial Sequence
  Description of Artificial Sequence: Synthetic oligonucleotide
uaguggcaguggcaugaua

SEQ ID NO: 1714529 - RNA, 19 nt, Artificial Sequence
  Description of Artificial Sequence: Synthetic oligonucleotide
ucccugaaacuguguucaa

SEQ ID NO: 1714530 - RNA, 19 nt, Artificial Sequence
  Description of Artificial Sequence: Synthetic oligonucleotide
acccgcaacuaguggcagu

SEQ ID NO: 1714531 - RNA, 19 nt, Artificial Sequence
  Description of Artificial Sequence: Synthetic oligonucleotide
gcggccggcgaucccagcg

SEQ ID NO: 1714532 - RNA, 19 nt, Artificial Sequence
  Description of Artificial Sequence: Synthetic oligonucleotide
agaguacgccaagguccac

SEQ ID NO: 1714533 - RNA, 19 nt, Artificial Sequence
  Description of Artificial Sequence: Synthetic oligonucleotide
ggggugaagugcagagagg

SEQ ID NO: 1714534 - RNA, 19 nt, Artificial Sequence
  Description of Artificial Sequence: Synthetic oligonucleotide
cuccgggccggaucacggc

SEQ ID NO: 1714535 - RNA, 19 nt, Artificial Sequence
  Description of Artificial Sequence: Synthetic oligonucleotide
ggagaggguggccuaagua

SEQ ID NO: 1714536 - RNA, 19 nt, Artificial Sequence
  Description of Artificial Sequence: Synthetic oligonucleotide
cagggguucucucggugca

SEQ ID NO: 1714537 - RNA, 19 nt, Artificial Sequence
  Description of Artificial Sequence: Synthetic oligonucleotide
gggugaagugcagagaggu

SEQ ID NO: 1714538 - RNA, 19 nt, Artificial Sequence
  Description of Artificial Sequence: Synthetic oligonucleotide
cagcucuccguguccuuuc

SEQ ID NO: 1714539 - RNA, 19 nt, Artificial Sequence
  Description of Artificial Sequence: Synthetic oligonucleotide
cgcaacuaguggcaguggc

SEQ ID NO: 1714540 - RNA, 19 nt, Artificial Sequence
  Description of Artificial Sequence: Synthetic oligonucleotide
caggccaagaguugcgggu

SEQ ID NO: 1714541 - RNA, 19 nt, Artificial Sequence
  Description of Artificial Sequence: Synthetic oligonucleotide
gguuccuguaaacauccau

SEQ ID NO: 1714542 - RNA, 19 nt, Artificial Sequence
  Description of Artificial Sequence: Synthetic oligonucleotide
auuccaugaggaaggcgua

SEQ ID NO: 1714543 - RNA, 19 nt, Artificial Sequence
  Description of Artificial Sequence: Synthetic oligonucleotide
cuuaaggcucaacugcauu

SEQ ID NO: 1714544 - RNA, 19 nt, Artificial Sequence
  Description of Artificial Sequence: Synthetic oligonucleotide
ccuuacuccaaauauccau

SEQ ID NO: 1714545 - RNA, 19 nt, Artificial Sequence
  Description of Artificial Sequence: Synthetic oligonucleotide
ggccggaucacggcgcccg

SEQ ID NO: 1714546 - RNA, 19 nt, Artificial Sequence
  Description of Artificial Sequence: Synthetic oligonucleotide
gaagccuacccaggcuuaa

SEQ ID NO: 1714547 - RNA, 19 nt, Artificial Sequence
  Description of Artificial Sequence: Synthetic oligonucleotide
agcggccggcgaucccagc

SEQ ID NO: 1714548 - RNA, 19 nt, Artificial Sequence
  Description of Artificial Sequence: Synthetic oligonucleotide
gcaacuaguggcaguggca

SEQ ID NO: 1714549 - RNA, 19 nt, Artificial Sequence
  Description of Artificial Sequence: Synthetic oligonucleotide
caugauauuggcggcuggu

SEQ ID NO: 1714550 - RNA, 19 nt, Artificial Sequence
  Description of Artificial Sequence: Synthetic oligonucleotide
ccuagaaguggccaggggu

SEQ ID NO: 1714551 - RNA, 19 nt, Artificial Sequence
  Description of Artificial Sequence: Synthetic oligonucleotide
gcaaguggggagcaguagu

SEQ ID NO: 1714552 - RNA, 19 nt, Artificial Sequence
  Description of Artificial Sequence: Synthetic oligonucleotide
aaacaacgcuggagagggu

SEQ ID NO: 1714553 - RNA, 19 nt, Artificial Sequence
  Description of Artificial Sequence: Synthetic oligonucleotide
gucuguuugcaccccacuu

SEQ ID NO: 1714554 - RNA, 19 nt, Artificial Sequence
  Description of Artificial Sequence: Synthetic oligonucleotide
guugcgggugguggagggc

SEQ ID NO: 1714555 - RNA, 19 nt, Artificial Sequence
  Description of Artificial Sequence: Synthetic oligonucleotide
caguagucaagaccuuacu

SEQ ID NO: 1714556 - RNA, 19 nt, Artificial Sequence
  Description of Artificial Sequence: Synthetic oligonucleotide
gacagcggccggcgauccc

SEQ ID NO: 1714557 - RNA, 19 nt, Artificial Sequence
  Description of Artificial Sequence: Synthetic oligonucleotide
gguacacuccuggguuggg

SEQ ID NO: 1714558 - RNA, 19 nt, Artificial Sequence
  Description of Artificial Sequence: Synthetic oligonucleotide
ggcgaucccagcgaccuca

SEQ ID NO: 1714559 - RNA, 19 nt, Artificial Sequence
  Description of Artificial Sequence: Synthetic oligonucleotide
gcgccgggcaugcaggggc

SEQ ID NO: 1714560 - RNA, 19 nt, Artificial Sequence
  Description of Artificial Sequence: Synthetic oligonucleotide
ccggcgauggggacagcgg

SEQ ID NO: 1714561 - RNA, 19 nt, Artificial Sequence
  Description of Artificial Sequence: Synthetic oligonucleotide
cacguugaggacgauguau

SEQ ID NO: 1714562 - RNA, 19 nt, Artificial Sequence
  Description of Artificial Sequence: Synthetic oligonucleotide
ggaucagcacauugacgaa

SEQ ID NO: 1714563 - RNA, 19 nt, Artificial Sequence
  Description of Artificial Sequence: Synthetic oligonucleotide
cucggugcaccucgcuuga

SEQ ID NO: 1714564 - RNA, 19 nt, Artificial Sequence
  Description of Artificial Sequence: Synthetic oligonucleotide
cccgcaacuaguggcagug

SEQ ID NO: 1714565 - RNA, 19 nt, Artificial Sequence
  Description of Artificial Sequence: Synthetic oligonucleotide
gccggcgauggggacagcg

SEQ ID NO: 1714566 - RNA, 19 nt, Artificial Sequence
  Description of Artificial Sequence: Synthetic oligonucleotide
cacggcgcccgggaugcgg

SEQ ID NO: 1714567 - RNA, 19 nt, Artificial Sequence
  Description of Artificial Sequence: Synthetic oligonucleotide
ggaucggagaguacgccaa

SEQ ID NO: 1714568 - RNA, 19 nt, Artificial Sequence
  Description of Artificial Sequence: Synthetic oligonucleotide
ccaggcuuaaggcucaacu

SEQ ID NO: 1714569 - RNA, 19 nt, Artificial Sequence
  Description of Artificial Sequence: Synthetic oligonucleotide
aggcccacguugaggacga

SEQ ID NO: 1714570 - RNA, 19 nt, Artificial Sequence
  Description of Artificial Sequence: Synthetic oligonucleotide
gcgaccucagccgcugcgg

SEQ ID NO: 1714571 - RNA, 19 nt, Artificial Sequence
  Description of Artificial Sequence: Synthetic oligonucleotide
gcaucucaguucugucaac

SEQ ID NO: 1714572 - RNA, 19 nt, Artificial Sequence
  Description of Artificial Sequence: Synthetic oligonucleotide
cguaaaggccagagccggg

SEQ ID NO: 1714573 - RNA, 19 nt, Artificial Sequence
  Description of Artificial Sequence: Synthetic oligonucleotide
ggcacaagcaggcgggccu

SEQ ID NO: 1714574 - RNA, 19 nt, Artificial Sequence
  Description of Artificial Sequence: Synthetic oligonucleotide
gggcucgggagcgguagcg

SEQ ID NO: 1714575 - RNA, 19 nt, Artificial Sequence
  Description of Artificial Sequence: Synthetic oligonucleotide
cagccucuaaguauugcuu

SEQ ID NO: 1714576 - RNA, 19 nt, Artificial Sequence
  Description of Artificial Sequence: Synthetic oligonucleotide
cccugaaacuguguucaac

SEQ ID NO: 1714577 - RNA, 19 nt, Artificial Sequence
  Description of Artificial Sequence: Synthetic oligonucleotide
acccuguuguuggcacaag

SEQ ID NO: 1714578 - RNA, 19 nt, Artificial Sequence
  Description of Artificial Sequence: Synthetic oligonucleotide
uuggggcaggaacccuguu

SEQ ID NO: 1714579 - RNA, 19 nt, Artificial Sequence
  Description of Artificial Sequence: Synthetic oligonucleotide
cagaugguacccgcaacua

SEQ ID NO: 1714580 - RNA, 19 nt, Artificial Sequence
  Description of Artificial Sequence: Synthetic oligonucleotide
gcaggcgggccucuuccug

SEQ ID NO: 1714581 - RNA, 19 nt, Artificial Sequence
  Description of Artificial Sequence: Synthetic oligonucleotide
ccuacccaggcuuaaggcu

SEQ ID NO: 1714582 - RNA, 19 nt, Artificial Sequence
  Description of Artificial Sequence: Synthetic oligonucleotide
ccgcucgucccucaggguc

SEQ ID NO: 1714583 - RNA, 19 nt, Artificial Sequence
  Description of Artificial Sequence: Synthetic oligonucleotide
cggagaguacgccaagguc

SEQ ID NO: 1714584 - RNA, 19 nt, Artificial Sequence
  Description of Artificial Sequence: Synthetic oligonucleotide
cugucaaccuggagagacu

SEQ ID NO: 1714585 - RNA, 19 nt, Artificial Sequence
  Description of Artificial Sequence: Synthetic oligonucleotide
gcggccucggaagacgcgc

SEQ ID NO: 1714586 - RNA, 19 nt, Artificial Sequence
  Description of Artificial Sequence: Synthetic oligonucleotide
uggcugcacguaggagacc

SEQ ID NO: 1714587 - RNA, 19 nt, Artificial Sequence
  Description of Artificial Sequence: Synthetic oligonucleotide
ggugguaggugagucuucu

SEQ ID NO: 1714588 - RNA, 19 nt, Artificial Sequence
  Description of Artificial Sequence: Synthetic oligonucleotide
gucgagcuccgagucggca

SEQ ID NO: 1714589 - RNA, 19 nt, Artificial Sequence
  Description of Artificial Sequence: Synthetic oligonucleotide
gacccgggcgccgggcaug

SEQ ID NO: 1714590 - RNA, 19 nt, Artificial Sequence
  Description of Artificial Sequence: Synthetic oligonucleotide
ccagaugguacccgcaacu

SEQ ID NO: 1714591 - RNA, 19 nt, Artificial Sequence
  Description of Artificial Sequence: Synthetic oligonucleotide
agcguccaggugggcugcg

SEQ ID NO: 1714592 - RNA, 19 nt, Artificial Sequence
  Description of Artificial Sequence: Synthetic oligonucleotide
caagcccacguagaacaua

SEQ ID NO: 1714593 - RNA, 19 nt, Artificial Sequence
  Description of Artificial Sequence: Synthetic oligonucleotide
gggccggcgauggggacag

SEQ ID NO: 1714594 - RNA, 19 nt, Artificial Sequence
  Description of Artificial Sequence: Synthetic oligonucleotide
ccaagaguugcggguggug

SEQ ID NO: 1714595 - RNA, 19 nt, Artificial Sequence
  Description of Artificial Sequence: Synthetic oligonucleotide
augcuccgggccggaucac

SEQ ID NO: 1714596 - RNA, 19 nt, Artificial Sequence
  Description of Artificial Sequence: Synthetic oligonucleotide
agccgggaucggagaguac

SEQ ID NO: 1714597 - RNA, 19 nt, Artificial Sequence
  Description of Artificial Sequence: Synthetic oligonucleotide
gcccacguugaggacgaug

SEQ ID NO: 1714598 - RNA, 19 nt, Artificial Sequence
  Description of Artificial Sequence: Synthetic oligonucleotide
cagcgaccucagccgcugc

SEQ ID NO: 1714599 - RNA, 19 nt, Artificial Sequence
  Description of Artificial Sequence: Synthetic oligonucleotide
gggagcgguagcgcugggc

SEQ ID NO: 1714600 - RNA, 19 nt, Artificial Sequence
  Description of Artificial Sequence: Synthetic oligonucleotide
cucuggcuggguuccugua

SEQ ID NO: 1714601 - RNA, 19 nt, Artificial Sequence
  Description of Artificial Sequence: Synthetic oligonucleotide
gccgcugcggcgcccgggc

SEQ ID NO: 1714602 - RNA, 19 nt, Artificial Sequence
  Description of Artificial Sequence: Synthetic oligonucleotide
gcgguggcugcacguagga

SEQ ID NO: 1714603 - RNA, 19 nt, Artificial Sequence
  Description of Artificial Sequence: Synthetic oligonucleotide
agcccacguagaacauaga

SEQ ID NO: 1714604 - RNA, 19 nt, Artificial Sequence
  Description of Artificial Sequence: Synthetic oligonucleotide
ccgagaugcuccgggccgg

SEQ ID NO: 1714605 - RNA, 19 nt, Artificial Sequence
  Description of Artificial Sequence: Synthetic oligonucleotide
ggguggccuaaguaugagu

SEQ ID NO: 1714606 - RNA, 19 nt, Artificial Sequence
  Description of Artificial Sequence: Synthetic oligonucleotide
gccucuaaguauugcuuuu

SEQ ID NO: 1714607 - RNA, 19 nt, Artificial Sequence
  Description of Artificial Sequence: Synthetic oligonucleotide
caccucgcuugagcucccc

SEQ ID NO: 1714608 - RNA, 19 nt, Artificial Sequence
  Description of Artificial Sequence: Synthetic oligonucleotide
cucucggugcaccucgcuu

SEQ ID NO: 1714609 - RNA, 19 nt, Artificial Sequence
  Description of Artificial Sequence: Synthetic oligonucleotide
cugcgacccgggcgccggg

SEQ ID NO: 1714610 - RNA, 19 nt, Artificial Sequence
  Description of Artificial Sequence: Synthetic oligonucleotide
gccggaucacggcgcccgg

SEQ ID NO: 1714611 - RNA, 19 nt, Artificial Sequence
  Description of Artificial Sequence: Synthetic oligonucleotide
cgagcuccgagucggcauc

SEQ ID NO: 1714612 - RNA, 19 nt, Artificial Sequence
  Description of Artificial Sequence: Synthetic oligonucleotide
gcaugucccucuucagagu

SEQ ID NO: 1714613 - RNA, 19 nt, Artificial Sequence
  Description of Artificial Sequence: Synthetic oligonucleotide
caucccgguccagauggua

SEQ ID NO: 1714614 - RNA, 19 nt, Artificial Sequence
  Description of Artificial Sequence: Synthetic oligonucleotide
ccagagccgggaucggaga

SEQ ID NO: 1714615 - RNA, 19 nt, Artificial Sequence
  Description of Artificial Sequence: Synthetic oligonucleotide
gcugcacguaggagaccag

SEQ ID NO: 1714616 - RNA, 19 nt, Artificial Sequence
  Description of Artificial Sequence: Synthetic oligonucleotide
ggccggcgaucccagcgac

SEQ ID NO: 1714617 - RNA, 19 nt, Artificial Sequence
  Description of Artificial Sequence: Synthetic oligonucleotide
cucagccgcugcggcgccc

SEQ ID NO: 1714618 - RNA, 19 nt, Artificial Sequence
  Description of Artificial Sequence: Synthetic oligonucleotide
ccgcgacagcucagagucg

SEQ ID NO: 1714619 - RNA, 19 nt, Artificial Sequence
  Description of Artificial Sequence: Synthetic oligonucleotide
ccgggaugcgggccacagg

SEQ ID NO: 1714620 - RNA, 19 nt, Artificial Sequence
  Description of Artificial Sequence: Synthetic oligonucleotide
cgggaucggagaguacgcc

SEQ ID NO: 1714621 - RNA, 19 nt, Artificial Sequence
  Description of Artificial Sequence: Synthetic oligonucleotide
cgaccucagccgcugcggc

SEQ ID NO: 1714622 - RNA, 19 nt, Artificial Sequence
  Description of Artificial Sequence: Synthetic oligonucleotide
ccgcaacuaguggcagugg

SEQ ID NO: 1714623 - RNA, 19 nt, Artificial Sequence
  Description of Artificial Sequence: Synthetic oligonucleotide
gcgacagcucagagucgag

SEQ ID NO: 1714624 - RNA, 19 nt, Artificial Sequence
  Description of Artificial Sequence: Synthetic oligonucleotide
gggcggccucggaagacgc

SEQ ID NO: 1714625 - RNA, 19 nt, Artificial Sequence
  Description of Artificial Sequence: Synthetic oligonucleotide
gcucgggagcgguagcgcu

SEQ ID NO: 1714626 - RNA, 19 nt, Artificial Sequence
  Description of Artificial Sequence: Synthetic oligonucleotide
cccgggaugcgggccacag

SEQ ID NO: 1714627 - RNA, 19 nt, Artificial Sequence
  Description of Artificial Sequence: Synthetic oligonucleotide
ccguguccuuuccagaggu

SEQ ID NO: 1714628 - RNA, 19 nt, Artificial Sequence
  Description of Artificial Sequence: Synthetic oligonucleotide
caaagacgucgagcuccga

SEQ ID NO: 1714629 - RNA, 19 nt, Artificial Sequence
  Description of Artificial Sequence: Synthetic oligonucleotide
ugcgggccacaggggccgc

SEQ ID NO: 1714630 - RNA, 19 nt, Artificial Sequence
  Description of Artificial Sequence: Synthetic oligonucleotide
ggguuccuguaaacaucca

SEQ ID NO: 1714631 - RNA, 19 nt, Artificial Sequence
  Description of Artificial Sequence: Synthetic oligonucleotide
ggcgcccgggaugcgggcc

SEQ ID NO: 1714632 - RNA, 19 nt, Artificial Sequence
  Description of Artificial Sequence: Synthetic oligonucleotide
gcuuaaggcucaacugcau

SEQ ID NO: 1714633 - RNA, 19 nt, Artificial Sequence
  Description of Artificial Sequence: Synthetic oligonucleotide
cgcgacagcucagagucga

SEQ ID NO: 1714634 - RNA, 19 nt, Artificial Sequence
  Description of Artificial Sequence: Synthetic oligonucleotide
gcuccgagucggcaucgua

SEQ ID NO: 1714635 - RNA, 19 nt, Artificial Sequence
  Description of Artificial Sequence: Synthetic oligonucleotide
ccggaucacggcgcccggg

SEQ ID NO: 1714636 - RNA, 19 nt, Artificial Sequence
  Description of Artificial Sequence: Synthetic oligonucleotide
ccgggcaugcaggggccgg

SEQ ID NO: 1714637 - RNA, 19 nt, Artificial Sequence
  Description of Artificial Sequence: Synthetic oligonucleotide
cggccucggaagacgcgcc

SEQ ID NO: 1714638 - RNA, 19 nt, Artificial Sequence
  Description of Artificial Sequence: Synthetic oligonucleotide
gagcaguagucaagaccuu

SEQ ID NO: 1714639 - RNA, 19 nt, Artificial Sequence
  Description of Artificial Sequence: Synthetic oligonucleotide
ggggccggcgauggggaca

SEQ ID NO: 1714640 - RNA, 19 nt, Artificial Sequence
  Description of Artificial Sequence: Synthetic oligonucleotide
cugggccccgggcggccuc

SEQ ID NO: 1714641 - RNA, 19 nt, Artificial Sequence
  Description of Artificial Sequence: Synthetic oligonucleotide
cuaguggcaguggcaugau

SEQ ID NO: 1714642 - RNA, 19 nt, Artificial Sequence
  Description of Artificial Sequence: Synthetic oligonucleotide
gcaugcaggggccggcgau

SEQ ID NO: 1714643 - RNA, 19 nt, Artificial Sequence
  Description of Artificial Sequence: Synthetic oligonucleotide
ggggacagcggccggcgau

SEQ ID NO: 1714644 - RNA, 19 nt, Artificial Sequence
  Description of Artificial Sequence: Synthetic oligonucleotide
gccggcgaucccagcgacc

SEQ ID NO: 1714645 - RNA, 19 nt, Artificial Sequence
  Description of Artificial Sequence: Synthetic oligonucleotide
cgucgagcuccgagucggc

SEQ ID NO: 1714646 - RNA, 19 nt, Artificial Sequence
  Description of Artificial Sequence: Synthetic oligonucleotide
gccuaaguaugagucuguu

SEQ ID NO: 1714647 - RNA, 19 nt, Artificial Sequence
  Description of Artificial Sequence: Synthetic oligonucleotide
ccuggggucucaucccggu

SEQ ID NO: 1714648 - RNA, 19 nt, Artificial Sequence
  Description of Artificial Sequence: Synthetic oligonucleotide
cggaucacggcgcccggga

SEQ ID NO: 1714649 - RNA, 19 nt, Artificial Sequence
  Description of Artificial Sequence: Synthetic oligonucleotide
cgccaagguccaccagcgc

SEQ ID NO: 1714650 - RNA, 19 nt, Artificial Sequence
  Description of Artificial Sequence: Synthetic oligonucleotide
cgaggcccacguugaggac

SEQ ID NO: 1714651 - RNA, 19 nt, Artificial Sequence
  Description of Artificial Sequence: Synthetic oligonucleotide
ccggcgaucccagcgaccu

SEQ ID NO: 1714652 - RNA, 19 nt, Artificial Sequence
  Description of Artificial Sequence: Synthetic oligonucleotide
ggccucggaagacgcgccu

SEQ ID NO: 1714653 - RNA, 19 nt, Artificial Sequence
  Description of Artificial Sequence: Synthetic oligonucleotide
ggaucacggcgcccgggau

SEQ ID NO: 1714654 - RNA, 19 nt, Artificial Sequence
  Description of Artificial Sequence: Synthetic oligonucleotide
cgggccggaucacggcgcc

SEQ ID NO: 1714655 - RNA, 19 nt, Artificial Sequence
  Description of Artificial Sequence: Synthetic oligonucleotide
ggccagggguucucucggu

SEQ ID NO: 1714656 - RNA, 19 nt, Artificial Sequence
  Description of Artificial Sequence: Synthetic oligonucleotide
gggccggaucacggcgccc

SEQ ID NO: 1714657 - RNA, 19 nt, Artificial Sequence
  Description of Artificial Sequence: Synthetic oligonucleotide
ccgcugcggcgcccgggcg

SEQ ID NO: 1714658 - RNA, 19 nt, Artificial Sequence
  Description of Artificial Sequence: Synthetic oligonucleotide
ccgggcggccucggaagac

SEQ ID NO: 1714659 - RNA, 19 nt, Artificial Sequence
  Description of Artificial Sequence: Synthetic oligonucleotide
ccccgcgacagcucagagu

SEQ ID NO: 1714660 - RNA, 19 nt, Artificial Sequence
  Description of Artificial Sequence: Synthetic oligonucleotide
gcguccaggugggcugcga

SEQ ID NO: 1714661 - RNA, 19 nt, Artificial Sequence
  Description of Artificial Sequence: Synthetic oligonucleotide
cccgggcggccucggaaga

SEQ ID NO: 1714662 - RNA, 19 nt, Artificial Sequence
  Description of Artificial Sequence: Synthetic oligonucleotide
cggccggcgaucccagcga

SEQ ID NO: 1714663 - RNA, 19 nt, Artificial Sequence
  Description of Artificial Sequence: Synthetic oligonucleotide
cccagcgaccucagccgcu

SEQ ID NO: 1714664 - RNA, 19 nt, Artificial Sequence
  Description of Artificial Sequence: Synthetic oligonucleotide
ggggcgccccggggcucgg

SEQ ID NO: 1714665 - RNA, 19 nt, Artificial Sequence
  Description of Artificial Sequence: Synthetic oligonucleotide
gccucggaagacgcgccuu

SEQ ID NO: 1714666 - RNA, 19 nt, Artificial Sequence
  Description of Artificial Sequence: Synthetic oligonucleotide
cggcgaucccagcgaccuc

SEQ ID NO: 1714667 - RNA, 19 nt, Artificial Sequence
  Description of Artificial Sequence: Synthetic oligonucleotide
cguguccuuuccagagguu

SEQ ID NO: 1714668 - RNA, 19 nt, Artificial Sequence
  Description of Artificial Sequence: Synthetic oligonucleotide
cggcaucguaaaggccaga

SEQ ID NO: 1714669 - RNA, 19 nt, Artificial Sequence
  Description of Artificial Sequence: Synthetic oligonucleotide
cccgggcgccgggcaugca

SEQ ID NO: 1714670 - RNA, 19 nt, Artificial Sequence
  Description of Artificial Sequence: Synthetic oligonucleotide
uuaacagaaacuuuaauac

SEQ ID NO: 1714671 - RNA, 19 nt, Artificial Sequence
  Description of Artificial Sequence: Synthetic oligonucleotide
aaugaaacaaaugccaguc

SEQ ID NO: 1714672 - RNA, 19 nt, Artificial Sequence
  Description of Artificial Sequence: Synthetic oligonucleotide
auucauguuggccaguucc

SEQ ID NO: 1714673 - RNA, 19 nt, Artificial Sequence
  Description of Artificial Sequence: Synthetic oligonucleotide
acuuuaauacguuuuguac

SEQ ID NO: 1714674 - RNA, 19 nt, Artificial Sequence
  Description of Artificial Sequence: Synthetic oligonucleotide
gaaaagucgauucauguug

SEQ ID NO: 1714675 - RNA, 19 nt, Artificial Sequence
  Description of Artificial Sequence: Synthetic oligonucleotide
uuugaagcaacuacaagug

SEQ ID NO: 1714676 - RNA, 19 nt, Artificial Sequence
  Description of Artificial Sequence: Synthetic oligonucleotide
cuuuaauacguuuuguacc

SEQ ID NO: 1714677 - RNA, 19 nt, Artificial Sequence
  Description of Artificial Sequence: Synthetic oligonucleotide
uuuaauacguuuuguacca

SEQ ID NO: 1714678 - RNA, 19 nt, Artificial Sequence
  Description of Artificial Sequence: Synthetic oligonucleotide
agaaacugcauuuucacug

SEQ ID NO: 1714679 - RNA, 19 nt, Artificial Sequence
  Description of Artificial Sequence: Synthetic oligonucleotide
aaaacaagccgacucuccg

SEQ ID NO: 1714680 - RNA, 19 nt, Artificial Sequence
  Description of Artificial Sequence: Synthetic oligonucleotide
uaaugauucacauaccagu

SEQ ID NO: 1714681 - RNA, 19 nt, Artificial Sequence
  Description of Artificial Sequence: Synthetic oligonucleotide
auagucaaagagcaguaac

SEQ ID NO: 1714682 - RNA, 19 nt, Artificial Sequence
  Description of Artificial Sequence: Synthetic oligonucleotide
uguucaaaguguuccaccg

SEQ ID NO: 1714683 - RNA, 19 nt, Artificial Sequence
  Description of Artificial Sequence: Synthetic oligonucleotide
agcaguaacuuaccaaugc

SEQ ID NO: 1714684 - RNA, 19 nt, Artificial Sequence
  Description of Artificial Sequence: Synthetic oligonucleotide
auugccaccguguaaguac

SEQ ID NO: 1714685 - RNA, 19 nt, Artificial Sequence
  Description of Artificial Sequence: Synthetic oligonucleotide
acguuuuguaccaaaaucc

SEQ ID NO: 1714686 - RNA, 19 nt, Artificial Sequence
  Description of Artificial Sequence: Synthetic oligonucleotide
uuacaagccguauuuauug

SEQ ID NO: 1714687 - RNA, 19 nt, Artificial Sequence
  Description of Artificial Sequence: Synthetic oligonucleotide
uauuuauugccauucgagc

SEQ ID NO: 1714688 - RNA, 19 nt, Artificial Sequence
  Description of Artificial Sequence: Synthetic oligonucleotide
agaagcaagaagcaaccac

SEQ ID NO: 1714689 - RNA, 19 nt, Artificial Sequence
  Description of Artificial Sequence: Synthetic oligonucleotide
aguaaugauucacauacca

SEQ ID NO: 1714690 - RNA, 19 nt, Artificial Sequence
  Description of Artificial Sequence: Synthetic oligonucleotide
aauaccccacucguuaucc

SEQ ID NO: 1714691 - RNA, 19 nt, Artificial Sequence
  Description of Artificial Sequence: Synthetic oligonucleotide
aacaucaggguuaauguuc

SEQ ID NO: 1714692 - RNA, 19 nt, Artificial Sequence
  Description of Artificial Sequence: Synthetic oligonucleotide
accaaguucauuacaagcc

SEQ ID NO: 1714693 - RNA, 19 nt, Artificial Sequence
  Description of Artificial Sequence: Synthetic oligonucleotide
aaaugaaacaaaugccagu

SEQ ID NO: 1714694 - RNA, 19 nt, Artificial Sequence
  Description of Artificial Sequence: Synthetic oligonucleotide
uuauccucauguauuaucu

SEQ ID NO: 1714695 - RNA, 19 nt, Artificial Sequence
  Description of Artificial Sequence: Synthetic oligonucleotide
aacagaaacuuuaauacgu

SEQ ID NO: 1714696 - RNA, 19 nt, Artificial Sequence
  Description of Artificial Sequence: Synthetic oligonucleotide
uucaguuguagagagaagc

SEQ ID NO: 1714697 - RNA, 19 nt, Artificial Sequence
  Description of Artificial Sequence: Synthetic oligonucleotide
aauucccucagguaagucu

SEQ ID NO: 1714698 - RNA, 19 nt, Artificial Sequence
  Description of Artificial Sequence: Synthetic oligonucleotide
uuaccaaugccacaucuug

SEQ ID NO: 1714699 - RNA, 19 nt, Artificial Sequence
  Description of Artificial Sequence: Synthetic oligonucleotide
cuaagaaccaggucaacag

SEQ ID NO: 1714700 - RNA, 19 nt, Artificial Sequence
  Description of Artificial Sequence: Synthetic oligonucleotide
aaacugacggugccaaaac

SEQ ID NO: 1714701 - RNA, 19 nt, Artificial Sequence
  Description of Artificial Sequence: Synthetic oligonucleotide
auuuauugccauucgagcu

SEQ ID NO: 1714702 - RNA, 19 nt, Artificial Sequence
  Description of Artificial Sequence: Synthetic oligonucleotide
aaaccucagacaccaacuc

SEQ ID NO: 1714703 - RNA, 19 nt, Artificial Sequence
  Description of Artificial Sequence: Synthetic oligonucleotide
uacguuuuguaccaaaauc

SEQ ID NO: 1714704 - RNA, 19 nt, Artificial Sequence
  Description of Artificial Sequence: Synthetic oligonucleotide
uguaauucccucagguaag

SEQ ID NO: 1714705 - RNA, 19 nt, Artificial Sequence
  Description of Artificial Sequence: Synthetic oligonucleotide
acuguuacuucagaaaccg

SEQ ID NO: 1714706 - RNA, 19 nt, Artificial Sequence
  Description of Artificial Sequence: Synthetic oligonucleotide
aaguuguccacacagcuaa

SEQ ID NO: 1714707 - RNA, 19 nt, Artificial Sequence
  Description of Artificial Sequence: Synthetic oligonucleotide
aacucaauaccccacucgu

SEQ ID NO: 1714708 - RNA, 19 nt, Artificial Sequence
  Description of Artificial Sequence: Synthetic oligonucleotide
aguacggauucucucauag

SEQ ID NO: 1714709 - RNA, 19 nt, Artificial Sequence
  Description of Artificial Sequence: Synthetic oligonucleotide
guuucaaugccaucaggcg

SEQ ID NO: 1714710 - RNA, 19 nt, Artificial Sequence
  Description of Artificial Sequence: Synthetic oligonucleotide
aagucgauucauguuggcc

SEQ ID NO: 1714711 - RNA, 19 nt, Artificial Sequence
  Description of Artificial Sequence: Synthetic oligonucleotide
agcaacuacaagugguggc

SEQ ID NO: 1714712 - RNA, 19 nt, Artificial Sequence
  Description of Artificial Sequence: Synthetic oligonucleotide
aauagaauaagcacagaaa

SEQ ID NO: 1714713 - RNA, 19 nt, Artificial Sequence
  Description of Artificial Sequence: Synthetic oligonucleotide
aaagucgauucauguuggc

SEQ ID NO: 1714714 - RNA, 19 nt, Artificial Sequence
  Description of Artificial Sequence: Synthetic oligonucleotide
agaagcaaccacguguucc

SEQ ID NO: 1714715 - RNA, 19 nt, Artificial Sequence
  Description of Artificial Sequence: Synthetic oligonucleotide
ugauucacauaccaguuaa

SEQ ID NO: 1714716 - RNA, 19 nt, Artificial Sequence
  Description of Artificial Sequence: Synthetic oligonucleotide
ucugaaaccucagacacca

SEQ ID NO: 1714717 - RNA, 19 nt, Artificial Sequence
  Description of Artificial Sequence: Synthetic oligonucleotide
aguaacuuaccaaugccac

SEQ ID NO: 1714718 - RNA, 19 nt, Artificial Sequence
  Description of Artificial Sequence: Synthetic oligonucleotide
uacggauucucucauaguc

SEQ ID NO: 1714719 - RNA, 19 nt, Artificial Sequence
  Description of Artificial Sequence: Synthetic oligonucleotide
aaugccaucaggcggcugu

SEQ ID NO: 1714720 - RNA, 19 nt, Artificial Sequence
  Description of Artificial Sequence: Synthetic oligonucleotide
aaaagucgauucauguugg

SEQ ID NO: 1714721 - RNA, 19 nt, Artificial Sequence
  Description of Artificial Sequence: Synthetic oligonucleotide
agcaugacaacucaguaau

SEQ ID NO: 1714722 - RNA, 19 nt, Artificial Sequence
  Description of Artificial Sequence: Synthetic oligonucleotide
gauauuguaguugugaacu

SEQ ID NO: 1714723 - RNA, 19 nt, Artificial Sequence
  Description of Artificial Sequence: Synthetic oligonucleotide
aaguguuccaccgugguga

SEQ ID NO: 1714724 - RNA, 19 nt, Artificial Sequence
  Description of Artificial Sequence: Synthetic oligonucleotide
agucgauucauguuggcca

SEQ ID NO: 1714725 - RNA, 19 nt, Artificial Sequence
  Description of Artificial Sequence: Synthetic oligonucleotide
aaacuuaacagaaacuuua

SEQ ID NO: 1714726 - RNA, 19 nt, Artificial Sequence
  Description of Artificial Sequence: Synthetic oligonucleotide
gacaacucaguaaugauuc

SEQ ID NO: 1714727 - RNA, 19 nt, Artificial Sequence
  Description of Artificial Sequence: Synthetic oligonucleotide
uguaccaaaaucccugcaa

SEQ ID NO: 1714728 - RNA, 19 nt, Artificial Sequence
  Description of Artificial Sequence: Synthetic oligonucleotide
uuauucuacucaugaagug

SEQ ID NO: 1714729 - RNA, 19 nt, Artificial Sequence
  Description of Artificial Sequence: Synthetic oligonucleotide
aucuucucgaugcgggucc

SEQ ID NO: 1714730 - RNA, 19 nt, Artificial Sequence
  Description of Artificial Sequence: Synthetic oligonucleotide
ugcugcuugaacuuuacuc

SEQ ID NO: 1714731 - RNA, 19 nt, Artificial Sequence
  Description of Artificial Sequence: Synthetic oligonucleotide
ucaggguuaauguuccuca

SEQ ID NO: 1714732 - RNA, 19 nt, Artificial Sequence
  Description of Artificial Sequence: Synthetic oligonucleotide
accaaugccacaucuuguc

SEQ ID NO: 1714733 - RNA, 19 nt, Artificial Sequence
  Description of Artificial Sequence: Synthetic oligonucleotide
acgcaaaacaagccgacuc

SEQ ID NO: 1714734 - RNA, 19 nt, Artificial Sequence
  Description of Artificial Sequence: Synthetic oligonucleotide
cugauucaguuguagagag

SEQ ID NO: 1714735 - RNA, 19 nt, Artificial Sequence
  Description of Artificial Sequence: Synthetic oligonucleotide
aacccaccauuacuuauuc

SEQ ID NO: 1714736 - RNA, 19 nt, Artificial Sequence
  Description of Artificial Sequence: Synthetic oligonucleotide
uucagaaaccgaauccucu

SEQ ID NO: 1714737 - RNA, 19 nt, Artificial Sequence
  Description of Artificial Sequence: Synthetic oligonucleotide
acguguuccauacagcaug

SEQ ID NO: 1714738 - RNA, 19 nt, Artificial Sequence
  Description of Artificial Sequence: Synthetic oligonucleotide
cuuuacucaguccugcuug

SEQ ID NO: 1714739 - RNA, 19 nt, Artificial Sequence
  Description of Artificial Sequence: Synthetic oligonucleotide
uauucuacucaugaagugu

SEQ ID NO: 1714740 - RNA, 19 nt, Artificial Sequence
  Description of Artificial Sequence: Synthetic oligonucleotide
aagagcaguaacuuaccaa

SEQ ID NO: 1714741 - RNA, 19 nt, Artificial Sequence
  Description of Artificial Sequence: Synthetic oligonucleotide
aacuccaccaacaccuacg

SEQ ID NO: 1714742 - RNA, 19 nt, Artificial Sequence
  Description of Artificial Sequence: Synthetic oligonucleotide
cauucgagcuucaaaguug

SEQ ID NO: 1714743 - RNA, 19 nt, Artificial Sequence
  Description of Artificial Sequence: Synthetic oligonucleotide
uuacuucagaaaccgaauc

SEQ ID NO: 1714744 - RNA, 19 nt, Artificial Sequence
  Description of Artificial Sequence: Synthetic oligonucleotide
ugauauuguaguugugaac

SEQ ID NO: 1714745 - RNA, 19 nt, Artificial Sequence
  Description of Artificial Sequence: Synthetic oligonucleotide
uuuauugccauucgagcuu

SEQ ID NO: 1714746 - RNA, 19 nt, Artificial Sequence
  Description of Artificial Sequence: Synthetic oligonucleotide
cacauaccaguuaaggcag

SEQ ID NO: 1714747 - RNA, 19 nt, Artificial Sequence
  Description of Artificial Sequence: Synthetic oligonucleotide
ucgagcuucaaaguugucc

SEQ ID NO: 1714748 - RNA, 19 nt, Artificial Sequence
  Description of Artificial Sequence: Synthetic oligonucleotide
aaaguguuccaccguggug

SEQ ID NO: 1714749 - RNA, 19 nt, Artificial Sequence
  Description of Artificial Sequence: Synthetic oligonucleotide
cacacuaccaacuccacca

SEQ ID NO: 1714750 - RNA, 19 nt, Artificial Sequence
  Description of Artificial Sequence: Synthetic oligonucleotide
uaccaguuaaggcagcccu

SEQ ID NO: 1714751 - RNA, 19 nt, Artificial Sequence
  Description of Artificial Sequence: Synthetic oligonucleotide
auacucugcugcuugaacu

SEQ ID NO: 1714752 - RNA, 19 nt, Artificial Sequence
  Description of Artificial Sequence: Synthetic oligonucleotide
accguguaaguacggauuc

SEQ ID NO: 1714753 - RNA, 19 nt, Artificial Sequence
  Description of Artificial Sequence: Synthetic oligonucleotide
uguaguugugaacuucaaa

SEQ ID NO: 1714754 - RNA, 19 nt, Artificial Sequence
  Description of Artificial Sequence: Synthetic oligonucleotide
guaaguacggauucucuca

SEQ ID NO: 1714755 - RNA, 19 nt, Artificial Sequence
  Description of Artificial Sequence: Synthetic oligonucleotide
uugucagcauuucagcagu

SEQ ID NO: 1714756 - RNA, 19 nt, Artificial Sequence
  Description of Artificial Sequence: Synthetic oligonucleotide
aaaacugacggugccaaaa

SEQ ID NO: 1714757 - RNA, 19 nt, Artificial Sequence
  Description of Artificial Sequence: Synthetic oligonucleotide
gaagaaaagucgauucaug

SEQ ID NO: 1714758 - RNA, 19 nt, Artificial Sequence
  Description of Artificial Sequence: Synthetic oligonucleotide
aauguuccucaagguauac

SEQ ID NO: 1714759 - RNA, 19 nt, Artificial Sequence
  Description of Artificial Sequence: Synthetic oligonucleotide
guaaugauucacauaccag

SEQ ID NO: 1714760 - RNA, 19 nt, Artificial Sequence
  Description of Artificial Sequence: Synthetic oligonucleotide
gaagcaacuacaaguggug

SEQ ID NO: 1714761 - RNA, 19 nt, Artificial Sequence
  Description of Artificial Sequence: Synthetic oligonucleotide
uaccaaaaucccugcaacc

SEQ ID NO: 1714762 - RNA, 19 nt, Artificial Sequence
  Description of Artificial Sequence: Synthetic oligonucleotide
caacucaauaccccacucg

SEQ ID NO: 1714763 - RNA, 19 nt, Artificial Sequence
  Description of Artificial Sequence: Synthetic oligonucleotide
cauagucacugacaauucc

SEQ ID NO: 1714764 - RNA, 19 nt, Artificial Sequence
  Description of Artificial Sequence: Synthetic oligonucleotide
uaacuuaccaaugccacau

SEQ ID NO: 1714765 - RNA, 19 nt, Artificial Sequence
  Description of Artificial Sequence: Synthetic oligonucleotide
gacgccuucucguuucagg

SEQ ID NO: 1714766 - RNA, 19 nt, Artificial Sequence
  Description of Artificial Sequence: Synthetic oligonucleotide
uccaagggaauagaauaag

SEQ ID NO: 1714767 - RNA, 19 nt, Artificial Sequence
  Description of Artificial Sequence: Synthetic oligonucleotide
aaccucagacaccaacuca

SEQ ID NO: 1714768 - RNA, 19 nt, Artificial Sequence
  Description of Artificial Sequence: Synthetic oligonucleotide
guuauccucauguauuauc

SEQ ID NO: 1714769 - RNA, 19 nt, Artificial Sequence
  Description of Artificial Sequence: Synthetic oligonucleotide
acuuaccaaugccacaucu

SEQ ID NO: 1714770 - RNA, 19 nt, Artificial Sequence
  Description of Artificial Sequence: Synthetic oligonucleotide
uugcauuguauccaaggua

SEQ ID NO: 1714771 - RNA, 19 nt, Artificial Sequence
  Description of Artificial Sequence: Synthetic oligonucleotide
aaaaucccugcaaccacuc

SEQ ID NO: 1714772 - RNA, 19 nt, Artificial Sequence
  Description of Artificial Sequence: Synthetic oligonucleotide
aauacguuuuguaccaaaa

SEQ ID NO: 1714773 - RNA, 19 nt, Artificial Sequence
  Description of Artificial Sequence: Synthetic oligonucleotide
uguaugccacuguaauucc

SEQ ID NO: 1714774 - RNA, 19 nt, Artificial Sequence
  Description of Artificial Sequence: Synthetic oligonucleotide
acgccuucucguuucaggg

SEQ ID NO: 1714775 - RNA, 19 nt, Artificial Sequence
  Description of Artificial Sequence: Synthetic oligonucleotide
aguuuuguuaguucugauu

SEQ ID NO: 1714776 - RNA, 19 nt, Artificial Sequence
  Description of Artificial Sequence: Synthetic oligonucleotide
gccaaaacuuaacagaaac

SEQ ID NO: 1714777 - RNA, 19 nt, Artificial Sequence
  Description of Artificial Sequence: Synthetic oligonucleotide
gacaauucccauccguuuc

SEQ ID NO: 1714778 - RNA, 19 nt, Artificial Sequence
  Description of Artificial Sequence: Synthetic oligonucleotide
uugccaccguguaaguacg

SEQ ID NO: 1714779 - RNA, 19 nt, Artificial Sequence
  Description of Artificial Sequence: Synthetic oligonucleotide
guuaauguuccucaaggua

SEQ ID NO: 1714780 - RNA, 19 nt, Artificial Sequence
  Description of Artificial Sequence: Synthetic oligonucleotide
guguaugccacuguaauuc

SEQ ID NO: 1714781 - RNA, 19 nt, Artificial Sequence
  Description of Artificial Sequence: Synthetic oligonucleotide
aacuuaccaaugccacauc

SEQ ID NO: 1714782 - RNA, 19 nt, Artificial Sequence
  Description of Artificial Sequence: Synthetic oligonucleotide
cacuguuacuucagaaacc

SEQ ID NO: 1714783 - RNA, 19 nt, Artificial Sequence
  Description of Artificial Sequence: Synthetic oligonucleotide
acugacaauucccauccgu

SEQ ID NO: 1714784 - RNA, 19 nt, Artificial Sequence
  Description of Artificial Sequence: Synthetic oligonucleotide
ucuacucaugaaguguuca

SEQ ID NO: 1714785 - RNA, 19 nt, Artificial Sequence
  Description of Artificial Sequence: Synthetic oligonucleotide
gaagcaaccacguguucca

SEQ ID NO: 1714786 - RNA, 19 nt, Artificial Sequence
  Description of Artificial Sequence: Synthetic oligonucleotide
uccacgucugaccaaguuc

SEQ ID NO: 1714787 - RNA, 19 nt, Artificial Sequence
  Description of Artificial Sequence: Synthetic oligonucleotide
aacugacggugccaaaacu

SEQ ID NO: 1714788 - RNA, 19 nt, Artificial Sequence
  Description of Artificial Sequence: Synthetic oligonucleotide
cagcccuaaguuuuguuag

SEQ ID NO: 1714789 - RNA, 19 nt, Artificial Sequence
  Description of Artificial Sequence: Synthetic oligonucleotide
aaugggaccugaagaguuc

SEQ ID NO: 1714790 - RNA, 19 nt, Artificial Sequence
  Description of Artificial Sequence: Synthetic oligonucleotide
cuuauucuacucaugaagu

SEQ ID NO: 1714791 - RNA, 19 nt, Artificial Sequence
  Description of Artificial Sequence: Synthetic oligonucleotide
agguauacucugcugcuug

SEQ ID NO: 1714792 - RNA, 19 nt, Artificial Sequence
  Description of Artificial Sequence: Synthetic oligonucleotide
aaugccaguccacugucua

SEQ ID NO: 1714793 - RNA, 19 nt, Artificial Sequence
  Description of Artificial Sequence: Synthetic oligonucleotide
aacuuuacucaguccugcu

SEQ ID NO: 1714794 - RNA, 19 nt, Artificial Sequence
  Description of Artificial Sequence: Synthetic oligonucleotide
ugaaguguucaaaguguuc

SEQ ID NO: 1714795 - RNA, 19 nt, Artificial Sequence
  Description of Artificial Sequence: Synthetic oligonucleotide
uaauacguuuuguaccaaa

SEQ ID NO: 1714796 - RNA, 19 nt, Artificial Sequence
  Description of Artificial Sequence: Synthetic oligonucleotide
cuguaauucccucagguaa

SEQ ID NO: 1714797 - RNA, 19 nt, Artificial Sequence
  Description of Artificial Sequence: Synthetic oligonucleotide
auaccaguuaaggcagccc

SEQ ID NO: 1714798 - RNA, 19 nt, Artificial Sequence
  Description of Artificial Sequence: Synthetic oligonucleotide
aacuacaagugguggcgca

SEQ ID NO: 1714799 - RNA, 19 nt, Artificial Sequence
  Description of Artificial Sequence: Synthetic oligonucleotide
auacguuuuguaccaaaau

SEQ ID NO: 1714800 - RNA, 19 nt, Artificial Sequence
  Description of Artificial Sequence: Synthetic oligonucleotide
acuuaacagaaacuuuaau

SEQ ID NO: 1714801 - RNA, 19 nt, Artificial Sequence
  Description of Artificial Sequence: Synthetic oligonucleotide
aaaccgaauccucuugcuu

SEQ ID NO: 1714802 - RNA, 19 nt, Artificial Sequence
  Description of Artificial Sequence: Synthetic oligonucleotide
uaaguacggauucucucau

SEQ ID NO: 1714803 - RNA, 19 nt, Artificial Sequence
  Description of Artificial Sequence: Synthetic oligonucleotide
auccguuucaaugccauca

SEQ ID NO: 1714804 - RNA, 19 nt, Artificial Sequence
  Description of Artificial Sequence: Synthetic oligonucleotide
uuccauacagcaugacaac

SEQ ID NO: 1714805 - RNA, 19 nt, Artificial Sequence
  Description of Artificial Sequence: Synthetic oligonucleotide
uucuucuaacccaccauua

SEQ ID NO: 1714806 - RNA, 19 nt, Artificial Sequence
  Description of Artificial Sequence: Synthetic oligonucleotide
acaauucccauccguuuca

SEQ ID NO: 1714807 - RNA, 19 nt, Artificial Sequence
  Description of Artificial Sequence: Synthetic oligonucleotide
ggcuucauggacaugguag

SEQ ID NO: 1714808 - RNA, 19 nt, Artificial Sequence
  Description of Artificial Sequence: Synthetic oligonucleotide
uaccaacuccaccaacacc

SEQ ID NO: 1714809 - RNA, 19 nt, Artificial Sequence
  Description of Artificial Sequence: Synthetic oligonucleotide
uacuuauucuacucaugaa

SEQ ID NO: 1714810 - RNA, 19 nt, Artificial Sequence
  Description of Artificial Sequence: Synthetic oligonucleotide
ccaaguucauuacaagccg

SEQ ID NO: 1714811 - RNA, 19 nt, Artificial Sequence
  Description of Artificial Sequence: Synthetic oligonucleotide
agucacacuaccaacucca

SEQ ID NO: 1714812 - RNA, 19 nt, Artificial Sequence
  Description of Artificial Sequence: Synthetic oligonucleotide
uggaugugcccagaaacug

SEQ ID NO: 1714813 - RNA, 19 nt, Artificial Sequence
  Description of Artificial Sequence: Synthetic oligonucleotide
ugcauugcauuguauccaa

SEQ ID NO: 1714814 - RNA, 19 nt, Artificial Sequence
  Description of Artificial Sequence: Synthetic oligonucleotide
augacaacucaguaaugau

SEQ ID NO: 1714815 - RNA, 19 nt, Artificial Sequence
  Description of Artificial Sequence: Synthetic oligonucleotide
acucguuauccucauguau

SEQ ID NO: 1714816 - RNA, 19 nt, Artificial Sequence
  Description of Artificial Sequence: Synthetic oligonucleotide
cagaaucuuccacuguuac

SEQ ID NO: 1714817 - RNA, 19 nt, Artificial Sequence
  Description of Artificial Sequence: Synthetic oligonucleotide
uaacccaccauuacuuauu

SEQ ID NO: 1714818 - RNA, 19 nt, Artificial Sequence
  Description of Artificial Sequence: Synthetic oligonucleotide
gucgauucauguuggccag

SEQ ID NO: 1714819 - RNA, 19 nt, Artificial Sequence
  Description of Artificial Sequence: Synthetic oligonucleotide
uaccaaugccacaucuugu

SEQ ID NO: 1714820 - RNA, 19 nt, Artificial Sequence
  Description of Artificial Sequence: Synthetic oligonucleotide
cucgaugcggguccggccg

SEQ ID NO: 1714821 - RNA, 19 nt, Artificial Sequence
  Description of Artificial Sequence: Synthetic oligonucleotide
ucagaaaccgaauccucuu

SEQ ID NO: 1714822 - RNA, 19 nt, Artificial Sequence
  Description of Artificial Sequence: Synthetic oligonucleotide
caguaacuuaccaaugcca

SEQ ID NO: 1714823 - RNA, 19 nt, Artificial Sequence
  Description of Artificial Sequence: Synthetic oligonucleotide
gcaacuacaagugguggcg

SEQ ID NO: 1714824 - RNA, 19 nt, Artificial Sequence
  Description of Artificial Sequence: Synthetic oligonucleotide
acuacaagugguggcgcac

SEQ ID NO: 1714825 - RNA, 19 nt, Artificial Sequence
  Description of Artificial Sequence: Synthetic oligonucleotide
ugauucaguuguagagaga

SEQ ID NO: 1714826 - RNA, 19 nt, Artificial Sequence
  Description of Artificial Sequence: Synthetic oligonucleotide
uccucauguauuaucucuu

SEQ ID NO: 1714827 - RNA, 19 nt, Artificial Sequence
  Description of Artificial Sequence: Synthetic oligonucleotide
acggugccaaaacuuaaca

SEQ ID NO: 1714828 - RNA, 19 nt, Artificial Sequence
  Description of Artificial Sequence: Synthetic oligonucleotide
uuccacuguuacuucagaa

SEQ ID NO: 1714829 - RNA, 19 nt, Artificial Sequence
  Description of Artificial Sequence: Synthetic oligonucleotide
ugucgcugccuucuucuug

SEQ ID NO: 1714830 - RNA, 19 nt, Artificial Sequence
  Description of Artificial Sequence: Synthetic oligonucleotide
ucguuauccucauguauua

SEQ ID NO: 1714831 - RNA, 19 nt, Artificial Sequence
  Description of Artificial Sequence: Synthetic oligonucleotide
uuaggcgcagccuccugug

SEQ ID NO: 1714832 - RNA, 19 nt, Artificial Sequence
  Description of Artificial Sequence: Synthetic oligonucleotide
uguguaugccacuguaauu

SEQ ID NO: 1714833 - RNA, 19 nt, Artificial Sequence
  Description of Artificial Sequence: Synthetic oligonucleotide
agugguggcgcacacgcaa

SEQ ID NO: 1714834 - RNA, 19 nt, Artificial Sequence
  Description of Artificial Sequence: Synthetic oligonucleotide
aagccguauuuauugccau

SEQ ID NO: 1714835 - RNA, 19 nt, Artificial Sequence
  Description of Artificial Sequence: Synthetic oligonucleotide
guaacuuaccaaugccaca

SEQ ID NO: 1714836 - RNA, 19 nt, Artificial Sequence
  Description of Artificial Sequence: Synthetic oligonucleotide
uugggacuguguaugccac

SEQ ID NO: 1714837 - RNA, 19 nt, Artificial Sequence
  Description of Artificial Sequence: Synthetic oligonucleotide
caacucaguaaugauucac

SEQ ID NO: 1714838 - RNA, 19 nt, Artificial Sequence
  Description of Artificial Sequence: Synthetic oligonucleotide
cucuccggggaucaugagc

SEQ ID NO: 1714839 - RNA, 19 nt, Artificial Sequence
  Description of Artificial Sequence: Synthetic oligonucleotide
ugacaauucccauccguuu

SEQ ID NO: 1714840 - RNA, 19 nt, Artificial Sequence
  Description of Artificial Sequence: Synthetic oligonucleotide
uugccauucgagcuucaaa

SEQ ID NO: 1714841 - RNA, 19 nt, Artificial Sequence
  Description of Artificial Sequence: Synthetic oligonucleotide
caagccguauuuauugcca

SEQ ID NO: 1714842 - RNA, 19 nt, Artificial Sequence
  Description of Artificial Sequence: Synthetic oligonucleotide
agcaagaagcaaccacgug

SEQ ID NO: 1714843 - RNA, 19 nt, Artificial Sequence
  Description of Artificial Sequence: Synthetic oligonucleotide
aggucaacagguuuuccuu

SEQ ID NO: 1714844 - RNA, 19 nt, Artificial Sequence
  Description of Artificial Sequence: Synthetic oligonucleotide
ucaauaccccacucguuau

SEQ ID NO: 1714845 - RNA, 19 nt, Artificial Sequence
  Description of Artificial Sequence: Synthetic oligonucleotide
cacacgcaaaacaagccga

SEQ ID NO: 1714846 - RNA, 19 nt, Artificial Sequence
  Description of Artificial Sequence: Synthetic oligonucleotide
acacgcaaaacaagccgac

SEQ ID NO: 1714847 - RNA, 19 nt, Artificial Sequence
  Description of Artificial Sequence: Synthetic oligonucleotide
ugccacuguaauucccuca

SEQ ID NO: 1714848 - RNA, 19 nt, Artificial Sequence
  Description of Artificial Sequence: Synthetic oligonucleotide
gguuuuccuucuucuaacc

SEQ ID NO: 1714849 - RNA, 19 nt, Artificial Sequence
  Description of Artificial Sequence: Synthetic oligonucleotide
augauucacauaccaguua

SEQ ID NO: 1714850 - RNA, 19 nt, Artificial Sequence
  Description of Artificial Sequence: Synthetic oligonucleotide
ugacggugccaaaacuuaa

SEQ ID NO: 1714851 - RNA, 19 nt, Artificial Sequence
  Description of Artificial Sequence: Synthetic oligonucleotide
gaugugcccagaaacugca

SEQ ID NO: 1714852 - RNA, 19 nt, Artificial Sequence
  Description of Artificial Sequence: Synthetic oligonucleotide
uacgauugccaccguguaa

SEQ ID NO: 1714853 - RNA, 19 nt, Artificial Sequence
  Description of Artificial Sequence: Synthetic oligonucleotide
cagucacacuaccaacucc

SEQ ID NO: 1714854 - RNA, 19 nt, Artificial Sequence
  Description of Artificial Sequence: Synthetic oligonucleotide
cagaaaccgaauccucuug

SEQ ID NO: 1714855 - RNA, 19 nt, Artificial Sequence
  Description of Artificial Sequence: Synthetic oligonucleotide
accgaauccucuugcuucu

SEQ ID NO: 1714856 - RNA, 19 nt, Artificial Sequence
  Description of Artificial Sequence: Synthetic oligonucleotide
auucgagcuucaaaguugu

SEQ ID NO: 1714857 - RNA, 19 nt, Artificial Sequence
  Description of Artificial Sequence: Synthetic oligonucleotide
uuauugccauucgagcuuc

SEQ ID NO: 1714858 - RNA, 19 nt, Artificial Sequence
  Description of Artificial Sequence: Synthetic oligonucleotide
acuuuacucaguccugcuu

SEQ ID NO: 1714859 - RNA, 19 nt, Artificial Sequence
  Description of Artificial Sequence: Synthetic oligonucleotide
caaaguuguccacacagcu

SEQ ID NO: 1714860 - RNA, 19 nt, Artificial Sequence
  Description of Artificial Sequence: Synthetic oligonucleotide
gcaagaagcaaccacgugu

SEQ ID NO: 1714861 - RNA, 19 nt, Artificial Sequence
  Description of Artificial Sequence: Synthetic oligonucleotide
augagcuggaugugcccag

SEQ ID NO: 1714862 - RNA, 19 nt, Artificial Sequence
  Description of Artificial Sequence: Synthetic oligonucleotide
gacggugccaaaacuuaac

SEQ ID NO: 1714863 - RNA, 19 nt, Artificial Sequence
  Description of Artificial Sequence: Synthetic oligonucleotide
accaggucaacagguuuuc

SEQ ID NO: 1714864 - RNA, 19 nt, Artificial Sequence
  Description of Artificial Sequence: Synthetic oligonucleotide
caacaccuacgauugccac

SEQ ID NO: 1714865 - RNA, 19 nt, Artificial Sequence
  Description of Artificial Sequence: Synthetic oligonucleotide
agcccuaaguuuuguuagu

SEQ ID NO: 1714866 - RNA, 19 nt, Artificial Sequence
  Description of Artificial Sequence: Synthetic oligonucleotide
guggcgcacacgcaaaaca

SEQ ID NO: 1714867 - RNA, 19 nt, Artificial Sequence
  Description of Artificial Sequence: Synthetic oligonucleotide
accuacgauugccaccgug

SEQ ID NO: 1714868 - RNA, 19 nt, Artificial Sequence
  Description of Artificial Sequence: Synthetic oligonucleotide
gauucauguuggccaguuc

SEQ ID NO: 1714869 - RNA, 19 nt, Artificial Sequence
  Description of Artificial Sequence: Synthetic oligonucleotide
acauaccaguuaaggcagc

SEQ ID NO: 1714870 - RNA, 19 nt, Artificial Sequence
  Description of Artificial Sequence: Synthetic oligonucleotide
caccaacucaauaccccac

SEQ ID NO: 1714871 - RNA, 19 nt, Artificial Sequence
  Description of Artificial Sequence: Synthetic oligonucleotide
acaagccgacucuccgggg

SEQ ID NO: 1714872 - RNA, 19 nt, Artificial Sequence
  Description of Artificial Sequence: Synthetic oligonucleotide
uaccccacucguuauccuc

SEQ ID NO: 1714873 - RNA, 19 nt, Artificial Sequence
  Description of Artificial Sequence: Synthetic oligonucleotide
ugccaccguguaaguacgg

SEQ ID NO: 1714874 - RNA, 19 nt, Artificial Sequence
  Description of Artificial Sequence: Synthetic oligonucleotide
acggauucucucauaguca

SEQ ID NO: 1714875 - RNA, 19 nt, Artificial Sequence
  Description of Artificial Sequence: Synthetic oligonucleotide
gagacuggccgcgcagacg

SEQ ID NO: 1714876 - RNA, 19 nt, Artificial Sequence
  Description of Artificial Sequence: Synthetic oligonucleotide
cagguaagucuggaauggg

SEQ ID NO: 1714877 - RNA, 19 nt, Artificial Sequence
  Description of Artificial Sequence: Synthetic oligonucleotide
acugacggugccaaaacuu

SEQ ID NO: 1714878 - RNA, 19 nt, Artificial Sequence
  Description of Artificial Sequence: Synthetic oligonucleotide
uuaauacguuuuguaccaa

SEQ ID NO: 1714879 - RNA, 19 nt, Artificial Sequence
  Description of Artificial Sequence: Synthetic oligonucleotide
ucuucucgaugcggguccg

SEQ ID NO: 1714880 - RNA, 19 nt, Artificial Sequence
  Description of Artificial Sequence: Synthetic oligonucleotide
cuccuuaggcgcagccucc

SEQ ID NO: 1714881 - RNA, 19 nt, Artificial Sequence
  Description of Artificial Sequence: Synthetic oligonucleotide
aaguacggauucucucaua

SEQ ID NO: 1714882 - RNA, 19 nt, Artificial Sequence
  Description of Artificial Sequence: Synthetic oligonucleotide
cauuacaagccguauuuau

SEQ ID NO: 1714883 - RNA, 19 nt, Artificial Sequence
  Description of Artificial Sequence: Synthetic oligonucleotide
cuacucaugaaguguucaa

SEQ ID NO: 1714884 - RNA, 19 nt, Artificial Sequence
  Description of Artificial Sequence: Synthetic oligonucleotide
agcuaagaaccaggucaac

SEQ ID NO: 1714885 - RNA, 19 nt, Artificial Sequence
  Description of Artificial Sequence: Synthetic oligonucleotide
caacuacaagugguggcgc

SEQ ID NO: 1714886 - RNA, 19 nt, Artificial Sequence
  Description of Artificial Sequence: Synthetic oligonucleotide
gacucuccggggaucauga

SEQ ID NO: 1714887 - RNA, 19 nt, Artificial Sequence
  Description of Artificial Sequence: Synthetic oligonucleotide
aagguauacucugcugcuu

SEQ ID NO: 1714888 - RNA, 19 nt, Artificial Sequence
  Description of Artificial Sequence: Synthetic oligonucleotide
caauaccccacucguuauc

SEQ ID NO: 1714889 - RNA, 19 nt, Artificial Sequence
  Description of Artificial Sequence: Synthetic oligonucleotide
gauuggaguccaccaccuc

SEQ ID NO: 1714890 - RNA, 19 nt, Artificial Sequence
  Description of Artificial Sequence: Synthetic oligonucleotide
aagccgacucuccggggau

SEQ ID NO: 1714891 - RNA, 19 nt, Artificial Sequence
  Description of Artificial Sequence: Synthetic oligonucleotide
cugacggugccaaaacuua

SEQ ID NO: 1714892 - RNA, 19 nt, Artificial Sequence
  Description of Artificial Sequence: Synthetic oligonucleotide
gcuaagaaccaggucaaca

SEQ ID NO: 1714893 - RNA, 19 nt, Artificial Sequence
  Description of Artificial Sequence: Synthetic oligonucleotide
ccacgucugaccaaguuca

SEQ ID NO: 1714894 - RNA, 19 nt, Artificial Sequence
  Description of Artificial Sequence: Synthetic oligonucleotide
uauugccauucgagcuuca

SEQ ID NO: 1714895 - RNA, 19 nt, Artificial Sequence
  Description of Artificial Sequence: Synthetic oligonucleotide
uggcuucauggacauggua

SEQ ID NO: 1714896 - RNA, 19 nt, Artificial Sequence
  Description of Artificial Sequence: Synthetic oligonucleotide
caccucggagcucaucuuc

SEQ ID NO: 1714897 - RNA, 19 nt, Artificial Sequence
  Description of Artificial Sequence: Synthetic oligonucleotide
ggaugugcccagaaacugc

SEQ ID NO: 1714898 - RNA, 19 nt, Artificial Sequence
  Description of Artificial Sequence: Synthetic oligonucleotide
augggaccugaagaguucu

SEQ ID NO: 1714899 - RNA, 19 nt, Artificial Sequence
  Description of Artificial Sequence: Synthetic oligonucleotide
ccguauuuauugccauucg

SEQ ID NO: 1714900 - RNA, 19 nt, Artificial Sequence
  Description of Artificial Sequence: Synthetic oligonucleotide
cacuaccaacuccaccaac

SEQ ID NO: 1714901 - RNA, 19 nt, Artificial Sequence
  Description of Artificial Sequence: Synthetic oligonucleotide
acuguguaugccacuguaa

SEQ ID NO: 1714902 - RNA, 19 nt, Artificial Sequence
  Description of Artificial Sequence: Synthetic oligonucleotide
auaccccacucguuauccu

SEQ ID NO: 1714903 - RNA, 19 nt, Artificial Sequence
  Description of Artificial Sequence: Synthetic oligonucleotide
auguuccucaagguauacu

SEQ ID NO: 1714904 - RNA, 19 nt, Artificial Sequence
  Description of Artificial Sequence: Synthetic oligonucleotide
caguuaaggcagcccuaag

SEQ ID NO: 1714905 - RNA, 19 nt, Artificial Sequence
  Description of Artificial Sequence: Synthetic oligonucleotide
ugggacuguguaugccacu

SEQ ID NO: 1714906 - RNA, 19 nt, Artificial Sequence
  Description of Artificial Sequence: Synthetic oligonucleotide
cccaccauuacuuauucua

SEQ ID NO: 1714907 - RNA, 19 nt, Artificial Sequence
  Description of Artificial Sequence: Synthetic oligonucleotide
gccguauuuauugccauuc

SEQ ID NO: 1714908 - RNA, 19 nt, Artificial Sequence
  Description of Artificial Sequence: Synthetic oligonucleotide
cacugacaauucccauccg

SEQ ID NO: 1714909 - RNA, 19 nt, Artificial Sequence
  Description of Artificial Sequence: Synthetic oligonucleotide
uggaguccaccaccucgga

SEQ ID NO: 1714910 - RNA, 19 nt, Artificial Sequence
  Description of Artificial Sequence: Synthetic oligonucleotide
uaauucccucagguaaguc

SEQ ID NO: 1714911 - RNA, 19 nt, Artificial Sequence
  Description of Artificial Sequence: Synthetic oligonucleotide
guuacuucagaaaccgaau

SEQ ID NO: 1714912 - RNA, 19 nt, Artificial Sequence
  Description of Artificial Sequence: Synthetic oligonucleotide
auccacgucugaccaaguu

SEQ ID NO: 1714913 - RNA, 19 nt, Artificial Sequence
  Description of Artificial Sequence: Synthetic oligonucleotide
gaaugggaccugaagaguu

SEQ ID NO: 1714914 - RNA, 19 nt, Artificial Sequence
  Description of Artificial Sequence: Synthetic oligonucleotide
ccacguguuccauacagca

SEQ ID NO: 1714915 - RNA, 19 nt, Artificial Sequence
  Description of Artificial Sequence: Synthetic oligonucleotide
aucaggcggcuguagggau

SEQ ID NO: 1714916 - RNA, 19 nt, Artificial Sequence
  Description of Artificial Sequence: Synthetic oligonucleotide
aguguuccaccguggugau

SEQ ID NO: 1714917 - RNA, 19 nt, Artificial Sequence
  Description of Artificial Sequence: Synthetic oligonucleotide
caagccgacucuccgggga

SEQ ID NO: 1714918 - RNA, 19 nt, Artificial Sequence
  Description of Artificial Sequence: Synthetic oligonucleotide
gcgcacacgcaaaacaagc

SEQ ID NO: 1714919 - RNA, 19 nt, Artificial Sequence
  Description of Artificial Sequence: Synthetic oligonucleotide
ucgaugcggguccggccgc

SEQ ID NO: 1714920 - RNA, 19 nt, Artificial Sequence
  Description of Artificial Sequence: Synthetic oligonucleotide
cauagucaaagagcaguaa

SEQ ID NO: 1714921 - RNA, 19 nt, Artificial Sequence
  Description of Artificial Sequence: Synthetic oligonucleotide
gguauacucugcugcuuga

SEQ ID NO: 1714922 - RNA, 19 nt, Artificial Sequence
  Description of Artificial Sequence: Synthetic oligonucleotide
ggggaucaugagcuggaug

SEQ ID NO: 1714923 - RNA, 19 nt, Artificial Sequence
  Description of Artificial Sequence: Synthetic oligonucleotide
acucuccggggaucaugag

SEQ ID NO: 1714924 - RNA, 19 nt, Artificial Sequence
  Description of Artificial Sequence: Synthetic oligonucleotide
ccucauguauuaucucuuc

SEQ ID NO: 1714925 - RNA, 19 nt, Artificial Sequence
  Description of Artificial Sequence: Synthetic oligonucleotide
uccauccacgucugaccaa

SEQ ID NO: 1714926 - RNA, 19 nt, Artificial Sequence
  Description of Artificial Sequence: Synthetic oligonucleotide
ugcccagaaacugcauuuu

SEQ ID NO: 1714927 - RNA, 19 nt, Artificial Sequence
  Description of Artificial Sequence: Synthetic oligonucleotide
caaaguguuccaccguggu

SEQ ID NO: 1714928 - RNA, 19 nt, Artificial Sequence
  Description of Artificial Sequence: Synthetic oligonucleotide
auugccauucgagcuucaa

SEQ ID NO: 1714929 - RNA, 19 nt, Artificial Sequence
  Description of Artificial Sequence: Synthetic oligonucleotide
gguggggagacuggccgcg

SEQ ID NO: 1714930 - RNA, 19 nt, Artificial Sequence
  Description of Artificial Sequence: Synthetic oligonucleotide
cgcacacgcaaaacaagcc

SEQ ID NO: 1714931 - RNA, 19 nt, Artificial Sequence
  Description of Artificial Sequence: Synthetic oligonucleotide
cggugccaaaacuuaacag

SEQ ID NO: 1714932 - RNA, 19 nt, Artificial Sequence
  Description of Artificial Sequence: Synthetic oligonucleotide
gauugccaccguguaagua

SEQ ID NO: 1714933 - RNA, 19 nt, Artificial Sequence
  Description of Artificial Sequence: Synthetic oligonucleotide
ggcgcacacgcaaaacaag

SEQ ID NO: 1714934 - RNA, 19 nt, Artificial Sequence
  Description of Artificial Sequence: Synthetic oligonucleotide
agucuggaaugggaccuga

SEQ ID NO: 1714935 - RNA, 19 nt, Artificial Sequence
  Description of Artificial Sequence: Synthetic oligonucleotide
caggcggcuguagggauug

SEQ ID NO: 1714936 - RNA, 19 nt, Artificial Sequence
  Description of Artificial Sequence: Synthetic oligonucleotide
aguuguccacacagcuaag

SEQ ID NO: 1714937 - RNA, 19 nt, Artificial Sequence
  Description of Artificial Sequence: Synthetic oligonucleotide
cuuaccaaugccacaucuu

SEQ ID NO: 1714938 - RNA, 19 nt, Artificial Sequence
  Description of Artificial Sequence: Synthetic oligonucleotide
ccauccacgucugaccaag

SEQ ID NO: 1714939 - RNA, 19 nt, Artificial Sequence
  Description of Artificial Sequence: Synthetic oligonucleotide
gcggcuguagggauuggag

SEQ ID NO: 1714940 - RNA, 19 nt, Artificial Sequence
  Description of Artificial Sequence: Synthetic oligonucleotide
uuacucaguccugcuugau

SEQ ID NO: 1714941 - RNA, 19 nt, Artificial Sequence
  Description of Artificial Sequence: Synthetic oligonucleotide
cuacaagugguggcgcaca

SEQ ID NO: 1714942 - RNA, 19 nt, Artificial Sequence
  Description of Artificial Sequence: Synthetic oligonucleotide
cuacgauugccaccgugua

SEQ ID NO: 1714943 - RNA, 19 nt, Artificial Sequence
  Description of Artificial Sequence: Synthetic oligonucleotide
gucacacuaccaacuccac

SEQ ID NO: 1714944 - RNA, 19 nt, Artificial Sequence
  Description of Artificial Sequence: Synthetic oligonucleotide
ucgauucauguuggccagu

SEQ ID NO: 1714945 - RNA, 19 nt, Artificial Sequence
  Description of Artificial Sequence: Synthetic oligonucleotide
cuuguugcuuccugcaguu

SEQ ID NO: 1714946 - RNA, 19 nt, Artificial Sequence
  Description of Artificial Sequence: Synthetic oligonucleotide
caggguuaauguuccucaa

SEQ ID NO: 1714947 - RNA, 19 nt, Artificial Sequence
  Description of Artificial Sequence: Synthetic oligonucleotide
ccaacucaauaccccacuc

SEQ ID NO: 1714948 - RNA, 19 nt, Artificial Sequence
  Description of Artificial Sequence: Synthetic oligonucleotide
cacucguuauccucaugua

SEQ ID NO: 1714949 - RNA, 19 nt, Artificial Sequence
  Description of Artificial Sequence: Synthetic oligonucleotide
ccaacaccuacgauugcca

SEQ ID NO: 1714950 - RNA, 19 nt, Artificial Sequence
  Description of Artificial Sequence: Synthetic oligonucleotide
cgucugaccaaguucauua

SEQ ID NO: 1714951 - RNA, 19 nt, Artificial Sequence
  Description of Artificial Sequence: Synthetic oligonucleotide
cuuaggcgcagccuccugu

SEQ ID NO: 1714952 - RNA, 19 nt, Artificial Sequence
  Description of Artificial Sequence: Synthetic oligonucleotide
guacggauucucucauagu

SEQ ID NO: 1714953 - RNA, 19 nt, Artificial Sequence
  Description of Artificial Sequence: Synthetic oligonucleotide
guguaaguacggauucucu

SEQ ID NO: 1714954 - RNA, 19 nt, Artificial Sequence
  Description of Artificial Sequence: Synthetic oligonucleotide
guaauucccucagguaagu

SEQ ID NO: 1714955 - RNA, 19 nt, Artificial Sequence
  Description of Artificial Sequence: Synthetic oligonucleotide
gagcuggaugugcccagaa

SEQ ID NO: 1714956 - RNA, 19 nt, Artificial Sequence
  Description of Artificial Sequence: Synthetic oligonucleotide
agacgccuucucguuucag

SEQ ID NO: 1714957 - RNA, 19 nt, Artificial Sequence
  Description of Artificial Sequence: Synthetic oligonucleotide
caccguguaaguacggauu

SEQ ID NO: 1714958 - RNA, 19 nt, Artificial Sequence
  Description of Artificial Sequence: Synthetic oligonucleotide
cguguaaguacggauucuc

SEQ ID NO: 1714959 - RNA, 19 nt, Artificial Sequence
  Description of Artificial Sequence: Synthetic oligonucleotide
acgucugaccaaguucauu

SEQ ID NO: 1714960 - RNA, 19 nt, Artificial Sequence
  Description of Artificial Sequence: Synthetic oligonucleotide
ccacucguuauccucaugu

SEQ ID NO: 1714961 - RNA, 19 nt, Artificial Sequence
  Description of Artificial Sequence: Synthetic oligonucleotide
ccuacgauugccaccgugu

SEQ ID NO: 1714962 - RNA, 19 nt, Artificial Sequence
  Description of Artificial Sequence: Synthetic oligonucleotide
gcaugacaacucaguaaug

SEQ ID NO: 1714963 - RNA, 19 nt, Artificial Sequence
  Description of Artificial Sequence: Synthetic oligonucleotide
agacuccauccacgucuga

SEQ ID NO: 1714964 - RNA, 19 nt, Artificial Sequence
  Description of Artificial Sequence: Synthetic oligonucleotide
ggaaugggaccugaagagu

SEQ ID NO: 1714965 - RNA, 19 nt, Artificial Sequence
  Description of Artificial Sequence: Synthetic oligonucleotide
cacguguuccauacagcau

SEQ ID NO: 1714966 - RNA, 19 nt, Artificial Sequence
  Description of Artificial Sequence: Synthetic oligonucleotide
caaccacguguuccauaca

SEQ ID NO: 1714967 - RNA, 19 nt, Artificial Sequence
  Description of Artificial Sequence: Synthetic oligonucleotide
ccgcgcagacgccuucucg

SEQ ID NO: 1714968 - RNA, 19 nt, Artificial Sequence
  Description of Artificial Sequence: Synthetic oligonucleotide
ggauuggaguccaccaccu

SEQ ID NO: 1714969 - RNA, 19 nt, Artificial Sequence
  Description of Artificial Sequence: Synthetic oligonucleotide
ccaggucaacagguuuucc

SEQ ID NO: 1714970 - RNA, 19 nt, Artificial Sequence
  Description of Artificial Sequence: Synthetic oligonucleotide
ccaguuaaggcagcccuaa

SEQ ID NO: 1714971 - RNA, 19 nt, Artificial Sequence
  Description of Artificial Sequence: Synthetic oligonucleotide
cacgcaaaacaagccgacu

SEQ ID NO: 1714972 - RNA, 19 nt, Artificial Sequence
  Description of Artificial Sequence: Synthetic oligonucleotide
gccaccguguaaguacgga

SEQ ID NO: 1714973 - RNA, 19 nt, Artificial Sequence
  Description of Artificial Sequence: Synthetic oligonucleotide
guggggagacuggccgcgc

SEQ ID NO: 1714974 - RNA, 19 nt, Artificial Sequence
  Description of Artificial Sequence: Synthetic oligonucleotide
gugguggcgcacacgcaaa

SEQ ID NO: 1714975 - RNA, 19 nt, Artificial Sequence
  Description of Artificial Sequence: Synthetic oligonucleotide
cacugaggguuuggcuuca

SEQ ID NO: 1714976 - RNA, 19 nt, Artificial Sequence
  Description of Artificial Sequence: Synthetic oligonucleotide
caucaggguuaauguuccu

SEQ ID NO: 1714977 - RNA, 19 nt, Artificial Sequence
  Description of Artificial Sequence: Synthetic oligonucleotide
cccauccguuucaaugcca

SEQ ID NO: 1714978 - RNA, 19 nt, Artificial Sequence
  Description of Artificial Sequence: Synthetic oligonucleotide
aggcggcuguagggauugg

SEQ ID NO: 1714979 - RNA, 19 nt, Artificial Sequence
  Description of Artificial Sequence: Synthetic oligonucleotide
ccacucccauggugguggg

SEQ ID NO: 1714980 - RNA, 19 nt, Artificial Sequence
  Description of Artificial Sequence: Synthetic oligonucleotide
ccauccguuucaaugccau

SEQ ID NO: 1714981 - RNA, 19 nt, Artificial Sequence
  Description of Artificial Sequence: Synthetic oligonucleotide
ccuuaggcgcagccuccug

SEQ ID NO: 1714982 - RNA, 19 nt, Artificial Sequence
  Description of Artificial Sequence: Synthetic oligonucleotide
caccaccucggagcucauc

SEQ ID NO: 1714983 - RNA, 19 nt, Artificial Sequence
  Description of Artificial Sequence: Synthetic oligonucleotide
cccagacuccauccacguc

SEQ ID NO: 1714984 - RNA, 19 nt, Artificial Sequence
  Description of Artificial Sequence: Synthetic oligonucleotide
gccgacucuccggggauca

SEQ ID NO: 1714985 - RNA, 19 nt, Artificial Sequence
  Description of Artificial Sequence: Synthetic oligonucleotide
cauccacgucugaccaagu

SEQ ID NO: 1714986 - RNA, 19 nt, Artificial Sequence
  Description of Artificial Sequence: Synthetic oligonucleotide
cgugucgcugccuucuucu

SEQ ID NO: 1714987 - RNA, 19 nt, Artificial Sequence
  Description of Artificial Sequence: Synthetic oligonucleotide
cccucagguaagucuggaa

SEQ ID NO: 1714988 - RNA, 19 nt, Artificial Sequence
  Description of Artificial Sequence: Synthetic oligonucleotide
cacgucugaccaaguucau

SEQ ID NO: 1714989 - RNA, 19 nt, Artificial Sequence
  Description of Artificial Sequence: Synthetic oligonucleotide
acacaacaucaggguuaau

SEQ ID NO: 1714990 - RNA, 19 nt, Artificial Sequence
  Description of Artificial Sequence: Synthetic oligonucleotide
cgacucuccggggaucaug

SEQ ID NO: 1714991 - RNA, 19 nt, Artificial Sequence
  Description of Artificial Sequence: Synthetic oligonucleotide
cuucucguuucaggguuuu

SEQ ID NO: 1714992 - RNA, 19 nt, Artificial Sequence
  Description of Artificial Sequence: Synthetic oligonucleotide
gugucgcugccuucuucuu

SEQ ID NO: 1714993 - RNA, 19 nt, Artificial Sequence
  Description of Artificial Sequence: Synthetic oligonucleotide
ggccgugucgcugccuucu

SEQ ID NO: 1714994 - RNA, 19 nt, Artificial Sequence
  Description of Artificial Sequence: Synthetic oligonucleotide
cgcgcagacgccuucucgu

SEQ ID NO: 1714995 - RNA, 19 nt, Artificial Sequence
  Description of Artificial Sequence: Synthetic oligonucleotide
gggccgugucgcugccuuc

SEQ ID NO: 1714996 - RNA, 19 nt, Artificial Sequence
  Description of Artificial Sequence: Synthetic oligonucleotide
guguuccaccguggugaua

SEQ ID NO: 1714997 - RNA, 19 nt, Artificial Sequence
  Description of Artificial Sequence: Synthetic oligonucleotide
cuggccgcgcagacgccuu

SEQ ID NO: 1714998 - RNA, 19 nt, Artificial Sequence
  Description of Artificial Sequence: Synthetic oligonucleotide
ccguguaaguacggauucu

SEQ ID NO: 1714999 - RNA, 19 nt, Artificial Sequence
  Description of Artificial Sequence: Synthetic oligonucleotide
gcgcagacgccuucucguu

SEQ ID NO: 1715000 - RNA, 19 nt, Artificial Sequence
  Description of Artificial Sequence: Synthetic oligonucleotide
ccguggugauauuguaguu

SEQ ID NO: 1715001 - RNA, 19 nt, Artificial Sequence
  Description of Artificial Sequence: Synthetic oligonucleotide
caccuacgauugccaccgu

SEQ ID NO: 1715002 - RNA, 19 nt, Artificial Sequence
  Description of Artificial Sequence: Synthetic oligonucleotide
cgauucauguuggccaguu

SEQ ID NO: 1715003 - RNA, 19 nt, Artificial Sequence
  Description of Artificial Sequence: Synthetic oligonucleotide
cguuauccucauguauuau

SEQ ID NO: 1715004 - RNA, 19 nt, Artificial Sequence
  Description of Artificial Sequence: Synthetic oligonucleotide
ccgacucuccggggaucau

SEQ ID NO: 1715005 - RNA, 19 nt, Artificial Sequence
  Description of Artificial Sequence: Synthetic oligonucleotide
aauagcacauauuuacacc

SEQ ID NO: 1715006 - RNA, 19 nt, Artificial Sequence
  Description of Artificial Sequence: Synthetic oligonucleotide
aauauuaaggccuacgaga

SEQ ID NO: 1715007 - RNA, 19 nt, Artificial Sequence
  Description of Artificial Sequence: Synthetic oligonucleotide
aaauagcacauauuuacac

SEQ ID NO: 1715008 - RNA, 19 nt, Artificial Sequence
  Description of Artificial Sequence: Synthetic oligonucleotide
aaagcagacauauuguauc

SEQ ID NO: 1715009 - RNA, 19 nt, Artificial Sequence
  Description of Artificial Sequence: Synthetic oligonucleotide
aaugcauacauucucaaca

SEQ ID NO: 1715010 - RNA, 19 nt, Artificial Sequence
  Description of Artificial Sequence: Synthetic oligonucleotide
aacuccaaaacuuuggaag

SEQ ID NO: 1715011 - RNA, 19 nt, Artificial Sequence
  Description of Artificial Sequence: Synthetic oligonucleotide
aauauauacaggucagaac

SEQ ID NO: 1715012 - RNA, 19 nt, Artificial Sequence
  Description of Artificial Sequence: Synthetic oligonucleotide
auauauacaggucagaacu

SEQ ID NO: 1715013 - RNA, 19 nt, Artificial Sequence
  Description of Artificial Sequence: Synthetic oligonucleotide
aauacuuuacucucugagg

SEQ ID NO: 1715014 - RNA, 19 nt, Artificial Sequence
  Description of Artificial Sequence: Synthetic oligonucleotide
aaaagacacaccucguacc

SEQ ID NO: 1715015 - RNA, 19 nt, Artificial Sequence
  Description of Artificial Sequence: Synthetic oligonucleotide
aaaacgguaggagagaaac

SEQ ID NO: 1715016 - RNA, 19 nt, Artificial Sequence
  Description of Artificial Sequence: Synthetic oligonucleotide
ucgacauaaauguugaagg

SEQ ID NO: 1715017 - RNA, 19 nt, Artificial Sequence
  Description of Artificial Sequence: Synthetic oligonucleotide
uucaaauugacaagaaugc

SEQ ID NO: 1715018 - RNA, 19 nt, Artificial Sequence
  Description of Artificial Sequence: Synthetic oligonucleotide
aaagacacaccucguaccc

SEQ ID NO: 1715019 - RNA, 19 nt, Artificial Sequence
  Description of Artificial Sequence: Synthetic oligonucleotide
auuccacugaauuuguucc

SEQ ID NO: 1715020 - RNA, 19 nt, Artificial Sequence
  Description of Artificial Sequence: Synthetic oligonucleotide
uaucauaagaugcaguagc

SEQ ID NO: 1715021 - RNA, 19 nt, Artificial Sequence
  Description of Artificial Sequence: Synthetic oligonucleotide
auacuuuacucucugaggg

SEQ ID NO: 1715022 - RNA, 19 nt, Artificial Sequence
  Description of Artificial Sequence: Synthetic oligonucleotide
ugacauucgacauaaaugu

SEQ ID NO: 1715023 - RNA, 19 nt, Artificial Sequence
  Description of Artificial Sequence: Synthetic oligonucleotide
uaauacuuuacucucugag

SEQ ID NO: 1715024 - RNA, 19 nt, Artificial Sequence
  Description of Artificial Sequence: Synthetic oligonucleotide
uguuccaacaaauagcaca

SEQ ID NO: 1715025 - RNA, 19 nt, Artificial Sequence
  Description of Artificial Sequence: Synthetic oligonucleotide
auacauagcagcuuguguc

SEQ ID NO: 1715026 - RNA, 19 nt, Artificial Sequence
  Description of Artificial Sequence: Synthetic oligonucleotide
ugucuaaauauauacaggu

SEQ ID NO: 1715027 - RNA, 19 nt, Artificial Sequence
  Description of Artificial Sequence: Synthetic oligonucleotide
uacaacaucauggugaugc

SEQ ID NO: 1715028 - RNA, 19 nt, Artificial Sequence
  Description of Artificial Sequence: Synthetic oligonucleotide
aaaggugcaacuuguacug

SEQ ID NO: 1715029 - RNA, 19 nt, Artificial Sequence
  Description of Artificial Sequence: Synthetic oligonucleotide
uaaaauaacuguuccuuag

SEQ ID NO: 1715030 - RNA, 19 nt, Artificial Sequence
  Description of Artificial Sequence: Synthetic oligonucleotide
uucaauacauagcagcuug

SEQ ID NO: 1715031 - RNA, 19 nt, Artificial Sequence
  Description of Artificial Sequence: Synthetic oligonucleotide
auagucuuaaaauaacugu

SEQ ID NO: 1715032 - RNA, 19 nt, Artificial Sequence
  Description of Artificial Sequence: Synthetic oligonucleotide
uauucagcaauaaugcaga

SEQ ID NO: 1715033 - RNA, 19 nt, Artificial Sequence
  Description of Artificial Sequence: Synthetic oligonucleotide
acuaauguaagaaaugaag

SEQ ID NO: 1715034 - RNA, 19 nt, Artificial Sequence
  Description of Artificial Sequence: Synthetic oligonucleotide
auuaaggccuacgagaaac

SEQ ID NO: 1715035 - RNA, 19 nt, Artificial Sequence
  Description of Artificial Sequence: Synthetic oligonucleotide
acauaaugcauacauucuc

SEQ ID NO: 1715036 - RNA, 19 nt, Artificial Sequence
  Description of Artificial Sequence: Synthetic oligonucleotide
acaagcuacaacaucaugg

SEQ ID NO: 1715037 - RNA, 19 nt, Artificial Sequence
  Description of Artificial Sequence: Synthetic oligonucleotide
cuacuaaagcaauauauac

SEQ ID NO: 1715038 - RNA, 19 nt, Artificial Sequence
  Description of Artificial Sequence: Synthetic oligonucleotide
uauauguuuucacaguuaa

SEQ ID NO: 1715039 - RNA, 19 nt, Artificial Sequence
  Description of Artificial Sequence: Synthetic oligonucleotide
agauaaauaacagaaggca

SEQ ID NO: 1715040 - RNA, 19 nt, Artificial Sequence
  Description of Artificial Sequence: Synthetic oligonucleotide
uccgucgugacuaaaagac

SEQ ID NO: 1715041 - RNA, 19 nt, Artificial Sequence
  Description of Artificial Sequence: Synthetic oligonucleotide
caaauauuggagugggugg

SEQ ID NO: 1715042 - RNA, 19 nt, Artificial Sequence
  Description of Artificial Sequence: Synthetic oligonucleotide
aauacauagcagcuugugu

SEQ ID NO: 1715043 - RNA, 19 nt, Artificial Sequence
  Description of Artificial Sequence: Synthetic oligonucleotide
aaauaaaucuuccgagccu

SEQ ID NO: 1715044 - RNA, 19 nt, Artificial Sequence
  Description of Artificial Sequence: Synthetic oligonucleotide
uaaaagacacaccucguac

SEQ ID NO: 1715045 - RNA, 19 nt, Artificial Sequence
  Description of Artificial Sequence: Synthetic oligonucleotide
uucgacauaaauguugaag

SEQ ID NO: 1715046 - RNA, 19 nt, Artificial Sequence
  Description of Artificial Sequence: Synthetic oligonucleotide
aaguguaagagucaaucaa

SEQ ID NO: 1715047 - RNA, 19 nt, Artificial Sequence
  Description of Artificial Sequence: Synthetic oligonucleotide
aaaacuuuggaaggaacug

SEQ ID NO: 1715048 - RNA, 19 nt, Artificial Sequence
  Description of Artificial Sequence: Synthetic oligonucleotide
cuauggucuauaaauaaug

SEQ ID NO: 1715049 - RNA, 19 nt, Artificial Sequence
  Description of Artificial Sequence: Synthetic oligonucleotide
aaugcuuaaguugguaaag

SEQ ID NO: 1715050 - RNA, 19 nt, Artificial Sequence
  Description of Artificial Sequence: Synthetic oligonucleotide
uacacuuccaucuuguguc

SEQ ID NO: 1715051 - RNA, 19 nt, Artificial Sequence
  Description of Artificial Sequence: Synthetic oligonucleotide
ucuacuaaagcaauauaua

SEQ ID NO: 1715052 - RNA, 19 nt, Artificial Sequence
  Description of Artificial Sequence: Synthetic oligonucleotide
aagaacaaaugcuuaaguu

SEQ ID NO: 1715053 - RNA, 19 nt, Artificial Sequence
  Description of Artificial Sequence: Synthetic oligonucleotide
uucggauugacauucgaca

SEQ ID NO: 1715054 - RNA, 19 nt, Artificial Sequence
  Description of Artificial Sequence: Synthetic oligonucleotide
uguuccuuaguauuaacaa

SEQ ID NO: 1715055 - RNA, 19 nt, Artificial Sequence
  Description of Artificial Sequence: Synthetic oligonucleotide
cacgaguaucauaagaugc

SEQ ID NO: 1715056 - RNA, 19 nt, Artificial Sequence
  Description of Artificial Sequence: Synthetic oligonucleotide
agaaaugaaguguaagagu

SEQ ID NO: 1715057 - RNA, 19 nt, Artificial Sequence
  Description of Artificial Sequence: Synthetic oligonucleotide
acauauuuacaccauggcu

SEQ ID NO: 1715058 - RNA, 19 nt, Artificial Sequence
  Description of Artificial Sequence: Synthetic oligonucleotide
cuagcaaugcuccaucagg

SEQ ID NO: 1715059 - RNA, 19 nt, Artificial Sequence
  Description of Artificial Sequence: Synthetic oligonucleotide
ucuuugguaagucaccagu

SEQ ID NO: 1715060 - RNA, 19 nt, Artificial Sequence
  Description of Artificial Sequence: Synthetic oligonucleotide
uucaauauuaaggccuacg

SEQ ID NO: 1715061 - RNA, 19 nt, Artificial Sequence
  Description of Artificial Sequence: Synthetic oligonucleotide
ggcaaaagcagacauauug

SEQ ID NO: 1715062 - RNA, 19 nt, Artificial Sequence
  Description of Artificial Sequence: Synthetic oligonucleotide
aguaucauaagaugcagua

SEQ ID NO: 1715063 - RNA, 19 nt, Artificial Sequence
  Description of Artificial Sequence: Synthetic oligonucleotide
uguauauguuuucacaguu

SEQ ID NO: 1715064 - RNA, 19 nt, Artificial Sequence
  Description of Artificial Sequence: Synthetic oligonucleotide
aaggcaaaagcagacauau

SEQ ID NO: 1715065 - RNA, 19 nt, Artificial Sequence
  Description of Artificial Sequence: Synthetic oligonucleotide
ugaggugugucuuguaaag

SEQ ID NO: 1715066 - RNA, 19 nt, Artificial Sequence
  Description of Artificial Sequence: Synthetic oligonucleotide
aagaaugcauaauacuuua

SEQ ID NO: 1715067 - RNA, 19 nt, Artificial Sequence
  Description of Artificial Sequence: Synthetic oligonucleotide
gaguuagaaaccaaagggc

SEQ ID NO: 1715068 - RNA, 19 nt, Artificial Sequence
  Description of Artificial Sequence: Synthetic oligonucleotide
aaauguugaaggcuaggaa

SEQ ID NO: 1715069 - RNA, 19 nt, Artificial Sequence
  Description of Artificial Sequence: Synthetic oligonucleotide
auaacuguuccuuaguauu

SEQ ID NO: 1715070 - RNA, 19 nt, Artificial Sequence
  Description of Artificial Sequence: Synthetic oligonucleotide
aacccauagucuuaaaaua

SEQ ID NO: 1715071 - RNA, 19 nt, Artificial Sequence
  Description of Artificial Sequence: Synthetic oligonucleotide
auaaaacaagcauuuuaca

SEQ ID NO: 1715072 - RNA, 19 nt, Artificial Sequence
  Description of Artificial Sequence: Synthetic oligonucleotide
uaucaugguguauuucucc

SEQ ID NO: 1715073 - RNA, 19 nt, Artificial Sequence
  Description of Artificial Sequence: Synthetic oligonucleotide
caauauuaaggccuacgag

SEQ ID NO: 1715074 - RNA, 19 nt, Artificial Sequence
  Description of Artificial Sequence: Synthetic oligonucleotide
agaugagauaaauaacaga

SEQ ID NO: 1715075 - RNA, 19 nt, Artificial Sequence
  Description of Artificial Sequence: Synthetic oligonucleotide
aauggagucuuccuucuaa

SEQ ID NO: 1715076 - RNA, 19 nt, Artificial Sequence
  Description of Artificial Sequence: Synthetic oligonucleotide
agucuuaaaauaacuguuc

SEQ ID NO: 1715077 - RNA, 19 nt, Artificial Sequence
  Description of Artificial Sequence: Synthetic oligonucleotide
uccagcaaauauuggagug

SEQ ID NO: 1715078 - RNA, 19 nt, Artificial Sequence
  Description of Artificial Sequence: Synthetic oligonucleotide
aacuuguacuggacaaucc

SEQ ID NO: 1715079 - RNA, 19 nt, Artificial Sequence
  Description of Artificial Sequence: Synthetic oligonucleotide
uauuguaucgcuucucuuu

SEQ ID NO: 1715080 - RNA, 19 nt, Artificial Sequence
  Description of Artificial Sequence: Synthetic oligonucleotide
uccauauuccaaaggaaaa

SEQ ID NO: 1715081 - RNA, 19 nt, Artificial Sequence
  Description of Artificial Sequence: Synthetic oligonucleotide
auuguaucgcuucucuuug

SEQ ID NO: 1715082 - RNA, 19 nt, Artificial Sequence
  Description of Artificial Sequence: Synthetic oligonucleotide
aacuaagaguuagaaacca

SEQ ID NO: 1715083 - RNA, 19 nt, Artificial Sequence
  Description of Artificial Sequence: Synthetic oligonucleotide
uaucgcuucucuuugguaa

SEQ ID NO: 1715084 - RNA, 19 nt, Artificial Sequence
  Description of Artificial Sequence: Synthetic oligonucleotide
uuaaaauaacuguuccuua

SEQ ID NO: 1715085 - RNA, 19 nt, Artificial Sequence
  Description of Artificial Sequence: Synthetic oligonucleotide
gugacuaaaagacacaccu

SEQ ID NO: 1715086 - RNA, 19 nt, Artificial Sequence
  Description of Artificial Sequence: Synthetic oligonucleotide
guacccaucggucauuugc

SEQ ID NO: 1715087 - RNA, 19 nt, Artificial Sequence
  Description of Artificial Sequence: Synthetic oligonucleotide
agcaaugcucgcaacaugg

SEQ ID NO: 1715088 - RNA, 19 nt, Artificial Sequence
  Description of Artificial Sequence: Synthetic oligonucleotide
aaauuacaugauauguuca

SEQ ID NO: 1715089 - RNA, 19 nt, Artificial Sequence
  Description of Artificial Sequence: Synthetic oligonucleotide
aauaaaucuuccgagccuu

SEQ ID NO: 1715090 - RNA, 19 nt, Artificial Sequence
  Description of Artificial Sequence: Synthetic oligonucleotide
gaugcaguagcuagcaaug

SEQ ID NO: 1715091 - RNA, 19 nt, Artificial Sequence
  Description of Artificial Sequence: Synthetic oligonucleotide
uucucuuugguaagucacc

SEQ ID NO: 1715092 - RNA, 19 nt, Artificial Sequence
  Description of Artificial Sequence: Synthetic oligonucleotide
aacaucauggugaugcccu

SEQ ID NO: 1715093 - RNA, 19 nt, Artificial Sequence
  Description of Artificial Sequence: Synthetic oligonucleotide
agauacacacacgaguauc

SEQ ID NO: 1715094 - RNA, 19 nt, Artificial Sequence
  Description of Artificial Sequence: Synthetic oligonucleotide
aaugcucgcaacauggagu

SEQ ID NO: 1715095 - RNA, 19 nt, Artificial Sequence
  Description of Artificial Sequence: Synthetic oligonucleotide
gaacuaagaguuagaaacc

SEQ ID NO: 1715096 - RNA, 19 nt, Artificial Sequence
  Description of Artificial Sequence: Synthetic oligonucleotide
augcuuaaguugguaaagc

SEQ ID NO: 1715097 - RNA, 19 nt, Artificial Sequence
  Description of Artificial Sequence: Synthetic oligonucleotide
aauauuggagugggugggg

SEQ ID NO: 1715098 - RNA, 19 nt, Artificial Sequence
  Description of Artificial Sequence: Synthetic oligonucleotide
ucuagcuaccauuuucacu

SEQ ID NO: 1715099 - RNA, 19 nt, Artificial Sequence
  Description of Artificial Sequence: Synthetic oligonucleotide
augcucgcaacauggaguc

SEQ ID NO: 1715100 - RNA, 19 nt, Artificial Sequence
  Description of Artificial Sequence: Synthetic oligonucleotide
gaaguguaagagucaauca

SEQ ID NO: 1715101 - RNA, 19 nt, Artificial Sequence
  Description of Artificial Sequence: Synthetic oligonucleotide
cuaauguaagaaaugaagu

SEQ ID NO: 1715102 - RNA, 19 nt, Artificial Sequence
  Description of Artificial Sequence: Synthetic oligonucleotide
ugcuuaaguugguaaagcu

SEQ ID NO: 1715103 - RNA, 19 nt, Artificial Sequence
  Description of Artificial Sequence: Synthetic oligonucleotide
uagcaaugcuccaucagga

SEQ ID NO: 1715104 - RNA, 19 nt, Artificial Sequence
  Description of Artificial Sequence: Synthetic oligonucleotide
ucuugggugggcaucacuc

SEQ ID NO: 1715105 - RNA, 19 nt, Artificial Sequence
  Description of Artificial Sequence: Synthetic oligonucleotide
uaaguagcuccuuucaaua

SEQ ID NO: 1715106 - RNA, 19 nt, Artificial Sequence
  Description of Artificial Sequence: Synthetic oligonucleotide
cauaaugcauacauucuca

SEQ ID NO: 1715107 - RNA, 19 nt, Artificial Sequence
  Description of Artificial Sequence: Synthetic oligonucleotide
acauucgacauaaauguug

SEQ ID NO: 1715108 - RNA, 19 nt, Artificial Sequence
  Description of Artificial Sequence: Synthetic oligonucleotide
agaugcaguagcuagcaau

SEQ ID NO: 1715109 - RNA, 19 nt, Artificial Sequence
  Description of Artificial Sequence: Synthetic oligonucleotide
acaauccucaccaauucuc

SEQ ID NO: 1715110 - RNA, 19 nt, Artificial Sequence
  Description of Artificial Sequence: Synthetic oligonucleotide
acacgaguaucauaagaug

SEQ ID NO: 1715111 - RNA, 19 nt, Artificial Sequence
  Description of Artificial Sequence: Synthetic oligonucleotide
aaaagcagacauauuguau

SEQ ID NO: 1715112 - RNA, 19 nt, Artificial Sequence
  Description of Artificial Sequence: Synthetic oligonucleotide
auaaauguugaaggcuagg

SEQ ID NO: 1715113 - RNA, 19 nt, Artificial Sequence
  Description of Artificial Sequence: Synthetic oligonucleotide
uaagaugcaguagcuagca

SEQ ID NO: 1715114 - RNA, 19 nt, Artificial Sequence
  Description of Artificial Sequence: Synthetic oligonucleotide
cauaaauguugaaggcuag

SEQ ID NO: 1715115 - RNA, 19 nt, Artificial Sequence
  Description of Artificial Sequence: Synthetic oligonucleotide
uaaugcauacauucucaac

SEQ ID NO: 1715116 - RNA, 19 nt, Artificial Sequence
  Description of Artificial Sequence: Synthetic oligonucleotide
uuugguaagucaccaguua

SEQ ID NO: 1715117 - RNA, 19 nt, Artificial Sequence
  Description of Artificial Sequence: Synthetic oligonucleotide
aaggccuacgagaaacaac

SEQ ID NO: 1715118 - RNA, 19 nt, Artificial Sequence
  Description of Artificial Sequence: Synthetic oligonucleotide
aauaaugcagaagguguau

SEQ ID NO: 1715119 - RNA, 19 nt, Artificial Sequence
  Description of Artificial Sequence: Synthetic oligonucleotide
uucagcaauaaugcagaag

SEQ ID NO: 1715120 - RNA, 19 nt, Artificial Sequence
  Description of Artificial Sequence: Synthetic oligonucleotide
ucaucagcaaugcucgcaa

SEQ ID NO: 1715121 - RNA, 19 nt, Artificial Sequence
  Description of Artificial Sequence: Synthetic oligonucleotide
aucagaaugucuccauugu

SEQ ID NO: 1715122 - RNA, 19 nt, Artificial Sequence
  Description of Artificial Sequence: Synthetic oligonucleotide
agcuccuuucaauauuaag

SEQ ID NO: 1715123 - RNA, 19 nt, Artificial Sequence
  Description of Artificial Sequence: Synthetic oligonucleotide
agcaauauauacaggucag

SEQ ID NO: 1715124 - RNA, 19 nt, Artificial Sequence
  Description of Artificial Sequence: Synthetic oligonucleotide
uguaucgcuucucuuuggu

SEQ ID NO: 1715125 - RNA, 19 nt, Artificial Sequence
  Description of Artificial Sequence: Synthetic oligonucleotide
uggacaauccucaccaauu

SEQ ID NO: 1715126 - RNA, 19 nt, Artificial Sequence
  Description of Artificial Sequence: Synthetic oligonucleotide
uauauacaggucagaacua

SEQ ID NO: 1715127 - RNA, 19 nt, Artificial Sequence
  Description of Artificial Sequence: Synthetic oligonucleotide
gacaagaaugcauaauacu

SEQ ID NO: 1715128 - RNA, 19 nt, Artificial Sequence
  Description of Artificial Sequence: Synthetic oligonucleotide
aauccucaccaauucucca

SEQ ID NO: 1715129 - RNA, 19 nt, Artificial Sequence
  Description of Artificial Sequence: Synthetic oligonucleotide
cauucgacauaaauguuga

SEQ ID NO: 1715130 - RNA, 19 nt, Artificial Sequence
  Description of Artificial Sequence: Synthetic oligonucleotide
agcacauauuuacaccaug

SEQ ID NO: 1715131 - RNA, 19 nt, Artificial Sequence
  Description of Artificial Sequence: Synthetic oligonucleotide
cuucggauugacauucgac

SEQ ID NO: 1715132 - RNA, 19 nt, Artificial Sequence
  Description of Artificial Sequence: Synthetic oligonucleotide
cuaggaacuugccuuggag

SEQ ID NO: 1715133 - RNA, 19 nt, Artificial Sequence
  Description of Artificial Sequence: Synthetic oligonucleotide
acacaccucguacccaucg

SEQ ID NO: 1715134 - RNA, 19 nt, Artificial Sequence
  Description of Artificial Sequence: Synthetic oligonucleotide
aagcuacaacaucauggug

SEQ ID NO: 1715135 - RNA, 19 nt, Artificial Sequence
  Description of Artificial Sequence: Synthetic oligonucleotide
ugguaagucaccaguuaaa

SEQ ID NO: 1715136 - RNA, 19 nt, Artificial Sequence
  Description of Artificial Sequence: Synthetic oligonucleotide
aaguagcuccuuucaauau

SEQ ID NO: 1715137 - RNA, 19 nt, Artificial Sequence
  Description of Artificial Sequence: Synthetic oligonucleotide
guaucauaagaugcaguag

SEQ ID NO: 1715138 - RNA, 19 nt, Artificial Sequence
  Description of Artificial Sequence: Synthetic oligonucleotide
aggccuacgagaaacaacu

SEQ ID NO: 1715139 - RNA, 19 nt, Artificial Sequence
  Description of Artificial Sequence: Synthetic oligonucleotide
acacacacgaguaucauaa

SEQ ID NO: 1715140 - RNA, 19 nt, Artificial Sequence
  Description of Artificial Sequence: Synthetic oligonucleotide
aacuaauguaagaaaugaa

SEQ ID NO: 1715141 - RNA, 19 nt, Artificial Sequence
  Description of Artificial Sequence: Synthetic oligonucleotide
uccuuaguauuaacaaaau

SEQ ID NO: 1715142 - RNA, 19 nt, Artificial Sequence
  Description of Artificial Sequence: Synthetic oligonucleotide
gauacacacacgaguauca

SEQ ID NO: 1715143 - RNA, 19 nt, Artificial Sequence
  Description of Artificial Sequence: Synthetic oligonucleotide
agcagacauauuguaucgc

SEQ ID NO: 1715144 - RNA, 19 nt, Artificial Sequence
  Description of Artificial Sequence: Synthetic oligonucleotide
ucgugacuaaaagacacac

SEQ ID NO: 1715145 - RNA, 19 nt, Artificial Sequence
  Description of Artificial Sequence: Synthetic oligonucleotide
ucggauugacauucgacau

SEQ ID NO: 1715146 - RNA, 19 nt, Artificial Sequence
  Description of Artificial Sequence: Synthetic oligonucleotide
aaagcuugaggugugucuu

SEQ ID NO: 1715147 - RNA, 19 nt, Artificial Sequence
  Description of Artificial Sequence: Synthetic oligonucleotide
cagcaaauauuggaguggg

SEQ ID NO: 1715148 - RNA, 19 nt, Artificial Sequence
  Description of Artificial Sequence: Synthetic oligonucleotide
aaugcagaagguguauuuu

SEQ ID NO: 1715149 - RNA, 19 nt, Artificial Sequence
  Description of Artificial Sequence: Synthetic oligonucleotide
caugauauguucagaaaua

SEQ ID NO: 1715150 - RNA, 19 nt, Artificial Sequence
  Description of Artificial Sequence: Synthetic oligonucleotide
agaaugcauaauacuuuac

SEQ ID NO: 1715151 - RNA, 19 nt, Artificial Sequence
  Description of Artificial Sequence: Synthetic oligonucleotide
uacccaucggucauuugcu

SEQ ID NO: 1715152 - RNA, 19 nt, Artificial Sequence
  Description of Artificial Sequence: Synthetic oligonucleotide
agcaaugcuccaucaggag

SEQ ID NO: 1715153 - RNA, 19 nt, Artificial Sequence
  Description of Artificial Sequence: Synthetic oligonucleotide
ucuucggauugacauucga

SEQ ID NO: 1715154 - RNA, 19 nt, Artificial Sequence
  Description of Artificial Sequence: Synthetic oligonucleotide
accaauucuccaaaaccuc

SEQ ID NO: 1715155 - RNA, 19 nt, Artificial Sequence
  Description of Artificial Sequence: Synthetic oligonucleotide
auauuaaggccuacgagaa

SEQ ID NO: 1715156 - RNA, 19 nt, Artificial Sequence
  Description of Artificial Sequence: Synthetic oligonucleotide
caaugcucgcaacauggag

SEQ ID NO: 1715157 - RNA, 19 nt, Artificial Sequence
  Description of Artificial Sequence: Synthetic oligonucleotide
ugagggguaaguagcuccu

SEQ ID NO: 1715158 - RNA, 19 nt, Artificial Sequence
  Description of Artificial Sequence: Synthetic oligonucleotide
uaaaggccauucucucagg

SEQ ID NO: 1715159 - RNA, 19 nt, Artificial Sequence
  Description of Artificial Sequence: Synthetic oligonucleotide
uaccauuuucacuggcucu

SEQ ID NO: 1715160 - RNA, 19 nt, Artificial Sequence
  Description of Artificial Sequence: Synthetic oligonucleotide
gcacauauuuacaccaugg

SEQ ID NO: 1715161 - RNA, 19 nt, Artificial Sequence
  Description of Artificial Sequence: Synthetic oligonucleotide
gaggugugucuuguaaagg

SEQ ID NO: 1715162 - RNA, 19 nt, Artificial Sequence
  Description of Artificial Sequence: Synthetic oligonucleotide
ugaaggcuaggaacuugcc

SEQ ID NO: 1715163 - RNA, 19 nt, Artificial Sequence
  Description of Artificial Sequence: Synthetic oligonucleotide
acauaaauguugaaggcua

SEQ ID NO: 1715164 - RNA, 19 nt, Artificial Sequence
  Description of Artificial Sequence: Synthetic oligonucleotide
ucccagauacacacacgag

SEQ ID NO: 1715165 - RNA, 19 nt, Artificial Sequence
  Description of Artificial Sequence: Synthetic oligonucleotide
uuuacaccauggcucuacu

SEQ ID NO: 1715166 - RNA, 19 nt, Artificial Sequence
  Description of Artificial Sequence: Synthetic oligonucleotide
auguugaaggcuaggaacu

SEQ ID NO: 1715167 - RNA, 19 nt, Artificial Sequence
  Description of Artificial Sequence: Synthetic oligonucleotide
ugcccgaauuccaucagaa

SEQ ID NO: 1715168 - RNA, 19 nt, Artificial Sequence
  Description of Artificial Sequence: Synthetic oligonucleotide
aguguaagagucaaucaaa

SEQ ID NO: 1715169 - RNA, 19 nt, Artificial Sequence
  Description of Artificial Sequence: Synthetic oligonucleotide
cccgaauuccaucagaaug

SEQ ID NO: 1715170 - RNA, 19 nt, Artificial Sequence
  Description of Artificial Sequence: Synthetic oligonucleotide
acuuuacucucugaggggu

SEQ ID NO: 1715171 - RNA, 19 nt, Artificial Sequence
  Description of Artificial Sequence: Synthetic oligonucleotide
gacauaaauguugaaggcu

SEQ ID NO: 1715172 - RNA, 19 nt, Artificial Sequence
  Description of Artificial Sequence: Synthetic oligonucleotide
aucuuccgagccuuuaaga

SEQ ID NO: 1715173 - RNA, 19 nt, Artificial Sequence
  Description of Artificial Sequence: Synthetic oligonucleotide
augcaguagcuagcaaugc

SEQ ID NO: 1715174 - RNA, 19 nt, Artificial Sequence
  Description of Artificial Sequence: Synthetic oligonucleotide
auugacaagaaugcauaau

SEQ ID NO: 1715175 - RNA, 19 nt, Artificial Sequence
  Description of Artificial Sequence: Synthetic oligonucleotide
gaacuugccuuggaguggc

SEQ ID NO: 1715176 - RNA, 19 nt, Artificial Sequence
  Description of Artificial Sequence: Synthetic oligonucleotide
cauucaauacauagcagcu

SEQ ID NO: 1715177 - RNA, 19 nt, Artificial Sequence
  Description of Artificial Sequence: Synthetic oligonucleotide
caauacauagcagcuugug

SEQ ID NO: 1715178 - RNA, 19 nt, Artificial Sequence
  Description of Artificial Sequence: Synthetic oligonucleotide
agguauguauauguuuuca

SEQ ID NO: 1715179 - RNA, 19 nt, Artificial Sequence
  Description of Artificial Sequence: Synthetic oligonucleotide
ugcauacauucucaacauc

SEQ ID NO: 1715180 - RNA, 19 nt, Artificial Sequence
  Description of Artificial Sequence: Synthetic oligonucleotide
ucacaagcuacaacaucau

SEQ ID NO: 1715181 - RNA, 19 nt, Artificial Sequence
  Description of Artificial Sequence: Synthetic oligonucleotide
aacuguuccuuaguauuaa

SEQ ID NO: 1715182 - RNA, 19 nt, Artificial Sequence
  Description of Artificial Sequence: Synthetic oligonucleotide
uccucaccaauucuccaaa

SEQ ID NO: 1715183 - RNA, 19 nt, Artificial Sequence
  Description of Artificial Sequence: Synthetic oligonucleotide
agagucaaucaaauuaaau

SEQ ID NO: 1715184 - RNA, 19 nt, Artificial Sequence
  Description of Artificial Sequence: Synthetic oligonucleotide
caggucagaacuaagaguu

SEQ ID NO: 1715185 - RNA, 19 nt, Artificial Sequence
  Description of Artificial Sequence: Synthetic oligonucleotide
auauacaggucagaacuaa

SEQ ID NO: 1715186 - RNA, 19 nt, Artificial Sequence
  Description of Artificial Sequence: Synthetic oligonucleotide
auuguguggaucccagaua

SEQ ID NO: 1715187 - RNA, 19 nt, Artificial Sequence
  Description of Artificial Sequence: Synthetic oligonucleotide
uagcuaccauuuucacugg

SEQ ID NO: 1715188 - RNA, 19 nt, Artificial Sequence
  Description of Artificial Sequence: Synthetic oligonucleotide
acauacacuuccaucuugu

SEQ ID NO: 1715189 - RNA, 19 nt, Artificial Sequence
  Description of Artificial Sequence: Synthetic oligonucleotide
caacuuguacuggacaauc

SEQ ID NO: 1715190 - RNA, 19 nt, Artificial Sequence
  Description of Artificial Sequence: Synthetic oligonucleotide
guuuucacaguuaauacuu

SEQ ID NO: 1715191 - RNA, 19 nt, Artificial Sequence
  Description of Artificial Sequence: Synthetic oligonucleotide
uuguuccaacaaauagcac

SEQ ID NO: 1715192 - RNA, 19 nt, Artificial Sequence
  Description of Artificial Sequence: Synthetic oligonucleotide
aggugcaacuuguacugga

SEQ ID NO: 1715193 - RNA, 19 nt, Artificial Sequence
  Description of Artificial Sequence: Synthetic oligonucleotide
uccaucagaaugucuccau

SEQ ID NO: 1715194 - RNA, 19 nt, Artificial Sequence
  Description of Artificial Sequence: Synthetic oligonucleotide
caagcuacaacaucauggu

SEQ ID NO: 1715195 - RNA, 19 nt, Artificial Sequence
  Description of Artificial Sequence: Synthetic oligonucleotide
aggugcccgaauuccauca

SEQ ID NO: 1715196 - RNA, 19 nt, Artificial Sequence
  Description of Artificial Sequence: Synthetic oligonucleotide
aucaucagcaaugcucgca

SEQ ID NO: 1715197 - RNA, 19 nt, Artificial Sequence
  Description of Artificial Sequence: Synthetic oligonucleotide
accucguacccaucgguca

SEQ ID NO: 1715198 - RNA, 19 nt, Artificial Sequence
  Description of Artificial Sequence: Synthetic oligonucleotide
acccauagucuuaaaauaa

SEQ ID NO: 1715199 - RNA, 19 nt, Artificial Sequence
  Description of Artificial Sequence: Synthetic oligonucleotide
uagcacauauuuacaccau

SEQ ID NO: 1715200 - RNA, 19 nt, Artificial Sequence
  Description of Artificial Sequence: Synthetic oligonucleotide
agacacaccucguacccau

SEQ ID NO: 1715201 - RNA, 19 nt, Artificial Sequence
  Description of Artificial Sequence: Synthetic oligonucleotide
auauuguaucgcuucucuu

SEQ ID NO: 1715202 - RNA, 19 nt, Artificial Sequence
  Description of Artificial Sequence: Synthetic oligonucleotide
aggcuaggaacuugccuug

SEQ ID NO: 1715203 - RNA, 19 nt, Artificial Sequence
  Description of Artificial Sequence: Synthetic oligonucleotide
cacaagcuacaacaucaug

SEQ ID NO: 1715204 - RNA, 19 nt, Artificial Sequence
  Description of Artificial Sequence: Synthetic oligonucleotide
guaaguagcuccuuucaau

SEQ ID NO: 1715205 - RNA, 19 nt, Artificial Sequence
  Description of Artificial Sequence: Synthetic oligonucleotide
acuaaaagacacaccucgu

SEQ ID NO: 1715206 - RNA, 19 nt, Artificial Sequence
  Description of Artificial Sequence: Synthetic oligonucleotide
gaaggcuaggaacuugccu

SEQ ID NO: 1715207 - RNA, 19 nt, Artificial Sequence
  Description of Artificial Sequence: Synthetic oligonucleotide
acaccucguacccaucggu

SEQ ID NO: 1715208 - RNA, 19 nt, Artificial Sequence
  Description of Artificial Sequence: Synthetic oligonucleotide
uaaggccuacgagaaacaa

SEQ ID NO: 1715209 - RNA, 19 nt, Artificial Sequence
  Description of Artificial Sequence: Synthetic oligonucleotide
acccaucggucauuugcuc

SEQ ID NO: 1715210 - RNA, 19 nt, Artificial Sequence
  Description of Artificial Sequence: Synthetic oligonucleotide
cccauagucuuaaaauaac

SEQ ID NO: 1715211 - RNA, 19 nt, Artificial Sequence
  Description of Artificial Sequence: Synthetic oligonucleotide
auggagucuuccuucuaaa

SEQ ID NO: 1715212 - RNA, 19 nt, Artificial Sequence
  Description of Artificial Sequence: Synthetic oligonucleotide
auggaguccgucgugacua

SEQ ID NO: 1715213 - RNA, 19 nt, Artificial Sequence
  Description of Artificial Sequence: Synthetic oligonucleotide
auucaauacauagcagcuu

SEQ ID NO: 1715214 - RNA, 19 nt, Artificial Sequence
  Description of Artificial Sequence: Synthetic oligonucleotide
gcuagcaaugcuccaucag

SEQ ID NO: 1715215 - RNA, 19 nt, Artificial Sequence
  Description of Artificial Sequence: Synthetic oligonucleotide
guuuccuuaucauggugua

SEQ ID NO: 1715216 - RNA, 19 nt, Artificial Sequence
  Description of Artificial Sequence: Synthetic oligonucleotide
cgucgugacuaaaagacac

SEQ ID NO: 1715217 - RNA, 19 nt, Artificial Sequence
  Description of Artificial Sequence: Synthetic oligonucleotide
ggauugacauucgacauaa

SEQ ID NO: 1715218 - RNA, 19 nt, Artificial Sequence
  Description of Artificial Sequence: Synthetic oligonucleotide
ccgcagaugagauaaauaa

SEQ ID NO: 1715219 - RNA, 19 nt, Artificial Sequence
  Description of Artificial Sequence: Synthetic oligonucleotide
cuugccuuggaguggccca

SEQ ID NO: 1715220 - RNA, 19 nt, Artificial Sequence
  Description of Artificial Sequence: Synthetic oligonucleotide
auucagcaauaaugcagaa

SEQ ID NO: 1715221 - RNA, 19 nt, Artificial Sequence
  Description of Artificial Sequence: Synthetic oligonucleotide
ggacaauccucaccaauuc

SEQ ID NO: 1715222 - RNA, 19 nt, Artificial Sequence
  Description of Artificial Sequence: Synthetic oligonucleotide
gcaauaaugcagaaggugu

SEQ ID NO: 1715223 - RNA, 19 nt, Artificial Sequence
  Description of Artificial Sequence: Synthetic oligonucleotide
uuacucucugagggguaag

SEQ ID NO: 1715224 - RNA, 19 nt, Artificial Sequence
  Description of Artificial Sequence: Synthetic oligonucleotide
gugcaacuuguacuggaca

SEQ ID NO: 1715225 - RNA, 19 nt, Artificial Sequence
  Description of Artificial Sequence: Synthetic oligonucleotide
uuuccuuaucaugguguau

SEQ ID NO: 1715226 - RNA, 19 nt, Artificial Sequence
  Description of Artificial Sequence: Synthetic oligonucleotide
guccgucgugacuaaaaga

SEQ ID NO: 1715227 - RNA, 19 nt, Artificial Sequence
  Description of Artificial Sequence: Synthetic oligonucleotide
auucgacauaaauguugaa

SEQ ID NO: 1715228 - RNA, 19 nt, Artificial Sequence
  Description of Artificial Sequence: Synthetic oligonucleotide
gcaaugcuccaucaggaga

SEQ ID NO: 1715229 - RNA, 19 nt, Artificial Sequence
  Description of Artificial Sequence: Synthetic oligonucleotide
agggguaaguagcuccuuu

SEQ ID NO: 1715230 - RNA, 19 nt, Artificial Sequence
  Description of Artificial Sequence: Synthetic oligonucleotide
caccucguacccaucgguc

SEQ ID NO: 1715231 - RNA, 19 nt, Artificial Sequence
  Description of Artificial Sequence: Synthetic oligonucleotide
caacauggaguccgucgug

SEQ ID NO: 1715232 - RNA, 19 nt, Artificial Sequence
  Description of Artificial Sequence: Synthetic oligonucleotide
uggcucuacuaaagcaaua

SEQ ID NO: 1715233 - RNA, 19 nt, Artificial Sequence
  Description of Artificial Sequence: Synthetic oligonucleotide
ucugagggguaaguagcuc

SEQ ID NO: 1715234 - RNA, 19 nt, Artificial Sequence
  Description of Artificial Sequence: Synthetic oligonucleotide
uguugaaggcuaggaacuu

SEQ ID NO: 1715235 - RNA, 19 nt, Artificial Sequence
  Description of Artificial Sequence: Synthetic oligonucleotide
auuugcuccuccagcaaau

SEQ ID NO: 1715236 - RNA, 19 nt, Artificial Sequence
  Description of Artificial Sequence: Synthetic oligonucleotide
gguaaguagcuccuuucaa

SEQ ID NO: 1715237 - RNA, 19 nt, Artificial Sequence
  Description of Artificial Sequence: Synthetic oligonucleotide
ggguaaguagcuccuuuca

SEQ ID NO: 1715238 - RNA, 19 nt, Artificial Sequence
  Description of Artificial Sequence: Synthetic oligonucleotide
cauuguguggaucccagau

SEQ ID NO: 1715239 - RNA, 19 nt, Artificial Sequence
  Description of Artificial Sequence: Synthetic oligonucleotide
aacuugccuuggaguggcc

SEQ ID NO: 1715240 - RNA, 19 nt, Artificial Sequence
  Description of Artificial Sequence: Synthetic oligonucleotide
gucagaacuaagaguuaga

SEQ ID NO: 1715241 - RNA, 19 nt, Artificial Sequence
  Description of Artificial Sequence: Synthetic oligonucleotide
cccauucaauacauagcag

SEQ ID NO: 1715242 - RNA, 19 nt, Artificial Sequence
  Description of Artificial Sequence: Synthetic oligonucleotide
caucagcaaugcucgcaac

SEQ ID NO: 1715243 - RNA, 19 nt, Artificial Sequence
  Description of Artificial Sequence: Synthetic oligonucleotide
uugcucaaaggugcaacuu

SEQ ID NO: 1715244 - RNA, 19 nt, Artificial Sequence
  Description of Artificial Sequence: Synthetic oligonucleotide
cccaucggucauuugcucc

SEQ ID NO: 1715245 - RNA, 19 nt, Artificial Sequence
  Description of Artificial Sequence: Synthetic oligonucleotide
gaguaucauaagaugcagu

SEQ ID NO: 1715246 - RNA, 19 nt, Artificial Sequence
  Description of Artificial Sequence: Synthetic oligonucleotide
auacacacacgaguaucau

SEQ ID NO: 1715247 - RNA, 19 nt, Artificial Sequence
  Description of Artificial Sequence: Synthetic oligonucleotide
gggguaaguagcuccuuuc

SEQ ID NO: 1715248 - RNA, 19 nt, Artificial Sequence
  Description of Artificial Sequence: Synthetic oligonucleotide
auccgcagaugagauaaau

SEQ ID NO: 1715249 - RNA, 19 nt, Artificial Sequence
  Description of Artificial Sequence: Synthetic oligonucleotide
gcagacauauuguaucgcu

SEQ ID NO: 1715250 - RNA, 19 nt, Artificial Sequence
  Description of Artificial Sequence: Synthetic oligonucleotide
gucgugacuaaaagacaca

SEQ ID NO: 1715251 - RNA, 19 nt, Artificial Sequence
  Description of Artificial Sequence: Synthetic oligonucleotide
cuuugguaagucaccaguu

SEQ ID NO: 1715252 - RNA, 19 nt, Artificial Sequence
  Description of Artificial Sequence: Synthetic oligonucleotide
uccgagccuuuaagaacaa

SEQ ID NO: 1715253 - RNA, 19 nt, Artificial Sequence
  Description of Artificial Sequence: Synthetic oligonucleotide
ggugcaacuuguacuggac

SEQ ID NO: 1715254 - RNA, 19 nt, Artificial Sequence
  Description of Artificial Sequence: Synthetic oligonucleotide
guaucgcuucucuuuggua

SEQ ID NO: 1715255 - RNA, 19 nt, Artificial Sequence
  Description of Artificial Sequence: Synthetic oligonucleotide
ggugcccgaauuccaucag

SEQ ID NO: 1715256 - RNA, 19 nt, Artificial Sequence
  Description of Artificial Sequence: Synthetic oligonucleotide
ccgaauuccaucagaaugu

SEQ ID NO: 1715257 - RNA, 19 nt, Artificial Sequence
  Description of Artificial Sequence: Synthetic oligonucleotide
caggugcccgaauuccauc

SEQ ID NO: 1715258 - RNA, 19 nt, Artificial Sequence
  Description of Artificial Sequence: Synthetic oligonucleotide
acaucauggugaugcccuu

SEQ ID NO: 1715259 - RNA, 19 nt, Artificial Sequence
  Description of Artificial Sequence: Synthetic oligonucleotide
agcaaauauuggagugggu

SEQ ID NO: 1715260 - RNA, 19 nt, Artificial Sequence
  Description of Artificial Sequence: Synthetic oligonucleotide
gugcccgaauuccaucaga

SEQ ID NO: 1715261 - RNA, 19 nt, Artificial Sequence
  Description of Artificial Sequence: Synthetic oligonucleotide
gucuuguaaaggccauucu

SEQ ID NO: 1715262 - RNA, 19 nt, Artificial Sequence
  Description of Artificial Sequence: Synthetic oligonucleotide
cgaguaucauaagaugcag

SEQ ID NO: 1715263 - RNA, 19 nt, Artificial Sequence
  Description of Artificial Sequence: Synthetic oligonucleotide
guagcuagcaaugcuccau

SEQ ID NO: 1715264 - RNA, 19 nt, Artificial Sequence
  Description of Artificial Sequence: Synthetic oligonucleotide
ccuacgagaaacaacuuuu

SEQ ID NO: 1715265 - RNA, 19 nt, Artificial Sequence
  Description of Artificial Sequence: Synthetic oligonucleotide
gcaacauggaguccgucgu

SEQ ID NO: 1715266 - RNA, 19 nt, Artificial Sequence
  Description of Artificial Sequence: Synthetic oligonucleotide
uauuuacaccauggcucua

SEQ ID NO: 1715267 - RNA, 19 nt, Artificial Sequence
  Description of Artificial Sequence: Synthetic oligonucleotide
uggaguccgucgugacuaa

SEQ ID NO: 1715268 - RNA, 19 nt, Artificial Sequence
  Description of Artificial Sequence: Synthetic oligonucleotide
caacauccgcagaugagau

SEQ ID NO: 1715269 - RNA, 19 nt, Artificial Sequence
  Description of Artificial Sequence: Synthetic oligonucleotide
ggaaacaggugcccgaauu

SEQ ID NO: 1715270 - RNA, 19 nt, Artificial Sequence
  Description of Artificial Sequence: Synthetic oligonucleotide
ggugggcaucacucuucgg

SEQ ID NO: 1715271 - RNA, 19 nt, Artificial Sequence
  Description of Artificial Sequence: Synthetic oligonucleotide
cagacauauuguaucgcuu

SEQ ID NO: 1715272 - RNA, 19 nt, Artificial Sequence
  Description of Artificial Sequence: Synthetic oligonucleotide
ucguacccaucggucauuu

SEQ ID NO: 1715273 - RNA, 19 nt, Artificial Sequence
  Description of Artificial Sequence: Synthetic oligonucleotide
ccucaccauuuuaucauca

SEQ ID NO: 1715274 - RNA, 19 nt, Artificial Sequence
  Description of Artificial Sequence: Synthetic oligonucleotide
gacauucgacauaaauguu

SEQ ID NO: 1715275 - RNA, 19 nt, Artificial Sequence
  Description of Artificial Sequence: Synthetic oligonucleotide
ggcucuacuaaagcaauau

SEQ ID NO: 1715276 - RNA, 19 nt, Artificial Sequence
  Description of Artificial Sequence: Synthetic oligonucleotide
cacugccaucagcagaaaa

SEQ ID NO: 1715277 - RNA, 19 nt, Artificial Sequence
  Description of Artificial Sequence: Synthetic oligonucleotide
agaaaccaaagggcccauu

SEQ ID NO: 1715278 - RNA, 19 nt, Artificial Sequence
  Description of Artificial Sequence: Synthetic oligonucleotide
cagauacacacacgaguau

SEQ ID NO: 1715279 - RNA, 19 nt, Artificial Sequence
  Description of Artificial Sequence: Synthetic oligonucleotide
gauugacauucgacauaaa

SEQ ID NO: 1715280 - RNA, 19 nt, Artificial Sequence
  Description of Artificial Sequence: Synthetic oligonucleotide
gcauaauacuuuacucucu

SEQ ID NO: 1715281 - RNA, 19 nt, Artificial Sequence
  Description of Artificial Sequence: Synthetic oligonucleotide
gacacaccucguacccauc

SEQ ID NO: 1715282 - RNA, 19 nt, Artificial Sequence
  Description of Artificial Sequence: Synthetic oligonucleotide
caucggucauuugcuccuc

SEQ ID NO: 1715283 - RNA, 19 nt, Artificial Sequence
  Description of Artificial Sequence: Synthetic oligonucleotide
ucgcaacauggaguccguc

SEQ ID NO: 1715284 - RNA, 19 nt, Artificial Sequence
  Description of Artificial Sequence: Synthetic oligonucleotide
gccuacgagaaacaacuuu

SEQ ID NO: 1715285 - RNA, 19 nt, Artificial Sequence
  Description of Artificial Sequence: Synthetic oligonucleotide
ccgucgugacuaaaagaca

SEQ ID NO: 1715286 - RNA, 19 nt, Artificial Sequence
  Description of Artificial Sequence: Synthetic oligonucleotide
gcaaugcucgcaacaugga

SEQ ID NO: 1715287 - RNA, 19 nt, Artificial Sequence
  Description of Artificial Sequence: Synthetic oligonucleotide
cauccgcagaugagauaaa

SEQ ID NO: 1715288 - RNA, 19 nt, Artificial Sequence
  Description of Artificial Sequence: Synthetic oligonucleotide
ccaaaaccucaccauuuua

SEQ ID NO: 1715289 - RNA, 19 nt, Artificial Sequence
  Description of Artificial Sequence: Synthetic oligonucleotide
cucgcaacauggaguccgu

SEQ ID NO: 1715290 - RNA, 19 nt, Artificial Sequence
  Description of Artificial Sequence: Synthetic oligonucleotide
cccuucuaguuuccuuauc

SEQ ID NO: 1715291 - RNA, 19 nt, Artificial Sequence
  Description of Artificial Sequence: Synthetic oligonucleotide
ccauuguguggaucccaga

SEQ ID NO: 1715292 - RNA, 19 nt, Artificial Sequence
  Description of Artificial Sequence: Synthetic oligonucleotide
gcaacuuguacuggacaau

SEQ ID NO: 1715293 - RNA, 19 nt, Artificial Sequence
  Description of Artificial Sequence: Synthetic oligonucleotide
ccucaccaauucuccaaaa

SEQ ID NO: 1715294 - RNA, 19 nt, Artificial Sequence
  Description of Artificial Sequence: Synthetic oligonucleotide
agggcccauucaauacaua

SEQ ID NO: 1715295 - RNA, 19 nt, Artificial Sequence
  Description of Artificial Sequence: Synthetic oligonucleotide
cggauugacauucgacaua

SEQ ID NO: 1715296 - RNA, 19 nt, Artificial Sequence
  Description of Artificial Sequence: Synthetic oligonucleotide
gcccgaauuccaucagaau

SEQ ID NO: 1715297 - RNA, 19 nt, Artificial Sequence
  Description of Artificial Sequence: Synthetic oligonucleotide
cguacccaucggucauuug

SEQ ID NO: 1715298 - RNA, 19 nt, Artificial Sequence
  Description of Artificial Sequence: Synthetic oligonucleotide
gggaaacaggugcccgaau

SEQ ID NO: 1715299 - RNA, 19 nt, Artificial Sequence
  Description of Artificial Sequence: Synthetic oligonucleotide
ggaguccgucgugacuaaa

SEQ ID NO: 1715300 - RNA, 19 nt, Artificial Sequence
  Description of Artificial Sequence: Synthetic oligonucleotide
ccauucucucaggccccac

SEQ ID NO: 1715301 - RNA, 19 nt, Artificial Sequence
  Description of Artificial Sequence: Synthetic oligonucleotide
ccucguacccaucggucau

SEQ ID NO: 1715302 - RNA, 19 nt, Artificial Sequence
  Description of Artificial Sequence: Synthetic oligonucleotide
cucguacccaucggucauu

SEQ ID NO: 1715303 - RNA, 19 nt, Artificial Sequence
  Description of Artificial Sequence: Synthetic oligonucleotide
ccgagccuuuaagaacaaa

SEQ ID NO: 1715304 - RNA, 19 nt, Artificial Sequence
  Description of Artificial Sequence: Synthetic oligonucleotide
ggccuacgagaaacaacuu

SEQ ID NO: 1715305 - RNA, 19 nt, Artificial Sequence
  Description of Artificial Sequence: Synthetic oligonucleotide
aaagauuagaacuacgugg

SEQ ID NO: 1715306 - RNA, 19 nt, Artificial Sequence
  Description of Artificial Sequence: Synthetic oligonucleotide
auauggaauaccuauaacc

SEQ ID NO: 1715307 - RNA, 19 nt, Artificial Sequence
  Description of Artificial Sequence: Synthetic oligonucleotide
aauaauuagaguugucuac

SEQ ID NO: 1715308 - RNA, 19 nt, Artificial Sequence
  Description of Artificial Sequence: Synthetic oligonucleotide
aaauaagucaucaaaauug

SEQ ID NO: 1715309 - RNA, 19 nt, Artificial Sequence
  Description of Artificial Sequence: Synthetic oligonucleotide
uuuaguagaaacagaagag

SEQ ID NO: 1715310 - RNA, 19 nt, Artificial Sequence
  Description of Artificial Sequence: Synthetic oligonucleotide
aacauaagugaaaucaugc

SEQ ID NO: 1715311 - RNA, 19 nt, Artificial Sequence
  Description of Artificial Sequence: Synthetic oligonucleotide
ugauuugucgcucugaggc

SEQ ID NO: 1715312 - RNA, 19 nt, Artificial Sequence
  Description of Artificial Sequence: Synthetic oligonucleotide
ucuauuggaaccauccugg

SEQ ID NO: 1715313 - RNA, 19 nt, Artificial Sequence
  Description of Artificial Sequence: Synthetic oligonucleotide
auuagaguugucuacuagc

SEQ ID NO: 1715314 - RNA, 19 nt, Artificial Sequence
  Description of Artificial Sequence: Synthetic oligonucleotide
cauaguagcucuuugaggc

SEQ ID NO: 1715315 - RNA, 19 nt, Artificial Sequence
  Description of Artificial Sequence: Synthetic oligonucleotide
uaugauuuugaucauacaa

SEQ ID NO: 1715316 - RNA, 19 nt, Artificial Sequence
  Description of Artificial Sequence: Synthetic oligonucleotide
uauggaauaccuauaacca

SEQ ID NO: 1715317 - RNA, 19 nt, Artificial Sequence
  Description of Artificial Sequence: Synthetic oligonucleotide
aacuacgugcaauacaauc

SEQ ID NO: 1715318 - RNA, 19 nt, Artificial Sequence
  Description of Artificial Sequence: Synthetic oligonucleotide
uuaacuacgugcaauacaa

SEQ ID NO: 1715319 - RNA, 19 nt, Artificial Sequence
  Description of Artificial Sequence: Synthetic oligonucleotide
uaauauauggaauaccuau

SEQ ID NO: 1715320 - RNA, 19 nt, Artificial Sequence
  Description of Artificial Sequence: Synthetic oligonucleotide
uguuacaccaauucuacug

SEQ ID NO: 1715321 - RNA, 19 nt, Artificial Sequence
  Description of Artificial Sequence: Synthetic oligonucleotide
gaaguuaaaagacugcuca

SEQ ID NO: 1715322 - RNA, 19 nt, Artificial Sequence
  Description of Artificial Sequence: Synthetic oligonucleotide
acauuuagcaacccaaguc

SEQ ID NO: 1715323 - RNA, 19 nt, Artificial Sequence
  Description of Artificial Sequence: Synthetic oligonucleotide
uggcaauuagccaaaagcc

SEQ ID NO: 1715324 - RNA, 19 nt, Artificial Sequence
  Description of Artificial Sequence: Synthetic oligonucleotide
ugugguaucaaaccagcag

SEQ ID NO: 1715325 - RNA, 19 nt, Artificial Sequence
  Description of Artificial Sequence: Synthetic oligonucleotide
ugcgauuuuaaauuagcag

SEQ ID NO: 1715326 - RNA, 19 nt, Artificial Sequence
  Description of Artificial Sequence: Synthetic oligonucleotide
agugaaaucaugcauuugu

SEQ ID NO: 1715327 - RNA, 19 nt, Artificial Sequence
  Description of Artificial Sequence: Synthetic oligonucleotide
uucacagacauuuagcaac

SEQ ID NO: 1715328 - RNA, 19 nt, Artificial Sequence
  Description of Artificial Sequence: Synthetic oligonucleotide
uuaaagucuuuaaauaagu

SEQ ID NO: 1715329 - RNA, 19 nt, Artificial Sequence
  Description of Artificial Sequence: Synthetic oligonucleotide
auuagcgcaggccaaacac

SEQ ID NO: 1715330 - RNA, 19 nt, Artificial Sequence
  Description of Artificial Sequence: Synthetic oligonucleotide
aaccauauuuccucuucgc

SEQ ID NO: 1715331 - RNA, 19 nt, Artificial Sequence
  Description of Artificial Sequence: Synthetic oligonucleotide
aauugaaguuaaaagacug

SEQ ID NO: 1715332 - RNA, 19 nt, Artificial Sequence
  Description of Artificial Sequence: Synthetic oligonucleotide
aagauaucauaguagcucu

SEQ ID NO: 1715333 - RNA, 19 nt, Artificial Sequence
  Description of Artificial Sequence: Synthetic oligonucleotide
ugaauuuugcuucagcauc

SEQ ID NO: 1715334 - RNA, 19 nt, Artificial Sequence
  Description of Artificial Sequence: Synthetic oligonucleotide
aacuacgugguuuaguaga

SEQ ID NO: 1715335 - RNA, 19 nt, Artificial Sequence
  Description of Artificial Sequence: Synthetic oligonucleotide
aaaccauuagcgcaggcca

SEQ ID NO: 1715336 - RNA, 19 nt, Artificial Sequence
  Description of Artificial Sequence: Synthetic oligonucleotide
accauuucuaaucccgugc

SEQ ID NO: 1715337 - RNA, 19 nt, Artificial Sequence
  Description of Artificial Sequence: Synthetic oligonucleotide
auacaaucauuccuguuac

SEQ ID NO: 1715338 - RNA, 19 nt, Artificial Sequence
  Description of Artificial Sequence: Synthetic oligonucleotide
aaacauaucaucaaacaau

SEQ ID NO: 1715339 - RNA, 19 nt, Artificial Sequence
  Description of Artificial Sequence: Synthetic oligonucleotide
uuucuaaagcauucagugg

SEQ ID NO: 1715340 - RNA, 19 nt, Artificial Sequence
  Description of Artificial Sequence: Synthetic oligonucleotide
auuacaguuucacagacau

SEQ ID NO: 1715341 - RNA, 19 nt, Artificial Sequence
  Description of Artificial Sequence: Synthetic oligonucleotide
gaaagauuagaacuacgug

SEQ ID NO: 1715342 - RNA, 19 nt, Artificial Sequence
  Description of Artificial Sequence: Synthetic oligonucleotide
augaucuuucaaaugaacc

SEQ ID NO: 1715343 - RNA, 19 nt, Artificial Sequence
  Description of Artificial Sequence: Synthetic oligonucleotide
uacuucaucgcuaauuugu

SEQ ID NO: 1715344 - RNA, 19 nt, Artificial Sequence
  Description of Artificial Sequence: Synthetic oligonucleotide
ugaucauacaaaccauuag

SEQ ID NO: 1715345 - RNA, 19 nt, Artificial Sequence
  Description of Artificial Sequence: Synthetic oligonucleotide
uucuguuaucauuaaaaug

SEQ ID NO: 1715346 - RNA, 19 nt, Artificial Sequence
  Description of Artificial Sequence: Synthetic oligonucleotide
auuucuaaucccgugcgcc

SEQ ID NO: 1715347 - RNA, 19 nt, Artificial Sequence
  Description of Artificial Sequence: Synthetic oligonucleotide
uaacauaagugaaaucaug

SEQ ID NO: 1715348 - RNA, 19 nt, Artificial Sequence
  Description of Artificial Sequence: Synthetic oligonucleotide
ugguuuaguagaaacagaa

SEQ ID NO: 1715349 - RNA, 19 nt, Artificial Sequence
  Description of Artificial Sequence: Synthetic oligonucleotide
gaaaucaugcauuuguuaa

SEQ ID NO: 1715350 - RNA, 19 nt, Artificial Sequence
  Description of Artificial Sequence: Synthetic oligonucleotide
cacaccuaagauaucauag

SEQ ID NO: 1715351 - RNA, 19 nt, Artificial Sequence
  Description of Artificial Sequence: Synthetic oligonucleotide
ucaccauaagcuuuaaacu

SEQ ID NO: 1715352 - RNA, 19 nt, Artificial Sequence
  Description of Artificial Sequence: Synthetic oligonucleotide
uucagcuuaacuacgugca

SEQ ID NO: 1715353 - RNA, 19 nt, Artificial Sequence
  Description of Artificial Sequence: Synthetic oligonucleotide
aaugaaccuuuccuaauca

SEQ ID NO: 1715354 - RNA, 19 nt, Artificial Sequence
  Description of Artificial Sequence: Synthetic oligonucleotide
uggaauaccuauaaccaac

SEQ ID NO: 1715355 - RNA, 19 nt, Artificial Sequence
  Description of Artificial Sequence: Synthetic oligonucleotide
uuugugguaucaaaccagc

SEQ ID NO: 1715356 - RNA, 19 nt, Artificial Sequence
  Description of Artificial Sequence: Synthetic oligonucleotide
uuagaguugucuacuagcu

SEQ ID NO: 1715357 - RNA, 19 nt, Artificial Sequence
  Description of Artificial Sequence: Synthetic oligonucleotide
uguacugugugucgauugg

SEQ ID NO: 1715358 - RNA, 19 nt, Artificial Sequence
  Description of Artificial Sequence: Synthetic oligonucleotide
ucaauuacaguuucacaga

SEQ ID NO: 1715359 - RNA, 19 nt, Artificial Sequence
  Description of Artificial Sequence: Synthetic oligonucleotide
accaauucuacugaagagg

SEQ ID NO: 1715360 - RNA, 19 nt, Artificial Sequence
  Description of Artificial Sequence: Synthetic oligonucleotide
aaagcaguguguccaacug

SEQ ID NO: 1715361 - RNA, 19 nt, Artificial Sequence
  Description of Artificial Sequence: Synthetic oligonucleotide
ucauacaaaccauuagcgc

SEQ ID NO: 1715362 - RNA, 19 nt, Artificial Sequence
  Description of Artificial Sequence: Synthetic oligonucleotide
ucgauuggugguaucaaag

SEQ ID NO: 1715363 - RNA, 19 nt, Artificial Sequence
  Description of Artificial Sequence: Synthetic oligonucleotide
aauucuacugaagaggcau

SEQ ID NO: 1715364 - RNA, 19 nt, Artificial Sequence
  Description of Artificial Sequence: Synthetic oligonucleotide
auugaaguuaaaagacugc

SEQ ID NO: 1715365 - RNA, 19 nt, Artificial Sequence
  Description of Artificial Sequence: Synthetic oligonucleotide
uucaguggcaauuagccaa

SEQ ID NO: 1715366 - RNA, 19 nt, Artificial Sequence
  Description of Artificial Sequence: Synthetic oligonucleotide
uuaacauaagugaaaucau

SEQ ID NO: 1715367 - RNA, 19 nt, Artificial Sequence
  Description of Artificial Sequence: Synthetic oligonucleotide
uaauaauuagaguugucua

SEQ ID NO: 1715368 - RNA, 19 nt, Artificial Sequence
  Description of Artificial Sequence: Synthetic oligonucleotide
aagauuagaacuacguggu

SEQ ID NO: 1715369 - RNA, 19 nt, Artificial Sequence
  Description of Artificial Sequence: Synthetic oligonucleotide
ugaaccuuuccuaaucaga

SEQ ID NO: 1715370 - RNA, 19 nt, Artificial Sequence
  Description of Artificial Sequence: Synthetic oligonucleotide
acuauuguccugaacaguc

SEQ ID NO: 1715371 - RNA, 19 nt, Artificial Sequence
  Description of Artificial Sequence: Synthetic oligonucleotide
uugucuacuagcugaaugu

SEQ ID NO: 1715372 - RNA, 19 nt, Artificial Sequence
  Description of Artificial Sequence: Synthetic oligonucleotide
cugacugacucaauuacag

SEQ ID NO: 1715373 - RNA, 19 nt, Artificial Sequence
  Description of Artificial Sequence: Synthetic oligonucleotide
auaccuauaaccaacugcu

SEQ ID NO: 1715374 - RNA, 19 nt, Artificial Sequence
  Description of Artificial Sequence: Synthetic oligonucleotide
gacacagugagaaagauua

SEQ ID NO: 1715375 - RNA, 19 nt, Artificial Sequence
  Description of Artificial Sequence: Synthetic oligonucleotide
aguguguccaacuguauca

SEQ ID NO: 1715376 - RNA, 19 nt, Artificial Sequence
  Description of Artificial Sequence: Synthetic oligonucleotide
auauauggaauaccuauaa

SEQ ID NO: 1715377 - RNA, 19 nt, Artificial Sequence
  Description of Artificial Sequence: Synthetic oligonucleotide
ucaucagacacagugagaa

SEQ ID NO: 1715378 - RNA, 19 nt, Artificial Sequence
  Description of Artificial Sequence: Synthetic oligonucleotide
caugcgauuuuaaauuagc

SEQ ID NO: 1715379 - RNA, 19 nt, Artificial Sequence
  Description of Artificial Sequence: Synthetic oligonucleotide
agaccgaguguuuugguuc

SEQ ID NO: 1715380 - RNA, 19 nt, Artificial Sequence
  Description of Artificial Sequence: Synthetic oligonucleotide
ugaaaggccuucuugauuu

SEQ ID NO: 1715381 - RNA, 19 nt, Artificial Sequence
  Description of Artificial Sequence: Synthetic oligonucleotide
uacuagcugaaugugauug

SEQ ID NO: 1715382 - RNA, 19 nt, Artificial Sequence
  Description of Artificial Sequence: Synthetic oligonucleotide
aggccaaacacacaaucuc

SEQ ID NO: 1715383 - RNA, 19 nt, Artificial Sequence
  Description of Artificial Sequence: Synthetic oligonucleotide
aaaucaugcauuuguuaaa

SEQ ID NO: 1715384 - RNA, 19 nt, Artificial Sequence
  Description of Artificial Sequence: Synthetic oligonucleotide
guaguaaccauauuuccuc

SEQ ID NO: 1715385 - RNA, 19 nt, Artificial Sequence
  Description of Artificial Sequence: Synthetic oligonucleotide
uugaaguuaaaagacugcu

SEQ ID NO: 1715386 - RNA, 19 nt, Artificial Sequence
  Description of Artificial Sequence: Synthetic oligonucleotide
aguacuucacagaaaacag

SEQ ID NO: 1715387 - RNA, 19 nt, Artificial Sequence
  Description of Artificial Sequence: Synthetic oligonucleotide
uugcaaaugaugaucuuuc

SEQ ID NO: 1715388 - RNA, 19 nt, Artificial Sequence
  Description of Artificial Sequence: Synthetic oligonucleotide
ccuaagauaucauaguagc

SEQ ID NO: 1715389 - RNA, 19 nt, Artificial Sequence
  Description of Artificial Sequence: Synthetic oligonucleotide
cugagagcguuucauaugc

SEQ ID NO: 1715390 - RNA, 19 nt, Artificial Sequence
  Description of Artificial Sequence: Synthetic oligonucleotide
ugaggcuaggauuaauucu

SEQ ID NO: 1715391 - RNA, 19 nt, Artificial Sequence
  Description of Artificial Sequence: Synthetic oligonucleotide
uucaaaugaaccuuuccua

SEQ ID NO: 1715392 - RNA, 19 nt, Artificial Sequence
  Description of Artificial Sequence: Synthetic oligonucleotide
ugagugacaguccugcagu

SEQ ID NO: 1715393 - RNA, 19 nt, Artificial Sequence
  Description of Artificial Sequence: Synthetic oligonucleotide
uauauggaauaccuauaac

SEQ ID NO: 1715394 - RNA, 19 nt, Artificial Sequence
  Description of Artificial Sequence: Synthetic oligonucleotide
acauaagugaaaucaugca

SEQ ID NO: 1715395 - RNA, 19 nt, Artificial Sequence
  Description of Artificial Sequence: Synthetic oligonucleotide
uuaauauauggaauaccua

SEQ ID NO: 1715396 - RNA, 19 nt, Artificial Sequence
  Description of Artificial Sequence: Synthetic oligonucleotide
acugauuggggaguagacc

SEQ ID NO: 1715397 - RNA, 19 nt, Artificial Sequence
  Description of Artificial Sequence: Synthetic oligonucleotide
ugaaguuaaaagacugcuc

SEQ ID NO: 1715398 - RNA, 19 nt, Artificial Sequence
  Description of Artificial Sequence: Synthetic oligonucleotide
cauuagugaaagcagugug

SEQ ID NO: 1715399 - RNA, 19 nt, Artificial Sequence
  Description of Artificial Sequence: Synthetic oligonucleotide
uacuggaaccccaugaaau

SEQ ID NO: 1715400 - RNA, 19 nt, Artificial Sequence
  Description of Artificial Sequence: Synthetic oligonucleotide
guugucuacuagcugaaug

SEQ ID NO: 1715401 - RNA, 19 nt, Artificial Sequence
  Description of Artificial Sequence: Synthetic oligonucleotide
aucgcuaauuugugaaagg

SEQ ID NO: 1715402 - RNA, 19 nt, Artificial Sequence
  Description of Artificial Sequence: Synthetic oligonucleotide
agaaagauuagaacuacgu

SEQ ID NO: 1715403 - RNA, 19 nt, Artificial Sequence
  Description of Artificial Sequence: Synthetic oligonucleotide
uacgugguuuaguagaaac

SEQ ID NO: 1715404 - RNA, 19 nt, Artificial Sequence
  Description of Artificial Sequence: Synthetic oligonucleotide
ucggggugguacuucaucg

SEQ ID NO: 1715405 - RNA, 19 nt, Artificial Sequence
  Description of Artificial Sequence: Synthetic oligonucleotide
auaauuagaguugucuacu

SEQ ID NO: 1715406 - RNA, 19 nt, Artificial Sequence
  Description of Artificial Sequence: Synthetic oligonucleotide
uuugaucauacaaaccauu

SEQ ID NO: 1715407 - RNA, 19 nt, Artificial Sequence
  Description of Artificial Sequence: Synthetic oligonucleotide
cuugauuugucgcucugag

SEQ ID NO: 1715408 - RNA, 19 nt, Artificial Sequence
  Description of Artificial Sequence: Synthetic oligonucleotide
aggauuaauucuguuauca

SEQ ID NO: 1715409 - RNA, 19 nt, Artificial Sequence
  Description of Artificial Sequence: Synthetic oligonucleotide
aacacacaaucucuuggca

SEQ ID NO: 1715410 - RNA, 19 nt, Artificial Sequence
  Description of Artificial Sequence: Synthetic oligonucleotide
acgugcaauacaaucauuc

SEQ ID NO: 1715411 - RNA, 19 nt, Artificial Sequence
  Description of Artificial Sequence: Synthetic oligonucleotide
augugauugaaccugucaa

SEQ ID NO: 1715412 - RNA, 19 nt, Artificial Sequence
  Description of Artificial Sequence: Synthetic oligonucleotide
aacugauuggggaguagac

SEQ ID NO: 1715413 - RNA, 19 nt, Artificial Sequence
  Description of Artificial Sequence: Synthetic oligonucleotide
aaaggacuuccacucccuc

SEQ ID NO: 1715414 - RNA, 19 nt, Artificial Sequence
  Description of Artificial Sequence: Synthetic oligonucleotide
uuggcaauauuucaccaua

SEQ ID NO: 1715415 - RNA, 19 nt, Artificial Sequence
  Description of Artificial Sequence: Synthetic oligonucleotide
auuuugggcacaccuaaga

SEQ ID NO: 1715416 - RNA, 19 nt, Artificial Sequence
  Description of Artificial Sequence: Synthetic oligonucleotide
uuuagcaacccaagucaca

SEQ ID NO: 1715417 - RNA, 19 nt, Artificial Sequence
  Description of Artificial Sequence: Synthetic oligonucleotide
uggggaguagaccauuucu

SEQ ID NO: 1715418 - RNA, 19 nt, Artificial Sequence
  Description of Artificial Sequence: Synthetic oligonucleotide
auuagaacuacgugguuua

SEQ ID NO: 1715419 - RNA, 19 nt, Artificial Sequence
  Description of Artificial Sequence: Synthetic oligonucleotide
accuuuccuaaucagaaaa

SEQ ID NO: 1715420 - RNA, 19 nt, Artificial Sequence
  Description of Artificial Sequence: Synthetic oligonucleotide
ugugauugaaccugucaaa

SEQ ID NO: 1715421 - RNA, 19 nt, Artificial Sequence
  Description of Artificial Sequence: Synthetic oligonucleotide
aacaauccaccaccaaaga

SEQ ID NO: 1715422 - RNA, 19 nt, Artificial Sequence
  Description of Artificial Sequence: Synthetic oligonucleotide
gagaaagauuagaacuacg

SEQ ID NO: 1715423 - RNA, 19 nt, Artificial Sequence
  Description of Artificial Sequence: Synthetic oligonucleotide
agcaacccaagucacaggu

SEQ ID NO: 1715424 - RNA, 19 nt, Artificial Sequence
  Description of Artificial Sequence: Synthetic oligonucleotide
gaguguuuugguucuggcc

SEQ ID NO: 1715425 - RNA, 19 nt, Artificial Sequence
  Description of Artificial Sequence: Synthetic oligonucleotide
ugcagugcuuacuggaacc

SEQ ID NO: 1715426 - RNA, 19 nt, Artificial Sequence
  Description of Artificial Sequence: Synthetic oligonucleotide
ucugagagcguuucauaug

SEQ ID NO: 1715427 - RNA, 19 nt, Artificial Sequence
  Description of Artificial Sequence: Synthetic oligonucleotide
aaguuaaaagacugcucaa

SEQ ID NO: 1715428 - RNA, 19 nt, Artificial Sequence
  Description of Artificial Sequence: Synthetic oligonucleotide
gacucaauuacaguuucac

SEQ ID NO: 1715429 - RNA, 19 nt, Artificial Sequence
  Description of Artificial Sequence: Synthetic oligonucleotide
ugagaaagauuagaacuac

SEQ ID NO: 1715430 - RNA, 19 nt, Artificial Sequence
  Description of Artificial Sequence: Synthetic oligonucleotide
ucgcuaauuugugaaaggc

SEQ ID NO: 1715431 - RNA, 19 nt, Artificial Sequence
  Description of Artificial Sequence: Synthetic oligonucleotide
ugcucaaaaggacuuccac

SEQ ID NO: 1715432 - RNA, 19 nt, Artificial Sequence
  Description of Artificial Sequence: Synthetic oligonucleotide
agauuuugggcacaccuaa

SEQ ID NO: 1715433 - RNA, 19 nt, Artificial Sequence
  Description of Artificial Sequence: Synthetic oligonucleotide
cugauuggggaguagacca

SEQ ID NO: 1715434 - RNA, 19 nt, Artificial Sequence
  Description of Artificial Sequence: Synthetic oligonucleotide
uucgcugagugacaguccu

SEQ ID NO: 1715435 - RNA, 19 nt, Artificial Sequence
  Description of Artificial Sequence: Synthetic oligonucleotide
ugccauuagugaaagcagu

SEQ ID NO: 1715436 - RNA, 19 nt, Artificial Sequence
  Description of Artificial Sequence: Synthetic oligonucleotide
uuuugggcacaccuaagau

SEQ ID NO: 1715437 - RNA, 19 nt, Artificial Sequence
  Description of Artificial Sequence: Synthetic oligonucleotide
acuacgugcaauacaauca

SEQ ID NO: 1715438 - RNA, 19 nt, Artificial Sequence
  Description of Artificial Sequence: Synthetic oligonucleotide
aauauauggaauaccuaua

SEQ ID NO: 1715439 - RNA, 19 nt, Artificial Sequence
  Description of Artificial Sequence: Synthetic oligonucleotide
agcaucagggcucuuauuu

SEQ ID NO: 1715440 - RNA, 19 nt, Artificial Sequence
  Description of Artificial Sequence: Synthetic oligonucleotide
ucuuagaccgaguguuuug

SEQ ID NO: 1715441 - RNA, 19 nt, Artificial Sequence
  Description of Artificial Sequence: Synthetic oligonucleotide
uugaggcuaggauuaauuc

SEQ ID NO: 1715442 - RNA, 19 nt, Artificial Sequence
  Description of Artificial Sequence: Synthetic oligonucleotide
gaugaucuuucaaaugaac

SEQ ID NO: 1715443 - RNA, 19 nt, Artificial Sequence
  Description of Artificial Sequence: Synthetic oligonucleotide
accuaagauaucauaguag

SEQ ID NO: 1715444 - RNA, 19 nt, Artificial Sequence
  Description of Artificial Sequence: Synthetic oligonucleotide
auuuagcaacccaagucac

SEQ ID NO: 1715445 - RNA, 19 nt, Artificial Sequence
  Description of Artificial Sequence: Synthetic oligonucleotide
ugaacagucaguguaugua

SEQ ID NO: 1715446 - RNA, 19 nt, Artificial Sequence
  Description of Artificial Sequence: Synthetic oligonucleotide
auaagugaaaucaugcauu

SEQ ID NO: 1715447 - RNA, 19 nt, Artificial Sequence
  Description of Artificial Sequence: Synthetic oligonucleotide
caaaccauuagcgcaggcc

SEQ ID NO: 1715448 - RNA, 19 nt, Artificial Sequence
  Description of Artificial Sequence: Synthetic oligonucleotide
aggccuucuugauuugucg

SEQ ID NO: 1715449 - RNA, 19 nt, Artificial Sequence
  Description of Artificial Sequence: Synthetic oligonucleotide
auuaauaauuagaguuguc

SEQ ID NO: 1715450 - RNA, 19 nt, Artificial Sequence
  Description of Artificial Sequence: Synthetic oligonucleotide
uuagcgcaggccaaacaca

SEQ ID NO: 1715451 - RNA, 19 nt, Artificial Sequence
  Description of Artificial Sequence: Synthetic oligonucleotide
uagaguugucuacuagcug

SEQ ID NO: 1715452 - RNA, 19 nt, Artificial Sequence
  Description of Artificial Sequence: Synthetic oligonucleotide
uuugggcacaccuaagaua

SEQ ID NO: 1715453 - RNA, 19 nt, Artificial Sequence
  Description of Artificial Sequence: Synthetic oligonucleotide
caaacauaucaucaaacaa

SEQ ID NO: 1715454 - RNA, 19 nt, Artificial Sequence
  Description of Artificial Sequence: Synthetic oligonucleotide
caccaauucuacugaagag

SEQ ID NO: 1715455 - RNA, 19 nt, Artificial Sequence
  Description of Artificial Sequence: Synthetic oligonucleotide
acucaauuacaguuucaca

SEQ ID NO: 1715456 - RNA, 19 nt, Artificial Sequence
  Description of Artificial Sequence: Synthetic oligonucleotide
acagacauuuagcaaccca

SEQ ID NO: 1715457 - RNA, 19 nt, Artificial Sequence
  Description of Artificial Sequence: Synthetic oligonucleotide
cacugacugacucaauuac

SEQ ID NO: 1715458 - RNA, 19 nt, Artificial Sequence
  Description of Artificial Sequence: Synthetic oligonucleotide
aaccccaugaaaucuuauu

SEQ ID NO: 1715459 - RNA, 19 nt, Artificial Sequence
  Description of Artificial Sequence: Synthetic oligonucleotide
cuuaacuacgugcaauaca

SEQ ID NO: 1715460 - RNA, 19 nt, Artificial Sequence
  Description of Artificial Sequence: Synthetic oligonucleotide
guaaccauauuuccucuuc

SEQ ID NO: 1715461 - RNA, 19 nt, Artificial Sequence
  Description of Artificial Sequence: Synthetic oligonucleotide
ucuaaucccgugcgccccg

SEQ ID NO: 1715462 - RNA, 19 nt, Artificial Sequence
  Description of Artificial Sequence: Synthetic oligonucleotide
caucgcuaauuugugaaag

SEQ ID NO: 1715463 - RNA, 19 nt, Artificial Sequence
  Description of Artificial Sequence: Synthetic oligonucleotide
accuauaaccaacugcuua

SEQ ID NO: 1715464 - RNA, 19 nt, Artificial Sequence
  Description of Artificial Sequence: Synthetic oligonucleotide
acaaaccauuagcgcaggc

SEQ ID NO: 1715465 - RNA, 19 nt, Artificial Sequence
  Description of Artificial Sequence: Synthetic oligonucleotide
agcucuuugaggcuaggau

SEQ ID NO: 1715466 - RNA, 19 nt, Artificial Sequence
  Description of Artificial Sequence: Synthetic oligonucleotide
auggaauaccuauaaccaa

SEQ ID NO: 1715467 - RNA, 19 nt, Artificial Sequence
  Description of Artificial Sequence: Synthetic oligonucleotide
gaccauuucuaaucccgug

SEQ ID NO: 1715468 - RNA, 19 nt, Artificial Sequence
  Description of Artificial Sequence: Synthetic oligonucleotide
uagugaaagcagugugucc

SEQ ID NO: 1715469 - RNA, 19 nt, Artificial Sequence
  Description of Artificial Sequence: Synthetic oligonucleotide
ugcuucuuagaccgagugu

SEQ ID NO: 1715470 - RNA, 19 nt, Artificial Sequence
  Description of Artificial Sequence: Synthetic oligonucleotide
uaguaaccauauuuccucu

SEQ ID NO: 1715471 - RNA, 19 nt, Artificial Sequence
  Description of Artificial Sequence: Synthetic oligonucleotide
ugucuacuagcugaaugug

SEQ ID NO: 1715472 - RNA, 19 nt, Artificial Sequence
  Description of Artificial Sequence: Synthetic oligonucleotide
ugcaaauugcaaagacaaa

SEQ ID NO: 1715473 - RNA, 19 nt, Artificial Sequence
  Description of Artificial Sequence: Synthetic oligonucleotide
gucaguguauguaguaacc

SEQ ID NO: 1715474 - RNA, 19 nt, Artificial Sequence
  Description of Artificial Sequence: Synthetic oligonucleotide
uugugguaucaaaccagca

SEQ ID NO: 1715475 - RNA, 19 nt, Artificial Sequence
  Description of Artificial Sequence: Synthetic oligonucleotide
agcauucaguggcaauuag

SEQ ID NO: 1715476 - RNA, 19 nt, Artificial Sequence
  Description of Artificial Sequence: Synthetic oligonucleotide
ugacucaauuacaguuuca

SEQ ID NO: 1715477 - RNA, 19 nt, Artificial Sequence
  Description of Artificial Sequence: Synthetic oligonucleotide
acuagcugaaugugauuga

SEQ ID NO: 1715478 - RNA, 19 nt, Artificial Sequence
  Description of Artificial Sequence: Synthetic oligonucleotide
ucaucgcuaauuugugaaa

SEQ ID NO: 1715479 - RNA, 19 nt, Artificial Sequence
  Description of Artificial Sequence: Synthetic oligonucleotide
ugguaucaaaccagcaguu

SEQ ID NO: 1715480 - RNA, 19 nt, Artificial Sequence
  Description of Artificial Sequence: Synthetic oligonucleotide
ugacugacucaauuacagu

SEQ ID NO: 1715481 - RNA, 19 nt, Artificial Sequence
  Description of Artificial Sequence: Synthetic oligonucleotide
agcuuaacuacgugcaaua

SEQ ID NO: 1715482 - RNA, 19 nt, Artificial Sequence
  Description of Artificial Sequence: Synthetic oligonucleotide
aagugaaaucaugcauuug

SEQ ID NO: 1715483 - RNA, 19 nt, Artificial Sequence
  Description of Artificial Sequence: Synthetic oligonucleotide
cauuucuaaucccgugcgc

SEQ ID NO: 1715484 - RNA, 19 nt, Artificial Sequence
  Description of Artificial Sequence: Synthetic oligonucleotide
ucagcuuaacuacgugcaa

SEQ ID NO: 1715485 - RNA, 19 nt, Artificial Sequence
  Description of Artificial Sequence: Synthetic oligonucleotide
uaggauuaauucuguuauc

SEQ ID NO: 1715486 - RNA, 19 nt, Artificial Sequence
  Description of Artificial Sequence: Synthetic oligonucleotide
cugaggcagauuuugggca

SEQ ID NO: 1715487 - RNA, 19 nt, Artificial Sequence
  Description of Artificial Sequence: Synthetic oligonucleotide
cauaagugaaaucaugcau

SEQ ID NO: 1715488 - RNA, 19 nt, Artificial Sequence
  Description of Artificial Sequence: Synthetic oligonucleotide
uagcaacccaagucacagg

SEQ ID NO: 1715489 - RNA, 19 nt, Artificial Sequence
  Description of Artificial Sequence: Synthetic oligonucleotide
gauuugucgcucugaggca

SEQ ID NO: 1715490 - RNA, 19 nt, Artificial Sequence
  Description of Artificial Sequence: Synthetic oligonucleotide
uguauguaguaaccauauu

SEQ ID NO: 1715491 - RNA, 19 nt, Artificial Sequence
  Description of Artificial Sequence: Synthetic oligonucleotide
uuagaacuacgugguuuag

SEQ ID NO: 1715492 - RNA, 19 nt, Artificial Sequence
  Description of Artificial Sequence: Synthetic oligonucleotide
ccauuucuaaucccgugcg

SEQ ID NO: 1715493 - RNA, 19 nt, Artificial Sequence
  Description of Artificial Sequence: Synthetic oligonucleotide
uacaaucauuccuguuaca

SEQ ID NO: 1715494 - RNA, 19 nt, Artificial Sequence
  Description of Artificial Sequence: Synthetic oligonucleotide
acuucaucgcuaauuugug

SEQ ID NO: 1715495 - RNA, 19 nt, Artificial Sequence
  Description of Artificial Sequence: Synthetic oligonucleotide
uuagaccgaguguuuuggu

SEQ ID NO: 1715496 - RNA, 19 nt, Artificial Sequence
  Description of Artificial Sequence: Synthetic oligonucleotide
guccugaacagucagugua

SEQ ID NO: 1715497 - RNA, 19 nt, Artificial Sequence
  Description of Artificial Sequence: Synthetic oligonucleotide
uucuaaucccgugcgcccc

SEQ ID NO: 1715498 - RNA, 19 nt, Artificial Sequence
  Description of Artificial Sequence: Synthetic oligonucleotide
aguguauguaguaaccaua

SEQ ID NO: 1715499 - RNA, 19 nt, Artificial Sequence
  Description of Artificial Sequence: Synthetic oligonucleotide
acagucaguguauguagua

SEQ ID NO: 1715500 - RNA, 19 nt, Artificial Sequence
  Description of Artificial Sequence: Synthetic oligonucleotide
uguccugaacagucagugu

SEQ ID NO: 1715501 - RNA, 19 nt, Artificial Sequence
  Description of Artificial Sequence: Synthetic oligonucleotide
gccggugagcaucugagag

SEQ ID NO: 1715502 - RNA, 19 nt, Artificial Sequence
  Description of Artificial Sequence: Synthetic oligonucleotide
cuucgcugagugacagucc

SEQ ID NO: 1715503 - RNA, 19 nt, Artificial Sequence
  Description of Artificial Sequence: Synthetic oligonucleotide
cuauaaccaacugcuuaac

SEQ ID NO: 1715504 - RNA, 19 nt, Artificial Sequence
  Description of Artificial Sequence: Synthetic oligonucleotide
uuggggaguagaccauuuc

SEQ ID NO: 1715505 - RNA, 19 nt, Artificial Sequence
  Description of Artificial Sequence: Synthetic oligonucleotide
ugcuuacuggaaccccaug

SEQ ID NO: 1715506 - RNA, 19 nt, Artificial Sequence
  Description of Artificial Sequence: Synthetic oligonucleotide
cacagugagaaagauuaga

SEQ ID NO: 1715507 - RNA, 19 nt, Artificial Sequence
  Description of Artificial Sequence: Synthetic oligonucleotide
acugacugacucaauuaca

SEQ ID NO: 1715508 - RNA, 19 nt, Artificial Sequence
  Description of Artificial Sequence: Synthetic oligonucleotide
ugauuggggaguagaccau

SEQ ID NO: 1715509 - RNA, 19 nt, Artificial Sequence
  Description of Artificial Sequence: Synthetic oligonucleotide
ggugcuacagggcaugcga

SEQ ID NO: 1715510 - RNA, 19 nt, Artificial Sequence
  Description of Artificial Sequence: Synthetic oligonucleotide
gauuagaacuacgugguuu

SEQ ID NO: 1715511 - RNA, 19 nt, Artificial Sequence
  Description of Artificial Sequence: Synthetic oligonucleotide
uugucggggugguacuuca

SEQ ID NO: 1715512 - RNA, 19 nt, Artificial Sequence
  Description of Artificial Sequence: Synthetic oligonucleotide
gcuaggauuaauucuguua

SEQ ID NO: 1715513 - RNA, 19 nt, Artificial Sequence
  Description of Artificial Sequence: Synthetic oligonucleotide
gugauugaaccugucaaaa

SEQ ID NO: 1715514 - RNA, 19 nt, Artificial Sequence
  Description of Artificial Sequence: Synthetic oligonucleotide
cuaagauaucauaguagcu

SEQ ID NO: 1715515 - RNA, 19 nt, Artificial Sequence
  Description of Artificial Sequence: Synthetic oligonucleotide
ugagagcguuucauaugcu

SEQ ID NO: 1715516 - RNA, 19 nt, Artificial Sequence
  Description of Artificial Sequence: Synthetic oligonucleotide
agugcuuacuggaacccca

SEQ ID NO: 1715517 - RNA, 19 nt, Artificial Sequence
  Description of Artificial Sequence: Synthetic oligonucleotide
cuauuguccugaacaguca

SEQ ID NO: 1715518 - RNA, 19 nt, Artificial Sequence
  Description of Artificial Sequence: Synthetic oligonucleotide
gcuuacuggaaccccauga

SEQ ID NO: 1715519 - RNA, 19 nt, Artificial Sequence
  Description of Artificial Sequence: Synthetic oligonucleotide
cuucaucgcuaauuuguga

SEQ ID NO: 1715520 - RNA, 19 nt, Artificial Sequence
  Description of Artificial Sequence: Synthetic oligonucleotide
gcuaauuugugaaaggccu

SEQ ID NO: 1715521 - RNA, 19 nt, Artificial Sequence
  Description of Artificial Sequence: Synthetic oligonucleotide
cuuugccauuagugaaagc

SEQ ID NO: 1715522 - RNA, 19 nt, Artificial Sequence
  Description of Artificial Sequence: Synthetic oligonucleotide
cgugcaauacaaucauucc

SEQ ID NO: 1715523 - RNA, 19 nt, Artificial Sequence
  Description of Artificial Sequence: Synthetic oligonucleotide
acgugguuuaguagaaaca

SEQ ID NO: 1715524 - RNA, 19 nt, Artificial Sequence
  Description of Artificial Sequence: Synthetic oligonucleotide
acaaucucuuggcaauauu

SEQ ID NO: 1715525 - RNA, 19 nt, Artificial Sequence
  Description of Artificial Sequence: Synthetic oligonucleotide
ugugugucgauugguggua

SEQ ID NO: 1715526 - RNA, 19 nt, Artificial Sequence
  Description of Artificial Sequence: Synthetic oligonucleotide
ugucgauuggugguaucaa

SEQ ID NO: 1715527 - RNA, 19 nt, Artificial Sequence
  Description of Artificial Sequence: Synthetic oligonucleotide
cgcuaauuugugaaaggcc

SEQ ID NO: 1715528 - RNA, 19 nt, Artificial Sequence
  Description of Artificial Sequence: Synthetic oligonucleotide
uucuuagaccgaguguuuu

SEQ ID NO: 1715529 - RNA, 19 nt, Artificial Sequence
  Description of Artificial Sequence: Synthetic oligonucleotide
aaucccgugcgccccgcaa

SEQ ID NO: 1715530 - RNA, 19 nt, Artificial Sequence
  Description of Artificial Sequence: Synthetic oligonucleotide
uccgccggugagcaucuga

SEQ ID NO: 1715531 - RNA, 19 nt, Artificial Sequence
  Description of Artificial Sequence: Synthetic oligonucleotide
gcaaaugaugaucuuucaa

SEQ ID NO: 1715532 - RNA, 19 nt, Artificial Sequence
  Description of Artificial Sequence: Synthetic oligonucleotide
ggccuucuugauuugucgc

SEQ ID NO: 1715533 - RNA, 19 nt, Artificial Sequence
  Description of Artificial Sequence: Synthetic oligonucleotide
uacgugcaauacaaucauu

SEQ ID NO: 1715534 - RNA, 19 nt, Artificial Sequence
  Description of Artificial Sequence: Synthetic oligonucleotide
agauuagaacuacgugguu

SEQ ID NO: 1715535 - RNA, 19 nt, Artificial Sequence
  Description of Artificial Sequence: Synthetic oligonucleotide
uguguccaacuguaucaua

SEQ ID NO: 1715536 - RNA, 19 nt, Artificial Sequence
  Description of Artificial Sequence: Synthetic oligonucleotide
gcagauuuugggcacaccu

SEQ ID NO: 1715537 - RNA, 19 nt, Artificial Sequence
  Description of Artificial Sequence: Synthetic oligonucleotide
gauaucauaguagcucuuu

SEQ ID NO: 1715538 - RNA, 19 nt, Artificial Sequence
  Description of Artificial Sequence: Synthetic oligonucleotide
gucuacuagcugaauguga

SEQ ID NO: 1715539 - RNA, 19 nt, Artificial Sequence
  Description of Artificial Sequence: Synthetic oligonucleotide
gugucgauuggugguauca

SEQ ID NO: 1715540 - RNA, 19 nt, Artificial Sequence
  Description of Artificial Sequence: Synthetic oligonucleotide
agaccauuucuaaucccgu

SEQ ID NO: 1715541 - RNA, 19 nt, Artificial Sequence
  Description of Artificial Sequence: Synthetic oligonucleotide
gugguuuaguagaaacaga

SEQ ID NO: 1715542 - RNA, 19 nt, Artificial Sequence
  Description of Artificial Sequence: Synthetic oligonucleotide
acuacgugguuuaguagaa

SEQ ID NO: 1715543 - RNA, 19 nt, Artificial Sequence
  Description of Artificial Sequence: Synthetic oligonucleotide
gggaguagaccauuucuaa

SEQ ID NO: 1715544 - RNA, 19 nt, Artificial Sequence
  Description of Artificial Sequence: Synthetic oligonucleotide
gccauuagugaaagcagug

SEQ ID NO: 1715545 - RNA, 19 nt, Artificial Sequence
  Description of Artificial Sequence: Synthetic oligonucleotide
gaaugugauugaaccuguc

SEQ ID NO: 1715546 - RNA, 19 nt, Artificial Sequence
  Description of Artificial Sequence: Synthetic oligonucleotide
ugugucgauuggugguauc

SEQ ID NO: 1715547 - RNA, 19 nt, Artificial Sequence
  Description of Artificial Sequence: Synthetic oligonucleotide
ugcgccccgcaacagcuuc

SEQ ID NO: 1715548 - RNA, 19 nt, Artificial Sequence
  Description of Artificial Sequence: Synthetic oligonucleotide
cuagcugaaugugauugaa

SEQ ID NO: 1715549 - RNA, 19 nt, Artificial Sequence
  Description of Artificial Sequence: Synthetic oligonucleotide
gcuuaacauaagugaaauc

SEQ ID NO: 1715550 - RNA, 19 nt, Artificial Sequence
  Description of Artificial Sequence: Synthetic oligonucleotide
cagauuuugggcacaccua

SEQ ID NO: 1715551 - RNA, 19 nt, Artificial Sequence
  Description of Artificial Sequence: Synthetic oligonucleotide
aggugcuacagggcaugcg

SEQ ID NO: 1715552 - RNA, 19 nt, Artificial Sequence
  Description of Artificial Sequence: Synthetic oligonucleotide
uacagggcaugcgauuuua

SEQ ID NO: 1715553 - RNA, 19 nt, Artificial Sequence
  Description of Artificial Sequence: Synthetic oligonucleotide
aaccauuagcgcaggccaa

SEQ ID NO: 1715554 - RNA, 19 nt, Artificial Sequence
  Description of Artificial Sequence: Synthetic oligonucleotide
gagagcguuucauaugcuu

SEQ ID NO: 1715555 - RNA, 19 nt, Artificial Sequence
  Description of Artificial Sequence: Synthetic oligonucleotide
ggaaccauccugguguguc

SEQ ID NO: 1715556 - RNA, 19 nt, Artificial Sequence
  Description of Artificial Sequence: Synthetic oligonucleotide
cacagacauuuagcaaccc

SEQ ID NO: 1715557 - RNA, 19 nt, Artificial Sequence
  Description of Artificial Sequence: Synthetic oligonucleotide
cauuagcgcaggccaaaca

SEQ ID NO: 1715558 - RNA, 19 nt, Artificial Sequence
  Description of Artificial Sequence: Synthetic oligonucleotide
cuacgugcaauacaaucau

SEQ ID NO: 1715559 - RNA, 19 nt, Artificial Sequence
  Description of Artificial Sequence: Synthetic oligonucleotide
gaccgaguguuuugguucu

SEQ ID NO: 1715560 - RNA, 19 nt, Artificial Sequence
  Description of Artificial Sequence: Synthetic oligonucleotide
agacugcucaaaaggacuu

SEQ ID NO: 1715561 - RNA, 19 nt, Artificial Sequence
  Description of Artificial Sequence: Synthetic oligonucleotide
caggccaaacacacaaucu

SEQ ID NO: 1715562 - RNA, 19 nt, Artificial Sequence
  Description of Artificial Sequence: Synthetic oligonucleotide
cagggcaugcgauuuuaaa

SEQ ID NO: 1715563 - RNA, 19 nt, Artificial Sequence
  Description of Artificial Sequence: Synthetic oligonucleotide
agacacagugagaaagauu

SEQ ID NO: 1715564 - RNA, 19 nt, Artificial Sequence
  Description of Artificial Sequence: Synthetic oligonucleotide
uguuuugguucuggccaaa

SEQ ID NO: 1715565 - RNA, 19 nt, Artificial Sequence
  Description of Artificial Sequence: Synthetic oligonucleotide
cugugugucgauugguggu

SEQ ID NO: 1715566 - RNA, 19 nt, Artificial Sequence
  Description of Artificial Sequence: Synthetic oligonucleotide
ggcaugcgauuuuaaauua

SEQ ID NO: 1715567 - RNA, 19 nt, Artificial Sequence
  Description of Artificial Sequence: Synthetic oligonucleotide
caguguauguaguaaccau

SEQ ID NO: 1715568 - RNA, 19 nt, Artificial Sequence
  Description of Artificial Sequence: Synthetic oligonucleotide
gggcaugcgauuuuaaauu

SEQ ID NO: 1715569 - RNA, 19 nt, Artificial Sequence
  Description of Artificial Sequence: Synthetic oligonucleotide
cuaauuugugaaaggccuu

SEQ ID NO: 1715570 - RNA, 19 nt, Artificial Sequence
  Description of Artificial Sequence: Synthetic oligonucleotide
accauuagcgcaggccaaa

SEQ ID NO: 1715571 - RNA, 19 nt, Artificial Sequence
  Description of Artificial Sequence: Synthetic oligonucleotide
uaaucccgugcgccccgca

SEQ ID NO: 1715572 - RNA, 19 nt, Artificial Sequence
  Description of Artificial Sequence: Synthetic oligonucleotide
ccuuugccauuagugaaag

SEQ ID NO: 1715573 - RNA, 19 nt, Artificial Sequence
  Description of Artificial Sequence: Synthetic oligonucleotide
gcuuaacuacgugcaauac

SEQ ID NO: 1715574 - RNA, 19 nt, Artificial Sequence
  Description of Artificial Sequence: Synthetic oligonucleotide
aggcuaggauuaauucugu

SEQ ID NO: 1715575 - RNA, 19 nt, Artificial Sequence
  Description of Artificial Sequence: Synthetic oligonucleotide
ugucggggugguacuucau

SEQ ID NO: 1715576 - RNA, 19 nt, Artificial Sequence
  Description of Artificial Sequence: Synthetic oligonucleotide
agauaucauaguagcucuu

SEQ ID NO: 1715577 - RNA, 19 nt, Artificial Sequence
  Description of Artificial Sequence: Synthetic oligonucleotide
gcuucuuagaccgaguguu

SEQ ID NO: 1715578 - RNA, 19 nt, Artificial Sequence
  Description of Artificial Sequence: Synthetic oligonucleotide
caucagacacagugagaaa

SEQ ID NO: 1715579 - RNA, 19 nt, Artificial Sequence
  Description of Artificial Sequence: Synthetic oligonucleotide
aguugucuacuagcugaau

SEQ ID NO: 1715580 - RNA, 19 nt, Artificial Sequence
  Description of Artificial Sequence: Synthetic oligonucleotide
ggaauaccuauaaccaacu

SEQ ID NO: 1715581 - RNA, 19 nt, Artificial Sequence
  Description of Artificial Sequence: Synthetic oligonucleotide
gcaauacaaucauuccugu

SEQ ID NO: 1715582 - RNA, 19 nt, Artificial Sequence
  Description of Artificial Sequence: Synthetic oligonucleotide
ugggcacaccuaagauauc

SEQ ID NO: 1715583 - RNA, 19 nt, Artificial Sequence
  Description of Artificial Sequence: Synthetic oligonucleotide
cgaguguuuugguucuggc

SEQ ID NO: 1715584 - RNA, 19 nt, Artificial Sequence
  Description of Artificial Sequence: Synthetic oligonucleotide
cuauuggaaccauccuggu

SEQ ID NO: 1715585 - RNA, 19 nt, Artificial Sequence
  Description of Artificial Sequence: Synthetic oligonucleotide
aucauuccuguuacaccaa

SEQ ID NO: 1715586 - RNA, 19 nt, Artificial Sequence
  Description of Artificial Sequence: Synthetic oligonucleotide
ucgcucugaggcagauuuu

SEQ ID NO: 1715587 - RNA, 19 nt, Artificial Sequence
  Description of Artificial Sequence: Synthetic oligonucleotide
ccgaguguuuugguucugg

SEQ ID NO: 1715588 - RNA, 19 nt, Artificial Sequence
  Description of Artificial Sequence: Synthetic oligonucleotide
cgcugagugacaguccugc

SEQ ID NO: 1715589 - RNA, 19 nt, Artificial Sequence
  Description of Artificial Sequence: Synthetic oligonucleotide
cuaaucccgugcgccccgc

SEQ ID NO: 1715590 - RNA, 19 nt, Artificial Sequence
  Description of Artificial Sequence: Synthetic oligonucleotide
ggggaguagaccauuucua

SEQ ID NO: 1715591 - RNA, 19 nt, Artificial Sequence
  Description of Artificial Sequence: Synthetic oligonucleotide
gugagcaucugagagcguu

SEQ ID NO: 1715592 - RNA, 19 nt, Artificial Sequence
  Description of Artificial Sequence: Synthetic oligonucleotide
caggugcuacagggcaugc

SEQ ID NO: 1715593 - RNA, 19 nt, Artificial Sequence
  Description of Artificial Sequence: Synthetic oligonucleotide
cauuccuguuacaccaauu

SEQ ID NO: 1715594 - RNA, 19 nt, Artificial Sequence
  Description of Artificial Sequence: Synthetic oligonucleotide
gauuggggaguagaccauu

SEQ ID NO: 1715595 - RNA, 19 nt, Artificial Sequence
  Description of Artificial Sequence: Synthetic oligonucleotide
ccuuccgccggugagcauc

SEQ ID NO: 1715596 - RNA, 19 nt, Artificial Sequence
  Description of Artificial Sequence: Synthetic oligonucleotide
guacugugugucgauuggu

SEQ ID NO: 1715597 - RNA, 19 nt, Artificial Sequence
  Description of Artificial Sequence: Synthetic oligonucleotide
cuucuuagaccgaguguuu

SEQ ID NO: 1715598 - RNA, 19 nt, Artificial Sequence
  Description of Artificial Sequence: Synthetic oligonucleotide
accgaguguuuugguucug

SEQ ID NO: 1715599 - RNA, 19 nt, Artificial Sequence
  Description of Artificial Sequence: Synthetic oligonucleotide
cuacgugguuuaguagaaa

SEQ ID NO: 1715600 - RNA, 19 nt, Artificial Sequence
  Description of Artificial Sequence: Synthetic oligonucleotide
ccgcaacagcuucugcacc

SEQ ID NO: 1715601 - RNA, 19 nt, Artificial Sequence
  Description of Artificial Sequence: Synthetic oligonucleotide
cgcucugaggcagauuuug

SEQ ID NO: 1715602 - RNA, 19 nt, Artificial Sequence
  Description of Artificial Sequence: Synthetic oligonucleotide
ggcagauuuugggcacacc

SEQ ID NO: 1715603 - RNA, 19 nt, Artificial Sequence
  Description of Artificial Sequence: Synthetic oligonucleotide
cagcuuaacuacgugcaau

SEQ ID NO: 1715604 - RNA, 19 nt, Artificial Sequence
  Description of Artificial Sequence: Synthetic oligonucleotide
gaaccccaugaaaucuuau

SEQ ID NO: 1715605 - RNA, 19 nt, Artificial Sequence
  Description of Artificial Sequence: Synthetic oligonucleotide
guguguccaacuguaucau

SEQ ID NO: 1715606 - RNA, 19 nt, Artificial Sequence
  Description of Artificial Sequence: Synthetic oligonucleotide
cuacuagcugaaugugauu

SEQ ID NO: 1715607 - RNA, 19 nt, Artificial Sequence
  Description of Artificial Sequence: Synthetic oligonucleotide
ugucgcucugaggcagauu

SEQ ID NO: 1715608 - RNA, 19 nt, Artificial Sequence
  Description of Artificial Sequence: Synthetic oligonucleotide
ccauuagcgcaggccaaac

SEQ ID NO: 1715609 - RNA, 19 nt, Artificial Sequence
  Description of Artificial Sequence: Synthetic oligonucleotide
ccauuagugaaagcagugu

SEQ ID NO: 1715610 - RNA, 19 nt, Artificial Sequence
  Description of Artificial Sequence: Synthetic oligonucleotide
cuuccgccggugagcaucu

SEQ ID NO: 1715611 - RNA, 19 nt, Artificial Sequence
  Description of Artificial Sequence: Synthetic oligonucleotide
gcuacagggcaugcgauuu

SEQ ID NO: 1715612 - RNA, 19 nt, Artificial Sequence
  Description of Artificial Sequence: Synthetic oligonucleotide
uccuuccgccggugagcau

SEQ ID NO: 1715613 - RNA, 19 nt, Artificial Sequence
  Description of Artificial Sequence: Synthetic oligonucleotide
gugcuuacuggaaccccau

SEQ ID NO: 1715614 - RNA, 19 nt, Artificial Sequence
  Description of Artificial Sequence: Synthetic oligonucleotide
cuacagggcaugcgauuuu

SEQ ID NO: 1715615 - RNA, 19 nt, Artificial Sequence
  Description of Artificial Sequence: Synthetic oligonucleotide
caguggcaauuagccaaaa

SEQ ID NO: 1715616 - RNA, 19 nt, Artificial Sequence
  Description of Artificial Sequence: Synthetic oligonucleotide
gccccgcaacagcuucugc

SEQ ID NO: 1715617 - RNA, 19 nt, Artificial Sequence
  Description of Artificial Sequence: Synthetic oligonucleotide
gugugucgauuggugguau

SEQ ID NO: 1715618 - RNA, 19 nt, Artificial Sequence
  Description of Artificial Sequence: Synthetic oligonucleotide
uuccgccggugagcaucug

SEQ ID NO: 1715619 - RNA, 19 nt, Artificial Sequence
  Description of Artificial Sequence: Synthetic oligonucleotide
ggacuuccacucccucuuu

SEQ ID NO: 1715620 - RNA, 19 nt, Artificial Sequence
  Description of Artificial Sequence: Synthetic oligonucleotide
cgccccgcaacagcuucug

SEQ ID NO: 1715621 - RNA, 19 nt, Artificial Sequence
  Description of Artificial Sequence: Synthetic oligonucleotide
ggugagcaucugagagcgu

SEQ ID NO: 1715622 - RNA, 19 nt, Artificial Sequence
  Description of Artificial Sequence: Synthetic oligonucleotide
ccccgcggaggccccgcuc

SEQ ID NO: 1715623 - RNA, 19 nt, Artificial Sequence
  Description of Artificial Sequence: Synthetic oligonucleotide
gugcgccccgcaacagcuu

SEQ ID NO: 1715624 - RNA, 19 nt, Artificial Sequence
  Description of Artificial Sequence: Synthetic oligonucleotide
aguauaguuauacagagcc

SEQ ID NO: 1715625 - RNA, 19 nt, Artificial Sequence
  Description of Artificial Sequence: Synthetic oligonucleotide
uauaguguaaaccagggca

SEQ ID NO: 1715626 - RNA, 19 nt, Artificial Sequence
  Description of Artificial Sequence: Synthetic oligonucleotide
aacaauauaugagaagugc

SEQ ID NO: 1715627 - RNA, 19 nt, Artificial Sequence
  Description of Artificial Sequence: Synthetic oligonucleotide
uauacugccaagcuuaggg

SEQ ID NO: 1715628 - RNA, 19 nt, Artificial Sequence
  Description of Artificial Sequence: Synthetic oligonucleotide
uuaugugaaaacuuaaugc

SEQ ID NO: 1715629 - RNA, 19 nt, Artificial Sequence
  Description of Artificial Sequence: Synthetic oligonucleotide
aacguauaaguguacacac

SEQ ID NO: 1715630 - RNA, 19 nt, Artificial Sequence
  Description of Artificial Sequence: Synthetic oligonucleotide
uauaaguguacacacagug

SEQ ID NO: 1715631 - RNA, 19 nt, Artificial Sequence
  Description of Artificial Sequence: Synthetic oligonucleotide
uugaauguugucaugagug

SEQ ID NO: 1715632 - RNA, 19 nt, Artificial Sequence
  Description of Artificial Sequence: Synthetic oligonucleotide
uaugugaaaacuuaaugca

SEQ ID NO: 1715633 - RNA, 19 nt, Artificial Sequence
  Description of Artificial Sequence: Synthetic oligonucleotide
aaugauagcuccuuagaug

SEQ ID NO: 1715634 - RNA, 19 nt, Artificial Sequence
  Description of Artificial Sequence: Synthetic oligonucleotide
aauucuaucacuagaguag

SEQ ID NO: 1715635 - RNA, 19 nt, Artificial Sequence
  Description of Artificial Sequence: Synthetic oligonucleotide
auauaugagaagugcaggc

SEQ ID NO: 1715636 - RNA, 19 nt, Artificial Sequence
  Description of Artificial Sequence: Synthetic oligonucleotide
ugucauauaguguaaacca

SEQ ID NO: 1715637 - RNA, 19 nt, Artificial Sequence
  Description of Artificial Sequence: Synthetic oligonucleotide
auggguauuacuuucaucu

SEQ ID NO: 1715638 - RNA, 19 nt, Artificial Sequence
  Description of Artificial Sequence: Synthetic oligonucleotide
ugcauaaaacaauauauga

SEQ ID NO: 1715639 - RNA, 19 nt, Artificial Sequence
  Description of Artificial Sequence: Synthetic oligonucleotide
uuauacagagccugaaacg

SEQ ID NO: 1715640 - RNA, 19 nt, Artificial Sequence
  Description of Artificial Sequence: Synthetic oligonucleotide
uaggaguauaguuauacag

SEQ ID NO: 1715641 - RNA, 19 nt, Artificial Sequence
  Description of Artificial Sequence: Synthetic oligonucleotide
uauacaaucgaacguauaa

SEQ ID NO: 1715642 - RNA, 19 nt, Artificial Sequence
  Description of Artificial Sequence: Synthetic oligonucleotide
gauuuuaugaucacugugc

SEQ ID NO: 1715643 - RNA, 19 nt, Artificial Sequence
  Description of Artificial Sequence: Synthetic oligonucleotide
uuaaaugauagcuccuuag

SEQ ID NO: 1715644 - RNA, 19 nt, Artificial Sequence
  Description of Artificial Sequence: Synthetic oligonucleotide
agugcaggcaaacaauagc

SEQ ID NO: 1715645 - RNA, 19 nt, Artificial Sequence
  Description of Artificial Sequence: Synthetic oligonucleotide
uauacagagccugaaacgg

SEQ ID NO: 1715646 - RNA, 19 nt, Artificial Sequence
  Description of Artificial Sequence: Synthetic oligonucleotide
ugcaaauuuuacaacacga

SEQ ID NO: 1715647 - RNA, 19 nt, Artificial Sequence
  Description of Artificial Sequence: Synthetic oligonucleotide
augacuucuacauaggaga

SEQ ID NO: 1715648 - RNA, 19 nt, Artificial Sequence
  Description of Artificial Sequence: Synthetic oligonucleotide
uauaguuauacagagccug

SEQ ID NO: 1715649 - RNA, 19 nt, Artificial Sequence
  Description of Artificial Sequence: Synthetic oligonucleotide
guauaguugucauauagug

SEQ ID NO: 1715650 - RNA, 19 nt, Artificial Sequence
  Description of Artificial Sequence: Synthetic oligonucleotide
aaacacuaagagcucauug

SEQ ID NO: 1715651 - RNA, 19 nt, Artificial Sequence
  Description of Artificial Sequence: Synthetic oligonucleotide
uucucuacguaugagauug

SEQ ID NO: 1715652 - RNA, 19 nt, Artificial Sequence
  Description of Artificial Sequence: Synthetic oligonucleotide
ugugaauucuaucacuaga

SEQ ID NO: 1715653 - RNA, 19 nt, Artificial Sequence
  Description of Artificial Sequence: Synthetic oligonucleotide
agccuuaacacucaggaug

SEQ ID NO: 1715654 - RNA, 19 nt, Artificial Sequence
  Description of Artificial Sequence: Synthetic oligonucleotide
cauauaguguaaaccaggg

SEQ ID NO: 1715655 - RNA, 19 nt, Artificial Sequence
  Description of Artificial Sequence: Synthetic oligonucleotide
auagcugaaguauaguugu

SEQ ID NO: 1715656 - RNA, 19 nt, Artificial Sequence
  Description of Artificial Sequence: Synthetic oligonucleotide
caauauaugagaagugcag

SEQ ID NO: 1715657 - RNA, 19 nt, Artificial Sequence
  Description of Artificial Sequence: Synthetic oligonucleotide
agcaaugcaaauuuuacaa

SEQ ID NO: 1715658 - RNA, 19 nt, Artificial Sequence
  Description of Artificial Sequence: Synthetic oligonucleotide
aaacuauagcauuucagaa

SEQ ID NO: 1715659 - RNA, 19 nt, Artificial Sequence
  Description of Artificial Sequence: Synthetic oligonucleotide
augauagcuccuuagaugu

SEQ ID NO: 1715660 - RNA, 19 nt, Artificial Sequence
  Description of Artificial Sequence: Synthetic oligonucleotide
gcuuugaaaucauagauag

SEQ ID NO: 1715661 - RNA, 19 nt, Artificial Sequence
  Description of Artificial Sequence: Synthetic oligonucleotide
uuuaugaucacugugcaua

SEQ ID NO: 1715662 - RNA, 19 nt, Artificial Sequence
  Description of Artificial Sequence: Synthetic oligonucleotide
uaaaugauagcuccuuaga

SEQ ID NO: 1715663 - RNA, 19 nt, Artificial Sequence
  Description of Artificial Sequence: Synthetic oligonucleotide
aacuauagcauuucagaaa

SEQ ID NO: 1715664 - RNA, 19 nt, Artificial Sequence
  Description of Artificial Sequence: Synthetic oligonucleotide
acuauagcauuucagaaaa

SEQ ID NO: 1715665 - RNA, 19 nt, Artificial Sequence
  Description of Artificial Sequence: Synthetic oligonucleotide
auaauccuugcuaaagucc

SEQ ID NO: 1715666 - RNA, 19 nt, Artificial Sequence
  Description of Artificial Sequence: Synthetic oligonucleotide
auauaguguaaaccagggc

SEQ ID NO: 1715667 - RNA, 19 nt, Artificial Sequence
  Description of Artificial Sequence: Synthetic oligonucleotide
caugagugaacgcaggacg

SEQ ID NO: 1715668 - RNA, 19 nt, Artificial Sequence
  Description of Artificial Sequence: Synthetic oligonucleotide
aaaugauagcuccuuagau

SEQ ID NO: 1715669 - RNA, 19 nt, Artificial Sequence
  Description of Artificial Sequence: Synthetic oligonucleotide
uuaccuauggguauuacuu

SEQ ID NO: 1715670 - RNA, 19 nt, Artificial Sequence
  Description of Artificial Sequence: Synthetic oligonucleotide
guuauacagagccugaaac

SEQ ID NO: 1715671 - RNA, 19 nt, Artificial Sequence
  Description of Artificial Sequence: Synthetic oligonucleotide
uauggcuucgccaaucucu

SEQ ID NO: 1715672 - RNA, 19 nt, Artificial Sequence
  Description of Artificial Sequence: Synthetic oligonucleotide
uauuacuuucaucucuuug

SEQ ID NO: 1715673 - RNA, 19 nt, Artificial Sequence
  Description of Artificial Sequence: Synthetic oligonucleotide
aaauauacugccaagcuua

SEQ ID NO: 1715674 - RNA, 19 nt, Artificial Sequence
  Description of Artificial Sequence: Synthetic oligonucleotide
uacguaugagauuggaaag

SEQ ID NO: 1715675 - RNA, 19 nt, Artificial Sequence
  Description of Artificial Sequence: Synthetic oligonucleotide
uacaaucgaacguauaagu

SEQ ID NO: 1715676 - RNA, 19 nt, Artificial Sequence
  Description of Artificial Sequence: Synthetic oligonucleotide
uauaguugucauauagugu

SEQ ID NO: 1715677 - RNA, 19 nt, Artificial Sequence
  Description of Artificial Sequence: Synthetic oligonucleotide
uaaaccuuaugugaaaacu

SEQ ID NO: 1715678 - RNA, 19 nt, Artificial Sequence
  Description of Artificial Sequence: Synthetic oligonucleotide
ugugaaaacuuaaugcaau

SEQ ID NO: 1715679 - RNA, 19 nt, Artificial Sequence
  Description of Artificial Sequence: Synthetic oligonucleotide
aacagauaaauaaacacua

SEQ ID NO: 1715680 - RNA, 19 nt, Artificial Sequence
  Description of Artificial Sequence: Synthetic oligonucleotide
cucuauaaaauaaugugga

SEQ ID NO: 1715681 - RNA, 19 nt, Artificial Sequence
  Description of Artificial Sequence: Synthetic oligonucleotide
aacaauagcugaaguauag

SEQ ID NO: 1715682 - RNA, 19 nt, Artificial Sequence
  Description of Artificial Sequence: Synthetic oligonucleotide
aaugaacuuuccuacucgu

SEQ ID NO: 1715683 - RNA, 19 nt, Artificial Sequence
  Description of Artificial Sequence: Synthetic oligonucleotide
uugucauauaguguaaacc

SEQ ID NO: 1715684 - RNA, 19 nt, Artificial Sequence
  Description of Artificial Sequence: Synthetic oligonucleotide
gauuuuaccuucauaccag

SEQ ID NO: 1715685 - RNA, 19 nt, Artificial Sequence
  Description of Artificial Sequence: Synthetic oligonucleotide
aauaaacacuaagagcuca

SEQ ID NO: 1715686 - RNA, 19 nt, Artificial Sequence
  Description of Artificial Sequence: Synthetic oligonucleotide
aagaugccuugccuguugc

SEQ ID NO: 1715687 - RNA, 19 nt, Artificial Sequence
  Description of Artificial Sequence: Synthetic oligonucleotide
uucuuccaaagucagucag

SEQ ID NO: 1715688 - RNA, 19 nt, Artificial Sequence
  Description of Artificial Sequence: Synthetic oligonucleotide
ucauaauccuugcuaaagu

SEQ ID NO: 1715689 - RNA, 19 nt, Artificial Sequence
  Description of Artificial Sequence: Synthetic oligonucleotide
ugaaccuuaccuaugggua

SEQ ID NO: 1715690 - RNA, 19 nt, Artificial Sequence
  Description of Artificial Sequence: Synthetic oligonucleotide
uuuaccuucauaccaguuu

SEQ ID NO: 1715691 - RNA, 19 nt, Artificial Sequence
  Description of Artificial Sequence: Synthetic oligonucleotide
gaugacuucuacauaggag

SEQ ID NO: 1715692 - RNA, 19 nt, Artificial Sequence
  Description of Artificial Sequence: Synthetic oligonucleotide
acuaagagcucauugucca

SEQ ID NO: 1715693 - RNA, 19 nt, Artificial Sequence
  Description of Artificial Sequence: Synthetic oligonucleotide
cuaaaguccagccuuaaca

SEQ ID NO: 1715694 - RNA, 19 nt, Artificial Sequence
  Description of Artificial Sequence: Synthetic oligonucleotide
auagauagcuuuugcaggu

SEQ ID NO: 1715695 - RNA, 19 nt, Artificial Sequence
  Description of Artificial Sequence: Synthetic oligonucleotide
ggaguauaguuauacagag

SEQ ID NO: 1715696 - RNA, 19 nt, Artificial Sequence
  Description of Artificial Sequence: Synthetic oligonucleotide
aacacgauuuguccugcag

SEQ ID NO: 1715697 - RNA, 19 nt, Artificial Sequence
  Description of Artificial Sequence: Synthetic oligonucleotide
uccuuauacaaucgaacgu

SEQ ID NO: 1715698 - RNA, 19 nt, Artificial Sequence
  Description of Artificial Sequence: Synthetic oligonucleotide
uuauuuguccuuauacaau

SEQ ID NO: 1715699 - RNA, 19 nt, Artificial Sequence
  Description of Artificial Sequence: Synthetic oligonucleotide
uaauucuaucacccuuucg

SEQ ID NO: 1715700 - RNA, 19 nt, Artificial Sequence
  Description of Artificial Sequence: Synthetic oligonucleotide
gacgauguggcuuauugga

SEQ ID NO: 1715701 - RNA, 19 nt, Artificial Sequence
  Description of Artificial Sequence: Synthetic oligonucleotide
ugaauucuaucacuagagu

SEQ ID NO: 1715702 - RNA, 19 nt, Artificial Sequence
  Description of Artificial Sequence: Synthetic oligonucleotide
accaguuuugaucaacucu

SEQ ID NO: 1715703 - RNA, 19 nt, Artificial Sequence
  Description of Artificial Sequence: Synthetic oligonucleotide
aguuucucuacguaugaga

SEQ ID NO: 1715704 - RNA, 19 nt, Artificial Sequence
  Description of Artificial Sequence: Synthetic oligonucleotide
ucgauuuuccugaggaugu

SEQ ID NO: 1715705 - RNA, 19 nt, Artificial Sequence
  Description of Artificial Sequence: Synthetic oligonucleotide
gaauucuaucacuagagua

SEQ ID NO: 1715706 - RNA, 19 nt, Artificial Sequence
  Description of Artificial Sequence: Synthetic oligonucleotide
auauaaaauagcaaugcaa

SEQ ID NO: 1715707 - RNA, 19 nt, Artificial Sequence
  Description of Artificial Sequence: Synthetic oligonucleotide
aguacucuauaaaauaaug

SEQ ID NO: 1715708 - RNA, 19 nt, Artificial Sequence
  Description of Artificial Sequence: Synthetic oligonucleotide
auaguguaaaccagggcac

SEQ ID NO: 1715709 - RNA, 19 nt, Artificial Sequence
  Description of Artificial Sequence: Synthetic oligonucleotide
aucauaauccuugcuaaag

SEQ ID NO: 1715710 - RNA, 19 nt, Artificial Sequence
  Description of Artificial Sequence: Synthetic oligonucleotide
agccugaaacgguucaccc

SEQ ID NO: 1715711 - RNA, 19 nt, Artificial Sequence
  Description of Artificial Sequence: Synthetic oligonucleotide
uuagggugaaaaugcaaac

SEQ ID NO: 1715712 - RNA, 19 nt, Artificial Sequence
  Description of Artificial Sequence: Synthetic oligonucleotide
uucuggucgauuuuccuga

SEQ ID NO: 1715713 - RNA, 19 nt, Artificial Sequence
  Description of Artificial Sequence: Synthetic oligonucleotide
ugaugacuucuacauagga

SEQ ID NO: 1715714 - RNA, 19 nt, Artificial Sequence
  Description of Artificial Sequence: Synthetic oligonucleotide
uacguuuccccuucguucc

SEQ ID NO: 1715715 - RNA, 19 nt, Artificial Sequence
  Description of Artificial Sequence: Synthetic oligonucleotide
cuacguaugagauuggaaa

SEQ ID NO: 1715716 - RNA, 19 nt, Artificial Sequence
  Description of Artificial Sequence: Synthetic oligonucleotide
uauaugagaagugcaggca

SEQ ID NO: 1715717 - RNA, 19 nt, Artificial Sequence
  Description of Artificial Sequence: Synthetic oligonucleotide
uccuacucguucuagauuu

SEQ ID NO: 1715718 - RNA, 19 nt, Artificial Sequence
  Description of Artificial Sequence: Synthetic oligonucleotide
uggcuuauuggaacuuagg

SEQ ID NO: 1715719 - RNA, 19 nt, Artificial Sequence
  Description of Artificial Sequence: Synthetic oligonucleotide
uuacaacacgauuuguccu

SEQ ID NO: 1715720 - RNA, 19 nt, Artificial Sequence
  Description of Artificial Sequence: Synthetic oligonucleotide
aaaguccagccuuaacacu

SEQ ID NO: 1715721 - RNA, 19 nt, Artificial Sequence
  Description of Artificial Sequence: Synthetic oligonucleotide
ucccaaugaacuuuccuac

SEQ ID NO: 1715722 - RNA, 19 nt, Artificial Sequence
  Description of Artificial Sequence: Synthetic oligonucleotide
agguguuaguuucucuacg

SEQ ID NO: 1715723 - RNA, 19 nt, Artificial Sequence
  Description of Artificial Sequence: Synthetic oligonucleotide
auacaaucgaacguauaag

SEQ ID NO: 1715724 - RNA, 19 nt, Artificial Sequence
  Description of Artificial Sequence: Synthetic oligonucleotide
uuggcuauggcuucgccaa

SEQ ID NO: 1715725 - RNA, 19 nt, Artificial Sequence
  Description of Artificial Sequence: Synthetic oligonucleotide
acucguucuagauuuuaug

SEQ ID NO: 1715726 - RNA, 19 nt, Artificial Sequence
  Description of Artificial Sequence: Synthetic oligonucleotide
guggcuaaaccuuauguga

SEQ ID NO: 1715727 - RNA, 19 nt, Artificial Sequence
  Description of Artificial Sequence: Synthetic oligonucleotide
guuaguuucucuacguaug

SEQ ID NO: 1715728 - RNA, 19 nt, Artificial Sequence
  Description of Artificial Sequence: Synthetic oligonucleotide
auguugucaugagugaacg

SEQ ID NO: 1715729 - RNA, 19 nt, Artificial Sequence
  Description of Artificial Sequence: Synthetic oligonucleotide
gaacguauaaguguacaca

SEQ ID NO: 1715730 - RNA, 19 nt, Artificial Sequence
  Description of Artificial Sequence: Synthetic oligonucleotide
ugaacgcaggacgaugugg

SEQ ID NO: 1715731 - RNA, 19 nt, Artificial Sequence
  Description of Artificial Sequence: Synthetic oligonucleotide
ugcaaacuauagcauuuca

SEQ ID NO: 1715732 - RNA, 19 nt, Artificial Sequence
  Description of Artificial Sequence: Synthetic oligonucleotide
acuagaguagcuguggggu

SEQ ID NO: 1715733 - RNA, 19 nt, Artificial Sequence
  Description of Artificial Sequence: Synthetic oligonucleotide
ucuacguaugagauuggaa

SEQ ID NO: 1715734 - RNA, 19 nt, Artificial Sequence
  Description of Artificial Sequence: Synthetic oligonucleotide
ggcuuauuggaacuuaggc

SEQ ID NO: 1715735 - RNA, 19 nt, Artificial Sequence
  Description of Artificial Sequence: Synthetic oligonucleotide
cuuagggugaaaaugcaaa

SEQ ID NO: 1715736 - RNA, 19 nt, Artificial Sequence
  Description of Artificial Sequence: Synthetic oligonucleotide
cagugaaccuuaccuaugg

SEQ ID NO: 1715737 - RNA, 19 nt, Artificial Sequence
  Description of Artificial Sequence: Synthetic oligonucleotide
gugcauaaaacaauauaug

SEQ ID NO: 1715738 - RNA, 19 nt, Artificial Sequence
  Description of Artificial Sequence: Synthetic oligonucleotide
cucguucuagauuuuauga

SEQ ID NO: 1715739 - RNA, 19 nt, Artificial Sequence
  Description of Artificial Sequence: Synthetic oligonucleotide
cuacauaggagacagggaa

SEQ ID NO: 1715740 - RNA, 19 nt, Artificial Sequence
  Description of Artificial Sequence: Synthetic oligonucleotide
ggauuuuaccuucauacca

SEQ ID NO: 1715741 - RNA, 19 nt, Artificial Sequence
  Description of Artificial Sequence: Synthetic oligonucleotide
guugucaugagugaacgca

SEQ ID NO: 1715742 - RNA, 19 nt, Artificial Sequence
  Description of Artificial Sequence: Synthetic oligonucleotide
acaauauaugagaagugca

SEQ ID NO: 1715743 - RNA, 19 nt, Artificial Sequence
  Description of Artificial Sequence: Synthetic oligonucleotide
uguauuuggcuauggcuuc

SEQ ID NO: 1715744 - RNA, 19 nt, Artificial Sequence
  Description of Artificial Sequence: Synthetic oligonucleotide
cacgauuuguccugcagug

SEQ ID NO: 1715745 - RNA, 19 nt, Artificial Sequence
  Description of Artificial Sequence: Synthetic oligonucleotide
agggugaaaaugcaaacua

SEQ ID NO: 1715746 - RNA, 19 nt, Artificial Sequence
  Description of Artificial Sequence: Synthetic oligonucleotide
aauauacugccaagcuuag

SEQ ID NO: 1715747 - RNA, 19 nt, Artificial Sequence
  Description of Artificial Sequence: Synthetic oligonucleotide
aaucgaacguauaagugua

SEQ ID NO: 1715748 - RNA, 19 nt, Artificial Sequence
  Description of Artificial Sequence: Synthetic oligonucleotide
agaugucugagcuuugaaa

SEQ ID NO: 1715749 - RNA, 19 nt, Artificial Sequence
  Description of Artificial Sequence: Synthetic oligonucleotide
ucguucuagauuuuaugau

SEQ ID NO: 1715750 - RNA, 19 nt, Artificial Sequence
  Description of Artificial Sequence: Synthetic oligonucleotide
gucauauaguguaaaccag

SEQ ID NO: 1715751 - RNA, 19 nt, Artificial Sequence
  Description of Artificial Sequence: Synthetic oligonucleotide
uggcuaaaccuuaugugaa

SEQ ID NO: 1715752 - RNA, 19 nt, Artificial Sequence
  Description of Artificial Sequence: Synthetic oligonucleotide
agugaaccuuaccuauggg

SEQ ID NO: 1715753 - RNA, 19 nt, Artificial Sequence
  Description of Artificial Sequence: Synthetic oligonucleotide
aaaccuuaugugaaaacuu

SEQ ID NO: 1715754 - RNA, 19 nt, Artificial Sequence
  Description of Artificial Sequence: Synthetic oligonucleotide
uacuaacacugcuuuuaag

SEQ ID NO: 1715755 - RNA, 19 nt, Artificial Sequence
  Description of Artificial Sequence: Synthetic oligonucleotide
aggguaaucgucagcuacc

SEQ ID NO: 1715756 - RNA, 19 nt, Artificial Sequence
  Description of Artificial Sequence: Synthetic oligonucleotide
gcauugaaguuguauuugg

SEQ ID NO: 1715757 - RNA, 19 nt, Artificial Sequence
  Description of Artificial Sequence: Synthetic oligonucleotide
aggaguauaguuauacaga

SEQ ID NO: 1715758 - RNA, 19 nt, Artificial Sequence
  Description of Artificial Sequence: Synthetic oligonucleotide
aguauaguugucauauagu

SEQ ID NO: 1715759 - RNA, 19 nt, Artificial Sequence
  Description of Artificial Sequence: Synthetic oligonucleotide
gagguguuaguuucucuac

SEQ ID NO: 1715760 - RNA, 19 nt, Artificial Sequence
  Description of Artificial Sequence: Synthetic oligonucleotide
cagcauaugauuuauuugu

SEQ ID NO: 1715761 - RNA, 19 nt, Artificial Sequence
  Description of Artificial Sequence: Synthetic oligonucleotide
acaaucgaacguauaagug

SEQ ID NO: 1715762 - RNA, 19 nt, Artificial Sequence
  Description of Artificial Sequence: Synthetic oligonucleotide
cacuagaguagcugugggg

SEQ ID NO: 1715763 - RNA, 19 nt, Artificial Sequence
  Description of Artificial Sequence: Synthetic oligonucleotide
auuuguccuuauacaaucg

SEQ ID NO: 1715764 - RNA, 19 nt, Artificial Sequence
  Description of Artificial Sequence: Synthetic oligonucleotide
cauaugauuuauuuguccu

SEQ ID NO: 1715765 - RNA, 19 nt, Artificial Sequence
  Description of Artificial Sequence: Synthetic oligonucleotide
uagggugaaaaugcaaacu

SEQ ID NO: 1715766 - RNA, 19 nt, Artificial Sequence
  Description of Artificial Sequence: Synthetic oligonucleotide
guacguuuccccuucguuc

SEQ ID NO: 1715767 - RNA, 19 nt, Artificial Sequence
  Description of Artificial Sequence: Synthetic oligonucleotide
acacgauuuguccugcagu

SEQ ID NO: 1715768 - RNA, 19 nt, Artificial Sequence
  Description of Artificial Sequence: Synthetic oligonucleotide
gaacgcaggacgauguggc

SEQ ID NO: 1715769 - RNA, 19 nt, Artificial Sequence
  Description of Artificial Sequence: Synthetic oligonucleotide
uuauacaaucgaacguaua

SEQ ID NO: 1715770 - RNA, 19 nt, Artificial Sequence
  Description of Artificial Sequence: Synthetic oligonucleotide
aagugcaggcaaacaauag

SEQ ID NO: 1715771 - RNA, 19 nt, Artificial Sequence
  Description of Artificial Sequence: Synthetic oligonucleotide
ucuuaaaugauagcuccuu

SEQ ID NO: 1715772 - RNA, 19 nt, Artificial Sequence
  Description of Artificial Sequence: Synthetic oligonucleotide
agcauaugauuuauuuguc

SEQ ID NO: 1715773 - RNA, 19 nt, Artificial Sequence
  Description of Artificial Sequence: Synthetic oligonucleotide
ucugguacguuuccccuuc

SEQ ID NO: 1715774 - RNA, 19 nt, Artificial Sequence
  Description of Artificial Sequence: Synthetic oligonucleotide
cugugaauucuaucacuag

SEQ ID NO: 1715775 - RNA, 19 nt, Artificial Sequence
  Description of Artificial Sequence: Synthetic oligonucleotide
acaacacgauuuguccugc

SEQ ID NO: 1715776 - RNA, 19 nt, Artificial Sequence
  Description of Artificial Sequence: Synthetic oligonucleotide
uuggaacuuaggcugugaa

SEQ ID NO: 1715777 - RNA, 19 nt, Artificial Sequence
  Description of Artificial Sequence: Synthetic oligonucleotide
aaccuuaugugaaaacuua

SEQ ID NO: 1715778 - RNA, 19 nt, Artificial Sequence
  Description of Artificial Sequence: Synthetic oligonucleotide
ucgaacguauaaguguaca

SEQ ID NO: 1715779 - RNA, 19 nt, Artificial Sequence
  Description of Artificial Sequence: Synthetic oligonucleotide
aucacccuuucgcagggag

SEQ ID NO: 1715780 - RNA, 19 nt, Artificial Sequence
  Description of Artificial Sequence: Synthetic oligonucleotide
cacguuugugucugcauug

SEQ ID NO: 1715781 - RNA, 19 nt, Artificial Sequence
  Description of Artificial Sequence: Synthetic oligonucleotide
cguauaaguguacacacag

SEQ ID NO: 1715782 - RNA, 19 nt, Artificial Sequence
  Description of Artificial Sequence: Synthetic oligonucleotide
auuccuaggaguauaguua

SEQ ID NO: 1715783 - RNA, 19 nt, Artificial Sequence
  Description of Artificial Sequence: Synthetic oligonucleotide
cucauuguccacgaugcug

SEQ ID NO: 1715784 - RNA, 19 nt, Artificial Sequence
  Description of Artificial Sequence: Synthetic oligonucleotide
uguugucaugagugaacgc

SEQ ID NO: 1715785 - RNA, 19 nt, Artificial Sequence
  Description of Artificial Sequence: Synthetic oligonucleotide
aguuccacguuugugucug

SEQ ID NO: 1715786 - RNA, 19 nt, Artificial Sequence
  Description of Artificial Sequence: Synthetic oligonucleotide
caaucgaacguauaagugu

SEQ ID NO: 1715787 - RNA, 19 nt, Artificial Sequence
  Description of Artificial Sequence: Synthetic oligonucleotide
uuaggcugugaauucuauc

SEQ ID NO: 1715788 - RNA, 19 nt, Artificial Sequence
  Description of Artificial Sequence: Synthetic oligonucleotide
uaaucgucagcuaccuuuu

SEQ ID NO: 1715789 - RNA, 19 nt, Artificial Sequence
  Description of Artificial Sequence: Synthetic oligonucleotide
auaaguguacacacaguga

SEQ ID NO: 1715790 - RNA, 19 nt, Artificial Sequence
  Description of Artificial Sequence: Synthetic oligonucleotide
uucccgagaugcuacuucu

SEQ ID NO: 1715791 - RNA, 19 nt, Artificial Sequence
  Description of Artificial Sequence: Synthetic oligonucleotide
uacucguucuagauuuuau

SEQ ID NO: 1715792 - RNA, 19 nt, Artificial Sequence
  Description of Artificial Sequence: Synthetic oligonucleotide
auacugccaagcuuagggu

SEQ ID NO: 1715793 - RNA, 19 nt, Artificial Sequence
  Description of Artificial Sequence: Synthetic oligonucleotide
gggauuuuaccuucauacc

SEQ ID NO: 1715794 - RNA, 19 nt, Artificial Sequence
  Description of Artificial Sequence: Synthetic oligonucleotide
aucgucagcuaccuuuugu

SEQ ID NO: 1715795 - RNA, 19 nt, Artificial Sequence
  Description of Artificial Sequence: Synthetic oligonucleotide
ucucuacguaugagauugg

SEQ ID NO: 1715796 - RNA, 19 nt, Artificial Sequence
  Description of Artificial Sequence: Synthetic oligonucleotide
guaaucgucagcuaccuuu

SEQ ID NO: 1715797 - RNA, 19 nt, Artificial Sequence
  Description of Artificial Sequence: Synthetic oligonucleotide
ugcugaugauuauauuuua

SEQ ID NO: 1715798 - RNA, 19 nt, Artificial Sequence
  Description of Artificial Sequence: Synthetic oligonucleotide
uucuaucacuagaguagcu

SEQ ID NO: 1715799 - RNA, 19 nt, Artificial Sequence
  Description of Artificial Sequence: Synthetic oligonucleotide
agcugaaguauaguuguca

SEQ ID NO: 1715800 - RNA, 19 nt, Artificial Sequence
  Description of Artificial Sequence: Synthetic oligonucleotide
aguucuggucgauuuuccu

SEQ ID NO: 1715801 - RNA, 19 nt, Artificial Sequence
  Description of Artificial Sequence: Synthetic oligonucleotide
uggaacuuaggcugugaau

SEQ ID NO: 1715802 - RNA, 19 nt, Artificial Sequence
  Description of Artificial Sequence: Synthetic oligonucleotide
uagaugucugagcuuugaa

SEQ ID NO: 1715803 - RNA, 19 nt, Artificial Sequence
  Description of Artificial Sequence: Synthetic oligonucleotide
cacucugccguagugcucc

SEQ ID NO: 1715804 - RNA, 19 nt, Artificial Sequence
  Description of Artificial Sequence: Synthetic oligonucleotide
aguuuugaucaacucuuuu

SEQ ID NO: 1715805 - RNA, 19 nt, Artificial Sequence
  Description of Artificial Sequence: Synthetic oligonucleotide
cuuucgcagggagaguucc

SEQ ID NO: 1715806 - RNA, 19 nt, Artificial Sequence
  Description of Artificial Sequence: Synthetic oligonucleotide
ggacagaacaccuuccaga

SEQ ID NO: 1715807 - RNA, 19 nt, Artificial Sequence
  Description of Artificial Sequence: Synthetic oligonucleotide
cacuaggcaaacuugugaa

SEQ ID NO: 1715808 - RNA, 19 nt, Artificial Sequence
  Description of Artificial Sequence: Synthetic oligonucleotide
acacagugaaccuuaccua

SEQ ID NO: 1715809 - RNA, 19 nt, Artificial Sequence
  Description of Artificial Sequence: Synthetic oligonucleotide
acguaugagauuggaaaga

SEQ ID NO: 1715810 - RNA, 19 nt, Artificial Sequence
  Description of Artificial Sequence: Synthetic oligonucleotide
cuaggaguauaguuauaca

SEQ ID NO: 1715811 - RNA, 19 nt, Artificial Sequence
  Description of Artificial Sequence: Synthetic oligonucleotide
cuuaacacucaggaugcuc

SEQ ID NO: 1715812 - RNA, 19 nt, Artificial Sequence
  Description of Artificial Sequence: Synthetic oligonucleotide
ggacgauguggcuuauugg

SEQ ID NO: 1715813 - RNA, 19 nt, Artificial Sequence
  Description of Artificial Sequence: Synthetic oligonucleotide
gauguggcuuauuggaacu

SEQ ID NO: 1715814 - RNA, 19 nt, Artificial Sequence
  Description of Artificial Sequence: Synthetic oligonucleotide
acuaggcaaacuugugaaa

SEQ ID NO: 1715815 - RNA, 19 nt, Artificial Sequence
  Description of Artificial Sequence: Synthetic oligonucleotide
agagccugaaacgguucac

SEQ ID NO: 1715816 - RNA, 19 nt, Artificial Sequence
  Description of Artificial Sequence: Synthetic oligonucleotide
ucgcagggagaguuccacg

SEQ ID NO: 1715817 - RNA, 19 nt, Artificial Sequence
  Description of Artificial Sequence: Synthetic oligonucleotide
ugcuccugaaguacucuau

SEQ ID NO: 1715818 - RNA, 19 nt, Artificial Sequence
  Description of Artificial Sequence: Synthetic oligonucleotide
uccccuucguucccgagau

SEQ ID NO: 1715819 - RNA, 19 nt, Artificial Sequence
  Description of Artificial Sequence: Synthetic oligonucleotide
uaacacucaggaugcuccu

SEQ ID NO: 1715820 - RNA, 19 nt, Artificial Sequence
  Description of Artificial Sequence: Synthetic oligonucleotide
ccuaggaguauaguuauac

SEQ ID NO: 1715821 - RNA, 19 nt, Artificial Sequence
  Description of Artificial Sequence: Synthetic oligonucleotide
auaguuauacagagccuga

SEQ ID NO: 1715822 - RNA, 19 nt, Artificial Sequence
  Description of Artificial Sequence: Synthetic oligonucleotide
auauacugccaagcuuagg

SEQ ID NO: 1715823 - RNA, 19 nt, Artificial Sequence
  Description of Artificial Sequence: Synthetic oligonucleotide
auggcuucgccaaucucuc

SEQ ID NO: 1715824 - RNA, 19 nt, Artificial Sequence
  Description of Artificial Sequence: Synthetic oligonucleotide
uaccuauggguauuacuuu

SEQ ID NO: 1715825 - RNA, 19 nt, Artificial Sequence
  Description of Artificial Sequence: Synthetic oligonucleotide
ggaaagaugcccacucugc

SEQ ID NO: 1715826 - RNA, 19 nt, Artificial Sequence
  Description of Artificial Sequence: Synthetic oligonucleotide
agugaacgcaggacgaugu

SEQ ID NO: 1715827 - RNA, 19 nt, Artificial Sequence
  Description of Artificial Sequence: Synthetic oligonucleotide
gugaaccuuaccuaugggu

SEQ ID NO: 1715828 - RNA, 19 nt, Artificial Sequence
  Description of Artificial Sequence: Synthetic oligonucleotide
uauuggaacuuaggcugug

SEQ ID NO: 1715829 - RNA, 19 nt, Artificial Sequence
  Description of Artificial Sequence: Synthetic oligonucleotide
agauagcuuuugcagguua

SEQ ID NO: 1715830 - RNA, 19 nt, Artificial Sequence
  Description of Artificial Sequence: Synthetic oligonucleotide
uuccuacucguucuagauu

SEQ ID NO: 1715831 - RNA, 19 nt, Artificial Sequence
  Description of Artificial Sequence: Synthetic oligonucleotide
guggcuuauuggaacuuag

SEQ ID NO: 1715832 - RNA, 19 nt, Artificial Sequence
  Description of Artificial Sequence: Synthetic oligonucleotide
gagugaacgcaggacgaug

SEQ ID NO: 1715833 - RNA, 19 nt, Artificial Sequence
  Description of Artificial Sequence: Synthetic oligonucleotide
aucgaacguauaaguguac

SEQ ID NO: 1715834 - RNA, 19 nt, Artificial Sequence
  Description of Artificial Sequence: Synthetic oligonucleotide
gaagugcaggcaaacaaua

SEQ ID NO: 1715835 - RNA, 19 nt, Artificial Sequence
  Description of Artificial Sequence: Synthetic oligonucleotide
uaguuauacagagccugaa

SEQ ID NO: 1715836 - RNA, 19 nt, Artificial Sequence
  Description of Artificial Sequence: Synthetic oligonucleotide
acguuuccccuucguuccc

SEQ ID NO: 1715837 - RNA, 19 nt, Artificial Sequence
  Description of Artificial Sequence: Synthetic oligonucleotide
aguugucauauaguguaaa

SEQ ID NO: 1715838 - RNA, 19 nt, Artificial Sequence
  Description of Artificial Sequence: Synthetic oligonucleotide
gcaaacaauagcugaagua

SEQ ID NO: 1715839 - RNA, 19 nt, Artificial Sequence
  Description of Artificial Sequence: Synthetic oligonucleotide
uggagguguuaguuucucu

SEQ ID NO: 1715840 - RNA, 19 nt, Artificial Sequence
  Description of Artificial Sequence: Synthetic oligonucleotide
cuuaaaugauagcuccuua

SEQ ID NO: 1715841 - RNA, 19 nt, Artificial Sequence
  Description of Artificial Sequence: Synthetic oligonucleotide
cguucuagauuuuaugauc

SEQ ID NO: 1715842 - RNA, 19 nt, Artificial Sequence
  Description of Artificial Sequence: Synthetic oligonucleotide
uugcuaaaguccagccuua

SEQ ID NO: 1715843 - RNA, 19 nt, Artificial Sequence
  Description of Artificial Sequence: Synthetic oligonucleotide
uucccgggauuuuaccuuc

SEQ ID NO: 1715844 - RNA, 19 nt, Artificial Sequence
  Description of Artificial Sequence: Synthetic oligonucleotide
acgaugcugaugauuauau

SEQ ID NO: 1715845 - RNA, 19 nt, Artificial Sequence
  Description of Artificial Sequence: Synthetic oligonucleotide
uucgcagggagaguuccac

SEQ ID NO: 1715846 - RNA, 19 nt, Artificial Sequence
  Description of Artificial Sequence: Synthetic oligonucleotide
gcuccuuagaugucugagc

SEQ ID NO: 1715847 - RNA, 19 nt, Artificial Sequence
  Description of Artificial Sequence: Synthetic oligonucleotide
uugcuucccgggauuuuac

SEQ ID NO: 1715848 - RNA, 19 nt, Artificial Sequence
  Description of Artificial Sequence: Synthetic oligonucleotide
cuuaccuauggguauuacu

SEQ ID NO: 1715849 - RNA, 19 nt, Artificial Sequence
  Description of Artificial Sequence: Synthetic oligonucleotide
uguggcuuauuggaacuua

SEQ ID NO: 1715850 - RNA, 19 nt, Artificial Sequence
  Description of Artificial Sequence: Synthetic oligonucleotide
augagugaacgcaggacga

SEQ ID NO: 1715851 - RNA, 19 nt, Artificial Sequence
  Description of Artificial Sequence: Synthetic oligonucleotide
uaaacacuaagagcucauu

SEQ ID NO: 1715852 - RNA, 19 nt, Artificial Sequence
  Description of Artificial Sequence: Synthetic oligonucleotide
gccuuaacacucaggaugc

SEQ ID NO: 1715853 - RNA, 19 nt, Artificial Sequence
  Description of Artificial Sequence: Synthetic oligonucleotide
gacuucuacauaggagaca

SEQ ID NO: 1715854 - RNA, 19 nt, Artificial Sequence
  Description of Artificial Sequence: Synthetic oligonucleotide
cuuuugcagguuaauuucu

SEQ ID NO: 1715855 - RNA, 19 nt, Artificial Sequence
  Description of Artificial Sequence: Synthetic oligonucleotide
cauuccuaggaguauaguu

SEQ ID NO: 1715856 - RNA, 19 nt, Artificial Sequence
  Description of Artificial Sequence: Synthetic oligonucleotide
acagugaaccuuaccuaug

SEQ ID NO: 1715857 - RNA, 19 nt, Artificial Sequence
  Description of Artificial Sequence: Synthetic oligonucleotide
ugguacguuuccccuucgu

SEQ ID NO: 1715858 - RNA, 19 nt, Artificial Sequence
  Description of Artificial Sequence: Synthetic oligonucleotide
gaaccuuaccuauggguau

SEQ ID NO: 1715859 - RNA, 19 nt, Artificial Sequence
  Description of Artificial Sequence: Synthetic oligonucleotide
ggugaaaaugcaaacuaua

SEQ ID NO: 1715860 - RNA, 19 nt, Artificial Sequence
  Description of Artificial Sequence: Synthetic oligonucleotide
aaccuuaccuauggguauu

SEQ ID NO: 1715861 - RNA, 19 nt, Artificial Sequence
  Description of Artificial Sequence: Synthetic oligonucleotide
ccgagaugcuacuucuucc

SEQ ID NO: 1715862 - RNA, 19 nt, Artificial Sequence
  Description of Artificial Sequence: Synthetic oligonucleotide
acguauaaguguacacaca

SEQ ID NO: 1715863 - RNA, 19 nt, Artificial Sequence
  Description of Artificial Sequence: Synthetic oligonucleotide
accuuaugugaaaacuuaa

SEQ ID NO: 1715864 - RNA, 19 nt, Artificial Sequence
  Description of Artificial Sequence: Synthetic oligonucleotide
gaugcccacucugccguag

SEQ ID NO: 1715865 - RNA, 19 nt, Artificial Sequence
  Description of Artificial Sequence: Synthetic oligonucleotide
uucugguacguuuccccuu

SEQ ID NO: 1715866 - RNA, 19 nt, Artificial Sequence
  Description of Artificial Sequence: Synthetic oligonucleotide
ggaacuuaggcugugaauu

SEQ ID NO: 1715867 - RNA, 19 nt, Artificial Sequence
  Description of Artificial Sequence: Synthetic oligonucleotide
cuuauacaaucgaacguau

SEQ ID NO: 1715868 - RNA, 19 nt, Artificial Sequence
  Description of Artificial Sequence: Synthetic oligonucleotide
gcacuaggcaaacuuguga

SEQ ID NO: 1715869 - RNA, 19 nt, Artificial Sequence
  Description of Artificial Sequence: Synthetic oligonucleotide
gagaugcuacuucuuccaa

SEQ ID NO: 1715870 - RNA, 19 nt, Artificial Sequence
  Description of Artificial Sequence: Synthetic oligonucleotide
gugaacgcaggacgaugug

SEQ ID NO: 1715871 - RNA, 19 nt, Artificial Sequence
  Description of Artificial Sequence: Synthetic oligonucleotide
auagcuccuuagaugucug

SEQ ID NO: 1715872 - RNA, 19 nt, Artificial Sequence
  Description of Artificial Sequence: Synthetic oligonucleotide
ugagugaacgcaggacgau

SEQ ID NO: 1715873 - RNA, 19 nt, Artificial Sequence
  Description of Artificial Sequence: Synthetic oligonucleotide
accagggcacuaggcaaac

SEQ ID NO: 1715874 - RNA, 19 nt, Artificial Sequence
  Description of Artificial Sequence: Synthetic oligonucleotide
agaugccuugccuguugcu

SEQ ID NO: 1715875 - RNA, 19 nt, Artificial Sequence
  Description of Artificial Sequence: Synthetic oligonucleotide
gccccucuuacuaacacug

SEQ ID NO: 1715876 - RNA, 19 nt, Artificial Sequence
  Description of Artificial Sequence: Synthetic oligonucleotide
ucaggguaaucgucagcua

SEQ ID NO: 1715877 - RNA, 19 nt, Artificial Sequence
  Description of Artificial Sequence: Synthetic oligonucleotide
uccuuagaugucugagcuu

SEQ ID NO: 1715878 - RNA, 19 nt, Artificial Sequence
  Description of Artificial Sequence: Synthetic oligonucleotide
gccugaaacgguucacccc

SEQ ID NO: 1715879 - RNA, 19 nt, Artificial Sequence
  Description of Artificial Sequence: Synthetic oligonucleotide
cccuucguucccgagaugc

SEQ ID NO: 1715880 - RNA, 19 nt, Artificial Sequence
  Description of Artificial Sequence: Synthetic oligonucleotide
uccuaggaguauaguuaua

SEQ ID NO: 1715881 - RNA, 19 nt, Artificial Sequence
  Description of Artificial Sequence: Synthetic oligonucleotide
gguguuaguuucucuacgu

SEQ ID NO: 1715882 - RNA, 19 nt, Artificial Sequence
  Description of Artificial Sequence: Synthetic oligonucleotide
gaacaccuuccagagaggu

SEQ ID NO: 1715883 - RNA, 19 nt, Artificial Sequence
  Description of Artificial Sequence: Synthetic oligonucleotide
acguuugugucugcauuga

SEQ ID NO: 1715884 - RNA, 19 nt, Artificial Sequence
  Description of Artificial Sequence: Synthetic oligonucleotide
cgaacguauaaguguacac

SEQ ID NO: 1715885 - RNA, 19 nt, Artificial Sequence
  Description of Artificial Sequence: Synthetic oligonucleotide
augcuccugaaguacucua

SEQ ID NO: 1715886 - RNA, 19 nt, Artificial Sequence
  Description of Artificial Sequence: Synthetic oligonucleotide
gcuaaaguccagccuuaac

SEQ ID NO: 1715887 - RNA, 19 nt, Artificial Sequence
  Description of Artificial Sequence: Synthetic oligonucleotide
aguguaaaccagggcacua

SEQ ID NO: 1715888 - RNA, 19 nt, Artificial Sequence
  Description of Artificial Sequence: Synthetic oligonucleotide
gccaaucucuccaggcugg

SEQ ID NO: 1715889 - RNA, 19 nt, Artificial Sequence
  Description of Artificial Sequence: Synthetic oligonucleotide
ugcuaaaguccagccuuaa

SEQ ID NO: 1715890 - RNA, 19 nt, Artificial Sequence
  Description of Artificial Sequence: Synthetic oligonucleotide
ccuuauacaaucgaacgua

SEQ ID NO: 1715891 - RNA, 19 nt, Artificial Sequence
  Description of Artificial Sequence: Synthetic oligonucleotide
ucguucccgagaugcuacu

SEQ ID NO: 1715892 - RNA, 19 nt, Artificial Sequence
  Description of Artificial Sequence: Synthetic oligonucleotide
uggcuucgccaaucucucc

SEQ ID NO: 1715893 - RNA, 19 nt, Artificial Sequence
  Description of Artificial Sequence: Synthetic oligonucleotide
cucuacguaugagauugga

SEQ ID NO: 1715894 - RNA, 19 nt, Artificial Sequence
  Description of Artificial Sequence: Synthetic oligonucleotide
cugguacguuuccccuucg

SEQ ID NO: 1715895 - RNA, 19 nt, Artificial Sequence
  Description of Artificial Sequence: Synthetic oligonucleotide
guauaguuauacagagccu

SEQ ID NO: 1715896 - RNA, 19 nt, Artificial Sequence
  Description of Artificial Sequence: Synthetic oligonucleotide
gggucaggguaaucgucag

SEQ ID NO: 1715897 - RNA, 19 nt, Artificial Sequence
  Description of Artificial Sequence: Synthetic oligonucleotide
gcuaaaccuuaugugaaaa

SEQ ID NO: 1715898 - RNA, 19 nt, Artificial Sequence
  Description of Artificial Sequence: Synthetic oligonucleotide
acgauguggcuuauuggaa

SEQ ID NO: 1715899 - RNA, 19 nt, Artificial Sequence
  Description of Artificial Sequence: Synthetic oligonucleotide
acccaucccaaugaacuuu

SEQ ID NO: 1715900 - RNA, 19 nt, Artificial Sequence
  Description of Artificial Sequence: Synthetic oligonucleotide
uagauagcuuuugcagguu

SEQ ID NO: 1715901 - RNA, 19 nt, Artificial Sequence
  Description of Artificial Sequence: Synthetic oligonucleotide
gcugugaauucuaucacua

SEQ ID NO: 1715902 - RNA, 19 nt, Artificial Sequence
  Description of Artificial Sequence: Synthetic oligonucleotide
aguccagccuuaacacuca

SEQ ID NO: 1715903 - RNA, 19 nt, Artificial Sequence
  Description of Artificial Sequence: Synthetic oligonucleotide
uuccagagagguggucacu

SEQ ID NO: 1715904 - RNA, 19 nt, Artificial Sequence
  Description of Artificial Sequence: Synthetic oligonucleotide
gaugcuccugaaguacucu

SEQ ID NO: 1715905 - RNA, 19 nt, Artificial Sequence
  Description of Artificial Sequence: Synthetic oligonucleotide
guugcuucccgggauuuua

SEQ ID NO: 1715906 - RNA, 19 nt, Artificial Sequence
  Description of Artificial Sequence: Synthetic oligonucleotide
cuagaguagcuguggggua

SEQ ID NO: 1715907 - RNA, 19 nt, Artificial Sequence
  Description of Artificial Sequence: Synthetic oligonucleotide
ggcuaaaccuuaugugaaa

SEQ ID NO: 1715908 - RNA, 19 nt, Artificial Sequence
  Description of Artificial Sequence: Synthetic oligonucleotide
ggcacuaggcaaacuugug

SEQ ID NO: 1715909 - RNA, 19 nt, Artificial Sequence
  Description of Artificial Sequence: Synthetic oligonucleotide
agaguagcugugggguaga

SEQ ID NO: 1715910 - RNA, 19 nt, Artificial Sequence
  Description of Artificial Sequence: Synthetic oligonucleotide
ucccgagaugcuacuucuu

SEQ ID NO: 1715911 - RNA, 19 nt, Artificial Sequence
  Description of Artificial Sequence: Synthetic oligonucleotide
gcaaauuuuacaacacgau

SEQ ID NO: 1715912 - RNA, 19 nt, Artificial Sequence
  Description of Artificial Sequence: Synthetic oligonucleotide
gaugccuugccuguugcuu

SEQ ID NO: 1715913 - RNA, 19 nt, Artificial Sequence
  Description of Artificial Sequence: Synthetic oligonucleotide
cccgagaugcuacuucuuc

SEQ ID NO: 1715914 - RNA, 19 nt, Artificial Sequence
  Description of Artificial Sequence: Synthetic oligonucleotide
cacgaugcugaugauuaua

SEQ ID NO: 1715915 - RNA, 19 nt, Artificial Sequence
  Description of Artificial Sequence: Synthetic oligonucleotide
cuuaggcugugaauucuau

SEQ ID NO: 1715916 - RNA, 19 nt, Artificial Sequence
  Description of Artificial Sequence: Synthetic oligonucleotide
cuauggguauuacuuucau

SEQ ID NO: 1715917 - RNA, 19 nt, Artificial Sequence
  Description of Artificial Sequence: Synthetic oligonucleotide
uguugcuucccgggauuuu

SEQ ID NO: 1715918 - RNA, 19 nt, Artificial Sequence
  Description of Artificial Sequence: Synthetic oligonucleotide
cgagaugcuacuucuucca

SEQ ID NO: 1715919 - RNA, 19 nt, Artificial Sequence
  Description of Artificial Sequence: Synthetic oligonucleotide
acgcaggacgauguggcuu

SEQ ID NO: 1715920 - RNA, 19 nt, Artificial Sequence
  Description of Artificial Sequence: Synthetic oligonucleotide
cuucguucccgagaugcua

SEQ ID NO: 1715921 - RNA, 19 nt, Artificial Sequence
  Description of Artificial Sequence: Synthetic oligonucleotide
cuucccgggauuuuaccuu

SEQ ID NO: 1715922 - RNA, 19 nt, Artificial Sequence
  Description of Artificial Sequence: Synthetic oligonucleotide
caacacgauuuguccugca

SEQ ID NO: 1715923 - RNA, 19 nt, Artificial Sequence
  Description of Artificial Sequence: Synthetic oligonucleotide
cagggcacuaggcaaacuu

SEQ ID NO: 1715924 - RNA, 19 nt, Artificial Sequence
  Description of Artificial Sequence: Synthetic oligonucleotide
cuacucguucuagauuuua

SEQ ID NO: 1715925 - RNA, 19 nt, Artificial Sequence
  Description of Artificial Sequence: Synthetic oligonucleotide
ccccucuuacuaacacugc

SEQ ID NO: 1715926 - RNA, 19 nt, Artificial Sequence
  Description of Artificial Sequence: Synthetic oligonucleotide
ggaugcuccugaaguacuc

SEQ ID NO: 1715927 - RNA, 19 nt, Artificial Sequence
  Description of Artificial Sequence: Synthetic oligonucleotide
accuuaccuauggguauua

SEQ ID NO: 1715928 - RNA, 19 nt, Artificial Sequence
  Description of Artificial Sequence: Synthetic oligonucleotide
gguacguuuccccuucguu

SEQ ID NO: 1715929 - RNA, 19 nt, Artificial Sequence
  Description of Artificial Sequence: Synthetic oligonucleotide
caacucuuuuaagaagaau

SEQ ID NO: 1715930 - RNA, 19 nt, Artificial Sequence
  Description of Artificial Sequence: Synthetic oligonucleotide
ccaccuugaauguugucau

SEQ ID NO: 1715931 - RNA, 19 nt, Artificial Sequence
  Description of Artificial Sequence: Synthetic oligonucleotide
gggcacuaggcaaacuugu

SEQ ID NO: 1715932 - RNA, 19 nt, Artificial Sequence
  Description of Artificial Sequence: Synthetic oligonucleotide
ccuuaccuauggguauuac

SEQ ID NO: 1715933 - RNA, 19 nt, Artificial Sequence
  Description of Artificial Sequence: Synthetic oligonucleotide
ggucgauuuuccugaggau

SEQ ID NO: 1715934 - RNA, 19 nt, Artificial Sequence
  Description of Artificial Sequence: Synthetic oligonucleotide
gcaguguggcuaaaccuua

SEQ ID NO: 1715935 - RNA, 19 nt, Artificial Sequence
  Description of Artificial Sequence: Synthetic oligonucleotide
ggguaaucgucagcuaccu

SEQ ID NO: 1715936 - RNA, 19 nt, Artificial Sequence
  Description of Artificial Sequence: Synthetic oligonucleotide
ccucuuacuaacacugcuu

SEQ ID NO: 1715937 - RNA, 19 nt, Artificial Sequence
  Description of Artificial Sequence: Synthetic oligonucleotide
gggagaguuccacguuugu

SEQ ID NO: 1715938 - RNA, 19 nt, Artificial Sequence
  Description of Artificial Sequence: Synthetic oligonucleotide
ccacucugccguagugcuc

SEQ ID NO: 1715939 - RNA, 19 nt, Artificial Sequence
  Description of Artificial Sequence: Synthetic oligonucleotide
ccgggauuuuaccuucaua

SEQ ID NO: 1715940 - RNA, 19 nt, Artificial Sequence
  Description of Artificial Sequence: Synthetic oligonucleotide
cgcaggacgauguggcuua

SEQ ID NO: 1715941 - RNA, 19 nt, Artificial Sequence
  Description of Artificial Sequence: Synthetic oligonucleotide
ccacguuugugucugcauu

SEQ ID NO: 1715942 - RNA, 19 nt, Artificial Sequence
  Description of Artificial Sequence: Synthetic oligonucleotide
cguuugugucugcauugaa

SEQ ID NO: 1715943 - RNA, 19 nt, Artificial Sequence
  Description of Artificial Sequence: Synthetic oligonucleotide
cccuuucgcagggagaguu

SEQ ID NO: 1715944 - RNA, 19 nt, Artificial Sequence
  Description of Artificial Sequence: Synthetic oligonucleotide
ccccuucguucccgagaug

SEQ ID NO: 1715945 - RNA, 19 nt, Artificial Sequence
  Description of Artificial Sequence: Synthetic oligonucleotide
ccuacucguucuagauuuu

SEQ ID NO: 1715946 - RNA, 19 nt, Artificial Sequence
  Description of Artificial Sequence: Synthetic oligonucleotide
ccacgaugcugaugauuau

SEQ ID NO: 1715947 - RNA, 19 nt, Artificial Sequence
  Description of Artificial Sequence: Synthetic oligonucleotide
cgauuuuccugaggaugua

SEQ ID NO: 1715948 - RNA, 19 nt, Artificial Sequence
  Description of Artificial Sequence: Synthetic oligonucleotide
ccuuaacacucaggaugcu

SEQ ID NO: 1715949 - RNA, 19 nt, Artificial Sequence
  Description of Artificial Sequence: Synthetic oligonucleotide
cccgggauuuuaccuucau

SEQ ID NO: 1715950 - RNA, 19 nt, Artificial Sequence
  Description of Artificial Sequence: Synthetic oligonucleotide
gcaggacgauguggcuuau

SEQ ID NO: 1715951 - RNA, 19 nt, Artificial Sequence
  Description of Artificial Sequence: Synthetic oligonucleotide
cguucccgagaugcuacuu

SEQ ID NO: 1715952 - RNA, 19 nt, Artificial Sequence
  Description of Artificial Sequence: Synthetic oligonucleotide
aaguagaugggacagcucc

SEQ ID NO: 1715953 - RNA, 19 nt, Artificial Sequence
  Description of Artificial Sequence: Synthetic oligonucleotide
agagguguuaaguagaugg

SEQ ID NO: 1715954 - RNA, 19 nt, Artificial Sequence
  Description of Artificial Sequence: Synthetic oligonucleotide
uggauuacaacgcacuugg

SEQ ID NO: 1715955 - RNA, 19 nt, Artificial Sequence
  Description of Artificial Sequence: Synthetic oligonucleotide
uccuuuauaguuuauccgg

SEQ ID NO: 1715956 - RNA, 19 nt, Artificial Sequence
  Description of Artificial Sequence: Synthetic oligonucleotide
aaaguauacaguaccgggc

SEQ ID NO: 1715957 - RNA, 19 nt, Artificial Sequence
  Description of Artificial Sequence: Synthetic oligonucleotide
augucagcacaucagaucg

SEQ ID NO: 1715958 - RNA, 19 nt, Artificial Sequence
  Description of Artificial Sequence: Synthetic oligonucleotide
uguccuuuauaguuuaucc

SEQ ID NO: 1715959 - RNA, 19 nt, Artificial Sequence
  Description of Artificial Sequence: Synthetic oligonucleotide
auuacaacgcacuuggaca

SEQ ID NO: 1715960 - RNA, 19 nt, Artificial Sequence
  Description of Artificial Sequence: Synthetic oligonucleotide
gauagccuguccuuuauag

SEQ ID NO: 1715961 - RNA, 19 nt, Artificial Sequence
  Description of Artificial Sequence: Synthetic oligonucleotide
gaauguauccccgugugcg

SEQ ID NO: 1715962 - RNA, 19 nt, Artificial Sequence
  Description of Artificial Sequence: Synthetic oligonucleotide
uaguuuauccggcaggacc

SEQ ID NO: 1715963 - RNA, 19 nt, Artificial Sequence
  Description of Artificial Sequence: Synthetic oligonucleotide
ugagguucgagcaguaugc

SEQ ID NO: 1715964 - RNA, 19 nt, Artificial Sequence
  Description of Artificial Sequence: Synthetic oligonucleotide
ugugguaguccucacaugu

SEQ ID NO: 1715965 - RNA, 19 nt, Artificial Sequence
  Description of Artificial Sequence: Synthetic oligonucleotide
aaguauacaguaccgggcu

SEQ ID NO: 1715966 - RNA, 19 nt, Artificial Sequence
  Description of Artificial Sequence: Synthetic oligonucleotide
aguaccgggcuucaggccc

SEQ ID NO: 1715967 - RNA, 19 nt, Artificial Sequence
  Description of Artificial Sequence: Synthetic oligonucleotide
aagaauguauccccgugug

SEQ ID NO: 1715968 - RNA, 19 nt, Artificial Sequence
  Description of Artificial Sequence: Synthetic oligonucleotide
gauuacaacgcacuuggac

SEQ ID NO: 1715969 - RNA, 19 nt, Artificial Sequence
  Description of Artificial Sequence: Synthetic oligonucleotide
agugagguccuucauguuc

SEQ ID NO: 1715970 - RNA, 19 nt, Artificial Sequence
  Description of Artificial Sequence: Synthetic oligonucleotide
aucagaucgagcugagccc

SEQ ID NO: 1715971 - RNA, 19 nt, Artificial Sequence
  Description of Artificial Sequence: Synthetic oligonucleotide
uguuaaguagaugggacag

SEQ ID NO: 1715972 - RNA, 19 nt, Artificial Sequence
  Description of Artificial Sequence: Synthetic oligonucleotide
uaugcgugcuucuucagcc

SEQ ID NO: 1715973 - RNA, 19 nt, Artificial Sequence
  Description of Artificial Sequence: Synthetic oligonucleotide
uacaguaccgggcuucagg

SEQ ID NO: 1715974 - RNA, 19 nt, Artificial Sequence
  Description of Artificial Sequence: Synthetic oligonucleotide
acauguguuguccugacca

SEQ ID NO: 1715975 - RNA, 19 nt, Artificial Sequence
  Description of Artificial Sequence: Synthetic oligonucleotide
ucagaggggcccuaguugg

SEQ ID NO: 1715976 - RNA, 19 nt, Artificial Sequence
  Description of Artificial Sequence: Synthetic oligonucleotide
uagcuugcagggaagagcc

SEQ ID NO: 1715977 - RNA, 19 nt, Artificial Sequence
  Description of Artificial Sequence: Synthetic oligonucleotide
acccguagaucccaaaugg

SEQ ID NO: 1715978 - RNA, 19 nt, Artificial Sequence
  Description of Artificial Sequence: Synthetic oligonucleotide
auagggagugaagagggcc

SEQ ID NO: 1715979 - RNA, 19 nt, Artificial Sequence
  Description of Artificial Sequence: Synthetic oligonucleotide
aguccuugagggcaggugg

SEQ ID NO: 1715980 - RNA, 19 nt, Artificial Sequence
  Description of Artificial Sequence: Synthetic oligonucleotide
cauugaggguccaauagag

SEQ ID NO: 1715981 - RNA, 19 nt, Artificial Sequence
  Description of Artificial Sequence: Synthetic oligonucleotide
guccuuuauaguuuauccg

SEQ ID NO: 1715982 - RNA, 19 nt, Artificial Sequence
  Description of Artificial Sequence: Synthetic oligonucleotide
cauguauagagcagguagc

SEQ ID NO: 1715983 - RNA, 19 nt, Artificial Sequence
  Description of Artificial Sequence: Synthetic oligonucleotide
ucgagcugagcccagacga

SEQ ID NO: 1715984 - RNA, 19 nt, Artificial Sequence
  Description of Artificial Sequence: Synthetic oligonucleotide
auuacagcuguguggguuc

SEQ ID NO: 1715985 - RNA, 19 nt, Artificial Sequence
  Description of Artificial Sequence: Synthetic oligonucleotide
ucuccauguauagagcagg

SEQ ID NO: 1715986 - RNA, 19 nt, Artificial Sequence
  Description of Artificial Sequence: Synthetic oligonucleotide
aaauggauuacaacgcacu

SEQ ID NO: 1715987 - RNA, 19 nt, Artificial Sequence
  Description of Artificial Sequence: Synthetic oligonucleotide
acucuugauaguucagagg

SEQ ID NO: 1715988 - RNA, 19 nt, Artificial Sequence
  Description of Artificial Sequence: Synthetic oligonucleotide
cuugauaguucagaggggc

SEQ ID NO: 1715989 - RNA, 19 nt, Artificial Sequence
  Description of Artificial Sequence: Synthetic oligonucleotide
uaagaauguauccccgugu

SEQ ID NO: 1715990 - RNA, 19 nt, Artificial Sequence
  Description of Artificial Sequence: Synthetic oligonucleotide
uccaggacguccaauguca

SEQ ID NO: 1715991 - RNA, 19 nt, Artificial Sequence
  Description of Artificial Sequence: Synthetic oligonucleotide
acaaaguauacaguaccgg

SEQ ID NO: 1715992 - RNA, 19 nt, Artificial Sequence
  Description of Artificial Sequence: Synthetic oligonucleotide
ccaauagagacccucagcg

SEQ ID NO: 1715993 - RNA, 19 nt, Artificial Sequence
  Description of Artificial Sequence: Synthetic oligonucleotide
uuagcuuguauuugaggga

SEQ ID NO: 1715994 - RNA, 19 nt, Artificial Sequence
  Description of Artificial Sequence: Synthetic oligonucleotide
ugguguguaagaauguauc

SEQ ID NO: 1715995 - RNA, 19 nt, Artificial Sequence
  Description of Artificial Sequence: Synthetic oligonucleotide
ugaccauaccaccuuagcu

SEQ ID NO: 1715996 - RNA, 19 nt, Artificial Sequence
  Description of Artificial Sequence: Synthetic oligonucleotide
acgauugguggcuuccacc

SEQ ID NO: 1715997 - RNA, 19 nt, Artificial Sequence
  Description of Artificial Sequence: Synthetic oligonucleotide
uccaauagagacccucagc

SEQ ID NO: 1715998 - RNA, 19 nt, Artificial Sequence
  Description of Artificial Sequence: Synthetic oligonucleotide
ugucuccauguauagagca

SEQ ID NO: 1715999 - RNA, 19 nt, Artificial Sequence
  Description of Artificial Sequence: Synthetic oligonucleotide
uggacaaaguauacaguac

SEQ ID NO: 1716000 - RNA, 19 nt, Artificial Sequence
  Description of Artificial Sequence: Synthetic oligonucleotide
ggacaaaguauacaguacc

SEQ ID NO: 1716001 - RNA, 19 nt, Artificial Sequence
  Description of Artificial Sequence: Synthetic oligonucleotide
aauggauuacaacgcacuu

SEQ ID NO: 1716002 - RNA, 19 nt, Artificial Sequence
  Description of Artificial Sequence: Synthetic oligonucleotide
uagcuuguauuugagggag

SEQ ID NO: 1716003 - RNA, 19 nt, Artificial Sequence
  Description of Artificial Sequence: Synthetic oligonucleotide
cucauagggagugaagagg

SEQ ID NO: 1716004 - RNA, 19 nt, Artificial Sequence
  Description of Artificial Sequence: Synthetic oligonucleotide
uguaagaauguauccccgu

SEQ ID NO: 1716005 - RNA, 19 nt, Artificial Sequence
  Description of Artificial Sequence: Synthetic oligonucleotide
ugauaguucagaggggccc

SEQ ID NO: 1716006 - RNA, 19 nt, Artificial Sequence
  Description of Artificial Sequence: Synthetic oligonucleotide
guaagaauguauccccgug

SEQ ID NO: 1716007 - RNA, 19 nt, Artificial Sequence
  Description of Artificial Sequence: Synthetic oligonucleotide
uuuaaagaacacucuugau

SEQ ID NO: 1716008 - RNA, 19 nt, Artificial Sequence
  Description of Artificial Sequence: Synthetic oligonucleotide
caaauggauuacaacgcac

SEQ ID NO: 1716009 - RNA, 19 nt, Artificial Sequence
  Description of Artificial Sequence: Synthetic oligonucleotide
uuacaacgcacuuggacaa

SEQ ID NO: 1716010 - RNA, 19 nt, Artificial Sequence
  Description of Artificial Sequence: Synthetic oligonucleotide
aagaacacucuugauaguu

SEQ ID NO: 1716011 - RNA, 19 nt, Artificial Sequence
  Description of Artificial Sequence: Synthetic oligonucleotide
cagguggugaaacccagcg

SEQ ID NO: 1716012 - RNA, 19 nt, Artificial Sequence
  Description of Artificial Sequence: Synthetic oligonucleotide
caauagagacccucagcgg

SEQ ID NO: 1716013 - RNA, 19 nt, Artificial Sequence
  Description of Artificial Sequence: Synthetic oligonucleotide
ccauguauagagcagguag

SEQ ID NO: 1716014 - RNA, 19 nt, Artificial Sequence
  Description of Artificial Sequence: Synthetic oligonucleotide
uuuucgacccguagauccc

SEQ ID NO: 1716015 - RNA, 19 nt, Artificial Sequence
  Description of Artificial Sequence: Synthetic oligonucleotide
uugauaguucagaggggcc

SEQ ID NO: 1716016 - RNA, 19 nt, Artificial Sequence
  Description of Artificial Sequence: Synthetic oligonucleotide
guguguaagaauguauccc

SEQ ID NO: 1716017 - RNA, 19 nt, Artificial Sequence
  Description of Artificial Sequence: Synthetic oligonucleotide
gagguguuaaguagauggg

SEQ ID NO: 1716018 - RNA, 19 nt, Artificial Sequence
  Description of Artificial Sequence: Synthetic oligonucleotide
aaagaacacucuugauagu

SEQ ID NO: 1716019 - RNA, 19 nt, Artificial Sequence
  Description of Artificial Sequence: Synthetic oligonucleotide
gguguguaagaauguaucc

SEQ ID NO: 1716020 - RNA, 19 nt, Artificial Sequence
  Description of Artificial Sequence: Synthetic oligonucleotide
agcccagacgauugguggc

SEQ ID NO: 1716021 - RNA, 19 nt, Artificial Sequence
  Description of Artificial Sequence: Synthetic oligonucleotide
uguccugaccauaccaccu

SEQ ID NO: 1716022 - RNA, 19 nt, Artificial Sequence
  Description of Artificial Sequence: Synthetic oligonucleotide
uugguguguaagaauguau

SEQ ID NO: 1716023 - RNA, 19 nt, Artificial Sequence
  Description of Artificial Sequence: Synthetic oligonucleotide
uuguccugaccauaccacc

SEQ ID NO: 1716024 - RNA, 19 nt, Artificial Sequence
  Description of Artificial Sequence: Synthetic oligonucleotide
aggacguccaaugucagca

SEQ ID NO: 1716025 - RNA, 19 nt, Artificial Sequence
  Description of Artificial Sequence: Synthetic oligonucleotide
uugagcucgcgccgcaccg

SEQ ID NO: 1716026 - RNA, 19 nt, Artificial Sequence
  Description of Artificial Sequence: Synthetic oligonucleotide
cugagguucgagcaguaug

SEQ ID NO: 1716027 - RNA, 19 nt, Artificial Sequence
  Description of Artificial Sequence: Synthetic oligonucleotide
cugguacuuggcuuggaag

SEQ ID NO: 1716028 - RNA, 19 nt, Artificial Sequence
  Description of Artificial Sequence: Synthetic oligonucleotide
guauuugagggaguaguug

SEQ ID NO: 1716029 - RNA, 19 nt, Artificial Sequence
  Description of Artificial Sequence: Synthetic oligonucleotide
ugguuucgagucuugugug

SEQ ID NO: 1716030 - RNA, 19 nt, Artificial Sequence
  Description of Artificial Sequence: Synthetic oligonucleotide
guagaucccaaauggauua

SEQ ID NO: 1716031 - RNA, 19 nt, Artificial Sequence
  Description of Artificial Sequence: Synthetic oligonucleotide
ucguacaggcggaagcuga

SEQ ID NO: 1716032 - RNA, 19 nt, Artificial Sequence
  Description of Artificial Sequence: Synthetic oligonucleotide
agagccgaugagaagagug

SEQ ID NO: 1716033 - RNA, 19 nt, Artificial Sequence
  Description of Artificial Sequence: Synthetic oligonucleotide
aaacccagcggacgcucag

SEQ ID NO: 1716034 - RNA, 19 nt, Artificial Sequence
  Description of Artificial Sequence: Synthetic oligonucleotide
ugccuggacccauugaggu

SEQ ID NO: 1716035 - RNA, 19 nt, Artificial Sequence
  Description of Artificial Sequence: Synthetic oligonucleotide
auggauuacaacgcacuug

SEQ ID NO: 1716036 - RNA, 19 nt, Artificial Sequence
  Description of Artificial Sequence: Synthetic oligonucleotide
acguccaggacguccaaug

SEQ ID NO: 1716037 - RNA, 19 nt, Artificial Sequence
  Description of Artificial Sequence: Synthetic oligonucleotide
gaguaguugguguguaaga

SEQ ID NO: 1716038 - RNA, 19 nt, Artificial Sequence
  Description of Artificial Sequence: Synthetic oligonucleotide
guaugcgugcuucuucagc

SEQ ID NO: 1716039 - RNA, 19 nt, Artificial Sequence
  Description of Artificial Sequence: Synthetic oligonucleotide
cugaccauaccaccuuagc

SEQ ID NO: 1716040 - RNA, 19 nt, Artificial Sequence
  Description of Artificial Sequence: Synthetic oligonucleotide
auguauccccgugugcgcc

SEQ ID NO: 1716041 - RNA, 19 nt, Artificial Sequence
  Description of Artificial Sequence: Synthetic oligonucleotide
guguuaaguagaugggaca

SEQ ID NO: 1716042 - RNA, 19 nt, Artificial Sequence
  Description of Artificial Sequence: Synthetic oligonucleotide
auguauagagcagguagcu

SEQ ID NO: 1716043 - RNA, 19 nt, Artificial Sequence
  Description of Artificial Sequence: Synthetic oligonucleotide
ggaagagccgaugagaaga

SEQ ID NO: 1716044 - RNA, 19 nt, Artificial Sequence
  Description of Artificial Sequence: Synthetic oligonucleotide
gguucgagcaguaugcgug

SEQ ID NO: 1716045 - RNA, 19 nt, Artificial Sequence
  Description of Artificial Sequence: Synthetic oligonucleotide
augacacaccagguugucc

SEQ ID NO: 1716046 - RNA, 19 nt, Artificial Sequence
  Description of Artificial Sequence: Synthetic oligonucleotide
ccaagcacgccacuggucg

SEQ ID NO: 1716047 - RNA, 19 nt, Artificial Sequence
  Description of Artificial Sequence: Synthetic oligonucleotide
aguagaugggacagcuccg

SEQ ID NO: 1716048 - RNA, 19 nt, Artificial Sequence
  Description of Artificial Sequence: Synthetic oligonucleotide
ccuuuauaguuuauccggc

SEQ ID NO: 1716049 - RNA, 19 nt, Artificial Sequence
  Description of Artificial Sequence: Synthetic oligonucleotide
ggugaaacccagcggacgc

SEQ ID NO: 1716050 - RNA, 19 nt, Artificial Sequence
  Description of Artificial Sequence: Synthetic oligonucleotide
uagaugggacagcuccgag

SEQ ID NO: 1716051 - RNA, 19 nt, Artificial Sequence
  Description of Artificial Sequence: Synthetic oligonucleotide
gaccauaccaccuuagcuu

SEQ ID NO: 1716052 - RNA, 19 nt, Artificial Sequence
  Description of Artificial Sequence: Synthetic oligonucleotide
cugccuggacccauugagg

SEQ ID NO: 1716053 - RNA, 19 nt, Artificial Sequence
  Description of Artificial Sequence: Synthetic oligonucleotide
cuuguauuugagggaguag

SEQ ID NO: 1716054 - RNA, 19 nt, Artificial Sequence
  Description of Artificial Sequence: Synthetic oligonucleotide
gguguuaaguagaugggac

SEQ ID NO: 1716055 - RNA, 19 nt, Artificial Sequence
  Description of Artificial Sequence: Synthetic oligonucleotide
agccgaugagaagaguggg

SEQ ID NO: 1716056 - RNA, 19 nt, Artificial Sequence
  Description of Artificial Sequence: Synthetic oligonucleotide
cauguuccgagaccagcag

SEQ ID NO: 1716057 - RNA, 19 nt, Artificial Sequence
  Description of Artificial Sequence: Synthetic oligonucleotide
cccaacacggcucacgugc

SEQ ID NO: 1716058 - RNA, 19 nt, Artificial Sequence
  Description of Artificial Sequence: Synthetic oligonucleotide
aguaugcgugcuucuucag

SEQ ID NO: 1716059 - RNA, 19 nt, Artificial Sequence
  Description of Artificial Sequence: Synthetic oligonucleotide
aaguccuugagggcaggug

SEQ ID NO: 1716060 - RNA, 19 nt, Artificial Sequence
  Description of Artificial Sequence: Synthetic oligonucleotide
agguguuaaguagauggga

SEQ ID NO: 1716061 - RNA, 19 nt, Artificial Sequence
  Description of Artificial Sequence: Synthetic oligonucleotide
ugaggacccacaguguggu

SEQ ID NO: 1716062 - RNA, 19 nt, Artificial Sequence
  Description of Artificial Sequence: Synthetic oligonucleotide
guucgagcaguaugcgugc

SEQ ID NO: 1716063 - RNA, 19 nt, Artificial Sequence
  Description of Artificial Sequence: Synthetic oligonucleotide
cucguccugguuucgaguc

SEQ ID NO: 1716064 - RNA, 19 nt, Artificial Sequence
  Description of Artificial Sequence: Synthetic oligonucleotide
uauacaguaccgggcuuca

SEQ ID NO: 1716065 - RNA, 19 nt, Artificial Sequence
  Description of Artificial Sequence: Synthetic oligonucleotide
uaaguagaugggacagcuc

SEQ ID NO: 1716066 - RNA, 19 nt, Artificial Sequence
  Description of Artificial Sequence: Synthetic oligonucleotide
ucacauguguuguccugac

SEQ ID NO: 1716067 - RNA, 19 nt, Artificial Sequence
  Description of Artificial Sequence: Synthetic oligonucleotide
gagguucgagcaguaugcg

SEQ ID NO: 1716068 - RNA, 19 nt, Artificial Sequence
  Description of Artificial Sequence: Synthetic oligonucleotide
auccccucguccugguuuc

SEQ ID NO: 1716069 - RNA, 19 nt, Artificial Sequence
  Description of Artificial Sequence: Synthetic oligonucleotide
acaacgcacuuggacaaag

SEQ ID NO: 1716070 - RNA, 19 nt, Artificial Sequence
  Description of Artificial Sequence: Synthetic oligonucleotide
guacuuggcuuggaagagg

SEQ ID NO: 1716071 - RNA, 19 nt, Artificial Sequence
  Description of Artificial Sequence: Synthetic oligonucleotide
uccgagaccagcagcugau

SEQ ID NO: 1716072 - RNA, 19 nt, Artificial Sequence
  Description of Artificial Sequence: Synthetic oligonucleotide
aggaccucucgccgugccc

SEQ ID NO: 1716073 - RNA, 19 nt, Artificial Sequence
  Description of Artificial Sequence: Synthetic oligonucleotide
aacacggcucacgugcaca

SEQ ID NO: 1716074 - RNA, 19 nt, Artificial Sequence
  Description of Artificial Sequence: Synthetic oligonucleotide
ucacuucgagggguggagg

SEQ ID NO: 1716075 - RNA, 19 nt, Artificial Sequence
  Description of Artificial Sequence: Synthetic oligonucleotide
ccuuagcuuguauuugagg

SEQ ID NO: 1716076 - RNA, 19 nt, Artificial Sequence
  Description of Artificial Sequence: Synthetic oligonucleotide
caggcggcgcccauugagg

SEQ ID NO: 1716077 - RNA, 19 nt, Artificial Sequence
  Description of Artificial Sequence: Synthetic oligonucleotide
gacgauugguggcuuccac

SEQ ID NO: 1716078 - RNA, 19 nt, Artificial Sequence
  Description of Artificial Sequence: Synthetic oligonucleotide
cuugagcucgcgccgcacc

SEQ ID NO: 1716079 - RNA, 19 nt, Artificial Sequence
  Description of Artificial Sequence: Synthetic oligonucleotide
guuucgagucuugugugac

SEQ ID NO: 1716080 - RNA, 19 nt, Artificial Sequence
  Description of Artificial Sequence: Synthetic oligonucleotide
uucgagucuugugugacuu

SEQ ID NO: 1716081 - RNA, 19 nt, Artificial Sequence
  Description of Artificial Sequence: Synthetic oligonucleotide
guauacaguaccgggcuuc

SEQ ID NO: 1716082 - RNA, 19 nt, Artificial Sequence
  Description of Artificial Sequence: Synthetic oligonucleotide
ccgggcaugacacaccagg

SEQ ID NO: 1716083 - RNA, 19 nt, Artificial Sequence
  Description of Artificial Sequence: Synthetic oligonucleotide
gucuccauguauagagcag

SEQ ID NO: 1716084 - RNA, 19 nt, Artificial Sequence
  Description of Artificial Sequence: Synthetic oligonucleotide
cuguccuuuauaguuuauc

SEQ ID NO: 1716085 - RNA, 19 nt, Artificial Sequence
  Description of Artificial Sequence: Synthetic oligonucleotide
aggcggcgcccauugaggg

SEQ ID NO: 1716086 - RNA, 19 nt, Artificial Sequence
  Description of Artificial Sequence: Synthetic oligonucleotide
caguaugcgugcuucuuca

SEQ ID NO: 1716087 - RNA, 19 nt, Artificial Sequence
  Description of Artificial Sequence: Synthetic oligonucleotide
uaccaccuuagcuuguauu

SEQ ID NO: 1716088 - RNA, 19 nt, Artificial Sequence
  Description of Artificial Sequence: Synthetic oligonucleotide
ucgcacaccccgccgcccg

SEQ ID NO: 1716089 - RNA, 19 nt, Artificial Sequence
  Description of Artificial Sequence: Synthetic oligonucleotide
cacgcgguagcggaucugg

SEQ ID NO: 1716090 - RNA, 19 nt, Artificial Sequence
  Description of Artificial Sequence: Synthetic oligonucleotide
uucugcauccaagcacgcc

SEQ ID NO: 1716091 - RNA, 19 nt, Artificial Sequence
  Description of Artificial Sequence: Synthetic oligonucleotide
cugguuucgagucuugugu

SEQ ID NO: 1716092 - RNA, 19 nt, Artificial Sequence
  Description of Artificial Sequence: Synthetic oligonucleotide
agguucgagcaguaugcgu

SEQ ID NO: 1716093 - RNA, 19 nt, Artificial Sequence
  Description of Artificial Sequence: Synthetic oligonucleotide
cccauugaggguccaauag

SEQ ID NO: 1716094 - RNA, 19 nt, Artificial Sequence
  Description of Artificial Sequence: Synthetic oligonucleotide
cucgcuccagauucccgcc

SEQ ID NO: 1716095 - RNA, 19 nt, Artificial Sequence
  Description of Artificial Sequence: Synthetic oligonucleotide
ucugcccgagggcaggauc

SEQ ID NO: 1716096 - RNA, 19 nt, Artificial Sequence
  Description of Artificial Sequence: Synthetic oligonucleotide
gguagagguguuaaguaga

SEQ ID NO: 1716097 - RNA, 19 nt, Artificial Sequence
  Description of Artificial Sequence: Synthetic oligonucleotide
uuucgacccguagauccca

SEQ ID NO: 1716098 - RNA, 19 nt, Artificial Sequence
  Description of Artificial Sequence: Synthetic oligonucleotide
cucacuucgagggguggag

SEQ ID NO: 1716099 - RNA, 19 nt, Artificial Sequence
  Description of Artificial Sequence: Synthetic oligonucleotide
uguauagagcagguagcuu

SEQ ID NO: 1716100 - RNA, 19 nt, Artificial Sequence
  Description of Artificial Sequence: Synthetic oligonucleotide
auuugagggaguaguuggu

SEQ ID NO: 1716101 - RNA, 19 nt, Artificial Sequence
  Description of Artificial Sequence: Synthetic oligonucleotide
caggacguccaaugucagc

SEQ ID NO: 1716102 - RNA, 19 nt, Artificial Sequence
  Description of Artificial Sequence: Synthetic oligonucleotide
agaucccaaauggauuaca

SEQ ID NO: 1716103 - RNA, 19 nt, Artificial Sequence
  Description of Artificial Sequence: Synthetic oligonucleotide
guccguggucaccacgucc

SEQ ID NO: 1716104 - RNA, 19 nt, Artificial Sequence
  Description of Artificial Sequence: Synthetic oligonucleotide
aguugguguguaagaaugu

SEQ ID NO: 1716105 - RNA, 19 nt, Artificial Sequence
  Description of Artificial Sequence: Synthetic oligonucleotide
ccuaguuggggcaaaccuc

SEQ ID NO: 1716106 - RNA, 19 nt, Artificial Sequence
  Description of Artificial Sequence: Synthetic oligonucleotide
aguauacaguaccgggcuu

SEQ ID NO: 1716107 - RNA, 19 nt, Artificial Sequence
  Description of Artificial Sequence: Synthetic oligonucleotide
cgauugguggcuuccaccc

SEQ ID NO: 1716108 - RNA, 19 nt, Artificial Sequence
  Description of Artificial Sequence: Synthetic oligonucleotide
agggaagagccgaugagaa

SEQ ID NO: 1716109 - RNA, 19 nt, Artificial Sequence
  Description of Artificial Sequence: Synthetic oligonucleotide
auugaggguccaauagaga

SEQ ID NO: 1716110 - RNA, 19 nt, Artificial Sequence
  Description of Artificial Sequence: Synthetic oligonucleotide
ucguccugguuucgagucu

SEQ ID NO: 1716111 - RNA, 19 nt, Artificial Sequence
  Description of Artificial Sequence: Synthetic oligonucleotide
uuacagcuguguggguucc

SEQ ID NO: 1716112 - RNA, 19 nt, Artificial Sequence
  Description of Artificial Sequence: Synthetic oligonucleotide
aggauagccuguccuuuau

SEQ ID NO: 1716113 - RNA, 19 nt, Artificial Sequence
  Description of Artificial Sequence: Synthetic oligonucleotide
uguauccccgugugcgccu

SEQ ID NO: 1716114 - RNA, 19 nt, Artificial Sequence
  Description of Artificial Sequence: Synthetic oligonucleotide
cuuggacaaaguauacagu

SEQ ID NO: 1716115 - RNA, 19 nt, Artificial Sequence
  Description of Artificial Sequence: Synthetic oligonucleotide
uccugaccauaccaccuua

SEQ ID NO: 1716116 - RNA, 19 nt, Artificial Sequence
  Description of Artificial Sequence: Synthetic oligonucleotide
guccaggacguccaauguc

SEQ ID NO: 1716117 - RNA, 19 nt, Artificial Sequence
  Description of Artificial Sequence: Synthetic oligonucleotide
guacaggcggaagcugagg

SEQ ID NO: 1716118 - RNA, 19 nt, Artificial Sequence
  Description of Artificial Sequence: Synthetic oligonucleotide
uaguucagaggggcccuag

SEQ ID NO: 1716119 - RNA, 19 nt, Artificial Sequence
  Description of Artificial Sequence: Synthetic oligonucleotide
caagcugcaggaggauagc

SEQ ID NO: 1716120 - RNA, 19 nt, Artificial Sequence
  Description of Artificial Sequence: Synthetic oligonucleotide
uccauguauagagcaggua

SEQ ID NO: 1716121 - RNA, 19 nt, Artificial Sequence
  Description of Artificial Sequence: Synthetic oligonucleotide
aagagccgaugagaagagu

SEQ ID NO: 1716122 - RNA, 19 nt, Artificial Sequence
  Description of Artificial Sequence: Synthetic oligonucleotide
guugguguguaagaaugua

SEQ ID NO: 1716123 - RNA, 19 nt, Artificial Sequence
  Description of Artificial Sequence: Synthetic oligonucleotide
uucgagggguggaggcagc

SEQ ID NO: 1716124 - RNA, 19 nt, Artificial Sequence
  Description of Artificial Sequence: Synthetic oligonucleotide
guaguugguguguaagaau

SEQ ID NO: 1716125 - RNA, 19 nt, Artificial Sequence
  Description of Artificial Sequence: Synthetic oligonucleotide
uccacgcgguagcggaucu

SEQ ID NO: 1716126 - RNA, 19 nt, Artificial Sequence
  Description of Artificial Sequence: Synthetic oligonucleotide
ugcauccaagcacgccacu

SEQ ID NO: 1716127 - RNA, 19 nt, Artificial Sequence
  Description of Artificial Sequence: Synthetic oligonucleotide
caaggcggcaggaggucug

SEQ ID NO: 1716128 - RNA, 19 nt, Artificial Sequence
  Description of Artificial Sequence: Synthetic oligonucleotide
guagaugggacagcuccga

SEQ ID NO: 1716129 - RNA, 19 nt, Artificial Sequence
  Description of Artificial Sequence: Synthetic oligonucleotide
cucacauguguuguccuga

SEQ ID NO: 1716130 - RNA, 19 nt, Artificial Sequence
  Description of Artificial Sequence: Synthetic oligonucleotide
agguuguccccugacugcu

SEQ ID NO: 1716131 - RNA, 19 nt, Artificial Sequence
  Description of Artificial Sequence: Synthetic oligonucleotide
gugcgccugguguccagcg

SEQ ID NO: 1716132 - RNA, 19 nt, Artificial Sequence
  Description of Artificial Sequence: Synthetic oligonucleotide
gaccucucgccgugccccg

SEQ ID NO: 1716133 - RNA, 19 nt, Artificial Sequence
  Description of Artificial Sequence: Synthetic oligonucleotide
gguuucgagucuuguguga

SEQ ID NO: 1716134 - RNA, 19 nt, Artificial Sequence
  Description of Artificial Sequence: Synthetic oligonucleotide
ucgagcaguaugcgugcuu

SEQ ID NO: 1716135 - RNA, 19 nt, Artificial Sequence
  Description of Artificial Sequence: Synthetic oligonucleotide
gauaguucagaggggcccu

SEQ ID NO: 1716136 - RNA, 19 nt, Artificial Sequence
  Description of Artificial Sequence: Synthetic oligonucleotide
acacggcucacgugcacau

SEQ ID NO: 1716137 - RNA, 19 nt, Artificial Sequence
  Description of Artificial Sequence: Synthetic oligonucleotide
ggcucacgugcacaucggg

SEQ ID NO: 1716138 - RNA, 19 nt, Artificial Sequence
  Description of Artificial Sequence: Synthetic oligonucleotide
uauccccgugugcgccugg

SEQ ID NO: 1716139 - RNA, 19 nt, Artificial Sequence
  Description of Artificial Sequence: Synthetic oligonucleotide
ugugcgccugguguccagc

SEQ ID NO: 1716140 - RNA, 19 nt, Artificial Sequence
  Description of Artificial Sequence: Synthetic oligonucleotide
caugacacaccagguuguc

SEQ ID NO: 1716141 - RNA, 19 nt, Artificial Sequence
  Description of Artificial Sequence: Synthetic oligonucleotide
gccgaugagaagagugggg

SEQ ID NO: 1716142 - RNA, 19 nt, Artificial Sequence
  Description of Artificial Sequence: Synthetic oligonucleotide
agcacgccacuggucguac

SEQ ID NO: 1716143 - RNA, 19 nt, Artificial Sequence
  Description of Artificial Sequence: Synthetic oligonucleotide
cacgugcacaucggguggg

SEQ ID NO: 1716144 - RNA, 19 nt, Artificial Sequence
  Description of Artificial Sequence: Synthetic oligonucleotide
uucgacccguagaucccaa

SEQ ID NO: 1716145 - RNA, 19 nt, Artificial Sequence
  Description of Artificial Sequence: Synthetic oligonucleotide
gcaguaugcgugcuucuuc

SEQ ID NO: 1716146 - RNA, 19 nt, Artificial Sequence
  Description of Artificial Sequence: Synthetic oligonucleotide
gauccccucguccugguuu

SEQ ID NO: 1716147 - RNA, 19 nt, Artificial Sequence
  Description of Artificial Sequence: Synthetic oligonucleotide
ccugaccauaccaccuuag

SEQ ID NO: 1716148 - RNA, 19 nt, Artificial Sequence
  Description of Artificial Sequence: Synthetic oligonucleotide
gcacaucagaucgagcuga

SEQ ID NO: 1716149 - RNA, 19 nt, Artificial Sequence
  Description of Artificial Sequence: Synthetic oligonucleotide
cccgcaaggcggcaggagg

SEQ ID NO: 1716150 - RNA, 19 nt, Artificial Sequence
  Description of Artificial Sequence: Synthetic oligonucleotide
cagaucgagcugagcccag

SEQ ID NO: 1716151 - RNA, 19 nt, Artificial Sequence
  Description of Artificial Sequence: Synthetic oligonucleotide
gucaccacguccaggacgu

SEQ ID NO: 1716152 - RNA, 19 nt, Artificial Sequence
  Description of Artificial Sequence: Synthetic oligonucleotide
uacaacgcacuuggacaaa

SEQ ID NO: 1716153 - RNA, 19 nt, Artificial Sequence
  Description of Artificial Sequence: Synthetic oligonucleotide
cagccgaggaacugcuuga

SEQ ID NO: 1716154 - RNA, 19 nt, Artificial Sequence
  Description of Artificial Sequence: Synthetic oligonucleotide
uucgagcaguaugcgugcu

SEQ ID NO: 1716155 - RNA, 19 nt, Artificial Sequence
  Description of Artificial Sequence: Synthetic oligonucleotide
gguccaauagagacccuca

SEQ ID NO: 1716156 - RNA, 19 nt, Artificial Sequence
  Description of Artificial Sequence: Synthetic oligonucleotide
ucucgccgugccccgucug

SEQ ID NO: 1716157 - RNA, 19 nt, Artificial Sequence
  Description of Artificial Sequence: Synthetic oligonucleotide
ggaccucucgccgugcccc

SEQ ID NO: 1716158 - RNA, 19 nt, Artificial Sequence
  Description of Artificial Sequence: Synthetic oligonucleotide
cuggucguacaggcggaag

SEQ ID NO: 1716159 - RNA, 19 nt, Artificial Sequence
  Description of Artificial Sequence: Synthetic oligonucleotide
auacaguaccgggcuucag

SEQ ID NO: 1716160 - RNA, 19 nt, Artificial Sequence
  Description of Artificial Sequence: Synthetic oligonucleotide
caccagguuguccccugac

SEQ ID NO: 1716161 - RNA, 19 nt, Artificial Sequence
  Description of Artificial Sequence: Synthetic oligonucleotide
ccauugaggguccaauaga

SEQ ID NO: 1716162 - RNA, 19 nt, Artificial Sequence
  Description of Artificial Sequence: Synthetic oligonucleotide
gcagcggugggguggcucc

SEQ ID NO: 1716163 - RNA, 19 nt, Artificial Sequence
  Description of Artificial Sequence: Synthetic oligonucleotide
ucgacccguagaucccaaa

SEQ ID NO: 1716164 - RNA, 19 nt, Artificial Sequence
  Description of Artificial Sequence: Synthetic oligonucleotide
aagcacgccacuggucgua

SEQ ID NO: 1716165 - RNA, 19 nt, Artificial Sequence
  Description of Artificial Sequence: Synthetic oligonucleotide
caacacggcucacgugcac

SEQ ID NO: 1716166 - RNA, 19 nt, Artificial Sequence
  Description of Artificial Sequence: Synthetic oligonucleotide
gaaacccagcggacgcuca

SEQ ID NO: 1716167 - RNA, 19 nt, Artificial Sequence
  Description of Artificial Sequence: Synthetic oligonucleotide
cagugugguaguccucaca

SEQ ID NO: 1716168 - RNA, 19 nt, Artificial Sequence
  Description of Artificial Sequence: Synthetic oligonucleotide
auguguuguccugaccaua

SEQ ID NO: 1716169 - RNA, 19 nt, Artificial Sequence
  Description of Artificial Sequence: Synthetic oligonucleotide
gcauccaagcacgccacug

SEQ ID NO: 1716170 - RNA, 19 nt, Artificial Sequence
  Description of Artificial Sequence: Synthetic oligonucleotide
gcuugcagggaagagccga

SEQ ID NO: 1716171 - RNA, 19 nt, Artificial Sequence
  Description of Artificial Sequence: Synthetic oligonucleotide
agcuugcagggaagagccg

SEQ ID NO: 1716172 - RNA, 19 nt, Artificial Sequence
  Description of Artificial Sequence: Synthetic oligonucleotide
cugcuugagcucgcgccgc

SEQ ID NO: 1716173 - RNA, 19 nt, Artificial Sequence
  Description of Artificial Sequence: Synthetic oligonucleotide
agaucgagcugagcccaga

SEQ ID NO: 1716174 - RNA, 19 nt, Artificial Sequence
  Description of Artificial Sequence: Synthetic oligonucleotide
guagagguguuaaguagau

SEQ ID NO: 1716175 - RNA, 19 nt, Artificial Sequence
  Description of Artificial Sequence: Synthetic oligonucleotide
cuccauguauagagcaggu

SEQ ID NO: 1716176 - RNA, 19 nt, Artificial Sequence
  Description of Artificial Sequence: Synthetic oligonucleotide
guucagaggggcccuaguu

SEQ ID NO: 1716177 - RNA, 19 nt, Artificial Sequence
  Description of Artificial Sequence: Synthetic oligonucleotide
gcuuguauuugagggagua

SEQ ID NO: 1716178 - RNA, 19 nt, Artificial Sequence
  Description of Artificial Sequence: Synthetic oligonucleotide
agcuuguauuugagggagu

SEQ ID NO: 1716179 - RNA, 19 nt, Artificial Sequence
  Description of Artificial Sequence: Synthetic oligonucleotide
cuuccacccagaucucaua

SEQ ID NO: 1716180 - RNA, 19 nt, Artificial Sequence
  Description of Artificial Sequence: Synthetic oligonucleotide
gggauguggcaggaaugag

SEQ ID NO: 1716181 - RNA, 19 nt, Artificial Sequence
  Description of Artificial Sequence: Synthetic oligonucleotide
cugggcucgccgccccgcg

SEQ ID NO: 1716182 - RNA, 19 nt, Artificial Sequence
  Description of Artificial Sequence: Synthetic oligonucleotide
ggcucgcacaccccgccgc

SEQ ID NO: 1716183 - RNA, 19 nt, Artificial Sequence
  Description of Artificial Sequence: Synthetic oligonucleotide
ggguggcuccacucgcucc

SEQ ID NO: 1716184 - RNA, 19 nt, Artificial Sequence
  Description of Artificial Sequence: Synthetic oligonucleotide
ccaggacguccaaugucag

SEQ ID NO: 1716185 - RNA, 19 nt, Artificial Sequence
  Description of Artificial Sequence: Synthetic oligonucleotide
gcuguguggguucccgauc

SEQ ID NO: 1716186 - RNA, 19 nt, Artificial Sequence
  Description of Artificial Sequence: Synthetic oligonucleotide
cuuuggggauguggcagga

SEQ ID NO: 1716187 - RNA, 19 nt, Artificial Sequence
  Description of Artificial Sequence: Synthetic oligonucleotide
guguggguucccgauccuc

SEQ ID NO: 1716188 - RNA, 19 nt, Artificial Sequence
  Description of Artificial Sequence: Synthetic oligonucleotide
gagcaguaugcgugcuucu

SEQ ID NO: 1716189 - RNA, 19 nt, Artificial Sequence
  Description of Artificial Sequence: Synthetic oligonucleotide
gugugcgccugguguccag

SEQ ID NO: 1716190 - RNA, 19 nt, Artificial Sequence
  Description of Artificial Sequence: Synthetic oligonucleotide
agccagccgaggaacugcu

SEQ ID NO: 1716191 - RNA, 19 nt, Artificial Sequence
  Description of Artificial Sequence: Synthetic oligonucleotide
cuccacgcgguagcggauc

SEQ ID NO: 1716192 - RNA, 19 nt, Artificial Sequence
  Description of Artificial Sequence: Synthetic oligonucleotide
acuggucguacaggcggaa

SEQ ID NO: 1716193 - RNA, 19 nt, Artificial Sequence
  Description of Artificial Sequence: Synthetic oligonucleotide
guauccccgugugcgccug

SEQ ID NO: 1716194 - RNA, 19 nt, Artificial Sequence
  Description of Artificial Sequence: Synthetic oligonucleotide
gacccacagugugguaguc

SEQ ID NO: 1716195 - RNA, 19 nt, Artificial Sequence
  Description of Artificial Sequence: Synthetic oligonucleotide
cccguagaucccaaaugga

SEQ ID NO: 1716196 - RNA, 19 nt, Artificial Sequence
  Description of Artificial Sequence: Synthetic oligonucleotide
auaguucagaggggcccua

SEQ ID NO: 1716197 - RNA, 19 nt, Artificial Sequence
  Description of Artificial Sequence: Synthetic oligonucleotide
cuugcagggaagagccgau

SEQ ID NO: 1716198 - RNA, 19 nt, Artificial Sequence
  Description of Artificial Sequence: Synthetic oligonucleotide
agcggacgcucagcugguc

SEQ ID NO: 1716199 - RNA, 19 nt, Artificial Sequence
  Description of Artificial Sequence: Synthetic oligonucleotide
cgagcaguaugcgugcuuc

SEQ ID NO: 1716200 - RNA, 19 nt, Artificial Sequence
  Description of Artificial Sequence: Synthetic oligonucleotide
gccgucccgggcaugacac

SEQ ID NO: 1716201 - RNA, 19 nt, Artificial Sequence
  Description of Artificial Sequence: Synthetic oligonucleotide
cacaccccgccgcccgggc

SEQ ID NO: 1716202 - RNA, 19 nt, Artificial Sequence
  Description of Artificial Sequence: Synthetic oligonucleotide
ccguagaucccaaauggau

SEQ ID NO: 1716203 - RNA, 19 nt, Artificial Sequence
  Description of Artificial Sequence: Synthetic oligonucleotide
gcucgcacaccccgccgcc

SEQ ID NO: 1716204 - RNA, 19 nt, Artificial Sequence
  Description of Artificial Sequence: Synthetic oligonucleotide
cccuaguuggggcaaaccu

SEQ ID NO: 1716205 - RNA, 19 nt, Artificial Sequence
  Description of Artificial Sequence: Synthetic oligonucleotide
guccugaccauaccaccuu

SEQ ID NO: 1716206 - RNA, 19 nt, Artificial Sequence
  Description of Artificial Sequence: Synthetic oligonucleotide
gcccuaguuggggcaaacc

SEQ ID NO: 1716207 - RNA, 19 nt, Artificial Sequence
  Description of Artificial Sequence: Synthetic oligonucleotide
gccaggguagagguguuaa

SEQ ID NO: 1716208 - RNA, 19 nt, Artificial Sequence
  Description of Artificial Sequence: Synthetic oligonucleotide
gcggcgcccauugaggguc

SEQ ID NO: 1716209 - RNA, 19 nt, Artificial Sequence
  Description of Artificial Sequence: Synthetic oligonucleotide
cccgugugcgccugguguc

SEQ ID NO: 1716210 - RNA, 19 nt, Artificial Sequence
  Description of Artificial Sequence: Synthetic oligonucleotide
ggauuacaacgcacuugga

SEQ ID NO: 1716211 - RNA, 19 nt, Artificial Sequence
  Description of Artificial Sequence: Synthetic oligonucleotide
gcccauugaggguccaaua

SEQ ID NO: 1716212 - RNA, 19 nt, Artificial Sequence
  Description of Artificial Sequence: Synthetic oligonucleotide
auccccgugugcgccuggu

SEQ ID NO: 1716213 - RNA, 19 nt, Artificial Sequence
  Description of Artificial Sequence: Synthetic oligonucleotide
cuccgagggcaggcggcgc

SEQ ID NO: 1716214 - RNA, 19 nt, Artificial Sequence
  Description of Artificial Sequence: Synthetic oligonucleotide
gugaaacccagcggacgcu

SEQ ID NO: 1716215 - RNA, 19 nt, Artificial Sequence
  Description of Artificial Sequence: Synthetic oligonucleotide
cacggcucacgugcacauc

SEQ ID NO: 1716216 - RNA, 19 nt, Artificial Sequence
  Description of Artificial Sequence: Synthetic oligonucleotide
ccaacacggcucacgugca

SEQ ID NO: 1716217 - RNA, 19 nt, Artificial Sequence
  Description of Artificial Sequence: Synthetic oligonucleotide
gcucacuucgaggggugga

SEQ ID NO: 1716218 - RNA, 19 nt, Artificial Sequence
  Description of Artificial Sequence: Synthetic oligonucleotide
cguagaucccaaauggauu

SEQ ID NO: 1716219 - RNA, 19 nt, Artificial Sequence
  Description of Artificial Sequence: Synthetic oligonucleotide
gcugccgucccgggcauga

SEQ ID NO: 1716220 - RNA, 19 nt, Artificial Sequence
  Description of Artificial Sequence: Synthetic oligonucleotide
cggcucacgugcacaucgg

SEQ ID NO: 1716221 - RNA, 19 nt, Artificial Sequence
  Description of Artificial Sequence: Synthetic oligonucleotide
gcucacgugcacaucgggu

SEQ ID NO: 1716222 - RNA, 19 nt, Artificial Sequence
  Description of Artificial Sequence: Synthetic oligonucleotide
ggcaagugagguccuucau

SEQ ID NO: 1716223 - RNA, 19 nt, Artificial Sequence
  Description of Artificial Sequence: Synthetic oligonucleotide
ggguccguggucaccacgu

SEQ ID NO: 1716224 - RNA, 19 nt, Artificial Sequence
  Description of Artificial Sequence: Synthetic oligonucleotide
gccccgucugcccgagggc

SEQ ID NO: 1716225 - RNA, 19 nt, Artificial Sequence
  Description of Artificial Sequence: Synthetic oligonucleotide
ccgugugcgccuggugucc

SEQ ID NO: 1716226 - RNA, 19 nt, Artificial Sequence
  Description of Artificial Sequence: Synthetic oligonucleotide
ugcugccgucccgggcaug

SEQ ID NO: 1716227 - RNA, 19 nt, Artificial Sequence
  Description of Artificial Sequence: Synthetic oligonucleotide
agcggcaagugagguccuu

SEQ ID NO: 1716228 - RNA, 19 nt, Artificial Sequence
  Description of Artificial Sequence: Synthetic oligonucleotide
ccccaacacggcucacgug

SEQ ID NO: 1716229 - RNA, 19 nt, Artificial Sequence
  Description of Artificial Sequence: Synthetic oligonucleotide
ggcccuaguuggggcaaac

SEQ ID NO: 1716230 - RNA, 19 nt, Artificial Sequence
  Description of Artificial Sequence: Synthetic oligonucleotide
ggaccugaacagcuccuuu

SEQ ID NO: 1716231 - RNA, 19 nt, Artificial Sequence
  Description of Artificial Sequence: Synthetic oligonucleotide
ggcagcggugggguggcuc

SEQ ID NO: 1716232 - RNA, 19 nt, Artificial Sequence
  Description of Artificial Sequence: Synthetic oligonucleotide
aggguccaauagagacccu

SEQ ID NO: 1716233 - RNA, 19 nt, Artificial Sequence
  Description of Artificial Sequence: Synthetic oligonucleotide
cccagaucucauagggagu

SEQ ID NO: 1716234 - RNA, 19 nt, Artificial Sequence
  Description of Artificial Sequence: Synthetic oligonucleotide
gcccgcaaggcggcaggag

SEQ ID NO: 1716235 - RNA, 19 nt, Artificial Sequence
  Description of Artificial Sequence: Synthetic oligonucleotide
gcacaccccgccgcccggg

SEQ ID NO: 1716236 - RNA, 19 nt, Artificial Sequence
  Description of Artificial Sequence: Synthetic oligonucleotide
accucucgccgugccccgu

SEQ ID NO: 1716237 - RNA, 19 nt, Artificial Sequence
  Description of Artificial Sequence: Synthetic oligonucleotide
aggcggcaggaggucuggu

SEQ ID NO: 1716238 - RNA, 19 nt, Artificial Sequence
  Description of Artificial Sequence: Synthetic oligonucleotide
cugccgucccgggcaugac

SEQ ID NO: 1716239 - RNA, 19 nt, Artificial Sequence
  Description of Artificial Sequence: Synthetic oligonucleotide
cccgggcaugacacaccag

SEQ ID NO: 1716240 - RNA, 19 nt, Artificial Sequence
  Description of Artificial Sequence: Synthetic oligonucleotide
cccgcggcucgcacacccc

SEQ ID NO: 1716241 - RNA, 19 nt, Artificial Sequence
  Description of Artificial Sequence: Synthetic oligonucleotide
gcccagacgauugguggcu

SEQ ID NO: 1716242 - RNA, 19 nt, Artificial Sequence
  Description of Artificial Sequence: Synthetic oligonucleotide
cagcggacgcucagcuggu

SEQ ID NO: 1716243 - RNA, 19 nt, Artificial Sequence
  Description of Artificial Sequence: Synthetic oligonucleotide
ccucguccugguuucgagu

SEQ ID NO: 1716244 - RNA, 19 nt, Artificial Sequence
  Description of Artificial Sequence: Synthetic oligonucleotide
gcacgccacuggucguaca

SEQ ID NO: 1716245 - RNA, 19 nt, Artificial Sequence
  Description of Artificial Sequence: Synthetic oligonucleotide
ccucucgccgugccccguc

SEQ ID NO: 1716246 - RNA, 19 nt, Artificial Sequence
  Description of Artificial Sequence: Synthetic oligonucleotide
ccgcaaggcggcaggaggu

SEQ ID NO: 1716247 - RNA, 19 nt, Artificial Sequence
  Description of Artificial Sequence: Synthetic oligonucleotide
cucucgccgugccccgucu

SEQ ID NO: 1716248 - RNA, 19 nt, Artificial Sequence
  Description of Artificial Sequence: Synthetic oligonucleotide
ggcggcgcccauugagggu

SEQ ID NO: 1716249 - RNA, 19 nt, Artificial Sequence
  Description of Artificial Sequence: Synthetic oligonucleotide
ggggcccuaguuggggcaa

SEQ ID NO: 1716250 - RNA, 19 nt, Artificial Sequence
  Description of Artificial Sequence: Synthetic oligonucleotide
cgcgguagcggaucuggua

SEQ ID NO: 1716251 - RNA, 19 nt, Artificial Sequence
  Description of Artificial Sequence: Synthetic oligonucleotide
cggcucgcacaccccgccg

SEQ ID NO: 1716252 - RNA, 19 nt, Artificial Sequence
  Description of Artificial Sequence: Synthetic oligonucleotide
gccuggacccauugagguu

SEQ ID NO: 1716253 - RNA, 19 nt, Artificial Sequence
  Description of Artificial Sequence: Synthetic oligonucleotide
cccgagggcaggauccccu

SEQ ID NO: 1716254 - RNA, 19 nt, Artificial Sequence
  Description of Artificial Sequence: Synthetic oligonucleotide
ccauaccaccuuagcuugu

SEQ ID NO: 1716255 - RNA, 19 nt, Artificial Sequence
  Description of Artificial Sequence: Synthetic oligonucleotide
cggaucugguacuuggcuu

SEQ ID NO: 1716256 - RNA, 19 nt, Artificial Sequence
  Description of Artificial Sequence: Synthetic oligonucleotide
cgacccguagaucccaaau

SEQ ID NO: 1716257 - RNA, 19 nt, Artificial Sequence
  Description of Artificial Sequence: Synthetic oligonucleotide
cgcaaggcggcaggagguc

SEQ ID NO: 1716258 - RNA, 19 nt, Artificial Sequence
  Description of Artificial Sequence: Synthetic oligonucleotide
cgggcaugacacaccaggu

SEQ ID NO: 1716259 - RNA, 19 nt, Artificial Sequence
  Description of Artificial Sequence: Synthetic oligonucleotide
cgcacaccccgccgcccgg

SEQ ID NO: 1716260 - RNA, 19 nt, Artificial Sequence
  Description of Artificial Sequence: Synthetic oligonucleotide
cagcggcaagugagguccu

SEQ ID NO: 1716261 - RNA, 19 nt, Artificial Sequence
  Description of Artificial Sequence: Synthetic oligonucleotide
ccacgcgguagcggaucug

SEQ ID NO: 1716262 - RNA, 19 nt, Artificial Sequence
  Description of Artificial Sequence: Synthetic oligonucleotide
cguccaggacguccaaugu

SEQ ID NO: 1716263 - RNA, 19 nt, Artificial Sequence
  Description of Artificial Sequence: Synthetic oligonucleotide
ggcccgcaaggcggcagga

SEQ ID NO: 1716264 - RNA, 19 nt, Artificial Sequence
  Description of Artificial Sequence: Synthetic oligonucleotide
cgccugguguccagcggca

SEQ ID NO: 1716265 - RNA, 19 nt, Artificial Sequence
  Description of Artificial Sequence: Synthetic oligonucleotide
aggcagcggugggguggcu

SEQ ID NO: 1716266 - RNA, 19 nt, Artificial Sequence
  Description of Artificial Sequence: Synthetic oligonucleotide
cgugccccgucugcccgag

SEQ ID NO: 1716267 - RNA, 19 nt, Artificial Sequence
  Description of Artificial Sequence: Synthetic oligonucleotide
ccgucccgggcaugacaca

SEQ ID NO: 1716268 - RNA, 19 nt, Artificial Sequence
  Description of Artificial Sequence: Synthetic oligonucleotide
ccgcaccgggcccgagcug

SEQ ID NO: 1716269 - RNA, 19 nt, Artificial Sequence
  Description of Artificial Sequence: Synthetic oligonucleotide
ccccucguccugguuucga

SEQ ID NO: 1716270 - RNA, 19 nt, Artificial Sequence
  Description of Artificial Sequence: Synthetic oligonucleotide
gcgcccauugaggguccaa

SEQ ID NO: 1716271 - RNA, 19 nt, Artificial Sequence
  Description of Artificial Sequence: Synthetic oligonucleotide
ccgugccccgucugcccga

SEQ ID NO: 1716272 - RNA, 19 nt, Artificial Sequence
  Description of Artificial Sequence: Synthetic oligonucleotide
gcccgggcgcucacuucga

SEQ ID NO: 1716273 - RNA, 19 nt, Artificial Sequence
  Description of Artificial Sequence: Synthetic oligonucleotide
gcgguggccccaggugugu

SEQ ID NO: 1716274 - RNA, 19 nt, Artificial Sequence
  Description of Artificial Sequence: Synthetic oligonucleotide
cgcccauugaggguccaau

SEQ ID NO: 1716275 - RNA, 19 nt, Artificial Sequence
  Description of Artificial Sequence: Synthetic oligonucleotide
cggcaggaccucucgccgu

SEQ ID NO: 1716276 - RNA, 19 nt, Artificial Sequence
  Description of Artificial Sequence: Synthetic oligonucleotide
cgguggccccagguguguc

SEQ ID NO: 1716277 - RNA, 19 nt, Artificial Sequence
  Description of Artificial Sequence: Synthetic oligonucleotide
gcgccgcaccgggcccgag

SEQ ID NO: 1716278 - RNA, 19 nt, Artificial Sequence
  Description of Artificial Sequence: Synthetic oligonucleotide
gccagccgaggaacugcuu

SEQ ID NO: 1716279 - RNA, 19 nt, Artificial Sequence
  Description of Artificial Sequence: Synthetic oligonucleotide
aauuauauuaaauccaugc

SEQ ID NO: 1716280 - RNA, 19 nt, Artificial Sequence
  Description of Artificial Sequence: Synthetic oligonucleotide
aucucaaacaugcagaggc

SEQ ID NO: 1716281 - RNA, 19 nt, Artificial Sequence
  Description of Artificial Sequence: Synthetic oligonucleotide
augaauucuaugcaaaugc

SEQ ID NO: 1716282 - RNA, 19 nt, Artificial Sequence
  Description of Artificial Sequence: Synthetic oligonucleotide
auuauauuaaauccaugcc

SEQ ID NO: 1716283 - RNA, 19 nt, Artificial Sequence
  Description of Artificial Sequence: Synthetic oligonucleotide
aacaguauguaccagauau

SEQ ID NO: 1716284 - RNA, 19 nt, Artificial Sequence
  Description of Artificial Sequence: Synthetic oligonucleotide
gaagugaacaguuuugggg

SEQ ID NO: 1716285 - RNA, 19 nt, Artificial Sequence
  Description of Artificial Sequence: Synthetic oligonucleotide
acaauguucacacucuccc

SEQ ID NO: 1716286 - RNA, 19 nt, Artificial Sequence
  Description of Artificial Sequence: Synthetic oligonucleotide
aauucuaugcaaaugcuuc

SEQ ID NO: 1716287 - RNA, 19 nt, Artificial Sequence
  Description of Artificial Sequence: Synthetic oligonucleotide
ugcaggguagcaaauaugg

SEQ ID NO: 1716288 - RNA, 19 nt, Artificial Sequence
  Description of Artificial Sequence: Synthetic oligonucleotide
uggaacuuuguuuugagag

SEQ ID NO: 1716289 - RNA, 19 nt, Artificial Sequence
  Description of Artificial Sequence: Synthetic oligonucleotide
agacaaugccaccagaacc

SEQ ID NO: 1716290 - RNA, 19 nt, Artificial Sequence
  Description of Artificial Sequence: Synthetic oligonucleotide
uaucccaugaauucuaugc

SEQ ID NO: 1716291 - RNA, 19 nt, Artificial Sequence
  Description of Artificial Sequence: Synthetic oligonucleotide
uaugaaucagggcagagcu

SEQ ID NO: 1716292 - RNA, 19 nt, Artificial Sequence
  Description of Artificial Sequence: Synthetic oligonucleotide
agaucuaaacaauacuggg

SEQ ID NO: 1716293 - RNA, 19 nt, Artificial Sequence
  Description of Artificial Sequence: Synthetic oligonucleotide
ugaggaaccacccugauua

SEQ ID NO: 1716294 - RNA, 19 nt, Artificial Sequence
  Description of Artificial Sequence: Synthetic oligonucleotide
agauaaagggagcaagagc

SEQ ID NO: 1716295 - RNA, 19 nt, Artificial Sequence
  Description of Artificial Sequence: Synthetic oligonucleotide
uauauuaaauccaugccau

SEQ ID NO: 1716296 - RNA, 19 nt, Artificial Sequence
  Description of Artificial Sequence: Synthetic oligonucleotide
aaggcuagugugcaggagg

SEQ ID NO: 1716297 - RNA, 19 nt, Artificial Sequence
  Description of Artificial Sequence: Synthetic oligonucleotide
uuucacacaucccaggccc

SEQ ID NO: 1716298 - RNA, 19 nt, Artificial Sequence
  Description of Artificial Sequence: Synthetic oligonucleotide
ugaaacugcuguuaacagg

SEQ ID NO: 1716299 - RNA, 19 nt, Artificial Sequence
  Description of Artificial Sequence: Synthetic oligonucleotide
auaugcacugaugauaugg

SEQ ID NO: 1716300 - RNA, 19 nt, Artificial Sequence
  Description of Artificial Sequence: Synthetic oligonucleotide
uaugcacugaugauauggg

SEQ ID NO: 1716301 - RNA, 19 nt, Artificial Sequence
  Description of Artificial Sequence: Synthetic oligonucleotide
ggagcaagagccuauaagg

SEQ ID NO: 1716302 - RNA, 19 nt, Artificial Sequence
  Description of Artificial Sequence: Synthetic oligonucleotide
guauguaccagauaugcac

SEQ ID NO: 1716303 - RNA, 19 nt, Artificial Sequence
  Description of Artificial Sequence: Synthetic oligonucleotide
gaagggaacagccaccucc

SEQ ID NO: 1716304 - RNA, 19 nt, Artificial Sequence
  Description of Artificial Sequence: Synthetic oligonucleotide
aaacaauguucacacucuc

SEQ ID NO: 1716305 - RNA, 19 nt, Artificial Sequence
  Description of Artificial Sequence: Synthetic oligonucleotide
aaaggaagugaacaguuuu

SEQ ID NO: 1716306 - RNA, 19 nt, Artificial Sequence
  Description of Artificial Sequence: Synthetic oligonucleotide
aagucuuacacuggucagc

SEQ ID NO: 1716307 - RNA, 19 nt, Artificial Sequence
  Description of Artificial Sequence: Synthetic oligonucleotide
cugauuaccccuuccagcc

SEQ ID NO: 1716308 - RNA, 19 nt, Artificial Sequence
  Description of Artificial Sequence: Synthetic oligonucleotide
agccacucugcucuaaacc

SEQ ID NO: 1716309 - RNA, 19 nt, Artificial Sequence
  Description of Artificial Sequence: Synthetic oligonucleotide
accagauaugcacugauga

SEQ ID NO: 1716310 - RNA, 19 nt, Artificial Sequence
  Description of Artificial Sequence: Synthetic oligonucleotide
aacguucccagccaguacu

SEQ ID NO: 1716311 - RNA, 19 nt, Artificial Sequence
  Description of Artificial Sequence: Synthetic oligonucleotide
aucuaaacaauacugggua

SEQ ID NO: 1716312 - RNA, 19 nt, Artificial Sequence
  Description of Artificial Sequence: Synthetic oligonucleotide
uggccuuucaaaacaaugu

SEQ ID NO: 1716313 - RNA, 19 nt, Artificial Sequence
  Description of Artificial Sequence: Synthetic oligonucleotide
aaggacaaaaggccccagg

SEQ ID NO: 1716314 - RNA, 19 nt, Artificial Sequence
  Description of Artificial Sequence: Synthetic oligonucleotide
aaaacaauguucacacucu

SEQ ID NO: 1716315 - RNA, 19 nt, Artificial Sequence
  Description of Artificial Sequence: Synthetic oligonucleotide
ugaguacagccacugaggc

SEQ ID NO: 1716316 - RNA, 19 nt, Artificial Sequence
  Description of Artificial Sequence: Synthetic oligonucleotide
aaauauggcugacucccug

SEQ ID NO: 1716317 - RNA, 19 nt, Artificial Sequence
  Description of Artificial Sequence: Synthetic oligonucleotide
agucuuacacuggucagcc

SEQ ID NO: 1716318 - RNA, 19 nt, Artificial Sequence
  Description of Artificial Sequence: Synthetic oligonucleotide
aagccacccacccucuggc

SEQ ID NO: 1716319 - RNA, 19 nt, Artificial Sequence
  Description of Artificial Sequence: Synthetic oligonucleotide
ucaggacucauguggaugc

SEQ ID NO: 1716320 - RNA, 19 nt, Artificial Sequence
  Description of Artificial Sequence: Synthetic oligonucleotide
uuuguuuugagagcauuca

SEQ ID NO: 1716321 - RNA, 19 nt, Artificial Sequence
  Description of Artificial Sequence: Synthetic oligonucleotide
aguacuccugccaacaagg

SEQ ID NO: 1716322 - RNA, 19 nt, Artificial Sequence
  Description of Artificial Sequence: Synthetic oligonucleotide
acugaggccccacaacagc

SEQ ID NO: 1716323 - RNA, 19 nt, Artificial Sequence
  Description of Artificial Sequence: Synthetic oligonucleotide
uaaauccaugccaucugag

SEQ ID NO: 1716324 - RNA, 19 nt, Artificial Sequence
  Description of Artificial Sequence: Synthetic oligonucleotide
cugcucaggacucaugugg

SEQ ID NO: 1716325 - RNA, 19 nt, Artificial Sequence
  Description of Artificial Sequence: Synthetic oligonucleotide
aacucaacacccucuuuca

SEQ ID NO: 1716326 - RNA, 19 nt, Artificial Sequence
  Description of Artificial Sequence: Synthetic oligonucleotide
aaacguucccagccaguac

SEQ ID NO: 1716327 - RNA, 19 nt, Artificial Sequence
  Description of Artificial Sequence: Synthetic oligonucleotide
uaagucuuacacuggucag

SEQ ID NO: 1716328 - RNA, 19 nt, Artificial Sequence
  Description of Artificial Sequence: Synthetic oligonucleotide
uguccaaaccacuggaacu

SEQ ID NO: 1716329 - RNA, 19 nt, Artificial Sequence
  Description of Artificial Sequence: Synthetic oligonucleotide
caguauguaccagauaugc

SEQ ID NO: 1716330 - RNA, 19 nt, Artificial Sequence
  Description of Artificial Sequence: Synthetic oligonucleotide
cacaacagccauauguggc

SEQ ID NO: 1716331 - RNA, 19 nt, Artificial Sequence
  Description of Artificial Sequence: Synthetic oligonucleotide
ucaacacccucuuucacac

SEQ ID NO: 1716332 - RNA, 19 nt, Artificial Sequence
  Description of Artificial Sequence: Synthetic oligonucleotide
aaauuauauuaaauccaug

SEQ ID NO: 1716333 - RNA, 19 nt, Artificial Sequence
  Description of Artificial Sequence: Synthetic oligonucleotide
ugacucccugguuagagag

SEQ ID NO: 1716334 - RNA, 19 nt, Artificial Sequence
  Description of Artificial Sequence: Synthetic oligonucleotide
gagaugacgagguaagcca

SEQ ID NO: 1716335 - RNA, 19 nt, Artificial Sequence
  Description of Artificial Sequence: Synthetic oligonucleotide
agcugcuugcucaacagcc

SEQ ID NO: 1716336 - RNA, 19 nt, Artificial Sequence
  Description of Artificial Sequence: Synthetic oligonucleotide
aacacccucuuucacacau

SEQ ID NO: 1716337 - RNA, 19 nt, Artificial Sequence
  Description of Artificial Sequence: Synthetic oligonucleotide
uggagauaaagggagcaag

SEQ ID NO: 1716338 - RNA, 19 nt, Artificial Sequence
  Description of Artificial Sequence: Synthetic oligonucleotide
auacuggguacuucccacc

SEQ ID NO: 1716339 - RNA, 19 nt, Artificial Sequence
  Description of Artificial Sequence: Synthetic oligonucleotide
gagauaaagggagcaagag

SEQ ID NO: 1716340 - RNA, 19 nt, Artificial Sequence
  Description of Artificial Sequence: Synthetic oligonucleotide
cuaagucuuacacugguca

SEQ ID NO: 1716341 - RNA, 19 nt, Artificial Sequence
  Description of Artificial Sequence: Synthetic oligonucleotide
ugaugauauggggaguggg

SEQ ID NO: 1716342 - RNA, 19 nt, Artificial Sequence
  Description of Artificial Sequence: Synthetic oligonucleotide
uggagugauggagauaaag

SEQ ID NO: 1716343 - RNA, 19 nt, Artificial Sequence
  Description of Artificial Sequence: Synthetic oligonucleotide
cauucaguagcucaaacaa

SEQ ID NO: 1716344 - RNA, 19 nt, Artificial Sequence
  Description of Artificial Sequence: Synthetic oligonucleotide
agccuauaaggcuagugug

SEQ ID NO: 1716345 - RNA, 19 nt, Artificial Sequence
  Description of Artificial Sequence: Synthetic oligonucleotide
guucucaguucuuuggcag

SEQ ID NO: 1716346 - RNA, 19 nt, Artificial Sequence
  Description of Artificial Sequence: Synthetic oligonucleotide
ucuaaacaauacuggguac

SEQ ID NO: 1716347 - RNA, 19 nt, Artificial Sequence
  Description of Artificial Sequence: Synthetic oligonucleotide
uagacaaugccaccagaac

SEQ ID NO: 1716348 - RNA, 19 nt, Artificial Sequence
  Description of Artificial Sequence: Synthetic oligonucleotide
caugcagaggcucuuguac

SEQ ID NO: 1716349 - RNA, 19 nt, Artificial Sequence
  Description of Artificial Sequence: Synthetic oligonucleotide
ugcuaagucuuacacuggu

SEQ ID NO: 1716350 - RNA, 19 nt, Artificial Sequence
  Description of Artificial Sequence: Synthetic oligonucleotide
cuuuguuuugagagcauuc

SEQ ID NO: 1716351 - RNA, 19 nt, Artificial Sequence
  Description of Artificial Sequence: Synthetic oligonucleotide
gugcaggucuaauuuaucc

SEQ ID NO: 1716352 - RNA, 19 nt, Artificial Sequence
  Description of Artificial Sequence: Synthetic oligonucleotide
ggagugauggagauaaagg

SEQ ID NO: 1716353 - RNA, 19 nt, Artificial Sequence
  Description of Artificial Sequence: Synthetic oligonucleotide
uauguggccucccaguuua

SEQ ID NO: 1716354 - RNA, 19 nt, Artificial Sequence
  Description of Artificial Sequence: Synthetic oligonucleotide
ccugcuaagucuuacacug

SEQ ID NO: 1716355 - RNA, 19 nt, Artificial Sequence
  Description of Artificial Sequence: Synthetic oligonucleotide
gcaaauauggcugacuccc

SEQ ID NO: 1716356 - RNA, 19 nt, Artificial Sequence
  Description of Artificial Sequence: Synthetic oligonucleotide
uuuugagccagcgugggaa

SEQ ID NO: 1716357 - RNA, 19 nt, Artificial Sequence
  Description of Artificial Sequence: Synthetic oligonucleotide
aggaacaguauguaccaga

SEQ ID NO: 1716358 - RNA, 19 nt, Artificial Sequence
  Description of Artificial Sequence: Synthetic oligonucleotide
uuggcuauucugagcacug

SEQ ID NO: 1716359 - RNA, 19 nt, Artificial Sequence
  Description of Artificial Sequence: Synthetic oligonucleotide
augcacugaugauaugggg

SEQ ID NO: 1716360 - RNA, 19 nt, Artificial Sequence
  Description of Artificial Sequence: Synthetic oligonucleotide
ucuaaaccagaagugugca

SEQ ID NO: 1716361 - RNA, 19 nt, Artificial Sequence
  Description of Artificial Sequence: Synthetic oligonucleotide
aacugugaggcaucuugga

SEQ ID NO: 1716362 - RNA, 19 nt, Artificial Sequence
  Description of Artificial Sequence: Synthetic oligonucleotide
caugaaacugcuguuaaca

SEQ ID NO: 1716363 - RNA, 19 nt, Artificial Sequence
  Description of Artificial Sequence: Synthetic oligonucleotide
ugcucuaaaccagaagugu

SEQ ID NO: 1716364 - RNA, 19 nt, Artificial Sequence
  Description of Artificial Sequence: Synthetic oligonucleotide
gaggagaugacgagguaag

SEQ ID NO: 1716365 - RNA, 19 nt, Artificial Sequence
  Description of Artificial Sequence: Synthetic oligonucleotide
ugguccuacuccuugggga

SEQ ID NO: 1716366 - RNA, 19 nt, Artificial Sequence
  Description of Artificial Sequence: Synthetic oligonucleotide
agggccuaugaaucagggc

SEQ ID NO: 1716367 - RNA, 19 nt, Artificial Sequence
  Description of Artificial Sequence: Synthetic oligonucleotide
uuccgcaucuccuggaacu

SEQ ID NO: 1716368 - RNA, 19 nt, Artificial Sequence
  Description of Artificial Sequence: Synthetic oligonucleotide
agugauggagauaaaggga

SEQ ID NO: 1716369 - RNA, 19 nt, Artificial Sequence
  Description of Artificial Sequence: Synthetic oligonucleotide
gaucugucaaggcugagua

SEQ ID NO: 1716370 - RNA, 19 nt, Artificial Sequence
  Description of Artificial Sequence: Synthetic oligonucleotide
guuuugagagcauucaggu

SEQ ID NO: 1716371 - RNA, 19 nt, Artificial Sequence
  Description of Artificial Sequence: Synthetic oligonucleotide
uuaacaggaacaguaugua

SEQ ID NO: 1716372 - RNA, 19 nt, Artificial Sequence
  Description of Artificial Sequence: Synthetic oligonucleotide
ucauguggaugccaggcau

SEQ ID NO: 1716373 - RNA, 19 nt, Artificial Sequence
  Description of Artificial Sequence: Synthetic oligonucleotide
cuaugaaucagggcagagc

SEQ ID NO: 1716374 - RNA, 19 nt, Artificial Sequence
  Description of Artificial Sequence: Synthetic oligonucleotide
acaauacuggguacuuccc

SEQ ID NO: 1716375 - RNA, 19 nt, Artificial Sequence
  Description of Artificial Sequence: Synthetic oligonucleotide
gagcaagagccuauaaggc

SEQ ID NO: 1716376 - RNA, 19 nt, Artificial Sequence
  Description of Artificial Sequence: Synthetic oligonucleotide
uuggauagacaaugccacc

SEQ ID NO: 1716377 - RNA, 19 nt, Artificial Sequence
  Description of Artificial Sequence: Synthetic oligonucleotide
gggccuaugaaucagggca

SEQ ID NO: 1716378 - RNA, 19 nt, Artificial Sequence
  Description of Artificial Sequence: Synthetic oligonucleotide
uuuggcuauucugagcacu

SEQ ID NO: 1716379 - RNA, 19 nt, Artificial Sequence
  Description of Artificial Sequence: Synthetic oligonucleotide
ucucaaacaugcagaggcu

SEQ ID NO: 1716380 - RNA, 19 nt, Artificial Sequence
  Description of Artificial Sequence: Synthetic oligonucleotide
ggaagugaacaguuuuggg

SEQ ID NO: 1716381 - RNA, 19 nt, Artificial Sequence
  Description of Artificial Sequence: Synthetic oligonucleotide
acucaacacccucuuucac

SEQ ID NO: 1716382 - RNA, 19 nt, Artificial Sequence
  Description of Artificial Sequence: Synthetic oligonucleotide
acugccuggagugauggag

SEQ ID NO: 1716383 - RNA, 19 nt, Artificial Sequence
  Description of Artificial Sequence: Synthetic oligonucleotide
uuaucccaugaauucuaug

SEQ ID NO: 1716384 - RNA, 19 nt, Artificial Sequence
  Description of Artificial Sequence: Synthetic oligonucleotide
uaccagauaugcacugaug

SEQ ID NO: 1716385 - RNA, 19 nt, Artificial Sequence
  Description of Artificial Sequence: Synthetic oligonucleotide
aggacgaagggccacccug

SEQ ID NO: 1716386 - RNA, 19 nt, Artificial Sequence
  Description of Artificial Sequence: Synthetic oligonucleotide
agauaugcacugaugauau

SEQ ID NO: 1716387 - RNA, 19 nt, Artificial Sequence
  Description of Artificial Sequence: Synthetic oligonucleotide
uuuugagagcauucagguc

SEQ ID NO: 1716388 - RNA, 19 nt, Artificial Sequence
  Description of Artificial Sequence: Synthetic oligonucleotide
cuguccaaaccacuggaac

SEQ ID NO: 1716389 - RNA, 19 nt, Artificial Sequence
  Description of Artificial Sequence: Synthetic oligonucleotide
cugcucuaaaccagaagug

SEQ ID NO: 1716390 - RNA, 19 nt, Artificial Sequence
  Description of Artificial Sequence: Synthetic oligonucleotide
aucugucaaggcugaguac

SEQ ID NO: 1716391 - RNA, 19 nt, Artificial Sequence
  Description of Artificial Sequence: Synthetic oligonucleotide
gguuagagaggagaugacg

SEQ ID NO: 1716392 - RNA, 19 nt, Artificial Sequence
  Description of Artificial Sequence: Synthetic oligonucleotide
ccuuucaaaacaauguuca

SEQ ID NO: 1716393 - RNA, 19 nt, Artificial Sequence
  Description of Artificial Sequence: Synthetic oligonucleotide
gauauggggagugggagga

SEQ ID NO: 1716394 - RNA, 19 nt, Artificial Sequence
  Description of Artificial Sequence: Synthetic oligonucleotide
ccgagauacaguuucauuc

SEQ ID NO: 1716395 - RNA, 19 nt, Artificial Sequence
  Description of Artificial Sequence: Synthetic oligonucleotide
guugguccuacuccuuggg

SEQ ID NO: 1716396 - RNA, 19 nt, Artificial Sequence
  Description of Artificial Sequence: Synthetic oligonucleotide
acagccauauguggccucc

SEQ ID NO: 1716397 - RNA, 19 nt, Artificial Sequence
  Description of Artificial Sequence: Synthetic oligonucleotide
ugcucaggacucaugugga

SEQ ID NO: 1716398 - RNA, 19 nt, Artificial Sequence
  Description of Artificial Sequence: Synthetic oligonucleotide
ucccaugaauucuaugcaa

SEQ ID NO: 1716399 - RNA, 19 nt, Artificial Sequence
  Description of Artificial Sequence: Synthetic oligonucleotide
uuagagcugggcucccaag

SEQ ID NO: 1716400 - RNA, 19 nt, Artificial Sequence
  Description of Artificial Sequence: Synthetic oligonucleotide
auguaccagauaugcacug

SEQ ID NO: 1716401 - RNA, 19 nt, Artificial Sequence
  Description of Artificial Sequence: Synthetic oligonucleotide
gaugauauggggaguggga

SEQ ID NO: 1716402 - RNA, 19 nt, Artificial Sequence
  Description of Artificial Sequence: Synthetic oligonucleotide
cugguuagagaggagauga

SEQ ID NO: 1716403 - RNA, 19 nt, Artificial Sequence
  Description of Artificial Sequence: Synthetic oligonucleotide
caaggcugaguacagccac

SEQ ID NO: 1716404 - RNA, 19 nt, Artificial Sequence
  Description of Artificial Sequence: Synthetic oligonucleotide
gcaucuuggauagacaaug

SEQ ID NO: 1716405 - RNA, 19 nt, Artificial Sequence
  Description of Artificial Sequence: Synthetic oligonucleotide
uguccugggaguugguccu

SEQ ID NO: 1716406 - RNA, 19 nt, Artificial Sequence
  Description of Artificial Sequence: Synthetic oligonucleotide
gcacugaugauauggggag

SEQ ID NO: 1716407 - RNA, 19 nt, Artificial Sequence
  Description of Artificial Sequence: Synthetic oligonucleotide
gaugacgagguaagccagg

SEQ ID NO: 1716408 - RNA, 19 nt, Artificial Sequence
  Description of Artificial Sequence: Synthetic oligonucleotide
ucugagugcaggucuaauu

SEQ ID NO: 1716409 - RNA, 19 nt, Artificial Sequence
  Description of Artificial Sequence: Synthetic oligonucleotide
cuuacacuggucagcccag

SEQ ID NO: 1716410 - RNA, 19 nt, Artificial Sequence
  Description of Artificial Sequence: Synthetic oligonucleotide
guuaacaggaacaguaugu

SEQ ID NO: 1716411 - RNA, 19 nt, Artificial Sequence
  Description of Artificial Sequence: Synthetic oligonucleotide
caaaccacuggaacucaac

SEQ ID NO: 1716412 - RNA, 19 nt, Artificial Sequence
  Description of Artificial Sequence: Synthetic oligonucleotide
gagagcauucagguccugg

SEQ ID NO: 1716413 - RNA, 19 nt, Artificial Sequence
  Description of Artificial Sequence: Synthetic oligonucleotide
ucuguccaaaccacuggaa

SEQ ID NO: 1716414 - RNA, 19 nt, Artificial Sequence
  Description of Artificial Sequence: Synthetic oligonucleotide
uugagagcauucagguccu

SEQ ID NO: 1716415 - RNA, 19 nt, Artificial Sequence
  Description of Artificial Sequence: Synthetic oligonucleotide
uacuggguacuucccaccu

SEQ ID NO: 1716416 - RNA, 19 nt, Artificial Sequence
  Description of Artificial Sequence: Synthetic oligonucleotide
aggaaccacccugauuacc

SEQ ID NO: 1716417 - RNA, 19 nt, Artificial Sequence
  Description of Artificial Sequence: Synthetic oligonucleotide
gggagcaagagccuauaag

SEQ ID NO: 1716418 - RNA, 19 nt, Artificial Sequence
  Description of Artificial Sequence: Synthetic oligonucleotide
gaccgugcccauuucaaga

SEQ ID NO: 1716419 - RNA, 19 nt, Artificial Sequence
  Description of Artificial Sequence: Synthetic oligonucleotide
cgugggaaggacaaaaggc

SEQ ID NO: 1716420 - RNA, 19 nt, Artificial Sequence
  Description of Artificial Sequence: Synthetic oligonucleotide
auguggaugccaggcaugg

SEQ ID NO: 1716421 - RNA, 19 nt, Artificial Sequence
  Description of Artificial Sequence: Synthetic oligonucleotide
gaucuaaacaauacugggu

SEQ ID NO: 1716422 - RNA, 19 nt, Artificial Sequence
  Description of Artificial Sequence: Synthetic oligonucleotide
gagccuauaaggcuagugu

SEQ ID NO: 1716423 - RNA, 19 nt, Artificial Sequence
  Description of Artificial Sequence: Synthetic oligonucleotide
caagagccuauaaggcuag

SEQ ID NO: 1716424 - RNA, 19 nt, Artificial Sequence
  Description of Artificial Sequence: Synthetic oligonucleotide
ucuugguccugacuugcuc

SEQ ID NO: 1716425 - RNA, 19 nt, Artificial Sequence
  Description of Artificial Sequence: Synthetic oligonucleotide
gaagugugcagggaccaug

SEQ ID NO: 1716426 - RNA, 19 nt, Artificial Sequence
  Description of Artificial Sequence: Synthetic oligonucleotide
uccugagaggacgaagggc

SEQ ID NO: 1716427 - RNA, 19 nt, Artificial Sequence
  Description of Artificial Sequence: Synthetic oligonucleotide
aggucuaauuuaucccaug

SEQ ID NO: 1716428 - RNA, 19 nt, Artificial Sequence
  Description of Artificial Sequence: Synthetic oligonucleotide
accugcuaagucuuacacu

SEQ ID NO: 1716429 - RNA, 19 nt, Artificial Sequence
  Description of Artificial Sequence: Synthetic oligonucleotide
uugguccugacuugcuccc

SEQ ID NO: 1716430 - RNA, 19 nt, Artificial Sequence
  Description of Artificial Sequence: Synthetic oligonucleotide
cuuggggaucucaaacaug

SEQ ID NO: 1716431 - RNA, 19 nt, Artificial Sequence
  Description of Artificial Sequence: Synthetic oligonucleotide
cagggccuaugaaucaggg

SEQ ID NO: 1716432 - RNA, 19 nt, Artificial Sequence
  Description of Artificial Sequence: Synthetic oligonucleotide
augcagaggcucuuguacu

SEQ ID NO: 1716433 - RNA, 19 nt, Artificial Sequence
  Description of Artificial Sequence: Synthetic oligonucleotide
cauggugccuaugagcuuc

SEQ ID NO: 1716434 - RNA, 19 nt, Artificial Sequence
  Description of Artificial Sequence: Synthetic oligonucleotide
agaccgugcccauuucaag

SEQ ID NO: 1716435 - RNA, 19 nt, Artificial Sequence
  Description of Artificial Sequence: Synthetic oligonucleotide
caguuuagagcugggcucc

SEQ ID NO: 1716436 - RNA, 19 nt, Artificial Sequence
  Description of Artificial Sequence: Synthetic oligonucleotide
caccugcuaagucuuacac

SEQ ID NO: 1716437 - RNA, 19 nt, Artificial Sequence
  Description of Artificial Sequence: Synthetic oligonucleotide
aaacuggaguugguggcug

SEQ ID NO: 1716438 - RNA, 19 nt, Artificial Sequence
  Description of Artificial Sequence: Synthetic oligonucleotide
acgaagggccacccugccc

SEQ ID NO: 1716439 - RNA, 19 nt, Artificial Sequence
  Description of Artificial Sequence: Synthetic oligonucleotide
ggagaugacgagguaagcc

SEQ ID NO: 1716440 - RNA, 19 nt, Artificial Sequence
  Description of Artificial Sequence: Synthetic oligonucleotide
aggagaugacgagguaagc

SEQ ID NO: 1716441 - RNA, 19 nt, Artificial Sequence
  Description of Artificial Sequence: Synthetic oligonucleotide
ucccugguuagagaggaga

SEQ ID NO: 1716442 - RNA, 19 nt, Artificial Sequence
  Description of Artificial Sequence: Synthetic oligonucleotide
agaggagaugacgagguaa

SEQ ID NO: 1716443 - RNA, 19 nt, Artificial Sequence
  Description of Artificial Sequence: Synthetic oligonucleotide
ccugauuaccccuuccagc

SEQ ID NO: 1716444 - RNA, 19 nt, Artificial Sequence
  Description of Artificial Sequence: Synthetic oligonucleotide
ucucccagccuucuuuaaa

SEQ ID NO: 1716445 - RNA, 19 nt, Artificial Sequence
  Description of Artificial Sequence: Synthetic oligonucleotide
cuauaaggcuagugugcag

SEQ ID NO: 1716446 - RNA, 19 nt, Artificial Sequence
  Description of Artificial Sequence: Synthetic oligonucleotide
ggaaccacccugauuaccc

SEQ ID NO: 1716447 - RNA, 19 nt, Artificial Sequence
  Description of Artificial Sequence: Synthetic oligonucleotide
cugcuaagucuuacacugg

SEQ ID NO: 1716448 - RNA, 19 nt, Artificial Sequence
  Description of Artificial Sequence: Synthetic oligonucleotide
gauaugcacugaugauaug

SEQ ID NO: 1716449 - RNA, 19 nt, Artificial Sequence
  Description of Artificial Sequence: Synthetic oligonucleotide
caguacuccugccaacaag

SEQ ID NO: 1716450 - RNA, 19 nt, Artificial Sequence
  Description of Artificial Sequence: Synthetic oligonucleotide
ggucuaauuuaucccauga

SEQ ID NO: 1716451 - RNA, 19 nt, Artificial Sequence
  Description of Artificial Sequence: Synthetic oligonucleotide
caggguagcaaauauggcu

SEQ ID NO: 1716452 - RNA, 19 nt, Artificial Sequence
  Description of Artificial Sequence: Synthetic oligonucleotide
auauggcugacucccuggu

SEQ ID NO: 1716453 - RNA, 19 nt, Artificial Sequence
  Description of Artificial Sequence: Synthetic oligonucleotide
ggagaagccacccacccuc

SEQ ID NO: 1716454 - RNA, 19 nt, Artificial Sequence
  Description of Artificial Sequence: Synthetic oligonucleotide
agagccuauaaggcuagug

SEQ ID NO: 1716455 - RNA, 19 nt, Artificial Sequence
  Description of Artificial Sequence: Synthetic oligonucleotide
cccaccuuacuccugagag

SEQ ID NO: 1716456 - RNA, 19 nt, Artificial Sequence
  Description of Artificial Sequence: Synthetic oligonucleotide
gucuaauuuaucccaugaa

SEQ ID NO: 1716457 - RNA, 19 nt, Artificial Sequence
  Description of Artificial Sequence: Synthetic oligonucleotide
acaucccaggcccaacugu

SEQ ID NO: 1716458 - RNA, 19 nt, Artificial Sequence
  Description of Artificial Sequence: Synthetic oligonucleotide
aagugugcagggaccaugu

SEQ ID NO: 1716459 - RNA, 19 nt, Artificial Sequence
  Description of Artificial Sequence: Synthetic oligonucleotide
uucuaugcaaaugcuucau

SEQ ID NO: 1716460 - RNA, 19 nt, Artificial Sequence
  Description of Artificial Sequence: Synthetic oligonucleotide
cucccggaggcugugaagc

SEQ ID NO: 1716461 - RNA, 19 nt, Artificial Sequence
  Description of Artificial Sequence: Synthetic oligonucleotide
cucugcucuaaaccagaag

SEQ ID NO: 1716462 - RNA, 19 nt, Artificial Sequence
  Description of Artificial Sequence: Synthetic oligonucleotide
cauguggaugccaggcaug

SEQ ID NO: 1716463 - RNA, 19 nt, Artificial Sequence
  Description of Artificial Sequence: Synthetic oligonucleotide
gcaggucuaauuuauccca

SEQ ID NO: 1716464 - RNA, 19 nt, Artificial Sequence
  Description of Artificial Sequence: Synthetic oligonucleotide
agaggacgaagggccaccc

SEQ ID NO: 1716465 - RNA, 19 nt, Artificial Sequence
  Description of Artificial Sequence: Synthetic oligonucleotide
gcgugggaaggacaaaagg

SEQ ID NO: 1716466 - RNA, 19 nt, Artificial Sequence
  Description of Artificial Sequence: Synthetic oligonucleotide
aguauguaccagauaugca

SEQ ID NO: 1716467 - RNA, 19 nt, Artificial Sequence
  Description of Artificial Sequence: Synthetic oligonucleotide
aggcucuuguacuucugca

SEQ ID NO: 1716468 - RNA, 19 nt, Artificial Sequence
  Description of Artificial Sequence: Synthetic oligonucleotide
cuggcaggcaccugcuaag

SEQ ID NO: 1716469 - RNA, 19 nt, Artificial Sequence
  Description of Artificial Sequence: Synthetic oligonucleotide
gcuguuaacaggaacagua

SEQ ID NO: 1716470 - RNA, 19 nt, Artificial Sequence
  Description of Artificial Sequence: Synthetic oligonucleotide
acccugauuaccccuucca

SEQ ID NO: 1716471 - RNA, 19 nt, Artificial Sequence
  Description of Artificial Sequence: Synthetic oligonucleotide
cucaggacucauguggaug

SEQ ID NO: 1716472 - RNA, 19 nt, Artificial Sequence
  Description of Artificial Sequence: Synthetic oligonucleotide
cuuacuccugagaggacga

SEQ ID NO: 1716473 - RNA, 19 nt, Artificial Sequence
  Description of Artificial Sequence: Synthetic oligonucleotide
caccuuacuccugagagga

SEQ ID NO: 1716474 - RNA, 19 nt, Artificial Sequence
  Description of Artificial Sequence: Synthetic oligonucleotide
caaaaggccccaggcaagc

SEQ ID NO: 1716475 - RNA, 19 nt, Artificial Sequence
  Description of Artificial Sequence: Synthetic oligonucleotide
cacugaggccccacaacag

SEQ ID NO: 1716476 - RNA, 19 nt, Artificial Sequence
  Description of Artificial Sequence: Synthetic oligonucleotide
acaaaaggccccaggcaag

SEQ ID NO: 1716477 - RNA, 19 nt, Artificial Sequence
  Description of Artificial Sequence: Synthetic oligonucleotide
ugugaaguucucaguucuu

SEQ ID NO: 1716478 - RNA, 19 nt, Artificial Sequence
  Description of Artificial Sequence: Synthetic oligonucleotide
acaguauguaccagauaug

SEQ ID NO: 1716479 - RNA, 19 nt, Artificial Sequence
  Description of Artificial Sequence: Synthetic oligonucleotide
agaagggaacagccaccuc

SEQ ID NO: 1716480 - RNA, 19 nt, Artificial Sequence
  Description of Artificial Sequence: Synthetic oligonucleotide
aguuuagagcugggcuccc

SEQ ID NO: 1716481 - RNA, 19 nt, Artificial Sequence
  Description of Artificial Sequence: Synthetic oligonucleotide
ccacuuuucuguccaaacc

SEQ ID NO: 1716482 - RNA, 19 nt, Artificial Sequence
  Description of Artificial Sequence: Synthetic oligonucleotide
aaagggagcaagagccuau

SEQ ID NO: 1716483 - RNA, 19 nt, Artificial Sequence
  Description of Artificial Sequence: Synthetic oligonucleotide
cugugaggcaucuuggaua

SEQ ID NO: 1716484 - RNA, 19 nt, Artificial Sequence
  Description of Artificial Sequence: Synthetic oligonucleotide
gagcccacuuuucugucca

SEQ ID NO: 1716485 - RNA, 19 nt, Artificial Sequence
  Description of Artificial Sequence: Synthetic oligonucleotide
uugagccagcgugggaagg

SEQ ID NO: 1716486 - RNA, 19 nt, Artificial Sequence
  Description of Artificial Sequence: Synthetic oligonucleotide
ugcccuccagaucugucaa

SEQ ID NO: 1716487 - RNA, 19 nt, Artificial Sequence
  Description of Artificial Sequence: Synthetic oligonucleotide
ccuuacuccugagaggacg

SEQ ID NO: 1716488 - RNA, 19 nt, Artificial Sequence
  Description of Artificial Sequence: Synthetic oligonucleotide
cagauaugcacugaugaua

SEQ ID NO: 1716489 - RNA, 19 nt, Artificial Sequence
  Description of Artificial Sequence: Synthetic oligonucleotide
accgugcccauuucaagau

SEQ ID NO: 1716490 - RNA, 19 nt, Artificial Sequence
  Description of Artificial Sequence: Synthetic oligonucleotide
caauguucacacucuccca

SEQ ID NO: 1716491 - RNA, 19 nt, Artificial Sequence
  Description of Artificial Sequence: Synthetic oligonucleotide
cuuuggcuauucugagcac

SEQ ID NO: 1716492 - RNA, 19 nt, Artificial Sequence
  Description of Artificial Sequence: Synthetic oligonucleotide
gccacucugcucuaaacca

SEQ ID NO: 1716493 - RNA, 19 nt, Artificial Sequence
  Description of Artificial Sequence: Synthetic oligonucleotide
gacgaagggccacccugcc

SEQ ID NO: 1716494 - RNA, 19 nt, Artificial Sequence
  Description of Artificial Sequence: Synthetic oligonucleotide
uccuacuccuuggggaucu

SEQ ID NO: 1716495 - RNA, 19 nt, Artificial Sequence
  Description of Artificial Sequence: Synthetic oligonucleotide
aaccagaagugugcaggga

SEQ ID NO: 1716496 - RNA, 19 nt, Artificial Sequence
  Description of Artificial Sequence: Synthetic oligonucleotide
gccuauaaggcuagugugc

SEQ ID NO: 1716497 - RNA, 19 nt, Artificial Sequence
  Description of Artificial Sequence: Synthetic oligonucleotide
agccacccacccucuggcc

SEQ ID NO: 1716498 - RNA, 19 nt, Artificial Sequence
  Description of Artificial Sequence: Synthetic oligonucleotide
agaucugggcuguccuugu

SEQ ID NO: 1716499 - RNA, 19 nt, Artificial Sequence
  Description of Artificial Sequence: Synthetic oligonucleotide
uccaaaccacuggaacuca

SEQ ID NO: 1716500 - RNA, 19 nt, Artificial Sequence
  Description of Artificial Sequence: Synthetic oligonucleotide
gcucuaaaccagaagugug

SEQ ID NO: 1716501 - RNA, 19 nt, Artificial Sequence
  Description of Artificial Sequence: Synthetic oligonucleotide
ugugcccuccagaucuguc

SEQ ID NO: 1716502 - RNA, 19 nt, Artificial Sequence
  Description of Artificial Sequence: Synthetic oligonucleotide
ugccuaugagcuuccgcau

SEQ ID NO: 1716503 - RNA, 19 nt, Artificial Sequence
  Description of Artificial Sequence: Synthetic oligonucleotide
ggcuggaaacuggaguugg

SEQ ID NO: 1716504 - RNA, 19 nt, Artificial Sequence
  Description of Artificial Sequence: Synthetic oligonucleotide
accagaaccccugcuaaaa

SEQ ID NO: 1716505 - RNA, 19 nt, Artificial Sequence
  Description of Artificial Sequence: Synthetic oligonucleotide
auauguggccucccaguuu

SEQ ID NO: 1716506 - RNA, 19 nt, Artificial Sequence
  Description of Artificial Sequence: Synthetic oligonucleotide
cucccagccuucuuuaaaa

SEQ ID NO: 1716507 - RNA, 19 nt, Artificial Sequence
  Description of Artificial Sequence: Synthetic oligonucleotide
gcuagugugcaggaggcug

SEQ ID NO: 1716508 - RNA, 19 nt, Artificial Sequence
  Description of Artificial Sequence: Synthetic oligonucleotide
ggagauaaagggagcaaga

SEQ ID NO: 1716509 - RNA, 19 nt, Artificial Sequence
  Description of Artificial Sequence: Synthetic oligonucleotide
gguccugacuugcucccgg

SEQ ID NO: 1716510 - RNA, 19 nt, Artificial Sequence
  Description of Artificial Sequence: Synthetic oligonucleotide
uggguacuucccaccuuac

SEQ ID NO: 1716511 - RNA, 19 nt, Artificial Sequence
  Description of Artificial Sequence: Synthetic oligonucleotide
gaggaaccacccugauuac

SEQ ID NO: 1716512 - RNA, 19 nt, Artificial Sequence
  Description of Artificial Sequence: Synthetic oligonucleotide
agccauauguggccuccca

SEQ ID NO: 1716513 - RNA, 19 nt, Artificial Sequence
  Description of Artificial Sequence: Synthetic oligonucleotide
gcucuuguacuucugcaga

SEQ ID NO: 1716514 - RNA, 19 nt, Artificial Sequence
  Description of Artificial Sequence: Synthetic oligonucleotide
agcgugggaaggacaaaag

SEQ ID NO: 1716515 - RNA, 19 nt, Artificial Sequence
  Description of Artificial Sequence: Synthetic oligonucleotide
ggacucauguggaugccag

SEQ ID NO: 1716516 - RNA, 19 nt, Artificial Sequence
  Description of Artificial Sequence: Synthetic oligonucleotide
ggugccuaugagcuuccgc

SEQ ID NO: 1716517 - RNA, 19 nt, Artificial Sequence
  Description of Artificial Sequence: Synthetic oligonucleotide
agugugcagggaccaugug

SEQ ID NO: 1716518 - RNA, 19 nt, Artificial Sequence
  Description of Artificial Sequence: Synthetic oligonucleotide
gggaaggacaaaaggcccc

SEQ ID NO: 1716519 - RNA, 19 nt, Artificial Sequence
  Description of Artificial Sequence: Synthetic oligonucleotide
gcaagcagugcuuuggcua

SEQ ID NO: 1716520 - RNA, 19 nt, Artificial Sequence
  Description of Artificial Sequence: Synthetic oligonucleotide
cacaucccaggcccaacug

SEQ ID NO: 1716521 - RNA, 19 nt, Artificial Sequence
  Description of Artificial Sequence: Synthetic oligonucleotide
ugccuggagugauggagau

SEQ ID NO: 1716522 - RNA, 19 nt, Artificial Sequence
  Description of Artificial Sequence: Synthetic oligonucleotide
uaccccuuccagccacucu

SEQ ID NO: 1716523 - RNA, 19 nt, Artificial Sequence
  Description of Artificial Sequence: Synthetic oligonucleotide
ugagcacugccuggaguga

SEQ ID NO: 1716524 - RNA, 19 nt, Artificial Sequence
  Description of Artificial Sequence: Synthetic oligonucleotide
ccaccuuacuccugagagg

SEQ ID NO: 1716525 - RNA, 19 nt, Artificial Sequence
  Description of Artificial Sequence: Synthetic oligonucleotide
guacuccugccaacaaggc

SEQ ID NO: 1716526 - RNA, 19 nt, Artificial Sequence
  Description of Artificial Sequence: Synthetic oligonucleotide
cugagugcaggucuaauuu

SEQ ID NO: 1716527 - RNA, 19 nt, Artificial Sequence
  Description of Artificial Sequence: Synthetic oligonucleotide
cucauguggaugccaggca

SEQ ID NO: 1716528 - RNA, 19 nt, Artificial Sequence
  Description of Artificial Sequence: Synthetic oligonucleotide
ugguccugacuugcucccg

SEQ ID NO: 1716529 - RNA, 19 nt, Artificial Sequence
  Description of Artificial Sequence: Synthetic oligonucleotide
gcugacucccugguuagag

SEQ ID NO: 1716530 - RNA, 19 nt, Artificial Sequence
  Description of Artificial Sequence: Synthetic oligonucleotide
cugccuggagugauggaga

SEQ ID NO: 1716531 - RNA, 19 nt, Artificial Sequence
  Description of Artificial Sequence: Synthetic oligonucleotide
auggugccuaugagcuucc

SEQ ID NO: 1716532 - RNA, 19 nt, Artificial Sequence
  Description of Artificial Sequence: Synthetic oligonucleotide
aggcugugaagcugcugcu

SEQ ID NO: 1716533 - RNA, 19 nt, Artificial Sequence
  Description of Artificial Sequence: Synthetic oligonucleotide
uucccaccuuacuccugag

SEQ ID NO: 1716534 - RNA, 19 nt, Artificial Sequence
  Description of Artificial Sequence: Synthetic oligonucleotide
gaaacuggaguugguggcu

SEQ ID NO: 1716535 - RNA, 19 nt, Artificial Sequence
  Description of Artificial Sequence: Synthetic oligonucleotide
acagcacaggugugaaguu

SEQ ID NO: 1716536 - RNA, 19 nt, Artificial Sequence
  Description of Artificial Sequence: Synthetic oligonucleotide
cuggguacuucccaccuua

SEQ ID NO: 1716537 - RNA, 19 nt, Artificial Sequence
  Description of Artificial Sequence: Synthetic oligonucleotide
ccuggcugaggaaccaccc

SEQ ID NO: 1716538 - RNA, 19 nt, Artificial Sequence
  Description of Artificial Sequence: Synthetic oligonucleotide
acgagguaagccagggccu

SEQ ID NO: 1716539 - RNA, 19 nt, Artificial Sequence
  Description of Artificial Sequence: Synthetic oligonucleotide
ggccuaugaaucagggcag

SEQ ID NO: 1716540 - RNA, 19 nt, Artificial Sequence
  Description of Artificial Sequence: Synthetic oligonucleotide
caccuccucuccuucugug

SEQ ID NO: 1716541 - RNA, 19 nt, Artificial Sequence
  Description of Artificial Sequence: Synthetic oligonucleotide
aagggagcaagagccuaua

SEQ ID NO: 1716542 - RNA, 19 nt, Artificial Sequence
  Description of Artificial Sequence: Synthetic oligonucleotide
cagaccgugcccauuucaa

SEQ ID NO: 1716543 - RNA, 19 nt, Artificial Sequence
  Description of Artificial Sequence: Synthetic oligonucleotide
ccacucugcucuaaaccag

SEQ ID NO: 1716544 - RNA, 19 nt, Artificial Sequence
  Description of Artificial Sequence: Synthetic oligonucleotide
gucuuacacuggucagccc

SEQ ID NO: 1716545 - RNA, 19 nt, Artificial Sequence
  Description of Artificial Sequence: Synthetic oligonucleotide
aggacucauguggaugcca

SEQ ID NO: 1716546 - RNA, 19 nt, Artificial Sequence
  Description of Artificial Sequence: Synthetic oligonucleotide
guaagccagggccuaugaa

SEQ ID NO: 1716547 - RNA, 19 nt, Artificial Sequence
  Description of Artificial Sequence: Synthetic oligonucleotide
cagcacaggugugaaguuc

SEQ ID NO: 1716548 - RNA, 19 nt, Artificial Sequence
  Description of Artificial Sequence: Synthetic oligonucleotide
uuacacuggucagcccaga

SEQ ID NO: 1716549 - RNA, 19 nt, Artificial Sequence
  Description of Artificial Sequence: Synthetic oligonucleotide
caggaacaguauguaccag

SEQ ID NO: 1716550 - RNA, 19 nt, Artificial Sequence
  Description of Artificial Sequence: Synthetic oligonucleotide
agggagcaagagccuauaa

SEQ ID NO: 1716551 - RNA, 19 nt, Artificial Sequence
  Description of Artificial Sequence: Synthetic oligonucleotide
accaugugcaggguagcaa

SEQ ID NO: 1716552 - RNA, 19 nt, Artificial Sequence
  Description of Artificial Sequence: Synthetic oligonucleotide
ggcauggugccuaugagcu

SEQ ID NO: 1716553 - RNA, 19 nt, Artificial Sequence
  Description of Artificial Sequence: Synthetic oligonucleotide
aaacugcuguuaacaggaa

SEQ ID NO: 1716554 - RNA, 19 nt, Artificial Sequence
  Description of Artificial Sequence: Synthetic oligonucleotide
cugacucccugguuagaga

SEQ ID NO: 1716555 - RNA, 19 nt, Artificial Sequence
  Description of Artificial Sequence: Synthetic oligonucleotide
ugguggagaucugggcugu

SEQ ID NO: 1716556 - RNA, 19 nt, Artificial Sequence
  Description of Artificial Sequence: Synthetic oligonucleotide
guaccagauaugcacugau

SEQ ID NO: 1716557 - RNA, 19 nt, Artificial Sequence
  Description of Artificial Sequence: Synthetic oligonucleotide
agguaagccagggccuaug

SEQ ID NO: 1716558 - RNA, 19 nt, Artificial Sequence
  Description of Artificial Sequence: Synthetic oligonucleotide
acguucccagccaguacuc

SEQ ID NO: 1716559 - RNA, 19 nt, Artificial Sequence
  Description of Artificial Sequence: Synthetic oligonucleotide
ucacacaucccaggcccaa

SEQ ID NO: 1716560 - RNA, 19 nt, Artificial Sequence
  Description of Artificial Sequence: Synthetic oligonucleotide
gaccaugugcaggguagca

SEQ ID NO: 1716561 - RNA, 19 nt, Artificial Sequence
  Description of Artificial Sequence: Synthetic oligonucleotide
cagaagugugcagggacca

SEQ ID NO: 1716562 - RNA, 19 nt, Artificial Sequence
  Description of Artificial Sequence: Synthetic oligonucleotide
ucccggaggcugugaagcu

SEQ ID NO: 1716563 - RNA, 19 nt, Artificial Sequence
  Description of Artificial Sequence: Synthetic oligonucleotide
auauggggagugggaggag

SEQ ID NO: 1716564 - RNA, 19 nt, Artificial Sequence
  Description of Artificial Sequence: Synthetic oligonucleotide
agggaccaugugcagggua

SEQ ID NO: 1716565 - RNA, 19 nt, Artificial Sequence
  Description of Artificial Sequence: Synthetic oligonucleotide
gcaagagccuauaaggcua

SEQ ID NO: 1716566 - RNA, 19 nt, Artificial Sequence
  Description of Artificial Sequence: Synthetic oligonucleotide
aagagccuauaaggcuagu

SEQ ID NO: 1716567 - RNA, 19 nt, Artificial Sequence
  Description of Artificial Sequence: Synthetic oligonucleotide
ggucagcccagaccgugcc

SEQ ID NO: 1716568 - RNA, 19 nt, Artificial Sequence
  Description of Artificial Sequence: Synthetic oligonucleotide
cucuggccuuucaaaacaa

SEQ ID NO: 1716569 - RNA, 19 nt, Artificial Sequence
  Description of Artificial Sequence: Synthetic oligonucleotide
acuggguacuucccaccuu

SEQ ID NO: 1716570 - RNA, 19 nt, Artificial Sequence
  Description of Artificial Sequence: Synthetic oligonucleotide
gucagcccagaccgugccc

SEQ ID NO: 1716571 - RNA, 19 nt, Artificial Sequence
  Description of Artificial Sequence: Synthetic oligonucleotide
gguagcaaauauggcugac

SEQ ID NO: 1716572 - RNA, 19 nt, Artificial Sequence
  Description of Artificial Sequence: Synthetic oligonucleotide
accuuacuccugagaggac

SEQ ID NO: 1716573 - RNA, 19 nt, Artificial Sequence
  Description of Artificial Sequence: Synthetic oligonucleotide
caagcagugcuuuggcuau

SEQ ID NO: 1716574 - RNA, 19 nt, Artificial Sequence
  Description of Artificial Sequence: Synthetic oligonucleotide
ugacuugcucccggaggcu

SEQ ID NO: 1716575 - RNA, 19 nt, Artificial Sequence
  Description of Artificial Sequence: Synthetic oligonucleotide
uuacuccugagaggacgaa

SEQ ID NO: 1716576 - RNA, 19 nt, Artificial Sequence
  Description of Artificial Sequence: Synthetic oligonucleotide
ggagugggaggagccaaag

SEQ ID NO: 1716577 - RNA, 19 nt, Artificial Sequence
  Description of Artificial Sequence: Synthetic oligonucleotide
ggguagcaaauauggcuga

SEQ ID NO: 1716578 - RNA, 19 nt, Artificial Sequence
  Description of Artificial Sequence: Synthetic oligonucleotide
ccuauaaggcuagugugca

SEQ ID NO: 1716579 - RNA, 19 nt, Artificial Sequence
  Description of Artificial Sequence: Synthetic oligonucleotide
gcaggguagcaaauauggc

SEQ ID NO: 1716580 - RNA, 19 nt, Artificial Sequence
  Description of Artificial Sequence: Synthetic oligonucleotide
acccugcccucagugugac

SEQ ID NO: 1716581 - RNA, 19 nt, Artificial Sequence
  Description of Artificial Sequence: Synthetic oligonucleotide
augugcaggguagcaaaua

SEQ ID NO: 1716582 - RNA, 19 nt, Artificial Sequence
  Description of Artificial Sequence: Synthetic oligonucleotide
uggugccuaugagcuuccg

SEQ ID NO: 1716583 - RNA, 19 nt, Artificial Sequence
  Description of Artificial Sequence: Synthetic oligonucleotide
caggacucauguggaugcc

SEQ ID NO: 1716584 - RNA, 19 nt, Artificial Sequence
  Description of Artificial Sequence: Synthetic oligonucleotide
ggaaggacaaaaggcccca

SEQ ID NO: 1716585 - RNA, 19 nt, Artificial Sequence
  Description of Artificial Sequence: Synthetic oligonucleotide
gcucccaaggagauggaca

SEQ ID NO: 1716586 - RNA, 19 nt, Artificial Sequence
  Description of Artificial Sequence: Synthetic oligonucleotide
ggacgaagggccacccugc

SEQ ID NO: 1716587 - RNA, 19 nt, Artificial Sequence
  Description of Artificial Sequence: Synthetic oligonucleotide
aucugagugcaggucuaau

SEQ ID NO: 1716588 - RNA, 19 nt, Artificial Sequence
  Description of Artificial Sequence: Synthetic oligonucleotide
gagccagcgugggaaggac

SEQ ID NO: 1716589 - RNA, 19 nt, Artificial Sequence
  Description of Artificial Sequence: Synthetic oligonucleotide
caguuucauucaguagcuc

SEQ ID NO: 1716590 - RNA, 19 nt, Artificial Sequence
  Description of Artificial Sequence: Synthetic oligonucleotide
uccugggaguugguccuac

SEQ ID NO: 1716591 - RNA, 19 nt, Artificial Sequence
  Description of Artificial Sequence: Synthetic oligonucleotide
uccgcaucuccuggaacuu

SEQ ID NO: 1716592 - RNA, 19 nt, Artificial Sequence
  Description of Artificial Sequence: Synthetic oligonucleotide
ccuaugaaucagggcagag

SEQ ID NO: 1716593 - RNA, 19 nt, Artificial Sequence
  Description of Artificial Sequence: Synthetic oligonucleotide
gccacugaggccccacaac

SEQ ID NO: 1716594 - RNA, 19 nt, Artificial Sequence
  Description of Artificial Sequence: Synthetic oligonucleotide
uuaccccuuccagccacuc

SEQ ID NO: 1716595 - RNA, 19 nt, Artificial Sequence
  Description of Artificial Sequence: Synthetic oligonucleotide
ggaacaguauguaccagau

SEQ ID NO: 1716596 - RNA, 19 nt, Artificial Sequence
  Description of Artificial Sequence: Synthetic oligonucleotide
caaauauggcugacucccu

SEQ ID NO: 1716597 - RNA, 19 nt, Artificial Sequence
  Description of Artificial Sequence: Synthetic oligonucleotide
cagcgugggaaggacaaaa

SEQ ID NO: 1716598 - RNA, 19 nt, Artificial Sequence
  Description of Artificial Sequence: Synthetic oligonucleotide
ccugguuagagaggagaug

SEQ ID NO: 1716599 - RNA, 19 nt, Artificial Sequence
  Description of Artificial Sequence: Synthetic oligonucleotide
ccacccugcccucagugug

SEQ ID NO: 1716600 - RNA, 19 nt, Artificial Sequence
  Description of Artificial Sequence: Synthetic oligonucleotide
ccaugugcaggguagcaaa

SEQ ID NO: 1716601 - RNA, 19 nt, Artificial Sequence
  Description of Artificial Sequence: Synthetic oligonucleotide
acucugcucuaaaccagaa

SEQ ID NO: 1716602 - RNA, 19 nt, Artificial Sequence
  Description of Artificial Sequence: Synthetic oligonucleotide
ugagagcauucagguccug

SEQ ID NO: 1716603 - RNA, 19 nt, Artificial Sequence
  Description of Artificial Sequence: Synthetic oligonucleotide
cauauguggccucccaguu

SEQ ID NO: 1716604 - RNA, 19 nt, Artificial Sequence
  Description of Artificial Sequence: Synthetic oligonucleotide
ggccuuucaaaacaauguu

SEQ ID NO: 1716605 - RNA, 19 nt, Artificial Sequence
  Description of Artificial Sequence: Synthetic oligonucleotide
ggccacccugcccucagug

SEQ ID NO: 1716606 - RNA, 19 nt, Artificial Sequence
  Description of Artificial Sequence: Synthetic oligonucleotide
gcaccugcuaagucuuaca

SEQ ID NO: 1716607 - RNA, 19 nt, Artificial Sequence
  Description of Artificial Sequence: Synthetic oligonucleotide
gccuaugagcuuccgcauc

SEQ ID NO: 1716608 - RNA, 19 nt, Artificial Sequence
  Description of Artificial Sequence: Synthetic oligonucleotide
caggugugaaguucucagu

SEQ ID NO: 1716609 - RNA, 19 nt, Artificial Sequence
  Description of Artificial Sequence: Synthetic oligonucleotide
guuuagagcugggcuccca

SEQ ID NO: 1716610 - RNA, 19 nt, Artificial Sequence
  Description of Artificial Sequence: Synthetic oligonucleotide
gugaaguucucaguucuuu

SEQ ID NO: 1716611 - RNA, 19 nt, Artificial Sequence
  Description of Artificial Sequence: Synthetic oligonucleotide
ggcaccugcuaagucuuac

SEQ ID NO: 1716612 - RNA, 19 nt, Artificial Sequence
  Description of Artificial Sequence: Synthetic oligonucleotide
augccaggcauggugccua

SEQ ID NO: 1716613 - RNA, 19 nt, Artificial Sequence
  Description of Artificial Sequence: Synthetic oligonucleotide
cacccugcccucaguguga

SEQ ID NO: 1716614 - RNA, 19 nt, Artificial Sequence
  Description of Artificial Sequence: Synthetic oligonucleotide
gcucauucuugguccugac

SEQ ID NO: 1716615 - RNA, 19 nt, Artificial Sequence
  Description of Artificial Sequence: Synthetic oligonucleotide
gaugccaggcauggugccu

SEQ ID NO: 1716616 - RNA, 19 nt, Artificial Sequence
  Description of Artificial Sequence: Synthetic oligonucleotide
gcuauucugagcacugccu

SEQ ID NO: 1716617 - RNA, 19 nt, Artificial Sequence
  Description of Artificial Sequence: Synthetic oligonucleotide
caccagaaccccugcuaaa

SEQ ID NO: 1716618 - RNA, 19 nt, Artificial Sequence
  Description of Artificial Sequence: Synthetic oligonucleotide
cagccauauguggccuccc

SEQ ID NO: 1716619 - RNA, 19 nt, Artificial Sequence
  Description of Artificial Sequence: Synthetic oligonucleotide
gguccuacuccuuggggau

SEQ ID NO: 1716620 - RNA, 19 nt, Artificial Sequence
  Description of Artificial Sequence: Synthetic oligonucleotide
ggcaggcaccugcuaaguc

SEQ ID NO: 1716621 - RNA, 19 nt, Artificial Sequence
  Description of Artificial Sequence: Synthetic oligonucleotide
accacccugauuaccccuu

SEQ ID NO: 1716622 - RNA, 19 nt, Artificial Sequence
  Description of Artificial Sequence: Synthetic oligonucleotide
caugugcaggguagcaaau

SEQ ID NO: 1716623 - RNA, 19 nt, Artificial Sequence
  Description of Artificial Sequence: Synthetic oligonucleotide
caacacccucuuucacaca

SEQ ID NO: 1716624 - RNA, 19 nt, Artificial Sequence
  Description of Artificial Sequence: Synthetic oligonucleotide
ccuaugagcuuccgcaucu

SEQ ID NO: 1716625 - RNA, 19 nt, Artificial Sequence
  Description of Artificial Sequence: Synthetic oligonucleotide
agcccacuuuucuguccaa

SEQ ID NO: 1716626 - RNA, 19 nt, Artificial Sequence
  Description of Artificial Sequence: Synthetic oligonucleotide
gaggacgaagggccacccu

SEQ ID NO: 1716627 - RNA, 19 nt, Artificial Sequence
  Description of Artificial Sequence: Synthetic oligonucleotide
cacucucccagccuucuuu

SEQ ID NO: 1716628 - RNA, 19 nt, Artificial Sequence
  Description of Artificial Sequence: Synthetic oligonucleotide
ggcucccaaggagauggac

SEQ ID NO: 1716629 - RNA, 19 nt, Artificial Sequence
  Description of Artificial Sequence: Synthetic oligonucleotide
guccuacuccuuggggauc

SEQ ID NO: 1716630 - RNA, 19 nt, Artificial Sequence
  Description of Artificial Sequence: Synthetic oligonucleotide
ccaccagaaccccugcuaa

SEQ ID NO: 1716631 - RNA, 19 nt, Artificial Sequence
  Description of Artificial Sequence: Synthetic oligonucleotide
caucugagugcaggucuaa

SEQ ID NO: 1716632 - RNA, 19 nt, Artificial Sequence
  Description of Artificial Sequence: Synthetic oligonucleotide
ccagauaugcacugaugau

SEQ ID NO: 1716633 - RNA, 19 nt, Artificial Sequence
  Description of Artificial Sequence: Synthetic oligonucleotide
ccagaccgugcccauuuca

SEQ ID NO: 1716634 - RNA, 19 nt, Artificial Sequence
  Description of Artificial Sequence: Synthetic oligonucleotide
ggguacuucccaccuuacu

SEQ ID NO: 1716635 - RNA, 19 nt, Artificial Sequence
  Description of Artificial Sequence: Synthetic oligonucleotide
gccuaugaaucagggcaga

SEQ ID NO: 1716636 - RNA, 19 nt, Artificial Sequence
  Description of Artificial Sequence: Synthetic oligonucleotide
cugaggaaccacccugauu

SEQ ID NO: 1716637 - RNA, 19 nt, Artificial Sequence
  Description of Artificial Sequence: Synthetic oligonucleotide
ccaaaccacuggaacucaa

SEQ ID NO: 1716638 - RNA, 19 nt, Artificial Sequence
  Description of Artificial Sequence: Synthetic oligonucleotide
cacugaugauauggggagu

SEQ ID NO: 1716639 - RNA, 19 nt, Artificial Sequence
  Description of Artificial Sequence: Synthetic oligonucleotide
ggccccacaacagccauau

SEQ ID NO: 1716640 - RNA, 19 nt, Artificial Sequence
  Description of Artificial Sequence: Synthetic oligonucleotide
ggggagugggaggagccaa

SEQ ID NO: 1716641 - RNA, 19 nt, Artificial Sequence
  Description of Artificial Sequence: Synthetic oligonucleotide
ccgugcccauuucaagauc

SEQ ID NO: 1716642 - RNA, 19 nt, Artificial Sequence
  Description of Artificial Sequence: Synthetic oligonucleotide
ccaucugagugcaggucua

SEQ ID NO: 1716643 - RNA, 19 nt, Artificial Sequence
  Description of Artificial Sequence: Synthetic oligonucleotide
cccggaggcugugaagcug

SEQ ID NO: 1716644 - RNA, 19 nt, Artificial Sequence
  Description of Artificial Sequence: Synthetic oligonucleotide
ggaacucaacacccucuuu

SEQ ID NO: 1716645 - RNA, 19 nt, Artificial Sequence
  Description of Artificial Sequence: Synthetic oligonucleotide
caggcccaacugugaggca

SEQ ID NO: 1716646 - RNA, 19 nt, Artificial Sequence
  Description of Artificial Sequence: Synthetic oligonucleotide
gccacccacccucuggccu

SEQ ID NO: 1716647 - RNA, 19 nt, Artificial Sequence
  Description of Artificial Sequence: Synthetic oligonucleotide
ggagaucugggcuguccuu

SEQ ID NO: 1716648 - RNA, 19 nt, Artificial Sequence
  Description of Artificial Sequence: Synthetic oligonucleotide
gagguaagccagggccuau

SEQ ID NO: 1716649 - RNA, 19 nt, Artificial Sequence
  Description of Artificial Sequence: Synthetic oligonucleotide
ccaguacuccugccaacaa

SEQ ID NO: 1716650 - RNA, 19 nt, Artificial Sequence
  Description of Artificial Sequence: Synthetic oligonucleotide
cccugguuagagaggagau

SEQ ID NO: 1716651 - RNA, 19 nt, Artificial Sequence
  Description of Artificial Sequence: Synthetic oligonucleotide
cugcccucagugugacagu

SEQ ID NO: 1716652 - RNA, 19 nt, Artificial Sequence
  Description of Artificial Sequence: Synthetic oligonucleotide
ccaugccaucugagugcag

SEQ ID NO: 1716653 - RNA, 19 nt, Artificial Sequence
  Description of Artificial Sequence: Synthetic oligonucleotide
gggagugggaggagccaaa

SEQ ID NO: 1716654 - RNA, 19 nt, Artificial Sequence
  Description of Artificial Sequence: Synthetic oligonucleotide
agcccagaccgugcccauu

SEQ ID NO: 1716655 - RNA, 19 nt, Artificial Sequence
  Description of Artificial Sequence: Synthetic oligonucleotide
gcucaggacucauguggau

SEQ ID NO: 1716656 - RNA, 19 nt, Artificial Sequence
  Description of Artificial Sequence: Synthetic oligonucleotide
gcuugcucaacagccuuuu

SEQ ID NO: 1716657 - RNA, 19 nt, Artificial Sequence
  Description of Artificial Sequence: Synthetic oligonucleotide
gcuggaaacuggaguuggu

SEQ ID NO: 1716658 - RNA, 19 nt, Artificial Sequence
  Description of Artificial Sequence: Synthetic oligonucleotide
cccagaccgugcccauuuc

SEQ ID NO: 1716659 - RNA, 19 nt, Artificial Sequence
  Description of Artificial Sequence: Synthetic oligonucleotide
gcccagaccgugcccauuu

SEQ ID NO: 1716660 - RNA, 19 nt, Artificial Sequence
  Description of Artificial Sequence: Synthetic oligonucleotide
ggcugacucccugguuaga

SEQ ID NO: 1716661 - RNA, 19 nt, Artificial Sequence
  Description of Artificial Sequence: Synthetic oligonucleotide
gcaucuccuggaacuuugu

SEQ ID NO: 1716662 - RNA, 19 nt, Artificial Sequence
  Description of Artificial Sequence: Synthetic oligonucleotide
guccugggaguugguccua

SEQ ID NO: 1716663 - RNA, 19 nt, Artificial Sequence
  Description of Artificial Sequence: Synthetic oligonucleotide
ggcuagugugcaggaggcu

SEQ ID NO: 1716664 - RNA, 19 nt, Artificial Sequence
  Description of Artificial Sequence: Synthetic oligonucleotide
gccuggagugauggagaua

SEQ ID NO: 1716665 - RNA, 19 nt, Artificial Sequence
  Description of Artificial Sequence: Synthetic oligonucleotide
ccuacuccuuggggaucuc

SEQ ID NO: 1716666 - RNA, 19 nt, Artificial Sequence
  Description of Artificial Sequence: Synthetic oligonucleotide
cagggaccaugugcagggu

SEQ ID NO: 1716667 - RNA, 19 nt, Artificial Sequence
  Description of Artificial Sequence: Synthetic oligonucleotide
ggccagcuggcaggcaccu

SEQ ID NO: 1716668 - RNA, 19 nt, Artificial Sequence
  Description of Artificial Sequence: Synthetic oligonucleotide
ccacccacccucuggccuu

SEQ ID NO: 1716669 - RNA, 19 nt, Artificial Sequence
  Description of Artificial Sequence: Synthetic oligonucleotide
ccccgagauacaguuucau

SEQ ID NO: 1716670 - RNA, 19 nt, Artificial Sequence
  Description of Artificial Sequence: Synthetic oligonucleotide
gggccacccugcccucagu

SEQ ID NO: 1716671 - RNA, 19 nt, Artificial Sequence
  Description of Artificial Sequence: Synthetic oligonucleotide
cccaggcaagcagugcuuu

SEQ ID NO: 1716672 - RNA, 19 nt, Artificial Sequence
  Description of Artificial Sequence: Synthetic oligonucleotide
cccugcccucagugugaca

SEQ ID NO: 1716673 - RNA, 19 nt, Artificial Sequence
  Description of Artificial Sequence: Synthetic oligonucleotide
cacccacccucuggccuuu

SEQ ID NO: 1716674 - RNA, 19 nt, Artificial Sequence
  Description of Artificial Sequence: Synthetic oligonucleotide
ccgcaucuccuggaacuuu

SEQ ID NO: 1716675 - RNA, 19 nt, Artificial Sequence
  Description of Artificial Sequence: Synthetic oligonucleotide
cccaacugugaggcaucuu

SEQ ID NO: 1716676 - RNA, 19 nt, Artificial Sequence
  Description of Artificial Sequence: Synthetic oligonucleotide
aauagcauuaucauggugg

SEQ ID NO: 1716677 - RNA, 19 nt, Artificial Sequence
  Description of Artificial Sequence: Synthetic oligonucleotide
guaguauugauucagguac

SEQ ID NO: 1716678 - RNA, 19 nt, Artificial Sequence
  Description of Artificial Sequence: Synthetic oligonucleotide
guggcuauaccuuagaagc

SEQ ID NO: 1716679 - RNA, 19 nt, Artificial Sequence
  Description of Artificial Sequence: Synthetic oligonucleotide
aauguuguuagacuggaau

SEQ ID NO: 1716680 - RNA, 19 nt, Artificial Sequence
  Description of Artificial Sequence: Synthetic oligonucleotide
gaaauugccaaugccaugg

SEQ ID NO: 1716681 - RNA, 19 nt, Artificial Sequence
  Description of Artificial Sequence: Synthetic oligonucleotide
uguuucaaagacacggagg

SEQ ID NO: 1716682 - RNA, 19 nt, Artificial Sequence
  Description of Artificial Sequence: Synthetic oligonucleotide
aguauugaccuccagaacu

SEQ ID NO: 1716683 - RNA, 19 nt, Artificial Sequence
  Description of Artificial Sequence: Synthetic oligonucleotide
ugucccauggccauaauug

SEQ ID NO: 1716684 - RNA, 19 nt, Artificial Sequence
  Description of Artificial Sequence: Synthetic oligonucleotide
auagcauuaucaugguggc

SEQ ID NO: 1716685 - RNA, 19 nt, Artificial Sequence
  Description of Artificial Sequence: Synthetic oligonucleotide
aaugccagcccaucuggcc

SEQ ID NO: 1716686 - RNA, 19 nt, Artificial Sequence
  Description of Artificial Sequence: Synthetic oligonucleotide
uauugauucagguacugga

SEQ ID NO: 1716687 - RNA, 19 nt, Artificial Sequence
  Description of Artificial Sequence: Synthetic oligonucleotide
aaaacccugaugaaguggg

SEQ ID NO: 1716688 - RNA, 19 nt, Artificial Sequence
  Description of Artificial Sequence: Synthetic oligonucleotide
aggauagcuaagcaagagc

SEQ ID NO: 1716689 - RNA, 19 nt, Artificial Sequence
  Description of Artificial Sequence: Synthetic oligonucleotide
acgguuucaaaacuggguc

SEQ ID NO: 1716690 - RNA, 19 nt, Artificial Sequence
  Description of Artificial Sequence: Synthetic oligonucleotide
accuuagaagcuuaaaaug

SEQ ID NO: 1716691 - RNA, 19 nt, Artificial Sequence
  Description of Artificial Sequence: Synthetic oligonucleotide
auaucuguggucccauccc

SEQ ID NO: 1716692 - RNA, 19 nt, Artificial Sequence
  Description of Artificial Sequence: Synthetic oligonucleotide
cuugguagggcuguaaugg

SEQ ID NO: 1716693 - RNA, 19 nt, Artificial Sequence
  Description of Artificial Sequence: Synthetic oligonucleotide
uguguaugccuccuuuugg

SEQ ID NO: 1716694 - RNA, 19 nt, Artificial Sequence
  Description of Artificial Sequence: Synthetic oligonucleotide
augaaucccaaacugaagu

SEQ ID NO: 1716695 - RNA, 19 nt, Artificial Sequence
  Description of Artificial Sequence: Synthetic oligonucleotide
uagcuugggacauggaugg

SEQ ID NO: 1716696 - RNA, 19 nt, Artificial Sequence
  Description of Artificial Sequence: Synthetic oligonucleotide
auguuguuagacuggaauc

SEQ ID NO: 1716697 - RNA, 19 nt, Artificial Sequence
  Description of Artificial Sequence: Synthetic oligonucleotide
aaucgcacuguucugguga

SEQ ID NO: 1716698 - RNA, 19 nt, Artificial Sequence
  Description of Artificial Sequence: Synthetic oligonucleotide
gaaggcuacccacauagag

SEQ ID NO: 1716699 - RNA, 19 nt, Artificial Sequence
  Description of Artificial Sequence: Synthetic oligonucleotide
uuccugucuauaaaauggg

SEQ ID NO: 1716700 - RNA, 19 nt, Artificial Sequence
  Description of Artificial Sequence: Synthetic oligonucleotide
gauuccaaacuccccaucc

SEQ ID NO: 1716701 - RNA, 19 nt, Artificial Sequence
  Description of Artificial Sequence: Synthetic oligonucleotide
acaagguuaagaguguuuc

SEQ ID NO: 1716702 - RNA, 19 nt, Artificial Sequence
  Description of Artificial Sequence: Synthetic oligonucleotide
uaucuccuaaccaagugcu

SEQ ID NO: 1716703 - RNA, 19 nt, Artificial Sequence
  Description of Artificial Sequence: Synthetic oligonucleotide
uucaagacggauuccaaac

SEQ ID NO: 1716704 - RNA, 19 nt, Artificial Sequence
  Description of Artificial Sequence: Synthetic oligonucleotide
agagucugcccacacaagg

SEQ ID NO: 1716705 - RNA, 19 nt, Artificial Sequence
  Description of Artificial Sequence: Synthetic oligonucleotide
aagacggauuccaaacucc

SEQ ID NO: 1716706 - RNA, 19 nt, Artificial Sequence
  Description of Artificial Sequence: Synthetic oligonucleotide
ucugcuaacccuaucuccu

SEQ ID NO: 1716707 - RNA, 19 nt, Artificial Sequence
  Description of Artificial Sequence: Synthetic oligonucleotide
agagacuuggcacagugcu

SEQ ID NO: 1716708 - RNA, 19 nt, Artificial Sequence
  Description of Artificial Sequence: Synthetic oligonucleotide
gauaucuguggucccaucc

SEQ ID NO: 1716709 - RNA, 19 nt, Artificial Sequence
  Description of Artificial Sequence: Synthetic oligonucleotide
ugcgaacuccuccagaagc

SEQ ID NO: 1716710 - RNA, 19 nt, Artificial Sequence
  Description of Artificial Sequence: Synthetic oligonucleotide
uaccuuagaagcuuaaaau

SEQ ID NO: 1716711 - RNA, 19 nt, Artificial Sequence
  Description of Artificial Sequence: Synthetic oligonucleotide
ucgagcaaaagcuuccacc

SEQ ID NO: 1716712 - RNA, 19 nt, Artificial Sequence
  Description of Artificial Sequence: Synthetic oligonucleotide
gaaucccaaacugaagugg

SEQ ID NO: 1716713 - RNA, 19 nt, Artificial Sequence
  Description of Artificial Sequence: Synthetic oligonucleotide
aguggguucaguaaauggg

SEQ ID NO: 1716714 - RNA, 19 nt, Artificial Sequence
  Description of Artificial Sequence: Synthetic oligonucleotide
aacccuaucuccuaaccaa

SEQ ID NO: 1716715 - RNA, 19 nt, Artificial Sequence
  Description of Artificial Sequence: Synthetic oligonucleotide
agacacggagguuuaauag

SEQ ID NO: 1716716 - RNA, 19 nt, Artificial Sequence
  Description of Artificial Sequence: Synthetic oligonucleotide
uguaggcuaagagacuugg

SEQ ID NO: 1716717 - RNA, 19 nt, Artificial Sequence
  Description of Artificial Sequence: Synthetic oligonucleotide
cuaucuccuaaccaagugc

SEQ ID NO: 1716718 - RNA, 19 nt, Artificial Sequence
  Description of Artificial Sequence: Synthetic oligonucleotide
gacacggagguuuaauagc

SEQ ID NO: 1716719 - RNA, 19 nt, Artificial Sequence
  Description of Artificial Sequence: Synthetic oligonucleotide
auaccuuagaagcuuaaaa

SEQ ID NO: 1716720 - RNA, 19 nt, Artificial Sequence
  Description of Artificial Sequence: Synthetic oligonucleotide
uauccagguucaauggaag

SEQ ID NO: 1716721 - RNA, 19 nt, Artificial Sequence
  Description of Artificial Sequence: Synthetic oligonucleotide
ugaaucccaaacugaagug

SEQ ID NO: 1716722 - RNA, 19 nt, Artificial Sequence
  Description of Artificial Sequence: Synthetic oligonucleotide
gguuaagaguguuucaaag

SEQ ID NO: 1716723 - RNA, 19 nt, Artificial Sequence
  Description of Artificial Sequence: Synthetic oligonucleotide
aucaauguuucccauuagu

SEQ ID NO: 1716724 - RNA, 19 nt, Artificial Sequence
  Description of Artificial Sequence: Synthetic oligonucleotide
auuaguacacguguguaug

SEQ ID NO: 1716725 - RNA, 19 nt, Artificial Sequence
  Description of Artificial Sequence: Synthetic oligonucleotide
agagggaggauagcuaagc

SEQ ID NO: 1716726 - RNA, 19 nt, Artificial Sequence
  Description of Artificial Sequence: Synthetic oligonucleotide
caaggaacuggaaugccag

SEQ ID NO: 1716727 - RNA, 19 nt, Artificial Sequence
  Description of Artificial Sequence: Synthetic oligonucleotide
uaaaaugcucccugagagc

SEQ ID NO: 1716728 - RNA, 19 nt, Artificial Sequence
  Description of Artificial Sequence: Synthetic oligonucleotide
uugauucagguacuggagu

SEQ ID NO: 1716729 - RNA, 19 nt, Artificial Sequence
  Description of Artificial Sequence: Synthetic oligonucleotide
uguuagacuggaaucccac

SEQ ID NO: 1716730 - RNA, 19 nt, Artificial Sequence
  Description of Artificial Sequence: Synthetic oligonucleotide
aacuuucucgcgaaugguc

SEQ ID NO: 1716731 - RNA, 19 nt, Artificial Sequence
  Description of Artificial Sequence: Synthetic oligonucleotide
uaauagcauuaucauggug

SEQ ID NO: 1716732 - RNA, 19 nt, Artificial Sequence
  Description of Artificial Sequence: Synthetic oligonucleotide
ucaagacggauuccaaacu

SEQ ID NO: 1716733 - RNA, 19 nt, Artificial Sequence
  Description of Artificial Sequence: Synthetic oligonucleotide
gagacgguuucaaaacugg

SEQ ID NO: 1716734 - RNA, 19 nt, Artificial Sequence
  Description of Artificial Sequence: Synthetic oligonucleotide
gaggaaauugccaaugcca

SEQ ID NO: 1716735 - RNA, 19 nt, Artificial Sequence
  Description of Artificial Sequence: Synthetic oligonucleotide
uuaguacacguguguaugc

SEQ ID NO: 1716736 - RNA, 19 nt, Artificial Sequence
  Description of Artificial Sequence: Synthetic oligonucleotide
cauccugguaguauccagg

SEQ ID NO: 1716737 - RNA, 19 nt, Artificial Sequence
  Description of Artificial Sequence: Synthetic oligonucleotide
uaacccuaucuccuaacca

SEQ ID NO: 1716738 - RNA, 19 nt, Artificial Sequence
  Description of Artificial Sequence: Synthetic oligonucleotide
cauucaggccacuaagcag

SEQ ID NO: 1716739 - RNA, 19 nt, Artificial Sequence
  Description of Artificial Sequence: Synthetic oligonucleotide
ucuagcaggaugugagccc

SEQ ID NO: 1716740 - RNA, 19 nt, Artificial Sequence
  Description of Artificial Sequence: Synthetic oligonucleotide
uuaucaugguggcuauacc

SEQ ID NO: 1716741 - RNA, 19 nt, Artificial Sequence
  Description of Artificial Sequence: Synthetic oligonucleotide
acuaagcagagacgguuuc

SEQ ID NO: 1716742 - RNA, 19 nt, Artificial Sequence
  Description of Artificial Sequence: Synthetic oligonucleotide
agucuggacagaucaaugu

SEQ ID NO: 1716743 - RNA, 19 nt, Artificial Sequence
  Description of Artificial Sequence: Synthetic oligonucleotide
guggcuaacggcuagucca

SEQ ID NO: 1716744 - RNA, 19 nt, Artificial Sequence
  Description of Artificial Sequence: Synthetic oligonucleotide
uggaaugccagcccaucug

SEQ ID NO: 1716745 - RNA, 19 nt, Artificial Sequence
  Description of Artificial Sequence: Synthetic oligonucleotide
auagcuugggacauggaug

SEQ ID NO: 1716746 - RNA, 19 nt, Artificial Sequence
  Description of Artificial Sequence: Synthetic oligonucleotide
cucgcgaauggucugguag

SEQ ID NO: 1716747 - RNA, 19 nt, Artificial Sequence
  Description of Artificial Sequence: Synthetic oligonucleotide
guaauaggggccauggcug

SEQ ID NO: 1716748 - RNA, 19 nt, Artificial Sequence
  Description of Artificial Sequence: Synthetic oligonucleotide
cuaacccuaucuccuaacc

SEQ ID NO: 1716749 - RNA, 19 nt, Artificial Sequence
  Description of Artificial Sequence: Synthetic oligonucleotide
aagacacggagguuuaaua

SEQ ID NO: 1716750 - RNA, 19 nt, Artificial Sequence
  Description of Artificial Sequence: Synthetic oligonucleotide
augaaguggguucaguaaa

SEQ ID NO: 1716751 - RNA, 19 nt, Artificial Sequence
  Description of Artificial Sequence: Synthetic oligonucleotide
aaacucaguuuuccugucu

SEQ ID NO: 1716752 - RNA, 19 nt, Artificial Sequence
  Description of Artificial Sequence: Synthetic oligonucleotide
aagcaggaaagaugagucu

SEQ ID NO: 1716753 - RNA, 19 nt, Artificial Sequence
  Description of Artificial Sequence: Synthetic oligonucleotide
gguucaauggaagugaaca

SEQ ID NO: 1716754 - RNA, 19 nt, Artificial Sequence
  Description of Artificial Sequence: Synthetic oligonucleotide
ucauguacgcagaggaaau

SEQ ID NO: 1716755 - RNA, 19 nt, Artificial Sequence
  Description of Artificial Sequence: Synthetic oligonucleotide
caaacugaaguggucagug

SEQ ID NO: 1716756 - RNA, 19 nt, Artificial Sequence
  Description of Artificial Sequence: Synthetic oligonucleotide
uaauugaguccaacuuccc

SEQ ID NO: 1716757 - RNA, 19 nt, Artificial Sequence
  Description of Artificial Sequence: Synthetic oligonucleotide
guaaauggggccguggcug

SEQ ID NO: 1716758 - RNA, 19 nt, Artificial Sequence
  Description of Artificial Sequence: Synthetic oligonucleotide
cugucuauaaaauggggaa

SEQ ID NO: 1716759 - RNA, 19 nt, Artificial Sequence
  Description of Artificial Sequence: Synthetic oligonucleotide
agacggauuccaaacuccc

SEQ ID NO: 1716760 - RNA, 19 nt, Artificial Sequence
  Description of Artificial Sequence: Synthetic oligonucleotide
auucaggccacuaagcaga

SEQ ID NO: 1716761 - RNA, 19 nt, Artificial Sequence
  Description of Artificial Sequence: Synthetic oligonucleotide
agcauuaucaugguggcua

SEQ ID NO: 1716762 - RNA, 19 nt, Artificial Sequence
  Description of Artificial Sequence: Synthetic oligonucleotide
agcaggaaagaugagucug

SEQ ID NO: 1716763 - RNA, 19 nt, Artificial Sequence
  Description of Artificial Sequence: Synthetic oligonucleotide
gaggauagcuaagcaagag

SEQ ID NO: 1716764 - RNA, 19 nt, Artificial Sequence
  Description of Artificial Sequence: Synthetic oligonucleotide
uaguauugauucagguacu

SEQ ID NO: 1716765 - RNA, 19 nt, Artificial Sequence
  Description of Artificial Sequence: Synthetic oligonucleotide
cagagugaaggcuacccac

SEQ ID NO: 1716766 - RNA, 19 nt, Artificial Sequence
  Description of Artificial Sequence: Synthetic oligonucleotide
uagccaugcgaacuccucc

SEQ ID NO: 1716767 - RNA, 19 nt, Artificial Sequence
  Description of Artificial Sequence: Synthetic oligonucleotide
ucaguaaauggggccgugg

SEQ ID NO: 1716768 - RNA, 19 nt, Artificial Sequence
  Description of Artificial Sequence: Synthetic oligonucleotide
caucccaguauugaccucc

SEQ ID NO: 1716769 - RNA, 19 nt, Artificial Sequence
  Description of Artificial Sequence: Synthetic oligonucleotide
cuuggucuuugcuucuacc

SEQ ID NO: 1716770 - RNA, 19 nt, Artificial Sequence
  Description of Artificial Sequence: Synthetic oligonucleotide
caccacuucaaaagucagg

SEQ ID NO: 1716771 - RNA, 19 nt, Artificial Sequence
  Description of Artificial Sequence: Synthetic oligonucleotide
guauugauucagguacugg

SEQ ID NO: 1716772 - RNA, 19 nt, Artificial Sequence
  Description of Artificial Sequence: Synthetic oligonucleotide
ucuggugauaucugugguc

SEQ ID NO: 1716773 - RNA, 19 nt, Artificial Sequence
  Description of Artificial Sequence: Synthetic oligonucleotide
aguaaauggggccguggcu

SEQ ID NO: 1716774 - RNA, 19 nt, Artificial Sequence
  Description of Artificial Sequence: Synthetic oligonucleotide
ucccauuaguacacgugug

SEQ ID NO: 1716775 - RNA, 19 nt, Artificial Sequence
  Description of Artificial Sequence: Synthetic oligonucleotide
agcccagguggcuaacggc

SEQ ID NO: 1716776 - RNA, 19 nt, Artificial Sequence
  Description of Artificial Sequence: Synthetic oligonucleotide
uuucucgcgaauggucugg

SEQ ID NO: 1716777 - RNA, 19 nt, Artificial Sequence
  Description of Artificial Sequence: Synthetic oligonucleotide
ugauucagguacuggaguu

SEQ ID NO: 1716778 - RNA, 19 nt, Artificial Sequence
  Description of Artificial Sequence: Synthetic oligonucleotide
caagacggauuccaaacuc

SEQ ID NO: 1716779 - RNA, 19 nt, Artificial Sequence
  Description of Artificial Sequence: Synthetic oligonucleotide
ugggccaacuuucucgcga

SEQ ID NO: 1716780 - RNA, 19 nt, Artificial Sequence
  Description of Artificial Sequence: Synthetic oligonucleotide
aagcuggcgacgcugcagu

SEQ ID NO: 1716781 - RNA, 19 nt, Artificial Sequence
  Description of Artificial Sequence: Synthetic oligonucleotide
ggauagcuaagcaagagca

SEQ ID NO: 1716782 - RNA, 19 nt, Artificial Sequence
  Description of Artificial Sequence: Synthetic oligonucleotide
aaagacacggagguuuaau

SEQ ID NO: 1716783 - RNA, 19 nt, Artificial Sequence
  Description of Artificial Sequence: Synthetic oligonucleotide
ugaguuucuucaggcaggc

SEQ ID NO: 1716784 - RNA, 19 nt, Artificial Sequence
  Description of Artificial Sequence: Synthetic oligonucleotide
ugaccuccagaacuccacc

SEQ ID NO: 1716785 - RNA, 19 nt, Artificial Sequence
  Description of Artificial Sequence: Synthetic oligonucleotide
uagcuaagcaagagcaaau

SEQ ID NO: 1716786 - RNA, 19 nt, Artificial Sequence
  Description of Artificial Sequence: Synthetic oligonucleotide
auguacgcagaggaaauug

SEQ ID NO: 1716787 - RNA, 19 nt, Artificial Sequence
  Description of Artificial Sequence: Synthetic oligonucleotide
ccuuuuggaaggcagguag

SEQ ID NO: 1716788 - RNA, 19 nt, Artificial Sequence
  Description of Artificial Sequence: Synthetic oligonucleotide
guuguuagacuggaauccc

SEQ ID NO: 1716789 - RNA, 19 nt, Artificial Sequence
  Description of Artificial Sequence: Synthetic oligonucleotide
aguacacguguguaugccu

SEQ ID NO: 1716790 - RNA, 19 nt, Artificial Sequence
  Description of Artificial Sequence: Synthetic oligonucleotide
aguauugauucagguacug

SEQ ID NO: 1716791 - RNA, 19 nt, Artificial Sequence
  Description of Artificial Sequence: Synthetic oligonucleotide
uauaccuuagaagcuuaaa

SEQ ID NO: 1716792 - RNA, 19 nt, Artificial Sequence
  Description of Artificial Sequence: Synthetic oligonucleotide
ccugguaguauccagguuc

SEQ ID NO: 1716793 - RNA, 19 nt, Artificial Sequence
  Description of Artificial Sequence: Synthetic oligonucleotide
uggcuauaccuuagaagcu

SEQ ID NO: 1716794 - RNA, 19 nt, Artificial Sequence
  Description of Artificial Sequence: Synthetic oligonucleotide
ggacagaucaauguuuccc

SEQ ID NO: 1716795 - RNA, 19 nt, Artificial Sequence
  Description of Artificial Sequence: Synthetic oligonucleotide
ugcucuagccaugcgaacu

SEQ ID NO: 1716796 - RNA, 19 nt, Artificial Sequence
  Description of Artificial Sequence: Synthetic oligonucleotide
cuuagaagcuuaaaaugcu

SEQ ID NO: 1716797 - RNA, 19 nt, Artificial Sequence
  Description of Artificial Sequence: Synthetic oligonucleotide
caugguggcuauaccuuag

SEQ ID NO: 1716798 - RNA, 19 nt, Artificial Sequence
  Description of Artificial Sequence: Synthetic oligonucleotide
agggaggauagcuaagcaa

SEQ ID NO: 1716799 - RNA, 19 nt, Artificial Sequence
  Description of Artificial Sequence: Synthetic oligonucleotide
aagaugagucuggacagau

SEQ ID NO: 1716800 - RNA, 19 nt, Artificial Sequence
  Description of Artificial Sequence: Synthetic oligonucleotide
ccaacuuucucgcgaaugg

SEQ ID NO: 1716801 - RNA, 19 nt, Artificial Sequence
  Description of Artificial Sequence: Synthetic oligonucleotide
uggacagaucaauguuucc

SEQ ID NO: 1716802 - RNA, 19 nt, Artificial Sequence
  Description of Artificial Sequence: Synthetic oligonucleotide
ugaaguggucaguggaguc

SEQ ID NO: 1716803 - RNA, 19 nt, Artificial Sequence
  Description of Artificial Sequence: Synthetic oligonucleotide
agcuaagcaagagcaaaug

SEQ ID NO: 1716804 - RNA, 19 nt, Artificial Sequence
  Description of Artificial Sequence: Synthetic oligonucleotide
guaggggugccccaaucgc

SEQ ID NO: 1716805 - RNA, 19 nt, Artificial Sequence
  Description of Artificial Sequence: Synthetic oligonucleotide
gaaacucaguuuuccuguc

SEQ ID NO: 1716806 - RNA, 19 nt, Artificial Sequence
  Description of Artificial Sequence: Synthetic oligonucleotide
gguaggggugccccaaucg

SEQ ID NO: 1716807 - RNA, 19 nt, Artificial Sequence
  Description of Artificial Sequence: Synthetic oligonucleotide
caucuagcaggaugugagc

SEQ ID NO: 1716808 - RNA, 19 nt, Artificial Sequence
  Description of Artificial Sequence: Synthetic oligonucleotide
cuccuaaccaagugcugag

SEQ ID NO: 1716809 - RNA, 19 nt, Artificial Sequence
  Description of Artificial Sequence: Synthetic oligonucleotide
agagacgguuucaaaacug

SEQ ID NO: 1716810 - RNA, 19 nt, Artificial Sequence
  Description of Artificial Sequence: Synthetic oligonucleotide
ggccacuaagcagagacgg

SEQ ID NO: 1716811 - RNA, 19 nt, Artificial Sequence
  Description of Artificial Sequence: Synthetic oligonucleotide
acgcagaggaaauugccaa

SEQ ID NO: 1716812 - RNA, 19 nt, Artificial Sequence
  Description of Artificial Sequence: Synthetic oligonucleotide
uucgagcaaaagcuuccac

SEQ ID NO: 1716813 - RNA, 19 nt, Artificial Sequence
  Description of Artificial Sequence: Synthetic oligonucleotide
ccaacuucccacaaggcuc

SEQ ID NO: 1716814 - RNA, 19 nt, Artificial Sequence
  Description of Artificial Sequence: Synthetic oligonucleotide
ugucugaaacucaguuuuc

SEQ ID NO: 1716815 - RNA, 19 nt, Artificial Sequence
  Description of Artificial Sequence: Synthetic oligonucleotide
agguuaagaguguuucaaa

SEQ ID NO: 1716816 - RNA, 19 nt, Artificial Sequence
  Description of Artificial Sequence: Synthetic oligonucleotide
ucgcgaauggucugguagu

SEQ ID NO: 1716817 - RNA, 19 nt, Artificial Sequence
  Description of Artificial Sequence: Synthetic oligonucleotide
gagucuggacagaucaaug

SEQ ID NO: 1716818 - RNA, 19 nt, Artificial Sequence
  Description of Artificial Sequence: Synthetic oligonucleotide
agacgguuucaaaacuggg

SEQ ID NO: 1716819 - RNA, 19 nt, Artificial Sequence
  Description of Artificial Sequence: Synthetic oligonucleotide
gguaauaggggccauggcu

SEQ ID NO: 1716820 - RNA, 19 nt, Artificial Sequence
  Description of Artificial Sequence: Synthetic oligonucleotide
cuaacggcuaguccagguc

SEQ ID NO: 1716821 - RNA, 19 nt, Artificial Sequence
  Description of Artificial Sequence: Synthetic oligonucleotide
guguaugccuccuuuugga

SEQ ID NO: 1716822 - RNA, 19 nt, Artificial Sequence
  Description of Artificial Sequence: Synthetic oligonucleotide
aggaaauugccaaugccau

SEQ ID NO: 1716823 - RNA, 19 nt, Artificial Sequence
  Description of Artificial Sequence: Synthetic oligonucleotide
auccagguucaauggaagu

SEQ ID NO: 1716824 - RNA, 19 nt, Artificial Sequence
  Description of Artificial Sequence: Synthetic oligonucleotide
ucaugguggcuauaccuua

SEQ ID NO: 1716825 - RNA, 19 nt, Artificial Sequence
  Description of Artificial Sequence: Synthetic oligonucleotide
uccuugguagggcuguaau

SEQ ID NO: 1716826 - RNA, 19 nt, Artificial Sequence
  Description of Artificial Sequence: Synthetic oligonucleotide
aguguuucaaagacacgga

SEQ ID NO: 1716827 - RNA, 19 nt, Artificial Sequence
  Description of Artificial Sequence: Synthetic oligonucleotide
gguaguauugauucaggua

SEQ ID NO: 1716828 - RNA, 19 nt, Artificial Sequence
  Description of Artificial Sequence: Synthetic oligonucleotide
ugaaggcuacccacauaga

SEQ ID NO: 1716829 - RNA, 19 nt, Artificial Sequence
  Description of Artificial Sequence: Synthetic oligonucleotide
caugcgaacuccuccagaa

SEQ ID NO: 1716830 - RNA, 19 nt, Artificial Sequence
  Description of Artificial Sequence: Synthetic oligonucleotide
aggcugacaucaaugaggu

SEQ ID NO: 1716831 - RNA, 19 nt, Artificial Sequence
  Description of Artificial Sequence: Synthetic oligonucleotide
cuuucucgcgaauggucug

SEQ ID NO: 1716832 - RNA, 19 nt, Artificial Sequence
  Description of Artificial Sequence: Synthetic oligonucleotide
agccaugcgaacuccucca

SEQ ID NO: 1716833 - RNA, 19 nt, Artificial Sequence
  Description of Artificial Sequence: Synthetic oligonucleotide
ugcuaacccuaucuccuaa

SEQ ID NO: 1716834 - RNA, 19 nt, Artificial Sequence
  Description of Artificial Sequence: Synthetic oligonucleotide
ugcagauccuugguagggc

SEQ ID NO: 1716835 - RNA, 19 nt, Artificial Sequence
  Description of Artificial Sequence: Synthetic oligonucleotide
ggguucaguaaauggggcc

SEQ ID NO: 1716836 - RNA, 19 nt, Artificial Sequence
  Description of Artificial Sequence: Synthetic oligonucleotide
gagggaggauagcuaagca

SEQ ID NO: 1716837 - RNA, 19 nt, Artificial Sequence
  Description of Artificial Sequence: Synthetic oligonucleotide
guauugaccuccagaacuc

SEQ ID NO: 1716838 - RNA, 19 nt, Artificial Sequence
  Description of Artificial Sequence: Synthetic oligonucleotide
ugcggugcagauccuuggu

SEQ ID NO: 1716839 - RNA, 19 nt, Artificial Sequence
  Description of Artificial Sequence: Synthetic oligonucleotide
cuagccaugcgaacuccuc

SEQ ID NO: 1716840 - RNA, 19 nt, Artificial Sequence
  Description of Artificial Sequence: Synthetic oligonucleotide
caguauugaccuccagaac

SEQ ID NO: 1716841 - RNA, 19 nt, Artificial Sequence
  Description of Artificial Sequence: Synthetic oligonucleotide
gcaaaagcuuccaccaucc

SEQ ID NO: 1716842 - RNA, 19 nt, Artificial Sequence
  Description of Artificial Sequence: Synthetic oligonucleotide
gacggauuccaaacucccc

SEQ ID NO: 1716843 - RNA, 19 nt, Artificial Sequence
  Description of Artificial Sequence: Synthetic oligonucleotide
gguacuggaguugcucugg

SEQ ID NO: 1716844 - RNA, 19 nt, Artificial Sequence
  Description of Artificial Sequence: Synthetic oligonucleotide
gcuaagcaagagcaaauga

SEQ ID NO: 1716845 - RNA, 19 nt, Artificial Sequence
  Description of Artificial Sequence: Synthetic oligonucleotide
cugguaguauccagguuca

SEQ ID NO: 1716846 - RNA, 19 nt, Artificial Sequence
  Description of Artificial Sequence: Synthetic oligonucleotide
agguucaauggaagugaac

SEQ ID NO: 1716847 - RNA, 19 nt, Artificial Sequence
  Description of Artificial Sequence: Synthetic oligonucleotide
gauagcuaagcaagagcaa

SEQ ID NO: 1716848 - RNA, 19 nt, Artificial Sequence
  Description of Artificial Sequence: Synthetic oligonucleotide
aggucaaggaggugguaau

SEQ ID NO: 1716849 - RNA, 19 nt, Artificial Sequence
  Description of Artificial Sequence: Synthetic oligonucleotide
aacccugaugaaguggguu

SEQ ID NO: 1716850 - RNA, 19 nt, Artificial Sequence
  Description of Artificial Sequence: Synthetic oligonucleotide
agguuccggucauagggca

SEQ ID NO: 1716851 - RNA, 19 nt, Artificial Sequence
  Description of Artificial Sequence: Synthetic oligonucleotide
uggugauaucugugguccc

SEQ ID NO: 1716852 - RNA, 19 nt, Artificial Sequence
  Description of Artificial Sequence: Synthetic oligonucleotide
agagugaaggcuacccaca

SEQ ID NO: 1716853 - RNA, 19 nt, Artificial Sequence
  Description of Artificial Sequence: Synthetic oligonucleotide
cucauguacgcagaggaaa

SEQ ID NO: 1716854 - RNA, 19 nt, Artificial Sequence
  Description of Artificial Sequence: Synthetic oligonucleotide
gggauagcuugggacaugg

SEQ ID NO: 1716855 - RNA, 19 nt, Artificial Sequence
  Description of Artificial Sequence: Synthetic oligonucleotide
ggcuaagagacuuggcaca

SEQ ID NO: 1716856 - RNA, 19 nt, Artificial Sequence
  Description of Artificial Sequence: Synthetic oligonucleotide
agauccuugguagggcugu

SEQ ID NO: 1716857 - RNA, 19 nt, Artificial Sequence
  Description of Artificial Sequence: Synthetic oligonucleotide
gacgguuucaaaacugggu

SEQ ID NO: 1716858 - RNA, 19 nt, Artificial Sequence
  Description of Artificial Sequence: Synthetic oligonucleotide
guauccagguucaauggaa

SEQ ID NO: 1716859 - RNA, 19 nt, Artificial Sequence
  Description of Artificial Sequence: Synthetic oligonucleotide
aggggugccccaaucgcac

SEQ ID NO: 1716860 - RNA, 19 nt, Artificial Sequence
  Description of Artificial Sequence: Synthetic oligonucleotide
gauguaggcuaagagacuu

SEQ ID NO: 1716861 - RNA, 19 nt, Artificial Sequence
  Description of Artificial Sequence: Synthetic oligonucleotide
aaagucagguaggccccug

SEQ ID NO: 1716862 - RNA, 19 nt, Artificial Sequence
  Description of Artificial Sequence: Synthetic oligonucleotide
acagcgguugugugugcug

SEQ ID NO: 1716863 - RNA, 19 nt, Artificial Sequence
  Description of Artificial Sequence: Synthetic oligonucleotide
agggcuguaaugggccagg

SEQ ID NO: 1716864 - RNA, 19 nt, Artificial Sequence
  Description of Artificial Sequence: Synthetic oligonucleotide
uggucccaucccaguauug

SEQ ID NO: 1716865 - RNA, 19 nt, Artificial Sequence
  Description of Artificial Sequence: Synthetic oligonucleotide
uagggcuguaaugggccag

SEQ ID NO: 1716866 - RNA, 19 nt, Artificial Sequence
  Description of Artificial Sequence: Synthetic oligonucleotide
cagagucugcccacacaag

SEQ ID NO: 1716867 - RNA, 19 nt, Artificial Sequence
  Description of Artificial Sequence: Synthetic oligonucleotide
ugauaucuguggucccauc

SEQ ID NO: 1716868 - RNA, 19 nt, Artificial Sequence
  Description of Artificial Sequence: Synthetic oligonucleotide
aagcaucuagcaggaugug

SEQ ID NO: 1716869 - RNA, 19 nt, Artificial Sequence
  Description of Artificial Sequence: Synthetic oligonucleotide
aucccaaacugaagugguc

SEQ ID NO: 1716870 - RNA, 19 nt, Artificial Sequence
  Description of Artificial Sequence: Synthetic oligonucleotide
cagauccuugguagggcug

SEQ ID NO: 1716871 - RNA, 19 nt, Artificial Sequence
  Description of Artificial Sequence: Synthetic oligonucleotide
aucaugguggcuauaccuu

SEQ ID NO: 1716872 - RNA, 19 nt, Artificial Sequence
  Description of Artificial Sequence: Synthetic oligonucleotide
ucccaguauugaccuccag

SEQ ID NO: 1716873 - RNA, 19 nt, Artificial Sequence
  Description of Artificial Sequence: Synthetic oligonucleotide
uggaaucccacuggccacu

SEQ ID NO: 1716874 - RNA, 19 nt, Artificial Sequence
  Description of Artificial Sequence: Synthetic oligonucleotide
acguguguaugccuccuuu

SEQ ID NO: 1716875 - RNA, 19 nt, Artificial Sequence
  Description of Artificial Sequence: Synthetic oligonucleotide
gcuaagagacuuggcacag

SEQ ID NO: 1716876 - RNA, 19 nt, Artificial Sequence
  Description of Artificial Sequence: Synthetic oligonucleotide
agguggcuaacggcuaguc

SEQ ID NO: 1716877 - RNA, 19 nt, Artificial Sequence
  Description of Artificial Sequence: Synthetic oligonucleotide
gaugggccaaggaacugga

SEQ ID NO: 1716878 - RNA, 19 nt, Artificial Sequence
  Description of Artificial Sequence: Synthetic oligonucleotide
uccuaaccaagugcugagu

SEQ ID NO: 1716879 - RNA, 19 nt, Artificial Sequence
  Description of Artificial Sequence: Synthetic oligonucleotide
aauggggccguggcugaga

SEQ ID NO: 1716880 - RNA, 19 nt, Artificial Sequence
  Description of Artificial Sequence: Synthetic oligonucleotide
augccuccuuuuggaaggc

SEQ ID NO: 1716881 - RNA, 19 nt, Artificial Sequence
  Description of Artificial Sequence: Synthetic oligonucleotide
cauuaguacacguguguau

SEQ ID NO: 1716882 - RNA, 19 nt, Artificial Sequence
  Description of Artificial Sequence: Synthetic oligonucleotide
aggccacuaagcagagacg

SEQ ID NO: 1716883 - RNA, 19 nt, Artificial Sequence
  Description of Artificial Sequence: Synthetic oligonucleotide
cuauaccuuagaagcuuaa

SEQ ID NO: 1716884 - RNA, 19 nt, Artificial Sequence
  Description of Artificial Sequence: Synthetic oligonucleotide
cucuagccaugcgaacucc

SEQ ID NO: 1716885 - RNA, 19 nt, Artificial Sequence
  Description of Artificial Sequence: Synthetic oligonucleotide
aaacccugaugaagugggu

SEQ ID NO: 1716886 - RNA, 19 nt, Artificial Sequence
  Description of Artificial Sequence: Synthetic oligonucleotide
guuagacuggaaucccacu

SEQ ID NO: 1716887 - RNA, 19 nt, Artificial Sequence
  Description of Artificial Sequence: Synthetic oligonucleotide
cccaaucgcacuguucugg

SEQ ID NO: 1716888 - RNA, 19 nt, Artificial Sequence
  Description of Artificial Sequence: Synthetic oligonucleotide
cuaagcagagacgguuuca

SEQ ID NO: 1716889 - RNA, 19 nt, Artificial Sequence
  Description of Artificial Sequence: Synthetic oligonucleotide
gaggacagcuugcggugca

SEQ ID NO: 1716890 - RNA, 19 nt, Artificial Sequence
  Description of Artificial Sequence: Synthetic oligonucleotide
cugggccaacuuucucgcg

SEQ ID NO: 1716891 - RNA, 19 nt, Artificial Sequence
  Description of Artificial Sequence: Synthetic oligonucleotide
uccugguaguauccagguu

SEQ ID NO: 1716892 - RNA, 19 nt, Artificial Sequence
  Description of Artificial Sequence: Synthetic oligonucleotide
gccauaauugaguccaacu

SEQ ID NO: 1716893 - RNA, 19 nt, Artificial Sequence
  Description of Artificial Sequence: Synthetic oligonucleotide
gcuaacccuaucuccuaac

SEQ ID NO: 1716894 - RNA, 19 nt, Artificial Sequence
  Description of Artificial Sequence: Synthetic oligonucleotide
uggccccaccaucugcuaa

SEQ ID NO: 1716895 - RNA, 19 nt, Artificial Sequence
  Description of Artificial Sequence: Synthetic oligonucleotide
cugcucuagccaugcgaac

SEQ ID NO: 1716896 - RNA, 19 nt, Artificial Sequence
  Description of Artificial Sequence: Synthetic oligonucleotide
cacagagggaggauagcua

SEQ ID NO: 1716897 - RNA, 19 nt, Artificial Sequence
  Description of Artificial Sequence: Synthetic oligonucleotide
ggcgacgcugcaguucugg

SEQ ID NO: 1716898 - RNA, 19 nt, Artificial Sequence
  Description of Artificial Sequence: Synthetic oligonucleotide
ggaugugagcccagguggc

SEQ ID NO: 1716899 - RNA, 19 nt, Artificial Sequence
  Description of Artificial Sequence: Synthetic oligonucleotide
cacacaagguuaagagugu

SEQ ID NO: 1716900 - RNA, 19 nt, Artificial Sequence
  Description of Artificial Sequence: Synthetic oligonucleotide
cuucgagcaaaagcuucca

SEQ ID NO: 1716901 - RNA, 19 nt, Artificial Sequence
  Description of Artificial Sequence: Synthetic oligonucleotide
uggccauaauugaguccaa

SEQ ID NO: 1716902 - RNA, 19 nt, Artificial Sequence
  Description of Artificial Sequence: Synthetic oligonucleotide
gagucugcccacacaaggu

SEQ ID NO: 1716903 - RNA, 19 nt, Artificial Sequence
  Description of Artificial Sequence: Synthetic oligonucleotide
uucucgcgaauggucuggu

SEQ ID NO: 1716904 - RNA, 19 nt, Artificial Sequence
  Description of Artificial Sequence: Synthetic oligonucleotide
uacccacauagaggucaag

SEQ ID NO: 1716905 - RNA, 19 nt, Artificial Sequence
  Description of Artificial Sequence: Synthetic oligonucleotide
gcagcauucaggccacuaa

SEQ ID NO: 1716906 - RNA, 19 nt, Artificial Sequence
  Description of Artificial Sequence: Synthetic oligonucleotide
cuucaggcaggccacgccu

SEQ ID NO: 1716907 - RNA, 19 nt, Artificial Sequence
  Description of Artificial Sequence: Synthetic oligonucleotide
cagagacgguuucaaaacu

SEQ ID NO: 1716908 - RNA, 19 nt, Artificial Sequence
  Description of Artificial Sequence: Synthetic oligonucleotide
ggugguaauaggggccaug

SEQ ID NO: 1716909 - RNA, 19 nt, Artificial Sequence
  Description of Artificial Sequence: Synthetic oligonucleotide
gaaucccacuggccacuca

SEQ ID NO: 1716910 - RNA, 19 nt, Artificial Sequence
  Description of Artificial Sequence: Synthetic oligonucleotide
gcgacgcugcaguucuggg

SEQ ID NO: 1716911 - RNA, 19 nt, Artificial Sequence
  Description of Artificial Sequence: Synthetic oligonucleotide
ucucgcgaauggucuggua

SEQ ID NO: 1716912 - RNA, 19 nt, Artificial Sequence
  Description of Artificial Sequence: Synthetic oligonucleotide
cuggcgacgcugcaguucu

SEQ ID NO: 1716913 - RNA, 19 nt, Artificial Sequence
  Description of Artificial Sequence: Synthetic oligonucleotide
guaaugggccagggcagca

SEQ ID NO: 1716914 - RNA, 19 nt, Artificial Sequence
  Description of Artificial Sequence: Synthetic oligonucleotide
ggcgucuagcugcuccagc

SEQ ID NO: 1716915 - RNA, 19 nt, Artificial Sequence
  Description of Artificial Sequence: Synthetic oligonucleotide
ugccaaugccauggccugu

SEQ ID NO: 1716916 - RNA, 19 nt, Artificial Sequence
  Description of Artificial Sequence: Synthetic oligonucleotide
gggugccccaaucgcacug

SEQ ID NO: 1716917 - RNA, 19 nt, Artificial Sequence
  Description of Artificial Sequence: Synthetic oligonucleotide
gccaugcgaacuccuccag

SEQ ID NO: 1716918 - RNA, 19 nt, Artificial Sequence
  Description of Artificial Sequence: Synthetic oligonucleotide
ccccauccugguaguaucc

SEQ ID NO: 1716919 - RNA, 19 nt, Artificial Sequence
  Description of Artificial Sequence: Synthetic oligonucleotide
caaacuccccauccuggua

SEQ ID NO: 1716920 - RNA, 19 nt, Artificial Sequence
  Description of Artificial Sequence: Synthetic oligonucleotide
gaugugagcccagguggcu

SEQ ID NO: 1716921 - RNA, 19 nt, Artificial Sequence
  Description of Artificial Sequence: Synthetic oligonucleotide
ggccauaauugaguccaac

SEQ ID NO: 1716922 - RNA, 19 nt, Artificial Sequence
  Description of Artificial Sequence: Synthetic oligonucleotide
cugaaguggucaguggagu

SEQ ID NO: 1716923 - RNA, 19 nt, Artificial Sequence
  Description of Artificial Sequence: Synthetic oligonucleotide
cacaagguuaagaguguuu

SEQ ID NO: 1716924 - RNA, 19 nt, Artificial Sequence
  Description of Artificial Sequence: Synthetic oligonucleotide
uucaagcaucuagcaggau

SEQ ID NO: 1716925 - RNA, 19 nt, Artificial Sequence
  Description of Artificial Sequence: Synthetic oligonucleotide
cuggaaugccagcccaucu

SEQ ID NO: 1716926 - RNA, 19 nt, Artificial Sequence
  Description of Artificial Sequence: Synthetic oligonucleotide
ugguaguauccagguucaa

SEQ ID NO: 1716927 - RNA, 19 nt, Artificial Sequence
  Description of Artificial Sequence: Synthetic oligonucleotide
agguaggccccugggugcu

SEQ ID NO: 1716928 - RNA, 19 nt, Artificial Sequence
  Description of Artificial Sequence: Synthetic oligonucleotide
ggccguggcugagauguag

SEQ ID NO: 1716929 - RNA, 19 nt, Artificial Sequence
  Description of Artificial Sequence: Synthetic oligonucleotide
gucugcccacacaagguua

SEQ ID NO: 1716930 - RNA, 19 nt, Artificial Sequence
  Description of Artificial Sequence: Synthetic oligonucleotide
gacagcgguugugugugcu

SEQ ID NO: 1716931 - RNA, 19 nt, Artificial Sequence
  Description of Artificial Sequence: Synthetic oligonucleotide
uggggccguggcugagaug

SEQ ID NO: 1716932 - RNA, 19 nt, Artificial Sequence
  Description of Artificial Sequence: Synthetic oligonucleotide
ggcuaacggcuaguccagg

SEQ ID NO: 1716933 - RNA, 19 nt, Artificial Sequence
  Description of Artificial Sequence: Synthetic oligonucleotide
gcagauccuugguagggcu

SEQ ID NO: 1716934 - RNA, 19 nt, Artificial Sequence
  Description of Artificial Sequence: Synthetic oligonucleotide
gcuaacggcuaguccaggu

SEQ ID NO: 1716935 - RNA, 19 nt, Artificial Sequence
  Description of Artificial Sequence: Synthetic oligonucleotide
caacuuucucgcgaauggu

SEQ ID NO: 1716936 - RNA, 19 nt, Artificial Sequence
  Description of Artificial Sequence: Synthetic oligonucleotide
uggcgacgcugcaguucug

SEQ ID NO: 1716937 - RNA, 19 nt, Artificial Sequence
  Description of Artificial Sequence: Synthetic oligonucleotide
gggcuguaaugggccaggg

SEQ ID NO: 1716938 - RNA, 19 nt, Artificial Sequence
  Description of Artificial Sequence: Synthetic oligonucleotide
ggggcgucuagcugcucca

SEQ ID NO: 1716939 - RNA, 19 nt, Artificial Sequence
  Description of Artificial Sequence: Synthetic oligonucleotide
gcacagagggaggauagcu

SEQ ID NO: 1716940 - RNA, 19 nt, Artificial Sequence
  Description of Artificial Sequence: Synthetic oligonucleotide
cccauuaguacacgugugu

SEQ ID NO: 1716941 - RNA, 19 nt, Artificial Sequence
  Description of Artificial Sequence: Synthetic oligonucleotide
ggcuauaccuuagaagcuu

SEQ ID NO: 1716942 - RNA, 19 nt, Artificial Sequence
  Description of Artificial Sequence: Synthetic oligonucleotide
uccggucauagggcacaaa

SEQ ID NO: 1716943 - RNA, 19 nt, Artificial Sequence
  Description of Artificial Sequence: Synthetic oligonucleotide
ccauuaguacacgugugua

SEQ ID NO: 1716944 - RNA, 19 nt, Artificial Sequence
  Description of Artificial Sequence: Synthetic oligonucleotide
gggacauggauggcacaga

SEQ ID NO: 1716945 - RNA, 19 nt, Artificial Sequence
  Description of Artificial Sequence: Synthetic oligonucleotide
cugucccauggccauaauu

SEQ ID NO: 1716946 - RNA, 19 nt, Artificial Sequence
  Description of Artificial Sequence: Synthetic oligonucleotide
cacggagguuuaauagcau

SEQ ID NO: 1716947 - RNA, 19 nt, Artificial Sequence
  Description of Artificial Sequence: Synthetic oligonucleotide
ggucaaggaggugguaaua

SEQ ID NO: 1716948 - RNA, 19 nt, Artificial Sequence
  Description of Artificial Sequence: Synthetic oligonucleotide
ccccaaucgcacuguucug

SEQ ID NO: 1716949 - RNA, 19 nt, Artificial Sequence
  Description of Artificial Sequence: Synthetic oligonucleotide
cuccugucugaaacucagu

SEQ ID NO: 1716950 - RNA, 19 nt, Artificial Sequence
  Description of Artificial Sequence: Synthetic oligonucleotide
ccuuuuguugaagcaggaa

SEQ ID NO: 1716951 - RNA, 19 nt, Artificial Sequence
  Description of Artificial Sequence: Synthetic oligonucleotide
ccuaaccaagugcugaguu

SEQ ID NO: 1716952 - RNA, 19 nt, Artificial Sequence
  Description of Artificial Sequence: Synthetic oligonucleotide
ccaugcgaacuccuccaga

SEQ ID NO: 1716953 - RNA, 19 nt, Artificial Sequence
  Description of Artificial Sequence: Synthetic oligonucleotide
gggccauggcugacagcgg

SEQ ID NO: 1716954 - RNA, 19 nt, Artificial Sequence
  Description of Artificial Sequence: Synthetic oligonucleotide
ggccacgccuccugucuga

SEQ ID NO: 1716955 - RNA, 19 nt, Artificial Sequence
  Description of Artificial Sequence: Synthetic oligonucleotide
gggcgucuagcugcuccag

SEQ ID NO: 1716956 - RNA, 19 nt, Artificial Sequence
  Description of Artificial Sequence: Synthetic oligonucleotide
cauguacgcagaggaaauu

SEQ ID NO: 1716957 - RNA, 19 nt, Artificial Sequence
  Description of Artificial Sequence: Synthetic oligonucleotide
ggaaucccacuggccacuc

SEQ ID NO: 1716958 - RNA, 19 nt, Artificial Sequence
  Description of Artificial Sequence: Synthetic oligonucleotide
ggauagcuugggacaugga

SEQ ID NO: 1716959 - RNA, 19 nt, Artificial Sequence
  Description of Artificial Sequence: Synthetic oligonucleotide
gcgguugugugugcugcuc

SEQ ID NO: 1716960 - RNA, 19 nt, Artificial Sequence
  Description of Artificial Sequence: Synthetic oligonucleotide
ccaucccaguauugaccuc

SEQ ID NO: 1716961 - RNA, 19 nt, Artificial Sequence
  Description of Artificial Sequence: Synthetic oligonucleotide
ggcagcauucaggccacua

SEQ ID NO: 1716962 - RNA, 19 nt, Artificial Sequence
  Description of Artificial Sequence: Synthetic oligonucleotide
gccugucccauggccauaa

SEQ ID NO: 1716963 - RNA, 19 nt, Artificial Sequence
  Description of Artificial Sequence: Synthetic oligonucleotide
ggcuacccacauagagguc

SEQ ID NO: 1716964 - RNA, 19 nt, Artificial Sequence
  Description of Artificial Sequence: Synthetic oligonucleotide
gccacuaagcagagacggu

SEQ ID NO: 1716965 - RNA, 19 nt, Artificial Sequence
  Description of Artificial Sequence: Synthetic oligonucleotide
ccauggcaauguuguuaga

SEQ ID NO: 1716966 - RNA, 19 nt, Artificial Sequence
  Description of Artificial Sequence: Synthetic oligonucleotide
cagguggcuaacggcuagu

SEQ ID NO: 1716967 - RNA, 19 nt, Artificial Sequence
  Description of Artificial Sequence: Synthetic oligonucleotide
gcgaauggucugguaguau

SEQ ID NO: 1716968 - RNA, 19 nt, Artificial Sequence
  Description of Artificial Sequence: Synthetic oligonucleotide
cguguguaugccuccuuuu

SEQ ID NO: 1716969 - RNA, 19 nt, Artificial Sequence
  Description of Artificial Sequence: Synthetic oligonucleotide
cggauuccaaacuccccau

SEQ ID NO: 1716970 - RNA, 19 nt, Artificial Sequence
  Description of Artificial Sequence: Synthetic oligonucleotide
gccacgccuccugucugaa

SEQ ID NO: 1716971 - RNA, 19 nt, Artificial Sequence
  Description of Artificial Sequence: Synthetic oligonucleotide
gcccaucuggccccaccau

SEQ ID NO: 1716972 - RNA, 19 nt, Artificial Sequence
  Description of Artificial Sequence: Synthetic oligonucleotide
ccugucccauggccauaau

SEQ ID NO: 1716973 - RNA, 19 nt, Artificial Sequence
  Description of Artificial Sequence: Synthetic oligonucleotide
aaagagacagccuaggauc

SEQ ID NO: 1716974 - RNA, 19 nt, Artificial Sequence
  Description of Artificial Sequence: Synthetic oligonucleotide
auaaccgaaggucaaagcc

SEQ ID NO: 1716975 - RNA, 19 nt, Artificial Sequence
  Description of Artificial Sequence: Synthetic oligonucleotide
gauguuaugaggcaugaug

SEQ ID NO: 1716976 - RNA, 19 nt, Artificial Sequence
  Description of Artificial Sequence: Synthetic oligonucleotide
aauaguaauaagaagucca

SEQ ID NO: 1716977 - RNA, 19 nt, Artificial Sequence
  Description of Artificial Sequence: Synthetic oligonucleotide
caauccauaauuauccagg

SEQ ID NO: 1716978 - RNA, 19 nt, Artificial Sequence
  Description of Artificial Sequence: Synthetic oligonucleotide
agcagauugaaggagaucg

SEQ ID NO: 1716979 - RNA, 19 nt, Artificial Sequence
  Description of Artificial Sequence: Synthetic oligonucleotide
cuagacuugaccaaggcug

SEQ ID NO: 1716980 - RNA, 19 nt, Artificial Sequence
  Description of Artificial Sequence: Synthetic oligonucleotide
uaccacauacucauaaccg

SEQ ID NO: 1716981 - RNA, 19 nt, Artificial Sequence
  Description of Artificial Sequence: Synthetic oligonucleotide
ugugugauugucccuaggg

SEQ ID NO: 1716982 - RNA, 19 nt, Artificial Sequence
  Description of Artificial Sequence: Synthetic oligonucleotide
agugccaugaugcaggaag

SEQ ID NO: 1716983 - RNA, 19 nt, Artificial Sequence
  Description of Artificial Sequence: Synthetic oligonucleotide
augacuuugcucaacaggc

SEQ ID NO: 1716984 - RNA, 19 nt, Artificial Sequence
  Description of Artificial Sequence: Synthetic oligonucleotide
cagaacauugagcaaaucg

SEQ ID NO: 1716985 - RNA, 19 nt, Artificial Sequence
  Description of Artificial Sequence: Synthetic oligonucleotide
cagauagacaguaaggccc

SEQ ID NO: 1716986 - RNA, 19 nt, Artificial Sequence
  Description of Artificial Sequence: Synthetic oligonucleotide
uugguuugcugguagaagg

SEQ ID NO: 1716987 - RNA, 19 nt, Artificial Sequence
  Description of Artificial Sequence: Synthetic oligonucleotide
aaggucaaagccauaauag

SEQ ID NO: 1716988 - RNA, 19 nt, Artificial Sequence
  Description of Artificial Sequence: Synthetic oligonucleotide
gaucuuagcauaguugugg

SEQ ID NO: 1716989 - RNA, 19 nt, Artificial Sequence
  Description of Artificial Sequence: Synthetic oligonucleotide
auaauaguaauaagaaguc

SEQ ID NO: 1716990 - RNA, 19 nt, Artificial Sequence
  Description of Artificial Sequence: Synthetic oligonucleotide
cagauagauguuaugaggc

SEQ ID NO: 1716991 - RNA, 19 nt, Artificial Sequence
  Description of Artificial Sequence: Synthetic oligonucleotide
gaugauagcgccgacaaug

SEQ ID NO: 1716992 - RNA, 19 nt, Artificial Sequence
  Description of Artificial Sequence: Synthetic oligonucleotide
aaucguugaggccggauag

SEQ ID NO: 1716993 - RNA, 19 nt, Artificial Sequence
  Description of Artificial Sequence: Synthetic oligonucleotide
acggaagacggccacaagc

SEQ ID NO: 1716994 - RNA, 19 nt, Artificial Sequence
  Description of Artificial Sequence: Synthetic oligonucleotide
cugugagugagaaagguag

SEQ ID NO: 1716995 - RNA, 19 nt, Artificial Sequence
  Description of Artificial Sequence: Synthetic oligonucleotide
gagcaaaucguugaggccg

SEQ ID NO: 1716996 - RNA, 19 nt, Artificial Sequence
  Description of Artificial Sequence: Synthetic oligonucleotide
ugaggcaugaugauagcgc

SEQ ID NO: 1716997 - RNA, 19 nt, Artificial Sequence
  Description of Artificial Sequence: Synthetic oligonucleotide
auacucauaaccgaagguc

SEQ ID NO: 1716998 - RNA, 19 nt, Artificial Sequence
  Description of Artificial Sequence: Synthetic oligonucleotide
gagugagaaagguagcucc

SEQ ID NO: 1716999 - RNA, 19 nt, Artificial Sequence
  Description of Artificial Sequence: Synthetic oligonucleotide
ugcagauagauguuaugag

SEQ ID NO: 1717000 - RNA, 19 nt, Artificial Sequence
  Description of Artificial Sequence: Synthetic oligonucleotide
gacacugugugauuguccc

SEQ ID NO: 1717001 - RNA, 19 nt, Artificial Sequence
  Description of Artificial Sequence: Synthetic oligonucleotide
uucucgaauguccacccgg

SEQ ID NO: 1717002 - RNA, 19 nt, Artificial Sequence
  Description of Artificial Sequence: Synthetic oligonucleotide
augaaggacaccgauagag

SEQ ID NO: 1717003 - RNA, 19 nt, Artificial Sequence
  Description of Artificial Sequence: Synthetic oligonucleotide
gauauagagggcagcaggg

SEQ ID NO: 1717004 - RNA, 19 nt, Artificial Sequence
  Description of Artificial Sequence: Synthetic oligonucleotide
guaauaagaaguccaaaga

SEQ ID NO: 1717005 - RNA, 19 nt, Artificial Sequence
  Description of Artificial Sequence: Synthetic oligonucleotide
acggcccagauauagaggg

SEQ ID NO: 1717006 - RNA, 19 nt, Artificial Sequence
  Description of Artificial Sequence: Synthetic oligonucleotide
uauccacugacacugugug

SEQ ID NO: 1717007 - RNA, 19 nt, Artificial Sequence
  Description of Artificial Sequence: Synthetic oligonucleotide
uaaccgaaggucaaagcca

SEQ ID NO: 1717008 - RNA, 19 nt, Artificial Sequence
  Description of Artificial Sequence: Synthetic oligonucleotide
uaauaguaauaagaagucc

SEQ ID NO: 1717009 - RNA, 19 nt, Artificial Sequence
  Description of Artificial Sequence: Synthetic oligonucleotide
acagguccaggccagauag

SEQ ID NO: 1717010 - RNA, 19 nt, Artificial Sequence
  Description of Artificial Sequence: Synthetic oligonucleotide
ugucugacgccccacaaug

SEQ ID NO: 1717011 - RNA, 19 nt, Artificial Sequence
  Description of Artificial Sequence: Synthetic oligonucleotide
ucgaauguccacccggcgg

SEQ ID NO: 1717012 - RNA, 19 nt, Artificial Sequence
  Description of Artificial Sequence: Synthetic oligonucleotide
cuaccacauacucauaacc

SEQ ID NO: 1717013 - RNA, 19 nt, Artificial Sequence
  Description of Artificial Sequence: Synthetic oligonucleotide
uccggcagagagcagauug

SEQ ID NO: 1717014 - RNA, 19 nt, Artificial Sequence
  Description of Artificial Sequence: Synthetic oligonucleotide
accgauagagcaauggugg

SEQ ID NO: 1717015 - RNA, 19 nt, Artificial Sequence
  Description of Artificial Sequence: Synthetic oligonucleotide
gaagaucuuagcauaguug

SEQ ID NO: 1717016 - RNA, 19 nt, Artificial Sequence
  Description of Artificial Sequence: Synthetic oligonucleotide
agaacauugagcaaaucgu

SEQ ID NO: 1717017 - RNA, 19 nt, Artificial Sequence
  Description of Artificial Sequence: Synthetic oligonucleotide
acgauggugaucaggacgc

SEQ ID NO: 1717018 - RNA, 19 nt, Artificial Sequence
  Description of Artificial Sequence: Synthetic oligonucleotide
ugaaggacaccgauagagc

SEQ ID NO: 1717019 - RNA, 19 nt, Artificial Sequence
  Description of Artificial Sequence: Synthetic oligonucleotide
cuuccugcaugucugacgc

SEQ ID NO: 1717020 - RNA, 19 nt, Artificial Sequence
  Description of Artificial Sequence: Synthetic oligonucleotide
acauugagcaaaucguuga

SEQ ID NO: 1717021 - RNA, 19 nt, Artificial Sequence
  Description of Artificial Sequence: Synthetic oligonucleotide
gcagauagauguuaugagg

SEQ ID NO: 1717022 - RNA, 19 nt, Artificial Sequence
  Description of Artificial Sequence: Synthetic oligonucleotide
agacccacggcccagauau

SEQ ID NO: 1717023 - RNA, 19 nt, Artificial Sequence
  Description of Artificial Sequence: Synthetic oligonucleotide
aacauugagcaaaucguug

SEQ ID NO: 1717024 - RNA, 19 nt, Artificial Sequence
  Description of Artificial Sequence: Synthetic oligonucleotide
ugcgcaauccauaauuauc

SEQ ID NO: 1717025 - RNA, 19 nt, Artificial Sequence
  Description of Artificial Sequence: Synthetic oligonucleotide
accucucuagacuugacca

SEQ ID NO: 1717026 - RNA, 19 nt, Artificial Sequence
  Description of Artificial Sequence: Synthetic oligonucleotide
ucucuagacuugaccaagg

SEQ ID NO: 1717027 - RNA, 19 nt, Artificial Sequence
  Description of Artificial Sequence: Synthetic oligonucleotide
gauagcgccgacaaugccc

SEQ ID NO: 1717028 - RNA, 19 nt, Artificial Sequence
  Description of Artificial Sequence: Synthetic oligonucleotide
aaagucaagaugggcagca

SEQ ID NO: 1717029 - RNA, 19 nt, Artificial Sequence
  Description of Artificial Sequence: Synthetic oligonucleotide
gaggcaugaugauagcgcc

SEQ ID NO: 1717030 - RNA, 19 nt, Artificial Sequence
  Description of Artificial Sequence: Synthetic oligonucleotide
gaucacaccuccuugguaa

SEQ ID NO: 1717031 - RNA, 19 nt, Artificial Sequence
  Description of Artificial Sequence: Synthetic oligonucleotide
ucauaaccgaaggucaaag

SEQ ID NO: 1717032 - RNA, 19 nt, Artificial Sequence
  Description of Artificial Sequence: Synthetic oligonucleotide
cauguuggcuucucgaaug

SEQ ID NO: 1717033 - RNA, 19 nt, Artificial Sequence
  Description of Artificial Sequence: Synthetic oligonucleotide
caaugcuacagguccaggc

SEQ ID NO: 1717034 - RNA, 19 nt, Artificial Sequence
  Description of Artificial Sequence: Synthetic oligonucleotide
aaaucguugaggccggaua

SEQ ID NO: 1717035 - RNA, 19 nt, Artificial Sequence
  Description of Artificial Sequence: Synthetic oligonucleotide
auaggugccggucauagua

SEQ ID NO: 1717036 - RNA, 19 nt, Artificial Sequence
  Description of Artificial Sequence: Synthetic oligonucleotide
ucugacgccccacaauggc

SEQ ID NO: 1717037 - RNA, 19 nt, Artificial Sequence
  Description of Artificial Sequence: Synthetic oligonucleotide
gacaccgauagagcaaugg

SEQ ID NO: 1717038 - RNA, 19 nt, Artificial Sequence
  Description of Artificial Sequence: Synthetic oligonucleotide
augaugauagcgccgacaa

SEQ ID NO: 1717039 - RNA, 19 nt, Artificial Sequence
  Description of Artificial Sequence: Synthetic oligonucleotide
aagacggccacaagcacag

SEQ ID NO: 1717040 - RNA, 19 nt, Artificial Sequence
  Description of Artificial Sequence: Synthetic oligonucleotide
ucugucuaccucucuagac

SEQ ID NO: 1717041 - RNA, 19 nt, Artificial Sequence
  Description of Artificial Sequence: Synthetic oligonucleotide
uaccucucuagacuugacc

SEQ ID NO: 1717042 - RNA, 19 nt, Artificial Sequence
  Description of Artificial Sequence: Synthetic oligonucleotide
agauagauguuaugaggca

SEQ ID NO: 1717043 - RNA, 19 nt, Artificial Sequence
  Description of Artificial Sequence: Synthetic oligonucleotide
gacgaacuguccugcauag

SEQ ID NO: 1717044 - RNA, 19 nt, Artificial Sequence
  Description of Artificial Sequence: Synthetic oligonucleotide
agauugaaggagaucgccg

SEQ ID NO: 1717045 - RNA, 19 nt, Artificial Sequence
  Description of Artificial Sequence: Synthetic oligonucleotide
ugagcaaaucguugaggcc

SEQ ID NO: 1717046 - RNA, 19 nt, Artificial Sequence
  Description of Artificial Sequence: Synthetic oligonucleotide
accacauacucauaaccga

SEQ ID NO: 1717047 - RNA, 19 nt, Artificial Sequence
  Description of Artificial Sequence: Synthetic oligonucleotide
cauaaccgaaggucaaagc

SEQ ID NO: 1717048 - RNA, 19 nt, Artificial Sequence
  Description of Artificial Sequence: Synthetic oligonucleotide
uagaacucugcccggcugc

SEQ ID NO: 1717049 - RNA, 19 nt, Artificial Sequence
  Description of Artificial Sequence: Synthetic oligonucleotide
uagggaagaucuuagcaua

SEQ ID NO: 1717050 - RNA, 19 nt, Artificial Sequence
  Description of Artificial Sequence: Synthetic oligonucleotide
gaacaggccccgaagaagc

SEQ ID NO: 1717051 - RNA, 19 nt, Artificial Sequence
  Description of Artificial Sequence: Synthetic oligonucleotide
uccacugacacugugugau

SEQ ID NO: 1717052 - RNA, 19 nt, Artificial Sequence
  Description of Artificial Sequence: Synthetic oligonucleotide
ucccuagggaagaucuuag

SEQ ID NO: 1717053 - RNA, 19 nt, Artificial Sequence
  Description of Artificial Sequence: Synthetic oligonucleotide
caccgauagagcaauggug

SEQ ID NO: 1717054 - RNA, 19 nt, Artificial Sequence
  Description of Artificial Sequence: Synthetic oligonucleotide
augauagcgccgacaaugc

SEQ ID NO: 1717055 - RNA, 19 nt, Artificial Sequence
  Description of Artificial Sequence: Synthetic oligonucleotide
ugaaggagaucgccgugcc

SEQ ID NO: 1717056 - RNA, 19 nt, Artificial Sequence
  Description of Artificial Sequence: Synthetic oligonucleotide
uagcucgauggucagccag

SEQ ID NO: 1717057 - RNA, 19 nt, Artificial Sequence
  Description of Artificial Sequence: Synthetic oligonucleotide
agugcagauagauguuaug

SEQ ID NO: 1717058 - RNA, 19 nt, Artificial Sequence
  Description of Artificial Sequence: Synthetic oligonucleotide
ugcaugacggcuggcaugc

SEQ ID NO: 1717059 - RNA, 19 nt, Artificial Sequence
  Description of Artificial Sequence: Synthetic oligonucleotide
augaggcaugaugauagcg

SEQ ID NO: 1717060 - RNA, 19 nt, Artificial Sequence
  Description of Artificial Sequence: Synthetic oligonucleotide
gauggcgcaagagcgagug

SEQ ID NO: 1717061 - RNA, 19 nt, Artificial Sequence
  Description of Artificial Sequence: Synthetic oligonucleotide
acacgugcgaagcgcgacc

SEQ ID NO: 1717062 - RNA, 19 nt, Artificial Sequence
  Description of Artificial Sequence: Synthetic oligonucleotide
uguuaugaggcaugaugau

SEQ ID NO: 1717063 - RNA, 19 nt, Artificial Sequence
  Description of Artificial Sequence: Synthetic oligonucleotide
uaggugccggucauaguag

SEQ ID NO: 1717064 - RNA, 19 nt, Artificial Sequence
  Description of Artificial Sequence: Synthetic oligonucleotide
uugaaggagaucgccgugc

SEQ ID NO: 1717065 - RNA, 19 nt, Artificial Sequence
  Description of Artificial Sequence: Synthetic oligonucleotide
ugaucaggacgccacccca

SEQ ID NO: 1717066 - RNA, 19 nt, Artificial Sequence
  Description of Artificial Sequence: Synthetic oligonucleotide
ugccggucauaguagaacu

SEQ ID NO: 1717067 - RNA, 19 nt, Artificial Sequence
  Description of Artificial Sequence: Synthetic oligonucleotide
cagauugaaggagaucgcc

SEQ ID NO: 1717068 - RNA, 19 nt, Artificial Sequence
  Description of Artificial Sequence: Synthetic oligonucleotide
auagauguuaugaggcaug

SEQ ID NO: 1717069 - RNA, 19 nt, Artificial Sequence
  Description of Artificial Sequence: Synthetic oligonucleotide
ugaugaugaaggacaccga

SEQ ID NO: 1717070 - RNA, 19 nt, Artificial Sequence
  Description of Artificial Sequence: Synthetic oligonucleotide
auggugaucaggacgccac

SEQ ID NO: 1717071 - RNA, 19 nt, Artificial Sequence
  Description of Artificial Sequence: Synthetic oligonucleotide
caugaugcaggaagugaug

SEQ ID NO: 1717072 - RNA, 19 nt, Artificial Sequence
  Description of Artificial Sequence: Synthetic oligonucleotide
uggcgcaagagcgagugag

SEQ ID NO: 1717073 - RNA, 19 nt, Artificial Sequence
  Description of Artificial Sequence: Synthetic oligonucleotide
agugaugacuuugcucaac

SEQ ID NO: 1717074 - RNA, 19 nt, Artificial Sequence
  Description of Artificial Sequence: Synthetic oligonucleotide
agucaagaugggcagcaca

SEQ ID NO: 1717075 - RNA, 19 nt, Artificial Sequence
  Description of Artificial Sequence: Synthetic oligonucleotide
gauugaaggagaucgccgu

SEQ ID NO: 1717076 - RNA, 19 nt, Artificial Sequence
  Description of Artificial Sequence: Synthetic oligonucleotide
agcauaguuguggaggcug

SEQ ID NO: 1717077 - RNA, 19 nt, Artificial Sequence
  Description of Artificial Sequence: Synthetic oligonucleotide
uaugaggcaugaugauagc

SEQ ID NO: 1717078 - RNA, 19 nt, Artificial Sequence
  Description of Artificial Sequence: Synthetic oligonucleotide
ggauaggucccucagguca

SEQ ID NO: 1717079 - RNA, 19 nt, Artificial Sequence
  Description of Artificial Sequence: Synthetic oligonucleotide
cucuagacuugaccaaggc

SEQ ID NO: 1717080 - RNA, 19 nt, Artificial Sequence
  Description of Artificial Sequence: Synthetic oligonucleotide
gugcagauagauguuauga

SEQ ID NO: 1717081 - RNA, 19 nt, Artificial Sequence
  Description of Artificial Sequence: Synthetic oligonucleotide
uccucauugguuugcuggu

SEQ ID NO: 1717082 - RNA, 19 nt, Artificial Sequence
  Description of Artificial Sequence: Synthetic oligonucleotide
uagauguuaugaggcauga

SEQ ID NO: 1717083 - RNA, 19 nt, Artificial Sequence
  Description of Artificial Sequence: Synthetic oligonucleotide
ccagauagacaguaaggcc

SEQ ID NO: 1717084 - RNA, 19 nt, Artificial Sequence
  Description of Artificial Sequence: Synthetic oligonucleotide
gcugagugcagauagaugu

SEQ ID NO: 1717085 - RNA, 19 nt, Artificial Sequence
  Description of Artificial Sequence: Synthetic oligonucleotide
ugauagcgccgacaaugcc

SEQ ID NO: 1717086 - RNA, 19 nt, Artificial Sequence
  Description of Artificial Sequence: Synthetic oligonucleotide
ggaugcguccggcagagag

SEQ ID NO: 1717087 - RNA, 19 nt, Artificial Sequence
  Description of Artificial Sequence: Synthetic oligonucleotide
ucgggcugaccgcagcccg

SEQ ID NO: 1717088 - RNA, 19 nt, Artificial Sequence
  Description of Artificial Sequence: Synthetic oligonucleotide
aagucaagaugggcagcac

SEQ ID NO: 1717089 - RNA, 19 nt, Artificial Sequence
  Description of Artificial Sequence: Synthetic oligonucleotide
cuugaccaaggcugagugc

SEQ ID NO: 1717090 - RNA, 19 nt, Artificial Sequence
  Description of Artificial Sequence: Synthetic oligonucleotide
gagaucgccgugccgauga

SEQ ID NO: 1717091 - RNA, 19 nt, Artificial Sequence
  Description of Artificial Sequence: Synthetic oligonucleotide
gcgcaauccauaauuaucc

SEQ ID NO: 1717092 - RNA, 19 nt, Artificial Sequence
  Description of Artificial Sequence: Synthetic oligonucleotide
cucucuagacuugaccaag

SEQ ID NO: 1717093 - RNA, 19 nt, Artificial Sequence
  Description of Artificial Sequence: Synthetic oligonucleotide
gaaagucaagaugggcagc

SEQ ID NO: 1717094 - RNA, 19 nt, Artificial Sequence
  Description of Artificial Sequence: Synthetic oligonucleotide
ucaacaggccauuggcaaa

SEQ ID NO: 1717095 - RNA, 19 nt, Artificial Sequence
  Description of Artificial Sequence: Synthetic oligonucleotide
uccuuagggagcccauaca

SEQ ID NO: 1717096 - RNA, 19 nt, Artificial Sequence
  Description of Artificial Sequence: Synthetic oligonucleotide
gaugaugaaggacaccgau

SEQ ID NO: 1717097 - RNA, 19 nt, Artificial Sequence
  Description of Artificial Sequence: Synthetic oligonucleotide
ugauugucccuagggaaga

SEQ ID NO: 1717098 - RNA, 19 nt, Artificial Sequence
  Description of Artificial Sequence: Synthetic oligonucleotide
gaagcgcucccugggacgg

SEQ ID NO: 1717099 - RNA, 19 nt, Artificial Sequence
  Description of Artificial Sequence: Synthetic oligonucleotide
gaagacggccacaagcaca

SEQ ID NO: 1717100 - RNA, 19 nt, Artificial Sequence
  Description of Artificial Sequence: Synthetic oligonucleotide
gaggacacgugcgaagcgc

SEQ ID NO: 1717101 - RNA, 19 nt, Artificial Sequence
  Description of Artificial Sequence: Synthetic oligonucleotide
auagagcaaugguggcuuc

SEQ ID NO: 1717102 - RNA, 19 nt, Artificial Sequence
  Description of Artificial Sequence: Synthetic oligonucleotide
gacgcgcuaccacauacuc

SEQ ID NO: 1717103 - RNA, 19 nt, Artificial Sequence
  Description of Artificial Sequence: Synthetic oligonucleotide
ucaagaugggcagcacagc

SEQ ID NO: 1717104 - RNA, 19 nt, Artificial Sequence
  Description of Artificial Sequence: Synthetic oligonucleotide
uugcgcaauccauaauuau

SEQ ID NO: 1717105 - RNA, 19 nt, Artificial Sequence
  Description of Artificial Sequence: Synthetic oligonucleotide
auugucccuagggaagauc

SEQ ID NO: 1717106 - RNA, 19 nt, Artificial Sequence
  Description of Artificial Sequence: Synthetic oligonucleotide
cuccuuagggagcccauac

SEQ ID NO: 1717107 - RNA, 19 nt, Artificial Sequence
  Description of Artificial Sequence: Synthetic oligonucleotide
ucaggacgccaccccacag

SEQ ID NO: 1717108 - RNA, 19 nt, Artificial Sequence
  Description of Artificial Sequence: Synthetic oligonucleotide
aaccgaaggucaaagccau

SEQ ID NO: 1717109 - RNA, 19 nt, Artificial Sequence
  Description of Artificial Sequence: Synthetic oligonucleotide
agcgccgacaaugcccacc

SEQ ID NO: 1717110 - RNA, 19 nt, Artificial Sequence
  Description of Artificial Sequence: Synthetic oligonucleotide
gugaucaggacgccacccc

SEQ ID NO: 1717111 - RNA, 19 nt, Artificial Sequence
  Description of Artificial Sequence: Synthetic oligonucleotide
ugagugcagauagauguua

SEQ ID NO: 1717112 - RNA, 19 nt, Artificial Sequence
  Description of Artificial Sequence: Synthetic oligonucleotide
agacagccuaggaucacac

SEQ ID NO: 1717113 - RNA, 19 nt, Artificial Sequence
  Description of Artificial Sequence: Synthetic oligonucleotide
ccccacaauggcuagcucg

SEQ ID NO: 1717114 - RNA, 19 nt, Artificial Sequence
  Description of Artificial Sequence: Synthetic oligonucleotide
agauagacaguaaggccca

SEQ ID NO: 1717115 - RNA, 19 nt, Artificial Sequence
  Description of Artificial Sequence: Synthetic oligonucleotide
uugaggccggauagguccc

SEQ ID NO: 1717116 - RNA, 19 nt, Artificial Sequence
  Description of Artificial Sequence: Synthetic oligonucleotide
ugacgccccacaauggcua

SEQ ID NO: 1717117 - RNA, 19 nt, Artificial Sequence
  Description of Artificial Sequence: Synthetic oligonucleotide
gaagaagcgcucccuggga

SEQ ID NO: 1717118 - RNA, 19 nt, Artificial Sequence
  Description of Artificial Sequence: Synthetic oligonucleotide
ggccagauagacaguaagg

SEQ ID NO: 1717119 - RNA, 19 nt, Artificial Sequence
  Description of Artificial Sequence: Synthetic oligonucleotide
uggugaucaggacgccacc

SEQ ID NO: 1717120 - RNA, 19 nt, Artificial Sequence
  Description of Artificial Sequence: Synthetic oligonucleotide
aggaucacaccuccuuggu

SEQ ID NO: 1717121 - RNA, 19 nt, Artificial Sequence
  Description of Artificial Sequence: Synthetic oligonucleotide
gaugcguccggcagagagc

SEQ ID NO: 1717122 - RNA, 19 nt, Artificial Sequence
  Description of Artificial Sequence: Synthetic oligonucleotide
caggacgccaccccacagg

SEQ ID NO: 1717123 - RNA, 19 nt, Artificial Sequence
  Description of Artificial Sequence: Synthetic oligonucleotide
cuagggaagaucuuagcau

SEQ ID NO: 1717124 - RNA, 19 nt, Artificial Sequence
  Description of Artificial Sequence: Synthetic oligonucleotide
aauuauccaggaagaggaa

SEQ ID NO: 1717125 - RNA, 19 nt, Artificial Sequence
  Description of Artificial Sequence: Synthetic oligonucleotide
ucaggucacggaagacggc

SEQ ID NO: 1717126 - RNA, 19 nt, Artificial Sequence
  Description of Artificial Sequence: Synthetic oligonucleotide
ugguagaaggccugaccaa

SEQ ID NO: 1717127 - RNA, 19 nt, Artificial Sequence
  Description of Artificial Sequence: Synthetic oligonucleotide
gugccgaugacuuccugca

SEQ ID NO: 1717128 - RNA, 19 nt, Artificial Sequence
  Description of Artificial Sequence: Synthetic oligonucleotide
gauaggucccucaggucac

SEQ ID NO: 1717129 - RNA, 19 nt, Artificial Sequence
  Description of Artificial Sequence: Synthetic oligonucleotide
aacaggccccgaagaagcg

SEQ ID NO: 1717130 - RNA, 19 nt, Artificial Sequence
  Description of Artificial Sequence: Synthetic oligonucleotide
gccagaacagcuacaaggc

SEQ ID NO: 1717131 - RNA, 19 nt, Artificial Sequence
  Description of Artificial Sequence: Synthetic oligonucleotide
cagauauagagggcagcag

SEQ ID NO: 1717132 - RNA, 19 nt, Artificial Sequence
  Description of Artificial Sequence: Synthetic oligonucleotide
aaggacaccgauagagcaa

SEQ ID NO: 1717133 - RNA, 19 nt, Artificial Sequence
  Description of Artificial Sequence: Synthetic oligonucleotide
agcaaaucguugaggccgg

SEQ ID NO: 1717134 - RNA, 19 nt, Artificial Sequence
  Description of Artificial Sequence: Synthetic oligonucleotide
agaucuuagcauaguugug

SEQ ID NO: 1717135 - RNA, 19 nt, Artificial Sequence
  Description of Artificial Sequence: Synthetic oligonucleotide
ucguugaggccggauaggu

SEQ ID NO: 1717136 - RNA, 19 nt, Artificial Sequence
  Description of Artificial Sequence: Synthetic oligonucleotide
auagcgccgacaaugccca

SEQ ID NO: 1717137 - RNA, 19 nt, Artificial Sequence
  Description of Artificial Sequence: Synthetic oligonucleotide
gauagauguuaugaggcau

SEQ ID NO: 1717138 - RNA, 19 nt, Artificial Sequence
  Description of Artificial Sequence: Synthetic oligonucleotide
gaugaaggacaccgauaga

SEQ ID NO: 1717139 - RNA, 19 nt, Artificial Sequence
  Description of Artificial Sequence: Synthetic oligonucleotide
acaccuccuugguaaauau

SEQ ID NO: 1717140 - RNA, 19 nt, Artificial Sequence
  Description of Artificial Sequence: Synthetic oligonucleotide
cacugacacugugugauug

SEQ ID NO: 1717141 - RNA, 19 nt, Artificial Sequence
  Description of Artificial Sequence: Synthetic oligonucleotide
aaguaggcggggugcggga

SEQ ID NO: 1717142 - RNA, 19 nt, Artificial Sequence
  Description of Artificial Sequence: Synthetic oligonucleotide
caccgcagccucaggaagc

SEQ ID NO: 1717143 - RNA, 19 nt, Artificial Sequence
  Description of Artificial Sequence: Synthetic oligonucleotide
uacagguccaggccagaua

SEQ ID NO: 1717144 - RNA, 19 nt, Artificial Sequence
  Description of Artificial Sequence: Synthetic oligonucleotide
agaccagugccaugaugca

SEQ ID NO: 1717145 - RNA, 19 nt, Artificial Sequence
  Description of Artificial Sequence: Synthetic oligonucleotide
aaguagcccacagccagaa

SEQ ID NO: 1717146 - RNA, 19 nt, Artificial Sequence
  Description of Artificial Sequence: Synthetic oligonucleotide
agagacagccuaggaucac

SEQ ID NO: 1717147 - RNA, 19 nt, Artificial Sequence
  Description of Artificial Sequence: Synthetic oligonucleotide
cuugcgcaauccauaauua

SEQ ID NO: 1717148 - RNA, 19 nt, Artificial Sequence
  Description of Artificial Sequence: Synthetic oligonucleotide
caugacggcuggcaugcug

SEQ ID NO: 1717149 - RNA, 19 nt, Artificial Sequence
  Description of Artificial Sequence: Synthetic oligonucleotide
cugaccgcagcccgggcag

SEQ ID NO: 1717150 - RNA, 19 nt, Artificial Sequence
  Description of Artificial Sequence: Synthetic oligonucleotide
gcugaacgcuuccucauug

SEQ ID NO: 1717151 - RNA, 19 nt, Artificial Sequence
  Description of Artificial Sequence: Synthetic oligonucleotide
aggccauuggcaaacuccu

SEQ ID NO: 1717152 - RNA, 19 nt, Artificial Sequence
  Description of Artificial Sequence: Synthetic oligonucleotide
gcuucucgaauguccaccc

SEQ ID NO: 1717153 - RNA, 19 nt, Artificial Sequence
  Description of Artificial Sequence: Synthetic oligonucleotide
acccacggcccagauauag

SEQ ID NO: 1717154 - RNA, 19 nt, Artificial Sequence
  Description of Artificial Sequence: Synthetic oligonucleotide
aggaagcccuccaugacga

SEQ ID NO: 1717155 - RNA, 19 nt, Artificial Sequence
  Description of Artificial Sequence: Synthetic oligonucleotide
ugaugauagcgccgacaau

SEQ ID NO: 1717156 - RNA, 19 nt, Artificial Sequence
  Description of Artificial Sequence: Synthetic oligonucleotide
caaagagacagccuaggau

SEQ ID NO: 1717157 - RNA, 19 nt, Artificial Sequence
  Description of Artificial Sequence: Synthetic oligonucleotide
gcugaccacaaaguagagg

SEQ ID NO: 1717158 - RNA, 19 nt, Artificial Sequence
  Description of Artificial Sequence: Synthetic oligonucleotide
aucaggacgccaccccaca

SEQ ID NO: 1717159 - RNA, 19 nt, Artificial Sequence
  Description of Artificial Sequence: Synthetic oligonucleotide
augcguccggcagagagca

SEQ ID NO: 1717160 - RNA, 19 nt, Artificial Sequence
  Description of Artificial Sequence: Synthetic oligonucleotide
gugcgaagcgcgaccaccg

SEQ ID NO: 1717161 - RNA, 19 nt, Artificial Sequence
  Description of Artificial Sequence: Synthetic oligonucleotide
gcuaccacauacucauaac

SEQ ID NO: 1717162 - RNA, 19 nt, Artificial Sequence
  Description of Artificial Sequence: Synthetic oligonucleotide
gauagagcaaugguggcuu

SEQ ID NO: 1717163 - RNA, 19 nt, Artificial Sequence
  Description of Artificial Sequence: Synthetic oligonucleotide
aggacaccgauagagcaau

SEQ ID NO: 1717164 - RNA, 19 nt, Artificial Sequence
  Description of Artificial Sequence: Synthetic oligonucleotide
guccacgauggugaucagg

SEQ ID NO: 1717165 - RNA, 19 nt, Artificial Sequence
  Description of Artificial Sequence: Synthetic oligonucleotide
ggucaaagccauaauagua

SEQ ID NO: 1717166 - RNA, 19 nt, Artificial Sequence
  Description of Artificial Sequence: Synthetic oligonucleotide
cuguccugcauaggugccg

SEQ ID NO: 1717167 - RNA, 19 nt, Artificial Sequence
  Description of Artificial Sequence: Synthetic oligonucleotide
ugcgaagcgcgaccaccgc

SEQ ID NO: 1717168 - RNA, 19 nt, Artificial Sequence
  Description of Artificial Sequence: Synthetic oligonucleotide
guaggcggggugcgggagg

SEQ ID NO: 1717169 - RNA, 19 nt, Artificial Sequence
  Description of Artificial Sequence: Synthetic oligonucleotide
caugaugauagcgccgaca

SEQ ID NO: 1717170 - RNA, 19 nt, Artificial Sequence
  Description of Artificial Sequence: Synthetic oligonucleotide
ccucaggucacggaagacg

SEQ ID NO: 1717171 - RNA, 19 nt, Artificial Sequence
  Description of Artificial Sequence: Synthetic oligonucleotide
gacgccccacaauggcuag

SEQ ID NO: 1717172 - RNA, 19 nt, Artificial Sequence
  Description of Artificial Sequence: Synthetic oligonucleotide
gcauaggugccggucauag

SEQ ID NO: 1717173 - RNA, 19 nt, Artificial Sequence
  Description of Artificial Sequence: Synthetic oligonucleotide
cugucuaccucucuagacu

SEQ ID NO: 1717174 - RNA, 19 nt, Artificial Sequence
  Description of Artificial Sequence: Synthetic oligonucleotide
gccaaagagacagccuagg

SEQ ID NO: 1717175 - RNA, 19 nt, Artificial Sequence
  Description of Artificial Sequence: Synthetic oligonucleotide
gcaggaagugaugacuuug

SEQ ID NO: 1717176 - RNA, 19 nt, Artificial Sequence
  Description of Artificial Sequence: Synthetic oligonucleotide
gucugacgccccacaaugg

SEQ ID NO: 1717177 - RNA, 19 nt, Artificial Sequence
  Description of Artificial Sequence: Synthetic oligonucleotide
gaacauugagcaaaucguu

SEQ ID NO: 1717178 - RNA, 19 nt, Artificial Sequence
  Description of Artificial Sequence: Synthetic oligonucleotide
gaucaggacgccaccccac

SEQ ID NO: 1717179 - RNA, 19 nt, Artificial Sequence
  Description of Artificial Sequence: Synthetic oligonucleotide
cucccugggacggacgcgc

SEQ ID NO: 1717180 - RNA, 19 nt, Artificial Sequence
  Description of Artificial Sequence: Synthetic oligonucleotide
uggcuagcucgauggucag

SEQ ID NO: 1717181 - RNA, 19 nt, Artificial Sequence
  Description of Artificial Sequence: Synthetic oligonucleotide
cgaauguccacccggcggg

SEQ ID NO: 1717182 - RNA, 19 nt, Artificial Sequence
  Description of Artificial Sequence: Synthetic oligonucleotide
gacacgugcgaagcgcgac

SEQ ID NO: 1717183 - RNA, 19 nt, Artificial Sequence
  Description of Artificial Sequence: Synthetic oligonucleotide
agaucgccgugccgaugac

SEQ ID NO: 1717184 - RNA, 19 nt, Artificial Sequence
  Description of Artificial Sequence: Synthetic oligonucleotide
cuaccucucuagacuugac

SEQ ID NO: 1717185 - RNA, 19 nt, Artificial Sequence
  Description of Artificial Sequence: Synthetic oligonucleotide
uaggucccucaggucacgg

SEQ ID NO: 1717186 - RNA, 19 nt, Artificial Sequence
  Description of Artificial Sequence: Synthetic oligonucleotide
aggugccggucauaguaga

SEQ ID NO: 1717187 - RNA, 19 nt, Artificial Sequence
  Description of Artificial Sequence: Synthetic oligonucleotide
gaagcgcgaccaccgcagc

SEQ ID NO: 1717188 - RNA, 19 nt, Artificial Sequence
  Description of Artificial Sequence: Synthetic oligonucleotide
acgaacuguccugcauagg

SEQ ID NO: 1717189 - RNA, 19 nt, Artificial Sequence
  Description of Artificial Sequence: Synthetic oligonucleotide
gcgccgacaaugcccaccg

SEQ ID NO: 1717190 - RNA, 19 nt, Artificial Sequence
  Description of Artificial Sequence: Synthetic oligonucleotide
caccuccuugguaaauauc

SEQ ID NO: 1717191 - RNA, 19 nt, Artificial Sequence
  Description of Artificial Sequence: Synthetic oligonucleotide
acucauaaccgaaggucaa

SEQ ID NO: 1717192 - RNA, 19 nt, Artificial Sequence
  Description of Artificial Sequence: Synthetic oligonucleotide
aucacaccuccuugguaaa

SEQ ID NO: 1717193 - RNA, 19 nt, Artificial Sequence
  Description of Artificial Sequence: Synthetic oligonucleotide
ggugaucaggacgccaccc

SEQ ID NO: 1717194 - RNA, 19 nt, Artificial Sequence
  Description of Artificial Sequence: Synthetic oligonucleotide
ggcaugaugauagcgccga

SEQ ID NO: 1717195 - RNA, 19 nt, Artificial Sequence
  Description of Artificial Sequence: Synthetic oligonucleotide
acgugcgaagcgcgaccac

SEQ ID NO: 1717196 - RNA, 19 nt, Artificial Sequence
  Description of Artificial Sequence: Synthetic oligonucleotide
guagcuccaugggcaaugc

SEQ ID NO: 1717197 - RNA, 19 nt, Artificial Sequence
  Description of Artificial Sequence: Synthetic oligonucleotide
aacaggccauuggcaaacu

SEQ ID NO: 1717198 - RNA, 19 nt, Artificial Sequence
  Description of Artificial Sequence: Synthetic oligonucleotide
augcaggaagugaugacuu

SEQ ID NO: 1717199 - RNA, 19 nt, Artificial Sequence
  Description of Artificial Sequence: Synthetic oligonucleotide
uguuggcuucucgaauguc

SEQ ID NO: 1717200 - RNA, 19 nt, Artificial Sequence
  Description of Artificial Sequence: Synthetic oligonucleotide
agacuugaccaaggcugag

SEQ ID NO: 1717201 - RNA, 19 nt, Artificial Sequence
  Description of Artificial Sequence: Synthetic oligonucleotide
uagcauaguuguggaggcu

SEQ ID NO: 1717202 - RNA, 19 nt, Artificial Sequence
  Description of Artificial Sequence: Synthetic oligonucleotide
ggcaaugcuacagguccag

SEQ ID NO: 1717203 - RNA, 19 nt, Artificial Sequence
  Description of Artificial Sequence: Synthetic oligonucleotide
agcgagugaggaggacacg

SEQ ID NO: 1717204 - RNA, 19 nt, Artificial Sequence
  Description of Artificial Sequence: Synthetic oligonucleotide
aguaggcggggugcgggag

SEQ ID NO: 1717205 - RNA, 19 nt, Artificial Sequence
  Description of Artificial Sequence: Synthetic oligonucleotide
aucgccgugccgaugacuu

SEQ ID NO: 1717206 - RNA, 19 nt, Artificial Sequence
  Description of Artificial Sequence: Synthetic oligonucleotide
cuccaugacgaacuguccu

SEQ ID NO: 1717207 - RNA, 19 nt, Artificial Sequence
  Description of Artificial Sequence: Synthetic oligonucleotide
uccuccuuagggagcccau

SEQ ID NO: 1717208 - RNA, 19 nt, Artificial Sequence
  Description of Artificial Sequence: Synthetic oligonucleotide
caugacgaacuguccugca

SEQ ID NO: 1717209 - RNA, 19 nt, Artificial Sequence
  Description of Artificial Sequence: Synthetic oligonucleotide
agcgcucccugggacggac

SEQ ID NO: 1717210 - RNA, 19 nt, Artificial Sequence
  Description of Artificial Sequence: Synthetic oligonucleotide
caaguagcccacagccaga

SEQ ID NO: 1717211 - RNA, 19 nt, Artificial Sequence
  Description of Artificial Sequence: Synthetic oligonucleotide
gccggauaggucccucagg

SEQ ID NO: 1717212 - RNA, 19 nt, Artificial Sequence
  Description of Artificial Sequence: Synthetic oligonucleotide
ccgauagagcaaugguggc

SEQ ID NO: 1717213 - RNA, 19 nt, Artificial Sequence
  Description of Artificial Sequence: Synthetic oligonucleotide
ucugcccggcugccaggag

SEQ ID NO: 1717214 - RNA, 19 nt, Artificial Sequence
  Description of Artificial Sequence: Synthetic oligonucleotide
caggauggcgcaagagcga

SEQ ID NO: 1717215 - RNA, 19 nt, Artificial Sequence
  Description of Artificial Sequence: Synthetic oligonucleotide
cagcuugcgcaauccauaa

SEQ ID NO: 1717216 - RNA, 19 nt, Artificial Sequence
  Description of Artificial Sequence: Synthetic oligonucleotide
cgugccgaugacuuccugc

SEQ ID NO: 1717217 - RNA, 19 nt, Artificial Sequence
  Description of Artificial Sequence: Synthetic oligonucleotide
gcuugcgcaauccauaauu

SEQ ID NO: 1717218 - RNA, 19 nt, Artificial Sequence
  Description of Artificial Sequence: Synthetic oligonucleotide
cacugugugauugucccua

SEQ ID NO: 1717219 - RNA, 19 nt, Artificial Sequence
  Description of Artificial Sequence: Synthetic oligonucleotide
agcuugcgcaauccauaau

SEQ ID NO: 1717220 - RNA, 19 nt, Artificial Sequence
  Description of Artificial Sequence: Synthetic oligonucleotide
ggcgcaagagcgagugagg

SEQ ID NO: 1717221 - RNA, 19 nt, Artificial Sequence
  Description of Artificial Sequence: Synthetic oligonucleotide
guagaaggccugaccaaaa

SEQ ID NO: 1717222 - RNA, 19 nt, Artificial Sequence
  Description of Artificial Sequence: Synthetic oligonucleotide
cacggaagacggccacaag

SEQ ID NO: 1717223 - RNA, 19 nt, Artificial Sequence
  Description of Artificial Sequence: Synthetic oligonucleotide
ccuccaugacgaacugucc

SEQ ID NO: 1717224 - RNA, 19 nt, Artificial Sequence
  Description of Artificial Sequence: Synthetic oligonucleotide
cucgggcugaccgcagccc

SEQ ID NO: 1717225 - RNA, 19 nt, Artificial Sequence
  Description of Artificial Sequence: Synthetic oligonucleotide
cucauaaccgaaggucaaa

SEQ ID NO: 1717226 - RNA, 19 nt, Artificial Sequence
  Description of Artificial Sequence: Synthetic oligonucleotide
ggacggacgcgcuaccaca

SEQ ID NO: 1717227 - RNA, 19 nt, Artificial Sequence
  Description of Artificial Sequence: Synthetic oligonucleotide
ugggacggacgcgcuacca

SEQ ID NO: 1717228 - RNA, 19 nt, Artificial Sequence
  Description of Artificial Sequence: Synthetic oligonucleotide
ggccaaagagacagccuag

SEQ ID NO: 1717229 - RNA, 19 nt, Artificial Sequence
  Description of Artificial Sequence: Synthetic oligonucleotide
gucccuagggaagaucuua

SEQ ID NO: 1717230 - RNA, 19 nt, Artificial Sequence
  Description of Artificial Sequence: Synthetic oligonucleotide
aggccggauaggucccuca

SEQ ID NO: 1717231 - RNA, 19 nt, Artificial Sequence
  Description of Artificial Sequence: Synthetic oligonucleotide
ggcccaaguagcccacagc

SEQ ID NO: 1717232 - RNA, 19 nt, Artificial Sequence
  Description of Artificial Sequence: Synthetic oligonucleotide
ucacaccuccuugguaaau

SEQ ID NO: 1717233 - RNA, 19 nt, Artificial Sequence
  Description of Artificial Sequence: Synthetic oligonucleotide
acgccccacaauggcuagc

SEQ ID NO: 1717234 - RNA, 19 nt, Artificial Sequence
  Description of Artificial Sequence: Synthetic oligonucleotide
ccacauacucauaaccgaa

SEQ ID NO: 1717235 - RNA, 19 nt, Artificial Sequence
  Description of Artificial Sequence: Synthetic oligonucleotide
ggcuucaaucaggaaguac

SEQ ID NO: 1717236 - RNA, 19 nt, Artificial Sequence
  Description of Artificial Sequence: Synthetic oligonucleotide
gcauaguuguggaggcugc

SEQ ID NO: 1717237 - RNA, 19 nt, Artificial Sequence
  Description of Artificial Sequence: Synthetic oligonucleotide
ccaugacgaacuguccugc

SEQ ID NO: 1717238 - RNA, 19 nt, Artificial Sequence
  Description of Artificial Sequence: Synthetic oligonucleotide
aggagaucgccgugccgau

SEQ ID NO: 1717239 - RNA, 19 nt, Artificial Sequence
  Description of Artificial Sequence: Synthetic oligonucleotide
gccaugaugcaggaaguga

SEQ ID NO: 1717240 - RNA, 19 nt, Artificial Sequence
  Description of Artificial Sequence: Synthetic oligonucleotide
uguccacccggcggguucu

SEQ ID NO: 1717241 - RNA, 19 nt, Artificial Sequence
  Description of Artificial Sequence: Synthetic oligonucleotide
ggcugagugcagauagaug

SEQ ID NO: 1717242 - RNA, 19 nt, Artificial Sequence
  Description of Artificial Sequence: Synthetic oligonucleotide
aauguccacccggcggguu

SEQ ID NO: 1717243 - RNA, 19 nt, Artificial Sequence
  Description of Artificial Sequence: Synthetic oligonucleotide
gcaaugcuacagguccagg

SEQ ID NO: 1717244 - RNA, 19 nt, Artificial Sequence
  Description of Artificial Sequence: Synthetic oligonucleotide
auggcgcaagagcgaguga

SEQ ID NO: 1717245 - RNA, 19 nt, Artificial Sequence
  Description of Artificial Sequence: Synthetic oligonucleotide
gagugcagauagauguuau

SEQ ID NO: 1717246 - RNA, 19 nt, Artificial Sequence
  Description of Artificial Sequence: Synthetic oligonucleotide
ggggaugcguccggcagag

SEQ ID NO: 1717247 - RNA, 19 nt, Artificial Sequence
  Description of Artificial Sequence: Synthetic oligonucleotide
cugggacggacgcgcuacc

SEQ ID NO: 1717248 - RNA, 19 nt, Artificial Sequence
  Description of Artificial Sequence: Synthetic oligonucleotide
gggacggacgcgcuaccac

SEQ ID NO: 1717249 - RNA, 19 nt, Artificial Sequence
  Description of Artificial Sequence: Synthetic oligonucleotide
acgcgcuaccacauacuca

SEQ ID NO: 1717250 - RNA, 19 nt, Artificial Sequence
  Description of Artificial Sequence: Synthetic oligonucleotide
cccagauauagagggcagc

SEQ ID NO: 1717251 - RNA, 19 nt, Artificial Sequence
  Description of Artificial Sequence: Synthetic oligonucleotide
ggcggguucugucuaccuc

SEQ ID NO: 1717252 - RNA, 19 nt, Artificial Sequence
  Description of Artificial Sequence: Synthetic oligonucleotide
cuagcucgauggucagcca

SEQ ID NO: 1717253 - RNA, 19 nt, Artificial Sequence
  Description of Artificial Sequence: Synthetic oligonucleotide
ugcauaggugccggucaua

SEQ ID NO: 1717254 - RNA, 19 nt, Artificial Sequence
  Description of Artificial Sequence: Synthetic oligonucleotide
cacaccuccuugguaaaua

SEQ ID NO: 1717255 - RNA, 19 nt, Artificial Sequence
  Description of Artificial Sequence: Synthetic oligonucleotide
aggucacggaagacggcca

SEQ ID NO: 1717256 - RNA, 19 nt, Artificial Sequence
  Description of Artificial Sequence: Synthetic oligonucleotide
gcucgauggucagccagag

SEQ ID NO: 1717257 - RNA, 19 nt, Artificial Sequence
  Description of Artificial Sequence: Synthetic oligonucleotide
cugacgccccacaauggcu

SEQ ID NO: 1717258 - RNA, 19 nt, Artificial Sequence
  Description of Artificial Sequence: Synthetic oligonucleotide
ucccugggacggacgcgcu

SEQ ID NO: 1717259 - RNA, 19 nt, Artificial Sequence
  Description of Artificial Sequence: Synthetic oligonucleotide
gcucgggcugaccgcagcc

SEQ ID NO: 1717260 - RNA, 19 nt, Artificial Sequence
  Description of Artificial Sequence: Synthetic oligonucleotide
gcccauacaggaagugcug

SEQ ID NO: 1717261 - RNA, 19 nt, Artificial Sequence
  Description of Artificial Sequence: Synthetic oligonucleotide
cggucauaguagaacucug

SEQ ID NO: 1717262 - RNA, 19 nt, Artificial Sequence
  Description of Artificial Sequence: Synthetic oligonucleotide
caggccccgaagaagcgcu

SEQ ID NO: 1717263 - RNA, 19 nt, Artificial Sequence
  Description of Artificial Sequence: Synthetic oligonucleotide
cacgugcgaagcgcgacca

SEQ ID NO: 1717264 - RNA, 19 nt, Artificial Sequence
  Description of Artificial Sequence: Synthetic oligonucleotide
cgcaagagcgagugaggag

SEQ ID NO: 1717265 - RNA, 19 nt, Artificial Sequence
  Description of Artificial Sequence: Synthetic oligonucleotide
gucacggaagacggccaca

SEQ ID NO: 1717266 - RNA, 19 nt, Artificial Sequence
  Description of Artificial Sequence: Synthetic oligonucleotide
ggaucacaccuccuuggua

SEQ ID NO: 1717267 - RNA, 19 nt, Artificial Sequence
  Description of Artificial Sequence: Synthetic oligonucleotide
ugcgggaggcugggcaggu

SEQ ID NO: 1717268 - RNA, 19 nt, Artificial Sequence
  Description of Artificial Sequence: Synthetic oligonucleotide
cgaacuguccugcauaggu

SEQ ID NO: 1717269 - RNA, 19 nt, Artificial Sequence
  Description of Artificial Sequence: Synthetic oligonucleotide
gcugaccgcagcccgggca

SEQ ID NO: 1717270 - RNA, 19 nt, Artificial Sequence
  Description of Artificial Sequence: Synthetic oligonucleotide
ggcaggaacaggccccgaa

SEQ ID NO: 1717271 - RNA, 19 nt, Artificial Sequence
  Description of Artificial Sequence: Synthetic oligonucleotide
ucgccgugccgaugacuuc

SEQ ID NO: 1717272 - RNA, 19 nt, Artificial Sequence
  Description of Artificial Sequence: Synthetic oligonucleotide
gcugugagugagaaaggua

SEQ ID NO: 1717273 - RNA, 19 nt, Artificial Sequence
  Description of Artificial Sequence: Synthetic oligonucleotide
cugagugcagauagauguu

SEQ ID NO: 1717274 - RNA, 19 nt, Artificial Sequence
  Description of Artificial Sequence: Synthetic oligonucleotide
cgugcgaagcgcgaccacc

SEQ ID NO: 1717275 - RNA, 19 nt, Artificial Sequence
  Description of Artificial Sequence: Synthetic oligonucleotide
cuggcaugcuggugaaagu

SEQ ID NO: 1717276 - RNA, 19 nt, Artificial Sequence
  Description of Artificial Sequence: Synthetic oligonucleotide
gccccgaagaagcgcuccc

SEQ ID NO: 1717277 - RNA, 19 nt, Artificial Sequence
  Description of Artificial Sequence: Synthetic oligonucleotide
ccacgauggugaucaggac

SEQ ID NO: 1717278 - RNA, 19 nt, Artificial Sequence
  Description of Artificial Sequence: Synthetic oligonucleotide
gcgcaagagcgagugagga

SEQ ID NO: 1717279 - RNA, 19 nt, Artificial Sequence
  Description of Artificial Sequence: Synthetic oligonucleotide
gggcugaccgcagcccggg

SEQ ID NO: 1717280 - RNA, 19 nt, Artificial Sequence
  Description of Artificial Sequence: Synthetic oligonucleotide
acggacgcgcuaccacaua

SEQ ID NO: 1717281 - RNA, 19 nt, Artificial Sequence
  Description of Artificial Sequence: Synthetic oligonucleotide
ccggauaggucccucaggu

SEQ ID NO: 1717282 - RNA, 19 nt, Artificial Sequence
  Description of Artificial Sequence: Synthetic oligonucleotide
cauaggugccggucauagu

SEQ ID NO: 1717283 - RNA, 19 nt, Artificial Sequence
  Description of Artificial Sequence: Synthetic oligonucleotide
gcgaagcgcgaccaccgca

SEQ ID NO: 1717284 - RNA, 19 nt, Artificial Sequence
  Description of Artificial Sequence: Synthetic oligonucleotide
cggacgcgcuaccacauac

SEQ ID NO: 1717285 - RNA, 19 nt, Artificial Sequence
  Description of Artificial Sequence: Synthetic oligonucleotide
gaggccggauaggucccuc

SEQ ID NO: 1717286 - RNA, 19 nt, Artificial Sequence
  Description of Artificial Sequence: Synthetic oligonucleotide
gcguccggcagagagcaga

SEQ ID NO: 1717287 - RNA, 19 nt, Artificial Sequence
  Description of Artificial Sequence: Synthetic oligonucleotide
cauaguuguggaggcugcu

SEQ ID NO: 1717288 - RNA, 19 nt, Artificial Sequence
  Description of Artificial Sequence: Synthetic oligonucleotide
gaucgccgugccgaugacu

SEQ ID NO: 1717289 - RNA, 19 nt, Artificial Sequence
  Description of Artificial Sequence: Synthetic oligonucleotide
cgcgcuaccacauacucau

SEQ ID NO: 1717290 - RNA, 19 nt, Artificial Sequence
  Description of Artificial Sequence: Synthetic oligonucleotide
agguagcuccaugggcaau

SEQ ID NO: 1717291 - RNA, 19 nt, Artificial Sequence
  Description of Artificial Sequence: Synthetic oligonucleotide
acccggcggguucugucua

SEQ ID NO: 1717292 - RNA, 19 nt, Artificial Sequence
  Description of Artificial Sequence: Synthetic oligonucleotide
gcgagugaggaggacacgu

SEQ ID NO: 1717293 - RNA, 19 nt, Artificial Sequence
  Description of Artificial Sequence: Synthetic oligonucleotide
aagcgcucccugggacgga

SEQ ID NO: 1717294 - RNA, 19 nt, Artificial Sequence
  Description of Artificial Sequence: Synthetic oligonucleotide
gacggacgcgcuaccacau

SEQ ID NO: 1717295 - RNA, 19 nt, Artificial Sequence
  Description of Artificial Sequence: Synthetic oligonucleotide
gcucccugggacggacgcg

SEQ ID NO: 1717296 - RNA, 19 nt, Artificial Sequence
  Description of Artificial Sequence: Synthetic oligonucleotide
ggagaucgccgugccgaug

SEQ ID NO: 1717297 - RNA, 19 nt, Artificial Sequence
  Description of Artificial Sequence: Synthetic oligonucleotide
ggacgccaccccacagggg

SEQ ID NO: 1717298 - RNA, 19 nt, Artificial Sequence
  Description of Artificial Sequence: Synthetic oligonucleotide
cucugcccggcugccagga

SEQ ID NO: 1717299 - RNA, 19 nt, Artificial Sequence
  Description of Artificial Sequence: Synthetic oligonucleotide
cguugaggccggauagguc

SEQ ID NO: 1717300 - RNA, 19 nt, Artificial Sequence
  Description of Artificial Sequence: Synthetic oligonucleotide
ggugccggucauaguagaa

SEQ ID NO: 1717301 - RNA, 19 nt, Artificial Sequence
  Description of Artificial Sequence: Synthetic oligonucleotide
gaauguccacccggcgggu

SEQ ID NO: 1717302 - RNA, 19 nt, Artificial Sequence
  Description of Artificial Sequence: Synthetic oligonucleotide
ccgacaaugcccaccgccu

SEQ ID NO: 1717303 - RNA, 19 nt, Artificial Sequence
  Description of Artificial Sequence: Synthetic oligonucleotide
uagcgccgacaaugcccac

SEQ ID NO: 1717304 - RNA, 19 nt, Artificial Sequence
  Description of Artificial Sequence: Synthetic oligonucleotide
gggcaaugcuacaggucca

SEQ ID NO: 1717305 - RNA, 19 nt, Artificial Sequence
  Description of Artificial Sequence: Synthetic oligonucleotide
cgacaaugcccaccgccug

SEQ ID NO: 1717306 - RNA, 19 nt, Artificial Sequence
  Description of Artificial Sequence: Synthetic oligonucleotide
cacccggcggguucugucu

SEQ ID NO: 1717307 - RNA, 19 nt, Artificial Sequence
  Description of Artificial Sequence: Synthetic oligonucleotide
caaaucguugaggccggau

SEQ ID NO: 1717308 - RNA, 19 nt, Artificial Sequence
  Description of Artificial Sequence: Synthetic oligonucleotide
ggacaccgauagagcaaug

SEQ ID NO: 1717309 - RNA, 19 nt, Artificial Sequence
  Description of Artificial Sequence: Synthetic oligonucleotide
gggagcugugagugagaaa

SEQ ID NO: 1717310 - RNA, 19 nt, Artificial Sequence
  Description of Artificial Sequence: Synthetic oligonucleotide
ggacacgugcgaagcgcga

SEQ ID NO: 1717311 - RNA, 19 nt, Artificial Sequence
  Description of Artificial Sequence: Synthetic oligonucleotide
cggauaggucccucagguc

SEQ ID NO: 1717312 - RNA, 19 nt, Artificial Sequence
  Description of Artificial Sequence: Synthetic oligonucleotide
cuacagguccaggccagau

SEQ ID NO: 1717313 - RNA, 19 nt, Artificial Sequence
  Description of Artificial Sequence: Synthetic oligonucleotide
accgaaggucaaagccaua

SEQ ID NO: 1717314 - RNA, 19 nt, Artificial Sequence
  Description of Artificial Sequence: Synthetic oligonucleotide
agacggccacaagcacagu

SEQ ID NO: 1717315 - RNA, 19 nt, Artificial Sequence
  Description of Artificial Sequence: Synthetic oligonucleotide
cgggcugaccgcagcccgg

SEQ ID NO: 1717316 - RNA, 19 nt, Artificial Sequence
  Description of Artificial Sequence: Synthetic oligonucleotide
ggcugaccgcagcccgggc

SEQ ID NO: 1717317 - RNA, 19 nt, Artificial Sequence
  Description of Artificial Sequence: Synthetic oligonucleotide
ccggcggguucugucuacc

SEQ ID NO: 1717318 - RNA, 19 nt, Artificial Sequence
  Description of Artificial Sequence: Synthetic oligonucleotide
ggacgcgcuaccacauacu

SEQ ID NO: 1717319 - RNA, 19 nt, Artificial Sequence
  Description of Artificial Sequence: Synthetic oligonucleotide
cccggcggguucugucuac

SEQ ID NO: 1717320 - RNA, 19 nt, Artificial Sequence
  Description of Artificial Sequence: Synthetic oligonucleotide
gggagcccauacaggaagu

SEQ ID NO: 1717321 - RNA, 19 nt, Artificial Sequence
  Description of Artificial Sequence: Synthetic oligonucleotide
cgauggugaucaggacgcc

SEQ ID NO: 1717322 - RNA, 19 nt, Artificial Sequence
  Description of Artificial Sequence: Synthetic oligonucleotide
cgauagagcaaugguggcu

SEQ ID NO: 1717323 - RNA, 19 nt, Artificial Sequence
  Description of Artificial Sequence: Synthetic oligonucleotide
cacagaccagugccaugau

SEQ ID NO: 1717324 - RNA, 19 nt, Artificial Sequence
  Description of Artificial Sequence: Synthetic oligonucleotide
guccacccggcggguucug

SEQ ID NO: 1717325 - RNA, 19 nt, Artificial Sequence
  Description of Artificial Sequence: Synthetic oligonucleotide
gcaaaucguugaggccgga

SEQ ID NO: 1717326 - RNA, 19 nt, Artificial Sequence
  Description of Artificial Sequence: Synthetic oligonucleotide
gcgcucccugggacggacg

SEQ ID NO: 1717327 - RNA, 19 nt, Artificial Sequence
  Description of Artificial Sequence: Synthetic oligonucleotide
ccaaggcugagugcagaua

SEQ ID NO: 1717328 - RNA, 19 nt, Artificial Sequence
  Description of Artificial Sequence: Synthetic oligonucleotide
gacccacggcccagauaua

SEQ ID NO: 1717329 - RNA, 19 nt, Artificial Sequence
  Description of Artificial Sequence: Synthetic oligonucleotide
ccucauugguuugcuggua

SEQ ID NO: 1717330 - RNA, 19 nt, Artificial Sequence
  Description of Artificial Sequence: Synthetic oligonucleotide
ccgugccgaugacuuccug

SEQ ID NO: 1717331 - RNA, 19 nt, Artificial Sequence
  Description of Artificial Sequence: Synthetic oligonucleotide
cgaaggucaaagccauaau

SEQ ID NO: 1717332 - RNA, 19 nt, Artificial Sequence
  Description of Artificial Sequence: Synthetic oligonucleotide
cgaccaccgcagccucagg

SEQ ID NO: 1717333 - RNA, 19 nt, Artificial Sequence
  Description of Artificial Sequence: Synthetic oligonucleotide
ggauggcgcaagagcgagu

SEQ ID NO: 1717334 - RNA, 19 nt, Artificial Sequence
  Description of Artificial Sequence: Synthetic oligonucleotide
ccgcagccucaggaagccc

SEQ ID NO: 1717335 - RNA, 19 nt, Artificial Sequence
  Description of Artificial Sequence: Synthetic oligonucleotide
caagcacagugggcaggau

SEQ ID NO: 1717336 - RNA, 19 nt, Artificial Sequence
  Description of Artificial Sequence: Synthetic oligonucleotide
cgccgacaaugcccaccgc

SEQ ID NO: 1717337 - RNA, 19 nt, Artificial Sequence
  Description of Artificial Sequence: Synthetic oligonucleotide
guccggcagagagcagauu

SEQ ID NO: 1717338 - RNA, 19 nt, Artificial Sequence
  Description of Artificial Sequence: Synthetic oligonucleotide
gggaugcguccggcagaga

SEQ ID NO: 1717339 - RNA, 19 nt, Artificial Sequence
  Description of Artificial Sequence: Synthetic oligonucleotide
cgccccacaauggcuagcu

SEQ ID NO: 1717340 - RNA, 19 nt, Artificial Sequence
  Description of Artificial Sequence: Synthetic oligonucleotide
gccgugccgaugacuuccu

SEQ ID NO: 1717341 - RNA, 19 nt, Artificial Sequence
  Description of Artificial Sequence: Synthetic oligonucleotide
ccccgaagaagcgcucccu

SEQ ID NO: 1717342 - RNA, 19 nt, Artificial Sequence
  Description of Artificial Sequence: Synthetic oligonucleotide
cguccggcagagagcagau

SEQ ID NO: 1717343 - RNA, 19 nt, Artificial Sequence
  Description of Artificial Sequence: Synthetic oligonucleotide
gcgcuaccacauacucaua

SEQ ID NO: 1717344 - RNA, 19 nt, Artificial Sequence
  Description of Artificial Sequence: Synthetic oligonucleotide
cccugggacggacgcgcua

SEQ ID NO: 1717345 - RNA, 19 nt, Artificial Sequence
  Description of Artificial Sequence: Synthetic oligonucleotide
gcaugacggcuggcaugcu

SEQ ID NO: 1717346 - RNA, 19 nt, Artificial Sequence
  Description of Artificial Sequence: Synthetic oligonucleotide
cggcggguucugucuaccu

SEQ ID NO: 1717347 - RNA, 19 nt, Artificial Sequence
  Description of Artificial Sequence: Synthetic oligonucleotide
aacacaaccaacuuggaac

SEQ ID NO: 1717348 - RNA, 19 nt, Artificial Sequence
  Description of Artificial Sequence: Synthetic oligonucleotide
uuugaauuaaugaagagac

SEQ ID NO: 1717349 - RNA, 19 nt, Artificial Sequence
  Description of Artificial Sequence: Synthetic oligonucleotide
aaugauagucuccagaguc

SEQ ID NO: 1717350 - RNA, 19 nt, Artificial Sequence
  Description of Artificial Sequence: Synthetic oligonucleotide
aaauuaaucacaucaaacu

SEQ ID NO: 1717351 - RNA, 19 nt, Artificial Sequence
  Description of Artificial Sequence: Synthetic oligonucleotide
ucuaguuccagacaguggg

SEQ ID NO: 1717352 - RNA, 19 nt, Artificial Sequence
  Description of Artificial Sequence: Synthetic oligonucleotide
ugccaaauuaaucacauca

SEQ ID NO: 1717353 - RNA, 19 nt, Artificial Sequence
  Description of Artificial Sequence: Synthetic oligonucleotide
uguacaaagaugccuagag

SEQ ID NO: 1717354 - RNA, 19 nt, Artificial Sequence
  Description of Artificial Sequence: Synthetic oligonucleotide
aaugcucauucucuggagc

SEQ ID NO: 1717355 - RNA, 19 nt, Artificial Sequence
  Description of Artificial Sequence: Synthetic oligonucleotide
auuaaucuuggcuaccuac

SEQ ID NO: 1717356 - RNA, 19 nt, Artificial Sequence
  Description of Artificial Sequence: Synthetic oligonucleotide
aacaccguuagucaccagg

SEQ ID NO: 1717357 - RNA, 19 nt, Artificial Sequence
  Description of Artificial Sequence: Synthetic oligonucleotide
gauacgaugcccuugacca

SEQ ID NO: 1717358 - RNA, 19 nt, Artificial Sequence
  Description of Artificial Sequence: Synthetic oligonucleotide
ucauagaucugcaccaagg

SEQ ID NO: 1717359 - RNA, 19 nt, Artificial Sequence
  Description of Artificial Sequence: Synthetic oligonucleotide
gugauaaacagcuugagga

SEQ ID NO: 1717360 - RNA, 19 nt, Artificial Sequence
  Description of Artificial Sequence: Synthetic oligonucleotide
ucuauuaaugauagucucc

SEQ ID NO: 1717361 - RNA, 19 nt, Artificial Sequence
  Description of Artificial Sequence: Synthetic oligonucleotide
uguuauaggucuuuucugc

SEQ ID NO: 1717362 - RNA, 19 nt, Artificial Sequence
  Description of Artificial Sequence: Synthetic oligonucleotide
uguuguagagcuuuuguca

SEQ ID NO: 1717363 - RNA, 19 nt, Artificial Sequence
  Description of Artificial Sequence: Synthetic oligonucleotide
auagaucugcaccaaggcc

SEQ ID NO: 1717364 - RNA, 19 nt, Artificial Sequence
  Description of Artificial Sequence: Synthetic oligonucleotide
aaugacuggaagccugugg

SEQ ID NO: 1717365 - RNA, 19 nt, Artificial Sequence
  Description of Artificial Sequence: Synthetic oligonucleotide
ugucuauuuaauuagguuu

SEQ ID NO: 1717366 - RNA, 19 nt, Artificial Sequence
  Description of Artificial Sequence: Synthetic oligonucleotide
uuaccuaugauagaaaauc

SEQ ID NO: 1717367 - RNA, 19 nt, Artificial Sequence
  Description of Artificial Sequence: Synthetic oligonucleotide
uuucaucugauucccagag

SEQ ID NO: 1717368 - RNA, 19 nt, Artificial Sequence
  Description of Artificial Sequence: Synthetic oligonucleotide
aucacaucaaacuuggagu

SEQ ID NO: 1717369 - RNA, 19 nt, Artificial Sequence
  Description of Artificial Sequence: Synthetic oligonucleotide
uguagauagcacuugagaa

SEQ ID NO: 1717370 - RNA, 19 nt, Artificial Sequence
  Description of Artificial Sequence: Synthetic oligonucleotide
uugaaaaugcucauucucu

SEQ ID NO: 1717371 - RNA, 19 nt, Artificial Sequence
  Description of Artificial Sequence: Synthetic oligonucleotide
gaagcaaccgacuccauug

SEQ ID NO: 1717372 - RNA, 19 nt, Artificial Sequence
  Description of Artificial Sequence: Synthetic oligonucleotide
ucuugucuauuuaauuagg

SEQ ID NO: 1717373 - RNA, 19 nt, Artificial Sequence
  Description of Artificial Sequence: Synthetic oligonucleotide
uuaauuagguuugucaaca

SEQ ID NO: 1717374 - RNA, 19 nt, Artificial Sequence
  Description of Artificial Sequence: Synthetic oligonucleotide
agugauaaacagcuugagg

SEQ ID NO: 1717375 - RNA, 19 nt, Artificial Sequence
  Description of Artificial Sequence: Synthetic oligonucleotide
uuagguuugucaacaaaug

SEQ ID NO: 1717376 - RNA, 19 nt, Artificial Sequence
  Description of Artificial Sequence: Synthetic oligonucleotide
uuaaucuuggcuaccuacc

SEQ ID NO: 1717377 - RNA, 19 nt, Artificial Sequence
  Description of Artificial Sequence: Synthetic oligonucleotide
augauagaaaaucuugucu

SEQ ID NO: 1717378 - RNA, 19 nt, Artificial Sequence
  Description of Artificial Sequence: Synthetic oligonucleotide
ugauagaaaaucuugucua

SEQ ID NO: 1717379 - RNA, 19 nt, Artificial Sequence
  Description of Artificial Sequence: Synthetic oligonucleotide
gaugagacuucauaaagga

SEQ ID NO: 1717380 - RNA, 19 nt, Artificial Sequence
  Description of Artificial Sequence: Synthetic oligonucleotide
gauaaagucagugaugguc

SEQ ID NO: 1717381 - RNA, 19 nt, Artificial Sequence
  Description of Artificial Sequence: Synthetic oligonucleotide
uucuuacuaucccacagag

SEQ ID NO: 1717382 - RNA, 19 nt, Artificial Sequence
  Description of Artificial Sequence: Synthetic oligonucleotide
acagcaucgaacaagcugg

SEQ ID NO: 1717383 - RNA, 19 nt, Artificial Sequence
  Description of Artificial Sequence: Synthetic oligonucleotide
auuguuugauuccggaguc

SEQ ID NO: 1717384 - RNA, 19 nt, Artificial Sequence
  Description of Artificial Sequence: Synthetic oligonucleotide
uuuaauuagguuugucaac

SEQ ID NO: 1717385 - RNA, 19 nt, Artificial Sequence
  Description of Artificial Sequence: Synthetic oligonucleotide
aaggccgacuuauaguauc

SEQ ID NO: 1717386 - RNA, 19 nt, Artificial Sequence
  Description of Artificial Sequence: Synthetic oligonucleotide
gagacuuagacaugaauuc

SEQ ID NO: 1717387 - RNA, 19 nt, Artificial Sequence
  Description of Artificial Sequence: Synthetic oligonucleotide
cuucauaaaggauguauac

SEQ ID NO: 1717388 - RNA, 19 nt, Artificial Sequence
  Description of Artificial Sequence: Synthetic oligonucleotide
uaugauagaaaaucuuguc

SEQ ID NO: 1717389 - RNA, 19 nt, Artificial Sequence
  Description of Artificial Sequence: Synthetic oligonucleotide
ucagugauaaacagcuuga

SEQ ID NO: 1717390 - RNA, 19 nt, Artificial Sequence
  Description of Artificial Sequence: Synthetic oligonucleotide
gacagcaucgaacaagcug

SEQ ID NO: 1717391 - RNA, 19 nt, Artificial Sequence
  Description of Artificial Sequence: Synthetic oligonucleotide
ugucacagauauauccagg

SEQ ID NO: 1717392 - RNA, 19 nt, Artificial Sequence
  Description of Artificial Sequence: Synthetic oligonucleotide
ccuagagccacauagacag

SEQ ID NO: 1717393 - RNA, 19 nt, Artificial Sequence
  Description of Artificial Sequence: Synthetic oligonucleotide
ucggacagcgauacgaugc

SEQ ID NO: 1717394 - RNA, 19 nt, Artificial Sequence
  Description of Artificial Sequence: Synthetic oligonucleotide
aagcaaccgacuccauugc

SEQ ID NO: 1717395 - RNA, 19 nt, Artificial Sequence
  Description of Artificial Sequence: Synthetic oligonucleotide
aaaugcucauucucuggag

SEQ ID NO: 1717396 - RNA, 19 nt, Artificial Sequence
  Description of Artificial Sequence: Synthetic oligonucleotide
gaaggcuuucuuuaccugc

SEQ ID NO: 1717397 - RNA, 19 nt, Artificial Sequence
  Description of Artificial Sequence: Synthetic oligonucleotide
cagucuauuaaugauaguc

SEQ ID NO: 1717398 - RNA, 19 nt, Artificial Sequence
  Description of Artificial Sequence: Synthetic oligonucleotide
aguaaggauguacaaggug

SEQ ID NO: 1717399 - RNA, 19 nt, Artificial Sequence
  Description of Artificial Sequence: Synthetic oligonucleotide
gaugcccuugaccacgucg

SEQ ID NO: 1717400 - RNA, 19 nt, Artificial Sequence
  Description of Artificial Sequence: Synthetic oligonucleotide
agacaaggggcuuaaagga

SEQ ID NO: 1717401 - RNA, 19 nt, Artificial Sequence
  Description of Artificial Sequence: Synthetic oligonucleotide
gaccacgucguucucaucc

SEQ ID NO: 1717402 - RNA, 19 nt, Artificial Sequence
  Description of Artificial Sequence: Synthetic oligonucleotide
aggauguugauaaagucag

SEQ ID NO: 1717403 - RNA, 19 nt, Artificial Sequence
  Description of Artificial Sequence: Synthetic oligonucleotide
uuguuauaggucuuuucug

SEQ ID NO: 1717404 - RNA, 19 nt, Artificial Sequence
  Description of Artificial Sequence: Synthetic oligonucleotide
aauuagguuugucaacaaa

SEQ ID NO: 1717405 - RNA, 19 nt, Artificial Sequence
  Description of Artificial Sequence: Synthetic oligonucleotide
acacccucaaaguagugag

SEQ ID NO: 1717406 - RNA, 19 nt, Artificial Sequence
  Description of Artificial Sequence: Synthetic oligonucleotide
aagccuguggaucuuauuu

SEQ ID NO: 1717407 - RNA, 19 nt, Artificial Sequence
  Description of Artificial Sequence: Synthetic oligonucleotide
ucuuacuaucccacagagg

SEQ ID NO: 1717408 - RNA, 19 nt, Artificial Sequence
  Description of Artificial Sequence: Synthetic oligonucleotide
acaagguguugccugacuc

SEQ ID NO: 1717409 - RNA, 19 nt, Artificial Sequence
  Description of Artificial Sequence: Synthetic oligonucleotide
caugaauucuggcuugggg

SEQ ID NO: 1717410 - RNA, 19 nt, Artificial Sequence
  Description of Artificial Sequence: Synthetic oligonucleotide
uuucuuuaccugcagggaa

SEQ ID NO: 1717411 - RNA, 19 nt, Artificial Sequence
  Description of Artificial Sequence: Synthetic oligonucleotide
ccaacuuggaacuuguggg

SEQ ID NO: 1717412 - RNA, 19 nt, Artificial Sequence
  Description of Artificial Sequence: Synthetic oligonucleotide
acauagacaggugugguag

SEQ ID NO: 1717413 - RNA, 19 nt, Artificial Sequence
  Description of Artificial Sequence: Synthetic oligonucleotide
uuaaaggaguccuguaggu

SEQ ID NO: 1717414 - RNA, 19 nt, Artificial Sequence
  Description of Artificial Sequence: Synthetic oligonucleotide
cauagaucugcaccaaggc

SEQ ID NO: 1717415 - RNA, 19 nt, Artificial Sequence
  Description of Artificial Sequence: Synthetic oligonucleotide
gguauggagcuccugaggg

SEQ ID NO: 1717416 - RNA, 19 nt, Artificial Sequence
  Description of Artificial Sequence: Synthetic oligonucleotide
gucuauuuaauuagguuug

SEQ ID NO: 1717417 - RNA, 19 nt, Artificial Sequence
  Description of Artificial Sequence: Synthetic oligonucleotide
agguauaccucucuccaag

SEQ ID NO: 1717418 - RNA, 19 nt, Artificial Sequence
  Description of Artificial Sequence: Synthetic oligonucleotide
uccaccagucuauuaauga

SEQ ID NO: 1717419 - RNA, 19 nt, Artificial Sequence
  Description of Artificial Sequence: Synthetic oligonucleotide
gauauauccagguuguuau

SEQ ID NO: 1717420 - RNA, 19 nt, Artificial Sequence
  Description of Artificial Sequence: Synthetic oligonucleotide
ucugaagcaaccgacucca

SEQ ID NO: 1717421 - RNA, 19 nt, Artificial Sequence
  Description of Artificial Sequence: Synthetic oligonucleotide
uuacuaucccacagagggg

SEQ ID NO: 1717422 - RNA, 19 nt, Artificial Sequence
  Description of Artificial Sequence: Synthetic oligonucleotide
gacucggugcuguacaaag

SEQ ID NO: 1717423 - RNA, 19 nt, Artificial Sequence
  Description of Artificial Sequence: Synthetic oligonucleotide
uaccuaugauagaaaaucu

SEQ ID NO: 1717424 - RNA, 19 nt, Artificial Sequence
  Description of Artificial Sequence: Synthetic oligonucleotide
uugaauuaaugaagagaca

SEQ ID NO: 1717425 - RNA, 19 nt, Artificial Sequence
  Description of Artificial Sequence: Synthetic oligonucleotide
ugggucaaugacuggaagc

SEQ ID NO: 1717426 - RNA, 19 nt, Artificial Sequence
  Description of Artificial Sequence: Synthetic oligonucleotide
uggcauuuggagaaaugca

SEQ ID NO: 1717427 - RNA, 19 nt, Artificial Sequence
  Description of Artificial Sequence: Synthetic oligonucleotide
caacuuggaacuugugggg

SEQ ID NO: 1717428 - RNA, 19 nt, Artificial Sequence
  Description of Artificial Sequence: Synthetic oligonucleotide
aacuuguggggaucagguc

SEQ ID NO: 1717429 - RNA, 19 nt, Artificial Sequence
  Description of Artificial Sequence: Synthetic oligonucleotide
uucauagaucugcaccaag

SEQ ID NO: 1717430 - RNA, 19 nt, Artificial Sequence
  Description of Artificial Sequence: Synthetic oligonucleotide
uccugagggaacacacucg

SEQ ID NO: 1717431 - RNA, 19 nt, Artificial Sequence
  Description of Artificial Sequence: Synthetic oligonucleotide
cuggcauuuggagaaaugc

SEQ ID NO: 1717432 - RNA, 19 nt, Artificial Sequence
  Description of Artificial Sequence: Synthetic oligonucleotide
acccucaaaguagugagac

SEQ ID NO: 1717433 - RNA, 19 nt, Artificial Sequence
  Description of Artificial Sequence: Synthetic oligonucleotide
ugcuguacaaagaugccua

SEQ ID NO: 1717434 - RNA, 19 nt, Artificial Sequence
  Description of Artificial Sequence: Synthetic oligonucleotide
uaucggugcaggauguuga

SEQ ID NO: 1717435 - RNA, 19 nt, Artificial Sequence
  Description of Artificial Sequence: Synthetic oligonucleotide
cuuagacaugaauucuggc

SEQ ID NO: 1717436 - RNA, 19 nt, Artificial Sequence
  Description of Artificial Sequence: Synthetic oligonucleotide
guuguuauaggucuuuucu

SEQ ID NO: 1717437 - RNA, 19 nt, Artificial Sequence
  Description of Artificial Sequence: Synthetic oligonucleotide
ugaauucuggcuuggggaa

SEQ ID NO: 1717438 - RNA, 19 nt, Artificial Sequence
  Description of Artificial Sequence: Synthetic oligonucleotide
ugagggaacacacucgguu

SEQ ID NO: 1717439 - RNA, 19 nt, Artificial Sequence
  Description of Artificial Sequence: Synthetic oligonucleotide
acaguggguauggagcucc

SEQ ID NO: 1717440 - RNA, 19 nt, Artificial Sequence
  Description of Artificial Sequence: Synthetic oligonucleotide
gucuauuaaugauagucuc

SEQ ID NO: 1717441 - RNA, 19 nt, Artificial Sequence
  Description of Artificial Sequence: Synthetic oligonucleotide
agugagaccgguguuguag

SEQ ID NO: 1717442 - RNA, 19 nt, Artificial Sequence
  Description of Artificial Sequence: Synthetic oligonucleotide
acacaaccaacuuggaacu

SEQ ID NO: 1717443 - RNA, 19 nt, Artificial Sequence
  Description of Artificial Sequence: Synthetic oligonucleotide
ucugcuuccaccagucuau

SEQ ID NO: 1717444 - RNA, 19 nt, Artificial Sequence
  Description of Artificial Sequence: Synthetic oligonucleotide
agaccgguguuguagagcu

SEQ ID NO: 1717445 - RNA, 19 nt, Artificial Sequence
  Description of Artificial Sequence: Synthetic oligonucleotide
auaucggacagcgauacga

SEQ ID NO: 1717446 - RNA, 19 nt, Artificial Sequence
  Description of Artificial Sequence: Synthetic oligonucleotide
uugucuauuuaauuagguu

SEQ ID NO: 1717447 - RNA, 19 nt, Artificial Sequence
  Description of Artificial Sequence: Synthetic oligonucleotide
accgacuccauugcaaucg

SEQ ID NO: 1717448 - RNA, 19 nt, Artificial Sequence
  Description of Artificial Sequence: Synthetic oligonucleotide
agucuauuaaugauagucu

SEQ ID NO: 1717449 - RNA, 19 nt, Artificial Sequence
  Description of Artificial Sequence: Synthetic oligonucleotide
accagucuauuaaugauag

SEQ ID NO: 1717450 - RNA, 19 nt, Artificial Sequence
  Description of Artificial Sequence: Synthetic oligonucleotide
cuacccauugcccuccucc

SEQ ID NO: 1717451 - RNA, 19 nt, Artificial Sequence
  Description of Artificial Sequence: Synthetic oligonucleotide
agucucuugaaaaugcuca

SEQ ID NO: 1717452 - RNA, 19 nt, Artificial Sequence
  Description of Artificial Sequence: Synthetic oligonucleotide
uguacaagguguugccuga

SEQ ID NO: 1717453 - RNA, 19 nt, Artificial Sequence
  Description of Artificial Sequence: Synthetic oligonucleotide
gauucccagagcucucagg

SEQ ID NO: 1717454 - RNA, 19 nt, Artificial Sequence
  Description of Artificial Sequence: Synthetic oligonucleotide
guugauaaagucagugaug

SEQ ID NO: 1717455 - RNA, 19 nt, Artificial Sequence
  Description of Artificial Sequence: Synthetic oligonucleotide
uuaccugcagggaaguauc

SEQ ID NO: 1717456 - RNA, 19 nt, Artificial Sequence
  Description of Artificial Sequence: Synthetic oligonucleotide
auaggucuuuucugcugcc

SEQ ID NO: 1717457 - RNA, 19 nt, Artificial Sequence
  Description of Artificial Sequence: Synthetic oligonucleotide
uacgaugcccuugaccacg

SEQ ID NO: 1717458 - RNA, 19 nt, Artificial Sequence
  Description of Artificial Sequence: Synthetic oligonucleotide
uccagagacuuagacauga

SEQ ID NO: 1717459 - RNA, 19 nt, Artificial Sequence
  Description of Artificial Sequence: Synthetic oligonucleotide
gacuccauugcaaucgccc

SEQ ID NO: 1717460 - RNA, 19 nt, Artificial Sequence
  Description of Artificial Sequence: Synthetic oligonucleotide
agcccgaacaccguuaguc

SEQ ID NO: 1717461 - RNA, 19 nt, Artificial Sequence
  Description of Artificial Sequence: Synthetic oligonucleotide
aaacucugcuucuuacuau

SEQ ID NO: 1717462 - RNA, 19 nt, Artificial Sequence
  Description of Artificial Sequence: Synthetic oligonucleotide
agguuugucaacaaaugca

SEQ ID NO: 1717463 - RNA, 19 nt, Artificial Sequence
  Description of Artificial Sequence: Synthetic oligonucleotide
cuucucuccaccugugagc

SEQ ID NO: 1717464 - RNA, 19 nt, Artificial Sequence
  Description of Artificial Sequence: Synthetic oligonucleotide
aaccgacuccauugcaauc

SEQ ID NO: 1717465 - RNA, 19 nt, Artificial Sequence
  Description of Artificial Sequence: Synthetic oligonucleotide
ccucaaaguagugagaccg

SEQ ID NO: 1717466 - RNA, 19 nt, Artificial Sequence
  Description of Artificial Sequence: Synthetic oligonucleotide
ugccuagagccacauagac

SEQ ID NO: 1717467 - RNA, 19 nt, Artificial Sequence
  Description of Artificial Sequence: Synthetic oligonucleotide
auaccucucuccaaguuuc

SEQ ID NO: 1717468 - RNA, 19 nt, Artificial Sequence
  Description of Artificial Sequence: Synthetic oligonucleotide
gauagcacuugagaacacc

SEQ ID NO: 1717469 - RNA, 19 nt, Artificial Sequence
  Description of Artificial Sequence: Synthetic oligonucleotide
uccuguagauagcacuuga

SEQ ID NO: 1717470 - RNA, 19 nt, Artificial Sequence
  Description of Artificial Sequence: Synthetic oligonucleotide
uggaucuuauuuugaauua

SEQ ID NO: 1717471 - RNA, 19 nt, Artificial Sequence
  Description of Artificial Sequence: Synthetic oligonucleotide
uuuaccugcagggaaguau

SEQ ID NO: 1717472 - RNA, 19 nt, Artificial Sequence
  Description of Artificial Sequence: Synthetic oligonucleotide
gugaguaaggauguacaag

SEQ ID NO: 1717473 - RNA, 19 nt, Artificial Sequence
  Description of Artificial Sequence: Synthetic oligonucleotide
accguuagucaccagggca

SEQ ID NO: 1717474 - RNA, 19 nt, Artificial Sequence
  Description of Artificial Sequence: Synthetic oligonucleotide
cuugugaguaaggauguac

SEQ ID NO: 1717475 - RNA, 19 nt, Artificial Sequence
  Description of Artificial Sequence: Synthetic oligonucleotide
ucucugaagcaaccgacuc

SEQ ID NO: 1717476 - RNA, 19 nt, Artificial Sequence
  Description of Artificial Sequence: Synthetic oligonucleotide
agacaugaauucuggcuug

SEQ ID NO: 1717477 - RNA, 19 nt, Artificial Sequence
  Description of Artificial Sequence: Synthetic oligonucleotide
uuccaccagucuauuaaug

SEQ ID NO: 1717478 - RNA, 19 nt, Artificial Sequence
  Description of Artificial Sequence: Synthetic oligonucleotide
uuggggaacucagugauaa

SEQ ID NO: 1717479 - RNA, 19 nt, Artificial Sequence
  Description of Artificial Sequence: Synthetic oligonucleotide
auguauacacaccauuguu

SEQ ID NO: 1717480 - RNA, 19 nt, Artificial Sequence
  Description of Artificial Sequence: Synthetic oligonucleotide
ugauuccggagucucuuga

SEQ ID NO: 1717481 - RNA, 19 nt, Artificial Sequence
  Description of Artificial Sequence: Synthetic oligonucleotide
acacacucgguucuuccag

SEQ ID NO: 1717482 - RNA, 19 nt, Artificial Sequence
  Description of Artificial Sequence: Synthetic oligonucleotide
uggguauggagcuccugag

SEQ ID NO: 1717483 - RNA, 19 nt, Artificial Sequence
  Description of Artificial Sequence: Synthetic oligonucleotide
uucugcugccaaauuaauc

SEQ ID NO: 1717484 - RNA, 19 nt, Artificial Sequence
  Description of Artificial Sequence: Synthetic oligonucleotide
agagacucggugcuguaca

SEQ ID NO: 1717485 - RNA, 19 nt, Artificial Sequence
  Description of Artificial Sequence: Synthetic oligonucleotide
ucuccuguagauagcacuu

SEQ ID NO: 1717486 - RNA, 19 nt, Artificial Sequence
  Description of Artificial Sequence: Synthetic oligonucleotide
aagguguugccugacucug

SEQ ID NO: 1717487 - RNA, 19 nt, Artificial Sequence
  Description of Artificial Sequence: Synthetic oligonucleotide
uuauaguaucggugcagga

SEQ ID NO: 1717488 - RNA, 19 nt, Artificial Sequence
  Description of Artificial Sequence: Synthetic oligonucleotide
aguccuguagguauaccuc

SEQ ID NO: 1717489 - RNA, 19 nt, Artificial Sequence
  Description of Artificial Sequence: Synthetic oligonucleotide
cucuaguuccagacagugg

SEQ ID NO: 1717490 - RNA, 19 nt, Artificial Sequence
  Description of Artificial Sequence: Synthetic oligonucleotide
cauaggugccaaucuguag

SEQ ID NO: 1717491 - RNA, 19 nt, Artificial Sequence
  Description of Artificial Sequence: Synthetic oligonucleotide
aauucuggcuuggggaacu

SEQ ID NO: 1717492 - RNA, 19 nt, Artificial Sequence
  Description of Artificial Sequence: Synthetic oligonucleotide
accauuguuugauuccgga

SEQ ID NO: 1717493 - RNA, 19 nt, Artificial Sequence
  Description of Artificial Sequence: Synthetic oligonucleotide
guaaggauguacaaggugu

SEQ ID NO: 1717494 - RNA, 19 nt, Artificial Sequence
  Description of Artificial Sequence: Synthetic oligonucleotide
uugucaacaaaugcauuaa

SEQ ID NO: 1717495 - RNA, 19 nt, Artificial Sequence
  Description of Artificial Sequence: Synthetic oligonucleotide
ucguucucauccaccacca

SEQ ID NO: 1717496 - RNA, 19 nt, Artificial Sequence
  Description of Artificial Sequence: Synthetic oligonucleotide
ucuauuuaauuagguuugu

SEQ ID NO: 1717497 - RNA, 19 nt, Artificial Sequence
  Description of Artificial Sequence: Synthetic oligonucleotide
uggggaucaggucguagca

SEQ ID NO: 1717498 - RNA, 19 nt, Artificial Sequence
  Description of Artificial Sequence: Synthetic oligonucleotide
uaaggauguacaagguguu

SEQ ID NO: 1717499 - RNA, 19 nt, Artificial Sequence
  Description of Artificial Sequence: Synthetic oligonucleotide
auagcaauguuggcauagg

SEQ ID NO: 1717500 - RNA, 19 nt, Artificial Sequence
  Description of Artificial Sequence: Synthetic oligonucleotide
aucugauucccagagcucu

SEQ ID NO: 1717501 - RNA, 19 nt, Artificial Sequence
  Description of Artificial Sequence: Synthetic oligonucleotide
uccacaacacgcccuuucu

SEQ ID NO: 1717502 - RNA, 19 nt, Artificial Sequence
  Description of Artificial Sequence: Synthetic oligonucleotide
auaaacagcuugaggaacu

SEQ ID NO: 1717503 - RNA, 19 nt, Artificial Sequence
  Description of Artificial Sequence: Synthetic oligonucleotide
agcgauacgaugcccuuga

SEQ ID NO: 1717504 - RNA, 19 nt, Artificial Sequence
  Description of Artificial Sequence: Synthetic oligonucleotide
gcgaugagacuucauaaag

SEQ ID NO: 1717505 - RNA, 19 nt, Artificial Sequence
  Description of Artificial Sequence: Synthetic oligonucleotide
acaccguuagucaccaggg

SEQ ID NO: 1717506 - RNA, 19 nt, Artificial Sequence
  Description of Artificial Sequence: Synthetic oligonucleotide
agcgaugagacuucauaaa

SEQ ID NO: 1717507 - RNA, 19 nt, Artificial Sequence
  Description of Artificial Sequence: Synthetic oligonucleotide
uggcuaccuacccauugcc

SEQ ID NO: 1717508 - RNA, 19 nt, Artificial Sequence
  Description of Artificial Sequence: Synthetic oligonucleotide
gacaugaauucuggcuugg

SEQ ID NO: 1717509 - RNA, 19 nt, Artificial Sequence
  Description of Artificial Sequence: Synthetic oligonucleotide
accaaggccgacuuauagu

SEQ ID NO: 1717510 - RNA, 19 nt, Artificial Sequence
  Description of Artificial Sequence: Synthetic oligonucleotide
gauaucggacagcgauacg

SEQ ID NO: 1717511 - RNA, 19 nt, Artificial Sequence
  Description of Artificial Sequence: Synthetic oligonucleotide
gcagacaaggggcuuaaag

SEQ ID NO: 1717512 - RNA, 19 nt, Artificial Sequence
  Description of Artificial Sequence: Synthetic oligonucleotide
aggauguauacacaccauu

SEQ ID NO: 1717513 - RNA, 19 nt, Artificial Sequence
  Description of Artificial Sequence: Synthetic oligonucleotide
guguuguagagcuuuuguc

SEQ ID NO: 1717514 - RNA, 19 nt, Artificial Sequence
  Description of Artificial Sequence: Synthetic oligonucleotide
agacuuagacaugaauucu

SEQ ID NO: 1717515 - RNA, 19 nt, Artificial Sequence
  Description of Artificial Sequence: Synthetic oligonucleotide
acaaccaacuuggaacuug

SEQ ID NO: 1717516 - RNA, 19 nt, Artificial Sequence
  Description of Artificial Sequence: Synthetic oligonucleotide
cagcaugcccacaaaacuc

SEQ ID NO: 1717517 - RNA, 19 nt, Artificial Sequence
  Description of Artificial Sequence: Synthetic oligonucleotide
auacgaugcccuugaccac

SEQ ID NO: 1717518 - RNA, 19 nt, Artificial Sequence
  Description of Artificial Sequence: Synthetic oligonucleotide
caugcccacaaaacucugc

SEQ ID NO: 1717519 - RNA, 19 nt, Artificial Sequence
  Description of Artificial Sequence: Synthetic oligonucleotide
guggggaucaggucguagc

SEQ ID NO: 1717520 - RNA, 19 nt, Artificial Sequence
  Description of Artificial Sequence: Synthetic oligonucleotide
gcuucuuacuaucccacag

SEQ ID NO: 1717521 - RNA, 19 nt, Artificial Sequence
  Description of Artificial Sequence: Synthetic oligonucleotide
uccauugcaaucgcccgcc

SEQ ID NO: 1717522 - RNA, 19 nt, Artificial Sequence
  Description of Artificial Sequence: Synthetic oligonucleotide
cggaccauagcaauguugg

SEQ ID NO: 1717523 - RNA, 19 nt, Artificial Sequence
  Description of Artificial Sequence: Synthetic oligonucleotide
gacaggugugguaguacgg

SEQ ID NO: 1717524 - RNA, 19 nt, Artificial Sequence
  Description of Artificial Sequence: Synthetic oligonucleotide
gaacuugaggaugcgcuug

SEQ ID NO: 1717525 - RNA, 19 nt, Artificial Sequence
  Description of Artificial Sequence: Synthetic oligonucleotide
gauagaaaaucuugucuau

SEQ ID NO: 1717526 - RNA, 19 nt, Artificial Sequence
  Description of Artificial Sequence: Synthetic oligonucleotide
auacacaccauuguuugau

SEQ ID NO: 1717527 - RNA, 19 nt, Artificial Sequence
  Description of Artificial Sequence: Synthetic oligonucleotide
uaguaucggugcaggaugu

SEQ ID NO: 1717528 - RNA, 19 nt, Artificial Sequence
  Description of Artificial Sequence: Synthetic oligonucleotide
uaucggacagcgauacgau

SEQ ID NO: 1717529 - RNA, 19 nt, Artificial Sequence
  Description of Artificial Sequence: Synthetic oligonucleotide
ugauucccagagcucucag

SEQ ID NO: 1717530 - RNA, 19 nt, Artificial Sequence
  Description of Artificial Sequence: Synthetic oligonucleotide
gucaaugacuggaagccug

SEQ ID NO: 1717531 - RNA, 19 nt, Artificial Sequence
  Description of Artificial Sequence: Synthetic oligonucleotide
gucguagcagcgaugagac

SEQ ID NO: 1717532 - RNA, 19 nt, Artificial Sequence
  Description of Artificial Sequence: Synthetic oligonucleotide
ugaagcaaccgacuccauu

SEQ ID NO: 1717533 - RNA, 19 nt, Artificial Sequence
  Description of Artificial Sequence: Synthetic oligonucleotide
cacaacacgcccuuucuca

SEQ ID NO: 1717534 - RNA, 19 nt, Artificial Sequence
  Description of Artificial Sequence: Synthetic oligonucleotide
ugguaguacggaccauagc

SEQ ID NO: 1717535 - RNA, 19 nt, Artificial Sequence
  Description of Artificial Sequence: Synthetic oligonucleotide
uuguagagcuuuugucaca

SEQ ID NO: 1717536 - RNA, 19 nt, Artificial Sequence
  Description of Artificial Sequence: Synthetic oligonucleotide
uaguacggaccauagcaau

SEQ ID NO: 1717537 - RNA, 19 nt, Artificial Sequence
  Description of Artificial Sequence: Synthetic oligonucleotide
cugcuucuuacuaucccac

SEQ ID NO: 1717538 - RNA, 19 nt, Artificial Sequence
  Description of Artificial Sequence: Synthetic oligonucleotide
uaggugccaaucuguagcu

SEQ ID NO: 1717539 - RNA, 19 nt, Artificial Sequence
  Description of Artificial Sequence: Synthetic oligonucleotide
ugcaccaaggccgacuuau

SEQ ID NO: 1717540 - RNA, 19 nt, Artificial Sequence
  Description of Artificial Sequence: Synthetic oligonucleotide
agcucucugaagcaaccga

SEQ ID NO: 1717541 - RNA, 19 nt, Artificial Sequence
  Description of Artificial Sequence: Synthetic oligonucleotide
gguguugccugacucuggg

SEQ ID NO: 1717542 - RNA, 19 nt, Artificial Sequence
  Description of Artificial Sequence: Synthetic oligonucleotide
ugagaccgguguuguagag

SEQ ID NO: 1717543 - RNA, 19 nt, Artificial Sequence
  Description of Artificial Sequence: Synthetic oligonucleotide
uacaagguguugccugacu

SEQ ID NO: 1717544 - RNA, 19 nt, Artificial Sequence
  Description of Artificial Sequence: Synthetic oligonucleotide
gaugcgcuugugaguaagg

SEQ ID NO: 1717545 - RNA, 19 nt, Artificial Sequence
  Description of Artificial Sequence: Synthetic oligonucleotide
aaugcagacaaggggcuua

SEQ ID NO: 1717546 - RNA, 19 nt, Artificial Sequence
  Description of Artificial Sequence: Synthetic oligonucleotide
caccaaggccgacuuauag

SEQ ID NO: 1717547 - RNA, 19 nt, Artificial Sequence
  Description of Artificial Sequence: Synthetic oligonucleotide
ugugguaguacggaccaua

SEQ ID NO: 1717548 - RNA, 19 nt, Artificial Sequence
  Description of Artificial Sequence: Synthetic oligonucleotide
acucgguucuuccaggauu

SEQ ID NO: 1717549 - RNA, 19 nt, Artificial Sequence
  Description of Artificial Sequence: Synthetic oligonucleotide
uugauuccggagucucuug

SEQ ID NO: 1717550 - RNA, 19 nt, Artificial Sequence
  Description of Artificial Sequence: Synthetic oligonucleotide
guggaucuuauuuugaauu

SEQ ID NO: 1717551 - RNA, 19 nt, Artificial Sequence
  Description of Artificial Sequence: Synthetic oligonucleotide
uccggagucucuugaaaau

SEQ ID NO: 1717552 - RNA, 19 nt, Artificial Sequence
  Description of Artificial Sequence: Synthetic oligonucleotide
ugauaaagucagugauggu

SEQ ID NO: 1717553 - RNA, 19 nt, Artificial Sequence
  Description of Artificial Sequence: Synthetic oligonucleotide
cuauuuaauuagguuuguc

SEQ ID NO: 1717554 - RNA, 19 nt, Artificial Sequence
  Description of Artificial Sequence: Synthetic oligonucleotide
gaguccuguagguauaccu

SEQ ID NO: 1717555 - RNA, 19 nt, Artificial Sequence
  Description of Artificial Sequence: Synthetic oligonucleotide
cuucuuacuaucccacaga

SEQ ID NO: 1717556 - RNA, 19 nt, Artificial Sequence
  Description of Artificial Sequence: Synthetic oligonucleotide
gucagcaugcccacaaaac

SEQ ID NO: 1717557 - RNA, 19 nt, Artificial Sequence
  Description of Artificial Sequence: Synthetic oligonucleotide
cgaugagacuucauaaagg

SEQ ID NO: 1717558 - RNA, 19 nt, Artificial Sequence
  Description of Artificial Sequence: Synthetic oligonucleotide
auuaaugaagagacagcau

SEQ ID NO: 1717559 - RNA, 19 nt, Artificial Sequence
  Description of Artificial Sequence: Synthetic oligonucleotide
gagccugcaggauaucgga

SEQ ID NO: 1717560 - RNA, 19 nt, Artificial Sequence
  Description of Artificial Sequence: Synthetic oligonucleotide
cuugucuauuuaauuaggu

SEQ ID NO: 1717561 - RNA, 19 nt, Artificial Sequence
  Description of Artificial Sequence: Synthetic oligonucleotide
cuccauugcaaucgcccgc

SEQ ID NO: 1717562 - RNA, 19 nt, Artificial Sequence
  Description of Artificial Sequence: Synthetic oligonucleotide
aguacggaccauagcaaug

SEQ ID NO: 1717563 - RNA, 19 nt, Artificial Sequence
  Description of Artificial Sequence: Synthetic oligonucleotide
caccauuguuugauuccgg

SEQ ID NO: 1717564 - RNA, 19 nt, Artificial Sequence
  Description of Artificial Sequence: Synthetic oligonucleotide
gacuucauaaaggauguau

SEQ ID NO: 1717565 - RNA, 19 nt, Artificial Sequence
  Description of Artificial Sequence: Synthetic oligonucleotide
ccugagggaacacacucgg

SEQ ID NO: 1717566 - RNA, 19 nt, Artificial Sequence
  Description of Artificial Sequence: Synthetic oligonucleotide
ucugauucccagagcucuc

SEQ ID NO: 1717567 - RNA, 19 nt, Artificial Sequence
  Description of Artificial Sequence: Synthetic oligonucleotide
ucaggucguagcagcgaug

SEQ ID NO: 1717568 - RNA, 19 nt, Artificial Sequence
  Description of Artificial Sequence: Synthetic oligonucleotide
auagaaaaucuugucuauu

SEQ ID NO: 1717569 - RNA, 19 nt, Artificial Sequence
  Description of Artificial Sequence: Synthetic oligonucleotide
gagcucucugaagcaaccg

SEQ ID NO: 1717570 - RNA, 19 nt, Artificial Sequence
  Description of Artificial Sequence: Synthetic oligonucleotide
aucggacagcgauacgaug

SEQ ID NO: 1717571 - RNA, 19 nt, Artificial Sequence
  Description of Artificial Sequence: Synthetic oligonucleotide
acaugaauucuggcuuggg

SEQ ID NO: 1717572 - RNA, 19 nt, Artificial Sequence
  Description of Artificial Sequence: Synthetic oligonucleotide
aucaggucguagcagcgau

SEQ ID NO: 1717573 - RNA, 19 nt, Artificial Sequence
  Description of Artificial Sequence: Synthetic oligonucleotide
ucuuuaccugcagggaagu

SEQ ID NO: 1717574 - RNA, 19 nt, Artificial Sequence
  Description of Artificial Sequence: Synthetic oligonucleotide
cagugauaaacagcuugag

SEQ ID NO: 1717575 - RNA, 19 nt, Artificial Sequence
  Description of Artificial Sequence: Synthetic oligonucleotide
cugggucaaugacuggaag

SEQ ID NO: 1717576 - RNA, 19 nt, Artificial Sequence
  Description of Artificial Sequence: Synthetic oligonucleotide
uccuguagguauaccucuc

SEQ ID NO: 1717577 - RNA, 19 nt, Artificial Sequence
  Description of Artificial Sequence: Synthetic oligonucleotide
aaggauguauacacaccau

SEQ ID NO: 1717578 - RNA, 19 nt, Artificial Sequence
  Description of Artificial Sequence: Synthetic oligonucleotide
gcgcuugugaguaaggaug

SEQ ID NO: 1717579 - RNA, 19 nt, Artificial Sequence
  Description of Artificial Sequence: Synthetic oligonucleotide
gagaccgguguuguagagc

SEQ ID NO: 1717580 - RNA, 19 nt, Artificial Sequence
  Description of Artificial Sequence: Synthetic oligonucleotide
cuagagccacauagacagg

SEQ ID NO: 1717581 - RNA, 19 nt, Artificial Sequence
  Description of Artificial Sequence: Synthetic oligonucleotide
ggggaacucagugauaaac

SEQ ID NO: 1717582 - RNA, 19 nt, Artificial Sequence
  Description of Artificial Sequence: Synthetic oligonucleotide
gaacaagcuggcauuugga

SEQ ID NO: 1717583 - RNA, 19 nt, Artificial Sequence
  Description of Artificial Sequence: Synthetic oligonucleotide
guugccugacucuggguca

SEQ ID NO: 1717584 - RNA, 19 nt, Artificial Sequence
  Description of Artificial Sequence: Synthetic oligonucleotide
aggaguccuguagguauac

SEQ ID NO: 1717585 - RNA, 19 nt, Artificial Sequence
  Description of Artificial Sequence: Synthetic oligonucleotide
cuaccuacccauugcccuc

SEQ ID NO: 1717586 - RNA, 19 nt, Artificial Sequence
  Description of Artificial Sequence: Synthetic oligonucleotide
cucauucucuggagcuggg

SEQ ID NO: 1717587 - RNA, 19 nt, Artificial Sequence
  Description of Artificial Sequence: Synthetic oligonucleotide
cuguagguauaccucucuc

SEQ ID NO: 1717588 - RNA, 19 nt, Artificial Sequence
  Description of Artificial Sequence: Synthetic oligonucleotide
aggucuuuucugcugccaa

SEQ ID NO: 1717589 - RNA, 19 nt, Artificial Sequence
  Description of Artificial Sequence: Synthetic oligonucleotide
ggguauggagcuccugagg

SEQ ID NO: 1717590 - RNA, 19 nt, Artificial Sequence
  Description of Artificial Sequence: Synthetic oligonucleotide
aggccgacuuauaguaucg

SEQ ID NO: 1717591 - RNA, 19 nt, Artificial Sequence
  Description of Artificial Sequence: Synthetic oligonucleotide
uaccugcagggaaguauca

SEQ ID NO: 1717592 - RNA, 19 nt, Artificial Sequence
  Description of Artificial Sequence: Synthetic oligonucleotide
uagacaggugugguaguac

SEQ ID NO: 1717593 - RNA, 19 nt, Artificial Sequence
  Description of Artificial Sequence: Synthetic oligonucleotide
ggauaucggacagcgauac

SEQ ID NO: 1717594 - RNA, 19 nt, Artificial Sequence
  Description of Artificial Sequence: Synthetic oligonucleotide
acaacacgcccuuucucau

SEQ ID NO: 1717595 - RNA, 19 nt, Artificial Sequence
  Description of Artificial Sequence: Synthetic oligonucleotide
gcuuccaccagucuauuaa

SEQ ID NO: 1717596 - RNA, 19 nt, Artificial Sequence
  Description of Artificial Sequence: Synthetic oligonucleotide
cagcgaugagacuucauaa

SEQ ID NO: 1717597 - RNA, 19 nt, Artificial Sequence
  Description of Artificial Sequence: Synthetic oligonucleotide
caggauaucggacagcgau

SEQ ID NO: 1717598 - RNA, 19 nt, Artificial Sequence
  Description of Artificial Sequence: Synthetic oligonucleotide
gucuccuguagauagcacu

SEQ ID NO: 1717599 - RNA, 19 nt, Artificial Sequence
  Description of Artificial Sequence: Synthetic oligonucleotide
uguggggaucaggucguag

SEQ ID NO: 1717600 - RNA, 19 nt, Artificial Sequence
  Description of Artificial Sequence: Synthetic oligonucleotide
ucucuugaaaaugcucauu

SEQ ID NO: 1717601 - RNA, 19 nt, Artificial Sequence
  Description of Artificial Sequence: Synthetic oligonucleotide
accuaugauagaaaaucuu

SEQ ID NO: 1717602 - RNA, 19 nt, Artificial Sequence
  Description of Artificial Sequence: Synthetic oligonucleotide
uuccaggauuucaucugau

SEQ ID NO: 1717603 - RNA, 19 nt, Artificial Sequence
  Description of Artificial Sequence: Synthetic oligonucleotide
acgcccuuucucauccacc

SEQ ID NO: 1717604 - RNA, 19 nt, Artificial Sequence
  Description of Artificial Sequence: Synthetic oligonucleotide
agauagcacuugagaacac

SEQ ID NO: 1717605 - RNA, 19 nt, Artificial Sequence
  Description of Artificial Sequence: Synthetic oligonucleotide
gccuguggaucuuauuuug

SEQ ID NO: 1717606 - RNA, 19 nt, Artificial Sequence
  Description of Artificial Sequence: Synthetic oligonucleotide
gaauucuggcuuggggaac

SEQ ID NO: 1717607 - RNA, 19 nt, Artificial Sequence
  Description of Artificial Sequence: Synthetic oligonucleotide
agccacauagacaggugug

SEQ ID NO: 1717608 - RNA, 19 nt, Artificial Sequence
  Description of Artificial Sequence: Synthetic oligonucleotide
cugccugucccuccccacg

SEQ ID NO: 1717609 - RNA, 19 nt, Artificial Sequence
  Description of Artificial Sequence: Synthetic oligonucleotide
agcaaccgacuccauugca

SEQ ID NO: 1717610 - RNA, 19 nt, Artificial Sequence
  Description of Artificial Sequence: Synthetic oligonucleotide
cgaacaagcuggcauuugg

SEQ ID NO: 1717611 - RNA, 19 nt, Artificial Sequence
  Description of Artificial Sequence: Synthetic oligonucleotide
acggaccauagcaauguug

SEQ ID NO: 1717612 - RNA, 19 nt, Artificial Sequence
  Description of Artificial Sequence: Synthetic oligonucleotide
gcuguacaaagaugccuag

SEQ ID NO: 1717613 - RNA, 19 nt, Artificial Sequence
  Description of Artificial Sequence: Synthetic oligonucleotide
guauggagcuccugaggga

SEQ ID NO: 1717614 - RNA, 19 nt, Artificial Sequence
  Description of Artificial Sequence: Synthetic oligonucleotide
gaaaugcagacaaggggcu

SEQ ID NO: 1717615 - RNA, 19 nt, Artificial Sequence
  Description of Artificial Sequence: Synthetic oligonucleotide
aaaugcagacaaggggcuu

SEQ ID NO: 1717616 - RNA, 19 nt, Artificial Sequence
  Description of Artificial Sequence: Synthetic oligonucleotide
agagcuuuugucacagaua

SEQ ID NO: 1717617 - RNA, 19 nt, Artificial Sequence
  Description of Artificial Sequence: Synthetic oligonucleotide
auguccacaacacgcccuu

SEQ ID NO: 1717618 - RNA, 19 nt, Artificial Sequence
  Description of Artificial Sequence: Synthetic oligonucleotide
caccguuagucaccagggc

SEQ ID NO: 1717619 - RNA, 19 nt, Artificial Sequence
  Description of Artificial Sequence: Synthetic oligonucleotide
guuagucaccagggcaaag

SEQ ID NO: 1717620 - RNA, 19 nt, Artificial Sequence
  Description of Artificial Sequence: Synthetic oligonucleotide
guccacaacacgcccuuuc

SEQ ID NO: 1717621 - RNA, 19 nt, Artificial Sequence
  Description of Artificial Sequence: Synthetic oligonucleotide
cagcaucgaacaagcuggc

SEQ ID NO: 1717622 - RNA, 19 nt, Artificial Sequence
  Description of Artificial Sequence: Synthetic oligonucleotide
cugccaaauuaaucacauc

SEQ ID NO: 1717623 - RNA, 19 nt, Artificial Sequence
  Description of Artificial Sequence: Synthetic oligonucleotide
ggucguagcagcgaugaga

SEQ ID NO: 1717624 - RNA, 19 nt, Artificial Sequence
  Description of Artificial Sequence: Synthetic oligonucleotide
guaguacggaccauagcaa

SEQ ID NO: 1717625 - RNA, 19 nt, Artificial Sequence
  Description of Artificial Sequence: Synthetic oligonucleotide
gugagaccgguguuguaga

SEQ ID NO: 1717626 - RNA, 19 nt, Artificial Sequence
  Description of Artificial Sequence: Synthetic oligonucleotide
cuaucccacagaggggcag

SEQ ID NO: 1717627 - RNA, 19 nt, Artificial Sequence
  Description of Artificial Sequence: Synthetic oligonucleotide
augcccuugaccacgucgu

SEQ ID NO: 1717628 - RNA, 19 nt, Artificial Sequence
  Description of Artificial Sequence: Synthetic oligonucleotide
aaccaacuuggaacuugug

SEQ ID NO: 1717629 - RNA, 19 nt, Artificial Sequence
  Description of Artificial Sequence: Synthetic oligonucleotide
cggagucucuugaaaaugc

SEQ ID NO: 1717630 - RNA, 19 nt, Artificial Sequence
  Description of Artificial Sequence: Synthetic oligonucleotide
augagacuucauaaaggau

SEQ ID NO: 1717631 - RNA, 19 nt, Artificial Sequence
  Description of Artificial Sequence: Synthetic oligonucleotide
gguguuguagagcuuuugu

SEQ ID NO: 1717632 - RNA, 19 nt, Artificial Sequence
  Description of Artificial Sequence: Synthetic oligonucleotide
caggucguagcagcgauga

SEQ ID NO: 1717633 - RNA, 19 nt, Artificial Sequence
  Description of Artificial Sequence: Synthetic oligonucleotide
acagcgauacgaugcccuu

SEQ ID NO: 1717634 - RNA, 19 nt, Artificial Sequence
  Description of Artificial Sequence: Synthetic oligonucleotide
guagcagcgaugagacuuc

SEQ ID NO: 1717635 - RNA, 19 nt, Artificial Sequence
  Description of Artificial Sequence: Synthetic oligonucleotide
agaucugcaccaaggccga

SEQ ID NO: 1717636 - RNA, 19 nt, Artificial Sequence
  Description of Artificial Sequence: Synthetic oligonucleotide
gcagcgaugagacuucaua

SEQ ID NO: 1717637 - RNA, 19 nt, Artificial Sequence
  Description of Artificial Sequence: Synthetic oligonucleotide
cacaaaacucugcuucuua

SEQ ID NO: 1717638 - RNA, 19 nt, Artificial Sequence
  Description of Artificial Sequence: Synthetic oligonucleotide
ggugccaaucuguagcucu

SEQ ID NO: 1717639 - RNA, 19 nt, Artificial Sequence
  Description of Artificial Sequence: Synthetic oligonucleotide
cuccuguagauagcacuug

SEQ ID NO: 1717640 - RNA, 19 nt, Artificial Sequence
  Description of Artificial Sequence: Synthetic oligonucleotide
ggaccauagcaauguuggc

SEQ ID NO: 1717641 - RNA, 19 nt, Artificial Sequence
  Description of Artificial Sequence: Synthetic oligonucleotide
cacgcccuuucucauccac

SEQ ID NO: 1717642 - RNA, 19 nt, Artificial Sequence
  Description of Artificial Sequence: Synthetic oligonucleotide
gagacucggugcuguacaa

SEQ ID NO: 1717643 - RNA, 19 nt, Artificial Sequence
  Description of Artificial Sequence: Synthetic oligonucleotide
guacggaccauagcaaugu

SEQ ID NO: 1717644 - RNA, 19 nt, Artificial Sequence
  Description of Artificial Sequence: Synthetic oligonucleotide
gaacacccucaaaguagug

SEQ ID NO: 1717645 - RNA, 19 nt, Artificial Sequence
  Description of Artificial Sequence: Synthetic oligonucleotide
ggaugcgcuugugaguaag

SEQ ID NO: 1717646 - RNA, 19 nt, Artificial Sequence
  Description of Artificial Sequence: Synthetic oligonucleotide
aaggaguccuguagguaua

SEQ ID NO: 1717647 - RNA, 19 nt, Artificial Sequence
  Description of Artificial Sequence: Synthetic oligonucleotide
caggcagggcagagacucg

SEQ ID NO: 1717648 - RNA, 19 nt, Artificial Sequence
  Description of Artificial Sequence: Synthetic oligonucleotide
ugcccacaaaacucugcuu

SEQ ID NO: 1717649 - RNA, 19 nt, Artificial Sequence
  Description of Artificial Sequence: Synthetic oligonucleotide
cgauacgaugcccuugacc

SEQ ID NO: 1717650 - RNA, 19 nt, Artificial Sequence
  Description of Artificial Sequence: Synthetic oligonucleotide
cuugaccacgucguucuca

SEQ ID NO: 1717651 - RNA, 19 nt, Artificial Sequence
  Description of Artificial Sequence: Synthetic oligonucleotide
ggagcucucugaagcaacc

SEQ ID NO: 1717652 - RNA, 19 nt, Artificial Sequence
  Description of Artificial Sequence: Synthetic oligonucleotide
caagguguugccugacucu

SEQ ID NO: 1717653 - RNA, 19 nt, Artificial Sequence
  Description of Artificial Sequence: Synthetic oligonucleotide
uacggaccauagcaauguu

SEQ ID NO: 1717654 - RNA, 19 nt, Artificial Sequence
  Description of Artificial Sequence: Synthetic oligonucleotide
ccaaggccgacuuauagua

SEQ ID NO: 1717655 - RNA, 19 nt, Artificial Sequence
  Description of Artificial Sequence: Synthetic oligonucleotide
agguguugccugacucugg

SEQ ID NO: 1717656 - RNA, 19 nt, Artificial Sequence
  Description of Artificial Sequence: Synthetic oligonucleotide
aggucguagcagcgaugag

SEQ ID NO: 1717657 - RNA, 19 nt, Artificial Sequence
  Description of Artificial Sequence: Synthetic oligonucleotide
gaguaaggauguacaaggu

SEQ ID NO: 1717658 - RNA, 19 nt, Artificial Sequence
  Description of Artificial Sequence: Synthetic oligonucleotide
gcuaccuacccauugcccu

SEQ ID NO: 1717659 - RNA, 19 nt, Artificial Sequence
  Description of Artificial Sequence: Synthetic oligonucleotide
ucccuccucuaguuccaga

SEQ ID NO: 1717660 - RNA, 19 nt, Artificial Sequence
  Description of Artificial Sequence: Synthetic oligonucleotide
caaccaacuuggaacuugu

SEQ ID NO: 1717661 - RNA, 19 nt, Artificial Sequence
  Description of Artificial Sequence: Synthetic oligonucleotide
cuguacaaagaugccuaga

SEQ ID NO: 1717662 - RNA, 19 nt, Artificial Sequence
  Description of Artificial Sequence: Synthetic oligonucleotide
uggggaacucagugauaaa

SEQ ID NO: 1717663 - RNA, 19 nt, Artificial Sequence
  Description of Artificial Sequence: Synthetic oligonucleotide
cuuguggggaucaggucgu

SEQ ID NO: 1717664 - RNA, 19 nt, Artificial Sequence
  Description of Artificial Sequence: Synthetic oligonucleotide
caaugacuggaagccugug

SEQ ID NO: 1717665 - RNA, 19 nt, Artificial Sequence
  Description of Artificial Sequence: Synthetic oligonucleotide
cauuaaucuuggcuaccua

SEQ ID NO: 1717666 - RNA, 19 nt, Artificial Sequence
  Description of Artificial Sequence: Synthetic oligonucleotide
cucucugaagcaaccgacu

SEQ ID NO: 1717667 - RNA, 19 nt, Artificial Sequence
  Description of Artificial Sequence: Synthetic oligonucleotide
ucccuggcgcugccugucc

SEQ ID NO: 1717668 - RNA, 19 nt, Artificial Sequence
  Description of Artificial Sequence: Synthetic oligonucleotide
gcaucgaacaagcuggcau

SEQ ID NO: 1717669 - RNA, 19 nt, Artificial Sequence
  Description of Artificial Sequence: Synthetic oligonucleotide
agcaucgaacaagcuggca

SEQ ID NO: 1717670 - RNA, 19 nt, Artificial Sequence
  Description of Artificial Sequence: Synthetic oligonucleotide
uucccuccucuaguuccag

SEQ ID NO: 1717671 - RNA, 19 nt, Artificial Sequence
  Description of Artificial Sequence: Synthetic oligonucleotide
cccucaaaguagugagacc

SEQ ID NO: 1717672 - RNA, 19 nt, Artificial Sequence
  Description of Artificial Sequence: Synthetic oligonucleotide
gugcuguacaaagaugccu

SEQ ID NO: 1717673 - RNA, 19 nt, Artificial Sequence
  Description of Artificial Sequence: Synthetic oligonucleotide
caucgaacaagcuggcauu

SEQ ID NO: 1717674 - RNA, 19 nt, Artificial Sequence
  Description of Artificial Sequence: Synthetic oligonucleotide
uugccugacucugggucaa

SEQ ID NO: 1717675 - RNA, 19 nt, Artificial Sequence
  Description of Artificial Sequence: Synthetic oligonucleotide
aggauaucggacagcgaua

SEQ ID NO: 1717676 - RNA, 19 nt, Artificial Sequence
  Description of Artificial Sequence: Synthetic oligonucleotide
cauugcccuccuccacagc

SEQ ID NO: 1717677 - RNA, 19 nt, Artificial Sequence
  Description of Artificial Sequence: Synthetic oligonucleotide
ucguagcagcgaugagacu

SEQ ID NO: 1717678 - RNA, 19 nt, Artificial Sequence
  Description of Artificial Sequence: Synthetic oligonucleotide
cagagacuuagacaugaau

SEQ ID NO: 1717679 - RNA, 19 nt, Artificial Sequence
  Description of Artificial Sequence: Synthetic oligonucleotide
caccagacggugaaccucu

SEQ ID NO: 1717680 - RNA, 19 nt, Artificial Sequence
  Description of Artificial Sequence: Synthetic oligonucleotide
ggccgacuuauaguaucgg

SEQ ID NO: 1717681 - RNA, 19 nt, Artificial Sequence
  Description of Artificial Sequence: Synthetic oligonucleotide
guagugagaccgguguugu

SEQ ID NO: 1717682 - RNA, 19 nt, Artificial Sequence
  Description of Artificial Sequence: Synthetic oligonucleotide
ggcuaccuacccauugccc

SEQ ID NO: 1717683 - RNA, 19 nt, Artificial Sequence
  Description of Artificial Sequence: Synthetic oligonucleotide
guauaccucucuccaaguu

SEQ ID NO: 1717684 - RNA, 19 nt, Artificial Sequence
  Description of Artificial Sequence: Synthetic oligonucleotide
cagcgauacgaugcccuug

SEQ ID NO: 1717685 - RNA, 19 nt, Artificial Sequence
  Description of Artificial Sequence: Synthetic oligonucleotide
cuuccaccagucuauuaau

SEQ ID NO: 1717686 - RNA, 19 nt, Artificial Sequence
  Description of Artificial Sequence: Synthetic oligonucleotide
uagugagaccgguguugua

SEQ ID NO: 1717687 - RNA, 19 nt, Artificial Sequence
  Description of Artificial Sequence: Synthetic oligonucleotide
uggaagccuguggaucuua

SEQ ID NO: 1717688 - RNA, 19 nt, Artificial Sequence
  Description of Artificial Sequence: Synthetic oligonucleotide
acuaucccacagaggggca

SEQ ID NO: 1717689 - RNA, 19 nt, Artificial Sequence
  Description of Artificial Sequence: Synthetic oligonucleotide
gguauaccucucuccaagu

SEQ ID NO: 1717690 - RNA, 19 nt, Artificial Sequence
  Description of Artificial Sequence: Synthetic oligonucleotide
ccggagucucuugaaaaug

SEQ ID NO: 1717691 - RNA, 19 nt, Artificial Sequence
  Description of Artificial Sequence: Synthetic oligonucleotide
ggggcuuaaaggaguccug

SEQ ID NO: 1717692 - RNA, 19 nt, Artificial Sequence
  Description of Artificial Sequence: Synthetic oligonucleotide
cauagacaggugugguagu

SEQ ID NO: 1717693 - RNA, 19 nt, Artificial Sequence
  Description of Artificial Sequence: Synthetic oligonucleotide
ccguuagucaccagggcaa

SEQ ID NO: 1717694 - RNA, 19 nt, Artificial Sequence
  Description of Artificial Sequence: Synthetic oligonucleotide
ugcccuugaccacgucguu

SEQ ID NO: 1717695 - RNA, 19 nt, Artificial Sequence
  Description of Artificial Sequence: Synthetic oligonucleotide
agacagcaucgaacaagcu

SEQ ID NO: 1717696 - RNA, 19 nt, Artificial Sequence
  Description of Artificial Sequence: Synthetic oligonucleotide
gcugccaaauuaaucacau

SEQ ID NO: 1717697 - RNA, 19 nt, Artificial Sequence
  Description of Artificial Sequence: Synthetic oligonucleotide
gggagcucucugaagcaac

SEQ ID NO: 1717698 - RNA, 19 nt, Artificial Sequence
  Description of Artificial Sequence: Synthetic oligonucleotide
ugaccacgucguucucauc

SEQ ID NO: 1717699 - RNA, 19 nt, Artificial Sequence
  Description of Artificial Sequence: Synthetic oligonucleotide
gccuagagccacauagaca

SEQ ID NO: 1717700 - RNA, 19 nt, Artificial Sequence
  Description of Artificial Sequence: Synthetic oligonucleotide
cggacagcgauacgaugcc

SEQ ID NO: 1717701 - RNA, 19 nt, Artificial Sequence
  Description of Artificial Sequence: Synthetic oligonucleotide
ccgacuccauugcaaucgc

SEQ ID NO: 1717702 - RNA, 19 nt, Artificial Sequence
  Description of Artificial Sequence: Synthetic oligonucleotide
gggaaguaucaaacacaac

SEQ ID NO: 1717703 - RNA, 19 nt, Artificial Sequence
  Description of Artificial Sequence: Synthetic oligonucleotide
gccgacuuauaguaucggu

SEQ ID NO: 1717704 - RNA, 19 nt, Artificial Sequence
  Description of Artificial Sequence: Synthetic oligonucleotide
ucgguucuuccaggauuuc

SEQ ID NO: 1717705 - RNA, 19 nt, Artificial Sequence
  Description of Artificial Sequence: Synthetic oligonucleotide
agacuucauaaaggaugua

SEQ ID NO: 1717706 - RNA, 19 nt, Artificial Sequence
  Description of Artificial Sequence: Synthetic oligonucleotide
acacgcccuuucucaucca

SEQ ID NO: 1717707 - RNA, 19 nt, Artificial Sequence
  Description of Artificial Sequence: Synthetic oligonucleotide
ggacagcgauacgaugccc

SEQ ID NO: 1717708 - RNA, 19 nt, Artificial Sequence
  Description of Artificial Sequence: Synthetic oligonucleotide
ccacaacacgcccuuucuc

SEQ ID NO: 1717709 - RNA, 19 nt, Artificial Sequence
  Description of Artificial Sequence: Synthetic oligonucleotide
ugcagacaaggggcuuaaa

SEQ ID NO: 1717710 - RNA, 19 nt, Artificial Sequence
  Description of Artificial Sequence: Synthetic oligonucleotide
uguccacaacacgcccuuu

SEQ ID NO: 1717711 - RNA, 19 nt, Artificial Sequence
  Description of Artificial Sequence: Synthetic oligonucleotide
caaggccgacuuauaguau

SEQ ID NO: 1717712 - RNA, 19 nt, Artificial Sequence
  Description of Artificial Sequence: Synthetic oligonucleotide
gggcuuaaaggaguccugu

SEQ ID NO: 1717713 - RNA, 19 nt, Artificial Sequence
  Description of Artificial Sequence: Synthetic oligonucleotide
agcagcgaugagacuucau

SEQ ID NO: 1717714 - RNA, 19 nt, Artificial Sequence
  Description of Artificial Sequence: Synthetic oligonucleotide
cgacuccauugcaaucgcc

SEQ ID NO: 1717715 - RNA, 19 nt, Artificial Sequence
  Description of Artificial Sequence: Synthetic oligonucleotide
cuuuaccugcagggaagua

SEQ ID NO: 1717716 - RNA, 19 nt, Artificial Sequence
  Description of Artificial Sequence: Synthetic oligonucleotide
accagacggugaaccucug

SEQ ID NO: 1717717 - RNA, 19 nt, Artificial Sequence
  Description of Artificial Sequence: Synthetic oligonucleotide
ggucaaugacuggaagccu

SEQ ID NO: 1717718 - RNA, 19 nt, Artificial Sequence
  Description of Artificial Sequence: Synthetic oligonucleotide
ccacgcucagggcuucuuc

SEQ ID NO: 1717719 - RNA, 19 nt, Artificial Sequence
  Description of Artificial Sequence: Synthetic oligonucleotide
uuguggggaucaggucgua

SEQ ID NO: 1717720 - RNA, 19 nt, Artificial Sequence
  Description of Artificial Sequence: Synthetic oligonucleotide
gcccuugaccacgucguuc

SEQ ID NO: 1717721 - RNA, 19 nt, Artificial Sequence
  Description of Artificial Sequence: Synthetic oligonucleotide
gcgauacgaugcccuugac

SEQ ID NO: 1717722 - RNA, 19 nt, Artificial Sequence
  Description of Artificial Sequence: Synthetic oligonucleotide
ccuguagguauaccucucu

SEQ ID NO: 1717723 - RNA, 19 nt, Artificial Sequence
  Description of Artificial Sequence: Synthetic oligonucleotide
cacagaggggcagcccgaa

SEQ ID NO: 1717724 - RNA, 19 nt, Artificial Sequence
  Description of Artificial Sequence: Synthetic oligonucleotide
ugccugacucugggucaau

SEQ ID NO: 1717725 - RNA, 19 nt, Artificial Sequence
  Description of Artificial Sequence: Synthetic oligonucleotide
cgucguucucauccaccac

SEQ ID NO: 1717726 - RNA, 19 nt, Artificial Sequence
  Description of Artificial Sequence: Synthetic oligonucleotide
cacucgguucuuccaggau

SEQ ID NO: 1717727 - RNA, 19 nt, Artificial Sequence
  Description of Artificial Sequence: Synthetic oligonucleotide
gcaggauaucggacagcga

SEQ ID NO: 1717728 - RNA, 19 nt, Artificial Sequence
  Description of Artificial Sequence: Synthetic oligonucleotide
cgcuugugaguaaggaugu

SEQ ID NO: 1717729 - RNA, 19 nt, Artificial Sequence
  Description of Artificial Sequence: Synthetic oligonucleotide
gugccaaucuguagcucuu

SEQ ID NO: 1717730 - RNA, 19 nt, Artificial Sequence
  Description of Artificial Sequence: Synthetic oligonucleotide
ggcagcccgaacaccguua

SEQ ID NO: 1717731 - RNA, 19 nt, Artificial Sequence
  Description of Artificial Sequence: Synthetic oligonucleotide
ccacagaggggcagcccga

SEQ ID NO: 1717732 - RNA, 19 nt, Artificial Sequence
  Description of Artificial Sequence: Synthetic oligonucleotide
ccagagucuccuguagaua

SEQ ID NO: 1717733 - RNA, 19 nt, Artificial Sequence
  Description of Artificial Sequence: Synthetic oligonucleotide
ccuacccauugcccuccuc

SEQ ID NO: 1717734 - RNA, 19 nt, Artificial Sequence
  Description of Artificial Sequence: Synthetic oligonucleotide
gcuugugaguaaggaugua

SEQ ID NO: 1717735 - RNA, 19 nt, Artificial Sequence
  Description of Artificial Sequence: Synthetic oligonucleotide
cagauauauccagguuguu

SEQ ID NO: 1717736 - RNA, 19 nt, Artificial Sequence
  Description of Artificial Sequence: Synthetic oligonucleotide
cacaaccaacuuggaacuu

SEQ ID NO: 1717737 - RNA, 19 nt, Artificial Sequence
  Description of Artificial Sequence: Synthetic oligonucleotide
ccauugcaaucgcccgcca

SEQ ID NO: 1717738 - RNA, 19 nt, Artificial Sequence
  Description of Artificial Sequence: Synthetic oligonucleotide
gcaccaaggccgacuuaua

SEQ ID NO: 1717739 - RNA, 19 nt, Artificial Sequence
  Description of Artificial Sequence: Synthetic oligonucleotide
gugugguaguacggaccau

SEQ ID NO: 1717740 - RNA, 19 nt, Artificial Sequence
  Description of Artificial Sequence: Synthetic oligonucleotide
gaccgguguuguagagcuu

SEQ ID NO: 1717741 - RNA, 19 nt, Artificial Sequence
  Description of Artificial Sequence: Synthetic oligonucleotide
gggcagcccgaacaccguu

SEQ ID NO: 1717742 - RNA, 19 nt, Artificial Sequence
  Description of Artificial Sequence: Synthetic oligonucleotide
ggggcagcccgaacaccgu

SEQ ID NO: 1717743 - RNA, 19 nt, Artificial Sequence
  Description of Artificial Sequence: Synthetic oligonucleotide
cccacgcucagggcuucuu

SEQ ID NO: 1717744 - RNA, 19 nt, Artificial Sequence
  Description of Artificial Sequence: Synthetic oligonucleotide
uucuauaacaggucuaggg

SEQ ID NO: 1717745 - RNA, 19 nt, Artificial Sequence
  Description of Artificial Sequence: Synthetic oligonucleotide
ucuauaacaggucuagggc

SEQ ID NO: 1717746 - RNA, 19 nt, Artificial Sequence
  Description of Artificial Sequence: Synthetic oligonucleotide
acaacuagagcacugauga

SEQ ID NO: 1717747 - RNA, 19 nt, Artificial Sequence
  Description of Artificial Sequence: Synthetic oligonucleotide
agauauagggcuucucucc

SEQ ID NO: 1717748 - RNA, 19 nt, Artificial Sequence
  Description of Artificial Sequence: Synthetic oligonucleotide
agggcuuuaguucugcucc

SEQ ID NO: 1717749 - RNA, 19 nt, Artificial Sequence
  Description of Artificial Sequence: Synthetic oligonucleotide
ucucccauagucuuugucg

SEQ ID NO: 1717750 - RNA, 19 nt, Artificial Sequence
  Description of Artificial Sequence: Synthetic oligonucleotide
aacuagagcacugaugagg

SEQ ID NO: 1717751 - RNA, 19 nt, Artificial Sequence
  Description of Artificial Sequence: Synthetic oligonucleotide
aaacguaagggcauucacc

SEQ ID NO: 1717752 - RNA, 19 nt, Artificial Sequence
  Description of Artificial Sequence: Synthetic oligonucleotide
aaaagcgggcuucacagug

SEQ ID NO: 1717753 - RNA, 19 nt, Artificial Sequence
  Description of Artificial Sequence: Synthetic oligonucleotide
uuugucgugcuaaaggaca

SEQ ID NO: 1717754 - RNA, 19 nt, Artificial Sequence
  Description of Artificial Sequence: Synthetic oligonucleotide
cuuguggacagccagagac

SEQ ID NO: 1717755 - RNA, 19 nt, Artificial Sequence
  Description of Artificial Sequence: Synthetic oligonucleotide
auggauagcaagcagagau

SEQ ID NO: 1717756 - RNA, 19 nt, Artificial Sequence
  Description of Artificial Sequence: Synthetic oligonucleotide
ucuuugucgugcuaaagga

SEQ ID NO: 1717757 - RNA, 19 nt, Artificial Sequence
  Description of Artificial Sequence: Synthetic oligonucleotide
auagccaaggagccgcucc

SEQ ID NO: 1717758 - RNA, 19 nt, Artificial Sequence
  Description of Artificial Sequence: Synthetic oligonucleotide
aagcguuuggagcaaaggu

SEQ ID NO: 1717759 - RNA, 19 nt, Artificial Sequence
  Description of Artificial Sequence: Synthetic oligonucleotide
aaagcguuuggagcaaagg

SEQ ID NO: 1717760 - RNA, 19 nt, Artificial Sequence
  Description of Artificial Sequence: Synthetic oligonucleotide
uccguugauggauagcaag

SEQ ID NO: 1717761 - RNA, 19 nt, Artificial Sequence
  Description of Artificial Sequence: Synthetic oligonucleotide
ucgccuguaugcaagagcu

SEQ ID NO: 1717762 - RNA, 19 nt, Artificial Sequence
  Description of Artificial Sequence: Synthetic oligonucleotide
ggaaaagcgggcuucacag

SEQ ID NO: 1717763 - RNA, 19 nt, Artificial Sequence
  Description of Artificial Sequence: Synthetic oligonucleotide
cucguuucccuuuucgggg

SEQ ID NO: 1717764 - RNA, 19 nt, Artificial Sequence
  Description of Artificial Sequence: Synthetic oligonucleotide
uguccguugauggauagca

SEQ ID NO: 1717765 - RNA, 19 nt, Artificial Sequence
  Description of Artificial Sequence: Synthetic oligonucleotide
cauuuguggcucuccaugg

SEQ ID NO: 1717766 - RNA, 19 nt, Artificial Sequence
  Description of Artificial Sequence: Synthetic oligonucleotide
ugcugcgcugggaaaagcg

SEQ ID NO: 1717767 - RNA, 19 nt, Artificial Sequence
  Description of Artificial Sequence: Synthetic oligonucleotide
aucaaccgggguuugcugg

SEQ ID NO: 1717768 - RNA, 19 nt, Artificial Sequence
  Description of Artificial Sequence: Synthetic oligonucleotide
ugaaccccuccauaaagug

SEQ ID NO: 1717769 - RNA, 19 nt, Artificial Sequence
  Description of Artificial Sequence: Synthetic oligonucleotide
uguaugcaagagcuggugu

SEQ ID NO: 1717770 - RNA, 19 nt, Artificial Sequence
  Description of Artificial Sequence: Synthetic oligonucleotide
caaagcgucggccacaguc

SEQ ID NO: 1717771 - RNA, 19 nt, Artificial Sequence
  Description of Artificial Sequence: Synthetic oligonucleotide
agaaccgccgcucgcaguc

SEQ ID NO: 1717772 - RNA, 19 nt, Artificial Sequence
  Description of Artificial Sequence: Synthetic oligonucleotide
uaaaggacacugcuccucu

SEQ ID NO: 1717773 - RNA, 19 nt, Artificial Sequence
  Description of Artificial Sequence: Synthetic oligonucleotide
cuccauaaagugaucuccc

SEQ ID NO: 1717774 - RNA, 19 nt, Artificial Sequence
  Description of Artificial Sequence: Synthetic oligonucleotide
gauggguaggaaaagcgac

SEQ ID NO: 1717775 - RNA, 19 nt, Artificial Sequence
  Description of Artificial Sequence: Synthetic oligonucleotide
agauucugggcacauuugu

SEQ ID NO: 1717776 - RNA, 19 nt, Artificial Sequence
  Description of Artificial Sequence: Synthetic oligonucleotide
agcguuuggagcaaagguc

SEQ ID NO: 1717777 - RNA, 19 nt, Artificial Sequence
  Description of Artificial Sequence: Synthetic oligonucleotide
aaucaaccgggguuugcug

SEQ ID NO: 1717778 - RNA, 19 nt, Artificial Sequence
  Description of Artificial Sequence: Synthetic oligonucleotide
guggauugggccaaggacc

SEQ ID NO: 1717779 - RNA, 19 nt, Artificial Sequence
  Description of Artificial Sequence: Synthetic oligonucleotide
ugcuccgccgaaagcagcg

SEQ ID NO: 1717780 - RNA, 19 nt, Artificial Sequence
  Description of Artificial Sequence: Synthetic oligonucleotide
uccucccgaguucugaacc

SEQ ID NO: 1717781 - RNA, 19 nt, Artificial Sequence
  Description of Artificial Sequence: Synthetic oligonucleotide
aaggacacugcuccucuga

SEQ ID NO: 1717782 - RNA, 19 nt, Artificial Sequence
  Description of Artificial Sequence: Synthetic oligonucleotide
ggaagguacagccacaguc

SEQ ID NO: 1717783 - RNA, 19 nt, Artificial Sequence
  Description of Artificial Sequence: Synthetic oligonucleotide
gcaucggccacacucaagg

SEQ ID NO: 1717784 - RNA, 19 nt, Artificial Sequence
  Description of Artificial Sequence: Synthetic oligonucleotide
uaugcaagagcugguguug

SEQ ID NO: 1717785 - RNA, 19 nt, Artificial Sequence
  Description of Artificial Sequence: Synthetic oligonucleotide
ggauagcaagcagagaugg

SEQ ID NO: 1717786 - RNA, 19 nt, Artificial Sequence
  Description of Artificial Sequence: Synthetic oligonucleotide
gacugaccaacagggaugg

SEQ ID NO: 1717787 - RNA, 19 nt, Artificial Sequence
  Description of Artificial Sequence: Synthetic oligonucleotide
ggaagcaucggccacacuc

SEQ ID NO: 1717788 - RNA, 19 nt, Artificial Sequence
  Description of Artificial Sequence: Synthetic oligonucleotide
ucaaccgggguuugcuggg

SEQ ID NO: 1717789 - RNA, 19 nt, Artificial Sequence
  Description of Artificial Sequence: Synthetic oligonucleotide
cacaacuagagcacugaug

SEQ ID NO: 1717790 - RNA, 19 nt, Artificial Sequence
  Description of Artificial Sequence: Synthetic oligonucleotide
cuuugucgugcuaaaggac

SEQ ID NO: 1717791 - RNA, 19 nt, Artificial Sequence
  Description of Artificial Sequence: Synthetic oligonucleotide
agcuagguggcuccacugg

SEQ ID NO: 1717792 - RNA, 19 nt, Artificial Sequence
  Description of Artificial Sequence: Synthetic oligonucleotide
uggagcaaggugcugcgcu

SEQ ID NO: 1717793 - RNA, 19 nt, Artificial Sequence
  Description of Artificial Sequence: Synthetic oligonucleotide
ucugacugggcccuucuau

SEQ ID NO: 1717794 - RNA, 19 nt, Artificial Sequence
  Description of Artificial Sequence: Synthetic oligonucleotide
cugccugggaaucaaccgg

SEQ ID NO: 1717795 - RNA, 19 nt, Artificial Sequence
  Description of Artificial Sequence: Synthetic oligonucleotide
uccgugguuaagagcacgc

SEQ ID NO: 1717796 - RNA, 19 nt, Artificial Sequence
  Description of Artificial Sequence: Synthetic oligonucleotide
caaacguaagggcauucac

SEQ ID NO: 1717797 - RNA, 19 nt, Artificial Sequence
  Description of Artificial Sequence: Synthetic oligonucleotide
gguaggaaaagcgacgccc

SEQ ID NO: 1717798 - RNA, 19 nt, Artificial Sequence
  Description of Artificial Sequence: Synthetic oligonucleotide
cagauauagggcuucucuc

SEQ ID NO: 1717799 - RNA, 19 nt, Artificial Sequence
  Description of Artificial Sequence: Synthetic oligonucleotide
uaaccaggcgagaggagga

SEQ ID NO: 1717800 - RNA, 19 nt, Artificial Sequence
  Description of Artificial Sequence: Synthetic oligonucleotide
uggguaggaaaagcgacgc

SEQ ID NO: 1717801 - RNA, 19 nt, Artificial Sequence
  Description of Artificial Sequence: Synthetic oligonucleotide
gauugggccaaggaccugc

SEQ ID NO: 1717802 - RNA, 19 nt, Artificial Sequence
  Description of Artificial Sequence: Synthetic oligonucleotide
auucaccagagugugcccg

SEQ ID NO: 1717803 - RNA, 19 nt, Artificial Sequence
  Description of Artificial Sequence: Synthetic oligonucleotide
uguggacagccagagacca

SEQ ID NO: 1717804 - RNA, 19 nt, Artificial Sequence
  Description of Artificial Sequence: Synthetic oligonucleotide
uguaugacuuggugcugag

SEQ ID NO: 1717805 - RNA, 19 nt, Artificial Sequence
  Description of Artificial Sequence: Synthetic oligonucleotide
gauggguaggcgaagcgac

SEQ ID NO: 1717806 - RNA, 19 nt, Artificial Sequence
  Description of Artificial Sequence: Synthetic oligonucleotide
accucugucggaagcaucg

SEQ ID NO: 1717807 - RNA, 19 nt, Artificial Sequence
  Description of Artificial Sequence: Synthetic oligonucleotide
aaccccuccauaaagugau

SEQ ID NO: 1717808 - RNA, 19 nt, Artificial Sequence
  Description of Artificial Sequence: Synthetic oligonucleotide
gauucugggcacauuugug

SEQ ID NO: 1717809 - RNA, 19 nt, Artificial Sequence
  Description of Artificial Sequence: Synthetic oligonucleotide
uugucgugcuaaaggacac

SEQ ID NO: 1717810 - RNA, 19 nt, Artificial Sequence
  Description of Artificial Sequence: Synthetic oligonucleotide
cauaaagugaucucccaua

SEQ ID NO: 1717811 - RNA, 19 nt, Artificial Sequence
  Description of Artificial Sequence: Synthetic oligonucleotide
ugagcuagguggcuccacu

SEQ ID NO: 1717812 - RNA, 19 nt, Artificial Sequence
  Description of Artificial Sequence: Synthetic oligonucleotide
gacuggccagcagugaagg

SEQ ID NO: 1717813 - RNA, 19 nt, Artificial Sequence
  Description of Artificial Sequence: Synthetic oligonucleotide
ggugcugcgauggauagcc

SEQ ID NO: 1717814 - RNA, 19 nt, Artificial Sequence
  Description of Artificial Sequence: Synthetic oligonucleotide
acuagagcacugaugaggu

SEQ ID NO: 1717815 - RNA, 19 nt, Artificial Sequence
  Description of Artificial Sequence: Synthetic oligonucleotide
aagugaucucccauagucu

SEQ ID NO: 1717816 - RNA, 19 nt, Artificial Sequence
  Description of Artificial Sequence: Synthetic oligonucleotide
gacggcugcauucuaggca

SEQ ID NO: 1717817 - RNA, 19 nt, Artificial Sequence
  Description of Artificial Sequence: Synthetic oligonucleotide
ugcgcugggaaaagcgggc

SEQ ID NO: 1717818 - RNA, 19 nt, Artificial Sequence
  Description of Artificial Sequence: Synthetic oligonucleotide
cucgccugagugcacacgc

SEQ ID NO: 1717819 - RNA, 19 nt, Artificial Sequence
  Description of Artificial Sequence: Synthetic oligonucleotide
aaaggacacugcuccucug

SEQ ID NO: 1717820 - RNA, 19 nt, Artificial Sequence
  Description of Artificial Sequence: Synthetic oligonucleotide
gguggauugggccaaggac

SEQ ID NO: 1717821 - RNA, 19 nt, Artificial Sequence
  Description of Artificial Sequence: Synthetic oligonucleotide
auagucuuugucgugcuaa

SEQ ID NO: 1717822 - RNA, 19 nt, Artificial Sequence
  Description of Artificial Sequence: Synthetic oligonucleotide
cucgcaagcgugcagcuuc

SEQ ID NO: 1717823 - RNA, 19 nt, Artificial Sequence
  Description of Artificial Sequence: Synthetic oligonucleotide
ucgugcuaaaggacacugc

SEQ ID NO: 1717824 - RNA, 19 nt, Artificial Sequence
  Description of Artificial Sequence: Synthetic oligonucleotide
ugguccgguggauugggcc

SEQ ID NO: 1717825 - RNA, 19 nt, Artificial Sequence
  Description of Artificial Sequence: Synthetic oligonucleotide
guaagggcauucaccagag

SEQ ID NO: 1717826 - RNA, 19 nt, Artificial Sequence
  Description of Artificial Sequence: Synthetic oligonucleotide
ugcgugguccgguggauug

SEQ ID NO: 1717827 - RNA, 19 nt, Artificial Sequence
  Description of Artificial Sequence: Synthetic oligonucleotide
uccgccgaaagcagcgacc

SEQ ID NO: 1717828 - RNA, 19 nt, Artificial Sequence
  Description of Artificial Sequence: Synthetic oligonucleotide
ugcgauggauagccaagga

SEQ ID NO: 1717829 - RNA, 19 nt, Artificial Sequence
  Description of Artificial Sequence: Synthetic oligonucleotide
aacaggucuagggcuacca

SEQ ID NO: 1717830 - RNA, 19 nt, Artificial Sequence
  Description of Artificial Sequence: Synthetic oligonucleotide
cuauaacaggucuagggcu

SEQ ID NO: 1717831 - RNA, 19 nt, Artificial Sequence
  Description of Artificial Sequence: Synthetic oligonucleotide
gagggcuuuaguucugcuc

SEQ ID NO: 1717832 - RNA, 19 nt, Artificial Sequence
  Description of Artificial Sequence: Synthetic oligonucleotide
cuucuauaacaggucuagg

SEQ ID NO: 1717833 - RNA, 19 nt, Artificial Sequence
  Description of Artificial Sequence: Synthetic oligonucleotide
gaagcaucggccacacuca

SEQ ID NO: 1717834 - RNA, 19 nt, Artificial Sequence
  Description of Artificial Sequence: Synthetic oligonucleotide
ccucguuucccuuuucggg

SEQ ID NO: 1717835 - RNA, 19 nt, Artificial Sequence
  Description of Artificial Sequence: Synthetic oligonucleotide
caaggguagggcuucuuca

SEQ ID NO: 1717836 - RNA, 19 nt, Artificial Sequence
  Description of Artificial Sequence: Synthetic oligonucleotide
acaaacguaagggcauuca

SEQ ID NO: 1717837 - RNA, 19 nt, Artificial Sequence
  Description of Artificial Sequence: Synthetic oligonucleotide
augacuggccagcagugaa

SEQ ID NO: 1717838 - RNA, 19 nt, Artificial Sequence
  Description of Artificial Sequence: Synthetic oligonucleotide
auguugagcuagguggcuc

SEQ ID NO: 1717839 - RNA, 19 nt, Artificial Sequence
  Description of Artificial Sequence: Synthetic oligonucleotide
ugcugcgauggauagccaa

SEQ ID NO: 1717840 - RNA, 19 nt, Artificial Sequence
  Description of Artificial Sequence: Synthetic oligonucleotide
ugacugggcccuucuauaa

SEQ ID NO: 1717841 - RNA, 19 nt, Artificial Sequence
  Description of Artificial Sequence: Synthetic oligonucleotide
uaggaaaagcgacgcccac

SEQ ID NO: 1717842 - RNA, 19 nt, Artificial Sequence
  Description of Artificial Sequence: Synthetic oligonucleotide
cauggcggaguggucaggg

SEQ ID NO: 1717843 - RNA, 19 nt, Artificial Sequence
  Description of Artificial Sequence: Synthetic oligonucleotide
gcgauggauagccaaggag

SEQ ID NO: 1717844 - RNA, 19 nt, Artificial Sequence
  Description of Artificial Sequence: Synthetic oligonucleotide
acgccgaugacuggccagc

SEQ ID NO: 1717845 - RNA, 19 nt, Artificial Sequence
  Description of Artificial Sequence: Synthetic oligonucleotide
gucgugcuaaaggacacug

SEQ ID NO: 1717846 - RNA, 19 nt, Artificial Sequence
  Description of Artificial Sequence: Synthetic oligonucleotide
ugucggaagcaucggccac

SEQ ID NO: 1717847 - RNA, 19 nt, Artificial Sequence
  Description of Artificial Sequence: Synthetic oligonucleotide
agauggguaggcgaagcga

SEQ ID NO: 1717848 - RNA, 19 nt, Artificial Sequence
  Description of Artificial Sequence: Synthetic oligonucleotide
acgcacugcucuugcagag

SEQ ID NO: 1717849 - RNA, 19 nt, Artificial Sequence
  Description of Artificial Sequence: Synthetic oligonucleotide
cugcgauggauagccaagg

SEQ ID NO: 1717850 - RNA, 19 nt, Artificial Sequence
  Description of Artificial Sequence: Synthetic oligonucleotide
cauucaccagagugugccc

SEQ ID NO: 1717851 - RNA, 19 nt, Artificial Sequence
  Description of Artificial Sequence: Synthetic oligonucleotide
ccuccauaaagugaucucc

SEQ ID NO: 1717852 - RNA, 19 nt, Artificial Sequence
  Description of Artificial Sequence: Synthetic oligonucleotide
caacuagagcacugaugag

SEQ ID NO: 1717853 - RNA, 19 nt, Artificial Sequence
  Description of Artificial Sequence: Synthetic oligonucleotide
agucuuugucgugcuaaag

SEQ ID NO: 1717854 - RNA, 19 nt, Artificial Sequence
  Description of Artificial Sequence: Synthetic oligonucleotide
gagcuagguggcuccacug

SEQ ID NO: 1717855 - RNA, 19 nt, Artificial Sequence
  Description of Artificial Sequence: Synthetic oligonucleotide
agugcacacgccgaugacu

SEQ ID NO: 1717856 - RNA, 19 nt, Artificial Sequence
  Description of Artificial Sequence: Synthetic oligonucleotide
uagucuuugucgugcuaaa

SEQ ID NO: 1717857 - RNA, 19 nt, Artificial Sequence
  Description of Artificial Sequence: Synthetic oligonucleotide
ugggaaucaaccgggguuu

SEQ ID NO: 1717858 - RNA, 19 nt, Artificial Sequence
  Description of Artificial Sequence: Synthetic oligonucleotide
ccuguaugacuucuggcag

SEQ ID NO: 1717859 - RNA, 19 nt, Artificial Sequence
  Description of Artificial Sequence: Synthetic oligonucleotide
gcuagguggcuccacuggg

SEQ ID NO: 1717860 - RNA, 19 nt, Artificial Sequence
  Description of Artificial Sequence: Synthetic oligonucleotide
cacuggucacaaacguaag

SEQ ID NO: 1717861 - RNA, 19 nt, Artificial Sequence
  Description of Artificial Sequence: Synthetic oligonucleotide
cacaguccucgcaagcgug

SEQ ID NO: 1717862 - RNA, 19 nt, Artificial Sequence
  Description of Artificial Sequence: Synthetic oligonucleotide
acguaagggcauucaccag

SEQ ID NO: 1717863 - RNA, 19 nt, Artificial Sequence
  Description of Artificial Sequence: Synthetic oligonucleotide
gugcacacgccgaugacug

SEQ ID NO: 1717864 - RNA, 19 nt, Artificial Sequence
  Description of Artificial Sequence: Synthetic oligonucleotide
acgcccacaacuagagcac

SEQ ID NO: 1717865 - RNA, 19 nt, Artificial Sequence
  Description of Artificial Sequence: Synthetic oligonucleotide
agcaaggugcugcgcuggg

SEQ ID NO: 1717866 - RNA, 19 nt, Artificial Sequence
  Description of Artificial Sequence: Synthetic oligonucleotide
gagcaaggugcugcgcugg

SEQ ID NO: 1717867 - RNA, 19 nt, Artificial Sequence
  Description of Artificial Sequence: Synthetic oligonucleotide
cuucggaaggcacguccgc

SEQ ID NO: 1717868 - RNA, 19 nt, Artificial Sequence
  Description of Artificial Sequence: Synthetic oligonucleotide
aaccaggcgagaggaggag

SEQ ID NO: 1717869 - RNA, 19 nt, Artificial Sequence
  Description of Artificial Sequence: Synthetic oligonucleotide
gaaccccuccauaaaguga

SEQ ID NO: 1717870 - RNA, 19 nt, Artificial Sequence
  Description of Artificial Sequence: Synthetic oligonucleotide
aaggagccgcuccuucgga

SEQ ID NO: 1717871 - RNA, 19 nt, Artificial Sequence
  Description of Artificial Sequence: Synthetic oligonucleotide
guaggaaaagcgacgccca

SEQ ID NO: 1717872 - RNA, 19 nt, Artificial Sequence
  Description of Artificial Sequence: Synthetic oligonucleotide
uucggaaggcacguccgca

SEQ ID NO: 1717873 - RNA, 19 nt, Artificial Sequence
  Description of Artificial Sequence: Synthetic oligonucleotide
aaccgccgcucgcagucag

SEQ ID NO: 1717874 - RNA, 19 nt, Artificial Sequence
  Description of Artificial Sequence: Synthetic oligonucleotide
aguccgggcaaggguaggg

SEQ ID NO: 1717875 - RNA, 19 nt, Artificial Sequence
  Description of Artificial Sequence: Synthetic oligonucleotide
cacacgccgaugacuggcc

SEQ ID NO: 1717876 - RNA, 19 nt, Artificial Sequence
  Description of Artificial Sequence: Synthetic oligonucleotide
aaccgggguuugcugggcu

SEQ ID NO: 1717877 - RNA, 19 nt, Artificial Sequence
  Description of Artificial Sequence: Synthetic oligonucleotide
gagaccaccucugucggaa

SEQ ID NO: 1717878 - RNA, 19 nt, Artificial Sequence
  Description of Artificial Sequence: Synthetic oligonucleotide
caucggccacacucaaggc

SEQ ID NO: 1717879 - RNA, 19 nt, Artificial Sequence
  Description of Artificial Sequence: Synthetic oligonucleotide
gugacugaccaacagggau

SEQ ID NO: 1717880 - RNA, 19 nt, Artificial Sequence
  Description of Artificial Sequence: Synthetic oligonucleotide
guaugcgugguccggugga

SEQ ID NO: 1717881 - RNA, 19 nt, Artificial Sequence
  Description of Artificial Sequence: Synthetic oligonucleotide
aguccucgcaagcgugcag

SEQ ID NO: 1717882 - RNA, 19 nt, Artificial Sequence
  Description of Artificial Sequence: Synthetic oligonucleotide
gcgacggcugcauucuagg

SEQ ID NO: 1717883 - RNA, 19 nt, Artificial Sequence
  Description of Artificial Sequence: Synthetic oligonucleotide
ugucugccugggaaucaac

SEQ ID NO: 1717884 - RNA, 19 nt, Artificial Sequence
  Description of Artificial Sequence: Synthetic oligonucleotide
gaccgagggcuuuaguucu

SEQ ID NO: 1717885 - RNA, 19 nt, Artificial Sequence
  Description of Artificial Sequence: Synthetic oligonucleotide
gacgcccacaguccgggca

SEQ ID NO: 1717886 - RNA, 19 nt, Artificial Sequence
  Description of Artificial Sequence: Synthetic oligonucleotide
gaagcgacgcccacaacua

SEQ ID NO: 1717887 - RNA, 19 nt, Artificial Sequence
  Description of Artificial Sequence: Synthetic oligonucleotide
cacgccgaugacuggccag

SEQ ID NO: 1717888 - RNA, 19 nt, Artificial Sequence
  Description of Artificial Sequence: Synthetic oligonucleotide
cugucggaagcaucggcca

SEQ ID NO: 1717889 - RNA, 19 nt, Artificial Sequence
  Description of Artificial Sequence: Synthetic oligonucleotide
guccucgcaagcgugcagc

SEQ ID NO: 1717890 - RNA, 19 nt, Artificial Sequence
  Description of Artificial Sequence: Synthetic oligonucleotide
acuuguggacagccagaga

SEQ ID NO: 1717891 - RNA, 19 nt, Artificial Sequence
  Description of Artificial Sequence: Synthetic oligonucleotide
ugucgugcuaaaggacacu

SEQ ID NO: 1717892 - RNA, 19 nt, Artificial Sequence
  Description of Artificial Sequence: Synthetic oligonucleotide
agagcacgcacugcucuug

SEQ ID NO: 1717893 - RNA, 19 nt, Artificial Sequence
  Description of Artificial Sequence: Synthetic oligonucleotide
uaagggcauucaccagagu

SEQ ID NO: 1717894 - RNA, 19 nt, Artificial Sequence
  Description of Artificial Sequence: Synthetic oligonucleotide
cuggcggaagcgacggcug

SEQ ID NO: 1717895 - RNA, 19 nt, Artificial Sequence
  Description of Artificial Sequence: Synthetic oligonucleotide
gcaagcgugcagcuucucc

SEQ ID NO: 1717896 - RNA, 19 nt, Artificial Sequence
  Description of Artificial Sequence: Synthetic oligonucleotide
caagcgugcagcuucuccu

SEQ ID NO: 1717897 - RNA, 19 nt, Artificial Sequence
  Description of Artificial Sequence: Synthetic oligonucleotide
aggagaaccgccgcucgca

SEQ ID NO: 1717898 - RNA, 19 nt, Artificial Sequence
  Description of Artificial Sequence: Synthetic oligonucleotide
caaggugcugcgcugggaa

SEQ ID NO: 1717899 - RNA, 19 nt, Artificial Sequence
  Description of Artificial Sequence: Synthetic oligonucleotide
ccgaaagcagcgaccacag

SEQ ID NO: 1717900 - RNA, 19 nt, Artificial Sequence
  Description of Artificial Sequence: Synthetic oligonucleotide
gcguuuggagcaaagguca

SEQ ID NO: 1717901 - RNA, 19 nt, Artificial Sequence
  Description of Artificial Sequence: Synthetic oligonucleotide
guaugcaagagcugguguu

SEQ ID NO: 1717902 - RNA, 19 nt, Artificial Sequence
  Description of Artificial Sequence: Synthetic oligonucleotide
ccaaggagccgcuccuucg

SEQ ID NO: 1717903 - RNA, 19 nt, Artificial Sequence
  Description of Artificial Sequence: Synthetic oligonucleotide
uccucgcaagcgugcagcu

SEQ ID NO: 1717904 - RNA, 19 nt, Artificial Sequence
  Description of Artificial Sequence: Synthetic oligonucleotide
cccucguuucccuuuucgg

SEQ ID NO: 1717905 - RNA, 19 nt, Artificial Sequence
  Description of Artificial Sequence: Synthetic oligonucleotide
cacgcacugcucuugcaga

SEQ ID NO: 1717906 - RNA, 19 nt, Artificial Sequence
  Description of Artificial Sequence: Synthetic oligonucleotide
ggaccugcuccgccgaaag

SEQ ID NO: 1717907 - RNA, 19 nt, Artificial Sequence
  Description of Artificial Sequence: Synthetic oligonucleotide
cacaguccgggcaagggua

SEQ ID NO: 1717908 - RNA, 19 nt, Artificial Sequence
  Description of Artificial Sequence: Synthetic oligonucleotide
cucccgaguucugaacccc

SEQ ID NO: 1717909 - RNA, 19 nt, Artificial Sequence
  Description of Artificial Sequence: Synthetic oligonucleotide
ucgcaagcgugcagcuucu

SEQ ID NO: 1717910 - RNA, 19 nt, Artificial Sequence
  Description of Artificial Sequence: Synthetic oligonucleotide
gcugcgauggauagccaag

SEQ ID NO: 1717911 - RNA, 19 nt, Artificial Sequence
  Description of Artificial Sequence: Synthetic oligonucleotide
agcgacggcugcauucuag

SEQ ID NO: 1717912 - RNA, 19 nt, Artificial Sequence
  Description of Artificial Sequence: Synthetic oligonucleotide
ggagcaaggugcugcgcug

SEQ ID NO: 1717913 - RNA, 19 nt, Artificial Sequence
  Description of Artificial Sequence: Synthetic oligonucleotide
ucacaaacguaagggcauu

SEQ ID NO: 1717914 - RNA, 19 nt, Artificial Sequence
  Description of Artificial Sequence: Synthetic oligonucleotide
ggcacguccgcaguccggg

SEQ ID NO: 1717915 - RNA, 19 nt, Artificial Sequence
  Description of Artificial Sequence: Synthetic oligonucleotide
gugcuaaaggacacugcuc

SEQ ID NO: 1717916 - RNA, 19 nt, Artificial Sequence
  Description of Artificial Sequence: Synthetic oligonucleotide
gaagcgacggcugcauucu

SEQ ID NO: 1717917 - RNA, 19 nt, Artificial Sequence
  Description of Artificial Sequence: Synthetic oligonucleotide
ucaccagagugugcccgcc

SEQ ID NO: 1717918 - RNA, 19 nt, Artificial Sequence
  Description of Artificial Sequence: Synthetic oligonucleotide
cugcuccgccgaaagcagc

SEQ ID NO: 1717919 - RNA, 19 nt, Artificial Sequence
  Description of Artificial Sequence: Synthetic oligonucleotide
caccagagugugcccgccg

SEQ ID NO: 1717920 - RNA, 19 nt, Artificial Sequence
  Description of Artificial Sequence: Synthetic oligonucleotide
gguaggcgaagcgacgccc

SEQ ID NO: 1717921 - RNA, 19 nt, Artificial Sequence
  Description of Artificial Sequence: Synthetic oligonucleotide
agagaccaccucugucgga

SEQ ID NO: 1717922 - RNA, 19 nt, Artificial Sequence
  Description of Artificial Sequence: Synthetic oligonucleotide
agugcgcuggcggaagcga

SEQ ID NO: 1717923 - RNA, 19 nt, Artificial Sequence
  Description of Artificial Sequence: Synthetic oligonucleotide
agcgacgcccacaacuaga

SEQ ID NO: 1717924 - RNA, 19 nt, Artificial Sequence
  Description of Artificial Sequence: Synthetic oligonucleotide
ggcuaaccaggcgagagga

SEQ ID NO: 1717925 - RNA, 19 nt, Artificial Sequence
  Description of Artificial Sequence: Synthetic oligonucleotide
gguccgguggauugggcca

SEQ ID NO: 1717926 - RNA, 19 nt, Artificial Sequence
  Description of Artificial Sequence: Synthetic oligonucleotide
agcagcgaccacagucagg

SEQ ID NO: 1717927 - RNA, 19 nt, Artificial Sequence
  Description of Artificial Sequence: Synthetic oligonucleotide
gcaaggguagggcuucuuc

SEQ ID NO: 1717928 - RNA, 19 nt, Artificial Sequence
  Description of Artificial Sequence: Synthetic oligonucleotide
gcgucggccacaguccucg

SEQ ID NO: 1717929 - RNA, 19 nt, Artificial Sequence
  Description of Artificial Sequence: Synthetic oligonucleotide
cuccgccgaaagcagcgac

SEQ ID NO: 1717930 - RNA, 19 nt, Artificial Sequence
  Description of Artificial Sequence: Synthetic oligonucleotide
gccgcucgcagucaggaca

SEQ ID NO: 1717931 - RNA, 19 nt, Artificial Sequence
  Description of Artificial Sequence: Synthetic oligonucleotide
ggagaaccgccgcucgcag

SEQ ID NO: 1717932 - RNA, 19 nt, Artificial Sequence
  Description of Artificial Sequence: Synthetic oligonucleotide
cugagugcacacgccgaug

SEQ ID NO: 1717933 - RNA, 19 nt, Artificial Sequence
  Description of Artificial Sequence: Synthetic oligonucleotide
cugggaaucaaccgggguu

SEQ ID NO: 1717934 - RNA, 19 nt, Artificial Sequence
  Description of Artificial Sequence: Synthetic oligonucleotide
ugggaaaagcgggcuucac

SEQ ID NO: 1717935 - RNA, 19 nt, Artificial Sequence
  Description of Artificial Sequence: Synthetic oligonucleotide
ugggcacauuuguggcucu

SEQ ID NO: 1717936 - RNA, 19 nt, Artificial Sequence
  Description of Artificial Sequence: Synthetic oligonucleotide
gccgaaagcagcgaccaca

SEQ ID NO: 1717937 - RNA, 19 nt, Artificial Sequence
  Description of Artificial Sequence: Synthetic oligonucleotide
acacgccgaugacuggcca

SEQ ID NO: 1717938 - RNA, 19 nt, Artificial Sequence
  Description of Artificial Sequence: Synthetic oligonucleotide
gcucgcagucaggacaggg

SEQ ID NO: 1717939 - RNA, 19 nt, Artificial Sequence
  Description of Artificial Sequence: Synthetic oligonucleotide
uaugcgugguccgguggau

SEQ ID NO: 1717940 - RNA, 19 nt, Artificial Sequence
  Description of Artificial Sequence: Synthetic oligonucleotide
aggagccgcuccuucggaa

SEQ ID NO: 1717941 - RNA, 19 nt, Artificial Sequence
  Description of Artificial Sequence: Synthetic oligonucleotide
aggugcugcgcugggaaaa

SEQ ID NO: 1717942 - RNA, 19 nt, Artificial Sequence
  Description of Artificial Sequence: Synthetic oligonucleotide
auggcggaguggucaggga

SEQ ID NO: 1717943 - RNA, 19 nt, Artificial Sequence
  Description of Artificial Sequence: Synthetic oligonucleotide
gauguugagcuagguggcu

SEQ ID NO: 1717944 - RNA, 19 nt, Artificial Sequence
  Description of Artificial Sequence: Synthetic oligonucleotide
guguccguugauggauagc

SEQ ID NO: 1717945 - RNA, 19 nt, Artificial Sequence
  Description of Artificial Sequence: Synthetic oligonucleotide
gcgacgcccacaacuagag

SEQ ID NO: 1717946 - RNA, 19 nt, Artificial Sequence
  Description of Artificial Sequence: Synthetic oligonucleotide
ccccuguaugacuucuggc

SEQ ID NO: 1717947 - RNA, 19 nt, Artificial Sequence
  Description of Artificial Sequence: Synthetic oligonucleotide
uccgcccucguuucccuuu

SEQ ID NO: 1717948 - RNA, 19 nt, Artificial Sequence
  Description of Artificial Sequence: Synthetic oligonucleotide
gucggaagcaucggccaca

SEQ ID NO: 1717949 - RNA, 19 nt, Artificial Sequence
  Description of Artificial Sequence: Synthetic oligonucleotide
ccugcuccgccgaaagcag

SEQ ID NO: 1717950 - RNA, 19 nt, Artificial Sequence
  Description of Artificial Sequence: Synthetic oligonucleotide
ggaaucaaccgggguuugc

SEQ ID NO: 1717951 - RNA, 19 nt, Artificial Sequence
  Description of Artificial Sequence: Synthetic oligonucleotide
cacacgccgguggcuaacc

SEQ ID NO: 1717952 - RNA, 19 nt, Artificial Sequence
  Description of Artificial Sequence: Synthetic oligonucleotide
ggugcugcgcugggaaaag

SEQ ID NO: 1717953 - RNA, 19 nt, Artificial Sequence
  Description of Artificial Sequence: Synthetic oligonucleotide
gcacacgccgaugacuggc

SEQ ID NO: 1717954 - RNA, 19 nt, Artificial Sequence
  Description of Artificial Sequence: Synthetic oligonucleotide
guaggcgaagcgacgccca

SEQ ID NO: 1717955 - RNA, 19 nt, Artificial Sequence
  Description of Artificial Sequence: Synthetic oligonucleotide
ggcgaagcgacgcccacaa

SEQ ID NO: 1717956 - RNA, 19 nt, Artificial Sequence
  Description of Artificial Sequence: Synthetic oligonucleotide
ggaaggcacguccgcaguc

SEQ ID NO: 1717957 - RNA, 19 nt, Artificial Sequence
  Description of Artificial Sequence: Synthetic oligonucleotide
acacgccgguggcuaacca

SEQ ID NO: 1717958 - RNA, 19 nt, Artificial Sequence
  Description of Artificial Sequence: Synthetic oligonucleotide
ugcacacgccgguggcuaa

SEQ ID NO: 1717959 - RNA, 19 nt, Artificial Sequence
  Description of Artificial Sequence: Synthetic oligonucleotide
gccgguggcuaaccaggcg

SEQ ID NO: 1717960 - RNA, 19 nt, Artificial Sequence
  Description of Artificial Sequence: Synthetic oligonucleotide
cgcuccuucggaaggcacg

SEQ ID NO: 1717961 - RNA, 19 nt, Artificial Sequence
  Description of Artificial Sequence: Synthetic oligonucleotide
aggcagauauagggcuucu

SEQ ID NO: 1717962 - RNA, 19 nt, Artificial Sequence
  Description of Artificial Sequence: Synthetic oligonucleotide
aagcgacggcugcauucua

SEQ ID NO: 1717963 - RNA, 19 nt, Artificial Sequence
  Description of Artificial Sequence: Synthetic oligonucleotide
auugggccaaggaccugcu

SEQ ID NO: 1717964 - RNA, 19 nt, Artificial Sequence
  Description of Artificial Sequence: Synthetic oligonucleotide
caaccgggguuugcugggc

SEQ ID NO: 1717965 - RNA, 19 nt, Artificial Sequence
  Description of Artificial Sequence: Synthetic oligonucleotide
ccgcucgcagucaggacag

SEQ ID NO: 1717966 - RNA, 19 nt, Artificial Sequence
  Description of Artificial Sequence: Synthetic oligonucleotide
cauagucuuugucgugcua

SEQ ID NO: 1717967 - RNA, 19 nt, Artificial Sequence
  Description of Artificial Sequence: Synthetic oligonucleotide
gugggugcugcgauggaua

SEQ ID NO: 1717968 - RNA, 19 nt, Artificial Sequence
  Description of Artificial Sequence: Synthetic oligonucleotide
cacguccgcaguccgggca

SEQ ID NO: 1717969 - RNA, 19 nt, Artificial Sequence
  Description of Artificial Sequence: Synthetic oligonucleotide
cugggaaaagcgggcuuca

SEQ ID NO: 1717970 - RNA, 19 nt, Artificial Sequence
  Description of Artificial Sequence: Synthetic oligonucleotide
aggcacguccgcaguccgg

SEQ ID NO: 1717971 - RNA, 19 nt, Artificial Sequence
  Description of Artificial Sequence: Synthetic oligonucleotide
caguccgggcaaggguagg

SEQ ID NO: 1717972 - RNA, 19 nt, Artificial Sequence
  Description of Artificial Sequence: Synthetic oligonucleotide
aggggaccgagggcuuuag

SEQ ID NO: 1717973 - RNA, 19 nt, Artificial Sequence
  Description of Artificial Sequence: Synthetic oligonucleotide
uccgguggauugggccaag

SEQ ID NO: 1717974 - RNA, 19 nt, Artificial Sequence
  Description of Artificial Sequence: Synthetic oligonucleotide
cguaugcgugguccggugg

SEQ ID NO: 1717975 - RNA, 19 nt, Artificial Sequence
  Description of Artificial Sequence: Synthetic oligonucleotide
gaaaagcgacgcccacagu

SEQ ID NO: 1717976 - RNA, 19 nt, Artificial Sequence
  Description of Artificial Sequence: Synthetic oligonucleotide
gugcccgccggugacugac

SEQ ID NO: 1717977 - RNA, 19 nt, Artificial Sequence
  Description of Artificial Sequence: Synthetic oligonucleotide
cgccugagugcacacgccg

SEQ ID NO: 1717978 - RNA, 19 nt, Artificial Sequence
  Description of Artificial Sequence: Synthetic oligonucleotide
ccgguggcuaaccaggcga

SEQ ID NO: 1717979 - RNA, 19 nt, Artificial Sequence
  Description of Artificial Sequence: Synthetic oligonucleotide
gcuuccgcccucguuuccc

SEQ ID NO: 1717980 - RNA, 19 nt, Artificial Sequence
  Description of Artificial Sequence: Synthetic oligonucleotide
ggugacugaccaacaggga

SEQ ID NO: 1717981 - RNA, 19 nt, Artificial Sequence
  Description of Artificial Sequence: Synthetic oligonucleotide
uccucugacugggcccuuc

SEQ ID NO: 1717982 - RNA, 19 nt, Artificial Sequence
  Description of Artificial Sequence: Synthetic oligonucleotide
gcuaaccaggcgagaggag

SEQ ID NO: 1717983 - RNA, 19 nt, Artificial Sequence
  Description of Artificial Sequence: Synthetic oligonucleotide
cgugcuaaaggacacugcu

SEQ ID NO: 1717984 - RNA, 19 nt, Artificial Sequence
  Description of Artificial Sequence: Synthetic oligonucleotide
agcgucggccacaguccuc

SEQ ID NO: 1717985 - RNA, 19 nt, Artificial Sequence
  Description of Artificial Sequence: Synthetic oligonucleotide
cguuuggagcaaaggucac

SEQ ID NO: 1717986 - RNA, 19 nt, Artificial Sequence
  Description of Artificial Sequence: Synthetic oligonucleotide
cgaagcgacgcccacaacu

SEQ ID NO: 1717987 - RNA, 19 nt, Artificial Sequence
  Description of Artificial Sequence: Synthetic oligonucleotide
guccguugauggauagcaa

SEQ ID NO: 1717988 - RNA, 19 nt, Artificial Sequence
  Description of Artificial Sequence: Synthetic oligonucleotide
gggaaucaaccgggguuug

SEQ ID NO: 1717989 - RNA, 19 nt, Artificial Sequence
  Description of Artificial Sequence: Synthetic oligonucleotide
gugguccgguggauugggc

SEQ ID NO: 1717990 - RNA, 19 nt, Artificial Sequence
  Description of Artificial Sequence: Synthetic oligonucleotide
ccgccggugacugaccaac

SEQ ID NO: 1717991 - RNA, 19 nt, Artificial Sequence
  Description of Artificial Sequence: Synthetic oligonucleotide
ccucugucggaagcaucgg

SEQ ID NO: 1717992 - RNA, 19 nt, Artificial Sequence
  Description of Artificial Sequence: Synthetic oligonucleotide
ccacugggcaaagcguuug

SEQ ID NO: 1717993 - RNA, 19 nt, Artificial Sequence
  Description of Artificial Sequence: Synthetic oligonucleotide
gcgugguccgguggauugg

SEQ ID NO: 1717994 - RNA, 19 nt, Artificial Sequence
  Description of Artificial Sequence: Synthetic oligonucleotide
gcccguaugcgugguccgg

SEQ ID NO: 1717995 - RNA, 19 nt, Artificial Sequence
  Description of Artificial Sequence: Synthetic oligonucleotide
ggacacugcuccucugacu

SEQ ID NO: 1717996 - RNA, 19 nt, Artificial Sequence
  Description of Artificial Sequence: Synthetic oligonucleotide
gaaccgccgcucgcaguca

SEQ ID NO: 1717997 - RNA, 19 nt, Artificial Sequence
  Description of Artificial Sequence: Synthetic oligonucleotide
cccacaacuagagcacuga

SEQ ID NO: 1717998 - RNA, 19 nt, Artificial Sequence
  Description of Artificial Sequence: Synthetic oligonucleotide
ccauaaagugaucucccau

SEQ ID NO: 1717999 - RNA, 19 nt, Artificial Sequence
  Description of Artificial Sequence: Synthetic oligonucleotide
cgguggcuaaccaggcgag

SEQ ID NO: 1718000 - RNA, 19 nt, Artificial Sequence
  Description of Artificial Sequence: Synthetic oligonucleotide
ccguaugcgugguccggug

SEQ ID NO: 1718001 - RNA, 19 nt, Artificial Sequence
  Description of Artificial Sequence: Synthetic oligonucleotide
cccgaguucugaaccccuc

SEQ ID NO: 1718002 - RNA, 19 nt, Artificial Sequence
  Description of Artificial Sequence: Synthetic oligonucleotide
cgugguccgguggauuggg

SEQ ID NO: 1718003 - RNA, 19 nt, Artificial Sequence
  Description of Artificial Sequence: Synthetic oligonucleotide
ccgagggcuuuaguucugc

SEQ ID NO: 1718004 - RNA, 19 nt, Artificial Sequence
  Description of Artificial Sequence: Synthetic oligonucleotide
augcgugguccgguggauu

SEQ ID NO: 1718005 - RNA, 19 nt, Artificial Sequence
  Description of Artificial Sequence: Synthetic oligonucleotide
gggcgaggggaccgagggc

SEQ ID NO: 1718006 - RNA, 19 nt, Artificial Sequence
  Description of Artificial Sequence: Synthetic oligonucleotide
gggugcugcgauggauagc

SEQ ID NO: 1718007 - RNA, 19 nt, Artificial Sequence
  Description of Artificial Sequence: Synthetic oligonucleotide
gguggcuaaccaggcgaga

SEQ ID NO: 1718008 - RNA, 19 nt, Artificial Sequence
  Description of Artificial Sequence: Synthetic oligonucleotide
guccgguggauugggccaa

SEQ ID NO: 1718009 - RNA, 19 nt, Artificial Sequence
  Description of Artificial Sequence: Synthetic oligonucleotide
gcuggcggaagcgacggcu

SEQ ID NO: 1718010 - RNA, 19 nt, Artificial Sequence
  Description of Artificial Sequence: Synthetic oligonucleotide
cuuccgcccucguuucccu

SEQ ID NO: 1718011 - RNA, 19 nt, Artificial Sequence
  Description of Artificial Sequence: Synthetic oligonucleotide
gccugagugcacacgccga

SEQ ID NO: 1718012 - RNA, 19 nt, Artificial Sequence
  Description of Artificial Sequence: Synthetic oligonucleotide
gcacguccgcaguccgggc

SEQ ID NO: 1718013 - RNA, 19 nt, Artificial Sequence
  Description of Artificial Sequence: Synthetic oligonucleotide
cgcccguaugcgugguccg

SEQ ID NO: 1718014 - RNA, 19 nt, Artificial Sequence
  Description of Artificial Sequence: Synthetic oligonucleotide
ccgccgaaagcagcgacca

SEQ ID NO: 1718015 - RNA, 19 nt, Artificial Sequence
  Description of Artificial Sequence: Synthetic oligonucleotide
ggccaaggaccugcuccgc

SEQ ID NO: 1718016 - RNA, 19 nt, Artificial Sequence
  Description of Artificial Sequence: Synthetic oligonucleotide
ccauggcggaguggucagg

SEQ ID NO: 1718017 - RNA, 19 nt, Artificial Sequence
  Description of Artificial Sequence: Synthetic oligonucleotide
gcaaagcguuuggagcaaa

SEQ ID NO: 1718018 - RNA, 19 nt, Artificial Sequence
  Description of Artificial Sequence: Synthetic oligonucleotide
ccgguggauugggccaagg

SEQ ID NO: 1718019 - RNA, 19 nt, Artificial Sequence
  Description of Artificial Sequence: Synthetic oligonucleotide
cgacgcccacaacuagagc

SEQ ID NO: 1718020 - RNA, 19 nt, Artificial Sequence
  Description of Artificial Sequence: Synthetic oligonucleotide
gugcugcgauggauagcca

SEQ ID NO: 1718021 - RNA, 19 nt, Artificial Sequence
  Description of Artificial Sequence: Synthetic oligonucleotide
ccgugguuaagagcacgca

SEQ ID NO: 1718022 - RNA, 19 nt, Artificial Sequence
  Description of Artificial Sequence: Synthetic oligonucleotide
gggcacauuuguggcucuc

SEQ ID NO: 1718023 - RNA, 19 nt, Artificial Sequence
  Description of Artificial Sequence: Synthetic oligonucleotide
gcacacgccgguggcuaac

SEQ ID NO: 1718024 - RNA, 19 nt, Artificial Sequence
  Description of Artificial Sequence: Synthetic oligonucleotide
cgguggauugggccaagga

SEQ ID NO: 1718025 - RNA, 19 nt, Artificial Sequence
  Description of Artificial Sequence: Synthetic oligonucleotide
ccacaguccgggcaagggu

SEQ ID NO: 1718026 - RNA, 19 nt, Artificial Sequence
  Description of Artificial Sequence: Synthetic oligonucleotide
gcgaagcgacgcccacaac

SEQ ID NO: 1718027 - RNA, 19 nt, Artificial Sequence
  Description of Artificial Sequence: Synthetic oligonucleotide
ccccuccauaaagugaucu

SEQ ID NO: 1718028 - RNA, 19 nt, Artificial Sequence
  Description of Artificial Sequence: Synthetic oligonucleotide
gcuccgccgaaagcagcga

SEQ ID NO: 1718029 - RNA, 19 nt, Artificial Sequence
  Description of Artificial Sequence: Synthetic oligonucleotide
ccugagugcacacgccgau

SEQ ID NO: 1718030 - RNA, 19 nt, Artificial Sequence
  Description of Artificial Sequence: Synthetic oligonucleotide
ggauagccaaggagccgcu

SEQ ID NO: 1718031 - RNA, 19 nt, Artificial Sequence
  Description of Artificial Sequence: Synthetic oligonucleotide
cugggcuuccgcccucguu

SEQ ID NO: 1718032 - RNA, 19 nt, Artificial Sequence
  Description of Artificial Sequence: Synthetic oligonucleotide
ccgccgcucgcagucagga

SEQ ID NO: 1718033 - RNA, 19 nt, Artificial Sequence
  Description of Artificial Sequence: Synthetic oligonucleotide
gggcagugcgcuggcggaa

SEQ ID NO: 1718034 - RNA, 19 nt, Artificial Sequence
  Description of Artificial Sequence: Synthetic oligonucleotide
gcgcugggaaaagcgggcu

SEQ ID NO: 1718035 - RNA, 19 nt, Artificial Sequence
  Description of Artificial Sequence: Synthetic oligonucleotide
cgccgaaagcagcgaccac

SEQ ID NO: 1718036 - RNA, 19 nt, Artificial Sequence
  Description of Artificial Sequence: Synthetic oligonucleotide
cgucggccacaguccucgc

SEQ ID NO: 1718037 - RNA, 19 nt, Artificial Sequence
  Description of Artificial Sequence: Synthetic oligonucleotide
ccagagugugcccgccggu

SEQ ID NO: 1718038 - RNA, 19 nt, Artificial Sequence
  Description of Artificial Sequence: Synthetic oligonucleotide
cccgccggugacugaccaa

SEQ ID NO: 1718039 - RNA, 19 nt, Artificial Sequence
  Description of Artificial Sequence: Synthetic oligonucleotide
cgcucgcagucaggacagg

SEQ ID NO: 1718040 - RNA, 19 nt, Artificial Sequence
  Description of Artificial Sequence: Synthetic oligonucleotide
cccguaugcgugguccggu

SEQ ID NO: 1718041 - RNA, 19 nt, Artificial Sequence
  Description of Artificial Sequence: Synthetic oligonucleotide
cggaaggcacguccgcagu

SEQ ID NO: 1718042 - RNA, 19 nt, Artificial Sequence
  Description of Artificial Sequence: Synthetic oligonucleotide
gcugggcuuccgcccucgu

SEQ ID NO: 1718043 - RNA, 19 nt, Artificial Sequence
  Description of Artificial Sequence: Synthetic oligonucleotide
cgcccucguuucccuuuuc

SEQ ID NO: 1718044 - RNA, 19 nt, Artificial Sequence
  Description of Artificial Sequence: Synthetic oligonucleotide
cgcaagcgugcagcuucuc

SEQ ID NO: 1718045 - RNA, 19 nt, Artificial Sequence
  Description of Artificial Sequence: Synthetic oligonucleotide
ccucgcaagcgugcagcuu

SEQ ID NO: 1718046 - RNA, 19 nt, Artificial Sequence
  Description of Artificial Sequence: Synthetic oligonucleotide
ccgcccucguuucccuuuu

SEQ ID NO: 1718047 - RNA, 19 nt, Artificial Sequence
  Description of Artificial Sequence: Synthetic oligonucleotide
uuaugaaacaaucauaagg

SEQ ID NO: 1718048 - RNA, 19 nt, Artificial Sequence
  Description of Artificial Sequence: Synthetic oligonucleotide
aacacaauaaguaauucgc

SEQ ID NO: 1718049 - RNA, 19 nt, Artificial Sequence
  Description of Artificial Sequence: Synthetic oligonucleotide
uaaacuguuacucaacccc

SEQ ID NO: 1718050 - RNA, 19 nt, Artificial Sequence
  Description of Artificial Sequence: Synthetic oligonucleotide
auacuuauaguuaugaaac

SEQ ID NO: 1718051 - RNA, 19 nt, Artificial Sequence
  Description of Artificial Sequence: Synthetic oligonucleotide
acaauaaguaauucgcagc

SEQ ID NO: 1718052 - RNA, 19 nt, Artificial Sequence
  Description of Artificial Sequence: Synthetic oligonucleotide
uugucugggauauaaaacg

SEQ ID NO: 1718053 - RNA, 19 nt, Artificial Sequence
  Description of Artificial Sequence: Synthetic oligonucleotide
aauauagucggcaaacugg

SEQ ID NO: 1718054 - RNA, 19 nt, Artificial Sequence
  Description of Artificial Sequence: Synthetic oligonucleotide
uuauauuaacacaauaagu

SEQ ID NO: 1718055 - RNA, 19 nt, Artificial Sequence
  Description of Artificial Sequence: Synthetic oligonucleotide
aaugaguuauccaaggcac

SEQ ID NO: 1718056 - RNA, 19 nt, Artificial Sequence
  Description of Artificial Sequence: Synthetic oligonucleotide
aaucauaaggccaccaccc

SEQ ID NO: 1718057 - RNA, 19 nt, Artificial Sequence
  Description of Artificial Sequence: Synthetic oligonucleotide
acacucuugauauuggagc

SEQ ID NO: 1718058 - RNA, 19 nt, Artificial Sequence
  Description of Artificial Sequence: Synthetic oligonucleotide
uaacacaauaaguaauucg

SEQ ID NO: 1718059 - RNA, 19 nt, Artificial Sequence
  Description of Artificial Sequence: Synthetic oligonucleotide
uuguuauugacugaaagag

SEQ ID NO: 1718060 - RNA, 19 nt, Artificial Sequence
  Description of Artificial Sequence: Synthetic oligonucleotide
agacuugcaaacuguaucc

SEQ ID NO: 1718061 - RNA, 19 nt, Artificial Sequence
  Description of Artificial Sequence: Synthetic oligonucleotide
uggauuuccgcaauggccg

SEQ ID NO: 1718062 - RNA, 19 nt, Artificial Sequence
  Description of Artificial Sequence: Synthetic oligonucleotide
uuuaaacuguuacucaacc

SEQ ID NO: 1718063 - RNA, 19 nt, Artificial Sequence
  Description of Artificial Sequence: Synthetic oligonucleotide
aaauauagucggcaaacug

SEQ ID NO: 1718064 - RNA, 19 nt, Artificial Sequence
  Description of Artificial Sequence: Synthetic oligonucleotide
aauagaagucccuuggccu

SEQ ID NO: 1718065 - RNA, 19 nt, Artificial Sequence
  Description of Artificial Sequence: Synthetic oligonucleotide
caauaguugaucaucuucc

SEQ ID NO: 1718066 - RNA, 19 nt, Artificial Sequence
  Description of Artificial Sequence: Synthetic oligonucleotide
ugauauguaagaagaaaga

SEQ ID NO: 1718067 - RNA, 19 nt, Artificial Sequence
  Description of Artificial Sequence: Synthetic oligonucleotide
gacaauagaagucccuugg

SEQ ID NO: 1718068 - RNA, 19 nt, Artificial Sequence
  Description of Artificial Sequence: Synthetic oligonucleotide
ugacaaucugaucaaaggc

SEQ ID NO: 1718069 - RNA, 19 nt, Artificial Sequence
  Description of Artificial Sequence: Synthetic oligonucleotide
uguuauugacugaaagagg

SEQ ID NO: 1718070 - RNA, 19 nt, Artificial Sequence
  Description of Artificial Sequence: Synthetic oligonucleotide
uuugcuuuauugaauacaa

SEQ ID NO: 1718071 - RNA, 19 nt, Artificial Sequence
  Description of Artificial Sequence: Synthetic oligonucleotide
uuauaguuaugaaacaauc

SEQ ID NO: 1718072 - RNA, 19 nt, Artificial Sequence
  Description of Artificial Sequence: Synthetic oligonucleotide
auaguuaugaaacaaucau

SEQ ID NO: 1718073 - RNA, 19 nt, Artificial Sequence
  Description of Artificial Sequence: Synthetic oligonucleotide
aaauauuacugcaguaggg

SEQ ID NO: 1718074 - RNA, 19 nt, Artificial Sequence
  Description of Artificial Sequence: Synthetic oligonucleotide
caaauauuacugcaguagg

SEQ ID NO: 1718075 - RNA, 19 nt, Artificial Sequence
  Description of Artificial Sequence: Synthetic oligonucleotide
aaacauucuuccuggacug

SEQ ID NO: 1718076 - RNA, 19 nt, Artificial Sequence
  Description of Artificial Sequence: Synthetic oligonucleotide
aauauuacugcaguagggu

SEQ ID NO: 1718077 - RNA, 19 nt, Artificial Sequence
  Description of Artificial Sequence: Synthetic oligonucleotide
ugucugggauauaaaacgg

SEQ ID NO: 1718078 - RNA, 19 nt, Artificial Sequence
  Description of Artificial Sequence: Synthetic oligonucleotide
ucaauaguugaucaucuuc

SEQ ID NO: 1718079 - RNA, 19 nt, Artificial Sequence
  Description of Artificial Sequence: Synthetic oligonucleotide
guucaagaaacauucuucc

SEQ ID NO: 1718080 - RNA, 19 nt, Artificial Sequence
  Description of Artificial Sequence: Synthetic oligonucleotide
auaaguaauucgcagcuca

SEQ ID NO: 1718081 - RNA, 19 nt, Artificial Sequence
  Description of Artificial Sequence: Synthetic oligonucleotide
gaaaauauagucggcaaac

SEQ ID NO: 1718082 - RNA, 19 nt, Artificial Sequence
  Description of Artificial Sequence: Synthetic oligonucleotide
gaaacggggugucauaucc

SEQ ID NO: 1718083 - RNA, 19 nt, Artificial Sequence
  Description of Artificial Sequence: Synthetic oligonucleotide
caaacuguauccauauccc

SEQ ID NO: 1718084 - RNA, 19 nt, Artificial Sequence
  Description of Artificial Sequence: Synthetic oligonucleotide
ucaucagccaauauccaug

SEQ ID NO: 1718085 - RNA, 19 nt, Artificial Sequence
  Description of Artificial Sequence: Synthetic oligonucleotide
aacgguacuuggcagcuuc

SEQ ID NO: 1718086 - RNA, 19 nt, Artificial Sequence
  Description of Artificial Sequence: Synthetic oligonucleotide
aguaauucgcagcucauca

SEQ ID NO: 1718087 - RNA, 19 nt, Artificial Sequence
  Description of Artificial Sequence: Synthetic oligonucleotide
agaaacauucuuccuggac

SEQ ID NO: 1718088 - RNA, 19 nt, Artificial Sequence
  Description of Artificial Sequence: Synthetic oligonucleotide
auauuaacacaauaaguaa

SEQ ID NO: 1718089 - RNA, 19 nt, Artificial Sequence
  Description of Artificial Sequence: Synthetic oligonucleotide
augauauguaagaagaaag

SEQ ID NO: 1718090 - RNA, 19 nt, Artificial Sequence
  Description of Artificial Sequence: Synthetic oligonucleotide
aacggggugucauauccac

SEQ ID NO: 1718091 - RNA, 19 nt, Artificial Sequence
  Description of Artificial Sequence: Synthetic oligonucleotide
aauacaacaccacccaaua

SEQ ID NO: 1718092 - RNA, 19 nt, Artificial Sequence
  Description of Artificial Sequence: Synthetic oligonucleotide
uauuacugcaguagggucu

SEQ ID NO: 1718093 - RNA, 19 nt, Artificial Sequence
  Description of Artificial Sequence: Synthetic oligonucleotide
ucugggauauaaaacggcu

SEQ ID NO: 1718094 - RNA, 19 nt, Artificial Sequence
  Description of Artificial Sequence: Synthetic oligonucleotide
acaaucauaaggccaccac

SEQ ID NO: 1718095 - RNA, 19 nt, Artificial Sequence
  Description of Artificial Sequence: Synthetic oligonucleotide
ucuggguauaaccaccuug

SEQ ID NO: 1718096 - RNA, 19 nt, Artificial Sequence
  Description of Artificial Sequence: Synthetic oligonucleotide
uuaaacuguuacucaaccc

SEQ ID NO: 1718097 - RNA, 19 nt, Artificial Sequence
  Description of Artificial Sequence: Synthetic oligonucleotide
aauucgcagcucaucagcc

SEQ ID NO: 1718098 - RNA, 19 nt, Artificial Sequence
  Description of Artificial Sequence: Synthetic oligonucleotide
auauuacugcaguaggguc

SEQ ID NO: 1718099 - RNA, 19 nt, Artificial Sequence
  Description of Artificial Sequence: Synthetic oligonucleotide
uccgguuuugaccacagac

SEQ ID NO: 1718100 - RNA, 19 nt, Artificial Sequence
  Description of Artificial Sequence: Synthetic oligonucleotide
agugacugcgauuccaauc

SEQ ID NO: 1718101 - RNA, 19 nt, Artificial Sequence
  Description of Artificial Sequence: Synthetic oligonucleotide
gauaacgguacuuggcagc

SEQ ID NO: 1718102 - RNA, 19 nt, Artificial Sequence
  Description of Artificial Sequence: Synthetic oligonucleotide
aaaccaacagugcaucgga

SEQ ID NO: 1718103 - RNA, 19 nt, Artificial Sequence
  Description of Artificial Sequence: Synthetic oligonucleotide
uuauugaauacaacaccac

SEQ ID NO: 1718104 - RNA, 19 nt, Artificial Sequence
  Description of Artificial Sequence: Synthetic oligonucleotide
aacaccacccaauacuuau

SEQ ID NO: 1718105 - RNA, 19 nt, Artificial Sequence
  Description of Artificial Sequence: Synthetic oligonucleotide
cuggauuuccgcaauggcc

SEQ ID NO: 1718106 - RNA, 19 nt, Artificial Sequence
  Description of Artificial Sequence: Synthetic oligonucleotide
aauaaguaauucgcagcuc

SEQ ID NO: 1718107 - RNA, 19 nt, Artificial Sequence
  Description of Artificial Sequence: Synthetic oligonucleotide
uguauccauaucccaaggc

SEQ ID NO: 1718108 - RNA, 19 nt, Artificial Sequence
  Description of Artificial Sequence: Synthetic oligonucleotide
uguggucaauaguugauca

SEQ ID NO: 1718109 - RNA, 19 nt, Artificial Sequence
  Description of Artificial Sequence: Synthetic oligonucleotide
cuucuaugcaugacaauag

SEQ ID NO: 1718110 - RNA, 19 nt, Artificial Sequence
  Description of Artificial Sequence: Synthetic oligonucleotide
uuauccaaggcacuuguua

SEQ ID NO: 1718111 - RNA, 19 nt, Artificial Sequence
  Description of Artificial Sequence: Synthetic oligonucleotide
aguucauuucauaaaauga

SEQ ID NO: 1718112 - RNA, 19 nt, Artificial Sequence
  Description of Artificial Sequence: Synthetic oligonucleotide
acuguauccauaucccaag

SEQ ID NO: 1718113 - RNA, 19 nt, Artificial Sequence
  Description of Artificial Sequence: Synthetic oligonucleotide
ucuaugcaugacaauagaa

SEQ ID NO: 1718114 - RNA, 19 nt, Artificial Sequence
  Description of Artificial Sequence: Synthetic oligonucleotide
guuuugaccacagacuugc

SEQ ID NO: 1718115 - RNA, 19 nt, Artificial Sequence
  Description of Artificial Sequence: Synthetic oligonucleotide
ucagccaauauccaugaua

SEQ ID NO: 1718116 - RNA, 19 nt, Artificial Sequence
  Description of Artificial Sequence: Synthetic oligonucleotide
uuccuuguucacacaacgg

SEQ ID NO: 1718117 - RNA, 19 nt, Artificial Sequence
  Description of Artificial Sequence: Synthetic oligonucleotide
ugucauauccacacacucu

SEQ ID NO: 1718118 - RNA, 19 nt, Artificial Sequence
  Description of Artificial Sequence: Synthetic oligonucleotide
aucucagaggcaaagccgc

SEQ ID NO: 1718119 - RNA, 19 nt, Artificial Sequence
  Description of Artificial Sequence: Synthetic oligonucleotide
aaacuguauccauauccca

SEQ ID NO: 1718120 - RNA, 19 nt, Artificial Sequence
  Description of Artificial Sequence: Synthetic oligonucleotide
uauugacugaaagagguuc

SEQ ID NO: 1718121 - RNA, 19 nt, Artificial Sequence
  Description of Artificial Sequence: Synthetic oligonucleotide
aguugaucaucuuccguag

SEQ ID NO: 1718122 - RNA, 19 nt, Artificial Sequence
  Description of Artificial Sequence: Synthetic oligonucleotide
aaaauauagucggcaaacu

SEQ ID NO: 1718123 - RNA, 19 nt, Artificial Sequence
  Description of Artificial Sequence: Synthetic oligonucleotide
uaguuaugaaacaaucaua

SEQ ID NO: 1718124 - RNA, 19 nt, Artificial Sequence
  Description of Artificial Sequence: Synthetic oligonucleotide
uuugucucgcaaaccaaca

SEQ ID NO: 1718125 - RNA, 19 nt, Artificial Sequence
  Description of Artificial Sequence: Synthetic oligonucleotide
cuuuaaacuguuacucaac

SEQ ID NO: 1718126 - RNA, 19 nt, Artificial Sequence
  Description of Artificial Sequence: Synthetic oligonucleotide
uaguugaucaucuuccgua

SEQ ID NO: 1718127 - RNA, 19 nt, Artificial Sequence
  Description of Artificial Sequence: Synthetic oligonucleotide
uauuggagccucuaaguuc

SEQ ID NO: 1718128 - RNA, 19 nt, Artificial Sequence
  Description of Artificial Sequence: Synthetic oligonucleotide
cacucuugauauuggagcc

SEQ ID NO: 1718129 - RNA, 19 nt, Artificial Sequence
  Description of Artificial Sequence: Synthetic oligonucleotide
acaugaaccugagugcccc

SEQ ID NO: 1718130 - RNA, 19 nt, Artificial Sequence
  Description of Artificial Sequence: Synthetic oligonucleotide
uucuaugcaugacaauaga

SEQ ID NO: 1718131 - RNA, 19 nt, Artificial Sequence
  Description of Artificial Sequence: Synthetic oligonucleotide
aaacaaucauaaggccacc

SEQ ID NO: 1718132 - RNA, 19 nt, Artificial Sequence
  Description of Artificial Sequence: Synthetic oligonucleotide
aaguaauucgcagcucauc

SEQ ID NO: 1718133 - RNA, 19 nt, Artificial Sequence
  Description of Artificial Sequence: Synthetic oligonucleotide
agggcaucguagcacuucc

SEQ ID NO: 1718134 - RNA, 19 nt, Artificial Sequence
  Description of Artificial Sequence: Synthetic oligonucleotide
auuugucucgcaaaccaac

SEQ ID NO: 1718135 - RNA, 19 nt, Artificial Sequence
  Description of Artificial Sequence: Synthetic oligonucleotide
cuucaccaaauauuacugc

SEQ ID NO: 1718136 - RNA, 19 nt, Artificial Sequence
  Description of Artificial Sequence: Synthetic oligonucleotide
aaaagauccccagagcgau

SEQ ID NO: 1718137 - RNA, 19 nt, Artificial Sequence
  Description of Artificial Sequence: Synthetic oligonucleotide
ugauuucacaagacacucc

SEQ ID NO: 1718138 - RNA, 19 nt, Artificial Sequence
  Description of Artificial Sequence: Synthetic oligonucleotide
gauccccagagcgauaacg

SEQ ID NO: 1718139 - RNA, 19 nt, Artificial Sequence
  Description of Artificial Sequence: Synthetic oligonucleotide
auccacacacucuugauau

SEQ ID NO: 1718140 - RNA, 19 nt, Artificial Sequence
  Description of Artificial Sequence: Synthetic oligonucleotide
ucggaagacuccaccaaag

SEQ ID NO: 1718141 - RNA, 19 nt, Artificial Sequence
  Description of Artificial Sequence: Synthetic oligonucleotide
ugacaauagaagucccuug

SEQ ID NO: 1718142 - RNA, 19 nt, Artificial Sequence
  Description of Artificial Sequence: Synthetic oligonucleotide
uugucucgcaaaccaacag

SEQ ID NO: 1718143 - RNA, 19 nt, Artificial Sequence
  Description of Artificial Sequence: Synthetic oligonucleotide
agaaagucuaaggaaauau

SEQ ID NO: 1718144 - RNA, 19 nt, Artificial Sequence
  Description of Artificial Sequence: Synthetic oligonucleotide
ugucucgcaaaccaacagu

SEQ ID NO: 1718145 - RNA, 19 nt, Artificial Sequence
  Description of Artificial Sequence: Synthetic oligonucleotide
auauuuccauaucuaguca

SEQ ID NO: 1718146 - RNA, 19 nt, Artificial Sequence
  Description of Artificial Sequence: Synthetic oligonucleotide
agcgauaacgguacuuggc

SEQ ID NO: 1718147 - RNA, 19 nt, Artificial Sequence
  Description of Artificial Sequence: Synthetic oligonucleotide
agucguccgguuuugacca

SEQ ID NO: 1718148 - RNA, 19 nt, Artificial Sequence
  Description of Artificial Sequence: Synthetic oligonucleotide
cacggugcacuuuaaacug

SEQ ID NO: 1718149 - RNA, 19 nt, Artificial Sequence
  Description of Artificial Sequence: Synthetic oligonucleotide
caaugaguuauccaaggca

SEQ ID NO: 1718150 - RNA, 19 nt, Artificial Sequence
  Description of Artificial Sequence: Synthetic oligonucleotide
acaacgggguguugaacac

SEQ ID NO: 1718151 - RNA, 19 nt, Artificial Sequence
  Description of Artificial Sequence: Synthetic oligonucleotide
aaaugugaggaaacggggu

SEQ ID NO: 1718152 - RNA, 19 nt, Artificial Sequence
  Description of Artificial Sequence: Synthetic oligonucleotide
uuaacacaauaaguaauuc

SEQ ID NO: 1718153 - RNA, 19 nt, Artificial Sequence
  Description of Artificial Sequence: Synthetic oligonucleotide
caaaccaacagugcaucgg

SEQ ID NO: 1718154 - RNA, 19 nt, Artificial Sequence
  Description of Artificial Sequence: Synthetic oligonucleotide
aacgggguguugaacacuc

SEQ ID NO: 1718155 - RNA, 19 nt, Artificial Sequence
  Description of Artificial Sequence: Synthetic oligonucleotide
cucccggaugacaugaacc

SEQ ID NO: 1718156 - RNA, 19 nt, Artificial Sequence
  Description of Artificial Sequence: Synthetic oligonucleotide
cuuccguagggcaucguag

SEQ ID NO: 1718157 - RNA, 19 nt, Artificial Sequence
  Description of Artificial Sequence: Synthetic oligonucleotide
agagcgauaacgguacuug

SEQ ID NO: 1718158 - RNA, 19 nt, Artificial Sequence
  Description of Artificial Sequence: Synthetic oligonucleotide
guuauugacugaaagaggu

SEQ ID NO: 1718159 - RNA, 19 nt, Artificial Sequence
  Description of Artificial Sequence: Synthetic oligonucleotide
gagcgauaacgguacuugg

SEQ ID NO: 1718160 - RNA, 19 nt, Artificial Sequence
  Description of Artificial Sequence: Synthetic oligonucleotide
ucauaaggccaccacccac

SEQ ID NO: 1718161 - RNA, 19 nt, Artificial Sequence
  Description of Artificial Sequence: Synthetic oligonucleotide
auuggagccucuaaguuca

SEQ ID NO: 1718162 - RNA, 19 nt, Artificial Sequence
  Description of Artificial Sequence: Synthetic oligonucleotide
accuguuccacugcugccc

SEQ ID NO: 1718163 - RNA, 19 nt, Artificial Sequence
  Description of Artificial Sequence: Synthetic oligonucleotide
ucuguggucaauaguugau

SEQ ID NO: 1718164 - RNA, 19 nt, Artificial Sequence
  Description of Artificial Sequence: Synthetic oligonucleotide
guaauucgcagcucaucag

SEQ ID NO: 1718165 - RNA, 19 nt, Artificial Sequence
  Description of Artificial Sequence: Synthetic oligonucleotide
aaacuggauuuccgcaaug

SEQ ID NO: 1718166 - RNA, 19 nt, Artificial Sequence
  Description of Artificial Sequence: Synthetic oligonucleotide
ucccggaugacaugaaccu

SEQ ID NO: 1718167 - RNA, 19 nt, Artificial Sequence
  Description of Artificial Sequence: Synthetic oligonucleotide
ucucgcaaaccaacagugc

SEQ ID NO: 1718168 - RNA, 19 nt, Artificial Sequence
  Description of Artificial Sequence: Synthetic oligonucleotide
uggucaauaguugaucauc

SEQ ID NO: 1718169 - RNA, 19 nt, Artificial Sequence
  Description of Artificial Sequence: Synthetic oligonucleotide
uuuaucuucuaugcaugac

SEQ ID NO: 1718170 - RNA, 19 nt, Artificial Sequence
  Description of Artificial Sequence: Synthetic oligonucleotide
guaggguucuacugggacc

SEQ ID NO: 1718171 - RNA, 19 nt, Artificial Sequence
  Description of Artificial Sequence: Synthetic oligonucleotide
aacuguauccauaucccaa

SEQ ID NO: 1718172 - RNA, 19 nt, Artificial Sequence
  Description of Artificial Sequence: Synthetic oligonucleotide
uauccaugauaguucauuu

SEQ ID NO: 1718173 - RNA, 19 nt, Artificial Sequence
  Description of Artificial Sequence: Synthetic oligonucleotide
auauuggagccucuaaguu

SEQ ID NO: 1718174 - RNA, 19 nt, Artificial Sequence
  Description of Artificial Sequence: Synthetic oligonucleotide
cagucguccgguuuugacc

SEQ ID NO: 1718175 - RNA, 19 nt, Artificial Sequence
  Description of Artificial Sequence: Synthetic oligonucleotide
ccaaauauuacugcaguag

SEQ ID NO: 1718176 - RNA, 19 nt, Artificial Sequence
  Description of Artificial Sequence: Synthetic oligonucleotide
cagaucaaugauuucacaa

SEQ ID NO: 1718177 - RNA, 19 nt, Artificial Sequence
  Description of Artificial Sequence: Synthetic oligonucleotide
acccaauacuuauaguuau

SEQ ID NO: 1718178 - RNA, 19 nt, Artificial Sequence
  Description of Artificial Sequence: Synthetic oligonucleotide
uuccguagggcaucguagc

SEQ ID NO: 1718179 - RNA, 19 nt, Artificial Sequence
  Description of Artificial Sequence: Synthetic oligonucleotide
uagucggcaaacuggauuu

SEQ ID NO: 1718180 - RNA, 19 nt, Artificial Sequence
  Description of Artificial Sequence: Synthetic oligonucleotide
aacaaucauaaggccacca

SEQ ID NO: 1718181 - RNA, 19 nt, Artificial Sequence
  Description of Artificial Sequence: Synthetic oligonucleotide
guugaucaucuuccguagg

SEQ ID NO: 1718182 - RNA, 19 nt, Artificial Sequence
  Description of Artificial Sequence: Synthetic oligonucleotide
uaggguucuacugggaccu

SEQ ID NO: 1718183 - RNA, 19 nt, Artificial Sequence
  Description of Artificial Sequence: Synthetic oligonucleotide
uuggccaaugaguuaucca

SEQ ID NO: 1718184 - RNA, 19 nt, Artificial Sequence
  Description of Artificial Sequence: Synthetic oligonucleotide
auaaggccaccacccacgg

SEQ ID NO: 1718185 - RNA, 19 nt, Artificial Sequence
  Description of Artificial Sequence: Synthetic oligonucleotide
uuuggccaaugaguuaucc

SEQ ID NO: 1718186 - RNA, 19 nt, Artificial Sequence
  Description of Artificial Sequence: Synthetic oligonucleotide
auauagucggcaaacugga

SEQ ID NO: 1718187 - RNA, 19 nt, Artificial Sequence
  Description of Artificial Sequence: Synthetic oligonucleotide
uaaguaauucgcagcucau

SEQ ID NO: 1718188 - RNA, 19 nt, Artificial Sequence
  Description of Artificial Sequence: Synthetic oligonucleotide
agcuuuucuugugccaugg

SEQ ID NO: 1718189 - RNA, 19 nt, Artificial Sequence
  Description of Artificial Sequence: Synthetic oligonucleotide
gucucgcaaaccaacagug

SEQ ID NO: 1718190 - RNA, 19 nt, Artificial Sequence
  Description of Artificial Sequence: Synthetic oligonucleotide
uuauugacugaaagagguu

SEQ ID NO: 1718191 - RNA, 19 nt, Artificial Sequence
  Description of Artificial Sequence: Synthetic oligonucleotide
caauaaguaauucgcagcu

SEQ ID NO: 1718192 - RNA, 19 nt, Artificial Sequence
  Description of Artificial Sequence: Synthetic oligonucleotide
cccuguaaaguauuuuagg

SEQ ID NO: 1718193 - RNA, 19 nt, Artificial Sequence
  Description of Artificial Sequence: Synthetic oligonucleotide
aagaaagucuaaggaaaua

SEQ ID NO: 1718194 - RNA, 19 nt, Artificial Sequence
  Description of Artificial Sequence: Synthetic oligonucleotide
agccucguggcugaucagc

SEQ ID NO: 1718195 - RNA, 19 nt, Artificial Sequence
  Description of Artificial Sequence: Synthetic oligonucleotide
cucgcaaaccaacagugca

SEQ ID NO: 1718196 - RNA, 19 nt, Artificial Sequence
  Description of Artificial Sequence: Synthetic oligonucleotide
ucagcagucguccgguuuu

SEQ ID NO: 1718197 - RNA, 19 nt, Artificial Sequence
  Description of Artificial Sequence: Synthetic oligonucleotide
cacaacgggguguugaaca

SEQ ID NO: 1718198 - RNA, 19 nt, Artificial Sequence
  Description of Artificial Sequence: Synthetic oligonucleotide
uauaaccaccuugauuccu

SEQ ID NO: 1718199 - RNA, 19 nt, Artificial Sequence
  Description of Artificial Sequence: Synthetic oligonucleotide
cuuauaguuaugaaacaau

SEQ ID NO: 1718200 - RNA, 19 nt, Artificial Sequence
  Description of Artificial Sequence: Synthetic oligonucleotide
ucgcaaaccaacagugcau

SEQ ID NO: 1718201 - RNA, 19 nt, Artificial Sequence
  Description of Artificial Sequence: Synthetic oligonucleotide
ucacacaacgggguguuga

SEQ ID NO: 1718202 - RNA, 19 nt, Artificial Sequence
  Description of Artificial Sequence: Synthetic oligonucleotide
gccucuaaguucaagaaac

SEQ ID NO: 1718203 - RNA, 19 nt, Artificial Sequence
  Description of Artificial Sequence: Synthetic oligonucleotide
guauaaccaccuugauucc

SEQ ID NO: 1718204 - RNA, 19 nt, Artificial Sequence
  Description of Artificial Sequence: Synthetic oligonucleotide
cauauccacacacucuuga

SEQ ID NO: 1718205 - RNA, 19 nt, Artificial Sequence
  Description of Artificial Sequence: Synthetic oligonucleotide
acuugcaaacuguauccau

SEQ ID NO: 1718206 - RNA, 19 nt, Artificial Sequence
  Description of Artificial Sequence: Synthetic oligonucleotide
agugcaucggaagacucca

SEQ ID NO: 1718207 - RNA, 19 nt, Artificial Sequence
  Description of Artificial Sequence: Synthetic oligonucleotide
uuugaggcgaugugaguuu

SEQ ID NO: 1718208 - RNA, 19 nt, Artificial Sequence
  Description of Artificial Sequence: Synthetic oligonucleotide
cuugauuccugggcagugg

SEQ ID NO: 1718209 - RNA, 19 nt, Artificial Sequence
  Description of Artificial Sequence: Synthetic oligonucleotide
uguucacacaacggggugu

SEQ ID NO: 1718210 - RNA, 19 nt, Artificial Sequence
  Description of Artificial Sequence: Synthetic oligonucleotide
uuccgcaauggccguagca

SEQ ID NO: 1718211 - RNA, 19 nt, Artificial Sequence
  Description of Artificial Sequence: Synthetic oligonucleotide
ugaguuauccaaggcacuu

SEQ ID NO: 1718212 - RNA, 19 nt, Artificial Sequence
  Description of Artificial Sequence: Synthetic oligonucleotide
auaacgguacuuggcagcu

SEQ ID NO: 1718213 - RNA, 19 nt, Artificial Sequence
  Description of Artificial Sequence: Synthetic oligonucleotide
aucauaaggccaccaccca

SEQ ID NO: 1718214 - RNA, 19 nt, Artificial Sequence
  Description of Artificial Sequence: Synthetic oligonucleotide
aaucguccgcagaucaaug

SEQ ID NO: 1718215 - RNA, 19 nt, Artificial Sequence
  Description of Artificial Sequence: Synthetic oligonucleotide
gagaaugguagagggcccc

SEQ ID NO: 1718216 - RNA, 19 nt, Artificial Sequence
  Description of Artificial Sequence: Synthetic oligonucleotide
ucguccgcagaucaaugau

SEQ ID NO: 1718217 - RNA, 19 nt, Artificial Sequence
  Description of Artificial Sequence: Synthetic oligonucleotide
uccguagggcaucguagca

SEQ ID NO: 1718218 - RNA, 19 nt, Artificial Sequence
  Description of Artificial Sequence: Synthetic oligonucleotide
agccucuaaguucaagaaa

SEQ ID NO: 1718219 - RNA, 19 nt, Artificial Sequence
  Description of Artificial Sequence: Synthetic oligonucleotide
aucguccgcagaucaauga

SEQ ID NO: 1718220 - RNA, 19 nt, Artificial Sequence
  Description of Artificial Sequence: Synthetic oligonucleotide
aucguagcacuuccauuug

SEQ ID NO: 1718221 - RNA, 19 nt, Artificial Sequence
  Description of Artificial Sequence: Synthetic oligonucleotide
ugaucagcagucguccggu

SEQ ID NO: 1718222 - RNA, 19 nt, Artificial Sequence
  Description of Artificial Sequence: Synthetic oligonucleotide
augacaauagaagucccuu

SEQ ID NO: 1718223 - RNA, 19 nt, Artificial Sequence
  Description of Artificial Sequence: Synthetic oligonucleotide
uggccguagcaccagugac

SEQ ID NO: 1718224 - RNA, 19 nt, Artificial Sequence
  Description of Artificial Sequence: Synthetic oligonucleotide
ucguagcacuuccauuugu

SEQ ID NO: 1718225 - RNA, 19 nt, Artificial Sequence
  Description of Artificial Sequence: Synthetic oligonucleotide
caugauaguucauuucaua

SEQ ID NO: 1718226 - RNA, 19 nt, Artificial Sequence
  Description of Artificial Sequence: Synthetic oligonucleotide
gaguuauccaaggcacuug

SEQ ID NO: 1718227 - RNA, 19 nt, Artificial Sequence
  Description of Artificial Sequence: Synthetic oligonucleotide
aucggaagacuccaccaaa

SEQ ID NO: 1718228 - RNA, 19 nt, Artificial Sequence
  Description of Artificial Sequence: Synthetic oligonucleotide
ugacugcgauuccaauccc

SEQ ID NO: 1718229 - RNA, 19 nt, Artificial Sequence
  Description of Artificial Sequence: Synthetic oligonucleotide
caucagccaauauccauga

SEQ ID NO: 1718230 - RNA, 19 nt, Artificial Sequence
  Description of Artificial Sequence: Synthetic oligonucleotide
uucuugugccauggaagcc

SEQ ID NO: 1718231 - RNA, 19 nt, Artificial Sequence
  Description of Artificial Sequence: Synthetic oligonucleotide
cucuguggucaauaguuga

SEQ ID NO: 1718232 - RNA, 19 nt, Artificial Sequence
  Description of Artificial Sequence: Synthetic oligonucleotide
auaguucauuucauaaaau

SEQ ID NO: 1718233 - RNA, 19 nt, Artificial Sequence
  Description of Artificial Sequence: Synthetic oligonucleotide
auggccguagcaccaguga

SEQ ID NO: 1718234 - RNA, 19 nt, Artificial Sequence
  Description of Artificial Sequence: Synthetic oligonucleotide
ugaggcgaugugaguuugc

SEQ ID NO: 1718235 - RNA, 19 nt, Artificial Sequence
  Description of Artificial Sequence: Synthetic oligonucleotide
ugggaccuguuccacugcu

SEQ ID NO: 1718236 - RNA, 19 nt, Artificial Sequence
  Description of Artificial Sequence: Synthetic oligonucleotide
agaaugguagagggccccg

SEQ ID NO: 1718237 - RNA, 19 nt, Artificial Sequence
  Description of Artificial Sequence: Synthetic oligonucleotide
uauagucggcaaacuggau

SEQ ID NO: 1718238 - RNA, 19 nt, Artificial Sequence
  Description of Artificial Sequence: Synthetic oligonucleotide
uuuugaccacagacuugca

SEQ ID NO: 1718239 - RNA, 19 nt, Artificial Sequence
  Description of Artificial Sequence: Synthetic oligonucleotide
gacaugaaccugagugccc

SEQ ID NO: 1718240 - RNA, 19 nt, Artificial Sequence
  Description of Artificial Sequence: Synthetic oligonucleotide
caaagccgccugucaaggg

SEQ ID NO: 1718241 - RNA, 19 nt, Artificial Sequence
  Description of Artificial Sequence: Synthetic oligonucleotide
gggugucauauccacacac

SEQ ID NO: 1718242 - RNA, 19 nt, Artificial Sequence
  Description of Artificial Sequence: Synthetic oligonucleotide
ccaaugaguuauccaaggc

SEQ ID NO: 1718243 - RNA, 19 nt, Artificial Sequence
  Description of Artificial Sequence: Synthetic oligonucleotide
gcaaaccaacagugcaucg

SEQ ID NO: 1718244 - RNA, 19 nt, Artificial Sequence
  Description of Artificial Sequence: Synthetic oligonucleotide
gaauacaacaccacccaau

SEQ ID NO: 1718245 - RNA, 19 nt, Artificial Sequence
  Description of Artificial Sequence: Synthetic oligonucleotide
cuuguucacacaacggggu

SEQ ID NO: 1718246 - RNA, 19 nt, Artificial Sequence
  Description of Artificial Sequence: Synthetic oligonucleotide
acacaacgggguguugaac

SEQ ID NO: 1718247 - RNA, 19 nt, Artificial Sequence
  Description of Artificial Sequence: Synthetic oligonucleotide
uugaggcgaugugaguuug

SEQ ID NO: 1718248 - RNA, 19 nt, Artificial Sequence
  Description of Artificial Sequence: Synthetic oligonucleotide
uugacugaaagagguucau

SEQ ID NO: 1718249 - RNA, 19 nt, Artificial Sequence
  Description of Artificial Sequence: Synthetic oligonucleotide
gcgauaacgguacuuggca

SEQ ID NO: 1718250 - RNA, 19 nt, Artificial Sequence
  Description of Artificial Sequence: Synthetic oligonucleotide
acaacaccacccaauacuu

SEQ ID NO: 1718251 - RNA, 19 nt, Artificial Sequence
  Description of Artificial Sequence: Synthetic oligonucleotide
gagacagaggaaucuugua

SEQ ID NO: 1718252 - RNA, 19 nt, Artificial Sequence
  Description of Artificial Sequence: Synthetic oligonucleotide
accacccaauacuuauagu

SEQ ID NO: 1718253 - RNA, 19 nt, Artificial Sequence
  Description of Artificial Sequence: Synthetic oligonucleotide
ggcaaagccgccugucaag

SEQ ID NO: 1718254 - RNA, 19 nt, Artificial Sequence
  Description of Artificial Sequence: Synthetic oligonucleotide
ggcaaacuggauuuccgca

SEQ ID NO: 1718255 - RNA, 19 nt, Artificial Sequence
  Description of Artificial Sequence: Synthetic oligonucleotide
aaacggggugucauaucca

SEQ ID NO: 1718256 - RNA, 19 nt, Artificial Sequence
  Description of Artificial Sequence: Synthetic oligonucleotide
ccagagucacaucacugcc

SEQ ID NO: 1718257 - RNA, 19 nt, Artificial Sequence
  Description of Artificial Sequence: Synthetic oligonucleotide
cuuccauuugucugggaua

SEQ ID NO: 1718258 - RNA, 19 nt, Artificial Sequence
  Description of Artificial Sequence: Synthetic oligonucleotide
acucuugauauuggagccu

SEQ ID NO: 1718259 - RNA, 19 nt, Artificial Sequence
  Description of Artificial Sequence: Synthetic oligonucleotide
gacuugcaaacuguaucca

SEQ ID NO: 1718260 - RNA, 19 nt, Artificial Sequence
  Description of Artificial Sequence: Synthetic oligonucleotide
ggagccucguggcugauca

SEQ ID NO: 1718261 - RNA, 19 nt, Artificial Sequence
  Description of Artificial Sequence: Synthetic oligonucleotide
cccacggugcacuuuaaac

SEQ ID NO: 1718262 - RNA, 19 nt, Artificial Sequence
  Description of Artificial Sequence: Synthetic oligonucleotide
ccccaauccacuuauauua

SEQ ID NO: 1718263 - RNA, 19 nt, Artificial Sequence
  Description of Artificial Sequence: Synthetic oligonucleotide
cugagugccccaggcaacc

SEQ ID NO: 1718264 - RNA, 19 nt, Artificial Sequence
  Description of Artificial Sequence: Synthetic oligonucleotide
acaagacacuccaagcuuu

SEQ ID NO: 1718265 - RNA, 19 nt, Artificial Sequence
  Description of Artificial Sequence: Synthetic oligonucleotide
aggcaaagccgccugucaa

SEQ ID NO: 1718266 - RNA, 19 nt, Artificial Sequence
  Description of Artificial Sequence: Synthetic oligonucleotide
uggagccucuaaguucaag

SEQ ID NO: 1718267 - RNA, 19 nt, Artificial Sequence
  Description of Artificial Sequence: Synthetic oligonucleotide
cauaucuagucauaaucuu

SEQ ID NO: 1718268 - RNA, 19 nt, Artificial Sequence
  Description of Artificial Sequence: Synthetic oligonucleotide
aggaaacggggugucauau

SEQ ID NO: 1718269 - RNA, 19 nt, Artificial Sequence
  Description of Artificial Sequence: Synthetic oligonucleotide
gccuacacagccccauggg

SEQ ID NO: 1718270 - RNA, 19 nt, Artificial Sequence
  Description of Artificial Sequence: Synthetic oligonucleotide
acacucuaucuuuuccaua

SEQ ID NO: 1718271 - RNA, 19 nt, Artificial Sequence
  Description of Artificial Sequence: Synthetic oligonucleotide
gcaaagccgccugucaagg

SEQ ID NO: 1718272 - RNA, 19 nt, Artificial Sequence
  Description of Artificial Sequence: Synthetic oligonucleotide
aucagcagucguccgguuu

SEQ ID NO: 1718273 - RNA, 19 nt, Artificial Sequence
  Description of Artificial Sequence: Synthetic oligonucleotide
acugcgauuccaaucccaa

SEQ ID NO: 1718274 - RNA, 19 nt, Artificial Sequence
  Description of Artificial Sequence: Synthetic oligonucleotide
gcccuguaaaguauuuuag

SEQ ID NO: 1718275 - RNA, 19 nt, Artificial Sequence
  Description of Artificial Sequence: Synthetic oligonucleotide
ccaauacuuauaguuauga

SEQ ID NO: 1718276 - RNA, 19 nt, Artificial Sequence
  Description of Artificial Sequence: Synthetic oligonucleotide
caugacaauagaagucccu

SEQ ID NO: 1718277 - RNA, 19 nt, Artificial Sequence
  Description of Artificial Sequence: Synthetic oligonucleotide
acagacuugcaaacuguau

SEQ ID NO: 1718278 - RNA, 19 nt, Artificial Sequence
  Description of Artificial Sequence: Synthetic oligonucleotide
ggcgaugugaguuugcuuu

SEQ ID NO: 1718279 - RNA, 19 nt, Artificial Sequence
  Description of Artificial Sequence: Synthetic oligonucleotide
agccaauauccaugauagu

SEQ ID NO: 1718280 - RNA, 19 nt, Artificial Sequence
  Description of Artificial Sequence: Synthetic oligonucleotide
gcaaacuggauuuccgcaa

SEQ ID NO: 1718281 - RNA, 19 nt, Artificial Sequence
  Description of Artificial Sequence: Synthetic oligonucleotide
gcugaucagcagucguccg

SEQ ID NO: 1718282 - RNA, 19 nt, Artificial Sequence
  Description of Artificial Sequence: Synthetic oligonucleotide
agucggcaaacuggauuuc

SEQ ID NO: 1718283 - RNA, 19 nt, Artificial Sequence
  Description of Artificial Sequence: Synthetic oligonucleotide
ugacugaaagagguucauu

SEQ ID NO: 1718284 - RNA, 19 nt, Artificial Sequence
  Description of Artificial Sequence: Synthetic oligonucleotide
uccgcagaucaaugauuuc

SEQ ID NO: 1718285 - RNA, 19 nt, Artificial Sequence
  Description of Artificial Sequence: Synthetic oligonucleotide
gacugcgauuccaauccca

SEQ ID NO: 1718286 - RNA, 19 nt, Artificial Sequence
  Description of Artificial Sequence: Synthetic oligonucleotide
cuuuggccaaugaguuauc

SEQ ID NO: 1718287 - RNA, 19 nt, Artificial Sequence
  Description of Artificial Sequence: Synthetic oligonucleotide
aggcaaccagagucacauc

SEQ ID NO: 1718288 - RNA, 19 nt, Artificial Sequence
  Description of Artificial Sequence: Synthetic oligonucleotide
aggcacaaucguccgcaga

SEQ ID NO: 1718289 - RNA, 19 nt, Artificial Sequence
  Description of Artificial Sequence: Synthetic oligonucleotide
gaggcucccacaguugaaa

SEQ ID NO: 1718290 - RNA, 19 nt, Artificial Sequence
  Description of Artificial Sequence: Synthetic oligonucleotide
gguuuugaccacagacuug

SEQ ID NO: 1718291 - RNA, 19 nt, Artificial Sequence
  Description of Artificial Sequence: Synthetic oligonucleotide
aaccaacagugcaucggaa

SEQ ID NO: 1718292 - RNA, 19 nt, Artificial Sequence
  Description of Artificial Sequence: Synthetic oligonucleotide
gaggaaacggggugucaua

SEQ ID NO: 1718293 - RNA, 19 nt, Artificial Sequence
  Description of Artificial Sequence: Synthetic oligonucleotide
cuugauauuggagccucua

SEQ ID NO: 1718294 - RNA, 19 nt, Artificial Sequence
  Description of Artificial Sequence: Synthetic oligonucleotide
cgcagaucaaugauuucac

SEQ ID NO: 1718295 - RNA, 19 nt, Artificial Sequence
  Description of Artificial Sequence: Synthetic oligonucleotide
aggcucccacaguugaaaa

SEQ ID NO: 1718296 - RNA, 19 nt, Artificial Sequence
  Description of Artificial Sequence: Synthetic oligonucleotide
cucaucagccaauauccau

SEQ ID NO: 1718297 - RNA, 19 nt, Artificial Sequence
  Description of Artificial Sequence: Synthetic oligonucleotide
ccggaugacaugaaccuga

SEQ ID NO: 1718298 - RNA, 19 nt, Artificial Sequence
  Description of Artificial Sequence: Synthetic oligonucleotide
ucguccgguuuugaccaca

SEQ ID NO: 1718299 - RNA, 19 nt, Artificial Sequence
  Description of Artificial Sequence: Synthetic oligonucleotide
uccacacacucuugauauu

SEQ ID NO: 1718300 - RNA, 19 nt, Artificial Sequence
  Description of Artificial Sequence: Synthetic oligonucleotide
accuugauuccugggcagu

SEQ ID NO: 1718301 - RNA, 19 nt, Artificial Sequence
  Description of Artificial Sequence: Synthetic oligonucleotide
gccguagcaccagugacug

SEQ ID NO: 1718302 - RNA, 19 nt, Artificial Sequence
  Description of Artificial Sequence: Synthetic oligonucleotide
cgauaacgguacuuggcag

SEQ ID NO: 1718303 - RNA, 19 nt, Artificial Sequence
  Description of Artificial Sequence: Synthetic oligonucleotide
ggcacaaucguccgcagau

SEQ ID NO: 1718304 - RNA, 19 nt, Artificial Sequence
  Description of Artificial Sequence: Synthetic oligonucleotide
cacacaacgggguguugaa

SEQ ID NO: 1718305 - RNA, 19 nt, Artificial Sequence
  Description of Artificial Sequence: Synthetic oligonucleotide
gggucuuuggccaaugagu

SEQ ID NO: 1718306 - RNA, 19 nt, Artificial Sequence
  Description of Artificial Sequence: Synthetic oligonucleotide
agacuccaccaaaggcaac

SEQ ID NO: 1718307 - RNA, 19 nt, Artificial Sequence
  Description of Artificial Sequence: Synthetic oligonucleotide
cuacugggaccuguuccac

SEQ ID NO: 1718308 - RNA, 19 nt, Artificial Sequence
  Description of Artificial Sequence: Synthetic oligonucleotide
caggcaaccagagucacau

SEQ ID NO: 1718309 - RNA, 19 nt, Artificial Sequence
  Description of Artificial Sequence: Synthetic oligonucleotide
uucacacaacgggguguug

SEQ ID NO: 1718310 - RNA, 19 nt, Artificial Sequence
  Description of Artificial Sequence: Synthetic oligonucleotide
gcagucguccgguuuugac

SEQ ID NO: 1718311 - RNA, 19 nt, Artificial Sequence
  Description of Artificial Sequence: Synthetic oligonucleotide
cacuuguuauugacugaaa

SEQ ID NO: 1718312 - RNA, 19 nt, Artificial Sequence
  Description of Artificial Sequence: Synthetic oligonucleotide
ccgcaauggccguagcacc

SEQ ID NO: 1718313 - RNA, 19 nt, Artificial Sequence
  Description of Artificial Sequence: Synthetic oligonucleotide
gaggcgaugugaguuugcu

SEQ ID NO: 1718314 - RNA, 19 nt, Artificial Sequence
  Description of Artificial Sequence: Synthetic oligonucleotide
ccacccaauacuuauaguu

SEQ ID NO: 1718315 - RNA, 19 nt, Artificial Sequence
  Description of Artificial Sequence: Synthetic oligonucleotide
acggugcacuuuaaacugu

SEQ ID NO: 1718316 - RNA, 19 nt, Artificial Sequence
  Description of Artificial Sequence: Synthetic oligonucleotide
ccgcagaucaaugauuuca

SEQ ID NO: 1718317 - RNA, 19 nt, Artificial Sequence
  Description of Artificial Sequence: Synthetic oligonucleotide
ggaaacggggugucauauc

SEQ ID NO: 1718318 - RNA, 19 nt, Artificial Sequence
  Description of Artificial Sequence: Synthetic oligonucleotide
gcaaccagagucacaucac

SEQ ID NO: 1718319 - RNA, 19 nt, Artificial Sequence
  Description of Artificial Sequence: Synthetic oligonucleotide
aaagauccccagagcgaua

SEQ ID NO: 1718320 - RNA, 19 nt, Artificial Sequence
  Description of Artificial Sequence: Synthetic oligonucleotide
aggcgaugugaguuugcuu

SEQ ID NO: 1718321 - RNA, 19 nt, Artificial Sequence
  Description of Artificial Sequence: Synthetic oligonucleotide
acccacggugcacuuuaaa

SEQ ID NO: 1718322 - RNA, 19 nt, Artificial Sequence
  Description of Artificial Sequence: Synthetic oligonucleotide
ugagugccccaggcaacca

SEQ ID NO: 1718323 - RNA, 19 nt, Artificial Sequence
  Description of Artificial Sequence: Synthetic oligonucleotide
guggucaauaguugaucau

SEQ ID NO: 1718324 - RNA, 19 nt, Artificial Sequence
  Description of Artificial Sequence: Synthetic oligonucleotide
acaaucguccgcagaucaa

SEQ ID NO: 1718325 - RNA, 19 nt, Artificial Sequence
  Description of Artificial Sequence: Synthetic oligonucleotide
caaacuggauuuccgcaau

SEQ ID NO: 1718326 - RNA, 19 nt, Artificial Sequence
  Description of Artificial Sequence: Synthetic oligonucleotide
ggaacugaucucagaggca

SEQ ID NO: 1718327 - RNA, 19 nt, Artificial Sequence
  Description of Artificial Sequence: Synthetic oligonucleotide
cagcuucguugacaaucug

SEQ ID NO: 1718328 - RNA, 19 nt, Artificial Sequence
  Description of Artificial Sequence: Synthetic oligonucleotide
gucaauaguugaucaucuu

SEQ ID NO: 1718329 - RNA, 19 nt, Artificial Sequence
  Description of Artificial Sequence: Synthetic oligonucleotide
caccucccggaugacauga

SEQ ID NO: 1718330 - RNA, 19 nt, Artificial Sequence
  Description of Artificial Sequence: Synthetic oligonucleotide
guugaacacucuaucuuuu

SEQ ID NO: 1718331 - RNA, 19 nt, Artificial Sequence
  Description of Artificial Sequence: Synthetic oligonucleotide
uuggagccucuaaguucaa

SEQ ID NO: 1718332 - RNA, 19 nt, Artificial Sequence
  Description of Artificial Sequence: Synthetic oligonucleotide
caacaccacccaauacuua

SEQ ID NO: 1718333 - RNA, 19 nt, Artificial Sequence
  Description of Artificial Sequence: Synthetic oligonucleotide
guccgcagaucaaugauuu

SEQ ID NO: 1718334 - RNA, 19 nt, Artificial Sequence
  Description of Artificial Sequence: Synthetic oligonucleotide
gacuucagccugagacaga

SEQ ID NO: 1718335 - RNA, 19 nt, Artificial Sequence
  Description of Artificial Sequence: Synthetic oligonucleotide
ggucuuuggccaaugaguu

SEQ ID NO: 1718336 - RNA, 19 nt, Artificial Sequence
  Description of Artificial Sequence: Synthetic oligonucleotide
guagagggccccguggccu

SEQ ID NO: 1718337 - RNA, 19 nt, Artificial Sequence
  Description of Artificial Sequence: Synthetic oligonucleotide
ggugucauauccacacacu

SEQ ID NO: 1718338 - RNA, 19 nt, Artificial Sequence
  Description of Artificial Sequence: Synthetic oligonucleotide
gccauggaagccaccuccc

SEQ ID NO: 1718339 - RNA, 19 nt, Artificial Sequence
  Description of Artificial Sequence: Synthetic oligonucleotide
caaucguccgcagaucaau

SEQ ID NO: 1718340 - RNA, 19 nt, Artificial Sequence
  Description of Artificial Sequence: Synthetic oligonucleotide
gauuuccgcaauggccgua

SEQ ID NO: 1718341 - RNA, 19 nt, Artificial Sequence
  Description of Artificial Sequence: Synthetic oligonucleotide
ccgguuuugaccacagacu

SEQ ID NO: 1718342 - RNA, 19 nt, Artificial Sequence
  Description of Artificial Sequence: Synthetic oligonucleotide
acggggugucauauccaca

SEQ ID NO: 1718343 - RNA, 19 nt, Artificial Sequence
  Description of Artificial Sequence: Synthetic oligonucleotide
gaaugguagagggccccgu

SEQ ID NO: 1718344 - RNA, 19 nt, Artificial Sequence
  Description of Artificial Sequence: Synthetic oligonucleotide
uccauuugucugggauaua

SEQ ID NO: 1718345 - RNA, 19 nt, Artificial Sequence
  Description of Artificial Sequence: Synthetic oligonucleotide
ccucguggcugaucagcag

SEQ ID NO: 1718346 - RNA, 19 nt, Artificial Sequence
  Description of Artificial Sequence: Synthetic oligonucleotide
agcagucguccgguuuuga

SEQ ID NO: 1718347 - RNA, 19 nt, Artificial Sequence
  Description of Artificial Sequence: Synthetic oligonucleotide
cagaggaaucuuguagggu

SEQ ID NO: 1718348 - RNA, 19 nt, Artificial Sequence
  Description of Artificial Sequence: Synthetic oligonucleotide
uaacgguacuuggcagcuu

SEQ ID NO: 1718349 - RNA, 19 nt, Artificial Sequence
  Description of Artificial Sequence: Synthetic oligonucleotide
guccgguuuugaccacaga

SEQ ID NO: 1718350 - RNA, 19 nt, Artificial Sequence
  Description of Artificial Sequence: Synthetic oligonucleotide
cagcagucguccgguuuug

SEQ ID NO: 1718351 - RNA, 19 nt, Artificial Sequence
  Description of Artificial Sequence: Synthetic oligonucleotide
ccguagggcaucguagcac

SEQ ID NO: 1718352 - RNA, 19 nt, Artificial Sequence
  Description of Artificial Sequence: Synthetic oligonucleotide
gucguccgguuuugaccac

SEQ ID NO: 1718353 - RNA, 19 nt, Artificial Sequence
  Description of Artificial Sequence: Synthetic oligonucleotide
gaagucccuuggccuggaa

SEQ ID NO: 1718354 - RNA, 19 nt, Artificial Sequence
  Description of Artificial Sequence: Synthetic oligonucleotide
cccguggccuacacagccc

SEQ ID NO: 1718355 - RNA, 19 nt, Artificial Sequence
  Description of Artificial Sequence: Synthetic oligonucleotide
gcagcuucguugacaaucu

SEQ ID NO: 1718356 - RNA, 19 nt, Artificial Sequence
  Description of Artificial Sequence: Synthetic oligonucleotide
gugcaucggaagacuccac

SEQ ID NO: 1718357 - RNA, 19 nt, Artificial Sequence
  Description of Artificial Sequence: Synthetic oligonucleotide
gggaccuguuccacugcug

SEQ ID NO: 1718358 - RNA, 19 nt, Artificial Sequence
  Description of Artificial Sequence: Synthetic oligonucleotide
cguccgguuuugaccacag

SEQ ID NO: 1718359 - RNA, 19 nt, Artificial Sequence
  Description of Artificial Sequence: Synthetic oligonucleotide
gcgaugugaguuugcuuua

SEQ ID NO: 1718360 - RNA, 19 nt, Artificial Sequence
  Description of Artificial Sequence: Synthetic oligonucleotide
gcccggauggugaggcucc

SEQ ID NO: 1718361 - RNA, 19 nt, Artificial Sequence
  Description of Artificial Sequence: Synthetic oligonucleotide
gccucguggcugaucagca

SEQ ID NO: 1718362 - RNA, 19 nt, Artificial Sequence
  Description of Artificial Sequence: Synthetic oligonucleotide
acgggguguugaacacucu

SEQ ID NO: 1718363 - RNA, 19 nt, Artificial Sequence
  Description of Artificial Sequence: Synthetic oligonucleotide
gggguguugaacacucuau

SEQ ID NO: 1718364 - RNA, 19 nt, Artificial Sequence
  Description of Artificial Sequence: Synthetic oligonucleotide
ggugcacuuuaaacuguua

SEQ ID NO: 1718365 - RNA, 19 nt, Artificial Sequence
  Description of Artificial Sequence: Synthetic oligonucleotide
guuauccaaggcacuuguu

SEQ ID NO: 1718366 - RNA, 19 nt, Artificial Sequence
  Description of Artificial Sequence: Synthetic oligonucleotide
gccugucaagggagccucg

SEQ ID NO: 1718367 - RNA, 19 nt, Artificial Sequence
  Description of Artificial Sequence: Synthetic oligonucleotide
aucuuccguagggcaucgu

SEQ ID NO: 1718368 - RNA, 19 nt, Artificial Sequence
  Description of Artificial Sequence: Synthetic oligonucleotide
guuccacugcugcccugua

SEQ ID NO: 1718369 - RNA, 19 nt, Artificial Sequence
  Description of Artificial Sequence: Synthetic oligonucleotide
cagugacugcgauuccaau

SEQ ID NO: 1718370 - RNA, 19 nt, Artificial Sequence
  Description of Artificial Sequence: Synthetic oligonucleotide
ggccguagcaccagugacu

SEQ ID NO: 1718371 - RNA, 19 nt, Artificial Sequence
  Description of Artificial Sequence: Synthetic oligonucleotide
accacccacggugcacuuu

SEQ ID NO: 1718372 - RNA, 19 nt, Artificial Sequence
  Description of Artificial Sequence: Synthetic oligonucleotide
caacgggguguugaacacu

SEQ ID NO: 1718373 - RNA, 19 nt, Artificial Sequence
  Description of Artificial Sequence: Synthetic oligonucleotide
cguagggcaucguagcacu

SEQ ID NO: 1718374 - RNA, 19 nt, Artificial Sequence
  Description of Artificial Sequence: Synthetic oligonucleotide
gcccuccuggaugacuuca

SEQ ID NO: 1718375 - RNA, 19 nt, Artificial Sequence
  Description of Artificial Sequence: Synthetic oligonucleotide
cagagcgauaacgguacuu

SEQ ID NO: 1718376 - RNA, 19 nt, Artificial Sequence
  Description of Artificial Sequence: Synthetic oligonucleotide
ccauggggcccggauggug

SEQ ID NO: 1718377 - RNA, 19 nt, Artificial Sequence
  Description of Artificial Sequence: Synthetic oligonucleotide
cugcccuguaaaguauuuu

SEQ ID NO: 1718378 - RNA, 19 nt, Artificial Sequence
  Description of Artificial Sequence: Synthetic oligonucleotide
cgggguguugaacacucua

SEQ ID NO: 1718379 - RNA, 19 nt, Artificial Sequence
  Description of Artificial Sequence: Synthetic oligonucleotide
guagggcaucguagcacuu

SEQ ID NO: 1718380 - RNA, 19 nt, Artificial Sequence
  Description of Artificial Sequence: Synthetic oligonucleotide
cguccgcagaucaaugauu

SEQ ID NO: 1718381 - RNA, 19 nt, Artificial Sequence
  Description of Artificial Sequence: Synthetic oligonucleotide
ccagagcgauaacgguacu

SEQ ID NO: 1718382 - RNA, 19 nt, Artificial Sequence
  Description of Artificial Sequence: Synthetic oligonucleotide
ccggauggugaggcuccca

SEQ ID NO: 1718383 - RNA, 19 nt, Artificial Sequence
  Description of Artificial Sequence: Synthetic oligonucleotide
cgaugugaguuugcuuuau

SEQ ID NO: 1718384 - RNA, 19 nt, Artificial Sequence
  Description of Artificial Sequence: Synthetic oligonucleotide
ccgccugucaagggagccu

SEQ ID NO: 1718385 - RNA, 19 nt, Artificial Sequence
  Description of Artificial Sequence: Synthetic oligonucleotide
cccauggggcccggauggu

SEQ ID NO: 1718386 - RNA, 19 nt, Artificial Sequence
  Description of Artificial Sequence: Synthetic oligonucleotide
aaccauauaaacuuuauaa

SEQ ID NO: 1718387 - RNA, 19 nt, Artificial Sequence
  Description of Artificial Sequence: Synthetic oligonucleotide
cuuuauaauacucauacug

SEQ ID NO: 1718388 - RNA, 19 nt, Artificial Sequence
  Description of Artificial Sequence: Synthetic oligonucleotide
aauucuagaccccugaugu

SEQ ID NO: 1718389 - RNA, 19 nt, Artificial Sequence
  Description of Artificial Sequence: Synthetic oligonucleotide
uuuaucaaccauauaaacu

SEQ ID NO: 1718390 - RNA, 19 nt, Artificial Sequence
  Description of Artificial Sequence: Synthetic oligonucleotide
uacaaaacuguccagcucc

SEQ ID NO: 1718391 - RNA, 19 nt, Artificial Sequence
  Description of Artificial Sequence: Synthetic oligonucleotide
uuaucaaccauauaaacuu

SEQ ID NO: 1718392 - RNA, 19 nt, Artificial Sequence
  Description of Artificial Sequence: Synthetic oligonucleotide
uuagaguccacuuuugggc

SEQ ID NO: 1718393 - RNA, 19 nt, Artificial Sequence
  Description of Artificial Sequence: Synthetic oligonucleotide
uauaauacucauacuggcc

SEQ ID NO: 1718394 - RNA, 19 nt, Artificial Sequence
  Description of Artificial Sequence: Synthetic oligonucleotide
agaugaugcauccugaugu

SEQ ID NO: 1718395 - RNA, 19 nt, Artificial Sequence
  Description of Artificial Sequence: Synthetic oligonucleotide
guuguugccaccuugcuug

SEQ ID NO: 1718396 - RNA, 19 nt, Artificial Sequence
  Description of Artificial Sequence: Synthetic oligonucleotide
auaauacucauacuggcca

SEQ ID NO: 1718397 - RNA, 19 nt, Artificial Sequence
  Description of Artificial Sequence: Synthetic oligonucleotide
cuuugaaaaccuuacugag

SEQ ID NO: 1718398 - RNA, 19 nt, Artificial Sequence
  Description of Artificial Sequence: Synthetic oligonucleotide
guuuguaccagcuucuagc

SEQ ID NO: 1718399 - RNA, 19 nt, Artificial Sequence
  Description of Artificial Sequence: Synthetic oligonucleotide
cuggccaacaguuuuagag

SEQ ID NO: 1718400 - RNA, 19 nt, Artificial Sequence
  Description of Artificial Sequence: Synthetic oligonucleotide
aaccuuacugagguuaccc

SEQ ID NO: 1718401 - RNA, 19 nt, Artificial Sequence
  Description of Artificial Sequence: Synthetic oligonucleotide
acccauuugauguagauau

SEQ ID NO: 1718402 - RNA, 19 nt, Artificial Sequence
  Description of Artificial Sequence: Synthetic oligonucleotide
aaugcuagggaucuuugaa

SEQ ID NO: 1718403 - RNA, 19 nt, Artificial Sequence
  Description of Artificial Sequence: Synthetic oligonucleotide
gauuccugcgaauaaggcc

SEQ ID NO: 1718404 - RNA, 19 nt, Artificial Sequence
  Description of Artificial Sequence: Synthetic oligonucleotide
auaguaccaggccuugucc

SEQ ID NO: 1718405 - RNA, 19 nt, Artificial Sequence
  Description of Artificial Sequence: Synthetic oligonucleotide
auguaauaaucuuuguucu

SEQ ID NO: 1718406 - RNA, 19 nt, Artificial Sequence
  Description of Artificial Sequence: Synthetic oligonucleotide
ucuuguuuggcacaccccu

SEQ ID NO: 1718407 - RNA, 19 nt, Artificial Sequence
  Description of Artificial Sequence: Synthetic oligonucleotide
cuaucuguggguauaguac

SEQ ID NO: 1718408 - RNA, 19 nt, Artificial Sequence
  Description of Artificial Sequence: Synthetic oligonucleotide
uuagcagucuuccagcuuc

SEQ ID NO: 1718409 - RNA, 19 nt, Artificial Sequence
  Description of Artificial Sequence: Synthetic oligonucleotide
uccacuuuugggcaaauaa

SEQ ID NO: 1718410 - RNA, 19 nt, Artificial Sequence
  Description of Artificial Sequence: Synthetic oligonucleotide
aauaaugcaucugucugcu

SEQ ID NO: 1718411 - RNA, 19 nt, Artificial Sequence
  Description of Artificial Sequence: Synthetic oligonucleotide
uaauauccaauuugucucc

SEQ ID NO: 1718412 - RNA, 19 nt, Artificial Sequence
  Description of Artificial Sequence: Synthetic oligonucleotide
guuggaucauuauuccugg

SEQ ID NO: 1718413 - RNA, 19 nt, Artificial Sequence
  Description of Artificial Sequence: Synthetic oligonucleotide
agcaguaccaccaagguga

SEQ ID NO: 1718414 - RNA, 19 nt, Artificial Sequence
  Description of Artificial Sequence: Synthetic oligonucleotide
aacuugaugguaaauuuca

SEQ ID NO: 1718415 - RNA, 19 nt, Artificial Sequence
  Description of Artificial Sequence: Synthetic oligonucleotide
uggauuugguuucacaaaa

SEQ ID NO: 1718416 - RNA, 19 nt, Artificial Sequence
  Description of Artificial Sequence: Synthetic oligonucleotide
ugcgaauaaggccacuuug

SEQ ID NO: 1718417 - RNA, 19 nt, Artificial Sequence
  Description of Artificial Sequence: Synthetic oligonucleotide
uguagauaugauguaauaa

SEQ ID NO: 1718418 - RNA, 19 nt, Artificial Sequence
  Description of Artificial Sequence: Synthetic oligonucleotide
uuaugcaggccuuccaaag

SEQ ID NO: 1718419 - RNA, 19 nt, Artificial Sequence
  Description of Artificial Sequence: Synthetic oligonucleotide
gaucuuguuuggcacaccc

SEQ ID NO: 1718420 - RNA, 19 nt, Artificial Sequence
  Description of Artificial Sequence: Synthetic oligonucleotide
caacuuucuccuaagguac

SEQ ID NO: 1718421 - RNA, 19 nt, Artificial Sequence
  Description of Artificial Sequence: Synthetic oligonucleotide
cauagaucuuguuuggcac

SEQ ID NO: 1718422 - RNA, 19 nt, Artificial Sequence
  Description of Artificial Sequence: Synthetic oligonucleotide
aagggcuuguuauugaauu

SEQ ID NO: 1718423 - RNA, 19 nt, Artificial Sequence
  Description of Artificial Sequence: Synthetic oligonucleotide
aauacucauacuggccaac

SEQ ID NO: 1718424 - RNA, 19 nt, Artificial Sequence
  Description of Artificial Sequence: Synthetic oligonucleotide
gguaugagaacaucacugg

SEQ ID NO: 1718425 - RNA, 19 nt, Artificial Sequence
  Description of Artificial Sequence: Synthetic oligonucleotide
ucgggaacaguugagcagg

SEQ ID NO: 1718426 - RNA, 19 nt, Artificial Sequence
  Description of Artificial Sequence: Synthetic oligonucleotide
acagccuacaaaacugucc

SEQ ID NO: 1718427 - RNA, 19 nt, Artificial Sequence
  Description of Artificial Sequence: Synthetic oligonucleotide
aguuuuagaguccacuuuu

SEQ ID NO: 1718428 - RNA, 19 nt, Artificial Sequence
  Description of Artificial Sequence: Synthetic oligonucleotide
uggguauaguaccaggccu

SEQ ID NO: 1718429 - RNA, 19 nt, Artificial Sequence
  Description of Artificial Sequence: Synthetic oligonucleotide
ugugauuccugcgaauaag

SEQ ID NO: 1718430 - RNA, 19 nt, Artificial Sequence
  Description of Artificial Sequence: Synthetic oligonucleotide
ugauuccugcgaauaaggc

SEQ ID NO: 1718431 - RNA, 19 nt, Artificial Sequence
  Description of Artificial Sequence: Synthetic oligonucleotide
aaaugcuagggaucuuuga

SEQ ID NO: 1718432 - RNA, 19 nt, Artificial Sequence
  Description of Artificial Sequence: Synthetic oligonucleotide
agaccccugauguuagggc

SEQ ID NO: 1718433 - RNA, 19 nt, Artificial Sequence
  Description of Artificial Sequence: Synthetic oligonucleotide
uaaaugcuagggaucuuug

SEQ ID NO: 1718434 - RNA, 19 nt, Artificial Sequence
  Description of Artificial Sequence: Synthetic oligonucleotide
ugauguuagggcugaauuc

SEQ ID NO: 1718435 - RNA, 19 nt, Artificial Sequence
  Description of Artificial Sequence: Synthetic oligonucleotide
cuucucauagugugggcgg

SEQ ID NO: 1718436 - RNA, 19 nt, Artificial Sequence
  Description of Artificial Sequence: Synthetic oligonucleotide
agguccgagugacaagucc

SEQ ID NO: 1718437 - RNA, 19 nt, Artificial Sequence
  Description of Artificial Sequence: Synthetic oligonucleotide
auuccugcgaauaaggcca

SEQ ID NO: 1718438 - RNA, 19 nt, Artificial Sequence
  Description of Artificial Sequence: Synthetic oligonucleotide
ucuagaccccugauguuag

SEQ ID NO: 1718439 - RNA, 19 nt, Artificial Sequence
  Description of Artificial Sequence: Synthetic oligonucleotide
ugguugauccagcaggacu

SEQ ID NO: 1718440 - RNA, 19 nt, Artificial Sequence
  Description of Artificial Sequence: Synthetic oligonucleotide
uugccuucagugcuccugg

SEQ ID NO: 1718441 - RNA, 19 nt, Artificial Sequence
  Description of Artificial Sequence: Synthetic oligonucleotide
ugcgcccacaacaagguga

SEQ ID NO: 1718442 - RNA, 19 nt, Artificial Sequence
  Description of Artificial Sequence: Synthetic oligonucleotide
cauagagguccgcacaggg

SEQ ID NO: 1718443 - RNA, 19 nt, Artificial Sequence
  Description of Artificial Sequence: Synthetic oligonucleotide
ggaucauuauuccugguug

SEQ ID NO: 1718444 - RNA, 19 nt, Artificial Sequence
  Description of Artificial Sequence: Synthetic oligonucleotide
ugagguuacccgagguccg

SEQ ID NO: 1718445 - RNA, 19 nt, Artificial Sequence
  Description of Artificial Sequence: Synthetic oligonucleotide
aaaccuuacugagguuacc

SEQ ID NO: 1718446 - RNA, 19 nt, Artificial Sequence
  Description of Artificial Sequence: Synthetic oligonucleotide
acugagguuacccgagguc

SEQ ID NO: 1718447 - RNA, 19 nt, Artificial Sequence
  Description of Artificial Sequence: Synthetic oligonucleotide
ugaaaaguuacagccuaca

SEQ ID NO: 1718448 - RNA, 19 nt, Artificial Sequence
  Description of Artificial Sequence: Synthetic oligonucleotide
uuacugagguuacccgagg

SEQ ID NO: 1718449 - RNA, 19 nt, Artificial Sequence
  Description of Artificial Sequence: Synthetic oligonucleotide
cacgauguacacugggugc

SEQ ID NO: 1718450 - RNA, 19 nt, Artificial Sequence
  Description of Artificial Sequence: Synthetic oligonucleotide
ugcauagcauagagguccg

SEQ ID NO: 1718451 - RNA, 19 nt, Artificial Sequence
  Description of Artificial Sequence: Synthetic oligonucleotide
gaccuucucauaguguggg

SEQ ID NO: 1718452 - RNA, 19 nt, Artificial Sequence
  Description of Artificial Sequence: Synthetic oligonucleotide
cucuuagcagucuuccagc

SEQ ID NO: 1718453 - RNA, 19 nt, Artificial Sequence
  Description of Artificial Sequence: Synthetic oligonucleotide
augaggaucuucauagauc

SEQ ID NO: 1718454 - RNA, 19 nt, Artificial Sequence
  Description of Artificial Sequence: Synthetic oligonucleotide
accuuacugagguuacccg

SEQ ID NO: 1718455 - RNA, 19 nt, Artificial Sequence
  Description of Artificial Sequence: Synthetic oligonucleotide
cugagguuacccgaggucc

SEQ ID NO: 1718456 - RNA, 19 nt, Artificial Sequence
  Description of Artificial Sequence: Synthetic oligonucleotide
gaaaaccuuacugagguua

SEQ ID NO: 1718457 - RNA, 19 nt, Artificial Sequence
  Description of Artificial Sequence: Synthetic oligonucleotide
acuuuauaauacucauacu

SEQ ID NO: 1718458 - RNA, 19 nt, Artificial Sequence
  Description of Artificial Sequence: Synthetic oligonucleotide
ugugguuccccaaggcuga

SEQ ID NO: 1718459 - RNA, 19 nt, Artificial Sequence
  Description of Artificial Sequence: Synthetic oligonucleotide
uggacgucuuguuggauca

SEQ ID NO: 1718460 - RNA, 19 nt, Artificial Sequence
  Description of Artificial Sequence: Synthetic oligonucleotide
gaucauuauuccugguuga

SEQ ID NO: 1718461 - RNA, 19 nt, Artificial Sequence
  Description of Artificial Sequence: Synthetic oligonucleotide
caaggugagaguucccuug

SEQ ID NO: 1718462 - RNA, 19 nt, Artificial Sequence
  Description of Artificial Sequence: Synthetic oligonucleotide
uguaauaaucuuuguucuu

SEQ ID NO: 1718463 - RNA, 19 nt, Artificial Sequence
  Description of Artificial Sequence: Synthetic oligonucleotide
gugauuccugcgaauaagg

SEQ ID NO: 1718464 - RNA, 19 nt, Artificial Sequence
  Description of Artificial Sequence: Synthetic oligonucleotide
uuccccaaggcugaaaagu

SEQ ID NO: 1718465 - RNA, 19 nt, Artificial Sequence
  Description of Artificial Sequence: Synthetic oligonucleotide
uauuccugguugauccagc

SEQ ID NO: 1718466 - RNA, 19 nt, Artificial Sequence
  Description of Artificial Sequence: Synthetic oligonucleotide
guggguauaguaccaggcc

SEQ ID NO: 1718467 - RNA, 19 nt, Artificial Sequence
  Description of Artificial Sequence: Synthetic oligonucleotide
agaggugcgcaacuuucuc

SEQ ID NO: 1718468 - RNA, 19 nt, Artificial Sequence
  Description of Artificial Sequence: Synthetic oligonucleotide
uucuccuaagguacugcug

SEQ ID NO: 1718469 - RNA, 19 nt, Artificial Sequence
  Description of Artificial Sequence: Synthetic oligonucleotide
ugcacgauguacacugggu

SEQ ID NO: 1718470 - RNA, 19 nt, Artificial Sequence
  Description of Artificial Sequence: Synthetic oligonucleotide
gaaacuugaugguaaauuu

SEQ ID NO: 1718471 - RNA, 19 nt, Artificial Sequence
  Description of Artificial Sequence: Synthetic oligonucleotide
uccugaugugauuccugcg

SEQ ID NO: 1718472 - RNA, 19 nt, Artificial Sequence
  Description of Artificial Sequence: Synthetic oligonucleotide
gaaaaguuacagccuacaa

SEQ ID NO: 1718473 - RNA, 19 nt, Artificial Sequence
  Description of Artificial Sequence: Synthetic oligonucleotide
guacuugagcagcaguacc

SEQ ID NO: 1718474 - RNA, 19 nt, Artificial Sequence
  Description of Artificial Sequence: Synthetic oligonucleotide
uaauacucauacuggccaa

SEQ ID NO: 1718475 - RNA, 19 nt, Artificial Sequence
  Description of Artificial Sequence: Synthetic oligonucleotide
acuugaugguaaauuucac

SEQ ID NO: 1718476 - RNA, 19 nt, Artificial Sequence
  Description of Artificial Sequence: Synthetic oligonucleotide
ugaauucuugaaacuugau

SEQ ID NO: 1718477 - RNA, 19 nt, Artificial Sequence
  Description of Artificial Sequence: Synthetic oligonucleotide
cuucuuaauaaugcaucug

SEQ ID NO: 1718478 - RNA, 19 nt, Artificial Sequence
  Description of Artificial Sequence: Synthetic oligonucleotide
uugauguagauaugaugua

SEQ ID NO: 1718479 - RNA, 19 nt, Artificial Sequence
  Description of Artificial Sequence: Synthetic oligonucleotide
uaucaaccauauaaacuuu

SEQ ID NO: 1718480 - RNA, 19 nt, Artificial Sequence
  Description of Artificial Sequence: Synthetic oligonucleotide
ugcgcaacuuucuccuaag

SEQ ID NO: 1718481 - RNA, 19 nt, Artificial Sequence
  Description of Artificial Sequence: Synthetic oligonucleotide
guuauugaauuucuccugu

SEQ ID NO: 1718482 - RNA, 19 nt, Artificial Sequence
  Description of Artificial Sequence: Synthetic oligonucleotide
aggugcgcaacuuucuccu

SEQ ID NO: 1718483 - RNA, 19 nt, Artificial Sequence
  Description of Artificial Sequence: Synthetic oligonucleotide
guuagggcugaauucuuga

SEQ ID NO: 1718484 - RNA, 19 nt, Artificial Sequence
  Description of Artificial Sequence: Synthetic oligonucleotide
auguagauaugauguaaua

SEQ ID NO: 1718485 - RNA, 19 nt, Artificial Sequence
  Description of Artificial Sequence: Synthetic oligonucleotide
cacuuuugggcaaauaaua

SEQ ID NO: 1718486 - RNA, 19 nt, Artificial Sequence
  Description of Artificial Sequence: Synthetic oligonucleotide
cuugggugugguacugugc

SEQ ID NO: 1718487 - RNA, 19 nt, Artificial Sequence
  Description of Artificial Sequence: Synthetic oligonucleotide
uuagggcugaauucuugaa

SEQ ID NO: 1718488 - RNA, 19 nt, Artificial Sequence
  Description of Artificial Sequence: Synthetic oligonucleotide
guuacccgagguccgagug

SEQ ID NO: 1718489 - RNA, 19 nt, Artificial Sequence
  Description of Artificial Sequence: Synthetic oligonucleotide
caggccucagaccuuguag

SEQ ID NO: 1718490 - RNA, 19 nt, Artificial Sequence
  Description of Artificial Sequence: Synthetic oligonucleotide
uacugagguuacccgaggu

SEQ ID NO: 1718491 - RNA, 19 nt, Artificial Sequence
  Description of Artificial Sequence: Synthetic oligonucleotide
uucuagaccccugauguua

SEQ ID NO: 1718492 - RNA, 19 nt, Artificial Sequence
  Description of Artificial Sequence: Synthetic oligonucleotide
gaggcgaaggucccaggcc

SEQ ID NO: 1718493 - RNA, 19 nt, Artificial Sequence
  Description of Artificial Sequence: Synthetic oligonucleotide
agcuucuagcucuggacgu

SEQ ID NO: 1718494 - RNA, 19 nt, Artificial Sequence
  Description of Artificial Sequence: Synthetic oligonucleotide
ucauuauuccugguugauc

SEQ ID NO: 1718495 - RNA, 19 nt, Artificial Sequence
  Description of Artificial Sequence: Synthetic oligonucleotide
aggccucagaccuuguagu

SEQ ID NO: 1718496 - RNA, 19 nt, Artificial Sequence
  Description of Artificial Sequence: Synthetic oligonucleotide
uagaucuuguuuggcacac

SEQ ID NO: 1718497 - RNA, 19 nt, Artificial Sequence
  Description of Artificial Sequence: Synthetic oligonucleotide
ggaucuuugaaaaccuuac

SEQ ID NO: 1718498 - RNA, 19 nt, Artificial Sequence
  Description of Artificial Sequence: Synthetic oligonucleotide
ggaacccagggauuguucc

SEQ ID NO: 1718499 - RNA, 19 nt, Artificial Sequence
  Description of Artificial Sequence: Synthetic oligonucleotide
uacagccuacaaaacuguc

SEQ ID NO: 1718500 - RNA, 19 nt, Artificial Sequence
  Description of Artificial Sequence: Synthetic oligonucleotide
gcgaauaaggccacuuugg

SEQ ID NO: 1718501 - RNA, 19 nt, Artificial Sequence
  Description of Artificial Sequence: Synthetic oligonucleotide
gaugugauuccugcgaaua

SEQ ID NO: 1718502 - RNA, 19 nt, Artificial Sequence
  Description of Artificial Sequence: Synthetic oligonucleotide
cuuucuccuaagguacugc

SEQ ID NO: 1718503 - RNA, 19 nt, Artificial Sequence
  Description of Artificial Sequence: Synthetic oligonucleotide
gguacugugcugguggucc

SEQ ID NO: 1718504 - RNA, 19 nt, Artificial Sequence
  Description of Artificial Sequence: Synthetic oligonucleotide
uuacccgagguccgaguga

SEQ ID NO: 1718505 - RNA, 19 nt, Artificial Sequence
  Description of Artificial Sequence: Synthetic oligonucleotide
gcaacuuucuccuaaggua

SEQ ID NO: 1718506 - RNA, 19 nt, Artificial Sequence
  Description of Artificial Sequence: Synthetic oligonucleotide
guuugcggugccuccugcg

SEQ ID NO: 1718507 - RNA, 19 nt, Artificial Sequence
  Description of Artificial Sequence: Synthetic oligonucleotide
gacuaaaugcuagggaucu

SEQ ID NO: 1718508 - RNA, 19 nt, Artificial Sequence
  Description of Artificial Sequence: Synthetic oligonucleotide
aggcgaaggucccaggccu

SEQ ID NO: 1718509 - RNA, 19 nt, Artificial Sequence
  Description of Artificial Sequence: Synthetic oligonucleotide
auagcccaccguguccucc

SEQ ID NO: 1718510 - RNA, 19 nt, Artificial Sequence
  Description of Artificial Sequence: Synthetic oligonucleotide
cauccugaugugauuccug

SEQ ID NO: 1718511 - RNA, 19 nt, Artificial Sequence
  Description of Artificial Sequence: Synthetic oligonucleotide
uggucgggaacaguugagc

SEQ ID NO: 1718512 - RNA, 19 nt, Artificial Sequence
  Description of Artificial Sequence: Synthetic oligonucleotide
cuugggaggcgaagguccc

SEQ ID NO: 1718513 - RNA, 19 nt, Artificial Sequence
  Description of Artificial Sequence: Synthetic oligonucleotide
aguuguugccaccuugcuu

SEQ ID NO: 1718514 - RNA, 19 nt, Artificial Sequence
  Description of Artificial Sequence: Synthetic oligonucleotide
uccccaaggcugaaaaguu

SEQ ID NO: 1718515 - RNA, 19 nt, Artificial Sequence
  Description of Artificial Sequence: Synthetic oligonucleotide
uguuugcggugccuccugc

SEQ ID NO: 1718516 - RNA, 19 nt, Artificial Sequence
  Description of Artificial Sequence: Synthetic oligonucleotide
uugucuccuaucugugggu

SEQ ID NO: 1718517 - RNA, 19 nt, Artificial Sequence
  Description of Artificial Sequence: Synthetic oligonucleotide
aaagggcuuguuauugaau

SEQ ID NO: 1718518 - RNA, 19 nt, Artificial Sequence
  Description of Artificial Sequence: Synthetic oligonucleotide
gguccugugcuguggagag

SEQ ID NO: 1718519 - RNA, 19 nt, Artificial Sequence
  Description of Artificial Sequence: Synthetic oligonucleotide
uuagggguaugagaacauc

SEQ ID NO: 1718520 - RNA, 19 nt, Artificial Sequence
  Description of Artificial Sequence: Synthetic oligonucleotide
cuuguuuggcacaccccuc

SEQ ID NO: 1718521 - RNA, 19 nt, Artificial Sequence
  Description of Artificial Sequence: Synthetic oligonucleotide
ugaugugauuccugcgaau

SEQ ID NO: 1718522 - RNA, 19 nt, Artificial Sequence
  Description of Artificial Sequence: Synthetic oligonucleotide
ccaaagacccauuugaugu

SEQ ID NO: 1718523 - RNA, 19 nt, Artificial Sequence
  Description of Artificial Sequence: Synthetic oligonucleotide
uccuuagggguaugagaac

SEQ ID NO: 1718524 - RNA, 19 nt, Artificial Sequence
  Description of Artificial Sequence: Synthetic oligonucleotide
gcacgauguacacugggug

SEQ ID NO: 1718525 - RNA, 19 nt, Artificial Sequence
  Description of Artificial Sequence: Synthetic oligonucleotide
ucaggcagucccugcgccc

SEQ ID NO: 1718526 - RNA, 19 nt, Artificial Sequence
  Description of Artificial Sequence: Synthetic oligonucleotide
guuaugcaggccuuccaaa

SEQ ID NO: 1718527 - RNA, 19 nt, Artificial Sequence
  Description of Artificial Sequence: Synthetic oligonucleotide
agccuacaaaacuguccag

SEQ ID NO: 1718528 - RNA, 19 nt, Artificial Sequence
  Description of Artificial Sequence: Synthetic oligonucleotide
auacucauacuggccaaca

SEQ ID NO: 1718529 - RNA, 19 nt, Artificial Sequence
  Description of Artificial Sequence: Synthetic oligonucleotide
ucccuugggaggcgaaggu

SEQ ID NO: 1718530 - RNA, 19 nt, Artificial Sequence
  Description of Artificial Sequence: Synthetic oligonucleotide
ccaaguggggaucucuuag

SEQ ID NO: 1718531 - RNA, 19 nt, Artificial Sequence
  Description of Artificial Sequence: Synthetic oligonucleotide
cccaaggcugaaaaguuac

SEQ ID NO: 1718532 - RNA, 19 nt, Artificial Sequence
  Description of Artificial Sequence: Synthetic oligonucleotide
uuggaucauuauuccuggu

SEQ ID NO: 1718533 - RNA, 19 nt, Artificial Sequence
  Description of Artificial Sequence: Synthetic oligonucleotide
cuagaccccugauguuagg

SEQ ID NO: 1718534 - RNA, 19 nt, Artificial Sequence
  Description of Artificial Sequence: Synthetic oligonucleotide
ccuucucauagugugggcg

SEQ ID NO: 1718535 - RNA, 19 nt, Artificial Sequence
  Description of Artificial Sequence: Synthetic oligonucleotide
agaccuuguaguaaauguu

SEQ ID NO: 1718536 - RNA, 19 nt, Artificial Sequence
  Description of Artificial Sequence: Synthetic oligonucleotide
ucuccuaucuguggguaua

SEQ ID NO: 1718537 - RNA, 19 nt, Artificial Sequence
  Description of Artificial Sequence: Synthetic oligonucleotide
ggauuugguuucacaaaag

SEQ ID NO: 1718538 - RNA, 19 nt, Artificial Sequence
  Description of Artificial Sequence: Synthetic oligonucleotide
gaagaugaugcauccugau

SEQ ID NO: 1718539 - RNA, 19 nt, Artificial Sequence
  Description of Artificial Sequence: Synthetic oligonucleotide
gggcggaagacacugucug

SEQ ID NO: 1718540 - RNA, 19 nt, Artificial Sequence
  Description of Artificial Sequence: Synthetic oligonucleotide
caaccauauaaacuuuaua

SEQ ID NO: 1718541 - RNA, 19 nt, Artificial Sequence
  Description of Artificial Sequence: Synthetic oligonucleotide
uacccgagguccgagugac

SEQ ID NO: 1718542 - RNA, 19 nt, Artificial Sequence
  Description of Artificial Sequence: Synthetic oligonucleotide
ugaaaaccuuacugagguu

SEQ ID NO: 1718543 - RNA, 19 nt, Artificial Sequence
  Description of Artificial Sequence: Synthetic oligonucleotide
ugacaaguccagugugcau

SEQ ID NO: 1718544 - RNA, 19 nt, Artificial Sequence
  Description of Artificial Sequence: Synthetic oligonucleotide
gugcuguggagaguguuug

SEQ ID NO: 1718545 - RNA, 19 nt, Artificial Sequence
  Description of Artificial Sequence: Synthetic oligonucleotide
gugacaaguccagugugca

SEQ ID NO: 1718546 - RNA, 19 nt, Artificial Sequence
  Description of Artificial Sequence: Synthetic oligonucleotide
uucacaucucggugugguc

SEQ ID NO: 1718547 - RNA, 19 nt, Artificial Sequence
  Description of Artificial Sequence: Synthetic oligonucleotide
gaccccugauguuagggcu

SEQ ID NO: 1718548 - RNA, 19 nt, Artificial Sequence
  Description of Artificial Sequence: Synthetic oligonucleotide
caucacccauagcccaccg

SEQ ID NO: 1718549 - RNA, 19 nt, Artificial Sequence
  Description of Artificial Sequence: Synthetic oligonucleotide
acccagggauuguucccgg

SEQ ID NO: 1718550 - RNA, 19 nt, Artificial Sequence
  Description of Artificial Sequence: Synthetic oligonucleotide
aguguuugcggugccuccu

SEQ ID NO: 1718551 - RNA, 19 nt, Artificial Sequence
  Description of Artificial Sequence: Synthetic oligonucleotide
auauccaauuugucuccua

SEQ ID NO: 1718552 - RNA, 19 nt, Artificial Sequence
  Description of Artificial Sequence: Synthetic oligonucleotide
ggauuguucccggaaugcc

SEQ ID NO: 1718553 - RNA, 19 nt, Artificial Sequence
  Description of Artificial Sequence: Synthetic oligonucleotide
aagacccauuugauguaga

SEQ ID NO: 1718554 - RNA, 19 nt, Artificial Sequence
  Description of Artificial Sequence: Synthetic oligonucleotide
auucuagaccccugauguu

SEQ ID NO: 1718555 - RNA, 19 nt, Artificial Sequence
  Description of Artificial Sequence: Synthetic oligonucleotide
cccugcgcccacaacaagg

SEQ ID NO: 1718556 - RNA, 19 nt, Artificial Sequence
  Description of Artificial Sequence: Synthetic oligonucleotide
gguuaugcaggccuuccaa

SEQ ID NO: 1718557 - RNA, 19 nt, Artificial Sequence
  Description of Artificial Sequence: Synthetic oligonucleotide
uggcugggugcauagcaua

SEQ ID NO: 1718558 - RNA, 19 nt, Artificial Sequence
  Description of Artificial Sequence: Synthetic oligonucleotide
guccgagugacaaguccag

SEQ ID NO: 1718559 - RNA, 19 nt, Artificial Sequence
  Description of Artificial Sequence: Synthetic oligonucleotide
caugaggaucuucauagau

SEQ ID NO: 1718560 - RNA, 19 nt, Artificial Sequence
  Description of Artificial Sequence: Synthetic oligonucleotide
ugucuccuaucugugggua

SEQ ID NO: 1718561 - RNA, 19 nt, Artificial Sequence
  Description of Artificial Sequence: Synthetic oligonucleotide
ggucgggaacaguugagca

SEQ ID NO: 1718562 - RNA, 19 nt, Artificial Sequence
  Description of Artificial Sequence: Synthetic oligonucleotide
auagagguccgcacaggga

SEQ ID NO: 1718563 - RNA, 19 nt, Artificial Sequence
  Description of Artificial Sequence: Synthetic oligonucleotide
caacaguuuuagaguccac

SEQ ID NO: 1718564 - RNA, 19 nt, Artificial Sequence
  Description of Artificial Sequence: Synthetic oligonucleotide
uccuaagguacugcugcau

SEQ ID NO: 1718565 - RNA, 19 nt, Artificial Sequence
  Description of Artificial Sequence: Synthetic oligonucleotide
ccuugcuugggugugguac

SEQ ID NO: 1718566 - RNA, 19 nt, Artificial Sequence
  Description of Artificial Sequence: Synthetic oligonucleotide
gcuagggaucuuugaaaac

SEQ ID NO: 1718567 - RNA, 19 nt, Artificial Sequence
  Description of Artificial Sequence: Synthetic oligonucleotide
cucgguguggucgggaaca

SEQ ID NO: 1718568 - RNA, 19 nt, Artificial Sequence
  Description of Artificial Sequence: Synthetic oligonucleotide
ucccugcgcccacaacaag

SEQ ID NO: 1718569 - RNA, 19 nt, Artificial Sequence
  Description of Artificial Sequence: Synthetic oligonucleotide
ccugaugugauuccugcga

SEQ ID NO: 1718570 - RNA, 19 nt, Artificial Sequence
  Description of Artificial Sequence: Synthetic oligonucleotide
gguauaguaccaggccuug

SEQ ID NO: 1718571 - RNA, 19 nt, Artificial Sequence
  Description of Artificial Sequence: Synthetic oligonucleotide
gauguacacugggugccca

SEQ ID NO: 1718572 - RNA, 19 nt, Artificial Sequence
  Description of Artificial Sequence: Synthetic oligonucleotide
ccuccugcgguacuugagc

SEQ ID NO: 1718573 - RNA, 19 nt, Artificial Sequence
  Description of Artificial Sequence: Synthetic oligonucleotide
ggacuaaaugcuagggauc

SEQ ID NO: 1718574 - RNA, 19 nt, Artificial Sequence
  Description of Artificial Sequence: Synthetic oligonucleotide
guguuugcggugccuccug

SEQ ID NO: 1718575 - RNA, 19 nt, Artificial Sequence
  Description of Artificial Sequence: Synthetic oligonucleotide
gagguccgcacagggacac

SEQ ID NO: 1718576 - RNA, 19 nt, Artificial Sequence
  Description of Artificial Sequence: Synthetic oligonucleotide
ccuaagguacugcugcauc

SEQ ID NO: 1718577 - RNA, 19 nt, Artificial Sequence
  Description of Artificial Sequence: Synthetic oligonucleotide
guggucgggaacaguugag

SEQ ID NO: 1718578 - RNA, 19 nt, Artificial Sequence
  Description of Artificial Sequence: Synthetic oligonucleotide
ccaggaggcauuccgcccc

SEQ ID NO: 1718579 - RNA, 19 nt, Artificial Sequence
  Description of Artificial Sequence: Synthetic oligonucleotide
uguccuccccgggaucugc

SEQ ID NO: 1718580 - RNA, 19 nt, Artificial Sequence
  Description of Artificial Sequence: Synthetic oligonucleotide
gagggucugugguucccca

SEQ ID NO: 1718581 - RNA, 19 nt, Artificial Sequence
  Description of Artificial Sequence: Synthetic oligonucleotide
agaguucccuugggaggcg

SEQ ID NO: 1718582 - RNA, 19 nt, Artificial Sequence
  Description of Artificial Sequence: Synthetic oligonucleotide
uccuaucuguggguauagu

SEQ ID NO: 1718583 - RNA, 19 nt, Artificial Sequence
  Description of Artificial Sequence: Synthetic oligonucleotide
gguccgagugacaagucca

SEQ ID NO: 1718584 - RNA, 19 nt, Artificial Sequence
  Description of Artificial Sequence: Synthetic oligonucleotide
ccuuacugagguuacccga

SEQ ID NO: 1718585 - RNA, 19 nt, Artificial Sequence
  Description of Artificial Sequence: Synthetic oligonucleotide
ggaacaguugagcaggguu

SEQ ID NO: 1718586 - RNA, 19 nt, Artificial Sequence
  Description of Artificial Sequence: Synthetic oligonucleotide
gcgcaacuuucuccuaagg

SEQ ID NO: 1718587 - RNA, 19 nt, Artificial Sequence
  Description of Artificial Sequence: Synthetic oligonucleotide
guguggucgggaacaguug

SEQ ID NO: 1718588 - RNA, 19 nt, Artificial Sequence
  Description of Artificial Sequence: Synthetic oligonucleotide
cuugcuugggugugguacu

SEQ ID NO: 1718589 - RNA, 19 nt, Artificial Sequence
  Description of Artificial Sequence: Synthetic oligonucleotide
caggccuuguccagguaga

SEQ ID NO: 1718590 - RNA, 19 nt, Artificial Sequence
  Description of Artificial Sequence: Synthetic oligonucleotide
ggcggaagacacugucugc

SEQ ID NO: 1718591 - RNA, 19 nt, Artificial Sequence
  Description of Artificial Sequence: Synthetic oligonucleotide
auguacacugggugcccau

SEQ ID NO: 1718592 - RNA, 19 nt, Artificial Sequence
  Description of Artificial Sequence: Synthetic oligonucleotide
gugcgcaacuuucuccuaa

SEQ ID NO: 1718593 - RNA, 19 nt, Artificial Sequence
  Description of Artificial Sequence: Synthetic oligonucleotide
cuaaaugcuagggaucuuu

SEQ ID NO: 1718594 - RNA, 19 nt, Artificial Sequence
  Description of Artificial Sequence: Synthetic oligonucleotide
ggcaaauaauauccaauuu

SEQ ID NO: 1718595 - RNA, 19 nt, Artificial Sequence
  Description of Artificial Sequence: Synthetic oligonucleotide
uagcucuggacgucuuguu

SEQ ID NO: 1718596 - RNA, 19 nt, Artificial Sequence
  Description of Artificial Sequence: Synthetic oligonucleotide
cuccuaagguacugcugca

SEQ ID NO: 1718597 - RNA, 19 nt, Artificial Sequence
  Description of Artificial Sequence: Synthetic oligonucleotide
auaaugcaucugucugcuu

SEQ ID NO: 1718598 - RNA, 19 nt, Artificial Sequence
  Description of Artificial Sequence: Synthetic oligonucleotide
ccuuagggguaugagaaca

SEQ ID NO: 1718599 - RNA, 19 nt, Artificial Sequence
  Description of Artificial Sequence: Synthetic oligonucleotide
ccuaucuguggguauagua

SEQ ID NO: 1718600 - RNA, 19 nt, Artificial Sequence
  Description of Artificial Sequence: Synthetic oligonucleotide
uccccgggaucugcagagg

SEQ ID NO: 1718601 - RNA, 19 nt, Artificial Sequence
  Description of Artificial Sequence: Synthetic oligonucleotide
agguuacccgagguccgag

SEQ ID NO: 1718602 - RNA, 19 nt, Artificial Sequence
  Description of Artificial Sequence: Synthetic oligonucleotide
cuuagggguaugagaacau

SEQ ID NO: 1718603 - RNA, 19 nt, Artificial Sequence
  Description of Artificial Sequence: Synthetic oligonucleotide
gcggaagacacugucugca

SEQ ID NO: 1718604 - RNA, 19 nt, Artificial Sequence
  Description of Artificial Sequence: Synthetic oligonucleotide
ggagaguguuugcggugcc

SEQ ID NO: 1718605 - RNA, 19 nt, Artificial Sequence
  Description of Artificial Sequence: Synthetic oligonucleotide
uugggaggcgaagguccca

SEQ ID NO: 1718606 - RNA, 19 nt, Artificial Sequence
  Description of Artificial Sequence: Synthetic oligonucleotide
ccuacaaaacuguccagcu

SEQ ID NO: 1718607 - RNA, 19 nt, Artificial Sequence
  Description of Artificial Sequence: Synthetic oligonucleotide
gagguuacccgagguccga

SEQ ID NO: 1718608 - RNA, 19 nt, Artificial Sequence
  Description of Artificial Sequence: Synthetic oligonucleotide
gggguaugagaacaucacu

SEQ ID NO: 1718609 - RNA, 19 nt, Artificial Sequence
  Description of Artificial Sequence: Synthetic oligonucleotide
gcgcccacaacaaggugag

SEQ ID NO: 1718610 - RNA, 19 nt, Artificial Sequence
  Description of Artificial Sequence: Synthetic oligonucleotide
gugugguacugugcuggug

SEQ ID NO: 1718611 - RNA, 19 nt, Artificial Sequence
  Description of Artificial Sequence: Synthetic oligonucleotide
gggcaucuccugcacgaug

SEQ ID NO: 1718612 - RNA, 19 nt, Artificial Sequence
  Description of Artificial Sequence: Synthetic oligonucleotide
cuagcucuggacgucuugu

SEQ ID NO: 1718613 - RNA, 19 nt, Artificial Sequence
  Description of Artificial Sequence: Synthetic oligonucleotide
gguugauccagcaggacuu

SEQ ID NO: 1718614 - RNA, 19 nt, Artificial Sequence
  Description of Artificial Sequence: Synthetic oligonucleotide
guuuggcacaccccucccu

SEQ ID NO: 1718615 - RNA, 19 nt, Artificial Sequence
  Description of Artificial Sequence: Synthetic oligonucleotide
agggaucuuugaaaaccuu

SEQ ID NO: 1718616 - RNA, 19 nt, Artificial Sequence
  Description of Artificial Sequence: Synthetic oligonucleotide
ugcaguccuuagggguaug

SEQ ID NO: 1718617 - RNA, 19 nt, Artificial Sequence
  Description of Artificial Sequence: Synthetic oligonucleotide
cauagcccaccguguccuc

SEQ ID NO: 1718618 - RNA, 19 nt, Artificial Sequence
  Description of Artificial Sequence: Synthetic oligonucleotide
cagaggugcgcaacuuucu

SEQ ID NO: 1718619 - RNA, 19 nt, Artificial Sequence
  Description of Artificial Sequence: Synthetic oligonucleotide
cccggaaugcccugcgcug

SEQ ID NO: 1718620 - RNA, 19 nt, Artificial Sequence
  Description of Artificial Sequence: Synthetic oligonucleotide
cccauaguccccgcugacc

SEQ ID NO: 1718621 - RNA, 19 nt, Artificial Sequence
  Description of Artificial Sequence: Synthetic oligonucleotide
uccugcgaauaaggccacu

SEQ ID NO: 1718622 - RNA, 19 nt, Artificial Sequence
  Description of Artificial Sequence: Synthetic oligonucleotide
guccgcacagggacacagc

SEQ ID NO: 1718623 - RNA, 19 nt, Artificial Sequence
  Description of Artificial Sequence: Synthetic oligonucleotide
ugguuccccaaggcugaaa

SEQ ID NO: 1718624 - RNA, 19 nt, Artificial Sequence
  Description of Artificial Sequence: Synthetic oligonucleotide
gaguucccuugggaggcga

SEQ ID NO: 1718625 - RNA, 19 nt, Artificial Sequence
  Description of Artificial Sequence: Synthetic oligonucleotide
ccaaggcugaaaaguuaca

SEQ ID NO: 1718626 - RNA, 19 nt, Artificial Sequence
  Description of Artificial Sequence: Synthetic oligonucleotide
ccacuuuugggcaaauaau

SEQ ID NO: 1718627 - RNA, 19 nt, Artificial Sequence
  Description of Artificial Sequence: Synthetic oligonucleotide
ccccgggaucugcagaggc

SEQ ID NO: 1718628 - RNA, 19 nt, Artificial Sequence
  Description of Artificial Sequence: Synthetic oligonucleotide
gagaguguuugcggugccu

SEQ ID NO: 1718629 - RNA, 19 nt, Artificial Sequence
  Description of Artificial Sequence: Synthetic oligonucleotide
gucccugcgcccacaacaa

SEQ ID NO: 1718630 - RNA, 19 nt, Artificial Sequence
  Description of Artificial Sequence: Synthetic oligonucleotide
ccuguuuguaccagcuucu

SEQ ID NO: 1718631 - RNA, 19 nt, Artificial Sequence
  Description of Artificial Sequence: Synthetic oligonucleotide
gcuucuagcucuggacguc

SEQ ID NO: 1718632 - RNA, 19 nt, Artificial Sequence
  Description of Artificial Sequence: Synthetic oligonucleotide
cugcugcaucacccauagc

SEQ ID NO: 1718633 - RNA, 19 nt, Artificial Sequence
  Description of Artificial Sequence: Synthetic oligonucleotide
gacgucuuguuggaucauu

SEQ ID NO: 1718634 - RNA, 19 nt, Artificial Sequence
  Description of Artificial Sequence: Synthetic oligonucleotide
ggaaugcccugcgcuguug

SEQ ID NO: 1718635 - RNA, 19 nt, Artificial Sequence
  Description of Artificial Sequence: Synthetic oligonucleotide
ggccucagaccuuguagua

SEQ ID NO: 1718636 - RNA, 19 nt, Artificial Sequence
  Description of Artificial Sequence: Synthetic oligonucleotide
cacccauagcccaccgugu

SEQ ID NO: 1718637 - RNA, 19 nt, Artificial Sequence
  Description of Artificial Sequence: Synthetic oligonucleotide
guauaguaccaggccuugu

SEQ ID NO: 1718638 - RNA, 19 nt, Artificial Sequence
  Description of Artificial Sequence: Synthetic oligonucleotide
ccgagguccgagugacaag

SEQ ID NO: 1718639 - RNA, 19 nt, Artificial Sequence
  Description of Artificial Sequence: Synthetic oligonucleotide
gucuccuaucuguggguau

SEQ ID NO: 1718640 - RNA, 19 nt, Artificial Sequence
  Description of Artificial Sequence: Synthetic oligonucleotide
accuugcuuggguguggua

SEQ ID NO: 1718641 - RNA, 19 nt, Artificial Sequence
  Description of Artificial Sequence: Synthetic oligonucleotide
aggcagaggugcgcaacuu

SEQ ID NO: 1718642 - RNA, 19 nt, Artificial Sequence
  Description of Artificial Sequence: Synthetic oligonucleotide
guacugugcuggugguccu

SEQ ID NO: 1718643 - RNA, 19 nt, Artificial Sequence
  Description of Artificial Sequence: Synthetic oligonucleotide
cugcgaauaaggccacuuu

SEQ ID NO: 1718644 - RNA, 19 nt, Artificial Sequence
  Description of Artificial Sequence: Synthetic oligonucleotide
caucucgguguggucggga

SEQ ID NO: 1718645 - RNA, 19 nt, Artificial Sequence
  Description of Artificial Sequence: Synthetic oligonucleotide
caguaccaccaaggugaug

SEQ ID NO: 1718646 - RNA, 19 nt, Artificial Sequence
  Description of Artificial Sequence: Synthetic oligonucleotide
cgggaacaguugagcaggg

SEQ ID NO: 1718647 - RNA, 19 nt, Artificial Sequence
  Description of Artificial Sequence: Synthetic oligonucleotide
ccugguuaugcaggccuuc

SEQ ID NO: 1718648 - RNA, 19 nt, Artificial Sequence
  Description of Artificial Sequence: Synthetic oligonucleotide
gcaguccuuagggguauga

SEQ ID NO: 1718649 - RNA, 19 nt, Artificial Sequence
  Description of Artificial Sequence: Synthetic oligonucleotide
gguuacccgagguccgagu

SEQ ID NO: 1718650 - RNA, 19 nt, Artificial Sequence
  Description of Artificial Sequence: Synthetic oligonucleotide
gcccauaguccccgcugac

SEQ ID NO: 1718651 - RNA, 19 nt, Artificial Sequence
  Description of Artificial Sequence: Synthetic oligonucleotide
ggguauaguaccaggccuu

SEQ ID NO: 1718652 - RNA, 19 nt, Artificial Sequence
  Description of Artificial Sequence: Synthetic oligonucleotide
guccacuuuugggcaaaua

SEQ ID NO: 1718653 - RNA, 19 nt, Artificial Sequence
  Description of Artificial Sequence: Synthetic oligonucleotide
cgauguacacugggugccc

SEQ ID NO: 1718654 - RNA, 19 nt, Artificial Sequence
  Description of Artificial Sequence: Synthetic oligonucleotide
gcugaccuucucauagugu

SEQ ID NO: 1718655 - RNA, 19 nt, Artificial Sequence
  Description of Artificial Sequence: Synthetic oligonucleotide
ccccaaggcugaaaaguua

SEQ ID NO: 1718656 - RNA, 19 nt, Artificial Sequence
  Description of Artificial Sequence: Synthetic oligonucleotide
cccgagguccgagugacaa

SEQ ID NO: 1718657 - RNA, 19 nt, Artificial Sequence
  Description of Artificial Sequence: Synthetic oligonucleotide
ggugcgcaacuuucuccua

SEQ ID NO: 1718658 - RNA, 19 nt, Artificial Sequence
  Description of Artificial Sequence: Synthetic oligonucleotide
ggcagaggugcgcaacuuu

SEQ ID NO: 1718659 - RNA, 19 nt, Artificial Sequence
  Description of Artificial Sequence: Synthetic oligonucleotide
agguccgcacagggacaca

SEQ ID NO: 1718660 - RNA, 19 nt, Artificial Sequence
  Description of Artificial Sequence: Synthetic oligonucleotide
cauaguccccgcugaccuu

SEQ ID NO: 1718661 - RNA, 19 nt, Artificial Sequence
  Description of Artificial Sequence: Synthetic oligonucleotide
ggcgaaggucccaggccuc

SEQ ID NO: 1718662 - RNA, 19 nt, Artificial Sequence
  Description of Artificial Sequence: Synthetic oligonucleotide
gccuuccaaagacccauuu

SEQ ID NO: 1718663 - RNA, 19 nt, Artificial Sequence
  Description of Artificial Sequence: Synthetic oligonucleotide
ccauagcccaccguguccu

SEQ ID NO: 1718664 - RNA, 19 nt, Artificial Sequence
  Description of Artificial Sequence: Synthetic oligonucleotide
gcaguccaaguggggaucu

SEQ ID NO: 1718665 - RNA, 19 nt, Artificial Sequence
  Description of Artificial Sequence: Synthetic oligonucleotide
caccuugcuuggguguggu

SEQ ID NO: 1718666 - RNA, 19 nt, Artificial Sequence
  Description of Artificial Sequence: Synthetic oligonucleotide
cugcgcuguugccuucagu

SEQ ID NO: 1718667 - RNA, 19 nt, Artificial Sequence
  Description of Artificial Sequence: Synthetic oligonucleotide
ccgggaucugcagaggccu

SEQ ID NO: 1718668 - RNA, 19 nt, Artificial Sequence
  Description of Artificial Sequence: Synthetic oligonucleotide
cgucuuguuggaucauuau

SEQ ID NO: 1718669 - RNA, 19 nt, Artificial Sequence
  Description of Artificial Sequence: Synthetic oligonucleotide
ggcagucccugcgcccaca

SEQ ID NO: 1718670 - RNA, 19 nt, Artificial Sequence
  Description of Artificial Sequence: Synthetic oligonucleotide
guucccagccagaguuguu

SEQ ID NO: 1718671 - RNA, 19 nt, Artificial Sequence
  Description of Artificial Sequence: Synthetic oligonucleotide
ccugcgaauaaggccacuu

SEQ ID NO: 1718672 - RNA, 19 nt, Artificial Sequence
  Description of Artificial Sequence: Synthetic oligonucleotide
gcggugccuccugcgguac

SEQ ID NO: 1718673 - RNA, 19 nt, Artificial Sequence
  Description of Artificial Sequence: Synthetic oligonucleotide
ccgcugaccuucucauagu

SEQ ID NO: 1718674 - RNA, 19 nt, Artificial Sequence
  Description of Artificial Sequence: Synthetic oligonucleotide
ccggaaugcccugcgcugu

SEQ ID NO: 1718675 - RNA, 19 nt, Artificial Sequence
  Description of Artificial Sequence: Synthetic oligonucleotide
ggacgucuuguuggaucau

SEQ ID NO: 1718676 - RNA, 19 nt, Artificial Sequence
  Description of Artificial Sequence: Synthetic oligonucleotide
cccugauguuagggcugaa

SEQ ID NO: 1718677 - RNA, 19 nt, Artificial Sequence
  Description of Artificial Sequence: Synthetic oligonucleotide
cggaaugcccugcgcuguu

SEQ ID NO: 1718678 - RNA, 19 nt, Artificial Sequence
  Description of Artificial Sequence: Synthetic oligonucleotide
auuguguaaguucugaugc

SEQ ID NO: 1718679 - RNA, 19 nt, Artificial Sequence
  Description of Artificial Sequence: Synthetic oligonucleotide
aauacuaaccguuuuggcu

SEQ ID NO: 1718680 - RNA, 19 nt, Artificial Sequence
  Description of Artificial Sequence: Synthetic oligonucleotide
uuagaugugagcuuuauaa

SEQ ID NO: 1718681 - RNA, 19 nt, Artificial Sequence
  Description of Artificial Sequence: Synthetic oligonucleotide
aaauacuaaccguuuuggc

SEQ ID NO: 1718682 - RNA, 19 nt, Artificial Sequence
  Description of Artificial Sequence: Synthetic oligonucleotide
aaaauacuaaccguuuugg

SEQ ID NO: 1718683 - RNA, 19 nt, Artificial Sequence
  Description of Artificial Sequence: Synthetic oligonucleotide
accacugacaaauaggguc

SEQ ID NO: 1718684 - RNA, 19 nt, Artificial Sequence
  Description of Artificial Sequence: Synthetic oligonucleotide
aauaacacguauuucuuaa

SEQ ID NO: 1718685 - RNA, 19 nt, Artificial Sequence
  Description of Artificial Sequence: Synthetic oligonucleotide
ugagcuuuauaagagaacc

SEQ ID NO: 1718686 - RNA, 19 nt, Artificial Sequence
  Description of Artificial Sequence: Synthetic oligonucleotide
ugcauucacaaauaacacg

SEQ ID NO: 1718687 - RNA, 19 nt, Artificial Sequence
  Description of Artificial Sequence: Synthetic oligonucleotide
uuugucauuaaaagcauuc

SEQ ID NO: 1718688 - RNA, 19 nt, Artificial Sequence
  Description of Artificial Sequence: Synthetic oligonucleotide
aacccugagaaguagccuc

SEQ ID NO: 1718689 - RNA, 19 nt, Artificial Sequence
  Description of Artificial Sequence: Synthetic oligonucleotide
ugucgaaacugacaaaacc

SEQ ID NO: 1718690 - RNA, 19 nt, Artificial Sequence
  Description of Artificial Sequence: Synthetic oligonucleotide
ugaagguuggccucgcucg

SEQ ID NO: 1718691 - RNA, 19 nt, Artificial Sequence
  Description of Artificial Sequence: Synthetic oligonucleotide
aagcguaugccguucaaag

SEQ ID NO: 1718692 - RNA, 19 nt, Artificial Sequence
  Description of Artificial Sequence: Synthetic oligonucleotide
ugacaaaaccuacaggcug

SEQ ID NO: 1718693 - RNA, 19 nt, Artificial Sequence
  Description of Artificial Sequence: Synthetic oligonucleotide
agcauucaaaacugaagcg

SEQ ID NO: 1718694 - RNA, 19 nt, Artificial Sequence
  Description of Artificial Sequence: Synthetic oligonucleotide
agacaugccucaaacaugc

SEQ ID NO: 1718695 - RNA, 19 nt, Artificial Sequence
  Description of Artificial Sequence: Synthetic oligonucleotide
caugccucaaacaugcagc

SEQ ID NO: 1718696 - RNA, 19 nt, Artificial Sequence
  Description of Artificial Sequence: Synthetic oligonucleotide
gaugugagcuuuauaagag

SEQ ID NO: 1718697 - RNA, 19 nt, Artificial Sequence
  Description of Artificial Sequence: Synthetic oligonucleotide
ugagguacaguguugggca

SEQ ID NO: 1718698 - RNA, 19 nt, Artificial Sequence
  Description of Artificial Sequence: Synthetic oligonucleotide
uggucugaagagcagguag

SEQ ID NO: 1718699 - RNA, 19 nt, Artificial Sequence
  Description of Artificial Sequence: Synthetic oligonucleotide
agagacaugccucaaacau

SEQ ID NO: 1718700 - RNA, 19 nt, Artificial Sequence
  Description of Artificial Sequence: Synthetic oligonucleotide
uuauaagagaaccuucaua

SEQ ID NO: 1718701 - RNA, 19 nt, Artificial Sequence
  Description of Artificial Sequence: Synthetic oligonucleotide
aacacguauuucuuaaaau

SEQ ID NO: 1718702 - RNA, 19 nt, Artificial Sequence
  Description of Artificial Sequence: Synthetic oligonucleotide
ucagagacaugccucaaac

SEQ ID NO: 1718703 - RNA, 19 nt, Artificial Sequence
  Description of Artificial Sequence: Synthetic oligonucleotide
uacgaguuuguucuuggcc

SEQ ID NO: 1718704 - RNA, 19 nt, Artificial Sequence
  Description of Artificial Sequence: Synthetic oligonucleotide
ugugagcuuuauaagagaa

SEQ ID NO: 1718705 - RNA, 19 nt, Artificial Sequence
  Description of Artificial Sequence: Synthetic oligonucleotide
uguaagaauucaucccucc

SEQ ID NO: 1718706 - RNA, 19 nt, Artificial Sequence
  Description of Artificial Sequence: Synthetic oligonucleotide
gacaaauaggguccggacc

SEQ ID NO: 1718707 - RNA, 19 nt, Artificial Sequence
  Description of Artificial Sequence: Synthetic oligonucleotide
aacuccgcuggguacagag

SEQ ID NO: 1718708 - RNA, 19 nt, Artificial Sequence
  Description of Artificial Sequence: Synthetic oligonucleotide
ucaggaucgaagcguaugc

SEQ ID NO: 1718709 - RNA, 19 nt, Artificial Sequence
  Description of Artificial Sequence: Synthetic oligonucleotide
uucuauucaaggaugccuc

SEQ ID NO: 1718710 - RNA, 19 nt, Artificial Sequence
  Description of Artificial Sequence: Synthetic oligonucleotide
aacaugauauuugucauua

SEQ ID NO: 1718711 - RNA, 19 nt, Artificial Sequence
  Description of Artificial Sequence: Synthetic oligonucleotide
cuuuauaagagaaccuuca

SEQ ID NO: 1718712 - RNA, 19 nt, Artificial Sequence
  Description of Artificial Sequence: Synthetic oligonucleotide
agaccaugcauucacaaau

SEQ ID NO: 1718713 - RNA, 19 nt, Artificial Sequence
  Description of Artificial Sequence: Synthetic oligonucleotide
ugagcuaaccuaguguaag

SEQ ID NO: 1718714 - RNA, 19 nt, Artificial Sequence
  Description of Artificial Sequence: Synthetic oligonucleotide
cuagucguaguguuugcgg

SEQ ID NO: 1718715 - RNA, 19 nt, Artificial Sequence
  Description of Artificial Sequence: Synthetic oligonucleotide
aggaucgaagcguaugccg

SEQ ID NO: 1718716 - RNA, 19 nt, Artificial Sequence
  Description of Artificial Sequence: Synthetic oligonucleotide
agcguaugccguucaaagc

SEQ ID NO: 1718717 - RNA, 19 nt, Artificial Sequence
  Description of Artificial Sequence: Synthetic oligonucleotide
agugaggcgggauagguga

SEQ ID NO: 1718718 - RNA, 19 nt, Artificial Sequence
  Description of Artificial Sequence: Synthetic oligonucleotide
aaauaacacguauuucuua

SEQ ID NO: 1718719 - RNA, 19 nt, Artificial Sequence
  Description of Artificial Sequence: Synthetic oligonucleotide
uuuauaagagaaccuucau

SEQ ID NO: 1718720 - RNA, 19 nt, Artificial Sequence
  Description of Artificial Sequence: Synthetic oligonucleotide
acgaguuuguucuuggcca

SEQ ID NO: 1718721 - RNA, 19 nt, Artificial Sequence
  Description of Artificial Sequence: Synthetic oligonucleotide
cagaagugagcuaaccuag

SEQ ID NO: 1718722 - RNA, 19 nt, Artificial Sequence
  Description of Artificial Sequence: Synthetic oligonucleotide
auacuaaccguuuuggcuu

SEQ ID NO: 1718723 - RNA, 19 nt, Artificial Sequence
  Description of Artificial Sequence: Synthetic oligonucleotide
uucacaacacaauugugua

SEQ ID NO: 1718724 - RNA, 19 nt, Artificial Sequence
  Description of Artificial Sequence: Synthetic oligonucleotide
uaaagugcgggcacuguga

SEQ ID NO: 1718725 - RNA, 19 nt, Artificial Sequence
  Description of Artificial Sequence: Synthetic oligonucleotide
aaagugcgggcacugugag

SEQ ID NO: 1718726 - RNA, 19 nt, Artificial Sequence
  Description of Artificial Sequence: Synthetic oligonucleotide
uuuggagucccuacgaguu

SEQ ID NO: 1718727 - RNA, 19 nt, Artificial Sequence
  Description of Artificial Sequence: Synthetic oligonucleotide
gaauggucugaagagcagg

SEQ ID NO: 1718728 - RNA, 19 nt, Artificial Sequence
  Description of Artificial Sequence: Synthetic oligonucleotide
cuauucagagacaugccuc

SEQ ID NO: 1718729 - RNA, 19 nt, Artificial Sequence
  Description of Artificial Sequence: Synthetic oligonucleotide
aacugaagcgcagaaguga

SEQ ID NO: 1718730 - RNA, 19 nt, Artificial Sequence
  Description of Artificial Sequence: Synthetic oligonucleotide
agugagcuaaccuagugua

SEQ ID NO: 1718731 - RNA, 19 nt, Artificial Sequence
  Description of Artificial Sequence: Synthetic oligonucleotide
uuugcgggauuucaggauc

SEQ ID NO: 1718732 - RNA, 19 nt, Artificial Sequence
  Description of Artificial Sequence: Synthetic oligonucleotide
ugaagcgcagaagugagcu

SEQ ID NO: 1718733 - RNA, 19 nt, Artificial Sequence
  Description of Artificial Sequence: Synthetic oligonucleotide
uccuuuucggcuuugccuc

SEQ ID NO: 1718734 - RNA, 19 nt, Artificial Sequence
  Description of Artificial Sequence: Synthetic oligonucleotide
ucuagucguaguguuugcg

SEQ ID NO: 1718735 - RNA, 19 nt, Artificial Sequence
  Description of Artificial Sequence: Synthetic oligonucleotide
uguuugcgggauuucagga

SEQ ID NO: 1718736 - RNA, 19 nt, Artificial Sequence
  Description of Artificial Sequence: Synthetic oligonucleotide
cauucaaaacugaagcgca

SEQ ID NO: 1718737 - RNA, 19 nt, Artificial Sequence
  Description of Artificial Sequence: Synthetic oligonucleotide
aggcuguuuagaugugagc

SEQ ID NO: 1718738 - RNA, 19 nt, Artificial Sequence
  Description of Artificial Sequence: Synthetic oligonucleotide
ucuauucaaggaugccucc

SEQ ID NO: 1718739 - RNA, 19 nt, Artificial Sequence
  Description of Artificial Sequence: Synthetic oligonucleotide
gaguguucuccuuuucggc

SEQ ID NO: 1718740 - RNA, 19 nt, Artificial Sequence
  Description of Artificial Sequence: Synthetic oligonucleotide
uugcgggauuucaggaucg

SEQ ID NO: 1718741 - RNA, 19 nt, Artificial Sequence
  Description of Artificial Sequence: Synthetic oligonucleotide
ugacaaauaggguccggac

SEQ ID NO: 1718742 - RNA, 19 nt, Artificial Sequence
  Description of Artificial Sequence: Synthetic oligonucleotide
agccccguaguccggacgc

SEQ ID NO: 1718743 - RNA, 19 nt, Artificial Sequence
  Description of Artificial Sequence: Synthetic oligonucleotide
ggaguguucuccuuuucgg

SEQ ID NO: 1718744 - RNA, 19 nt, Artificial Sequence
  Description of Artificial Sequence: Synthetic oligonucleotide
aagugcgggcacugugagc

SEQ ID NO: 1718745 - RNA, 19 nt, Artificial Sequence
  Description of Artificial Sequence: Synthetic oligonucleotide
uuagcaaacucuagucgua

SEQ ID NO: 1718746 - RNA, 19 nt, Artificial Sequence
  Description of Artificial Sequence: Synthetic oligonucleotide
caugcagcuuauuaggaga

SEQ ID NO: 1718747 - RNA, 19 nt, Artificial Sequence
  Description of Artificial Sequence: Synthetic oligonucleotide
gcuacugggguaaagugcg

SEQ ID NO: 1718748 - RNA, 19 nt, Artificial Sequence
  Description of Artificial Sequence: Synthetic oligonucleotide
uaugccguucaaagcauuc

SEQ ID NO: 1718749 - RNA, 19 nt, Artificial Sequence
  Description of Artificial Sequence: Synthetic oligonucleotide
gcucauauggcucucuggc

SEQ ID NO: 1718750 - RNA, 19 nt, Artificial Sequence
  Description of Artificial Sequence: Synthetic oligonucleotide
uccgccguucaucuucccg

SEQ ID NO: 1718751 - RNA, 19 nt, Artificial Sequence
  Description of Artificial Sequence: Synthetic oligonucleotide
uucaggaucgaagcguaug

SEQ ID NO: 1718752 - RNA, 19 nt, Artificial Sequence
  Description of Artificial Sequence: Synthetic oligonucleotide
guaaagugcgggcacugug

SEQ ID NO: 1718753 - RNA, 19 nt, Artificial Sequence
  Description of Artificial Sequence: Synthetic oligonucleotide
aaccuaguguaagaauuca

SEQ ID NO: 1718754 - RNA, 19 nt, Artificial Sequence
  Description of Artificial Sequence: Synthetic oligonucleotide
acaauuguguaaguucuga

SEQ ID NO: 1718755 - RNA, 19 nt, Artificial Sequence
  Description of Artificial Sequence: Synthetic oligonucleotide
acucuagucguaguguuug

SEQ ID NO: 1718756 - RNA, 19 nt, Artificial Sequence
  Description of Artificial Sequence: Synthetic oligonucleotide
uguucuauucaaggaugcc

SEQ ID NO: 1718757 - RNA, 19 nt, Artificial Sequence
  Description of Artificial Sequence: Synthetic oligonucleotide
cugagguacaguguugggc

SEQ ID NO: 1718758 - RNA, 19 nt, Artificial Sequence
  Description of Artificial Sequence: Synthetic oligonucleotide
gaagguuggccucgcucgg

SEQ ID NO: 1718759 - RNA, 19 nt, Artificial Sequence
  Description of Artificial Sequence: Synthetic oligonucleotide
ggauuucaggaucgaagcg

SEQ ID NO: 1718760 - RNA, 19 nt, Artificial Sequence
  Description of Artificial Sequence: Synthetic oligonucleotide
auaggugaaagcagcagga

SEQ ID NO: 1718761 - RNA, 19 nt, Artificial Sequence
  Description of Artificial Sequence: Synthetic oligonucleotide
uccuuagucgccgcgcggg

SEQ ID NO: 1718762 - RNA, 19 nt, Artificial Sequence
  Description of Artificial Sequence: Synthetic oligonucleotide
aagcgcagaagugagcuaa

SEQ ID NO: 1718763 - RNA, 19 nt, Artificial Sequence
  Description of Artificial Sequence: Synthetic oligonucleotide
cuuagcaaacucuagucgu

SEQ ID NO: 1718764 - RNA, 19 nt, Artificial Sequence
  Description of Artificial Sequence: Synthetic oligonucleotide
cuucccgguccuuagucgc

SEQ ID NO: 1718765 - RNA, 19 nt, Artificial Sequence
  Description of Artificial Sequence: Synthetic oligonucleotide
uagcaaacucuagucguag

SEQ ID NO: 1718766 - RNA, 19 nt, Artificial Sequence
  Description of Artificial Sequence: Synthetic oligonucleotide
uucauagcccuugaauggu

SEQ ID NO: 1718767 - RNA, 19 nt, Artificial Sequence
  Description of Artificial Sequence: Synthetic oligonucleotide
acugaagcgcagaagugag

SEQ ID NO: 1718768 - RNA, 19 nt, Artificial Sequence
  Description of Artificial Sequence: Synthetic oligonucleotide
ccuaguguaagaauucauc

SEQ ID NO: 1718769 - RNA, 19 nt, Artificial Sequence
  Description of Artificial Sequence: Synthetic oligonucleotide
caucccuccauucuuaaaa

SEQ ID NO: 1718770 - RNA, 19 nt, Artificial Sequence
  Description of Artificial Sequence: Synthetic oligonucleotide
uguguaaguucugaugcua

SEQ ID NO: 1718771 - RNA, 19 nt, Artificial Sequence
  Description of Artificial Sequence: Synthetic oligonucleotide
ucccuccauucuuaaaaug

SEQ ID NO: 1718772 - RNA, 19 nt, Artificial Sequence
  Description of Artificial Sequence: Synthetic oligonucleotide
aaaggaguacugggguuug

SEQ ID NO: 1718773 - RNA, 19 nt, Artificial Sequence
  Description of Artificial Sequence: Synthetic oligonucleotide
cuaaccuaguguaagaauu

SEQ ID NO: 1718774 - RNA, 19 nt, Artificial Sequence
  Description of Artificial Sequence: Synthetic oligonucleotide
aggcgggauaggugaaagc

SEQ ID NO: 1718775 - RNA, 19 nt, Artificial Sequence
  Description of Artificial Sequence: Synthetic oligonucleotide
ccacugacaaauagggucc

SEQ ID NO: 1718776 - RNA, 19 nt, Artificial Sequence
  Description of Artificial Sequence: Synthetic oligonucleotide
auaacacguauuucuuaaa

SEQ ID NO: 1718777 - RNA, 19 nt, Artificial Sequence
  Description of Artificial Sequence: Synthetic oligonucleotide
guuggccucgcucggagug

SEQ ID NO: 1718778 - RNA, 19 nt, Artificial Sequence
  Description of Artificial Sequence: Synthetic oligonucleotide
gaugcuauucagagacaug

SEQ ID NO: 1718779 - RNA, 19 nt, Artificial Sequence
  Description of Artificial Sequence: Synthetic oligonucleotide
caggcgcuaacuccgcugg

SEQ ID NO: 1718780 - RNA, 19 nt, Artificial Sequence
  Description of Artificial Sequence: Synthetic oligonucleotide
cuucguguuugccuuagca

SEQ ID NO: 1718781 - RNA, 19 nt, Artificial Sequence
  Description of Artificial Sequence: Synthetic oligonucleotide
ggguacagaggguacgggg

SEQ ID NO: 1718782 - RNA, 19 nt, Artificial Sequence
  Description of Artificial Sequence: Synthetic oligonucleotide
uaaccguuuuggcuuuacu

SEQ ID NO: 1718783 - RNA, 19 nt, Artificial Sequence
  Description of Artificial Sequence: Synthetic oligonucleotide
gucgaaacugacaaaaccu

SEQ ID NO: 1718784 - RNA, 19 nt, Artificial Sequence
  Description of Artificial Sequence: Synthetic oligonucleotide
cuacgaguuuguucuuggc

SEQ ID NO: 1718785 - RNA, 19 nt, Artificial Sequence
  Description of Artificial Sequence: Synthetic oligonucleotide
ggcacugugagcucauaug

SEQ ID NO: 1718786 - RNA, 19 nt, Artificial Sequence
  Description of Artificial Sequence: Synthetic oligonucleotide
accuacaggcuguuuagau

SEQ ID NO: 1718787 - RNA, 19 nt, Artificial Sequence
  Description of Artificial Sequence: Synthetic oligonucleotide
guacagcagugucagacca

SEQ ID NO: 1718788 - RNA, 19 nt, Artificial Sequence
  Description of Artificial Sequence: Synthetic oligonucleotide
uggagucccuacgaguuug

SEQ ID NO: 1718789 - RNA, 19 nt, Artificial Sequence
  Description of Artificial Sequence: Synthetic oligonucleotide
uuugccuccgccguucauc

SEQ ID NO: 1718790 - RNA, 19 nt, Artificial Sequence
  Description of Artificial Sequence: Synthetic oligonucleotide
ucauagcccuugaaugguc

SEQ ID NO: 1718791 - RNA, 19 nt, Artificial Sequence
  Description of Artificial Sequence: Synthetic oligonucleotide
gaggguacggggcccacac

SEQ ID NO: 1718792 - RNA, 19 nt, Artificial Sequence
  Description of Artificial Sequence: Synthetic oligonucleotide
aaacggcagauggagucca

SEQ ID NO: 1718793 - RNA, 19 nt, Artificial Sequence
  Description of Artificial Sequence: Synthetic oligonucleotide
agccggacggcgcugcggg

SEQ ID NO: 1718794 - RNA, 19 nt, Artificial Sequence
  Description of Artificial Sequence: Synthetic oligonucleotide
gcagaccacugacaaauag

SEQ ID NO: 1718795 - RNA, 19 nt, Artificial Sequence
  Description of Artificial Sequence: Synthetic oligonucleotide
gagcuaaccuaguguaaga

SEQ ID NO: 1718796 - RNA, 19 nt, Artificial Sequence
  Description of Artificial Sequence: Synthetic oligonucleotide
gagcucauauggcucucug

SEQ ID NO: 1718797 - RNA, 19 nt, Artificial Sequence
  Description of Artificial Sequence: Synthetic oligonucleotide
gcagguagagcucccgggg

SEQ ID NO: 1718798 - RNA, 19 nt, Artificial Sequence
  Description of Artificial Sequence: Synthetic oligonucleotide
uguuuagaugugagcuuua

SEQ ID NO: 1718799 - RNA, 19 nt, Artificial Sequence
  Description of Artificial Sequence: Synthetic oligonucleotide
agcaaacucuagucguagu

SEQ ID NO: 1718800 - RNA, 19 nt, Artificial Sequence
  Description of Artificial Sequence: Synthetic oligonucleotide
gcauucacaaauaacacgu

SEQ ID NO: 1718801 - RNA, 19 nt, Artificial Sequence
  Description of Artificial Sequence: Synthetic oligonucleotide
aaggaguacugggguuugg

SEQ ID NO: 1718802 - RNA, 19 nt, Artificial Sequence
  Description of Artificial Sequence: Synthetic oligonucleotide
gaggcgggauaggugaaag

SEQ ID NO: 1718803 - RNA, 19 nt, Artificial Sequence
  Description of Artificial Sequence: Synthetic oligonucleotide
gggguuuggagucccuacg

SEQ ID NO: 1718804 - RNA, 19 nt, Artificial Sequence
  Description of Artificial Sequence: Synthetic oligonucleotide
acggggcccacacuucagg

SEQ ID NO: 1718805 - RNA, 19 nt, Artificial Sequence
  Description of Artificial Sequence: Synthetic oligonucleotide
ccuacgaguuuguucuugg

SEQ ID NO: 1718806 - RNA, 19 nt, Artificial Sequence
  Description of Artificial Sequence: Synthetic oligonucleotide
aucgaagcguaugccguuc

SEQ ID NO: 1718807 - RNA, 19 nt, Artificial Sequence
  Description of Artificial Sequence: Synthetic oligonucleotide
cugaagcgcagaagugagc

SEQ ID NO: 1718808 - RNA, 19 nt, Artificial Sequence
  Description of Artificial Sequence: Synthetic oligonucleotide
guucuauucaaggaugccu

SEQ ID NO: 1718809 - RNA, 19 nt, Artificial Sequence
  Description of Artificial Sequence: Synthetic oligonucleotide
cucuagucguaguguuugc

SEQ ID NO: 1718810 - RNA, 19 nt, Artificial Sequence
  Description of Artificial Sequence: Synthetic oligonucleotide
uuuucggcuuugccuccgc

SEQ ID NO: 1718811 - RNA, 19 nt, Artificial Sequence
  Description of Artificial Sequence: Synthetic oligonucleotide
gugagcuuuauaagagaac

SEQ ID NO: 1718812 - RNA, 19 nt, Artificial Sequence
  Description of Artificial Sequence: Synthetic oligonucleotide
agggcuacugggguaaagu

SEQ ID NO: 1718813 - RNA, 19 nt, Artificial Sequence
  Description of Artificial Sequence: Synthetic oligonucleotide
gagccagcgcaucugggca

SEQ ID NO: 1718814 - RNA, 19 nt, Artificial Sequence
  Description of Artificial Sequence: Synthetic oligonucleotide
acugacaaauaggguccgg

SEQ ID NO: 1718815 - RNA, 19 nt, Artificial Sequence
  Description of Artificial Sequence: Synthetic oligonucleotide
guugggaccggagccgccg

SEQ ID NO: 1718816 - RNA, 19 nt, Artificial Sequence
  Description of Artificial Sequence: Synthetic oligonucleotide
gccuuagcaaacucuaguc

SEQ ID NO: 1718817 - RNA, 19 nt, Artificial Sequence
  Description of Artificial Sequence: Synthetic oligonucleotide
uucccgguccuuagucgcc

SEQ ID NO: 1718818 - RNA, 19 nt, Artificial Sequence
  Description of Artificial Sequence: Synthetic oligonucleotide
agcuaaccuaguguaagaa

SEQ ID NO: 1718819 - RNA, 19 nt, Artificial Sequence
  Description of Artificial Sequence: Synthetic oligonucleotide
agcgacugucgaaacugac

SEQ ID NO: 1718820 - RNA, 19 nt, Artificial Sequence
  Description of Artificial Sequence: Synthetic oligonucleotide
aaccuacaggcuguuuaga

SEQ ID NO: 1718821 - RNA, 19 nt, Artificial Sequence
  Description of Artificial Sequence: Synthetic oligonucleotide
acaugauauuugucauuaa

SEQ ID NO: 1718822 - RNA, 19 nt, Artificial Sequence
  Description of Artificial Sequence: Synthetic oligonucleotide
uagccucggagggagggag

SEQ ID NO: 1718823 - RNA, 19 nt, Artificial Sequence
  Description of Artificial Sequence: Synthetic oligonucleotide
cucgcucggaguguucucc

SEQ ID NO: 1718824 - RNA, 19 nt, Artificial Sequence
  Description of Artificial Sequence: Synthetic oligonucleotide
ccuacaggcuguuuagaug

SEQ ID NO: 1718825 - RNA, 19 nt, Artificial Sequence
  Description of Artificial Sequence: Synthetic oligonucleotide
uacggggcccacacuucag

SEQ ID NO: 1718826 - RNA, 19 nt, Artificial Sequence
  Description of Artificial Sequence: Synthetic oligonucleotide
caggaucgaagcguaugcc

SEQ ID NO: 1718827 - RNA, 19 nt, Artificial Sequence
  Description of Artificial Sequence: Synthetic oligonucleotide
ggcuacugggguaaagugc

SEQ ID NO: 1718828 - RNA, 19 nt, Artificial Sequence
  Description of Artificial Sequence: Synthetic oligonucleotide
gguccuuagucgccgcgcg

SEQ ID NO: 1718829 - RNA, 19 nt, Artificial Sequence
  Description of Artificial Sequence: Synthetic oligonucleotide
cgggauuucaggaucgaag

SEQ ID NO: 1718830 - RNA, 19 nt, Artificial Sequence
  Description of Artificial Sequence: Synthetic oligonucleotide
uuucaggaucgaagcguau

SEQ ID NO: 1718831 - RNA, 19 nt, Artificial Sequence
  Description of Artificial Sequence: Synthetic oligonucleotide
gagccccguaguccggacg

SEQ ID NO: 1718832 - RNA, 19 nt, Artificial Sequence
  Description of Artificial Sequence: Synthetic oligonucleotide
uuugcggccucugcuucug

SEQ ID NO: 1718833 - RNA, 19 nt, Artificial Sequence
  Description of Artificial Sequence: Synthetic oligonucleotide
ggcgggauaggugaaagca

SEQ ID NO: 1718834 - RNA, 19 nt, Artificial Sequence
  Description of Artificial Sequence: Synthetic oligonucleotide
cacugacaaauaggguccg

SEQ ID NO: 1718835 - RNA, 19 nt, Artificial Sequence
  Description of Artificial Sequence: Synthetic oligonucleotide
uacagaggguacggggccc

SEQ ID NO: 1718836 - RNA, 19 nt, Artificial Sequence
  Description of Artificial Sequence: Synthetic oligonucleotide
gccucaaacaugcagcuua

SEQ ID NO: 1718837 - RNA, 19 nt, Artificial Sequence
  Description of Artificial Sequence: Synthetic oligonucleotide
gguacaguguugggcaaag

SEQ ID NO: 1718838 - RNA, 19 nt, Artificial Sequence
  Description of Artificial Sequence: Synthetic oligonucleotide
cugacaaauaggguccgga

SEQ ID NO: 1718839 - RNA, 19 nt, Artificial Sequence
  Description of Artificial Sequence: Synthetic oligonucleotide
ucccgguccuuagucgccg

SEQ ID NO: 1718840 - RNA, 19 nt, Artificial Sequence
  Description of Artificial Sequence: Synthetic oligonucleotide
gaagcguaugccguucaaa

SEQ ID NO: 1718841 - RNA, 19 nt, Artificial Sequence
  Description of Artificial Sequence: Synthetic oligonucleotide
guccacacauucacaacac

SEQ ID NO: 1718842 - RNA, 19 nt, Artificial Sequence
  Description of Artificial Sequence: Synthetic oligonucleotide
acaggcuguuuagauguga

SEQ ID NO: 1718843 - RNA, 19 nt, Artificial Sequence
  Description of Artificial Sequence: Synthetic oligonucleotide
uccgcuggguacagagggu

SEQ ID NO: 1718844 - RNA, 19 nt, Artificial Sequence
  Description of Artificial Sequence: Synthetic oligonucleotide
gggcuacugggguaaagug

SEQ ID NO: 1718845 - RNA, 19 nt, Artificial Sequence
  Description of Artificial Sequence: Synthetic oligonucleotide
acgcagcgcgcuuucucuc

SEQ ID NO: 1718846 - RNA, 19 nt, Artificial Sequence
  Description of Artificial Sequence: Synthetic oligonucleotide
agaagugagcuaaccuagu

SEQ ID NO: 1718847 - RNA, 19 nt, Artificial Sequence
  Description of Artificial Sequence: Synthetic oligonucleotide
uacuaaccguuuuggcuuu

SEQ ID NO: 1718848 - RNA, 19 nt, Artificial Sequence
  Description of Artificial Sequence: Synthetic oligonucleotide
cgaaacugacaaaaccuac

SEQ ID NO: 1718849 - RNA, 19 nt, Artificial Sequence
  Description of Artificial Sequence: Synthetic oligonucleotide
gaaccuccgagaggccggg

SEQ ID NO: 1718850 - RNA, 19 nt, Artificial Sequence
  Description of Artificial Sequence: Synthetic oligonucleotide
cuauucaaggaugccucca

SEQ ID NO: 1718851 - RNA, 19 nt, Artificial Sequence
  Description of Artificial Sequence: Synthetic oligonucleotide
cgggauaggugaaagcagc

SEQ ID NO: 1718852 - RNA, 19 nt, Artificial Sequence
  Description of Artificial Sequence: Synthetic oligonucleotide
gcuauucagagacaugccu

SEQ ID NO: 1718853 - RNA, 19 nt, Artificial Sequence
  Description of Artificial Sequence: Synthetic oligonucleotide
uuggagucccuacgaguuu

SEQ ID NO: 1718854 - RNA, 19 nt, Artificial Sequence
  Description of Artificial Sequence: Synthetic oligonucleotide
ugagcucauauggcucucu

SEQ ID NO: 1718855 - RNA, 19 nt, Artificial Sequence
  Description of Artificial Sequence: Synthetic oligonucleotide
cagaccaugcauucacaaa

SEQ ID NO: 1718856 - RNA, 19 nt, Artificial Sequence
  Description of Artificial Sequence: Synthetic oligonucleotide
guccuuagucgccgcgcgg

SEQ ID NO: 1718857 - RNA, 19 nt, Artificial Sequence
  Description of Artificial Sequence: Synthetic oligonucleotide
uggccaucuucguguuugc

SEQ ID NO: 1718858 - RNA, 19 nt, Artificial Sequence
  Description of Artificial Sequence: Synthetic oligonucleotide
gggaaccuccgagaggccg

SEQ ID NO: 1718859 - RNA, 19 nt, Artificial Sequence
  Description of Artificial Sequence: Synthetic oligonucleotide
uacugggguuuggaguccc

SEQ ID NO: 1718860 - RNA, 19 nt, Artificial Sequence
  Description of Artificial Sequence: Synthetic oligonucleotide
gcuggguacagaggguacg

SEQ ID NO: 1718861 - RNA, 19 nt, Artificial Sequence
  Description of Artificial Sequence: Synthetic oligonucleotide
cuaacuccgcuggguacag

SEQ ID NO: 1718862 - RNA, 19 nt, Artificial Sequence
  Description of Artificial Sequence: Synthetic oligonucleotide
cuaaccguuuuggcuuuac

SEQ ID NO: 1718863 - RNA, 19 nt, Artificial Sequence
  Description of Artificial Sequence: Synthetic oligonucleotide
cauucuuaaaaugucuguu

SEQ ID NO: 1718864 - RNA, 19 nt, Artificial Sequence
  Description of Artificial Sequence: Synthetic oligonucleotide
gagaggccgggcgagcccc

SEQ ID NO: 1718865 - RNA, 19 nt, Artificial Sequence
  Description of Artificial Sequence: Synthetic oligonucleotide
ggcggggaaccuccgagag

SEQ ID NO: 1718866 - RNA, 19 nt, Artificial Sequence
  Description of Artificial Sequence: Synthetic oligonucleotide
agcgcagaagugagcuaac

SEQ ID NO: 1718867 - RNA, 19 nt, Artificial Sequence
  Description of Artificial Sequence: Synthetic oligonucleotide
caaacucuagucguagugu

SEQ ID NO: 1718868 - RNA, 19 nt, Artificial Sequence
  Description of Artificial Sequence: Synthetic oligonucleotide
gacugucgaaacugacaaa

SEQ ID NO: 1718869 - RNA, 19 nt, Artificial Sequence
  Description of Artificial Sequence: Synthetic oligonucleotide
ugcagcuuauuaggagaaa

SEQ ID NO: 1718870 - RNA, 19 nt, Artificial Sequence
  Description of Artificial Sequence: Synthetic oligonucleotide
accuaguguaagaauucau

SEQ ID NO: 1718871 - RNA, 19 nt, Artificial Sequence
  Description of Artificial Sequence: Synthetic oligonucleotide
augcagcuuauuaggagaa

SEQ ID NO: 1718872 - RNA, 19 nt, Artificial Sequence
  Description of Artificial Sequence: Synthetic oligonucleotide
ugcgggcacugugagcuca

SEQ ID NO: 1718873 - RNA, 19 nt, Artificial Sequence
  Description of Artificial Sequence: Synthetic oligonucleotide
gcuucugagcgacugucga

SEQ ID NO: 1718874 - RNA, 19 nt, Artificial Sequence
  Description of Artificial Sequence: Synthetic oligonucleotide
ggaccggagccgccgaggg

SEQ ID NO: 1718875 - RNA, 19 nt, Artificial Sequence
  Description of Artificial Sequence: Synthetic oligonucleotide
guacggggcccacacuuca

SEQ ID NO: 1718876 - RNA, 19 nt, Artificial Sequence
  Description of Artificial Sequence: Synthetic oligonucleotide
ugggaccggagccgccgag

SEQ ID NO: 1718877 - RNA, 19 nt, Artificial Sequence
  Description of Artificial Sequence: Synthetic oligonucleotide
ucgcucggaguguucuccu

SEQ ID NO: 1718878 - RNA, 19 nt, Artificial Sequence
  Description of Artificial Sequence: Synthetic oligonucleotide
aggcgcuaacuccgcuggg

SEQ ID NO: 1718879 - RNA, 19 nt, Artificial Sequence
  Description of Artificial Sequence: Synthetic oligonucleotide
gguccggaccuccuccucc

SEQ ID NO: 1718880 - RNA, 19 nt, Artificial Sequence
  Description of Artificial Sequence: Synthetic oligonucleotide
cuucugagcgacugucgaa

SEQ ID NO: 1718881 - RNA, 19 nt, Artificial Sequence
  Description of Artificial Sequence: Synthetic oligonucleotide
guccggacgcggccgaggc

SEQ ID NO: 1718882 - RNA, 19 nt, Artificial Sequence
  Description of Artificial Sequence: Synthetic oligonucleotide
guuugcgggauuucaggau

SEQ ID NO: 1718883 - RNA, 19 nt, Artificial Sequence
  Description of Artificial Sequence: Synthetic oligonucleotide
uugggaccggagccgccga

SEQ ID NO: 1718884 - RNA, 19 nt, Artificial Sequence
  Description of Artificial Sequence: Synthetic oligonucleotide
ucccgggguuugaugucca

SEQ ID NO: 1718885 - RNA, 19 nt, Artificial Sequence
  Description of Artificial Sequence: Synthetic oligonucleotide
ugaggcgggauaggugaaa

SEQ ID NO: 1718886 - RNA, 19 nt, Artificial Sequence
  Description of Artificial Sequence: Synthetic oligonucleotide
ggucugaagagcagguaga

SEQ ID NO: 1718887 - RNA, 19 nt, Artificial Sequence
  Description of Artificial Sequence: Synthetic oligonucleotide
cugggguaaagugcgggca

SEQ ID NO: 1718888 - RNA, 19 nt, Artificial Sequence
  Description of Artificial Sequence: Synthetic oligonucleotide
cauagcccuugaauggucu

SEQ ID NO: 1718889 - RNA, 19 nt, Artificial Sequence
  Description of Artificial Sequence: Synthetic oligonucleotide
cggggaaccuccgagaggc

SEQ ID NO: 1718890 - RNA, 19 nt, Artificial Sequence
  Description of Artificial Sequence: Synthetic oligonucleotide
aguccggacgcggccgagg

SEQ ID NO: 1718891 - RNA, 19 nt, Artificial Sequence
  Description of Artificial Sequence: Synthetic oligonucleotide
gaagcgcagaagugagcua

SEQ ID NO: 1718892 - RNA, 19 nt, Artificial Sequence
  Description of Artificial Sequence: Synthetic oligonucleotide
gcaggcgcuaacuccgcug

SEQ ID NO: 1718893 - RNA, 19 nt, Artificial Sequence
  Description of Artificial Sequence: Synthetic oligonucleotide
gaguuuguucuuggccauc

SEQ ID NO: 1718894 - RNA, 19 nt, Artificial Sequence
  Description of Artificial Sequence: Synthetic oligonucleotide
ugcgggauuucaggaucga

SEQ ID NO: 1718895 - RNA, 19 nt, Artificial Sequence
  Description of Artificial Sequence: Synthetic oligonucleotide
aggguccggaccuccuccu

SEQ ID NO: 1718896 - RNA, 19 nt, Artificial Sequence
  Description of Artificial Sequence: Synthetic oligonucleotide
guaguguuugcgggauuuc

SEQ ID NO: 1718897 - RNA, 19 nt, Artificial Sequence
  Description of Artificial Sequence: Synthetic oligonucleotide
agcaggcgcuaacuccgcu

SEQ ID NO: 1718898 - RNA, 19 nt, Artificial Sequence
  Description of Artificial Sequence: Synthetic oligonucleotide
uccugaagguuggccucgc

SEQ ID NO: 1718899 - RNA, 19 nt, Artificial Sequence
  Description of Artificial Sequence: Synthetic oligonucleotide
agccucggagggagggagc

SEQ ID NO: 1718900 - RNA, 19 nt, Artificial Sequence
  Description of Artificial Sequence: Synthetic oligonucleotide
acaaaaccuacaggcuguu

SEQ ID NO: 1718901 - RNA, 19 nt, Artificial Sequence
  Description of Artificial Sequence: Synthetic oligonucleotide
gcuaacuccgcuggguaca

SEQ ID NO: 1718902 - RNA, 19 nt, Artificial Sequence
  Description of Artificial Sequence: Synthetic oligonucleotide
gaccggagccgccgagggc

SEQ ID NO: 1718903 - RNA, 19 nt, Artificial Sequence
  Description of Artificial Sequence: Synthetic oligonucleotide
guacugggguuuggagucc

SEQ ID NO: 1718904 - RNA, 19 nt, Artificial Sequence
  Description of Artificial Sequence: Synthetic oligonucleotide
cuggcaggcucugggcagc

SEQ ID NO: 1718905 - RNA, 19 nt, Artificial Sequence
  Description of Artificial Sequence: Synthetic oligonucleotide
uuggccucgcucggagugu

SEQ ID NO: 1718906 - RNA, 19 nt, Artificial Sequence
  Description of Artificial Sequence: Synthetic oligonucleotide
gagcgacugucgaaacuga

SEQ ID NO: 1718907 - RNA, 19 nt, Artificial Sequence
  Description of Artificial Sequence: Synthetic oligonucleotide
gucagaccaugcauucaca

SEQ ID NO: 1718908 - RNA, 19 nt, Artificial Sequence
  Description of Artificial Sequence: Synthetic oligonucleotide
ucguaguguuugcgggauu

SEQ ID NO: 1718909 - RNA, 19 nt, Artificial Sequence
  Description of Artificial Sequence: Synthetic oligonucleotide
gaucgaagcguaugccguu

SEQ ID NO: 1718910 - RNA, 19 nt, Artificial Sequence
  Description of Artificial Sequence: Synthetic oligonucleotide
gugagcuaaccuaguguaa

SEQ ID NO: 1718911 - RNA, 19 nt, Artificial Sequence
  Description of Artificial Sequence: Synthetic oligonucleotide
agguacaguguugggcaaa

SEQ ID NO: 1718912 - RNA, 19 nt, Artificial Sequence
  Description of Artificial Sequence: Synthetic oligonucleotide
gcuaaccuaguguaagaau

SEQ ID NO: 1718913 - RNA, 19 nt, Artificial Sequence
  Description of Artificial Sequence: Synthetic oligonucleotide
gcgacugucgaaacugaca

SEQ ID NO: 1718914 - RNA, 19 nt, Artificial Sequence
  Description of Artificial Sequence: Synthetic oligonucleotide
cgacugucgaaacugacaa

SEQ ID NO: 1718915 - RNA, 19 nt, Artificial Sequence
  Description of Artificial Sequence: Synthetic oligonucleotide
guaguccggacgcggccga

SEQ ID NO: 1718916 - RNA, 19 nt, Artificial Sequence
  Description of Artificial Sequence: Synthetic oligonucleotide
cgcgguugggaccggagcc

SEQ ID NO: 1718917 - RNA, 19 nt, Artificial Sequence
  Description of Artificial Sequence: Synthetic oligonucleotide
caaugaacugagguacagu

SEQ ID NO: 1718918 - RNA, 19 nt, Artificial Sequence
  Description of Artificial Sequence: Synthetic oligonucleotide
ggaucgaagcguaugccgu

SEQ ID NO: 1718919 - RNA, 19 nt, Artificial Sequence
  Description of Artificial Sequence: Synthetic oligonucleotide
cacgcagcgcgcuuucucu

SEQ ID NO: 1718920 - RNA, 19 nt, Artificial Sequence
  Description of Artificial Sequence: Synthetic oligonucleotide
gacaugccucaaacaugca

SEQ ID NO: 1718921 - RNA, 19 nt, Artificial Sequence
  Description of Artificial Sequence: Synthetic oligonucleotide
ggucgcgcucgcucgcuug

SEQ ID NO: 1718922 - RNA, 19 nt, Artificial Sequence
  Description of Artificial Sequence: Synthetic oligonucleotide
uaguccggacgcggccgag

SEQ ID NO: 1718923 - RNA, 19 nt, Artificial Sequence
  Description of Artificial Sequence: Synthetic oligonucleotide
uaacuccgcuggguacaga

SEQ ID NO: 1718924 - RNA, 19 nt, Artificial Sequence
  Description of Artificial Sequence: Synthetic oligonucleotide
guagccucggagggaggga

SEQ ID NO: 1718925 - RNA, 19 nt, Artificial Sequence
  Description of Artificial Sequence: Synthetic oligonucleotide
cccguaguccggacgcggc

SEQ ID NO: 1718926 - RNA, 19 nt, Artificial Sequence
  Description of Artificial Sequence: Synthetic oligonucleotide
ggcgcggucgcgcucgcuc

SEQ ID NO: 1718927 - RNA, 19 nt, Artificial Sequence
  Description of Artificial Sequence: Synthetic oligonucleotide
gcgcgguugggaccggagc

SEQ ID NO: 1718928 - RNA, 19 nt, Artificial Sequence
  Description of Artificial Sequence: Synthetic oligonucleotide
gugagcucauauggcucuc

SEQ ID NO: 1718929 - RNA, 19 nt, Artificial Sequence
  Description of Artificial Sequence: Synthetic oligonucleotide
gcgcggucgcgcucgcucg

SEQ ID NO: 1718930 - RNA, 19 nt, Artificial Sequence
  Description of Artificial Sequence: Synthetic oligonucleotide
ggaugccuccaaacuguac

SEQ ID NO: 1718931 - RNA, 19 nt, Artificial Sequence
  Description of Artificial Sequence: Synthetic oligonucleotide
gccucggagggagggagcc

SEQ ID NO: 1718932 - RNA, 19 nt, Artificial Sequence
  Description of Artificial Sequence: Synthetic oligonucleotide
cgcagcgcgcuuucucucg

SEQ ID NO: 1718933 - RNA, 19 nt, Artificial Sequence
  Description of Artificial Sequence: Synthetic oligonucleotide
cuccgccguucaucuuccc

SEQ ID NO: 1718934 - RNA, 19 nt, Artificial Sequence
  Description of Artificial Sequence: Synthetic oligonucleotide
gcacgcagcgcgcuuucuc

SEQ ID NO: 1718935 - RNA, 19 nt, Artificial Sequence
  Description of Artificial Sequence: Synthetic oligonucleotide
gguacggggcccacacuuc

SEQ ID NO: 1718936 - RNA, 19 nt, Artificial Sequence
  Description of Artificial Sequence: Synthetic oligonucleotide
caacccugagaaguagccu

SEQ ID NO: 1718937 - RNA, 19 nt, Artificial Sequence
  Description of Artificial Sequence: Synthetic oligonucleotide
uagucgccgcgcggggcug

SEQ ID NO: 1718938 - RNA, 19 nt, Artificial Sequence
  Description of Artificial Sequence: Synthetic oligonucleotide
cgcuaacuccgcuggguac

SEQ ID NO: 1718939 - RNA, 19 nt, Artificial Sequence
  Description of Artificial Sequence: Synthetic oligonucleotide
ccgguccuuagucgccgcg

SEQ ID NO: 1718940 - RNA, 19 nt, Artificial Sequence
  Description of Artificial Sequence: Synthetic oligonucleotide
acuaaccguuuuggcuuua

SEQ ID NO: 1718941 - RNA, 19 nt, Artificial Sequence
  Description of Artificial Sequence: Synthetic oligonucleotide
uggccucgcucggaguguu

SEQ ID NO: 1718942 - RNA, 19 nt, Artificial Sequence
  Description of Artificial Sequence: Synthetic oligonucleotide
ccugagaaguagccucgga

SEQ ID NO: 1718943 - RNA, 19 nt, Artificial Sequence
  Description of Artificial Sequence: Synthetic oligonucleotide
ggcgcgguugggaccggag

SEQ ID NO: 1718944 - RNA, 19 nt, Artificial Sequence
  Description of Artificial Sequence: Synthetic oligonucleotide
gguaaagugcgggcacugu

SEQ ID NO: 1718945 - RNA, 19 nt, Artificial Sequence
  Description of Artificial Sequence: Synthetic oligonucleotide
gcagugaggcgggauaggu

SEQ ID NO: 1718946 - RNA, 19 nt, Artificial Sequence
  Description of Artificial Sequence: Synthetic oligonucleotide
gcgcuaacuccgcugggua

SEQ ID NO: 1718947 - RNA, 19 nt, Artificial Sequence
  Description of Artificial Sequence: Synthetic oligonucleotide
ccccguaguccggacgcgg

SEQ ID NO: 1718948 - RNA, 19 nt, Artificial Sequence
  Description of Artificial Sequence: Synthetic oligonucleotide
gugaggcgggauaggugaa

SEQ ID NO: 1718949 - RNA, 19 nt, Artificial Sequence
  Description of Artificial Sequence: Synthetic oligonucleotide
cagaggguacggggcccac

SEQ ID NO: 1718950 - RNA, 19 nt, Artificial Sequence
  Description of Artificial Sequence: Synthetic oligonucleotide
ccgagaggccgggcgagcc

SEQ ID NO: 1718951 - RNA, 19 nt, Artificial Sequence
  Description of Artificial Sequence: Synthetic oligonucleotide
gguugggaccggagccgcc

SEQ ID NO: 1718952 - RNA, 19 nt, Artificial Sequence
  Description of Artificial Sequence: Synthetic oligonucleotide
guaugccguucaaagcauu

SEQ ID NO: 1718953 - RNA, 19 nt, Artificial Sequence
  Description of Artificial Sequence: Synthetic oligonucleotide
cgggcgagccccguagucc

SEQ ID NO: 1718954 - RNA, 19 nt, Artificial Sequence
  Description of Artificial Sequence: Synthetic oligonucleotide
cccgggguuugauguccag

SEQ ID NO: 1718955 - RNA, 19 nt, Artificial Sequence
  Description of Artificial Sequence: Synthetic oligonucleotide
ggcgcuaacuccgcugggu

SEQ ID NO: 1718956 - RNA, 19 nt, Artificial Sequence
  Description of Artificial Sequence: Synthetic oligonucleotide
gucgccgcgcggggcuggg

SEQ ID NO: 1718957 - RNA, 19 nt, Artificial Sequence
  Description of Artificial Sequence: Synthetic oligonucleotide
ggcgaggcggcgggcgcgg

SEQ ID NO: 1718958 - RNA, 19 nt, Artificial Sequence
  Description of Artificial Sequence: Synthetic oligonucleotide
ccucgcucggaguguucuc

SEQ ID NO: 1718959 - RNA, 19 nt, Artificial Sequence
  Description of Artificial Sequence: Synthetic oligonucleotide
ccuccgagaggccgggcga

SEQ ID NO: 1718960 - RNA, 19 nt, Artificial Sequence
  Description of Artificial Sequence: Synthetic oligonucleotide
gccggacggcgcugcgggg

SEQ ID NO: 1718961 - RNA, 19 nt, Artificial Sequence
  Description of Artificial Sequence: Synthetic oligonucleotide
cccgguccuuagucgccgc

SEQ ID NO: 1718962 - RNA, 19 nt, Artificial Sequence
  Description of Artificial Sequence: Synthetic oligonucleotide
gcucggaguguucuccuuu

SEQ ID NO: 1718963 - RNA, 19 nt, Artificial Sequence
  Description of Artificial Sequence: Synthetic oligonucleotide
gccccguaguccggacgcg

SEQ ID NO: 1718964 - RNA, 19 nt, Artificial Sequence
  Description of Artificial Sequence: Synthetic oligonucleotide
gcgggauuucaggaucgaa

SEQ ID NO: 1718965 - RNA, 19 nt, Artificial Sequence
  Description of Artificial Sequence: Synthetic oligonucleotide
ccgggcgagccccguaguc

SEQ ID NO: 1718966 - RNA, 19 nt, Artificial Sequence
  Description of Artificial Sequence: Synthetic oligonucleotide
cuuugccuccgccguucau

SEQ ID NO: 1718967 - RNA, 19 nt, Artificial Sequence
  Description of Artificial Sequence: Synthetic oligonucleotide
cgguugggaccggagccgc

SEQ ID NO: 1718968 - RNA, 19 nt, Artificial Sequence
  Description of Artificial Sequence: Synthetic oligonucleotide
cguaugccguucaaagcau

SEQ ID NO: 1718969 - RNA, 19 nt, Artificial Sequence
  Description of Artificial Sequence: Synthetic oligonucleotide
ggacgcggccgaggcggag

SEQ ID NO: 1718970 - RNA, 19 nt, Artificial Sequence
  Description of Artificial Sequence: Synthetic oligonucleotide
cggacggcgcugcggggag

SEQ ID NO: 1718971 - RNA, 19 nt, Artificial Sequence
  Description of Artificial Sequence: Synthetic oligonucleotide
cgaagcguaugccguucaa

SEQ ID NO: 1718972 - RNA, 19 nt, Artificial Sequence
  Description of Artificial Sequence: Synthetic oligonucleotide
ccgcuggguacagagggua

SEQ ID NO: 1718973 - RNA, 19 nt, Artificial Sequence
  Description of Artificial Sequence: Synthetic oligonucleotide
cgagccccguaguccggac

SEQ ID NO: 1718974 - RNA, 19 nt, Artificial Sequence
  Description of Artificial Sequence: Synthetic oligonucleotide
ggcaugcagugaggcggga

SEQ ID NO: 1718975 - RNA, 19 nt, Artificial Sequence
  Description of Artificial Sequence: Synthetic oligonucleotide
gccggggcgggcggggaac

SEQ ID NO: 1718976 - RNA, 19 nt, Artificial Sequence
  Description of Artificial Sequence: Synthetic oligonucleotide
cucgcucgcuugcuaccuu

SEQ ID NO: 1718977 - RNA, 19 nt, Artificial Sequence
  Description of Artificial Sequence: Synthetic oligonucleotide
gaggccgggcgagccccgu

SEQ ID NO: 1718978 - RNA, 19 nt, Artificial Sequence
  Description of Artificial Sequence: Synthetic oligonucleotide
ggccucgcucggaguguuc

SEQ ID NO: 1718979 - RNA, 19 nt, Artificial Sequence
  Description of Artificial Sequence: Synthetic oligonucleotide
ccucggagggagggagcca

SEQ ID NO: 1718980 - RNA, 19 nt, Artificial Sequence
  Description of Artificial Sequence: Synthetic oligonucleotide
cgccguucaucuucccggu

SEQ ID NO: 1718981 - RNA, 19 nt, Artificial Sequence
  Description of Artificial Sequence: Synthetic oligonucleotide
gggcgcgguugggaccgga

SEQ ID NO: 1718982 - RNA, 19 nt, Artificial Sequence
  Description of Artificial Sequence: Synthetic oligonucleotide
cgcucggaguguucuccuu

SEQ ID NO: 1718983 - RNA, 19 nt, Artificial Sequence
  Description of Artificial Sequence: Synthetic oligonucleotide
ccgccgagggcgcgcugcu

SEQ ID NO: 1718984 - RNA, 19 nt, Artificial Sequence
  Description of Artificial Sequence: Synthetic oligonucleotide
cgcacgcagcgcgcuuucu

SEQ ID NO: 1718985 - RNA, 19 nt, Artificial Sequence
  Description of Artificial Sequence: Synthetic oligonucleotide
aacaugaccaugaagaccc

SEQ ID NO: 1718986 - RNA, 19 nt, Artificial Sequence
  Description of Artificial Sequence: Synthetic oligonucleotide
gaagagacaaguuagcucc

SEQ ID NO: 1718987 - RNA, 19 nt, Artificial Sequence
  Description of Artificial Sequence: Synthetic oligonucleotide
aacauuggacaucagcgcc

SEQ ID NO: 1718988 - RNA, 19 nt, Artificial Sequence
  Description of Artificial Sequence: Synthetic oligonucleotide
gaaacugaauaccaggccg

SEQ ID NO: 1718989 - RNA, 19 nt, Artificial Sequence
  Description of Artificial Sequence: Synthetic oligonucleotide
aguaugaugaucccuugcc

SEQ ID NO: 1718990 - RNA, 19 nt, Artificial Sequence
  Description of Artificial Sequence: Synthetic oligonucleotide
aaaauggagaauugcauga

SEQ ID NO: 1718991 - RNA, 19 nt, Artificial Sequence
  Description of Artificial Sequence: Synthetic oligonucleotide
gauaauggagaacaugacc

SEQ ID NO: 1718992 - RNA, 19 nt, Artificial Sequence
  Description of Artificial Sequence: Synthetic oligonucleotide
ugaacguagccaaagacca

SEQ ID NO: 1718993 - RNA, 19 nt, Artificial Sequence
  Description of Artificial Sequence: Synthetic oligonucleotide
uuuauugccugacuggacc

SEQ ID NO: 1718994 - RNA, 19 nt, Artificial Sequence
  Description of Artificial Sequence: Synthetic oligonucleotide
uaaaauggagaauugcaug

SEQ ID NO: 1718995 - RNA, 19 nt, Artificial Sequence
  Description of Artificial Sequence: Synthetic oligonucleotide
ugaagcacaccaaagguug

SEQ ID NO: 1718996 - RNA, 19 nt, Artificial Sequence
  Description of Artificial Sequence: Synthetic oligonucleotide
agaaucuaggcccaguguc

SEQ ID NO: 1718997 - RNA, 19 nt, Artificial Sequence
  Description of Artificial Sequence: Synthetic oligonucleotide
uaugaugaucccuugccgg

SEQ ID NO: 1718998 - RNA, 19 nt, Artificial Sequence
  Description of Artificial Sequence: Synthetic oligonucleotide
ucaguggaugcacagaggc

SEQ ID NO: 1718999 - RNA, 19 nt, Artificial Sequence
  Description of Artificial Sequence: Synthetic oligonucleotide
auggcgacaccauagcugc

SEQ ID NO: 1719000 - RNA, 19 nt, Artificial Sequence
  Description of Artificial Sequence: Synthetic oligonucleotide
aggacaagcaaauucacca

SEQ ID NO: 1719001 - RNA, 19 nt, Artificial Sequence
  Description of Artificial Sequence: Synthetic oligonucleotide
caaguuagcuccaaggcag

SEQ ID NO: 1719002 - RNA, 19 nt, Artificial Sequence
  Description of Artificial Sequence: Synthetic oligonucleotide
uucaggucaaauacacugg

SEQ ID NO: 1719003 - RNA, 19 nt, Artificial Sequence
  Description of Artificial Sequence: Synthetic oligonucleotide
uacagugcgagucagugga

SEQ ID NO: 1719004 - RNA, 19 nt, Artificial Sequence
  Description of Artificial Sequence: Synthetic oligonucleotide
ugaccaggaauacaggcag

SEQ ID NO: 1719005 - RNA, 19 nt, Artificial Sequence
  Description of Artificial Sequence: Synthetic oligonucleotide
uucaccauaagcugcaccu

SEQ ID NO: 1719006 - RNA, 19 nt, Artificial Sequence
  Description of Artificial Sequence: Synthetic oligonucleotide
auaauggagaacaugacca

SEQ ID NO: 1719007 - RNA, 19 nt, Artificial Sequence
  Description of Artificial Sequence: Synthetic oligonucleotide
uggaucaccaucuggagga

SEQ ID NO: 1719008 - RNA, 19 nt, Artificial Sequence
  Description of Artificial Sequence: Synthetic oligonucleotide
ucuagcuggaagaagucca

SEQ ID NO: 1719009 - RNA, 19 nt, Artificial Sequence
  Description of Artificial Sequence: Synthetic oligonucleotide
accaaagguugucugaacg

SEQ ID NO: 1719010 - RNA, 19 nt, Artificial Sequence
  Description of Artificial Sequence: Synthetic oligonucleotide
cugaacguagccaaagacc

SEQ ID NO: 1719011 - RNA, 19 nt, Artificial Sequence
  Description of Artificial Sequence: Synthetic oligonucleotide
auagcugcgguacaacagg

SEQ ID NO: 1719012 - RNA, 19 nt, Artificial Sequence
  Description of Artificial Sequence: Synthetic oligonucleotide
ugugcaugagugcugcagg

SEQ ID NO: 1719013 - RNA, 19 nt, Artificial Sequence
  Description of Artificial Sequence: Synthetic oligonucleotide
augacuccgaugccgaagc

SEQ ID NO: 1719014 - RNA, 19 nt, Artificial Sequence
  Description of Artificial Sequence: Synthetic oligonucleotide
gagacuccgaaguuuauug

SEQ ID NO: 1719015 - RNA, 19 nt, Artificial Sequence
  Description of Artificial Sequence: Synthetic oligonucleotide
aacacaaguaaagcugagg

SEQ ID NO: 1719016 - RNA, 19 nt, Artificial Sequence
  Description of Artificial Sequence: Synthetic oligonucleotide
auggagauaauggagaaca

SEQ ID NO: 1719017 - RNA, 19 nt, Artificial Sequence
  Description of Artificial Sequence: Synthetic oligonucleotide
auagaguggaggcugccac

SEQ ID NO: 1719018 - RNA, 19 nt, Artificial Sequence
  Description of Artificial Sequence: Synthetic oligonucleotide
cuugaccaggaauacaggc

SEQ ID NO: 1719019 - RNA, 19 nt, Artificial Sequence
  Description of Artificial Sequence: Synthetic oligonucleotide
gaugccgaagcagagaccc

SEQ ID NO: 1719020 - RNA, 19 nt, Artificial Sequence
  Description of Artificial Sequence: Synthetic oligonucleotide
augaugaucccuugccggc

SEQ ID NO: 1719021 - RNA, 19 nt, Artificial Sequence
  Description of Artificial Sequence: Synthetic oligonucleotide
caauaggacaagcaaauuc

SEQ ID NO: 1719022 - RNA, 19 nt, Artificial Sequence
  Description of Artificial Sequence: Synthetic oligonucleotide
aguggcuuccuccagagga

SEQ ID NO: 1719023 - RNA, 19 nt, Artificial Sequence
  Description of Artificial Sequence: Synthetic oligonucleotide
aggagagugaaagugccgc

SEQ ID NO: 1719024 - RNA, 19 nt, Artificial Sequence
  Description of Artificial Sequence: Synthetic oligonucleotide
agugcgagucaguggaugc

SEQ ID NO: 1719025 - RNA, 19 nt, Artificial Sequence
  Description of Artificial Sequence: Synthetic oligonucleotide
uccgagacagauaugguaa

SEQ ID NO: 1719026 - RNA, 19 nt, Artificial Sequence
  Description of Artificial Sequence: Synthetic oligonucleotide
gaacauuggacaucagcgc

SEQ ID NO: 1719027 - RNA, 19 nt, Artificial Sequence
  Description of Artificial Sequence: Synthetic oligonucleotide
aaacugaauaccaggccgg

SEQ ID NO: 1719028 - RNA, 19 nt, Artificial Sequence
  Description of Artificial Sequence: Synthetic oligonucleotide
auugcaugaagagacaagu

SEQ ID NO: 1719029 - RNA, 19 nt, Artificial Sequence
  Description of Artificial Sequence: Synthetic oligonucleotide
aagguugucugaacguagc

SEQ ID NO: 1719030 - RNA, 19 nt, Artificial Sequence
  Description of Artificial Sequence: Synthetic oligonucleotide
agaccagcacacuggaucg

SEQ ID NO: 1719031 - RNA, 19 nt, Artificial Sequence
  Description of Artificial Sequence: Synthetic oligonucleotide
uuggacaucagcgccaugc

SEQ ID NO: 1719032 - RNA, 19 nt, Artificial Sequence
  Description of Artificial Sequence: Synthetic oligonucleotide
ucucccaaugaccaggccu

SEQ ID NO: 1719033 - RNA, 19 nt, Artificial Sequence
  Description of Artificial Sequence: Synthetic oligonucleotide
agacuccgaaguuuauugc

SEQ ID NO: 1719034 - RNA, 19 nt, Artificial Sequence
  Description of Artificial Sequence: Synthetic oligonucleotide
gacuccgaaguuuauugcc

SEQ ID NO: 1719035 - RNA, 19 nt, Artificial Sequence
  Description of Artificial Sequence: Synthetic oligonucleotide
acaaguuagcuccaaggca

SEQ ID NO: 1719036 - RNA, 19 nt, Artificial Sequence
  Description of Artificial Sequence: Synthetic oligonucleotide
aaauacacuggccuugguu

SEQ ID NO: 1719037 - RNA, 19 nt, Artificial Sequence
  Description of Artificial Sequence: Synthetic oligonucleotide
ugauuggacaccagcuucc

SEQ ID NO: 1719038 - RNA, 19 nt, Artificial Sequence
  Description of Artificial Sequence: Synthetic oligonucleotide
guguccgagacagauaugg

SEQ ID NO: 1719039 - RNA, 19 nt, Artificial Sequence
  Description of Artificial Sequence: Synthetic oligonucleotide
caugaagagacaaguuagc

SEQ ID NO: 1719040 - RNA, 19 nt, Artificial Sequence
  Description of Artificial Sequence: Synthetic oligonucleotide
guaugaugaucccuugccg

SEQ ID NO: 1719041 - RNA, 19 nt, Artificial Sequence
  Description of Artificial Sequence: Synthetic oligonucleotide
aagagugugcaugagugcu

SEQ ID NO: 1719042 - RNA, 19 nt, Artificial Sequence
  Description of Artificial Sequence: Synthetic oligonucleotide
aaucuaggcccaguguccg

SEQ ID NO: 1719043 - RNA, 19 nt, Artificial Sequence
  Description of Artificial Sequence: Synthetic oligonucleotide
agugcugcagguaugcgcg

SEQ ID NO: 1719044 - RNA, 19 nt, Artificial Sequence
  Description of Artificial Sequence: Synthetic oligonucleotide
agguugucugaacguagcc

SEQ ID NO: 1719045 - RNA, 19 nt, Artificial Sequence
  Description of Artificial Sequence: Synthetic oligonucleotide
cacuggaucccguacgugg

SEQ ID NO: 1719046 - RNA, 19 nt, Artificial Sequence
  Description of Artificial Sequence: Synthetic oligonucleotide
agagugaaagugccgcccg

SEQ ID NO: 1719047 - RNA, 19 nt, Artificial Sequence
  Description of Artificial Sequence: Synthetic oligonucleotide
aaagguugucugaacguag

SEQ ID NO: 1719048 - RNA, 19 nt, Artificial Sequence
  Description of Artificial Sequence: Synthetic oligonucleotide
aaaugggugcucagucucc

SEQ ID NO: 1719049 - RNA, 19 nt, Artificial Sequence
  Description of Artificial Sequence: Synthetic oligonucleotide
ugguaaaauggagaauugc

SEQ ID NO: 1719050 - RNA, 19 nt, Artificial Sequence
  Description of Artificial Sequence: Synthetic oligonucleotide
aggagugugaccacaagag

SEQ ID NO: 1719051 - RNA, 19 nt, Artificial Sequence
  Description of Artificial Sequence: Synthetic oligonucleotide
auaggugaguaugaugauc

SEQ ID NO: 1719052 - RNA, 19 nt, Artificial Sequence
  Description of Artificial Sequence: Synthetic oligonucleotide
acuggccuugguuccaccc

SEQ ID NO: 1719053 - RNA, 19 nt, Artificial Sequence
  Description of Artificial Sequence: Synthetic oligonucleotide
acgaaggagagugaaagug

SEQ ID NO: 1719054 - RNA, 19 nt, Artificial Sequence
  Description of Artificial Sequence: Synthetic oligonucleotide
uuaagggucccgccaagca

SEQ ID NO: 1719055 - RNA, 19 nt, Artificial Sequence
  Description of Artificial Sequence: Synthetic oligonucleotide
acaugagguagccagccug

SEQ ID NO: 1719056 - RNA, 19 nt, Artificial Sequence
  Description of Artificial Sequence: Synthetic oligonucleotide
agauaugguaaaauggaga

SEQ ID NO: 1719057 - RNA, 19 nt, Artificial Sequence
  Description of Artificial Sequence: Synthetic oligonucleotide
cacauuaggcagcagcagc

SEQ ID NO: 1719058 - RNA, 19 nt, Artificial Sequence
  Description of Artificial Sequence: Synthetic oligonucleotide
ugcucagucucccaaugac

SEQ ID NO: 1719059 - RNA, 19 nt, Artificial Sequence
  Description of Artificial Sequence: Synthetic oligonucleotide
agcagguauagaguggagg

SEQ ID NO: 1719060 - RNA, 19 nt, Artificial Sequence
  Description of Artificial Sequence: Synthetic oligonucleotide
gaagagugugcaugagugc

SEQ ID NO: 1719061 - RNA, 19 nt, Artificial Sequence
  Description of Artificial Sequence: Synthetic oligonucleotide
gaaagugccgcccgugccc

SEQ ID NO: 1719062 - RNA, 19 nt, Artificial Sequence
  Description of Artificial Sequence: Synthetic oligonucleotide
ugcaaaccugccaaacaca

SEQ ID NO: 1719063 - RNA, 19 nt, Artificial Sequence
  Description of Artificial Sequence: Synthetic oligonucleotide
gacaccauagcugcgguac

SEQ ID NO: 1719064 - RNA, 19 nt, Artificial Sequence
  Description of Artificial Sequence: Synthetic oligonucleotide
cugcaaaccugccaaacac

SEQ ID NO: 1719065 - RNA, 19 nt, Artificial Sequence
  Description of Artificial Sequence: Synthetic oligonucleotide
uacgugguguuaagggucc

SEQ ID NO: 1719066 - RNA, 19 nt, Artificial Sequence
  Description of Artificial Sequence: Synthetic oligonucleotide
aaagugccgcccgugcccc

SEQ ID NO: 1719067 - RNA, 19 nt, Artificial Sequence
  Description of Artificial Sequence: Synthetic oligonucleotide
ugucugaacguagccaaag

SEQ ID NO: 1719068 - RNA, 19 nt, Artificial Sequence
  Description of Artificial Sequence: Synthetic oligonucleotide
uggaagagugugcaugagu

SEQ ID NO: 1719069 - RNA, 19 nt, Artificial Sequence
  Description of Artificial Sequence: Synthetic oligonucleotide
gagugcugcagguaugcgc

SEQ ID NO: 1719070 - RNA, 19 nt, Artificial Sequence
  Description of Artificial Sequence: Synthetic oligonucleotide
gaguaugaugaucccuugc

SEQ ID NO: 1719071 - RNA, 19 nt, Artificial Sequence
  Description of Artificial Sequence: Synthetic oligonucleotide
aggacacuggaucccguac

SEQ ID NO: 1719072 - RNA, 19 nt, Artificial Sequence
  Description of Artificial Sequence: Synthetic oligonucleotide
agugcagaacauuggacau

SEQ ID NO: 1719073 - RNA, 19 nt, Artificial Sequence
  Description of Artificial Sequence: Synthetic oligonucleotide
ugucggugaccacauugag

SEQ ID NO: 1719074 - RNA, 19 nt, Artificial Sequence
  Description of Artificial Sequence: Synthetic oligonucleotide
gagacaaguuagcuccaag

SEQ ID NO: 1719075 - RNA, 19 nt, Artificial Sequence
  Description of Artificial Sequence: Synthetic oligonucleotide
gguaaaauggagaauugca

SEQ ID NO: 1719076 - RNA, 19 nt, Artificial Sequence
  Description of Artificial Sequence: Synthetic oligonucleotide
agagcacccaugcugccag

SEQ ID NO: 1719077 - RNA, 19 nt, Artificial Sequence
  Description of Artificial Sequence: Synthetic oligonucleotide
ggaagagugugcaugagug

SEQ ID NO: 1719078 - RNA, 19 nt, Artificial Sequence
  Description of Artificial Sequence: Synthetic oligonucleotide
aguggaggcugccacgaag

SEQ ID NO: 1719079 - RNA, 19 nt, Artificial Sequence
  Description of Artificial Sequence: Synthetic oligonucleotide
ugugucugaagcugacaca

SEQ ID NO: 1719080 - RNA, 19 nt, Artificial Sequence
  Description of Artificial Sequence: Synthetic oligonucleotide
guugucugaacguagccaa

SEQ ID NO: 1719081 - RNA, 19 nt, Artificial Sequence
  Description of Artificial Sequence: Synthetic oligonucleotide
aauucaccauaagcugcac

SEQ ID NO: 1719082 - RNA, 19 nt, Artificial Sequence
  Description of Artificial Sequence: Synthetic oligonucleotide
agcuccuaggagugugacc

SEQ ID NO: 1719083 - RNA, 19 nt, Artificial Sequence
  Description of Artificial Sequence: Synthetic oligonucleotide
ugaguaugaugaucccuug

SEQ ID NO: 1719084 - RNA, 19 nt, Artificial Sequence
  Description of Artificial Sequence: Synthetic oligonucleotide
auaagcugcaccuggccaa

SEQ ID NO: 1719085 - RNA, 19 nt, Artificial Sequence
  Description of Artificial Sequence: Synthetic oligonucleotide
gaaagcagaagugcagaac

SEQ ID NO: 1719086 - RNA, 19 nt, Artificial Sequence
  Description of Artificial Sequence: Synthetic oligonucleotide
aagcacaccaaagguuguc

SEQ ID NO: 1719087 - RNA, 19 nt, Artificial Sequence
  Description of Artificial Sequence: Synthetic oligonucleotide
aauaccaggccgggcauca

SEQ ID NO: 1719088 - RNA, 19 nt, Artificial Sequence
  Description of Artificial Sequence: Synthetic oligonucleotide
ugaccaugaagaccccuga

SEQ ID NO: 1719089 - RNA, 19 nt, Artificial Sequence
  Description of Artificial Sequence: Synthetic oligonucleotide
cacauaggugaguaugaug

SEQ ID NO: 1719090 - RNA, 19 nt, Artificial Sequence
  Description of Artificial Sequence: Synthetic oligonucleotide
aaggagagugaaagugccg

SEQ ID NO: 1719091 - RNA, 19 nt, Artificial Sequence
  Description of Artificial Sequence: Synthetic oligonucleotide
uaauggagaacaugaccau

SEQ ID NO: 1719092 - RNA, 19 nt, Artificial Sequence
  Description of Artificial Sequence: Synthetic oligonucleotide
gaugacuccgaugccgaag

SEQ ID NO: 1719093 - RNA, 19 nt, Artificial Sequence
  Description of Artificial Sequence: Synthetic oligonucleotide
aaauggagaauugcaugaa

SEQ ID NO: 1719094 - RNA, 19 nt, Artificial Sequence
  Description of Artificial Sequence: Synthetic oligonucleotide
ugcccagucccacaacagc

SEQ ID NO: 1719095 - RNA, 19 nt, Artificial Sequence
  Description of Artificial Sequence: Synthetic oligonucleotide
aaccugccaaacacaggcc

SEQ ID NO: 1719096 - RNA, 19 nt, Artificial Sequence
  Description of Artificial Sequence: Synthetic oligonucleotide
caaaccugccaaacacagg

SEQ ID NO: 1719097 - RNA, 19 nt, Artificial Sequence
  Description of Artificial Sequence: Synthetic oligonucleotide
gacccagucggccuagggc

SEQ ID NO: 1719098 - RNA, 19 nt, Artificial Sequence
  Description of Artificial Sequence: Synthetic oligonucleotide
aucagaaagcagaagugca

SEQ ID NO: 1719099 - RNA, 19 nt, Artificial Sequence
  Description of Artificial Sequence: Synthetic oligonucleotide
cuacagugcgagucagugg

SEQ ID NO: 1719100 - RNA, 19 nt, Artificial Sequence
  Description of Artificial Sequence: Synthetic oligonucleotide
cugaauaccaggccgggca

SEQ ID NO: 1719101 - RNA, 19 nt, Artificial Sequence
  Description of Artificial Sequence: Synthetic oligonucleotide
acccugaugggcugauugg

SEQ ID NO: 1719102 - RNA, 19 nt, Artificial Sequence
  Description of Artificial Sequence: Synthetic oligonucleotide
aguuagcuccaaggcagcc

SEQ ID NO: 1719103 - RNA, 19 nt, Artificial Sequence
  Description of Artificial Sequence: Synthetic oligonucleotide
gagagugaaagugccgccc

SEQ ID NO: 1719104 - RNA, 19 nt, Artificial Sequence
  Description of Artificial Sequence: Synthetic oligonucleotide
ugagggcacagaaacugaa

SEQ ID NO: 1719105 - RNA, 19 nt, Artificial Sequence
  Description of Artificial Sequence: Synthetic oligonucleotide
cagaggaccaauaggacaa

SEQ ID NO: 1719106 - RNA, 19 nt, Artificial Sequence
  Description of Artificial Sequence: Synthetic oligonucleotide
accaauaggacaagcaaau

SEQ ID NO: 1719107 - RNA, 19 nt, Artificial Sequence
  Description of Artificial Sequence: Synthetic oligonucleotide
caggccgggcaucagaaag

SEQ ID NO: 1719108 - RNA, 19 nt, Artificial Sequence
  Description of Artificial Sequence: Synthetic oligonucleotide
acuggaucgcagcaaggcu

SEQ ID NO: 1719109 - RNA, 19 nt, Artificial Sequence
  Description of Artificial Sequence: Synthetic oligonucleotide
ugcagguaugcgcgaggcg

SEQ ID NO: 1719110 - RNA, 19 nt, Artificial Sequence
  Description of Artificial Sequence: Synthetic oligonucleotide
acugaauaccaggccgggc

SEQ ID NO: 1719111 - RNA, 19 nt, Artificial Sequence
  Description of Artificial Sequence: Synthetic oligonucleotide
agaaagcagaagugcagaa

SEQ ID NO: 1719112 - RNA, 19 nt, Artificial Sequence
  Description of Artificial Sequence: Synthetic oligonucleotide
agagccacgauggcaggac

SEQ ID NO: 1719113 - RNA, 19 nt, Artificial Sequence
  Description of Artificial Sequence: Synthetic oligonucleotide
ugugcagccucuagcugga

SEQ ID NO: 1719114 - RNA, 19 nt, Artificial Sequence
  Description of Artificial Sequence: Synthetic oligonucleotide
ucugggaaaugggugcuca

SEQ ID NO: 1719115 - RNA, 19 nt, Artificial Sequence
  Description of Artificial Sequence: Synthetic oligonucleotide
ucuaggcccaguguccgag

SEQ ID NO: 1719116 - RNA, 19 nt, Artificial Sequence
  Description of Artificial Sequence: Synthetic oligonucleotide
guaugcgcgaggcgaagag

SEQ ID NO: 1719117 - RNA, 19 nt, Artificial Sequence
  Description of Artificial Sequence: Synthetic oligonucleotide
cuugccggcgcagagcacc

SEQ ID NO: 1719118 - RNA, 19 nt, Artificial Sequence
  Description of Artificial Sequence: Synthetic oligonucleotide
cacuggaucgcagcaaggc

SEQ ID NO: 1719119 - RNA, 19 nt, Artificial Sequence
  Description of Artificial Sequence: Synthetic oligonucleotide
uagcugcgguacaacaggc

SEQ ID NO: 1719120 - RNA, 19 nt, Artificial Sequence
  Description of Artificial Sequence: Synthetic oligonucleotide
aagcagagacccagucggc

SEQ ID NO: 1719121 - RNA, 19 nt, Artificial Sequence
  Description of Artificial Sequence: Synthetic oligonucleotide
cacccugaugggcugauug

SEQ ID NO: 1719122 - RNA, 19 nt, Artificial Sequence
  Description of Artificial Sequence: Synthetic oligonucleotide
ggacacuggaucccguacg

SEQ ID NO: 1719123 - RNA, 19 nt, Artificial Sequence
  Description of Artificial Sequence: Synthetic oligonucleotide
ugcgguacaacaggccacc

SEQ ID NO: 1719124 - RNA, 19 nt, Artificial Sequence
  Description of Artificial Sequence: Synthetic oligonucleotide
acaagcaaauucaccauaa

SEQ ID NO: 1719125 - RNA, 19 nt, Artificial Sequence
  Description of Artificial Sequence: Synthetic oligonucleotide
cagcugaagcacaccaaag

SEQ ID NO: 1719126 - RNA, 19 nt, Artificial Sequence
  Description of Artificial Sequence: Synthetic oligonucleotide
gcagaagugcagaacauug

SEQ ID NO: 1719127 - RNA, 19 nt, Artificial Sequence
  Description of Artificial Sequence: Synthetic oligonucleotide
gacuccgaugccgaagcag

SEQ ID NO: 1719128 - RNA, 19 nt, Artificial Sequence
  Description of Artificial Sequence: Synthetic oligonucleotide
uugcaugaagagacaaguu

SEQ ID NO: 1719129 - RNA, 19 nt, Artificial Sequence
  Description of Artificial Sequence: Synthetic oligonucleotide
uguccgagacagauauggu

SEQ ID NO: 1719130 - RNA, 19 nt, Artificial Sequence
  Description of Artificial Sequence: Synthetic oligonucleotide
uggaucgcagcaaggcuuc

SEQ ID NO: 1719131 - RNA, 19 nt, Artificial Sequence
  Description of Artificial Sequence: Synthetic oligonucleotide
uggccuugguuccacccug

SEQ ID NO: 1719132 - RNA, 19 nt, Artificial Sequence
  Description of Artificial Sequence: Synthetic oligonucleotide
ggcagagaggcccagcaug

SEQ ID NO: 1719133 - RNA, 19 nt, Artificial Sequence
  Description of Artificial Sequence: Synthetic oligonucleotide
ugaauaccaggccgggcau

SEQ ID NO: 1719134 - RNA, 19 nt, Artificial Sequence
  Description of Artificial Sequence: Synthetic oligonucleotide
ggucccgccaagcagggag

SEQ ID NO: 1719135 - RNA, 19 nt, Artificial Sequence
  Description of Artificial Sequence: Synthetic oligonucleotide
cuccgaaguuuauugccug

SEQ ID NO: 1719136 - RNA, 19 nt, Artificial Sequence
  Description of Artificial Sequence: Synthetic oligonucleotide
acgauggcaggacacugga

SEQ ID NO: 1719137 - RNA, 19 nt, Artificial Sequence
  Description of Artificial Sequence: Synthetic oligonucleotide
uauugccugacuggaccag

SEQ ID NO: 1719138 - RNA, 19 nt, Artificial Sequence
  Description of Artificial Sequence: Synthetic oligonucleotide
gaagagacuccgaaguuua

SEQ ID NO: 1719139 - RNA, 19 nt, Artificial Sequence
  Description of Artificial Sequence: Synthetic oligonucleotide
uggagauaauggagaacau

SEQ ID NO: 1719140 - RNA, 19 nt, Artificial Sequence
  Description of Artificial Sequence: Synthetic oligonucleotide
cugugaugaccaucugggc

SEQ ID NO: 1719141 - RNA, 19 nt, Artificial Sequence
  Description of Artificial Sequence: Synthetic oligonucleotide
gcugucggugaccacauug

SEQ ID NO: 1719142 - RNA, 19 nt, Artificial Sequence
  Description of Artificial Sequence: Synthetic oligonucleotide
gacagcuccuaggagugug

SEQ ID NO: 1719143 - RNA, 19 nt, Artificial Sequence
  Description of Artificial Sequence: Synthetic oligonucleotide
ccguacgugguguuaaggg

SEQ ID NO: 1719144 - RNA, 19 nt, Artificial Sequence
  Description of Artificial Sequence: Synthetic oligonucleotide
accauagcugcgguacaac

SEQ ID NO: 1719145 - RNA, 19 nt, Artificial Sequence
  Description of Artificial Sequence: Synthetic oligonucleotide
aacaggccacccagggugg

SEQ ID NO: 1719146 - RNA, 19 nt, Artificial Sequence
  Description of Artificial Sequence: Synthetic oligonucleotide
ggagugugaccacaagagc

SEQ ID NO: 1719147 - RNA, 19 nt, Artificial Sequence
  Description of Artificial Sequence: Synthetic oligonucleotide
cuggaccaggucaccaggc

SEQ ID NO: 1719148 - RNA, 19 nt, Artificial Sequence
  Description of Artificial Sequence: Synthetic oligonucleotide
agacccagucggccuaggg

SEQ ID NO: 1719149 - RNA, 19 nt, Artificial Sequence
  Description of Artificial Sequence: Synthetic oligonucleotide
ucuuucuucuggguacagu

SEQ ID NO: 1719150 - RNA, 19 nt, Artificial Sequence
  Description of Artificial Sequence: Synthetic oligonucleotide
guacgugguguuaaggguc

SEQ ID NO: 1719151 - RNA, 19 nt, Artificial Sequence
  Description of Artificial Sequence: Synthetic oligonucleotide
ugucuuucuucuggguaca

SEQ ID NO: 1719152 - RNA, 19 nt, Artificial Sequence
  Description of Artificial Sequence: Synthetic oligonucleotide
auacuggucugcaaaccug

SEQ ID NO: 1719153 - RNA, 19 nt, Artificial Sequence
  Description of Artificial Sequence: Synthetic oligonucleotide
cauggagauaauggagaac

SEQ ID NO: 1719154 - RNA, 19 nt, Artificial Sequence
  Description of Artificial Sequence: Synthetic oligonucleotide
ggagccgaagaugacuccg

SEQ ID NO: 1719155 - RNA, 19 nt, Artificial Sequence
  Description of Artificial Sequence: Synthetic oligonucleotide
uaugcgcgaggcgaagagc

SEQ ID NO: 1719156 - RNA, 19 nt, Artificial Sequence
  Description of Artificial Sequence: Synthetic oligonucleotide
acaacaggccacccagggu

SEQ ID NO: 1719157 - RNA, 19 nt, Artificial Sequence
  Description of Artificial Sequence: Synthetic oligonucleotide
agcugcgguacaacaggcc

SEQ ID NO: 1719158 - RNA, 19 nt, Artificial Sequence
  Description of Artificial Sequence: Synthetic oligonucleotide
ugagugcugcagguaugcg

SEQ ID NO: 1719159 - RNA, 19 nt, Artificial Sequence
  Description of Artificial Sequence: Synthetic oligonucleotide
auaugguaaaauggagaau

SEQ ID NO: 1719160 - RNA, 19 nt, Artificial Sequence
  Description of Artificial Sequence: Synthetic oligonucleotide
ccacgaaggagagugaaag

SEQ ID NO: 1719161 - RNA, 19 nt, Artificial Sequence
  Description of Artificial Sequence: Synthetic oligonucleotide
ggagaauugcaugaagaga

SEQ ID NO: 1719162 - RNA, 19 nt, Artificial Sequence
  Description of Artificial Sequence: Synthetic oligonucleotide
agugaaagugccgcccgug

SEQ ID NO: 1719163 - RNA, 19 nt, Artificial Sequence
  Description of Artificial Sequence: Synthetic oligonucleotide
cgaaggagagugaaagugc

SEQ ID NO: 1719164 - RNA, 19 nt, Artificial Sequence
  Description of Artificial Sequence: Synthetic oligonucleotide
ggguacaguggcuuccucc

SEQ ID NO: 1719165 - RNA, 19 nt, Artificial Sequence
  Description of Artificial Sequence: Synthetic oligonucleotide
cugucggugaccacauuga

SEQ ID NO: 1719166 - RNA, 19 nt, Artificial Sequence
  Description of Artificial Sequence: Synthetic oligonucleotide
gguguuaagggucccgcca

SEQ ID NO: 1719167 - RNA, 19 nt, Artificial Sequence
  Description of Artificial Sequence: Synthetic oligonucleotide
uugucugaacguagccaaa

SEQ ID NO: 1719168 - RNA, 19 nt, Artificial Sequence
  Description of Artificial Sequence: Synthetic oligonucleotide
gaugggcugauuggacacc

SEQ ID NO: 1719169 - RNA, 19 nt, Artificial Sequence
  Description of Artificial Sequence: Synthetic oligonucleotide
guuaagggucccgccaagc

SEQ ID NO: 1719170 - RNA, 19 nt, Artificial Sequence
  Description of Artificial Sequence: Synthetic oligonucleotide
ucugcgggcgccgucagau

SEQ ID NO: 1719171 - RNA, 19 nt, Artificial Sequence
  Description of Artificial Sequence: Synthetic oligonucleotide
ugcgagucaguggaugcac

SEQ ID NO: 1719172 - RNA, 19 nt, Artificial Sequence
  Description of Artificial Sequence: Synthetic oligonucleotide
agcugaggacagcuccuag

SEQ ID NO: 1719173 - RNA, 19 nt, Artificial Sequence
  Description of Artificial Sequence: Synthetic oligonucleotide
agcacaccaaagguugucu

SEQ ID NO: 1719174 - RNA, 19 nt, Artificial Sequence
  Description of Artificial Sequence: Synthetic oligonucleotide
guccgagacagauauggua

SEQ ID NO: 1719175 - RNA, 19 nt, Artificial Sequence
  Description of Artificial Sequence: Synthetic oligonucleotide
cugcgguacaacaggccac

SEQ ID NO: 1719176 - RNA, 19 nt, Artificial Sequence
  Description of Artificial Sequence: Synthetic oligonucleotide
uccuaggagugugaccaca

SEQ ID NO: 1719177 - RNA, 19 nt, Artificial Sequence
  Description of Artificial Sequence: Synthetic oligonucleotide
ccuccagaggaccaauagg

SEQ ID NO: 1719178 - RNA, 19 nt, Artificial Sequence
  Description of Artificial Sequence: Synthetic oligonucleotide
guuuauugccugacuggac

SEQ ID NO: 1719179 - RNA, 19 nt, Artificial Sequence
  Description of Artificial Sequence: Synthetic oligonucleotide
gguggugacaggaacacaa

SEQ ID NO: 1719180 - RNA, 19 nt, Artificial Sequence
  Description of Artificial Sequence: Synthetic oligonucleotide
ugacuggaccaggucacca

SEQ ID NO: 1719181 - RNA, 19 nt, Artificial Sequence
  Description of Artificial Sequence: Synthetic oligonucleotide
gucugaacguagccaaaga

SEQ ID NO: 1719182 - RNA, 19 nt, Artificial Sequence
  Description of Artificial Sequence: Synthetic oligonucleotide
gaagaccccugaagggaag

SEQ ID NO: 1719183 - RNA, 19 nt, Artificial Sequence
  Description of Artificial Sequence: Synthetic oligonucleotide
agccacgauggcaggacac

SEQ ID NO: 1719184 - RNA, 19 nt, Artificial Sequence
  Description of Artificial Sequence: Synthetic oligonucleotide
aagagccacgauggcagga

SEQ ID NO: 1719185 - RNA, 19 nt, Artificial Sequence
  Description of Artificial Sequence: Synthetic oligonucleotide
aggcccacccagcagcuga

SEQ ID NO: 1719186 - RNA, 19 nt, Artificial Sequence
  Description of Artificial Sequence: Synthetic oligonucleotide
ggagagugaaagugccgcc

SEQ ID NO: 1719187 - RNA, 19 nt, Artificial Sequence
  Description of Artificial Sequence: Synthetic oligonucleotide
guggguccuacagugcgag

SEQ ID NO: 1719188 - RNA, 19 nt, Artificial Sequence
  Description of Artificial Sequence: Synthetic oligonucleotide
ucagaucugugaugaccau

SEQ ID NO: 1719189 - RNA, 19 nt, Artificial Sequence
  Description of Artificial Sequence: Synthetic oligonucleotide
cauacuggucugcaaaccu

SEQ ID NO: 1719190 - RNA, 19 nt, Artificial Sequence
  Description of Artificial Sequence: Synthetic oligonucleotide
ugggcuacaggaggccacc

SEQ ID NO: 1719191 - RNA, 19 nt, Artificial Sequence
  Description of Artificial Sequence: Synthetic oligonucleotide
ggugcucagucucccaaug

SEQ ID NO: 1719192 - RNA, 19 nt, Artificial Sequence
  Description of Artificial Sequence: Synthetic oligonucleotide
uccuacagugcgagucagu

SEQ ID NO: 1719193 - RNA, 19 nt, Artificial Sequence
  Description of Artificial Sequence: Synthetic oligonucleotide
cugcagguaugcgcgaggc

SEQ ID NO: 1719194 - RNA, 19 nt, Artificial Sequence
  Description of Artificial Sequence: Synthetic oligonucleotide
ugcugcagguaugcgcgag

SEQ ID NO: 1719195 - RNA, 19 nt, Artificial Sequence
  Description of Artificial Sequence: Synthetic oligonucleotide
ggcgacaccauagcugcgg

SEQ ID NO: 1719196 - RNA, 19 nt, Artificial Sequence
  Description of Artificial Sequence: Synthetic oligonucleotide
agguagccagccugugcag

SEQ ID NO: 1719197 - RNA, 19 nt, Artificial Sequence
  Description of Artificial Sequence: Synthetic oligonucleotide
gcugcgguacaacaggcca

SEQ ID NO: 1719198 - RNA, 19 nt, Artificial Sequence
  Description of Artificial Sequence: Synthetic oligonucleotide
cugggcuacaggaggccac

SEQ ID NO: 1719199 - RNA, 19 nt, Artificial Sequence
  Description of Artificial Sequence: Synthetic oligonucleotide
cacauugagggcacagaaa

SEQ ID NO: 1719200 - RNA, 19 nt, Artificial Sequence
  Description of Artificial Sequence: Synthetic oligonucleotide
ugccacgaaggagagugaa

SEQ ID NO: 1719201 - RNA, 19 nt, Artificial Sequence
  Description of Artificial Sequence: Synthetic oligonucleotide
aucccuugccggcgcagag

SEQ ID NO: 1719202 - RNA, 19 nt, Artificial Sequence
  Description of Artificial Sequence: Synthetic oligonucleotide
gucccacaacagcaaagac

SEQ ID NO: 1719203 - RNA, 19 nt, Artificial Sequence
  Description of Artificial Sequence: Synthetic oligonucleotide
uggaucccguacguggugu

SEQ ID NO: 1719204 - RNA, 19 nt, Artificial Sequence
  Description of Artificial Sequence: Synthetic oligonucleotide
agagacuccgaaguuuauu

SEQ ID NO: 1719205 - RNA, 19 nt, Artificial Sequence
  Description of Artificial Sequence: Synthetic oligonucleotide
cacccagcagcugaagcac

SEQ ID NO: 1719206 - RNA, 19 nt, Artificial Sequence
  Description of Artificial Sequence: Synthetic oligonucleotide
agagugugcaugagugcug

SEQ ID NO: 1719207 - RNA, 19 nt, Artificial Sequence
  Description of Artificial Sequence: Synthetic oligonucleotide
cagaucugugaugaccauc

SEQ ID NO: 1719208 - RNA, 19 nt, Artificial Sequence
  Description of Artificial Sequence: Synthetic oligonucleotide
guauagaguggaggcugcc

SEQ ID NO: 1719209 - RNA, 19 nt, Artificial Sequence
  Description of Artificial Sequence: Synthetic oligonucleotide
uggcgacaccauagcugcg

SEQ ID NO: 1719210 - RNA, 19 nt, Artificial Sequence
  Description of Artificial Sequence: Synthetic oligonucleotide
acaccauagcugcgguaca

SEQ ID NO: 1719211 - RNA, 19 nt, Artificial Sequence
  Description of Artificial Sequence: Synthetic oligonucleotide
ccuacagugcgagucagug

SEQ ID NO: 1719212 - RNA, 19 nt, Artificial Sequence
  Description of Artificial Sequence: Synthetic oligonucleotide
ugaugaccaucugggcagc

SEQ ID NO: 1719213 - RNA, 19 nt, Artificial Sequence
  Description of Artificial Sequence: Synthetic oligonucleotide
gaccaugaagaccccugaa

SEQ ID NO: 1719214 - RNA, 19 nt, Artificial Sequence
  Description of Artificial Sequence: Synthetic oligonucleotide
guguuaagggucccgccaa

SEQ ID NO: 1719215 - RNA, 19 nt, Artificial Sequence
  Description of Artificial Sequence: Synthetic oligonucleotide
ccuugaccaggaauacagg

SEQ ID NO: 1719216 - RNA, 19 nt, Artificial Sequence
  Description of Artificial Sequence: Synthetic oligonucleotide
gguugucugaacguagcca

SEQ ID NO: 1719217 - RNA, 19 nt, Artificial Sequence
  Description of Artificial Sequence: Synthetic oligonucleotide
gccuucaggucaaauacac

SEQ ID NO: 1719218 - RNA, 19 nt, Artificial Sequence
  Description of Artificial Sequence: Synthetic oligonucleotide
ccgggcaucagaaagcaga

SEQ ID NO: 1719219 - RNA, 19 nt, Artificial Sequence
  Description of Artificial Sequence: Synthetic oligonucleotide
ccgaugccgaagcagagac

SEQ ID NO: 1719220 - RNA, 19 nt, Artificial Sequence
  Description of Artificial Sequence: Synthetic oligonucleotide
augggcugauuggacacca

SEQ ID NO: 1719221 - RNA, 19 nt, Artificial Sequence
  Description of Artificial Sequence: Synthetic oligonucleotide
caaagguugucugaacgua

SEQ ID NO: 1719222 - RNA, 19 nt, Artificial Sequence
  Description of Artificial Sequence: Synthetic oligonucleotide
gagucaguggaugcacaga

SEQ ID NO: 1719223 - RNA, 19 nt, Artificial Sequence
  Description of Artificial Sequence: Synthetic oligonucleotide
cgaagcagagacccagucg

SEQ ID NO: 1719224 - RNA, 19 nt, Artificial Sequence
  Description of Artificial Sequence: Synthetic oligonucleotide
gguauagaguggaggcugc

SEQ ID NO: 1719225 - RNA, 19 nt, Artificial Sequence
  Description of Artificial Sequence: Synthetic oligonucleotide
gcagguaugcgcgaggcga

SEQ ID NO: 1719226 - RNA, 19 nt, Artificial Sequence
  Description of Artificial Sequence: Synthetic oligonucleotide
gcacagaaacugaauacca

SEQ ID NO: 1719227 - RNA, 19 nt, Artificial Sequence
  Description of Artificial Sequence: Synthetic oligonucleotide
ugccccauacuggucugca

SEQ ID NO: 1719228 - RNA, 19 nt, Artificial Sequence
  Description of Artificial Sequence: Synthetic oligonucleotide
ugaucccuugccggcgcag

SEQ ID NO: 1719229 - RNA, 19 nt, Artificial Sequence
  Description of Artificial Sequence: Synthetic oligonucleotide
ugcaugagugcugcaggua

SEQ ID NO: 1719230 - RNA, 19 nt, Artificial Sequence
  Description of Artificial Sequence: Synthetic oligonucleotide
gcacaccaaagguugucug

SEQ ID NO: 1719231 - RNA, 19 nt, Artificial Sequence
  Description of Artificial Sequence: Synthetic oligonucleotide
gccugacuggaccagguca

SEQ ID NO: 1719232 - RNA, 19 nt, Artificial Sequence
  Description of Artificial Sequence: Synthetic oligonucleotide
gcugcagguaugcgcgagg

SEQ ID NO: 1719233 - RNA, 19 nt, Artificial Sequence
  Description of Artificial Sequence: Synthetic oligonucleotide
cagugcgagucaguggaug

SEQ ID NO: 1719234 - RNA, 19 nt, Artificial Sequence
  Description of Artificial Sequence: Synthetic oligonucleotide
cuggaagagugugcaugag

SEQ ID NO: 1719235 - RNA, 19 nt, Artificial Sequence
  Description of Artificial Sequence: Synthetic oligonucleotide
ggcaggacacuggaucccg

SEQ ID NO: 1719236 - RNA, 19 nt, Artificial Sequence
  Description of Artificial Sequence: Synthetic oligonucleotide
cuggaucccguacguggug

SEQ ID NO: 1719237 - RNA, 19 nt, Artificial Sequence
  Description of Artificial Sequence: Synthetic oligonucleotide
augcccagucccacaacag

SEQ ID NO: 1719238 - RNA, 19 nt, Artificial Sequence
  Description of Artificial Sequence: Synthetic oligonucleotide
acgugguguuaaggguccc

SEQ ID NO: 1719239 - RNA, 19 nt, Artificial Sequence
  Description of Artificial Sequence: Synthetic oligonucleotide
gccgucagaucugugauga

SEQ ID NO: 1719240 - RNA, 19 nt, Artificial Sequence
  Description of Artificial Sequence: Synthetic oligonucleotide
gguccuacagugcgaguca

SEQ ID NO: 1719241 - RNA, 19 nt, Artificial Sequence
  Description of Artificial Sequence: Synthetic oligonucleotide
gaaggacaugagguagcca

SEQ ID NO: 1719242 - RNA, 19 nt, Artificial Sequence
  Description of Artificial Sequence: Synthetic oligonucleotide
ggcgccgucagaucuguga

SEQ ID NO: 1719243 - RNA, 19 nt, Artificial Sequence
  Description of Artificial Sequence: Synthetic oligonucleotide
aggccacccaggguggguc

SEQ ID NO: 1719244 - RNA, 19 nt, Artificial Sequence
  Description of Artificial Sequence: Synthetic oligonucleotide
guccuacagugcgagucag

SEQ ID NO: 1719245 - RNA, 19 nt, Artificial Sequence
  Description of Artificial Sequence: Synthetic oligonucleotide
gugcucagucucccaauga

SEQ ID NO: 1719246 - RNA, 19 nt, Artificial Sequence
  Description of Artificial Sequence: Synthetic oligonucleotide
aagagacuccgaaguuuau

SEQ ID NO: 1719247 - RNA, 19 nt, Artificial Sequence
  Description of Artificial Sequence: Synthetic oligonucleotide
ggguccuacagugcgaguc

SEQ ID NO: 1719248 - RNA, 19 nt, Artificial Sequence
  Description of Artificial Sequence: Synthetic oligonucleotide
cugacuggaccaggucacc

SEQ ID NO: 1719249 - RNA, 19 nt, Artificial Sequence
  Description of Artificial Sequence: Synthetic oligonucleotide
ucccuugccggcgcagagc

SEQ ID NO: 1719250 - RNA, 19 nt, Artificial Sequence
  Description of Artificial Sequence: Synthetic oligonucleotide
auuggacaccagcuuccuu

SEQ ID NO: 1719251 - RNA, 19 nt, Artificial Sequence
  Description of Artificial Sequence: Synthetic oligonucleotide
agaugacuccgaugccgaa

SEQ ID NO: 1719252 - RNA, 19 nt, Artificial Sequence
  Description of Artificial Sequence: Synthetic oligonucleotide
gugcagaacauuggacauc

SEQ ID NO: 1719253 - RNA, 19 nt, Artificial Sequence
  Description of Artificial Sequence: Synthetic oligonucleotide
aucccguacgugguguuaa

SEQ ID NO: 1719254 - RNA, 19 nt, Artificial Sequence
  Description of Artificial Sequence: Synthetic oligonucleotide
gagccacgauggcaggaca

SEQ ID NO: 1719255 - RNA, 19 nt, Artificial Sequence
  Description of Artificial Sequence: Synthetic oligonucleotide
gagccgaagaugacuccga

SEQ ID NO: 1719256 - RNA, 19 nt, Artificial Sequence
  Description of Artificial Sequence: Synthetic oligonucleotide
uggguacaguggcuuccuc

SEQ ID NO: 1719257 - RNA, 19 nt, Artificial Sequence
  Description of Artificial Sequence: Synthetic oligonucleotide
gucggccuagggccgcggg

SEQ ID NO: 1719258 - RNA, 19 nt, Artificial Sequence
  Description of Artificial Sequence: Synthetic oligonucleotide
auuggacaucagcgccaug

SEQ ID NO: 1719259 - RNA, 19 nt, Artificial Sequence
  Description of Artificial Sequence: Synthetic oligonucleotide
gaccagcacacuggaucgc

SEQ ID NO: 1719260 - RNA, 19 nt, Artificial Sequence
  Description of Artificial Sequence: Synthetic oligonucleotide
acacuggaucccguacgug

SEQ ID NO: 1719261 - RNA, 19 nt, Artificial Sequence
  Description of Artificial Sequence: Synthetic oligonucleotide
agguaugcgcgaggcgaag

SEQ ID NO: 1719262 - RNA, 19 nt, Artificial Sequence
  Description of Artificial Sequence: Synthetic oligonucleotide
cuggaucgcagcaaggcuu

SEQ ID NO: 1719263 - RNA, 19 nt, Artificial Sequence
  Description of Artificial Sequence: Synthetic oligonucleotide
ucccgccaagcagggagcc

SEQ ID NO: 1719264 - RNA, 19 nt, Artificial Sequence
  Description of Artificial Sequence: Synthetic oligonucleotide
ucccaaugaccaggccuug

SEQ ID NO: 1719265 - RNA, 19 nt, Artificial Sequence
  Description of Artificial Sequence: Synthetic oligonucleotide
cuccuaggagugugaccac

SEQ ID NO: 1719266 - RNA, 19 nt, Artificial Sequence
  Description of Artificial Sequence: Synthetic oligonucleotide
cgagucaguggaugcacag

SEQ ID NO: 1719267 - RNA, 19 nt, Artificial Sequence
  Description of Artificial Sequence: Synthetic oligonucleotide
cucccaaugaccaggccuu

SEQ ID NO: 1719268 - RNA, 19 nt, Artificial Sequence
  Description of Artificial Sequence: Synthetic oligonucleotide
gugugaccacaagagccac

SEQ ID NO: 1719269 - RNA, 19 nt, Artificial Sequence
  Description of Artificial Sequence: Synthetic oligonucleotide
gaucccuugccggcgcaga

SEQ ID NO: 1719270 - RNA, 19 nt, Artificial Sequence
  Description of Artificial Sequence: Synthetic oligonucleotide
uucugcgggcgccgucaga

SEQ ID NO: 1719271 - RNA, 19 nt, Artificial Sequence
  Description of Artificial Sequence: Synthetic oligonucleotide
guucugcgggcgccgucag

SEQ ID NO: 1719272 - RNA, 19 nt, Artificial Sequence
  Description of Artificial Sequence: Synthetic oligonucleotide
caagcagggagccgaagau

SEQ ID NO: 1719273 - RNA, 19 nt, Artificial Sequence
  Description of Artificial Sequence: Synthetic oligonucleotide
gauuggacaccagcuuccu

SEQ ID NO: 1719274 - RNA, 19 nt, Artificial Sequence
  Description of Artificial Sequence: Synthetic oligonucleotide
gagacccagucggccuagg

SEQ ID NO: 1719275 - RNA, 19 nt, Artificial Sequence
  Description of Artificial Sequence: Synthetic oligonucleotide
cagcuccuaggagugugac

SEQ ID NO: 1719276 - RNA, 19 nt, Artificial Sequence
  Description of Artificial Sequence: Synthetic oligonucleotide
ggaagacaccagguagggc

SEQ ID NO: 1719277 - RNA, 19 nt, Artificial Sequence
  Description of Artificial Sequence: Synthetic oligonucleotide
uguggucacugggcuuugu

SEQ ID NO: 1719278 - RNA, 19 nt, Artificial Sequence
  Description of Artificial Sequence: Synthetic oligonucleotide
gggagccgaagaugacucc

SEQ ID NO: 1719279 - RNA, 19 nt, Artificial Sequence
  Description of Artificial Sequence: Synthetic oligonucleotide
uggguccuacagugcgagu

SEQ ID NO: 1719280 - RNA, 19 nt, Artificial Sequence
  Description of Artificial Sequence: Synthetic oligonucleotide
accaggccgggcaucagaa

SEQ ID NO: 1719281 - RNA, 19 nt, Artificial Sequence
  Description of Artificial Sequence: Synthetic oligonucleotide
ccauggagauaauggagaa

SEQ ID NO: 1719282 - RNA, 19 nt, Artificial Sequence
  Description of Artificial Sequence: Synthetic oligonucleotide
ugccgcccgugccccauac

SEQ ID NO: 1719283 - RNA, 19 nt, Artificial Sequence
  Description of Artificial Sequence: Synthetic oligonucleotide
gagugaaagugccgcccgu

SEQ ID NO: 1719284 - RNA, 19 nt, Artificial Sequence
  Description of Artificial Sequence: Synthetic oligonucleotide
cauaggugaguaugaugau

SEQ ID NO: 1719285 - RNA, 19 nt, Artificial Sequence
  Description of Artificial Sequence: Synthetic oligonucleotide
agggccgcgggccguucug

SEQ ID NO: 1719286 - RNA, 19 nt, Artificial Sequence
  Description of Artificial Sequence: Synthetic oligonucleotide
gaccccgaagaaggacaug

SEQ ID NO: 1719287 - RNA, 19 nt, Artificial Sequence
  Description of Artificial Sequence: Synthetic oligonucleotide
uagggccgcgggccguucu

SEQ ID NO: 1719288 - RNA, 19 nt, Artificial Sequence
  Description of Artificial Sequence: Synthetic oligonucleotide
cagguaugcgcgaggcgaa

SEQ ID NO: 1719289 - RNA, 19 nt, Artificial Sequence
  Description of Artificial Sequence: Synthetic oligonucleotide
gcaugagugcugcagguau

SEQ ID NO: 1719290 - RNA, 19 nt, Artificial Sequence
  Description of Artificial Sequence: Synthetic oligonucleotide
gugcgagucaguggaugca

SEQ ID NO: 1719291 - RNA, 19 nt, Artificial Sequence
  Description of Artificial Sequence: Synthetic oligonucleotide
gcgcgaggcgaagagcagg

SEQ ID NO: 1719292 - RNA, 19 nt, Artificial Sequence
  Description of Artificial Sequence: Synthetic oligonucleotide
ggcugauuggacaccagcu

SEQ ID NO: 1719293 - RNA, 19 nt, Artificial Sequence
  Description of Artificial Sequence: Synthetic oligonucleotide
gucccgccaagcagggagc

SEQ ID NO: 1719294 - RNA, 19 nt, Artificial Sequence
  Description of Artificial Sequence: Synthetic oligonucleotide
ccuggccaaagauggcgac

SEQ ID NO: 1719295 - RNA, 19 nt, Artificial Sequence
  Description of Artificial Sequence: Synthetic oligonucleotide
cucugggaaaugggugcuc

SEQ ID NO: 1719296 - RNA, 19 nt, Artificial Sequence
  Description of Artificial Sequence: Synthetic oligonucleotide
ccaaagguugucugaacgu

SEQ ID NO: 1719297 - RNA, 19 nt, Artificial Sequence
  Description of Artificial Sequence: Synthetic oligonucleotide
ccgcccgugccccauacug

SEQ ID NO: 1719298 - RNA, 19 nt, Artificial Sequence
  Description of Artificial Sequence: Synthetic oligonucleotide
caggacacuggaucccgua

SEQ ID NO: 1719299 - RNA, 19 nt, Artificial Sequence
  Description of Artificial Sequence: Synthetic oligonucleotide
ggucagcaugcugucggug

SEQ ID NO: 1719300 - RNA, 19 nt, Artificial Sequence
  Description of Artificial Sequence: Synthetic oligonucleotide
gaucgcagcaaggcuuccu

SEQ ID NO: 1719301 - RNA, 19 nt, Artificial Sequence
  Description of Artificial Sequence: Synthetic oligonucleotide
gagggcacagaaacugaau

SEQ ID NO: 1719302 - RNA, 19 nt, Artificial Sequence
  Description of Artificial Sequence: Synthetic oligonucleotide
gaucccguacgugguguua

SEQ ID NO: 1719303 - RNA, 19 nt, Artificial Sequence
  Description of Artificial Sequence: Synthetic oligonucleotide
cccguacgugguguuaagg

SEQ ID NO: 1719304 - RNA, 19 nt, Artificial Sequence
  Description of Artificial Sequence: Synthetic oligonucleotide
auaccaggccgggcaucag

SEQ ID NO: 1719305 - RNA, 19 nt, Artificial Sequence
  Description of Artificial Sequence: Synthetic oligonucleotide
cccagucggccuagggccg

SEQ ID NO: 1719306 - RNA, 19 nt, Artificial Sequence
  Description of Artificial Sequence: Synthetic oligonucleotide
uccacccugaugggcugau

SEQ ID NO: 1719307 - RNA, 19 nt, Artificial Sequence
  Description of Artificial Sequence: Synthetic oligonucleotide
ggaagagacuccgaaguuu

SEQ ID NO: 1719308 - RNA, 19 nt, Artificial Sequence
  Description of Artificial Sequence: Synthetic oligonucleotide
gcugauuggacaccagcuu

SEQ ID NO: 1719309 - RNA, 19 nt, Artificial Sequence
  Description of Artificial Sequence: Synthetic oligonucleotide
cagguauagaguggaggcu

SEQ ID NO: 1719310 - RNA, 19 nt, Artificial Sequence
  Description of Artificial Sequence: Synthetic oligonucleotide
cccaaugaccaggccuugg

SEQ ID NO: 1719311 - RNA, 19 nt, Artificial Sequence
  Description of Artificial Sequence: Synthetic oligonucleotide
caaugaccaggccuuggau

SEQ ID NO: 1719312 - RNA, 19 nt, Artificial Sequence
  Description of Artificial Sequence: Synthetic oligonucleotide
ccuaggagugugaccacaa

SEQ ID NO: 1719313 - RNA, 19 nt, Artificial Sequence
  Description of Artificial Sequence: Synthetic oligonucleotide
caccauagcugcgguacaa

SEQ ID NO: 1719314 - RNA, 19 nt, Artificial Sequence
  Description of Artificial Sequence: Synthetic oligonucleotide
gguaugcgcgaggcgaaga

SEQ ID NO: 1719315 - RNA, 19 nt, Artificial Sequence
  Description of Artificial Sequence: Synthetic oligonucleotide
agucggccuagggccgcgg

SEQ ID NO: 1719316 - RNA, 19 nt, Artificial Sequence
  Description of Artificial Sequence: Synthetic oligonucleotide
ccgcgggccguucugcggg

SEQ ID NO: 1719317 - RNA, 19 nt, Artificial Sequence
  Description of Artificial Sequence: Synthetic oligonucleotide
cagagacccagucggccua

SEQ ID NO: 1719318 - RNA, 19 nt, Artificial Sequence
  Description of Artificial Sequence: Synthetic oligonucleotide
acccaggguggguccuaca

SEQ ID NO: 1719319 - RNA, 19 nt, Artificial Sequence
  Description of Artificial Sequence: Synthetic oligonucleotide
cccugugucugaagcugac

SEQ ID NO: 1719320 - RNA, 19 nt, Artificial Sequence
  Description of Artificial Sequence: Synthetic oligonucleotide
cugccacgaaggagaguga

SEQ ID NO: 1719321 - RNA, 19 nt, Artificial Sequence
  Description of Artificial Sequence: Synthetic oligonucleotide
ggucugcaaaccugccaaa

SEQ ID NO: 1719322 - RNA, 19 nt, Artificial Sequence
  Description of Artificial Sequence: Synthetic oligonucleotide
ggccuagggccgcgggccg

SEQ ID NO: 1719323 - RNA, 19 nt, Artificial Sequence
  Description of Artificial Sequence: Synthetic oligonucleotide
ccacgauggcaggacacug

SEQ ID NO: 1719324 - RNA, 19 nt, Artificial Sequence
  Description of Artificial Sequence: Synthetic oligonucleotide
cuucuggguacaguggcuu

SEQ ID NO: 1719325 - RNA, 19 nt, Artificial Sequence
  Description of Artificial Sequence: Synthetic oligonucleotide
cagucggccuagggccgcg

SEQ ID NO: 1719326 - RNA, 19 nt, Artificial Sequence
  Description of Artificial Sequence: Synthetic oligonucleotide
acagugcgagucaguggau

SEQ ID NO: 1719327 - RNA, 19 nt, Artificial Sequence
  Description of Artificial Sequence: Synthetic oligonucleotide
gugcugcagguaugcgcga

SEQ ID NO: 1719328 - RNA, 19 nt, Artificial Sequence
  Description of Artificial Sequence: Synthetic oligonucleotide
gguggguccuacagugcga

SEQ ID NO: 1719329 - RNA, 19 nt, Artificial Sequence
  Description of Artificial Sequence: Synthetic oligonucleotide
cccuugccggcgcagagca

SEQ ID NO: 1719330 - RNA, 19 nt, Artificial Sequence
  Description of Artificial Sequence: Synthetic oligonucleotide
cgcccgugccccauacugg

SEQ ID NO: 1719331 - RNA, 19 nt, Artificial Sequence
  Description of Artificial Sequence: Synthetic oligonucleotide
augccgaagcagagaccca

SEQ ID NO: 1719332 - RNA, 19 nt, Artificial Sequence
  Description of Artificial Sequence: Synthetic oligonucleotide
cugcgggcgccgucagauc

SEQ ID NO: 1719333 - RNA, 19 nt, Artificial Sequence
  Description of Artificial Sequence: Synthetic oligonucleotide
gaugaccaucugggcagcu

SEQ ID NO: 1719334 - RNA, 19 nt, Artificial Sequence
  Description of Artificial Sequence: Synthetic oligonucleotide
cguacgugguguuaagggu

SEQ ID NO: 1719335 - RNA, 19 nt, Artificial Sequence
  Description of Artificial Sequence: Synthetic oligonucleotide
agugccgcccgugccccau

SEQ ID NO: 1719336 - RNA, 19 nt, Artificial Sequence
  Description of Artificial Sequence: Synthetic oligonucleotide
cauuggacaucagcgccau

SEQ ID NO: 1719337 - RNA, 19 nt, Artificial Sequence
  Description of Artificial Sequence: Synthetic oligonucleotide
ccgagacagauaugguaaa

SEQ ID NO: 1719338 - RNA, 19 nt, Artificial Sequence
  Description of Artificial Sequence: Synthetic oligonucleotide
ggcgggugauggccuucag

SEQ ID NO: 1719339 - RNA, 19 nt, Artificial Sequence
  Description of Artificial Sequence: Synthetic oligonucleotide
ggaucgcagcaaggcuucc

SEQ ID NO: 1719340 - RNA, 19 nt, Artificial Sequence
  Description of Artificial Sequence: Synthetic oligonucleotide
caggcgggugauggccuuc

SEQ ID NO: 1719341 - RNA, 19 nt, Artificial Sequence
  Description of Artificial Sequence: Synthetic oligonucleotide
gcgagucaguggaugcaca

SEQ ID NO: 1719342 - RNA, 19 nt, Artificial Sequence
  Description of Artificial Sequence: Synthetic oligonucleotide
ccagucccacaacagcaaa

SEQ ID NO: 1719343 - RNA, 19 nt, Artificial Sequence
  Description of Artificial Sequence: Synthetic oligonucleotide
ccgucagaucugugaugac

SEQ ID NO: 1719344 - RNA, 19 nt, Artificial Sequence
  Description of Artificial Sequence: Synthetic oligonucleotide
gcccgugccccauacuggu

SEQ ID NO: 1719345 - RNA, 19 nt, Artificial Sequence
  Description of Artificial Sequence: Synthetic oligonucleotide
gcgguacaacaggccaccc

SEQ ID NO: 1719346 - RNA, 19 nt, Artificial Sequence
  Description of Artificial Sequence: Synthetic oligonucleotide
cgccgucagaucugugaug

SEQ ID NO: 1719347 - RNA, 19 nt, Artificial Sequence
  Description of Artificial Sequence: Synthetic oligonucleotide
cgcgaggcgaagagcagga

SEQ ID NO: 1719348 - RNA, 19 nt, Artificial Sequence
  Description of Artificial Sequence: Synthetic oligonucleotide
ccgccaagcagggagccga

SEQ ID NO: 1719349 - RNA, 19 nt, Artificial Sequence
  Description of Artificial Sequence: Synthetic oligonucleotide
gcgccgucagaucugugau

SEQ ID NO: 1719350 - RNA, 19 nt, Artificial Sequence
  Description of Artificial Sequence: Synthetic oligonucleotide
cgugccccauacuggucug

SEQ ID NO: 1719351 - RNA, 19 nt, Artificial Sequence
  Description of Artificial Sequence: Synthetic oligonucleotide
gccgggcaucagaaagcag

SEQ ID NO: 1719352 - RNA, 19 nt, Artificial Sequence
  Description of Artificial Sequence: Synthetic oligonucleotide
ccggcgcagagcacccaug

SEQ ID NO: 1719353 - RNA, 19 nt, Artificial Sequence
  Description of Artificial Sequence: Synthetic oligonucleotide
gcacauaggugaguaugau

SEQ ID NO: 1719354 - RNA, 19 nt, Artificial Sequence
  Description of Artificial Sequence: Synthetic oligonucleotide
gcgacaccauagcugcggu

SEQ ID NO: 1719355 - RNA, 19 nt, Artificial Sequence
  Description of Artificial Sequence: Synthetic oligonucleotide
cccgccaagcagggagccg

SEQ ID NO: 1719356 - RNA, 19 nt, Artificial Sequence
  Description of Artificial Sequence: Synthetic oligonucleotide
gccacgauggcaggacacu

SEQ ID NO: 1719357 - RNA, 19 nt, Artificial Sequence
  Description of Artificial Sequence: Synthetic oligonucleotide
cgagacagauaugguaaaa

SEQ ID NO: 1719358 - RNA, 19 nt, Artificial Sequence
  Description of Artificial Sequence: Synthetic oligonucleotide
ccagucggccuagggccgc

SEQ ID NO: 1719359 - RNA, 19 nt, Artificial Sequence
  Description of Artificial Sequence: Synthetic oligonucleotide
cuagggccgcgggccguuc

SEQ ID NO: 1719360 - RNA, 19 nt, Artificial Sequence
  Description of Artificial Sequence: Synthetic oligonucleotide
ccgugccccauacuggucu

SEQ ID NO: 1719361 - RNA, 19 nt, Artificial Sequence
  Description of Artificial Sequence: Synthetic oligonucleotide
gcgccaugcccagucccac

SEQ ID NO: 1719362 - RNA, 19 nt, Artificial Sequence
  Description of Artificial Sequence: Synthetic oligonucleotide
cagcuggaagagugugcau

SEQ ID NO: 1719363 - RNA, 19 nt, Artificial Sequence
  Description of Artificial Sequence: Synthetic oligonucleotide
cguucugcgggcgccguca

SEQ ID NO: 1719364 - RNA, 19 nt, Artificial Sequence
  Description of Artificial Sequence: Synthetic oligonucleotide
ggaccccgaagaaggacau

SEQ ID NO: 1719365 - RNA, 19 nt, Artificial Sequence
  Description of Artificial Sequence: Synthetic oligonucleotide
gggccgcgggccguucugc

SEQ ID NO: 1719366 - RNA, 19 nt, Artificial Sequence
  Description of Artificial Sequence: Synthetic oligonucleotide
ggaucccguacgugguguu

SEQ ID NO: 1719367 - RNA, 19 nt, Artificial Sequence
  Description of Artificial Sequence: Synthetic oligonucleotide
ccaauaggacaagcaaauu

SEQ ID NO: 1719368 - RNA, 19 nt, Artificial Sequence
  Description of Artificial Sequence: Synthetic oligonucleotide
cgggccguucugcgggcgc

SEQ ID NO: 1719369 - RNA, 19 nt, Artificial Sequence
  Description of Artificial Sequence: Synthetic oligonucleotide
ccaggccgggcaucagaaa

SEQ ID NO: 1719370 - RNA, 19 nt, Artificial Sequence
  Description of Artificial Sequence: Synthetic oligonucleotide
ggacagcuccuaggagugu

SEQ ID NO: 1719371 - RNA, 19 nt, Artificial Sequence
  Description of Artificial Sequence: Synthetic oligonucleotide
gugccgcccgugccccaua

SEQ ID NO: 1719372 - RNA, 19 nt, Artificial Sequence
  Description of Artificial Sequence: Synthetic oligonucleotide
caucagcgccaugcccagu

SEQ ID NO: 1719373 - RNA, 19 nt, Artificial Sequence
  Description of Artificial Sequence: Synthetic oligonucleotide
cgacaccauagcugcggua

SEQ ID NO: 1719374 - RNA, 19 nt, Artificial Sequence
  Description of Artificial Sequence: Synthetic oligonucleotide
gggcgccgucagaucugug

SEQ ID NO: 1719375 - RNA, 19 nt, Artificial Sequence
  Description of Artificial Sequence: Synthetic oligonucleotide
ccaggccuuggaucaccau

SEQ ID NO: 1719376 - RNA, 19 nt, Artificial Sequence
  Description of Artificial Sequence: Synthetic oligonucleotide
gccgcccgugccccauacu

SEQ ID NO: 1719377 - RNA, 19 nt, Artificial Sequence
  Description of Artificial Sequence: Synthetic oligonucleotide
cgggcgccgucagaucugu

SEQ ID NO: 1719378 - RNA, 19 nt, Artificial Sequence
  Description of Artificial Sequence: Synthetic oligonucleotide
aauaauacgaaugauacuc

SEQ ID NO: 1719379 - RNA, 19 nt, Artificial Sequence
  Description of Artificial Sequence: Synthetic oligonucleotide
aauauauucaguaugagag

SEQ ID NO: 1719380 - RNA, 19 nt, Artificial Sequence
  Description of Artificial Sequence: Synthetic oligonucleotide
uauauauauauacugaagc

SEQ ID NO: 1719381 - RNA, 19 nt, Artificial Sequence
  Description of Artificial Sequence: Synthetic oligonucleotide
aaucuauauacccaacucc

SEQ ID NO: 1719382 - RNA, 19 nt, Artificial Sequence
  Description of Artificial Sequence: Synthetic oligonucleotide
uauauauauauauauauac

SEQ ID NO: 1719383 - RNA, 19 nt, Artificial Sequence
  Description of Artificial Sequence: Synthetic oligonucleotide
uauauauauauauauacug

SEQ ID NO: 1719384 - RNA, 19 nt, Artificial Sequence
  Description of Artificial Sequence: Synthetic oligonucleotide
uuuagaaugucuaacaugu

SEQ ID NO: 1719385 - RNA, 19 nt, Artificial Sequence
  Description of Artificial Sequence: Synthetic oligonucleotide
aaugggacgaaguuugacc

SEQ ID NO: 1719386 - RNA, 19 nt, Artificial Sequence
  Description of Artificial Sequence: Synthetic oligonucleotide
uauauauauauauauauau

SEQ ID NO: 1719387 - RNA, 19 nt, Artificial Sequence
  Description of Artificial Sequence: Synthetic oligonucleotide
uauauuaucaguucuuccc

SEQ ID NO: 1719388 - RNA, 19 nt, Artificial Sequence
  Description of Artificial Sequence: Synthetic oligonucleotide
auuauauauauauauauau

SEQ ID NO: 1719389 - RNA, 19 nt, Artificial Sequence
  Description of Artificial Sequence: Synthetic oligonucleotide
uuuuccagggacuaugucg

SEQ ID NO: 1719390 - RNA, 19 nt, Artificial Sequence
  Description of Artificial Sequence: Synthetic oligonucleotide
uucgacaagguucuaaggg

SEQ ID NO: 1719391 - RNA, 19 nt, Artificial Sequence
  Description of Artificial Sequence: Synthetic oligonucleotide
uucaguaugagagacauug

SEQ ID NO: 1719392 - RNA, 19 nt, Artificial Sequence
  Description of Artificial Sequence: Synthetic oligonucleotide
uacuagaauaauaacuucc

SEQ ID NO: 1719393 - RNA, 19 nt, Artificial Sequence
  Description of Artificial Sequence: Synthetic oligonucleotide
uuuacucucucucagcucc

SEQ ID NO: 1719394 - RNA, 19 nt, Artificial Sequence
  Description of Artificial Sequence: Synthetic oligonucleotide
ugauuaauugcuuuuauau

SEQ ID NO: 1719395 - RNA, 19 nt, Artificial Sequence
  Description of Artificial Sequence: Synthetic oligonucleotide
uauauauauauauacugaa

SEQ ID NO: 1719396 - RNA, 19 nt, Artificial Sequence
  Description of Artificial Sequence: Synthetic oligonucleotide
uuucccaauaauacgaaug

SEQ ID NO: 1719397 - RNA, 19 nt, Artificial Sequence
  Description of Artificial Sequence: Synthetic oligonucleotide
auauauuccauuuucagua

SEQ ID NO: 1719398 - RNA, 19 nt, Artificial Sequence
  Description of Artificial Sequence: Synthetic oligonucleotide
acauuauauauauauauau

SEQ ID NO: 1719399 - RNA, 19 nt, Artificial Sequence
  Description of Artificial Sequence: Synthetic oligonucleotide
auuaauugcuuuuauauua

SEQ ID NO: 1719400 - RNA, 19 nt, Artificial Sequence
  Description of Artificial Sequence: Synthetic oligonucleotide
cauuggauauuaaagacac

SEQ ID NO: 1719401 - RNA, 19 nt, Artificial Sequence
  Description of Artificial Sequence: Synthetic oligonucleotide
cuuguuaacaccugagugc

SEQ ID NO: 1719402 - RNA, 19 nt, Artificial Sequence
  Description of Artificial Sequence: Synthetic oligonucleotide
aacuacuagaauaauaacu

SEQ ID NO: 1719403 - RNA, 19 nt, Artificial Sequence
  Description of Artificial Sequence: Synthetic oligonucleotide
aaaagauggaaccguaggu

SEQ ID NO: 1719404 - RNA, 19 nt, Artificial Sequence
  Description of Artificial Sequence: Synthetic oligonucleotide
uggugaagcaaguucaagg

SEQ ID NO: 1719405 - RNA, 19 nt, Artificial Sequence
  Description of Artificial Sequence: Synthetic oligonucleotide
guuggguacagauaggucc

SEQ ID NO: 1719406 - RNA, 19 nt, Artificial Sequence
  Description of Artificial Sequence: Synthetic oligonucleotide
agaucuauuuucuauguca

SEQ ID NO: 1719407 - RNA, 19 nt, Artificial Sequence
  Description of Artificial Sequence: Synthetic oligonucleotide
aaugauggaucccaaauua

SEQ ID NO: 1719408 - RNA, 19 nt, Artificial Sequence
  Description of Artificial Sequence: Synthetic oligonucleotide
ucuaagggaagcauuuucc

SEQ ID NO: 1719409 - RNA, 19 nt, Artificial Sequence
  Description of Artificial Sequence: Synthetic oligonucleotide
uuauauauauauauauaua

SEQ ID NO: 1719410 - RNA, 19 nt, Artificial Sequence
  Description of Artificial Sequence: Synthetic oligonucleotide
acaucacuaacucucuggc

SEQ ID NO: 1719411 - RNA, 19 nt, Artificial Sequence
  Description of Artificial Sequence: Synthetic oligonucleotide
aaaacgucaagcaaaagau

SEQ ID NO: 1719412 - RNA, 19 nt, Artificial Sequence
  Description of Artificial Sequence: Synthetic oligonucleotide
agcauuuucccaauaauac

SEQ ID NO: 1719413 - RNA, 19 nt, Artificial Sequence
  Description of Artificial Sequence: Synthetic oligonucleotide
uagaauaauaacuuccaaa

SEQ ID NO: 1719414 - RNA, 19 nt, Artificial Sequence
  Description of Artificial Sequence: Synthetic oligonucleotide
uaauacgaaugauacuccg

SEQ ID NO: 1719415 - RNA, 19 nt, Artificial Sequence
  Description of Artificial Sequence: Synthetic oligonucleotide
auacgaaugauacuccgag

SEQ ID NO: 1719416 - RNA, 19 nt, Artificial Sequence
  Description of Artificial Sequence: Synthetic oligonucleotide
aauuaauuuuggagaaugg

SEQ ID NO: 1719417 - RNA, 19 nt, Artificial Sequence
  Description of Artificial Sequence: Synthetic oligonucleotide
auggcuaccauucaccuug

SEQ ID NO: 1719418 - RNA, 19 nt, Artificial Sequence
  Description of Artificial Sequence: Synthetic oligonucleotide
uucccaauaauacgaauga

SEQ ID NO: 1719419 - RNA, 19 nt, Artificial Sequence
  Description of Artificial Sequence: Synthetic oligonucleotide
agcagguaaugauggaucc

SEQ ID NO: 1719420 - RNA, 19 nt, Artificial Sequence
  Description of Artificial Sequence: Synthetic oligonucleotide
gagauaaccagcuucuuca

SEQ ID NO: 1719421 - RNA, 19 nt, Artificial Sequence
  Description of Artificial Sequence: Synthetic oligonucleotide
uuagucacccuaacaaaag

SEQ ID NO: 1719422 - RNA, 19 nt, Artificial Sequence
  Description of Artificial Sequence: Synthetic oligonucleotide
aagaucuauuuucuauguc

SEQ ID NO: 1719423 - RNA, 19 nt, Artificial Sequence
  Description of Artificial Sequence: Synthetic oligonucleotide
caaaagauggaaccguagg

SEQ ID NO: 1719424 - RNA, 19 nt, Artificial Sequence
  Description of Artificial Sequence: Synthetic oligonucleotide
ucugagauaaccagcuucu

SEQ ID NO: 1719425 - RNA, 19 nt, Artificial Sequence
  Description of Artificial Sequence: Synthetic oligonucleotide
agugcauuggauauuaaag

SEQ ID NO: 1719426 - RNA, 19 nt, Artificial Sequence
  Description of Artificial Sequence: Synthetic oligonucleotide
aaggaaucaucuugaaaug

SEQ ID NO: 1719427 - RNA, 19 nt, Artificial Sequence
  Description of Artificial Sequence: Synthetic oligonucleotide
caggauaagguuuagucac

SEQ ID NO: 1719428 - RNA, 19 nt, Artificial Sequence
  Description of Artificial Sequence: Synthetic oligonucleotide
aggaacaccaaaauacgcc

SEQ ID NO: 1719429 - RNA, 19 nt, Artificial Sequence
  Description of Artificial Sequence: Synthetic oligonucleotide
uauauucaguaugagagac

SEQ ID NO: 1719430 - RNA, 19 nt, Artificial Sequence
  Description of Artificial Sequence: Synthetic oligonucleotide
aaggaaacauuguucgaug

SEQ ID NO: 1719431 - RNA, 19 nt, Artificial Sequence
  Description of Artificial Sequence: Synthetic oligonucleotide
ucacuucugaccuugauua

SEQ ID NO: 1719432 - RNA, 19 nt, Artificial Sequence
  Description of Artificial Sequence: Synthetic oligonucleotide
ucuucgacaagguucuaag

SEQ ID NO: 1719433 - RNA, 19 nt, Artificial Sequence
  Description of Artificial Sequence: Synthetic oligonucleotide
uagcacucacauaaagugg

SEQ ID NO: 1719434 - RNA, 19 nt, Artificial Sequence
  Description of Artificial Sequence: Synthetic oligonucleotide
gaaugggucuaccaccugg

SEQ ID NO: 1719435 - RNA, 19 nt, Artificial Sequence
  Description of Artificial Sequence: Synthetic oligonucleotide
acgaaugauacuccgagcu

SEQ ID NO: 1719436 - RNA, 19 nt, Artificial Sequence
  Description of Artificial Sequence: Synthetic oligonucleotide
uuuggagaauggaaaggag

SEQ ID NO: 1719437 - RNA, 19 nt, Artificial Sequence
  Description of Artificial Sequence: Synthetic oligonucleotide
ucuuuacucucucucagcu

SEQ ID NO: 1719438 - RNA, 19 nt, Artificial Sequence
  Description of Artificial Sequence: Synthetic oligonucleotide
cacacauaaaacgucaagc

SEQ ID NO: 1719439 - RNA, 19 nt, Artificial Sequence
  Description of Artificial Sequence: Synthetic oligonucleotide
ccaauaauacgaaugauac

SEQ ID NO: 1719440 - RNA, 19 nt, Artificial Sequence
  Description of Artificial Sequence: Synthetic oligonucleotide
auauauauauauauacuga

SEQ ID NO: 1719441 - RNA, 19 nt, Artificial Sequence
  Description of Artificial Sequence: Synthetic oligonucleotide
aagguuuagucacccuaac

SEQ ID NO: 1719442 - RNA, 19 nt, Artificial Sequence
  Description of Artificial Sequence: Synthetic oligonucleotide
auauauauauauacugaag

SEQ ID NO: 1719443 - RNA, 19 nt, Artificial Sequence
  Description of Artificial Sequence: Synthetic oligonucleotide
auauauauauauauauacu

SEQ ID NO: 1719444 - RNA, 19 nt, Artificial Sequence
  Description of Artificial Sequence: Synthetic oligonucleotide
auaauacgaaugauacucc

SEQ ID NO: 1719445 - RNA, 19 nt, Artificial Sequence
  Description of Artificial Sequence: Synthetic oligonucleotide
uuaauauauucaguaugag

SEQ ID NO: 1719446 - RNA, 19 nt, Artificial Sequence
  Description of Artificial Sequence: Synthetic oligonucleotide
uugaccuuauucauguccu

SEQ ID NO: 1719447 - RNA, 19 nt, Artificial Sequence
  Description of Artificial Sequence: Synthetic oligonucleotide
uucuaugucaaaggaauca

SEQ ID NO: 1719448 - RNA, 19 nt, Artificial Sequence
  Description of Artificial Sequence: Synthetic oligonucleotide
ucuacaggaacaccaaaau

SEQ ID NO: 1719449 - RNA, 19 nt, Artificial Sequence
  Description of Artificial Sequence: Synthetic oligonucleotide
ucugaccuugauuaauugc

SEQ ID NO: 1719450 - RNA, 19 nt, Artificial Sequence
  Description of Artificial Sequence: Synthetic oligonucleotide
ucugagaccgaagaaaagu

SEQ ID NO: 1719451 - RNA, 19 nt, Artificial Sequence
  Description of Artificial Sequence: Synthetic oligonucleotide
gaugacauuuuguuggaga

SEQ ID NO: 1719452 - RNA, 19 nt, Artificial Sequence
  Description of Artificial Sequence: Synthetic oligonucleotide
auauuaucaguucuucccu

SEQ ID NO: 1719453 - RNA, 19 nt, Artificial Sequence
  Description of Artificial Sequence: Synthetic oligonucleotide
aggaaucaucuugaaaugc

SEQ ID NO: 1719454 - RNA, 19 nt, Artificial Sequence
  Description of Artificial Sequence: Synthetic oligonucleotide
ugacccauagucuuuauuu

SEQ ID NO: 1719455 - RNA, 19 nt, Artificial Sequence
  Description of Artificial Sequence: Synthetic oligonucleotide
auuaauuuuggagaaugga

SEQ ID NO: 1719456 - RNA, 19 nt, Artificial Sequence
  Description of Artificial Sequence: Synthetic oligonucleotide
uuguaauucucugaaaguc

SEQ ID NO: 1719457 - RNA, 19 nt, Artificial Sequence
  Description of Artificial Sequence: Synthetic oligonucleotide
uguccuuccaaguguaggc

SEQ ID NO: 1719458 - RNA, 19 nt, Artificial Sequence
  Description of Artificial Sequence: Synthetic oligonucleotide
ucaguaugagagacauugg

SEQ ID NO: 1719459 - RNA, 19 nt, Artificial Sequence
  Description of Artificial Sequence: Synthetic oligonucleotide
acaagguucuaagggaagc

SEQ ID NO: 1719460 - RNA, 19 nt, Artificial Sequence
  Description of Artificial Sequence: Synthetic oligonucleotide
uucgaugggaccuucccgc

SEQ ID NO: 1719461 - RNA, 19 nt, Artificial Sequence
  Description of Artificial Sequence: Synthetic oligonucleotide
ucuucccuuagaucgauga

SEQ ID NO: 1719462 - RNA, 19 nt, Artificial Sequence
  Description of Artificial Sequence: Synthetic oligonucleotide
uauucaguaugagagacau

SEQ ID NO: 1719463 - RNA, 19 nt, Artificial Sequence
  Description of Artificial Sequence: Synthetic oligonucleotide
uccaaguguaggcacagcu

SEQ ID NO: 1719464 - RNA, 19 nt, Artificial Sequence
  Description of Artificial Sequence: Synthetic oligonucleotide
gucgaaaucugagauaacc

SEQ ID NO: 1719465 - RNA, 19 nt, Artificial Sequence
  Description of Artificial Sequence: Synthetic oligonucleotide
ugaccuuucaaugggacga

SEQ ID NO: 1719466 - RNA, 19 nt, Artificial Sequence
  Description of Artificial Sequence: Synthetic oligonucleotide
uuaucaguucuucccuuag

SEQ ID NO: 1719467 - RNA, 19 nt, Artificial Sequence
  Description of Artificial Sequence: Synthetic oligonucleotide
acuacuagaauaauaacuu

SEQ ID NO: 1719468 - RNA, 19 nt, Artificial Sequence
  Description of Artificial Sequence: Synthetic oligonucleotide
uugcuuuuauauuaucagu

SEQ ID NO: 1719469 - RNA, 19 nt, Artificial Sequence
  Description of Artificial Sequence: Synthetic oligonucleotide
ucgacaagguucuaaggga

SEQ ID NO: 1719470 - RNA, 19 nt, Artificial Sequence
  Description of Artificial Sequence: Synthetic oligonucleotide
gaaccguagguucauaauc

SEQ ID NO: 1719471 - RNA, 19 nt, Artificial Sequence
  Description of Artificial Sequence: Synthetic oligonucleotide
auauauucaguaugagaga

SEQ ID NO: 1719472 - RNA, 19 nt, Artificial Sequence
  Description of Artificial Sequence: Synthetic oligonucleotide
acauguuugggacaucacu

SEQ ID NO: 1719473 - RNA, 19 nt, Artificial Sequence
  Description of Artificial Sequence: Synthetic oligonucleotide
agcacucacauaaaguggg

SEQ ID NO: 1719474 - RNA, 19 nt, Artificial Sequence
  Description of Artificial Sequence: Synthetic oligonucleotide
agcaaucugagaccgaaga

SEQ ID NO: 1719475 - RNA, 19 nt, Artificial Sequence
  Description of Artificial Sequence: Synthetic oligonucleotide
aguucaaggaaacauuguu

SEQ ID NO: 1719476 - RNA, 19 nt, Artificial Sequence
  Description of Artificial Sequence: Synthetic oligonucleotide
caagcaaaagauggaaccg

SEQ ID NO: 1719477 - RNA, 19 nt, Artificial Sequence
  Description of Artificial Sequence: Synthetic oligonucleotide
acuaugucgaaaucugaga

SEQ ID NO: 1719478 - RNA, 19 nt, Artificial Sequence
  Description of Artificial Sequence: Synthetic oligonucleotide
ugagauaaccagcuucuuc

SEQ ID NO: 1719479 - RNA, 19 nt, Artificial Sequence
  Description of Artificial Sequence: Synthetic oligonucleotide
uuagaucgaugacauuuug

SEQ ID NO: 1719480 - RNA, 19 nt, Artificial Sequence
  Description of Artificial Sequence: Synthetic oligonucleotide
augauggcuaccauucacc

SEQ ID NO: 1719481 - RNA, 19 nt, Artificial Sequence
  Description of Artificial Sequence: Synthetic oligonucleotide
ugauggaucccaaauuaau

SEQ ID NO: 1719482 - RNA, 19 nt, Artificial Sequence
  Description of Artificial Sequence: Synthetic oligonucleotide
uguucgaugggaccuuccc

SEQ ID NO: 1719483 - RNA, 19 nt, Artificial Sequence
  Description of Artificial Sequence: Synthetic oligonucleotide
uauuuugccaagucagaaa

SEQ ID NO: 1719484 - RNA, 19 nt, Artificial Sequence
  Description of Artificial Sequence: Synthetic oligonucleotide
ucuauauacccaacuccac

SEQ ID NO: 1719485 - RNA, 19 nt, Artificial Sequence
  Description of Artificial Sequence: Synthetic oligonucleotide
uccgagcugacccauaguc

SEQ ID NO: 1719486 - RNA, 19 nt, Artificial Sequence
  Description of Artificial Sequence: Synthetic oligonucleotide
auaagguuuagucacccua

SEQ ID NO: 1719487 - RNA, 19 nt, Artificial Sequence
  Description of Artificial Sequence: Synthetic oligonucleotide
aaauggagagcacucccaa

SEQ ID NO: 1719488 - RNA, 19 nt, Artificial Sequence
  Description of Artificial Sequence: Synthetic oligonucleotide
uuguuaacaccugagugcu

SEQ ID NO: 1719489 - RNA, 19 nt, Artificial Sequence
  Description of Artificial Sequence: Synthetic oligonucleotide
uaauugcagccucacuugc

SEQ ID NO: 1719490 - RNA, 19 nt, Artificial Sequence
  Description of Artificial Sequence: Synthetic oligonucleotide
ucuaacauguuugggacau

SEQ ID NO: 1719491 - RNA, 19 nt, Artificial Sequence
  Description of Artificial Sequence: Synthetic oligonucleotide
guuaacaccugagugcugc

SEQ ID NO: 1719492 - RNA, 19 nt, Artificial Sequence
  Description of Artificial Sequence: Synthetic oligonucleotide
augggacgaaguuugaccu

SEQ ID NO: 1719493 - RNA, 19 nt, Artificial Sequence
  Description of Artificial Sequence: Synthetic oligonucleotide
cauuauauauauauauaua

SEQ ID NO: 1719494 - RNA, 19 nt, Artificial Sequence
  Description of Artificial Sequence: Synthetic oligonucleotide
uuuuaauugcagccucacu

SEQ ID NO: 1719495 - RNA, 19 nt, Artificial Sequence
  Description of Artificial Sequence: Synthetic oligonucleotide
uucccuuagaucgaugaca

SEQ ID NO: 1719496 - RNA, 19 nt, Artificial Sequence
  Description of Artificial Sequence: Synthetic oligonucleotide
uagaucgaugacauuuugu

SEQ ID NO: 1719497 - RNA, 19 nt, Artificial Sequence
  Description of Artificial Sequence: Synthetic oligonucleotide
gacacuggaucccauugug

SEQ ID NO: 1719498 - RNA, 19 nt, Artificial Sequence
  Description of Artificial Sequence: Synthetic oligonucleotide
accgaagaaaagugaguuc

SEQ ID NO: 1719499 - RNA, 19 nt, Artificial Sequence
  Description of Artificial Sequence: Synthetic oligonucleotide
aauacgaaugauacuccga

SEQ ID NO: 1719500 - RNA, 19 nt, Artificial Sequence
  Description of Artificial Sequence: Synthetic oligonucleotide
aauacgccagcauguuucu

SEQ ID NO: 1719501 - RNA, 19 nt, Artificial Sequence
  Description of Artificial Sequence: Synthetic oligonucleotide
aucuauauacccaacucca

SEQ ID NO: 1719502 - RNA, 19 nt, Artificial Sequence
  Description of Artificial Sequence: Synthetic oligonucleotide
aaauuaggucuucgacaag

SEQ ID NO: 1719503 - RNA, 19 nt, Artificial Sequence
  Description of Artificial Sequence: Synthetic oligonucleotide
cuggugaccuuucaauggg

SEQ ID NO: 1719504 - RNA, 19 nt, Artificial Sequence
  Description of Artificial Sequence: Synthetic oligonucleotide
uggagaaaugugaugucaa

SEQ ID NO: 1719505 - RNA, 19 nt, Artificial Sequence
  Description of Artificial Sequence: Synthetic oligonucleotide
cuucccgcugcauugcacg

SEQ ID NO: 1719506 - RNA, 19 nt, Artificial Sequence
  Description of Artificial Sequence: Synthetic oligonucleotide
caucauuugccacacauaa

SEQ ID NO: 1719507 - RNA, 19 nt, Artificial Sequence
  Description of Artificial Sequence: Synthetic oligonucleotide
augucgaaaucugagauaa

SEQ ID NO: 1719508 - RNA, 19 nt, Artificial Sequence
  Description of Artificial Sequence: Synthetic oligonucleotide
auauauauauauauauaua

SEQ ID NO: 1719509 - RNA, 19 nt, Artificial Sequence
  Description of Artificial Sequence: Synthetic oligonucleotide
cuacuagaauaauaacuuc

SEQ ID NO: 1719510 - RNA, 19 nt, Artificial Sequence
  Description of Artificial Sequence: Synthetic oligonucleotide
gguuuagucacccuaacaa

SEQ ID NO: 1719511 - RNA, 19 nt, Artificial Sequence
  Description of Artificial Sequence: Synthetic oligonucleotide
uugcagcaaucugagaccg

SEQ ID NO: 1719512 - RNA, 19 nt, Artificial Sequence
  Description of Artificial Sequence: Synthetic oligonucleotide
ugggucuaccaccugguga

SEQ ID NO: 1719513 - RNA, 19 nt, Artificial Sequence
  Description of Artificial Sequence: Synthetic oligonucleotide
gaaugauacuccgagcuga

SEQ ID NO: 1719514 - RNA, 19 nt, Artificial Sequence
  Description of Artificial Sequence: Synthetic oligonucleotide
aaacgucaagcaaaagaug

SEQ ID NO: 1719515 - RNA, 19 nt, Artificial Sequence
  Description of Artificial Sequence: Synthetic oligonucleotide
gaugggaccuucccgcugc

SEQ ID NO: 1719516 - RNA, 19 nt, Artificial Sequence
  Description of Artificial Sequence: Synthetic oligonucleotide
cuucgacaagguucuaagg

SEQ ID NO: 1719517 - RNA, 19 nt, Artificial Sequence
  Description of Artificial Sequence: Synthetic oligonucleotide
uuucuaugucaaaggaauc

SEQ ID NO: 1719518 - RNA, 19 nt, Artificial Sequence
  Description of Artificial Sequence: Synthetic oligonucleotide
acucacauaaagugggaau

SEQ ID NO: 1719519 - RNA, 19 nt, Artificial Sequence
  Description of Artificial Sequence: Synthetic oligonucleotide
ucccuuagaucgaugacau

SEQ ID NO: 1719520 - RNA, 19 nt, Artificial Sequence
  Description of Artificial Sequence: Synthetic oligonucleotide
uguuugggacaucacuaac

SEQ ID NO: 1719521 - RNA, 19 nt, Artificial Sequence
  Description of Artificial Sequence: Synthetic oligonucleotide
aagcauuuucccaauaaua

SEQ ID NO: 1719522 - RNA, 19 nt, Artificial Sequence
  Description of Artificial Sequence: Synthetic oligonucleotide
ugcuggauuaucucuguuc

SEQ ID NO: 1719523 - RNA, 19 nt, Artificial Sequence
  Description of Artificial Sequence: Synthetic oligonucleotide
uagucacccuaacaaaagu

SEQ ID NO: 1719524 - RNA, 19 nt, Artificial Sequence
  Description of Artificial Sequence: Synthetic oligonucleotide
aaguuugaccuuauucaug

SEQ ID NO: 1719525 - RNA, 19 nt, Artificial Sequence
  Description of Artificial Sequence: Synthetic oligonucleotide
ugauggcuaccauucaccu

SEQ ID NO: 1719526 - RNA, 19 nt, Artificial Sequence
  Description of Artificial Sequence: Synthetic oligonucleotide
ugucuuagagcagguaaug

SEQ ID NO: 1719527 - RNA, 19 nt, Artificial Sequence
  Description of Artificial Sequence: Synthetic oligonucleotide
uucugaccuugauuaauug

SEQ ID NO: 1719528 - RNA, 19 nt, Artificial Sequence
  Description of Artificial Sequence: Synthetic oligonucleotide
guucgaugggaccuucccg

SEQ ID NO: 1719529 - RNA, 19 nt, Artificial Sequence
  Description of Artificial Sequence: Synthetic oligonucleotide
aacauguuugggacaucac

SEQ ID NO: 1719530 - RNA, 19 nt, Artificial Sequence
  Description of Artificial Sequence: Synthetic oligonucleotide
uacgaaugauacuccgagc

SEQ ID NO: 1719531 - RNA, 19 nt, Artificial Sequence
  Description of Artificial Sequence: Synthetic oligonucleotide
uaugucgaaaucugagaua

SEQ ID NO: 1719532 - RNA, 19 nt, Artificial Sequence
  Description of Artificial Sequence: Synthetic oligonucleotide
cuauauacccaacuccaca

SEQ ID NO: 1719533 - RNA, 19 nt, Artificial Sequence
  Description of Artificial Sequence: Synthetic oligonucleotide
aguagcacucacauaaagu

SEQ ID NO: 1719534 - RNA, 19 nt, Artificial Sequence
  Description of Artificial Sequence: Synthetic oligonucleotide
caaaugugggaucaacuca

SEQ ID NO: 1719535 - RNA, 19 nt, Artificial Sequence
  Description of Artificial Sequence: Synthetic oligonucleotide
acauuguucgaugggaccu

SEQ ID NO: 1719536 - RNA, 19 nt, Artificial Sequence
  Description of Artificial Sequence: Synthetic oligonucleotide
ggaucaacucaaaauuagg

SEQ ID NO: 1719537 - RNA, 19 nt, Artificial Sequence
  Description of Artificial Sequence: Synthetic oligonucleotide
aggauaagguuuagucacc

SEQ ID NO: 1719538 - RNA, 19 nt, Artificial Sequence
  Description of Artificial Sequence: Synthetic oligonucleotide
uuccauugcaguugcugga

SEQ ID NO: 1719539 - RNA, 19 nt, Artificial Sequence
  Description of Artificial Sequence: Synthetic oligonucleotide
cauguuugggacaucacua

SEQ ID NO: 1719540 - RNA, 19 nt, Artificial Sequence
  Description of Artificial Sequence: Synthetic oligonucleotide
uacagauaggucccaggau

SEQ ID NO: 1719541 - RNA, 19 nt, Artificial Sequence
  Description of Artificial Sequence: Synthetic oligonucleotide
guuuagucacccuaacaaa

SEQ ID NO: 1719542 - RNA, 19 nt, Artificial Sequence
  Description of Artificial Sequence: Synthetic oligonucleotide
auuuucuaugucaaaggaa

SEQ ID NO: 1719543 - RNA, 19 nt, Artificial Sequence
  Description of Artificial Sequence: Synthetic oligonucleotide
gucaaaggaaucaucuuga

SEQ ID NO: 1719544 - RNA, 19 nt, Artificial Sequence
  Description of Artificial Sequence: Synthetic oligonucleotide
ggaacaccaaaauacgcca

SEQ ID NO: 1719545 - RNA, 19 nt, Artificial Sequence
  Description of Artificial Sequence: Synthetic oligonucleotide
caccuuguuaacaccugag

SEQ ID NO: 1719546 - RNA, 19 nt, Artificial Sequence
  Description of Artificial Sequence: Synthetic oligonucleotide
caguagcacucacauaaag

SEQ ID NO: 1719547 - RNA, 19 nt, Artificial Sequence
  Description of Artificial Sequence: Synthetic oligonucleotide
ucgaugacauuuuguugga

SEQ ID NO: 1719548 - RNA, 19 nt, Artificial Sequence
  Description of Artificial Sequence: Synthetic oligonucleotide
ccaagaucuauuuucuaug

SEQ ID NO: 1719549 - RNA, 19 nt, Artificial Sequence
  Description of Artificial Sequence: Synthetic oligonucleotide
uacgccagcauguuucuua

SEQ ID NO: 1719550 - RNA, 19 nt, Artificial Sequence
  Description of Artificial Sequence: Synthetic oligonucleotide
agguuuagucacccuaaca

SEQ ID NO: 1719551 - RNA, 19 nt, Artificial Sequence
  Description of Artificial Sequence: Synthetic oligonucleotide
gaacaccaaaauacgccag

SEQ ID NO: 1719552 - RNA, 19 nt, Artificial Sequence
  Description of Artificial Sequence: Synthetic oligonucleotide
gauacuccgagcugaccca

SEQ ID NO: 1719553 - RNA, 19 nt, Artificial Sequence
  Description of Artificial Sequence: Synthetic oligonucleotide
gcuuuuauauuaucaguuc

SEQ ID NO: 1719554 - RNA, 19 nt, Artificial Sequence
  Description of Artificial Sequence: Synthetic oligonucleotide
aaguguaggcacagcuuuc

SEQ ID NO: 1719555 - RNA, 19 nt, Artificial Sequence
  Description of Artificial Sequence: Synthetic oligonucleotide
auuaucaguucuucccuua

SEQ ID NO: 1719556 - RNA, 19 nt, Artificial Sequence
  Description of Artificial Sequence: Synthetic oligonucleotide
gauaaccagcuucuucauc

SEQ ID NO: 1719557 - RNA, 19 nt, Artificial Sequence
  Description of Artificial Sequence: Synthetic oligonucleotide
aaugggucuaccaccuggu

SEQ ID NO: 1719558 - RNA, 19 nt, Artificial Sequence
  Description of Artificial Sequence: Synthetic oligonucleotide
uuggugaagcaaguucaag

SEQ ID NO: 1719559 - RNA, 19 nt, Artificial Sequence
  Description of Artificial Sequence: Synthetic oligonucleotide
gaaguuugaccuuauucau

SEQ ID NO: 1719560 - RNA, 19 nt, Artificial Sequence
  Description of Artificial Sequence: Synthetic oligonucleotide
guuguaauucucugaaagu

SEQ ID NO: 1719561 - RNA, 19 nt, Artificial Sequence
  Description of Artificial Sequence: Synthetic oligonucleotide
uauuaucaguucuucccuu

SEQ ID NO: 1719562 - RNA, 19 nt, Artificial Sequence
  Description of Artificial Sequence: Synthetic oligonucleotide
gacaagguucuaagggaag

SEQ ID NO: 1719563 - RNA, 19 nt, Artificial Sequence
  Description of Artificial Sequence: Synthetic oligonucleotide
auguuugggacaucacuaa

SEQ ID NO: 1719564 - RNA, 19 nt, Artificial Sequence
  Description of Artificial Sequence: Synthetic oligonucleotide
ucuguccuuccaaguguag

SEQ ID NO: 1719565 - RNA, 19 nt, Artificial Sequence
  Description of Artificial Sequence: Synthetic oligonucleotide
ucuucaagggcagcuauuu

SEQ ID NO: 1719566 - RNA, 19 nt, Artificial Sequence
  Description of Artificial Sequence: Synthetic oligonucleotide
uggaaccguagguucauaa

SEQ ID NO: 1719567 - RNA, 19 nt, Artificial Sequence
  Description of Artificial Sequence: Synthetic oligonucleotide
gggaucaacucaaaauuag

SEQ ID NO: 1719568 - RNA, 19 nt, Artificial Sequence
  Description of Artificial Sequence: Synthetic oligonucleotide
aagguucuaagggaagcau

SEQ ID NO: 1719569 - RNA, 19 nt, Artificial Sequence
  Description of Artificial Sequence: Synthetic oligonucleotide
agcauauauuccauuuuca

SEQ ID NO: 1719570 - RNA, 19 nt, Artificial Sequence
  Description of Artificial Sequence: Synthetic oligonucleotide
caucaaauuccucagaguu

SEQ ID NO: 1719571 - RNA, 19 nt, Artificial Sequence
  Description of Artificial Sequence: Synthetic oligonucleotide
gaguucaaaugugggauca

SEQ ID NO: 1719572 - RNA, 19 nt, Artificial Sequence
  Description of Artificial Sequence: Synthetic oligonucleotide
aaucugagauaaccagcuu

SEQ ID NO: 1719573 - RNA, 19 nt, Artificial Sequence
  Description of Artificial Sequence: Synthetic oligonucleotide
uaauucucugaaagucaau

SEQ ID NO: 1719574 - RNA, 19 nt, Artificial Sequence
  Description of Artificial Sequence: Synthetic oligonucleotide
ucaaugggacgaaguuuga

SEQ ID NO: 1719575 - RNA, 19 nt, Artificial Sequence
  Description of Artificial Sequence: Synthetic oligonucleotide
cuaacucucuggcuuucug

SEQ ID NO: 1719576 - RNA, 19 nt, Artificial Sequence
  Description of Artificial Sequence: Synthetic oligonucleotide
guucaaaugugggaucaac

SEQ ID NO: 1719577 - RNA, 19 nt, Artificial Sequence
  Description of Artificial Sequence: Synthetic oligonucleotide
gucaagcaaaagauggaac

SEQ ID NO: 1719578 - RNA, 19 nt, Artificial Sequence
  Description of Artificial Sequence: Synthetic oligonucleotide
augauacuccgagcugacc

SEQ ID NO: 1719579 - RNA, 19 nt, Artificial Sequence
  Description of Artificial Sequence: Synthetic oligonucleotide
auacccaacuccacaguag

SEQ ID NO: 1719580 - RNA, 19 nt, Artificial Sequence
  Description of Artificial Sequence: Synthetic oligonucleotide
aauugcagccucacuugcu

SEQ ID NO: 1719581 - RNA, 19 nt, Artificial Sequence
  Description of Artificial Sequence: Synthetic oligonucleotide
gggucuaccaccuggugac

SEQ ID NO: 1719582 - RNA, 19 nt, Artificial Sequence
  Description of Artificial Sequence: Synthetic oligonucleotide
ucacugguuuguucugucu

SEQ ID NO: 1719583 - RNA, 19 nt, Artificial Sequence
  Description of Artificial Sequence: Synthetic oligonucleotide
cuagaauaauaacuuccaa

SEQ ID NO: 1719584 - RNA, 19 nt, Artificial Sequence
  Description of Artificial Sequence: Synthetic oligonucleotide
agguuggguacagauaggu

SEQ ID NO: 1719585 - RNA, 19 nt, Artificial Sequence
  Description of Artificial Sequence: Synthetic oligonucleotide
cuuuacucucucucagcuc

SEQ ID NO: 1719586 - RNA, 19 nt, Artificial Sequence
  Description of Artificial Sequence: Synthetic oligonucleotide
cauuuucaguagcacucac

SEQ ID NO: 1719587 - RNA, 19 nt, Artificial Sequence
  Description of Artificial Sequence: Synthetic oligonucleotide
acccuaacaaaaguuguaa

SEQ ID NO: 1719588 - RNA, 19 nt, Artificial Sequence
  Description of Artificial Sequence: Synthetic oligonucleotide
gugggaucaacucaaaauu

SEQ ID NO: 1719589 - RNA, 19 nt, Artificial Sequence
  Description of Artificial Sequence: Synthetic oligonucleotide
aggucuucgacaagguucu

SEQ ID NO: 1719590 - RNA, 19 nt, Artificial Sequence
  Description of Artificial Sequence: Synthetic oligonucleotide
uguuaacaccugagugcug

SEQ ID NO: 1719591 - RNA, 19 nt, Artificial Sequence
  Description of Artificial Sequence: Synthetic oligonucleotide
acugguuuguucugucuua

SEQ ID NO: 1719592 - RNA, 19 nt, Artificial Sequence
  Description of Artificial Sequence: Synthetic oligonucleotide
aguguaggcacagcuuuca

SEQ ID NO: 1719593 - RNA, 19 nt, Artificial Sequence
  Description of Artificial Sequence: Synthetic oligonucleotide
agccaguuaacuacuagaa

SEQ ID NO: 1719594 - RNA, 19 nt, Artificial Sequence
  Description of Artificial Sequence: Synthetic oligonucleotide
ggaucccaaauuaauuuug

SEQ ID NO: 1719595 - RNA, 19 nt, Artificial Sequence
  Description of Artificial Sequence: Synthetic oligonucleotide
cagguaaugauggauccca

SEQ ID NO: 1719596 - RNA, 19 nt, Artificial Sequence
  Description of Artificial Sequence: Synthetic oligonucleotide
agucuuuauuuugccaagu

SEQ ID NO: 1719597 - RNA, 19 nt, Artificial Sequence
  Description of Artificial Sequence: Synthetic oligonucleotide
gggacuaugucgaaaucug

SEQ ID NO: 1719598 - RNA, 19 nt, Artificial Sequence
  Description of Artificial Sequence: Synthetic oligonucleotide
ccaaauuaauuuuggagaa

SEQ ID NO: 1719599 - RNA, 19 nt, Artificial Sequence
  Description of Artificial Sequence: Synthetic oligonucleotide
ugaaugggucuaccaccug

SEQ ID NO: 1719600 - RNA, 19 nt, Artificial Sequence
  Description of Artificial Sequence: Synthetic oligonucleotide
agauaaccagcuucuucau

SEQ ID NO: 1719601 - RNA, 19 nt, Artificial Sequence
  Description of Artificial Sequence: Synthetic oligonucleotide
cuaugucgaaaucugagau

SEQ ID NO: 1719602 - RNA, 19 nt, Artificial Sequence
  Description of Artificial Sequence: Synthetic oligonucleotide
caagaucuauuuucuaugu

SEQ ID NO: 1719603 - RNA, 19 nt, Artificial Sequence
  Description of Artificial Sequence: Synthetic oligonucleotide
auuguucgaugggaccuuc

SEQ ID NO: 1719604 - RNA, 19 nt, Artificial Sequence
  Description of Artificial Sequence: Synthetic oligonucleotide
uuaacaccugagugcugcu

SEQ ID NO: 1719605 - RNA, 19 nt, Artificial Sequence
  Description of Artificial Sequence: Synthetic oligonucleotide
ucacuaacucucuggcuuu

SEQ ID NO: 1719606 - RNA, 19 nt, Artificial Sequence
  Description of Artificial Sequence: Synthetic oligonucleotide
gaagcauauauuccauuuu

SEQ ID NO: 1719607 - RNA, 19 nt, Artificial Sequence
  Description of Artificial Sequence: Synthetic oligonucleotide
auauucaguaugagagaca

SEQ ID NO: 1719608 - RNA, 19 nt, Artificial Sequence
  Description of Artificial Sequence: Synthetic oligonucleotide
cuccacaguagccaguuaa

SEQ ID NO: 1719609 - RNA, 19 nt, Artificial Sequence
  Description of Artificial Sequence: Synthetic oligonucleotide
ugucgaaaucugagauaac

SEQ ID NO: 1719610 - RNA, 19 nt, Artificial Sequence
  Description of Artificial Sequence: Synthetic oligonucleotide
cugcauugccacaauugca

SEQ ID NO: 1719611 - RNA, 19 nt, Artificial Sequence
  Description of Artificial Sequence: Synthetic oligonucleotide
ggauaagguuuagucaccc

SEQ ID NO: 1719612 - RNA, 19 nt, Artificial Sequence
  Description of Artificial Sequence: Synthetic oligonucleotide
gugaagcaaguucaaggaa

SEQ ID NO: 1719613 - RNA, 19 nt, Artificial Sequence
  Description of Artificial Sequence: Synthetic oligonucleotide
cuacaggaacaccaaaaua

SEQ ID NO: 1719614 - RNA, 19 nt, Artificial Sequence
  Description of Artificial Sequence: Synthetic oligonucleotide
agaccgaagaaaagugagu

SEQ ID NO: 1719615 - RNA, 19 nt, Artificial Sequence
  Description of Artificial Sequence: Synthetic oligonucleotide
caaugggacgaaguuugac

SEQ ID NO: 1719616 - RNA, 19 nt, Artificial Sequence
  Description of Artificial Sequence: Synthetic oligonucleotide
gauggaucccaaauuaauu

SEQ ID NO: 1719617 - RNA, 19 nt, Artificial Sequence
  Description of Artificial Sequence: Synthetic oligonucleotide
caauaauacgaaugauacu

SEQ ID NO: 1719618 - RNA, 19 nt, Artificial Sequence
  Description of Artificial Sequence: Synthetic oligonucleotide
gauaagguuuagucacccu

SEQ ID NO: 1719619 - RNA, 19 nt, Artificial Sequence
  Description of Artificial Sequence: Synthetic oligonucleotide
gucuaacauguuugggaca

SEQ ID NO: 1719620 - RNA, 19 nt, Artificial Sequence
  Description of Artificial Sequence: Synthetic oligonucleotide
ggaccuucccgcugcauug

SEQ ID NO: 1719621 - RNA, 19 nt, Artificial Sequence
  Description of Artificial Sequence: Synthetic oligonucleotide
caguaugagagacauuggu

SEQ ID NO: 1719622 - RNA, 19 nt, Artificial Sequence
  Description of Artificial Sequence: Synthetic oligonucleotide
agauaggucccaggauaag

SEQ ID NO: 1719623 - RNA, 19 nt, Artificial Sequence
  Description of Artificial Sequence: Synthetic oligonucleotide
auugcaguugcuggauuau

SEQ ID NO: 1719624 - RNA, 19 nt, Artificial Sequence
  Description of Artificial Sequence: Synthetic oligonucleotide
ccaggauaagguuuaguca

SEQ ID NO: 1719625 - RNA, 19 nt, Artificial Sequence
  Description of Artificial Sequence: Synthetic oligonucleotide
gaccgaagaaaagugaguu

SEQ ID NO: 1719626 - RNA, 19 nt, Artificial Sequence
  Description of Artificial Sequence: Synthetic oligonucleotide
cagcaaucugagaccgaag

SEQ ID NO: 1719627 - RNA, 19 nt, Artificial Sequence
  Description of Artificial Sequence: Synthetic oligonucleotide
augauggaucccaaauuaa

SEQ ID NO: 1719628 - RNA, 19 nt, Artificial Sequence
  Description of Artificial Sequence: Synthetic oligonucleotide
aaugugggaucaacucaaa

SEQ ID NO: 1719629 - RNA, 19 nt, Artificial Sequence
  Description of Artificial Sequence: Synthetic oligonucleotide
acgucaagcaaaagaugga

SEQ ID NO: 1719630 - RNA, 19 nt, Artificial Sequence
  Description of Artificial Sequence: Synthetic oligonucleotide
auccuggucuacaggaaca

SEQ ID NO: 1719631 - RNA, 19 nt, Artificial Sequence
  Description of Artificial Sequence: Synthetic oligonucleotide
cugaaugggucuaccaccu

SEQ ID NO: 1719632 - RNA, 19 nt, Artificial Sequence
  Description of Artificial Sequence: Synthetic oligonucleotide
acgccagcauguuucuuaa

SEQ ID NO: 1719633 - RNA, 19 nt, Artificial Sequence
  Description of Artificial Sequence: Synthetic oligonucleotide
ugaccuuauucauguccuu

SEQ ID NO: 1719634 - RNA, 19 nt, Artificial Sequence
  Description of Artificial Sequence: Synthetic oligonucleotide
agcaaaagauggaaccgua

SEQ ID NO: 1719635 - RNA, 19 nt, Artificial Sequence
  Description of Artificial Sequence: Synthetic oligonucleotide
caaguguaggcacagcuuu

SEQ ID NO: 1719636 - RNA, 19 nt, Artificial Sequence
  Description of Artificial Sequence: Synthetic oligonucleotide
cuuagaucgaugacauuuu

SEQ ID NO: 1719637 - RNA, 19 nt, Artificial Sequence
  Description of Artificial Sequence: Synthetic oligonucleotide
cacccuaacaaaaguugua

SEQ ID NO: 1719638 - RNA, 19 nt, Artificial Sequence
  Description of Artificial Sequence: Synthetic oligonucleotide
gacccauagucuuuauuuu

SEQ ID NO: 1719639 - RNA, 19 nt, Artificial Sequence
  Description of Artificial Sequence: Synthetic oligonucleotide
acacuggaucccauuguga

SEQ ID NO: 1719640 - RNA, 19 nt, Artificial Sequence
  Description of Artificial Sequence: Synthetic oligonucleotide
acuaacucucuggcuuucu

SEQ ID NO: 1719641 - RNA, 19 nt, Artificial Sequence
  Description of Artificial Sequence: Synthetic oligonucleotide
ugcuucugaaugggucuac

SEQ ID NO: 1719642 - RNA, 19 nt, Artificial Sequence
  Description of Artificial Sequence: Synthetic oligonucleotide
ugggacgaaguuugaccuu

SEQ ID NO: 1719643 - RNA, 19 nt, Artificial Sequence
  Description of Artificial Sequence: Synthetic oligonucleotide
ccacaauugcagcaaucug

SEQ ID NO: 1719644 - RNA, 19 nt, Artificial Sequence
  Description of Artificial Sequence: Synthetic oligonucleotide
uucugucuuagagcaggua

SEQ ID NO: 1719645 - RNA, 19 nt, Artificial Sequence
  Description of Artificial Sequence: Synthetic oligonucleotide
cugucuuagagcagguaau

SEQ ID NO: 1719646 - RNA, 19 nt, Artificial Sequence
  Description of Artificial Sequence: Synthetic oligonucleotide
agguucuaagggaagcauu

SEQ ID NO: 1719647 - RNA, 19 nt, Artificial Sequence
  Description of Artificial Sequence: Synthetic oligonucleotide
ccuaacaaaaguuguaauu

SEQ ID NO: 1719648 - RNA, 19 nt, Artificial Sequence
  Description of Artificial Sequence: Synthetic oligonucleotide
uggcuaccauucaccuugu

SEQ ID NO: 1719649 - RNA, 19 nt, Artificial Sequence
  Description of Artificial Sequence: Synthetic oligonucleotide
gguucauaaucaucaaauu

SEQ ID NO: 1719650 - RNA, 19 nt, Artificial Sequence
  Description of Artificial Sequence: Synthetic oligonucleotide
uaacaccugagugcugcuu

SEQ ID NO: 1719651 - RNA, 19 nt, Artificial Sequence
  Description of Artificial Sequence: Synthetic oligonucleotide
gucuucgacaagguucuaa

SEQ ID NO: 1719652 - RNA, 19 nt, Artificial Sequence
  Description of Artificial Sequence: Synthetic oligonucleotide
uaccaccuggugaccuuuc

SEQ ID NO: 1719653 - RNA, 19 nt, Artificial Sequence
  Description of Artificial Sequence: Synthetic oligonucleotide
gcagguaaugauggauccc

SEQ ID NO: 1719654 - RNA, 19 nt, Artificial Sequence
  Description of Artificial Sequence: Synthetic oligonucleotide
cugagugcugcuuuuccau

SEQ ID NO: 1719655 - RNA, 19 nt, Artificial Sequence
  Description of Artificial Sequence: Synthetic oligonucleotide
cacucacauaaagugggaa

SEQ ID NO: 1719656 - RNA, 19 nt, Artificial Sequence
  Description of Artificial Sequence: Synthetic oligonucleotide
agcacucccaagaucuauu

SEQ ID NO: 1719657 - RNA, 19 nt, Artificial Sequence
  Description of Artificial Sequence: Synthetic oligonucleotide
caucacuaacucucuggcu

SEQ ID NO: 1719658 - RNA, 19 nt, Artificial Sequence
  Description of Artificial Sequence: Synthetic oligonucleotide
gcuucugaaugggucuacc

SEQ ID NO: 1719659 - RNA, 19 nt, Artificial Sequence
  Description of Artificial Sequence: Synthetic oligonucleotide
cacauaaagugggaaucua

SEQ ID NO: 1719660 - RNA, 19 nt, Artificial Sequence
  Description of Artificial Sequence: Synthetic oligonucleotide
accuucccgcugcauugca

SEQ ID NO: 1719661 - RNA, 19 nt, Artificial Sequence
  Description of Artificial Sequence: Synthetic oligonucleotide
aucuguccuuccaagugua

SEQ ID NO: 1719662 - RNA, 19 nt, Artificial Sequence
  Description of Artificial Sequence: Synthetic oligonucleotide
cgaaugauacuccgagcug

SEQ ID NO: 1719663 - RNA, 19 nt, Artificial Sequence
  Description of Artificial Sequence: Synthetic oligonucleotide
ccuuagaucgaugacauuu

SEQ ID NO: 1719664 - RNA, 19 nt, Artificial Sequence
  Description of Artificial Sequence: Synthetic oligonucleotide
caccuggugaccuuucaau

SEQ ID NO: 1719665 - RNA, 19 nt, Artificial Sequence
  Description of Artificial Sequence: Synthetic oligonucleotide
agcugacccauagucuuua

SEQ ID NO: 1719666 - RNA, 19 nt, Artificial Sequence
  Description of Artificial Sequence: Synthetic oligonucleotide
gaccuuauucauguccuuu

SEQ ID NO: 1719667 - RNA, 19 nt, Artificial Sequence
  Description of Artificial Sequence: Synthetic oligonucleotide
gaccuuucaaugggacgaa

SEQ ID NO: 1719668 - RNA, 19 nt, Artificial Sequence
  Description of Artificial Sequence: Synthetic oligonucleotide
ggacuaugucgaaaucuga

SEQ ID NO: 1719669 - RNA, 19 nt, Artificial Sequence
  Description of Artificial Sequence: Synthetic oligonucleotide
gguucuaagggaagcauuu

SEQ ID NO: 1719670 - RNA, 19 nt, Artificial Sequence
  Description of Artificial Sequence: Synthetic oligonucleotide
auacuccgagcugacccau

SEQ ID NO: 1719671 - RNA, 19 nt, Artificial Sequence
  Description of Artificial Sequence: Synthetic oligonucleotide
ggaaccguagguucauaau

SEQ ID NO: 1719672 - RNA, 19 nt, Artificial Sequence
  Description of Artificial Sequence: Synthetic oligonucleotide
cugaagcauauauuccauu

SEQ ID NO: 1719673 - RNA, 19 nt, Artificial Sequence
  Description of Artificial Sequence: Synthetic oligonucleotide
gggacgaaguuugaccuua

SEQ ID NO: 1719674 - RNA, 19 nt, Artificial Sequence
  Description of Artificial Sequence: Synthetic oligonucleotide
gacgaaguuugaccuuauu

SEQ ID NO: 1719675 - RNA, 19 nt, Artificial Sequence
  Description of Artificial Sequence: Synthetic oligonucleotide
ccuuucaaugggacgaagu

SEQ ID NO: 1719676 - RNA, 19 nt, Artificial Sequence
  Description of Artificial Sequence: Synthetic oligonucleotide
gggcauuucuggaucuguc

SEQ ID NO: 1719677 - RNA, 19 nt, Artificial Sequence
  Description of Artificial Sequence: Synthetic oligonucleotide
caccaaaauacgccagcau

SEQ ID NO: 1719678 - RNA, 19 nt, Artificial Sequence
  Description of Artificial Sequence: Synthetic oligonucleotide
gccaguuaacuacuagaau

SEQ ID NO: 1719679 - RNA, 19 nt, Artificial Sequence
  Description of Artificial Sequence: Synthetic oligonucleotide
cgacaagguucuaagggaa

SEQ ID NO: 1719680 - RNA, 19 nt, Artificial Sequence
  Description of Artificial Sequence: Synthetic oligonucleotide
agagcacucccaagaucua

SEQ ID NO: 1719681 - RNA, 19 nt, Artificial Sequence
  Description of Artificial Sequence: Synthetic oligonucleotide
cugacccauagucuuuauu

SEQ ID NO: 1719682 - RNA, 19 nt, Artificial Sequence
  Description of Artificial Sequence: Synthetic oligonucleotide
gcacucacauaaaguggga

SEQ ID NO: 1719683 - RNA, 19 nt, Artificial Sequence
  Description of Artificial Sequence: Synthetic oligonucleotide
ggucuaccaccuggugacc

SEQ ID NO: 1719684 - RNA, 19 nt, Artificial Sequence
  Description of Artificial Sequence: Synthetic oligonucleotide
auacgccagcauguuucuu

SEQ ID NO: 1719685 - RNA, 19 nt, Artificial Sequence
  Description of Artificial Sequence: Synthetic oligonucleotide
cccuaacaaaaguuguaau

SEQ ID NO: 1719686 - RNA, 19 nt, Artificial Sequence
  Description of Artificial Sequence: Synthetic oligonucleotide
gggaccuucccgcugcauu

SEQ ID NO: 1719687 - RNA, 19 nt, Artificial Sequence
  Description of Artificial Sequence: Synthetic oligonucleotide
ccaaguguaggcacagcuu

SEQ ID NO: 1719688 - RNA, 19 nt, Artificial Sequence
  Description of Artificial Sequence: Synthetic oligonucleotide
gcacucccaagaucuauuu

SEQ ID NO: 1719689 - RNA, 19 nt, Artificial Sequence
  Description of Artificial Sequence: Synthetic oligonucleotide
cauuguucgaugggaccuu

SEQ ID NO: 1719690 - RNA, 19 nt, Artificial Sequence
  Description of Artificial Sequence: Synthetic oligonucleotide
cuccgagcugacccauagu

SEQ ID NO: 1719691 - RNA, 19 nt, Artificial Sequence
  Description of Artificial Sequence: Synthetic oligonucleotide
cugagauaaccagcuucuu

SEQ ID NO: 1719692 - RNA, 19 nt, Artificial Sequence
  Description of Artificial Sequence: Synthetic oligonucleotide
gcugacccauagucuuuau

SEQ ID NO: 1719693 - RNA, 19 nt, Artificial Sequence
  Description of Artificial Sequence: Synthetic oligonucleotide
ggacgaaguuugaccuuau

SEQ ID NO: 1719694 - RNA, 19 nt, Artificial Sequence
  Description of Artificial Sequence: Synthetic oligonucleotide
ggucuucgacaagguucua

SEQ ID NO: 1719695 - RNA, 19 nt, Artificial Sequence
  Description of Artificial Sequence: Synthetic oligonucleotide
cccuuagaucgaugacauu

SEQ ID NO: 1719696 - RNA, 19 nt, Artificial Sequence
  Description of Artificial Sequence: Synthetic oligonucleotide
aaugcgacgauguucugcc

SEQ ID NO: 1719697 - RNA, 19 nt, Artificial Sequence
  Description of Artificial Sequence: Synthetic oligonucleotide
aacggguagaucucaaugg

SEQ ID NO: 1719698 - RNA, 19 nt, Artificial Sequence
  Description of Artificial Sequence: Synthetic oligonucleotide
ugcgcaacaagaaggagcg

SEQ ID NO: 1719699 - RNA, 19 nt, Artificial Sequence
  Description of Artificial Sequence: Synthetic oligonucleotide
cagagaaaagagaaaacgg

SEQ ID NO: 1719700 - RNA, 19 nt, Artificial Sequence
  Description of Artificial Sequence: Synthetic oligonucleotide
aaaagagaaaacggggccg

SEQ ID NO: 1719701 - RNA, 19 nt, Artificial Sequence
  Description of Artificial Sequence: Synthetic oligonucleotide
agagaaaagagaaaacggg

SEQ ID NO: 1719702 - RNA, 19 nt, Artificial Sequence
  Description of Artificial Sequence: Synthetic oligonucleotide
ugcgguuuccaucacagcc

SEQ ID NO: 1719703 - RNA, 19 nt, Artificial Sequence
  Description of Artificial Sequence: Synthetic oligonucleotide
agggguacaauauguacac

SEQ ID NO: 1719704 - RNA, 19 nt, Artificial Sequence
  Description of Artificial Sequence: Synthetic oligonucleotide
acgauguucugccaggcgc

SEQ ID NO: 1719705 - RNA, 19 nt, Artificial Sequence
  Description of Artificial Sequence: Synthetic oligonucleotide
aagagcuucuugcacucac

SEQ ID NO: 1719706 - RNA, 19 nt, Artificial Sequence
  Description of Artificial Sequence: Synthetic oligonucleotide
agagggguacaauauguac

SEQ ID NO: 1719707 - RNA, 19 nt, Artificial Sequence
  Description of Artificial Sequence: Synthetic oligonucleotide
gaaaacgcaguccacacuc

SEQ ID NO: 1719708 - RNA, 19 nt, Artificial Sequence
  Description of Artificial Sequence: Synthetic oligonucleotide
uuagccaagaccucuccag

SEQ ID NO: 1719709 - RNA, 19 nt, Artificial Sequence
  Description of Artificial Sequence: Synthetic oligonucleotide
uacacagguuuuaaggggc

SEQ ID NO: 1719710 - RNA, 19 nt, Artificial Sequence
  Description of Artificial Sequence: Synthetic oligonucleotide
uaacggguagaucucaaug

SEQ ID NO: 1719711 - RNA, 19 nt, Artificial Sequence
  Description of Artificial Sequence: Synthetic oligonucleotide
aggucccacacucaaagcg

SEQ ID NO: 1719712 - RNA, 19 nt, Artificial Sequence
  Description of Artificial Sequence: Synthetic oligonucleotide
acggguagaucucaauggc

SEQ ID NO: 1719713 - RNA, 19 nt, Artificial Sequence
  Description of Artificial Sequence: Synthetic oligonucleotide
guacacagguuuuaagggg

SEQ ID NO: 1719714 - RNA, 19 nt, Artificial Sequence
  Description of Artificial Sequence: Synthetic oligonucleotide
gaucucaauggccucuacg

SEQ ID NO: 1719715 - RNA, 19 nt, Artificial Sequence
  Description of Artificial Sequence: Synthetic oligonucleotide
cucaauggccucuacgagg

SEQ ID NO: 1719716 - RNA, 19 nt, Artificial Sequence
  Description of Artificial Sequence: Synthetic oligonucleotide
uggucuuucagauggguac

SEQ ID NO: 1719717 - RNA, 19 nt, Artificial Sequence
  Description of Artificial Sequence: Synthetic oligonucleotide
ugcauuccaggccacgccg

SEQ ID NO: 1719718 - RNA, 19 nt, Artificial Sequence
  Description of Artificial Sequence: Synthetic oligonucleotide
uuuuaaggggcuguuggag

SEQ ID NO: 1719719 - RNA, 19 nt, Artificial Sequence
  Description of Artificial Sequence: Synthetic oligonucleotide
ugcacagcgaugcucauaa

SEQ ID NO: 1719720 - RNA, 19 nt, Artificial Sequence
  Description of Artificial Sequence: Synthetic oligonucleotide
aagcuggugcaccucuagc

SEQ ID NO: 1719721 - RNA, 19 nt, Artificial Sequence
  Description of Artificial Sequence: Synthetic oligonucleotide
ucagauggguacucuggcg

SEQ ID NO: 1719722 - RNA, 19 nt, Artificial Sequence
  Description of Artificial Sequence: Synthetic oligonucleotide
cauggagauggcaaaggcc

SEQ ID NO: 1719723 - RNA, 19 nt, Artificial Sequence
  Description of Artificial Sequence: Synthetic oligonucleotide
ucagccgcugaucuggacc

SEQ ID NO: 1719724 - RNA, 19 nt, Artificial Sequence
  Description of Artificial Sequence: Synthetic oligonucleotide
ucauaaagccgcagagaag

SEQ ID NO: 1719725 - RNA, 19 nt, Artificial Sequence
  Description of Artificial Sequence: Synthetic oligonucleotide
cugcgcaacaagaaggagc

SEQ ID NO: 1719726 - RNA, 19 nt, Artificial Sequence
  Description of Artificial Sequence: Synthetic oligonucleotide
gaugucucugugcugaaga

SEQ ID NO: 1719727 - RNA, 19 nt, Artificial Sequence
  Description of Artificial Sequence: Synthetic oligonucleotide
ucagccucugcuaacgggu

SEQ ID NO: 1719728 - RNA, 19 nt, Artificial Sequence
  Description of Artificial Sequence: Synthetic oligonucleotide
cacagcgaugcucauaaag

SEQ ID NO: 1719729 - RNA, 19 nt, Artificial Sequence
  Description of Artificial Sequence: Synthetic oligonucleotide
cucuacgaggggcagagcc

SEQ ID NO: 1719730 - RNA, 19 nt, Artificial Sequence
  Description of Artificial Sequence: Synthetic oligonucleotide
accucuagcagccugcgca

SEQ ID NO: 1719731 - RNA, 19 nt, Artificial Sequence
  Description of Artificial Sequence: Synthetic oligonucleotide
aaaacgcaguccacacucc

SEQ ID NO: 1719732 - RNA, 19 nt, Artificial Sequence
  Description of Artificial Sequence: Synthetic oligonucleotide
gagaaaacggggccgaguc

SEQ ID NO: 1719733 - RNA, 19 nt, Artificial Sequence
  Description of Artificial Sequence: Synthetic oligonucleotide
ugcgacgauguucugccag

SEQ ID NO: 1719734 - RNA, 19 nt, Artificial Sequence
  Description of Artificial Sequence: Synthetic oligonucleotide
auggagauggcaaaggccu

SEQ ID NO: 1719735 - RNA, 19 nt, Artificial Sequence
  Description of Artificial Sequence: Synthetic oligonucleotide
gagucagccgcugaucugg

SEQ ID NO: 1719736 - RNA, 19 nt, Artificial Sequence
  Description of Artificial Sequence: Synthetic oligonucleotide
aaggagcgggagcacuccc

SEQ ID NO: 1719737 - RNA, 19 nt, Artificial Sequence
  Description of Artificial Sequence: Synthetic oligonucleotide
ugugaaugcgacgauguuc

SEQ ID NO: 1719738 - RNA, 19 nt, Artificial Sequence
  Description of Artificial Sequence: Synthetic oligonucleotide
aaacggggccgagucagcc

SEQ ID NO: 1719739 - RNA, 19 nt, Artificial Sequence
  Description of Artificial Sequence: Synthetic oligonucleotide
cagcgaugcucauaaagcc

SEQ ID NO: 1719740 - RNA, 19 nt, Artificial Sequence
  Description of Artificial Sequence: Synthetic oligonucleotide
acgcaguccacacuccugg

SEQ ID NO: 1719741 - RNA, 19 nt, Artificial Sequence
  Description of Artificial Sequence: Synthetic oligonucleotide
gguaagggcggugaaaacg

SEQ ID NO: 1719742 - RNA, 19 nt, Artificial Sequence
  Description of Artificial Sequence: Synthetic oligonucleotide
aauauguacacagguuuua

SEQ ID NO: 1719743 - RNA, 19 nt, Artificial Sequence
  Description of Artificial Sequence: Synthetic oligonucleotide
ugugcgaguggcccgggag

SEQ ID NO: 1719744 - RNA, 19 nt, Artificial Sequence
  Description of Artificial Sequence: Synthetic oligonucleotide
cucauaaagccgcagagaa

SEQ ID NO: 1719745 - RNA, 19 nt, Artificial Sequence
  Description of Artificial Sequence: Synthetic oligonucleotide
acugcauuccaggccacgc

SEQ ID NO: 1719746 - RNA, 19 nt, Artificial Sequence
  Description of Artificial Sequence: Synthetic oligonucleotide
ucguucacccgugugaaug

SEQ ID NO: 1719747 - RNA, 19 nt, Artificial Sequence
  Description of Artificial Sequence: Synthetic oligonucleotide
uggugcaccucuagcagcc

SEQ ID NO: 1719748 - RNA, 19 nt, Artificial Sequence
  Description of Artificial Sequence: Synthetic oligonucleotide
aaggagcgguagcucuugc

SEQ ID NO: 1719749 - RNA, 19 nt, Artificial Sequence
  Description of Artificial Sequence: Synthetic oligonucleotide
ugaaaacgcaguccacacu

SEQ ID NO: 1719750 - RNA, 19 nt, Artificial Sequence
  Description of Artificial Sequence: Synthetic oligonucleotide
aaacgcaguccacacuccu

SEQ ID NO: 1719751 - RNA, 19 nt, Artificial Sequence
  Description of Artificial Sequence: Synthetic oligonucleotide
acacucaaagcgccguggg

SEQ ID NO: 1719752 - RNA, 19 nt, Artificial Sequence
  Description of Artificial Sequence: Synthetic oligonucleotide
guaagggcggugaaaacgc

SEQ ID NO: 1719753 - RNA, 19 nt, Artificial Sequence
  Description of Artificial Sequence: Synthetic oligonucleotide
agccaagaccucuccaggg

SEQ ID NO: 1719754 - RNA, 19 nt, Artificial Sequence
  Description of Artificial Sequence: Synthetic oligonucleotide
aggagcgguagcucuugcc

SEQ ID NO: 1719755 - RNA, 19 nt, Artificial Sequence
  Description of Artificial Sequence: Synthetic oligonucleotide
guagcggugcaugagcagg

SEQ ID NO: 1719756 - RNA, 19 nt, Artificial Sequence
  Description of Artificial Sequence: Synthetic oligonucleotide
ggagcgguagcucuugccg

SEQ ID NO: 1719757 - RNA, 19 nt, Artificial Sequence
  Description of Artificial Sequence: Synthetic oligonucleotide
ucuacgaggggcagagccu

SEQ ID NO: 1719758 - RNA, 19 nt, Artificial Sequence
  Description of Artificial Sequence: Synthetic oligonucleotide
gaaugcgacgauguucugc

SEQ ID NO: 1719759 - RNA, 19 nt, Artificial Sequence
  Description of Artificial Sequence: Synthetic oligonucleotide
gagggguacaauauguaca

SEQ ID NO: 1719760 - RNA, 19 nt, Artificial Sequence
  Description of Artificial Sequence: Synthetic oligonucleotide
guuggaggccuucagagaa

SEQ ID NO: 1719761 - RNA, 19 nt, Artificial Sequence
  Description of Artificial Sequence: Synthetic oligonucleotide
aacggggccgagucagccg

SEQ ID NO: 1719762 - RNA, 19 nt, Artificial Sequence
  Description of Artificial Sequence: Synthetic oligonucleotide
gacgauguucugccaggcg

SEQ ID NO: 1719763 - RNA, 19 nt, Artificial Sequence
  Description of Artificial Sequence: Synthetic oligonucleotide
gugaaaacgcaguccacac

SEQ ID NO: 1719764 - RNA, 19 nt, Artificial Sequence
  Description of Artificial Sequence: Synthetic oligonucleotide
ucuagcagccugcgcaaca

SEQ ID NO: 1719765 - RNA, 19 nt, Artificial Sequence
  Description of Artificial Sequence: Synthetic oligonucleotide
ugcaccucuagcagccugc

SEQ ID NO: 1719766 - RNA, 19 nt, Artificial Sequence
  Description of Artificial Sequence: Synthetic oligonucleotide
agaggagagggguacaaua

SEQ ID NO: 1719767 - RNA, 19 nt, Artificial Sequence
  Description of Artificial Sequence: Synthetic oligonucleotide
ucuugcacucacugcauuc

SEQ ID NO: 1719768 - RNA, 19 nt, Artificial Sequence
  Description of Artificial Sequence: Synthetic oligonucleotide
augguuccgcacgugagac

SEQ ID NO: 1719769 - RNA, 19 nt, Artificial Sequence
  Description of Artificial Sequence: Synthetic oligonucleotide
acggggccgagucagccgc

SEQ ID NO: 1719770 - RNA, 19 nt, Artificial Sequence
  Description of Artificial Sequence: Synthetic oligonucleotide
guacucuccuguguggugg

SEQ ID NO: 1719771 - RNA, 19 nt, Artificial Sequence
  Description of Artificial Sequence: Synthetic oligonucleotide
guagggaaagugcugggca

SEQ ID NO: 1719772 - RNA, 19 nt, Artificial Sequence
  Description of Artificial Sequence: Synthetic oligonucleotide
cuugcacucacugcauucc

SEQ ID NO: 1719773 - RNA, 19 nt, Artificial Sequence
  Description of Artificial Sequence: Synthetic oligonucleotide
agggguacucuccugugug

SEQ ID NO: 1719774 - RNA, 19 nt, Artificial Sequence
  Description of Artificial Sequence: Synthetic oligonucleotide
agccugcgcaacaagaagg

SEQ ID NO: 1719775 - RNA, 19 nt, Artificial Sequence
  Description of Artificial Sequence: Synthetic oligonucleotide
cucagccucugcuaacggg

SEQ ID NO: 1719776 - RNA, 19 nt, Artificial Sequence
  Description of Artificial Sequence: Synthetic oligonucleotide
ugugugaggcgguggcggg

SEQ ID NO: 1719777 - RNA, 19 nt, Artificial Sequence
  Description of Artificial Sequence: Synthetic oligonucleotide
ccgguggucuuucagaugg

SEQ ID NO: 1719778 - RNA, 19 nt, Artificial Sequence
  Description of Artificial Sequence: Synthetic oligonucleotide
agucuggacacggguaugg

SEQ ID NO: 1719779 - RNA, 19 nt, Artificial Sequence
  Description of Artificial Sequence: Synthetic oligonucleotide
ugcagcgaugucucugugc

SEQ ID NO: 1719780 - RNA, 19 nt, Artificial Sequence
  Description of Artificial Sequence: Synthetic oligonucleotide
gaugguuccgcacgugaga

SEQ ID NO: 1719781 - RNA, 19 nt, Artificial Sequence
  Description of Artificial Sequence: Synthetic oligonucleotide
acggguauggccgcucccc

SEQ ID NO: 1719782 - RNA, 19 nt, Artificial Sequence
  Description of Artificial Sequence: Synthetic oligonucleotide
agcgaugucucugugcuga

SEQ ID NO: 1719783 - RNA, 19 nt, Artificial Sequence
  Description of Artificial Sequence: Synthetic oligonucleotide
aaaacggggccgagucagc

SEQ ID NO: 1719784 - RNA, 19 nt, Artificial Sequence
  Description of Artificial Sequence: Synthetic oligonucleotide
cucaaagcgccguggggcc

SEQ ID NO: 1719785 - RNA, 19 nt, Artificial Sequence
  Description of Artificial Sequence: Synthetic oligonucleotide
guuggggagggagugacug

SEQ ID NO: 1719786 - RNA, 19 nt, Artificial Sequence
  Description of Artificial Sequence: Synthetic oligonucleotide
ugacuggugugcgaguggc

SEQ ID NO: 1719787 - RNA, 19 nt, Artificial Sequence
  Description of Artificial Sequence: Synthetic oligonucleotide
gauccgccgaugcaccugc

SEQ ID NO: 1719788 - RNA, 19 nt, Artificial Sequence
  Description of Artificial Sequence: Synthetic oligonucleotide
ugagucuugcggugcuucc

SEQ ID NO: 1719789 - RNA, 19 nt, Artificial Sequence
  Description of Artificial Sequence: Synthetic oligonucleotide
gaugcucauaaagccgcag

SEQ ID NO: 1719790 - RNA, 19 nt, Artificial Sequence
  Description of Artificial Sequence: Synthetic oligonucleotide
guuuuaaggggcuguugga

SEQ ID NO: 1719791 - RNA, 19 nt, Artificial Sequence
  Description of Artificial Sequence: Synthetic oligonucleotide
ucuccuguguggugguagc

SEQ ID NO: 1719792 - RNA, 19 nt, Artificial Sequence
  Description of Artificial Sequence: Synthetic oligonucleotide
aggcgaugcugccucagag

SEQ ID NO: 1719793 - RNA, 19 nt, Artificial Sequence
  Description of Artificial Sequence: Synthetic oligonucleotide
ggaguagggucguucaccc

SEQ ID NO: 1719794 - RNA, 19 nt, Artificial Sequence
  Description of Artificial Sequence: Synthetic oligonucleotide
acgugagacuucuucuuga

SEQ ID NO: 1719795 - RNA, 19 nt, Artificial Sequence
  Description of Artificial Sequence: Synthetic oligonucleotide
accgccgagggccugguug

SEQ ID NO: 1719796 - RNA, 19 nt, Artificial Sequence
  Description of Artificial Sequence: Synthetic oligonucleotide
ugugugugaggcgguggcg

SEQ ID NO: 1719797 - RNA, 19 nt, Artificial Sequence
  Description of Artificial Sequence: Synthetic oligonucleotide
aagggcggugaaaacgcag

SEQ ID NO: 1719798 - RNA, 19 nt, Artificial Sequence
  Description of Artificial Sequence: Synthetic oligonucleotide
cagccgcugaucuggaccc

SEQ ID NO: 1719799 - RNA, 19 nt, Artificial Sequence
  Description of Artificial Sequence: Synthetic oligonucleotide
gagcccacuuucuugccac

SEQ ID NO: 1719800 - RNA, 19 nt, Artificial Sequence
  Description of Artificial Sequence: Synthetic oligonucleotide
ucaugggccugcaggcgag

SEQ ID NO: 1719801 - RNA, 19 nt, Artificial Sequence
  Description of Artificial Sequence: Synthetic oligonucleotide
uggcgggccagguuggcag

SEQ ID NO: 1719802 - RNA, 19 nt, Artificial Sequence
  Description of Artificial Sequence: Synthetic oligonucleotide
gagcgguagcucuugccgc

SEQ ID NO: 1719803 - RNA, 19 nt, Artificial Sequence
  Description of Artificial Sequence: Synthetic oligonucleotide
cuggugcaccucuagcagc

SEQ ID NO: 1719804 - RNA, 19 nt, Artificial Sequence
  Description of Artificial Sequence: Synthetic oligonucleotide
agugacuggugugcgagug

SEQ ID NO: 1719805 - RNA, 19 nt, Artificial Sequence
  Description of Artificial Sequence: Synthetic oligonucleotide
uagggguacucuccugugu

SEQ ID NO: 1719806 - RNA, 19 nt, Artificial Sequence
  Description of Artificial Sequence: Synthetic oligonucleotide
cugcaggcgagcagcagag

SEQ ID NO: 1719807 - RNA, 19 nt, Artificial Sequence
  Description of Artificial Sequence: Synthetic oligonucleotide
cacucaaagcgccgugggg

SEQ ID NO: 1719808 - RNA, 19 nt, Artificial Sequence
  Description of Artificial Sequence: Synthetic oligonucleotide
agauggguacucuggcgga

SEQ ID NO: 1719809 - RNA, 19 nt, Artificial Sequence
  Description of Artificial Sequence: Synthetic oligonucleotide
uaagggcggugaaaacgca

SEQ ID NO: 1719810 - RNA, 19 nt, Artificial Sequence
  Description of Artificial Sequence: Synthetic oligonucleotide
acagguuuuaaggggcugu

SEQ ID NO: 1719811 - RNA, 19 nt, Artificial Sequence
  Description of Artificial Sequence: Synthetic oligonucleotide
gugaaugcgacgauguucu

SEQ ID NO: 1719812 - RNA, 19 nt, Artificial Sequence
  Description of Artificial Sequence: Synthetic oligonucleotide
agaaaacggggccgaguca

SEQ ID NO: 1719813 - RNA, 19 nt, Artificial Sequence
  Description of Artificial Sequence: Synthetic oligonucleotide
gugacuggugugcgagugg

SEQ ID NO: 1719814 - RNA, 19 nt, Artificial Sequence
  Description of Artificial Sequence: Synthetic oligonucleotide
gaguagggucguucacccg

SEQ ID NO: 1719815 - RNA, 19 nt, Artificial Sequence
  Description of Artificial Sequence: Synthetic oligonucleotide
gugcgaguggcccgggagg

SEQ ID NO: 1719816 - RNA, 19 nt, Artificial Sequence
  Description of Artificial Sequence: Synthetic oligonucleotide
guuggcaggugaguugaag

SEQ ID NO: 1719817 - RNA, 19 nt, Artificial Sequence
  Description of Artificial Sequence: Synthetic oligonucleotide
aacgcaguccacacuccug

SEQ ID NO: 1719818 - RNA, 19 nt, Artificial Sequence
  Description of Artificial Sequence: Synthetic oligonucleotide
cucugaguaaaggccuugc

SEQ ID NO: 1719819 - RNA, 19 nt, Artificial Sequence
  Description of Artificial Sequence: Synthetic oligonucleotide
cugggcaugcaccaggcga

SEQ ID NO: 1719820 - RNA, 19 nt, Artificial Sequence
  Description of Artificial Sequence: Synthetic oligonucleotide
uccgccgaugcaccugcag

SEQ ID NO: 1719821 - RNA, 19 nt, Artificial Sequence
  Description of Artificial Sequence: Synthetic oligonucleotide
gagguuggagaaggagcgg

SEQ ID NO: 1719822 - RNA, 19 nt, Artificial Sequence
  Description of Artificial Sequence: Synthetic oligonucleotide
guagggguacucuccugug

SEQ ID NO: 1719823 - RNA, 19 nt, Artificial Sequence
  Description of Artificial Sequence: Synthetic oligonucleotide
ucuccggugugugugcgca

SEQ ID NO: 1719824 - RNA, 19 nt, Artificial Sequence
  Description of Artificial Sequence: Synthetic oligonucleotide
gcgaugcugccucagagug

SEQ ID NO: 1719825 - RNA, 19 nt, Artificial Sequence
  Description of Artificial Sequence: Synthetic oligonucleotide
cagccugcgcaacaagaag

SEQ ID NO: 1719826 - RNA, 19 nt, Artificial Sequence
  Description of Artificial Sequence: Synthetic oligonucleotide
ugcaccaggcgaugcugcc

SEQ ID NO: 1719827 - RNA, 19 nt, Artificial Sequence
  Description of Artificial Sequence: Synthetic oligonucleotide
cagguuggcaggugaguug

SEQ ID NO: 1719828 - RNA, 19 nt, Artificial Sequence
  Description of Artificial Sequence: Synthetic oligonucleotide
agguuggcaggugaguuga

SEQ ID NO: 1719829 - RNA, 19 nt, Artificial Sequence
  Description of Artificial Sequence: Synthetic oligonucleotide
gaaggagcgguagcucuug

SEQ ID NO: 1719830 - RNA, 19 nt, Artificial Sequence
  Description of Artificial Sequence: Synthetic oligonucleotide
ugcgcagaugguuccgcac

SEQ ID NO: 1719831 - RNA, 19 nt, Artificial Sequence
  Description of Artificial Sequence: Synthetic oligonucleotide
ugcuaacggguagaucuca

SEQ ID NO: 1719832 - RNA, 19 nt, Artificial Sequence
  Description of Artificial Sequence: Synthetic oligonucleotide
ggugaaaacgcaguccaca

SEQ ID NO: 1719833 - RNA, 19 nt, Artificial Sequence
  Description of Artificial Sequence: Synthetic oligonucleotide
gaaggagcgggagcacucc

SEQ ID NO: 1719834 - RNA, 19 nt, Artificial Sequence
  Description of Artificial Sequence: Synthetic oligonucleotide
uuguagggguacucuccug

SEQ ID NO: 1719835 - RNA, 19 nt, Artificial Sequence
  Description of Artificial Sequence: Synthetic oligonucleotide
ggagugacuggugugcgag

SEQ ID NO: 1719836 - RNA, 19 nt, Artificial Sequence
  Description of Artificial Sequence: Synthetic oligonucleotide
gagcagucggggcagggga

SEQ ID NO: 1719837 - RNA, 19 nt, Artificial Sequence
  Description of Artificial Sequence: Synthetic oligonucleotide
cucccgacacuuguagggg

SEQ ID NO: 1719838 - RNA, 19 nt, Artificial Sequence
  Description of Artificial Sequence: Synthetic oligonucleotide
uggugugcgaguggcccgg

SEQ ID NO: 1719839 - RNA, 19 nt, Artificial Sequence
  Description of Artificial Sequence: Synthetic oligonucleotide
cacgccgccuugcaggggc

SEQ ID NO: 1719840 - RNA, 19 nt, Artificial Sequence
  Description of Artificial Sequence: Synthetic oligonucleotide
ugugaggcgguggcgggcc

SEQ ID NO: 1719841 - RNA, 19 nt, Artificial Sequence
  Description of Artificial Sequence: Synthetic oligonucleotide
ggccacgccgccuugcagg

SEQ ID NO: 1719842 - RNA, 19 nt, Artificial Sequence
  Description of Artificial Sequence: Synthetic oligonucleotide
agguuggagaaggagcggu

SEQ ID NO: 1719843 - RNA, 19 nt, Artificial Sequence
  Description of Artificial Sequence: Synthetic oligonucleotide
ugccgcagucuggacacgg

SEQ ID NO: 1719844 - RNA, 19 nt, Artificial Sequence
  Description of Artificial Sequence: Synthetic oligonucleotide
agagaaaacggggccgagu

SEQ ID NO: 1719845 - RNA, 19 nt, Artificial Sequence
  Description of Artificial Sequence: Synthetic oligonucleotide
ggcguggaccacaagcugg

SEQ ID NO: 1719846 - RNA, 19 nt, Artificial Sequence
  Description of Artificial Sequence: Synthetic oligonucleotide
uggugagucuugcggugcu

SEQ ID NO: 1719847 - RNA, 19 nt, Artificial Sequence
  Description of Artificial Sequence: Synthetic oligonucleotide
cuguaggggcagcggaggg

SEQ ID NO: 1719848 - RNA, 19 nt, Artificial Sequence
  Description of Artificial Sequence: Synthetic oligonucleotide
cauuccaggccacgccgcc

SEQ ID NO: 1719849 - RNA, 19 nt, Artificial Sequence
  Description of Artificial Sequence: Synthetic oligonucleotide
agccucugcuaacggguag

SEQ ID NO: 1719850 - RNA, 19 nt, Artificial Sequence
  Description of Artificial Sequence: Synthetic oligonucleotide
ugugcgcagaugguuccgc

SEQ ID NO: 1719851 - RNA, 19 nt, Artificial Sequence
  Description of Artificial Sequence: Synthetic oligonucleotide
gcggugaaaacgcagucca

SEQ ID NO: 1719852 - RNA, 19 nt, Artificial Sequence
  Description of Artificial Sequence: Synthetic oligonucleotide
gcgcagaugguuccgcacg

SEQ ID NO: 1719853 - RNA, 19 nt, Artificial Sequence
  Description of Artificial Sequence: Synthetic oligonucleotide
agggagugacuggugugcg

SEQ ID NO: 1719854 - RNA, 19 nt, Artificial Sequence
  Description of Artificial Sequence: Synthetic oligonucleotide
guucacccgugugaaugcg

SEQ ID NO: 1719855 - RNA, 19 nt, Artificial Sequence
  Description of Artificial Sequence: Synthetic oligonucleotide
caggucccacacucaaagc

SEQ ID NO: 1719856 - RNA, 19 nt, Artificial Sequence
  Description of Artificial Sequence: Synthetic oligonucleotide
cuuagccaagaccucucca

SEQ ID NO: 1719857 - RNA, 19 nt, Artificial Sequence
  Description of Artificial Sequence: Synthetic oligonucleotide
gcgaugcucauaaagccgc

SEQ ID NO: 1719858 - RNA, 19 nt, Artificial Sequence
  Description of Artificial Sequence: Synthetic oligonucleotide
ucccgacacuuguaggggu

SEQ ID NO: 1719859 - RNA, 19 nt, Artificial Sequence
  Description of Artificial Sequence: Synthetic oligonucleotide
uggaggccuucagagaaaa

SEQ ID NO: 1719860 - RNA, 19 nt, Artificial Sequence
  Description of Artificial Sequence: Synthetic oligonucleotide
gcgacgauguucugccagg

SEQ ID NO: 1719861 - RNA, 19 nt, Artificial Sequence
  Description of Artificial Sequence: Synthetic oligonucleotide
uuccgcacgugagacuucu

SEQ ID NO: 1719862 - RNA, 19 nt, Artificial Sequence
  Description of Artificial Sequence: Synthetic oligonucleotide
ggucccacacucaaagcgc

SEQ ID NO: 1719863 - RNA, 19 nt, Artificial Sequence
  Description of Artificial Sequence: Synthetic oligonucleotide
guggagaggagagggguac

SEQ ID NO: 1719864 - RNA, 19 nt, Artificial Sequence
  Description of Artificial Sequence: Synthetic oligonucleotide
cugcuaacggguagaucuc

SEQ ID NO: 1719865 - RNA, 19 nt, Artificial Sequence
  Description of Artificial Sequence: Synthetic oligonucleotide
ugaaugcgacgauguucug

SEQ ID NO: 1719866 - RNA, 19 nt, Artificial Sequence
  Description of Artificial Sequence: Synthetic oligonucleotide
gguagggaaagugcugggc

SEQ ID NO: 1719867 - RNA, 19 nt, Artificial Sequence
  Description of Artificial Sequence: Synthetic oligonucleotide
gccaggcgcauggagaugg

SEQ ID NO: 1719868 - RNA, 19 nt, Artificial Sequence
  Description of Artificial Sequence: Synthetic oligonucleotide
agccgcagagaagagggga

SEQ ID NO: 1719869 - RNA, 19 nt, Artificial Sequence
  Description of Artificial Sequence: Synthetic oligonucleotide
gucccacacucaaagcgcc

SEQ ID NO: 1719870 - RNA, 19 nt, Artificial Sequence
  Description of Artificial Sequence: Synthetic oligonucleotide
gggguacucuccugugugg

SEQ ID NO: 1719871 - RNA, 19 nt, Artificial Sequence
  Description of Artificial Sequence: Synthetic oligonucleotide
cagaugguuccgcacguga

SEQ ID NO: 1719872 - RNA, 19 nt, Artificial Sequence
  Description of Artificial Sequence: Synthetic oligonucleotide
gcagcgguagggaaagugc

SEQ ID NO: 1719873 - RNA, 19 nt, Artificial Sequence
  Description of Artificial Sequence: Synthetic oligonucleotide
ggagggagugacuggugug

SEQ ID NO: 1719874 - RNA, 19 nt, Artificial Sequence
  Description of Artificial Sequence: Synthetic oligonucleotide
gguagcggugcaugagcag

SEQ ID NO: 1719875 - RNA, 19 nt, Artificial Sequence
  Description of Artificial Sequence: Synthetic oligonucleotide
uacgaggggcagagccucc

SEQ ID NO: 1719876 - RNA, 19 nt, Artificial Sequence
  Description of Artificial Sequence: Synthetic oligonucleotide
acacuccuggcagcgguag

SEQ ID NO: 1719877 - RNA, 19 nt, Artificial Sequence
  Description of Artificial Sequence: Synthetic oligonucleotide
agggcggugaaaacgcagu

SEQ ID NO: 1719878 - RNA, 19 nt, Artificial Sequence
  Description of Artificial Sequence: Synthetic oligonucleotide
cugcgguuuccaucacagc

SEQ ID NO: 1719879 - RNA, 19 nt, Artificial Sequence
  Description of Artificial Sequence: Synthetic oligonucleotide
caagaccucuccagggcca

SEQ ID NO: 1719880 - RNA, 19 nt, Artificial Sequence
  Description of Artificial Sequence: Synthetic oligonucleotide
uggagcagucggggcaggg

SEQ ID NO: 1719881 - RNA, 19 nt, Artificial Sequence
  Description of Artificial Sequence: Synthetic oligonucleotide
aggagcgggagcacucccg

SEQ ID NO: 1719882 - RNA, 19 nt, Artificial Sequence
  Description of Artificial Sequence: Synthetic oligonucleotide
ggcggugaaaacgcagucc

SEQ ID NO: 1719883 - RNA, 19 nt, Artificial Sequence
  Description of Artificial Sequence: Synthetic oligonucleotide
cuccuguguggugguagcg

SEQ ID NO: 1719884 - RNA, 19 nt, Artificial Sequence
  Description of Artificial Sequence: Synthetic oligonucleotide
agcgguagggaaagugcug

SEQ ID NO: 1719885 - RNA, 19 nt, Artificial Sequence
  Description of Artificial Sequence: Synthetic oligonucleotide
gcaugagcaggcgguaagg

SEQ ID NO: 1719886 - RNA, 19 nt, Artificial Sequence
  Description of Artificial Sequence: Synthetic oligonucleotide
gaugcaccugcagcgaugu

SEQ ID NO: 1719887 - RNA, 19 nt, Artificial Sequence
  Description of Artificial Sequence: Synthetic oligonucleotide
cucaugggccugcaggcga

SEQ ID NO: 1719888 - RNA, 19 nt, Artificial Sequence
  Description of Artificial Sequence: Synthetic oligonucleotide
gggcuccuuagccaagacc

SEQ ID NO: 1719889 - RNA, 19 nt, Artificial Sequence
  Description of Artificial Sequence: Synthetic oligonucleotide
cacagguuuuaaggggcug

SEQ ID NO: 1719890 - RNA, 19 nt, Artificial Sequence
  Description of Artificial Sequence: Synthetic oligonucleotide
guggauccgccgaugcacc

SEQ ID NO: 1719891 - RNA, 19 nt, Artificial Sequence
  Description of Artificial Sequence: Synthetic oligonucleotide
gcagcgaugucucugugcu

SEQ ID NO: 1719892 - RNA, 19 nt, Artificial Sequence
  Description of Artificial Sequence: Synthetic oligonucleotide
gcgguggcgggccagguug

SEQ ID NO: 1719893 - RNA, 19 nt, Artificial Sequence
  Description of Artificial Sequence: Synthetic oligonucleotide
uggauccgccgaugcaccu

SEQ ID NO: 1719894 - RNA, 19 nt, Artificial Sequence
  Description of Artificial Sequence: Synthetic oligonucleotide
ggcagcggagggugcaccg

SEQ ID NO: 1719895 - RNA, 19 nt, Artificial Sequence
  Description of Artificial Sequence: Synthetic oligonucleotide
ugguuccgcacgugagacu

SEQ ID NO: 1719896 - RNA, 19 nt, Artificial Sequence
  Description of Artificial Sequence: Synthetic oligonucleotide
guccccacagcgguagggc

SEQ ID NO: 1719897 - RNA, 19 nt, Artificial Sequence
  Description of Artificial Sequence: Synthetic oligonucleotide
gugagucuugcggugcuuc

SEQ ID NO: 1719898 - RNA, 19 nt, Artificial Sequence
  Description of Artificial Sequence: Synthetic oligonucleotide
uggagaggagagggguaca

SEQ ID NO: 1719899 - RNA, 19 nt, Artificial Sequence
  Description of Artificial Sequence: Synthetic oligonucleotide
gagucuugcggugcuucca

SEQ ID NO: 1719900 - RNA, 19 nt, Artificial Sequence
  Description of Artificial Sequence: Synthetic oligonucleotide
guagaucucaauggccucu

SEQ ID NO: 1719901 - RNA, 19 nt, Artificial Sequence
  Description of Artificial Sequence: Synthetic oligonucleotide
ggcagcgguagggaaagug

SEQ ID NO: 1719902 - RNA, 19 nt, Artificial Sequence
  Description of Artificial Sequence: Synthetic oligonucleotide
gccucuacgaggggcagag

SEQ ID NO: 1719903 - RNA, 19 nt, Artificial Sequence
  Description of Artificial Sequence: Synthetic oligonucleotide
aggcgcauggagauggcaa

SEQ ID NO: 1719904 - RNA, 19 nt, Artificial Sequence
  Description of Artificial Sequence: Synthetic oligonucleotide
caagaaggagcgggagcac

SEQ ID NO: 1719905 - RNA, 19 nt, Artificial Sequence
  Description of Artificial Sequence: Synthetic oligonucleotide
gagcacucccgacacuugu

SEQ ID NO: 1719906 - RNA, 19 nt, Artificial Sequence
  Description of Artificial Sequence: Synthetic oligonucleotide
gaagagcuucuugcacuca

SEQ ID NO: 1719907 - RNA, 19 nt, Artificial Sequence
  Description of Artificial Sequence: Synthetic oligonucleotide
ccuuagccaagaccucucc

SEQ ID NO: 1719908 - RNA, 19 nt, Artificial Sequence
  Description of Artificial Sequence: Synthetic oligonucleotide
gacuggugugcgaguggcc

SEQ ID NO: 1719909 - RNA, 19 nt, Artificial Sequence
  Description of Artificial Sequence: Synthetic oligonucleotide
ggagagggguacaauaugu

SEQ ID NO: 1719910 - RNA, 19 nt, Artificial Sequence
  Description of Artificial Sequence: Synthetic oligonucleotide
agaccucuccagggccagc

SEQ ID NO: 1719911 - RNA, 19 nt, Artificial Sequence
  Description of Artificial Sequence: Synthetic oligonucleotide
cggguagaucucaauggcc

SEQ ID NO: 1719912 - RNA, 19 nt, Artificial Sequence
  Description of Artificial Sequence: Synthetic oligonucleotide
cacggguauggccgcuccc

SEQ ID NO: 1719913 - RNA, 19 nt, Artificial Sequence
  Description of Artificial Sequence: Synthetic oligonucleotide
gcucauaaagccgcagaga

SEQ ID NO: 1719914 - RNA, 19 nt, Artificial Sequence
  Description of Artificial Sequence: Synthetic oligonucleotide
cuggcgcccggcguggacc

SEQ ID NO: 1719915 - RNA, 19 nt, Artificial Sequence
  Description of Artificial Sequence: Synthetic oligonucleotide
gcggugcaugagcaggcgg

SEQ ID NO: 1719916 - RNA, 19 nt, Artificial Sequence
  Description of Artificial Sequence: Synthetic oligonucleotide
aggccacgccgccuugcag

SEQ ID NO: 1719917 - RNA, 19 nt, Artificial Sequence
  Description of Artificial Sequence: Synthetic oligonucleotide
ccccacagcgguagggccg

SEQ ID NO: 1719918 - RNA, 19 nt, Artificial Sequence
  Description of Artificial Sequence: Synthetic oligonucleotide
agccgcugaucuggacccc

SEQ ID NO: 1719919 - RNA, 19 nt, Artificial Sequence
  Description of Artificial Sequence: Synthetic oligonucleotide
gccacgccgccuugcaggg

SEQ ID NO: 1719920 - RNA, 19 nt, Artificial Sequence
  Description of Artificial Sequence: Synthetic oligonucleotide
aggccuugccgcagucugg

SEQ ID NO: 1719921 - RNA, 19 nt, Artificial Sequence
  Description of Artificial Sequence: Synthetic oligonucleotide
agcccacuuucuugccaca

SEQ ID NO: 1719922 - RNA, 19 nt, Artificial Sequence
  Description of Artificial Sequence: Synthetic oligonucleotide
agaaggagcgguagcucuu

SEQ ID NO: 1719923 - RNA, 19 nt, Artificial Sequence
  Description of Artificial Sequence: Synthetic oligonucleotide
uccaggccacgccgccuug

SEQ ID NO: 1719924 - RNA, 19 nt, Artificial Sequence
  Description of Artificial Sequence: Synthetic oligonucleotide
cguucacccgugugaaugc

SEQ ID NO: 1719925 - RNA, 19 nt, Artificial Sequence
  Description of Artificial Sequence: Synthetic oligonucleotide
cagcgguagggaaagugcu

SEQ ID NO: 1719926 - RNA, 19 nt, Artificial Sequence
  Description of Artificial Sequence: Synthetic oligonucleotide
uggccucuacgaggggcag

SEQ ID NO: 1719927 - RNA, 19 nt, Artificial Sequence
  Description of Artificial Sequence: Synthetic oligonucleotide
ccgccgaugcaccugcagc

SEQ ID NO: 1719928 - RNA, 19 nt, Artificial Sequence
  Description of Artificial Sequence: Synthetic oligonucleotide
cccucagccucugcuaacg

SEQ ID NO: 1719929 - RNA, 19 nt, Artificial Sequence
  Description of Artificial Sequence: Synthetic oligonucleotide
ugcaggcgagcagcagagc

SEQ ID NO: 1719930 - RNA, 19 nt, Artificial Sequence
  Description of Artificial Sequence: Synthetic oligonucleotide
gcgguuuccaucacagcca

SEQ ID NO: 1719931 - RNA, 19 nt, Artificial Sequence
  Description of Artificial Sequence: Synthetic oligonucleotide
cuaacggguagaucucaau

SEQ ID NO: 1719932 - RNA, 19 nt, Artificial Sequence
  Description of Artificial Sequence: Synthetic oligonucleotide
ggcgcauggagauggcaaa

SEQ ID NO: 1719933 - RNA, 19 nt, Artificial Sequence
  Description of Artificial Sequence: Synthetic oligonucleotide
gagcgggagcacucccgac

SEQ ID NO: 1719934 - RNA, 19 nt, Artificial Sequence
  Description of Artificial Sequence: Synthetic oligonucleotide
cagcgaugucucugugcug

SEQ ID NO: 1719935 - RNA, 19 nt, Artificial Sequence
  Description of Artificial Sequence: Synthetic oligonucleotide
auuccaggccacgccgccu

SEQ ID NO: 1719936 - RNA, 19 nt, Artificial Sequence
  Description of Artificial Sequence: Synthetic oligonucleotide
augcgacgauguucugcca

SEQ ID NO: 1719937 - RNA, 19 nt, Artificial Sequence
  Description of Artificial Sequence: Synthetic oligonucleotide
cagucuggacacggguaug

SEQ ID NO: 1719938 - RNA, 19 nt, Artificial Sequence
  Description of Artificial Sequence: Synthetic oligonucleotide
gcugccucagaguggagcu

SEQ ID NO: 1719939 - RNA, 19 nt, Artificial Sequence
  Description of Artificial Sequence: Synthetic oligonucleotide
gacacggguauggccgcuc

SEQ ID NO: 1719940 - RNA, 19 nt, Artificial Sequence
  Description of Artificial Sequence: Synthetic oligonucleotide
ccugguuggggagggagug

SEQ ID NO: 1719941 - RNA, 19 nt, Artificial Sequence
  Description of Artificial Sequence: Synthetic oligonucleotide
caggcgguaagggcgguga

SEQ ID NO: 1719942 - RNA, 19 nt, Artificial Sequence
  Description of Artificial Sequence: Synthetic oligonucleotide
gcgguaagggcggugaaaa

SEQ ID NO: 1719943 - RNA, 19 nt, Artificial Sequence
  Description of Artificial Sequence: Synthetic oligonucleotide
cacaggucccacacucaaa

SEQ ID NO: 1719944 - RNA, 19 nt, Artificial Sequence
  Description of Artificial Sequence: Synthetic oligonucleotide
gucagccgcugaucuggac

SEQ ID NO: 1719945 - RNA, 19 nt, Artificial Sequence
  Description of Artificial Sequence: Synthetic oligonucleotide
cuccggugugugugcgcag

SEQ ID NO: 1719946 - RNA, 19 nt, Artificial Sequence
  Description of Artificial Sequence: Synthetic oligonucleotide
ccgccgagggccugguugg

SEQ ID NO: 1719947 - RNA, 19 nt, Artificial Sequence
  Description of Artificial Sequence: Synthetic oligonucleotide
gcgggagcacucccgacac

SEQ ID NO: 1719948 - RNA, 19 nt, Artificial Sequence
  Description of Artificial Sequence: Synthetic oligonucleotide
ccgcacgugagacuucuuc

SEQ ID NO: 1719949 - RNA, 19 nt, Artificial Sequence
  Description of Artificial Sequence: Synthetic oligonucleotide
cugcagcgaugucucugug

SEQ ID NO: 1719950 - RNA, 19 nt, Artificial Sequence
  Description of Artificial Sequence: Synthetic oligonucleotide
gucuugcggugcuuccaga

SEQ ID NO: 1719951 - RNA, 19 nt, Artificial Sequence
  Description of Artificial Sequence: Synthetic oligonucleotide
gcaccucuagcagccugcg

SEQ ID NO: 1719952 - RNA, 19 nt, Artificial Sequence
  Description of Artificial Sequence: Synthetic oligonucleotide
caguccccacagcgguagg

SEQ ID NO: 1719953 - RNA, 19 nt, Artificial Sequence
  Description of Artificial Sequence: Synthetic oligonucleotide
ggucguucacccgugugaa

SEQ ID NO: 1719954 - RNA, 19 nt, Artificial Sequence
  Description of Artificial Sequence: Synthetic oligonucleotide
gcgcauggagauggcaaag

SEQ ID NO: 1719955 - RNA, 19 nt, Artificial Sequence
  Description of Artificial Sequence: Synthetic oligonucleotide
gggcggugaaaacgcaguc

SEQ ID NO: 1719956 - RNA, 19 nt, Artificial Sequence
  Description of Artificial Sequence: Synthetic oligonucleotide
ccucagccucugcuaacgg

SEQ ID NO: 1719957 - RNA, 19 nt, Artificial Sequence
  Description of Artificial Sequence: Synthetic oligonucleotide
ggcaugcaccaggcgaugc

SEQ ID NO: 1719958 - RNA, 19 nt, Artificial Sequence
  Description of Artificial Sequence: Synthetic oligonucleotide
gagugacuggugugcgagu

SEQ ID NO: 1719959 - RNA, 19 nt, Artificial Sequence
  Description of Artificial Sequence: Synthetic oligonucleotide
caaagggccgcucgccugu

SEQ ID NO: 1719960 - RNA, 19 nt, Artificial Sequence
  Description of Artificial Sequence: Synthetic oligonucleotide
gagccuccacugcgguuuc

SEQ ID NO: 1719961 - RNA, 19 nt, Artificial Sequence
  Description of Artificial Sequence: Synthetic oligonucleotide
gcccacuuucuugccacag

SEQ ID NO: 1719962 - RNA, 19 nt, Artificial Sequence
  Description of Artificial Sequence: Synthetic oligonucleotide
ccgcaccgcagccuggugc

SEQ ID NO: 1719963 - RNA, 19 nt, Artificial Sequence
  Description of Artificial Sequence: Synthetic oligonucleotide
caggcgaugcugccucaga

SEQ ID NO: 1719964 - RNA, 19 nt, Artificial Sequence
  Description of Artificial Sequence: Synthetic oligonucleotide
ggauccgccgaugcaccug

SEQ ID NO: 1719965 - RNA, 19 nt, Artificial Sequence
  Description of Artificial Sequence: Synthetic oligonucleotide
caugggccugcaggcgagc

SEQ ID NO: 1719966 - RNA, 19 nt, Artificial Sequence
  Description of Artificial Sequence: Synthetic oligonucleotide
gccugcgcaacaagaagga

SEQ ID NO: 1719967 - RNA, 19 nt, Artificial Sequence
  Description of Artificial Sequence: Synthetic oligonucleotide
guguguaggcgccgguggu

SEQ ID NO: 1719968 - RNA, 19 nt, Artificial Sequence
  Description of Artificial Sequence: Synthetic oligonucleotide
aggcgguaagggcggugaa

SEQ ID NO: 1719969 - RNA, 19 nt, Artificial Sequence
  Description of Artificial Sequence: Synthetic oligonucleotide
uguaggcgccgguggucuu

SEQ ID NO: 1719970 - RNA, 19 nt, Artificial Sequence
  Description of Artificial Sequence: Synthetic oligonucleotide
gcauuccaggccacgccgc

SEQ ID NO: 1719971 - RNA, 19 nt, Artificial Sequence
  Description of Artificial Sequence: Synthetic oligonucleotide
gcgccguggggccugggug

SEQ ID NO: 1719972 - RNA, 19 nt, Artificial Sequence
  Description of Artificial Sequence: Synthetic oligonucleotide
gcagccugcgcaacaagaa

SEQ ID NO: 1719973 - RNA, 19 nt, Artificial Sequence
  Description of Artificial Sequence: Synthetic oligonucleotide
gcggugcuuccagagguug

SEQ ID NO: 1719974 - RNA, 19 nt, Artificial Sequence
  Description of Artificial Sequence: Synthetic oligonucleotide
ggagaggagagggguacaa

SEQ ID NO: 1719975 - RNA, 19 nt, Artificial Sequence
  Description of Artificial Sequence: Synthetic oligonucleotide
ccugcgcaacaagaaggag

SEQ ID NO: 1719976 - RNA, 19 nt, Artificial Sequence
  Description of Artificial Sequence: Synthetic oligonucleotide
gcgccgguggucuuucaga

SEQ ID NO: 1719977 - RNA, 19 nt, Artificial Sequence
  Description of Artificial Sequence: Synthetic oligonucleotide
ggcgaugcugccucagagu

SEQ ID NO: 1719978 - RNA, 19 nt, Artificial Sequence
  Description of Artificial Sequence: Synthetic oligonucleotide
gggagugacuggugugcga

SEQ ID NO: 1719979 - RNA, 19 nt, Artificial Sequence
  Description of Artificial Sequence: Synthetic oligonucleotide
cugccucagaguggagcuc

SEQ ID NO: 1719980 - RNA, 19 nt, Artificial Sequence
  Description of Artificial Sequence: Synthetic oligonucleotide
cccgggaggcccugggagc

SEQ ID NO: 1719981 - RNA, 19 nt, Artificial Sequence
  Description of Artificial Sequence: Synthetic oligonucleotide
cgugugaaugcgacgaugu

SEQ ID NO: 1719982 - RNA, 19 nt, Artificial Sequence
  Description of Artificial Sequence: Synthetic oligonucleotide
agucagccgcugaucugga

SEQ ID NO: 1719983 - RNA, 19 nt, Artificial Sequence
  Description of Artificial Sequence: Synthetic oligonucleotide
agcagucggggcaggggaa

SEQ ID NO: 1719984 - RNA, 19 nt, Artificial Sequence
  Description of Artificial Sequence: Synthetic oligonucleotide
acaagcuggugcaccucua

SEQ ID NO: 1719985 - RNA, 19 nt, Artificial Sequence
  Description of Artificial Sequence: Synthetic oligonucleotide
gguuccgcacgugagacuu

SEQ ID NO: 1719986 - RNA, 19 nt, Artificial Sequence
  Description of Artificial Sequence: Synthetic oligonucleotide
gccgcagucuggacacggg

SEQ ID NO: 1719987 - RNA, 19 nt, Artificial Sequence
  Description of Artificial Sequence: Synthetic oligonucleotide
cgauguucugccaggcgca

SEQ ID NO: 1719988 - RNA, 19 nt, Artificial Sequence
  Description of Artificial Sequence: Synthetic oligonucleotide
guguaggcgccgguggucu

SEQ ID NO: 1719989 - RNA, 19 nt, Artificial Sequence
  Description of Artificial Sequence: Synthetic oligonucleotide
uccgcacgugagacuucuu

SEQ ID NO: 1719990 - RNA, 19 nt, Artificial Sequence
  Description of Artificial Sequence: Synthetic oligonucleotide
ccgcagagaagaggggaag

SEQ ID NO: 1719991 - RNA, 19 nt, Artificial Sequence
  Description of Artificial Sequence: Synthetic oligonucleotide
gauguucugccaggcgcau

SEQ ID NO: 1719992 - RNA, 19 nt, Artificial Sequence
  Description of Artificial Sequence: Synthetic oligonucleotide
gugcaugagcaggcgguaa

SEQ ID NO: 1719993 - RNA, 19 nt, Artificial Sequence
  Description of Artificial Sequence: Synthetic oligonucleotide
cgaugcaccugcagcgaug

SEQ ID NO: 1719994 - RNA, 19 nt, Artificial Sequence
  Description of Artificial Sequence: Synthetic oligonucleotide
gguggucuuucagaugggu

SEQ ID NO: 1719995 - RNA, 19 nt, Artificial Sequence
  Description of Artificial Sequence: Synthetic oligonucleotide
gugugaaugcgacgauguu

SEQ ID NO: 1719996 - RNA, 19 nt, Artificial Sequence
  Description of Artificial Sequence: Synthetic oligonucleotide
gccucugcuaacggguaga

SEQ ID NO: 1719997 - RNA, 19 nt, Artificial Sequence
  Description of Artificial Sequence: Synthetic oligonucleotide
caggcgcauggagauggca

SEQ ID NO: 1719998 - RNA, 19 nt, Artificial Sequence
  Description of Artificial Sequence: Synthetic oligonucleotide
gcuaacggguagaucucaa

SEQ ID NO: 1719999 - RNA, 19 nt, Artificial Sequence
  Description of Artificial Sequence: Synthetic oligonucleotide
gugugcgaguggcccggga

SEQ ID NO: 1720000 - RNA, 19 nt, Artificial Sequence
  Description of Artificial Sequence: Synthetic oligonucleotide
cccacagcgguagggccgc

SEQ ID NO: 1720001 - RNA, 19 nt, Artificial Sequence
  Description of Artificial Sequence: Synthetic oligonucleotide
ccgacacuuguagggguac

SEQ ID NO: 1720002 - RNA, 19 nt, Artificial Sequence
  Description of Artificial Sequence: Synthetic oligonucleotide
aagcgccguggggccuggg

SEQ ID NO: 1720003 - RNA, 19 nt, Artificial Sequence
  Description of Artificial Sequence: Synthetic oligonucleotide
ccacaggucccacacucaa

SEQ ID NO: 1720004 - RNA, 19 nt, Artificial Sequence
  Description of Artificial Sequence: Synthetic oligonucleotide
cgugagacuucuucuugaa

SEQ ID NO: 1720005 - RNA, 19 nt, Artificial Sequence
  Description of Artificial Sequence: Synthetic oligonucleotide
ccgcucgccuguguguagg

SEQ ID NO: 1720006 - RNA, 19 nt, Artificial Sequence
  Description of Artificial Sequence: Synthetic oligonucleotide
gcaugcaccaggcgaugcu

SEQ ID NO: 1720007 - RNA, 19 nt, Artificial Sequence
  Description of Artificial Sequence: Synthetic oligonucleotide
ggaccacaagcuggugcac

SEQ ID NO: 1720008 - RNA, 19 nt, Artificial Sequence
  Description of Artificial Sequence: Synthetic oligonucleotide
cggugaaaacgcaguccac

SEQ ID NO: 1720009 - RNA, 19 nt, Artificial Sequence
  Description of Artificial Sequence: Synthetic oligonucleotide
ccaggcgcauggagauggc

SEQ ID NO: 1720010 - RNA, 19 nt, Artificial Sequence
  Description of Artificial Sequence: Synthetic oligonucleotide
gccgcagagaagaggggaa

SEQ ID NO: 1720011 - RNA, 19 nt, Artificial Sequence
  Description of Artificial Sequence: Synthetic oligonucleotide
gcgcaacaagaaggagcgg

SEQ ID NO: 1720012 - RNA, 19 nt, Artificial Sequence
  Description of Artificial Sequence: Synthetic oligonucleotide
ggugcaugagcaggcggua

SEQ ID NO: 1720013 - RNA, 19 nt, Artificial Sequence
  Description of Artificial Sequence: Synthetic oligonucleotide
ggcgguaagggcggugaaa

SEQ ID NO: 1720014 - RNA, 19 nt, Artificial Sequence
  Description of Artificial Sequence: Synthetic oligonucleotide
ggugugcgaguggcccggg

SEQ ID NO: 1720015 - RNA, 19 nt, Artificial Sequence
  Description of Artificial Sequence: Synthetic oligonucleotide
cgacgauguucugccaggc

SEQ ID NO: 1720016 - RNA, 19 nt, Artificial Sequence
  Description of Artificial Sequence: Synthetic oligonucleotide
ccucuagcagccugcgcaa

SEQ ID NO: 1720017 - RNA, 19 nt, Artificial Sequence
  Description of Artificial Sequence: Synthetic oligonucleotide
ccggcguggaccacaagcu

SEQ ID NO: 1720018 - RNA, 19 nt, Artificial Sequence
  Description of Artificial Sequence: Synthetic oligonucleotide
cugcacagcgaugcucaua

SEQ ID NO: 1720019 - RNA, 19 nt, Artificial Sequence
  Description of Artificial Sequence: Synthetic oligonucleotide
ccaggcgaugcugccucag

SEQ ID NO: 1720020 - RNA, 19 nt, Artificial Sequence
  Description of Artificial Sequence: Synthetic oligonucleotide
gggagcacucccgacacuu

SEQ ID NO: 1720021 - RNA, 19 nt, Artificial Sequence
  Description of Artificial Sequence: Synthetic oligonucleotide
agcaggcgguaagggcggu

SEQ ID NO: 1720022 - RNA, 19 nt, Artificial Sequence
  Description of Artificial Sequence: Synthetic oligonucleotide
cgcucuccggugugugugc

SEQ ID NO: 1720023 - RNA, 19 nt, Artificial Sequence
  Description of Artificial Sequence: Synthetic oligonucleotide
ccgagucagccgcugaucu

SEQ ID NO: 1720024 - RNA, 19 nt, Artificial Sequence
  Description of Artificial Sequence: Synthetic oligonucleotide
acucuccugugugguggua

SEQ ID NO: 1720025 - RNA, 19 nt, Artificial Sequence
  Description of Artificial Sequence: Synthetic oligonucleotide
gucguucacccgugugaau

SEQ ID NO: 1720026 - RNA, 19 nt, Artificial Sequence
  Description of Artificial Sequence: Synthetic oligonucleotide
gccacaggucccacacuca

SEQ ID NO: 1720027 - RNA, 19 nt, Artificial Sequence
  Description of Artificial Sequence: Synthetic oligonucleotide
cgcacgugagacuucuucu

SEQ ID NO: 1720028 - RNA, 19 nt, Artificial Sequence
  Description of Artificial Sequence: Synthetic oligonucleotide
gugaggcgguggcgggcca

SEQ ID NO: 1720029 - RNA, 19 nt, Artificial Sequence
  Description of Artificial Sequence: Synthetic oligonucleotide
caggugaguugaagggcuu

SEQ ID NO: 1720030 - RNA, 19 nt, Artificial Sequence
  Description of Artificial Sequence: Synthetic oligonucleotide
gguggcgggccagguuggc

SEQ ID NO: 1720031 - RNA, 19 nt, Artificial Sequence
  Description of Artificial Sequence: Synthetic oligonucleotide
cggcguggaccacaagcug

SEQ ID NO: 1720032 - RNA, 19 nt, Artificial Sequence
  Description of Artificial Sequence: Synthetic oligonucleotide
augcugccucagaguggag

SEQ ID NO: 1720033 - RNA, 19 nt, Artificial Sequence
  Description of Artificial Sequence: Synthetic oligonucleotide
gcggagggugcaccgccga

SEQ ID NO: 1720034 - RNA, 19 nt, Artificial Sequence
  Description of Artificial Sequence: Synthetic oligonucleotide
cccgacacuuguaggggua

SEQ ID NO: 1720035 - RNA, 19 nt, Artificial Sequence
  Description of Artificial Sequence: Synthetic oligonucleotide
gggcuggcgcccggcgugg

SEQ ID NO: 1720036 - RNA, 19 nt, Artificial Sequence
  Description of Artificial Sequence: Synthetic oligonucleotide
ggggccgagucagccgcug

SEQ ID NO: 1720037 - RNA, 19 nt, Artificial Sequence
  Description of Artificial Sequence: Synthetic oligonucleotide
cgaugcucauaaagccgca

SEQ ID NO: 1720038 - RNA, 19 nt, Artificial Sequence
  Description of Artificial Sequence: Synthetic oligonucleotide
cgguggcgggccagguugg

SEQ ID NO: 1720039 - RNA, 19 nt, Artificial Sequence
  Description of Artificial Sequence: Synthetic oligonucleotide
gggccgagucagccgcuga

SEQ ID NO: 1720040 - RNA, 19 nt, Artificial Sequence
  Description of Artificial Sequence: Synthetic oligonucleotide
gcuggcgcccggcguggac

SEQ ID NO: 1720041 - RNA, 19 nt, Artificial Sequence
  Description of Artificial Sequence: Synthetic oligonucleotide
gcguggaccacaagcuggu

SEQ ID NO: 1720042 - RNA, 19 nt, Artificial Sequence
  Description of Artificial Sequence: Synthetic oligonucleotide
ggccgagucagccgcugau

SEQ ID NO: 1720043 - RNA, 19 nt, Artificial Sequence
  Description of Artificial Sequence: Synthetic oligonucleotide
cggugcaugagcaggcggu

SEQ ID NO: 1720044 - RNA, 19 nt, Artificial Sequence
  Description of Artificial Sequence: Synthetic oligonucleotide
gccgcaccgcagccuggug

SEQ ID NO: 1720045 - RNA, 19 nt, Artificial Sequence
  Description of Artificial Sequence: Synthetic oligonucleotide
cggagggugcaccgccgag

SEQ ID NO: 1720046 - RNA, 19 nt, Artificial Sequence
  Description of Artificial Sequence: Synthetic oligonucleotide
ggccucuacgaggggcaga

SEQ ID NO: 1720047 - RNA, 19 nt, Artificial Sequence
  Description of Artificial Sequence: Synthetic oligonucleotide
guaggcgccgguggucuuu

SEQ ID NO: 1720048 - RNA, 19 nt, Artificial Sequence
  Description of Artificial Sequence: Synthetic oligonucleotide
ccucuacgaggggcagagc

SEQ ID NO: 1720049 - RNA, 19 nt, Artificial Sequence
  Description of Artificial Sequence: Synthetic oligonucleotide
cagagccuccacugcgguu

SEQ ID NO: 1720050 - RNA, 19 nt, Artificial Sequence
  Description of Artificial Sequence: Synthetic oligonucleotide
gcgagcagcagagcccacu

SEQ ID NO: 1720051 - RNA, 19 nt, Artificial Sequence
  Description of Artificial Sequence: Synthetic oligonucleotide
ccacugcgguuuccaucac

SEQ ID NO: 1720052 - RNA, 19 nt, Artificial Sequence
  Description of Artificial Sequence: Synthetic oligonucleotide
acgccgccuugcaggggcu

SEQ ID NO: 1720053 - RNA, 19 nt, Artificial Sequence
  Description of Artificial Sequence: Synthetic oligonucleotide
gguuggcaggugaguugaa

SEQ ID NO: 1720054 - RNA, 19 nt, Artificial Sequence
  Description of Artificial Sequence: Synthetic oligonucleotide
gugcaccgccgagggccug

SEQ ID NO: 1720055 - RNA, 19 nt, Artificial Sequence
  Description of Artificial Sequence: Synthetic oligonucleotide
ccagguuggcaggugaguu

SEQ ID NO: 1720056 - RNA, 19 nt, Artificial Sequence
  Description of Artificial Sequence: Synthetic oligonucleotide
cgccuugcaggggcuguag

SEQ ID NO: 1720057 - RNA, 19 nt, Artificial Sequence
  Description of Artificial Sequence: Synthetic oligonucleotide
ccgcagucuggacacgggu

SEQ ID NO: 1720058 - RNA, 19 nt, Artificial Sequence
  Description of Artificial Sequence: Synthetic oligonucleotide
gcaccgcagccuggugcug

SEQ ID NO: 1720059 - RNA, 19 nt, Artificial Sequence
  Description of Artificial Sequence: Synthetic oligonucleotide
ggugcaccgccgagggccu

SEQ ID NO: 1720060 - RNA, 19 nt, Artificial Sequence
  Description of Artificial Sequence: Synthetic oligonucleotide
cgcaccgcagccuggugcu

SEQ ID NO: 1720061 - RNA, 19 nt, Artificial Sequence
  Description of Artificial Sequence: Synthetic oligonucleotide
ccacgccgccuugcagggg

SEQ ID NO: 1720062 - RNA, 19 nt, Artificial Sequence
  Description of Artificial Sequence: Synthetic oligonucleotide
ggugcaccucuagcagccu

SEQ ID NO: 1720063 - RNA, 19 nt, Artificial Sequence
  Description of Artificial Sequence: Synthetic oligonucleotide
cgccuguguguaggcgccg

SEQ ID NO: 1720064 - RNA, 19 nt, Artificial Sequence
  Description of Artificial Sequence: Synthetic oligonucleotide
gcccggcguggaccacaag

SEQ ID NO: 1720065 - RNA, 19 nt, Artificial Sequence
  Description of Artificial Sequence: Synthetic oligonucleotide
ggcgagcagcagagcccac

SEQ ID NO: 1720066 - RNA, 19 nt, Artificial Sequence
  Description of Artificial Sequence: Synthetic oligonucleotide
ggugagucuugcggugcuu

SEQ ID NO: 1720067 - RNA, 19 nt, Artificial Sequence
  Description of Artificial Sequence: Synthetic oligonucleotide
cgccgguggucuuucagau

SEQ ID NO: 1720068 - RNA, 19 nt, Artificial Sequence
  Description of Artificial Sequence: Synthetic oligonucleotide
ccgaugcaccugcagcgau

SEQ ID NO: 1720069 - RNA, 19 nt, Artificial Sequence
  Description of Artificial Sequence: Synthetic oligonucleotide
ccuccacugcgguuuccau

SEQ ID NO: 1720070 - RNA, 19 nt, Artificial Sequence
  Description of Artificial Sequence: Synthetic oligonucleotide
gccgccuugcaggggcugu

SEQ ID NO: 1720071 - RNA, 19 nt, Artificial Sequence
  Description of Artificial Sequence: Synthetic oligonucleotide
cgccgagggccugguuggg

SEQ ID NO: 1720072 - RNA, 19 nt, Artificial Sequence
  Description of Artificial Sequence: Synthetic oligonucleotide
ccggugugugugcgcagau

SEQ ID NO: 1720073 - RNA, 19 nt, Artificial Sequence
  Description of Artificial Sequence: Synthetic oligonucleotide
cgccgccuugcaggggcug

SEQ ID NO: 1720074 - RNA, 19 nt, Artificial Sequence
  Description of Artificial Sequence: Synthetic oligonucleotide
ccgccuugcaggggcugua

SEQ ID NO: 1720075 - RNA, 19 nt, Artificial Sequence
  Description of Artificial Sequence: Synthetic oligonucleotide
caccgccgagggccugguu

SEQ ID NO: 1720076 - RNA, 19 nt, Artificial Sequence
  Description of Artificial Sequence: Synthetic oligonucleotide
cggggccgagucagccgcu

SEQ ID NO: 1720077 - RNA, 19 nt, Artificial Sequence
  Description of Artificial Sequence: Synthetic oligonucleotide
uauauuacaacauacauau

SEQ ID NO: 1720078 - RNA, 19 nt, Artificial Sequence
  Description of Artificial Sequence: Synthetic oligonucleotide
uauauaauggaaaaguuua

SEQ ID NO: 1720079 - RNA, 19 nt, Artificial Sequence
  Description of Artificial Sequence: Synthetic oligonucleotide
aguaagagcagcuacaaug

SEQ ID NO: 1720080 - RNA, 19 nt, Artificial Sequence
  Description of Artificial Sequence: Synthetic oligonucleotide
uuaacgaucagguaggcga

SEQ ID NO: 1720081 - RNA, 19 nt, Artificial Sequence
  Description of Artificial Sequence: Synthetic oligonucleotide
gaauauauaaaaccccuag

SEQ ID NO: 1720082 - RNA, 19 nt, Artificial Sequence
  Description of Artificial Sequence: Synthetic oligonucleotide
ucuuuaacgaucagguagg

SEQ ID NO: 1720083 - RNA, 19 nt, Artificial Sequence
  Description of Artificial Sequence: Synthetic oligonucleotide
aauucuuuaacgaucaggu

SEQ ID NO: 1720084 - RNA, 19 nt, Artificial Sequence
  Description of Artificial Sequence: Synthetic oligonucleotide
ucuuuaaauggucucacug

SEQ ID NO: 1720085 - RNA, 19 nt, Artificial Sequence
  Description of Artificial Sequence: Synthetic oligonucleotide
uuuaaauggucucacugug

SEQ ID NO: 1720086 - RNA, 19 nt, Artificial Sequence
  Description of Artificial Sequence: Synthetic oligonucleotide
guuuacaugaggcaccacg

SEQ ID NO: 1720087 - RNA, 19 nt, Artificial Sequence
  Description of Artificial Sequence: Synthetic oligonucleotide
gagaccagaauccuaacag

SEQ ID NO: 1720088 - RNA, 19 nt, Artificial Sequence
  Description of Artificial Sequence: Synthetic oligonucleotide
ugauauauauaauggaaaa

SEQ ID NO: 1720089 - RNA, 19 nt, Artificial Sequence
  Description of Artificial Sequence: Synthetic oligonucleotide
agcaguuagagauaauguc

SEQ ID NO: 1720090 - RNA, 19 nt, Artificial Sequence
  Description of Artificial Sequence: Synthetic oligonucleotide
uuagagauaaugucagcag

SEQ ID NO: 1720091 - RNA, 19 nt, Artificial Sequence
  Description of Artificial Sequence: Synthetic oligonucleotide
agucggaauacacaggccg

SEQ ID NO: 1720092 - RNA, 19 nt, Artificial Sequence
  Description of Artificial Sequence: Synthetic oligonucleotide
aaacaagcaggacuuucac

SEQ ID NO: 1720093 - RNA, 19 nt, Artificial Sequence
  Description of Artificial Sequence: Synthetic oligonucleotide
aauacacaggccgagucac

SEQ ID NO: 1720094 - RNA, 19 nt, Artificial Sequence
  Description of Artificial Sequence: Synthetic oligonucleotide
uuuacaugaggcaccacgc

SEQ ID NO: 1720095 - RNA, 19 nt, Artificial Sequence
  Description of Artificial Sequence: Synthetic oligonucleotide
aacuauauucuugagauua

SEQ ID NO: 1720096 - RNA, 19 nt, Artificial Sequence
  Description of Artificial Sequence: Synthetic oligonucleotide
ucugauguaguuucuauaa

SEQ ID NO: 1720097 - RNA, 19 nt, Artificial Sequence
  Description of Artificial Sequence: Synthetic oligonucleotide
uacauauuaaaguucaauu

SEQ ID NO: 1720098 - RNA, 19 nt, Artificial Sequence
  Description of Artificial Sequence: Synthetic oligonucleotide
ucuucgucgauuucgcccg

SEQ ID NO: 1720099 - RNA, 19 nt, Artificial Sequence
  Description of Artificial Sequence: Synthetic oligonucleotide
acagagaauggaaaggacc

SEQ ID NO: 1720100 - RNA, 19 nt, Artificial Sequence
  Description of Artificial Sequence: Synthetic oligonucleotide
aauugccauacuauagccc

SEQ ID NO: 1720101 - RNA, 19 nt, Artificial Sequence
  Description of Artificial Sequence: Synthetic oligonucleotide
ucuugaaccuagcagguga

SEQ ID NO: 1720102 - RNA, 19 nt, Artificial Sequence
  Description of Artificial Sequence: Synthetic oligonucleotide
uauaagugcacauuugcau

SEQ ID NO: 1720103 - RNA, 19 nt, Artificial Sequence
  Description of Artificial Sequence: Synthetic oligonucleotide
auugccauacuauagccca

SEQ ID NO: 1720104 - RNA, 19 nt, Artificial Sequence
  Description of Artificial Sequence: Synthetic oligonucleotide
cucucuacgaaggacaugg

SEQ ID NO: 1720105 - RNA, 19 nt, Artificial Sequence
  Description of Artificial Sequence: Synthetic oligonucleotide
gugaaagaggaguaggcgg

SEQ ID NO: 1720106 - RNA, 19 nt, Artificial Sequence
  Description of Artificial Sequence: Synthetic oligonucleotide
agaccagaauccuaacagc

SEQ ID NO: 1720107 - RNA, 19 nt, Artificial Sequence
  Description of Artificial Sequence: Synthetic oligonucleotide
aauccuaacagcccaguau

SEQ ID NO: 1720108 - RNA, 19 nt, Artificial Sequence
  Description of Artificial Sequence: Synthetic oligonucleotide
gaaaaguuuacacuggcua

SEQ ID NO: 1720109 - RNA, 19 nt, Artificial Sequence
  Description of Artificial Sequence: Synthetic oligonucleotide
aguuuugcugcccugauau

SEQ ID NO: 1720110 - RNA, 19 nt, Artificial Sequence
  Description of Artificial Sequence: Synthetic oligonucleotide
aggagaauccagcaguuag

SEQ ID NO: 1720111 - RNA, 19 nt, Artificial Sequence
  Description of Artificial Sequence: Synthetic oligonucleotide
caaaucgcgggcuacuugg

SEQ ID NO: 1720112 - RNA, 19 nt, Artificial Sequence
  Description of Artificial Sequence: Synthetic oligonucleotide
auuguagguuuacaugagg

SEQ ID NO: 1720113 - RNA, 19 nt, Artificial Sequence
  Description of Artificial Sequence: Synthetic oligonucleotide
uccugguucaaaagaauca

SEQ ID NO: 1720114 - RNA, 19 nt, Artificial Sequence
  Description of Artificial Sequence: Synthetic oligonucleotide
uguagguuuacaugaggca

SEQ ID NO: 1720115 - RNA, 19 nt, Artificial Sequence
  Description of Artificial Sequence: Synthetic oligonucleotide
uauaaaaccccuagguaua

SEQ ID NO: 1720116 - RNA, 19 nt, Artificial Sequence
  Description of Artificial Sequence: Synthetic oligonucleotide
aaaagacugagagccccgc

SEQ ID NO: 1720117 - RNA, 19 nt, Artificial Sequence
  Description of Artificial Sequence: Synthetic oligonucleotide
aaagcaaggaggccggcga

SEQ ID NO: 1720118 - RNA, 19 nt, Artificial Sequence
  Description of Artificial Sequence: Synthetic oligonucleotide
caguuagagauaaugucag

SEQ ID NO: 1720119 - RNA, 19 nt, Artificial Sequence
  Description of Artificial Sequence: Synthetic oligonucleotide
auucuauugauuaucaaaa

SEQ ID NO: 1720120 - RNA, 19 nt, Artificial Sequence
  Description of Artificial Sequence: Synthetic oligonucleotide
auuaaaguucaauuguaua

SEQ ID NO: 1720121 - RNA, 19 nt, Artificial Sequence
  Description of Artificial Sequence: Synthetic oligonucleotide
aaccuagcaggugaaagag

SEQ ID NO: 1720122 - RNA, 19 nt, Artificial Sequence
  Description of Artificial Sequence: Synthetic oligonucleotide
auauaauggaaaaguuuac

SEQ ID NO: 1720123 - RNA, 19 nt, Artificial Sequence
  Description of Artificial Sequence: Synthetic oligonucleotide
aaaccccuagguauacucc

SEQ ID NO: 1720124 - RNA, 19 nt, Artificial Sequence
  Description of Artificial Sequence: Synthetic oligonucleotide
uagguuuacaugaggcacc

SEQ ID NO: 1720125 - RNA, 19 nt, Artificial Sequence
  Description of Artificial Sequence: Synthetic oligonucleotide
uaaauggucucacugugua

SEQ ID NO: 1720126 - RNA, 19 nt, Artificial Sequence
  Description of Artificial Sequence: Synthetic oligonucleotide
ugaaccuagcaggugaaag

SEQ ID NO: 1720127 - RNA, 19 nt, Artificial Sequence
  Description of Artificial Sequence: Synthetic oligonucleotide
caaaacaguacaaguuuug

SEQ ID NO: 1720128 - RNA, 19 nt, Artificial Sequence
  Description of Artificial Sequence: Synthetic oligonucleotide
aggacuuucaccaacagua

SEQ ID NO: 1720129 - RNA, 19 nt, Artificial Sequence
  Description of Artificial Sequence: Synthetic oligonucleotide
uacuuggucgcaucccucg

SEQ ID NO: 1720130 - RNA, 19 nt, Artificial Sequence
  Description of Artificial Sequence: Synthetic oligonucleotide
agagauaaugucagcagag

SEQ ID NO: 1720131 - RNA, 19 nt, Artificial Sequence
  Description of Artificial Sequence: Synthetic oligonucleotide
ugaauauauaaaaccccua

SEQ ID NO: 1720132 - RNA, 19 nt, Artificial Sequence
  Description of Artificial Sequence: Synthetic oligonucleotide
uacaugaggcaccacgcca

SEQ ID NO: 1720133 - RNA, 19 nt, Artificial Sequence
  Description of Artificial Sequence: Synthetic oligonucleotide
aguacaaguuuugcugccc

SEQ ID NO: 1720134 - RNA, 19 nt, Artificial Sequence
  Description of Artificial Sequence: Synthetic oligonucleotide
uuuaacgaucagguaggcg

SEQ ID NO: 1720135 - RNA, 19 nt, Artificial Sequence
  Description of Artificial Sequence: Synthetic oligonucleotide
aguagcggggcccucuugg

SEQ ID NO: 1720136 - RNA, 19 nt, Artificial Sequence
  Description of Artificial Sequence: Synthetic oligonucleotide
aucgcgggcuacuuggucg

SEQ ID NO: 1720137 - RNA, 19 nt, Artificial Sequence
  Description of Artificial Sequence: Synthetic oligonucleotide
gaccagaauccuaacagcc

SEQ ID NO: 1720138 - RNA, 19 nt, Artificial Sequence
  Description of Artificial Sequence: Synthetic oligonucleotide
uuccugguucaaaagaauc

SEQ ID NO: 1720139 - RNA, 19 nt, Artificial Sequence
  Description of Artificial Sequence: Synthetic oligonucleotide
cucuacgaaggacauggcg

SEQ ID NO: 1720140 - RNA, 19 nt, Artificial Sequence
  Description of Artificial Sequence: Synthetic oligonucleotide
uuacaugaggcaccacgcc

SEQ ID NO: 1720141 - RNA, 19 nt, Artificial Sequence
  Description of Artificial Sequence: Synthetic oligonucleotide
guaggcgauggccaggagg

SEQ ID NO: 1720142 - RNA, 19 nt, Artificial Sequence
  Description of Artificial Sequence: Synthetic oligonucleotide
aaccccuagguauacucca

SEQ ID NO: 1720143 - RNA, 19 nt, Artificial Sequence
  Description of Artificial Sequence: Synthetic oligonucleotide
uguagcuacaggcuggcuu

SEQ ID NO: 1720144 - RNA, 19 nt, Artificial Sequence
  Description of Artificial Sequence: Synthetic oligonucleotide
uuugcauucuauugauuau

SEQ ID NO: 1720145 - RNA, 19 nt, Artificial Sequence
  Description of Artificial Sequence: Synthetic oligonucleotide
auaagugcacauuugcauu

SEQ ID NO: 1720146 - RNA, 19 nt, Artificial Sequence
  Description of Artificial Sequence: Synthetic oligonucleotide
gucgauuucgcccgcaccc

SEQ ID NO: 1720147 - RNA, 19 nt, Artificial Sequence
  Description of Artificial Sequence: Synthetic oligonucleotide
uccccguagagugaagucg

SEQ ID NO: 1720148 - RNA, 19 nt, Artificial Sequence
  Description of Artificial Sequence: Synthetic oligonucleotide
uaagugcacauuugcauuc

SEQ ID NO: 1720149 - RNA, 19 nt, Artificial Sequence
  Description of Artificial Sequence: Synthetic oligonucleotide
aggugaaagaggaguaggc

SEQ ID NO: 1720150 - RNA, 19 nt, Artificial Sequence
  Description of Artificial Sequence: Synthetic oligonucleotide
aaaucucaaaauaucuuuu

SEQ ID NO: 1720151 - RNA, 19 nt, Artificial Sequence
  Description of Artificial Sequence: Synthetic oligonucleotide
augcaauucuuuaacgauc

SEQ ID NO: 1720152 - RNA, 19 nt, Artificial Sequence
  Description of Artificial Sequence: Synthetic oligonucleotide
ucgccauccccguagagug

SEQ ID NO: 1720153 - RNA, 19 nt, Artificial Sequence
  Description of Artificial Sequence: Synthetic oligonucleotide
cucgucuucgucgauuucg

SEQ ID NO: 1720154 - RNA, 19 nt, Artificial Sequence
  Description of Artificial Sequence: Synthetic oligonucleotide
gaaccuagcaggugaaaga

SEQ ID NO: 1720155 - RNA, 19 nt, Artificial Sequence
  Description of Artificial Sequence: Synthetic oligonucleotide
aaucgcgggcuacuugguc

SEQ ID NO: 1720156 - RNA, 19 nt, Artificial Sequence
  Description of Artificial Sequence: Synthetic oligonucleotide
aaccugguucaucacauuu

SEQ ID NO: 1720157 - RNA, 19 nt, Artificial Sequence
  Description of Artificial Sequence: Synthetic oligonucleotide
uuggaguaggcaacauuug

SEQ ID NO: 1720158 - RNA, 19 nt, Artificial Sequence
  Description of Artificial Sequence: Synthetic oligonucleotide
uacacuggcuaagaaauaa

SEQ ID NO: 1720159 - RNA, 19 nt, Artificial Sequence
  Description of Artificial Sequence: Synthetic oligonucleotide
aacuccgcccgcaaaucgc

SEQ ID NO: 1720160 - RNA, 19 nt, Artificial Sequence
  Description of Artificial Sequence: Synthetic oligonucleotide
auaaaaccccuagguauac

SEQ ID NO: 1720161 - RNA, 19 nt, Artificial Sequence
  Description of Artificial Sequence: Synthetic oligonucleotide
uucauagucuuuggaguag

SEQ ID NO: 1720162 - RNA, 19 nt, Artificial Sequence
  Description of Artificial Sequence: Synthetic oligonucleotide
agagaccagaauccuaaca

SEQ ID NO: 1720163 - RNA, 19 nt, Artificial Sequence
  Description of Artificial Sequence: Synthetic oligonucleotide
gaaaagacugagagccccg

SEQ ID NO: 1720164 - RNA, 19 nt, Artificial Sequence
  Description of Artificial Sequence: Synthetic oligonucleotide
gaacuccgcccgcaaaucg

SEQ ID NO: 1720165 - RNA, 19 nt, Artificial Sequence
  Description of Artificial Sequence: Synthetic oligonucleotide
agacugagagccccgcgcg

SEQ ID NO: 1720166 - RNA, 19 nt, Artificial Sequence
  Description of Artificial Sequence: Synthetic oligonucleotide
gaauacacaggccgaguca

SEQ ID NO: 1720167 - RNA, 19 nt, Artificial Sequence
  Description of Artificial Sequence: Synthetic oligonucleotide
agucuuuggaguaggcaac

SEQ ID NO: 1720168 - RNA, 19 nt, Artificial Sequence
  Description of Artificial Sequence: Synthetic oligonucleotide
guagcuacaggcuggcuuc

SEQ ID NO: 1720169 - RNA, 19 nt, Artificial Sequence
  Description of Artificial Sequence: Synthetic oligonucleotide
gaaagcaaggaggccggcg

SEQ ID NO: 1720170 - RNA, 19 nt, Artificial Sequence
  Description of Artificial Sequence: Synthetic oligonucleotide
gcaacuauauucuugagau

SEQ ID NO: 1720171 - RNA, 19 nt, Artificial Sequence
  Description of Artificial Sequence: Synthetic oligonucleotide
ucgucuucgucgauuucgc

SEQ ID NO: 1720172 - RNA, 19 nt, Artificial Sequence
  Description of Artificial Sequence: Synthetic oligonucleotide
accacgccacaguaagagc

SEQ ID NO: 1720173 - RNA, 19 nt, Artificial Sequence
  Description of Artificial Sequence: Synthetic oligonucleotide
aguaggcggaaacauuccu

SEQ ID NO: 1720174 - RNA, 19 nt, Artificial Sequence
  Description of Artificial Sequence: Synthetic oligonucleotide
uagagugaagucggaauac

SEQ ID NO: 1720175 - RNA, 19 nt, Artificial Sequence
  Description of Artificial Sequence: Synthetic oligonucleotide
cgggaaaagacugagagcc

SEQ ID NO: 1720176 - RNA, 19 nt, Artificial Sequence
  Description of Artificial Sequence: Synthetic oligonucleotide
uuggucgcaucccucgucu

SEQ ID NO: 1720177 - RNA, 19 nt, Artificial Sequence
  Description of Artificial Sequence: Synthetic oligonucleotide
auuucgcccgcaccccagc

SEQ ID NO: 1720178 - RNA, 19 nt, Artificial Sequence
  Description of Artificial Sequence: Synthetic oligonucleotide
uuugcugcccugauauaua

SEQ ID NO: 1720179 - RNA, 19 nt, Artificial Sequence
  Description of Artificial Sequence: Synthetic oligonucleotide
uucucuauuguagguuuac

SEQ ID NO: 1720180 - RNA, 19 nt, Artificial Sequence
  Description of Artificial Sequence: Synthetic oligonucleotide
gagcagcgaacagagaaug

SEQ ID NO: 1720181 - RNA, 19 nt, Artificial Sequence
  Description of Artificial Sequence: Synthetic oligonucleotide
auagucuuuggaguaggca

SEQ ID NO: 1720182 - RNA, 19 nt, Artificial Sequence
  Description of Artificial Sequence: Synthetic oligonucleotide
ugccguugcgcuucucggg

SEQ ID NO: 1720183 - RNA, 19 nt, Artificial Sequence
  Description of Artificial Sequence: Synthetic oligonucleotide
acucugauguaguuucuau

SEQ ID NO: 1720184 - RNA, 19 nt, Artificial Sequence
  Description of Artificial Sequence: Synthetic oligonucleotide
uucugguggccgcagucgc

SEQ ID NO: 1720185 - RNA, 19 nt, Artificial Sequence
  Description of Artificial Sequence: Synthetic oligonucleotide
guagagugaagucggaaua

SEQ ID NO: 1720186 - RNA, 19 nt, Artificial Sequence
  Description of Artificial Sequence: Synthetic oligonucleotide
auacuauagcccaugugga

SEQ ID NO: 1720187 - RNA, 19 nt, Artificial Sequence
  Description of Artificial Sequence: Synthetic oligonucleotide
ucggaauacacaggccgag

SEQ ID NO: 1720188 - RNA, 19 nt, Artificial Sequence
  Description of Artificial Sequence: Synthetic oligonucleotide
ccugauauauauaauggaa

SEQ ID NO: 1720189 - RNA, 19 nt, Artificial Sequence
  Description of Artificial Sequence: Synthetic oligonucleotide
ggaaaagacugagagcccc

SEQ ID NO: 1720190 - RNA, 19 nt, Artificial Sequence
  Description of Artificial Sequence: Synthetic oligonucleotide
ucucuauuguagguuuaca

SEQ ID NO: 1720191 - RNA, 19 nt, Artificial Sequence
  Description of Artificial Sequence: Synthetic oligonucleotide
gcaucccucgucuucgucg

SEQ ID NO: 1720192 - RNA, 19 nt, Artificial Sequence
  Description of Artificial Sequence: Synthetic oligonucleotide
caccacgccacaguaagag

SEQ ID NO: 1720193 - RNA, 19 nt, Artificial Sequence
  Description of Artificial Sequence: Synthetic oligonucleotide
ggcaacuauauucuugaga

SEQ ID NO: 1720194 - RNA, 19 nt, Artificial Sequence
  Description of Artificial Sequence: Synthetic oligonucleotide
uguguagcuacaggcuggc

SEQ ID NO: 1720195 - RNA, 19 nt, Artificial Sequence
  Description of Artificial Sequence: Synthetic oligonucleotide
cacaggccgagucaccggg

SEQ ID NO: 1720196 - RNA, 19 nt, Artificial Sequence
  Description of Artificial Sequence: Synthetic oligonucleotide
gcugcccugauauauauaa

SEQ ID NO: 1720197 - RNA, 19 nt, Artificial Sequence
  Description of Artificial Sequence: Synthetic oligonucleotide
uccgcccgcaaaucgcggg

SEQ ID NO: 1720198 - RNA, 19 nt, Artificial Sequence
  Description of Artificial Sequence: Synthetic oligonucleotide
agaacuccgcccgcaaauc

SEQ ID NO: 1720199 - RNA, 19 nt, Artificial Sequence
  Description of Artificial Sequence: Synthetic oligonucleotide
uuccaacccacagaaccug

SEQ ID NO: 1720200 - RNA, 19 nt, Artificial Sequence
  Description of Artificial Sequence: Synthetic oligonucleotide
gucgcaucccucgucuucg

SEQ ID NO: 1720201 - RNA, 19 nt, Artificial Sequence
  Description of Artificial Sequence: Synthetic oligonucleotide
uuacacuggcuaagaaaua

SEQ ID NO: 1720202 - RNA, 19 nt, Artificial Sequence
  Description of Artificial Sequence: Synthetic oligonucleotide
uggcaacuauauucuugag

SEQ ID NO: 1720203 - RNA, 19 nt, Artificial Sequence
  Description of Artificial Sequence: Synthetic oligonucleotide
cacgccacaguaagagcag

SEQ ID NO: 1720204 - RNA, 19 nt, Artificial Sequence
  Description of Artificial Sequence: Synthetic oligonucleotide
ugccauacuauagcccaug

SEQ ID NO: 1720205 - RNA, 19 nt, Artificial Sequence
  Description of Artificial Sequence: Synthetic oligonucleotide
acauggcgggaaaagacug

SEQ ID NO: 1720206 - RNA, 19 nt, Artificial Sequence
  Description of Artificial Sequence: Synthetic oligonucleotide
cuacaggcuggcuuccaac

SEQ ID NO: 1720207 - RNA, 19 nt, Artificial Sequence
  Description of Artificial Sequence: Synthetic oligonucleotide
aagugcacauuugcauucu

SEQ ID NO: 1720208 - RNA, 19 nt, Artificial Sequence
  Description of Artificial Sequence: Synthetic oligonucleotide
ggacgggugacccaucccc

SEQ ID NO: 1720209 - RNA, 19 nt, Artificial Sequence
  Description of Artificial Sequence: Synthetic oligonucleotide
ucucuacgaaggacauggc

SEQ ID NO: 1720210 - RNA, 19 nt, Artificial Sequence
  Description of Artificial Sequence: Synthetic oligonucleotide
ggugacccauccccgaccg

SEQ ID NO: 1720211 - RNA, 19 nt, Artificial Sequence
  Description of Artificial Sequence: Synthetic oligonucleotide
ugagaacuccgcccgcaaa

SEQ ID NO: 1720212 - RNA, 19 nt, Artificial Sequence
  Description of Artificial Sequence: Synthetic oligonucleotide
acugagagccccgcgcggg

SEQ ID NO: 1720213 - RNA, 19 nt, Artificial Sequence
  Description of Artificial Sequence: Synthetic oligonucleotide
ggaguaggcggaaacauuc

SEQ ID NO: 1720214 - RNA, 19 nt, Artificial Sequence
  Description of Artificial Sequence: Synthetic oligonucleotide
ggaauacacaggccgaguc

SEQ ID NO: 1720215 - RNA, 19 nt, Artificial Sequence
  Description of Artificial Sequence: Synthetic oligonucleotide
cuuuaacgaucagguaggc

SEQ ID NO: 1720216 - RNA, 19 nt, Artificial Sequence
  Description of Artificial Sequence: Synthetic oligonucleotide
aacucugauguaguuucua

SEQ ID NO: 1720217 - RNA, 19 nt, Artificial Sequence
  Description of Artificial Sequence: Synthetic oligonucleotide
ucccacgacgccccggcug

SEQ ID NO: 1720218 - RNA, 19 nt, Artificial Sequence
  Description of Artificial Sequence: Synthetic oligonucleotide
guagcggggcccucuuggg

SEQ ID NO: 1720219 - RNA, 19 nt, Artificial Sequence
  Description of Artificial Sequence: Synthetic oligonucleotide
aucgccauccccguagagu

SEQ ID NO: 1720220 - RNA, 19 nt, Artificial Sequence
  Description of Artificial Sequence: Synthetic oligonucleotide
uuucgcccgcaccccagcc

SEQ ID NO: 1720221 - RNA, 19 nt, Artificial Sequence
  Description of Artificial Sequence: Synthetic oligonucleotide
agcggggcccucuugggcu

SEQ ID NO: 1720222 - RNA, 19 nt, Artificial Sequence
  Description of Artificial Sequence: Synthetic oligonucleotide
aaacucugauguaguuucu

SEQ ID NO: 1720223 - RNA, 19 nt, Artificial Sequence
  Description of Artificial Sequence: Synthetic oligonucleotide
gaggccggcgaagagcagc

SEQ ID NO: 1720224 - RNA, 19 nt, Artificial Sequence
  Description of Artificial Sequence: Synthetic oligonucleotide
cagaccucgcacucucuac

SEQ ID NO: 1720225 - RNA, 19 nt, Artificial Sequence
  Description of Artificial Sequence: Synthetic oligonucleotide
ucgauuucgcccgcacccc

SEQ ID NO: 1720226 - RNA, 19 nt, Artificial Sequence
  Description of Artificial Sequence: Synthetic oligonucleotide
agguuuacaugaggcacca

SEQ ID NO: 1720227 - RNA, 19 nt, Artificial Sequence
  Description of Artificial Sequence: Synthetic oligonucleotide
acgccacaguaagagcagc

SEQ ID NO: 1720228 - RNA, 19 nt, Artificial Sequence
  Description of Artificial Sequence: Synthetic oligonucleotide
acuauauucuugagauuaa

SEQ ID NO: 1720229 - RNA, 19 nt, Artificial Sequence
  Description of Artificial Sequence: Synthetic oligonucleotide
agaauccuaacagcccagu

SEQ ID NO: 1720230 - RNA, 19 nt, Artificial Sequence
  Description of Artificial Sequence: Synthetic oligonucleotide
agcgaacagagaauggaaa

SEQ ID NO: 1720231 - RNA, 19 nt, Artificial Sequence
  Description of Artificial Sequence: Synthetic oligonucleotide
uaaaaccccuagguauacu

SEQ ID NO: 1720232 - RNA, 19 nt, Artificial Sequence
  Description of Artificial Sequence: Synthetic oligonucleotide
ucgcgggcuacuuggucgc

SEQ ID NO: 1720233 - RNA, 19 nt, Artificial Sequence
  Description of Artificial Sequence: Synthetic oligonucleotide
ucgucgauuucgcccgcac

SEQ ID NO: 1720234 - RNA, 19 nt, Artificial Sequence
  Description of Artificial Sequence: Synthetic oligonucleotide
caggacgggugacccaucc

SEQ ID NO: 1720235 - RNA, 19 nt, Artificial Sequence
  Description of Artificial Sequence: Synthetic oligonucleotide
gauuucgcccgcaccccag

SEQ ID NO: 1720236 - RNA, 19 nt, Artificial Sequence
  Description of Artificial Sequence: Synthetic oligonucleotide
agcuacaaugccauucaaa

SEQ ID NO: 1720237 - RNA, 19 nt, Artificial Sequence
  Description of Artificial Sequence: Synthetic oligonucleotide
uagcggggcccucuugggc

SEQ ID NO: 1720238 - RNA, 19 nt, Artificial Sequence
  Description of Artificial Sequence: Synthetic oligonucleotide
cucugauguaguuucuaua

SEQ ID NO: 1720239 - RNA, 19 nt, Artificial Sequence
  Description of Artificial Sequence: Synthetic oligonucleotide
acuccgcccgcaaaucgcg

SEQ ID NO: 1720240 - RNA, 19 nt, Artificial Sequence
  Description of Artificial Sequence: Synthetic oligonucleotide
cagcaguuagagauaaugu

SEQ ID NO: 1720241 - RNA, 19 nt, Artificial Sequence
  Description of Artificial Sequence: Synthetic oligonucleotide
ccccguagagugaagucgg

SEQ ID NO: 1720242 - RNA, 19 nt, Artificial Sequence
  Description of Artificial Sequence: Synthetic oligonucleotide
acagaccucgcacucucua

SEQ ID NO: 1720243 - RNA, 19 nt, Artificial Sequence
  Description of Artificial Sequence: Synthetic oligonucleotide
guucaucacauuucauagu

SEQ ID NO: 1720244 - RNA, 19 nt, Artificial Sequence
  Description of Artificial Sequence: Synthetic oligonucleotide
cuugaaccuagcaggugaa

SEQ ID NO: 1720245 - RNA, 19 nt, Artificial Sequence
  Description of Artificial Sequence: Synthetic oligonucleotide
gacauggcgggaaaagacu

SEQ ID NO: 1720246 - RNA, 19 nt, Artificial Sequence
  Description of Artificial Sequence: Synthetic oligonucleotide
cagagaccagaauccuaac

SEQ ID NO: 1720247 - RNA, 19 nt, Artificial Sequence
  Description of Artificial Sequence: Synthetic oligonucleotide
cuuggucgcaucccucguc

SEQ ID NO: 1720248 - RNA, 19 nt, Artificial Sequence
  Description of Artificial Sequence: Synthetic oligonucleotide
gagaacuccgcccgcaaau

SEQ ID NO: 1720249 - RNA, 19 nt, Artificial Sequence
  Description of Artificial Sequence: Synthetic oligonucleotide
ccacaguaagagcagcuac

SEQ ID NO: 1720250 - RNA, 19 nt, Artificial Sequence
  Description of Artificial Sequence: Synthetic oligonucleotide
aaaucgcgggcuacuuggu

SEQ ID NO: 1720251 - RNA, 19 nt, Artificial Sequence
  Description of Artificial Sequence: Synthetic oligonucleotide
cuuccaacccacagaaccu

SEQ ID NO: 1720252 - RNA, 19 nt, Artificial Sequence
  Description of Artificial Sequence: Synthetic oligonucleotide
gcgggaaaagacugagagc

SEQ ID NO: 1720253 - RNA, 19 nt, Artificial Sequence
  Description of Artificial Sequence: Synthetic oligonucleotide
agcaaggaggccggcgaag

SEQ ID NO: 1720254 - RNA, 19 nt, Artificial Sequence
  Description of Artificial Sequence: Synthetic oligonucleotide
cauggcgggaaaagacuga

SEQ ID NO: 1720255 - RNA, 19 nt, Artificial Sequence
  Description of Artificial Sequence: Synthetic oligonucleotide
ugcagccauauagguauaa

SEQ ID NO: 1720256 - RNA, 19 nt, Artificial Sequence
  Description of Artificial Sequence: Synthetic oligonucleotide
cccugauauauauaaugga

SEQ ID NO: 1720257 - RNA, 19 nt, Artificial Sequence
  Description of Artificial Sequence: Synthetic oligonucleotide
gcgcuucucgggcaggacg

SEQ ID NO: 1720258 - RNA, 19 nt, Artificial Sequence
  Description of Artificial Sequence: Synthetic oligonucleotide
caucccucgucuucgucga

SEQ ID NO: 1720259 - RNA, 19 nt, Artificial Sequence
  Description of Artificial Sequence: Synthetic oligonucleotide
gcagcgaacagagaaugga

SEQ ID NO: 1720260 - RNA, 19 nt, Artificial Sequence
  Description of Artificial Sequence: Synthetic oligonucleotide
uugaaccuagcaggugaaa

SEQ ID NO: 1720261 - RNA, 19 nt, Artificial Sequence
  Description of Artificial Sequence: Synthetic oligonucleotide
aggcggaaacauuccuggu

SEQ ID NO: 1720262 - RNA, 19 nt, Artificial Sequence
  Description of Artificial Sequence: Synthetic oligonucleotide
ccauauagguauaaauaua

SEQ ID NO: 1720263 - RNA, 19 nt, Artificial Sequence
  Description of Artificial Sequence: Synthetic oligonucleotide
gucggaauacacaggccga

SEQ ID NO: 1720264 - RNA, 19 nt, Artificial Sequence
  Description of Artificial Sequence: Synthetic oligonucleotide
gcaaaucgcgggcuacuug

SEQ ID NO: 1720265 - RNA, 19 nt, Artificial Sequence
  Description of Artificial Sequence: Synthetic oligonucleotide
ccacgccacaguaagagca

SEQ ID NO: 1720266 - RNA, 19 nt, Artificial Sequence
  Description of Artificial Sequence: Synthetic oligonucleotide
gucuuuggaguaggcaaca

SEQ ID NO: 1720267 - RNA, 19 nt, Artificial Sequence
  Description of Artificial Sequence: Synthetic oligonucleotide
agugcacauuugcauucua

SEQ ID NO: 1720268 - RNA, 19 nt, Artificial Sequence
  Description of Artificial Sequence: Synthetic oligonucleotide
agguaggcgauggccagga

SEQ ID NO: 1720269 - RNA, 19 nt, Artificial Sequence
  Description of Artificial Sequence: Synthetic oligonucleotide
acaggccgagucaccgggc

SEQ ID NO: 1720270 - RNA, 19 nt, Artificial Sequence
  Description of Artificial Sequence: Synthetic oligonucleotide
acacuggcuaagaaauaaa

SEQ ID NO: 1720271 - RNA, 19 nt, Artificial Sequence
  Description of Artificial Sequence: Synthetic oligonucleotide
ggcgaagagcagcgaacag

SEQ ID NO: 1720272 - RNA, 19 nt, Artificial Sequence
  Description of Artificial Sequence: Synthetic oligonucleotide
acucucuacgaaggacaug

SEQ ID NO: 1720273 - RNA, 19 nt, Artificial Sequence
  Description of Artificial Sequence: Synthetic oligonucleotide
gacgccccggcugagaacu

SEQ ID NO: 1720274 - RNA, 19 nt, Artificial Sequence
  Description of Artificial Sequence: Synthetic oligonucleotide
acgggugacccauccccga

SEQ ID NO: 1720275 - RNA, 19 nt, Artificial Sequence
  Description of Artificial Sequence: Synthetic oligonucleotide
cuccgcccgcaaaucgcgg

SEQ ID NO: 1720276 - RNA, 19 nt, Artificial Sequence
  Description of Artificial Sequence: Synthetic oligonucleotide
gccuggggugaccuggcgg

SEQ ID NO: 1720277 - RNA, 19 nt, Artificial Sequence
  Description of Artificial Sequence: Synthetic oligonucleotide
uagcuacaggcuggcuucc

SEQ ID NO: 1720278 - RNA, 19 nt, Artificial Sequence
  Description of Artificial Sequence: Synthetic oligonucleotide
gagucaccgggccuggggu

SEQ ID NO: 1720279 - RNA, 19 nt, Artificial Sequence
  Description of Artificial Sequence: Synthetic oligonucleotide
guugcgcuucucgggcagg

SEQ ID NO: 1720280 - RNA, 19 nt, Artificial Sequence
  Description of Artificial Sequence: Synthetic oligonucleotide
caucgccauccccguagag

SEQ ID NO: 1720281 - RNA, 19 nt, Artificial Sequence
  Description of Artificial Sequence: Synthetic oligonucleotide
gcccucuugggcucccacg

SEQ ID NO: 1720282 - RNA, 19 nt, Artificial Sequence
  Description of Artificial Sequence: Synthetic oligonucleotide
ccuaacagcccaguaucug

SEQ ID NO: 1720283 - RNA, 19 nt, Artificial Sequence
  Description of Artificial Sequence: Synthetic oligonucleotide
cuucgucgauuucgcccgc

SEQ ID NO: 1720284 - RNA, 19 nt, Artificial Sequence
  Description of Artificial Sequence: Synthetic oligonucleotide
gggaaaagacugagagccc

SEQ ID NO: 1720285 - RNA, 19 nt, Artificial Sequence
  Description of Artificial Sequence: Synthetic oligonucleotide
gggcuacuuggucgcaucc

SEQ ID NO: 1720286 - RNA, 19 nt, Artificial Sequence
  Description of Artificial Sequence: Synthetic oligonucleotide
uucgucgauuucgcccgca

SEQ ID NO: 1720287 - RNA, 19 nt, Artificial Sequence
  Description of Artificial Sequence: Synthetic oligonucleotide
aggaguaggcggaaacauu

SEQ ID NO: 1720288 - RNA, 19 nt, Artificial Sequence
  Description of Artificial Sequence: Synthetic oligonucleotide
ccuggacaggccaccgccg

SEQ ID NO: 1720289 - RNA, 19 nt, Artificial Sequence
  Description of Artificial Sequence: Synthetic oligonucleotide
uccccgaccggcgggagua

SEQ ID NO: 1720290 - RNA, 19 nt, Artificial Sequence
  Description of Artificial Sequence: Synthetic oligonucleotide
gugacccauccccgaccgg

SEQ ID NO: 1720291 - RNA, 19 nt, Artificial Sequence
  Description of Artificial Sequence: Synthetic oligonucleotide
gggugacccauccccgacc

SEQ ID NO: 1720292 - RNA, 19 nt, Artificial Sequence
  Description of Artificial Sequence: Synthetic oligonucleotide
caggacuuucaccaacagu

SEQ ID NO: 1720293 - RNA, 19 nt, Artificial Sequence
  Description of Artificial Sequence: Synthetic oligonucleotide
gcucccacgacgccccggc

SEQ ID NO: 1720294 - RNA, 19 nt, Artificial Sequence
  Description of Artificial Sequence: Synthetic oligonucleotide
aggccgagucaccgggccu

SEQ ID NO: 1720295 - RNA, 19 nt, Artificial Sequence
  Description of Artificial Sequence: Synthetic oligonucleotide
ggaccuggacaggccaccg

SEQ ID NO: 1720296 - RNA, 19 nt, Artificial Sequence
  Description of Artificial Sequence: Synthetic oligonucleotide
ucgcaucccucgucuucgu

SEQ ID NO: 1720297 - RNA, 19 nt, Artificial Sequence
  Description of Artificial Sequence: Synthetic oligonucleotide
gucgcgcggccacagaccu

SEQ ID NO: 1720298 - RNA, 19 nt, Artificial Sequence
  Description of Artificial Sequence: Synthetic oligonucleotide
ccgaccggcgggaguagcg

SEQ ID NO: 1720299 - RNA, 19 nt, Artificial Sequence
  Description of Artificial Sequence: Synthetic oligonucleotide
ccuagguauacuccauaaa

SEQ ID NO: 1720300 - RNA, 19 nt, Artificial Sequence
  Description of Artificial Sequence: Synthetic oligonucleotide
cccuagguauacuccauaa

SEQ ID NO: 1720301 - RNA, 19 nt, Artificial Sequence
  Description of Artificial Sequence: Synthetic oligonucleotide
caccaacaguauuucucua

SEQ ID NO: 1720302 - RNA, 19 nt, Artificial Sequence
  Description of Artificial Sequence: Synthetic oligonucleotide
cccggcugagaacuccgcc

SEQ ID NO: 1720303 - RNA, 19 nt, Artificial Sequence
  Description of Artificial Sequence: Synthetic oligonucleotide
cacucucuacgaaggacau

SEQ ID NO: 1720304 - RNA, 19 nt, Artificial Sequence
  Description of Artificial Sequence: Synthetic oligonucleotide
gcccgcaccccagccaucg

SEQ ID NO: 1720305 - RNA, 19 nt, Artificial Sequence
  Description of Artificial Sequence: Synthetic oligonucleotide
auccccgaccggcgggagu

SEQ ID NO: 1720306 - RNA, 19 nt, Artificial Sequence
  Description of Artificial Sequence: Synthetic oligonucleotide
cgagucaccgggccugggg

SEQ ID NO: 1720307 - RNA, 19 nt, Artificial Sequence
  Description of Artificial Sequence: Synthetic oligonucleotide
ggaguaggcaacauuuguu

SEQ ID NO: 1720308 - RNA, 19 nt, Artificial Sequence
  Description of Artificial Sequence: Synthetic oligonucleotide
caacuauauucuugagauu

SEQ ID NO: 1720309 - RNA, 19 nt, Artificial Sequence
  Description of Artificial Sequence: Synthetic oligonucleotide
agcuacaggcuggcuucca

SEQ ID NO: 1720310 - RNA, 19 nt, Artificial Sequence
  Description of Artificial Sequence: Synthetic oligonucleotide
ucgccgggaagaugccguu

SEQ ID NO: 1720311 - RNA, 19 nt, Artificial Sequence
  Description of Artificial Sequence: Synthetic oligonucleotide
uggucgcaucccucgucuu

SEQ ID NO: 1720312 - RNA, 19 nt, Artificial Sequence
  Description of Artificial Sequence: Synthetic oligonucleotide
ggccgagucaccgggccug

SEQ ID NO: 1720313 - RNA, 19 nt, Artificial Sequence
  Description of Artificial Sequence: Synthetic oligonucleotide
gcuacaggcuggcuuccaa

SEQ ID NO: 1720314 - RNA, 19 nt, Artificial Sequence
  Description of Artificial Sequence: Synthetic oligonucleotide
cagcuacaaugccauucaa

SEQ ID NO: 1720315 - RNA, 19 nt, Artificial Sequence
  Description of Artificial Sequence: Synthetic oligonucleotide
ggaaagcaaggaggccggc

SEQ ID NO: 1720316 - RNA, 19 nt, Artificial Sequence
  Description of Artificial Sequence: Synthetic oligonucleotide
cauccccguagagugaagu

SEQ ID NO: 1720317 - RNA, 19 nt, Artificial Sequence
  Description of Artificial Sequence: Synthetic oligonucleotide
cgucgauuucgcccgcacc

SEQ ID NO: 1720318 - RNA, 19 nt, Artificial Sequence
  Description of Artificial Sequence: Synthetic oligonucleotide
caccgccgagucuggcuuc

SEQ ID NO: 1720319 - RNA, 19 nt, Artificial Sequence
  Description of Artificial Sequence: Synthetic oligonucleotide
agaugccguugcgcuucuc

SEQ ID NO: 1720320 - RNA, 19 nt, Artificial Sequence
  Description of Artificial Sequence: Synthetic oligonucleotide
uggccgcagucgccgggaa

SEQ ID NO: 1720321 - RNA, 19 nt, Artificial Sequence
  Description of Artificial Sequence: Synthetic oligonucleotide
ggcgauggccaggaggaaa

SEQ ID NO: 1720322 - RNA, 19 nt, Artificial Sequence
  Description of Artificial Sequence: Synthetic oligonucleotide
cguagagugaagucggaau

SEQ ID NO: 1720323 - RNA, 19 nt, Artificial Sequence
  Description of Artificial Sequence: Synthetic oligonucleotide
cugcccugauauauauaau

SEQ ID NO: 1720324 - RNA, 19 nt, Artificial Sequence
  Description of Artificial Sequence: Synthetic oligonucleotide
cccauccccgaccggcggg

SEQ ID NO: 1720325 - RNA, 19 nt, Artificial Sequence
  Description of Artificial Sequence: Synthetic oligonucleotide
ccgucgcgcggccacagac

SEQ ID NO: 1720326 - RNA, 19 nt, Artificial Sequence
  Description of Artificial Sequence: Synthetic oligonucleotide
caacccacagaaccugguu

SEQ ID NO: 1720327 - RNA, 19 nt, Artificial Sequence
  Description of Artificial Sequence: Synthetic oligonucleotide
caguaagagcagcuacaau

SEQ ID NO: 1720328 - RNA, 19 nt, Artificial Sequence
  Description of Artificial Sequence: Synthetic oligonucleotide
caggagaauccagcaguua

SEQ ID NO: 1720329 - RNA, 19 nt, Artificial Sequence
  Description of Artificial Sequence: Synthetic oligonucleotide
ccaacaguauuucucuauu

SEQ ID NO: 1720330 - RNA, 19 nt, Artificial Sequence
  Description of Artificial Sequence: Synthetic oligonucleotide
ggcgccgucgcgcggccac

SEQ ID NO: 1720331 - RNA, 19 nt, Artificial Sequence
  Description of Artificial Sequence: Synthetic oligonucleotide
cgucgcgcggccacagacc

SEQ ID NO: 1720332 - RNA, 19 nt, Artificial Sequence
  Description of Artificial Sequence: Synthetic oligonucleotide
ccgcccgcaaaucgcgggc

SEQ ID NO: 1720333 - RNA, 19 nt, Artificial Sequence
  Description of Artificial Sequence: Synthetic oligonucleotide
cguugcgcuucucgggcag

SEQ ID NO: 1720334 - RNA, 19 nt, Artificial Sequence
  Description of Artificial Sequence: Synthetic oligonucleotide
cgccgagucuggcuucugg

SEQ ID NO: 1720335 - RNA, 19 nt, Artificial Sequence
  Description of Artificial Sequence: Synthetic oligonucleotide
aucccucgucuucgucgau

SEQ ID NO: 1720336 - RNA, 19 nt, Artificial Sequence
  Description of Artificial Sequence: Synthetic oligonucleotide
gguuuacaugaggcaccac

SEQ ID NO: 1720337 - RNA, 19 nt, Artificial Sequence
  Description of Artificial Sequence: Synthetic oligonucleotide
gugaccuggcggcgccguc

SEQ ID NO: 1720338 - RNA, 19 nt, Artificial Sequence
  Description of Artificial Sequence: Synthetic oligonucleotide
gccauccccguagagugaa

SEQ ID NO: 1720339 - RNA, 19 nt, Artificial Sequence
  Description of Artificial Sequence: Synthetic oligonucleotide
ccauccccguagagugaag

SEQ ID NO: 1720340 - RNA, 19 nt, Artificial Sequence
  Description of Artificial Sequence: Synthetic oligonucleotide
cccgcaaaucgcgggcuac

SEQ ID NO: 1720341 - RNA, 19 nt, Artificial Sequence
  Description of Artificial Sequence: Synthetic oligonucleotide
cccacgacgccccggcuga

SEQ ID NO: 1720342 - RNA, 19 nt, Artificial Sequence
  Description of Artificial Sequence: Synthetic oligonucleotide
gccgagucaccgggccugg

SEQ ID NO: 1720343 - RNA, 19 nt, Artificial Sequence
  Description of Artificial Sequence: Synthetic oligonucleotide
cgggcuacuuggucgcauc

SEQ ID NO: 1720344 - RNA, 19 nt, Artificial Sequence
  Description of Artificial Sequence: Synthetic oligonucleotide
aggcgauggccaggaggaa

SEQ ID NO: 1720345 - RNA, 19 nt, Artificial Sequence
  Description of Artificial Sequence: Synthetic oligonucleotide
gggugaccuggcggcgccg

SEQ ID NO: 1720346 - RNA, 19 nt, Artificial Sequence
  Description of Artificial Sequence: Synthetic oligonucleotide
cugagagccccgcgcgggu

SEQ ID NO: 1720347 - RNA, 19 nt, Artificial Sequence
  Description of Artificial Sequence: Synthetic oligonucleotide
cacgacgccccggcugaga

SEQ ID NO: 1720348 - RNA, 19 nt, Artificial Sequence
  Description of Artificial Sequence: Synthetic oligonucleotide
caccgggccuggggugacc

SEQ ID NO: 1720349 - RNA, 19 nt, Artificial Sequence
  Description of Artificial Sequence: Synthetic oligonucleotide
cgggugacccauccccgac

SEQ ID NO: 1720350 - RNA, 19 nt, Artificial Sequence
  Description of Artificial Sequence: Synthetic oligonucleotide
cccguagagugaagucgga

SEQ ID NO: 1720351 - RNA, 19 nt, Artificial Sequence
  Description of Artificial Sequence: Synthetic oligonucleotide
ccguagagugaagucggaa

SEQ ID NO: 1720352 - RNA, 19 nt, Artificial Sequence
  Description of Artificial Sequence: Synthetic oligonucleotide
gcaccacgccacaguaaga

SEQ ID NO: 1720353 - RNA, 19 nt, Artificial Sequence
  Description of Artificial Sequence: Synthetic oligonucleotide
ccccuagguauacuccaua

SEQ ID NO: 1720354 - RNA, 19 nt, Artificial Sequence
  Description of Artificial Sequence: Synthetic oligonucleotide
cggcgaagagcagcgaaca

SEQ ID NO: 1720355 - RNA, 19 nt, Artificial Sequence
  Description of Artificial Sequence: Synthetic oligonucleotide
gggcucccacgacgccccg

SEQ ID NO: 1720356 - RNA, 19 nt, Artificial Sequence
  Description of Artificial Sequence: Synthetic oligonucleotide
guguagcuacaggcuggcu

SEQ ID NO: 1720357 - RNA, 19 nt, Artificial Sequence
  Description of Artificial Sequence: Synthetic oligonucleotide
cgauuucgcccgcacccca

SEQ ID NO: 1720358 - RNA, 19 nt, Artificial Sequence
  Description of Artificial Sequence: Synthetic oligonucleotide
ccguugcgcuucucgggca

SEQ ID NO: 1720359 - RNA, 19 nt, Artificial Sequence
  Description of Artificial Sequence: Synthetic oligonucleotide
gccacagaccucgcacucu

SEQ ID NO: 1720360 - RNA, 19 nt, Artificial Sequence
  Description of Artificial Sequence: Synthetic oligonucleotide
ggaguagcggggcccucuu

SEQ ID NO: 1720361 - RNA, 19 nt, Artificial Sequence
  Description of Artificial Sequence: Synthetic oligonucleotide
cccgaccggcgggaguagc

SEQ ID NO: 1720362 - RNA, 19 nt, Artificial Sequence
  Description of Artificial Sequence: Synthetic oligonucleotide
cgcaucccucgucuucguc

SEQ ID NO: 1720363 - RNA, 19 nt, Artificial Sequence
  Description of Artificial Sequence: Synthetic oligonucleotide
gcccgcaaaucgcgggcua

SEQ ID NO: 1720364 - RNA, 19 nt, Artificial Sequence
  Description of Artificial Sequence: Synthetic oligonucleotide
ccgagucaccgggccuggg

SEQ ID NO: 1720365 - RNA, 19 nt, Artificial Sequence
  Description of Artificial Sequence: Synthetic oligonucleotide
gcaggacgggugacccauc

SEQ ID NO: 1720366 - RNA, 19 nt, Artificial Sequence
  Description of Artificial Sequence: Synthetic oligonucleotide
cgacgccccggcugagaac

SEQ ID NO: 1720367 - RNA, 19 nt, Artificial Sequence
  Description of Artificial Sequence: Synthetic oligonucleotide
ccgggccuggggugaccug

SEQ ID NO: 1720368 - RNA, 19 nt, Artificial Sequence
  Description of Artificial Sequence: Synthetic oligonucleotide
gccgucgcgcggccacaga

SEQ ID NO: 1720369 - RNA, 19 nt, Artificial Sequence
  Description of Artificial Sequence: Synthetic oligonucleotide
ccaccgccgagucuggcuu

SEQ ID NO: 1720370 - RNA, 19 nt, Artificial Sequence
  Description of Artificial Sequence: Synthetic oligonucleotide
gcgggaguagcggggcccu

SEQ ID NO: 1720371 - RNA, 19 nt, Artificial Sequence
  Description of Artificial Sequence: Synthetic oligonucleotide
cggaauacacaggccgagu

SEQ ID NO: 1720372 - RNA, 19 nt, Artificial Sequence
  Description of Artificial Sequence: Synthetic oligonucleotide
ccgcaaaucgcgggcuacu

SEQ ID NO: 1720373 - RNA, 19 nt, Artificial Sequence
  Description of Artificial Sequence: Synthetic oligonucleotide
ccccgaccggcgggaguag

SEQ ID NO: 1720374 - RNA, 19 nt, Artificial Sequence
  Description of Artificial Sequence: Synthetic oligonucleotide
gcgggcuacuuggucgcau

SEQ ID NO: 1720375 - RNA, 19 nt, Artificial Sequence
  Description of Artificial Sequence: Synthetic oligonucleotide
cccacagaaccugguucau

SEQ ID NO: 1720376 - RNA, 19 nt, Artificial Sequence
  Description of Artificial Sequence: Synthetic oligonucleotide
gcgcggccacagaccucgc

SEQ ID NO: 1720377 - RNA, 19 nt, Artificial Sequence
  Description of Artificial Sequence: Synthetic oligonucleotide
cgcaaaucgcgggcuacuu

SEQ ID NO: 1720378 - RNA, 19 nt, Artificial Sequence
  Description of Artificial Sequence: Synthetic oligonucleotide
cgggaguagcggggcccuc

SEQ ID NO: 1720379 - RNA, 19 nt, Artificial Sequence
  Description of Artificial Sequence: Synthetic oligonucleotide
cgcccgcaaaucgcgggcu

SEQ ID NO: 1720380 - RNA, 19 nt, Artificial Sequence
  Description of Artificial Sequence: Synthetic oligonucleotide
cgcgggcuacuuggucgca

SEQ ID NO: 1720381 - RNA, 19 nt, Artificial Sequence
  Description of Artificial Sequence: Synthetic oligonucleotide
ccgcagucgccgggaagau

SEQ ID NO: 1720382 - RNA, 19 nt, Artificial Sequence
  Description of Artificial Sequence: Synthetic oligonucleotide
cggcgccgucgcgcggcca

SEQ ID NO: 1720383 - RNA, 19 nt, Artificial Sequence
  Description of Artificial Sequence: Synthetic oligonucleotide
uuuacgaagccccagaugc

SEQ ID NO: 1720384 - RNA, 19 nt, Artificial Sequence
  Description of Artificial Sequence: Synthetic oligonucleotide
aaauugaaaacgaagagca

SEQ ID NO: 1720385 - RNA, 19 nt, Artificial Sequence
  Description of Artificial Sequence: Synthetic oligonucleotide
ugaaauugaaaacgaagag

SEQ ID NO: 1720386 - RNA, 19 nt, Artificial Sequence
  Description of Artificial Sequence: Synthetic oligonucleotide
aaguguagcagaguaauac

SEQ ID NO: 1720387 - RNA, 19 nt, Artificial Sequence
  Description of Artificial Sequence: Synthetic oligonucleotide
uguaauuacaguugaaggu

SEQ ID NO: 1720388 - RNA, 19 nt, Artificial Sequence
  Description of Artificial Sequence: Synthetic oligonucleotide
aaaugacuguuucagaugu

SEQ ID NO: 1720389 - RNA, 19 nt, Artificial Sequence
  Description of Artificial Sequence: Synthetic oligonucleotide
aaagaugugaucgauguga

SEQ ID NO: 1720390 - RNA, 19 nt, Artificial Sequence
  Description of Artificial Sequence: Synthetic oligonucleotide
aucgaugugacccacagug

SEQ ID NO: 1720391 - RNA, 19 nt, Artificial Sequence
  Description of Artificial Sequence: Synthetic oligonucleotide
ugacacguuagaaagaaca

SEQ ID NO: 1720392 - RNA, 19 nt, Artificial Sequence
  Description of Artificial Sequence: Synthetic oligonucleotide
aguugaauauguuggugcc

SEQ ID NO: 1720393 - RNA, 19 nt, Artificial Sequence
  Description of Artificial Sequence: Synthetic oligonucleotide
cauaagagugcuuacaaac

SEQ ID NO: 1720394 - RNA, 19 nt, Artificial Sequence
  Description of Artificial Sequence: Synthetic oligonucleotide
auaccaaugagguacagcu

SEQ ID NO: 1720395 - RNA, 19 nt, Artificial Sequence
  Description of Artificial Sequence: Synthetic oligonucleotide
agguauuugaugcauuugg

SEQ ID NO: 1720396 - RNA, 19 nt, Artificial Sequence
  Description of Artificial Sequence: Synthetic oligonucleotide
auggcguaaccacagagcc

SEQ ID NO: 1720397 - RNA, 19 nt, Artificial Sequence
  Description of Artificial Sequence: Synthetic oligonucleotide
gaaauugaaaacgaagagc

SEQ ID NO: 1720398 - RNA, 19 nt, Artificial Sequence
  Description of Artificial Sequence: Synthetic oligonucleotide
auugaaaacgaagagcagg

SEQ ID NO: 1720399 - RNA, 19 nt, Artificial Sequence
  Description of Artificial Sequence: Synthetic oligonucleotide
agaaauauauacacaggcc

SEQ ID NO: 1720400 - RNA, 19 nt, Artificial Sequence
  Description of Artificial Sequence: Synthetic oligonucleotide
agauagagcaggcuggugg

SEQ ID NO: 1720401 - RNA, 19 nt, Artificial Sequence
  Description of Artificial Sequence: Synthetic oligonucleotide
aauaccaaugagguacagc

SEQ ID NO: 1720402 - RNA, 19 nt, Artificial Sequence
  Description of Artificial Sequence: Synthetic oligonucleotide
cauugaaggcauaagagug

SEQ ID NO: 1720403 - RNA, 19 nt, Artificial Sequence
  Description of Artificial Sequence: Synthetic oligonucleotide
uaagagugcuuacaaaccc

SEQ ID NO: 1720404 - RNA, 19 nt, Artificial Sequence
  Description of Artificial Sequence: Synthetic oligonucleotide
gucgcuaccgcucagaagc

SEQ ID NO: 1720405 - RNA, 19 nt, Artificial Sequence
  Description of Artificial Sequence: Synthetic oligonucleotide
accaaugagguacagcuuc

SEQ ID NO: 1720406 - RNA, 19 nt, Artificial Sequence
  Description of Artificial Sequence: Synthetic oligonucleotide
gcaaugagaauguagaugc

SEQ ID NO: 1720407 - RNA, 19 nt, Artificial Sequence
  Description of Artificial Sequence: Synthetic oligonucleotide
gaguugaauauguuggugc

SEQ ID NO: 1720408 - RNA, 19 nt, Artificial Sequence
  Description of Artificial Sequence: Synthetic oligonucleotide
aacaggaagcgcgagaguc

SEQ ID NO: 1720409 - RNA, 19 nt, Artificial Sequence
  Description of Artificial Sequence: Synthetic oligonucleotide
uugaucauagaacugcuuc

SEQ ID NO: 1720410 - RNA, 19 nt, Artificial Sequence
  Description of Artificial Sequence: Synthetic oligonucleotide
agcuacauagccucugggc

SEQ ID NO: 1720411 - RNA, 19 nt, Artificial Sequence
  Description of Artificial Sequence: Synthetic oligonucleotide
auaagagugcuuacaaacc

SEQ ID NO: 1720412 - RNA, 19 nt, Artificial Sequence
  Description of Artificial Sequence: Synthetic oligonucleotide
aagggcuugaucauagaac

SEQ ID NO: 1720413 - RNA, 19 nt, Artificial Sequence
  Description of Artificial Sequence: Synthetic oligonucleotide
caugcucagaaucaucucg

SEQ ID NO: 1720414 - RNA, 19 nt, Artificial Sequence
  Description of Artificial Sequence: Synthetic oligonucleotide
uucagauguaauuacaguu

SEQ ID NO: 1720415 - RNA, 19 nt, Artificial Sequence
  Description of Artificial Sequence: Synthetic oligonucleotide
guaauuacaguugaaggug

SEQ ID NO: 1720416 - RNA, 19 nt, Artificial Sequence
  Description of Artificial Sequence: Synthetic oligonucleotide
gucuccuaauuccagauag

SEQ ID NO: 1720417 - RNA, 19 nt, Artificial Sequence
  Description of Artificial Sequence: Synthetic oligonucleotide
auuggcaucgucauccacc

SEQ ID NO: 1720418 - RNA, 19 nt, Artificial Sequence
  Description of Artificial Sequence: Synthetic oligonucleotide
uugagcgucucauggaagg

SEQ ID NO: 1720419 - RNA, 19 nt, Artificial Sequence
  Description of Artificial Sequence: Synthetic oligonucleotide
caauccuccuucaucaagg

SEQ ID NO: 1720420 - RNA, 19 nt, Artificial Sequence
  Description of Artificial Sequence: Synthetic oligonucleotide
uaaaugacuguuucagaug

SEQ ID NO: 1720421 - RNA, 19 nt, Artificial Sequence
  Description of Artificial Sequence: Synthetic oligonucleotide
augaaauugaaaacgaaga

SEQ ID NO: 1720422 - RNA, 19 nt, Artificial Sequence
  Description of Artificial Sequence: Synthetic oligonucleotide
uguuucagauguaauuaca

SEQ ID NO: 1720423 - RNA, 19 nt, Artificial Sequence
  Description of Artificial Sequence: Synthetic oligonucleotide
ucaucaaggaguugaauau

SEQ ID NO: 1720424 - RNA, 19 nt, Artificial Sequence
  Description of Artificial Sequence: Synthetic oligonucleotide
aaggcauaagagugcuuac

SEQ ID NO: 1720425 - RNA, 19 nt, Artificial Sequence
  Description of Artificial Sequence: Synthetic oligonucleotide
ugaucgaugugacccacag

SEQ ID NO: 1720426 - RNA, 19 nt, Artificial Sequence
  Description of Artificial Sequence: Synthetic oligonucleotide
uuuggugcagcccuccacc

SEQ ID NO: 1720427 - RNA, 19 nt, Artificial Sequence
  Description of Artificial Sequence: Synthetic oligonucleotide
aagaacguccccagcaggc

SEQ ID NO: 1720428 - RNA, 19 nt, Artificial Sequence
  Description of Artificial Sequence: Synthetic oligonucleotide
uguagcagaguaauacaga

SEQ ID NO: 1720429 - RNA, 19 nt, Artificial Sequence
  Description of Artificial Sequence: Synthetic oligonucleotide
agggcuugaucauagaacu

SEQ ID NO: 1720430 - RNA, 19 nt, Artificial Sequence
  Description of Artificial Sequence: Synthetic oligonucleotide
ugaucauagaacugcuuca

SEQ ID NO: 1720431 - RNA, 19 nt, Artificial Sequence
  Description of Artificial Sequence: Synthetic oligonucleotide
auugaaggcauaagagugc

SEQ ID NO: 1720432 - RNA, 19 nt, Artificial Sequence
  Description of Artificial Sequence: Synthetic oligonucleotide
caaggaguugaauauguug

SEQ ID NO: 1720433 - RNA, 19 nt, Artificial Sequence
  Description of Artificial Sequence: Synthetic oligonucleotide
aaacccagcucuugaaaug

SEQ ID NO: 1720434 - RNA, 19 nt, Artificial Sequence
  Description of Artificial Sequence: Synthetic oligonucleotide
uaauuacaguugaagguga

SEQ ID NO: 1720435 - RNA, 19 nt, Artificial Sequence
  Description of Artificial Sequence: Synthetic oligonucleotide
uuucagauguaauuacagu

SEQ ID NO: 1720436 - RNA, 19 nt, Artificial Sequence
  Description of Artificial Sequence: Synthetic oligonucleotide
ucauggcguaaccacagag

SEQ ID NO: 1720437 - RNA, 19 nt, Artificial Sequence
  Description of Artificial Sequence: Synthetic oligonucleotide
uaaccacagagccacaccu

SEQ ID NO: 1720438 - RNA, 19 nt, Artificial Sequence
  Description of Artificial Sequence: Synthetic oligonucleotide
acauagaaggugcugggug

SEQ ID NO: 1720439 - RNA, 19 nt, Artificial Sequence
  Description of Artificial Sequence: Synthetic oligonucleotide
uccuaauuccagauagagc

SEQ ID NO: 1720440 - RNA, 19 nt, Artificial Sequence
  Description of Artificial Sequence: Synthetic oligonucleotide
uuuagcaugccugauuuuc

SEQ ID NO: 1720441 - RNA, 19 nt, Artificial Sequence
  Description of Artificial Sequence: Synthetic oligonucleotide
ucuagcucagcuacauagc

SEQ ID NO: 1720442 - RNA, 19 nt, Artificial Sequence
  Description of Artificial Sequence: Synthetic oligonucleotide
agcaugccugauuuucucc

SEQ ID NO: 1720443 - RNA, 19 nt, Artificial Sequence
  Description of Artificial Sequence: Synthetic oligonucleotide
uacaguugaaggugacacg

SEQ ID NO: 1720444 - RNA, 19 nt, Artificial Sequence
  Description of Artificial Sequence: Synthetic oligonucleotide
aacaggugcauugaaggca

SEQ ID NO: 1720445 - RNA, 19 nt, Artificial Sequence
  Description of Artificial Sequence: Synthetic oligonucleotide
aauuacaguugaaggugac

SEQ ID NO: 1720446 - RNA, 19 nt, Artificial Sequence
  Description of Artificial Sequence: Synthetic oligonucleotide
aagaugugaucgaugugac

SEQ ID NO: 1720447 - RNA, 19 nt, Artificial Sequence
  Description of Artificial Sequence: Synthetic oligonucleotide
cuccuuuauuaaaugacug

SEQ ID NO: 1720448 - RNA, 19 nt, Artificial Sequence
  Description of Artificial Sequence: Synthetic oligonucleotide
uguuccggaugccacagca

SEQ ID NO: 1720449 - RNA, 19 nt, Artificial Sequence
  Description of Artificial Sequence: Synthetic oligonucleotide
uuacaaacccagcucuuga

SEQ ID NO: 1720450 - RNA, 19 nt, Artificial Sequence
  Description of Artificial Sequence: Synthetic oligonucleotide
cuagcucagcuacauagcc

SEQ ID NO: 1720451 - RNA, 19 nt, Artificial Sequence
  Description of Artificial Sequence: Synthetic oligonucleotide
ucuuggauggccccauagc

SEQ ID NO: 1720452 - RNA, 19 nt, Artificial Sequence
  Description of Artificial Sequence: Synthetic oligonucleotide
cacagcaaugagaauguag

SEQ ID NO: 1720453 - RNA, 19 nt, Artificial Sequence
  Description of Artificial Sequence: Synthetic oligonucleotide
acacguuagaaagaacagg

SEQ ID NO: 1720454 - RNA, 19 nt, Artificial Sequence
  Description of Artificial Sequence: Synthetic oligonucleotide
aaacaggaucacaaggcag

SEQ ID NO: 1720455 - RNA, 19 nt, Artificial Sequence
  Description of Artificial Sequence: Synthetic oligonucleotide
accacgauggccgcaauac

SEQ ID NO: 1720456 - RNA, 19 nt, Artificial Sequence
  Description of Artificial Sequence: Synthetic oligonucleotide
augccugauuuucuccucc

SEQ ID NO: 1720457 - RNA, 19 nt, Artificial Sequence
  Description of Artificial Sequence: Synthetic oligonucleotide
cauggcguaaccacagagc

SEQ ID NO: 1720458 - RNA, 19 nt, Artificial Sequence
  Description of Artificial Sequence: Synthetic oligonucleotide
aguguagcagaguaauaca

SEQ ID NO: 1720459 - RNA, 19 nt, Artificial Sequence
  Description of Artificial Sequence: Synthetic oligonucleotide
gacacguuagaaagaacag

SEQ ID NO: 1720460 - RNA, 19 nt, Artificial Sequence
  Description of Artificial Sequence: Synthetic oligonucleotide
agaugcgggguagagaagg

SEQ ID NO: 1720461 - RNA, 19 nt, Artificial Sequence
  Description of Artificial Sequence: Synthetic oligonucleotide
ggcaaacaggaucacaagg

SEQ ID NO: 1720462 - RNA, 19 nt, Artificial Sequence
  Description of Artificial Sequence: Synthetic oligonucleotide
agaugugaucgaugugacc

SEQ ID NO: 1720463 - RNA, 19 nt, Artificial Sequence
  Description of Artificial Sequence: Synthetic oligonucleotide
gaacaggugcauugaaggc

SEQ ID NO: 1720464 - RNA, 19 nt, Artificial Sequence
  Description of Artificial Sequence: Synthetic oligonucleotide
uuagcaugccugauuuucu

SEQ ID NO: 1720465 - RNA, 19 nt, Artificial Sequence
  Description of Artificial Sequence: Synthetic oligonucleotide
agugcguuggagccacagc

SEQ ID NO: 1720466 - RNA, 19 nt, Artificial Sequence
  Description of Artificial Sequence: Synthetic oligonucleotide
guuagaaagaacaggugca

SEQ ID NO: 1720467 - RNA, 19 nt, Artificial Sequence
  Description of Artificial Sequence: Synthetic oligonucleotide
aagcgcgagagucgcuacc

SEQ ID NO: 1720468 - RNA, 19 nt, Artificial Sequence
  Description of Artificial Sequence: Synthetic oligonucleotide
aggccuaacaggaagcgcg

SEQ ID NO: 1720469 - RNA, 19 nt, Artificial Sequence
  Description of Artificial Sequence: Synthetic oligonucleotide
ucgaugugacccacagugg

SEQ ID NO: 1720470 - RNA, 19 nt, Artificial Sequence
  Description of Artificial Sequence: Synthetic oligonucleotide
uuuguuuacgaagccccag

SEQ ID NO: 1720471 - RNA, 19 nt, Artificial Sequence
  Description of Artificial Sequence: Synthetic oligonucleotide
ucgagagcgagaugcgggg

SEQ ID NO: 1720472 - RNA, 19 nt, Artificial Sequence
  Description of Artificial Sequence: Synthetic oligonucleotide
guagcagaguaauacagaa

SEQ ID NO: 1720473 - RNA, 19 nt, Artificial Sequence
  Description of Artificial Sequence: Synthetic oligonucleotide
acaguugaaggugacacgu

SEQ ID NO: 1720474 - RNA, 19 nt, Artificial Sequence
  Description of Artificial Sequence: Synthetic oligonucleotide
agugcggucagugcguugg

SEQ ID NO: 1720475 - RNA, 19 nt, Artificial Sequence
  Description of Artificial Sequence: Synthetic oligonucleotide
ggugucgagagcgagaugc

SEQ ID NO: 1720476 - RNA, 19 nt, Artificial Sequence
  Description of Artificial Sequence: Synthetic oligonucleotide
aguacacggagcuguuccg

SEQ ID NO: 1720477 - RNA, 19 nt, Artificial Sequence
  Description of Artificial Sequence: Synthetic oligonucleotide
cuguuucagauguaauuac

SEQ ID NO: 1720478 - RNA, 19 nt, Artificial Sequence
  Description of Artificial Sequence: Synthetic oligonucleotide
ugggcaagcagcuguggag

SEQ ID NO: 1720479 - RNA, 19 nt, Artificial Sequence
  Description of Artificial Sequence: Synthetic oligonucleotide
aaaacgaagagcagguauu

SEQ ID NO: 1720480 - RNA, 19 nt, Artificial Sequence
  Description of Artificial Sequence: Synthetic oligonucleotide
gaucuggucuuuguuuacg

SEQ ID NO: 1720481 - RNA, 19 nt, Artificial Sequence
  Description of Artificial Sequence: Synthetic oligonucleotide
cuccuaauuccagauagag

SEQ ID NO: 1720482 - RNA, 19 nt, Artificial Sequence
  Description of Artificial Sequence: Synthetic oligonucleotide
agcucaucgauuuucugau

SEQ ID NO: 1720483 - RNA, 19 nt, Artificial Sequence
  Description of Artificial Sequence: Synthetic oligonucleotide
ucaucgauuuucugauggc

SEQ ID NO: 1720484 - RNA, 19 nt, Artificial Sequence
  Description of Artificial Sequence: Synthetic oligonucleotide
caguacacggagcuguucc

SEQ ID NO: 1720485 - RNA, 19 nt, Artificial Sequence
  Description of Artificial Sequence: Synthetic oligonucleotide
gcaguugagcgucucaugg

SEQ ID NO: 1720486 - RNA, 19 nt, Artificial Sequence
  Description of Artificial Sequence: Synthetic oligonucleotide
aauccuccuucaucaagga

SEQ ID NO: 1720487 - RNA, 19 nt, Artificial Sequence
  Description of Artificial Sequence: Synthetic oligonucleotide
gaucauagaacugcuucac

SEQ ID NO: 1720488 - RNA, 19 nt, Artificial Sequence
  Description of Artificial Sequence: Synthetic oligonucleotide
guguagcagaguaauacag

SEQ ID NO: 1720489 - RNA, 19 nt, Artificial Sequence
  Description of Artificial Sequence: Synthetic oligonucleotide
ugggucauggcguaaccac

SEQ ID NO: 1720490 - RNA, 19 nt, Artificial Sequence
  Description of Artificial Sequence: Synthetic oligonucleotide
auccuuggcgaucuggucu

SEQ ID NO: 1720491 - RNA, 19 nt, Artificial Sequence
  Description of Artificial Sequence: Synthetic oligonucleotide
caucucgaagaucaugaug

SEQ ID NO: 1720492 - RNA, 19 nt, Artificial Sequence
  Description of Artificial Sequence: Synthetic oligonucleotide
uauguuggugccugaggga

SEQ ID NO: 1720493 - RNA, 19 nt, Artificial Sequence
  Description of Artificial Sequence: Synthetic oligonucleotide
gaaaacgaagagcagguau

SEQ ID NO: 1720494 - RNA, 19 nt, Artificial Sequence
  Description of Artificial Sequence: Synthetic oligonucleotide
cccagaaaagagcucaucg

SEQ ID NO: 1720495 - RNA, 19 nt, Artificial Sequence
  Description of Artificial Sequence: Synthetic oligonucleotide
gaaggcauaagagugcuua

SEQ ID NO: 1720496 - RNA, 19 nt, Artificial Sequence
  Description of Artificial Sequence: Synthetic oligonucleotide
uuagaaagaacaggugcau

SEQ ID NO: 1720497 - RNA, 19 nt, Artificial Sequence
  Description of Artificial Sequence: Synthetic oligonucleotide
cagagccacaccuaggauc

SEQ ID NO: 1720498 - RNA, 19 nt, Artificial Sequence
  Description of Artificial Sequence: Synthetic oligonucleotide
cuaccgcucagaagcaggg

SEQ ID NO: 1720499 - RNA, 19 nt, Artificial Sequence
  Description of Artificial Sequence: Synthetic oligonucleotide
gugcauugaaggcauaaga

SEQ ID NO: 1720500 - RNA, 19 nt, Artificial Sequence
  Description of Artificial Sequence: Synthetic oligonucleotide
uguuuacgaagccccagau

SEQ ID NO: 1720501 - RNA, 19 nt, Artificial Sequence
  Description of Artificial Sequence: Synthetic oligonucleotide
auggccgcaauaccaauga

SEQ ID NO: 1720502 - RNA, 19 nt, Artificial Sequence
  Description of Artificial Sequence: Synthetic oligonucleotide
ugagaauguagaugcccac

SEQ ID NO: 1720503 - RNA, 19 nt, Artificial Sequence
  Description of Artificial Sequence: Synthetic oligonucleotide
ucuccuaauuccagauaga

SEQ ID NO: 1720504 - RNA, 19 nt, Artificial Sequence
  Description of Artificial Sequence: Synthetic oligonucleotide
gaagcccacaaacaucauc

SEQ ID NO: 1720505 - RNA, 19 nt, Artificial Sequence
  Description of Artificial Sequence: Synthetic oligonucleotide
cuuggauggccccauagca

SEQ ID NO: 1720506 - RNA, 19 nt, Artificial Sequence
  Description of Artificial Sequence: Synthetic oligonucleotide
gaagggcuugaucauagaa

SEQ ID NO: 1720507 - RNA, 19 nt, Artificial Sequence
  Description of Artificial Sequence: Synthetic oligonucleotide
aguugaaggugacacguua

SEQ ID NO: 1720508 - RNA, 19 nt, Artificial Sequence
  Description of Artificial Sequence: Synthetic oligonucleotide
cacguuagaaagaacaggu

SEQ ID NO: 1720509 - RNA, 19 nt, Artificial Sequence
  Description of Artificial Sequence: Synthetic oligonucleotide
aagagugcuuacaaaccca

SEQ ID NO: 1720510 - RNA, 19 nt, Artificial Sequence
  Description of Artificial Sequence: Synthetic oligonucleotide
guuuacgaagccccagaug

SEQ ID NO: 1720511 - RNA, 19 nt, Artificial Sequence
  Description of Artificial Sequence: Synthetic oligonucleotide
aucaaggaguugaauaugu

SEQ ID NO: 1720512 - RNA, 19 nt, Artificial Sequence
  Description of Artificial Sequence: Synthetic oligonucleotide
guaaccacagagccacacc

SEQ ID NO: 1720513 - RNA, 19 nt, Artificial Sequence
  Description of Artificial Sequence: Synthetic oligonucleotide
ggcuugaucauagaacugc

SEQ ID NO: 1720514 - RNA, 19 nt, Artificial Sequence
  Description of Artificial Sequence: Synthetic oligonucleotide
uggucacucagggaggacc

SEQ ID NO: 1720515 - RNA, 19 nt, Artificial Sequence
  Description of Artificial Sequence: Synthetic oligonucleotide
cuuacaaacccagcucuug

SEQ ID NO: 1720516 - RNA, 19 nt, Artificial Sequence
  Description of Artificial Sequence: Synthetic oligonucleotide
aggcaaacaggaucacaag

SEQ ID NO: 1720517 - RNA, 19 nt, Artificial Sequence
  Description of Artificial Sequence: Synthetic oligonucleotide
ugggacucuuggauggccc

SEQ ID NO: 1720518 - RNA, 19 nt, Artificial Sequence
  Description of Artificial Sequence: Synthetic oligonucleotide
agagcagguauuugaugca

SEQ ID NO: 1720519 - RNA, 19 nt, Artificial Sequence
  Description of Artificial Sequence: Synthetic oligonucleotide
gguacagcuucccagaaaa

SEQ ID NO: 1720520 - RNA, 19 nt, Artificial Sequence
  Description of Artificial Sequence: Synthetic oligonucleotide
ugugggucauggcguaacc

SEQ ID NO: 1720521 - RNA, 19 nt, Artificial Sequence
  Description of Artificial Sequence: Synthetic oligonucleotide
agagccacaccuaggauca

SEQ ID NO: 1720522 - RNA, 19 nt, Artificial Sequence
  Description of Artificial Sequence: Synthetic oligonucleotide
agaagcaggggcgcgcucg

SEQ ID NO: 1720523 - RNA, 19 nt, Artificial Sequence
  Description of Artificial Sequence: Synthetic oligonucleotide
aagaucaugaugacagcua

SEQ ID NO: 1720524 - RNA, 19 nt, Artificial Sequence
  Description of Artificial Sequence: Synthetic oligonucleotide
aggagguuuggcucagcag

SEQ ID NO: 1720525 - RNA, 19 nt, Artificial Sequence
  Description of Artificial Sequence: Synthetic oligonucleotide
agagugcuuacaaacccag

SEQ ID NO: 1720526 - RNA, 19 nt, Artificial Sequence
  Description of Artificial Sequence: Synthetic oligonucleotide
uccggaugccacagcacag

SEQ ID NO: 1720527 - RNA, 19 nt, Artificial Sequence
  Description of Artificial Sequence: Synthetic oligonucleotide
uagcucagcuacauagccu

SEQ ID NO: 1720528 - RNA, 19 nt, Artificial Sequence
  Description of Artificial Sequence: Synthetic oligonucleotide
uccgggauuggcagguggc

SEQ ID NO: 1720529 - RNA, 19 nt, Artificial Sequence
  Description of Artificial Sequence: Synthetic oligonucleotide
aacgaagagcagguauuug

SEQ ID NO: 1720530 - RNA, 19 nt, Artificial Sequence
  Description of Artificial Sequence: Synthetic oligonucleotide
ucacaaggcaggugaagaa

SEQ ID NO: 1720531 - RNA, 19 nt, Artificial Sequence
  Description of Artificial Sequence: Synthetic oligonucleotide
cgcaauaccaaugagguac

SEQ ID NO: 1720532 - RNA, 19 nt, Artificial Sequence
  Description of Artificial Sequence: Synthetic oligonucleotide
auagcaccccaggaagccc

SEQ ID NO: 1720533 - RNA, 19 nt, Artificial Sequence
  Description of Artificial Sequence: Synthetic oligonucleotide
aaacgaagagcagguauuu

SEQ ID NO: 1720534 - RNA, 19 nt, Artificial Sequence
  Description of Artificial Sequence: Synthetic oligonucleotide
aucuggucuuuguuuacga

SEQ ID NO: 1720535 - RNA, 19 nt, Artificial Sequence
  Description of Artificial Sequence: Synthetic oligonucleotide
auuacaguugaaggugaca

SEQ ID NO: 1720536 - RNA, 19 nt, Artificial Sequence
  Description of Artificial Sequence: Synthetic oligonucleotide
ugacuguuucagauguaau

SEQ ID NO: 1720537 - RNA, 19 nt, Artificial Sequence
  Description of Artificial Sequence: Synthetic oligonucleotide
gauggccgcaauaccaaug

SEQ ID NO: 1720538 - RNA, 19 nt, Artificial Sequence
  Description of Artificial Sequence: Synthetic oligonucleotide
augacuguuucagauguaa

SEQ ID NO: 1720539 - RNA, 19 nt, Artificial Sequence
  Description of Artificial Sequence: Synthetic oligonucleotide
acaccuaggaucacaccuc

SEQ ID NO: 1720540 - RNA, 19 nt, Artificial Sequence
  Description of Artificial Sequence: Synthetic oligonucleotide
uaaguguagcagaguaaua

SEQ ID NO: 1720541 - RNA, 19 nt, Artificial Sequence
  Description of Artificial Sequence: Synthetic oligonucleotide
uuauuggcaucgucaucca

SEQ ID NO: 1720542 - RNA, 19 nt, Artificial Sequence
  Description of Artificial Sequence: Synthetic oligonucleotide
uacgaagccccagaugcca

SEQ ID NO: 1720543 - RNA, 19 nt, Artificial Sequence
  Description of Artificial Sequence: Synthetic oligonucleotide
gaagaucaugaugacagcu

SEQ ID NO: 1720544 - RNA, 19 nt, Artificial Sequence
  Description of Artificial Sequence: Synthetic oligonucleotide
ugaauauguuggugccuga

SEQ ID NO: 1720545 - RNA, 19 nt, Artificial Sequence
  Description of Artificial Sequence: Synthetic oligonucleotide
cucuuggauggccccauag

SEQ ID NO: 1720546 - RNA, 19 nt, Artificial Sequence
  Description of Artificial Sequence: Synthetic oligonucleotide
ggcauuauuggcaucguca

SEQ ID NO: 1720547 - RNA, 19 nt, Artificial Sequence
  Description of Artificial Sequence: Synthetic oligonucleotide
caucaaggaguugaauaug

SEQ ID NO: 1720548 - RNA, 19 nt, Artificial Sequence
  Description of Artificial Sequence: Synthetic oligonucleotide
ucucgaagaucaugaugac

SEQ ID NO: 1720549 - RNA, 19 nt, Artificial Sequence
  Description of Artificial Sequence: Synthetic oligonucleotide
aggaucacaccuccagcca

SEQ ID NO: 1720550 - RNA, 19 nt, Artificial Sequence
  Description of Artificial Sequence: Synthetic oligonucleotide
acaggaagcgcgagagucg

SEQ ID NO: 1720551 - RNA, 19 nt, Artificial Sequence
  Description of Artificial Sequence: Synthetic oligonucleotide
aggaaagggacaaggauua

SEQ ID NO: 1720552 - RNA, 19 nt, Artificial Sequence
  Description of Artificial Sequence: Synthetic oligonucleotide
agaguaauacagaaauaua

SEQ ID NO: 1720553 - RNA, 19 nt, Artificial Sequence
  Description of Artificial Sequence: Synthetic oligonucleotide
gaugcgggguagagaaggg

SEQ ID NO: 1720554 - RNA, 19 nt, Artificial Sequence
  Description of Artificial Sequence: Synthetic oligonucleotide
agcuucccagaaaagagcu

SEQ ID NO: 1720555 - RNA, 19 nt, Artificial Sequence
  Description of Artificial Sequence: Synthetic oligonucleotide
uggugccugagggacacag

SEQ ID NO: 1720556 - RNA, 19 nt, Artificial Sequence
  Description of Artificial Sequence: Synthetic oligonucleotide
cacaaggcaggugaagaac

SEQ ID NO: 1720557 - RNA, 19 nt, Artificial Sequence
  Description of Artificial Sequence: Synthetic oligonucleotide
ggccgcaauaccaaugagg

SEQ ID NO: 1720558 - RNA, 19 nt, Artificial Sequence
  Description of Artificial Sequence: Synthetic oligonucleotide
agcucuugaaauggggaca

SEQ ID NO: 1720559 - RNA, 19 nt, Artificial Sequence
  Description of Artificial Sequence: Synthetic oligonucleotide
gaggagguuuggcucagca

SEQ ID NO: 1720560 - RNA, 19 nt, Artificial Sequence
  Description of Artificial Sequence: Synthetic oligonucleotide
ggcguaaccacagagccac

SEQ ID NO: 1720561 - RNA, 19 nt, Artificial Sequence
  Description of Artificial Sequence: Synthetic oligonucleotide
gauagagcaggcugguggu

SEQ ID NO: 1720562 - RNA, 19 nt, Artificial Sequence
  Description of Artificial Sequence: Synthetic oligonucleotide
augcgggguagagaagggc

SEQ ID NO: 1720563 - RNA, 19 nt, Artificial Sequence
  Description of Artificial Sequence: Synthetic oligonucleotide
agucgcuaccgcucagaag

SEQ ID NO: 1720564 - RNA, 19 nt, Artificial Sequence
  Description of Artificial Sequence: Synthetic oligonucleotide
uagcaugccugauuuucuc

SEQ ID NO: 1720565 - RNA, 19 nt, Artificial Sequence
  Description of Artificial Sequence: Synthetic oligonucleotide
uggcguaaccacagagcca

SEQ ID NO: 1720566 - RNA, 19 nt, Artificial Sequence
  Description of Artificial Sequence: Synthetic oligonucleotide
gaccauggcucucuagcuc

SEQ ID NO: 1720567 - RNA, 19 nt, Artificial Sequence
  Description of Artificial Sequence: Synthetic oligonucleotide
cacaccuaggaucacaccu

SEQ ID NO: 1720568 - RNA, 19 nt, Artificial Sequence
  Description of Artificial Sequence: Synthetic oligonucleotide
gaucacaccuccagccagc

SEQ ID NO: 1720569 - RNA, 19 nt, Artificial Sequence
  Description of Artificial Sequence: Synthetic oligonucleotide
guacacggagcuguuccgg

SEQ ID NO: 1720570 - RNA, 19 nt, Artificial Sequence
  Description of Artificial Sequence: Synthetic oligonucleotide
aucgauuuucugauggcaa

SEQ ID NO: 1720571 - RNA, 19 nt, Artificial Sequence
  Description of Artificial Sequence: Synthetic oligonucleotide
uggggugucgagagcgaga

SEQ ID NO: 1720572 - RNA, 19 nt, Artificial Sequence
  Description of Artificial Sequence: Synthetic oligonucleotide
uggcauuauuggcaucguc

SEQ ID NO: 1720573 - RNA, 19 nt, Artificial Sequence
  Description of Artificial Sequence: Synthetic oligonucleotide
cuggguacgcaggacuggg

SEQ ID NO: 1720574 - RNA, 19 nt, Artificial Sequence
  Description of Artificial Sequence: Synthetic oligonucleotide
aggacuggguccgggauug

SEQ ID NO: 1720575 - RNA, 19 nt, Artificial Sequence
  Description of Artificial Sequence: Synthetic oligonucleotide
ggcauaagagugcuuacaa

SEQ ID NO: 1720576 - RNA, 19 nt, Artificial Sequence
  Description of Artificial Sequence: Synthetic oligonucleotide
acguuagaaagaacaggug

SEQ ID NO: 1720577 - RNA, 19 nt, Artificial Sequence
  Description of Artificial Sequence: Synthetic oligonucleotide
aggcauaagagugcuuaca

SEQ ID NO: 1720578 - RNA, 19 nt, Artificial Sequence
  Description of Artificial Sequence: Synthetic oligonucleotide
ugauggcaauccuccuuca

SEQ ID NO: 1720579 - RNA, 19 nt, Artificial Sequence
  Description of Artificial Sequence: Synthetic oligonucleotide
acagcaguugagcgucuca

SEQ ID NO: 1720580 - RNA, 19 nt, Artificial Sequence
  Description of Artificial Sequence: Synthetic oligonucleotide
ggaguugaauauguuggug

SEQ ID NO: 1720581 - RNA, 19 nt, Artificial Sequence
  Description of Artificial Sequence: Synthetic oligonucleotide
uucugauggcaauccuccu

SEQ ID NO: 1720582 - RNA, 19 nt, Artificial Sequence
  Description of Artificial Sequence: Synthetic oligonucleotide
gcagaaaaggcuaagugua

SEQ ID NO: 1720583 - RNA, 19 nt, Artificial Sequence
  Description of Artificial Sequence: Synthetic oligonucleotide
uggccgcaauaccaaugag

SEQ ID NO: 1720584 - RNA, 19 nt, Artificial Sequence
  Description of Artificial Sequence: Synthetic oligonucleotide
ugugaucgaugugacccac

SEQ ID NO: 1720585 - RNA, 19 nt, Artificial Sequence
  Description of Artificial Sequence: Synthetic oligonucleotide
guccgggauuggcaggugg

SEQ ID NO: 1720586 - RNA, 19 nt, Artificial Sequence
  Description of Artificial Sequence: Synthetic oligonucleotide
cuaaguguagcagaguaau

SEQ ID NO: 1720587 - RNA, 19 nt, Artificial Sequence
  Description of Artificial Sequence: Synthetic oligonucleotide
caucgauuuucugauggca

SEQ ID NO: 1720588 - RNA, 19 nt, Artificial Sequence
  Description of Artificial Sequence: Synthetic oligonucleotide
ggugcauugaaggcauaag

SEQ ID NO: 1720589 - RNA, 19 nt, Artificial Sequence
  Description of Artificial Sequence: Synthetic oligonucleotide
guugagcgucucauggaag

SEQ ID NO: 1720590 - RNA, 19 nt, Artificial Sequence
  Description of Artificial Sequence: Synthetic oligonucleotide
ggucuuuguuuacgaagcc

SEQ ID NO: 1720591 - RNA, 19 nt, Artificial Sequence
  Description of Artificial Sequence: Synthetic oligonucleotide
auagaaggugcugggugcu

SEQ ID NO: 1720592 - RNA, 19 nt, Artificial Sequence
  Description of Artificial Sequence: Synthetic oligonucleotide
uuuuagcaugccugauuuu

SEQ ID NO: 1720593 - RNA, 19 nt, Artificial Sequence
  Description of Artificial Sequence: Synthetic oligonucleotide
agcuguuccggaugccaca

SEQ ID NO: 1720594 - RNA, 19 nt, Artificial Sequence
  Description of Artificial Sequence: Synthetic oligonucleotide
ugcauuuggugcagcccuc

SEQ ID NO: 1720595 - RNA, 19 nt, Artificial Sequence
  Description of Artificial Sequence: Synthetic oligonucleotide
uaccaaugagguacagcuu

SEQ ID NO: 1720596 - RNA, 19 nt, Artificial Sequence
  Description of Artificial Sequence: Synthetic oligonucleotide
caggaagcgcgagagucgc

SEQ ID NO: 1720597 - RNA, 19 nt, Artificial Sequence
  Description of Artificial Sequence: Synthetic oligonucleotide
ugggugcuggucugucucc

SEQ ID NO: 1720598 - RNA, 19 nt, Artificial Sequence
  Description of Artificial Sequence: Synthetic oligonucleotide
uagaaagaacaggugcauu

SEQ ID NO: 1720599 - RNA, 19 nt, Artificial Sequence
  Description of Artificial Sequence: Synthetic oligonucleotide
gcauugaaggcauaagagu

SEQ ID NO: 1720600 - RNA, 19 nt, Artificial Sequence
  Description of Artificial Sequence: Synthetic oligonucleotide
ggugacacguuagaaagaa

SEQ ID NO: 1720601 - RNA, 19 nt, Artificial Sequence
  Description of Artificial Sequence: Synthetic oligonucleotide
ggucauggcguaaccacag

SEQ ID NO: 1720602 - RNA, 19 nt, Artificial Sequence
  Description of Artificial Sequence: Synthetic oligonucleotide
gagugcuuacaaacccagc

SEQ ID NO: 1720603 - RNA, 19 nt, Artificial Sequence
  Description of Artificial Sequence: Synthetic oligonucleotide
gagcgagcgggcuggguac

SEQ ID NO: 1720604 - RNA, 19 nt, Artificial Sequence
  Description of Artificial Sequence: Synthetic oligonucleotide
gaagcgcgagagucgcuac

SEQ ID NO: 1720605 - RNA, 19 nt, Artificial Sequence
  Description of Artificial Sequence: Synthetic oligonucleotide
uaccgcucagaagcagggg

SEQ ID NO: 1720606 - RNA, 19 nt, Artificial Sequence
  Description of Artificial Sequence: Synthetic oligonucleotide
acaggugcauugaaggcau

SEQ ID NO: 1720607 - RNA, 19 nt, Artificial Sequence
  Description of Artificial Sequence: Synthetic oligonucleotide
gaagcaggggcgcgcucgc

SEQ ID NO: 1720608 - RNA, 19 nt, Artificial Sequence
  Description of Artificial Sequence: Synthetic oligonucleotide
gcucuugaaauggggacag

SEQ ID NO: 1720609 - RNA, 19 nt, Artificial Sequence
  Description of Artificial Sequence: Synthetic oligonucleotide
guuggugccugagggacac

SEQ ID NO: 1720610 - RNA, 19 nt, Artificial Sequence
  Description of Artificial Sequence: Synthetic oligonucleotide
ugagcgucucauggaaggu

SEQ ID NO: 1720611 - RNA, 19 nt, Artificial Sequence
  Description of Artificial Sequence: Synthetic oligonucleotide
guggucagugcggucagug

SEQ ID NO: 1720612 - RNA, 19 nt, Artificial Sequence
  Description of Artificial Sequence: Synthetic oligonucleotide
cacggagcuguuccggaug

SEQ ID NO: 1720613 - RNA, 19 nt, Artificial Sequence
  Description of Artificial Sequence: Synthetic oligonucleotide
caggaaagggacaaggauu

SEQ ID NO: 1720614 - RNA, 19 nt, Artificial Sequence
  Description of Artificial Sequence: Synthetic oligonucleotide
ugcccacauagaaggugcu

SEQ ID NO: 1720615 - RNA, 19 nt, Artificial Sequence
  Description of Artificial Sequence: Synthetic oligonucleotide
agcgagaugcgggguagag

SEQ ID NO: 1720616 - RNA, 19 nt, Artificial Sequence
  Description of Artificial Sequence: Synthetic oligonucleotide
gcuaccgcucagaagcagg

SEQ ID NO: 1720617 - RNA, 19 nt, Artificial Sequence
  Description of Artificial Sequence: Synthetic oligonucleotide
gggaggaccucaguacacg

SEQ ID NO: 1720618 - RNA, 19 nt, Artificial Sequence
  Description of Artificial Sequence: Synthetic oligonucleotide
agguacagcuucccagaaa

SEQ ID NO: 1720619 - RNA, 19 nt, Artificial Sequence
  Description of Artificial Sequence: Synthetic oligonucleotide
ggcagggugagugaccaug

SEQ ID NO: 1720620 - RNA, 19 nt, Artificial Sequence
  Description of Artificial Sequence: Synthetic oligonucleotide
cucgaagaucaugaugaca

SEQ ID NO: 1720621 - RNA, 19 nt, Artificial Sequence
  Description of Artificial Sequence: Synthetic oligonucleotide
gucagugcguuggagccac

SEQ ID NO: 1720622 - RNA, 19 nt, Artificial Sequence
  Description of Artificial Sequence: Synthetic oligonucleotide
gugucgagagcgagaugcg

SEQ ID NO: 1720623 - RNA, 19 nt, Artificial Sequence
  Description of Artificial Sequence: Synthetic oligonucleotide
ucgcuaccgcucagaagca

SEQ ID NO: 1720624 - RNA, 19 nt, Artificial Sequence
  Description of Artificial Sequence: Synthetic oligonucleotide
ugcggucagugcguuggag

SEQ ID NO: 1720625 - RNA, 19 nt, Artificial Sequence
  Description of Artificial Sequence: Synthetic oligonucleotide
aggugcauugaaggcauaa

SEQ ID NO: 1720626 - RNA, 19 nt, Artificial Sequence
  Description of Artificial Sequence: Synthetic oligonucleotide
uggcgaucuggucuuuguu

SEQ ID NO: 1720627 - RNA, 19 nt, Artificial Sequence
  Description of Artificial Sequence: Synthetic oligonucleotide
gagcgucucauggaagguc

SEQ ID NO: 1720628 - RNA, 19 nt, Artificial Sequence
  Description of Artificial Sequence: Synthetic oligonucleotide
uaccacgauggccgcaaua

SEQ ID NO: 1720629 - RNA, 19 nt, Artificial Sequence
  Description of Artificial Sequence: Synthetic oligonucleotide
gagagucgcuaccgcucag

SEQ ID NO: 1720630 - RNA, 19 nt, Artificial Sequence
  Description of Artificial Sequence: Synthetic oligonucleotide
gcggucagugcguuggagc

SEQ ID NO: 1720631 - RNA, 19 nt, Artificial Sequence
  Description of Artificial Sequence: Synthetic oligonucleotide
uggguacgcaggacugggu

SEQ ID NO: 1720632 - RNA, 19 nt, Artificial Sequence
  Description of Artificial Sequence: Synthetic oligonucleotide
acauagccucugggcaagc

SEQ ID NO: 1720633 - RNA, 19 nt, Artificial Sequence
  Description of Artificial Sequence: Synthetic oligonucleotide
gagcuguuccggaugccac

SEQ ID NO: 1720634 - RNA, 19 nt, Artificial Sequence
  Description of Artificial Sequence: Synthetic oligonucleotide
caguugagcgucucaugga

SEQ ID NO: 1720635 - RNA, 19 nt, Artificial Sequence
  Description of Artificial Sequence: Synthetic oligonucleotide
cagcuguggaggagguuug

SEQ ID NO: 1720636 - RNA, 19 nt, Artificial Sequence
  Description of Artificial Sequence: Synthetic oligonucleotide
gagucgcuaccgcucagaa

SEQ ID NO: 1720637 - RNA, 19 nt, Artificial Sequence
  Description of Artificial Sequence: Synthetic oligonucleotide
ucaguacacggagcuguuc

SEQ ID NO: 1720638 - RNA, 19 nt, Artificial Sequence
  Description of Artificial Sequence: Synthetic oligonucleotide
agagucgcuaccgcucaga

SEQ ID NO: 1720639 - RNA, 19 nt, Artificial Sequence
  Description of Artificial Sequence: Synthetic oligonucleotide
cugugggucauggcguaac

SEQ ID NO: 1720640 - RNA, 19 nt, Artificial Sequence
  Description of Artificial Sequence: Synthetic oligonucleotide
gcacugggacucuuggaug

SEQ ID NO: 1720641 - RNA, 19 nt, Artificial Sequence
  Description of Artificial Sequence: Synthetic oligonucleotide
gagaugcgggguagagaag

SEQ ID NO: 1720642 - RNA, 19 nt, Artificial Sequence
  Description of Artificial Sequence: Synthetic oligonucleotide
gccgcaauaccaaugaggu

SEQ ID NO: 1720643 - RNA, 19 nt, Artificial Sequence
  Description of Artificial Sequence: Synthetic oligonucleotide
ccgcucagaagcaggggcg

SEQ ID NO: 1720644 - RNA, 19 nt, Artificial Sequence
  Description of Artificial Sequence: Synthetic oligonucleotide
gggacucuuggauggcccc

SEQ ID NO: 1720645 - RNA, 19 nt, Artificial Sequence
  Description of Artificial Sequence: Synthetic oligonucleotide
acacggagcuguuccggau

SEQ ID NO: 1720646 - RNA, 19 nt, Artificial Sequence
  Description of Artificial Sequence: Synthetic oligonucleotide
uggcgggccggggaacugg

SEQ ID NO: 1720647 - RNA, 19 nt, Artificial Sequence
  Description of Artificial Sequence: Synthetic oligonucleotide
uggccccauagcaccccag

SEQ ID NO: 1720648 - RNA, 19 nt, Artificial Sequence
  Description of Artificial Sequence: Synthetic oligonucleotide
cagugcguuggagccacag

SEQ ID NO: 1720649 - RNA, 19 nt, Artificial Sequence
  Description of Artificial Sequence: Synthetic oligonucleotide
aaccacagagccacaccua

SEQ ID NO: 1720650 - RNA, 19 nt, Artificial Sequence
  Description of Artificial Sequence: Synthetic oligonucleotide
cgagaugcgggguagagaa

SEQ ID NO: 1720651 - RNA, 19 nt, Artificial Sequence
  Description of Artificial Sequence: Synthetic oligonucleotide
aggugacacguuagaaaga

SEQ ID NO: 1720652 - RNA, 19 nt, Artificial Sequence
  Description of Artificial Sequence: Synthetic oligonucleotide
gguauuugaugcauuuggu

SEQ ID NO: 1720653 - RNA, 19 nt, Artificial Sequence
  Description of Artificial Sequence: Synthetic oligonucleotide
acgauggccgcaauaccaa

SEQ ID NO: 1720654 - RNA, 19 nt, Artificial Sequence
  Description of Artificial Sequence: Synthetic oligonucleotide
gauggcaauccuccuucau

SEQ ID NO: 1720655 - RNA, 19 nt, Artificial Sequence
  Description of Artificial Sequence: Synthetic oligonucleotide
gucauggcguaaccacaga

SEQ ID NO: 1720656 - RNA, 19 nt, Artificial Sequence
  Description of Artificial Sequence: Synthetic oligonucleotide
gugacacguuagaaagaac

SEQ ID NO: 1720657 - RNA, 19 nt, Artificial Sequence
  Description of Artificial Sequence: Synthetic oligonucleotide
agcgggcuggguacgcagg

SEQ ID NO: 1720658 - RNA, 19 nt, Artificial Sequence
  Description of Artificial Sequence: Synthetic oligonucleotide
acgaagccccagaugccag

SEQ ID NO: 1720659 - RNA, 19 nt, Artificial Sequence
  Description of Artificial Sequence: Synthetic oligonucleotide
gaucgaugugacccacagu

SEQ ID NO: 1720660 - RNA, 19 nt, Artificial Sequence
  Description of Artificial Sequence: Synthetic oligonucleotide
ccacagagccacaccuagg

SEQ ID NO: 1720661 - RNA, 19 nt, Artificial Sequence
  Description of Artificial Sequence: Synthetic oligonucleotide
uacgcaggacuggguccgg

SEQ ID NO: 1720662 - RNA, 19 nt, Artificial Sequence
  Description of Artificial Sequence: Synthetic oligonucleotide
gugggucauggcguaacca

SEQ ID NO: 1720663 - RNA, 19 nt, Artificial Sequence
  Description of Artificial Sequence: Synthetic oligonucleotide
agaugcccacauagaaggu

SEQ ID NO: 1720664 - RNA, 19 nt, Artificial Sequence
  Description of Artificial Sequence: Synthetic oligonucleotide
cagauagagcaggcuggug

SEQ ID NO: 1720665 - RNA, 19 nt, Artificial Sequence
  Description of Artificial Sequence: Synthetic oligonucleotide
accccaggaagcccacaaa

SEQ ID NO: 1720666 - RNA, 19 nt, Artificial Sequence
  Description of Artificial Sequence: Synthetic oligonucleotide
agccuguugaagggcuuga

SEQ ID NO: 1720667 - RNA, 19 nt, Artificial Sequence
  Description of Artificial Sequence: Synthetic oligonucleotide
ccuggagcgagcgggcugg

SEQ ID NO: 1720668 - RNA, 19 nt, Artificial Sequence
  Description of Artificial Sequence: Synthetic oligonucleotide
ucugugggucauggcguaa

SEQ ID NO: 1720669 - RNA, 19 nt, Artificial Sequence
  Description of Artificial Sequence: Synthetic oligonucleotide
caaggcaggugaagaacgu

SEQ ID NO: 1720670 - RNA, 19 nt, Artificial Sequence
  Description of Artificial Sequence: Synthetic oligonucleotide
cagcuaccacgauggccgc

SEQ ID NO: 1720671 - RNA, 19 nt, Artificial Sequence
  Description of Artificial Sequence: Synthetic oligonucleotide
auggcggcgcgcggccugc

SEQ ID NO: 1720672 - RNA, 19 nt, Artificial Sequence
  Description of Artificial Sequence: Synthetic oligonucleotide
agcagguauuugaugcauu

SEQ ID NO: 1720673 - RNA, 19 nt, Artificial Sequence
  Description of Artificial Sequence: Synthetic oligonucleotide
gcuaaguguagcagaguaa

SEQ ID NO: 1720674 - RNA, 19 nt, Artificial Sequence
  Description of Artificial Sequence: Synthetic oligonucleotide
gcaugccugauuuucuccu

SEQ ID NO: 1720675 - RNA, 19 nt, Artificial Sequence
  Description of Artificial Sequence: Synthetic oligonucleotide
ccuaacaggaagcgcgaga

SEQ ID NO: 1720676 - RNA, 19 nt, Artificial Sequence
  Description of Artificial Sequence: Synthetic oligonucleotide
ggagcgagcgggcugggua

SEQ ID NO: 1720677 - RNA, 19 nt, Artificial Sequence
  Description of Artificial Sequence: Synthetic oligonucleotide
ccacgauggccgcaauacc

SEQ ID NO: 1720678 - RNA, 19 nt, Artificial Sequence
  Description of Artificial Sequence: Synthetic oligonucleotide
ggaccucaguacacggagc

SEQ ID NO: 1720679 - RNA, 19 nt, Artificial Sequence
  Description of Artificial Sequence: Synthetic oligonucleotide
ucagugcggucagugcguu

SEQ ID NO: 1720680 - RNA, 19 nt, Artificial Sequence
  Description of Artificial Sequence: Synthetic oligonucleotide
gucugugggucauggcgua

SEQ ID NO: 1720681 - RNA, 19 nt, Artificial Sequence
  Description of Artificial Sequence: Synthetic oligonucleotide
ccacaccuaggaucacacc

SEQ ID NO: 1720682 - RNA, 19 nt, Artificial Sequence
  Description of Artificial Sequence: Synthetic oligonucleotide
agguggccucuggucacuc

SEQ ID NO: 1720683 - RNA, 19 nt, Artificial Sequence
  Description of Artificial Sequence: Synthetic oligonucleotide
ucagugcguuggagccaca

SEQ ID NO: 1720684 - RNA, 19 nt, Artificial Sequence
  Description of Artificial Sequence: Synthetic oligonucleotide
cacagcaguugagcgucuc

SEQ ID NO: 1720685 - RNA, 19 nt, Artificial Sequence
  Description of Artificial Sequence: Synthetic oligonucleotide
gugagugaccauggcucuc

SEQ ID NO: 1720686 - RNA, 19 nt, Artificial Sequence
  Description of Artificial Sequence: Synthetic oligonucleotide
gugaucgaugugacccaca

SEQ ID NO: 1720687 - RNA, 19 nt, Artificial Sequence
  Description of Artificial Sequence: Synthetic oligonucleotide
ggcgaucuggucuuuguuu

SEQ ID NO: 1720688 - RNA, 19 nt, Artificial Sequence
  Description of Artificial Sequence: Synthetic oligonucleotide
cccgagguggccucugguc

SEQ ID NO: 1720689 - RNA, 19 nt, Artificial Sequence
  Description of Artificial Sequence: Synthetic oligonucleotide
gcagaguaauacagaaaua

SEQ ID NO: 1720690 - RNA, 19 nt, Artificial Sequence
  Description of Artificial Sequence: Synthetic oligonucleotide
ggauggccccauagcaccc

SEQ ID NO: 1720691 - RNA, 19 nt, Artificial Sequence
  Description of Artificial Sequence: Synthetic oligonucleotide
gcgagagucgcuaccgcuc

SEQ ID NO: 1720692 - RNA, 19 nt, Artificial Sequence
  Description of Artificial Sequence: Synthetic oligonucleotide
ggaagcgcgagagucgcua

SEQ ID NO: 1720693 - RNA, 19 nt, Artificial Sequence
  Description of Artificial Sequence: Synthetic oligonucleotide
cagugcggucagugcguug

SEQ ID NO: 1720694 - RNA, 19 nt, Artificial Sequence
  Description of Artificial Sequence: Synthetic oligonucleotide
cacauagaaggugcugggu

SEQ ID NO: 1720695 - RNA, 19 nt, Artificial Sequence
  Description of Artificial Sequence: Synthetic oligonucleotide
aagcaggggcgcgcucgcu

SEQ ID NO: 1720696 - RNA, 19 nt, Artificial Sequence
  Description of Artificial Sequence: Synthetic oligonucleotide
gucagugcggucagugcgu

SEQ ID NO: 1720697 - RNA, 19 nt, Artificial Sequence
  Description of Artificial Sequence: Synthetic oligonucleotide
gcuugaucauagaacugcu

SEQ ID NO: 1720698 - RNA, 19 nt, Artificial Sequence
  Description of Artificial Sequence: Synthetic oligonucleotide
gccccagaugccagcagcc

SEQ ID NO: 1720699 - RNA, 19 nt, Artificial Sequence
  Description of Artificial Sequence: Synthetic oligonucleotide
ccgagguggccucugguca

SEQ ID NO: 1720700 - RNA, 19 nt, Artificial Sequence
  Description of Artificial Sequence: Synthetic oligonucleotide
gcuaccacgauggccgcaa

SEQ ID NO: 1720701 - RNA, 19 nt, Artificial Sequence
  Description of Artificial Sequence: Synthetic oligonucleotide
cgaucuggucuuuguuuac

SEQ ID NO: 1720702 - RNA, 19 nt, Artificial Sequence
  Description of Artificial Sequence: Synthetic oligonucleotide
agcuaccacgauggccgca

SEQ ID NO: 1720703 - RNA, 19 nt, Artificial Sequence
  Description of Artificial Sequence: Synthetic oligonucleotide
ccauggcucucuagcucag

SEQ ID NO: 1720704 - RNA, 19 nt, Artificial Sequence
  Description of Artificial Sequence: Synthetic oligonucleotide
ccgggauuggcagguggcc

SEQ ID NO: 1720705 - RNA, 19 nt, Artificial Sequence
  Description of Artificial Sequence: Synthetic oligonucleotide
gucacucagggaggaccuc

SEQ ID NO: 1720706 - RNA, 19 nt, Artificial Sequence
  Description of Artificial Sequence: Synthetic oligonucleotide
gagcgagaugcgggguaga

SEQ ID NO: 1720707 - RNA, 19 nt, Artificial Sequence
  Description of Artificial Sequence: Synthetic oligonucleotide
ggacucuuggauggcccca

SEQ ID NO: 1720708 - RNA, 19 nt, Artificial Sequence
  Description of Artificial Sequence: Synthetic oligonucleotide
ggccuaacaggaagcgcga

SEQ ID NO: 1720709 - RNA, 19 nt, Artificial Sequence
  Description of Artificial Sequence: Synthetic oligonucleotide
gguggccucuggucacuca

SEQ ID NO: 1720710 - RNA, 19 nt, Artificial Sequence
  Description of Artificial Sequence: Synthetic oligonucleotide
ggucagugcguuggagcca

SEQ ID NO: 1720711 - RNA, 19 nt, Artificial Sequence
  Description of Artificial Sequence: Synthetic oligonucleotide
ccucaguacacggagcugu

SEQ ID NO: 1720712 - RNA, 19 nt, Artificial Sequence
  Description of Artificial Sequence: Synthetic oligonucleotide
cgagguggccucuggucac

SEQ ID NO: 1720713 - RNA, 19 nt, Artificial Sequence
  Description of Artificial Sequence: Synthetic oligonucleotide
gugcggucagugcguugga

SEQ ID NO: 1720714 - RNA, 19 nt, Artificial Sequence
  Description of Artificial Sequence: Synthetic oligonucleotide
cagcaguugagcgucucau

SEQ ID NO: 1720715 - RNA, 19 nt, Artificial Sequence
  Description of Artificial Sequence: Synthetic oligonucleotide
gcguuggagccacagcagu

SEQ ID NO: 1720716 - RNA, 19 nt, Artificial Sequence
  Description of Artificial Sequence: Synthetic oligonucleotide
gcgcgagagucgcuaccgc

SEQ ID NO: 1720717 - RNA, 19 nt, Artificial Sequence
  Description of Artificial Sequence: Synthetic oligonucleotide
ggcgggccggggaacuggg

SEQ ID NO: 1720718 - RNA, 19 nt, Artificial Sequence
  Description of Artificial Sequence: Synthetic oligonucleotide
cucaguacacggagcuguu

SEQ ID NO: 1720719 - RNA, 19 nt, Artificial Sequence
  Description of Artificial Sequence: Synthetic oligonucleotide
caggggcgcuggcgggccg

SEQ ID NO: 1720720 - RNA, 19 nt, Artificial Sequence
  Description of Artificial Sequence: Synthetic oligonucleotide
caguugaaggugacacguu

SEQ ID NO: 1720721 - RNA, 19 nt, Artificial Sequence
  Description of Artificial Sequence: Synthetic oligonucleotide
gcgagaugcgggguagaga

SEQ ID NO: 1720722 - RNA, 19 nt, Artificial Sequence
  Description of Artificial Sequence: Synthetic oligonucleotide
aggaagcgcgagagucgcu

SEQ ID NO: 1720723 - RNA, 19 nt, Artificial Sequence
  Description of Artificial Sequence: Synthetic oligonucleotide
gagccacaccuaggaucac

SEQ ID NO: 1720724 - RNA, 19 nt, Artificial Sequence
  Description of Artificial Sequence: Synthetic oligonucleotide
gggugucgagagcgagaug

SEQ ID NO: 1720725 - RNA, 19 nt, Artificial Sequence
  Description of Artificial Sequence: Synthetic oligonucleotide
ggggugucgagagcgagau

SEQ ID NO: 1720726 - RNA, 19 nt, Artificial Sequence
  Description of Artificial Sequence: Synthetic oligonucleotide
gggguagagaagggcugga

SEQ ID NO: 1720727 - RNA, 19 nt, Artificial Sequence
  Description of Artificial Sequence: Synthetic oligonucleotide
gcggccugcggagcuuggg

SEQ ID NO: 1720728 - RNA, 19 nt, Artificial Sequence
  Description of Artificial Sequence: Synthetic oligonucleotide
cuggcgggccggggaacug

SEQ ID NO: 1720729 - RNA, 19 nt, Artificial Sequence
  Description of Artificial Sequence: Synthetic oligonucleotide
cgagagucgcuaccgcuca

SEQ ID NO: 1720730 - RNA, 19 nt, Artificial Sequence
  Description of Artificial Sequence: Synthetic oligonucleotide
cgucucauggaaggucuuc

SEQ ID NO: 1720731 - RNA, 19 nt, Artificial Sequence
  Description of Artificial Sequence: Synthetic oligonucleotide
ggugcuggucugucuccua

SEQ ID NO: 1720732 - RNA, 19 nt, Artificial Sequence
  Description of Artificial Sequence: Synthetic oligonucleotide
gcucucuagcucagcuaca

SEQ ID NO: 1720733 - RNA, 19 nt, Artificial Sequence
  Description of Artificial Sequence: Synthetic oligonucleotide
ggacuggguccgggauugg

SEQ ID NO: 1720734 - RNA, 19 nt, Artificial Sequence
  Description of Artificial Sequence: Synthetic oligonucleotide
ccggggaacuggggugucg

SEQ ID NO: 1720735 - RNA, 19 nt, Artificial Sequence
  Description of Artificial Sequence: Synthetic oligonucleotide
caggugcauugaaggcaua

SEQ ID NO: 1720736 - RNA, 19 nt, Artificial Sequence
  Description of Artificial Sequence: Synthetic oligonucleotide
ggguccgggauuggcaggu

SEQ ID NO: 1720737 - RNA, 19 nt, Artificial Sequence
  Description of Artificial Sequence: Synthetic oligonucleotide
ccgcaauaccaaugaggua

SEQ ID NO: 1720738 - RNA, 19 nt, Artificial Sequence
  Description of Artificial Sequence: Synthetic oligonucleotide
cgcuaccgcucagaagcag

SEQ ID NO: 1720739 - RNA, 19 nt, Artificial Sequence
  Description of Artificial Sequence: Synthetic oligonucleotide
gcgggccggggaacugggg

SEQ ID NO: 1720740 - RNA, 19 nt, Artificial Sequence
  Description of Artificial Sequence: Synthetic oligonucleotide
caccuccagccagccagaa

SEQ ID NO: 1720741 - RNA, 19 nt, Artificial Sequence
  Description of Artificial Sequence: Synthetic oligonucleotide
ggcgcgcggccugcggagc

SEQ ID NO: 1720742 - RNA, 19 nt, Artificial Sequence
  Description of Artificial Sequence: Synthetic oligonucleotide
ccccagaugccagcagcca

SEQ ID NO: 1720743 - RNA, 19 nt, Artificial Sequence
  Description of Artificial Sequence: Synthetic oligonucleotide
gcgcggccugcggagcuug

SEQ ID NO: 1720744 - RNA, 19 nt, Artificial Sequence
  Description of Artificial Sequence: Synthetic oligonucleotide
cgcgagagucgcuaccgcu

SEQ ID NO: 1720745 - RNA, 19 nt, Artificial Sequence
  Description of Artificial Sequence: Synthetic oligonucleotide
cuaccacgauggccgcaau

SEQ ID NO: 1720746 - RNA, 19 nt, Artificial Sequence
  Description of Artificial Sequence: Synthetic oligonucleotide
gcacagcaccaugcucaga

SEQ ID NO: 1720747 - RNA, 19 nt, Artificial Sequence
  Description of Artificial Sequence: Synthetic oligonucleotide
gcguaaccacagagccaca

SEQ ID NO: 1720748 - RNA, 19 nt, Artificial Sequence
  Description of Artificial Sequence: Synthetic oligonucleotide
gcuggcgggccggggaacu

SEQ ID NO: 1720749 - RNA, 19 nt, Artificial Sequence
  Description of Artificial Sequence: Synthetic oligonucleotide
cgauggccgcaauaccaau

SEQ ID NO: 1720750 - RNA, 19 nt, Artificial Sequence
  Description of Artificial Sequence: Synthetic oligonucleotide
ccacagcaguugagcgucu

SEQ ID NO: 1720751 - RNA, 19 nt, Artificial Sequence
  Description of Artificial Sequence: Synthetic oligonucleotide
gcgcgcggccugcggagcu

SEQ ID NO: 1720752 - RNA, 19 nt, Artificial Sequence
  Description of Artificial Sequence: Synthetic oligonucleotide
ccccgagguggccucuggu

SEQ ID NO: 1720753 - RNA, 19 nt, Artificial Sequence
  Description of Artificial Sequence: Synthetic oligonucleotide
cgcgcggccugcggagcuu

SEQ ID NO: 1720754 - RNA, 19 nt, Artificial Sequence
  Description of Artificial Sequence: Synthetic oligonucleotide
uauaauaucacaaaagcca

SEQ ID NO: 1720755 - RNA, 19 nt, Artificial Sequence
  Description of Artificial Sequence: Synthetic oligonucleotide
gauauaauaucacaaaagc

SEQ ID NO: 1720756 - RNA, 19 nt, Artificial Sequence
  Description of Artificial Sequence: Synthetic oligonucleotide
uaauacaucauaaaugcag

SEQ ID NO: 1720757 - RNA, 19 nt, Artificial Sequence
  Description of Artificial Sequence: Synthetic oligonucleotide
uauauugcaauacugcgag

SEQ ID NO: 1720758 - RNA, 19 nt, Artificial Sequence
  Description of Artificial Sequence: Synthetic oligonucleotide
aauaaacugccauugaugu

SEQ ID NO: 1720759 - RNA, 19 nt, Artificial Sequence
  Description of Artificial Sequence: Synthetic oligonucleotide
ugauauaauaucacaaaag

SEQ ID NO: 1720760 - RNA, 19 nt, Artificial Sequence
  Description of Artificial Sequence: Synthetic oligonucleotide
ugcuaauuguuaaugaggg

SEQ ID NO: 1720761 - RNA, 19 nt, Artificial Sequence
  Description of Artificial Sequence: Synthetic oligonucleotide
aauguuguuaagguaaaac

SEQ ID NO: 1720762 - RNA, 19 nt, Artificial Sequence
  Description of Artificial Sequence: Synthetic oligonucleotide
auacacguugccuugagcc

SEQ ID NO: 1720763 - RNA, 19 nt, Artificial Sequence
  Description of Artificial Sequence: Synthetic oligonucleotide
cucauguucaguuugauug

SEQ ID NO: 1720764 - RNA, 19 nt, Artificial Sequence
  Description of Artificial Sequence: Synthetic oligonucleotide
uuaaugaggguagaaagcg

SEQ ID NO: 1720765 - RNA, 19 nt, Artificial Sequence
  Description of Artificial Sequence: Synthetic oligonucleotide
auauaauaucacaaaagcc

SEQ ID NO: 1720766 - RNA, 19 nt, Artificial Sequence
  Description of Artificial Sequence: Synthetic oligonucleotide
uguuguuaagguaaaacac

SEQ ID NO: 1720767 - RNA, 19 nt, Artificial Sequence
  Description of Artificial Sequence: Synthetic oligonucleotide
ucaagacuaaagaaggugc

SEQ ID NO: 1720768 - RNA, 19 nt, Artificial Sequence
  Description of Artificial Sequence: Synthetic oligonucleotide
aacagaauguuguuaaggu

SEQ ID NO: 1720769 - RNA, 19 nt, Artificial Sequence
  Description of Artificial Sequence: Synthetic oligonucleotide
uaaaacacaggguacacac

SEQ ID NO: 1720770 - RNA, 19 nt, Artificial Sequence
  Description of Artificial Sequence: Synthetic oligonucleotide
agaaagcggauuccgaugc

SEQ ID NO: 1720771 - RNA, 19 nt, Artificial Sequence
  Description of Artificial Sequence: Synthetic oligonucleotide
aaaccgaucucccgggacc

SEQ ID NO: 1720772 - RNA, 19 nt, Artificial Sequence
  Description of Artificial Sequence: Synthetic oligonucleotide
ucauaaaugcagaaagggc

SEQ ID NO: 1720773 - RNA, 19 nt, Artificial Sequence
  Description of Artificial Sequence: Synthetic oligonucleotide
aauaaccuaauguagucau

SEQ ID NO: 1720774 - RNA, 19 nt, Artificial Sequence
  Description of Artificial Sequence: Synthetic oligonucleotide
uguucgugauauaauauca

SEQ ID NO: 1720775 - RNA, 19 nt, Artificial Sequence
  Description of Artificial Sequence: Synthetic oligonucleotide
agugaaaccgaucucccgg

SEQ ID NO: 1720776 - RNA, 19 nt, Artificial Sequence
  Description of Artificial Sequence: Synthetic oligonucleotide
gaaucgacuguccacaggc

SEQ ID NO: 1720777 - RNA, 19 nt, Artificial Sequence
  Description of Artificial Sequence: Synthetic oligonucleotide
uauugcaauacugcgagag

SEQ ID NO: 1720778 - RNA, 19 nt, Artificial Sequence
  Description of Artificial Sequence: Synthetic oligonucleotide
aauuagguucauuagucau

SEQ ID NO: 1720779 - RNA, 19 nt, Artificial Sequence
  Description of Artificial Sequence: Synthetic oligonucleotide
uguucaguuugauugaaac

SEQ ID NO: 1720780 - RNA, 19 nt, Artificial Sequence
  Description of Artificial Sequence: Synthetic oligonucleotide
uacaauaaaaguguucgug

SEQ ID NO: 1720781 - RNA, 19 nt, Artificial Sequence
  Description of Artificial Sequence: Synthetic oligonucleotide
auguuguuaagguaaaaca

SEQ ID NO: 1720782 - RNA, 19 nt, Artificial Sequence
  Description of Artificial Sequence: Synthetic oligonucleotide
aacaucgaaacaagaacac

SEQ ID NO: 1720783 - RNA, 19 nt, Artificial Sequence
  Description of Artificial Sequence: Synthetic oligonucleotide
uaguggauugcucugaagu

SEQ ID NO: 1720784 - RNA, 19 nt, Artificial Sequence
  Description of Artificial Sequence: Synthetic oligonucleotide
acaggguacacacucuggc

SEQ ID NO: 1720785 - RNA, 19 nt, Artificial Sequence
  Description of Artificial Sequence: Synthetic oligonucleotide
cugcuaauuguuaaugagg

SEQ ID NO: 1720786 - RNA, 19 nt, Artificial Sequence
  Description of Artificial Sequence: Synthetic oligonucleotide
uguuaagguaaaacacagg

SEQ ID NO: 1720787 - RNA, 19 nt, Artificial Sequence
  Description of Artificial Sequence: Synthetic oligonucleotide
cauugauguagugaaaccg

SEQ ID NO: 1720788 - RNA, 19 nt, Artificial Sequence
  Description of Artificial Sequence: Synthetic oligonucleotide
aaaaguguucgugauauaa

SEQ ID NO: 1720789 - RNA, 19 nt, Artificial Sequence
  Description of Artificial Sequence: Synthetic oligonucleotide
uccuuaauguucauauuca

SEQ ID NO: 1720790 - RNA, 19 nt, Artificial Sequence
  Description of Artificial Sequence: Synthetic oligonucleotide
uuaagguaaaacacagggu

SEQ ID NO: 1720791 - RNA, 19 nt, Artificial Sequence
  Description of Artificial Sequence: Synthetic oligonucleotide
caucauaaaugcagaaagg

SEQ ID NO: 1720792 - RNA, 19 nt, Artificial Sequence
  Description of Artificial Sequence: Synthetic oligonucleotide
aauacaucauaaaugcaga

SEQ ID NO: 1720793 - RNA, 19 nt, Artificial Sequence
  Description of Artificial Sequence: Synthetic oligonucleotide
uuacaacacuuaaauauac

SEQ ID NO: 1720794 - RNA, 19 nt, Artificial Sequence
  Description of Artificial Sequence: Synthetic oligonucleotide
aauacugcgagaggcggcg

SEQ ID NO: 1720795 - RNA, 19 nt, Artificial Sequence
  Description of Artificial Sequence: Synthetic oligonucleotide
gaauaaacugccauugaug

SEQ ID NO: 1720796 - RNA, 19 nt, Artificial Sequence
  Description of Artificial Sequence: Synthetic oligonucleotide
uucgugauauaauaucaca

SEQ ID NO: 1720797 - RNA, 19 nt, Artificial Sequence
  Description of Artificial Sequence: Synthetic oligonucleotide
caagacuaaagaaggugcg

SEQ ID NO: 1720798 - RNA, 19 nt, Artificial Sequence
  Description of Artificial Sequence: Synthetic oligonucleotide
ucgugauauaauaucacaa

SEQ ID NO: 1720799 - RNA, 19 nt, Artificial Sequence
  Description of Artificial Sequence: Synthetic oligonucleotide
ucccaaauaaccuaaugua

SEQ ID NO: 1720800 - RNA, 19 nt, Artificial Sequence
  Description of Artificial Sequence: Synthetic oligonucleotide
aaccuaauguagucauuuc

SEQ ID NO: 1720801 - RNA, 19 nt, Artificial Sequence
  Description of Artificial Sequence: Synthetic oligonucleotide
agaaggugcgaugacaagg

SEQ ID NO: 1720802 - RNA, 19 nt, Artificial Sequence
  Description of Artificial Sequence: Synthetic oligonucleotide
aauucagauggccauugau

SEQ ID NO: 1720803 - RNA, 19 nt, Artificial Sequence
  Description of Artificial Sequence: Synthetic oligonucleotide
aaguguucgugauauaaua

SEQ ID NO: 1720804 - RNA, 19 nt, Artificial Sequence
  Description of Artificial Sequence: Synthetic oligonucleotide
aggguacacacucuggccg

SEQ ID NO: 1720805 - RNA, 19 nt, Artificial Sequence
  Description of Artificial Sequence: Synthetic oligonucleotide
aaauaaccuaauguaguca

SEQ ID NO: 1720806 - RNA, 19 nt, Artificial Sequence
  Description of Artificial Sequence: Synthetic oligonucleotide
ugagaugauacacguugcc

SEQ ID NO: 1720807 - RNA, 19 nt, Artificial Sequence
  Description of Artificial Sequence: Synthetic oligonucleotide
caaauaaccuaauguaguc

SEQ ID NO: 1720808 - RNA, 19 nt, Artificial Sequence
  Description of Artificial Sequence: Synthetic oligonucleotide
acguaaaacacuugagaug

SEQ ID NO: 1720809 - RNA, 19 nt, Artificial Sequence
  Description of Artificial Sequence: Synthetic oligonucleotide
cacaugcauacauacauug

SEQ ID NO: 1720810 - RNA, 19 nt, Artificial Sequence
  Description of Artificial Sequence: Synthetic oligonucleotide
uaauuagguucauuaguca

SEQ ID NO: 1720811 - RNA, 19 nt, Artificial Sequence
  Description of Artificial Sequence: Synthetic oligonucleotide
gaugauacacguugccuug

SEQ ID NO: 1720812 - RNA, 19 nt, Artificial Sequence
  Description of Artificial Sequence: Synthetic oligonucleotide
gaaggugcgaugacaaggg

SEQ ID NO: 1720813 - RNA, 19 nt, Artificial Sequence
  Description of Artificial Sequence: Synthetic oligonucleotide
auugcaauacugcgagagg

SEQ ID NO: 1720814 - RNA, 19 nt, Artificial Sequence
  Description of Artificial Sequence: Synthetic oligonucleotide
ugguguaacaggacgugcc

SEQ ID NO: 1720815 - RNA, 19 nt, Artificial Sequence
  Description of Artificial Sequence: Synthetic oligonucleotide
caacaucgaaacaagaaca

SEQ ID NO: 1720816 - RNA, 19 nt, Artificial Sequence
  Description of Artificial Sequence: Synthetic oligonucleotide
aaugaggguagaaagcgga

SEQ ID NO: 1720817 - RNA, 19 nt, Artificial Sequence
  Description of Artificial Sequence: Synthetic oligonucleotide
ccuauauugcaauacugcg

SEQ ID NO: 1720818 - RNA, 19 nt, Artificial Sequence
  Description of Artificial Sequence: Synthetic oligonucleotide
uugagaugauacacguugc

SEQ ID NO: 1720819 - RNA, 19 nt, Artificial Sequence
  Description of Artificial Sequence: Synthetic oligonucleotide
aggaucaugccgcucuugg

SEQ ID NO: 1720820 - RNA, 19 nt, Artificial Sequence
  Description of Artificial Sequence: Synthetic oligonucleotide
accuaauguagucauuucu

SEQ ID NO: 1720821 - RNA, 19 nt, Artificial Sequence
  Description of Artificial Sequence: Synthetic oligonucleotide
auagagcagaaagcggucc

SEQ ID NO: 1720822 - RNA, 19 nt, Artificial Sequence
  Description of Artificial Sequence: Synthetic oligonucleotide
uugaaacacauuucauuac

SEQ ID NO: 1720823 - RNA, 19 nt, Artificial Sequence
  Description of Artificial Sequence: Synthetic oligonucleotide
acuaaagaaggugcgauga

SEQ ID NO: 1720824 - RNA, 19 nt, Artificial Sequence
  Description of Artificial Sequence: Synthetic oligonucleotide
gggucuaucguguucacag

SEQ ID NO: 1720825 - RNA, 19 nt, Artificial Sequence
  Description of Artificial Sequence: Synthetic oligonucleotide
guuguuaagguaaaacaca

SEQ ID NO: 1720826 - RNA, 19 nt, Artificial Sequence
  Description of Artificial Sequence: Synthetic oligonucleotide
uagagcacguaaaacacuu

SEQ ID NO: 1720827 - RNA, 19 nt, Artificial Sequence
  Description of Artificial Sequence: Synthetic oligonucleotide
aacgauguccuucggugga

SEQ ID NO: 1720828 - RNA, 19 nt, Artificial Sequence
  Description of Artificial Sequence: Synthetic oligonucleotide
aaagaaggugcgaugacaa

SEQ ID NO: 1720829 - RNA, 19 nt, Artificial Sequence
  Description of Artificial Sequence: Synthetic oligonucleotide
gagcacuugaggcagcggc

SEQ ID NO: 1720830 - RNA, 19 nt, Artificial Sequence
  Description of Artificial Sequence: Synthetic oligonucleotide
gacgaguucacucgcagga

SEQ ID NO: 1720831 - RNA, 19 nt, Artificial Sequence
  Description of Artificial Sequence: Synthetic oligonucleotide
cucaagacuaaagaaggug

SEQ ID NO: 1720832 - RNA, 19 nt, Artificial Sequence
  Description of Artificial Sequence: Synthetic oligonucleotide
auucagauggccauugaug

SEQ ID NO: 1720833 - RNA, 19 nt, Artificial Sequence
  Description of Artificial Sequence: Synthetic oligonucleotide
cuaauuguuaaugagggua

SEQ ID NO: 1720834 - RNA, 19 nt, Artificial Sequence
  Description of Artificial Sequence: Synthetic oligonucleotide
agaugauacacguugccuu

SEQ ID NO: 1720835 - RNA, 19 nt, Artificial Sequence
  Description of Artificial Sequence: Synthetic oligonucleotide
gacuaaagaaggugcgaug

SEQ ID NO: 1720836 - RNA, 19 nt, Artificial Sequence
  Description of Artificial Sequence: Synthetic oligonucleotide
accgcuauucccaaauaac

SEQ ID NO: 1720837 - RNA, 19 nt, Artificial Sequence
  Description of Artificial Sequence: Synthetic oligonucleotide
uagugaaaccgaucucccg

SEQ ID NO: 1720838 - RNA, 19 nt, Artificial Sequence
  Description of Artificial Sequence: Synthetic oligonucleotide
aaagcgguccgcaaucuug

SEQ ID NO: 1720839 - RNA, 19 nt, Artificial Sequence
  Description of Artificial Sequence: Synthetic oligonucleotide
aagcgguccgcaaucuugc

SEQ ID NO: 1720840 - RNA, 19 nt, Artificial Sequence
  Description of Artificial Sequence: Synthetic oligonucleotide
ugaauucagauggccauug

SEQ ID NO: 1720841 - RNA, 19 nt, Artificial Sequence
  Description of Artificial Sequence: Synthetic oligonucleotide
ugugggucuaucguguuca

SEQ ID NO: 1720842 - RNA, 19 nt, Artificial Sequence
  Description of Artificial Sequence: Synthetic oligonucleotide
uaacaggacgugccgaugu

SEQ ID NO: 1720843 - RNA, 19 nt, Artificial Sequence
  Description of Artificial Sequence: Synthetic oligonucleotide
uuuuaaccuuuugccaggg

SEQ ID NO: 1720844 - RNA, 19 nt, Artificial Sequence
  Description of Artificial Sequence: Synthetic oligonucleotide
gcaacaucgaaacaagaac

SEQ ID NO: 1720845 - RNA, 19 nt, Artificial Sequence
  Description of Artificial Sequence: Synthetic oligonucleotide
aacaggacgugccgauguc

SEQ ID NO: 1720846 - RNA, 19 nt, Artificial Sequence
  Description of Artificial Sequence: Synthetic oligonucleotide
gagcacguaaaacacuuga

SEQ ID NO: 1720847 - RNA, 19 nt, Artificial Sequence
  Description of Artificial Sequence: Synthetic oligonucleotide
gguggagcaacaucgaaac

SEQ ID NO: 1720848 - RNA, 19 nt, Artificial Sequence
  Description of Artificial Sequence: Synthetic oligonucleotide
uccccuauauugcaauacu

SEQ ID NO: 1720849 - RNA, 19 nt, Artificial Sequence
  Description of Artificial Sequence: Synthetic oligonucleotide
guguucgugauauaauauc

SEQ ID NO: 1720850 - RNA, 19 nt, Artificial Sequence
  Description of Artificial Sequence: Synthetic oligonucleotide
aagacuaaagaaggugcga

SEQ ID NO: 1720851 - RNA, 19 nt, Artificial Sequence
  Description of Artificial Sequence: Synthetic oligonucleotide
aaggugcgaugacaagggg

SEQ ID NO: 1720852 - RNA, 19 nt, Artificial Sequence
  Description of Artificial Sequence: Synthetic oligonucleotide
ucaugacgaguucacucgc

SEQ ID NO: 1720853 - RNA, 19 nt, Artificial Sequence
  Description of Artificial Sequence: Synthetic oligonucleotide
ugacgaguucacucgcagg

SEQ ID NO: 1720854 - RNA, 19 nt, Artificial Sequence
  Description of Artificial Sequence: Synthetic oligonucleotide
ugauacacguugccuugag

SEQ ID NO: 1720855 - RNA, 19 nt, Artificial Sequence
  Description of Artificial Sequence: Synthetic oligonucleotide
uucacucgcaggaaucgac

SEQ ID NO: 1720856 - RNA, 19 nt, Artificial Sequence
  Description of Artificial Sequence: Synthetic oligonucleotide
augacgaguucacucgcag

SEQ ID NO: 1720857 - RNA, 19 nt, Artificial Sequence
  Description of Artificial Sequence: Synthetic oligonucleotide
uugauguagugaaaccgau

SEQ ID NO: 1720858 - RNA, 19 nt, Artificial Sequence
  Description of Artificial Sequence: Synthetic oligonucleotide
cccaaauaaccuaauguag

SEQ ID NO: 1720859 - RNA, 19 nt, Artificial Sequence
  Description of Artificial Sequence: Synthetic oligonucleotide
aggugcgaugacaaggggc

SEQ ID NO: 1720860 - RNA, 19 nt, Artificial Sequence
  Description of Artificial Sequence: Synthetic oligonucleotide
ugcauacauacauuguauu

SEQ ID NO: 1720861 - RNA, 19 nt, Artificial Sequence
  Description of Artificial Sequence: Synthetic oligonucleotide
uccgaugcuucuuuuaauu

SEQ ID NO: 1720862 - RNA, 19 nt, Artificial Sequence
  Description of Artificial Sequence: Synthetic oligonucleotide
ucgcagaagcaggaaaggg

SEQ ID NO: 1720863 - RNA, 19 nt, Artificial Sequence
  Description of Artificial Sequence: Synthetic oligonucleotide
aauuguuaaugaggguaga

SEQ ID NO: 1720864 - RNA, 19 nt, Artificial Sequence
  Description of Artificial Sequence: Synthetic oligonucleotide
ugcgaugacaaggggcugg

SEQ ID NO: 1720865 - RNA, 19 nt, Artificial Sequence
  Description of Artificial Sequence: Synthetic oligonucleotide
ucuaucguguucacagaau

SEQ ID NO: 1720866 - RNA, 19 nt, Artificial Sequence
  Description of Artificial Sequence: Synthetic oligonucleotide
gugaaaccgaucucccggg

SEQ ID NO: 1720867 - RNA, 19 nt, Artificial Sequence
  Description of Artificial Sequence: Synthetic oligonucleotide
aaaguguucgugauauaau

SEQ ID NO: 1720868 - RNA, 19 nt, Artificial Sequence
  Description of Artificial Sequence: Synthetic oligonucleotide
cccuauauugcaauacugc

SEQ ID NO: 1720869 - RNA, 19 nt, Artificial Sequence
  Description of Artificial Sequence: Synthetic oligonucleotide
caacgauguccuucggugg

SEQ ID NO: 1720870 - RNA, 19 nt, Artificial Sequence
  Description of Artificial Sequence: Synthetic oligonucleotide
uggucuacugaagacacau

SEQ ID NO: 1720871 - RNA, 19 nt, Artificial Sequence
  Description of Artificial Sequence: Synthetic oligonucleotide
cucugcauuacucugaccu

SEQ ID NO: 1720872 - RNA, 19 nt, Artificial Sequence
  Description of Artificial Sequence: Synthetic oligonucleotide
uguaacaggacgugccgau

SEQ ID NO: 1720873 - RNA, 19 nt, Artificial Sequence
  Description of Artificial Sequence: Synthetic oligonucleotide
aaugcgagcggagccgcuc

SEQ ID NO: 1720874 - RNA, 19 nt, Artificial Sequence
  Description of Artificial Sequence: Synthetic oligonucleotide
uucucgcagaagcaggaaa

SEQ ID NO: 1720875 - RNA, 19 nt, Artificial Sequence
  Description of Artificial Sequence: Synthetic oligonucleotide
aggcgauuccggcagguag

SEQ ID NO: 1720876 - RNA, 19 nt, Artificial Sequence
  Description of Artificial Sequence: Synthetic oligonucleotide
uucuggucuggcaguagug

SEQ ID NO: 1720877 - RNA, 19 nt, Artificial Sequence
  Description of Artificial Sequence: Synthetic oligonucleotide
aaagagcaaacagaauguu

SEQ ID NO: 1720878 - RNA, 19 nt, Artificial Sequence
  Description of Artificial Sequence: Synthetic oligonucleotide
ugacuggucuacugaagac

SEQ ID NO: 1720879 - RNA, 19 nt, Artificial Sequence
  Description of Artificial Sequence: Synthetic oligonucleotide
caugcauacauacauugua

SEQ ID NO: 1720880 - RNA, 19 nt, Artificial Sequence
  Description of Artificial Sequence: Synthetic oligonucleotide
aagcggauuccgaugcuuc

SEQ ID NO: 1720881 - RNA, 19 nt, Artificial Sequence
  Description of Artificial Sequence: Synthetic oligonucleotide
ccugcuaauuguuaaugag

SEQ ID NO: 1720882 - RNA, 19 nt, Artificial Sequence
  Description of Artificial Sequence: Synthetic oligonucleotide
cauuagucauuucccuccc

SEQ ID NO: 1720883 - RNA, 19 nt, Artificial Sequence
  Description of Artificial Sequence: Synthetic oligonucleotide
aaggcacgcacucugcauu

SEQ ID NO: 1720884 - RNA, 19 nt, Artificial Sequence
  Description of Artificial Sequence: Synthetic oligonucleotide
gguguaacaggacgugccg

SEQ ID NO: 1720885 - RNA, 19 nt, Artificial Sequence
  Description of Artificial Sequence: Synthetic oligonucleotide
cuaaagaaggugcgaugac

SEQ ID NO: 1720886 - RNA, 19 nt, Artificial Sequence
  Description of Artificial Sequence: Synthetic oligonucleotide
cauuguauuuuacagaguu

SEQ ID NO: 1720887 - RNA, 19 nt, Artificial Sequence
  Description of Artificial Sequence: Synthetic oligonucleotide
ucacucgcaggaaucgacu

SEQ ID NO: 1720888 - RNA, 19 nt, Artificial Sequence
  Description of Artificial Sequence: Synthetic oligonucleotide
aaucgacuguccacaggcg

SEQ ID NO: 1720889 - RNA, 19 nt, Artificial Sequence
  Description of Artificial Sequence: Synthetic oligonucleotide
aucgaaacaagaacacuca

SEQ ID NO: 1720890 - RNA, 19 nt, Artificial Sequence
  Description of Artificial Sequence: Synthetic oligonucleotide
ugcaagcaccgcuauuccc

SEQ ID NO: 1720891 - RNA, 19 nt, Artificial Sequence
  Description of Artificial Sequence: Synthetic oligonucleotide
cagcgcuuccaagagaggg

SEQ ID NO: 1720892 - RNA, 19 nt, Artificial Sequence
  Description of Artificial Sequence: Synthetic oligonucleotide
gccgaugucgcccagcugc

SEQ ID NO: 1720893 - RNA, 19 nt, Artificial Sequence
  Description of Artificial Sequence: Synthetic oligonucleotide
uagcccagguucauggagu

SEQ ID NO: 1720894 - RNA, 19 nt, Artificial Sequence
  Description of Artificial Sequence: Synthetic oligonucleotide
gaaaccgaucucccgggac

SEQ ID NO: 1720895 - RNA, 19 nt, Artificial Sequence
  Description of Artificial Sequence: Synthetic oligonucleotide
ugagcccucaugacgaguu

SEQ ID NO: 1720896 - RNA, 19 nt, Artificial Sequence
  Description of Artificial Sequence: Synthetic oligonucleotide
caaagagcaaacagaaugu

SEQ ID NO: 1720897 - RNA, 19 nt, Artificial Sequence
  Description of Artificial Sequence: Synthetic oligonucleotide
agcacguaaaacacuugag

SEQ ID NO: 1720898 - RNA, 19 nt, Artificial Sequence
  Description of Artificial Sequence: Synthetic oligonucleotide
caauacugcgagaggcggc

SEQ ID NO: 1720899 - RNA, 19 nt, Artificial Sequence
  Description of Artificial Sequence: Synthetic oligonucleotide
agacuaaagaaggugcgau

SEQ ID NO: 1720900 - RNA, 19 nt, Artificial Sequence
  Description of Artificial Sequence: Synthetic oligonucleotide
aaaacacaggguacacacu

SEQ ID NO: 1720901 - RNA, 19 nt, Artificial Sequence
  Description of Artificial Sequence: Synthetic oligonucleotide
ucucccauuagcccagguu

SEQ ID NO: 1720902 - RNA, 19 nt, Artificial Sequence
  Description of Artificial Sequence: Synthetic oligonucleotide
guucgugauauaauaucac

SEQ ID NO: 1720903 - RNA, 19 nt, Artificial Sequence
  Description of Artificial Sequence: Synthetic oligonucleotide
ccgcuauucccaaauaacc

SEQ ID NO: 1720904 - RNA, 19 nt, Artificial Sequence
  Description of Artificial Sequence: Synthetic oligonucleotide
uugguguaacaggacgugc

SEQ ID NO: 1720905 - RNA, 19 nt, Artificial Sequence
  Description of Artificial Sequence: Synthetic oligonucleotide
ccaacgauguccuucggug

SEQ ID NO: 1720906 - RNA, 19 nt, Artificial Sequence
  Description of Artificial Sequence: Synthetic oligonucleotide
agauggccauugaugaggg

SEQ ID NO: 1720907 - RNA, 19 nt, Artificial Sequence
  Description of Artificial Sequence: Synthetic oligonucleotide
agcaccgcuauucccaaau

SEQ ID NO: 1720908 - RNA, 19 nt, Artificial Sequence
  Description of Artificial Sequence: Synthetic oligonucleotide
cacguaaaacacuugagau

SEQ ID NO: 1720909 - RNA, 19 nt, Artificial Sequence
  Description of Artificial Sequence: Synthetic oligonucleotide
acaucgaaacaagaacacu

SEQ ID NO: 1720910 - RNA, 19 nt, Artificial Sequence
  Description of Artificial Sequence: Synthetic oligonucleotide
gacggcgaaaugcgagcgg

SEQ ID NO: 1720911 - RNA, 19 nt, Artificial Sequence
  Description of Artificial Sequence: Synthetic oligonucleotide
agcggagccgcucggcuuc

SEQ ID NO: 1720912 - RNA, 19 nt, Artificial Sequence
  Description of Artificial Sequence: Synthetic oligonucleotide
uuuucgcuaccaucuccca

SEQ ID NO: 1720913 - RNA, 19 nt, Artificial Sequence
  Description of Artificial Sequence: Synthetic oligonucleotide
gcacguaaaacacuugaga

SEQ ID NO: 1720914 - RNA, 19 nt, Artificial Sequence
  Description of Artificial Sequence: Synthetic oligonucleotide
guaguggauugcucugaag

SEQ ID NO: 1720915 - RNA, 19 nt, Artificial Sequence
  Description of Artificial Sequence: Synthetic oligonucleotide
cuaucguguucacagaaua

SEQ ID NO: 1720916 - RNA, 19 nt, Artificial Sequence
  Description of Artificial Sequence: Synthetic oligonucleotide
acaggacgugccgaugucg

SEQ ID NO: 1720917 - RNA, 19 nt, Artificial Sequence
  Description of Artificial Sequence: Synthetic oligonucleotide
ugaaaccgaucucccggga

SEQ ID NO: 1720918 - RNA, 19 nt, Artificial Sequence
  Description of Artificial Sequence: Synthetic oligonucleotide
gaaaugcgagcggagccgc

SEQ ID NO: 1720919 - RNA, 19 nt, Artificial Sequence
  Description of Artificial Sequence: Synthetic oligonucleotide
ggagcaacaucgaaacaag

SEQ ID NO: 1720920 - RNA, 19 nt, Artificial Sequence
  Description of Artificial Sequence: Synthetic oligonucleotide
cagaaagcgguccgcaauc

SEQ ID NO: 1720921 - RNA, 19 nt, Artificial Sequence
  Description of Artificial Sequence: Synthetic oligonucleotide
cacgcacucugcauuacuc

SEQ ID NO: 1720922 - RNA, 19 nt, Artificial Sequence
  Description of Artificial Sequence: Synthetic oligonucleotide
aguaguggauugcucugaa

SEQ ID NO: 1720923 - RNA, 19 nt, Artificial Sequence
  Description of Artificial Sequence: Synthetic oligonucleotide
augcauacauacauuguau

SEQ ID NO: 1720924 - RNA, 19 nt, Artificial Sequence
  Description of Artificial Sequence: Synthetic oligonucleotide
acucgcaggaaucgacugu

SEQ ID NO: 1720925 - RNA, 19 nt, Artificial Sequence
  Description of Artificial Sequence: Synthetic oligonucleotide
ucugcauuacucugaccuu

SEQ ID NO: 1720926 - RNA, 19 nt, Artificial Sequence
  Description of Artificial Sequence: Synthetic oligonucleotide
agcgguccgcaaucuugcc

SEQ ID NO: 1720927 - RNA, 19 nt, Artificial Sequence
  Description of Artificial Sequence: Synthetic oligonucleotide
acgcacucugcauuacucu

SEQ ID NO: 1720928 - RNA, 19 nt, Artificial Sequence
  Description of Artificial Sequence: Synthetic oligonucleotide
ucuuuuaauuagguucauu

SEQ ID NO: 1720929 - RNA, 19 nt, Artificial Sequence
  Description of Artificial Sequence: Synthetic oligonucleotide
uacugcgagaggcggcggc

SEQ ID NO: 1720930 - RNA, 19 nt, Artificial Sequence
  Description of Artificial Sequence: Synthetic oligonucleotide
aaagcggauuccgaugcuu

SEQ ID NO: 1720931 - RNA, 19 nt, Artificial Sequence
  Description of Artificial Sequence: Synthetic oligonucleotide
cugcccggauucaccaugg

SEQ ID NO: 1720932 - RNA, 19 nt, Artificial Sequence
  Description of Artificial Sequence: Synthetic oligonucleotide
cacucgcaggaaucgacug

SEQ ID NO: 1720933 - RNA, 19 nt, Artificial Sequence
  Description of Artificial Sequence: Synthetic oligonucleotide
aggugacuggucuacugaa

SEQ ID NO: 1720934 - RNA, 19 nt, Artificial Sequence
  Description of Artificial Sequence: Synthetic oligonucleotide
gaauucagauggccauuga

SEQ ID NO: 1720935 - RNA, 19 nt, Artificial Sequence
  Description of Artificial Sequence: Synthetic oligonucleotide
ggaaucgacuguccacagg

SEQ ID NO: 1720936 - RNA, 19 nt, Artificial Sequence
  Description of Artificial Sequence: Synthetic oligonucleotide
augcgagcggagccgcucg

SEQ ID NO: 1720937 - RNA, 19 nt, Artificial Sequence
  Description of Artificial Sequence: Synthetic oligonucleotide
ggguagaaagcggauuccg

SEQ ID NO: 1720938 - RNA, 19 nt, Artificial Sequence
  Description of Artificial Sequence: Synthetic oligonucleotide
ggcauagagcagaaagcgg

SEQ ID NO: 1720939 - RNA, 19 nt, Artificial Sequence
  Description of Artificial Sequence: Synthetic oligonucleotide
uccuuuucgcuaccaucuc

SEQ ID NO: 1720940 - RNA, 19 nt, Artificial Sequence
  Description of Artificial Sequence: Synthetic oligonucleotide
auauugcaauacugcgaga

SEQ ID NO: 1720941 - RNA, 19 nt, Artificial Sequence
  Description of Artificial Sequence: Synthetic oligonucleotide
agcggauuccgaugcuucu

SEQ ID NO: 1720942 - RNA, 19 nt, Artificial Sequence
  Description of Artificial Sequence: Synthetic oligonucleotide
ucgcaggaaucgacugucc

SEQ ID NO: 1720943 - RNA, 19 nt, Artificial Sequence
  Description of Artificial Sequence: Synthetic oligonucleotide
cucgcaggaaucgacuguc

SEQ ID NO: 1720944 - RNA, 19 nt, Artificial Sequence
  Description of Artificial Sequence: Synthetic oligonucleotide
gaguucacucgcaggaauc

SEQ ID NO: 1720945 - RNA, 19 nt, Artificial Sequence
  Description of Artificial Sequence: Synthetic oligonucleotide
ggguacacacucuggccgg

SEQ ID NO: 1720946 - RNA, 19 nt, Artificial Sequence
  Description of Artificial Sequence: Synthetic oligonucleotide
gagaugauacacguugccu

SEQ ID NO: 1720947 - RNA, 19 nt, Artificial Sequence
  Description of Artificial Sequence: Synthetic oligonucleotide
uaaaaguguucgugauaua

SEQ ID NO: 1720948 - RNA, 19 nt, Artificial Sequence
  Description of Artificial Sequence: Synthetic oligonucleotide
gcgaaaugcgagcggagcc

SEQ ID NO: 1720949 - RNA, 19 nt, Artificial Sequence
  Description of Artificial Sequence: Synthetic oligonucleotide
caggaaucgacuguccaca

SEQ ID NO: 1720950 - RNA, 19 nt, Artificial Sequence
  Description of Artificial Sequence: Synthetic oligonucleotide
ccucaugacgaguucacuc

SEQ ID NO: 1720951 - RNA, 19 nt, Artificial Sequence
  Description of Artificial Sequence: Synthetic oligonucleotide
aguucucgcagaagcagga

SEQ ID NO: 1720952 - RNA, 19 nt, Artificial Sequence
  Description of Artificial Sequence: Synthetic oligonucleotide
ucucccgggaccaggcgau

SEQ ID NO: 1720953 - RNA, 19 nt, Artificial Sequence
  Description of Artificial Sequence: Synthetic oligonucleotide
acugcgagaggcggcggcg

SEQ ID NO: 1720954 - RNA, 19 nt, Artificial Sequence
  Description of Artificial Sequence: Synthetic oligonucleotide
acacguugccuugagcccu

SEQ ID NO: 1720955 - RNA, 19 nt, Artificial Sequence
  Description of Artificial Sequence: Synthetic oligonucleotide
gguaaaacacaggguacac

SEQ ID NO: 1720956 - RNA, 19 nt, Artificial Sequence
  Description of Artificial Sequence: Synthetic oligonucleotide
cuugagcccucaugacgag

SEQ ID NO: 1720957 - RNA, 19 nt, Artificial Sequence
  Description of Artificial Sequence: Synthetic oligonucleotide
uguccuucgguggaucuuu

SEQ ID NO: 1720958 - RNA, 19 nt, Artificial Sequence
  Description of Artificial Sequence: Synthetic oligonucleotide
gcaggaaucgacuguccac

SEQ ID NO: 1720959 - RNA, 19 nt, Artificial Sequence
  Description of Artificial Sequence: Synthetic oligonucleotide
gcaguaguggauugcucug

SEQ ID NO: 1720960 - RNA, 19 nt, Artificial Sequence
  Description of Artificial Sequence: Synthetic oligonucleotide
ucaccggggcggcugcgag

SEQ ID NO: 1720961 - RNA, 19 nt, Artificial Sequence
  Description of Artificial Sequence: Synthetic oligonucleotide
ucuccccuauauugcaaua

SEQ ID NO: 1720962 - RNA, 19 nt, Artificial Sequence
  Description of Artificial Sequence: Synthetic oligonucleotide
ugccuugagcccucaugac

SEQ ID NO: 1720963 - RNA, 19 nt, Artificial Sequence
  Description of Artificial Sequence: Synthetic oligonucleotide
ccaaauaaccuaauguagu

SEQ ID NO: 1720964 - RNA, 19 nt, Artificial Sequence
  Description of Artificial Sequence: Synthetic oligonucleotide
cagcagaccuucuggucug

SEQ ID NO: 1720965 - RNA, 19 nt, Artificial Sequence
  Description of Artificial Sequence: Synthetic oligonucleotide
acggcgaaaugcgagcgga

SEQ ID NO: 1720966 - RNA, 19 nt, Artificial Sequence
  Description of Artificial Sequence: Synthetic oligonucleotide
uggcaguaguggauugcuc

SEQ ID NO: 1720967 - RNA, 19 nt, Artificial Sequence
  Description of Artificial Sequence: Synthetic oligonucleotide
caugacgaguucacucgca

SEQ ID NO: 1720968 - RNA, 19 nt, Artificial Sequence
  Description of Artificial Sequence: Synthetic oligonucleotide
gagggagccggccgucacc

SEQ ID NO: 1720969 - RNA, 19 nt, Artificial Sequence
  Description of Artificial Sequence: Synthetic oligonucleotide
ccuuuucgcuaccaucucc

SEQ ID NO: 1720970 - RNA, 19 nt, Artificial Sequence
  Description of Artificial Sequence: Synthetic oligonucleotide
agucauuucugcagaggau

SEQ ID NO: 1720971 - RNA, 19 nt, Artificial Sequence
  Description of Artificial Sequence: Synthetic oligonucleotide
guaacaggacgugccgaug

SEQ ID NO: 1720972 - RNA, 19 nt, Artificial Sequence
  Description of Artificial Sequence: Synthetic oligonucleotide
gagggaguucucgcagaag

SEQ ID NO: 1720973 - RNA, 19 nt, Artificial Sequence
  Description of Artificial Sequence: Synthetic oligonucleotide
agagcacguaaaacacuug

SEQ ID NO: 1720974 - RNA, 19 nt, Artificial Sequence
  Description of Artificial Sequence: Synthetic oligonucleotide
ugacaaggggcuggcuaca

SEQ ID NO: 1720975 - RNA, 19 nt, Artificial Sequence
  Description of Artificial Sequence: Synthetic oligonucleotide
caccgcuauucccaaauaa

SEQ ID NO: 1720976 - RNA, 19 nt, Artificial Sequence
  Description of Artificial Sequence: Synthetic oligonucleotide
caguuugauugaaacacau

SEQ ID NO: 1720977 - RNA, 19 nt, Artificial Sequence
  Description of Artificial Sequence: Synthetic oligonucleotide
ucgcuaccaucucccauua

SEQ ID NO: 1720978 - RNA, 19 nt, Artificial Sequence
  Description of Artificial Sequence: Synthetic oligonucleotide
cagaggaucaugccgcucu

SEQ ID NO: 1720979 - RNA, 19 nt, Artificial Sequence
  Description of Artificial Sequence: Synthetic oligonucleotide
gcaagcaccgcuauuccca

SEQ ID NO: 1720980 - RNA, 19 nt, Artificial Sequence
  Description of Artificial Sequence: Synthetic oligonucleotide
gggaccaggcgauuccggc

SEQ ID NO: 1720981 - RNA, 19 nt, Artificial Sequence
  Description of Artificial Sequence: Synthetic oligonucleotide
agcgcuuccaagagaggga

SEQ ID NO: 1720982 - RNA, 19 nt, Artificial Sequence
  Description of Artificial Sequence: Synthetic oligonucleotide
cacacucuggccggugccc

SEQ ID NO: 1720983 - RNA, 19 nt, Artificial Sequence
  Description of Artificial Sequence: Synthetic oligonucleotide
agcccucaugacgaguuca

SEQ ID NO: 1720984 - RNA, 19 nt, Artificial Sequence
  Description of Artificial Sequence: Synthetic oligonucleotide
caugggauccaccugugau

SEQ ID NO: 1720985 - RNA, 19 nt, Artificial Sequence
  Description of Artificial Sequence: Synthetic oligonucleotide
cugugggucuaucguguuc

SEQ ID NO: 1720986 - RNA, 19 nt, Artificial Sequence
  Description of Artificial Sequence: Synthetic oligonucleotide
ggcggcgacggcgaaaugc

SEQ ID NO: 1720987 - RNA, 19 nt, Artificial Sequence
  Description of Artificial Sequence: Synthetic oligonucleotide
gacgugccgaugucgccca

SEQ ID NO: 1720988 - RNA, 19 nt, Artificial Sequence
  Description of Artificial Sequence: Synthetic oligonucleotide
ggcgaaaugcgagcggagc

SEQ ID NO: 1720989 - RNA, 19 nt, Artificial Sequence
  Description of Artificial Sequence: Synthetic oligonucleotide
uagguucauuagucauuuc

SEQ ID NO: 1720990 - RNA, 19 nt, Artificial Sequence
  Description of Artificial Sequence: Synthetic oligonucleotide
cccggauucaccauggucu

SEQ ID NO: 1720991 - RNA, 19 nt, Artificial Sequence
  Description of Artificial Sequence: Synthetic oligonucleotide
cgguccgcaaucuugcccc

SEQ ID NO: 1720992 - RNA, 19 nt, Artificial Sequence
  Description of Artificial Sequence: Synthetic oligonucleotide
uugagcccucaugacgagu

SEQ ID NO: 1720993 - RNA, 19 nt, Artificial Sequence
  Description of Artificial Sequence: Synthetic oligonucleotide
gcggcgacggcgaaaugcg

SEQ ID NO: 1720994 - RNA, 19 nt, Artificial Sequence
  Description of Artificial Sequence: Synthetic oligonucleotide
ggcgacggcgaaaugcgag

SEQ ID NO: 1720995 - RNA, 19 nt, Artificial Sequence
  Description of Artificial Sequence: Synthetic oligonucleotide
gccggugcccugcuaauug

SEQ ID NO: 1720996 - RNA, 19 nt, Artificial Sequence
  Description of Artificial Sequence: Synthetic oligonucleotide
auaaccuaauguagucauu

SEQ ID NO: 1720997 - RNA, 19 nt, Artificial Sequence
  Description of Artificial Sequence: Synthetic oligonucleotide
augccgcucuugguguaac

SEQ ID NO: 1720998 - RNA, 19 nt, Artificial Sequence
  Description of Artificial Sequence: Synthetic oligonucleotide
gcauacauacauuguauuu

SEQ ID NO: 1720999 - RNA, 19 nt, Artificial Sequence
  Description of Artificial Sequence: Synthetic oligonucleotide
ugccgcucuugguguaaca

SEQ ID NO: 1721000 - RNA, 19 nt, Artificial Sequence
  Description of Artificial Sequence: Synthetic oligonucleotide
gcgacggcgaaaugcgagc

SEQ ID NO: 1721001 - RNA, 19 nt, Artificial Sequence
  Description of Artificial Sequence: Synthetic oligonucleotide
guguaacaggacgugccga

SEQ ID NO: 1721002 - RNA, 19 nt, Artificial Sequence
  Description of Artificial Sequence: Synthetic oligonucleotide
ugccgaugucgcccagcug

SEQ ID NO: 1721003 - RNA, 19 nt, Artificial Sequence
  Description of Artificial Sequence: Synthetic oligonucleotide
cgaaaugcgagcggagccg

SEQ ID NO: 1721004 - RNA, 19 nt, Artificial Sequence
  Description of Artificial Sequence: Synthetic oligonucleotide
guggagcaacaucgaaaca

SEQ ID NO: 1721005 - RNA, 19 nt, Artificial Sequence
  Description of Artificial Sequence: Synthetic oligonucleotide
gcccugcuaauuguuaaug

SEQ ID NO: 1721006 - RNA, 19 nt, Artificial Sequence
  Description of Artificial Sequence: Synthetic oligonucleotide
gccgcucuugguguaacag

SEQ ID NO: 1721007 - RNA, 19 nt, Artificial Sequence
  Description of Artificial Sequence: Synthetic oligonucleotide
aggcacgcacucugcauua

SEQ ID NO: 1721008 - RNA, 19 nt, Artificial Sequence
  Description of Artificial Sequence: Synthetic oligonucleotide
guagagcacguaaaacacu

SEQ ID NO: 1721009 - RNA, 19 nt, Artificial Sequence
  Description of Artificial Sequence: Synthetic oligonucleotide
agcagaccuucuggucugg

SEQ ID NO: 1721010 - RNA, 19 nt, Artificial Sequence
  Description of Artificial Sequence: Synthetic oligonucleotide
ggcggcugcgagcugcugc

SEQ ID NO: 1721011 - RNA, 19 nt, Artificial Sequence
  Description of Artificial Sequence: Synthetic oligonucleotide
aagcaccgcuauucccaaa

SEQ ID NO: 1721012 - RNA, 19 nt, Artificial Sequence
  Description of Artificial Sequence: Synthetic oligonucleotide
aaaugcgagcggagccgcu

SEQ ID NO: 1721013 - RNA, 19 nt, Artificial Sequence
  Description of Artificial Sequence: Synthetic oligonucleotide
auacugcgagaggcggcgg

SEQ ID NO: 1721014 - RNA, 19 nt, Artificial Sequence
  Description of Artificial Sequence: Synthetic oligonucleotide
gcgcuuccaagagagggag

SEQ ID NO: 1721015 - RNA, 19 nt, Artificial Sequence
  Description of Artificial Sequence: Synthetic oligonucleotide
gaaagcggauuccgaugcu

SEQ ID NO: 1721016 - RNA, 19 nt, Artificial Sequence
  Description of Artificial Sequence: Synthetic oligonucleotide
acuugagaugauacacguu

SEQ ID NO: 1721017 - RNA, 19 nt, Artificial Sequence
  Description of Artificial Sequence: Synthetic oligonucleotide
gagcccucaugacgaguuc

SEQ ID NO: 1721018 - RNA, 19 nt, Artificial Sequence
  Description of Artificial Sequence: Synthetic oligonucleotide
guucacucgcaggaaucga

SEQ ID NO: 1721019 - RNA, 19 nt, Artificial Sequence
  Description of Artificial Sequence: Synthetic oligonucleotide
cuucuggucuggcaguagu

SEQ ID NO: 1721020 - RNA, 19 nt, Artificial Sequence
  Description of Artificial Sequence: Synthetic oligonucleotide
cacaucucuuuuccuuuaa

SEQ ID NO: 1721021 - RNA, 19 nt, Artificial Sequence
  Description of Artificial Sequence: Synthetic oligonucleotide
uggaguccuuaauguucau

SEQ ID NO: 1721022 - RNA, 19 nt, Artificial Sequence
  Description of Artificial Sequence: Synthetic oligonucleotide
cuggucuacugaagacaca

SEQ ID NO: 1721023 - RNA, 19 nt, Artificial Sequence
  Description of Artificial Sequence: Synthetic oligonucleotide
gcgguccgcaaucuugccc

SEQ ID NO: 1721024 - RNA, 19 nt, Artificial Sequence
  Description of Artificial Sequence: Synthetic oligonucleotide
caagcaccgcuauucccaa

SEQ ID NO: 1721025 - RNA, 19 nt, Artificial Sequence
  Description of Artificial Sequence: Synthetic oligonucleotide
ugcccggauucaccauggu

SEQ ID NO: 1721026 - RNA, 19 nt, Artificial Sequence
  Description of Artificial Sequence: Synthetic oligonucleotide
gcggcugcgagcugcugcc

SEQ ID NO: 1721027 - RNA, 19 nt, Artificial Sequence
  Description of Artificial Sequence: Synthetic oligonucleotide
acgaguucacucgcaggaa

SEQ ID NO: 1721028 - RNA, 19 nt, Artificial Sequence
  Description of Artificial Sequence: Synthetic oligonucleotide
ggaccaggcgauuccggca

SEQ ID NO: 1721029 - RNA, 19 nt, Artificial Sequence
  Description of Artificial Sequence: Synthetic oligonucleotide
gcuaauuguuaaugagggu

SEQ ID NO: 1721030 - RNA, 19 nt, Artificial Sequence
  Description of Artificial Sequence: Synthetic oligonucleotide
cccugcuaauuguuaauga

SEQ ID NO: 1721031 - RNA, 19 nt, Artificial Sequence
  Description of Artificial Sequence: Synthetic oligonucleotide
cacguugccuugagcccuc

SEQ ID NO: 1721032 - RNA, 19 nt, Artificial Sequence
  Description of Artificial Sequence: Synthetic oligonucleotide
guacacacucuggccggug

SEQ ID NO: 1721033 - RNA, 19 nt, Artificial Sequence
  Description of Artificial Sequence: Synthetic oligonucleotide
cuggccggugcccugcuaa

SEQ ID NO: 1721034 - RNA, 19 nt, Artificial Sequence
  Description of Artificial Sequence: Synthetic oligonucleotide
ccgaugucgcccagcugcg

SEQ ID NO: 1721035 - RNA, 19 nt, Artificial Sequence
  Description of Artificial Sequence: Synthetic oligonucleotide
gcgauuccggcagguagag

SEQ ID NO: 1721036 - RNA, 19 nt, Artificial Sequence
  Description of Artificial Sequence: Synthetic oligonucleotide
ggagcacuugaggcagcgg

SEQ ID NO: 1721037 - RNA, 19 nt, Artificial Sequence
  Description of Artificial Sequence: Synthetic oligonucleotide
ggcgauuccggcagguaga

SEQ ID NO: 1721038 - RNA, 19 nt, Artificial Sequence
  Description of Artificial Sequence: Synthetic oligonucleotide
gcccggauucaccaugguc

SEQ ID NO: 1721039 - RNA, 19 nt, Artificial Sequence
  Description of Artificial Sequence: Synthetic oligonucleotide
ggcuacaaaggugacuggu

SEQ ID NO: 1721040 - RNA, 19 nt, Artificial Sequence
  Description of Artificial Sequence: Synthetic oligonucleotide
auguccuucgguggaucuu

SEQ ID NO: 1721041 - RNA, 19 nt, Artificial Sequence
  Description of Artificial Sequence: Synthetic oligonucleotide
uggccggugcccugcuaau

SEQ ID NO: 1721042 - RNA, 19 nt, Artificial Sequence
  Description of Artificial Sequence: Synthetic oligonucleotide
gugccgaugucgcccagcu

SEQ ID NO: 1721043 - RNA, 19 nt, Artificial Sequence
  Description of Artificial Sequence: Synthetic oligonucleotide
ucccgggaccaggcgauuc

SEQ ID NO: 1721044 - RNA, 19 nt, Artificial Sequence
  Description of Artificial Sequence: Synthetic oligonucleotide
guucucgcagaagcaggaa

SEQ ID NO: 1721045 - RNA, 19 nt, Artificial Sequence
  Description of Artificial Sequence: Synthetic oligonucleotide
gugcgaugacaaggggcug

SEQ ID NO: 1721046 - RNA, 19 nt, Artificial Sequence
  Description of Artificial Sequence: Synthetic oligonucleotide
cccgggaccaggcgauucc

SEQ ID NO: 1721047 - RNA, 19 nt, Artificial Sequence
  Description of Artificial Sequence: Synthetic oligonucleotide
ggaguccuuaauguucaua

SEQ ID NO: 1721048 - RNA, 19 nt, Artificial Sequence
  Description of Artificial Sequence: Synthetic oligonucleotide
cugcauuacucugaccuuu

SEQ ID NO: 1721049 - RNA, 19 nt, Artificial Sequence
  Description of Artificial Sequence: Synthetic oligonucleotide
ggaucaugccgcucuuggu

SEQ ID NO: 1721050 - RNA, 19 nt, Artificial Sequence
  Description of Artificial Sequence: Synthetic oligonucleotide
gcccucaugacgaguucac

SEQ ID NO: 1721051 - RNA, 19 nt, Artificial Sequence
  Description of Artificial Sequence: Synthetic oligonucleotide
acgugccgaugucgcccag

SEQ ID NO: 1721052 - RNA, 19 nt, Artificial Sequence
  Description of Artificial Sequence: Synthetic oligonucleotide
cgacggcgaaaugcgagcg

SEQ ID NO: 1721053 - RNA, 19 nt, Artificial Sequence
  Description of Artificial Sequence: Synthetic oligonucleotide
ggcugugggucuaucgugu

SEQ ID NO: 1721054 - RNA, 19 nt, Artificial Sequence
  Description of Artificial Sequence: Synthetic oligonucleotide
caugccgcucuugguguaa

SEQ ID NO: 1721055 - RNA, 19 nt, Artificial Sequence
  Description of Artificial Sequence: Synthetic oligonucleotide
ccgggaccaggcgauuccg

SEQ ID NO: 1721056 - RNA, 19 nt, Artificial Sequence
  Description of Artificial Sequence: Synthetic oligonucleotide
gucaccggggcggcugcga

SEQ ID NO: 1721057 - RNA, 19 nt, Artificial Sequence
  Description of Artificial Sequence: Synthetic oligonucleotide
gagcggagccgcucggcuu

SEQ ID NO: 1721058 - RNA, 19 nt, Artificial Sequence
  Description of Artificial Sequence: Synthetic oligonucleotide
ccuuuaacucauguucagu

SEQ ID NO: 1721059 - RNA, 19 nt, Artificial Sequence
  Description of Artificial Sequence: Synthetic oligonucleotide
ccggcggagcuggagggag

SEQ ID NO: 1721060 - RNA, 19 nt, Artificial Sequence
  Description of Artificial Sequence: Synthetic oligonucleotide
gcccagguucauggagucc

SEQ ID NO: 1721061 - RNA, 19 nt, Artificial Sequence
  Description of Artificial Sequence: Synthetic oligonucleotide
gcaccgcuauucccaaaua

SEQ ID NO: 1721062 - RNA, 19 nt, Artificial Sequence
  Description of Artificial Sequence: Synthetic oligonucleotide
gcacgcacucugcauuacu

SEQ ID NO: 1721063 - RNA, 19 nt, Artificial Sequence
  Description of Artificial Sequence: Synthetic oligonucleotide
cggcgaaaugcgagcggag

SEQ ID NO: 1721064 - RNA, 19 nt, Artificial Sequence
  Description of Artificial Sequence: Synthetic oligonucleotide
acguugccuugagcccuca

SEQ ID NO: 1721065 - RNA, 19 nt, Artificial Sequence
  Description of Artificial Sequence: Synthetic oligonucleotide
ccccaacgauguccuucgg

SEQ ID NO: 1721066 - RNA, 19 nt, Artificial Sequence
  Description of Artificial Sequence: Synthetic oligonucleotide
cccaacgauguccuucggu

SEQ ID NO: 1721067 - RNA, 19 nt, Artificial Sequence
  Description of Artificial Sequence: Synthetic oligonucleotide
gcgcagcgcuuccaagaga

SEQ ID NO: 1721068 - RNA, 19 nt, Artificial Sequence
  Description of Artificial Sequence: Synthetic oligonucleotide
gcugcgccuggcagcagga

SEQ ID NO: 1721069 - RNA, 19 nt, Artificial Sequence
  Description of Artificial Sequence: Synthetic oligonucleotide
cgugccgaugucgcccagc

SEQ ID NO: 1721070 - RNA, 19 nt, Artificial Sequence
  Description of Artificial Sequence: Synthetic oligonucleotide
cggcagguagagcacguaa

SEQ ID NO: 1721071 - RNA, 19 nt, Artificial Sequence
  Description of Artificial Sequence: Synthetic oligonucleotide
gcugugggucuaucguguu

SEQ ID NO: 1721072 - RNA, 19 nt, Artificial Sequence
  Description of Artificial Sequence: Synthetic oligonucleotide
ggccauugaugagggcugu

SEQ ID NO: 1721073 - RNA, 19 nt, Artificial Sequence
  Description of Artificial Sequence: Synthetic oligonucleotide
cgauuccggcagguagagc

SEQ ID NO: 1721074 - RNA, 19 nt, Artificial Sequence
  Description of Artificial Sequence: Synthetic oligonucleotide
ccggugcccugcuaauugu

SEQ ID NO: 1721075 - RNA, 19 nt, Artificial Sequence
  Description of Artificial Sequence: Synthetic oligonucleotide
gcggauuccgaugcuucuu

SEQ ID NO: 1721076 - RNA, 19 nt, Artificial Sequence
  Description of Artificial Sequence: Synthetic oligonucleotide
gccggcggagcuggaggga

SEQ ID NO: 1721077 - RNA, 19 nt, Artificial Sequence
  Description of Artificial Sequence: Synthetic oligonucleotide
ccauggcauagagcagaaa

SEQ ID NO: 1721078 - RNA, 19 nt, Artificial Sequence
  Description of Artificial Sequence: Synthetic oligonucleotide
cggauuccgaugcuucuuu

SEQ ID NO: 1721079 - RNA, 19 nt, Artificial Sequence
  Description of Artificial Sequence: Synthetic oligonucleotide
cccucaugacgaguucacu

SEQ ID NO: 1721080 - RNA, 19 nt, Artificial Sequence
  Description of Artificial Sequence: Synthetic oligonucleotide
gcgcugcaagcaccgcuau

SEQ ID NO: 1721081 - RNA, 19 nt, Artificial Sequence
  Description of Artificial Sequence: Synthetic oligonucleotide
cccauuagcccagguucau

SEQ ID NO: 1721082 - RNA, 19 nt, Artificial Sequence
  Description of Artificial Sequence: Synthetic oligonucleotide
cggcgacggcgaaaugcga

SEQ ID NO: 1721083 - RNA, 19 nt, Artificial Sequence
  Description of Artificial Sequence: Synthetic oligonucleotide
cggugcccugcuaauuguu

SEQ ID NO: 1721084 - RNA, 19 nt, Artificial Sequence
  Description of Artificial Sequence: Synthetic oligonucleotide
ccggggcggcugcgagcug

SEQ ID NO: 1721085 - RNA, 19 nt, Artificial Sequence
  Description of Artificial Sequence: Synthetic oligonucleotide
uaggacuuaaaccugaugg

SEQ ID NO: 1721086 - RNA, 19 nt, Artificial Sequence
  Description of Artificial Sequence: Synthetic oligonucleotide
uguacuaagaagaagaguc

SEQ ID NO: 1721087 - RNA, 19 nt, Artificial Sequence
  Description of Artificial Sequence: Synthetic oligonucleotide
auaaauuuggguaaaaccg

SEQ ID NO: 1721088 - RNA, 19 nt, Artificial Sequence
  Description of Artificial Sequence: Synthetic oligonucleotide
ugugucauaaauaaauuug

SEQ ID NO: 1721089 - RNA, 19 nt, Artificial Sequence
  Description of Artificial Sequence: Synthetic oligonucleotide
uuagccuuaaucauuagcu

SEQ ID NO: 1721090 - RNA, 19 nt, Artificial Sequence
  Description of Artificial Sequence: Synthetic oligonucleotide
gauugauuuagauaacucc

SEQ ID NO: 1721091 - RNA, 19 nt, Artificial Sequence
  Description of Artificial Sequence: Synthetic oligonucleotide
ucaaugaacacgaucuggg

SEQ ID NO: 1721092 - RNA, 19 nt, Artificial Sequence
  Description of Artificial Sequence: Synthetic oligonucleotide
uuaaucauuagcuugcuaa

SEQ ID NO: 1721093 - RNA, 19 nt, Artificial Sequence
  Description of Artificial Sequence: Synthetic oligonucleotide
cauaauaccaagucuauug

SEQ ID NO: 1721094 - RNA, 19 nt, Artificial Sequence
  Description of Artificial Sequence: Synthetic oligonucleotide
auuccuacagcucuuacuc

SEQ ID NO: 1721095 - RNA, 19 nt, Artificial Sequence
  Description of Artificial Sequence: Synthetic oligonucleotide
acgauuuuggcacucuucc

SEQ ID NO: 1721096 - RNA, 19 nt, Artificial Sequence
  Description of Artificial Sequence: Synthetic oligonucleotide
ugaaccacgauuuuggcac

SEQ ID NO: 1721097 - RNA, 19 nt, Artificial Sequence
  Description of Artificial Sequence: Synthetic oligonucleotide
uagcgauugauuuagauaa

SEQ ID NO: 1721098 - RNA, 19 nt, Artificial Sequence
  Description of Artificial Sequence: Synthetic oligonucleotide
ucaaguuuccuuucgauac

SEQ ID NO: 1721099 - RNA, 19 nt, Artificial Sequence
  Description of Artificial Sequence: Synthetic oligonucleotide
aauuucauauggccuuggc

SEQ ID NO: 1721100 - RNA, 19 nt, Artificial Sequence
  Description of Artificial Sequence: Synthetic oligonucleotide
auaauaccaagucuauugg

SEQ ID NO: 1721101 - RNA, 19 nt, Artificial Sequence
  Description of Artificial Sequence: Synthetic oligonucleotide
uuucauauggccuuggcau

SEQ ID NO: 1721102 - RNA, 19 nt, Artificial Sequence
  Description of Artificial Sequence: Synthetic oligonucleotide
uguuccucaaugaacacga

SEQ ID NO: 1721103 - RNA, 19 nt, Artificial Sequence
  Description of Artificial Sequence: Synthetic oligonucleotide
ucuuuaaucuuauuagcga

SEQ ID NO: 1721104 - RNA, 19 nt, Artificial Sequence
  Description of Artificial Sequence: Synthetic oligonucleotide
aacucuucugauguuaagg

SEQ ID NO: 1721105 - RNA, 19 nt, Artificial Sequence
  Description of Artificial Sequence: Synthetic oligonucleotide
cugacagguaauuucaggg

SEQ ID NO: 1721106 - RNA, 19 nt, Artificial Sequence
  Description of Artificial Sequence: Synthetic oligonucleotide
uuauuagcgauugauuuag

SEQ ID NO: 1721107 - RNA, 19 nt, Artificial Sequence
  Description of Artificial Sequence: Synthetic oligonucleotide
aaaccugauggucucaucu

SEQ ID NO: 1721108 - RNA, 19 nt, Artificial Sequence
  Description of Artificial Sequence: Synthetic oligonucleotide
gucaucucggcaaagaugg

SEQ ID NO: 1721109 - RNA, 19 nt, Artificial Sequence
  Description of Artificial Sequence: Synthetic oligonucleotide
aagccugacagguaauuuc

SEQ ID NO: 1721110 - RNA, 19 nt, Artificial Sequence
  Description of Artificial Sequence: Synthetic oligonucleotide
agguauaucggauacaaaa

SEQ ID NO: 1721111 - RNA, 19 nt, Artificial Sequence
  Description of Artificial Sequence: Synthetic oligonucleotide
uuaaggauccccuuucuga

SEQ ID NO: 1721112 - RNA, 19 nt, Artificial Sequence
  Description of Artificial Sequence: Synthetic oligonucleotide
ucaauuaccaugacaccgc

SEQ ID NO: 1721113 - RNA, 19 nt, Artificial Sequence
  Description of Artificial Sequence: Synthetic oligonucleotide
aacacccgaagccugacag

SEQ ID NO: 1721114 - RNA, 19 nt, Artificial Sequence
  Description of Artificial Sequence: Synthetic oligonucleotide
aaacaguacaccucuguga

SEQ ID NO: 1721115 - RNA, 19 nt, Artificial Sequence
  Description of Artificial Sequence: Synthetic oligonucleotide
uguguacuaagaagaagag

SEQ ID NO: 1721116 - RNA, 19 nt, Artificial Sequence
  Description of Artificial Sequence: Synthetic oligonucleotide
uuuggguaaaaccgcaagc

SEQ ID NO: 1721117 - RNA, 19 nt, Artificial Sequence
  Description of Artificial Sequence: Synthetic oligonucleotide
aaucauuagcuugcuaagg

SEQ ID NO: 1721118 - RNA, 19 nt, Artificial Sequence
  Description of Artificial Sequence: Synthetic oligonucleotide
cucaauuaccaugacaccg

SEQ ID NO: 1721119 - RNA, 19 nt, Artificial Sequence
  Description of Artificial Sequence: Synthetic oligonucleotide
uaaucauuagcuugcuaag

SEQ ID NO: 1721120 - RNA, 19 nt, Artificial Sequence
  Description of Artificial Sequence: Synthetic oligonucleotide
cauucacuaaaucuucugg

SEQ ID NO: 1721121 - RNA, 19 nt, Artificial Sequence
  Description of Artificial Sequence: Synthetic oligonucleotide
ugauuuagauaacuccacc

SEQ ID NO: 1721122 - RNA, 19 nt, Artificial Sequence
  Description of Artificial Sequence: Synthetic oligonucleotide
uaaacaguacaccucugug

SEQ ID NO: 1721123 - RNA, 19 nt, Artificial Sequence
  Description of Artificial Sequence: Synthetic oligonucleotide
aauuccuacagcucuuacu

SEQ ID NO: 1721124 - RNA, 19 nt, Artificial Sequence
  Description of Artificial Sequence: Synthetic oligonucleotide
uuagauaacuccaccauuu

SEQ ID NO: 1721125 - RNA, 19 nt, Artificial Sequence
  Description of Artificial Sequence: Synthetic oligonucleotide
ucggauacaaaauuuuagu

SEQ ID NO: 1721126 - RNA, 19 nt, Artificial Sequence
  Description of Artificial Sequence: Synthetic oligonucleotide
aauaccaagucuauuggca

SEQ ID NO: 1721127 - RNA, 19 nt, Artificial Sequence
  Description of Artificial Sequence: Synthetic oligonucleotide
auuaccaugacaccgcuau

SEQ ID NO: 1721128 - RNA, 19 nt, Artificial Sequence
  Description of Artificial Sequence: Synthetic oligonucleotide
uucgauaccuacaauuccu

SEQ ID NO: 1721129 - RNA, 19 nt, Artificial Sequence
  Description of Artificial Sequence: Synthetic oligonucleotide
acgccuguaaaacucaauc

SEQ ID NO: 1721130 - RNA, 19 nt, Artificial Sequence
  Description of Artificial Sequence: Synthetic oligonucleotide
uuucgauaccuacaauucc

SEQ ID NO: 1721131 - RNA, 19 nt, Artificial Sequence
  Description of Artificial Sequence: Synthetic oligonucleotide
aaucuuauuagcgauugau

SEQ ID NO: 1721132 - RNA, 19 nt, Artificial Sequence
  Description of Artificial Sequence: Synthetic oligonucleotide
guaaaacucaaucuggcca

SEQ ID NO: 1721133 - RNA, 19 nt, Artificial Sequence
  Description of Artificial Sequence: Synthetic oligonucleotide
aacacgaucugggacagag

SEQ ID NO: 1721134 - RNA, 19 nt, Artificial Sequence
  Description of Artificial Sequence: Synthetic oligonucleotide
ucacuaaaucuucugguga

SEQ ID NO: 1721135 - RNA, 19 nt, Artificial Sequence
  Description of Artificial Sequence: Synthetic oligonucleotide
uauaucggauacaaaauuu

SEQ ID NO: 1721136 - RNA, 19 nt, Artificial Sequence
  Description of Artificial Sequence: Synthetic oligonucleotide
guauucuuugcuuagcuca

SEQ ID NO: 1721137 - RNA, 19 nt, Artificial Sequence
  Description of Artificial Sequence: Synthetic oligonucleotide
uguaggaguucuuacugcc

SEQ ID NO: 1721138 - RNA, 19 nt, Artificial Sequence
  Description of Artificial Sequence: Synthetic oligonucleotide
auacucagcaaguaggacu

SEQ ID NO: 1721139 - RNA, 19 nt, Artificial Sequence
  Description of Artificial Sequence: Synthetic oligonucleotide
caggcucuuuguuagaugg

SEQ ID NO: 1721140 - RNA, 19 nt, Artificial Sequence
  Description of Artificial Sequence: Synthetic oligonucleotide
aaagauggcccaucuucuc

SEQ ID NO: 1721141 - RNA, 19 nt, Artificial Sequence
  Description of Artificial Sequence: Synthetic oligonucleotide
agaugaaccacgauuuugg

SEQ ID NO: 1721142 - RNA, 19 nt, Artificial Sequence
  Description of Artificial Sequence: Synthetic oligonucleotide
auuuggguaaaaccgcaag

SEQ ID NO: 1721143 - RNA, 19 nt, Artificial Sequence
  Description of Artificial Sequence: Synthetic oligonucleotide
cuuucgauaccuacaauuc

SEQ ID NO: 1721144 - RNA, 19 nt, Artificial Sequence
  Description of Artificial Sequence: Synthetic oligonucleotide
guaauuucagggcuucuag

SEQ ID NO: 1721145 - RNA, 19 nt, Artificial Sequence
  Description of Artificial Sequence: Synthetic oligonucleotide
caaaagguauaucggauac

SEQ ID NO: 1721146 - RNA, 19 nt, Artificial Sequence
  Description of Artificial Sequence: Synthetic oligonucleotide
auuccauuccucgagcucg

SEQ ID NO: 1721147 - RNA, 19 nt, Artificial Sequence
  Description of Artificial Sequence: Synthetic oligonucleotide
ugugagugacauuauuccc

SEQ ID NO: 1721148 - RNA, 19 nt, Artificial Sequence
  Description of Artificial Sequence: Synthetic oligonucleotide
uuggguaaaaccgcaagcc

SEQ ID NO: 1721149 - RNA, 19 nt, Artificial Sequence
  Description of Artificial Sequence: Synthetic oligonucleotide
ucguugaucuccaggaggc

SEQ ID NO: 1721150 - RNA, 19 nt, Artificial Sequence
  Description of Artificial Sequence: Synthetic oligonucleotide
aaccgcaagccuuccacgg

SEQ ID NO: 1721151 - RNA, 19 nt, Artificial Sequence
  Description of Artificial Sequence: Synthetic oligonucleotide
accgcuaucaaacacccga

SEQ ID NO: 1721152 - RNA, 19 nt, Artificial Sequence
  Description of Artificial Sequence: Synthetic oligonucleotide
uuagcgauugauuuagaua

SEQ ID NO: 1721153 - RNA, 19 nt, Artificial Sequence
  Description of Artificial Sequence: Synthetic oligonucleotide
acuuaaaccugauggucuc

SEQ ID NO: 1721154 - RNA, 19 nt, Artificial Sequence
  Description of Artificial Sequence: Synthetic oligonucleotide
ugcuaaggucuucaaaggc

SEQ ID NO: 1721155 - RNA, 19 nt, Artificial Sequence
  Description of Artificial Sequence: Synthetic oligonucleotide
cuuagccuuaaucauuagc

SEQ ID NO: 1721156 - RNA, 19 nt, Artificial Sequence
  Description of Artificial Sequence: Synthetic oligonucleotide
ugcagaugaaccacgauuu

SEQ ID NO: 1721157 - RNA, 19 nt, Artificial Sequence
  Description of Artificial Sequence: Synthetic oligonucleotide
agccuuaaucauuagcuug

SEQ ID NO: 1721158 - RNA, 19 nt, Artificial Sequence
  Description of Artificial Sequence: Synthetic oligonucleotide
ugacagguaauuucagggc

SEQ ID NO: 1721159 - RNA, 19 nt, Artificial Sequence
  Description of Artificial Sequence: Synthetic oligonucleotide
agcucuuacucuuccuggc

SEQ ID NO: 1721160 - RNA, 19 nt, Artificial Sequence
  Description of Artificial Sequence: Synthetic oligonucleotide
ugauguaggaguucuuacu

SEQ ID NO: 1721161 - RNA, 19 nt, Artificial Sequence
  Description of Artificial Sequence: Synthetic oligonucleotide
auuucauauggccuuggca

SEQ ID NO: 1721162 - RNA, 19 nt, Artificial Sequence
  Description of Artificial Sequence: Synthetic oligonucleotide
aggauccccuuucugaaac

SEQ ID NO: 1721163 - RNA, 19 nt, Artificial Sequence
  Description of Artificial Sequence: Synthetic oligonucleotide
gaauggaccaggcucuuug

SEQ ID NO: 1721164 - RNA, 19 nt, Artificial Sequence
  Description of Artificial Sequence: Synthetic oligonucleotide
uauuuguauucuuugcuua

SEQ ID NO: 1721165 - RNA, 19 nt, Artificial Sequence
  Description of Artificial Sequence: Synthetic oligonucleotide
aauuuuaguucugugucau

SEQ ID NO: 1721166 - RNA, 19 nt, Artificial Sequence
  Description of Artificial Sequence: Synthetic oligonucleotide
uuuagauaacuccaccauu

SEQ ID NO: 1721167 - RNA, 19 nt, Artificial Sequence
  Description of Artificial Sequence: Synthetic oligonucleotide
caagucuauuggcaaaagg

SEQ ID NO: 1721168 - RNA, 19 nt, Artificial Sequence
  Description of Artificial Sequence: Synthetic oligonucleotide
uuuaaucuuauuagcgauu

SEQ ID NO: 1721169 - RNA, 19 nt, Artificial Sequence
  Description of Artificial Sequence: Synthetic oligonucleotide
cugaagcucaauuaccaug

SEQ ID NO: 1721170 - RNA, 19 nt, Artificial Sequence
  Description of Artificial Sequence: Synthetic oligonucleotide
uggcaaaagguauaucgga

SEQ ID NO: 1721171 - RNA, 19 nt, Artificial Sequence
  Description of Artificial Sequence: Synthetic oligonucleotide
cacuaaaucuucuggugag

SEQ ID NO: 1721172 - RNA, 19 nt, Artificial Sequence
  Description of Artificial Sequence: Synthetic oligonucleotide
aaguuucccugguaaccgg

SEQ ID NO: 1721173 - RNA, 19 nt, Artificial Sequence
  Description of Artificial Sequence: Synthetic oligonucleotide
accgguguguacuaagaag

SEQ ID NO: 1721174 - RNA, 19 nt, Artificial Sequence
  Description of Artificial Sequence: Synthetic oligonucleotide
uaucggauacaaaauuuua

SEQ ID NO: 1721175 - RNA, 19 nt, Artificial Sequence
  Description of Artificial Sequence: Synthetic oligonucleotide
aagauggcccaucuucucu

SEQ ID NO: 1721176 - RNA, 19 nt, Artificial Sequence
  Description of Artificial Sequence: Synthetic oligonucleotide
cucguugaucuccaggagg

SEQ ID NO: 1721177 - RNA, 19 nt, Artificial Sequence
  Description of Artificial Sequence: Synthetic oligonucleotide
ucugugucauaaauaaauu

SEQ ID NO: 1721178 - RNA, 19 nt, Artificial Sequence
  Description of Artificial Sequence: Synthetic oligonucleotide
uggcuauucccauacucag

SEQ ID NO: 1721179 - RNA, 19 nt, Artificial Sequence
  Description of Artificial Sequence: Synthetic oligonucleotide
aucucggcaaagauggccc

SEQ ID NO: 1721180 - RNA, 19 nt, Artificial Sequence
  Description of Artificial Sequence: Synthetic oligonucleotide
aucggauacaaaauuuuag

SEQ ID NO: 1721181 - RNA, 19 nt, Artificial Sequence
  Description of Artificial Sequence: Synthetic oligonucleotide
guguguacuaagaagaaga

SEQ ID NO: 1721182 - RNA, 19 nt, Artificial Sequence
  Description of Artificial Sequence: Synthetic oligonucleotide
ugacaaacgccuguaaaac

SEQ ID NO: 1721183 - RNA, 19 nt, Artificial Sequence
  Description of Artificial Sequence: Synthetic oligonucleotide
aaauuuggguaaaaccgca

SEQ ID NO: 1721184 - RNA, 19 nt, Artificial Sequence
  Description of Artificial Sequence: Synthetic oligonucleotide
uaaaucuucuggugagagc

SEQ ID NO: 1721185 - RNA, 19 nt, Artificial Sequence
  Description of Artificial Sequence: Synthetic oligonucleotide
uaggaguucuuacugcccu

SEQ ID NO: 1721186 - RNA, 19 nt, Artificial Sequence
  Description of Artificial Sequence: Synthetic oligonucleotide
uugauguaggaguucuuac

SEQ ID NO: 1721187 - RNA, 19 nt, Artificial Sequence
  Description of Artificial Sequence: Synthetic oligonucleotide
auuagcgauugauuuagau

SEQ ID NO: 1721188 - RNA, 19 nt, Artificial Sequence
  Description of Artificial Sequence: Synthetic oligonucleotide
ugugccugagccauaaguu

SEQ ID NO: 1721189 - RNA, 19 nt, Artificial Sequence
  Description of Artificial Sequence: Synthetic oligonucleotide
aggacuuaaaccugauggu

SEQ ID NO: 1721190 - RNA, 19 nt, Artificial Sequence
  Description of Artificial Sequence: Synthetic oligonucleotide
ucuuacugcccuggaaugg

SEQ ID NO: 1721191 - RNA, 19 nt, Artificial Sequence
  Description of Artificial Sequence: Synthetic oligonucleotide
cuaaaucuucuggugagag

SEQ ID NO: 1721192 - RNA, 19 nt, Artificial Sequence
  Description of Artificial Sequence: Synthetic oligonucleotide
uaucaaacacccgaagccu

SEQ ID NO: 1721193 - RNA, 19 nt, Artificial Sequence
  Description of Artificial Sequence: Synthetic oligonucleotide
ucaaccgguguguacuaag

SEQ ID NO: 1721194 - RNA, 19 nt, Artificial Sequence
  Description of Artificial Sequence: Synthetic oligonucleotide
gcaaguaggacuuaaaccu

SEQ ID NO: 1721195 - RNA, 19 nt, Artificial Sequence
  Description of Artificial Sequence: Synthetic oligonucleotide
cauuccucgagcucgguuc

SEQ ID NO: 1721196 - RNA, 19 nt, Artificial Sequence
  Description of Artificial Sequence: Synthetic oligonucleotide
caaaauuuuaguucugugu

SEQ ID NO: 1721197 - RNA, 19 nt, Artificial Sequence
  Description of Artificial Sequence: Synthetic oligonucleotide
gugagugacauuauucccc

SEQ ID NO: 1721198 - RNA, 19 nt, Artificial Sequence
  Description of Artificial Sequence: Synthetic oligonucleotide
uguauucuuugcuuagcuc

SEQ ID NO: 1721199 - RNA, 19 nt, Artificial Sequence
  Description of Artificial Sequence: Synthetic oligonucleotide
gaugaaccacgauuuuggc

SEQ ID NO: 1721200 - RNA, 19 nt, Artificial Sequence
  Description of Artificial Sequence: Synthetic oligonucleotide
uggguaaaaccgcaagccu

SEQ ID NO: 1721201 - RNA, 19 nt, Artificial Sequence
  Description of Artificial Sequence: Synthetic oligonucleotide
uccuuagccuuaaucauua

SEQ ID NO: 1721202 - RNA, 19 nt, Artificial Sequence
  Description of Artificial Sequence: Synthetic oligonucleotide
cuugcaagcauucacuaaa

SEQ ID NO: 1721203 - RNA, 19 nt, Artificial Sequence
  Description of Artificial Sequence: Synthetic oligonucleotide
cuccaaaucaaccggugug

SEQ ID NO: 1721204 - RNA, 19 nt, Artificial Sequence
  Description of Artificial Sequence: Synthetic oligonucleotide
ggugagagcaauuccauuc

SEQ ID NO: 1721205 - RNA, 19 nt, Artificial Sequence
  Description of Artificial Sequence: Synthetic oligonucleotide
acucuucccaauuccagcu

SEQ ID NO: 1721206 - RNA, 19 nt, Artificial Sequence
  Description of Artificial Sequence: Synthetic oligonucleotide
acacgaagcgguccauggc

SEQ ID NO: 1721207 - RNA, 19 nt, Artificial Sequence
  Description of Artificial Sequence: Synthetic oligonucleotide
ucuccaaaucaaccggugu

SEQ ID NO: 1721208 - RNA, 19 nt, Artificial Sequence
  Description of Artificial Sequence: Synthetic oligonucleotide
caauauuccagccagcugu

SEQ ID NO: 1721209 - RNA, 19 nt, Artificial Sequence
  Description of Artificial Sequence: Synthetic oligonucleotide
ucaaacacccgaagccuga

SEQ ID NO: 1721210 - RNA, 19 nt, Artificial Sequence
  Description of Artificial Sequence: Synthetic oligonucleotide
cacgaagcgguccauggcc

SEQ ID NO: 1721211 - RNA, 19 nt, Artificial Sequence
  Description of Artificial Sequence: Synthetic oligonucleotide
acaccgcuaucaaacaccc

SEQ ID NO: 1721212 - RNA, 19 nt, Artificial Sequence
  Description of Artificial Sequence: Synthetic oligonucleotide
uagcucaauuucauauggc

SEQ ID NO: 1721213 - RNA, 19 nt, Artificial Sequence
  Description of Artificial Sequence: Synthetic oligonucleotide
guucacuaaacaguacacc

SEQ ID NO: 1721214 - RNA, 19 nt, Artificial Sequence
  Description of Artificial Sequence: Synthetic oligonucleotide
augaaccacgauuuuggca

SEQ ID NO: 1721215 - RNA, 19 nt, Artificial Sequence
  Description of Artificial Sequence: Synthetic oligonucleotide
aauggaccaggcucuuugu

SEQ ID NO: 1721216 - RNA, 19 nt, Artificial Sequence
  Description of Artificial Sequence: Synthetic oligonucleotide
guuggcuauucccauacuc

SEQ ID NO: 1721217 - RNA, 19 nt, Artificial Sequence
  Description of Artificial Sequence: Synthetic oligonucleotide
cccauacucagcaaguagg

SEQ ID NO: 1721218 - RNA, 19 nt, Artificial Sequence
  Description of Artificial Sequence: Synthetic oligonucleotide
guacuaagaagaagagucc

SEQ ID NO: 1721219 - RNA, 19 nt, Artificial Sequence
  Description of Artificial Sequence: Synthetic oligonucleotide
uccaaaucaaccggugugu

SEQ ID NO: 1721220 - RNA, 19 nt, Artificial Sequence
  Description of Artificial Sequence: Synthetic oligonucleotide
auaccaagucuauuggcaa

SEQ ID NO: 1721221 - RNA, 19 nt, Artificial Sequence
  Description of Artificial Sequence: Synthetic oligonucleotide
cagcucuuacucuuccugg

SEQ ID NO: 1721222 - RNA, 19 nt, Artificial Sequence
  Description of Artificial Sequence: Synthetic oligonucleotide
guuuguaaugacugggaaa

SEQ ID NO: 1721223 - RNA, 19 nt, Artificial Sequence
  Description of Artificial Sequence: Synthetic oligonucleotide
ugccugagccauaaguuuc

SEQ ID NO: 1721224 - RNA, 19 nt, Artificial Sequence
  Description of Artificial Sequence: Synthetic oligonucleotide
gugccugcaauauuccagc

SEQ ID NO: 1721225 - RNA, 19 nt, Artificial Sequence
  Description of Artificial Sequence: Synthetic oligonucleotide
gucguagacgcgcaccccg

SEQ ID NO: 1721226 - RNA, 19 nt, Artificial Sequence
  Description of Artificial Sequence: Synthetic oligonucleotide
caucuccucugacaaacgc

SEQ ID NO: 1721227 - RNA, 19 nt, Artificial Sequence
  Description of Artificial Sequence: Synthetic oligonucleotide
ugacaccgcuaucaaacac

SEQ ID NO: 1721228 - RNA, 19 nt, Artificial Sequence
  Description of Artificial Sequence: Synthetic oligonucleotide
ucgagcucgguucacuaaa

SEQ ID NO: 1721229 - RNA, 19 nt, Artificial Sequence
  Description of Artificial Sequence: Synthetic oligonucleotide
cuuauuagcgauugauuua

SEQ ID NO: 1721230 - RNA, 19 nt, Artificial Sequence
  Description of Artificial Sequence: Synthetic oligonucleotide
caaaucaaccgguguguac

SEQ ID NO: 1721231 - RNA, 19 nt, Artificial Sequence
  Description of Artificial Sequence: Synthetic oligonucleotide
uuuagccaggaggacagac

SEQ ID NO: 1721232 - RNA, 19 nt, Artificial Sequence
  Description of Artificial Sequence: Synthetic oligonucleotide
ucuugcaagcauucacuaa

SEQ ID NO: 1721233 - RNA, 19 nt, Artificial Sequence
  Description of Artificial Sequence: Synthetic oligonucleotide
gcuauucccauacucagca

SEQ ID NO: 1721234 - RNA, 19 nt, Artificial Sequence
  Description of Artificial Sequence: Synthetic oligonucleotide
uugcuuagcucaauuucau

SEQ ID NO: 1721235 - RNA, 19 nt, Artificial Sequence
  Description of Artificial Sequence: Synthetic oligonucleotide
ugggucugaagcucaauua

SEQ ID NO: 1721236 - RNA, 19 nt, Artificial Sequence
  Description of Artificial Sequence: Synthetic oligonucleotide
cacgaucugggacagagga

SEQ ID NO: 1721237 - RNA, 19 nt, Artificial Sequence
  Description of Artificial Sequence: Synthetic oligonucleotide
uuccauuccucgagcucgg

SEQ ID NO: 1721238 - RNA, 19 nt, Artificial Sequence
  Description of Artificial Sequence: Synthetic oligonucleotide
aaccgguguguacuaagaa

SEQ ID NO: 1721239 - RNA, 19 nt, Artificial Sequence
  Description of Artificial Sequence: Synthetic oligonucleotide
caucucggcaaagauggcc

SEQ ID NO: 1721240 - RNA, 19 nt, Artificial Sequence
  Description of Artificial Sequence: Synthetic oligonucleotide
ugcaagcauucacuaaauc

SEQ ID NO: 1721241 - RNA, 19 nt, Artificial Sequence
  Description of Artificial Sequence: Synthetic oligonucleotide
guaggacuuaaaccugaug

SEQ ID NO: 1721242 - RNA, 19 nt, Artificial Sequence
  Description of Artificial Sequence: Synthetic oligonucleotide
cacgauuuuggcacucuuc

SEQ ID NO: 1721243 - RNA, 19 nt, Artificial Sequence
  Description of Artificial Sequence: Synthetic oligonucleotide
uggaccaggcucuuuguua

SEQ ID NO: 1721244 - RNA, 19 nt, Artificial Sequence
  Description of Artificial Sequence: Synthetic oligonucleotide
uauuagcgauugauuuaga

SEQ ID NO: 1721245 - RNA, 19 nt, Artificial Sequence
  Description of Artificial Sequence: Synthetic oligonucleotide
uugcaagcauucacuaaau

SEQ ID NO: 1721246 - RNA, 19 nt, Artificial Sequence
  Description of Artificial Sequence: Synthetic oligonucleotide
cauuagcuugcuaaggucu

SEQ ID NO: 1721247 - RNA, 19 nt, Artificial Sequence
  Description of Artificial Sequence: Synthetic oligonucleotide
ucgauaccuacaauuccua

SEQ ID NO: 1721248 - RNA, 19 nt, Artificial Sequence
  Description of Artificial Sequence: Synthetic oligonucleotide
gauccccuuucugaaacug

SEQ ID NO: 1721249 - RNA, 19 nt, Artificial Sequence
  Description of Artificial Sequence: Synthetic oligonucleotide
auaucggauacaaaauuuu

SEQ ID NO: 1721250 - RNA, 19 nt, Artificial Sequence
  Description of Artificial Sequence: Synthetic oligonucleotide
uagcaucuugcaagcauuc

SEQ ID NO: 1721251 - RNA, 19 nt, Artificial Sequence
  Description of Artificial Sequence: Synthetic oligonucleotide
aguucuuacugcccuggaa

SEQ ID NO: 1721252 - RNA, 19 nt, Artificial Sequence
  Description of Artificial Sequence: Synthetic oligonucleotide
aaggccucagaaauguuuu

SEQ ID NO: 1721253 - RNA, 19 nt, Artificial Sequence
  Description of Artificial Sequence: Synthetic oligonucleotide
ugggguccuuuauuguuug

SEQ ID NO: 1721254 - RNA, 19 nt, Artificial Sequence
  Description of Artificial Sequence: Synthetic oligonucleotide
ggccaugcagcacucauug

SEQ ID NO: 1721255 - RNA, 19 nt, Artificial Sequence
  Description of Artificial Sequence: Synthetic oligonucleotide
uuaaaccugauggucucau

SEQ ID NO: 1721256 - RNA, 19 nt, Artificial Sequence
  Description of Artificial Sequence: Synthetic oligonucleotide
uagccuuaaucauuagcuu

SEQ ID NO: 1721257 - RNA, 19 nt, Artificial Sequence
  Description of Artificial Sequence: Synthetic oligonucleotide
cuucugugacgucaccuug

SEQ ID NO: 1721258 - RNA, 19 nt, Artificial Sequence
  Description of Artificial Sequence: Synthetic oligonucleotide
aaucaaccgguguguacua

SEQ ID NO: 1721259 - RNA, 19 nt, Artificial Sequence
  Description of Artificial Sequence: Synthetic oligonucleotide
caucgaauuuuaucuucuc

SEQ ID NO: 1721260 - RNA, 19 nt, Artificial Sequence
  Description of Artificial Sequence: Synthetic oligonucleotide
acacccgaagccugacagg

SEQ ID NO: 1721261 - RNA, 19 nt, Artificial Sequence
  Description of Artificial Sequence: Synthetic oligonucleotide
augacaccgcuaucaaaca

SEQ ID NO: 1721262 - RNA, 19 nt, Artificial Sequence
  Description of Artificial Sequence: Synthetic oligonucleotide
aaggauccccuuucugaaa

SEQ ID NO: 1721263 - RNA, 19 nt, Artificial Sequence
  Description of Artificial Sequence: Synthetic oligonucleotide
aucuugcaagcauucacua

SEQ ID NO: 1721264 - RNA, 19 nt, Artificial Sequence
  Description of Artificial Sequence: Synthetic oligonucleotide
ggugccugcaauauuccag

SEQ ID NO: 1721265 - RNA, 19 nt, Artificial Sequence
  Description of Artificial Sequence: Synthetic oligonucleotide
uccucuaaaggugccugca

SEQ ID NO: 1721266 - RNA, 19 nt, Artificial Sequence
  Description of Artificial Sequence: Synthetic oligonucleotide
guauaucggauacaaaauu

SEQ ID NO: 1721267 - RNA, 19 nt, Artificial Sequence
  Description of Artificial Sequence: Synthetic oligonucleotide
aaccacgauuuuggcacuc

SEQ ID NO: 1721268 - RNA, 19 nt, Artificial Sequence
  Description of Artificial Sequence: Synthetic oligonucleotide
gcauucacuaaaucuucug

SEQ ID NO: 1721269 - RNA, 19 nt, Artificial Sequence
  Description of Artificial Sequence: Synthetic oligonucleotide
agcgauugauuuagauaac

SEQ ID NO: 1721270 - RNA, 19 nt, Artificial Sequence
  Description of Artificial Sequence: Synthetic oligonucleotide
gccuuaaucauuagcuugc

SEQ ID NO: 1721271 - RNA, 19 nt, Artificial Sequence
  Description of Artificial Sequence: Synthetic oligonucleotide
gagcaauuccauuccucga

SEQ ID NO: 1721272 - RNA, 19 nt, Artificial Sequence
  Description of Artificial Sequence: Synthetic oligonucleotide
gaagcucaauuaccaugac

SEQ ID NO: 1721273 - RNA, 19 nt, Artificial Sequence
  Description of Artificial Sequence: Synthetic oligonucleotide
gacaaacgccuguaaaacu

SEQ ID NO: 1721274 - RNA, 19 nt, Artificial Sequence
  Description of Artificial Sequence: Synthetic oligonucleotide
caaacgccuguaaaacuca

SEQ ID NO: 1721275 - RNA, 19 nt, Artificial Sequence
  Description of Artificial Sequence: Synthetic oligonucleotide
caauuucauauggccuugg

SEQ ID NO: 1721276 - RNA, 19 nt, Artificial Sequence
  Description of Artificial Sequence: Synthetic oligonucleotide
cacuaaacaguacaccucu

SEQ ID NO: 1721277 - RNA, 19 nt, Artificial Sequence
  Description of Artificial Sequence: Synthetic oligonucleotide
acuaaaucuucuggugaga

SEQ ID NO: 1721278 - RNA, 19 nt, Artificial Sequence
  Description of Artificial Sequence: Synthetic oligonucleotide
auuccucgagcucgguuca

SEQ ID NO: 1721279 - RNA, 19 nt, Artificial Sequence
  Description of Artificial Sequence: Synthetic oligonucleotide
uuccuacagcucuuacucu

SEQ ID NO: 1721280 - RNA, 19 nt, Artificial Sequence
  Description of Artificial Sequence: Synthetic oligonucleotide
cauacucagcaaguaggac

SEQ ID NO: 1721281 - RNA, 19 nt, Artificial Sequence
  Description of Artificial Sequence: Synthetic oligonucleotide
uaaccggguuggcuauucc

SEQ ID NO: 1721282 - RNA, 19 nt, Artificial Sequence
  Description of Artificial Sequence: Synthetic oligonucleotide
ucugugacgucaccuuguu

SEQ ID NO: 1721283 - RNA, 19 nt, Artificial Sequence
  Description of Artificial Sequence: Synthetic oligonucleotide
ccagcaucgaauuuuaucu

SEQ ID NO: 1721284 - RNA, 19 nt, Artificial Sequence
  Description of Artificial Sequence: Synthetic oligonucleotide
gagagcaauuccauuccuc

SEQ ID NO: 1721285 - RNA, 19 nt, Artificial Sequence
  Description of Artificial Sequence: Synthetic oligonucleotide
agccugacagguaauuuca

SEQ ID NO: 1721286 - RNA, 19 nt, Artificial Sequence
  Description of Artificial Sequence: Synthetic oligonucleotide
uuacugcccuggaauggac

SEQ ID NO: 1721287 - RNA, 19 nt, Artificial Sequence
  Description of Artificial Sequence: Synthetic oligonucleotide
aucuuauuagcgauugauu

SEQ ID NO: 1721288 - RNA, 19 nt, Artificial Sequence
  Description of Artificial Sequence: Synthetic oligonucleotide
uagacgcgcaccccgcgcu

SEQ ID NO: 1721289 - RNA, 19 nt, Artificial Sequence
  Description of Artificial Sequence: Synthetic oligonucleotide
aauauuccagccagcuguu

SEQ ID NO: 1721290 - RNA, 19 nt, Artificial Sequence
  Description of Artificial Sequence: Synthetic oligonucleotide
ucguagacgcgcaccccgc

SEQ ID NO: 1721291 - RNA, 19 nt, Artificial Sequence
  Description of Artificial Sequence: Synthetic oligonucleotide
acagacauccccacaaguu

SEQ ID NO: 1721292 - RNA, 19 nt, Artificial Sequence
  Description of Artificial Sequence: Synthetic oligonucleotide
auggccaugcagcacucau

SEQ ID NO: 1721293 - RNA, 19 nt, Artificial Sequence
  Description of Artificial Sequence: Synthetic oligonucleotide
cacggagucaucucggcaa

SEQ ID NO: 1721294 - RNA, 19 nt, Artificial Sequence
  Description of Artificial Sequence: Synthetic oligonucleotide
gaggccgcugguccacacg

SEQ ID NO: 1721295 - RNA, 19 nt, Artificial Sequence
  Description of Artificial Sequence: Synthetic oligonucleotide
ugcuuagcucaauuucaua

SEQ ID NO: 1721296 - RNA, 19 nt, Artificial Sequence
  Description of Artificial Sequence: Synthetic oligonucleotide
gguaaaaccgcaagccuuc

SEQ ID NO: 1721297 - RNA, 19 nt, Artificial Sequence
  Description of Artificial Sequence: Synthetic oligonucleotide
gguccuuuauuguuuguaa

SEQ ID NO: 1721298 - RNA, 19 nt, Artificial Sequence
  Description of Artificial Sequence: Synthetic oligonucleotide
gcuuagcucaauuucauau

SEQ ID NO: 1721299 - RNA, 19 nt, Artificial Sequence
  Description of Artificial Sequence: Synthetic oligonucleotide
uuaccaugacaccgcuauc

SEQ ID NO: 1721300 - RNA, 19 nt, Artificial Sequence
  Description of Artificial Sequence: Synthetic oligonucleotide
uuguaaugacugggaaacu

SEQ ID NO: 1721301 - RNA, 19 nt, Artificial Sequence
  Description of Artificial Sequence: Synthetic oligonucleotide
ggacuuaaaccugaugguc

SEQ ID NO: 1721302 - RNA, 19 nt, Artificial Sequence
  Description of Artificial Sequence: Synthetic oligonucleotide
gacagacauccccacaagu

SEQ ID NO: 1721303 - RNA, 19 nt, Artificial Sequence
  Description of Artificial Sequence: Synthetic oligonucleotide
gcucaauuaccaugacacc

SEQ ID NO: 1721304 - RNA, 19 nt, Artificial Sequence
  Description of Artificial Sequence: Synthetic oligonucleotide
acgaagcgguccauggccg

SEQ ID NO: 1721305 - RNA, 19 nt, Artificial Sequence
  Description of Artificial Sequence: Synthetic oligonucleotide
uuucccugguaaccggguu

SEQ ID NO: 1721306 - RNA, 19 nt, Artificial Sequence
  Description of Artificial Sequence: Synthetic oligonucleotide
cccagcaucgaauuuuauc

SEQ ID NO: 1721307 - RNA, 19 nt, Artificial Sequence
  Description of Artificial Sequence: Synthetic oligonucleotide
ggguuggcuauucccauac

SEQ ID NO: 1721308 - RNA, 19 nt, Artificial Sequence
  Description of Artificial Sequence: Synthetic oligonucleotide
uccuuucgauaccuacaau

SEQ ID NO: 1721309 - RNA, 19 nt, Artificial Sequence
  Description of Artificial Sequence: Synthetic oligonucleotide
aguacaccucugugaguga

SEQ ID NO: 1721310 - RNA, 19 nt, Artificial Sequence
  Description of Artificial Sequence: Synthetic oligonucleotide
guaaaaccgcaagccuucc

SEQ ID NO: 1721311 - RNA, 19 nt, Artificial Sequence
  Description of Artificial Sequence: Synthetic oligonucleotide
aagguauaucggauacaaa

SEQ ID NO: 1721312 - RNA, 19 nt, Artificial Sequence
  Description of Artificial Sequence: Synthetic oligonucleotide
guagacgcgcaccccgcgc

SEQ ID NO: 1721313 - RNA, 19 nt, Artificial Sequence
  Description of Artificial Sequence: Synthetic oligonucleotide
gcaaaagguauaucggaua

SEQ ID NO: 1721314 - RNA, 19 nt, Artificial Sequence
  Description of Artificial Sequence: Synthetic oligonucleotide
aacgccuguaaaacucaau

SEQ ID NO: 1721315 - RNA, 19 nt, Artificial Sequence
  Description of Artificial Sequence: Synthetic oligonucleotide
gaggcuaccaucuccucuu

SEQ ID NO: 1721316 - RNA, 19 nt, Artificial Sequence
  Description of Artificial Sequence: Synthetic oligonucleotide
ugguaaccggguuggcuau

SEQ ID NO: 1721317 - RNA, 19 nt, Artificial Sequence
  Description of Artificial Sequence: Synthetic oligonucleotide
aaacgccuguaaaacucaa

SEQ ID NO: 1721318 - RNA, 19 nt, Artificial Sequence
  Description of Artificial Sequence: Synthetic oligonucleotide
cgauugauuuagauaacuc

SEQ ID NO: 1721319 - RNA, 19 nt, Artificial Sequence
  Description of Artificial Sequence: Synthetic oligonucleotide
agcaucuugcaagcauuca

SEQ ID NO: 1721320 - RNA, 19 nt, Artificial Sequence
  Description of Artificial Sequence: Synthetic oligonucleotide
gaagcgguccauggccgcc

SEQ ID NO: 1721321 - RNA, 19 nt, Artificial Sequence
  Description of Artificial Sequence: Synthetic oligonucleotide
gccuuggcauaauaccaag

SEQ ID NO: 1721322 - RNA, 19 nt, Artificial Sequence
  Description of Artificial Sequence: Synthetic oligonucleotide
aauggccaugcagcacuca

SEQ ID NO: 1721323 - RNA, 19 nt, Artificial Sequence
  Description of Artificial Sequence: Synthetic oligonucleotide
accggguuggcuauuccca

SEQ ID NO: 1721324 - RNA, 19 nt, Artificial Sequence
  Description of Artificial Sequence: Synthetic oligonucleotide
accgcaagccuuccacgga

SEQ ID NO: 1721325 - RNA, 19 nt, Artificial Sequence
  Description of Artificial Sequence: Synthetic oligonucleotide
uucccauacucagcaagua

SEQ ID NO: 1721326 - RNA, 19 nt, Artificial Sequence
  Description of Artificial Sequence: Synthetic oligonucleotide
auuagcuugcuaaggucuu

SEQ ID NO: 1721327 - RNA, 19 nt, Artificial Sequence
  Description of Artificial Sequence: Synthetic oligonucleotide
gagucaucucggcaaagau

SEQ ID NO: 1721328 - RNA, 19 nt, Artificial Sequence
  Description of Artificial Sequence: Synthetic oligonucleotide
aauuaccaugacaccgcua

SEQ ID NO: 1721329 - RNA, 19 nt, Artificial Sequence
  Description of Artificial Sequence: Synthetic oligonucleotide
ucaccagcgucucguugau

SEQ ID NO: 1721330 - RNA, 19 nt, Artificial Sequence
  Description of Artificial Sequence: Synthetic oligonucleotide
ucggcaaagauggcccauc

SEQ ID NO: 1721331 - RNA, 19 nt, Artificial Sequence
  Description of Artificial Sequence: Synthetic oligonucleotide
cuuaaucauuagcuugcua

SEQ ID NO: 1721332 - RNA, 19 nt, Artificial Sequence
  Description of Artificial Sequence: Synthetic oligonucleotide
uggccaugcagcacucauu

SEQ ID NO: 1721333 - RNA, 19 nt, Artificial Sequence
  Description of Artificial Sequence: Synthetic oligonucleotide
acacgaucugggacagagg

SEQ ID NO: 1721334 - RNA, 19 nt, Artificial Sequence
  Description of Artificial Sequence: Synthetic oligonucleotide
caccgcuaucaaacacccg

SEQ ID NO: 1721335 - RNA, 19 nt, Artificial Sequence
  Description of Artificial Sequence: Synthetic oligonucleotide
gguauaucggauacaaaau

SEQ ID NO: 1721336 - RNA, 19 nt, Artificial Sequence
  Description of Artificial Sequence: Synthetic oligonucleotide
acggagucaucucggcaaa

SEQ ID NO: 1721337 - RNA, 19 nt, Artificial Sequence
  Description of Artificial Sequence: Synthetic oligonucleotide
acaauuccuacagcucuua

SEQ ID NO: 1721338 - RNA, 19 nt, Artificial Sequence
  Description of Artificial Sequence: Synthetic oligonucleotide
guguacuaagaagaagagu

SEQ ID NO: 1721339 - RNA, 19 nt, Artificial Sequence
  Description of Artificial Sequence: Synthetic oligonucleotide
ccauacucagcaaguagga

SEQ ID NO: 1721340 - RNA, 19 nt, Artificial Sequence
  Description of Artificial Sequence: Synthetic oligonucleotide
ggcuauucccauacucagc

SEQ ID NO: 1721341 - RNA, 19 nt, Artificial Sequence
  Description of Artificial Sequence: Synthetic oligonucleotide
gguaauuucagggcuucua

SEQ ID NO: 1721342 - RNA, 19 nt, Artificial Sequence
  Description of Artificial Sequence: Synthetic oligonucleotide
accacgauuuuggcacucu

SEQ ID NO: 1721343 - RNA, 19 nt, Artificial Sequence
  Description of Artificial Sequence: Synthetic oligonucleotide
ccgcguuccucuaaaggug

SEQ ID NO: 1721344 - RNA, 19 nt, Artificial Sequence
  Description of Artificial Sequence: Synthetic oligonucleotide
gcugguccacacgaagcgg

SEQ ID NO: 1721345 - RNA, 19 nt, Artificial Sequence
  Description of Artificial Sequence: Synthetic oligonucleotide
uggcuagcugcauguggua

SEQ ID NO: 1721346 - RNA, 19 nt, Artificial Sequence
  Description of Artificial Sequence: Synthetic oligonucleotide
ccucaaugaacacgaucug

SEQ ID NO: 1721347 - RNA, 19 nt, Artificial Sequence
  Description of Artificial Sequence: Synthetic oligonucleotide
cucuaaaggugccugcaau

SEQ ID NO: 1721348 - RNA, 19 nt, Artificial Sequence
  Description of Artificial Sequence: Synthetic oligonucleotide
gcuugcuaaggucuucaaa

SEQ ID NO: 1721349 - RNA, 19 nt, Artificial Sequence
  Description of Artificial Sequence: Synthetic oligonucleotide
cgcugguccacacgaagcg

SEQ ID NO: 1721350 - RNA, 19 nt, Artificial Sequence
  Description of Artificial Sequence: Synthetic oligonucleotide
agguaauuucagggcuucu

SEQ ID NO: 1721351 - RNA, 19 nt, Artificial Sequence
  Description of Artificial Sequence: Synthetic oligonucleotide
ccccgcguuccucuaaagg

SEQ ID NO: 1721352 - RNA, 19 nt, Artificial Sequence
  Description of Artificial Sequence: Synthetic oligonucleotide
ucccagcaucgaauuuuau

SEQ ID NO: 1721353 - RNA, 19 nt, Artificial Sequence
  Description of Artificial Sequence: Synthetic oligonucleotide
cugguccacacgaagcggu

SEQ ID NO: 1721354 - RNA, 19 nt, Artificial Sequence
  Description of Artificial Sequence: Synthetic oligonucleotide
ccgucguagacgcgcaccc

SEQ ID NO: 1721355 - RNA, 19 nt, Artificial Sequence
  Description of Artificial Sequence: Synthetic oligonucleotide
agacgcgcaccccgcgcug

SEQ ID NO: 1721356 - RNA, 19 nt, Artificial Sequence
  Description of Artificial Sequence: Synthetic oligonucleotide
cuggugagagcaauuccau

SEQ ID NO: 1721357 - RNA, 19 nt, Artificial Sequence
  Description of Artificial Sequence: Synthetic oligonucleotide
cgauaccuacaauuccuac

SEQ ID NO: 1721358 - RNA, 19 nt, Artificial Sequence
  Description of Artificial Sequence: Synthetic oligonucleotide
gcucgguucacuaaacagu

SEQ ID NO: 1721359 - RNA, 19 nt, Artificial Sequence
  Description of Artificial Sequence: Synthetic oligonucleotide
caauuaccaugacaccgcu

SEQ ID NO: 1721360 - RNA, 19 nt, Artificial Sequence
  Description of Artificial Sequence: Synthetic oligonucleotide
cucgagcucgguucacuaa

SEQ ID NO: 1721361 - RNA, 19 nt, Artificial Sequence
  Description of Artificial Sequence: Synthetic oligonucleotide
gaaccacgauuuuggcacu

SEQ ID NO: 1721362 - RNA, 19 nt, Artificial Sequence
  Description of Artificial Sequence: Synthetic oligonucleotide
gguccacacgaagcggucc

SEQ ID NO: 1721363 - RNA, 19 nt, Artificial Sequence
  Description of Artificial Sequence: Synthetic oligonucleotide
accccgcgcugcuggauca

SEQ ID NO: 1721364 - RNA, 19 nt, Artificial Sequence
  Description of Artificial Sequence: Synthetic oligonucleotide
ggcuagcugcaugugguac

SEQ ID NO: 1721365 - RNA, 19 nt, Artificial Sequence
  Description of Artificial Sequence: Synthetic oligonucleotide
cucugacaaacgccuguaa

SEQ ID NO: 1721366 - RNA, 19 nt, Artificial Sequence
  Description of Artificial Sequence: Synthetic oligonucleotide
ccaagucuauuggcaaaag

SEQ ID NO: 1721367 - RNA, 19 nt, Artificial Sequence
  Description of Artificial Sequence: Synthetic oligonucleotide
aucaaccgguguguacuaa

SEQ ID NO: 1721368 - RNA, 19 nt, Artificial Sequence
  Description of Artificial Sequence: Synthetic oligonucleotide
gcgauugauuuagauaacu

SEQ ID NO: 1721369 - RNA, 19 nt, Artificial Sequence
  Description of Artificial Sequence: Synthetic oligonucleotide
ggcaaaagguauaucggau

SEQ ID NO: 1721370 - RNA, 19 nt, Artificial Sequence
  Description of Artificial Sequence: Synthetic oligonucleotide
acgaucugggacagaggaa

SEQ ID NO: 1721371 - RNA, 19 nt, Artificial Sequence
  Description of Artificial Sequence: Synthetic oligonucleotide
caugugguacugugugccu

SEQ ID NO: 1721372 - RNA, 19 nt, Artificial Sequence
  Description of Artificial Sequence: Synthetic oligonucleotide
ucucugcgaguagcagccu

SEQ ID NO: 1721373 - RNA, 19 nt, Artificial Sequence
  Description of Artificial Sequence: Synthetic oligonucleotide
uggaauggaccaggcucuu

SEQ ID NO: 1721374 - RNA, 19 nt, Artificial Sequence
  Description of Artificial Sequence: Synthetic oligonucleotide
ggguccuuuauuguuugua

SEQ ID NO: 1721375 - RNA, 19 nt, Artificial Sequence
  Description of Artificial Sequence: Synthetic oligonucleotide
cacccgaagccugacaggu

SEQ ID NO: 1721376 - RNA, 19 nt, Artificial Sequence
  Description of Artificial Sequence: Synthetic oligonucleotide
cugggguccuuuauuguuu

SEQ ID NO: 1721377 - RNA, 19 nt, Artificial Sequence
  Description of Artificial Sequence: Synthetic oligonucleotide
cuggcacacuuucccaucu

SEQ ID NO: 1721378 - RNA, 19 nt, Artificial Sequence
  Description of Artificial Sequence: Synthetic oligonucleotide
auauuccagccagcuguuu

SEQ ID NO: 1721379 - RNA, 19 nt, Artificial Sequence
  Description of Artificial Sequence: Synthetic oligonucleotide
uccauuccucgagcucggu

SEQ ID NO: 1721380 - RNA, 19 nt, Artificial Sequence
  Description of Artificial Sequence: Synthetic oligonucleotide
cccgcguuccucuaaaggu

SEQ ID NO: 1721381 - RNA, 19 nt, Artificial Sequence
  Description of Artificial Sequence: Synthetic oligonucleotide
cccgaagccugacagguaa

SEQ ID NO: 1721382 - RNA, 19 nt, Artificial Sequence
  Description of Artificial Sequence: Synthetic oligonucleotide
gccgucguagacgcgcacc

SEQ ID NO: 1721383 - RNA, 19 nt, Artificial Sequence
  Description of Artificial Sequence: Synthetic oligonucleotide
gcgcaccccgcgcugcugg

SEQ ID NO: 1721384 - RNA, 19 nt, Artificial Sequence
  Description of Artificial Sequence: Synthetic oligonucleotide
gcgaguagcagccuuucuu

SEQ ID NO: 1721385 - RNA, 19 nt, Artificial Sequence
  Description of Artificial Sequence: Synthetic oligonucleotide
uuccucgagcucgguucac

SEQ ID NO: 1721386 - RNA, 19 nt, Artificial Sequence
  Description of Artificial Sequence: Synthetic oligonucleotide
cagcaucgaauuuuaucuu

SEQ ID NO: 1721387 - RNA, 19 nt, Artificial Sequence
  Description of Artificial Sequence: Synthetic oligonucleotide
ggguaaaaccgcaagccuu

SEQ ID NO: 1721388 - RNA, 19 nt, Artificial Sequence
  Description of Artificial Sequence: Synthetic oligonucleotide
cgagcucgguucacuaaac

SEQ ID NO: 1721389 - RNA, 19 nt, Artificial Sequence
  Description of Artificial Sequence: Synthetic oligonucleotide
gcugggguccuuuauuguu

SEQ ID NO: 1721390 - RNA, 19 nt, Artificial Sequence
  Description of Artificial Sequence: Synthetic oligonucleotide
cuuuagccaggaggacaga

SEQ ID NO: 1721391 - RNA, 19 nt, Artificial Sequence
  Description of Artificial Sequence: Synthetic oligonucleotide
gaacacgaucugggacaga

SEQ ID NO: 1721392 - RNA, 19 nt, Artificial Sequence
  Description of Artificial Sequence: Synthetic oligonucleotide
cgaagcgguccauggccgc

SEQ ID NO: 1721393 - RNA, 19 nt, Artificial Sequence
  Description of Artificial Sequence: Synthetic oligonucleotide
cgccuguaaaacucaaucu

SEQ ID NO: 1721394 - RNA, 19 nt, Artificial Sequence
  Description of Artificial Sequence: Synthetic oligonucleotide
ccucuaaaggugccugcaa

SEQ ID NO: 1721395 - RNA, 19 nt, Artificial Sequence
  Description of Artificial Sequence: Synthetic oligonucleotide
ccgcuaucaaacacccgaa

SEQ ID NO: 1721396 - RNA, 19 nt, Artificial Sequence
  Description of Artificial Sequence: Synthetic oligonucleotide
ccacggagucaucucggca

SEQ ID NO: 1721397 - RNA, 19 nt, Artificial Sequence
  Description of Artificial Sequence: Synthetic oligonucleotide
gguuggcuauucccauacu

SEQ ID NO: 1721398 - RNA, 19 nt, Artificial Sequence
  Description of Artificial Sequence: Synthetic oligonucleotide
cgguguguacuaagaagaa

SEQ ID NO: 1721399 - RNA, 19 nt, Artificial Sequence
  Description of Artificial Sequence: Synthetic oligonucleotide
acccgaagccugacaggua

SEQ ID NO: 1721400 - RNA, 19 nt, Artificial Sequence
  Description of Artificial Sequence: Synthetic oligonucleotide
caaucuggccaugcucuuu

SEQ ID NO: 1721401 - RNA, 19 nt, Artificial Sequence
  Description of Artificial Sequence: Synthetic oligonucleotide
cgucguagacgcgcacccc

SEQ ID NO: 1721402 - RNA, 19 nt, Artificial Sequence
  Description of Artificial Sequence: Synthetic oligonucleotide
gggguccuuuauuguuugu

SEQ ID NO: 1721403 - RNA, 19 nt, Artificial Sequence
  Description of Artificial Sequence: Synthetic oligonucleotide
ccugguaaccggguuggcu

SEQ ID NO: 1721404 - RNA, 19 nt, Artificial Sequence
  Description of Artificial Sequence: Synthetic oligonucleotide
cugugacgucaccuuguuu

SEQ ID NO: 1721405 - RNA, 19 nt, Artificial Sequence
  Description of Artificial Sequence: Synthetic oligonucleotide
cccgcgcugcuggaucacc

SEQ ID NO: 1721406 - RNA, 19 nt, Artificial Sequence
  Description of Artificial Sequence: Synthetic oligonucleotide
ccucgccgucguagacgcg

SEQ ID NO: 1721407 - RNA, 19 nt, Artificial Sequence
  Description of Artificial Sequence: Synthetic oligonucleotide
cggagucaucucggcaaag

SEQ ID NO: 1721408 - RNA, 19 nt, Artificial Sequence
  Description of Artificial Sequence: Synthetic oligonucleotide
cccugguaaccggguuggc

SEQ ID NO: 1721409 - RNA, 19 nt, Artificial Sequence
  Description of Artificial Sequence: Synthetic oligonucleotide
ccggguuggcuauucccau

SEQ ID NO: 1721410 - RNA, 19 nt, Artificial Sequence
  Description of Artificial Sequence: Synthetic oligonucleotide
ccauuccucgagcucgguu

SEQ ID NO: 1721411 - RNA, 19 nt, Artificial Sequence
  Description of Artificial Sequence: Synthetic oligonucleotide
ccacgauuuuggcacucuu

SEQ ID NO: 1721412 - RNA, 19 nt, Artificial Sequence
  Description of Artificial Sequence: Synthetic oligonucleotide
cggguuggcuauucccaua

SEQ ID NO: 1721413 - RNA, 19 nt, Artificial Sequence
  Description of Artificial Sequence: Synthetic oligonucleotide
gguaaccggguuggcuauu

SEQ ID NO: 1721414 - RNA, 19 nt, Artificial Sequence
  Description of Artificial Sequence: Synthetic oligonucleotide
ccgaagccugacagguaau

SEQ ID NO: 1721415 - RNA, 19 nt, Artificial Sequence
  Description of Artificial Sequence: Synthetic oligonucleotide
cgccgucguagacgcgcac

SEQ ID NO: 1721416 - RNA, 19 nt, Artificial Sequence
  Description of Artificial Sequence: Synthetic oligonucleotide
cgcaagccuuccacggagu

SEQ ID NO: 1721417 - RNA, 19 nt, Artificial Sequence
  Description of Artificial Sequence: Synthetic oligonucleotide
ccccgcgcugcuggaucac

SEQ ID NO: 1721418 - RNA, 19 nt, Artificial Sequence
  Description of Artificial Sequence: Synthetic oligonucleotide
uuuacuuuaaaguugagag

SEQ ID NO: 1721419 - RNA, 19 nt, Artificial Sequence
  Description of Artificial Sequence: Synthetic oligonucleotide
acaucaguugaccaaaacc

SEQ ID NO: 1721420 - RNA, 19 nt, Artificial Sequence
  Description of Artificial Sequence: Synthetic oligonucleotide
uccaugagaaccaucaggg

SEQ ID NO: 1721421 - RNA, 19 nt, Artificial Sequence
  Description of Artificial Sequence: Synthetic oligonucleotide
uuuggcuauucuaugaagg

SEQ ID NO: 1721422 - RNA, 19 nt, Artificial Sequence
  Description of Artificial Sequence: Synthetic oligonucleotide
ugaauaaugaguacaaguc

SEQ ID NO: 1721423 - RNA, 19 nt, Artificial Sequence
  Description of Artificial Sequence: Synthetic oligonucleotide
aaugaaaacuccgacgccg

SEQ ID NO: 1721424 - RNA, 19 nt, Artificial Sequence
  Description of Artificial Sequence: Synthetic oligonucleotide
ugagaaggaacucucagug

SEQ ID NO: 1721425 - RNA, 19 nt, Artificial Sequence
  Description of Artificial Sequence: Synthetic oligonucleotide
aucuaagggagagagaggc

SEQ ID NO: 1721426 - RNA, 19 nt, Artificial Sequence
  Description of Artificial Sequence: Synthetic oligonucleotide
ugucugacaucuaagggag

SEQ ID NO: 1721427 - RNA, 19 nt, Artificial Sequence
  Description of Artificial Sequence: Synthetic oligonucleotide
uucgucagggucauggugg

SEQ ID NO: 1721428 - RNA, 19 nt, Artificial Sequence
  Description of Artificial Sequence: Synthetic oligonucleotide
cuuggaggcacucugagcc

SEQ ID NO: 1721429 - RNA, 19 nt, Artificial Sequence
  Description of Artificial Sequence: Synthetic oligonucleotide
aagucauaguuacucuuac

SEQ ID NO: 1721430 - RNA, 19 nt, Artificial Sequence
  Description of Artificial Sequence: Synthetic oligonucleotide
uaugaagggauccugucug

SEQ ID NO: 1721431 - RNA, 19 nt, Artificial Sequence
  Description of Artificial Sequence: Synthetic oligonucleotide
ucuuauuuggcuauucuau

SEQ ID NO: 1721432 - RNA, 19 nt, Artificial Sequence
  Description of Artificial Sequence: Synthetic oligonucleotide
ucaugagugaaauggagga

SEQ ID NO: 1721433 - RNA, 19 nt, Artificial Sequence
  Description of Artificial Sequence: Synthetic oligonucleotide
uugaccaaaaccaugucuc

SEQ ID NO: 1721434 - RNA, 19 nt, Artificial Sequence
  Description of Artificial Sequence: Synthetic oligonucleotide
cauuggugcacugagaagg

SEQ ID NO: 1721435 - RNA, 19 nt, Artificial Sequence
  Description of Artificial Sequence: Synthetic oligonucleotide
aggggaaacaagaagacac

SEQ ID NO: 1721436 - RNA, 19 nt, Artificial Sequence
  Description of Artificial Sequence: Synthetic oligonucleotide
augagugaaauggaggagc

SEQ ID NO: 1721437 - RNA, 19 nt, Artificial Sequence
  Description of Artificial Sequence: Synthetic oligonucleotide
ggugguagcuuucagaagg

SEQ ID NO: 1721438 - RNA, 19 nt, Artificial Sequence
  Description of Artificial Sequence: Synthetic oligonucleotide
aagacucuugcuugaagag

SEQ ID NO: 1721439 - RNA, 19 nt, Artificial Sequence
  Description of Artificial Sequence: Synthetic oligonucleotide
uaccccaaagccauuaaag

SEQ ID NO: 1721440 - RNA, 19 nt, Artificial Sequence
  Description of Artificial Sequence: Synthetic oligonucleotide
gucauaguuacucuuacac

SEQ ID NO: 1721441 - RNA, 19 nt, Artificial Sequence
  Description of Artificial Sequence: Synthetic oligonucleotide
acacuaguuucuuauuugg

SEQ ID NO: 1721442 - RNA, 19 nt, Artificial Sequence
  Description of Artificial Sequence: Synthetic oligonucleotide
uagguaaaggaaccuuucg

SEQ ID NO: 1721443 - RNA, 19 nt, Artificial Sequence
  Description of Artificial Sequence: Synthetic oligonucleotide
aauaaugaguacaagucau

SEQ ID NO: 1721444 - RNA, 19 nt, Artificial Sequence
  Description of Artificial Sequence: Synthetic oligonucleotide
cuggggauuauuuuggcag

SEQ ID NO: 1721445 - RNA, 19 nt, Artificial Sequence
  Description of Artificial Sequence: Synthetic oligonucleotide
gaguacaagucauaguuac

SEQ ID NO: 1721446 - RNA, 19 nt, Artificial Sequence
  Description of Artificial Sequence: Synthetic oligonucleotide
aucagggaaagucagcaag

SEQ ID NO: 1721447 - RNA, 19 nt, Artificial Sequence
  Description of Artificial Sequence: Synthetic oligonucleotide
aaguugagagggaagaaag

SEQ ID NO: 1721448 - RNA, 19 nt, Artificial Sequence
  Description of Artificial Sequence: Synthetic oligonucleotide
caucaguugaccaaaacca

SEQ ID NO: 1721449 - RNA, 19 nt, Artificial Sequence
  Description of Artificial Sequence: Synthetic oligonucleotide
agaaggaacucucagugca

SEQ ID NO: 1721450 - RNA, 19 nt, Artificial Sequence
  Description of Artificial Sequence: Synthetic oligonucleotide
agcgaaugaaaacuccgac

SEQ ID NO: 1721451 - RNA, 19 nt, Artificial Sequence
  Description of Artificial Sequence: Synthetic oligonucleotide
ugacaucuaagggagagag

SEQ ID NO: 1721452 - RNA, 19 nt, Artificial Sequence
  Description of Artificial Sequence: Synthetic oligonucleotide
ucuuacacuaguuucuuau

SEQ ID NO: 1721453 - RNA, 19 nt, Artificial Sequence
  Description of Artificial Sequence: Synthetic oligonucleotide
aacuccgacgccguuaaac

SEQ ID NO: 1721454 - RNA, 19 nt, Artificial Sequence
  Description of Artificial Sequence: Synthetic oligonucleotide
cuggaauagguaaaggaac

SEQ ID NO: 1721455 - RNA, 19 nt, Artificial Sequence
  Description of Artificial Sequence: Synthetic oligonucleotide
uacacuaguuucuuauuug

SEQ ID NO: 1721456 - RNA, 19 nt, Artificial Sequence
  Description of Artificial Sequence: Synthetic oligonucleotide
accaaaaccaugucuccgg

SEQ ID NO: 1721457 - RNA, 19 nt, Artificial Sequence
  Description of Artificial Sequence: Synthetic oligonucleotide
gaaaggauggcaccugagc

SEQ ID NO: 1721458 - RNA, 19 nt, Artificial Sequence
  Description of Artificial Sequence: Synthetic oligonucleotide
uccaaaugcagugaaugag

SEQ ID NO: 1721459 - RNA, 19 nt, Artificial Sequence
  Description of Artificial Sequence: Synthetic oligonucleotide
uuaguuaccccuaucuuuu

SEQ ID NO: 1721460 - RNA, 19 nt, Artificial Sequence
  Description of Artificial Sequence: Synthetic oligonucleotide
uugucauagcgaaugaaaa

SEQ ID NO: 1721461 - RNA, 19 nt, Artificial Sequence
  Description of Artificial Sequence: Synthetic oligonucleotide
cuucucacgccuuagcagc

SEQ ID NO: 1721462 - RNA, 19 nt, Artificial Sequence
  Description of Artificial Sequence: Synthetic oligonucleotide
uucauuucgggguauucca

SEQ ID NO: 1721463 - RNA, 19 nt, Artificial Sequence
  Description of Artificial Sequence: Synthetic oligonucleotide
ugagagucugauccauugg

SEQ ID NO: 1721464 - RNA, 19 nt, Artificial Sequence
  Description of Artificial Sequence: Synthetic oligonucleotide
uccauuggugcacugagaa

SEQ ID NO: 1721465 - RNA, 19 nt, Artificial Sequence
  Description of Artificial Sequence: Synthetic oligonucleotide
ugucauagcgaaugaaaac

SEQ ID NO: 1721466 - RNA, 19 nt, Artificial Sequence
  Description of Artificial Sequence: Synthetic oligonucleotide
aagccacacucuuacaaug

SEQ ID NO: 1721467 - RNA, 19 nt, Artificial Sequence
  Description of Artificial Sequence: Synthetic oligonucleotide
gauuauuuuggcaggaaga

SEQ ID NO: 1721468 - RNA, 19 nt, Artificial Sequence
  Description of Artificial Sequence: Synthetic oligonucleotide
cauagcgaaugaaaacucc

SEQ ID NO: 1721469 - RNA, 19 nt, Artificial Sequence
  Description of Artificial Sequence: Synthetic oligonucleotide
acagacaccuuccucuccg

SEQ ID NO: 1721470 - RNA, 19 nt, Artificial Sequence
  Description of Artificial Sequence: Synthetic oligonucleotide
guugagagggaagaaagcc

SEQ ID NO: 1721471 - RNA, 19 nt, Artificial Sequence
  Description of Artificial Sequence: Synthetic oligonucleotide
aagccgaagccaucuacuc

SEQ ID NO: 1721472 - RNA, 19 nt, Artificial Sequence
  Description of Artificial Sequence: Synthetic oligonucleotide
uuuacagagcugcuguggu

SEQ ID NO: 1721473 - RNA, 19 nt, Artificial Sequence
  Description of Artificial Sequence: Synthetic oligonucleotide
ucauaguuacucuuacacu

SEQ ID NO: 1721474 - RNA, 19 nt, Artificial Sequence
  Description of Artificial Sequence: Synthetic oligonucleotide
aaagccacacucuuacaau

SEQ ID NO: 1721475 - RNA, 19 nt, Artificial Sequence
  Description of Artificial Sequence: Synthetic oligonucleotide
acucaaggggcugagaguc

SEQ ID NO: 1721476 - RNA, 19 nt, Artificial Sequence
  Description of Artificial Sequence: Synthetic oligonucleotide
auagcgaaugaaaacuccg

SEQ ID NO: 1721477 - RNA, 19 nt, Artificial Sequence
  Description of Artificial Sequence: Synthetic oligonucleotide
ugaaccacagcagagcacu

SEQ ID NO: 1721478 - RNA, 19 nt, Artificial Sequence
  Description of Artificial Sequence: Synthetic oligonucleotide
uuaaagagcccauucucaa

SEQ ID NO: 1721479 - RNA, 19 nt, Artificial Sequence
  Description of Artificial Sequence: Synthetic oligonucleotide
uucgccacgguauuccucc

SEQ ID NO: 1721480 - RNA, 19 nt, Artificial Sequence
  Description of Artificial Sequence: Synthetic oligonucleotide
uguggucuuaguuaccccu

SEQ ID NO: 1721481 - RNA, 19 nt, Artificial Sequence
  Description of Artificial Sequence: Synthetic oligonucleotide
uuaaacuugcccugggcaa

SEQ ID NO: 1721482 - RNA, 19 nt, Artificial Sequence
  Description of Artificial Sequence: Synthetic oligonucleotide
aaaagcucuggccuggguu

SEQ ID NO: 1721483 - RNA, 19 nt, Artificial Sequence
  Description of Artificial Sequence: Synthetic oligonucleotide
gauucaggucaucccauag

SEQ ID NO: 1721484 - RNA, 19 nt, Artificial Sequence
  Description of Artificial Sequence: Synthetic oligonucleotide
acuucucacgccuuagcag

SEQ ID NO: 1721485 - RNA, 19 nt, Artificial Sequence
  Description of Artificial Sequence: Synthetic oligonucleotide
gauagcuuugccccuugcc

SEQ ID NO: 1721486 - RNA, 19 nt, Artificial Sequence
  Description of Artificial Sequence: Synthetic oligonucleotide
uggggauuauuuuggcagg

SEQ ID NO: 1721487 - RNA, 19 nt, Artificial Sequence
  Description of Artificial Sequence: Synthetic oligonucleotide
gucaugagugaaauggagg

SEQ ID NO: 1721488 - RNA, 19 nt, Artificial Sequence
  Description of Artificial Sequence: Synthetic oligonucleotide
cuugagccaucugagaagg

SEQ ID NO: 1721489 - RNA, 19 nt, Artificial Sequence
  Description of Artificial Sequence: Synthetic oligonucleotide
ugagauuccuggcugacuu

SEQ ID NO: 1721490 - RNA, 19 nt, Artificial Sequence
  Description of Artificial Sequence: Synthetic oligonucleotide
ucauagcgaaugaaaacuc

SEQ ID NO: 1721491 - RNA, 19 nt, Artificial Sequence
  Description of Artificial Sequence: Synthetic oligonucleotide
gacgccguuaaacuugccc

SEQ ID NO: 1721492 - RNA, 19 nt, Artificial Sequence
  Description of Artificial Sequence: Synthetic oligonucleotide
guaaaggaaccuuucguca

SEQ ID NO: 1721493 - RNA, 19 nt, Artificial Sequence
  Description of Artificial Sequence: Synthetic oligonucleotide
ucaagacucuugcuugaag

SEQ ID NO: 1721494 - RNA, 19 nt, Artificial Sequence
  Description of Artificial Sequence: Synthetic oligonucleotide
guuaaacuugcccugggca

SEQ ID NO: 1721495 - RNA, 19 nt, Artificial Sequence
  Description of Artificial Sequence: Synthetic oligonucleotide
uccgacgccguuaaacuug

SEQ ID NO: 1721496 - RNA, 19 nt, Artificial Sequence
  Description of Artificial Sequence: Synthetic oligonucleotide
auggugguagcuuucagaa

SEQ ID NO: 1721497 - RNA, 19 nt, Artificial Sequence
  Description of Artificial Sequence: Synthetic oligonucleotide
gaaagccacacucuuacaa

SEQ ID NO: 1721498 - RNA, 19 nt, Artificial Sequence
  Description of Artificial Sequence: Synthetic oligonucleotide
aauagguaaaggaaccuuu

SEQ ID NO: 1721499 - RNA, 19 nt, Artificial Sequence
  Description of Artificial Sequence: Synthetic oligonucleotide
aucggcaaacaucaguuga

SEQ ID NO: 1721500 - RNA, 19 nt, Artificial Sequence
  Description of Artificial Sequence: Synthetic oligonucleotide
aggaagacaguuuacuuua

SEQ ID NO: 1721501 - RNA, 19 nt, Artificial Sequence
  Description of Artificial Sequence: Synthetic oligonucleotide
uuucgucagggucauggug

SEQ ID NO: 1721502 - RNA, 19 nt, Artificial Sequence
  Description of Artificial Sequence: Synthetic oligonucleotide
uucuaugaagggauccugu

SEQ ID NO: 1721503 - RNA, 19 nt, Artificial Sequence
  Description of Artificial Sequence: Synthetic oligonucleotide
uuggggacgaccgucacgc

SEQ ID NO: 1721504 - RNA, 19 nt, Artificial Sequence
  Description of Artificial Sequence: Synthetic oligonucleotide
uauuccuccccacuggaau

SEQ ID NO: 1721505 - RNA, 19 nt, Artificial Sequence
  Description of Artificial Sequence: Synthetic oligonucleotide
ugggcuaucugcuguaacu

SEQ ID NO: 1721506 - RNA, 19 nt, Artificial Sequence
  Description of Artificial Sequence: Synthetic oligonucleotide
cuauucuaugaagggaucc

SEQ ID NO: 1721507 - RNA, 19 nt, Artificial Sequence
  Description of Artificial Sequence: Synthetic oligonucleotide
gucaguacacaugaggaug

SEQ ID NO: 1721508 - RNA, 19 nt, Artificial Sequence
  Description of Artificial Sequence: Synthetic oligonucleotide
uagcgaaugaaaacuccga

SEQ ID NO: 1721509 - RNA, 19 nt, Artificial Sequence
  Description of Artificial Sequence: Synthetic oligonucleotide
cugucugacaucuaaggga

SEQ ID NO: 1721510 - RNA, 19 nt, Artificial Sequence
  Description of Artificial Sequence: Synthetic oligonucleotide
ugcuguaacucagguaagg

SEQ ID NO: 1721511 - RNA, 19 nt, Artificial Sequence
  Description of Artificial Sequence: Synthetic oligonucleotide
auugaauaaugaguacaag

SEQ ID NO: 1721512 - RNA, 19 nt, Artificial Sequence
  Description of Artificial Sequence: Synthetic oligonucleotide
gaaugaaaacuccgacgcc

SEQ ID NO: 1721513 - RNA, 19 nt, Artificial Sequence
  Description of Artificial Sequence: Synthetic oligonucleotide
uacaagucauaguuacucu

SEQ ID NO: 1721514 - RNA, 19 nt, Artificial Sequence
  Description of Artificial Sequence: Synthetic oligonucleotide
ugaaauggaggagccaaug

SEQ ID NO: 1721515 - RNA, 19 nt, Artificial Sequence
  Description of Artificial Sequence: Synthetic oligonucleotide
auagguaaaggaaccuuuc

SEQ ID NO: 1721516 - RNA, 19 nt, Artificial Sequence
  Description of Artificial Sequence: Synthetic oligonucleotide
guacaagucauaguuacuc

SEQ ID NO: 1721517 - RNA, 19 nt, Artificial Sequence
  Description of Artificial Sequence: Synthetic oligonucleotide
agaccuggauagcuuugcc

SEQ ID NO: 1721518 - RNA, 19 nt, Artificial Sequence
  Description of Artificial Sequence: Synthetic oligonucleotide
ucggcaaacaucaguugac

SEQ ID NO: 1721519 - RNA, 19 nt, Artificial Sequence
  Description of Artificial Sequence: Synthetic oligonucleotide
cuaagggagagagaggcac

SEQ ID NO: 1721520 - RNA, 19 nt, Artificial Sequence
  Description of Artificial Sequence: Synthetic oligonucleotide
ugaccaaaaccaugucucc

SEQ ID NO: 1721521 - RNA, 19 nt, Artificial Sequence
  Description of Artificial Sequence: Synthetic oligonucleotide
cacuaguuucuuauuuggc

SEQ ID NO: 1721522 - RNA, 19 nt, Artificial Sequence
  Description of Artificial Sequence: Synthetic oligonucleotide
aaggaaccuuucgucaggg

SEQ ID NO: 1721523 - RNA, 19 nt, Artificial Sequence
  Description of Artificial Sequence: Synthetic oligonucleotide
uucgggguauuccaugaga

SEQ ID NO: 1721524 - RNA, 19 nt, Artificial Sequence
  Description of Artificial Sequence: Synthetic oligonucleotide
agcccauucucaaagugac

SEQ ID NO: 1721525 - RNA, 19 nt, Artificial Sequence
  Description of Artificial Sequence: Synthetic oligonucleotide
ucuaugaagggauccuguc

SEQ ID NO: 1721526 - RNA, 19 nt, Artificial Sequence
  Description of Artificial Sequence: Synthetic oligonucleotide
ggauuauuuuggcaggaag

SEQ ID NO: 1721527 - RNA, 19 nt, Artificial Sequence
  Description of Artificial Sequence: Synthetic oligonucleotide
guuguucucaaacaggccu

SEQ ID NO: 1721528 - RNA, 19 nt, Artificial Sequence
  Description of Artificial Sequence: Synthetic oligonucleotide
cuugcuugaagagucauga

SEQ ID NO: 1721529 - RNA, 19 nt, Artificial Sequence
  Description of Artificial Sequence: Synthetic oligonucleotide
cuucauuucgggguauucc

SEQ ID NO: 1721530 - RNA, 19 nt, Artificial Sequence
  Description of Artificial Sequence: Synthetic oligonucleotide
accccaaagccauuaaaga

SEQ ID NO: 1721531 - RNA, 19 nt, Artificial Sequence
  Description of Artificial Sequence: Synthetic oligonucleotide
uggugcacugagaaggaac

SEQ ID NO: 1721532 - RNA, 19 nt, Artificial Sequence
  Description of Artificial Sequence: Synthetic oligonucleotide
gagaaggaacucucagugc

SEQ ID NO: 1721533 - RNA, 19 nt, Artificial Sequence
  Description of Artificial Sequence: Synthetic oligonucleotide
acaccuuccucuccgccac

SEQ ID NO: 1721534 - RNA, 19 nt, Artificial Sequence
  Description of Artificial Sequence: Synthetic oligonucleotide
caagacucuugcuugaaga

SEQ ID NO: 1721535 - RNA, 19 nt, Artificial Sequence
  Description of Artificial Sequence: Synthetic oligonucleotide
cgaaugaaaacuccgacgc

SEQ ID NO: 1721536 - RNA, 19 nt, Artificial Sequence
  Description of Artificial Sequence: Synthetic oligonucleotide
ugaguacaagucauaguua

SEQ ID NO: 1721537 - RNA, 19 nt, Artificial Sequence
  Description of Artificial Sequence: Synthetic oligonucleotide
acgccguuaaacuugcccu

SEQ ID NO: 1721538 - RNA, 19 nt, Artificial Sequence
  Description of Artificial Sequence: Synthetic oligonucleotide
ugcacugagaaggaacucu

SEQ ID NO: 1721539 - RNA, 19 nt, Artificial Sequence
  Description of Artificial Sequence: Synthetic oligonucleotide
ucuuaguuaccccuaucuu

SEQ ID NO: 1721540 - RNA, 19 nt, Artificial Sequence
  Description of Artificial Sequence: Synthetic oligonucleotide
uagcuuucagaaggaaagg

SEQ ID NO: 1721541 - RNA, 19 nt, Artificial Sequence
  Description of Artificial Sequence: Synthetic oligonucleotide
guuuacuuuaaaguugaga

SEQ ID NO: 1721542 - RNA, 19 nt, Artificial Sequence
  Description of Artificial Sequence: Synthetic oligonucleotide
agauuccuggcugacuugg

SEQ ID NO: 1721543 - RNA, 19 nt, Artificial Sequence
  Description of Artificial Sequence: Synthetic oligonucleotide
gacucuugcuugaagaguc

SEQ ID NO: 1721544 - RNA, 19 nt, Artificial Sequence
  Description of Artificial Sequence: Synthetic oligonucleotide
cagucaguacacaugagga

SEQ ID NO: 1721545 - RNA, 19 nt, Artificial Sequence
  Description of Artificial Sequence: Synthetic oligonucleotide
aguugaccaaaaccauguc

SEQ ID NO: 1721546 - RNA, 19 nt, Artificial Sequence
  Description of Artificial Sequence: Synthetic oligonucleotide
acacucuuacaaugagggg

SEQ ID NO: 1721547 - RNA, 19 nt, Artificial Sequence
  Description of Artificial Sequence: Synthetic oligonucleotide
uuggcaggaagaucugccc

SEQ ID NO: 1721548 - RNA, 19 nt, Artificial Sequence
  Description of Artificial Sequence: Synthetic oligonucleotide
gacuuggaggcacucugag

SEQ ID NO: 1721549 - RNA, 19 nt, Artificial Sequence
  Description of Artificial Sequence: Synthetic oligonucleotide
ucucaaacaggccuucauu

SEQ ID NO: 1721550 - RNA, 19 nt, Artificial Sequence
  Description of Artificial Sequence: Synthetic oligonucleotide
agagcccauucucaaagug

SEQ ID NO: 1721551 - RNA, 19 nt, Artificial Sequence
  Description of Artificial Sequence: Synthetic oligonucleotide
cagagacaagccuggaccc

SEQ ID NO: 1721552 - RNA, 19 nt, Artificial Sequence
  Description of Artificial Sequence: Synthetic oligonucleotide
gucauguugucauagcgaa

SEQ ID NO: 1721553 - RNA, 19 nt, Artificial Sequence
  Description of Artificial Sequence: Synthetic oligonucleotide
accuggggauuauuuuggc

SEQ ID NO: 1721554 - RNA, 19 nt, Artificial Sequence
  Description of Artificial Sequence: Synthetic oligonucleotide
auaguuacucuuacacuag

SEQ ID NO: 1721555 - RNA, 19 nt, Artificial Sequence
  Description of Artificial Sequence: Synthetic oligonucleotide
agacaccuuccucuccgcc

SEQ ID NO: 1721556 - RNA, 19 nt, Artificial Sequence
  Description of Artificial Sequence: Synthetic oligonucleotide
guugaaccacagcagagca

SEQ ID NO: 1721557 - RNA, 19 nt, Artificial Sequence
  Description of Artificial Sequence: Synthetic oligonucleotide
ccaaagccauuaaagagcc

SEQ ID NO: 1721558 - RNA, 19 nt, Artificial Sequence
  Description of Artificial Sequence: Synthetic oligonucleotide
agucaugagugaaauggag

SEQ ID NO: 1721559 - RNA, 19 nt, Artificial Sequence
  Description of Artificial Sequence: Synthetic oligonucleotide
cauucucaaagugacccag

SEQ ID NO: 1721560 - RNA, 19 nt, Artificial Sequence
  Description of Artificial Sequence: Synthetic oligonucleotide
accaucggcaaacaucagu

SEQ ID NO: 1721561 - RNA, 19 nt, Artificial Sequence
  Description of Artificial Sequence: Synthetic oligonucleotide
aacucagguaaggaagaca

SEQ ID NO: 1721562 - RNA, 19 nt, Artificial Sequence
  Description of Artificial Sequence: Synthetic oligonucleotide
gggguauuccaugagaacc

SEQ ID NO: 1721563 - RNA, 19 nt, Artificial Sequence
  Description of Artificial Sequence: Synthetic oligonucleotide
uaguuacucuuacacuagu

SEQ ID NO: 1721564 - RNA, 19 nt, Artificial Sequence
  Description of Artificial Sequence: Synthetic oligonucleotide
uuucgggguauuccaugag

SEQ ID NO: 1721565 - RNA, 19 nt, Artificial Sequence
  Description of Artificial Sequence: Synthetic oligonucleotide
acaagucauaguuacucuu

SEQ ID NO: 1721566 - RNA, 19 nt, Artificial Sequence
  Description of Artificial Sequence: Synthetic oligonucleotide
caucuaagggagagagagg

SEQ ID NO: 1721567 - RNA, 19 nt, Artificial Sequence
  Description of Artificial Sequence: Synthetic oligonucleotide
aggucaucccauaggagac

SEQ ID NO: 1721568 - RNA, 19 nt, Artificial Sequence
  Description of Artificial Sequence: Synthetic oligonucleotide
aggacugguuuccagcugu

SEQ ID NO: 1721569 - RNA, 19 nt, Artificial Sequence
  Description of Artificial Sequence: Synthetic oligonucleotide
ucuaagggagagagaggca

SEQ ID NO: 1721570 - RNA, 19 nt, Artificial Sequence
  Description of Artificial Sequence: Synthetic oligonucleotide
ugccccuugcccuggauug

SEQ ID NO: 1721571 - RNA, 19 nt, Artificial Sequence
  Description of Artificial Sequence: Synthetic oligonucleotide
agggucaagacucuugcuu

SEQ ID NO: 1721572 - RNA, 19 nt, Artificial Sequence
  Description of Artificial Sequence: Synthetic oligonucleotide
uggggacugggcuaucugc

SEQ ID NO: 1721573 - RNA, 19 nt, Artificial Sequence
  Description of Artificial Sequence: Synthetic oligonucleotide
uccccacuggaauagguaa

SEQ ID NO: 1721574 - RNA, 19 nt, Artificial Sequence
  Description of Artificial Sequence: Synthetic oligonucleotide
uaaagagcccauucucaaa

SEQ ID NO: 1721575 - RNA, 19 nt, Artificial Sequence
  Description of Artificial Sequence: Synthetic oligonucleotide
auggcaccugagcuuggcc

SEQ ID NO: 1721576 - RNA, 19 nt, Artificial Sequence
  Description of Artificial Sequence: Synthetic oligonucleotide
uucucaaacaggccuucau

SEQ ID NO: 1721577 - RNA, 19 nt, Artificial Sequence
  Description of Artificial Sequence: Synthetic oligonucleotide
caucugagaaggucaguac

SEQ ID NO: 1721578 - RNA, 19 nt, Artificial Sequence
  Description of Artificial Sequence: Synthetic oligonucleotide
ugcaagcuuucccagggau

SEQ ID NO: 1721579 - RNA, 19 nt, Artificial Sequence
  Description of Artificial Sequence: Synthetic oligonucleotide
agucauaguuacucuuaca

SEQ ID NO: 1721580 - RNA, 19 nt, Artificial Sequence
  Description of Artificial Sequence: Synthetic oligonucleotide
acgguauuccuccccacug

SEQ ID NO: 1721581 - RNA, 19 nt, Artificial Sequence
  Description of Artificial Sequence: Synthetic oligonucleotide
ugagccaucugagaagguc

SEQ ID NO: 1721582 - RNA, 19 nt, Artificial Sequence
  Description of Artificial Sequence: Synthetic oligonucleotide
cugcuguggucuuaguuac

SEQ ID NO: 1721583 - RNA, 19 nt, Artificial Sequence
  Description of Artificial Sequence: Synthetic oligonucleotide
caaaaccaugucuccggcc

SEQ ID NO: 1721584 - RNA, 19 nt, Artificial Sequence
  Description of Artificial Sequence: Synthetic oligonucleotide
agucaguacacaugaggau

SEQ ID NO: 1721585 - RNA, 19 nt, Artificial Sequence
  Description of Artificial Sequence: Synthetic oligonucleotide
gucauagcgaaugaaaacu

SEQ ID NO: 1721586 - RNA, 19 nt, Artificial Sequence
  Description of Artificial Sequence: Synthetic oligonucleotide
gaaccaucagggaaaguca

SEQ ID NO: 1721587 - RNA, 19 nt, Artificial Sequence
  Description of Artificial Sequence: Synthetic oligonucleotide
acgaccgucacgccccgac

SEQ ID NO: 1721588 - RNA, 19 nt, Artificial Sequence
  Description of Artificial Sequence: Synthetic oligonucleotide
agugagauuccuggcugac

SEQ ID NO: 1721589 - RNA, 19 nt, Artificial Sequence
  Description of Artificial Sequence: Synthetic oligonucleotide
guaggugccaccaucggca

SEQ ID NO: 1721590 - RNA, 19 nt, Artificial Sequence
  Description of Artificial Sequence: Synthetic oligonucleotide
uuauuuuggcaggaagauc

SEQ ID NO: 1721591 - RNA, 19 nt, Artificial Sequence
  Description of Artificial Sequence: Synthetic oligonucleotide
aggcuugagggucaagacu

SEQ ID NO: 1721592 - RNA, 19 nt, Artificial Sequence
  Description of Artificial Sequence: Synthetic oligonucleotide
ugacuuggaggcacucuga

SEQ ID NO: 1721593 - RNA, 19 nt, Artificial Sequence
  Description of Artificial Sequence: Synthetic oligonucleotide
uugaaccacagcagagcac

SEQ ID NO: 1721594 - RNA, 19 nt, Artificial Sequence
  Description of Artificial Sequence: Synthetic oligonucleotide
uggcaccugagcuuggccu

SEQ ID NO: 1721595 - RNA, 19 nt, Artificial Sequence
  Description of Artificial Sequence: Synthetic oligonucleotide
guugaccaaaaccaugucu

SEQ ID NO: 1721596 - RNA, 19 nt, Artificial Sequence
  Description of Artificial Sequence: Synthetic oligonucleotide
gaagggauccugucugaca

SEQ ID NO: 1721597 - RNA, 19 nt, Artificial Sequence
  Description of Artificial Sequence: Synthetic oligonucleotide
gucuuaguuaccccuaucu

SEQ ID NO: 1721598 - RNA, 19 nt, Artificial Sequence
  Description of Artificial Sequence: Synthetic oligonucleotide
uggugguagcuuucagaag

SEQ ID NO: 1721599 - RNA, 19 nt, Artificial Sequence
  Description of Artificial Sequence: Synthetic oligonucleotide
agccaaugccagucaguac

SEQ ID NO: 1721600 - RNA, 19 nt, Artificial Sequence
  Description of Artificial Sequence: Synthetic oligonucleotide
gggaaagucagcaagccga

SEQ ID NO: 1721601 - RNA, 19 nt, Artificial Sequence
  Description of Artificial Sequence: Synthetic oligonucleotide
gggucaagacucuugcuug

SEQ ID NO: 1721602 - RNA, 19 nt, Artificial Sequence
  Description of Artificial Sequence: Synthetic oligonucleotide
gccucagucccacuggacg

SEQ ID NO: 1721603 - RNA, 19 nt, Artificial Sequence
  Description of Artificial Sequence: Synthetic oligonucleotide
uggaggcacucugagcccg

SEQ ID NO: 1721604 - RNA, 19 nt, Artificial Sequence
  Description of Artificial Sequence: Synthetic oligonucleotide
guaacucagguaaggaaga

SEQ ID NO: 1721605 - RNA, 19 nt, Artificial Sequence
  Description of Artificial Sequence: Synthetic oligonucleotide
ggguaacacacagaaaagc

SEQ ID NO: 1721606 - RNA, 19 nt, Artificial Sequence
  Description of Artificial Sequence: Synthetic oligonucleotide
ccugucugacaucuaaggg

SEQ ID NO: 1721607 - RNA, 19 nt, Artificial Sequence
  Description of Artificial Sequence: Synthetic oligonucleotide
ucaaggggcugagagucug

SEQ ID NO: 1721608 - RNA, 19 nt, Artificial Sequence
  Description of Artificial Sequence: Synthetic oligonucleotide
gagaccuggauagcuuugc

SEQ ID NO: 1721609 - RNA, 19 nt, Artificial Sequence
  Description of Artificial Sequence: Synthetic oligonucleotide
ccuuucgucagggucaugg

SEQ ID NO: 1721610 - RNA, 19 nt, Artificial Sequence
  Description of Artificial Sequence: Synthetic oligonucleotide
gccgaagccaucuacucug

SEQ ID NO: 1721611 - RNA, 19 nt, Artificial Sequence
  Description of Artificial Sequence: Synthetic oligonucleotide
ugggcguaacuggagaccu

SEQ ID NO: 1721612 - RNA, 19 nt, Artificial Sequence
  Description of Artificial Sequence: Synthetic oligonucleotide
caggcuugagggucaagac

SEQ ID NO: 1721613 - RNA, 19 nt, Artificial Sequence
  Description of Artificial Sequence: Synthetic oligonucleotide
cuuggggacgaccgucacg

SEQ ID NO: 1721614 - RNA, 19 nt, Artificial Sequence
  Description of Artificial Sequence: Synthetic oligonucleotide
gggaaacaagaagacacag

SEQ ID NO: 1721615 - RNA, 19 nt, Artificial Sequence
  Description of Artificial Sequence: Synthetic oligonucleotide
uggguuuuacagagcugcu

SEQ ID NO: 1721616 - RNA, 19 nt, Artificial Sequence
  Description of Artificial Sequence: Synthetic oligonucleotide
gaccgucacgccccgacgc

SEQ ID NO: 1721617 - RNA, 19 nt, Artificial Sequence
  Description of Artificial Sequence: Synthetic oligonucleotide
cuuaguuaccccuaucuuu

SEQ ID NO: 1721618 - RNA, 19 nt, Artificial Sequence
  Description of Artificial Sequence: Synthetic oligonucleotide
aaccaugucuccggcccuc

SEQ ID NO: 1721619 - RNA, 19 nt, Artificial Sequence
  Description of Artificial Sequence: Synthetic oligonucleotide
cuccaaaugcagugaauga

SEQ ID NO: 1721620 - RNA, 19 nt, Artificial Sequence
  Description of Artificial Sequence: Synthetic oligonucleotide
ccaucaggcagugagauuc

SEQ ID NO: 1721621 - RNA, 19 nt, Artificial Sequence
  Description of Artificial Sequence: Synthetic oligonucleotide
auguugucauagcgaauga

SEQ ID NO: 1721622 - RNA, 19 nt, Artificial Sequence
  Description of Artificial Sequence: Synthetic oligonucleotide
cuguaacucagguaaggaa

SEQ ID NO: 1721623 - RNA, 19 nt, Artificial Sequence
  Description of Artificial Sequence: Synthetic oligonucleotide
gagauuccuggcugacuug

SEQ ID NO: 1721624 - RNA, 19 nt, Artificial Sequence
  Description of Artificial Sequence: Synthetic oligonucleotide
cuuagcagcuuguuguucu

SEQ ID NO: 1721625 - RNA, 19 nt, Artificial Sequence
  Description of Artificial Sequence: Synthetic oligonucleotide
gagcccauucucaaaguga

SEQ ID NO: 1721626 - RNA, 19 nt, Artificial Sequence
  Description of Artificial Sequence: Synthetic oligonucleotide
caguugaccaaaaccaugu

SEQ ID NO: 1721627 - RNA, 19 nt, Artificial Sequence
  Description of Artificial Sequence: Synthetic oligonucleotide
agccgaagccaucuacucu

SEQ ID NO: 1721628 - RNA, 19 nt, Artificial Sequence
  Description of Artificial Sequence: Synthetic oligonucleotide
ugguuuccagcugugccca

SEQ ID NO: 1721629 - RNA, 19 nt, Artificial Sequence
  Description of Artificial Sequence: Synthetic oligonucleotide
uggucuuaguuaccccuau

SEQ ID NO: 1721630 - RNA, 19 nt, Artificial Sequence
  Description of Artificial Sequence: Synthetic oligonucleotide
acgccuuagcagcuuguug

SEQ ID NO: 1721631 - RNA, 19 nt, Artificial Sequence
  Description of Artificial Sequence: Synthetic oligonucleotide
agaaagccacacucuuaca

SEQ ID NO: 1721632 - RNA, 19 nt, Artificial Sequence
  Description of Artificial Sequence: Synthetic oligonucleotide
aacucucagugcaagcuuu

SEQ ID NO: 1721633 - RNA, 19 nt, Artificial Sequence
  Description of Artificial Sequence: Synthetic oligonucleotide
ucauaccuugagccaucug

SEQ ID NO: 1721634 - RNA, 19 nt, Artificial Sequence
  Description of Artificial Sequence: Synthetic oligonucleotide
gcagugagauuccuggcug

SEQ ID NO: 1721635 - RNA, 19 nt, Artificial Sequence
  Description of Artificial Sequence: Synthetic oligonucleotide
gaaagucagcaagccgaag

SEQ ID NO: 1721636 - RNA, 19 nt, Artificial Sequence
  Description of Artificial Sequence: Synthetic oligonucleotide
uaggagaccuggauagcuu

SEQ ID NO: 1721637 - RNA, 19 nt, Artificial Sequence
  Description of Artificial Sequence: Synthetic oligonucleotide
uaacucagguaaggaagac

SEQ ID NO: 1721638 - RNA, 19 nt, Artificial Sequence
  Description of Artificial Sequence: Synthetic oligonucleotide
ggcguaacuggagaccugg

SEQ ID NO: 1721639 - RNA, 19 nt, Artificial Sequence
  Description of Artificial Sequence: Synthetic oligonucleotide
ugagcccguugaaccacag

SEQ ID NO: 1721640 - RNA, 19 nt, Artificial Sequence
  Description of Artificial Sequence: Synthetic oligonucleotide
uuccaacacucaaggggcu

SEQ ID NO: 1721641 - RNA, 19 nt, Artificial Sequence
  Description of Artificial Sequence: Synthetic oligonucleotide
ggcuugagggucaagacuc

SEQ ID NO: 1721642 - RNA, 19 nt, Artificial Sequence
  Description of Artificial Sequence: Synthetic oligonucleotide
augaagggauccugucuga

SEQ ID NO: 1721643 - RNA, 19 nt, Artificial Sequence
  Description of Artificial Sequence: Synthetic oligonucleotide
aguacaagucauaguuacu

SEQ ID NO: 1721644 - RNA, 19 nt, Artificial Sequence
  Description of Artificial Sequence: Synthetic oligonucleotide
ugaagggauccugucugac

SEQ ID NO: 1721645 - RNA, 19 nt, Artificial Sequence
  Description of Artificial Sequence: Synthetic oligonucleotide
ucagcaagccgaagccauc

SEQ ID NO: 1721646 - RNA, 19 nt, Artificial Sequence
  Description of Artificial Sequence: Synthetic oligonucleotide
gaagaucugccccaggcuu

SEQ ID NO: 1721647 - RNA, 19 nt, Artificial Sequence
  Description of Artificial Sequence: Synthetic oligonucleotide
cuugcccuggauugaauaa

SEQ ID NO: 1721648 - RNA, 19 nt, Artificial Sequence
  Description of Artificial Sequence: Synthetic oligonucleotide
caagucuuccaacacucaa

SEQ ID NO: 1721649 - RNA, 19 nt, Artificial Sequence
  Description of Artificial Sequence: Synthetic oligonucleotide
ccaccaucggcaaacauca

SEQ ID NO: 1721650 - RNA, 19 nt, Artificial Sequence
  Description of Artificial Sequence: Synthetic oligonucleotide
aggagaccuggauagcuuu

SEQ ID NO: 1721651 - RNA, 19 nt, Artificial Sequence
  Description of Artificial Sequence: Synthetic oligonucleotide
accgucacgccccgacgcg

SEQ ID NO: 1721652 - RNA, 19 nt, Artificial Sequence
  Description of Artificial Sequence: Synthetic oligonucleotide
cauaggagaccuggauagc

SEQ ID NO: 1721653 - RNA, 19 nt, Artificial Sequence
  Description of Artificial Sequence: Synthetic oligonucleotide
gcuaucugcuguaacucag

SEQ ID NO: 1721654 - RNA, 19 nt, Artificial Sequence
  Description of Artificial Sequence: Synthetic oligonucleotide
auuccuccccacuggaaua

SEQ ID NO: 1721655 - RNA, 19 nt, Artificial Sequence
  Description of Artificial Sequence: Synthetic oligonucleotide
cugggcguaacuggagacc

SEQ ID NO: 1721656 - RNA, 19 nt, Artificial Sequence
  Description of Artificial Sequence: Synthetic oligonucleotide
aguaccccaaagccauuaa

SEQ ID NO: 1721657 - RNA, 19 nt, Artificial Sequence
  Description of Artificial Sequence: Synthetic oligonucleotide
ccuugagccaucugagaag

SEQ ID NO: 1721658 - RNA, 19 nt, Artificial Sequence
  Description of Artificial Sequence: Synthetic oligonucleotide
acuuuaaaguugagaggga

SEQ ID NO: 1721659 - RNA, 19 nt, Artificial Sequence
  Description of Artificial Sequence: Synthetic oligonucleotide
cuuccauucgccacgguau

SEQ ID NO: 1721660 - RNA, 19 nt, Artificial Sequence
  Description of Artificial Sequence: Synthetic oligonucleotide
ucuuggggacgaccgucac

SEQ ID NO: 1721661 - RNA, 19 nt, Artificial Sequence
  Description of Artificial Sequence: Synthetic oligonucleotide
gggguaacacacagaaaag

SEQ ID NO: 1721662 - RNA, 19 nt, Artificial Sequence
  Description of Artificial Sequence: Synthetic oligonucleotide
uuccauucgccacgguauu

SEQ ID NO: 1721663 - RNA, 19 nt, Artificial Sequence
  Description of Artificial Sequence: Synthetic oligonucleotide
ggugccaccaucggcaaac

SEQ ID NO: 1721664 - RNA, 19 nt, Artificial Sequence
  Description of Artificial Sequence: Synthetic oligonucleotide
ggaaacaagaagacacaga

SEQ ID NO: 1721665 - RNA, 19 nt, Artificial Sequence
  Description of Artificial Sequence: Synthetic oligonucleotide
aagccauuaaagagcccau

SEQ ID NO: 1721666 - RNA, 19 nt, Artificial Sequence
  Description of Artificial Sequence: Synthetic oligonucleotide
acucucagugcaagcuuuc

SEQ ID NO: 1721667 - RNA, 19 nt, Artificial Sequence
  Description of Artificial Sequence: Synthetic oligonucleotide
aguuuacuuuaaaguugag

SEQ ID NO: 1721668 - RNA, 19 nt, Artificial Sequence
  Description of Artificial Sequence: Synthetic oligonucleotide
auuggugcacugagaagga

SEQ ID NO: 1721669 - RNA, 19 nt, Artificial Sequence
  Description of Artificial Sequence: Synthetic oligonucleotide
augaaaacuccgacgccgu

SEQ ID NO: 1721670 - RNA, 19 nt, Artificial Sequence
  Description of Artificial Sequence: Synthetic oligonucleotide
ugaaaacuccgacgccguu

SEQ ID NO: 1721671 - RNA, 19 nt, Artificial Sequence
  Description of Artificial Sequence: Synthetic oligonucleotide
cuaugaagggauccugucu

SEQ ID NO: 1721672 - RNA, 19 nt, Artificial Sequence
  Description of Artificial Sequence: Synthetic oligonucleotide
cacucugagcccguugaac

SEQ ID NO: 1721673 - RNA, 19 nt, Artificial Sequence
  Description of Artificial Sequence: Synthetic oligonucleotide
aguuacucuuacacuaguu

SEQ ID NO: 1721674 - RNA, 19 nt, Artificial Sequence
  Description of Artificial Sequence: Synthetic oligonucleotide
cugagaaggaacucucagu

SEQ ID NO: 1721675 - RNA, 19 nt, Artificial Sequence
  Description of Artificial Sequence: Synthetic oligonucleotide
agucagcaagccgaagcca

SEQ ID NO: 1721676 - RNA, 19 nt, Artificial Sequence
  Description of Artificial Sequence: Synthetic oligonucleotide
ucucggcuccccacagaca

SEQ ID NO: 1721677 - RNA, 19 nt, Artificial Sequence
  Description of Artificial Sequence: Synthetic oligonucleotide
cucacgccuuagcagcuug

SEQ ID NO: 1721678 - RNA, 19 nt, Artificial Sequence
  Description of Artificial Sequence: Synthetic oligonucleotide
auucgccacgguauuccuc

SEQ ID NO: 1721679 - RNA, 19 nt, Artificial Sequence
  Description of Artificial Sequence: Synthetic oligonucleotide
gagcccguugaaccacagc

SEQ ID NO: 1721680 - RNA, 19 nt, Artificial Sequence
  Description of Artificial Sequence: Synthetic oligonucleotide
ccucagucccacuggacgc

SEQ ID NO: 1721681 - RNA, 19 nt, Artificial Sequence
  Description of Artificial Sequence: Synthetic oligonucleotide
agccacacucuuacaauga

SEQ ID NO: 1721682 - RNA, 19 nt, Artificial Sequence
  Description of Artificial Sequence: Synthetic oligonucleotide
cugggcuaucugcuguaac

SEQ ID NO: 1721683 - RNA, 19 nt, Artificial Sequence
  Description of Artificial Sequence: Synthetic oligonucleotide
uugccccuugcccuggauu

SEQ ID NO: 1721684 - RNA, 19 nt, Artificial Sequence
  Description of Artificial Sequence: Synthetic oligonucleotide
aaccuuucgucagggucau

SEQ ID NO: 1721685 - RNA, 19 nt, Artificial Sequence
  Description of Artificial Sequence: Synthetic oligonucleotide
agagacaagccuggaccca

SEQ ID NO: 1721686 - RNA, 19 nt, Artificial Sequence
  Description of Artificial Sequence: Synthetic oligonucleotide
cucugagcccguugaacca

SEQ ID NO: 1721687 - RNA, 19 nt, Artificial Sequence
  Description of Artificial Sequence: Synthetic oligonucleotide
cacugagaaggaacucuca

SEQ ID NO: 1721688 - RNA, 19 nt, Artificial Sequence
  Description of Artificial Sequence: Synthetic oligonucleotide
gaggcugggcguaacugga

SEQ ID NO: 1721689 - RNA, 19 nt, Artificial Sequence
  Description of Artificial Sequence: Synthetic oligonucleotide
gcaagccgaagccaucuac

SEQ ID NO: 1721690 - RNA, 19 nt, Artificial Sequence
  Description of Artificial Sequence: Synthetic oligonucleotide
agcggccaggaucuuugcu

SEQ ID NO: 1721691 - RNA, 19 nt, Artificial Sequence
  Description of Artificial Sequence: Synthetic oligonucleotide
ggguauuccaugagaacca

SEQ ID NO: 1721692 - RNA, 19 nt, Artificial Sequence
  Description of Artificial Sequence: Synthetic oligonucleotide
gaaggaacucucagugcaa

SEQ ID NO: 1721693 - RNA, 19 nt, Artificial Sequence
  Description of Artificial Sequence: Synthetic oligonucleotide
caagccgaagccaucuacu

SEQ ID NO: 1721694 - RNA, 19 nt, Artificial Sequence
  Description of Artificial Sequence: Synthetic oligonucleotide
ggccucuuggggacgaccg

SEQ ID NO: 1721695 - RNA, 19 nt, Artificial Sequence
  Description of Artificial Sequence: Synthetic oligonucleotide
ggguuuuacagagcugcug

SEQ ID NO: 1721696 - RNA, 19 nt, Artificial Sequence
  Description of Artificial Sequence: Synthetic oligonucleotide
ucggcuccccacagacacc

SEQ ID NO: 1721697 - RNA, 19 nt, Artificial Sequence
  Description of Artificial Sequence: Synthetic oligonucleotide
ggcuaucugcuguaacuca

SEQ ID NO: 1721698 - RNA, 19 nt, Artificial Sequence
  Description of Artificial Sequence: Synthetic oligonucleotide
gagaccuggggauuauuuu

SEQ ID NO: 1721699 - RNA, 19 nt, Artificial Sequence
  Description of Artificial Sequence: Synthetic oligonucleotide
gccguuaaacuugcccugg

SEQ ID NO: 1721700 - RNA, 19 nt, Artificial Sequence
  Description of Artificial Sequence: Synthetic oligonucleotide
ggggacgaccgucacgccc

SEQ ID NO: 1721701 - RNA, 19 nt, Artificial Sequence
  Description of Artificial Sequence: Synthetic oligonucleotide
ccguugaaccacagcagag

SEQ ID NO: 1721702 - RNA, 19 nt, Artificial Sequence
  Description of Artificial Sequence: Synthetic oligonucleotide
ucacgccccgacgcgacgc

SEQ ID NO: 1721703 - RNA, 19 nt, Artificial Sequence
  Description of Artificial Sequence: Synthetic oligonucleotide
ggucaagacucuugcuuga

SEQ ID NO: 1721704 - RNA, 19 nt, Artificial Sequence
  Description of Artificial Sequence: Synthetic oligonucleotide
uccauucgccacgguauuc

SEQ ID NO: 1721705 - RNA, 19 nt, Artificial Sequence
  Description of Artificial Sequence: Synthetic oligonucleotide
ccauucgccacgguauucc

SEQ ID NO: 1721706 - RNA, 19 nt, Artificial Sequence
  Description of Artificial Sequence: Synthetic oligonucleotide
gggacgaccgucacgcccc

SEQ ID NO: 1721707 - RNA, 19 nt, Artificial Sequence
  Description of Artificial Sequence: Synthetic oligonucleotide
gcuguaacucagguaagga

SEQ ID NO: 1721708 - RNA, 19 nt, Artificial Sequence
  Description of Artificial Sequence: Synthetic oligonucleotide
guauuccaugagaaccauc

SEQ ID NO: 1721709 - RNA, 19 nt, Artificial Sequence
  Description of Artificial Sequence: Synthetic oligonucleotide
ccauuggugcacugagaag

SEQ ID NO: 1721710 - RNA, 19 nt, Artificial Sequence
  Description of Artificial Sequence: Synthetic oligonucleotide
ugccaccaucggcaaacau

SEQ ID NO: 1721711 - RNA, 19 nt, Artificial Sequence
  Description of Artificial Sequence: Synthetic oligonucleotide
ccaaugccagucaguacac

SEQ ID NO: 1721712 - RNA, 19 nt, Artificial Sequence
  Description of Artificial Sequence: Synthetic oligonucleotide
gcugggcguaacuggagac

SEQ ID NO: 1721713 - RNA, 19 nt, Artificial Sequence
  Description of Artificial Sequence: Synthetic oligonucleotide
agggucauggugguagcuu

SEQ ID NO: 1721714 - RNA, 19 nt, Artificial Sequence
  Description of Artificial Sequence: Synthetic oligonucleotide
cugggcuccagcggccagg

SEQ ID NO: 1721715 - RNA, 19 nt, Artificial Sequence
  Description of Artificial Sequence: Synthetic oligonucleotide
gcacuucucacgccuuagc

SEQ ID NO: 1721716 - RNA, 19 nt, Artificial Sequence
  Description of Artificial Sequence: Synthetic oligonucleotide
ggcuauucuaugaagggau

SEQ ID NO: 1721717 - RNA, 19 nt, Artificial Sequence
  Description of Artificial Sequence: Synthetic oligonucleotide
acuggagaccuggggauua

SEQ ID NO: 1721718 - RNA, 19 nt, Artificial Sequence
  Description of Artificial Sequence: Synthetic oligonucleotide
cagagcuccaucaggcagu

SEQ ID NO: 1721719 - RNA, 19 nt, Artificial Sequence
  Description of Artificial Sequence: Synthetic oligonucleotide
gauuccuggcugacuugga

SEQ ID NO: 1721720 - RNA, 19 nt, Artificial Sequence
  Description of Artificial Sequence: Synthetic oligonucleotide
gucacgccccgacgcgacg

SEQ ID NO: 1721721 - RNA, 19 nt, Artificial Sequence
  Description of Artificial Sequence: Synthetic oligonucleotide
ccgccaucccugauggccg

SEQ ID NO: 1721722 - RNA, 19 nt, Artificial Sequence
  Description of Artificial Sequence: Synthetic oligonucleotide
auccauuggugcacugaga

SEQ ID NO: 1721723 - RNA, 19 nt, Artificial Sequence
  Description of Artificial Sequence: Synthetic oligonucleotide
agccauuaaagagcccauu

SEQ ID NO: 1721724 - RNA, 19 nt, Artificial Sequence
  Description of Artificial Sequence: Synthetic oligonucleotide
ggucaucccauaggagacc

SEQ ID NO: 1721725 - RNA, 19 nt, Artificial Sequence
  Description of Artificial Sequence: Synthetic oligonucleotide
ggucuuaguuaccccuauc

SEQ ID NO: 1721726 - RNA, 19 nt, Artificial Sequence
  Description of Artificial Sequence: Synthetic oligonucleotide
ggauagcuuugccccuugc

SEQ ID NO: 1721727 - RNA, 19 nt, Artificial Sequence
  Description of Artificial Sequence: Synthetic oligonucleotide
gagggucaagacucuugcu

SEQ ID NO: 1721728 - RNA, 19 nt, Artificial Sequence
  Description of Artificial Sequence: Synthetic oligonucleotide
gggcuaucugcuguaacuc

SEQ ID NO: 1721729 - RNA, 19 nt, Artificial Sequence
  Description of Artificial Sequence: Synthetic oligonucleotide
gcuauucuaugaagggauc

SEQ ID NO: 1721730 - RNA, 19 nt, Artificial Sequence
  Description of Artificial Sequence: Synthetic oligonucleotide
caccaucggcaaacaucag

SEQ ID NO: 1721731 - RNA, 19 nt, Artificial Sequence
  Description of Artificial Sequence: Synthetic oligonucleotide
aaacuccgacgccguuaaa

SEQ ID NO: 1721732 - RNA, 19 nt, Artificial Sequence
  Description of Artificial Sequence: Synthetic oligonucleotide
ucgccacgguauuccuccc

SEQ ID NO: 1721733 - RNA, 19 nt, Artificial Sequence
  Description of Artificial Sequence: Synthetic oligonucleotide
ccguuaaacuugcccuggg

SEQ ID NO: 1721734 - RNA, 19 nt, Artificial Sequence
  Description of Artificial Sequence: Synthetic oligonucleotide
gagcacuucucacgccuua

SEQ ID NO: 1721735 - RNA, 19 nt, Artificial Sequence
  Description of Artificial Sequence: Synthetic oligonucleotide
ggagaccuggauagcuuug

SEQ ID NO: 1721736 - RNA, 19 nt, Artificial Sequence
  Description of Artificial Sequence: Synthetic oligonucleotide
acacagagacaagccugga

SEQ ID NO: 1721737 - RNA, 19 nt, Artificial Sequence
  Description of Artificial Sequence: Synthetic oligonucleotide
agcaagccgaagccaucua

SEQ ID NO: 1721738 - RNA, 19 nt, Artificial Sequence
  Description of Artificial Sequence: Synthetic oligonucleotide
gccacgguauuccucccca

SEQ ID NO: 1721739 - RNA, 19 nt, Artificial Sequence
  Description of Artificial Sequence: Synthetic oligonucleotide
gucaagacucuugcuugaa

SEQ ID NO: 1721740 - RNA, 19 nt, Artificial Sequence
  Description of Artificial Sequence: Synthetic oligonucleotide
ggcugggcguaacuggaga

SEQ ID NO: 1721741 - RNA, 19 nt, Artificial Sequence
  Description of Artificial Sequence: Synthetic oligonucleotide
acaugaggauggagccaag

SEQ ID NO: 1721742 - RNA, 19 nt, Artificial Sequence
  Description of Artificial Sequence: Synthetic oligonucleotide
gauggggacugggcuaucu

SEQ ID NO: 1721743 - RNA, 19 nt, Artificial Sequence
  Description of Artificial Sequence: Synthetic oligonucleotide
cugagcccguugaaccaca

SEQ ID NO: 1721744 - RNA, 19 nt, Artificial Sequence
  Description of Artificial Sequence: Synthetic oligonucleotide
uggggacgaccgucacgcc

SEQ ID NO: 1721745 - RNA, 19 nt, Artificial Sequence
  Description of Artificial Sequence: Synthetic oligonucleotide
cacucaaggggcugagagu

SEQ ID NO: 1721746 - RNA, 19 nt, Artificial Sequence
  Description of Artificial Sequence: Synthetic oligonucleotide
ggggauuauuuuggcagga

SEQ ID NO: 1721747 - RNA, 19 nt, Artificial Sequence
  Description of Artificial Sequence: Synthetic oligonucleotide
cccguugaaccacagcaga

SEQ ID NO: 1721748 - RNA, 19 nt, Artificial Sequence
  Description of Artificial Sequence: Synthetic oligonucleotide
ccacuggacgccgccaucc

SEQ ID NO: 1721749 - RNA, 19 nt, Artificial Sequence
  Description of Artificial Sequence: Synthetic oligonucleotide
guggucuuaguuaccccua

SEQ ID NO: 1721750 - RNA, 19 nt, Artificial Sequence
  Description of Artificial Sequence: Synthetic oligonucleotide
caaggggcugagagucuga

SEQ ID NO: 1721751 - RNA, 19 nt, Artificial Sequence
  Description of Artificial Sequence: Synthetic oligonucleotide
aggcugggcguaacuggag

SEQ ID NO: 1721752 - RNA, 19 nt, Artificial Sequence
  Description of Artificial Sequence: Synthetic oligonucleotide
guauuccuccccacuggaa

SEQ ID NO: 1721753 - RNA, 19 nt, Artificial Sequence
  Description of Artificial Sequence: Synthetic oligonucleotide
uccuuccauucgccacggu

SEQ ID NO: 1721754 - RNA, 19 nt, Artificial Sequence
  Description of Artificial Sequence: Synthetic oligonucleotide
cacgguauuccuccccacu

SEQ ID NO: 1721755 - RNA, 19 nt, Artificial Sequence
  Description of Artificial Sequence: Synthetic oligonucleotide
ccgaagccaucuacucugc

SEQ ID NO: 1721756 - RNA, 19 nt, Artificial Sequence
  Description of Artificial Sequence: Synthetic oligonucleotide
ccaucugagaaggucagua

SEQ ID NO: 1721757 - RNA, 19 nt, Artificial Sequence
  Description of Artificial Sequence: Synthetic oligonucleotide
ccucauaccuugagccauc

SEQ ID NO: 1721758 - RNA, 19 nt, Artificial Sequence
  Description of Artificial Sequence: Synthetic oligonucleotide
ucucacgccuuagcagcuu

SEQ ID NO: 1721759 - RNA, 19 nt, Artificial Sequence
  Description of Artificial Sequence: Synthetic oligonucleotide
ccaucggcaaacaucaguu

SEQ ID NO: 1721760 - RNA, 19 nt, Artificial Sequence
  Description of Artificial Sequence: Synthetic oligonucleotide
caugaggauggagccaagu

SEQ ID NO: 1721761 - RNA, 19 nt, Artificial Sequence
  Description of Artificial Sequence: Synthetic oligonucleotide
gggauuauuuuggcaggaa

SEQ ID NO: 1721762 - RNA, 19 nt, Artificial Sequence
  Description of Artificial Sequence: Synthetic oligonucleotide
uggagaccuggggauuauu

SEQ ID NO: 1721763 - RNA, 19 nt, Artificial Sequence
  Description of Artificial Sequence: Synthetic oligonucleotide
ccuuccauucgccacggua

SEQ ID NO: 1721764 - RNA, 19 nt, Artificial Sequence
  Description of Artificial Sequence: Synthetic oligonucleotide
agagcacuucucacgccuu

SEQ ID NO: 1721765 - RNA, 19 nt, Artificial Sequence
  Description of Artificial Sequence: Synthetic oligonucleotide
cgccguuaaacuugcccug

SEQ ID NO: 1721766 - RNA, 19 nt, Artificial Sequence
  Description of Artificial Sequence: Synthetic oligonucleotide
cauucgccacgguauuccu

SEQ ID NO: 1721767 - RNA, 19 nt, Artificial Sequence
  Description of Artificial Sequence: Synthetic oligonucleotide
ggaagacaguuuacuuuaa

SEQ ID NO: 1721768 - RNA, 19 nt, Artificial Sequence
  Description of Artificial Sequence: Synthetic oligonucleotide
cgccuuagcagcuuguugu

SEQ ID NO: 1721769 - RNA, 19 nt, Artificial Sequence
  Description of Artificial Sequence: Synthetic oligonucleotide
gucugacaucuaagggaga

SEQ ID NO: 1721770 - RNA, 19 nt, Artificial Sequence
  Description of Artificial Sequence: Synthetic oligonucleotide
ggacgaccgucacgccccg

SEQ ID NO: 1721771 - RNA, 19 nt, Artificial Sequence
  Description of Artificial Sequence: Synthetic oligonucleotide
cagcaagccgaagccaucu

SEQ ID NO: 1721772 - RNA, 19 nt, Artificial Sequence
  Description of Artificial Sequence: Synthetic oligonucleotide
gagugggaggcugggcgua

SEQ ID NO: 1721773 - RNA, 19 nt, Artificial Sequence
  Description of Artificial Sequence: Synthetic oligonucleotide
ggagugggaggcugggcgu

SEQ ID NO: 1721774 - RNA, 19 nt, Artificial Sequence
  Description of Artificial Sequence: Synthetic oligonucleotide
ccacgguauuccuccccac

SEQ ID NO: 1721775 - RNA, 19 nt, Artificial Sequence
  Description of Artificial Sequence: Synthetic oligonucleotide
ggagaccuggggauuauuu

SEQ ID NO: 1721776 - RNA, 19 nt, Artificial Sequence
  Description of Artificial Sequence: Synthetic oligonucleotide
gccccgacgcgacgcuggg

SEQ ID NO: 1721777 - RNA, 19 nt, Artificial Sequence
  Description of Artificial Sequence: Synthetic oligonucleotide
cuccgacgccguuaaacuu

SEQ ID NO: 1721778 - RNA, 19 nt, Artificial Sequence
  Description of Artificial Sequence: Synthetic oligonucleotide
cggcccuccuuccauucgc

SEQ ID NO: 1721779 - RNA, 19 nt, Artificial Sequence
  Description of Artificial Sequence: Synthetic oligonucleotide
cccagagcuccaucaggca

SEQ ID NO: 1721780 - RNA, 19 nt, Artificial Sequence
  Description of Artificial Sequence: Synthetic oligonucleotide
cgaccgucacgccccgacg

SEQ ID NO: 1721781 - RNA, 19 nt, Artificial Sequence
  Description of Artificial Sequence: Synthetic oligonucleotide
ggccuggguuuuacagagc

SEQ ID NO: 1721782 - RNA, 19 nt, Artificial Sequence
  Description of Artificial Sequence: Synthetic oligonucleotide
gggcguaacuggagaccug

SEQ ID NO: 1721783 - RNA, 19 nt, Artificial Sequence
  Description of Artificial Sequence: Synthetic oligonucleotide
gcacucugagcccguugaa

SEQ ID NO: 1721784 - RNA, 19 nt, Artificial Sequence
  Description of Artificial Sequence: Synthetic oligonucleotide
cgccccgacgcgacgcugg

SEQ ID NO: 1721785 - RNA, 19 nt, Artificial Sequence
  Description of Artificial Sequence: Synthetic oligonucleotide
ccaucccugauggccgcac

SEQ ID NO: 1721786 - RNA, 19 nt, Artificial Sequence
  Description of Artificial Sequence: Synthetic oligonucleotide
acgccccgacgcgacgcug

SEQ ID NO: 1721787 - RNA, 19 nt, Artificial Sequence
  Description of Artificial Sequence: Synthetic oligonucleotide
accuuucgucagggucaug

SEQ ID NO: 1721788 - RNA, 19 nt, Artificial Sequence
  Description of Artificial Sequence: Synthetic oligonucleotide
gaaccacagcagagcacuu

SEQ ID NO: 1721789 - RNA, 19 nt, Artificial Sequence
  Description of Artificial Sequence: Synthetic oligonucleotide
ggcugagagucugauccau

SEQ ID NO: 1721790 - RNA, 19 nt, Artificial Sequence
  Description of Artificial Sequence: Synthetic oligonucleotide
cgucacgccccgacgcgac

SEQ ID NO: 1721791 - RNA, 19 nt, Artificial Sequence
  Description of Artificial Sequence: Synthetic oligonucleotide
cgcgacgcugggcuccagc

SEQ ID NO: 1721792 - RNA, 19 nt, Artificial Sequence
  Description of Artificial Sequence: Synthetic oligonucleotide
ccacccgccucagucccac

SEQ ID NO: 1721793 - RNA, 19 nt, Artificial Sequence
  Description of Artificial Sequence: Synthetic oligonucleotide
gacgaccgucacgccccga

SEQ ID NO: 1721794 - RNA, 19 nt, Artificial Sequence
  Description of Artificial Sequence: Synthetic oligonucleotide
cacgccuuagcagcuuguu

SEQ ID NO: 1721795 - RNA, 19 nt, Artificial Sequence
  Description of Artificial Sequence: Synthetic oligonucleotide
cgccaucccugauggccgc

SEQ ID NO: 1721796 - RNA, 19 nt, Artificial Sequence
  Description of Artificial Sequence: Synthetic oligonucleotide
cccucauaccuugagccau

SEQ ID NO: 1721797 - RNA, 19 nt, Artificial Sequence
  Description of Artificial Sequence: Synthetic oligonucleotide
gccucuuggggacgaccgu

SEQ ID NO: 1721798 - RNA, 19 nt, Artificial Sequence
  Description of Artificial Sequence: Synthetic oligonucleotide
ggauccugucugacaucua

SEQ ID NO: 1721799 - RNA, 19 nt, Artificial Sequence
  Description of Artificial Sequence: Synthetic oligonucleotide
gcugagagucugauccauu

SEQ ID NO: 1721800 - RNA, 19 nt, Artificial Sequence
  Description of Artificial Sequence: Synthetic oligonucleotide
cuggagaccuggggauuau

SEQ ID NO: 1721801 - RNA, 19 nt, Artificial Sequence
  Description of Artificial Sequence: Synthetic oligonucleotide
cgacgccguuaaacuugcc

SEQ ID NO: 1721802 - RNA, 19 nt, Artificial Sequence
  Description of Artificial Sequence: Synthetic oligonucleotide
gaggcacucugagcccguu

SEQ ID NO: 1721803 - RNA, 19 nt, Artificial Sequence
  Description of Artificial Sequence: Synthetic oligonucleotide
acgcgacgcugggcuccag

SEQ ID NO: 1721804 - RNA, 19 nt, Artificial Sequence
  Description of Artificial Sequence: Synthetic oligonucleotide
gccaucugagaaggucagu

SEQ ID NO: 1721805 - RNA, 19 nt, Artificial Sequence
  Description of Artificial Sequence: Synthetic oligonucleotide
cacgccccgacgcgacgcu

SEQ ID NO: 1721806 - RNA, 19 nt, Artificial Sequence
  Description of Artificial Sequence: Synthetic oligonucleotide
ggaggcacucugagcccgu

SEQ ID NO: 1721807 - RNA, 19 nt, Artificial Sequence
  Description of Artificial Sequence: Synthetic oligonucleotide
ccccuugcccuggauugaa

SEQ ID NO: 1721808 - RNA, 19 nt, Artificial Sequence
  Description of Artificial Sequence: Synthetic oligonucleotide
ccgucacgccccgacgcga

SEQ ID NO: 1721809 - RNA, 19 nt, Artificial Sequence
  Description of Artificial Sequence: Synthetic oligonucleotide
ccccgacgcgacgcugggc

SEQ ID NO: 1721810 - RNA, 19 nt, Artificial Sequence
  Description of Artificial Sequence: Synthetic oligonucleotide
gccuucauuucgggguauu

SEQ ID NO: 1721811 - RNA, 19 nt, Artificial Sequence
  Description of Artificial Sequence: Synthetic oligonucleotide
ggccuucauuucgggguau

SEQ ID NO: 1721812 - RNA, 19 nt, Artificial Sequence
  Description of Artificial Sequence: Synthetic oligonucleotide
cgccgccaucccugauggc

SEQ ID NO: 1721813 - RNA, 19 nt, Artificial Sequence
  Description of Artificial Sequence: Synthetic oligonucleotide
cacccgccucagucccacu

SEQ ID NO: 1721814 - RNA, 19 nt, Artificial Sequence
  Description of Artificial Sequence: Synthetic oligonucleotide
cccuugcccuggauugaau

SEQ ID NO: 1721815 - RNA, 19 nt, Artificial Sequence
  Description of Artificial Sequence: Synthetic oligonucleotide
cgucagggucaugguggua

SEQ ID NO: 1721816 - RNA, 19 nt, Artificial Sequence
  Description of Artificial Sequence: Synthetic oligonucleotide
ggcuccccacagacaccuu

SEQ ID NO: 1721817 - RNA, 19 nt, Artificial Sequence
  Description of Artificial Sequence: Synthetic oligonucleotide
cuccagcggccaggaucuu

SEQ ID NO: 1721818 - RNA, 19 nt, Artificial Sequence
  Description of Artificial Sequence: Synthetic oligonucleotide
aaacagcggauccugaggc

SEQ ID NO: 1721819 - RNA, 19 nt, Artificial Sequence
  Description of Artificial Sequence: Synthetic oligonucleotide
aaggcgaaaaggcacgagc

SEQ ID NO: 1721820 - RNA, 19 nt, Artificial Sequence
  Description of Artificial Sequence: Synthetic oligonucleotide
aacaugaguacaaacuccc

SEQ ID NO: 1721821 - RNA, 19 nt, Artificial Sequence
  Description of Artificial Sequence: Synthetic oligonucleotide
aauacggaguagugcagcc

SEQ ID NO: 1721822 - RNA, 19 nt, Artificial Sequence
  Description of Artificial Sequence: Synthetic oligonucleotide
aaaucgagcauguggggcg

SEQ ID NO: 1721823 - RNA, 19 nt, Artificial Sequence
  Description of Artificial Sequence: Synthetic oligonucleotide
aaagcuaguucugacuugg

SEQ ID NO: 1721824 - RNA, 19 nt, Artificial Sequence
  Description of Artificial Sequence: Synthetic oligonucleotide
aguacuagaggugggaggc

SEQ ID NO: 1721825 - RNA, 19 nt, Artificial Sequence
  Description of Artificial Sequence: Synthetic oligonucleotide
uaagggugagugcaaaccg

SEQ ID NO: 1721826 - RNA, 19 nt, Artificial Sequence
  Description of Artificial Sequence: Synthetic oligonucleotide
agaaguaagcugcaguguc

SEQ ID NO: 1721827 - RNA, 19 nt, Artificial Sequence
  Description of Artificial Sequence: Synthetic oligonucleotide
aaauacggaguagugcagc

SEQ ID NO: 1721828 - RNA, 19 nt, Artificial Sequence
  Description of Artificial Sequence: Synthetic oligonucleotide
acuaauuccccauccacag

SEQ ID NO: 1721829 - RNA, 19 nt, Artificial Sequence
  Description of Artificial Sequence: Synthetic oligonucleotide
cuaguucugacuuggcucg

SEQ ID NO: 1721830 - RNA, 19 nt, Artificial Sequence
  Description of Artificial Sequence: Synthetic oligonucleotide
aucaaaucgagcauguggg

SEQ ID NO: 1721831 - RNA, 19 nt, Artificial Sequence
  Description of Artificial Sequence: Synthetic oligonucleotide
uucaaggcgaaaaggcacg

SEQ ID NO: 1721832 - RNA, 19 nt, Artificial Sequence
  Description of Artificial Sequence: Synthetic oligonucleotide
ugguucaaggcgaaaaggc

SEQ ID NO: 1721833 - RNA, 19 nt, Artificial Sequence
  Description of Artificial Sequence: Synthetic oligonucleotide
ugugguagcagggagguag

SEQ ID NO: 1721834 - RNA, 19 nt, Artificial Sequence
  Description of Artificial Sequence: Synthetic oligonucleotide
caaaauacggaguagugca

SEQ ID NO: 1721835 - RNA, 19 nt, Artificial Sequence
  Description of Artificial Sequence: Synthetic oligonucleotide
uacggaguagugcagcccg

SEQ ID NO: 1721836 - RNA, 19 nt, Artificial Sequence
  Description of Artificial Sequence: Synthetic oligonucleotide
aagauagccaacaugagua

SEQ ID NO: 1721837 - RNA, 19 nt, Artificial Sequence
  Description of Artificial Sequence: Synthetic oligonucleotide
agacgcagaaguaagcugc

SEQ ID NO: 1721838 - RNA, 19 nt, Artificial Sequence
  Description of Artificial Sequence: Synthetic oligonucleotide
agaaaggccagguaggggu

SEQ ID NO: 1721839 - RNA, 19 nt, Artificial Sequence
  Description of Artificial Sequence: Synthetic oligonucleotide
ugaaggauuggaguacugg

SEQ ID NO: 1721840 - RNA, 19 nt, Artificial Sequence
  Description of Artificial Sequence: Synthetic oligonucleotide
aagccaaaggcaguagugg

SEQ ID NO: 1721841 - RNA, 19 nt, Artificial Sequence
  Description of Artificial Sequence: Synthetic oligonucleotide
accaaacucgccaugaagg

SEQ ID NO: 1721842 - RNA, 19 nt, Artificial Sequence
  Description of Artificial Sequence: Synthetic oligonucleotide
acgagcgugcagcauagcc

SEQ ID NO: 1721843 - RNA, 19 nt, Artificial Sequence
  Description of Artificial Sequence: Synthetic oligonucleotide
gaaaacagcggauccugag

SEQ ID NO: 1721844 - RNA, 19 nt, Artificial Sequence
  Description of Artificial Sequence: Synthetic oligonucleotide
caacaugaguacaaacucc

SEQ ID NO: 1721845 - RNA, 19 nt, Artificial Sequence
  Description of Artificial Sequence: Synthetic oligonucleotide
agggcuugcauuguaaggg

SEQ ID NO: 1721846 - RNA, 19 nt, Artificial Sequence
  Description of Artificial Sequence: Synthetic oligonucleotide
cucugcacgauucuccucg

SEQ ID NO: 1721847 - RNA, 19 nt, Artificial Sequence
  Description of Artificial Sequence: Synthetic oligonucleotide
cagguagagacuuucggag

SEQ ID NO: 1721848 - RNA, 19 nt, Artificial Sequence
  Description of Artificial Sequence: Synthetic oligonucleotide
ucaaaucgagcaugugggg

SEQ ID NO: 1721849 - RNA, 19 nt, Artificial Sequence
  Description of Artificial Sequence: Synthetic oligonucleotide
gaguacuagaggugggagg

SEQ ID NO: 1721850 - RNA, 19 nt, Artificial Sequence
  Description of Artificial Sequence: Synthetic oligonucleotide
aaacuccccuucuauuguc

SEQ ID NO: 1721851 - RNA, 19 nt, Artificial Sequence
  Description of Artificial Sequence: Synthetic oligonucleotide
agauagccaacaugaguac

SEQ ID NO: 1721852 - RNA, 19 nt, Artificial Sequence
  Description of Artificial Sequence: Synthetic oligonucleotide
uguagacgcagaaguaagc

SEQ ID NO: 1721853 - RNA, 19 nt, Artificial Sequence
  Description of Artificial Sequence: Synthetic oligonucleotide
uaugcaauguggccaggcc

SEQ ID NO: 1721854 - RNA, 19 nt, Artificial Sequence
  Description of Artificial Sequence: Synthetic oligonucleotide
acuuucggaguacuagagg

SEQ ID NO: 1721855 - RNA, 19 nt, Artificial Sequence
  Description of Artificial Sequence: Synthetic oligonucleotide
gagacuuucggaguacuag

SEQ ID NO: 1721856 - RNA, 19 nt, Artificial Sequence
  Description of Artificial Sequence: Synthetic oligonucleotide
caaaccgugggccaugggc

SEQ ID NO: 1721857 - RNA, 19 nt, Artificial Sequence
  Description of Artificial Sequence: Synthetic oligonucleotide
gaaggauuggaguacugga

SEQ ID NO: 1721858 - RNA, 19 nt, Artificial Sequence
  Description of Artificial Sequence: Synthetic oligonucleotide
accuaaggugaaucuagcg

SEQ ID NO: 1721859 - RNA, 19 nt, Artificial Sequence
  Description of Artificial Sequence: Synthetic oligonucleotide
uagguaugcaauguggcca

SEQ ID NO: 1721860 - RNA, 19 nt, Artificial Sequence
  Description of Artificial Sequence: Synthetic oligonucleotide
aaggugaaucuagcgcugc

SEQ ID NO: 1721861 - RNA, 19 nt, Artificial Sequence
  Description of Artificial Sequence: Synthetic oligonucleotide
guacgaguagcucugcgcc

SEQ ID NO: 1721862 - RNA, 19 nt, Artificial Sequence
  Description of Artificial Sequence: Synthetic oligonucleotide
guagguaugcaauguggcc

SEQ ID NO: 1721863 - RNA, 19 nt, Artificial Sequence
  Description of Artificial Sequence: Synthetic oligonucleotide
uuuccgugcuccauggcca

SEQ ID NO: 1721864 - RNA, 19 nt, Artificial Sequence
  Description of Artificial Sequence: Synthetic oligonucleotide
aguggccgcaccaucaacc

SEQ ID NO: 1721865 - RNA, 19 nt, Artificial Sequence
  Description of Artificial Sequence: Synthetic oligonucleotide
cacugagcgauguaagggc

SEQ ID NO: 1721866 - RNA, 19 nt, Artificial Sequence
  Description of Artificial Sequence: Synthetic oligonucleotide
agcacagaugcaccacgcc

SEQ ID NO: 1721867 - RNA, 19 nt, Artificial Sequence
  Description of Artificial Sequence: Synthetic oligonucleotide
guuuccgugcuccauggcc

SEQ ID NO: 1721868 - RNA, 19 nt, Artificial Sequence
  Description of Artificial Sequence: Synthetic oligonucleotide
aaaauacggaguagugcag

SEQ ID NO: 1721869 - RNA, 19 nt, Artificial Sequence
  Description of Artificial Sequence: Synthetic oligonucleotide
guaagggugagugcaaacc

SEQ ID NO: 1721870 - RNA, 19 nt, Artificial Sequence
  Description of Artificial Sequence: Synthetic oligonucleotide
ugcacgauucuccucguaa

SEQ ID NO: 1721871 - RNA, 19 nt, Artificial Sequence
  Description of Artificial Sequence: Synthetic oligonucleotide
uagacgcagaaguaagcug

SEQ ID NO: 1721872 - RNA, 19 nt, Artificial Sequence
  Description of Artificial Sequence: Synthetic oligonucleotide
gaaacgcucgcuguggaug

SEQ ID NO: 1721873 - RNA, 19 nt, Artificial Sequence
  Description of Artificial Sequence: Synthetic oligonucleotide
ggcaagauagccaacauga

SEQ ID NO: 1721874 - RNA, 19 nt, Artificial Sequence
  Description of Artificial Sequence: Synthetic oligonucleotide
ugagugcaaaccgugggcc

SEQ ID NO: 1721875 - RNA, 19 nt, Artificial Sequence
  Description of Artificial Sequence: Synthetic oligonucleotide
agaucagacacugagcgau

SEQ ID NO: 1721876 - RNA, 19 nt, Artificial Sequence
  Description of Artificial Sequence: Synthetic oligonucleotide
aaacgcucgcuguggaugu

SEQ ID NO: 1721877 - RNA, 19 nt, Artificial Sequence
  Description of Artificial Sequence: Synthetic oligonucleotide
ucgccaugaaggauuggag

SEQ ID NO: 1721878 - RNA, 19 nt, Artificial Sequence
  Description of Artificial Sequence: Synthetic oligonucleotide
gaagugguuuccgugcucc

SEQ ID NO: 1721879 - RNA, 19 nt, Artificial Sequence
  Description of Artificial Sequence: Synthetic oligonucleotide
agacuuucggaguacuaga

SEQ ID NO: 1721880 - RNA, 19 nt, Artificial Sequence
  Description of Artificial Sequence: Synthetic oligonucleotide
cacgccaucaucaaaucga

SEQ ID NO: 1721881 - RNA, 19 nt, Artificial Sequence
  Description of Artificial Sequence: Synthetic oligonucleotide
ccuaaggugaaucuagcgc

SEQ ID NO: 1721882 - RNA, 19 nt, Artificial Sequence
  Description of Artificial Sequence: Synthetic oligonucleotide
augugcagggcuugcauug

SEQ ID NO: 1721883 - RNA, 19 nt, Artificial Sequence
  Description of Artificial Sequence: Synthetic oligonucleotide
agugagcacaccacguggc

SEQ ID NO: 1721884 - RNA, 19 nt, Artificial Sequence
  Description of Artificial Sequence: Synthetic oligonucleotide
uguaagggcgaguggguga

SEQ ID NO: 1721885 - RNA, 19 nt, Artificial Sequence
  Description of Artificial Sequence: Synthetic oligonucleotide
aggugaaucuagcgcugcc

SEQ ID NO: 1721886 - RNA, 19 nt, Artificial Sequence
  Description of Artificial Sequence: Synthetic oligonucleotide
aggcuuugggcgcaaccgc

SEQ ID NO: 1721887 - RNA, 19 nt, Artificial Sequence
  Description of Artificial Sequence: Synthetic oligonucleotide
gauaggaaccaaacucgcc

SEQ ID NO: 1721888 - RNA, 19 nt, Artificial Sequence
  Description of Artificial Sequence: Synthetic oligonucleotide
gcaccaucaacccggaagg

SEQ ID NO: 1721889 - RNA, 19 nt, Artificial Sequence
  Description of Artificial Sequence: Synthetic oligonucleotide
gcagaaguaagcugcagug

SEQ ID NO: 1721890 - RNA, 19 nt, Artificial Sequence
  Description of Artificial Sequence: Synthetic oligonucleotide
caaaucgagcauguggggc

SEQ ID NO: 1721891 - RNA, 19 nt, Artificial Sequence
  Description of Artificial Sequence: Synthetic oligonucleotide
ggugagugcaaaccguggg

SEQ ID NO: 1721892 - RNA, 19 nt, Artificial Sequence
  Description of Artificial Sequence: Synthetic oligonucleotide
gacuuucggaguacuagag

SEQ ID NO: 1721893 - RNA, 19 nt, Artificial Sequence
  Description of Artificial Sequence: Synthetic oligonucleotide
aaaccgugggccaugggcu

SEQ ID NO: 1721894 - RNA, 19 nt, Artificial Sequence
  Description of Artificial Sequence: Synthetic oligonucleotide
uucuauugucacccagucu

SEQ ID NO: 1721895 - RNA, 19 nt, Artificial Sequence
  Description of Artificial Sequence: Synthetic oligonucleotide
ugcaauguggccaggccua

SEQ ID NO: 1721896 - RNA, 19 nt, Artificial Sequence
  Description of Artificial Sequence: Synthetic oligonucleotide
agcgauguaagggcgagug

SEQ ID NO: 1721897 - RNA, 19 nt, Artificial Sequence
  Description of Artificial Sequence: Synthetic oligonucleotide
uguaagggugagugcaaac

SEQ ID NO: 1721898 - RNA, 19 nt, Artificial Sequence
  Description of Artificial Sequence: Synthetic oligonucleotide
uauugucacccagucuggg

SEQ ID NO: 1721899 - RNA, 19 nt, Artificial Sequence
  Description of Artificial Sequence: Synthetic oligonucleotide
ucaggcuuugggcgcaacc

SEQ ID NO: 1721900 - RNA, 19 nt, Artificial Sequence
  Description of Artificial Sequence: Synthetic oligonucleotide
agcuaguucugacuuggcu

SEQ ID NO: 1721901 - RNA, 19 nt, Artificial Sequence
  Description of Artificial Sequence: Synthetic oligonucleotide
guucaaggcgaaaaggcac

SEQ ID NO: 1721902 - RNA, 19 nt, Artificial Sequence
  Description of Artificial Sequence: Synthetic oligonucleotide
aaaaggcacgagcgugcag

SEQ ID NO: 1721903 - RNA, 19 nt, Artificial Sequence
  Description of Artificial Sequence: Synthetic oligonucleotide
aaacucgccaugaaggauu

SEQ ID NO: 1721904 - RNA, 19 nt, Artificial Sequence
  Description of Artificial Sequence: Synthetic oligonucleotide
aaucgagcauguggggcgg

SEQ ID NO: 1721905 - RNA, 19 nt, Artificial Sequence
  Description of Artificial Sequence: Synthetic oligonucleotide
auacggaguagugcagccc

SEQ ID NO: 1721906 - RNA, 19 nt, Artificial Sequence
  Description of Artificial Sequence: Synthetic oligonucleotide
cuuucggaguacuagaggu

SEQ ID NO: 1721907 - RNA, 19 nt, Artificial Sequence
  Description of Artificial Sequence: Synthetic oligonucleotide
gagcgugcagcauagccca

SEQ ID NO: 1721908 - RNA, 19 nt, Artificial Sequence
  Description of Artificial Sequence: Synthetic oligonucleotide
ugaggcuagcgugacggag

SEQ ID NO: 1721909 - RNA, 19 nt, Artificial Sequence
  Description of Artificial Sequence: Synthetic oligonucleotide
ugagcgauguaagggcgag

SEQ ID NO: 1721910 - RNA, 19 nt, Artificial Sequence
  Description of Artificial Sequence: Synthetic oligonucleotide
gcuaguucugacuuggcuc

SEQ ID NO: 1721911 - RNA, 19 nt, Artificial Sequence
  Description of Artificial Sequence: Synthetic oligonucleotide
ggcaagacuggcucugugg

SEQ ID NO: 1721912 - RNA, 19 nt, Artificial Sequence
  Description of Artificial Sequence: Synthetic oligonucleotide
acugagcgauguaagggcg

SEQ ID NO: 1721913 - RNA, 19 nt, Artificial Sequence
  Description of Artificial Sequence: Synthetic oligonucleotide
aagguacgaguagcucugc

SEQ ID NO: 1721914 - RNA, 19 nt, Artificial Sequence
  Description of Artificial Sequence: Synthetic oligonucleotide
caggcuuugggcgcaaccg

SEQ ID NO: 1721915 - RNA, 19 nt, Artificial Sequence
  Description of Artificial Sequence: Synthetic oligonucleotide
agccaaaggcaguaguggu

SEQ ID NO: 1721916 - RNA, 19 nt, Artificial Sequence
  Description of Artificial Sequence: Synthetic oligonucleotide
gcgugagugguucaaggcg

SEQ ID NO: 1721917 - RNA, 19 nt, Artificial Sequence
  Description of Artificial Sequence: Synthetic oligonucleotide
caaagcuaguucugacuug

SEQ ID NO: 1721918 - RNA, 19 nt, Artificial Sequence
  Description of Artificial Sequence: Synthetic oligonucleotide
gcaaaauacggaguagugc

SEQ ID NO: 1721919 - RNA, 19 nt, Artificial Sequence
  Description of Artificial Sequence: Synthetic oligonucleotide
aagggcgagugggugacag

SEQ ID NO: 1721920 - RNA, 19 nt, Artificial Sequence
  Description of Artificial Sequence: Synthetic oligonucleotide
ccaacaugaguacaaacuc

SEQ ID NO: 1721921 - RNA, 19 nt, Artificial Sequence
  Description of Artificial Sequence: Synthetic oligonucleotide
cacuaauuccccauccaca

SEQ ID NO: 1721922 - RNA, 19 nt, Artificial Sequence
  Description of Artificial Sequence: Synthetic oligonucleotide
aacagcggauccugaggcu

SEQ ID NO: 1721923 - RNA, 19 nt, Artificial Sequence
  Description of Artificial Sequence: Synthetic oligonucleotide
guagguguagacgcagaag

SEQ ID NO: 1721924 - RNA, 19 nt, Artificial Sequence
  Description of Artificial Sequence: Synthetic oligonucleotide
caccuaaggugaaucuagc

SEQ ID NO: 1721925 - RNA, 19 nt, Artificial Sequence
  Description of Artificial Sequence: Synthetic oligonucleotide
uacaaacuccccuucuauu

SEQ ID NO: 1721926 - RNA, 19 nt, Artificial Sequence
  Description of Artificial Sequence: Synthetic oligonucleotide
caucaacccggaagguacg

SEQ ID NO: 1721927 - RNA, 19 nt, Artificial Sequence
  Description of Artificial Sequence: Synthetic oligonucleotide
gguagguaugcaauguggc

SEQ ID NO: 1721928 - RNA, 19 nt, Artificial Sequence
  Description of Artificial Sequence: Synthetic oligonucleotide
auguggggcggccaccagg

SEQ ID NO: 1721929 - RNA, 19 nt, Artificial Sequence
  Description of Artificial Sequence: Synthetic oligonucleotide
gugagcacaccacguggcg

SEQ ID NO: 1721930 - RNA, 19 nt, Artificial Sequence
  Description of Artificial Sequence: Synthetic oligonucleotide
aagcuaguucugacuuggc

SEQ ID NO: 1721931 - RNA, 19 nt, Artificial Sequence
  Description of Artificial Sequence: Synthetic oligonucleotide
agggacuaggccaucucgg

SEQ ID NO: 1721932 - RNA, 19 nt, Artificial Sequence
  Description of Artificial Sequence: Synthetic oligonucleotide
acgauucuccucguaagug

SEQ ID NO: 1721933 - RNA, 19 nt, Artificial Sequence
  Description of Artificial Sequence: Synthetic oligonucleotide
cuuggcucguggcaggcug

SEQ ID NO: 1721934 - RNA, 19 nt, Artificial Sequence
  Description of Artificial Sequence: Synthetic oligonucleotide
accgcuguaugugcagggc

SEQ ID NO: 1721935 - RNA, 19 nt, Artificial Sequence
  Description of Artificial Sequence: Synthetic oligonucleotide
uaugugcagggcuugcauu

SEQ ID NO: 1721936 - RNA, 19 nt, Artificial Sequence
  Description of Artificial Sequence: Synthetic oligonucleotide
uagugcagcccgugaaaug

SEQ ID NO: 1721937 - RNA, 19 nt, Artificial Sequence
  Description of Artificial Sequence: Synthetic oligonucleotide
uaaguggccgcaccaucaa

SEQ ID NO: 1721938 - RNA, 19 nt, Artificial Sequence
  Description of Artificial Sequence: Synthetic oligonucleotide
gcuagcgugacggagagca

SEQ ID NO: 1721939 - RNA, 19 nt, Artificial Sequence
  Description of Artificial Sequence: Synthetic oligonucleotide
ccuagugcugcaccuaagg

SEQ ID NO: 1721940 - RNA, 19 nt, Artificial Sequence
  Description of Artificial Sequence: Synthetic oligonucleotide
acgaguagcucugcgccgg

SEQ ID NO: 1721941 - RNA, 19 nt, Artificial Sequence
  Description of Artificial Sequence: Synthetic oligonucleotide
uggaguacuggaagccaaa

SEQ ID NO: 1721942 - RNA, 19 nt, Artificial Sequence
  Description of Artificial Sequence: Synthetic oligonucleotide
uggguagguguagacgcag

SEQ ID NO: 1721943 - RNA, 19 nt, Artificial Sequence
  Description of Artificial Sequence: Synthetic oligonucleotide
ucaucaaaucgagcaugug

SEQ ID NO: 1721944 - RNA, 19 nt, Artificial Sequence
  Description of Artificial Sequence: Synthetic oligonucleotide
cagcacagaugcaccacgc

SEQ ID NO: 1721945 - RNA, 19 nt, Artificial Sequence
  Description of Artificial Sequence: Synthetic oligonucleotide
gccauugagagaaaggcca

SEQ ID NO: 1721946 - RNA, 19 nt, Artificial Sequence
  Description of Artificial Sequence: Synthetic oligonucleotide
aggcuagcgugacggagag

SEQ ID NO: 1721947 - RNA, 19 nt, Artificial Sequence
  Description of Artificial Sequence: Synthetic oligonucleotide
ucaacccggaagguacgag

SEQ ID NO: 1721948 - RNA, 19 nt, Artificial Sequence
  Description of Artificial Sequence: Synthetic oligonucleotide
agcgugacggagagcagcg

SEQ ID NO: 1721949 - RNA, 19 nt, Artificial Sequence
  Description of Artificial Sequence: Synthetic oligonucleotide
aagaauccccaggccacug

SEQ ID NO: 1721950 - RNA, 19 nt, Artificial Sequence
  Description of Artificial Sequence: Synthetic oligonucleotide
ugaagugguuuccgugcuc

SEQ ID NO: 1721951 - RNA, 19 nt, Artificial Sequence
  Description of Artificial Sequence: Synthetic oligonucleotide
uggccgcaccaucaacccg

SEQ ID NO: 1721952 - RNA, 19 nt, Artificial Sequence
  Description of Artificial Sequence: Synthetic oligonucleotide
gcaccuaaggugaaucuag

SEQ ID NO: 1721953 - RNA, 19 nt, Artificial Sequence
  Description of Artificial Sequence: Synthetic oligonucleotide
aacucgccaugaaggauug

SEQ ID NO: 1721954 - RNA, 19 nt, Artificial Sequence
  Description of Artificial Sequence: Synthetic oligonucleotide
uaggagaggcguccgcggu

SEQ ID NO: 1721955 - RNA, 19 nt, Artificial Sequence
  Description of Artificial Sequence: Synthetic oligonucleotide
gugaaaugccacugcgcac

SEQ ID NO: 1721956 - RNA, 19 nt, Artificial Sequence
  Description of Artificial Sequence: Synthetic oligonucleotide
ugcaccuaaggugaaucua

SEQ ID NO: 1721957 - RNA, 19 nt, Artificial Sequence
  Description of Artificial Sequence: Synthetic oligonucleotide
gauccugaggcuagcguga

SEQ ID NO: 1721958 - RNA, 19 nt, Artificial Sequence
  Description of Artificial Sequence: Synthetic oligonucleotide
guggccgcaccaucaaccc

SEQ ID NO: 1721959 - RNA, 19 nt, Artificial Sequence
  Description of Artificial Sequence: Synthetic oligonucleotide
guaaguggccgcaccauca

SEQ ID NO: 1721960 - RNA, 19 nt, Artificial Sequence
  Description of Artificial Sequence: Synthetic oligonucleotide
gaguagugcagcccgugaa

SEQ ID NO: 1721961 - RNA, 19 nt, Artificial Sequence
  Description of Artificial Sequence: Synthetic oligonucleotide
aucuagcgcugcccagggc

SEQ ID NO: 1721962 - RNA, 19 nt, Artificial Sequence
  Description of Artificial Sequence: Synthetic oligonucleotide
caggcugaagugguuuccg

SEQ ID NO: 1721963 - RNA, 19 nt, Artificial Sequence
  Description of Artificial Sequence: Synthetic oligonucleotide
gcacgauucuccucguaag

SEQ ID NO: 1721964 - RNA, 19 nt, Artificial Sequence
  Description of Artificial Sequence: Synthetic oligonucleotide
aacuccccuucuauuguca

SEQ ID NO: 1721965 - RNA, 19 nt, Artificial Sequence
  Description of Artificial Sequence: Synthetic oligonucleotide
cgauucuccucguaagugg

SEQ ID NO: 1721966 - RNA, 19 nt, Artificial Sequence
  Description of Artificial Sequence: Synthetic oligonucleotide
ucuccucguaaguggccgc

SEQ ID NO: 1721967 - RNA, 19 nt, Artificial Sequence
  Description of Artificial Sequence: Synthetic oligonucleotide
uuccgugcuccauggccag

SEQ ID NO: 1721968 - RNA, 19 nt, Artificial Sequence
  Description of Artificial Sequence: Synthetic oligonucleotide
ggaagguacgaguagcucu

SEQ ID NO: 1721969 - RNA, 19 nt, Artificial Sequence
  Description of Artificial Sequence: Synthetic oligonucleotide
cucgccaugaaggauugga

SEQ ID NO: 1721970 - RNA, 19 nt, Artificial Sequence
  Description of Artificial Sequence: Synthetic oligonucleotide
ggcgugagugguucaaggc

SEQ ID NO: 1721971 - RNA, 19 nt, Artificial Sequence
  Description of Artificial Sequence: Synthetic oligonucleotide
ugaaacgcucgcuguggau

SEQ ID NO: 1721972 - RNA, 19 nt, Artificial Sequence
  Description of Artificial Sequence: Synthetic oligonucleotide
ggauaggaaccaaacucgc

SEQ ID NO: 1721973 - RNA, 19 nt, Artificial Sequence
  Description of Artificial Sequence: Synthetic oligonucleotide
ugaccugggaugggcaaga

SEQ ID NO: 1721974 - RNA, 19 nt, Artificial Sequence
  Description of Artificial Sequence: Synthetic oligonucleotide
ucguggcaggcugugaccu

SEQ ID NO: 1721975 - RNA, 19 nt, Artificial Sequence
  Description of Artificial Sequence: Synthetic oligonucleotide
ucagacacugagcgaugua

SEQ ID NO: 1721976 - RNA, 19 nt, Artificial Sequence
  Description of Artificial Sequence: Synthetic oligonucleotide
ccgccauugagagaaaggc

SEQ ID NO: 1721977 - RNA, 19 nt, Artificial Sequence
  Description of Artificial Sequence: Synthetic oligonucleotide
uuguaagggugagugcaaa

SEQ ID NO: 1721978 - RNA, 19 nt, Artificial Sequence
  Description of Artificial Sequence: Synthetic oligonucleotide
ggugaaucuagcgcugccc

SEQ ID NO: 1721979 - RNA, 19 nt, Artificial Sequence
  Description of Artificial Sequence: Synthetic oligonucleotide
gaaaaggcacgagcgugca

SEQ ID NO: 1721980 - RNA, 19 nt, Artificial Sequence
  Description of Artificial Sequence: Synthetic oligonucleotide
ggauccccgaggauguugg

SEQ ID NO: 1721981 - RNA, 19 nt, Artificial Sequence
  Description of Artificial Sequence: Synthetic oligonucleotide
ugucuacaucugacaagaa

SEQ ID NO: 1721982 - RNA, 19 nt, Artificial Sequence
  Description of Artificial Sequence: Synthetic oligonucleotide
cagggagguaggagaggcg

SEQ ID NO: 1721983 - RNA, 19 nt, Artificial Sequence
  Description of Artificial Sequence: Synthetic oligonucleotide
caaccgcuguaugugcagg

SEQ ID NO: 1721984 - RNA, 19 nt, Artificial Sequence
  Description of Artificial Sequence: Synthetic oligonucleotide
ggccgcaccaucaacccgg

SEQ ID NO: 1721985 - RNA, 19 nt, Artificial Sequence
  Description of Artificial Sequence: Synthetic oligonucleotide
gaggcuagcgugacggaga

SEQ ID NO: 1721986 - RNA, 19 nt, Artificial Sequence
  Description of Artificial Sequence: Synthetic oligonucleotide
aacccggaagguacgagua

SEQ ID NO: 1721987 - RNA, 19 nt, Artificial Sequence
  Description of Artificial Sequence: Synthetic oligonucleotide
guagacgcagaaguaagcu

SEQ ID NO: 1721988 - RNA, 19 nt, Artificial Sequence
  Description of Artificial Sequence: Synthetic oligonucleotide
gaaccaaacucgccaugaa

SEQ ID NO: 1721989 - RNA, 19 nt, Artificial Sequence
  Description of Artificial Sequence: Synthetic oligonucleotide
gguucaaggcgaaaaggca

SEQ ID NO: 1721990 - RNA, 19 nt, Artificial Sequence
  Description of Artificial Sequence: Synthetic oligonucleotide
cacugcgcacccagcacag

SEQ ID NO: 1721991 - RNA, 19 nt, Artificial Sequence
  Description of Artificial Sequence: Synthetic oligonucleotide
cgguagguaugcaaugugg

SEQ ID NO: 1721992 - RNA, 19 nt, Artificial Sequence
  Description of Artificial Sequence: Synthetic oligonucleotide
uggcccguacuccacuaau

SEQ ID NO: 1721993 - RNA, 19 nt, Artificial Sequence
  Description of Artificial Sequence: Synthetic oligonucleotide
augggcaagacuggcucug

SEQ ID NO: 1721994 - RNA, 19 nt, Artificial Sequence
  Description of Artificial Sequence: Synthetic oligonucleotide
gguagagacuuucggagua

SEQ ID NO: 1721995 - RNA, 19 nt, Artificial Sequence
  Description of Artificial Sequence: Synthetic oligonucleotide
ccacuaauuccccauccac

SEQ ID NO: 1721996 - RNA, 19 nt, Artificial Sequence
  Description of Artificial Sequence: Synthetic oligonucleotide
guagagacuuucggaguac

SEQ ID NO: 1721997 - RNA, 19 nt, Artificial Sequence
  Description of Artificial Sequence: Synthetic oligonucleotide
gccaugaaggauuggagua

SEQ ID NO: 1721998 - RNA, 19 nt, Artificial Sequence
  Description of Artificial Sequence: Synthetic oligonucleotide
gaaguaagcugcagugucu

SEQ ID NO: 1721999 - RNA, 19 nt, Artificial Sequence
  Description of Artificial Sequence: Synthetic oligonucleotide
cucgcuguggaugucuaca

SEQ ID NO: 1722000 - RNA, 19 nt, Artificial Sequence
  Description of Artificial Sequence: Synthetic oligonucleotide
cagacacugagcgauguaa

SEQ ID NO: 1722001 - RNA, 19 nt, Artificial Sequence
  Description of Artificial Sequence: Synthetic oligonucleotide
ucugcacgauucuccucgu

SEQ ID NO: 1722002 - RNA, 19 nt, Artificial Sequence
  Description of Artificial Sequence: Synthetic oligonucleotide
agcccgugaaaugccacug

SEQ ID NO: 1722003 - RNA, 19 nt, Artificial Sequence
  Description of Artificial Sequence: Synthetic oligonucleotide
ugggcgcaaccgcuguaug

SEQ ID NO: 1722004 - RNA, 19 nt, Artificial Sequence
  Description of Artificial Sequence: Synthetic oligonucleotide
auccugaggcuagcgugac

SEQ ID NO: 1722005 - RNA, 19 nt, Artificial Sequence
  Description of Artificial Sequence: Synthetic oligonucleotide
gcauuguaagggugagugc

SEQ ID NO: 1722006 - RNA, 19 nt, Artificial Sequence
  Description of Artificial Sequence: Synthetic oligonucleotide
acaccacguggcgugagug

SEQ ID NO: 1722007 - RNA, 19 nt, Artificial Sequence
  Description of Artificial Sequence: Synthetic oligonucleotide
cagcggauccugaggcuag

SEQ ID NO: 1722008 - RNA, 19 nt, Artificial Sequence
  Description of Artificial Sequence: Synthetic oligonucleotide
gcgaaaaggcacgagcgug

SEQ ID NO: 1722009 - RNA, 19 nt, Artificial Sequence
  Description of Artificial Sequence: Synthetic oligonucleotide
uuggcucguggcaggcugu

SEQ ID NO: 1722010 - RNA, 19 nt, Artificial Sequence
  Description of Artificial Sequence: Synthetic oligonucleotide
cgaaaaggcacgagcgugc

SEQ ID NO: 1722011 - RNA, 19 nt, Artificial Sequence
  Description of Artificial Sequence: Synthetic oligonucleotide
gccagcaaaauacggagua

SEQ ID NO: 1722012 - RNA, 19 nt, Artificial Sequence
  Description of Artificial Sequence: Synthetic oligonucleotide
ccugcauuggcccguacuc

SEQ ID NO: 1722013 - RNA, 19 nt, Artificial Sequence
  Description of Artificial Sequence: Synthetic oligonucleotide
cgagcgugcagcauagccc

SEQ ID NO: 1722014 - RNA, 19 nt, Artificial Sequence
  Description of Artificial Sequence: Synthetic oligonucleotide
ggcgcaaccgcuguaugug

SEQ ID NO: 1722015 - RNA, 19 nt, Artificial Sequence
  Description of Artificial Sequence: Synthetic oligonucleotide
ggcagaucagacacugagc

SEQ ID NO: 1722016 - RNA, 19 nt, Artificial Sequence
  Description of Artificial Sequence: Synthetic oligonucleotide
caaggcgaaaaggcacgag

SEQ ID NO: 1722017 - RNA, 19 nt, Artificial Sequence
  Description of Artificial Sequence: Synthetic oligonucleotide
accacguggcgugaguggu

SEQ ID NO: 1722018 - RNA, 19 nt, Artificial Sequence
  Description of Artificial Sequence: Synthetic oligonucleotide
uugcauuguaagggugagu

SEQ ID NO: 1722019 - RNA, 19 nt, Artificial Sequence
  Description of Artificial Sequence: Synthetic oligonucleotide
uuggcccguacuccacuaa

SEQ ID NO: 1722020 - RNA, 19 nt, Artificial Sequence
  Description of Artificial Sequence: Synthetic oligonucleotide
gugacggagagcagcgcug

SEQ ID NO: 1722021 - RNA, 19 nt, Artificial Sequence
  Description of Artificial Sequence: Synthetic oligonucleotide
gcaaccgcuguaugugcag

SEQ ID NO: 1722022 - RNA, 19 nt, Artificial Sequence
  Description of Artificial Sequence: Synthetic oligonucleotide
aggauccccgaggauguug

SEQ ID NO: 1722023 - RNA, 19 nt, Artificial Sequence
  Description of Artificial Sequence: Synthetic oligonucleotide
ccugaaacgcucgcugugg

SEQ ID NO: 1722024 - RNA, 19 nt, Artificial Sequence
  Description of Artificial Sequence: Synthetic oligonucleotide
uuugggcgcaaccgcugua

SEQ ID NO: 1722025 - RNA, 19 nt, Artificial Sequence
  Description of Artificial Sequence: Synthetic oligonucleotide
cagaucagacacugagcga

SEQ ID NO: 1722026 - RNA, 19 nt, Artificial Sequence
  Description of Artificial Sequence: Synthetic oligonucleotide
gacgcagaaguaagcugca

SEQ ID NO: 1722027 - RNA, 19 nt, Artificial Sequence
  Description of Artificial Sequence: Synthetic oligonucleotide
uugggcgcaaccgcuguau

SEQ ID NO: 1722028 - RNA, 19 nt, Artificial Sequence
  Description of Artificial Sequence: Synthetic oligonucleotide
cuguaugugcagggcuugc

SEQ ID NO: 1722029 - RNA, 19 nt, Artificial Sequence
  Description of Artificial Sequence: Synthetic oligonucleotide
auuggcccguacuccacua

SEQ ID NO: 1722030 - RNA, 19 nt, Artificial Sequence
  Description of Artificial Sequence: Synthetic oligonucleotide
aacgcucgcuguggauguc

SEQ ID NO: 1722031 - RNA, 19 nt, Artificial Sequence
  Description of Artificial Sequence: Synthetic oligonucleotide
ccacgccaucaucaaaucg

SEQ ID NO: 1722032 - RNA, 19 nt, Artificial Sequence
  Description of Artificial Sequence: Synthetic oligonucleotide
augaaggauuggaguacug

SEQ ID NO: 1722033 - RNA, 19 nt, Artificial Sequence
  Description of Artificial Sequence: Synthetic oligonucleotide
gauguaagggcgagugggu

SEQ ID NO: 1722034 - RNA, 19 nt, Artificial Sequence
  Description of Artificial Sequence: Synthetic oligonucleotide
gcgauguaagggcgagugg

SEQ ID NO: 1722035 - RNA, 19 nt, Artificial Sequence
  Description of Artificial Sequence: Synthetic oligonucleotide
accaucaacccggaaggua

SEQ ID NO: 1722036 - RNA, 19 nt, Artificial Sequence
  Description of Artificial Sequence: Synthetic oligonucleotide
cgugaaaugccacugcgca

SEQ ID NO: 1722037 - RNA, 19 nt, Artificial Sequence
  Description of Artificial Sequence: Synthetic oligonucleotide
gccgccauugagagaaagg

SEQ ID NO: 1722038 - RNA, 19 nt, Artificial Sequence
  Description of Artificial Sequence: Synthetic oligonucleotide
cugagcgauguaagggcga

SEQ ID NO: 1722039 - RNA, 19 nt, Artificial Sequence
  Description of Artificial Sequence: Synthetic oligonucleotide
ucgagcauguggggcggcc

SEQ ID NO: 1722040 - RNA, 19 nt, Artificial Sequence
  Description of Artificial Sequence: Synthetic oligonucleotide
agcccaggugagggcagcc

SEQ ID NO: 1722041 - RNA, 19 nt, Artificial Sequence
  Description of Artificial Sequence: Synthetic oligonucleotide
gcccguacuccacuaauuc

SEQ ID NO: 1722042 - RNA, 19 nt, Artificial Sequence
  Description of Artificial Sequence: Synthetic oligonucleotide
ccgugaaaugccacugcgc

SEQ ID NO: 1722043 - RNA, 19 nt, Artificial Sequence
  Description of Artificial Sequence: Synthetic oligonucleotide
gcgguagguaugcaaugug

SEQ ID NO: 1722044 - RNA, 19 nt, Artificial Sequence
  Description of Artificial Sequence: Synthetic oligonucleotide
acagcggauccugaggcua

SEQ ID NO: 1722045 - RNA, 19 nt, Artificial Sequence
  Description of Artificial Sequence: Synthetic oligonucleotide
cuagugcugcaccuaaggu

SEQ ID NO: 1722046 - RNA, 19 nt, Artificial Sequence
  Description of Artificial Sequence: Synthetic oligonucleotide
gcuugcauuguaaggguga

SEQ ID NO: 1722047 - RNA, 19 nt, Artificial Sequence
  Description of Artificial Sequence: Synthetic oligonucleotide
caaacuccccuucuauugu

SEQ ID NO: 1722048 - RNA, 19 nt, Artificial Sequence
  Description of Artificial Sequence: Synthetic oligonucleotide
aucaacccggaagguacga

SEQ ID NO: 1722049 - RNA, 19 nt, Artificial Sequence
  Description of Artificial Sequence: Synthetic oligonucleotide
aucgagcauguggggcggc

SEQ ID NO: 1722050 - RNA, 19 nt, Artificial Sequence
  Description of Artificial Sequence: Synthetic oligonucleotide
agaggcguccgcgguaggu

SEQ ID NO: 1722051 - RNA, 19 nt, Artificial Sequence
  Description of Artificial Sequence: Synthetic oligonucleotide
cacguggcgugagugguuc

SEQ ID NO: 1722052 - RNA, 19 nt, Artificial Sequence
  Description of Artificial Sequence: Synthetic oligonucleotide
ugagugguucaaggcgaaa

SEQ ID NO: 1722053 - RNA, 19 nt, Artificial Sequence
  Description of Artificial Sequence: Synthetic oligonucleotide
gggccgccgccauugagag

SEQ ID NO: 1722054 - RNA, 19 nt, Artificial Sequence
  Description of Artificial Sequence: Synthetic oligonucleotide
gcuggauaggaaccaaacu

SEQ ID NO: 1722055 - RNA, 19 nt, Artificial Sequence
  Description of Artificial Sequence: Synthetic oligonucleotide
gcugcaccuaaggugaauc

SEQ ID NO: 1722056 - RNA, 19 nt, Artificial Sequence
  Description of Artificial Sequence: Synthetic oligonucleotide
aggagggacuaggccaucu

SEQ ID NO: 1722057 - RNA, 19 nt, Artificial Sequence
  Description of Artificial Sequence: Synthetic oligonucleotide
gccgccgccauugagagaa

SEQ ID NO: 1722058 - RNA, 19 nt, Artificial Sequence
  Description of Artificial Sequence: Synthetic oligonucleotide
guagcucugcgccggccuc

SEQ ID NO: 1722059 - RNA, 19 nt, Artificial Sequence
  Description of Artificial Sequence: Synthetic oligonucleotide
aggcguccgcgguagguau

SEQ ID NO: 1722060 - RNA, 19 nt, Artificial Sequence
  Description of Artificial Sequence: Synthetic oligonucleotide
caacccggaagguacgagu

SEQ ID NO: 1722061 - RNA, 19 nt, Artificial Sequence
  Description of Artificial Sequence: Synthetic oligonucleotide
gagaggcguccgcgguagg

SEQ ID NO: 1722062 - RNA, 19 nt, Artificial Sequence
  Description of Artificial Sequence: Synthetic oligonucleotide
cacgauucuccucguaagu

SEQ ID NO: 1722063 - RNA, 19 nt, Artificial Sequence
  Description of Artificial Sequence: Synthetic oligonucleotide
cccggaagguacgaguagc

SEQ ID NO: 1722064 - RNA, 19 nt, Artificial Sequence
  Description of Artificial Sequence: Synthetic oligonucleotide
agagacuuucggaguacua

SEQ ID NO: 1722065 - RNA, 19 nt, Artificial Sequence
  Description of Artificial Sequence: Synthetic oligonucleotide
ggcacgagcgugcagcaua

SEQ ID NO: 1722066 - RNA, 19 nt, Artificial Sequence
  Description of Artificial Sequence: Synthetic oligonucleotide
gcuguaugugcagggcuug

SEQ ID NO: 1722067 - RNA, 19 nt, Artificial Sequence
  Description of Artificial Sequence: Synthetic oligonucleotide
gugcagcccgugaaaugcc

SEQ ID NO: 1722068 - RNA, 19 nt, Artificial Sequence
  Description of Artificial Sequence: Synthetic oligonucleotide
uaguucugacuuggcucgu

SEQ ID NO: 1722069 - RNA, 19 nt, Artificial Sequence
  Description of Artificial Sequence: Synthetic oligonucleotide
cgugagugguucaaggcga

SEQ ID NO: 1722070 - RNA, 19 nt, Artificial Sequence
  Description of Artificial Sequence: Synthetic oligonucleotide
agggcgagugggugacagu

SEQ ID NO: 1722071 - RNA, 19 nt, Artificial Sequence
  Description of Artificial Sequence: Synthetic oligonucleotide
ccguggguagguguagacg

SEQ ID NO: 1722072 - RNA, 19 nt, Artificial Sequence
  Description of Artificial Sequence: Synthetic oligonucleotide
guccgcgguagguaugcaa

SEQ ID NO: 1722073 - RNA, 19 nt, Artificial Sequence
  Description of Artificial Sequence: Synthetic oligonucleotide
acucgccaugaaggauugg

SEQ ID NO: 1722074 - RNA, 19 nt, Artificial Sequence
  Description of Artificial Sequence: Synthetic oligonucleotide
cugaagugguuuccgugcu

SEQ ID NO: 1722075 - RNA, 19 nt, Artificial Sequence
  Description of Artificial Sequence: Synthetic oligonucleotide
gagggagcaggugguccac

SEQ ID NO: 1722076 - RNA, 19 nt, Artificial Sequence
  Description of Artificial Sequence: Synthetic oligonucleotide
cauguggggcggccaccag

SEQ ID NO: 1722077 - RNA, 19 nt, Artificial Sequence
  Description of Artificial Sequence: Synthetic oligonucleotide
gguuuccgugcuccauggc

SEQ ID NO: 1722078 - RNA, 19 nt, Artificial Sequence
  Description of Artificial Sequence: Synthetic oligonucleotide
gguaugcaauguggccagg

SEQ ID NO: 1722079 - RNA, 19 nt, Artificial Sequence
  Description of Artificial Sequence: Synthetic oligonucleotide
ggagggacuaggccaucuc

SEQ ID NO: 1722080 - RNA, 19 nt, Artificial Sequence
  Description of Artificial Sequence: Synthetic oligonucleotide
cagaaguaagcugcagugu

SEQ ID NO: 1722081 - RNA, 19 nt, Artificial Sequence
  Description of Artificial Sequence: Synthetic oligonucleotide
gcccgugaaaugccacugc

SEQ ID NO: 1722082 - RNA, 19 nt, Artificial Sequence
  Description of Artificial Sequence: Synthetic oligonucleotide
cuaauuccccauccacagu

SEQ ID NO: 1722083 - RNA, 19 nt, Artificial Sequence
  Description of Artificial Sequence: Synthetic oligonucleotide
cccugaaacgcucgcugug

SEQ ID NO: 1722084 - RNA, 19 nt, Artificial Sequence
  Description of Artificial Sequence: Synthetic oligonucleotide
gcacgagcgugcagcauag

SEQ ID NO: 1722085 - RNA, 19 nt, Artificial Sequence
  Description of Artificial Sequence: Synthetic oligonucleotide
ggaaaacagcggauccuga

SEQ ID NO: 1722086 - RNA, 19 nt, Artificial Sequence
  Description of Artificial Sequence: Synthetic oligonucleotide
gcgugcagcauagcccagg

SEQ ID NO: 1722087 - RNA, 19 nt, Artificial Sequence
  Description of Artificial Sequence: Synthetic oligonucleotide
guacuagaggugggaggca

SEQ ID NO: 1722088 - RNA, 19 nt, Artificial Sequence
  Description of Artificial Sequence: Synthetic oligonucleotide
gcgcaaccgcuguaugugc

SEQ ID NO: 1722089 - RNA, 19 nt, Artificial Sequence
  Description of Artificial Sequence: Synthetic oligonucleotide
gggcaagacuggcucugug

SEQ ID NO: 1722090 - RNA, 19 nt, Artificial Sequence
  Description of Artificial Sequence: Synthetic oligonucleotide
caucucggggccgggcuuc

SEQ ID NO: 1722091 - RNA, 19 nt, Artificial Sequence
  Description of Artificial Sequence: Synthetic oligonucleotide
gaggcguccgcgguaggua

SEQ ID NO: 1722092 - RNA, 19 nt, Artificial Sequence
  Description of Artificial Sequence: Synthetic oligonucleotide
ggcgaaaaggcacgagcgu

SEQ ID NO: 1722093 - RNA, 19 nt, Artificial Sequence
  Description of Artificial Sequence: Synthetic oligonucleotide
ccagcuccgccccagucuc

SEQ ID NO: 1722094 - RNA, 19 nt, Artificial Sequence
  Description of Artificial Sequence: Synthetic oligonucleotide
uucaggcuuugggcgcaac

SEQ ID NO: 1722095 - RNA, 19 nt, Artificial Sequence
  Description of Artificial Sequence: Synthetic oligonucleotide
gcaaaccgugggccauggg

SEQ ID NO: 1722096 - RNA, 19 nt, Artificial Sequence
  Description of Artificial Sequence: Synthetic oligonucleotide
gccacugcgcacccagcac

SEQ ID NO: 1722097 - RNA, 19 nt, Artificial Sequence
  Description of Artificial Sequence: Synthetic oligonucleotide
cugaggcuagcgugacgga

SEQ ID NO: 1722098 - RNA, 19 nt, Artificial Sequence
  Description of Artificial Sequence: Synthetic oligonucleotide
gcuuugggcgcaaccgcug

SEQ ID NO: 1722099 - RNA, 19 nt, Artificial Sequence
  Description of Artificial Sequence: Synthetic oligonucleotide
agagcagcgcugggccucu

SEQ ID NO: 1722100 - RNA, 19 nt, Artificial Sequence
  Description of Artificial Sequence: Synthetic oligonucleotide
gaccugggaugggcaagac

SEQ ID NO: 1722101 - RNA, 19 nt, Artificial Sequence
  Description of Artificial Sequence: Synthetic oligonucleotide
ggggcggccaccaggucug

SEQ ID NO: 1722102 - RNA, 19 nt, Artificial Sequence
  Description of Artificial Sequence: Synthetic oligonucleotide
cuuugggcgcaaccgcugu

SEQ ID NO: 1722103 - RNA, 19 nt, Artificial Sequence
  Description of Artificial Sequence: Synthetic oligonucleotide
acguggcgugagugguuca

SEQ ID NO: 1722104 - RNA, 19 nt, Artificial Sequence
  Description of Artificial Sequence: Synthetic oligonucleotide
gcggauccugaggcuagcg

SEQ ID NO: 1722105 - RNA, 19 nt, Artificial Sequence
  Description of Artificial Sequence: Synthetic oligonucleotide
ggccuagugcugcaccuaa

SEQ ID NO: 1722106 - RNA, 19 nt, Artificial Sequence
  Description of Artificial Sequence: Synthetic oligonucleotide
ccgcgguagguaugcaaug

SEQ ID NO: 1722107 - RNA, 19 nt, Artificial Sequence
  Description of Artificial Sequence: Synthetic oligonucleotide
cagcuccgccccagucucc

SEQ ID NO: 1722108 - RNA, 19 nt, Artificial Sequence
  Description of Artificial Sequence: Synthetic oligonucleotide
cauuggcccguacuccacu

SEQ ID NO: 1722109 - RNA, 19 nt, Artificial Sequence
  Description of Artificial Sequence: Synthetic oligonucleotide
ugccugcauuggcccguac

SEQ ID NO: 1722110 - RNA, 19 nt, Artificial Sequence
  Description of Artificial Sequence: Synthetic oligonucleotide
gggcgagugggugacagua

SEQ ID NO: 1722111 - RNA, 19 nt, Artificial Sequence
  Description of Artificial Sequence: Synthetic oligonucleotide
gaugcaccugugccugcau

SEQ ID NO: 1722112 - RNA, 19 nt, Artificial Sequence
  Description of Artificial Sequence: Synthetic oligonucleotide
gcguccgcgguagguaugc

SEQ ID NO: 1722113 - RNA, 19 nt, Artificial Sequence
  Description of Artificial Sequence: Synthetic oligonucleotide
cagcccgugaaaugccacu

SEQ ID NO: 1722114 - RNA, 19 nt, Artificial Sequence
  Description of Artificial Sequence: Synthetic oligonucleotide
acggaguagugcagcccgu

SEQ ID NO: 1722115 - RNA, 19 nt, Artificial Sequence
  Description of Artificial Sequence: Synthetic oligonucleotide
ccacugcgcacccagcaca

SEQ ID NO: 1722116 - RNA, 19 nt, Artificial Sequence
  Description of Artificial Sequence: Synthetic oligonucleotide
cugcgcacccagcacagau

SEQ ID NO: 1722117 - RNA, 19 nt, Artificial Sequence
  Description of Artificial Sequence: Synthetic oligonucleotide
cacgagcgugcagcauagc

SEQ ID NO: 1722118 - RNA, 19 nt, Artificial Sequence
  Description of Artificial Sequence: Synthetic oligonucleotide
ggaugcaccugugccugca

SEQ ID NO: 1722119 - RNA, 19 nt, Artificial Sequence
  Description of Artificial Sequence: Synthetic oligonucleotide
agcgugcagcauagcccag

SEQ ID NO: 1722120 - RNA, 19 nt, Artificial Sequence
  Description of Artificial Sequence: Synthetic oligonucleotide
acugcgcacccagcacaga

SEQ ID NO: 1722121 - RNA, 19 nt, Artificial Sequence
  Description of Artificial Sequence: Synthetic oligonucleotide
gccuagugcugcaccuaag

SEQ ID NO: 1722122 - RNA, 19 nt, Artificial Sequence
  Description of Artificial Sequence: Synthetic oligonucleotide
caagaauccccaggccacu

SEQ ID NO: 1722123 - RNA, 19 nt, Artificial Sequence
  Description of Artificial Sequence: Synthetic oligonucleotide
gcagcccgugaaaugccac

SEQ ID NO: 1722124 - RNA, 19 nt, Artificial Sequence
  Description of Artificial Sequence: Synthetic oligonucleotide
gccccagguagagacuuuc

SEQ ID NO: 1722125 - RNA, 19 nt, Artificial Sequence
  Description of Artificial Sequence: Synthetic oligonucleotide
gccugcauuggcccguacu

SEQ ID NO: 1722126 - RNA, 19 nt, Artificial Sequence
  Description of Artificial Sequence: Synthetic oligonucleotide
gggcgcaaccgcuguaugu

SEQ ID NO: 1722127 - RNA, 19 nt, Artificial Sequence
  Description of Artificial Sequence: Synthetic oligonucleotide
gcccuucagugauggguga

SEQ ID NO: 1722128 - RNA, 19 nt, Artificial Sequence
  Description of Artificial Sequence: Synthetic oligonucleotide
cugcacgauucuccucgua

SEQ ID NO: 1722129 - RNA, 19 nt, Artificial Sequence
  Description of Artificial Sequence: Synthetic oligonucleotide
gagcgauguaagggcgagu

SEQ ID NO: 1722130 - RNA, 19 nt, Artificial Sequence
  Description of Artificial Sequence: Synthetic oligonucleotide
aggcacgagcgugcagcau

SEQ ID NO: 1722131 - RNA, 19 nt, Artificial Sequence
  Description of Artificial Sequence: Synthetic oligonucleotide
cacgccggccccgugggua

SEQ ID NO: 1722132 - RNA, 19 nt, Artificial Sequence
  Description of Artificial Sequence: Synthetic oligonucleotide
ggcguccgcgguagguaug

SEQ ID NO: 1722133 - RNA, 19 nt, Artificial Sequence
  Description of Artificial Sequence: Synthetic oligonucleotide
ccggaagguacgaguagcu

SEQ ID NO: 1722134 - RNA, 19 nt, Artificial Sequence
  Description of Artificial Sequence: Synthetic oligonucleotide
gccccguggguagguguag

SEQ ID NO: 1722135 - RNA, 19 nt, Artificial Sequence
  Description of Artificial Sequence: Synthetic oligonucleotide
guggggcggccaccagguc

SEQ ID NO: 1722136 - RNA, 19 nt, Artificial Sequence
  Description of Artificial Sequence: Synthetic oligonucleotide
gcgugacggagagcagcgc

SEQ ID NO: 1722137 - RNA, 19 nt, Artificial Sequence
  Description of Artificial Sequence: Synthetic oligonucleotide
cggaguagugcagcccgug

SEQ ID NO: 1722138 - RNA, 19 nt, Artificial Sequence
  Description of Artificial Sequence: Synthetic oligonucleotide
gcgcugggccucugcacga

SEQ ID NO: 1722139 - RNA, 19 nt, Artificial Sequence
  Description of Artificial Sequence: Synthetic oligonucleotide
ggcuagcgugacggagagc

SEQ ID NO: 1722140 - RNA, 19 nt, Artificial Sequence
  Description of Artificial Sequence: Synthetic oligonucleotide
caccaucaacccggaaggu

SEQ ID NO: 1722141 - RNA, 19 nt, Artificial Sequence
  Description of Artificial Sequence: Synthetic oligonucleotide
cgccgccauugagagaaag

SEQ ID NO: 1722142 - RNA, 19 nt, Artificial Sequence
  Description of Artificial Sequence: Synthetic oligonucleotide
ccgcuguaugugcagggcu

SEQ ID NO: 1722143 - RNA, 19 nt, Artificial Sequence
  Description of Artificial Sequence: Synthetic oligonucleotide
ggccccguggguaggugua

SEQ ID NO: 1722144 - RNA, 19 nt, Artificial Sequence
  Description of Artificial Sequence: Synthetic oligonucleotide
ccccuucuauugucaccca

SEQ ID NO: 1722145 - RNA, 19 nt, Artificial Sequence
  Description of Artificial Sequence: Synthetic oligonucleotide
cccuucagugaugggugaa

SEQ ID NO: 1722146 - RNA, 19 nt, Artificial Sequence
  Description of Artificial Sequence: Synthetic oligonucleotide
ggcccguacuccacuaauu

SEQ ID NO: 1722147 - RNA, 19 nt, Artificial Sequence
  Description of Artificial Sequence: Synthetic oligonucleotide
cgugcagcauagcccaggu

SEQ ID NO: 1722148 - RNA, 19 nt, Artificial Sequence
  Description of Artificial Sequence: Synthetic oligonucleotide
gccgcaccaucaacccgga

SEQ ID NO: 1722149 - RNA, 19 nt, Artificial Sequence
  Description of Artificial Sequence: Synthetic oligonucleotide
cgcgguagguaugcaaugu

SEQ ID NO: 1722150 - RNA, 19 nt, Artificial Sequence
  Description of Artificial Sequence: Synthetic oligonucleotide
cguggcgugagugguucaa

SEQ ID NO: 1722151 - RNA, 19 nt, Artificial Sequence
  Description of Artificial Sequence: Synthetic oligonucleotide
gggcggccaccaggucugc

SEQ ID NO: 1722152 - RNA, 19 nt, Artificial Sequence
  Description of Artificial Sequence: Synthetic oligonucleotide
cgcucgcuguggaugucua

SEQ ID NO: 1722153 - RNA, 19 nt, Artificial Sequence
  Description of Artificial Sequence: Synthetic oligonucleotide
gggagcccggggaggccaa

SEQ ID NO: 1722154 - RNA, 19 nt, Artificial Sequence
  Description of Artificial Sequence: Synthetic oligonucleotide
caggauccccgaggauguu

SEQ ID NO: 1722155 - RNA, 19 nt, Artificial Sequence
  Description of Artificial Sequence: Synthetic oligonucleotide
ccacguggcgugagugguu

SEQ ID NO: 1722156 - RNA, 19 nt, Artificial Sequence
  Description of Artificial Sequence: Synthetic oligonucleotide
ccgcaccaucaacccggaa

SEQ ID NO: 1722157 - RNA, 19 nt, Artificial Sequence
  Description of Artificial Sequence: Synthetic oligonucleotide
ccgccgccauugagagaaa

SEQ ID NO: 1722158 - RNA, 19 nt, Artificial Sequence
  Description of Artificial Sequence: Synthetic oligonucleotide
cguccgcgguagguaugca

SEQ ID NO: 1722159 - RNA, 19 nt, Artificial Sequence
  Description of Artificial Sequence: Synthetic oligonucleotide
aaaguguugacuuugucgg

SEQ ID NO: 1722160 - RNA, 19 nt, Artificial Sequence
  Description of Artificial Sequence: Synthetic oligonucleotide
aauucagcgaugcacacac

SEQ ID NO: 1722161 - RNA, 19 nt, Artificial Sequence
  Description of Artificial Sequence: Synthetic oligonucleotide
aauacuaccacugagaaau

SEQ ID NO: 1722162 - RNA, 19 nt, Artificial Sequence
  Description of Artificial Sequence: Synthetic oligonucleotide
aaaugauuagaacacucuc

SEQ ID NO: 1722163 - RNA, 19 nt, Artificial Sequence
  Description of Artificial Sequence: Synthetic oligonucleotide
aaugugaaagucuucauaa

SEQ ID NO: 1722164 - RNA, 19 nt, Artificial Sequence
  Description of Artificial Sequence: Synthetic oligonucleotide
acgaagauccacuuaaggc

SEQ ID NO: 1722165 - RNA, 19 nt, Artificial Sequence
  Description of Artificial Sequence: Synthetic oligonucleotide
ugugaaagucuucauaaag

SEQ ID NO: 1722166 - RNA, 19 nt, Artificial Sequence
  Description of Artificial Sequence: Synthetic oligonucleotide
gaugauauugcuaagcgug

SEQ ID NO: 1722167 - RNA, 19 nt, Artificial Sequence
  Description of Artificial Sequence: Synthetic oligonucleotide
ucgaugauauugcuaagcg

SEQ ID NO: 1722168 - RNA, 19 nt, Artificial Sequence
  Description of Artificial Sequence: Synthetic oligonucleotide
ucucacguccuuuagacag

SEQ ID NO: 1722169 - RNA, 19 nt, Artificial Sequence
  Description of Artificial Sequence: Synthetic oligonucleotide
uuauugaggagugugaggc

SEQ ID NO: 1722170 - RNA, 19 nt, Artificial Sequence
  Description of Artificial Sequence: Synthetic oligonucleotide
ucauacaaggacaagaauu

SEQ ID NO: 1722171 - RNA, 19 nt, Artificial Sequence
  Description of Artificial Sequence: Synthetic oligonucleotide
aaccgaucggaugacaggc

SEQ ID NO: 1722172 - RNA, 19 nt, Artificial Sequence
  Description of Artificial Sequence: Synthetic oligonucleotide
uauuuuauugaggagugug

SEQ ID NO: 1722173 - RNA, 19 nt, Artificial Sequence
  Description of Artificial Sequence: Synthetic oligonucleotide
acucucacguccuuuagac

SEQ ID NO: 1722174 - RNA, 19 nt, Artificial Sequence
  Description of Artificial Sequence: Synthetic oligonucleotide
cuugauuugcaugaggcgg

SEQ ID NO: 1722175 - RNA, 19 nt, Artificial Sequence
  Description of Artificial Sequence: Synthetic oligonucleotide
uacaaggacaagaauucag

SEQ ID NO: 1722176 - RNA, 19 nt, Artificial Sequence
  Description of Artificial Sequence: Synthetic oligonucleotide
uuagaacacucucacgucc

SEQ ID NO: 1722177 - RNA, 19 nt, Artificial Sequence
  Description of Artificial Sequence: Synthetic oligonucleotide
uugucauagccuuugaccu

SEQ ID NO: 1722178 - RNA, 19 nt, Artificial Sequence
  Description of Artificial Sequence: Synthetic oligonucleotide
gauuagaacacucucacgu

SEQ ID NO: 1722179 - RNA, 19 nt, Artificial Sequence
  Description of Artificial Sequence: Synthetic oligonucleotide
aaugauuagaacacucuca

SEQ ID NO: 1722180 - RNA, 19 nt, Artificial Sequence
  Description of Artificial Sequence: Synthetic oligonucleotide
ucauaaaggucuuccaucu

SEQ ID NO: 1722181 - RNA, 19 nt, Artificial Sequence
  Description of Artificial Sequence: Synthetic oligonucleotide
ucuugauuugcaugaggcg

SEQ ID NO: 1722182 - RNA, 19 nt, Artificial Sequence
  Description of Artificial Sequence: Synthetic oligonucleotide
ucgaauacuaccacugaga

SEQ ID NO: 1722183 - RNA, 19 nt, Artificial Sequence
  Description of Artificial Sequence: Synthetic oligonucleotide
gacgaagauccacuuaagg

SEQ ID NO: 1722184 - RNA, 19 nt, Artificial Sequence
  Description of Artificial Sequence: Synthetic oligonucleotide
ugcucgaugauauugcuaa

SEQ ID NO: 1722185 - RNA, 19 nt, Artificial Sequence
  Description of Artificial Sequence: Synthetic oligonucleotide
cuaagcguggguuccagcg

SEQ ID NO: 1722186 - RNA, 19 nt, Artificial Sequence
  Description of Artificial Sequence: Synthetic oligonucleotide
ugaguggugugcuauuggg

SEQ ID NO: 1722187 - RNA, 19 nt, Artificial Sequence
  Description of Artificial Sequence: Synthetic oligonucleotide
aagacgagcugguugacga

SEQ ID NO: 1722188 - RNA, 19 nt, Artificial Sequence
  Description of Artificial Sequence: Synthetic oligonucleotide
auuagaacacucucacguc

SEQ ID NO: 1722189 - RNA, 19 nt, Artificial Sequence
  Description of Artificial Sequence: Synthetic oligonucleotide
ucuguggaaaugauuagaa

SEQ ID NO: 1722190 - RNA, 19 nt, Artificial Sequence
  Description of Artificial Sequence: Synthetic oligonucleotide
caaggacaagaauucagcg

SEQ ID NO: 1722191 - RNA, 19 nt, Artificial Sequence
  Description of Artificial Sequence: Synthetic oligonucleotide
cuugcacuuagccagcucc

SEQ ID NO: 1722192 - RNA, 19 nt, Artificial Sequence
  Description of Artificial Sequence: Synthetic oligonucleotide
cuggucagcauucaugucc

SEQ ID NO: 1722193 - RNA, 19 nt, Artificial Sequence
  Description of Artificial Sequence: Synthetic oligonucleotide
aaguguugacuuugucggc

SEQ ID NO: 1722194 - RNA, 19 nt, Artificial Sequence
  Description of Artificial Sequence: Synthetic oligonucleotide
uucauaaaggucuuccauc

SEQ ID NO: 1722195 - RNA, 19 nt, Artificial Sequence
  Description of Artificial Sequence: Synthetic oligonucleotide
aggacaagaauucagcgau

SEQ ID NO: 1722196 - RNA, 19 nt, Artificial Sequence
  Description of Artificial Sequence: Synthetic oligonucleotide
auagcaaagagguugucau

SEQ ID NO: 1722197 - RNA, 19 nt, Artificial Sequence
  Description of Artificial Sequence: Synthetic oligonucleotide
ugcugugucgaauacuacc

SEQ ID NO: 1722198 - RNA, 19 nt, Artificial Sequence
  Description of Artificial Sequence: Synthetic oligonucleotide
aacucugccccauagggaa

SEQ ID NO: 1722199 - RNA, 19 nt, Artificial Sequence
  Description of Artificial Sequence: Synthetic oligonucleotide
auuauuuuauugaggagug

SEQ ID NO: 1722200 - RNA, 19 nt, Artificial Sequence
  Description of Artificial Sequence: Synthetic oligonucleotide
auugcuaagcguggguucc

SEQ ID NO: 1722201 - RNA, 19 nt, Artificial Sequence
  Description of Artificial Sequence: Synthetic oligonucleotide
ugaacuguucgcuaaccga

SEQ ID NO: 1722202 - RNA, 19 nt, Artificial Sequence
  Description of Artificial Sequence: Synthetic oligonucleotide
caagaauucagcgaugcac

SEQ ID NO: 1722203 - RNA, 19 nt, Artificial Sequence
  Description of Artificial Sequence: Synthetic oligonucleotide
uugauuugcaugaggcggc

SEQ ID NO: 1722204 - RNA, 19 nt, Artificial Sequence
  Description of Artificial Sequence: Synthetic oligonucleotide
agauuauuuuauugaggag

SEQ ID NO: 1722205 - RNA, 19 nt, Artificial Sequence
  Description of Artificial Sequence: Synthetic oligonucleotide
acuguucgcuaaccgaucg

SEQ ID NO: 1722206 - RNA, 19 nt, Artificial Sequence
  Description of Artificial Sequence: Synthetic oligonucleotide
aggagcauccucgaacucc

SEQ ID NO: 1722207 - RNA, 19 nt, Artificial Sequence
  Description of Artificial Sequence: Synthetic oligonucleotide
uccgucucauacaaggaca

SEQ ID NO: 1722208 - RNA, 19 nt, Artificial Sequence
  Description of Artificial Sequence: Synthetic oligonucleotide
cacgucaggagcauccucg

SEQ ID NO: 1722209 - RNA, 19 nt, Artificial Sequence
  Description of Artificial Sequence: Synthetic oligonucleotide
ucgcuaaccgaucggauga

SEQ ID NO: 1722210 - RNA, 19 nt, Artificial Sequence
  Description of Artificial Sequence: Synthetic oligonucleotide
caaugucucuucuagcuug

SEQ ID NO: 1722211 - RNA, 19 nt, Artificial Sequence
  Description of Artificial Sequence: Synthetic oligonucleotide
cauguugcacaucugugag

SEQ ID NO: 1722212 - RNA, 19 nt, Artificial Sequence
  Description of Artificial Sequence: Synthetic oligonucleotide
gacaagaauucagcgaugc

SEQ ID NO: 1722213 - RNA, 19 nt, Artificial Sequence
  Description of Artificial Sequence: Synthetic oligonucleotide
uaaccgaucggaugacagg

SEQ ID NO: 1722214 - RNA, 19 nt, Artificial Sequence
  Description of Artificial Sequence: Synthetic oligonucleotide
cuaaccgaucggaugacag

SEQ ID NO: 1722215 - RNA, 19 nt, Artificial Sequence
  Description of Artificial Sequence: Synthetic oligonucleotide
aaccucaugggguaacagu

SEQ ID NO: 1722216 - RNA, 19 nt, Artificial Sequence
  Description of Artificial Sequence: Synthetic oligonucleotide
cuccauagcaaagagguug

SEQ ID NO: 1722217 - RNA, 19 nt, Artificial Sequence
  Description of Artificial Sequence: Synthetic oligonucleotide
aggucgucuguucaggguc

SEQ ID NO: 1722218 - RNA, 19 nt, Artificial Sequence
  Description of Artificial Sequence: Synthetic oligonucleotide
cuuguggcgagccucacac

SEQ ID NO: 1722219 - RNA, 19 nt, Artificial Sequence
  Description of Artificial Sequence: Synthetic oligonucleotide
uucgcuaaccgaucggaug

SEQ ID NO: 1722220 - RNA, 19 nt, Artificial Sequence
  Description of Artificial Sequence: Synthetic oligonucleotide
acccacgccacccuugccc

SEQ ID NO: 1722221 - RNA, 19 nt, Artificial Sequence
  Description of Artificial Sequence: Synthetic oligonucleotide
agaaaguguugacuuuguc

SEQ ID NO: 1722222 - RNA, 19 nt, Artificial Sequence
  Description of Artificial Sequence: Synthetic oligonucleotide
ugggugucgaucuugcacu

SEQ ID NO: 1722223 - RNA, 19 nt, Artificial Sequence
  Description of Artificial Sequence: Synthetic oligonucleotide
ucgaucuugcacuuagcca

SEQ ID NO: 1722224 - RNA, 19 nt, Artificial Sequence
  Description of Artificial Sequence: Synthetic oligonucleotide
cuccucgaagaacucaucg

SEQ ID NO: 1722225 - RNA, 19 nt, Artificial Sequence
  Description of Artificial Sequence: Synthetic oligonucleotide
auagcucauggccucauca

SEQ ID NO: 1722226 - RNA, 19 nt, Artificial Sequence
  Description of Artificial Sequence: Synthetic oligonucleotide
ugauauugcuaagcguggg

SEQ ID NO: 1722227 - RNA, 19 nt, Artificial Sequence
  Description of Artificial Sequence: Synthetic oligonucleotide
uggucagcauucauguccc

SEQ ID NO: 1722228 - RNA, 19 nt, Artificial Sequence
  Description of Artificial Sequence: Synthetic oligonucleotide
gucgaucuugcacuuagcc

SEQ ID NO: 1722229 - RNA, 19 nt, Artificial Sequence
  Description of Artificial Sequence: Synthetic oligonucleotide
gucgaauacuaccacugag

SEQ ID NO: 1722230 - RNA, 19 nt, Artificial Sequence
  Description of Artificial Sequence: Synthetic oligonucleotide
ugugucgaauacuaccacu

SEQ ID NO: 1722231 - RNA, 19 nt, Artificial Sequence
  Description of Artificial Sequence: Synthetic oligonucleotide
uguugcacaucugugagau

SEQ ID NO: 1722232 - RNA, 19 nt, Artificial Sequence
  Description of Artificial Sequence: Synthetic oligonucleotide
ucuucuagcuuggaggcca

SEQ ID NO: 1722233 - RNA, 19 nt, Artificial Sequence
  Description of Artificial Sequence: Synthetic oligonucleotide
uccauagcaaagagguugu

SEQ ID NO: 1722234 - RNA, 19 nt, Artificial Sequence
  Description of Artificial Sequence: Synthetic oligonucleotide
aaugucucuucuagcuugg

SEQ ID NO: 1722235 - RNA, 19 nt, Artificial Sequence
  Description of Artificial Sequence: Synthetic oligonucleotide
ugaaggucgucuguucagg

SEQ ID NO: 1722236 - RNA, 19 nt, Artificial Sequence
  Description of Artificial Sequence: Synthetic oligonucleotide
gaaggucgucuguucaggg

SEQ ID NO: 1722237 - RNA, 19 nt, Artificial Sequence
  Description of Artificial Sequence: Synthetic oligonucleotide
uagacagcuggaccgcuag

SEQ ID NO: 1722238 - RNA, 19 nt, Artificial Sequence
  Description of Artificial Sequence: Synthetic oligonucleotide
ucaaugccugggaaggcgc

SEQ ID NO: 1722239 - RNA, 19 nt, Artificial Sequence
  Description of Artificial Sequence: Synthetic oligonucleotide
gaucggaugacaggcaaug

SEQ ID NO: 1722240 - RNA, 19 nt, Artificial Sequence
  Description of Artificial Sequence: Synthetic oligonucleotide
ugugagaugaaggggcuga

SEQ ID NO: 1722241 - RNA, 19 nt, Artificial Sequence
  Description of Artificial Sequence: Synthetic oligonucleotide
cuggggucuaucuccauag

SEQ ID NO: 1722242 - RNA, 19 nt, Artificial Sequence
  Description of Artificial Sequence: Synthetic oligonucleotide
gugaaguggcagcagcugg

SEQ ID NO: 1722243 - RNA, 19 nt, Artificial Sequence
  Description of Artificial Sequence: Synthetic oligonucleotide
ugucgaauacuaccacuga

SEQ ID NO: 1722244 - RNA, 19 nt, Artificial Sequence
  Description of Artificial Sequence: Synthetic oligonucleotide
cucgaugauauugcuaagc

SEQ ID NO: 1722245 - RNA, 19 nt, Artificial Sequence
  Description of Artificial Sequence: Synthetic oligonucleotide
ucacacaucuugcaggguu

SEQ ID NO: 1722246 - RNA, 19 nt, Artificial Sequence
  Description of Artificial Sequence: Synthetic oligonucleotide
agacccagcauguugcaca

SEQ ID NO: 1722247 - RNA, 19 nt, Artificial Sequence
  Description of Artificial Sequence: Synthetic oligonucleotide
gaugaaggucgucuguuca

SEQ ID NO: 1722248 - RNA, 19 nt, Artificial Sequence
  Description of Artificial Sequence: Synthetic oligonucleotide
gacgaugauguugugggug

SEQ ID NO: 1722249 - RNA, 19 nt, Artificial Sequence
  Description of Artificial Sequence: Synthetic oligonucleotide
ucggaugacaggcaauguc

SEQ ID NO: 1722250 - RNA, 19 nt, Artificial Sequence
  Description of Artificial Sequence: Synthetic oligonucleotide
auuugcaugaggcggccca

SEQ ID NO: 1722251 - RNA, 19 nt, Artificial Sequence
  Description of Artificial Sequence: Synthetic oligonucleotide
aggguccuugaacuguucg

SEQ ID NO: 1722252 - RNA, 19 nt, Artificial Sequence
  Description of Artificial Sequence: Synthetic oligonucleotide
aguggugugcuauugggua

SEQ ID NO: 1722253 - RNA, 19 nt, Artificial Sequence
  Description of Artificial Sequence: Synthetic oligonucleotide
gugucgaucuugcacuuag

SEQ ID NO: 1722254 - RNA, 19 nt, Artificial Sequence
  Description of Artificial Sequence: Synthetic oligonucleotide
caugaccucagcauagcuc

SEQ ID NO: 1722255 - RNA, 19 nt, Artificial Sequence
  Description of Artificial Sequence: Synthetic oligonucleotide
gauguugugggugucgauc

SEQ ID NO: 1722256 - RNA, 19 nt, Artificial Sequence
  Description of Artificial Sequence: Synthetic oligonucleotide
agggucagggaagacgagc

SEQ ID NO: 1722257 - RNA, 19 nt, Artificial Sequence
  Description of Artificial Sequence: Synthetic oligonucleotide
aggagucugaguguguguc

SEQ ID NO: 1722258 - RNA, 19 nt, Artificial Sequence
  Description of Artificial Sequence: Synthetic oligonucleotide
uauugcuaagcguggguuc

SEQ ID NO: 1722259 - RNA, 19 nt, Artificial Sequence
  Description of Artificial Sequence: Synthetic oligonucleotide
auccucgaacuccucugcc

SEQ ID NO: 1722260 - RNA, 19 nt, Artificial Sequence
  Description of Artificial Sequence: Synthetic oligonucleotide
augauauugcuaagcgugg

SEQ ID NO: 1722261 - RNA, 19 nt, Artificial Sequence
  Description of Artificial Sequence: Synthetic oligonucleotide
auuuuauugaggaguguga

SEQ ID NO: 1722262 - RNA, 19 nt, Artificial Sequence
  Description of Artificial Sequence: Synthetic oligonucleotide
gauguugugggcugggucu

SEQ ID NO: 1722263 - RNA, 19 nt, Artificial Sequence
  Description of Artificial Sequence: Synthetic oligonucleotide
auguugugggugucgaucu

SEQ ID NO: 1722264 - RNA, 19 nt, Artificial Sequence
  Description of Artificial Sequence: Synthetic oligonucleotide
uguucgcuaaccgaucgga

SEQ ID NO: 1722265 - RNA, 19 nt, Artificial Sequence
  Description of Artificial Sequence: Synthetic oligonucleotide
aaggucgucuguucagggu

SEQ ID NO: 1722266 - RNA, 19 nt, Artificial Sequence
  Description of Artificial Sequence: Synthetic oligonucleotide
uggaccgcuaggcugcagc

SEQ ID NO: 1722267 - RNA, 19 nt, Artificial Sequence
  Description of Artificial Sequence: Synthetic oligonucleotide
cuguggaaaugauuagaac

SEQ ID NO: 1722268 - RNA, 19 nt, Artificial Sequence
  Description of Artificial Sequence: Synthetic oligonucleotide
ugaggagugugaggcaggg

SEQ ID NO: 1722269 - RNA, 19 nt, Artificial Sequence
  Description of Artificial Sequence: Synthetic oligonucleotide
cacaaugugaaagucuuca

SEQ ID NO: 1722270 - RNA, 19 nt, Artificial Sequence
  Description of Artificial Sequence: Synthetic oligonucleotide
acacagaugaaggucgucu

SEQ ID NO: 1722271 - RNA, 19 nt, Artificial Sequence
  Description of Artificial Sequence: Synthetic oligonucleotide
auagccuuugaccuuggua

SEQ ID NO: 1722272 - RNA, 19 nt, Artificial Sequence
  Description of Artificial Sequence: Synthetic oligonucleotide
ugacuuugucggcuccccg

SEQ ID NO: 1722273 - RNA, 19 nt, Artificial Sequence
  Description of Artificial Sequence: Synthetic oligonucleotide
gugucgaauacuaccacug

SEQ ID NO: 1722274 - RNA, 19 nt, Artificial Sequence
  Description of Artificial Sequence: Synthetic oligonucleotide
ugggguaacaguggcagcu

SEQ ID NO: 1722275 - RNA, 19 nt, Artificial Sequence
  Description of Artificial Sequence: Synthetic oligonucleotide
aagaacucaucggggagcu

SEQ ID NO: 1722276 - RNA, 19 nt, Artificial Sequence
  Description of Artificial Sequence: Synthetic oligonucleotide
ucaggagucugagugugug

SEQ ID NO: 1722277 - RNA, 19 nt, Artificial Sequence
  Description of Artificial Sequence: Synthetic oligonucleotide
uguugacuuugucggcucc

SEQ ID NO: 1722278 - RNA, 19 nt, Artificial Sequence
  Description of Artificial Sequence: Synthetic oligonucleotide
gaaaugauuagaacacucu

SEQ ID NO: 1722279 - RNA, 19 nt, Artificial Sequence
  Description of Artificial Sequence: Synthetic oligonucleotide
ucaugaccucagcauagcu

SEQ ID NO: 1722280 - RNA, 19 nt, Artificial Sequence
  Description of Artificial Sequence: Synthetic oligonucleotide
gaagacgagcugguugacg

SEQ ID NO: 1722281 - RNA, 19 nt, Artificial Sequence
  Description of Artificial Sequence: Synthetic oligonucleotide
aguucaggagucugagugu

SEQ ID NO: 1722282 - RNA, 19 nt, Artificial Sequence
  Description of Artificial Sequence: Synthetic oligonucleotide
agccuuugaccuugguagg

SEQ ID NO: 1722283 - RNA, 19 nt, Artificial Sequence
  Description of Artificial Sequence: Synthetic oligonucleotide
ccucccaccuccuaaacgg

SEQ ID NO: 1722284 - RNA, 19 nt, Artificial Sequence
  Description of Artificial Sequence: Synthetic oligonucleotide
gaugaguggugugcuauug

SEQ ID NO: 1722285 - RNA, 19 nt, Artificial Sequence
  Description of Artificial Sequence: Synthetic oligonucleotide
uucaugccuuucaccagcc

SEQ ID NO: 1722286 - RNA, 19 nt, Artificial Sequence
  Description of Artificial Sequence: Synthetic oligonucleotide
caugccuuucaccagccuc

SEQ ID NO: 1722287 - RNA, 19 nt, Artificial Sequence
  Description of Artificial Sequence: Synthetic oligonucleotide
aacuguucgcuaaccgauc

SEQ ID NO: 1722288 - RNA, 19 nt, Artificial Sequence
  Description of Artificial Sequence: Synthetic oligonucleotide
uuacccacgccacccuugc

SEQ ID NO: 1722289 - RNA, 19 nt, Artificial Sequence
  Description of Artificial Sequence: Synthetic oligonucleotide
accucaugggguaacagug

SEQ ID NO: 1722290 - RNA, 19 nt, Artificial Sequence
  Description of Artificial Sequence: Synthetic oligonucleotide
gacagcuggaccgcuaggc

SEQ ID NO: 1722291 - RNA, 19 nt, Artificial Sequence
  Description of Artificial Sequence: Synthetic oligonucleotide
ccucgaagaacucaucggg

SEQ ID NO: 1722292 - RNA, 19 nt, Artificial Sequence
  Description of Artificial Sequence: Synthetic oligonucleotide
uccccgaaccucauggggu

SEQ ID NO: 1722293 - RNA, 19 nt, Artificial Sequence
  Description of Artificial Sequence: Synthetic oligonucleotide
gugggugucgaucuugcac

SEQ ID NO: 1722294 - RNA, 19 nt, Artificial Sequence
  Description of Artificial Sequence: Synthetic oligonucleotide
cauugcagccuccccaggc

SEQ ID NO: 1722295 - RNA, 19 nt, Artificial Sequence
  Description of Artificial Sequence: Synthetic oligonucleotide
cuugaacuguucgcuaacc

SEQ ID NO: 1722296 - RNA, 19 nt, Artificial Sequence
  Description of Artificial Sequence: Synthetic oligonucleotide
agcuggaccgcuaggcugc

SEQ ID NO: 1722297 - RNA, 19 nt, Artificial Sequence
  Description of Artificial Sequence: Synthetic oligonucleotide
augggguaacaguggcagc

SEQ ID NO: 1722298 - RNA, 19 nt, Artificial Sequence
  Description of Artificial Sequence: Synthetic oligonucleotide
ucuagcuuggaggccagcu

SEQ ID NO: 1722299 - RNA, 19 nt, Artificial Sequence
  Description of Artificial Sequence: Synthetic oligonucleotide
ugcagguggucuuacccac

SEQ ID NO: 1722300 - RNA, 19 nt, Artificial Sequence
  Description of Artificial Sequence: Synthetic oligonucleotide
aguguugacuuugucggcu

SEQ ID NO: 1722301 - RNA, 19 nt, Artificial Sequence
  Description of Artificial Sequence: Synthetic oligonucleotide
cacagaugaaggucgucug

SEQ ID NO: 1722302 - RNA, 19 nt, Artificial Sequence
  Description of Artificial Sequence: Synthetic oligonucleotide
gaccuugguaggcaccuug

SEQ ID NO: 1722303 - RNA, 19 nt, Artificial Sequence
  Description of Artificial Sequence: Synthetic oligonucleotide
ugagauguugugggcuggg

SEQ ID NO: 1722304 - RNA, 19 nt, Artificial Sequence
  Description of Artificial Sequence: Synthetic oligonucleotide
gacuuugugcaaacucugc

SEQ ID NO: 1722305 - RNA, 19 nt, Artificial Sequence
  Description of Artificial Sequence: Synthetic oligonucleotide
accuuggagaacuucugau

SEQ ID NO: 1722306 - RNA, 19 nt, Artificial Sequence
  Description of Artificial Sequence: Synthetic oligonucleotide
cuuuagacagcuggaccgc

SEQ ID NO: 1722307 - RNA, 19 nt, Artificial Sequence
  Description of Artificial Sequence: Synthetic oligonucleotide
agggcagagaaaguguuga

SEQ ID NO: 1722308 - RNA, 19 nt, Artificial Sequence
  Description of Artificial Sequence: Synthetic oligonucleotide
uggaucagccguuccgucu

SEQ ID NO: 1722309 - RNA, 19 nt, Artificial Sequence
  Description of Artificial Sequence: Synthetic oligonucleotide
ugguaggcaccuuggagaa

SEQ ID NO: 1722310 - RNA, 19 nt, Artificial Sequence
  Description of Artificial Sequence: Synthetic oligonucleotide
ugcaugaggcggcccaggc

SEQ ID NO: 1722311 - RNA, 19 nt, Artificial Sequence
  Description of Artificial Sequence: Synthetic oligonucleotide
cuuugaccuugguaggcac

SEQ ID NO: 1722312 - RNA, 19 nt, Artificial Sequence
  Description of Artificial Sequence: Synthetic oligonucleotide
aaacucugccccauaggga

SEQ ID NO: 1722313 - RNA, 19 nt, Artificial Sequence
  Description of Artificial Sequence: Synthetic oligonucleotide
ugucgaucuugcacuuagc

SEQ ID NO: 1722314 - RNA, 19 nt, Artificial Sequence
  Description of Artificial Sequence: Synthetic oligonucleotide
ggugugaaguggcagcagc

SEQ ID NO: 1722315 - RNA, 19 nt, Artificial Sequence
  Description of Artificial Sequence: Synthetic oligonucleotide
uggucuuacccacgccacc

SEQ ID NO: 1722316 - RNA, 19 nt, Artificial Sequence
  Description of Artificial Sequence: Synthetic oligonucleotide
uugcacuuagccagcuccu

SEQ ID NO: 1722317 - RNA, 19 nt, Artificial Sequence
  Description of Artificial Sequence: Synthetic oligonucleotide
uccggugggugcugugucg

SEQ ID NO: 1722318 - RNA, 19 nt, Artificial Sequence
  Description of Artificial Sequence: Synthetic oligonucleotide
uggccuggaucuuguggcg

SEQ ID NO: 1722319 - RNA, 19 nt, Artificial Sequence
  Description of Artificial Sequence: Synthetic oligonucleotide
cuccccgaaccucaugggg

SEQ ID NO: 1722320 - RNA, 19 nt, Artificial Sequence
  Description of Artificial Sequence: Synthetic oligonucleotide
gacuuugucggcuccccga

SEQ ID NO: 1722321 - RNA, 19 nt, Artificial Sequence
  Description of Artificial Sequence: Synthetic oligonucleotide
gugcuauuggguacugggg

SEQ ID NO: 1722322 - RNA, 19 nt, Artificial Sequence
  Description of Artificial Sequence: Synthetic oligonucleotide
agcggcuccacgucaggag

SEQ ID NO: 1722323 - RNA, 19 nt, Artificial Sequence
  Description of Artificial Sequence: Synthetic oligonucleotide
gcgaugcacacacagauga

SEQ ID NO: 1722324 - RNA, 19 nt, Artificial Sequence
  Description of Artificial Sequence: Synthetic oligonucleotide
cucacguccuuuagacagc

SEQ ID NO: 1722325 - RNA, 19 nt, Artificial Sequence
  Description of Artificial Sequence: Synthetic oligonucleotide
aucugagauguugugggcu

SEQ ID NO: 1722326 - RNA, 19 nt, Artificial Sequence
  Description of Artificial Sequence: Synthetic oligonucleotide
cauaaaggucuuccaucug

SEQ ID NO: 1722327 - RNA, 19 nt, Artificial Sequence
  Description of Artificial Sequence: Synthetic oligonucleotide
agguggucuuacccacgcc

SEQ ID NO: 1722328 - RNA, 19 nt, Artificial Sequence
  Description of Artificial Sequence: Synthetic oligonucleotide
auacaaggacaagaauuca

SEQ ID NO: 1722329 - RNA, 19 nt, Artificial Sequence
  Description of Artificial Sequence: Synthetic oligonucleotide
uagcucauggccucaucaa

SEQ ID NO: 1722330 - RNA, 19 nt, Artificial Sequence
  Description of Artificial Sequence: Synthetic oligonucleotide
agcauguugcacaucugug

SEQ ID NO: 1722331 - RNA, 19 nt, Artificial Sequence
  Description of Artificial Sequence: Synthetic oligonucleotide
caaugugaaagucuucaua

SEQ ID NO: 1722332 - RNA, 19 nt, Artificial Sequence
  Description of Artificial Sequence: Synthetic oligonucleotide
ugacaggcaaugucucuuc

SEQ ID NO: 1722333 - RNA, 19 nt, Artificial Sequence
  Description of Artificial Sequence: Synthetic oligonucleotide
auauugcuaagcguggguu

SEQ ID NO: 1722334 - RNA, 19 nt, Artificial Sequence
  Description of Artificial Sequence: Synthetic oligonucleotide
accuccuaaacggcucccc

SEQ ID NO: 1722335 - RNA, 19 nt, Artificial Sequence
  Description of Artificial Sequence: Synthetic oligonucleotide
cccauagggaaagaggagg

SEQ ID NO: 1722336 - RNA, 19 nt, Artificial Sequence
  Description of Artificial Sequence: Synthetic oligonucleotide
gaaccucaugggguaacag

SEQ ID NO: 1722337 - RNA, 19 nt, Artificial Sequence
  Description of Artificial Sequence: Synthetic oligonucleotide
gacgagcugguugacgaug

SEQ ID NO: 1722338 - RNA, 19 nt, Artificial Sequence
  Description of Artificial Sequence: Synthetic oligonucleotide
cagguggucuuacccacgc

SEQ ID NO: 1722339 - RNA, 19 nt, Artificial Sequence
  Description of Artificial Sequence: Synthetic oligonucleotide
uugugcaaacucugcccca

SEQ ID NO: 1722340 - RNA, 19 nt, Artificial Sequence
  Description of Artificial Sequence: Synthetic oligonucleotide
ugauuugcaugaggcggcc

SEQ ID NO: 1722341 - RNA, 19 nt, Artificial Sequence
  Description of Artificial Sequence: Synthetic oligonucleotide
cuguucgcuaaccgaucgg

SEQ ID NO: 1722342 - RNA, 19 nt, Artificial Sequence
  Description of Artificial Sequence: Synthetic oligonucleotide
agcucauggccucaucaau

SEQ ID NO: 1722343 - RNA, 19 nt, Artificial Sequence
  Description of Artificial Sequence: Synthetic oligonucleotide
ggucuguggaaaugauuag

SEQ ID NO: 1722344 - RNA, 19 nt, Artificial Sequence
  Description of Artificial Sequence: Synthetic oligonucleotide
gguggucuuacccacgcca

SEQ ID NO: 1722345 - RNA, 19 nt, Artificial Sequence
  Description of Artificial Sequence: Synthetic oligonucleotide
cagauccccucccaccucc

SEQ ID NO: 1722346 - RNA, 19 nt, Artificial Sequence
  Description of Artificial Sequence: Synthetic oligonucleotide
gucuguggaaaugauuaga

SEQ ID NO: 1722347 - RNA, 19 nt, Artificial Sequence
  Description of Artificial Sequence: Synthetic oligonucleotide
gaucuugcacuuagccagc

SEQ ID NO: 1722348 - RNA, 19 nt, Artificial Sequence
  Description of Artificial Sequence: Synthetic oligonucleotide
ucccaccuccuaaacggcu

SEQ ID NO: 1722349 - RNA, 19 nt, Artificial Sequence
  Description of Artificial Sequence: Synthetic oligonucleotide
guugugggugucgaucuug

SEQ ID NO: 1722350 - RNA, 19 nt, Artificial Sequence
  Description of Artificial Sequence: Synthetic oligonucleotide
uuagacagcuggaccgcua

SEQ ID NO: 1722351 - RNA, 19 nt, Artificial Sequence
  Description of Artificial Sequence: Synthetic oligonucleotide
acagauccccucccaccuc

SEQ ID NO: 1722352 - RNA, 19 nt, Artificial Sequence
  Description of Artificial Sequence: Synthetic oligonucleotide
ugggucuguggaaaugauu

SEQ ID NO: 1722353 - RNA, 19 nt, Artificial Sequence
  Description of Artificial Sequence: Synthetic oligonucleotide
cugugucgaauacuaccac

SEQ ID NO: 1722354 - RNA, 19 nt, Artificial Sequence
  Description of Artificial Sequence: Synthetic oligonucleotide
agacagcuggaccgcuagg

SEQ ID NO: 1722355 - RNA, 19 nt, Artificial Sequence
  Description of Artificial Sequence: Synthetic oligonucleotide
cuggaucuuguggcgagcc

SEQ ID NO: 1722356 - RNA, 19 nt, Artificial Sequence
  Description of Artificial Sequence: Synthetic oligonucleotide
guggugugcuauuggguac

SEQ ID NO: 1722357 - RNA, 19 nt, Artificial Sequence
  Description of Artificial Sequence: Synthetic oligonucleotide
cagcuggaccgcuaggcug

SEQ ID NO: 1722358 - RNA, 19 nt, Artificial Sequence
  Description of Artificial Sequence: Synthetic oligonucleotide
caucggggagcucugccac

SEQ ID NO: 1722359 - RNA, 19 nt, Artificial Sequence
  Description of Artificial Sequence: Synthetic oligonucleotide
ugggugcugugucgaauac

SEQ ID NO: 1722360 - RNA, 19 nt, Artificial Sequence
  Description of Artificial Sequence: Synthetic oligonucleotide
cucaugaccucagcauagc

SEQ ID NO: 1722361 - RNA, 19 nt, Artificial Sequence
  Description of Artificial Sequence: Synthetic oligonucleotide
ggcaaugucucuucuagcu

SEQ ID NO: 1722362 - RNA, 19 nt, Artificial Sequence
  Description of Artificial Sequence: Synthetic oligonucleotide
uggaucuuguggcgagccu

SEQ ID NO: 1722363 - RNA, 19 nt, Artificial Sequence
  Description of Artificial Sequence: Synthetic oligonucleotide
ucacguccuuuagacagcu

SEQ ID NO: 1722364 - RNA, 19 nt, Artificial Sequence
  Description of Artificial Sequence: Synthetic oligonucleotide
gcacuuagccagcuccugg

SEQ ID NO: 1722365 - RNA, 19 nt, Artificial Sequence
  Description of Artificial Sequence: Synthetic oligonucleotide
ucuugcacuuagccagcuc

SEQ ID NO: 1722366 - RNA, 19 nt, Artificial Sequence
  Description of Artificial Sequence: Synthetic oligonucleotide
gaugacaggcaaugucucu

SEQ ID NO: 1722367 - RNA, 19 nt, Artificial Sequence
  Description of Artificial Sequence: Synthetic oligonucleotide
ggggacuuugugcaaacuc

SEQ ID NO: 1722368 - RNA, 19 nt, Artificial Sequence
  Description of Artificial Sequence: Synthetic oligonucleotide
gguugucauagccuuugac

SEQ ID NO: 1722369 - RNA, 19 nt, Artificial Sequence
  Description of Artificial Sequence: Synthetic oligonucleotide
uggugugcuauuggguacu

SEQ ID NO: 1722370 - RNA, 19 nt, Artificial Sequence
  Description of Artificial Sequence: Synthetic oligonucleotide
cuuggaggccagcugguca

SEQ ID NO: 1722371 - RNA, 19 nt, Artificial Sequence
  Description of Artificial Sequence: Synthetic oligonucleotide
agccguuccgucucauaca

SEQ ID NO: 1722372 - RNA, 19 nt, Artificial Sequence
  Description of Artificial Sequence: Synthetic oligonucleotide
cccagacccagcauguugc

SEQ ID NO: 1722373 - RNA, 19 nt, Artificial Sequence
  Description of Artificial Sequence: Synthetic oligonucleotide
uuccagcggcuccacguca

SEQ ID NO: 1722374 - RNA, 19 nt, Artificial Sequence
  Description of Artificial Sequence: Synthetic oligonucleotide
uuaaggcugcgcugcucga

SEQ ID NO: 1722375 - RNA, 19 nt, Artificial Sequence
  Description of Artificial Sequence: Synthetic oligonucleotide
aucggggagcucugccacg

SEQ ID NO: 1722376 - RNA, 19 nt, Artificial Sequence
  Description of Artificial Sequence: Synthetic oligonucleotide
ucuccauagcaaagagguu

SEQ ID NO: 1722377 - RNA, 19 nt, Artificial Sequence
  Description of Artificial Sequence: Synthetic oligonucleotide
caguggcagcuucacaaug

SEQ ID NO: 1722378 - RNA, 19 nt, Artificial Sequence
  Description of Artificial Sequence: Synthetic oligonucleotide
gggucuguggaaaugauua

SEQ ID NO: 1722379 - RNA, 19 nt, Artificial Sequence
  Description of Artificial Sequence: Synthetic oligonucleotide
gaacuguucgcuaaccgau

SEQ ID NO: 1722380 - RNA, 19 nt, Artificial Sequence
  Description of Artificial Sequence: Synthetic oligonucleotide
ccucaugaccucagcauag

SEQ ID NO: 1722381 - RNA, 19 nt, Artificial Sequence
  Description of Artificial Sequence: Synthetic oligonucleotide
ugugggugucgaucuugca

SEQ ID NO: 1722382 - RNA, 19 nt, Artificial Sequence
  Description of Artificial Sequence: Synthetic oligonucleotide
cagcauagcucauggccuc

SEQ ID NO: 1722383 - RNA, 19 nt, Artificial Sequence
  Description of Artificial Sequence: Synthetic oligonucleotide
cugagauguugugggcugg

SEQ ID NO: 1722384 - RNA, 19 nt, Artificial Sequence
  Description of Artificial Sequence: Synthetic oligonucleotide
ugagaugaaggggcugauc

SEQ ID NO: 1722385 - RNA, 19 nt, Artificial Sequence
  Description of Artificial Sequence: Synthetic oligonucleotide
cacuuagccagcuccugga

SEQ ID NO: 1722386 - RNA, 19 nt, Artificial Sequence
  Description of Artificial Sequence: Synthetic oligonucleotide
cucccaccuccuaaacggc

SEQ ID NO: 1722387 - RNA, 19 nt, Artificial Sequence
  Description of Artificial Sequence: Synthetic oligonucleotide
guaggcaccuuggagaacu

SEQ ID NO: 1722388 - RNA, 19 nt, Artificial Sequence
  Description of Artificial Sequence: Synthetic oligonucleotide
ugcuaagcguggguuccag

SEQ ID NO: 1722389 - RNA, 19 nt, Artificial Sequence
  Description of Artificial Sequence: Synthetic oligonucleotide
ugggcugggucuguggaaa

SEQ ID NO: 1722390 - RNA, 19 nt, Artificial Sequence
  Description of Artificial Sequence: Synthetic oligonucleotide
aaguggcagcagcugggau

SEQ ID NO: 1722391 - RNA, 19 nt, Artificial Sequence
  Description of Artificial Sequence: Synthetic oligonucleotide
gcugugucgaauacuacca

SEQ ID NO: 1722392 - RNA, 19 nt, Artificial Sequence
  Description of Artificial Sequence: Synthetic oligonucleotide
cuucuagcuuggaggccag

SEQ ID NO: 1722393 - RNA, 19 nt, Artificial Sequence
  Description of Artificial Sequence: Synthetic oligonucleotide
ggagucugagugugugucc

SEQ ID NO: 1722394 - RNA, 19 nt, Artificial Sequence
  Description of Artificial Sequence: Synthetic oligonucleotide
ggucuuacccacgccaccc

SEQ ID NO: 1722395 - RNA, 19 nt, Artificial Sequence
  Description of Artificial Sequence: Synthetic oligonucleotide
ggggucuaucuccauagca

SEQ ID NO: 1722396 - RNA, 19 nt, Artificial Sequence
  Description of Artificial Sequence: Synthetic oligonucleotide
ucuuacccacgccacccuu

SEQ ID NO: 1722397 - RNA, 19 nt, Artificial Sequence
  Description of Artificial Sequence: Synthetic oligonucleotide
gauuugcaugaggcggccc

SEQ ID NO: 1722398 - RNA, 19 nt, Artificial Sequence
  Description of Artificial Sequence: Synthetic oligonucleotide
agggugugaaguggcagca

SEQ ID NO: 1722399 - RNA, 19 nt, Artificial Sequence
  Description of Artificial Sequence: Synthetic oligonucleotide
uguagggcuccaggagcag

SEQ ID NO: 1722400 - RNA, 19 nt, Artificial Sequence
  Description of Artificial Sequence: Synthetic oligonucleotide
ucggggagcucugccacgc

SEQ ID NO: 1722401 - RNA, 19 nt, Artificial Sequence
  Description of Artificial Sequence: Synthetic oligonucleotide
ugauguugugggugucgau

SEQ ID NO: 1722402 - RNA, 19 nt, Artificial Sequence
  Description of Artificial Sequence: Synthetic oligonucleotide
uguccggugggugcugugu

SEQ ID NO: 1722403 - RNA, 19 nt, Artificial Sequence
  Description of Artificial Sequence: Synthetic oligonucleotide
guggggaaguucaggaguc

SEQ ID NO: 1722404 - RNA, 19 nt, Artificial Sequence
  Description of Artificial Sequence: Synthetic oligonucleotide
agcgaugcacacacagaug

SEQ ID NO: 1722405 - RNA, 19 nt, Artificial Sequence
  Description of Artificial Sequence: Synthetic oligonucleotide
gaaguucaggagucugagu

SEQ ID NO: 1722406 - RNA, 19 nt, Artificial Sequence
  Description of Artificial Sequence: Synthetic oligonucleotide
ccacuuaaggcugcgcugc

SEQ ID NO: 1722407 - RNA, 19 nt, Artificial Sequence
  Description of Artificial Sequence: Synthetic oligonucleotide
ggaaagaggagggugugaa

SEQ ID NO: 1722408 - RNA, 19 nt, Artificial Sequence
  Description of Artificial Sequence: Synthetic oligonucleotide
cucuucuagcuuggaggcc

SEQ ID NO: 1722409 - RNA, 19 nt, Artificial Sequence
  Description of Artificial Sequence: Synthetic oligonucleotide
cgaagauccacuuaaggcu

SEQ ID NO: 1722410 - RNA, 19 nt, Artificial Sequence
  Description of Artificial Sequence: Synthetic oligonucleotide
guuccagcggcuccacguc

SEQ ID NO: 1722411 - RNA, 19 nt, Artificial Sequence
  Description of Artificial Sequence: Synthetic oligonucleotide
uguugugggugucgaucuu

SEQ ID NO: 1722412 - RNA, 19 nt, Artificial Sequence
  Description of Artificial Sequence: Synthetic oligonucleotide
gguggggaaguucaggagu

SEQ ID NO: 1722413 - RNA, 19 nt, Artificial Sequence
  Description of Artificial Sequence: Synthetic oligonucleotide
caccuuggagaacuucuga

SEQ ID NO: 1722414 - RNA, 19 nt, Artificial Sequence
  Description of Artificial Sequence: Synthetic oligonucleotide
agaacacucucacguccuu

SEQ ID NO: 1722415 - RNA, 19 nt, Artificial Sequence
  Description of Artificial Sequence: Synthetic oligonucleotide
ggagggugugaaguggcag

SEQ ID NO: 1722416 - RNA, 19 nt, Artificial Sequence
  Description of Artificial Sequence: Synthetic oligonucleotide
cuggaucagccguuccguc

SEQ ID NO: 1722417 - RNA, 19 nt, Artificial Sequence
  Description of Artificial Sequence: Synthetic oligonucleotide
guggucuuacccacgccac

SEQ ID NO: 1722418 - RNA, 19 nt, Artificial Sequence
  Description of Artificial Sequence: Synthetic oligonucleotide
gggucuaucuccauagcaa

SEQ ID NO: 1722419 - RNA, 19 nt, Artificial Sequence
  Description of Artificial Sequence: Synthetic oligonucleotide
aggcaccuuggagaacuuc

SEQ ID NO: 1722420 - RNA, 19 nt, Artificial Sequence
  Description of Artificial Sequence: Synthetic oligonucleotide
cacucucacguccuuuaga

SEQ ID NO: 1722421 - RNA, 19 nt, Artificial Sequence
  Description of Artificial Sequence: Synthetic oligonucleotide
uuguggcgagccucacaca

SEQ ID NO: 1722422 - RNA, 19 nt, Artificial Sequence
  Description of Artificial Sequence: Synthetic oligonucleotide
aucggaugacaggcaaugu

SEQ ID NO: 1722423 - RNA, 19 nt, Artificial Sequence
  Description of Artificial Sequence: Synthetic oligonucleotide
cuuugucggcuccccgaac

SEQ ID NO: 1722424 - RNA, 19 nt, Artificial Sequence
  Description of Artificial Sequence: Synthetic oligonucleotide
cucucacguccuuuagaca

SEQ ID NO: 1722425 - RNA, 19 nt, Artificial Sequence
  Description of Artificial Sequence: Synthetic oligonucleotide
cagcgaugcacacacagau

SEQ ID NO: 1722426 - RNA, 19 nt, Artificial Sequence
  Description of Artificial Sequence: Synthetic oligonucleotide
uaaggcugcgcugcucgau

SEQ ID NO: 1722427 - RNA, 19 nt, Artificial Sequence
  Description of Artificial Sequence: Synthetic oligonucleotide
gagaaaguguugacuuugu

SEQ ID NO: 1722428 - RNA, 19 nt, Artificial Sequence
  Description of Artificial Sequence: Synthetic oligonucleotide
ccgacgaagauccacuuaa

SEQ ID NO: 1722429 - RNA, 19 nt, Artificial Sequence
  Description of Artificial Sequence: Synthetic oligonucleotide
ucagccguuccgucucaua

SEQ ID NO: 1722430 - RNA, 19 nt, Artificial Sequence
  Description of Artificial Sequence: Synthetic oligonucleotide
cgagccucacacaucuugc

SEQ ID NO: 1722431 - RNA, 19 nt, Artificial Sequence
  Description of Artificial Sequence: Synthetic oligonucleotide
aaggcgcucauggccuccu

SEQ ID NO: 1722432 - RNA, 19 nt, Artificial Sequence
  Description of Artificial Sequence: Synthetic oligonucleotide
ugggaugaguggugugcua

SEQ ID NO: 1722433 - RNA, 19 nt, Artificial Sequence
  Description of Artificial Sequence: Synthetic oligonucleotide
aggcugcgcugcucgauga

SEQ ID NO: 1722434 - RNA, 19 nt, Artificial Sequence
  Description of Artificial Sequence: Synthetic oligonucleotide
gggacuuugugcaaacucu

SEQ ID NO: 1722435 - RNA, 19 nt, Artificial Sequence
  Description of Artificial Sequence: Synthetic oligonucleotide
uugcuaagcguggguucca

SEQ ID NO: 1722436 - RNA, 19 nt, Artificial Sequence
  Description of Artificial Sequence: Synthetic oligonucleotide
cagggucagggaagacgag

SEQ ID NO: 1722437 - RNA, 19 nt, Artificial Sequence
  Description of Artificial Sequence: Synthetic oligonucleotide
gguaacaguggcagcuuca

SEQ ID NO: 1722438 - RNA, 19 nt, Artificial Sequence
  Description of Artificial Sequence: Synthetic oligonucleotide
uacccacgccacccuugcc

SEQ ID NO: 1722439 - RNA, 19 nt, Artificial Sequence
  Description of Artificial Sequence: Synthetic oligonucleotide
gcuccccgaaccucauggg

SEQ ID NO: 1722440 - RNA, 19 nt, Artificial Sequence
  Description of Artificial Sequence: Synthetic oligonucleotide
gcggcuccacgucaggagc

SEQ ID NO: 1722441 - RNA, 19 nt, Artificial Sequence
  Description of Artificial Sequence: Synthetic oligonucleotide
ggggaaguucaggagucug

SEQ ID NO: 1722442 - RNA, 19 nt, Artificial Sequence
  Description of Artificial Sequence: Synthetic oligonucleotide
aucuugcacuuagccagcu

SEQ ID NO: 1722443 - RNA, 19 nt, Artificial Sequence
  Description of Artificial Sequence: Synthetic oligonucleotide
uucuagcuuggaggccagc

SEQ ID NO: 1722444 - RNA, 19 nt, Artificial Sequence
  Description of Artificial Sequence: Synthetic oligonucleotide
gaguggugugcuauugggu

SEQ ID NO: 1722445 - RNA, 19 nt, Artificial Sequence
  Description of Artificial Sequence: Synthetic oligonucleotide
cgaauacuaccacugagaa

SEQ ID NO: 1722446 - RNA, 19 nt, Artificial Sequence
  Description of Artificial Sequence: Synthetic oligonucleotide
ggucgucuguucagggucc

SEQ ID NO: 1722447 - RNA, 19 nt, Artificial Sequence
  Description of Artificial Sequence: Synthetic oligonucleotide
uguguccggugggugcugu

SEQ ID NO: 1722448 - RNA, 19 nt, Artificial Sequence
  Description of Artificial Sequence: Synthetic oligonucleotide
ggacaagaauucagcgaug

SEQ ID NO: 1722449 - RNA, 19 nt, Artificial Sequence
  Description of Artificial Sequence: Synthetic oligonucleotide
ggcgcucauggccuccugc

SEQ ID NO: 1722450 - RNA, 19 nt, Artificial Sequence
  Description of Artificial Sequence: Synthetic oligonucleotide
gcuaagcguggguuccagc

SEQ ID NO: 1722451 - RNA, 19 nt, Artificial Sequence
  Description of Artificial Sequence: Synthetic oligonucleotide
cugcucgaugauauugcua

SEQ ID NO: 1722452 - RNA, 19 nt, Artificial Sequence
  Description of Artificial Sequence: Synthetic oligonucleotide
gcccaugcucagcauguug

SEQ ID NO: 1722453 - RNA, 19 nt, Artificial Sequence
  Description of Artificial Sequence: Synthetic oligonucleotide
gggaaguucaggagucuga

SEQ ID NO: 1722454 - RNA, 19 nt, Artificial Sequence
  Description of Artificial Sequence: Synthetic oligonucleotide
cacacagaugaaggucguc

SEQ ID NO: 1722455 - RNA, 19 nt, Artificial Sequence
  Description of Artificial Sequence: Synthetic oligonucleotide
ggcagagaaaguguugacu

SEQ ID NO: 1722456 - RNA, 19 nt, Artificial Sequence
  Description of Artificial Sequence: Synthetic oligonucleotide
ccaagcuggggucuaucuc

SEQ ID NO: 1722457 - RNA, 19 nt, Artificial Sequence
  Description of Artificial Sequence: Synthetic oligonucleotide
caggccccgcuccacgaug

SEQ ID NO: 1722458 - RNA, 19 nt, Artificial Sequence
  Description of Artificial Sequence: Synthetic oligonucleotide
gccgccaucuuuggagccg

SEQ ID NO: 1722459 - RNA, 19 nt, Artificial Sequence
  Description of Artificial Sequence: Synthetic oligonucleotide
gccguuccgucucauacaa

SEQ ID NO: 1722460 - RNA, 19 nt, Artificial Sequence
  Description of Artificial Sequence: Synthetic oligonucleotide
guccggugggugcuguguc

SEQ ID NO: 1722461 - RNA, 19 nt, Artificial Sequence
  Description of Artificial Sequence: Synthetic oligonucleotide
gggaacagauccccuccca

SEQ ID NO: 1722462 - RNA, 19 nt, Artificial Sequence
  Description of Artificial Sequence: Synthetic oligonucleotide
uccagguauuuggccugga

SEQ ID NO: 1722463 - RNA, 19 nt, Artificial Sequence
  Description of Artificial Sequence: Synthetic oligonucleotide
gacccagcauguugcacau

SEQ ID NO: 1722464 - RNA, 19 nt, Artificial Sequence
  Description of Artificial Sequence: Synthetic oligonucleotide
ugcgcugcucgaugauauu

SEQ ID NO: 1722465 - RNA, 19 nt, Artificial Sequence
  Description of Artificial Sequence: Synthetic oligonucleotide
caccuccuaaacggcuccc

SEQ ID NO: 1722466 - RNA, 19 nt, Artificial Sequence
  Description of Artificial Sequence: Synthetic oligonucleotide
accgaucggaugacaggca

SEQ ID NO: 1722467 - RNA, 19 nt, Artificial Sequence
  Description of Artificial Sequence: Synthetic oligonucleotide
caggagcauccucgaacuc

SEQ ID NO: 1722468 - RNA, 19 nt, Artificial Sequence
  Description of Artificial Sequence: Synthetic oligonucleotide
gccucaugaccucagcaua

SEQ ID NO: 1722469 - RNA, 19 nt, Artificial Sequence
  Description of Artificial Sequence: Synthetic oligonucleotide
gcagguggucuuacccacg

SEQ ID NO: 1722470 - RNA, 19 nt, Artificial Sequence
  Description of Artificial Sequence: Synthetic oligonucleotide
gguugacgaugauguugug

SEQ ID NO: 1722471 - RNA, 19 nt, Artificial Sequence
  Description of Artificial Sequence: Synthetic oligonucleotide
cugccacgcccaagcuggg

SEQ ID NO: 1722472 - RNA, 19 nt, Artificial Sequence
  Description of Artificial Sequence: Synthetic oligonucleotide
cccaccuccuaaacggcuc

SEQ ID NO: 1722473 - RNA, 19 nt, Artificial Sequence
  Description of Artificial Sequence: Synthetic oligonucleotide
ggagugugaggcagggaga

SEQ ID NO: 1722474 - RNA, 19 nt, Artificial Sequence
  Description of Artificial Sequence: Synthetic oligonucleotide
agagguugucauagccuuu

SEQ ID NO: 1722475 - RNA, 19 nt, Artificial Sequence
  Description of Artificial Sequence: Synthetic oligonucleotide
cugcgcugcucgaugauau

SEQ ID NO: 1722476 - RNA, 19 nt, Artificial Sequence
  Description of Artificial Sequence: Synthetic oligonucleotide
cgacgaagauccacuuaag

SEQ ID NO: 1722477 - RNA, 19 nt, Artificial Sequence
  Description of Artificial Sequence: Synthetic oligonucleotide
gaggagugugaggcaggga

SEQ ID NO: 1722478 - RNA, 19 nt, Artificial Sequence
  Description of Artificial Sequence: Synthetic oligonucleotide
gaguguguguccggugggu

SEQ ID NO: 1722479 - RNA, 19 nt, Artificial Sequence
  Description of Artificial Sequence: Synthetic oligonucleotide
ggugugcuauuggguacug

SEQ ID NO: 1722480 - RNA, 19 nt, Artificial Sequence
  Description of Artificial Sequence: Synthetic oligonucleotide
ggguuccagcggcuccacg

SEQ ID NO: 1722481 - RNA, 19 nt, Artificial Sequence
  Description of Artificial Sequence: Synthetic oligonucleotide
cggaugacaggcaaugucu

SEQ ID NO: 1722482 - RNA, 19 nt, Artificial Sequence
  Description of Artificial Sequence: Synthetic oligonucleotide
guggcgagccucacacauc

SEQ ID NO: 1722483 - RNA, 19 nt, Artificial Sequence
  Description of Artificial Sequence: Synthetic oligonucleotide
ccgucucauacaaggacaa

SEQ ID NO: 1722484 - RNA, 19 nt, Artificial Sequence
  Description of Artificial Sequence: Synthetic oligonucleotide
gucugaguguguguccggu

SEQ ID NO: 1722485 - RNA, 19 nt, Artificial Sequence
  Description of Artificial Sequence: Synthetic oligonucleotide
gcugcucgaugauauugcu

SEQ ID NO: 1722486 - RNA, 19 nt, Artificial Sequence
  Description of Artificial Sequence: Synthetic oligonucleotide
auucagcgaugcacacaca

SEQ ID NO: 1722487 - RNA, 19 nt, Artificial Sequence
  Description of Artificial Sequence: Synthetic oligonucleotide
auacuaccacugagaaauu

SEQ ID NO: 1722488 - RNA, 19 nt, Artificial Sequence
  Description of Artificial Sequence: Synthetic oligonucleotide
gggaaagaggaggguguga

SEQ ID NO: 1722489 - RNA, 19 nt, Artificial Sequence
  Description of Artificial Sequence: Synthetic oligonucleotide
aggcgcucauggccuccug

SEQ ID NO: 1722490 - RNA, 19 nt, Artificial Sequence
  Description of Artificial Sequence: Synthetic oligonucleotide
gaacacucucacguccuuu

SEQ ID NO: 1722491 - RNA, 19 nt, Artificial Sequence
  Description of Artificial Sequence: Synthetic oligonucleotide
ggggcugaucugguucuug

SEQ ID NO: 1722492 - RNA, 19 nt, Artificial Sequence
  Description of Artificial Sequence: Synthetic oligonucleotide
cguggguuccagcggcucc

SEQ ID NO: 1722493 - RNA, 19 nt, Artificial Sequence
  Description of Artificial Sequence: Synthetic oligonucleotide
caggagucugagugugugu

SEQ ID NO: 1722494 - RNA, 19 nt, Artificial Sequence
  Description of Artificial Sequence: Synthetic oligonucleotide
ugaccuugguaggcaccuu

SEQ ID NO: 1722495 - RNA, 19 nt, Artificial Sequence
  Description of Artificial Sequence: Synthetic oligonucleotide
ggaagacgagcugguugac

SEQ ID NO: 1722496 - RNA, 19 nt, Artificial Sequence
  Description of Artificial Sequence: Synthetic oligonucleotide
gcuaaccgaucggaugaca

SEQ ID NO: 1722497 - RNA, 19 nt, Artificial Sequence
  Description of Artificial Sequence: Synthetic oligonucleotide
cccgcuccacgaugguggg

SEQ ID NO: 1722498 - RNA, 19 nt, Artificial Sequence
  Description of Artificial Sequence: Synthetic oligonucleotide
ccuccucgaagaacucauc

SEQ ID NO: 1722499 - RNA, 19 nt, Artificial Sequence
  Description of Artificial Sequence: Synthetic oligonucleotide
ccuuugaccuugguaggca

SEQ ID NO: 1722500 - RNA, 19 nt, Artificial Sequence
  Description of Artificial Sequence: Synthetic oligonucleotide
cugggaugaguggugugcu

SEQ ID NO: 1722501 - RNA, 19 nt, Artificial Sequence
  Description of Artificial Sequence: Synthetic oligonucleotide
gcaaugucucuucuagcuu

SEQ ID NO: 1722502 - RNA, 19 nt, Artificial Sequence
  Description of Artificial Sequence: Synthetic oligonucleotide
guucgcuaaccgaucggau

SEQ ID NO: 1722503 - RNA, 19 nt, Artificial Sequence
  Description of Artificial Sequence: Synthetic oligonucleotide
acucugccccauagggaaa

SEQ ID NO: 1722504 - RNA, 19 nt, Artificial Sequence
  Description of Artificial Sequence: Synthetic oligonucleotide
cugggucuguggaaaugau

SEQ ID NO: 1722505 - RNA, 19 nt, Artificial Sequence
  Description of Artificial Sequence: Synthetic oligonucleotide
gggaugaguggugugcuau

SEQ ID NO: 1722506 - RNA, 19 nt, Artificial Sequence
  Description of Artificial Sequence: Synthetic oligonucleotide
agcguggguuccagcggcu

SEQ ID NO: 1722507 - RNA, 19 nt, Artificial Sequence
  Description of Artificial Sequence: Synthetic oligonucleotide
cgaugauauugcuaagcgu

SEQ ID NO: 1722508 - RNA, 19 nt, Artificial Sequence
  Description of Artificial Sequence: Synthetic oligonucleotide
ccgaucggaugacaggcaa

SEQ ID NO: 1722509 - RNA, 19 nt, Artificial Sequence
  Description of Artificial Sequence: Synthetic oligonucleotide
cauagccuuugaccuuggu

SEQ ID NO: 1722510 - RNA, 19 nt, Artificial Sequence
  Description of Artificial Sequence: Synthetic oligonucleotide
gguaggcaccuuggagaac

SEQ ID NO: 1722511 - RNA, 19 nt, Artificial Sequence
  Description of Artificial Sequence: Synthetic oligonucleotide
ggaccgcuaggcugcagcu

SEQ ID NO: 1722512 - RNA, 19 nt, Artificial Sequence
  Description of Artificial Sequence: Synthetic oligonucleotide
guguguccggugggugcug

SEQ ID NO: 1722513 - RNA, 19 nt, Artificial Sequence
  Description of Artificial Sequence: Synthetic oligonucleotide
gccacgcccaagcuggggu

SEQ ID NO: 1722514 - RNA, 19 nt, Artificial Sequence
  Description of Artificial Sequence: Synthetic oligonucleotide
ccgaaccucaugggguaac

SEQ ID NO: 1722515 - RNA, 19 nt, Artificial Sequence
  Description of Artificial Sequence: Synthetic oligonucleotide
cacuuaaggcugcgcugcu

SEQ ID NO: 1722516 - RNA, 19 nt, Artificial Sequence
  Description of Artificial Sequence: Synthetic oligonucleotide
ggccuggaucuuguggcga

SEQ ID NO: 1722517 - RNA, 19 nt, Artificial Sequence
  Description of Artificial Sequence: Synthetic oligonucleotide
cuggaccgcuaggcugcag

SEQ ID NO: 1722518 - RNA, 19 nt, Artificial Sequence
  Description of Artificial Sequence: Synthetic oligonucleotide
ccagacccagcauguugca

SEQ ID NO: 1722519 - RNA, 19 nt, Artificial Sequence
  Description of Artificial Sequence: Synthetic oligonucleotide
gugagaugaaggggcugau

SEQ ID NO: 1722520 - RNA, 19 nt, Artificial Sequence
  Description of Artificial Sequence: Synthetic oligonucleotide
ggugucgaucuugcacuua

SEQ ID NO: 1722521 - RNA, 19 nt, Artificial Sequence
  Description of Artificial Sequence: Synthetic oligonucleotide
ggagcagggcagagaaagu

SEQ ID NO: 1722522 - RNA, 19 nt, Artificial Sequence
  Description of Artificial Sequence: Synthetic oligonucleotide
gcugcgcugcucgaugaua

SEQ ID NO: 1722523 - RNA, 19 nt, Artificial Sequence
  Description of Artificial Sequence: Synthetic oligonucleotide
gggugcugugucgaauacu

SEQ ID NO: 1722524 - RNA, 19 nt, Artificial Sequence
  Description of Artificial Sequence: Synthetic oligonucleotide
gucgucuguucaggguccu

SEQ ID NO: 1722525 - RNA, 19 nt, Artificial Sequence
  Description of Artificial Sequence: Synthetic oligonucleotide
cucacacaucuugcagggu

SEQ ID NO: 1722526 - RNA, 19 nt, Artificial Sequence
  Description of Artificial Sequence: Synthetic oligonucleotide
ccuggaucagccguuccgu

SEQ ID NO: 1722527 - RNA, 19 nt, Artificial Sequence
  Description of Artificial Sequence: Synthetic oligonucleotide
cacgcccaagcuggggucu

SEQ ID NO: 1722528 - RNA, 19 nt, Artificial Sequence
  Description of Artificial Sequence: Synthetic oligonucleotide
cgaugcacacacagaugaa

SEQ ID NO: 1722529 - RNA, 19 nt, Artificial Sequence
  Description of Artificial Sequence: Synthetic oligonucleotide
ggugggugcugugucgaau

SEQ ID NO: 1722530 - RNA, 19 nt, Artificial Sequence
  Description of Artificial Sequence: Synthetic oligonucleotide
cccgacgaagauccacuua

SEQ ID NO: 1722531 - RNA, 19 nt, Artificial Sequence
  Description of Artificial Sequence: Synthetic oligonucleotide
acgcccaagcuggggucua

SEQ ID NO: 1722532 - RNA, 19 nt, Artificial Sequence
  Description of Artificial Sequence: Synthetic oligonucleotide
gcuccacgucaggagcauc

SEQ ID NO: 1722533 - RNA, 19 nt, Artificial Sequence
  Description of Artificial Sequence: Synthetic oligonucleotide
cgcuaaccgaucggaugac

SEQ ID NO: 1722534 - RNA, 19 nt, Artificial Sequence
  Description of Artificial Sequence: Synthetic oligonucleotide
cgcuaggcugcagcugcag

SEQ ID NO: 1722535 - RNA, 19 nt, Artificial Sequence
  Description of Artificial Sequence: Synthetic oligonucleotide
gcguggguuccagcggcuc

SEQ ID NO: 1722536 - RNA, 19 nt, Artificial Sequence
  Description of Artificial Sequence: Synthetic oligonucleotide
gcucugccacgcccaagcu

SEQ ID NO: 1722537 - RNA, 19 nt, Artificial Sequence
  Description of Artificial Sequence: Synthetic oligonucleotide
ccgcuccacgauggugggg

SEQ ID NO: 1722538 - RNA, 19 nt, Artificial Sequence
  Description of Artificial Sequence: Synthetic oligonucleotide
gggguaacaguggcagcuu

SEQ ID NO: 1722539 - RNA, 19 nt, Artificial Sequence
  Description of Artificial Sequence: Synthetic oligonucleotide
gcuggaccgcuaggcugca

SEQ ID NO: 1722540 - RNA, 19 nt, Artificial Sequence
  Description of Artificial Sequence: Synthetic oligonucleotide
cggggagcucugccacgcc

SEQ ID NO: 1722541 - RNA, 19 nt, Artificial Sequence
  Description of Artificial Sequence: Synthetic oligonucleotide
ccgcuaggcugcagcugca

SEQ ID NO: 1722542 - RNA, 19 nt, Artificial Sequence
  Description of Artificial Sequence: Synthetic oligonucleotide
cgucaggagcauccucgaa

SEQ ID NO: 1722543 - RNA, 19 nt, Artificial Sequence
  Description of Artificial Sequence: Synthetic oligonucleotide
cgaucggaugacaggcaau

SEQ ID NO: 1722544 - RNA, 19 nt, Artificial Sequence
  Description of Artificial Sequence: Synthetic oligonucleotide
cccgaaccucaugggguaa

SEQ ID NO: 1722545 - RNA, 19 nt, Artificial Sequence
  Description of Artificial Sequence: Synthetic oligonucleotide
ccccgacgaagauccacuu

SEQ ID NO: 1722546 - RNA, 19 nt, Artificial Sequence
  Description of Artificial Sequence: Synthetic oligonucleotide
ggcgagccucacacaucuu

SEQ ID NO: 1722547 - RNA, 19 nt, Artificial Sequence
  Description of Artificial Sequence: Synthetic oligonucleotide
aaaucuuuauuaaagaggg

SEQ ID NO: 1722548 - RNA, 19 nt, Artificial Sequence
  Description of Artificial Sequence: Synthetic oligonucleotide
uuaaaguuaauauuugcag

SEQ ID NO: 1722549 - RNA, 19 nt, Artificial Sequence
  Description of Artificial Sequence: Synthetic oligonucleotide
aagaacagcagucuggagg

SEQ ID NO: 1722550 - RNA, 19 nt, Artificial Sequence
  Description of Artificial Sequence: Synthetic oligonucleotide
auaauuauuaguaaaaucu

SEQ ID NO: 1722551 - RNA, 19 nt, Artificial Sequence
  Description of Artificial Sequence: Synthetic oligonucleotide
aagaguauacguuuaaaca

SEQ ID NO: 1722552 - RNA, 19 nt, Artificial Sequence
  Description of Artificial Sequence: Synthetic oligonucleotide
aagaguucauuccaguacg

SEQ ID NO: 1722553 - RNA, 19 nt, Artificial Sequence
  Description of Artificial Sequence: Synthetic oligonucleotide
aaguugauaaaauuuacaa

SEQ ID NO: 1722554 - RNA, 19 nt, Artificial Sequence
  Description of Artificial Sequence: Synthetic oligonucleotide
aaaguuaauauuugcagau

SEQ ID NO: 1722555 - RNA, 19 nt, Artificial Sequence
  Description of Artificial Sequence: Synthetic oligonucleotide
aaaaucuacucccauagaa

SEQ ID NO: 1722556 - RNA, 19 nt, Artificial Sequence
  Description of Artificial Sequence: Synthetic oligonucleotide
uugauaaaauuuacaagag

SEQ ID NO: 1722557 - RNA, 19 nt, Artificial Sequence
  Description of Artificial Sequence: Synthetic oligonucleotide
ugucaaaugcccuugagac

SEQ ID NO: 1722558 - RNA, 19 nt, Artificial Sequence
  Description of Artificial Sequence: Synthetic oligonucleotide
uuaaggaauccaaagaaaa

SEQ ID NO: 1722559 - RNA, 19 nt, Artificial Sequence
  Description of Artificial Sequence: Synthetic oligonucleotide
aaagaaggaauggagagug

SEQ ID NO: 1722560 - RNA, 19 nt, Artificial Sequence
  Description of Artificial Sequence: Synthetic oligonucleotide
ugcacauucagguacucgg

SEQ ID NO: 1722561 - RNA, 19 nt, Artificial Sequence
  Description of Artificial Sequence: Synthetic oligonucleotide
aaguagucgagauagccug

SEQ ID NO: 1722562 - RNA, 19 nt, Artificial Sequence
  Description of Artificial Sequence: Synthetic oligonucleotide
cuaucugagcauuuuaugc

SEQ ID NO: 1722563 - RNA, 19 nt, Artificial Sequence
  Description of Artificial Sequence: Synthetic oligonucleotide
uuuaccaaugauauacugu

SEQ ID NO: 1722564 - RNA, 19 nt, Artificial Sequence
  Description of Artificial Sequence: Synthetic oligonucleotide
ugugggaugacacugucga

SEQ ID NO: 1722565 - RNA, 19 nt, Artificial Sequence
  Description of Artificial Sequence: Synthetic oligonucleotide
uguuacuauaauuauuagu

SEQ ID NO: 1722566 - RNA, 19 nt, Artificial Sequence
  Description of Artificial Sequence: Synthetic oligonucleotide
auaguugcuacguucauca

SEQ ID NO: 1722567 - RNA, 19 nt, Artificial Sequence
  Description of Artificial Sequence: Synthetic oligonucleotide
uuuacaagaguauacguuu

SEQ ID NO: 1722568 - RNA, 19 nt, Artificial Sequence
  Description of Artificial Sequence: Synthetic oligonucleotide
aauagacccauaccauuuc

SEQ ID NO: 1722569 - RNA, 19 nt, Artificial Sequence
  Description of Artificial Sequence: Synthetic oligonucleotide
agaaguagucgagauagcc

SEQ ID NO: 1722570 - RNA, 19 nt, Artificial Sequence
  Description of Artificial Sequence: Synthetic oligonucleotide
aaucuacucccauagaaaa

SEQ ID NO: 1722571 - RNA, 19 nt, Artificial Sequence
  Description of Artificial Sequence: Synthetic oligonucleotide
uuugguuacucuuaaaguu

SEQ ID NO: 1722572 - RNA, 19 nt, Artificial Sequence
  Description of Artificial Sequence: Synthetic oligonucleotide
auauacuguuuucuugccc

SEQ ID NO: 1722573 - RNA, 19 nt, Artificial Sequence
  Description of Artificial Sequence: Synthetic oligonucleotide
ugauaaaauuuacaagagu

SEQ ID NO: 1722574 - RNA, 19 nt, Artificial Sequence
  Description of Artificial Sequence: Synthetic oligonucleotide
auuccaguacgcuuuuacc

SEQ ID NO: 1722575 - RNA, 19 nt, Artificial Sequence
  Description of Artificial Sequence: Synthetic oligonucleotide
uuuugguuacucuuaaagu

SEQ ID NO: 1722576 - RNA, 19 nt, Artificial Sequence
  Description of Artificial Sequence: Synthetic oligonucleotide
gaaaacuacaugugaauuc

SEQ ID NO: 1722577 - RNA, 19 nt, Artificial Sequence
  Description of Artificial Sequence: Synthetic oligonucleotide
caagaauagacccauacca

SEQ ID NO: 1722578 - RNA, 19 nt, Artificial Sequence
  Description of Artificial Sequence: Synthetic oligonucleotide
aauauaguugcuacguuca

SEQ ID NO: 1722579 - RNA, 19 nt, Artificial Sequence
  Description of Artificial Sequence: Synthetic oligonucleotide
ugcaucgauaagaacagca

SEQ ID NO: 1722580 - RNA, 19 nt, Artificial Sequence
  Description of Artificial Sequence: Synthetic oligonucleotide
aguuguaaucugcaggcuc

SEQ ID NO: 1722581 - RNA, 19 nt, Artificial Sequence
  Description of Artificial Sequence: Synthetic oligonucleotide
uuaccaaugauauacuguu

SEQ ID NO: 1722582 - RNA, 19 nt, Artificial Sequence
  Description of Artificial Sequence: Synthetic oligonucleotide
uaauauaguugcuacguuc

SEQ ID NO: 1722583 - RNA, 19 nt, Artificial Sequence
  Description of Artificial Sequence: Synthetic oligonucleotide
caagaguauacguuuaaac

SEQ ID NO: 1722584 - RNA, 19 nt, Artificial Sequence
  Description of Artificial Sequence: Synthetic oligonucleotide
ugugaauucgucugagcag

SEQ ID NO: 1722585 - RNA, 19 nt, Artificial Sequence
  Description of Artificial Sequence: Synthetic oligonucleotide
aggcauggaagucuaauuc

SEQ ID NO: 1722586 - RNA, 19 nt, Artificial Sequence
  Description of Artificial Sequence: Synthetic oligonucleotide
uacugaaauagucuaucug

SEQ ID NO: 1722587 - RNA, 19 nt, Artificial Sequence
  Description of Artificial Sequence: Synthetic oligonucleotide
ugucgauucguacauuccc

SEQ ID NO: 1722588 - RNA, 19 nt, Artificial Sequence
  Description of Artificial Sequence: Synthetic oligonucleotide
uacgcuuuuaccaaugaua

SEQ ID NO: 1722589 - RNA, 19 nt, Artificial Sequence
  Description of Artificial Sequence: Synthetic oligonucleotide
uuuuaccaaugauauacug

SEQ ID NO: 1722590 - RNA, 19 nt, Artificial Sequence
  Description of Artificial Sequence: Synthetic oligonucleotide
ucuaccaagaauagaccca

SEQ ID NO: 1722591 - RNA, 19 nt, Artificial Sequence
  Description of Artificial Sequence: Synthetic oligonucleotide
ugaccaaugauuugggagu

SEQ ID NO: 1722592 - RNA, 19 nt, Artificial Sequence
  Description of Artificial Sequence: Synthetic oligonucleotide
gaagaacaauucuucagug

SEQ ID NO: 1722593 - RNA, 19 nt, Artificial Sequence
  Description of Artificial Sequence: Synthetic oligonucleotide
aagaacaauucuucaguga

SEQ ID NO: 1722594 - RNA, 19 nt, Artificial Sequence
  Description of Artificial Sequence: Synthetic oligonucleotide
aaugauuugggaguuguaa

SEQ ID NO: 1722595 - RNA, 19 nt, Artificial Sequence
  Description of Artificial Sequence: Synthetic oligonucleotide
ugcaagagugucaaaugcc

SEQ ID NO: 1722596 - RNA, 19 nt, Artificial Sequence
  Description of Artificial Sequence: Synthetic oligonucleotide
ucuaucugagcauuuuaug

SEQ ID NO: 1722597 - RNA, 19 nt, Artificial Sequence
  Description of Artificial Sequence: Synthetic oligonucleotide
gaauagagaaguuaagugu

SEQ ID NO: 1722598 - RNA, 19 nt, Artificial Sequence
  Description of Artificial Sequence: Synthetic oligonucleotide
uaaucacuuacauucuucu

SEQ ID NO: 1722599 - RNA, 19 nt, Artificial Sequence
  Description of Artificial Sequence: Synthetic oligonucleotide
aaguuaaguguagaugguc

SEQ ID NO: 1722600 - RNA, 19 nt, Artificial Sequence
  Description of Artificial Sequence: Synthetic oligonucleotide
uuaaucacuuacauucuuc

SEQ ID NO: 1722601 - RNA, 19 nt, Artificial Sequence
  Description of Artificial Sequence: Synthetic oligonucleotide
acugucgauucguacauuc

SEQ ID NO: 1722602 - RNA, 19 nt, Artificial Sequence
  Description of Artificial Sequence: Synthetic oligonucleotide
ugacaaauguugcuaauau

SEQ ID NO: 1722603 - RNA, 19 nt, Artificial Sequence
  Description of Artificial Sequence: Synthetic oligonucleotide
augugaauucgucugagca

SEQ ID NO: 1722604 - RNA, 19 nt, Artificial Sequence
  Description of Artificial Sequence: Synthetic oligonucleotide
aucgauaagaacagcaguc

SEQ ID NO: 1722605 - RNA, 19 nt, Artificial Sequence
  Description of Artificial Sequence: Synthetic oligonucleotide
uuccaguacgcuuuuacca

SEQ ID NO: 1722606 - RNA, 19 nt, Artificial Sequence
  Description of Artificial Sequence: Synthetic oligonucleotide
ggaaagaaggaauggagag

SEQ ID NO: 1722607 - RNA, 19 nt, Artificial Sequence
  Description of Artificial Sequence: Synthetic oligonucleotide
uguagcucgacucuccagu

SEQ ID NO: 1722608 - RNA, 19 nt, Artificial Sequence
  Description of Artificial Sequence: Synthetic oligonucleotide
gaauaaagcccucauagua

SEQ ID NO: 1722609 - RNA, 19 nt, Artificial Sequence
  Description of Artificial Sequence: Synthetic oligonucleotide
ugaauuuugguuacucuua

SEQ ID NO: 1722610 - RNA, 19 nt, Artificial Sequence
  Description of Artificial Sequence: Synthetic oligonucleotide
gauguaauccuggaauucc

SEQ ID NO: 1722611 - RNA, 19 nt, Artificial Sequence
  Description of Artificial Sequence: Synthetic oligonucleotide
ugcucuacugaaauagucu

SEQ ID NO: 1722612 - RNA, 19 nt, Artificial Sequence
  Description of Artificial Sequence: Synthetic oligonucleotide
agucgagauagccuguagg

SEQ ID NO: 1722613 - RNA, 19 nt, Artificial Sequence
  Description of Artificial Sequence: Synthetic oligonucleotide
ugcacguuuccuuucaugu

SEQ ID NO: 1722614 - RNA, 19 nt, Artificial Sequence
  Description of Artificial Sequence: Synthetic oligonucleotide
cagugcaucgauaagaaca

SEQ ID NO: 1722615 - RNA, 19 nt, Artificial Sequence
  Description of Artificial Sequence: Synthetic oligonucleotide
cugaaauagucuaucugag

SEQ ID NO: 1722616 - RNA, 19 nt, Artificial Sequence
  Description of Artificial Sequence: Synthetic oligonucleotide
gcuuuuaccaaugauauac

SEQ ID NO: 1722617 - RNA, 19 nt, Artificial Sequence
  Description of Artificial Sequence: Synthetic oligonucleotide
agaaggaacaguaaacuca

SEQ ID NO: 1722618 - RNA, 19 nt, Artificial Sequence
  Description of Artificial Sequence: Synthetic oligonucleotide
ucuuauucauccccauagc

SEQ ID NO: 1722619 - RNA, 19 nt, Artificial Sequence
  Description of Artificial Sequence: Synthetic oligonucleotide
ugagccugaaaacuacaug

SEQ ID NO: 1722620 - RNA, 19 nt, Artificial Sequence
  Description of Artificial Sequence: Synthetic oligonucleotide
gauuuggugucuugugucc

SEQ ID NO: 1722621 - RNA, 19 nt, Artificial Sequence
  Description of Artificial Sequence: Synthetic oligonucleotide
caguaaacucaguucauag

SEQ ID NO: 1722622 - RNA, 19 nt, Artificial Sequence
  Description of Artificial Sequence: Synthetic oligonucleotide
aauaaagcccucauaguaa

SEQ ID NO: 1722623 - RNA, 19 nt, Artificial Sequence
  Description of Artificial Sequence: Synthetic oligonucleotide
gauucguacauucccuaug

SEQ ID NO: 1722624 - RNA, 19 nt, Artificial Sequence
  Description of Artificial Sequence: Synthetic oligonucleotide
uuguuacuauaauuauuag

SEQ ID NO: 1722625 - RNA, 19 nt, Artificial Sequence
  Description of Artificial Sequence: Synthetic oligonucleotide
ucguacauucccuaugaga

SEQ ID NO: 1722626 - RNA, 19 nt, Artificial Sequence
  Description of Artificial Sequence: Synthetic oligonucleotide
guuaaguguagauggucag

SEQ ID NO: 1722627 - RNA, 19 nt, Artificial Sequence
  Description of Artificial Sequence: Synthetic oligonucleotide
ugauuugggaguuguaauc

SEQ ID NO: 1722628 - RNA, 19 nt, Artificial Sequence
  Description of Artificial Sequence: Synthetic oligonucleotide
uaaguguagauggucagga

SEQ ID NO: 1722629 - RNA, 19 nt, Artificial Sequence
  Description of Artificial Sequence: Synthetic oligonucleotide
ggaguuguaaucugcaggc

SEQ ID NO: 1722630 - RNA, 19 nt, Artificial Sequence
  Description of Artificial Sequence: Synthetic oligonucleotide
aucacuugccagcauuggg

SEQ ID NO: 1722631 - RNA, 19 nt, Artificial Sequence
  Description of Artificial Sequence: Synthetic oligonucleotide
uucccuaugagacccuuga

SEQ ID NO: 1722632 - RNA, 19 nt, Artificial Sequence
  Description of Artificial Sequence: Synthetic oligonucleotide
aguaaguugauaaaauuua

SEQ ID NO: 1722633 - RNA, 19 nt, Artificial Sequence
  Description of Artificial Sequence: Synthetic oligonucleotide
auucguacauucccuauga

SEQ ID NO: 1722634 - RNA, 19 nt, Artificial Sequence
  Description of Artificial Sequence: Synthetic oligonucleotide
auacguuuaaacauuuugu

SEQ ID NO: 1722635 - RNA, 19 nt, Artificial Sequence
  Description of Artificial Sequence: Synthetic oligonucleotide
ugcccuagggccuggaaag

SEQ ID NO: 1722636 - RNA, 19 nt, Artificial Sequence
  Description of Artificial Sequence: Synthetic oligonucleotide
aaguuaauauuugcagaug

SEQ ID NO: 1722637 - RNA, 19 nt, Artificial Sequence
  Description of Artificial Sequence: Synthetic oligonucleotide
ugcuacguucaucacuugc

SEQ ID NO: 1722638 - RNA, 19 nt, Artificial Sequence
  Description of Artificial Sequence: Synthetic oligonucleotide
aguugcuacguucaucacu

SEQ ID NO: 1722639 - RNA, 19 nt, Artificial Sequence
  Description of Artificial Sequence: Synthetic oligonucleotide
uaugagacccuugaagaac

SEQ ID NO: 1722640 - RNA, 19 nt, Artificial Sequence
  Description of Artificial Sequence: Synthetic oligonucleotide
guuaauauuugcagaugcc

SEQ ID NO: 1722641 - RNA, 19 nt, Artificial Sequence
  Description of Artificial Sequence: Synthetic oligonucleotide
uaaaaucuacucccauaga

SEQ ID NO: 1722642 - RNA, 19 nt, Artificial Sequence
  Description of Artificial Sequence: Synthetic oligonucleotide
aaaucuacucccauagaaa

SEQ ID NO: 1722643 - RNA, 19 nt, Artificial Sequence
  Description of Artificial Sequence: Synthetic oligonucleotide
ucugagaaguagucgagau

SEQ ID NO: 1722644 - RNA, 19 nt, Artificial Sequence
  Description of Artificial Sequence: Synthetic oligonucleotide
agugcaucgauaagaacag

SEQ ID NO: 1722645 - RNA, 19 nt, Artificial Sequence
  Description of Artificial Sequence: Synthetic oligonucleotide
uaaacucaguucauagcaa

SEQ ID NO: 1722646 - RNA, 19 nt, Artificial Sequence
  Description of Artificial Sequence: Synthetic oligonucleotide
uguaauccuggaauuccac

SEQ ID NO: 1722647 - RNA, 19 nt, Artificial Sequence
  Description of Artificial Sequence: Synthetic oligonucleotide
aauagucuaucugagcauu

SEQ ID NO: 1722648 - RNA, 19 nt, Artificial Sequence
  Description of Artificial Sequence: Synthetic oligonucleotide
gggaguuguaaucugcagg

SEQ ID NO: 1722649 - RNA, 19 nt, Artificial Sequence
  Description of Artificial Sequence: Synthetic oligonucleotide
guuuaacagggaauaaagc

SEQ ID NO: 1722650 - RNA, 19 nt, Artificial Sequence
  Description of Artificial Sequence: Synthetic oligonucleotide
auaagaacagcagucugga

SEQ ID NO: 1722651 - RNA, 19 nt, Artificial Sequence
  Description of Artificial Sequence: Synthetic oligonucleotide
gcugugaccaaugauuugg

SEQ ID NO: 1722652 - RNA, 19 nt, Artificial Sequence
  Description of Artificial Sequence: Synthetic oligonucleotide
caaugccuuugcaagagug

SEQ ID NO: 1722653 - RNA, 19 nt, Artificial Sequence
  Description of Artificial Sequence: Synthetic oligonucleotide
ugaagaguucauuccagua

SEQ ID NO: 1722654 - RNA, 19 nt, Artificial Sequence
  Description of Artificial Sequence: Synthetic oligonucleotide
uaaagagggagagcgagaa

SEQ ID NO: 1722655 - RNA, 19 nt, Artificial Sequence
  Description of Artificial Sequence: Synthetic oligonucleotide
aguuaaguguagaugguca

SEQ ID NO: 1722656 - RNA, 19 nt, Artificial Sequence
  Description of Artificial Sequence: Synthetic oligonucleotide
uucuccauguagcucgacu

SEQ ID NO: 1722657 - RNA, 19 nt, Artificial Sequence
  Description of Artificial Sequence: Synthetic oligonucleotide
cauuccaguacgcuuuuac

SEQ ID NO: 1722658 - RNA, 19 nt, Artificial Sequence
  Description of Artificial Sequence: Synthetic oligonucleotide
uucauacaauugacaaaug

SEQ ID NO: 1722659 - RNA, 19 nt, Artificial Sequence
  Description of Artificial Sequence: Synthetic oligonucleotide
uccaguacgcuuuuaccaa

SEQ ID NO: 1722660 - RNA, 19 nt, Artificial Sequence
  Description of Artificial Sequence: Synthetic oligonucleotide
agaauagacccauaccauu

SEQ ID NO: 1722661 - RNA, 19 nt, Artificial Sequence
  Description of Artificial Sequence: Synthetic oligonucleotide
ucgauaagaacagcagucu

SEQ ID NO: 1722662 - RNA, 19 nt, Artificial Sequence
  Description of Artificial Sequence: Synthetic oligonucleotide
auccccauagcacaggcau

SEQ ID NO: 1722663 - RNA, 19 nt, Artificial Sequence
  Description of Artificial Sequence: Synthetic oligonucleotide
aagaauagacccauaccau

SEQ ID NO: 1722664 - RNA, 19 nt, Artificial Sequence
  Description of Artificial Sequence: Synthetic oligonucleotide
uuacaagaguauacguuua

SEQ ID NO: 1722665 - RNA, 19 nt, Artificial Sequence
  Description of Artificial Sequence: Synthetic oligonucleotide
auuuacaagaguauacguu

SEQ ID NO: 1722666 - RNA, 19 nt, Artificial Sequence
  Description of Artificial Sequence: Synthetic oligonucleotide
auuugggaguuguaaucug

SEQ ID NO: 1722667 - RNA, 19 nt, Artificial Sequence
  Description of Artificial Sequence: Synthetic oligonucleotide
aaugccuuugcaagagugu

SEQ ID NO: 1722668 - RNA, 19 nt, Artificial Sequence
  Description of Artificial Sequence: Synthetic oligonucleotide
augaucuggacugaagaga

SEQ ID NO: 1722669 - RNA, 19 nt, Artificial Sequence
  Description of Artificial Sequence: Synthetic oligonucleotide
ggcauggaagucuaauucc

SEQ ID NO: 1722670 - RNA, 19 nt, Artificial Sequence
  Description of Artificial Sequence: Synthetic oligonucleotide
gaauucgucugagcagugg

SEQ ID NO: 1722671 - RNA, 19 nt, Artificial Sequence
  Description of Artificial Sequence: Synthetic oligonucleotide
agucuggaggccgacuccc

SEQ ID NO: 1722672 - RNA, 19 nt, Artificial Sequence
  Description of Artificial Sequence: Synthetic oligonucleotide
aacucaguucauagcaaug

SEQ ID NO: 1722673 - RNA, 19 nt, Artificial Sequence
  Description of Artificial Sequence: Synthetic oligonucleotide
acccuugaagaacaauucu

SEQ ID NO: 1722674 - RNA, 19 nt, Artificial Sequence
  Description of Artificial Sequence: Synthetic oligonucleotide
uucguacauucccuaugag

SEQ ID NO: 1722675 - RNA, 19 nt, Artificial Sequence
  Description of Artificial Sequence: Synthetic oligonucleotide
ggcguauucauacaauuga

SEQ ID NO: 1722676 - RNA, 19 nt, Artificial Sequence
  Description of Artificial Sequence: Synthetic oligonucleotide
uggaagucuaauuccggau

SEQ ID NO: 1722677 - RNA, 19 nt, Artificial Sequence
  Description of Artificial Sequence: Synthetic oligonucleotide
caugugaauucgucugagc

SEQ ID NO: 1722678 - RNA, 19 nt, Artificial Sequence
  Description of Artificial Sequence: Synthetic oligonucleotide
auucgucugagcaguggcc

SEQ ID NO: 1722679 - RNA, 19 nt, Artificial Sequence
  Description of Artificial Sequence: Synthetic oligonucleotide
auagagaaguuaaguguag

SEQ ID NO: 1722680 - RNA, 19 nt, Artificial Sequence
  Description of Artificial Sequence: Synthetic oligonucleotide
uguugcuaauauaguugcu

SEQ ID NO: 1722681 - RNA, 19 nt, Artificial Sequence
  Description of Artificial Sequence: Synthetic oligonucleotide
cauuucuuauucaucccca

SEQ ID NO: 1722682 - RNA, 19 nt, Artificial Sequence
  Description of Artificial Sequence: Synthetic oligonucleotide
uaggcguauucauacaauu

SEQ ID NO: 1722683 - RNA, 19 nt, Artificial Sequence
  Description of Artificial Sequence: Synthetic oligonucleotide
uucgucugagcaguggccc

SEQ ID NO: 1722684 - RNA, 19 nt, Artificial Sequence
  Description of Artificial Sequence: Synthetic oligonucleotide
augcucuacugaaauaguc

SEQ ID NO: 1722685 - RNA, 19 nt, Artificial Sequence
  Description of Artificial Sequence: Synthetic oligonucleotide
agguuagacaugcucuacu

SEQ ID NO: 1722686 - RNA, 19 nt, Artificial Sequence
  Description of Artificial Sequence: Synthetic oligonucleotide
uauaguugcuacguucauc

SEQ ID NO: 1722687 - RNA, 19 nt, Artificial Sequence
  Description of Artificial Sequence: Synthetic oligonucleotide
uggugagccugaaaacuac

SEQ ID NO: 1722688 - RNA, 19 nt, Artificial Sequence
  Description of Artificial Sequence: Synthetic oligonucleotide
ucccugcuuaaucacuuac

SEQ ID NO: 1722689 - RNA, 19 nt, Artificial Sequence
  Description of Artificial Sequence: Synthetic oligonucleotide
cugucgauucguacauucc

SEQ ID NO: 1722690 - RNA, 19 nt, Artificial Sequence
  Description of Artificial Sequence: Synthetic oligonucleotide
guaauccuggaauuccaca

SEQ ID NO: 1722691 - RNA, 19 nt, Artificial Sequence
  Description of Artificial Sequence: Synthetic oligonucleotide
uaagaacagcagucuggag

SEQ ID NO: 1722692 - RNA, 19 nt, Artificial Sequence
  Description of Artificial Sequence: Synthetic oligonucleotide
uagucgagauagccuguag

SEQ ID NO: 1722693 - RNA, 19 nt, Artificial Sequence
  Description of Artificial Sequence: Synthetic oligonucleotide
ucgggcauaggagaaggca

SEQ ID NO: 1722694 - RNA, 19 nt, Artificial Sequence
  Description of Artificial Sequence: Synthetic oligonucleotide
acucgggcauaggagaagg

SEQ ID NO: 1722695 - RNA, 19 nt, Artificial Sequence
  Description of Artificial Sequence: Synthetic oligonucleotide
acgcuuuuaccaaugauau

SEQ ID NO: 1722696 - RNA, 19 nt, Artificial Sequence
  Description of Artificial Sequence: Synthetic oligonucleotide
agaugcacguuuccuuuca

SEQ ID NO: 1722697 - RNA, 19 nt, Artificial Sequence
  Description of Artificial Sequence: Synthetic oligonucleotide
gacccuugaagaacaauuc

SEQ ID NO: 1722698 - RNA, 19 nt, Artificial Sequence
  Description of Artificial Sequence: Synthetic oligonucleotide
ccauuucuuauucaucccc

SEQ ID NO: 1722699 - RNA, 19 nt, Artificial Sequence
  Description of Artificial Sequence: Synthetic oligonucleotide
ugaauucgucugagcagug

SEQ ID NO: 1722700 - RNA, 19 nt, Artificial Sequence
  Description of Artificial Sequence: Synthetic oligonucleotide
auugggcaaggccaagagu

SEQ ID NO: 1722701 - RNA, 19 nt, Artificial Sequence
  Description of Artificial Sequence: Synthetic oligonucleotide
guugcuaauauaguugcua

SEQ ID NO: 1722702 - RNA, 19 nt, Artificial Sequence
  Description of Artificial Sequence: Synthetic oligonucleotide
uccggaucccugcuuaauc

SEQ ID NO: 1722703 - RNA, 19 nt, Artificial Sequence
  Description of Artificial Sequence: Synthetic oligonucleotide
ccuguagguaucaucuggg

SEQ ID NO: 1722704 - RNA, 19 nt, Artificial Sequence
  Description of Artificial Sequence: Synthetic oligonucleotide
ccaagaauagacccauacc

SEQ ID NO: 1722705 - RNA, 19 nt, Artificial Sequence
  Description of Artificial Sequence: Synthetic oligonucleotide
acaugugaauucgucugag

SEQ ID NO: 1722706 - RNA, 19 nt, Artificial Sequence
  Description of Artificial Sequence: Synthetic oligonucleotide
ugacacugucgauucguac

SEQ ID NO: 1722707 - RNA, 19 nt, Artificial Sequence
  Description of Artificial Sequence: Synthetic oligonucleotide
uggugauguaauccuggaa

SEQ ID NO: 1722708 - RNA, 19 nt, Artificial Sequence
  Description of Artificial Sequence: Synthetic oligonucleotide
uugcccuagggccuggaaa

SEQ ID NO: 1722709 - RNA, 19 nt, Artificial Sequence
  Description of Artificial Sequence: Synthetic oligonucleotide
acacugucgauucguacau

SEQ ID NO: 1722710 - RNA, 19 nt, Artificial Sequence
  Description of Artificial Sequence: Synthetic oligonucleotide
ggugauguaauccuggaau

SEQ ID NO: 1722711 - RNA, 19 nt, Artificial Sequence
  Description of Artificial Sequence: Synthetic oligonucleotide
cuacugggcucugacaggc

SEQ ID NO: 1722712 - RNA, 19 nt, Artificial Sequence
  Description of Artificial Sequence: Synthetic oligonucleotide
acccauaccauuucuuauu

SEQ ID NO: 1722713 - RNA, 19 nt, Artificial Sequence
  Description of Artificial Sequence: Synthetic oligonucleotide
uacuguuuucuugcccuag

SEQ ID NO: 1722714 - RNA, 19 nt, Artificial Sequence
  Description of Artificial Sequence: Synthetic oligonucleotide
ugggaugacacugucgauu

SEQ ID NO: 1722715 - RNA, 19 nt, Artificial Sequence
  Description of Artificial Sequence: Synthetic oligonucleotide
gcaagagugucaaaugccc

SEQ ID NO: 1722716 - RNA, 19 nt, Artificial Sequence
  Description of Artificial Sequence: Synthetic oligonucleotide
ugugcccuugacuuucaaa

SEQ ID NO: 1722717 - RNA, 19 nt, Artificial Sequence
  Description of Artificial Sequence: Synthetic oligonucleotide
ccucauaguaaguugauaa

SEQ ID NO: 1722718 - RNA, 19 nt, Artificial Sequence
  Description of Artificial Sequence: Synthetic oligonucleotide
ucaaugccggcagucugag

SEQ ID NO: 1722719 - RNA, 19 nt, Artificial Sequence
  Description of Artificial Sequence: Synthetic oligonucleotide
agucuaucugagcauuuua

SEQ ID NO: 1722720 - RNA, 19 nt, Artificial Sequence
  Description of Artificial Sequence: Synthetic oligonucleotide
aacaguaaacucaguucau

SEQ ID NO: 1722721 - RNA, 19 nt, Artificial Sequence
  Description of Artificial Sequence: Synthetic oligonucleotide
aaagagggagagcgagaaa

SEQ ID NO: 1722722 - RNA, 19 nt, Artificial Sequence
  Description of Artificial Sequence: Synthetic oligonucleotide
auguagcucgacucuccag

SEQ ID NO: 1722723 - RNA, 19 nt, Artificial Sequence
  Description of Artificial Sequence: Synthetic oligonucleotide
gcuacguucaucacuugcc

SEQ ID NO: 1722724 - RNA, 19 nt, Artificial Sequence
  Description of Artificial Sequence: Synthetic oligonucleotide
guagcucgacucuccagug

SEQ ID NO: 1722725 - RNA, 19 nt, Artificial Sequence
  Description of Artificial Sequence: Synthetic oligonucleotide
gucgagauagccuguaggu

SEQ ID NO: 1722726 - RNA, 19 nt, Artificial Sequence
  Description of Artificial Sequence: Synthetic oligonucleotide
uagacccauaccauuucuu

SEQ ID NO: 1722727 - RNA, 19 nt, Artificial Sequence
  Description of Artificial Sequence: Synthetic oligonucleotide
ucgacucuccagugauuag

SEQ ID NO: 1722728 - RNA, 19 nt, Artificial Sequence
  Description of Artificial Sequence: Synthetic oligonucleotide
gcaucgauaagaacagcag

SEQ ID NO: 1722729 - RNA, 19 nt, Artificial Sequence
  Description of Artificial Sequence: Synthetic oligonucleotide
auauaguugcuacguucau

SEQ ID NO: 1722730 - RNA, 19 nt, Artificial Sequence
  Description of Artificial Sequence: Synthetic oligonucleotide
gcccuugacuuucaaaggc

SEQ ID NO: 1722731 - RNA, 19 nt, Artificial Sequence
  Description of Artificial Sequence: Synthetic oligonucleotide
agggagagcgagaaagcag

SEQ ID NO: 1722732 - RNA, 19 nt, Artificial Sequence
  Description of Artificial Sequence: Synthetic oligonucleotide
agguacucgggcauaggag

SEQ ID NO: 1722733 - RNA, 19 nt, Artificial Sequence
  Description of Artificial Sequence: Synthetic oligonucleotide
caguacgcuuuuaccaaug

SEQ ID NO: 1722734 - RNA, 19 nt, Artificial Sequence
  Description of Artificial Sequence: Synthetic oligonucleotide
acaagaguauacguuuaaa

SEQ ID NO: 1722735 - RNA, 19 nt, Artificial Sequence
  Description of Artificial Sequence: Synthetic oligonucleotide
aaacuacaugugaauucgu

SEQ ID NO: 1722736 - RNA, 19 nt, Artificial Sequence
  Description of Artificial Sequence: Synthetic oligonucleotide
gaaguagucgagauagccu

SEQ ID NO: 1722737 - RNA, 19 nt, Artificial Sequence
  Description of Artificial Sequence: Synthetic oligonucleotide
cuaugagacccuugaagaa

SEQ ID NO: 1722738 - RNA, 19 nt, Artificial Sequence
  Description of Artificial Sequence: Synthetic oligonucleotide
caucacuugccagcauugg

SEQ ID NO: 1722739 - RNA, 19 nt, Artificial Sequence
  Description of Artificial Sequence: Synthetic oligonucleotide
aguauacguuuaaacauuu

SEQ ID NO: 1722740 - RNA, 19 nt, Artificial Sequence
  Description of Artificial Sequence: Synthetic oligonucleotide
caaugugcccuugacuuuc

SEQ ID NO: 1722741 - RNA, 19 nt, Artificial Sequence
  Description of Artificial Sequence: Synthetic oligonucleotide
uaccaaugauauacuguuu

SEQ ID NO: 1722742 - RNA, 19 nt, Artificial Sequence
  Description of Artificial Sequence: Synthetic oligonucleotide
caaauguugcuaauauagu

SEQ ID NO: 1722743 - RNA, 19 nt, Artificial Sequence
  Description of Artificial Sequence: Synthetic oligonucleotide
agccugaaaacuacaugug

SEQ ID NO: 1722744 - RNA, 19 nt, Artificial Sequence
  Description of Artificial Sequence: Synthetic oligonucleotide
ugagcauuuuaugcucuau

SEQ ID NO: 1722745 - RNA, 19 nt, Artificial Sequence
  Description of Artificial Sequence: Synthetic oligonucleotide
aggagucaaugccuuugca

SEQ ID NO: 1722746 - RNA, 19 nt, Artificial Sequence
  Description of Artificial Sequence: Synthetic oligonucleotide
acagggaauaaagcccuca

SEQ ID NO: 1722747 - RNA, 19 nt, Artificial Sequence
  Description of Artificial Sequence: Synthetic oligonucleotide
gcuaauauaguugcuacgu

SEQ ID NO: 1722748 - RNA, 19 nt, Artificial Sequence
  Description of Artificial Sequence: Synthetic oligonucleotide
acaguaaacucaguucaua

SEQ ID NO: 1722749 - RNA, 19 nt, Artificial Sequence
  Description of Artificial Sequence: Synthetic oligonucleotide
gggaugacacugucgauuc

SEQ ID NO: 1722750 - RNA, 19 nt, Artificial Sequence
  Description of Artificial Sequence: Synthetic oligonucleotide
ucgucugagcaguggcccc

SEQ ID NO: 1722751 - RNA, 19 nt, Artificial Sequence
  Description of Artificial Sequence: Synthetic oligonucleotide
agcccucauaguaaguuga

SEQ ID NO: 1722752 - RNA, 19 nt, Artificial Sequence
  Description of Artificial Sequence: Synthetic oligonucleotide
uacucgggcauaggagaag

SEQ ID NO: 1722753 - RNA, 19 nt, Artificial Sequence
  Description of Artificial Sequence: Synthetic oligonucleotide
ccaaugauauacuguuuuc

SEQ ID NO: 1722754 - RNA, 19 nt, Artificial Sequence
  Description of Artificial Sequence: Synthetic oligonucleotide
gagaaguagucgagauagc

SEQ ID NO: 1722755 - RNA, 19 nt, Artificial Sequence
  Description of Artificial Sequence: Synthetic oligonucleotide
ucgagauagccuguaggua

SEQ ID NO: 1722756 - RNA, 19 nt, Artificial Sequence
  Description of Artificial Sequence: Synthetic oligonucleotide
caucgauaagaacagcagu

SEQ ID NO: 1722757 - RNA, 19 nt, Artificial Sequence
  Description of Artificial Sequence: Synthetic oligonucleotide
uccauguagcucgacucuc

SEQ ID NO: 1722758 - RNA, 19 nt, Artificial Sequence
  Description of Artificial Sequence: Synthetic oligonucleotide
cugaaaacuacaugugaau

SEQ ID NO: 1722759 - RNA, 19 nt, Artificial Sequence
  Description of Artificial Sequence: Synthetic oligonucleotide
gugugggaugacacugucg

SEQ ID NO: 1722760 - RNA, 19 nt, Artificial Sequence
  Description of Artificial Sequence: Synthetic oligonucleotide
gguaggcguauucauacaa

SEQ ID NO: 1722761 - RNA, 19 nt, Artificial Sequence
  Description of Artificial Sequence: Synthetic oligonucleotide
cacuuacauucuucuuaag

SEQ ID NO: 1722762 - RNA, 19 nt, Artificial Sequence
  Description of Artificial Sequence: Synthetic oligonucleotide
uuguaaucugcaggcucca

SEQ ID NO: 1722763 - RNA, 19 nt, Artificial Sequence
  Description of Artificial Sequence: Synthetic oligonucleotide
gagcgagaaagcagaaaga

SEQ ID NO: 1722764 - RNA, 19 nt, Artificial Sequence
  Description of Artificial Sequence: Synthetic oligonucleotide
agccuguagguaucaucug

SEQ ID NO: 1722765 - RNA, 19 nt, Artificial Sequence
  Description of Artificial Sequence: Synthetic oligonucleotide
gugaauucgucugagcagu

SEQ ID NO: 1722766 - RNA, 19 nt, Artificial Sequence
  Description of Artificial Sequence: Synthetic oligonucleotide
agguaggcguauucauaca

SEQ ID NO: 1722767 - RNA, 19 nt, Artificial Sequence
  Description of Artificial Sequence: Synthetic oligonucleotide
ggugucuugugucccaaga

SEQ ID NO: 1722768 - RNA, 19 nt, Artificial Sequence
  Description of Artificial Sequence: Synthetic oligonucleotide
gagauagccuguagguauc

SEQ ID NO: 1722769 - RNA, 19 nt, Artificial Sequence
  Description of Artificial Sequence: Synthetic oligonucleotide
uggugucuugugucccaag

SEQ ID NO: 1722770 - RNA, 19 nt, Artificial Sequence
  Description of Artificial Sequence: Synthetic oligonucleotide
gucccaagaaggaacagua

SEQ ID NO: 1722771 - RNA, 19 nt, Artificial Sequence
  Description of Artificial Sequence: Synthetic oligonucleotide
uagucuaucugagcauuuu

SEQ ID NO: 1722772 - RNA, 19 nt, Artificial Sequence
  Description of Artificial Sequence: Synthetic oligonucleotide
gccugaaaacuacauguga

SEQ ID NO: 1722773 - RNA, 19 nt, Artificial Sequence
  Description of Artificial Sequence: Synthetic oligonucleotide
gaacuauggccuucaggua

SEQ ID NO: 1722774 - RNA, 19 nt, Artificial Sequence
  Description of Artificial Sequence: Synthetic oligonucleotide
gaaguuaaguguagauggu

SEQ ID NO: 1722775 - RNA, 19 nt, Artificial Sequence
  Description of Artificial Sequence: Synthetic oligonucleotide
ucccuaugagacccuugaa

SEQ ID NO: 1722776 - RNA, 19 nt, Artificial Sequence
  Description of Artificial Sequence: Synthetic oligonucleotide
ccaguagccuauuauaaaa

SEQ ID NO: 1722777 - RNA, 19 nt, Artificial Sequence
  Description of Artificial Sequence: Synthetic oligonucleotide
cauagcaaugugcccuuga

SEQ ID NO: 1722778 - RNA, 19 nt, Artificial Sequence
  Description of Artificial Sequence: Synthetic oligonucleotide
gguggcguucaucagucuc

SEQ ID NO: 1722779 - RNA, 19 nt, Artificial Sequence
  Description of Artificial Sequence: Synthetic oligonucleotide
cauggugagccugaaaacu

SEQ ID NO: 1722780 - RNA, 19 nt, Artificial Sequence
  Description of Artificial Sequence: Synthetic oligonucleotide
cucgggcauaggagaaggc

SEQ ID NO: 1722781 - RNA, 19 nt, Artificial Sequence
  Description of Artificial Sequence: Synthetic oligonucleotide
uaguugcuacguucaucac

SEQ ID NO: 1722782 - RNA, 19 nt, Artificial Sequence
  Description of Artificial Sequence: Synthetic oligonucleotide
agggccuggaaagaaggaa

SEQ ID NO: 1722783 - RNA, 19 nt, Artificial Sequence
  Description of Artificial Sequence: Synthetic oligonucleotide
gcauggugagccugaaaac

SEQ ID NO: 1722784 - RNA, 19 nt, Artificial Sequence
  Description of Artificial Sequence: Synthetic oligonucleotide
gcguauucauacaauugac

SEQ ID NO: 1722785 - RNA, 19 nt, Artificial Sequence
  Description of Artificial Sequence: Synthetic oligonucleotide
gcauuuuaugcucuaugua

SEQ ID NO: 1722786 - RNA, 19 nt, Artificial Sequence
  Description of Artificial Sequence: Synthetic oligonucleotide
cauguagcucgacucucca

SEQ ID NO: 1722787 - RNA, 19 nt, Artificial Sequence
  Description of Artificial Sequence: Synthetic oligonucleotide
aaugugcccuugacuuuca

SEQ ID NO: 1722788 - RNA, 19 nt, Artificial Sequence
  Description of Artificial Sequence: Synthetic oligonucleotide
agauagccuguagguauca

SEQ ID NO: 1722789 - RNA, 19 nt, Artificial Sequence
  Description of Artificial Sequence: Synthetic oligonucleotide
ucauagcaaugugcccuug

SEQ ID NO: 1722790 - RNA, 19 nt, Artificial Sequence
  Description of Artificial Sequence: Synthetic oligonucleotide
ccauguagcucgacucucc

SEQ ID NO: 1722791 - RNA, 19 nt, Artificial Sequence
  Description of Artificial Sequence: Synthetic oligonucleotide
uggaagcaacaguuugauu

SEQ ID NO: 1722792 - RNA, 19 nt, Artificial Sequence
  Description of Artificial Sequence: Synthetic oligonucleotide
gguaucaucuggguauguc

SEQ ID NO: 1722793 - RNA, 19 nt, Artificial Sequence
  Description of Artificial Sequence: Synthetic oligonucleotide
uugcuacguucaucacuug

SEQ ID NO: 1722794 - RNA, 19 nt, Artificial Sequence
  Description of Artificial Sequence: Synthetic oligonucleotide
uggaggccgacuccccaau

SEQ ID NO: 1722795 - RNA, 19 nt, Artificial Sequence
  Description of Artificial Sequence: Synthetic oligonucleotide
aggcugugaccaaugauuu

SEQ ID NO: 1722796 - RNA, 19 nt, Artificial Sequence
  Description of Artificial Sequence: Synthetic oligonucleotide
auucccuaugagacccuug

SEQ ID NO: 1722797 - RNA, 19 nt, Artificial Sequence
  Description of Artificial Sequence: Synthetic oligonucleotide
cucgacucuccagugauua

SEQ ID NO: 1722798 - RNA, 19 nt, Artificial Sequence
  Description of Artificial Sequence: Synthetic oligonucleotide
caugcucuacugaaauagu

SEQ ID NO: 1722799 - RNA, 19 nt, Artificial Sequence
  Description of Artificial Sequence: Synthetic oligonucleotide
guaaucugcaggcuccauu

SEQ ID NO: 1722800 - RNA, 19 nt, Artificial Sequence
  Description of Artificial Sequence: Synthetic oligonucleotide
uuggugucuugugucccaa

SEQ ID NO: 1722801 - RNA, 19 nt, Artificial Sequence
  Description of Artificial Sequence: Synthetic oligonucleotide
ggcugugaccaaugauuug

SEQ ID NO: 1722802 - RNA, 19 nt, Artificial Sequence
  Description of Artificial Sequence: Synthetic oligonucleotide
auagucuaucugagcauuu

SEQ ID NO: 1722803 - RNA, 19 nt, Artificial Sequence
  Description of Artificial Sequence: Synthetic oligonucleotide
gucgauucguacauucccu

SEQ ID NO: 1722804 - RNA, 19 nt, Artificial Sequence
  Description of Artificial Sequence: Synthetic oligonucleotide
cuaauauaguugcuacguu

SEQ ID NO: 1722805 - RNA, 19 nt, Artificial Sequence
  Description of Artificial Sequence: Synthetic oligonucleotide
aggccgacuccccaaugua

SEQ ID NO: 1722806 - RNA, 19 nt, Artificial Sequence
  Description of Artificial Sequence: Synthetic oligonucleotide
gugucccaagaaggaacag

SEQ ID NO: 1722807 - RNA, 19 nt, Artificial Sequence
  Description of Artificial Sequence: Synthetic oligonucleotide
cuaccaagaauagacccau

SEQ ID NO: 1722808 - RNA, 19 nt, Artificial Sequence
  Description of Artificial Sequence: Synthetic oligonucleotide
aucccugcuuaaucacuua

SEQ ID NO: 1722809 - RNA, 19 nt, Artificial Sequence
  Description of Artificial Sequence: Synthetic oligonucleotide
gugcaucgauaagaacagc

SEQ ID NO: 1722810 - RNA, 19 nt, Artificial Sequence
  Description of Artificial Sequence: Synthetic oligonucleotide
guacgcuuuuaccaaugau

SEQ ID NO: 1722811 - RNA, 19 nt, Artificial Sequence
  Description of Artificial Sequence: Synthetic oligonucleotide
caaugauuugggaguugua

SEQ ID NO: 1722812 - RNA, 19 nt, Artificial Sequence
  Description of Artificial Sequence: Synthetic oligonucleotide
cauccccauagcacaggca

SEQ ID NO: 1722813 - RNA, 19 nt, Artificial Sequence
  Description of Artificial Sequence: Synthetic oligonucleotide
gcccagugcaucgauaaga

SEQ ID NO: 1722814 - RNA, 19 nt, Artificial Sequence
  Description of Artificial Sequence: Synthetic oligonucleotide
uuccggaucccugcuuaau

SEQ ID NO: 1722815 - RNA, 19 nt, Artificial Sequence
  Description of Artificial Sequence: Synthetic oligonucleotide
caaaugcccuugagacauc

SEQ ID NO: 1722816 - RNA, 19 nt, Artificial Sequence
  Description of Artificial Sequence: Synthetic oligonucleotide
uucuugcccuagggccugg

SEQ ID NO: 1722817 - RNA, 19 nt, Artificial Sequence
  Description of Artificial Sequence: Synthetic oligonucleotide
ccggcagucugagaaguag

SEQ ID NO: 1722818 - RNA, 19 nt, Artificial Sequence
  Description of Artificial Sequence: Synthetic oligonucleotide
guagucgagauagccugua

SEQ ID NO: 1722819 - RNA, 19 nt, Artificial Sequence
  Description of Artificial Sequence: Synthetic oligonucleotide
gaguuguaaucugcaggcu

SEQ ID NO: 1722820 - RNA, 19 nt, Artificial Sequence
  Description of Artificial Sequence: Synthetic oligonucleotide
ccggaucccugcuuaauca

SEQ ID NO: 1722821 - RNA, 19 nt, Artificial Sequence
  Description of Artificial Sequence: Synthetic oligonucleotide
cuggaagcaacaguuugau

SEQ ID NO: 1722822 - RNA, 19 nt, Artificial Sequence
  Description of Artificial Sequence: Synthetic oligonucleotide
ucauuccaguacgcuuuua

SEQ ID NO: 1722823 - RNA, 19 nt, Artificial Sequence
  Description of Artificial Sequence: Synthetic oligonucleotide
ccugcuuaaucacuuacau

SEQ ID NO: 1722824 - RNA, 19 nt, Artificial Sequence
  Description of Artificial Sequence: Synthetic oligonucleotide
guaggcguauucauacaau

SEQ ID NO: 1722825 - RNA, 19 nt, Artificial Sequence
  Description of Artificial Sequence: Synthetic oligonucleotide
cugcuuaaucacuuacauu

SEQ ID NO: 1722826 - RNA, 19 nt, Artificial Sequence
  Description of Artificial Sequence: Synthetic oligonucleotide
cagggaauaaagcccucau

SEQ ID NO: 1722827 - RNA, 19 nt, Artificial Sequence
  Description of Artificial Sequence: Synthetic oligonucleotide
cuggacugaagagaacuau

SEQ ID NO: 1722828 - RNA, 19 nt, Artificial Sequence
  Description of Artificial Sequence: Synthetic oligonucleotide
gugagccugaaaacuacau

SEQ ID NO: 1722829 - RNA, 19 nt, Artificial Sequence
  Description of Artificial Sequence: Synthetic oligonucleotide
augugcccuugacuuucaa

SEQ ID NO: 1722830 - RNA, 19 nt, Artificial Sequence
  Description of Artificial Sequence: Synthetic oligonucleotide
ccauaccauuucuuauuca

SEQ ID NO: 1722831 - RNA, 19 nt, Artificial Sequence
  Description of Artificial Sequence: Synthetic oligonucleotide
gaccaaugauuugggaguu

SEQ ID NO: 1722832 - RNA, 19 nt, Artificial Sequence
  Description of Artificial Sequence: Synthetic oligonucleotide
gcuuaaucacuuacauucu

SEQ ID NO: 1722833 - RNA, 19 nt, Artificial Sequence
  Description of Artificial Sequence: Synthetic oligonucleotide
cgagauagccuguagguau

SEQ ID NO: 1722834 - RNA, 19 nt, Artificial Sequence
  Description of Artificial Sequence: Synthetic oligonucleotide
guauacguuuaaacauuuu

SEQ ID NO: 1722835 - RNA, 19 nt, Artificial Sequence
  Description of Artificial Sequence: Synthetic oligonucleotide
cuugcccuagggccuggaa

SEQ ID NO: 1722836 - RNA, 19 nt, Artificial Sequence
  Description of Artificial Sequence: Synthetic oligonucleotide
cggaucccugcuuaaucac

SEQ ID NO: 1722837 - RNA, 19 nt, Artificial Sequence
  Description of Artificial Sequence: Synthetic oligonucleotide
gguauguccuggugaugua

SEQ ID NO: 1722838 - RNA, 19 nt, Artificial Sequence
  Description of Artificial Sequence: Synthetic oligonucleotide
ccaaugauuugggaguugu

SEQ ID NO: 1722839 - RNA, 19 nt, Artificial Sequence
  Description of Artificial Sequence: Synthetic oligonucleotide
cccuugacuuucaaaggcu

SEQ ID NO: 1722840 - RNA, 19 nt, Artificial Sequence
  Description of Artificial Sequence: Synthetic oligonucleotide
ggagacagucuuggauguc

SEQ ID NO: 1722841 - RNA, 19 nt, Artificial Sequence
  Description of Artificial Sequence: Synthetic oligonucleotide
caaugccggcagucugaga

SEQ ID NO: 1722842 - RNA, 19 nt, Artificial Sequence
  Description of Artificial Sequence: Synthetic oligonucleotide
gugggaugacacugucgau

SEQ ID NO: 1722843 - RNA, 19 nt, Artificial Sequence
  Description of Artificial Sequence: Synthetic oligonucleotide
gccgacuccccaauguagu

SEQ ID NO: 1722844 - RNA, 19 nt, Artificial Sequence
  Description of Artificial Sequence: Synthetic oligonucleotide
gcaaugugcccuugacuuu

SEQ ID NO: 1722845 - RNA, 19 nt, Artificial Sequence
  Description of Artificial Sequence: Synthetic oligonucleotide
gguuacucuuaaaguuaau

SEQ ID NO: 1722846 - RNA, 19 nt, Artificial Sequence
  Description of Artificial Sequence: Synthetic oligonucleotide
cauucccuaugagacccuu

SEQ ID NO: 1722847 - RNA, 19 nt, Artificial Sequence
  Description of Artificial Sequence: Synthetic oligonucleotide
ccaguacgcuuuuaccaau

SEQ ID NO: 1722848 - RNA, 19 nt, Artificial Sequence
  Description of Artificial Sequence: Synthetic oligonucleotide
cccucauaguaaguugaua

SEQ ID NO: 1722849 - RNA, 19 nt, Artificial Sequence
  Description of Artificial Sequence: Synthetic oligonucleotide
cccuagggccuggaaagaa

SEQ ID NO: 1722850 - RNA, 19 nt, Artificial Sequence
  Description of Artificial Sequence: Synthetic oligonucleotide
gcccucauaguaaguugau

SEQ ID NO: 1722851 - RNA, 19 nt, Artificial Sequence
  Description of Artificial Sequence: Synthetic oligonucleotide
cacugucgauucguacauu

SEQ ID NO: 1722852 - RNA, 19 nt, Artificial Sequence
  Description of Artificial Sequence: Synthetic oligonucleotide
gccggcagucugagaagua

SEQ ID NO: 1722853 - RNA, 19 nt, Artificial Sequence
  Description of Artificial Sequence: Synthetic oligonucleotide
gcucgacucuccagugauu

SEQ ID NO: 1722854 - RNA, 19 nt, Artificial Sequence
  Description of Artificial Sequence: Synthetic oligonucleotide
ccccaauguagugcacauu

SEQ ID NO: 1722855 - RNA, 19 nt, Artificial Sequence
  Description of Artificial Sequence: Synthetic oligonucleotide
ugagcgaauaaacagagag

SEQ ID NO: 1722856 - RNA, 19 nt, Artificial Sequence
  Description of Artificial Sequence: Synthetic oligonucleotide
uuagguaaucaaaggaacg

SEQ ID NO: 1722857 - RNA, 19 nt, Artificial Sequence
  Description of Artificial Sequence: Synthetic oligonucleotide
aucaauuugacuguccacc

SEQ ID NO: 1722858 - RNA, 19 nt, Artificial Sequence
  Description of Artificial Sequence: Synthetic oligonucleotide
auugugagcgaauaaacag

SEQ ID NO: 1722859 - RNA, 19 nt, Artificial Sequence
  Description of Artificial Sequence: Synthetic oligonucleotide
uaccccaucaauuugacug

SEQ ID NO: 1722860 - RNA, 19 nt, Artificial Sequence
  Description of Artificial Sequence: Synthetic oligonucleotide
agcgaauaaacagagagac

SEQ ID NO: 1722861 - RNA, 19 nt, Artificial Sequence
  Description of Artificial Sequence: Synthetic oligonucleotide
aagucccacaaugagaacc

SEQ ID NO: 1722862 - RNA, 19 nt, Artificial Sequence
  Description of Artificial Sequence: Synthetic oligonucleotide
aauauuaccccaucaauuu

SEQ ID NO: 1722863 - RNA, 19 nt, Artificial Sequence
  Description of Artificial Sequence: Synthetic oligonucleotide
acaaugagaaccauggccc

SEQ ID NO: 1722864 - RNA, 19 nt, Artificial Sequence
  Description of Artificial Sequence: Synthetic oligonucleotide
gaaaccuucaggcaguacc

SEQ ID NO: 1722865 - RNA, 19 nt, Artificial Sequence
  Description of Artificial Sequence: Synthetic oligonucleotide
aaugucgcuguguagcggg

SEQ ID NO: 1722866 - RNA, 19 nt, Artificial Sequence
  Description of Artificial Sequence: Synthetic oligonucleotide
ucaagucccacaaugagaa

SEQ ID NO: 1722867 - RNA, 19 nt, Artificial Sequence
  Description of Artificial Sequence: Synthetic oligonucleotide
agagacgcuaauauuaccc

SEQ ID NO: 1722868 - RNA, 19 nt, Artificial Sequence
  Description of Artificial Sequence: Synthetic oligonucleotide
cacaaugagaaccauggcc

SEQ ID NO: 1722869 - RNA, 19 nt, Artificial Sequence
  Description of Artificial Sequence: Synthetic oligonucleotide
aagggaagcacccucccuc

SEQ ID NO: 1722870 - RNA, 19 nt, Artificial Sequence
  Description of Artificial Sequence: Synthetic oligonucleotide
uuauugugagcgaauaaac

SEQ ID NO: 1722871 - RNA, 19 nt, Artificial Sequence
  Description of Artificial Sequence: Synthetic oligonucleotide
gaguguagaaguuucuaag

SEQ ID NO: 1722872 - RNA, 19 nt, Artificial Sequence
  Description of Artificial Sequence: Synthetic oligonucleotide
guagaaguuucuaaggagg

SEQ ID NO: 1722873 - RNA, 19 nt, Artificial Sequence
  Description of Artificial Sequence: Synthetic oligonucleotide
uauugugagcgaauaaaca

SEQ ID NO: 1722874 - RNA, 19 nt, Artificial Sequence
  Description of Artificial Sequence: Synthetic oligonucleotide
gauaccagcaggcugacga

SEQ ID NO: 1722875 - RNA, 19 nt, Artificial Sequence
  Description of Artificial Sequence: Synthetic oligonucleotide
uaauauuaccccaucaauu

SEQ ID NO: 1722876 - RNA, 19 nt, Artificial Sequence
  Description of Artificial Sequence: Synthetic oligonucleotide
cuuagguaaucaaaggaac

SEQ ID NO: 1722877 - RNA, 19 nt, Artificial Sequence
  Description of Artificial Sequence: Synthetic oligonucleotide
aguaagggcuuguagagug

SEQ ID NO: 1722878 - RNA, 19 nt, Artificial Sequence
  Description of Artificial Sequence: Synthetic oligonucleotide
ucgaugagacaguagcugg

SEQ ID NO: 1722879 - RNA, 19 nt, Artificial Sequence
  Description of Artificial Sequence: Synthetic oligonucleotide
cugucgaugagacaguagc

SEQ ID NO: 1722880 - RNA, 19 nt, Artificial Sequence
  Description of Artificial Sequence: Synthetic oligonucleotide
uaaucaaaggaacggagua

SEQ ID NO: 1722881 - RNA, 19 nt, Artificial Sequence
  Description of Artificial Sequence: Synthetic oligonucleotide
gaaguuucuaaggaggcgc

SEQ ID NO: 1722882 - RNA, 19 nt, Artificial Sequence
  Description of Artificial Sequence: Synthetic oligonucleotide
uugugagcgaauaaacaga

SEQ ID NO: 1722883 - RNA, 19 nt, Artificial Sequence
  Description of Artificial Sequence: Synthetic oligonucleotide
gagaaugucgcuguguagc

SEQ ID NO: 1722884 - RNA, 19 nt, Artificial Sequence
  Description of Artificial Sequence: Synthetic oligonucleotide
ucaauuugacuguccaccc

SEQ ID NO: 1722885 - RNA, 19 nt, Artificial Sequence
  Description of Artificial Sequence: Synthetic oligonucleotide
ugcuguuuacauucugggg

SEQ ID NO: 1722886 - RNA, 19 nt, Artificial Sequence
  Description of Artificial Sequence: Synthetic oligonucleotide
aagucgguaccuccucccc

SEQ ID NO: 1722887 - RNA, 19 nt, Artificial Sequence
  Description of Artificial Sequence: Synthetic oligonucleotide
aauuugacuguccacccuu

SEQ ID NO: 1722888 - RNA, 19 nt, Artificial Sequence
  Description of Artificial Sequence: Synthetic oligonucleotide
auuauugugagcgaauaaa

SEQ ID NO: 1722889 - RNA, 19 nt, Artificial Sequence
  Description of Artificial Sequence: Synthetic oligonucleotide
agaaugucgcuguguagcg

SEQ ID NO: 1722890 - RNA, 19 nt, Artificial Sequence
  Description of Artificial Sequence: Synthetic oligonucleotide
uagcgggaaaccuucaggc

SEQ ID NO: 1722891 - RNA, 19 nt, Artificial Sequence
  Description of Artificial Sequence: Synthetic oligonucleotide
gagacgcuaauauuacccc

SEQ ID NO: 1722892 - RNA, 19 nt, Artificial Sequence
  Description of Artificial Sequence: Synthetic oligonucleotide
uguauuauugugagcgaau

SEQ ID NO: 1722893 - RNA, 19 nt, Artificial Sequence
  Description of Artificial Sequence: Synthetic oligonucleotide
aaguuucuaaggaggcgcc

SEQ ID NO: 1722894 - RNA, 19 nt, Artificial Sequence
  Description of Artificial Sequence: Synthetic oligonucleotide
uauuauugugagcgaauaa

SEQ ID NO: 1722895 - RNA, 19 nt, Artificial Sequence
  Description of Artificial Sequence: Synthetic oligonucleotide
cacccuuagguaaucaaag

SEQ ID NO: 1722896 - RNA, 19 nt, Artificial Sequence
  Description of Artificial Sequence: Synthetic oligonucleotide
uccgcgaacccugacaggg

SEQ ID NO: 1722897 - RNA, 19 nt, Artificial Sequence
  Description of Artificial Sequence: Synthetic oligonucleotide
uguguagcgggaaaccuuc

SEQ ID NO: 1722898 - RNA, 19 nt, Artificial Sequence
  Description of Artificial Sequence: Synthetic oligonucleotide
cucagaguuccccaggaag

SEQ ID NO: 1722899 - RNA, 19 nt, Artificial Sequence
  Description of Artificial Sequence: Synthetic oligonucleotide
aauaaacagagagacgcua

SEQ ID NO: 1722900 - RNA, 19 nt, Artificial Sequence
  Description of Artificial Sequence: Synthetic oligonucleotide
guagcgggaaaccuucagg

SEQ ID NO: 1722901 - RNA, 19 nt, Artificial Sequence
  Description of Artificial Sequence: Synthetic oligonucleotide
acccuuagguaaucaaagg

SEQ ID NO: 1722902 - RNA, 19 nt, Artificial Sequence
  Description of Artificial Sequence: Synthetic oligonucleotide
uggaggaaugacacagucc

SEQ ID NO: 1722903 - RNA, 19 nt, Artificial Sequence
  Description of Artificial Sequence: Synthetic oligonucleotide
cgaauaaacagagagacgc

SEQ ID NO: 1722904 - RNA, 19 nt, Artificial Sequence
  Description of Artificial Sequence: Synthetic oligonucleotide
acacgggguagucacgggc

SEQ ID NO: 1722905 - RNA, 19 nt, Artificial Sequence
  Description of Artificial Sequence: Synthetic oligonucleotide
auauuaccccaucaauuug

SEQ ID NO: 1722906 - RNA, 19 nt, Artificial Sequence
  Description of Artificial Sequence: Synthetic oligonucleotide
uguagcgggaaaccuucag

SEQ ID NO: 1722907 - RNA, 19 nt, Artificial Sequence
  Description of Artificial Sequence: Synthetic oligonucleotide
acaauagcagccgcagccc

SEQ ID NO: 1722908 - RNA, 19 nt, Artificial Sequence
  Description of Artificial Sequence: Synthetic oligonucleotide
acauuccggauauugguca

SEQ ID NO: 1722909 - RNA, 19 nt, Artificial Sequence
  Description of Artificial Sequence: Synthetic oligonucleotide
cucaacucuuucuucaguc

SEQ ID NO: 1722910 - RNA, 19 nt, Artificial Sequence
  Description of Artificial Sequence: Synthetic oligonucleotide
ccuagcacgagauagcaag

SEQ ID NO: 1722911 - RNA, 19 nt, Artificial Sequence
  Description of Artificial Sequence: Synthetic oligonucleotide
uuuauuccgagagggcucc

SEQ ID NO: 1722912 - RNA, 19 nt, Artificial Sequence
  Description of Artificial Sequence: Synthetic oligonucleotide
ucuccgaugagcucagagu

SEQ ID NO: 1722913 - RNA, 19 nt, Artificial Sequence
  Description of Artificial Sequence: Synthetic oligonucleotide
ccguguauuauugugagcg

SEQ ID NO: 1722914 - RNA, 19 nt, Artificial Sequence
  Description of Artificial Sequence: Synthetic oligonucleotide
agaaguuucuaaggaggcg

SEQ ID NO: 1722915 - RNA, 19 nt, Artificial Sequence
  Description of Artificial Sequence: Synthetic oligonucleotide
ggaguaagggcuuguagag

SEQ ID NO: 1722916 - RNA, 19 nt, Artificial Sequence
  Description of Artificial Sequence: Synthetic oligonucleotide
gaaggcucuuuauuccgag

SEQ ID NO: 1722917 - RNA, 19 nt, Artificial Sequence
  Description of Artificial Sequence: Synthetic oligonucleotide
uacauuccggauauugguc

SEQ ID NO: 1722918 - RNA, 19 nt, Artificial Sequence
  Description of Artificial Sequence: Synthetic oligonucleotide
ucaacucuuucuucagucu

SEQ ID NO: 1722919 - RNA, 19 nt, Artificial Sequence
  Description of Artificial Sequence: Synthetic oligonucleotide
cucgccugguccuagcacg

SEQ ID NO: 1722920 - RNA, 19 nt, Artificial Sequence
  Description of Artificial Sequence: Synthetic oligonucleotide
cucccuuuccccaucuggg

SEQ ID NO: 1722921 - RNA, 19 nt, Artificial Sequence
  Description of Artificial Sequence: Synthetic oligonucleotide
agcacgagauagcaagcuc

SEQ ID NO: 1722922 - RNA, 19 nt, Artificial Sequence
  Description of Artificial Sequence: Synthetic oligonucleotide
aaucaaaggaacggaguaa

SEQ ID NO: 1722923 - RNA, 19 nt, Artificial Sequence
  Description of Artificial Sequence: Synthetic oligonucleotide
uaaacagagagacgcuaau

SEQ ID NO: 1722924 - RNA, 19 nt, Artificial Sequence
  Description of Artificial Sequence: Synthetic oligonucleotide
uuugacuguccacccuuag

SEQ ID NO: 1722925 - RNA, 19 nt, Artificial Sequence
  Description of Artificial Sequence: Synthetic oligonucleotide
ugucgaugagacaguagcu

SEQ ID NO: 1722926 - RNA, 19 nt, Artificial Sequence
  Description of Artificial Sequence: Synthetic oligonucleotide
agggucaacagccgaugcg

SEQ ID NO: 1722927 - RNA, 19 nt, Artificial Sequence
  Description of Artificial Sequence: Synthetic oligonucleotide
cuuuauuccgagagggcuc

SEQ ID NO: 1722928 - RNA, 19 nt, Artificial Sequence
  Description of Artificial Sequence: Synthetic oligonucleotide
agucucucuacauuccgga

SEQ ID NO: 1722929 - RNA, 19 nt, Artificial Sequence
  Description of Artificial Sequence: Synthetic oligonucleotide
cacgagauagcaagcucgg

SEQ ID NO: 1722930 - RNA, 19 nt, Artificial Sequence
  Description of Artificial Sequence: Synthetic oligonucleotide
agcagaccgagaaugucgc

SEQ ID NO: 1722931 - RNA, 19 nt, Artificial Sequence
  Description of Artificial Sequence: Synthetic oligonucleotide
uguagaguguguguggcaa

SEQ ID NO: 1722932 - RNA, 19 nt, Artificial Sequence
  Description of Artificial Sequence: Synthetic oligonucleotide
cagcguuccaacaacugug

SEQ ID NO: 1722933 - RNA, 19 nt, Artificial Sequence
  Description of Artificial Sequence: Synthetic oligonucleotide
gaagucgguaccuccuccc

SEQ ID NO: 1722934 - RNA, 19 nt, Artificial Sequence
  Description of Artificial Sequence: Synthetic oligonucleotide
ucggaugacagagcaauga

SEQ ID NO: 1722935 - RNA, 19 nt, Artificial Sequence
  Description of Artificial Sequence: Synthetic oligonucleotide
guuucuaaggaggcgccgg

SEQ ID NO: 1722936 - RNA, 19 nt, Artificial Sequence
  Description of Artificial Sequence: Synthetic oligonucleotide
cagagagacgcuaauauua

SEQ ID NO: 1722937 - RNA, 19 nt, Artificial Sequence
  Description of Artificial Sequence: Synthetic oligonucleotide
accagaguguagaaguuuc

SEQ ID NO: 1722938 - RNA, 19 nt, Artificial Sequence
  Description of Artificial Sequence: Synthetic oligonucleotide
gcucuuuauuccgagaggg

SEQ ID NO: 1722939 - RNA, 19 nt, Artificial Sequence
  Description of Artificial Sequence: Synthetic oligonucleotide
gguaaucaaaggaacggag

SEQ ID NO: 1722940 - RNA, 19 nt, Artificial Sequence
  Description of Artificial Sequence: Synthetic oligonucleotide
guggagcaacagcagaccg

SEQ ID NO: 1722941 - RNA, 19 nt, Artificial Sequence
  Description of Artificial Sequence: Synthetic oligonucleotide
ccggauauuggucagcucc

SEQ ID NO: 1722942 - RNA, 19 nt, Artificial Sequence
  Description of Artificial Sequence: Synthetic oligonucleotide
ucccacaaugagaaccaug

SEQ ID NO: 1722943 - RNA, 19 nt, Artificial Sequence
  Description of Artificial Sequence: Synthetic oligonucleotide
cucagaggugcccuccucg

SEQ ID NO: 1722944 - RNA, 19 nt, Artificial Sequence
  Description of Artificial Sequence: Synthetic oligonucleotide
uggagcaacagcagaccga

SEQ ID NO: 1722945 - RNA, 19 nt, Artificial Sequence
  Description of Artificial Sequence: Synthetic oligonucleotide
agacgcuaauauuacccca

SEQ ID NO: 1722946 - RNA, 19 nt, Artificial Sequence
  Description of Artificial Sequence: Synthetic oligonucleotide
aguacccuagggcccagag

SEQ ID NO: 1722947 - RNA, 19 nt, Artificial Sequence
  Description of Artificial Sequence: Synthetic oligonucleotide
auuaccccaucaauuugac

SEQ ID NO: 1722948 - RNA, 19 nt, Artificial Sequence
  Description of Artificial Sequence: Synthetic oligonucleotide
gucgaugagacaguagcug

SEQ ID NO: 1722949 - RNA, 19 nt, Artificial Sequence
  Description of Artificial Sequence: Synthetic oligonucleotide
cagucucucuacauuccgg

SEQ ID NO: 1722950 - RNA, 19 nt, Artificial Sequence
  Description of Artificial Sequence: Synthetic oligonucleotide
ucaacagccgaugcgggac

SEQ ID NO: 1722951 - RNA, 19 nt, Artificial Sequence
  Description of Artificial Sequence: Synthetic oligonucleotide
cagcaucaacaauagcagc

SEQ ID NO: 1722952 - RNA, 19 nt, Artificial Sequence
  Description of Artificial Sequence: Synthetic oligonucleotide
agaccgagaaugucgcugu

SEQ ID NO: 1722953 - RNA, 19 nt, Artificial Sequence
  Description of Artificial Sequence: Synthetic oligonucleotide
aaggcucuuuauuccgaga

SEQ ID NO: 1722954 - RNA, 19 nt, Artificial Sequence
  Description of Artificial Sequence: Synthetic oligonucleotide
cugacgaaggccgugccag

SEQ ID NO: 1722955 - RNA, 19 nt, Artificial Sequence
  Description of Artificial Sequence: Synthetic oligonucleotide
agaggguccggggaagucg

SEQ ID NO: 1722956 - RNA, 19 nt, Artificial Sequence
  Description of Artificial Sequence: Synthetic oligonucleotide
acgcuaauauuaccccauc

SEQ ID NO: 1722957 - RNA, 19 nt, Artificial Sequence
  Description of Artificial Sequence: Synthetic oligonucleotide
ucgggcucugaggagacag

SEQ ID NO: 1722958 - RNA, 19 nt, Artificial Sequence
  Description of Artificial Sequence: Synthetic oligonucleotide
aagaggcagcgucucagau

SEQ ID NO: 1722959 - RNA, 19 nt, Artificial Sequence
  Description of Artificial Sequence: Synthetic oligonucleotide
gucuccgaugagcucagag

SEQ ID NO: 1722960 - RNA, 19 nt, Artificial Sequence
  Description of Artificial Sequence: Synthetic oligonucleotide
uaagggcuuguagagugug

SEQ ID NO: 1722961 - RNA, 19 nt, Artificial Sequence
  Description of Artificial Sequence: Synthetic oligonucleotide
gcgucucagauccaagugg

SEQ ID NO: 1722962 - RNA, 19 nt, Artificial Sequence
  Description of Artificial Sequence: Synthetic oligonucleotide
gcuaauauuaccccaucaa

SEQ ID NO: 1722963 - RNA, 19 nt, Artificial Sequence
  Description of Artificial Sequence: Synthetic oligonucleotide
guacacgggguagucacgg

SEQ ID NO: 1722964 - RNA, 19 nt, Artificial Sequence
  Description of Artificial Sequence: Synthetic oligonucleotide
aaacagagagacgcuaaua

SEQ ID NO: 1722965 - RNA, 19 nt, Artificial Sequence
  Description of Artificial Sequence: Synthetic oligonucleotide
caucaacaauagcagccgc

SEQ ID NO: 1722966 - RNA, 19 nt, Artificial Sequence
  Description of Artificial Sequence: Synthetic oligonucleotide
gggaaggcucuuuauuccg

SEQ ID NO: 1722967 - RNA, 19 nt, Artificial Sequence
  Description of Artificial Sequence: Synthetic oligonucleotide
gcacgagauagcaagcucg

SEQ ID NO: 1722968 - RNA, 19 nt, Artificial Sequence
  Description of Artificial Sequence: Synthetic oligonucleotide
gugaggcagguacacgggg

SEQ ID NO: 1722969 - RNA, 19 nt, Artificial Sequence
  Description of Artificial Sequence: Synthetic oligonucleotide
acagagagacgcuaauauu

SEQ ID NO: 1722970 - RNA, 19 nt, Artificial Sequence
  Description of Artificial Sequence: Synthetic oligonucleotide
uucuaaggaggcgccggcg

SEQ ID NO: 1722971 - RNA, 19 nt, Artificial Sequence
  Description of Artificial Sequence: Synthetic oligonucleotide
gcaucaacaauagcagccg

SEQ ID NO: 1722972 - RNA, 19 nt, Artificial Sequence
  Description of Artificial Sequence: Synthetic oligonucleotide
cauuccggauauuggucag

SEQ ID NO: 1722973 - RNA, 19 nt, Artificial Sequence
  Description of Artificial Sequence: Synthetic oligonucleotide
acgaaggccgugccagugg

SEQ ID NO: 1722974 - RNA, 19 nt, Artificial Sequence
  Description of Artificial Sequence: Synthetic oligonucleotide
gaaugucgcuguguagcgg

SEQ ID NO: 1722975 - RNA, 19 nt, Artificial Sequence
  Description of Artificial Sequence: Synthetic oligonucleotide
aguuucuaaggaggcgccg

SEQ ID NO: 1722976 - RNA, 19 nt, Artificial Sequence
  Description of Artificial Sequence: Synthetic oligonucleotide
gaggcagacaggcccggag

SEQ ID NO: 1722977 - RNA, 19 nt, Artificial Sequence
  Description of Artificial Sequence: Synthetic oligonucleotide
agcguuccaacaacugugg

SEQ ID NO: 1722978 - RNA, 19 nt, Artificial Sequence
  Description of Artificial Sequence: Synthetic oligonucleotide
uucucuguaggcccugguu

SEQ ID NO: 1722979 - RNA, 19 nt, Artificial Sequence
  Description of Artificial Sequence: Synthetic oligonucleotide
aacagcagaccgagaaugu

SEQ ID NO: 1722980 - RNA, 19 nt, Artificial Sequence
  Description of Artificial Sequence: Synthetic oligonucleotide
gggucaacagccgaugcgg

SEQ ID NO: 1722981 - RNA, 19 nt, Artificial Sequence
  Description of Artificial Sequence: Synthetic oligonucleotide
guacccuagggcccagagg

SEQ ID NO: 1722982 - RNA, 19 nt, Artificial Sequence
  Description of Artificial Sequence: Synthetic oligonucleotide
gagggucaacagccgaugc

SEQ ID NO: 1722983 - RNA, 19 nt, Artificial Sequence
  Description of Artificial Sequence: Synthetic oligonucleotide
aaggccgugccaguggccu

SEQ ID NO: 1722984 - RNA, 19 nt, Artificial Sequence
  Description of Artificial Sequence: Synthetic oligonucleotide
aaacaccaugugcagcauu

SEQ ID NO: 1722985 - RNA, 19 nt, Artificial Sequence
  Description of Artificial Sequence: Synthetic oligonucleotide
caugugcagcauucuuucc

SEQ ID NO: 1722986 - RNA, 19 nt, Artificial Sequence
  Description of Artificial Sequence: Synthetic oligonucleotide
cuaauauuaccccaucaau

SEQ ID NO: 1722987 - RNA, 19 nt, Artificial Sequence
  Description of Artificial Sequence: Synthetic oligonucleotide
uccacccuuagguaaucaa

SEQ ID NO: 1722988 - RNA, 19 nt, Artificial Sequence
  Description of Artificial Sequence: Synthetic oligonucleotide
gacagagcaaugaggguga

SEQ ID NO: 1722989 - RNA, 19 nt, Artificial Sequence
  Description of Artificial Sequence: Synthetic oligonucleotide
cauggccccaaacaccaug

SEQ ID NO: 1722990 - RNA, 19 nt, Artificial Sequence
  Description of Artificial Sequence: Synthetic oligonucleotide
cgagauagcaagcucgggg

SEQ ID NO: 1722991 - RNA, 19 nt, Artificial Sequence
  Description of Artificial Sequence: Synthetic oligonucleotide
uuccggauauuggucagcu

SEQ ID NO: 1722992 - RNA, 19 nt, Artificial Sequence
  Description of Artificial Sequence: Synthetic oligonucleotide
agcacggcuucaggcaugc

SEQ ID NO: 1722993 - RNA, 19 nt, Artificial Sequence
  Description of Artificial Sequence: Synthetic oligonucleotide
gaaggaccccucuggagga

SEQ ID NO: 1722994 - RNA, 19 nt, Artificial Sequence
  Description of Artificial Sequence: Synthetic oligonucleotide
ggccguguauuauugugag

SEQ ID NO: 1722995 - RNA, 19 nt, Artificial Sequence
  Description of Artificial Sequence: Synthetic oligonucleotide
aacagccgaugcgggaccg

SEQ ID NO: 1722996 - RNA, 19 nt, Artificial Sequence
  Description of Artificial Sequence: Synthetic oligonucleotide
aggagcgugagggucaaca

SEQ ID NO: 1722997 - RNA, 19 nt, Artificial Sequence
  Description of Artificial Sequence: Synthetic oligonucleotide
agcucagaguuccccagga

SEQ ID NO: 1722998 - RNA, 19 nt, Artificial Sequence
  Description of Artificial Sequence: Synthetic oligonucleotide
uacacgggguagucacggg

SEQ ID NO: 1722999 - RNA, 19 nt, Artificial Sequence
  Description of Artificial Sequence: Synthetic oligonucleotide
cuacauuccggauauuggu

SEQ ID NO: 1723000 - RNA, 19 nt, Artificial Sequence
  Description of Artificial Sequence: Synthetic oligonucleotide
cagaccgagaaugucgcug

SEQ ID NO: 1723001 - RNA, 19 nt, Artificial Sequence
  Description of Artificial Sequence: Synthetic oligonucleotide
uccaacaacugugggucca

SEQ ID NO: 1723002 - RNA, 19 nt, Artificial Sequence
  Description of Artificial Sequence: Synthetic oligonucleotide
uagcacgagauagcaagcu

SEQ ID NO: 1723003 - RNA, 19 nt, Artificial Sequence
  Description of Artificial Sequence: Synthetic oligonucleotide
agcgggaaaccuucaggca

SEQ ID NO: 1723004 - RNA, 19 nt, Artificial Sequence
  Description of Artificial Sequence: Synthetic oligonucleotide
ggggaaggcucuuuauucc

SEQ ID NO: 1723005 - RNA, 19 nt, Artificial Sequence
  Description of Artificial Sequence: Synthetic oligonucleotide
cuucaggcaugcccaggcg

SEQ ID NO: 1723006 - RNA, 19 nt, Artificial Sequence
  Description of Artificial Sequence: Synthetic oligonucleotide
aggcugacgaaggccgugc

SEQ ID NO: 1723007 - RNA, 19 nt, Artificial Sequence
  Description of Artificial Sequence: Synthetic oligonucleotide
agaggugcccuccucggau

SEQ ID NO: 1723008 - RNA, 19 nt, Artificial Sequence
  Description of Artificial Sequence: Synthetic oligonucleotide
gaggguccggggaagucgg

SEQ ID NO: 1723009 - RNA, 19 nt, Artificial Sequence
  Description of Artificial Sequence: Synthetic oligonucleotide
acagaggggagaggguccg

SEQ ID NO: 1723010 - RNA, 19 nt, Artificial Sequence
  Description of Artificial Sequence: Synthetic oligonucleotide
uggcccucaacucuuucuu

SEQ ID NO: 1723011 - RNA, 19 nt, Artificial Sequence
  Description of Artificial Sequence: Synthetic oligonucleotide
ccuuagguaaucaaaggaa

SEQ ID NO: 1723012 - RNA, 19 nt, Artificial Sequence
  Description of Artificial Sequence: Synthetic oligonucleotide
uuaccccaucaauuugacu

SEQ ID NO: 1723013 - RNA, 19 nt, Artificial Sequence
  Description of Artificial Sequence: Synthetic oligonucleotide
cugaggagacagcaucaac

SEQ ID NO: 1723014 - RNA, 19 nt, Artificial Sequence
  Description of Artificial Sequence: Synthetic oligonucleotide
guauuauugugagcgaaua

SEQ ID NO: 1723015 - RNA, 19 nt, Artificial Sequence
  Description of Artificial Sequence: Synthetic oligonucleotide
caaguggagcaacagcaga

SEQ ID NO: 1723016 - RNA, 19 nt, Artificial Sequence
  Description of Artificial Sequence: Synthetic oligonucleotide
guaaucaaaggaacggagu

SEQ ID NO: 1723017 - RNA, 19 nt, Artificial Sequence
  Description of Artificial Sequence: Synthetic oligonucleotide
ggcagacaggcccggaggg

SEQ ID NO: 1723018 - RNA, 19 nt, Artificial Sequence
  Description of Artificial Sequence: Synthetic oligonucleotide
gcucccgugaggcagguac

SEQ ID NO: 1723019 - RNA, 19 nt, Artificial Sequence
  Description of Artificial Sequence: Synthetic oligonucleotide
ucacgggcagccuguggug

SEQ ID NO: 1723020 - RNA, 19 nt, Artificial Sequence
  Description of Artificial Sequence: Synthetic oligonucleotide
accaaccgccaucccucgc

SEQ ID NO: 1723021 - RNA, 19 nt, Artificial Sequence
  Description of Artificial Sequence: Synthetic oligonucleotide
agucgguaccuccuccccu

SEQ ID NO: 1723022 - RNA, 19 nt, Artificial Sequence
  Description of Artificial Sequence: Synthetic oligonucleotide
caccacucggccugauacc

SEQ ID NO: 1723023 - RNA, 19 nt, Artificial Sequence
  Description of Artificial Sequence: Synthetic oligonucleotide
uguguguggcaaggcuccg

SEQ ID NO: 1723024 - RNA, 19 nt, Artificial Sequence
  Description of Artificial Sequence: Synthetic oligonucleotide
ggggccguguauuauugug

SEQ ID NO: 1723025 - RNA, 19 nt, Artificial Sequence
  Description of Artificial Sequence: Synthetic oligonucleotide
uccuagcacgagauagcaa

SEQ ID NO: 1723026 - RNA, 19 nt, Artificial Sequence
  Description of Artificial Sequence: Synthetic oligonucleotide
guagcuggcccucaacucu

SEQ ID NO: 1723027 - RNA, 19 nt, Artificial Sequence
  Description of Artificial Sequence: Synthetic oligonucleotide
gagaagugugugguggcca

SEQ ID NO: 1723028 - RNA, 19 nt, Artificial Sequence
  Description of Artificial Sequence: Synthetic oligonucleotide
guguauuauugugagcgaa

SEQ ID NO: 1723029 - RNA, 19 nt, Artificial Sequence
  Description of Artificial Sequence: Synthetic oligonucleotide
cagacaggcccggaggggc

SEQ ID NO: 1723030 - RNA, 19 nt, Artificial Sequence
  Description of Artificial Sequence: Synthetic oligonucleotide
accacucggccugauacca

SEQ ID NO: 1723031 - RNA, 19 nt, Artificial Sequence
  Description of Artificial Sequence: Synthetic oligonucleotide
cucggaugacagagcaaug

SEQ ID NO: 1723032 - RNA, 19 nt, Artificial Sequence
  Description of Artificial Sequence: Synthetic oligonucleotide
gaauaaacagagagacgcu

SEQ ID NO: 1723033 - RNA, 19 nt, Artificial Sequence
  Description of Artificial Sequence: Synthetic oligonucleotide
acgagauagcaagcucggg

SEQ ID NO: 1723034 - RNA, 19 nt, Artificial Sequence
  Description of Artificial Sequence: Synthetic oligonucleotide
gcgaauaaacagagagacg

SEQ ID NO: 1723035 - RNA, 19 nt, Artificial Sequence
  Description of Artificial Sequence: Synthetic oligonucleotide
gacgaaggccgugccagug

SEQ ID NO: 1723036 - RNA, 19 nt, Artificial Sequence
  Description of Artificial Sequence: Synthetic oligonucleotide
ggaagucgguaccuccucc

SEQ ID NO: 1723037 - RNA, 19 nt, Artificial Sequence
  Description of Artificial Sequence: Synthetic oligonucleotide
caggucuccgaugagcuca

SEQ ID NO: 1723038 - RNA, 19 nt, Artificial Sequence
  Description of Artificial Sequence: Synthetic oligonucleotide
caacagccgaugcgggacc

SEQ ID NO: 1723039 - RNA, 19 nt, Artificial Sequence
  Description of Artificial Sequence: Synthetic oligonucleotide
ucgccugguccuagcacga

SEQ ID NO: 1723040 - RNA, 19 nt, Artificial Sequence
  Description of Artificial Sequence: Synthetic oligonucleotide
ccucccuuuccccaucugg

SEQ ID NO: 1723041 - RNA, 19 nt, Artificial Sequence
  Description of Artificial Sequence: Synthetic oligonucleotide
ugauaccagcaggcugacg

SEQ ID NO: 1723042 - RNA, 19 nt, Artificial Sequence
  Description of Artificial Sequence: Synthetic oligonucleotide
ggucaggucuccgaugagc

SEQ ID NO: 1723043 - RNA, 19 nt, Artificial Sequence
  Description of Artificial Sequence: Synthetic oligonucleotide
gucgguaccuccuccccuc

SEQ ID NO: 1723044 - RNA, 19 nt, Artificial Sequence
  Description of Artificial Sequence: Synthetic oligonucleotide
ccgaugagcucagaguucc

SEQ ID NO: 1723045 - RNA, 19 nt, Artificial Sequence
  Description of Artificial Sequence: Synthetic oligonucleotide
auggccccaaacaccaugu

SEQ ID NO: 1723046 - RNA, 19 nt, Artificial Sequence
  Description of Artificial Sequence: Synthetic oligonucleotide
cacgggguagucacgggca

SEQ ID NO: 1723047 - RNA, 19 nt, Artificial Sequence
  Description of Artificial Sequence: Synthetic oligonucleotide
ucgcuguguagcgggaaac

SEQ ID NO: 1723048 - RNA, 19 nt, Artificial Sequence
  Description of Artificial Sequence: Synthetic oligonucleotide
ucgguaccuccuccccucc

SEQ ID NO: 1723049 - RNA, 19 nt, Artificial Sequence
  Description of Artificial Sequence: Synthetic oligonucleotide
guccuagcacgagauagca

SEQ ID NO: 1723050 - RNA, 19 nt, Artificial Sequence
  Description of Artificial Sequence: Synthetic oligonucleotide
caccaaccgccaucccucg

SEQ ID NO: 1723051 - RNA, 19 nt, Artificial Sequence
  Description of Artificial Sequence: Synthetic oligonucleotide
augagaaccauggccccaa

SEQ ID NO: 1723052 - RNA, 19 nt, Artificial Sequence
  Description of Artificial Sequence: Synthetic oligonucleotide
ccuccgcgaacccugacag

SEQ ID NO: 1723053 - RNA, 19 nt, Artificial Sequence
  Description of Artificial Sequence: Synthetic oligonucleotide
gucacgggcagccuguggu

SEQ ID NO: 1723054 - RNA, 19 nt, Artificial Sequence
  Description of Artificial Sequence: Synthetic oligonucleotide
gacgcuaauauuaccccau

SEQ ID NO: 1723055 - RNA, 19 nt, Artificial Sequence
  Description of Artificial Sequence: Synthetic oligonucleotide
gccgaugcgggaccguggg

SEQ ID NO: 1723056 - RNA, 19 nt, Artificial Sequence
  Description of Artificial Sequence: Synthetic oligonucleotide
gguccuagcacgagauagc

SEQ ID NO: 1723057 - RNA, 19 nt, Artificial Sequence
  Description of Artificial Sequence: Synthetic oligonucleotide
gaggcagguacacggggua

SEQ ID NO: 1723058 - RNA, 19 nt, Artificial Sequence
  Description of Artificial Sequence: Synthetic oligonucleotide
guuccccaggaagcugucg

SEQ ID NO: 1723059 - RNA, 19 nt, Artificial Sequence
  Description of Artificial Sequence: Synthetic oligonucleotide
gaccgagaaugucgcugug

SEQ ID NO: 1723060 - RNA, 19 nt, Artificial Sequence
  Description of Artificial Sequence: Synthetic oligonucleotide
ccaaccgccaucccucgcc

SEQ ID NO: 1723061 - RNA, 19 nt, Artificial Sequence
  Description of Artificial Sequence: Synthetic oligonucleotide
guccggggaagucgguacc

SEQ ID NO: 1723062 - RNA, 19 nt, Artificial Sequence
  Description of Artificial Sequence: Synthetic oligonucleotide
ugacgaaggccgugccagu

SEQ ID NO: 1723063 - RNA, 19 nt, Artificial Sequence
  Description of Artificial Sequence: Synthetic oligonucleotide
uggggccguguauuauugu

SEQ ID NO: 1723064 - RNA, 19 nt, Artificial Sequence
  Description of Artificial Sequence: Synthetic oligonucleotide
gggguagucacgggcagcc

SEQ ID NO: 1723065 - RNA, 19 nt, Artificial Sequence
  Description of Artificial Sequence: Synthetic oligonucleotide
accguggggcucccgugag

SEQ ID NO: 1723066 - RNA, 19 nt, Artificial Sequence
  Description of Artificial Sequence: Synthetic oligonucleotide
gaccguggggcucccguga

SEQ ID NO: 1723067 - RNA, 19 nt, Artificial Sequence
  Description of Artificial Sequence: Synthetic oligonucleotide
guggccuccgcgaacccug

SEQ ID NO: 1723068 - RNA, 19 nt, Artificial Sequence
  Description of Artificial Sequence: Synthetic oligonucleotide
ucccgugaggcagguacac

SEQ ID NO: 1723069 - RNA, 19 nt, Artificial Sequence
  Description of Artificial Sequence: Synthetic oligonucleotide
gguccggggaagucgguac

SEQ ID NO: 1723070 - RNA, 19 nt, Artificial Sequence
  Description of Artificial Sequence: Synthetic oligonucleotide
cuccgcgaacccugacagg

SEQ ID NO: 1723071 - RNA, 19 nt, Artificial Sequence
  Description of Artificial Sequence: Synthetic oligonucleotide
aggcagguacacgggguag

SEQ ID NO: 1723072 - RNA, 19 nt, Artificial Sequence
  Description of Artificial Sequence: Synthetic oligonucleotide
uccggggaagucgguaccu

SEQ ID NO: 1723073 - RNA, 19 nt, Artificial Sequence
  Description of Artificial Sequence: Synthetic oligonucleotide
uccggauauuggucagcuc

SEQ ID NO: 1723074 - RNA, 19 nt, Artificial Sequence
  Description of Artificial Sequence: Synthetic oligonucleotide
cuccgaugagcucagaguu

SEQ ID NO: 1723075 - RNA, 19 nt, Artificial Sequence
  Description of Artificial Sequence: Synthetic oligonucleotide
ggucaacagccgaugcggg

SEQ ID NO: 1723076 - RNA, 19 nt, Artificial Sequence
  Description of Artificial Sequence: Synthetic oligonucleotide
agccaccaaccgccauccc

SEQ ID NO: 1723077 - RNA, 19 nt, Artificial Sequence
  Description of Artificial Sequence: Synthetic oligonucleotide
aggcuccgcagcccauggg

SEQ ID NO: 1723078 - RNA, 19 nt, Artificial Sequence
  Description of Artificial Sequence: Synthetic oligonucleotide
gguacacgggguagucacg

SEQ ID NO: 1723079 - RNA, 19 nt, Artificial Sequence
  Description of Artificial Sequence: Synthetic oligonucleotide
acaccaugugcagcauucu

SEQ ID NO: 1723080 - RNA, 19 nt, Artificial Sequence
  Description of Artificial Sequence: Synthetic oligonucleotide
cggaguaagggcuuguaga

SEQ ID NO: 1723081 - RNA, 19 nt, Artificial Sequence
  Description of Artificial Sequence: Synthetic oligonucleotide
ccgagagggcuccacagug

SEQ ID NO: 1723082 - RNA, 19 nt, Artificial Sequence
  Description of Artificial Sequence: Synthetic oligonucleotide
cagaguguagaaguuucua

SEQ ID NO: 1723083 - RNA, 19 nt, Artificial Sequence
  Description of Artificial Sequence: Synthetic oligonucleotide
caguagcuggcccucaacu

SEQ ID NO: 1723084 - RNA, 19 nt, Artificial Sequence
  Description of Artificial Sequence: Synthetic oligonucleotide
aguuccccaggaagcuguc

SEQ ID NO: 1723085 - RNA, 19 nt, Artificial Sequence
  Description of Artificial Sequence: Synthetic oligonucleotide
ugucgcuguguagcgggaa

SEQ ID NO: 1723086 - RNA, 19 nt, Artificial Sequence
  Description of Artificial Sequence: Synthetic oligonucleotide
gucgcuguguagcgggaaa

SEQ ID NO: 1723087 - RNA, 19 nt, Artificial Sequence
  Description of Artificial Sequence: Synthetic oligonucleotide
caaggcuccgcagcccaug

SEQ ID NO: 1723088 - RNA, 19 nt, Artificial Sequence
  Description of Artificial Sequence: Synthetic oligonucleotide
cacugggucaggucuccga

SEQ ID NO: 1723089 - RNA, 19 nt, Artificial Sequence
  Description of Artificial Sequence: Synthetic oligonucleotide
aggcaugcccaggcgccac

SEQ ID NO: 1723090 - RNA, 19 nt, Artificial Sequence
  Description of Artificial Sequence: Synthetic oligonucleotide
uguccacccuuagguaauc

SEQ ID NO: 1723091 - RNA, 19 nt, Artificial Sequence
  Description of Artificial Sequence: Synthetic oligonucleotide
aguggccuccgcgaacccu

SEQ ID NO: 1723092 - RNA, 19 nt, Artificial Sequence
  Description of Artificial Sequence: Synthetic oligonucleotide
gccguguauuauugugagc

SEQ ID NO: 1723093 - RNA, 19 nt, Artificial Sequence
  Description of Artificial Sequence: Synthetic oligonucleotide
ggaacggaguaagggcuug

SEQ ID NO: 1723094 - RNA, 19 nt, Artificial Sequence
  Description of Artificial Sequence: Synthetic oligonucleotide
agagggcuccacagugaag

SEQ ID NO: 1723095 - RNA, 19 nt, Artificial Sequence
  Description of Artificial Sequence: Synthetic oligonucleotide
gaguaagggcuuguagagu

SEQ ID NO: 1723096 - RNA, 19 nt, Artificial Sequence
  Description of Artificial Sequence: Synthetic oligonucleotide
augacacaguccacacacu

SEQ ID NO: 1723097 - RNA, 19 nt, Artificial Sequence
  Description of Artificial Sequence: Synthetic oligonucleotide
guguguggcaaggcuccgc

SEQ ID NO: 1723098 - RNA, 19 nt, Artificial Sequence
  Description of Artificial Sequence: Synthetic oligonucleotide
cgugaggcagguacacggg

SEQ ID NO: 1723099 - RNA, 19 nt, Artificial Sequence
  Description of Artificial Sequence: Synthetic oligonucleotide
gugagcgaauaaacagaga

SEQ ID NO: 1723100 - RNA, 19 nt, Artificial Sequence
  Description of Artificial Sequence: Synthetic oligonucleotide
acacugggucaggucuccg

SEQ ID NO: 1723101 - RNA, 19 nt, Artificial Sequence
  Description of Artificial Sequence: Synthetic oligonucleotide
auuugacuguccacccuua

SEQ ID NO: 1723102 - RNA, 19 nt, Artificial Sequence
  Description of Artificial Sequence: Synthetic oligonucleotide
caauuugacuguccacccu

SEQ ID NO: 1723103 - RNA, 19 nt, Artificial Sequence
  Description of Artificial Sequence: Synthetic oligonucleotide
uugucgcccucccucccuu

SEQ ID NO: 1723104 - RNA, 19 nt, Artificial Sequence
  Description of Artificial Sequence: Synthetic oligonucleotide
gaugcgggaccguggggcu

SEQ ID NO: 1723105 - RNA, 19 nt, Artificial Sequence
  Description of Artificial Sequence: Synthetic oligonucleotide
gcugucgaugagacaguag

SEQ ID NO: 1723106 - RNA, 19 nt, Artificial Sequence
  Description of Artificial Sequence: Synthetic oligonucleotide
ggguuuccugcaugaagga

SEQ ID NO: 1723107 - RNA, 19 nt, Artificial Sequence
  Description of Artificial Sequence: Synthetic oligonucleotide
cugauaccagcaggcugac

SEQ ID NO: 1723108 - RNA, 19 nt, Artificial Sequence
  Description of Artificial Sequence: Synthetic oligonucleotide
ccaguggccuccgcgaacc

SEQ ID NO: 1723109 - RNA, 19 nt, Artificial Sequence
  Description of Artificial Sequence: Synthetic oligonucleotide
ucccucgccugguccuagc

SEQ ID NO: 1723110 - RNA, 19 nt, Artificial Sequence
  Description of Artificial Sequence: Synthetic oligonucleotide
uagucacgggcagccugug

SEQ ID NO: 1723111 - RNA, 19 nt, Artificial Sequence
  Description of Artificial Sequence: Synthetic oligonucleotide
aggucuccgaugagcucag

SEQ ID NO: 1723112 - RNA, 19 nt, Artificial Sequence
  Description of Artificial Sequence: Synthetic oligonucleotide
ccacccuuagguaaucaaa

SEQ ID NO: 1723113 - RNA, 19 nt, Artificial Sequence
  Description of Artificial Sequence: Synthetic oligonucleotide
agcugucgaugagacagua

SEQ ID NO: 1723114 - RNA, 19 nt, Artificial Sequence
  Description of Artificial Sequence: Synthetic oligonucleotide
ccaccagcguuccaacaac

SEQ ID NO: 1723115 - RNA, 19 nt, Artificial Sequence
  Description of Artificial Sequence: Synthetic oligonucleotide
uuauuccgagagggcucca

SEQ ID NO: 1723116 - RNA, 19 nt, Artificial Sequence
  Description of Artificial Sequence: Synthetic oligonucleotide
ggaaggcucuuuauuccga

SEQ ID NO: 1723117 - RNA, 19 nt, Artificial Sequence
  Description of Artificial Sequence: Synthetic oligonucleotide
uggccuccgcgaacccuga

SEQ ID NO: 1723118 - RNA, 19 nt, Artificial Sequence
  Description of Artificial Sequence: Synthetic oligonucleotide
gggaagucgguaccuccuc

SEQ ID NO: 1723119 - RNA, 19 nt, Artificial Sequence
  Description of Artificial Sequence: Synthetic oligonucleotide
caggcugacgaaggccgug

SEQ ID NO: 1723120 - RNA, 19 nt, Artificial Sequence
  Description of Artificial Sequence: Synthetic oligonucleotide
gggccguguauuauuguga

SEQ ID NO: 1723121 - RNA, 19 nt, Artificial Sequence
  Description of Artificial Sequence: Synthetic oligonucleotide
cucccgugaggcagguaca

SEQ ID NO: 1723122 - RNA, 19 nt, Artificial Sequence
  Description of Artificial Sequence: Synthetic oligonucleotide
aggaacggaguaagggcuu

SEQ ID NO: 1723123 - RNA, 19 nt, Artificial Sequence
  Description of Artificial Sequence: Synthetic oligonucleotide
agacaguagcuggcccuca

SEQ ID NO: 1723124 - RNA, 19 nt, Artificial Sequence
  Description of Artificial Sequence: Synthetic oligonucleotide
cagccgaugcgggaccgug

SEQ ID NO: 1723125 - RNA, 19 nt, Artificial Sequence
  Description of Artificial Sequence: Synthetic oligonucleotide
aaggaccccucuggaggaa

SEQ ID NO: 1723126 - RNA, 19 nt, Artificial Sequence
  Description of Artificial Sequence: Synthetic oligonucleotide
guagucacgggcagccugu

SEQ ID NO: 1723127 - RNA, 19 nt, Artificial Sequence
  Description of Artificial Sequence: Synthetic oligonucleotide
cagccucagcucagaggug

SEQ ID NO: 1723128 - RNA, 19 nt, Artificial Sequence
  Description of Artificial Sequence: Synthetic oligonucleotide
gccggcgcugcucagggga

SEQ ID NO: 1723129 - RNA, 19 nt, Artificial Sequence
  Description of Artificial Sequence: Synthetic oligonucleotide
cgaugcgggaccguggggc

SEQ ID NO: 1723130 - RNA, 19 nt, Artificial Sequence
  Description of Artificial Sequence: Synthetic oligonucleotide
gcugacgaaggccgugcca

SEQ ID NO: 1723131 - RNA, 19 nt, Artificial Sequence
  Description of Artificial Sequence: Synthetic oligonucleotide
ggcccucaacucuuucuuc

SEQ ID NO: 1723132 - RNA, 19 nt, Artificial Sequence
  Description of Artificial Sequence: Synthetic oligonucleotide
caauagcagccgcagcccu

SEQ ID NO: 1723133 - RNA, 19 nt, Artificial Sequence
  Description of Artificial Sequence: Synthetic oligonucleotide
gucucucuacauuccggau

SEQ ID NO: 1723134 - RNA, 19 nt, Artificial Sequence
  Description of Artificial Sequence: Synthetic oligonucleotide
gucgcccucccucccuuuc

SEQ ID NO: 1723135 - RNA, 19 nt, Artificial Sequence
  Description of Artificial Sequence: Synthetic oligonucleotide
ggaccguggggcucccgug

SEQ ID NO: 1723136 - RNA, 19 nt, Artificial Sequence
  Description of Artificial Sequence: Synthetic oligonucleotide
gcgccggcgcugcucaggg

SEQ ID NO: 1723137 - RNA, 19 nt, Artificial Sequence
  Description of Artificial Sequence: Synthetic oligonucleotide
aucccucgccugguccuag

SEQ ID NO: 1723138 - RNA, 19 nt, Artificial Sequence
  Description of Artificial Sequence: Synthetic oligonucleotide
uuccugcaugaaggacccc

SEQ ID NO: 1723139 - RNA, 19 nt, Artificial Sequence
  Description of Artificial Sequence: Synthetic oligonucleotide
cagguacacgggguaguca

SEQ ID NO: 1723140 - RNA, 19 nt, Artificial Sequence
  Description of Artificial Sequence: Synthetic oligonucleotide
agaggcagacaggcccgga

SEQ ID NO: 1723141 - RNA, 19 nt, Artificial Sequence
  Description of Artificial Sequence: Synthetic oligonucleotide
gccuccgcgaacccugaca

SEQ ID NO: 1723142 - RNA, 19 nt, Artificial Sequence
  Description of Artificial Sequence: Synthetic oligonucleotide
cggggaagucgguaccucc

SEQ ID NO: 1723143 - RNA, 19 nt, Artificial Sequence
  Description of Artificial Sequence: Synthetic oligonucleotide
ggcaguacccuagggccca

SEQ ID NO: 1723144 - RNA, 19 nt, Artificial Sequence
  Description of Artificial Sequence: Synthetic oligonucleotide
ggcuccgcagcccaugggu

SEQ ID NO: 1723145 - RNA, 19 nt, Artificial Sequence
  Description of Artificial Sequence: Synthetic oligonucleotide
cgcuaauauuaccccauca

SEQ ID NO: 1723146 - RNA, 19 nt, Artificial Sequence
  Description of Artificial Sequence: Synthetic oligonucleotide
gcgugagggucaacagccg

SEQ ID NO: 1723147 - RNA, 19 nt, Artificial Sequence
  Description of Artificial Sequence: Synthetic oligonucleotide
caccagcguuccaacaacu

SEQ ID NO: 1723148 - RNA, 19 nt, Artificial Sequence
  Description of Artificial Sequence: Synthetic oligonucleotide
ccgagaaugucgcugugua

SEQ ID NO: 1723149 - RNA, 19 nt, Artificial Sequence
  Description of Artificial Sequence: Synthetic oligonucleotide
caguggccuccgcgaaccc

SEQ ID NO: 1723150 - RNA, 19 nt, Artificial Sequence
  Description of Artificial Sequence: Synthetic oligonucleotide
aggaccccucuggaggaau

SEQ ID NO: 1723151 - RNA, 19 nt, Artificial Sequence
  Description of Artificial Sequence: Synthetic oligonucleotide
acagagcaaugagggugau

SEQ ID NO: 1723152 - RNA, 19 nt, Artificial Sequence
  Description of Artificial Sequence: Synthetic oligonucleotide
cguguauuauugugagcga

SEQ ID NO: 1723153 - RNA, 19 nt, Artificial Sequence
  Description of Artificial Sequence: Synthetic oligonucleotide
augucgcuguguagcggga

SEQ ID NO: 1723154 - RNA, 19 nt, Artificial Sequence
  Description of Artificial Sequence: Synthetic oligonucleotide
guguagcgggaaaccuuca

SEQ ID NO: 1723155 - RNA, 19 nt, Artificial Sequence
  Description of Artificial Sequence: Synthetic oligonucleotide
ccccucuggaggaaugaca

SEQ ID NO: 1723156 - RNA, 19 nt, Artificial Sequence
  Description of Artificial Sequence: Synthetic oligonucleotide
ggcaugcccaggcgccacc

SEQ ID NO: 1723157 - RNA, 19 nt, Artificial Sequence
  Description of Artificial Sequence: Synthetic oligonucleotide
ggaccccucuggaggaaug

SEQ ID NO: 1723158 - RNA, 19 nt, Artificial Sequence
  Description of Artificial Sequence: Synthetic oligonucleotide
ccagcguuccaacaacugu

SEQ ID NO: 1723159 - RNA, 19 nt, Artificial Sequence
  Description of Artificial Sequence: Synthetic oligonucleotide
ccaggcgccaccagcccuc

SEQ ID NO: 1723160 - RNA, 19 nt, Artificial Sequence
  Description of Artificial Sequence: Synthetic oligonucleotide
caggcgccaccagcccucg

SEQ ID NO: 1723161 - RNA, 19 nt, Artificial Sequence
  Description of Artificial Sequence: Synthetic oligonucleotide
ugucgcccucccucccuuu

SEQ ID NO: 1723162 - RNA, 19 nt, Artificial Sequence
  Description of Artificial Sequence: Synthetic oligonucleotide
cgcuguguagcgggaaacc

SEQ ID NO: 1723163 - RNA, 19 nt, Artificial Sequence
  Description of Artificial Sequence: Synthetic oligonucleotide
ggaccccaccagccagggg

SEQ ID NO: 1723164 - RNA, 19 nt, Artificial Sequence
  Description of Artificial Sequence: Synthetic oligonucleotide
gcuguguagcgggaaaccu

SEQ ID NO: 1723165 - RNA, 19 nt, Artificial Sequence
  Description of Artificial Sequence: Synthetic oligonucleotide
ucucuacauuccggauauu

SEQ ID NO: 1723166 - RNA, 19 nt, Artificial Sequence
  Description of Artificial Sequence: Synthetic oligonucleotide
aggcgccaccagcccucgg

SEQ ID NO: 1723167 - RNA, 19 nt, Artificial Sequence
  Description of Artificial Sequence: Synthetic oligonucleotide
ggcgccggcgcugcucagg

SEQ ID NO: 1723168 - RNA, 19 nt, Artificial Sequence
  Description of Artificial Sequence: Synthetic oligonucleotide
ugggcugggugggcuucgu

SEQ ID NO: 1723169 - RNA, 19 nt, Artificial Sequence
  Description of Artificial Sequence: Synthetic oligonucleotide
cugguccuagcacgagaua

SEQ ID NO: 1723170 - RNA, 19 nt, Artificial Sequence
  Description of Artificial Sequence: Synthetic oligonucleotide
cccgugaggcagguacacg

SEQ ID NO: 1723171 - RNA, 19 nt, Artificial Sequence
  Description of Artificial Sequence: Synthetic oligonucleotide
ccucggaugacagagcaau

SEQ ID NO: 1723172 - RNA, 19 nt, Artificial Sequence
  Description of Artificial Sequence: Synthetic oligonucleotide
caccaugugcagcauucuu

SEQ ID NO: 1723173 - RNA, 19 nt, Artificial Sequence
  Description of Artificial Sequence: Synthetic oligonucleotide
cgaacccugacaggguuuc

SEQ ID NO: 1723174 - RNA, 19 nt, Artificial Sequence
  Description of Artificial Sequence: Synthetic oligonucleotide
gcuggcccucaacucuuuc

SEQ ID NO: 1723175 - RNA, 19 nt, Artificial Sequence
  Description of Artificial Sequence: Synthetic oligonucleotide
ccugguccuagcacgagau

SEQ ID NO: 1723176 - RNA, 19 nt, Artificial Sequence
  Description of Artificial Sequence: Synthetic oligonucleotide
ccucuggaggaaugacaca

SEQ ID NO: 1723177 - RNA, 19 nt, Artificial Sequence
  Description of Artificial Sequence: Synthetic oligonucleotide
cgugagggucaacagccga

SEQ ID NO: 1723178 - RNA, 19 nt, Artificial Sequence
  Description of Artificial Sequence: Synthetic oligonucleotide
caaccgccaucccucgccu

SEQ ID NO: 1723179 - RNA, 19 nt, Artificial Sequence
  Description of Artificial Sequence: Synthetic oligonucleotide
caggcaugcccaggcgcca

SEQ ID NO: 1723180 - RNA, 19 nt, Artificial Sequence
  Description of Artificial Sequence: Synthetic oligonucleotide
ggcgcggcccgcacagcag

SEQ ID NO: 1723181 - RNA, 19 nt, Artificial Sequence
  Description of Artificial Sequence: Synthetic oligonucleotide
gggaccguggggcucccgu

SEQ ID NO: 1723182 - RNA, 19 nt, Artificial Sequence
  Description of Artificial Sequence: Synthetic oligonucleotide
ccccaucaauuugacuguc

SEQ ID NO: 1723183 - RNA, 19 nt, Artificial Sequence
  Description of Artificial Sequence: Synthetic oligonucleotide
cgcaggagcgugaggguca

SEQ ID NO: 1723184 - RNA, 19 nt, Artificial Sequence
  Description of Artificial Sequence: Synthetic oligonucleotide
ggcagguacacgggguagu

SEQ ID NO: 1723185 - RNA, 19 nt, Artificial Sequence
  Description of Artificial Sequence: Synthetic oligonucleotide
gcccugguucuggugagaa

SEQ ID NO: 1723186 - RNA, 19 nt, Artificial Sequence
  Description of Artificial Sequence: Synthetic oligonucleotide
cggauauuggucagcuccu

SEQ ID NO: 1723187 - RNA, 19 nt, Artificial Sequence
  Description of Artificial Sequence: Synthetic oligonucleotide
aggguccggggaagucggu

SEQ ID NO: 1723188 - RNA, 19 nt, Artificial Sequence
  Description of Artificial Sequence: Synthetic oligonucleotide
agcuggcccucaacucuuu

SEQ ID NO: 1723189 - RNA, 19 nt, Artificial Sequence
  Description of Artificial Sequence: Synthetic oligonucleotide
gcagaccgagaaugucgcu

SEQ ID NO: 1723190 - RNA, 19 nt, Artificial Sequence
  Description of Artificial Sequence: Synthetic oligonucleotide
cgguggcugccaccacucg

SEQ ID NO: 1723191 - RNA, 19 nt, Artificial Sequence
  Description of Artificial Sequence: Synthetic oligonucleotide
caucccucgccugguccua

SEQ ID NO: 1723192 - RNA, 19 nt, Artificial Sequence
  Description of Artificial Sequence: Synthetic oligonucleotide
ugccaccacucggccugau

SEQ ID NO: 1723193 - RNA, 19 nt, Artificial Sequence
  Description of Artificial Sequence: Synthetic oligonucleotide
caggagcgugagggucaac

SEQ ID NO: 1723194 - RNA, 19 nt, Artificial Sequence
  Description of Artificial Sequence: Synthetic oligonucleotide
ggguccggggaagucggua

SEQ ID NO: 1723195 - RNA, 19 nt, Artificial Sequence
  Description of Artificial Sequence: Synthetic oligonucleotide
ggccuccgcgaacccugac

SEQ ID NO: 1723196 - RNA, 19 nt, Artificial Sequence
  Description of Artificial Sequence: Synthetic oligonucleotide
gccaccacucggccugaua

SEQ ID NO: 1723197 - RNA, 19 nt, Artificial Sequence
  Description of Artificial Sequence: Synthetic oligonucleotide
gucccacaaugagaaccau

SEQ ID NO: 1723198 - RNA, 19 nt, Artificial Sequence
  Description of Artificial Sequence: Synthetic oligonucleotide
gcccuccucggaugacaga

SEQ ID NO: 1723199 - RNA, 19 nt, Artificial Sequence
  Description of Artificial Sequence: Synthetic oligonucleotide
ccggggaagucgguaccuc

SEQ ID NO: 1723200 - RNA, 19 nt, Artificial Sequence
  Description of Artificial Sequence: Synthetic oligonucleotide
ggagaggguccggggaagu

SEQ ID NO: 1723201 - RNA, 19 nt, Artificial Sequence
  Description of Artificial Sequence: Synthetic oligonucleotide
ccggcgcugcucaggggaa

SEQ ID NO: 1723202 - RNA, 19 nt, Artificial Sequence
  Description of Artificial Sequence: Synthetic oligonucleotide
ccgugccaguggccuccgc

SEQ ID NO: 1723203 - RNA, 19 nt, Artificial Sequence
  Description of Artificial Sequence: Synthetic oligonucleotide
gcgaacccugacaggguuu

SEQ ID NO: 1723204 - RNA, 19 nt, Artificial Sequence
  Description of Artificial Sequence: Synthetic oligonucleotide
cgccggcgcugcucagggg

SEQ ID NO: 1723205 - RNA, 19 nt, Artificial Sequence
  Description of Artificial Sequence: Synthetic oligonucleotide
cggcgcugcucaggggaag

SEQ ID NO: 1723206 - RNA, 19 nt, Artificial Sequence
  Description of Artificial Sequence: Synthetic oligonucleotide
ccgcgaacccugacagggu

SEQ ID NO: 1723207 - RNA, 19 nt, Artificial Sequence
  Description of Artificial Sequence: Synthetic oligonucleotide
ccccaucuggggccgugua

SEQ ID NO: 1723208 - RNA, 19 nt, Artificial Sequence
  Description of Artificial Sequence: Synthetic oligonucleotide
cgcgaacccugacaggguu

SEQ ID NO: 1723209 - RNA, 19 nt, Artificial Sequence
  Description of Artificial Sequence: Synthetic oligonucleotide
gcgggaccguggggcuccc

SEQ ID NO: 1723210 - RNA, 19 nt, Artificial Sequence
  Description of Artificial Sequence: Synthetic oligonucleotide
ccccauugucgcccucccu

SEQ ID NO: 1723211 - RNA, 19 nt, Artificial Sequence
  Description of Artificial Sequence: Synthetic oligonucleotide
cccaugggucgggcucuga

SEQ ID NO: 1723212 - RNA, 19 nt, Artificial Sequence
  Description of Artificial Sequence: Synthetic oligonucleotide
ccauggccccaaacaccau

SEQ ID NO: 1723213 - RNA, 19 nt, Artificial Sequence
  Description of Artificial Sequence: Synthetic oligonucleotide
cgggaccguggggcucccg

SEQ ID NO: 1723214 - RNA, 19 nt, Artificial Sequence
  Description of Artificial Sequence: Synthetic oligonucleotide
uuuaucauggcauggaaag

SEQ ID NO: 1723215 - RNA, 19 nt, Artificial Sequence
  Description of Artificial Sequence: Synthetic oligonucleotide
gagaauaaauaucacagug

SEQ ID NO: 1723216 - RNA, 19 nt, Artificial Sequence
  Description of Artificial Sequence: Synthetic oligonucleotide
aaugacgggauacugguag

SEQ ID NO: 1723217 - RNA, 19 nt, Artificial Sequence
  Description of Artificial Sequence: Synthetic oligonucleotide
uguacagaggaauuuauca

SEQ ID NO: 1723218 - RNA, 19 nt, Artificial Sequence
  Description of Artificial Sequence: Synthetic oligonucleotide
aauaucacaguguccauca

SEQ ID NO: 1723219 - RNA, 19 nt, Artificial Sequence
  Description of Artificial Sequence: Synthetic oligonucleotide
aauaucuaggccaugcuuc

SEQ ID NO: 1723220 - RNA, 19 nt, Artificial Sequence
  Description of Artificial Sequence: Synthetic oligonucleotide
aggacuauuggaauaaucc

SEQ ID NO: 1723221 - RNA, 19 nt, Artificial Sequence
  Description of Artificial Sequence: Synthetic oligonucleotide
ugaaaagggagccugaguc

SEQ ID NO: 1723222 - RNA, 19 nt, Artificial Sequence
  Description of Artificial Sequence: Synthetic oligonucleotide
aauuccugauacaaguucg

SEQ ID NO: 1723223 - RNA, 19 nt, Artificial Sequence
  Description of Artificial Sequence: Synthetic oligonucleotide
ugucacuuuaauuaagaca

SEQ ID NO: 1723224 - RNA, 19 nt, Artificial Sequence
  Description of Artificial Sequence: Synthetic oligonucleotide
uccauuuaugcauacacac

SEQ ID NO: 1723225 - RNA, 19 nt, Artificial Sequence
  Description of Artificial Sequence: Synthetic oligonucleotide
aaguuuaaggcagggaggg

SEQ ID NO: 1723226 - RNA, 19 nt, Artificial Sequence
  Description of Artificial Sequence: Synthetic oligonucleotide
uauuggaauaauccacagg

SEQ ID NO: 1723227 - RNA, 19 nt, Artificial Sequence
  Description of Artificial Sequence: Synthetic oligonucleotide
uuccggagaauaaauauca

SEQ ID NO: 1723228 - RNA, 19 nt, Artificial Sequence
  Description of Artificial Sequence: Synthetic oligonucleotide
uucccuuaguguaagagug

SEQ ID NO: 1723229 - RNA, 19 nt, Artificial Sequence
  Description of Artificial Sequence: Synthetic oligonucleotide
uucguaacagccuccaucc

SEQ ID NO: 1723230 - RNA, 19 nt, Artificial Sequence
  Description of Artificial Sequence: Synthetic oligonucleotide
uccaccaaagguaaggcug

SEQ ID NO: 1723231 - RNA, 19 nt, Artificial Sequence
  Description of Artificial Sequence: Synthetic oligonucleotide
caauccauaguacagguac

SEQ ID NO: 1723232 - RNA, 19 nt, Artificial Sequence
  Description of Artificial Sequence: Synthetic oligonucleotide
auacacacgaucucagugg

SEQ ID NO: 1723233 - RNA, 19 nt, Artificial Sequence
  Description of Artificial Sequence: Synthetic oligonucleotide
aaagaagauggugccauac

SEQ ID NO: 1723234 - RNA, 19 nt, Artificial Sequence
  Description of Artificial Sequence: Synthetic oligonucleotide
cauugugacagauuauugc

SEQ ID NO: 1723235 - RNA, 19 nt, Artificial Sequence
  Description of Artificial Sequence: Synthetic oligonucleotide
gauaccagaaauuggagaa

SEQ ID NO: 1723236 - RNA, 19 nt, Artificial Sequence
  Description of Artificial Sequence: Synthetic oligonucleotide
auugugacagauuauugcu

SEQ ID NO: 1723237 - RNA, 19 nt, Artificial Sequence
  Description of Artificial Sequence: Synthetic oligonucleotide
auacaaguucguaacagcc

SEQ ID NO: 1723238 - RNA, 19 nt, Artificial Sequence
  Description of Artificial Sequence: Synthetic oligonucleotide
uaguguaagagugauacca

SEQ ID NO: 1723239 - RNA, 19 nt, Artificial Sequence
  Description of Artificial Sequence: Synthetic oligonucleotide
acaaguucguaacagccuc

SEQ ID NO: 1723240 - RNA, 19 nt, Artificial Sequence
  Description of Artificial Sequence: Synthetic oligonucleotide
gauacaaguucguaacagc

SEQ ID NO: 1723241 - RNA, 19 nt, Artificial Sequence
  Description of Artificial Sequence: Synthetic oligonucleotide
ucugucacuuuaauuaaga

SEQ ID NO: 1723242 - RNA, 19 nt, Artificial Sequence
  Description of Artificial Sequence: Synthetic oligonucleotide
aaauaucacaguguccauc

SEQ ID NO: 1723243 - RNA, 19 nt, Artificial Sequence
  Description of Artificial Sequence: Synthetic oligonucleotide
uggaauaauccacaggguc

SEQ ID NO: 1723244 - RNA, 19 nt, Artificial Sequence
  Description of Artificial Sequence: Synthetic oligonucleotide
cagaaauuggagaagagca

SEQ ID NO: 1723245 - RNA, 19 nt, Artificial Sequence
  Description of Artificial Sequence: Synthetic oligonucleotide
auaaugacgggauacuggu

SEQ ID NO: 1723246 - RNA, 19 nt, Artificial Sequence
  Description of Artificial Sequence: Synthetic oligonucleotide
uccuacucaguccugacca

SEQ ID NO: 1723247 - RNA, 19 nt, Artificial Sequence
  Description of Artificial Sequence: Synthetic oligonucleotide
caaggugcaguccugaggc

SEQ ID NO: 1723248 - RNA, 19 nt, Artificial Sequence
  Description of Artificial Sequence: Synthetic oligonucleotide
ugagaccaggacaaacugg

SEQ ID NO: 1723249 - RNA, 19 nt, Artificial Sequence
  Description of Artificial Sequence: Synthetic oligonucleotide
agacaaaugaguacacagc

SEQ ID NO: 1723250 - RNA, 19 nt, Artificial Sequence
  Description of Artificial Sequence: Synthetic oligonucleotide
agaggaauuuaucauggca

SEQ ID NO: 1723251 - RNA, 19 nt, Artificial Sequence
  Description of Artificial Sequence: Synthetic oligonucleotide
uguaagagugauaccagaa

SEQ ID NO: 1723252 - RNA, 19 nt, Artificial Sequence
  Description of Artificial Sequence: Synthetic oligonucleotide
augagguggauaaugacgg

SEQ ID NO: 1723253 - RNA, 19 nt, Artificial Sequence
  Description of Artificial Sequence: Synthetic oligonucleotide
aaguaguauuggcugaugu

SEQ ID NO: 1723254 - RNA, 19 nt, Artificial Sequence
  Description of Artificial Sequence: Synthetic oligonucleotide
caaguuuaaggcagggagg

SEQ ID NO: 1723255 - RNA, 19 nt, Artificial Sequence
  Description of Artificial Sequence: Synthetic oligonucleotide
aauuuaucauggcauggaa

SEQ ID NO: 1723256 - RNA, 19 nt, Artificial Sequence
  Description of Artificial Sequence: Synthetic oligonucleotide
uuaggugggcaauaucuag

SEQ ID NO: 1723257 - RNA, 19 nt, Artificial Sequence
  Description of Artificial Sequence: Synthetic oligonucleotide
ugauaccagaaauuggaga

SEQ ID NO: 1723258 - RNA, 19 nt, Artificial Sequence
  Description of Artificial Sequence: Synthetic oligonucleotide
ugacaacauguacagagga

SEQ ID NO: 1723259 - RNA, 19 nt, Artificial Sequence
  Description of Artificial Sequence: Synthetic oligonucleotide
agagugauaccagaaauug

SEQ ID NO: 1723260 - RNA, 19 nt, Artificial Sequence
  Description of Artificial Sequence: Synthetic oligonucleotide
acgggauacugguaguugc

SEQ ID NO: 1723261 - RNA, 19 nt, Artificial Sequence
  Description of Artificial Sequence: Synthetic oligonucleotide
ugaagagccaggccacucg

SEQ ID NO: 1723262 - RNA, 19 nt, Artificial Sequence
  Description of Artificial Sequence: Synthetic oligonucleotide
agugauaccagaaauugga

SEQ ID NO: 1723263 - RNA, 19 nt, Artificial Sequence
  Description of Artificial Sequence: Synthetic oligonucleotide
cagacaauccauaguacag

SEQ ID NO: 1723264 - RNA, 19 nt, Artificial Sequence
  Description of Artificial Sequence: Synthetic oligonucleotide
agaugagguggauaaugac

SEQ ID NO: 1723265 - RNA, 19 nt, Artificial Sequence
  Description of Artificial Sequence: Synthetic oligonucleotide
uccauccuggcuaaggaca

SEQ ID NO: 1723266 - RNA, 19 nt, Artificial Sequence
  Description of Artificial Sequence: Synthetic oligonucleotide
aguaguauuggcugaugug

SEQ ID NO: 1723267 - RNA, 19 nt, Artificial Sequence
  Description of Artificial Sequence: Synthetic oligonucleotide
agugccucaggacuauugg

SEQ ID NO: 1723268 - RNA, 19 nt, Artificial Sequence
  Description of Artificial Sequence: Synthetic oligonucleotide
uccgaagugccucaggacu

SEQ ID NO: 1723269 - RNA, 19 nt, Artificial Sequence
  Description of Artificial Sequence: Synthetic oligonucleotide
ugggcaugaaguaguauug

SEQ ID NO: 1723270 - RNA, 19 nt, Artificial Sequence
  Description of Artificial Sequence: Synthetic oligonucleotide
acagaggaauuuaucaugg

SEQ ID NO: 1723271 - RNA, 19 nt, Artificial Sequence
  Description of Artificial Sequence: Synthetic oligonucleotide
agacaugcaugcuucauca

SEQ ID NO: 1723272 - RNA, 19 nt, Artificial Sequence
  Description of Artificial Sequence: Synthetic oligonucleotide
uucucaguuggccuugacc

SEQ ID NO: 1723273 - RNA, 19 nt, Artificial Sequence
  Description of Artificial Sequence: Synthetic oligonucleotide
cauggaaagagcccauucc

SEQ ID NO: 1723274 - RNA, 19 nt, Artificial Sequence
  Description of Artificial Sequence: Synthetic oligonucleotide
gacuauuggaauaauccac

SEQ ID NO: 1723275 - RNA, 19 nt, Artificial Sequence
  Description of Artificial Sequence: Synthetic oligonucleotide
gaaaagggagccugagucc

SEQ ID NO: 1723276 - RNA, 19 nt, Artificial Sequence
  Description of Artificial Sequence: Synthetic oligonucleotide
cauacauccagaugaggug

SEQ ID NO: 1723277 - RNA, 19 nt, Artificial Sequence
  Description of Artificial Sequence: Synthetic oligonucleotide
uuauugcugaccucuucag

SEQ ID NO: 1723278 - RNA, 19 nt, Artificial Sequence
  Description of Artificial Sequence: Synthetic oligonucleotide
agaaauuggagaagagcac

SEQ ID NO: 1723279 - RNA, 19 nt, Artificial Sequence
  Description of Artificial Sequence: Synthetic oligonucleotide
aggaauuuaucauggcaug

SEQ ID NO: 1723280 - RNA, 19 nt, Artificial Sequence
  Description of Artificial Sequence: Synthetic oligonucleotide
uacaaguucguaacagccu

SEQ ID NO: 1723281 - RNA, 19 nt, Artificial Sequence
  Description of Artificial Sequence: Synthetic oligonucleotide
acuuaggugggcaauaucu

SEQ ID NO: 1723282 - RNA, 19 nt, Artificial Sequence
  Description of Artificial Sequence: Synthetic oligonucleotide
guauugucaggccugcugc

SEQ ID NO: 1723283 - RNA, 19 nt, Artificial Sequence
  Description of Artificial Sequence: Synthetic oligonucleotide
aggagaaaggccacaagac

SEQ ID NO: 1723284 - RNA, 19 nt, Artificial Sequence
  Description of Artificial Sequence: Synthetic oligonucleotide
agacaauccauaguacagg

SEQ ID NO: 1723285 - RNA, 19 nt, Artificial Sequence
  Description of Artificial Sequence: Synthetic oligonucleotide
uggagcaaucuuuaucccc

SEQ ID NO: 1723286 - RNA, 19 nt, Artificial Sequence
  Description of Artificial Sequence: Synthetic oligonucleotide
aguccugaggcacuuaggu

SEQ ID NO: 1723287 - RNA, 19 nt, Artificial Sequence
  Description of Artificial Sequence: Synthetic oligonucleotide
acagguacaugacaacaug

SEQ ID NO: 1723288 - RNA, 19 nt, Artificial Sequence
  Description of Artificial Sequence: Synthetic oligonucleotide
cauagguguagguggagag

SEQ ID NO: 1723289 - RNA, 19 nt, Artificial Sequence
  Description of Artificial Sequence: Synthetic oligonucleotide
uaugcauacacacgaucuc

SEQ ID NO: 1723290 - RNA, 19 nt, Artificial Sequence
  Description of Artificial Sequence: Synthetic oligonucleotide
uaggaaggucaccugcccg

SEQ ID NO: 1723291 - RNA, 19 nt, Artificial Sequence
  Description of Artificial Sequence: Synthetic oligonucleotide
agaggacacugguggaugc

SEQ ID NO: 1723292 - RNA, 19 nt, Artificial Sequence
  Description of Artificial Sequence: Synthetic oligonucleotide
cuauuggaauaauccacag

SEQ ID NO: 1723293 - RNA, 19 nt, Artificial Sequence
  Description of Artificial Sequence: Synthetic oligonucleotide
aaugaccuuggaaagcaug

SEQ ID NO: 1723294 - RNA, 19 nt, Artificial Sequence
  Description of Artificial Sequence: Synthetic oligonucleotide
ccaaguuuaaggcagggag

SEQ ID NO: 1723295 - RNA, 19 nt, Artificial Sequence
  Description of Artificial Sequence: Synthetic oligonucleotide
ggccacaagacccugauug

SEQ ID NO: 1723296 - RNA, 19 nt, Artificial Sequence
  Description of Artificial Sequence: Synthetic oligonucleotide
agagccaggccacucgaac

SEQ ID NO: 1723297 - RNA, 19 nt, Artificial Sequence
  Description of Artificial Sequence: Synthetic oligonucleotide
guucggagggaucagggcc

SEQ ID NO: 1723298 - RNA, 19 nt, Artificial Sequence
  Description of Artificial Sequence: Synthetic oligonucleotide
uaguauuggcugaugugca

SEQ ID NO: 1723299 - RNA, 19 nt, Artificial Sequence
  Description of Artificial Sequence: Synthetic oligonucleotide
ugacagauuauugcugacc

SEQ ID NO: 1723300 - RNA, 19 nt, Artificial Sequence
  Description of Artificial Sequence: Synthetic oligonucleotide
gugggcaauaucuaggcca

SEQ ID NO: 1723301 - RNA, 19 nt, Artificial Sequence
  Description of Artificial Sequence: Synthetic oligonucleotide
gugauggaagacauguagg

SEQ ID NO: 1723302 - RNA, 19 nt, Artificial Sequence
  Description of Artificial Sequence: Synthetic oligonucleotide
guaaggcugagccacagga

SEQ ID NO: 1723303 - RNA, 19 nt, Artificial Sequence
  Description of Artificial Sequence: Synthetic oligonucleotide
uguuccucucccaaguuua

SEQ ID NO: 1723304 - RNA, 19 nt, Artificial Sequence
  Description of Artificial Sequence: Synthetic oligonucleotide
auccagaugagguggauaa

SEQ ID NO: 1723305 - RNA, 19 nt, Artificial Sequence
  Description of Artificial Sequence: Synthetic oligonucleotide
cagguguagguacucagcc

SEQ ID NO: 1723306 - RNA, 19 nt, Artificial Sequence
  Description of Artificial Sequence: Synthetic oligonucleotide
gagugauaccagaaauugg

SEQ ID NO: 1723307 - RNA, 19 nt, Artificial Sequence
  Description of Artificial Sequence: Synthetic oligonucleotide
gaauaauccacagggucac

SEQ ID NO: 1723308 - RNA, 19 nt, Artificial Sequence
  Description of Artificial Sequence: Synthetic oligonucleotide
acaacauguacagaggaau

SEQ ID NO: 1723309 - RNA, 19 nt, Artificial Sequence
  Description of Artificial Sequence: Synthetic oligonucleotide
acuauuggaauaauccaca

SEQ ID NO: 1723310 - RNA, 19 nt, Artificial Sequence
  Description of Artificial Sequence: Synthetic oligonucleotide
uuaguguaagagugauacc

SEQ ID NO: 1723311 - RNA, 19 nt, Artificial Sequence
  Description of Artificial Sequence: Synthetic oligonucleotide
uauuggcugaugugcagug

SEQ ID NO: 1723312 - RNA, 19 nt, Artificial Sequence
  Description of Artificial Sequence: Synthetic oligonucleotide
cuuucccuuaguguaagag

SEQ ID NO: 1723313 - RNA, 19 nt, Artificial Sequence
  Description of Artificial Sequence: Synthetic oligonucleotide
gauacugguaguugcagcu

SEQ ID NO: 1723314 - RNA, 19 nt, Artificial Sequence
  Description of Artificial Sequence: Synthetic oligonucleotide
gaauuuaucauggcaugga

SEQ ID NO: 1723315 - RNA, 19 nt, Artificial Sequence
  Description of Artificial Sequence: Synthetic oligonucleotide
uuggaauaauccacagggu

SEQ ID NO: 1723316 - RNA, 19 nt, Artificial Sequence
  Description of Artificial Sequence: Synthetic oligonucleotide
gacagauuauugcugaccu

SEQ ID NO: 1723317 - RNA, 19 nt, Artificial Sequence
  Description of Artificial Sequence: Synthetic oligonucleotide
auaagcugugugccccacc

SEQ ID NO: 1723318 - RNA, 19 nt, Artificial Sequence
  Description of Artificial Sequence: Synthetic oligonucleotide
ugccucaggacuauuggaa

SEQ ID NO: 1723319 - RNA, 19 nt, Artificial Sequence
  Description of Artificial Sequence: Synthetic oligonucleotide
cagugugaggagaaaggcc

SEQ ID NO: 1723320 - RNA, 19 nt, Artificial Sequence
  Description of Artificial Sequence: Synthetic oligonucleotide
cuggaguuccauuuugcug

SEQ ID NO: 1723321 - RNA, 19 nt, Artificial Sequence
  Description of Artificial Sequence: Synthetic oligonucleotide
auaucuaggccaugcuucu

SEQ ID NO: 1723322 - RNA, 19 nt, Artificial Sequence
  Description of Artificial Sequence: Synthetic oligonucleotide
gaaguaaguguccagcccu

SEQ ID NO: 1723323 - RNA, 19 nt, Artificial Sequence
  Description of Artificial Sequence: Synthetic oligonucleotide
acagauuauugcugaccuc

SEQ ID NO: 1723324 - RNA, 19 nt, Artificial Sequence
  Description of Artificial Sequence: Synthetic oligonucleotide
uauugcugaccucuucagu

SEQ ID NO: 1723325 - RNA, 19 nt, Artificial Sequence
  Description of Artificial Sequence: Synthetic oligonucleotide
uccauugugacagauuauu

SEQ ID NO: 1723326 - RNA, 19 nt, Artificial Sequence
  Description of Artificial Sequence: Synthetic oligonucleotide
aaggacagugggaaccagg

SEQ ID NO: 1723327 - RNA, 19 nt, Artificial Sequence
  Description of Artificial Sequence: Synthetic oligonucleotide
gaccaggacaaacuggauc

SEQ ID NO: 1723328 - RNA, 19 nt, Artificial Sequence
  Description of Artificial Sequence: Synthetic oligonucleotide
augacaacauguacagagg

SEQ ID NO: 1723329 - RNA, 19 nt, Artificial Sequence
  Description of Artificial Sequence: Synthetic oligonucleotide
ugagguggauaaugacggg

SEQ ID NO: 1723330 - RNA, 19 nt, Artificial Sequence
  Description of Artificial Sequence: Synthetic oligonucleotide
cugaugugcagugagacca

SEQ ID NO: 1723331 - RNA, 19 nt, Artificial Sequence
  Description of Artificial Sequence: Synthetic oligonucleotide
cuucagugugaggagaaag

SEQ ID NO: 1723332 - RNA, 19 nt, Artificial Sequence
  Description of Artificial Sequence: Synthetic oligonucleotide
auccgaagugccucaggac

SEQ ID NO: 1723333 - RNA, 19 nt, Artificial Sequence
  Description of Artificial Sequence: Synthetic oligonucleotide
gaagacauguaggaagguc

SEQ ID NO: 1723334 - RNA, 19 nt, Artificial Sequence
  Description of Artificial Sequence: Synthetic oligonucleotide
aguguaagagugauaccag

SEQ ID NO: 1723335 - RNA, 19 nt, Artificial Sequence
  Description of Artificial Sequence: Synthetic oligonucleotide
auagguguagguggagagg

SEQ ID NO: 1723336 - RNA, 19 nt, Artificial Sequence
  Description of Artificial Sequence: Synthetic oligonucleotide
accaagggcagacaaucca

SEQ ID NO: 1723337 - RNA, 19 nt, Artificial Sequence
  Description of Artificial Sequence: Synthetic oligonucleotide
ggaauuuaucauggcaugg

SEQ ID NO: 1723338 - RNA, 19 nt, Artificial Sequence
  Description of Artificial Sequence: Synthetic oligonucleotide
aucucagugguuuccucug

SEQ ID NO: 1723339 - RNA, 19 nt, Artificial Sequence
  Description of Artificial Sequence: Synthetic oligonucleotide
gauuauugcugaccucuuc

SEQ ID NO: 1723340 - RNA, 19 nt, Artificial Sequence
  Description of Artificial Sequence: Synthetic oligonucleotide
uauugucaggccugcugcc

SEQ ID NO: 1723341 - RNA, 19 nt, Artificial Sequence
  Description of Artificial Sequence: Synthetic oligonucleotide
agugagaccaggacaaacu

SEQ ID NO: 1723342 - RNA, 19 nt, Artificial Sequence
  Description of Artificial Sequence: Synthetic oligonucleotide
gugagaccaggacaaacug

SEQ ID NO: 1723343 - RNA, 19 nt, Artificial Sequence
  Description of Artificial Sequence: Synthetic oligonucleotide
ccauuuaugcauacacacg

SEQ ID NO: 1723344 - RNA, 19 nt, Artificial Sequence
  Description of Artificial Sequence: Synthetic oligonucleotide
aagcacugagugauggaag

SEQ ID NO: 1723345 - RNA, 19 nt, Artificial Sequence
  Description of Artificial Sequence: Synthetic oligonucleotide
agugguuuccucugucacu

SEQ ID NO: 1723346 - RNA, 19 nt, Artificial Sequence
  Description of Artificial Sequence: Synthetic oligonucleotide
aaauuggagaagagcacaa

SEQ ID NO: 1723347 - RNA, 19 nt, Artificial Sequence
  Description of Artificial Sequence: Synthetic oligonucleotide
uagcuggaguuccauuuug

SEQ ID NO: 1723348 - RNA, 19 nt, Artificial Sequence
  Description of Artificial Sequence: Synthetic oligonucleotide
auguacagaggaauuuauc

SEQ ID NO: 1723349 - RNA, 19 nt, Artificial Sequence
  Description of Artificial Sequence: Synthetic oligonucleotide
uccuggcuaaggacagugg

SEQ ID NO: 1723350 - RNA, 19 nt, Artificial Sequence
  Description of Artificial Sequence: Synthetic oligonucleotide
ugggcaauaucuaggccau

SEQ ID NO: 1723351 - RNA, 19 nt, Artificial Sequence
  Description of Artificial Sequence: Synthetic oligonucleotide
agugaaaagggagccugag

SEQ ID NO: 1723352 - RNA, 19 nt, Artificial Sequence
  Description of Artificial Sequence: Synthetic oligonucleotide
uggauaaugacgggauacu

SEQ ID NO: 1723353 - RNA, 19 nt, Artificial Sequence
  Description of Artificial Sequence: Synthetic oligonucleotide
ucgaaccauccgaagugcc

SEQ ID NO: 1723354 - RNA, 19 nt, Artificial Sequence
  Description of Artificial Sequence: Synthetic oligonucleotide
uccggagaauaaauaucac

SEQ ID NO: 1723355 - RNA, 19 nt, Artificial Sequence
  Description of Artificial Sequence: Synthetic oligonucleotide
auaccagaaauuggagaag

SEQ ID NO: 1723356 - RNA, 19 nt, Artificial Sequence
  Description of Artificial Sequence: Synthetic oligonucleotide
gagccaggccacucgaacc

SEQ ID NO: 1723357 - RNA, 19 nt, Artificial Sequence
  Description of Artificial Sequence: Synthetic oligonucleotide
ugccccaccuccauuuaug

SEQ ID NO: 1723358 - RNA, 19 nt, Artificial Sequence
  Description of Artificial Sequence: Synthetic oligonucleotide
ggacuauuggaauaaucca

SEQ ID NO: 1723359 - RNA, 19 nt, Artificial Sequence
  Description of Artificial Sequence: Synthetic oligonucleotide
caaguucguaacagccucc

SEQ ID NO: 1723360 - RNA, 19 nt, Artificial Sequence
  Description of Artificial Sequence: Synthetic oligonucleotide
agcuggaguuccauuuugc

SEQ ID NO: 1723361 - RNA, 19 nt, Artificial Sequence
  Description of Artificial Sequence: Synthetic oligonucleotide
ggaaguaaguguccagccc

SEQ ID NO: 1723362 - RNA, 19 nt, Artificial Sequence
  Description of Artificial Sequence: Synthetic oligonucleotide
aggaaggucaccugcccgu

SEQ ID NO: 1723363 - RNA, 19 nt, Artificial Sequence
  Description of Artificial Sequence: Synthetic oligonucleotide
gaagauggugccauacauc

SEQ ID NO: 1723364 - RNA, 19 nt, Artificial Sequence
  Description of Artificial Sequence: Synthetic oligonucleotide
gauagcuggaguuccauuu

SEQ ID NO: 1723365 - RNA, 19 nt, Artificial Sequence
  Description of Artificial Sequence: Synthetic oligonucleotide
aaguucguaacagccucca

SEQ ID NO: 1723366 - RNA, 19 nt, Artificial Sequence
  Description of Artificial Sequence: Synthetic oligonucleotide
uggugauagcuggaguucc

SEQ ID NO: 1723367 - RNA, 19 nt, Artificial Sequence
  Description of Artificial Sequence: Synthetic oligonucleotide
uggcuaaggacagugggaa

SEQ ID NO: 1723368 - RNA, 19 nt, Artificial Sequence
  Description of Artificial Sequence: Synthetic oligonucleotide
gacaauccauaguacaggu

SEQ ID NO: 1723369 - RNA, 19 nt, Artificial Sequence
  Description of Artificial Sequence: Synthetic oligonucleotide
ucccuuaguguaagaguga

SEQ ID NO: 1723370 - RNA, 19 nt, Artificial Sequence
  Description of Artificial Sequence: Synthetic oligonucleotide
ugcccauccugaccuuugg

SEQ ID NO: 1723371 - RNA, 19 nt, Artificial Sequence
  Description of Artificial Sequence: Synthetic oligonucleotide
caggacuauuggaauaauc

SEQ ID NO: 1723372 - RNA, 19 nt, Artificial Sequence
  Description of Artificial Sequence: Synthetic oligonucleotide
ggcaugaaguaguauuggc

SEQ ID NO: 1723373 - RNA, 19 nt, Artificial Sequence
  Description of Artificial Sequence: Synthetic oligonucleotide
augaccuuggaaagcauga

SEQ ID NO: 1723374 - RNA, 19 nt, Artificial Sequence
  Description of Artificial Sequence: Synthetic oligonucleotide
ugcugaccucuucagugug

SEQ ID NO: 1723375 - RNA, 19 nt, Artificial Sequence
  Description of Artificial Sequence: Synthetic oligonucleotide
uugcugaccucuucagugu

SEQ ID NO: 1723376 - RNA, 19 nt, Artificial Sequence
  Description of Artificial Sequence: Synthetic oligonucleotide
gugauaccagaaauuggag

SEQ ID NO: 1723377 - RNA, 19 nt, Artificial Sequence
  Description of Artificial Sequence: Synthetic oligonucleotide
ugaaguaguauuggcugau

SEQ ID NO: 1723378 - RNA, 19 nt, Artificial Sequence
  Description of Artificial Sequence: Synthetic oligonucleotide
caggccacucgaaccaucc

SEQ ID NO: 1723379 - RNA, 19 nt, Artificial Sequence
  Description of Artificial Sequence: Synthetic oligonucleotide
guucugguggcagacagca

SEQ ID NO: 1723380 - RNA, 19 nt, Artificial Sequence
  Description of Artificial Sequence: Synthetic oligonucleotide
ggaauaauccacaggguca

SEQ ID NO: 1723381 - RNA, 19 nt, Artificial Sequence
  Description of Artificial Sequence: Synthetic oligonucleotide
cagacaugcaugcuucauc

SEQ ID NO: 1723382 - RNA, 19 nt, Artificial Sequence
  Description of Artificial Sequence: Synthetic oligonucleotide
cauguaggaaggucaccug

SEQ ID NO: 1723383 - RNA, 19 nt, Artificial Sequence
  Description of Artificial Sequence: Synthetic oligonucleotide
aagugccucaggacuauug

SEQ ID NO: 1723384 - RNA, 19 nt, Artificial Sequence
  Description of Artificial Sequence: Synthetic oligonucleotide
auuuaucauggcauggaaa

SEQ ID NO: 1723385 - RNA, 19 nt, Artificial Sequence
  Description of Artificial Sequence: Synthetic oligonucleotide
gggaaguaaguguccagcc

SEQ ID NO: 1723386 - RNA, 19 nt, Artificial Sequence
  Description of Artificial Sequence: Synthetic oligonucleotide
caguccuccuacucagucc

SEQ ID NO: 1723387 - RNA, 19 nt, Artificial Sequence
  Description of Artificial Sequence: Synthetic oligonucleotide
agggcagacaauccauagu

SEQ ID NO: 1723388 - RNA, 19 nt, Artificial Sequence
  Description of Artificial Sequence: Synthetic oligonucleotide
gaugugcagugagaccagg

SEQ ID NO: 1723389 - RNA, 19 nt, Artificial Sequence
  Description of Artificial Sequence: Synthetic oligonucleotide
cugaccuuuggcccagaag

SEQ ID NO: 1723390 - RNA, 19 nt, Artificial Sequence
  Description of Artificial Sequence: Synthetic oligonucleotide
gcagacaauccauaguaca

SEQ ID NO: 1723391 - RNA, 19 nt, Artificial Sequence
  Description of Artificial Sequence: Synthetic oligonucleotide
auaucacaguguccaucag

SEQ ID NO: 1723392 - RNA, 19 nt, Artificial Sequence
  Description of Artificial Sequence: Synthetic oligonucleotide
guguaagagugauaccaga

SEQ ID NO: 1723393 - RNA, 19 nt, Artificial Sequence
  Description of Artificial Sequence: Synthetic oligonucleotide
gaaguaguauuggcugaug

SEQ ID NO: 1723394 - RNA, 19 nt, Artificial Sequence
  Description of Artificial Sequence: Synthetic oligonucleotide
cucagccaaccagacaugc

SEQ ID NO: 1723395 - RNA, 19 nt, Artificial Sequence
  Description of Artificial Sequence: Synthetic oligonucleotide
aggggagagccaguccucc

SEQ ID NO: 1723396 - RNA, 19 nt, Artificial Sequence
  Description of Artificial Sequence: Synthetic oligonucleotide
acacgaucucagugguuuc

SEQ ID NO: 1723397 - RNA, 19 nt, Artificial Sequence
  Description of Artificial Sequence: Synthetic oligonucleotide
cucccaaguuuaaggcagg

SEQ ID NO: 1723398 - RNA, 19 nt, Artificial Sequence
  Description of Artificial Sequence: Synthetic oligonucleotide
cuccuacucaguccugacc

SEQ ID NO: 1723399 - RNA, 19 nt, Artificial Sequence
  Description of Artificial Sequence: Synthetic oligonucleotide
gacgggauacugguaguug

SEQ ID NO: 1723400 - RNA, 19 nt, Artificial Sequence
  Description of Artificial Sequence: Synthetic oligonucleotide
augaguacacagccuguau

SEQ ID NO: 1723401 - RNA, 19 nt, Artificial Sequence
  Description of Artificial Sequence: Synthetic oligonucleotide
agguguagguacucagcca

SEQ ID NO: 1723402 - RNA, 19 nt, Artificial Sequence
  Description of Artificial Sequence: Synthetic oligonucleotide
auagcuggaguuccauuuu

SEQ ID NO: 1723403 - RNA, 19 nt, Artificial Sequence
  Description of Artificial Sequence: Synthetic oligonucleotide
cauccgaagugccucagga

SEQ ID NO: 1723404 - RNA, 19 nt, Artificial Sequence
  Description of Artificial Sequence: Synthetic oligonucleotide
guagguacucagccaacca

SEQ ID NO: 1723405 - RNA, 19 nt, Artificial Sequence
  Description of Artificial Sequence: Synthetic oligonucleotide
aguuuaaggcagggagggg

SEQ ID NO: 1723406 - RNA, 19 nt, Artificial Sequence
  Description of Artificial Sequence: Synthetic oligonucleotide
cuguagaccagcuguggga

SEQ ID NO: 1723407 - RNA, 19 nt, Artificial Sequence
  Description of Artificial Sequence: Synthetic oligonucleotide
cuccauccuggcuaaggac

SEQ ID NO: 1723408 - RNA, 19 nt, Artificial Sequence
  Description of Artificial Sequence: Synthetic oligonucleotide
ugaccucuucagugugagg

SEQ ID NO: 1723409 - RNA, 19 nt, Artificial Sequence
  Description of Artificial Sequence: Synthetic oligonucleotide
acccugauuggggccagcc

SEQ ID NO: 1723410 - RNA, 19 nt, Artificial Sequence
  Description of Artificial Sequence: Synthetic oligonucleotide
augaagagccaggccacuc

SEQ ID NO: 1723411 - RNA, 19 nt, Artificial Sequence
  Description of Artificial Sequence: Synthetic oligonucleotide
gaagagccaggccacucga

SEQ ID NO: 1723412 - RNA, 19 nt, Artificial Sequence
  Description of Artificial Sequence: Synthetic oligonucleotide
guaguugcagcugggcaug

SEQ ID NO: 1723413 - RNA, 19 nt, Artificial Sequence
  Description of Artificial Sequence: Synthetic oligonucleotide
cucgaaccauccgaagugc

SEQ ID NO: 1723414 - RNA, 19 nt, Artificial Sequence
  Description of Artificial Sequence: Synthetic oligonucleotide
cuacucaguccugaccacc

SEQ ID NO: 1723415 - RNA, 19 nt, Artificial Sequence
  Description of Artificial Sequence: Synthetic oligonucleotide
ccucucccaaguuuaaggc

SEQ ID NO: 1723416 - RNA, 19 nt, Artificial Sequence
  Description of Artificial Sequence: Synthetic oligonucleotide
cugaacagcacggggcagc

SEQ ID NO: 1723417 - RNA, 19 nt, Artificial Sequence
  Description of Artificial Sequence: Synthetic oligonucleotide
gacauguaggaaggucacc

SEQ ID NO: 1723418 - RNA, 19 nt, Artificial Sequence
  Description of Artificial Sequence: Synthetic oligonucleotide
auccuggcuaaggacagug

SEQ ID NO: 1723419 - RNA, 19 nt, Artificial Sequence
  Description of Artificial Sequence: Synthetic oligonucleotide
ccauccugaccuuuggccc

SEQ ID NO: 1723420 - RNA, 19 nt, Artificial Sequence
  Description of Artificial Sequence: Synthetic oligonucleotide
aggcggguagcaguggagg

SEQ ID NO: 1723421 - RNA, 19 nt, Artificial Sequence
  Description of Artificial Sequence: Synthetic oligonucleotide
cagauuauugcugaccucu

SEQ ID NO: 1723422 - RNA, 19 nt, Artificial Sequence
  Description of Artificial Sequence: Synthetic oligonucleotide
cccauccugaccuuuggcc

SEQ ID NO: 1723423 - RNA, 19 nt, Artificial Sequence
  Description of Artificial Sequence: Synthetic oligonucleotide
aguacacagccuguauugu

SEQ ID NO: 1723424 - RNA, 19 nt, Artificial Sequence
  Description of Artificial Sequence: Synthetic oligonucleotide
cugcccgucuuucuuccgg

SEQ ID NO: 1723425 - RNA, 19 nt, Artificial Sequence
  Description of Artificial Sequence: Synthetic oligonucleotide
guaaguguccagcccuuuc

SEQ ID NO: 1723426 - RNA, 19 nt, Artificial Sequence
  Description of Artificial Sequence: Synthetic oligonucleotide
gacaacauguacagaggaa

SEQ ID NO: 1723427 - RNA, 19 nt, Artificial Sequence
  Description of Artificial Sequence: Synthetic oligonucleotide
cacgaucucagugguuucc

SEQ ID NO: 1723428 - RNA, 19 nt, Artificial Sequence
  Description of Artificial Sequence: Synthetic oligonucleotide
agguacucagccaaccaga

SEQ ID NO: 1723429 - RNA, 19 nt, Artificial Sequence
  Description of Artificial Sequence: Synthetic oligonucleotide
uaaugacgggauacuggua

SEQ ID NO: 1723430 - RNA, 19 nt, Artificial Sequence
  Description of Artificial Sequence: Synthetic oligonucleotide
ggauaaugacgggauacug

SEQ ID NO: 1723431 - RNA, 19 nt, Artificial Sequence
  Description of Artificial Sequence: Synthetic oligonucleotide
gggcagacaauccauagua

SEQ ID NO: 1723432 - RNA, 19 nt, Artificial Sequence
  Description of Artificial Sequence: Synthetic oligonucleotide
cuuaggugggcaauaucua

SEQ ID NO: 1723433 - RNA, 19 nt, Artificial Sequence
  Description of Artificial Sequence: Synthetic oligonucleotide
uguagguggagaggacacu

SEQ ID NO: 1723434 - RNA, 19 nt, Artificial Sequence
  Description of Artificial Sequence: Synthetic oligonucleotide
cugauuggggccagcccug

SEQ ID NO: 1723435 - RNA, 19 nt, Artificial Sequence
  Description of Artificial Sequence: Synthetic oligonucleotide
augacgggauacugguagu

SEQ ID NO: 1723436 - RNA, 19 nt, Artificial Sequence
  Description of Artificial Sequence: Synthetic oligonucleotide
gaaagagcccauuccuccu

SEQ ID NO: 1723437 - RNA, 19 nt, Artificial Sequence
  Description of Artificial Sequence: Synthetic oligonucleotide
ccauugugacagauuauug

SEQ ID NO: 1723438 - RNA, 19 nt, Artificial Sequence
  Description of Artificial Sequence: Synthetic oligonucleotide
auuuaugcauacacacgau

SEQ ID NO: 1723439 - RNA, 19 nt, Artificial Sequence
  Description of Artificial Sequence: Synthetic oligonucleotide
accugagcccuggucauag

SEQ ID NO: 1723440 - RNA, 19 nt, Artificial Sequence
  Description of Artificial Sequence: Synthetic oligonucleotide
auuccugauacaaguucgu

SEQ ID NO: 1723441 - RNA, 19 nt, Artificial Sequence
  Description of Artificial Sequence: Synthetic oligonucleotide
uggagugaaaagggagccu

SEQ ID NO: 1723442 - RNA, 19 nt, Artificial Sequence
  Description of Artificial Sequence: Synthetic oligonucleotide
gaccaagggcagacaaucc

SEQ ID NO: 1723443 - RNA, 19 nt, Artificial Sequence
  Description of Artificial Sequence: Synthetic oligonucleotide
gagccugaguccauuguga

SEQ ID NO: 1723444 - RNA, 19 nt, Artificial Sequence
  Description of Artificial Sequence: Synthetic oligonucleotide
gguaaggcugagccacagg

SEQ ID NO: 1723445 - RNA, 19 nt, Artificial Sequence
  Description of Artificial Sequence: Synthetic oligonucleotide
uggugccauacauccagau

SEQ ID NO: 1723446 - RNA, 19 nt, Artificial Sequence
  Description of Artificial Sequence: Synthetic oligonucleotide
cagugagaccaggacaaac

SEQ ID NO: 1723447 - RNA, 19 nt, Artificial Sequence
  Description of Artificial Sequence: Synthetic oligonucleotide
gccuugaccuuggugauag

SEQ ID NO: 1723448 - RNA, 19 nt, Artificial Sequence
  Description of Artificial Sequence: Synthetic oligonucleotide
gguagcaguggaggguucg

SEQ ID NO: 1723449 - RNA, 19 nt, Artificial Sequence
  Description of Artificial Sequence: Synthetic oligonucleotide
agguacaugacaacaugua

SEQ ID NO: 1723450 - RNA, 19 nt, Artificial Sequence
  Description of Artificial Sequence: Synthetic oligonucleotide
augggaacaguggucccug

SEQ ID NO: 1723451 - RNA, 19 nt, Artificial Sequence
  Description of Artificial Sequence: Synthetic oligonucleotide
gaaccaggcggguagcagu

SEQ ID NO: 1723452 - RNA, 19 nt, Artificial Sequence
  Description of Artificial Sequence: Synthetic oligonucleotide
agcugugggaggggagagc

SEQ ID NO: 1723453 - RNA, 19 nt, Artificial Sequence
  Description of Artificial Sequence: Synthetic oligonucleotide
cugaccaccugagcccugg

SEQ ID NO: 1723454 - RNA, 19 nt, Artificial Sequence
  Description of Artificial Sequence: Synthetic oligonucleotide
gcugaugugcagugagacc

SEQ ID NO: 1723455 - RNA, 19 nt, Artificial Sequence
  Description of Artificial Sequence: Synthetic oligonucleotide
ugcccgucuuucuuccgga

SEQ ID NO: 1723456 - RNA, 19 nt, Artificial Sequence
  Description of Artificial Sequence: Synthetic oligonucleotide
uauaagcugugugccccac

SEQ ID NO: 1723457 - RNA, 19 nt, Artificial Sequence
  Description of Artificial Sequence: Synthetic oligonucleotide
ucuucagugugaggagaaa

SEQ ID NO: 1723458 - RNA, 19 nt, Artificial Sequence
  Description of Artificial Sequence: Synthetic oligonucleotide
uuccugauacaaguucgua

SEQ ID NO: 1723459 - RNA, 19 nt, Artificial Sequence
  Description of Artificial Sequence: Synthetic oligonucleotide
cugggcaugaaguaguauu

SEQ ID NO: 1723460 - RNA, 19 nt, Artificial Sequence
  Description of Artificial Sequence: Synthetic oligonucleotide
acucaguccugaccaccug

SEQ ID NO: 1723461 - RNA, 19 nt, Artificial Sequence
  Description of Artificial Sequence: Synthetic oligonucleotide
cuaaggacagugggaacca

SEQ ID NO: 1723462 - RNA, 19 nt, Artificial Sequence
  Description of Artificial Sequence: Synthetic oligonucleotide
gauuggggccagcccugag

SEQ ID NO: 1723463 - RNA, 19 nt, Artificial Sequence
  Description of Artificial Sequence: Synthetic oligonucleotide
ucguaacagccuccauccu

SEQ ID NO: 1723464 - RNA, 19 nt, Artificial Sequence
  Description of Artificial Sequence: Synthetic oligonucleotide
ccggagaauaaauaucaca

SEQ ID NO: 1723465 - RNA, 19 nt, Artificial Sequence
  Description of Artificial Sequence: Synthetic oligonucleotide
cagguacaugacaacaugu

SEQ ID NO: 1723466 - RNA, 19 nt, Artificial Sequence
  Description of Artificial Sequence: Synthetic oligonucleotide
ggcggguagcaguggaggg

SEQ ID NO: 1723467 - RNA, 19 nt, Artificial Sequence
  Description of Artificial Sequence: Synthetic oligonucleotide
gccagguguagguacucag

SEQ ID NO: 1723468 - RNA, 19 nt, Artificial Sequence
  Description of Artificial Sequence: Synthetic oligonucleotide
cuucaguguggagugaaaa

SEQ ID NO: 1723469 - RNA, 19 nt, Artificial Sequence
  Description of Artificial Sequence: Synthetic oligonucleotide
cucuucagugugaggagaa

SEQ ID NO: 1723470 - RNA, 19 nt, Artificial Sequence
  Description of Artificial Sequence: Synthetic oligonucleotide
gccgcuuucccuuagugua

SEQ ID NO: 1723471 - RNA, 19 nt, Artificial Sequence
  Description of Artificial Sequence: Synthetic oligonucleotide
cacuuaggugggcaauauc

SEQ ID NO: 1723472 - RNA, 19 nt, Artificial Sequence
  Description of Artificial Sequence: Synthetic oligonucleotide
cuauaagcugugugcccca

SEQ ID NO: 1723473 - RNA, 19 nt, Artificial Sequence
  Description of Artificial Sequence: Synthetic oligonucleotide
gucauagguguagguggag

SEQ ID NO: 1723474 - RNA, 19 nt, Artificial Sequence
  Description of Artificial Sequence: Synthetic oligonucleotide
aaguaaguguccagcccuu

SEQ ID NO: 1723475 - RNA, 19 nt, Artificial Sequence
  Description of Artificial Sequence: Synthetic oligonucleotide
uccugaccaccugagcccu

SEQ ID NO: 1723476 - RNA, 19 nt, Artificial Sequence
  Description of Artificial Sequence: Synthetic oligonucleotide
agccaaccagacaugcaug

SEQ ID NO: 1723477 - RNA, 19 nt, Artificial Sequence
  Description of Artificial Sequence: Synthetic oligonucleotide
guacucagccaaccagaca

SEQ ID NO: 1723478 - RNA, 19 nt, Artificial Sequence
  Description of Artificial Sequence: Synthetic oligonucleotide
cugaguguuccucucccaa

SEQ ID NO: 1723479 - RNA, 19 nt, Artificial Sequence
  Description of Artificial Sequence: Synthetic oligonucleotide
ucacagcgccagguguagg

SEQ ID NO: 1723480 - RNA, 19 nt, Artificial Sequence
  Description of Artificial Sequence: Synthetic oligonucleotide
caguccugaccaccugagc

SEQ ID NO: 1723481 - RNA, 19 nt, Artificial Sequence
  Description of Artificial Sequence: Synthetic oligonucleotide
ccauacauccagaugaggu

SEQ ID NO: 1723482 - RNA, 19 nt, Artificial Sequence
  Description of Artificial Sequence: Synthetic oligonucleotide
ucaggacuauuggaauaau

SEQ ID NO: 1723483 - RNA, 19 nt, Artificial Sequence
  Description of Artificial Sequence: Synthetic oligonucleotide
aguucguaacagccuccau

SEQ ID NO: 1723484 - RNA, 19 nt, Artificial Sequence
  Description of Artificial Sequence: Synthetic oligonucleotide
gaccaccugagcccugguc

SEQ ID NO: 1723485 - RNA, 19 nt, Artificial Sequence
  Description of Artificial Sequence: Synthetic oligonucleotide
gguacucagccaaccagac

SEQ ID NO: 1723486 - RNA, 19 nt, Artificial Sequence
  Description of Artificial Sequence: Synthetic oligonucleotide
ugacgggauacugguaguu

SEQ ID NO: 1723487 - RNA, 19 nt, Artificial Sequence
  Description of Artificial Sequence: Synthetic oligonucleotide
cagccgcuuucccuuagug

SEQ ID NO: 1723488 - RNA, 19 nt, Artificial Sequence
  Description of Artificial Sequence: Synthetic oligonucleotide
ugugugccccaccuccauu

SEQ ID NO: 1723489 - RNA, 19 nt, Artificial Sequence
  Description of Artificial Sequence: Synthetic oligonucleotide
ccacaagacccugauuggg

SEQ ID NO: 1723490 - RNA, 19 nt, Artificial Sequence
  Description of Artificial Sequence: Synthetic oligonucleotide
ggccacucgaaccauccga

SEQ ID NO: 1723491 - RNA, 19 nt, Artificial Sequence
  Description of Artificial Sequence: Synthetic oligonucleotide
uggaggguucggagggauc

SEQ ID NO: 1723492 - RNA, 19 nt, Artificial Sequence
  Description of Artificial Sequence: Synthetic oligonucleotide
ggaggguucggagggauca

SEQ ID NO: 1723493 - RNA, 19 nt, Artificial Sequence
  Description of Artificial Sequence: Synthetic oligonucleotide
gaggguucggagggaucag

SEQ ID NO: 1723494 - RNA, 19 nt, Artificial Sequence
  Description of Artificial Sequence: Synthetic oligonucleotide
ugugccccaccuccauuua

SEQ ID NO: 1723495 - RNA, 19 nt, Artificial Sequence
  Description of Artificial Sequence: Synthetic oligonucleotide
caauaucuaggccaugcuu

SEQ ID NO: 1723496 - RNA, 19 nt, Artificial Sequence
  Description of Artificial Sequence: Synthetic oligonucleotide
gcaugcuucaucaauuccu

SEQ ID NO: 1723497 - RNA, 19 nt, Artificial Sequence
  Description of Artificial Sequence: Synthetic oligonucleotide
ccauuuugcugaacagcac

SEQ ID NO: 1723498 - RNA, 19 nt, Artificial Sequence
  Description of Artificial Sequence: Synthetic oligonucleotide
gaacagcacggggcagccg

SEQ ID NO: 1723499 - RNA, 19 nt, Artificial Sequence
  Description of Artificial Sequence: Synthetic oligonucleotide
acugguggaugcugcccaa

SEQ ID NO: 1723500 - RNA, 19 nt, Artificial Sequence
  Description of Artificial Sequence: Synthetic oligonucleotide
augugcagugagaccagga

SEQ ID NO: 1723501 - RNA, 19 nt, Artificial Sequence
  Description of Artificial Sequence: Synthetic oligonucleotide
caccuccauuuaugcauac

SEQ ID NO: 1723502 - RNA, 19 nt, Artificial Sequence
  Description of Artificial Sequence: Synthetic oligonucleotide
gccauacauccagaugagg

SEQ ID NO: 1723503 - RNA, 19 nt, Artificial Sequence
  Description of Artificial Sequence: Synthetic oligonucleotide
ugauuggggccagcccuga

SEQ ID NO: 1723504 - RNA, 19 nt, Artificial Sequence
  Description of Artificial Sequence: Synthetic oligonucleotide
cuucucaguuggccuugac

SEQ ID NO: 1723505 - RNA, 19 nt, Artificial Sequence
  Description of Artificial Sequence: Synthetic oligonucleotide
ggaaccaggcggguagcag

SEQ ID NO: 1723506 - RNA, 19 nt, Artificial Sequence
  Description of Artificial Sequence: Synthetic oligonucleotide
gcaugaaguaguauuggcu

SEQ ID NO: 1723507 - RNA, 19 nt, Artificial Sequence
  Description of Artificial Sequence: Synthetic oligonucleotide
gccuguauugucaggccug

SEQ ID NO: 1723508 - RNA, 19 nt, Artificial Sequence
  Description of Artificial Sequence: Synthetic oligonucleotide
guauuggcugaugugcagu

SEQ ID NO: 1723509 - RNA, 19 nt, Artificial Sequence
  Description of Artificial Sequence: Synthetic oligonucleotide
gccuccauccuggcuaagg

SEQ ID NO: 1723510 - RNA, 19 nt, Artificial Sequence
  Description of Artificial Sequence: Synthetic oligonucleotide
ugggaacaguggucccugu

SEQ ID NO: 1723511 - RNA, 19 nt, Artificial Sequence
  Description of Artificial Sequence: Synthetic oligonucleotide
gauggcugucauauguuuu

SEQ ID NO: 1723512 - RNA, 19 nt, Artificial Sequence
  Description of Artificial Sequence: Synthetic oligonucleotide
aaagggagccugaguccau

SEQ ID NO: 1723513 - RNA, 19 nt, Artificial Sequence
  Description of Artificial Sequence: Synthetic oligonucleotide
ugucaggccugcugcccau

SEQ ID NO: 1723514 - RNA, 19 nt, Artificial Sequence
  Description of Artificial Sequence: Synthetic oligonucleotide
gccccaccuccauuuaugc

SEQ ID NO: 1723515 - RNA, 19 nt, Artificial Sequence
  Description of Artificial Sequence: Synthetic oligonucleotide
agauuauugcugaccucuu

SEQ ID NO: 1723516 - RNA, 19 nt, Artificial Sequence
  Description of Artificial Sequence: Synthetic oligonucleotide
ugaccaccugagcccuggu

SEQ ID NO: 1723517 - RNA, 19 nt, Artificial Sequence
  Description of Artificial Sequence: Synthetic oligonucleotide
cacacgaucucagugguuu

SEQ ID NO: 1723518 - RNA, 19 nt, Artificial Sequence
  Description of Artificial Sequence: Synthetic oligonucleotide
cacggggcagccgcuuucc

SEQ ID NO: 1723519 - RNA, 19 nt, Artificial Sequence
  Description of Artificial Sequence: Synthetic oligonucleotide
ccuguauugucaggccugc

SEQ ID NO: 1723520 - RNA, 19 nt, Artificial Sequence
  Description of Artificial Sequence: Synthetic oligonucleotide
aguaaguguccagcccuuu

SEQ ID NO: 1723521 - RNA, 19 nt, Artificial Sequence
  Description of Artificial Sequence: Synthetic oligonucleotide
gaggggagagccaguccuc

SEQ ID NO: 1723522 - RNA, 19 nt, Artificial Sequence
  Description of Artificial Sequence: Synthetic oligonucleotide
ggcuaaggacagugggaac

SEQ ID NO: 1723523 - RNA, 19 nt, Artificial Sequence
  Description of Artificial Sequence: Synthetic oligonucleotide
agcgccagguguagguacu

SEQ ID NO: 1723524 - RNA, 19 nt, Artificial Sequence
  Description of Artificial Sequence: Synthetic oligonucleotide
gcuggaguuccauuuugcu

SEQ ID NO: 1723525 - RNA, 19 nt, Artificial Sequence
  Description of Artificial Sequence: Synthetic oligonucleotide
acauccagaugagguggau

SEQ ID NO: 1723526 - RNA, 19 nt, Artificial Sequence
  Description of Artificial Sequence: Synthetic oligonucleotide
ccuacucaguccugaccac

SEQ ID NO: 1723527 - RNA, 19 nt, Artificial Sequence
  Description of Artificial Sequence: Synthetic oligonucleotide
ccauccgaagugccucagg

SEQ ID NO: 1723528 - RNA, 19 nt, Artificial Sequence
  Description of Artificial Sequence: Synthetic oligonucleotide
gcaauaucuaggccaugcu

SEQ ID NO: 1723529 - RNA, 19 nt, Artificial Sequence
  Description of Artificial Sequence: Synthetic oligonucleotide
auggugccauacauccaga

SEQ ID NO: 1723530 - RNA, 19 nt, Artificial Sequence
  Description of Artificial Sequence: Synthetic oligonucleotide
ggugauagcuggaguucca

SEQ ID NO: 1723531 - RNA, 19 nt, Artificial Sequence
  Description of Artificial Sequence: Synthetic oligonucleotide
ccgucuuucuuccggagaa

SEQ ID NO: 1723532 - RNA, 19 nt, Artificial Sequence
  Description of Artificial Sequence: Synthetic oligonucleotide
gguggaugcugcccaaggu

SEQ ID NO: 1723533 - RNA, 19 nt, Artificial Sequence
  Description of Artificial Sequence: Synthetic oligonucleotide
cagcccuuucagccuccag

SEQ ID NO: 1723534 - RNA, 19 nt, Artificial Sequence
  Description of Artificial Sequence: Synthetic oligonucleotide
ccuccuacucaguccugac

SEQ ID NO: 1723535 - RNA, 19 nt, Artificial Sequence
  Description of Artificial Sequence: Synthetic oligonucleotide
agcacggggcagccgcuuu

SEQ ID NO: 1723536 - RNA, 19 nt, Artificial Sequence
  Description of Artificial Sequence: Synthetic oligonucleotide
aggccacaagacccugauu

SEQ ID NO: 1723537 - RNA, 19 nt, Artificial Sequence
  Description of Artificial Sequence: Synthetic oligonucleotide
aguugcagcugggcaugaa

SEQ ID NO: 1723538 - RNA, 19 nt, Artificial Sequence
  Description of Artificial Sequence: Synthetic oligonucleotide
cccuggucauagguguagg

SEQ ID NO: 1723539 - RNA, 19 nt, Artificial Sequence
  Description of Artificial Sequence: Synthetic oligonucleotide
gcccgucuuucuuccggag

SEQ ID NO: 1723540 - RNA, 19 nt, Artificial Sequence
  Description of Artificial Sequence: Synthetic oligonucleotide
gggagagccaguccuccua

SEQ ID NO: 1723541 - RNA, 19 nt, Artificial Sequence
  Description of Artificial Sequence: Synthetic oligonucleotide
ccaggacaaacuggaucag

SEQ ID NO: 1723542 - RNA, 19 nt, Artificial Sequence
  Description of Artificial Sequence: Synthetic oligonucleotide
gccacucgaaccauccgaa

SEQ ID NO: 1723543 - RNA, 19 nt, Artificial Sequence
  Description of Artificial Sequence: Synthetic oligonucleotide
gugauagcuggaguuccau

SEQ ID NO: 1723544 - RNA, 19 nt, Artificial Sequence
  Description of Artificial Sequence: Synthetic oligonucleotide
ggcacuuaggugggcaaua

SEQ ID NO: 1723545 - RNA, 19 nt, Artificial Sequence
  Description of Artificial Sequence: Synthetic oligonucleotide
cagccuccauccuggcuaa

SEQ ID NO: 1723546 - RNA, 19 nt, Artificial Sequence
  Description of Artificial Sequence: Synthetic oligonucleotide
caaugaccuuggaaagcau

SEQ ID NO: 1723547 - RNA, 19 nt, Artificial Sequence
  Description of Artificial Sequence: Synthetic oligonucleotide
gccucaggacuauuggaau

SEQ ID NO: 1723548 - RNA, 19 nt, Artificial Sequence
  Description of Artificial Sequence: Synthetic oligonucleotide
acagcacggggcagccgcu

SEQ ID NO: 1723549 - RNA, 19 nt, Artificial Sequence
  Description of Artificial Sequence: Synthetic oligonucleotide
ggucaccugcccgucuuuc

SEQ ID NO: 1723550 - RNA, 19 nt, Artificial Sequence
  Description of Artificial Sequence: Synthetic oligonucleotide
ugccggccacuuccucauc

SEQ ID NO: 1723551 - RNA, 19 nt, Artificial Sequence
  Description of Artificial Sequence: Synthetic oligonucleotide
acacacgaucucagugguu

SEQ ID NO: 1723552 - RNA, 19 nt, Artificial Sequence
  Description of Artificial Sequence: Synthetic oligonucleotide
ccuuaguguaagagugaua

SEQ ID NO: 1723553 - RNA, 19 nt, Artificial Sequence
  Description of Artificial Sequence: Synthetic oligonucleotide
cccaaguuuaaggcaggga

SEQ ID NO: 1723554 - RNA, 19 nt, Artificial Sequence
  Description of Artificial Sequence: Synthetic oligonucleotide
caugaagagccaggccacu

SEQ ID NO: 1723555 - RNA, 19 nt, Artificial Sequence
  Description of Artificial Sequence: Synthetic oligonucleotide
cgggauacugguaguugca

SEQ ID NO: 1723556 - RNA, 19 nt, Artificial Sequence
  Description of Artificial Sequence: Synthetic oligonucleotide
ccgaagugccucaggacua

SEQ ID NO: 1723557 - RNA, 19 nt, Artificial Sequence
  Description of Artificial Sequence: Synthetic oligonucleotide
cccgucuuucuuccggaga

SEQ ID NO: 1723558 - RNA, 19 nt, Artificial Sequence
  Description of Artificial Sequence: Synthetic oligonucleotide
guccauugugacagauuau

SEQ ID NO: 1723559 - RNA, 19 nt, Artificial Sequence
  Description of Artificial Sequence: Synthetic oligonucleotide
cugccggccacuuccucau

SEQ ID NO: 1723560 - RNA, 19 nt, Artificial Sequence
  Description of Artificial Sequence: Synthetic oligonucleotide
ccuugaccuuggugauagc

SEQ ID NO: 1723561 - RNA, 19 nt, Artificial Sequence
  Description of Artificial Sequence: Synthetic oligonucleotide
cgaucucagugguuuccuc

SEQ ID NO: 1723562 - RNA, 19 nt, Artificial Sequence
  Description of Artificial Sequence: Synthetic oligonucleotide
cagggucacagcgccaggu

SEQ ID NO: 1723563 - RNA, 19 nt, Artificial Sequence
  Description of Artificial Sequence: Synthetic oligonucleotide
ccaccuccauuuaugcaua

SEQ ID NO: 1723564 - RNA, 19 nt, Artificial Sequence
  Description of Artificial Sequence: Synthetic oligonucleotide
uccugaccuuuggcccaga

SEQ ID NO: 1723565 - RNA, 19 nt, Artificial Sequence
  Description of Artificial Sequence: Synthetic oligonucleotide
gcugugugccccaccucca

SEQ ID NO: 1723566 - RNA, 19 nt, Artificial Sequence
  Description of Artificial Sequence: Synthetic oligonucleotide
gggcaauaucuaggccaug

SEQ ID NO: 1723567 - RNA, 19 nt, Artificial Sequence
  Description of Artificial Sequence: Synthetic oligonucleotide
ccccaccuccauuuaugca

SEQ ID NO: 1723568 - RNA, 19 nt, Artificial Sequence
  Description of Artificial Sequence: Synthetic oligonucleotide
gggaaccaggcggguagca

SEQ ID NO: 1723569 - RNA, 19 nt, Artificial Sequence
  Description of Artificial Sequence: Synthetic oligonucleotide
cuccuggagcaaucuuuau

SEQ ID NO: 1723570 - RNA, 19 nt, Artificial Sequence
  Description of Artificial Sequence: Synthetic oligonucleotide
gccggccacuuccucaucu

SEQ ID NO: 1723571 - RNA, 19 nt, Artificial Sequence
  Description of Artificial Sequence: Synthetic oligonucleotide
gugccccaccuccauuuau

SEQ ID NO: 1723572 - RNA, 19 nt, Artificial Sequence
  Description of Artificial Sequence: Synthetic oligonucleotide
guggaggguucggagggau

SEQ ID NO: 1723573 - RNA, 19 nt, Artificial Sequence
  Description of Artificial Sequence: Synthetic oligonucleotide
gcccaaggugcaguccuga

SEQ ID NO: 1723574 - RNA, 19 nt, Artificial Sequence
  Description of Artificial Sequence: Synthetic oligonucleotide
cgaaccauccgaagugccu

SEQ ID NO: 1723575 - RNA, 19 nt, Artificial Sequence
  Description of Artificial Sequence: Synthetic oligonucleotide
cugugugccccaccuccau

SEQ ID NO: 1723576 - RNA, 19 nt, Artificial Sequence
  Description of Artificial Sequence: Synthetic oligonucleotide
gaagugccucaggacuauu

SEQ ID NO: 1723577 - RNA, 19 nt, Artificial Sequence
  Description of Artificial Sequence: Synthetic oligonucleotide
ccugaccaccugagcccug

SEQ ID NO: 1723578 - RNA, 19 nt, Artificial Sequence
  Description of Artificial Sequence: Synthetic oligonucleotide
gcuucucaguuggccuuga

SEQ ID NO: 1723579 - RNA, 19 nt, Artificial Sequence
  Description of Artificial Sequence: Synthetic oligonucleotide
cccuuaguguaagagugau

SEQ ID NO: 1723580 - RNA, 19 nt, Artificial Sequence
  Description of Artificial Sequence: Synthetic oligonucleotide
ggggagagccaguccuccu

SEQ ID NO: 1723581 - RNA, 19 nt, Artificial Sequence
  Description of Artificial Sequence: Synthetic oligonucleotide
cuguauugucaggccugcu

SEQ ID NO: 1723582 - RNA, 19 nt, Artificial Sequence
  Description of Artificial Sequence: Synthetic oligonucleotide
gcagugagaccaggacaaa

SEQ ID NO: 1723583 - RNA, 19 nt, Artificial Sequence
  Description of Artificial Sequence: Synthetic oligonucleotide
gcacuuaggugggcaauau

SEQ ID NO: 1723584 - RNA, 19 nt, Artificial Sequence
  Description of Artificial Sequence: Synthetic oligonucleotide
cauccuggcuaaggacagu

SEQ ID NO: 1723585 - RNA, 19 nt, Artificial Sequence
  Description of Artificial Sequence: Synthetic oligonucleotide
ggguagcaguggaggguuc

SEQ ID NO: 1723586 - RNA, 19 nt, Artificial Sequence
  Description of Artificial Sequence: Synthetic oligonucleotide
gcagccgcuuucccuuagu

SEQ ID NO: 1723587 - RNA, 19 nt, Artificial Sequence
  Description of Artificial Sequence: Synthetic oligonucleotide
gcgccagguguagguacuc

SEQ ID NO: 1723588 - RNA, 19 nt, Artificial Sequence
  Description of Artificial Sequence: Synthetic oligonucleotide
caccugagcccuggucaua

SEQ ID NO: 1723589 - RNA, 19 nt, Artificial Sequence
  Description of Artificial Sequence: Synthetic oligonucleotide
cagggccgccugccggcca

SEQ ID NO: 1723590 - RNA, 19 nt, Artificial Sequence
  Description of Artificial Sequence: Synthetic oligonucleotide
gccgccugccggccacuuc

SEQ ID NO: 1723591 - RNA, 19 nt, Artificial Sequence
  Description of Artificial Sequence: Synthetic oligonucleotide
ccagacaugcaugcuucau

SEQ ID NO: 1723592 - RNA, 19 nt, Artificial Sequence
  Description of Artificial Sequence: Synthetic oligonucleotide
cgaagugccucaggacuau

SEQ ID NO: 1723593 - RNA, 19 nt, Artificial Sequence
  Description of Artificial Sequence: Synthetic oligonucleotide
cagcacggggcagccgcuu

SEQ ID NO: 1723594 - RNA, 19 nt, Artificial Sequence
  Description of Artificial Sequence: Synthetic oligonucleotide
cgucuuucuuccggagaau

SEQ ID NO: 1723595 - RNA, 19 nt, Artificial Sequence
  Description of Artificial Sequence: Synthetic oligonucleotide
aauauaauaacccagaucc

SEQ ID NO: 1723596 - RNA, 19 nt, Artificial Sequence
  Description of Artificial Sequence: Synthetic oligonucleotide
aauuugagaacuucagucc

SEQ ID NO: 1723597 - RNA, 19 nt, Artificial Sequence
  Description of Artificial Sequence: Synthetic oligonucleotide
uaucauuaggaucaaaggg

SEQ ID NO: 1723598 - RNA, 19 nt, Artificial Sequence
  Description of Artificial Sequence: Synthetic oligonucleotide
aaaacgagaucuccgaggc

SEQ ID NO: 1723599 - RNA, 19 nt, Artificial Sequence
  Description of Artificial Sequence: Synthetic oligonucleotide
gggaaugugaucuagaucg

SEQ ID NO: 1723600 - RNA, 19 nt, Artificial Sequence
  Description of Artificial Sequence: Synthetic oligonucleotide
ucuaucauuaggaucaaag

SEQ ID NO: 1723601 - RNA, 19 nt, Artificial Sequence
  Description of Artificial Sequence: Synthetic oligonucleotide
uugaauacagaauuaaagc

SEQ ID NO: 1723602 - RNA, 19 nt, Artificial Sequence
  Description of Artificial Sequence: Synthetic oligonucleotide
gauaauucaacucucacuc

SEQ ID NO: 1723603 - RNA, 19 nt, Artificial Sequence
  Description of Artificial Sequence: Synthetic oligonucleotide
aaccaaagaauccaaauga

SEQ ID NO: 1723604 - RNA, 19 nt, Artificial Sequence
  Description of Artificial Sequence: Synthetic oligonucleotide
uuaaaugugccaaauaaaa

SEQ ID NO: 1723605 - RNA, 19 nt, Artificial Sequence
  Description of Artificial Sequence: Synthetic oligonucleotide
ucuacgaagagacacagac

SEQ ID NO: 1723606 - RNA, 19 nt, Artificial Sequence
  Description of Artificial Sequence: Synthetic oligonucleotide
uaaagggugaauuugagaa

SEQ ID NO: 1723607 - RNA, 19 nt, Artificial Sequence
  Description of Artificial Sequence: Synthetic oligonucleotide
agaaccacaaaucaccuuc

SEQ ID NO: 1723608 - RNA, 19 nt, Artificial Sequence
  Description of Artificial Sequence: Synthetic oligonucleotide
uuaaagcuaaccaagugca

SEQ ID NO: 1723609 - RNA, 19 nt, Artificial Sequence
  Description of Artificial Sequence: Synthetic oligonucleotide
uuacagacauaacaaaucc

SEQ ID NO: 1723610 - RNA, 19 nt, Artificial Sequence
  Description of Artificial Sequence: Synthetic oligonucleotide
uacgaagagacacagaccu

SEQ ID NO: 1723611 - RNA, 19 nt, Artificial Sequence
  Description of Artificial Sequence: Synthetic oligonucleotide
ucuugaucuacgaagagac

SEQ ID NO: 1723612 - RNA, 19 nt, Artificial Sequence
  Description of Artificial Sequence: Synthetic oligonucleotide
aauccaaaugacuuccauc

SEQ ID NO: 1723613 - RNA, 19 nt, Artificial Sequence
  Description of Artificial Sequence: Synthetic oligonucleotide
uguuauuacauucaacaaa

SEQ ID NO: 1723614 - RNA, 19 nt, Artificial Sequence
  Description of Artificial Sequence: Synthetic oligonucleotide
uucaaucaaauucuaaaac

SEQ ID NO: 1723615 - RNA, 19 nt, Artificial Sequence
  Description of Artificial Sequence: Synthetic oligonucleotide
uaucaaaacgagaucuccg

SEQ ID NO: 1723616 - RNA, 19 nt, Artificial Sequence
  Description of Artificial Sequence: Synthetic oligonucleotide
auuagaugguugaugaucc

SEQ ID NO: 1723617 - RNA, 19 nt, Artificial Sequence
  Description of Artificial Sequence: Synthetic oligonucleotide
auugaauacagaauuaaag

SEQ ID NO: 1723618 - RNA, 19 nt, Artificial Sequence
  Description of Artificial Sequence: Synthetic oligonucleotide
ucgagaaccacaaaucacc

SEQ ID NO: 1723619 - RNA, 19 nt, Artificial Sequence
  Description of Artificial Sequence: Synthetic oligonucleotide
aacgacuucuuuuaggaga

SEQ ID NO: 1723620 - RNA, 19 nt, Artificial Sequence
  Description of Artificial Sequence: Synthetic oligonucleotide
acugccguuacacacauag

SEQ ID NO: 1723621 - RNA, 19 nt, Artificial Sequence
  Description of Artificial Sequence: Synthetic oligonucleotide
uucuucgacggcuauagcg

SEQ ID NO: 1723622 - RNA, 19 nt, Artificial Sequence
  Description of Artificial Sequence: Synthetic oligonucleotide
auccauacaguccuuaagg

SEQ ID NO: 1723623 - RNA, 19 nt, Artificial Sequence
  Description of Artificial Sequence: Synthetic oligonucleotide
uugauuagaugguugauga

SEQ ID NO: 1723624 - RNA, 19 nt, Artificial Sequence
  Description of Artificial Sequence: Synthetic oligonucleotide
acagaauuaaagcuaacca

SEQ ID NO: 1723625 - RNA, 19 nt, Artificial Sequence
  Description of Artificial Sequence: Synthetic oligonucleotide
ucgaucucgaccuggaacg

SEQ ID NO: 1723626 - RNA, 19 nt, Artificial Sequence
  Description of Artificial Sequence: Synthetic oligonucleotide
uucguggacuuccugaugg

SEQ ID NO: 1723627 - RNA, 19 nt, Artificial Sequence
  Description of Artificial Sequence: Synthetic oligonucleotide
uagguuacauuuuacagac

SEQ ID NO: 1723628 - RNA, 19 nt, Artificial Sequence
  Description of Artificial Sequence: Synthetic oligonucleotide
gauguuaccaaauugcaaa

SEQ ID NO: 1723629 - RNA, 19 nt, Artificial Sequence
  Description of Artificial Sequence: Synthetic oligonucleotide
aauaccucgauccuuuuau

SEQ ID NO: 1723630 - RNA, 19 nt, Artificial Sequence
  Description of Artificial Sequence: Synthetic oligonucleotide
uuggccgugaaauagaccu

SEQ ID NO: 1723631 - RNA, 19 nt, Artificial Sequence
  Description of Artificial Sequence: Synthetic oligonucleotide
uauagaaccagaccuagau

SEQ ID NO: 1723632 - RNA, 19 nt, Artificial Sequence
  Description of Artificial Sequence: Synthetic oligonucleotide
agaauuaaagcuaaccaag

SEQ ID NO: 1723633 - RNA, 19 nt, Artificial Sequence
  Description of Artificial Sequence: Synthetic oligonucleotide
cagagcaauauaauaaccc

SEQ ID NO: 1723634 - RNA, 19 nt, Artificial Sequence
  Description of Artificial Sequence: Synthetic oligonucleotide
uaacgugacaugauggcag

SEQ ID NO: 1723635 - RNA, 19 nt, Artificial Sequence
  Description of Artificial Sequence: Synthetic oligonucleotide
auucuuucaggacuugcac

SEQ ID NO: 1723636 - RNA, 19 nt, Artificial Sequence
  Description of Artificial Sequence: Synthetic oligonucleotide
uaauucaacucucacucga

SEQ ID NO: 1723637 - RNA, 19 nt, Artificial Sequence
  Description of Artificial Sequence: Synthetic oligonucleotide
ugaucuugaucuacgaaga

SEQ ID NO: 1723638 - RNA, 19 nt, Artificial Sequence
  Description of Artificial Sequence: Synthetic oligonucleotide
ugccguuacacacauagcu

SEQ ID NO: 1723639 - RNA, 19 nt, Artificial Sequence
  Description of Artificial Sequence: Synthetic oligonucleotide
agcaucuaucauuaggauc

SEQ ID NO: 1723640 - RNA, 19 nt, Artificial Sequence
  Description of Artificial Sequence: Synthetic oligonucleotide
agagcaauauaauaaccca

SEQ ID NO: 1723641 - RNA, 19 nt, Artificial Sequence
  Description of Artificial Sequence: Synthetic oligonucleotide
uccauacaguccuuaaggg

SEQ ID NO: 1723642 - RNA, 19 nt, Artificial Sequence
  Description of Artificial Sequence: Synthetic oligonucleotide
uuuauagaaccagaccuag

SEQ ID NO: 1723643 - RNA, 19 nt, Artificial Sequence
  Description of Artificial Sequence: Synthetic oligonucleotide
uuugauuagaugguugaug

SEQ ID NO: 1723644 - RNA, 19 nt, Artificial Sequence
  Description of Artificial Sequence: Synthetic oligonucleotide
caaaacgagaucuccgagg

SEQ ID NO: 1723645 - RNA, 19 nt, Artificial Sequence
  Description of Artificial Sequence: Synthetic oligonucleotide
cuaauucuccuuuaccagc

SEQ ID NO: 1723646 - RNA, 19 nt, Artificial Sequence
  Description of Artificial Sequence: Synthetic oligonucleotide
ucauuaggaucaaagggac

SEQ ID NO: 1723647 - RNA, 19 nt, Artificial Sequence
  Description of Artificial Sequence: Synthetic oligonucleotide
uagaucuucuuagugaagc

SEQ ID NO: 1723648 - RNA, 19 nt, Artificial Sequence
  Description of Artificial Sequence: Synthetic oligonucleotide
gauaagacugccguuacac

SEQ ID NO: 1723649 - RNA, 19 nt, Artificial Sequence
  Description of Artificial Sequence: Synthetic oligonucleotide
gaccauaagauguuauuac

SEQ ID NO: 1723650 - RNA, 19 nt, Artificial Sequence
  Description of Artificial Sequence: Synthetic oligonucleotide
ucuucgacggcuauagcga

SEQ ID NO: 1723651 - RNA, 19 nt, Artificial Sequence
  Description of Artificial Sequence: Synthetic oligonucleotide
gauccuuuuauagaaccag

SEQ ID NO: 1723652 - RNA, 19 nt, Artificial Sequence
  Description of Artificial Sequence: Synthetic oligonucleotide
aacaaaucccuuauaauaa

SEQ ID NO: 1723653 - RNA, 19 nt, Artificial Sequence
  Description of Artificial Sequence: Synthetic oligonucleotide
ucgauccuuuuauagaacc

SEQ ID NO: 1723654 - RNA, 19 nt, Artificial Sequence
  Description of Artificial Sequence: Synthetic oligonucleotide
uaagacugccguuacacac

SEQ ID NO: 1723655 - RNA, 19 nt, Artificial Sequence
  Description of Artificial Sequence: Synthetic oligonucleotide
aaaucccuuauaauaaugu

SEQ ID NO: 1723656 - RNA, 19 nt, Artificial Sequence
  Description of Artificial Sequence: Synthetic oligonucleotide
ucggcuauagcucgcagug

SEQ ID NO: 1723657 - RNA, 19 nt, Artificial Sequence
  Description of Artificial Sequence: Synthetic oligonucleotide
uucgugagcgagaguaucg

SEQ ID NO: 1723658 - RNA, 19 nt, Artificial Sequence
  Description of Artificial Sequence: Synthetic oligonucleotide
uucgaggggaugcugaucu

SEQ ID NO: 1723659 - RNA, 19 nt, Artificial Sequence
  Description of Artificial Sequence: Synthetic oligonucleotide
aauugcaaaguuauuaaua

SEQ ID NO: 1723660 - RNA, 19 nt, Artificial Sequence
  Description of Artificial Sequence: Synthetic oligonucleotide
uuuuauagaaccagaccua

SEQ ID NO: 1723661 - RNA, 19 nt, Artificial Sequence
  Description of Artificial Sequence: Synthetic oligonucleotide
aagggugaauuugagaacu

SEQ ID NO: 1723662 - RNA, 19 nt, Artificial Sequence
  Description of Artificial Sequence: Synthetic oligonucleotide
auaacccagauccauuuug

SEQ ID NO: 1723663 - RNA, 19 nt, Artificial Sequence
  Description of Artificial Sequence: Synthetic oligonucleotide
uccuuuuauagaaccagac

SEQ ID NO: 1723664 - RNA, 19 nt, Artificial Sequence
  Description of Artificial Sequence: Synthetic oligonucleotide
aacgugacaugauggcagg

SEQ ID NO: 1723665 - RNA, 19 nt, Artificial Sequence
  Description of Artificial Sequence: Synthetic oligonucleotide
auaauucaacucucacucg

SEQ ID NO: 1723666 - RNA, 19 nt, Artificial Sequence
  Description of Artificial Sequence: Synthetic oligonucleotide
gauuagaugguugaugauc

SEQ ID NO: 1723667 - RNA, 19 nt, Artificial Sequence
  Description of Artificial Sequence: Synthetic oligonucleotide
cagaccuagaucuucuuag

SEQ ID NO: 1723668 - RNA, 19 nt, Artificial Sequence
  Description of Artificial Sequence: Synthetic oligonucleotide
aacgcgauuggaaauaccu

SEQ ID NO: 1723669 - RNA, 19 nt, Artificial Sequence
  Description of Artificial Sequence: Synthetic oligonucleotide
ucaaaacgagaucuccgag

SEQ ID NO: 1723670 - RNA, 19 nt, Artificial Sequence
  Description of Artificial Sequence: Synthetic oligonucleotide
aucauuaggaucaaaggga

SEQ ID NO: 1723671 - RNA, 19 nt, Artificial Sequence
  Description of Artificial Sequence: Synthetic oligonucleotide
uuauuuguucaaucucugc

SEQ ID NO: 1723672 - RNA, 19 nt, Artificial Sequence
  Description of Artificial Sequence: Synthetic oligonucleotide
auuugagaacuucagucca

SEQ ID NO: 1723673 - RNA, 19 nt, Artificial Sequence
  Description of Artificial Sequence: Synthetic oligonucleotide
aaauaucuaguuagaaaca

SEQ ID NO: 1723674 - RNA, 19 nt, Artificial Sequence
  Description of Artificial Sequence: Synthetic oligonucleotide
cuuaagggcccauaguaac

SEQ ID NO: 1723675 - RNA, 19 nt, Artificial Sequence
  Description of Artificial Sequence: Synthetic oligonucleotide
cuuccaucauacuagugac

SEQ ID NO: 1723676 - RNA, 19 nt, Artificial Sequence
  Description of Artificial Sequence: Synthetic oligonucleotide
aaugugaucuagaucguga

SEQ ID NO: 1723677 - RNA, 19 nt, Artificial Sequence
  Description of Artificial Sequence: Synthetic oligonucleotide
uuaccgacauacaccuugg

SEQ ID NO: 1723678 - RNA, 19 nt, Artificial Sequence
  Description of Artificial Sequence: Synthetic oligonucleotide
aaucccuuauaauaaugua

SEQ ID NO: 1723679 - RNA, 19 nt, Artificial Sequence
  Description of Artificial Sequence: Synthetic oligonucleotide
caauauaauaacccagauc

SEQ ID NO: 1723680 - RNA, 19 nt, Artificial Sequence
  Description of Artificial Sequence: Synthetic oligonucleotide
ugaucuacgaagagacaca

SEQ ID NO: 1723681 - RNA, 19 nt, Artificial Sequence
  Description of Artificial Sequence: Synthetic oligonucleotide
uccuagguuacauuuuaca

SEQ ID NO: 1723682 - RNA, 19 nt, Artificial Sequence
  Description of Artificial Sequence: Synthetic oligonucleotide
ucaacucucacucgagaac

SEQ ID NO: 1723683 - RNA, 19 nt, Artificial Sequence
  Description of Artificial Sequence: Synthetic oligonucleotide
acggcuauagcgaugacag

SEQ ID NO: 1723684 - RNA, 19 nt, Artificial Sequence
  Description of Artificial Sequence: Synthetic oligonucleotide
auagaccuggaucucgauc

SEQ ID NO: 1723685 - RNA, 19 nt, Artificial Sequence
  Description of Artificial Sequence: Synthetic oligonucleotide
gagcaauauaauaacccag

SEQ ID NO: 1723686 - RNA, 19 nt, Artificial Sequence
  Description of Artificial Sequence: Synthetic oligonucleotide
auuuugaucggcugcuucu

SEQ ID NO: 1723687 - RNA, 19 nt, Artificial Sequence
  Description of Artificial Sequence: Synthetic oligonucleotide
ucgauaauucaacucucac

SEQ ID NO: 1723688 - RNA, 19 nt, Artificial Sequence
  Description of Artificial Sequence: Synthetic oligonucleotide
accuagaucuucuuaguga

SEQ ID NO: 1723689 - RNA, 19 nt, Artificial Sequence
  Description of Artificial Sequence: Synthetic oligonucleotide
agguuaccgacauacaccu

SEQ ID NO: 1723690 - RNA, 19 nt, Artificial Sequence
  Description of Artificial Sequence: Synthetic oligonucleotide
uaccucgauccuuuuauag

SEQ ID NO: 1723691 - RNA, 19 nt, Artificial Sequence
  Description of Artificial Sequence: Synthetic oligonucleotide
cuaucaaaacgagaucucc

SEQ ID NO: 1723692 - RNA, 19 nt, Artificial Sequence
  Description of Artificial Sequence: Synthetic oligonucleotide
uugaucggcugcuucuugg

SEQ ID NO: 1723693 - RNA, 19 nt, Artificial Sequence
  Description of Artificial Sequence: Synthetic oligonucleotide
agggacgucgggcaggugg

SEQ ID NO: 1723694 - RNA, 19 nt, Artificial Sequence
  Description of Artificial Sequence: Synthetic oligonucleotide
gugaaauagaccuggaucu

SEQ ID NO: 1723695 - RNA, 19 nt, Artificial Sequence
  Description of Artificial Sequence: Synthetic oligonucleotide
cugugaauuuuacagagca

SEQ ID NO: 1723696 - RNA, 19 nt, Artificial Sequence
  Description of Artificial Sequence: Synthetic oligonucleotide
ugcagauuuauuguugaac

SEQ ID NO: 1723697 - RNA, 19 nt, Artificial Sequence
  Description of Artificial Sequence: Synthetic oligonucleotide
caggacuugcacuucuucg

SEQ ID NO: 1723698 - RNA, 19 nt, Artificial Sequence
  Description of Artificial Sequence: Synthetic oligonucleotide
ugacaugauggcaggcccg

SEQ ID NO: 1723699 - RNA, 19 nt, Artificial Sequence
  Description of Artificial Sequence: Synthetic oligonucleotide
acuagugaccugauguuac

SEQ ID NO: 1723700 - RNA, 19 nt, Artificial Sequence
  Description of Artificial Sequence: Synthetic oligonucleotide
cuccauaccgcccguaacg

SEQ ID NO: 1723701 - RNA, 19 nt, Artificial Sequence
  Description of Artificial Sequence: Synthetic oligonucleotide
cauacuagugaccugaugu

SEQ ID NO: 1723702 - RNA, 19 nt, Artificial Sequence
  Description of Artificial Sequence: Synthetic oligonucleotide
uuaagggcccauaguaacu

SEQ ID NO: 1723703 - RNA, 19 nt, Artificial Sequence
  Description of Artificial Sequence: Synthetic oligonucleotide
uguauucaaucaaauucua

SEQ ID NO: 1723704 - RNA, 19 nt, Artificial Sequence
  Description of Artificial Sequence: Synthetic oligonucleotide
aguccuuaagggcccauag

SEQ ID NO: 1723705 - RNA, 19 nt, Artificial Sequence
  Description of Artificial Sequence: Synthetic oligonucleotide
gauuggaaauaccucgauc

SEQ ID NO: 1723706 - RNA, 19 nt, Artificial Sequence
  Description of Artificial Sequence: Synthetic oligonucleotide
gaugguugaugauccuucc

SEQ ID NO: 1723707 - RNA, 19 nt, Artificial Sequence
  Description of Artificial Sequence: Synthetic oligonucleotide
gaucuacgaagagacacag

SEQ ID NO: 1723708 - RNA, 19 nt, Artificial Sequence
  Description of Artificial Sequence: Synthetic oligonucleotide
auaagcauaaugucccuuu

SEQ ID NO: 1723709 - RNA, 19 nt, Artificial Sequence
  Description of Artificial Sequence: Synthetic oligonucleotide
caaauugcaaaguuauuaa

SEQ ID NO: 1723710 - RNA, 19 nt, Artificial Sequence
  Description of Artificial Sequence: Synthetic oligonucleotide
uaauaacccagauccauuu

SEQ ID NO: 1723711 - RNA, 19 nt, Artificial Sequence
  Description of Artificial Sequence: Synthetic oligonucleotide
ugguugaugauccuuccua

SEQ ID NO: 1723712 - RNA, 19 nt, Artificial Sequence
  Description of Artificial Sequence: Synthetic oligonucleotide
gcaucuaucauuaggauca

SEQ ID NO: 1723713 - RNA, 19 nt, Artificial Sequence
  Description of Artificial Sequence: Synthetic oligonucleotide
agacauaacaaaucccuua

SEQ ID NO: 1723714 - RNA, 19 nt, Artificial Sequence
  Description of Artificial Sequence: Synthetic oligonucleotide
aucaaagggacgucgggca

SEQ ID NO: 1723715 - RNA, 19 nt, Artificial Sequence
  Description of Artificial Sequence: Synthetic oligonucleotide
agcaauauaauaacccaga

SEQ ID NO: 1723716 - RNA, 19 nt, Artificial Sequence
  Description of Artificial Sequence: Synthetic oligonucleotide
gaucuugaucuacgaagag

SEQ ID NO: 1723717 - RNA, 19 nt, Artificial Sequence
  Description of Artificial Sequence: Synthetic oligonucleotide
gacuugcacuucuucgugg

SEQ ID NO: 1723718 - RNA, 19 nt, Artificial Sequence
  Description of Artificial Sequence: Synthetic oligonucleotide
agaugguugaugauccuuc

SEQ ID NO: 1723719 - RNA, 19 nt, Artificial Sequence
  Description of Artificial Sequence: Synthetic oligonucleotide
gaucaaagggacgucgggc

SEQ ID NO: 1723720 - RNA, 19 nt, Artificial Sequence
  Description of Artificial Sequence: Synthetic oligonucleotide
ccuagguuacauuuuacag

SEQ ID NO: 1723721 - RNA, 19 nt, Artificial Sequence
  Description of Artificial Sequence: Synthetic oligonucleotide
cuauagcucgcagugcucg

SEQ ID NO: 1723722 - RNA, 19 nt, Artificial Sequence
  Description of Artificial Sequence: Synthetic oligonucleotide
cucgagaaccacaaaucac

SEQ ID NO: 1723723 - RNA, 19 nt, Artificial Sequence
  Description of Artificial Sequence: Synthetic oligonucleotide
cuacgaagagacacagacc

SEQ ID NO: 1723724 - RNA, 19 nt, Artificial Sequence
  Description of Artificial Sequence: Synthetic oligonucleotide
ugcuucgugagcgagagua

SEQ ID NO: 1723725 - RNA, 19 nt, Artificial Sequence
  Description of Artificial Sequence: Synthetic oligonucleotide
gagaguaucgccuuccccu

SEQ ID NO: 1723726 - RNA, 19 nt, Artificial Sequence
  Description of Artificial Sequence: Synthetic oligonucleotide
ucgaccuggaacgcgauug

SEQ ID NO: 1723727 - RNA, 19 nt, Artificial Sequence
  Description of Artificial Sequence: Synthetic oligonucleotide
gaccuagaucuucuuagug

SEQ ID NO: 1723728 - RNA, 19 nt, Artificial Sequence
  Description of Artificial Sequence: Synthetic oligonucleotide
ucuggcgauccauacaguc

SEQ ID NO: 1723729 - RNA, 19 nt, Artificial Sequence
  Description of Artificial Sequence: Synthetic oligonucleotide
aggacuugcacuucuucgu

SEQ ID NO: 1723730 - RNA, 19 nt, Artificial Sequence
  Description of Artificial Sequence: Synthetic oligonucleotide
cuggaucucgaucucgacc

SEQ ID NO: 1723731 - RNA, 19 nt, Artificial Sequence
  Description of Artificial Sequence: Synthetic oligonucleotide
ugcaacagauaagacugcc

SEQ ID NO: 1723732 - RNA, 19 nt, Artificial Sequence
  Description of Artificial Sequence: Synthetic oligonucleotide
ucauacuagugaccugaug

SEQ ID NO: 1723733 - RNA, 19 nt, Artificial Sequence
  Description of Artificial Sequence: Synthetic oligonucleotide
uuccaucauacuagugacc

SEQ ID NO: 1723734 - RNA, 19 nt, Artificial Sequence
  Description of Artificial Sequence: Synthetic oligonucleotide
ucuuggccgugaaauagac

SEQ ID NO: 1723735 - RNA, 19 nt, Artificial Sequence
  Description of Artificial Sequence: Synthetic oligonucleotide
ggaacgacuucuuuuagga

SEQ ID NO: 1723736 - RNA, 19 nt, Artificial Sequence
  Description of Artificial Sequence: Synthetic oligonucleotide
uucuuggccgugaaauaga

SEQ ID NO: 1723737 - RNA, 19 nt, Artificial Sequence
  Description of Artificial Sequence: Synthetic oligonucleotide
aauaacccagauccauuuu

SEQ ID NO: 1723738 - RNA, 19 nt, Artificial Sequence
  Description of Artificial Sequence: Synthetic oligonucleotide
accucgauccuuuuauaga

SEQ ID NO: 1723739 - RNA, 19 nt, Artificial Sequence
  Description of Artificial Sequence: Synthetic oligonucleotide
ucccuaaagggugaauuug

SEQ ID NO: 1723740 - RNA, 19 nt, Artificial Sequence
  Description of Artificial Sequence: Synthetic oligonucleotide
gugacaugauggcaggccc

SEQ ID NO: 1723741 - RNA, 19 nt, Artificial Sequence
  Description of Artificial Sequence: Synthetic oligonucleotide
uuugagaacuucaguccau

SEQ ID NO: 1723742 - RNA, 19 nt, Artificial Sequence
  Description of Artificial Sequence: Synthetic oligonucleotide
cuaguuagaaacauuuuau

SEQ ID NO: 1723743 - RNA, 19 nt, Artificial Sequence
  Description of Artificial Sequence: Synthetic oligonucleotide
cauucuuucaggacuugca

SEQ ID NO: 1723744 - RNA, 19 nt, Artificial Sequence
  Description of Artificial Sequence: Synthetic oligonucleotide
uuugaucggcugcuucuug

SEQ ID NO: 1723745 - RNA, 19 nt, Artificial Sequence
  Description of Artificial Sequence: Synthetic oligonucleotide
aaauagaccuggaucucga

SEQ ID NO: 1723746 - RNA, 19 nt, Artificial Sequence
  Description of Artificial Sequence: Synthetic oligonucleotide
ccuuuuauagaaccagacc

SEQ ID NO: 1723747 - RNA, 19 nt, Artificial Sequence
  Description of Artificial Sequence: Synthetic oligonucleotide
agcgagaguaucgccuucc

SEQ ID NO: 1723748 - RNA, 19 nt, Artificial Sequence
  Description of Artificial Sequence: Synthetic oligonucleotide
uggggaacgacuucuuuua

SEQ ID NO: 1723749 - RNA, 19 nt, Artificial Sequence
  Description of Artificial Sequence: Synthetic oligonucleotide
auaagacugccguuacaca

SEQ ID NO: 1723750 - RNA, 19 nt, Artificial Sequence
  Description of Artificial Sequence: Synthetic oligonucleotide
aucuugaucuacgaagaga

SEQ ID NO: 1723751 - RNA, 19 nt, Artificial Sequence
  Description of Artificial Sequence: Synthetic oligonucleotide
cuaaagggugaauuugaga

SEQ ID NO: 1723752 - RNA, 19 nt, Artificial Sequence
  Description of Artificial Sequence: Synthetic oligonucleotide
caucauacuagugaccuga

SEQ ID NO: 1723753 - RNA, 19 nt, Artificial Sequence
  Description of Artificial Sequence: Synthetic oligonucleotide
cuaaaaccaaagaauccaa

SEQ ID NO: 1723754 - RNA, 19 nt, Artificial Sequence
  Description of Artificial Sequence: Synthetic oligonucleotide
acagauaagacugccguua

SEQ ID NO: 1723755 - RNA, 19 nt, Artificial Sequence
  Description of Artificial Sequence: Synthetic oligonucleotide
gacauaacaaaucccuuau

SEQ ID NO: 1723756 - RNA, 19 nt, Artificial Sequence
  Description of Artificial Sequence: Synthetic oligonucleotide
ucgacggcuauagcgauga

SEQ ID NO: 1723757 - RNA, 19 nt, Artificial Sequence
  Description of Artificial Sequence: Synthetic oligonucleotide
ugcccgucgauaauucaac

SEQ ID NO: 1723758 - RNA, 19 nt, Artificial Sequence
  Description of Artificial Sequence: Synthetic oligonucleotide
ucuucguggacuuccugau

SEQ ID NO: 1723759 - RNA, 19 nt, Artificial Sequence
  Description of Artificial Sequence: Synthetic oligonucleotide
gaaugugaucuagaucgug

SEQ ID NO: 1723760 - RNA, 19 nt, Artificial Sequence
  Description of Artificial Sequence: Synthetic oligonucleotide
ucuccuuuaccagcaccgg

SEQ ID NO: 1723761 - RNA, 19 nt, Artificial Sequence
  Description of Artificial Sequence: Synthetic oligonucleotide
gaucucgaucucgaccugg

SEQ ID NO: 1723762 - RNA, 19 nt, Artificial Sequence
  Description of Artificial Sequence: Synthetic oligonucleotide
ugacuuccaucauacuagu

SEQ ID NO: 1723763 - RNA, 19 nt, Artificial Sequence
  Description of Artificial Sequence: Synthetic oligonucleotide
agaccuagaucuucuuagu

SEQ ID NO: 1723764 - RNA, 19 nt, Artificial Sequence
  Description of Artificial Sequence: Synthetic oligonucleotide
cuaaccaagugcaacagau

SEQ ID NO: 1723765 - RNA, 19 nt, Artificial Sequence
  Description of Artificial Sequence: Synthetic oligonucleotide
agugcucgcagcucgagua

SEQ ID NO: 1723766 - RNA, 19 nt, Artificial Sequence
  Description of Artificial Sequence: Synthetic oligonucleotide
auacuagugaccugauguu

SEQ ID NO: 1723767 - RNA, 19 nt, Artificial Sequence
  Description of Artificial Sequence: Synthetic oligonucleotide
cauaccgcccguaacguga

SEQ ID NO: 1723768 - RNA, 19 nt, Artificial Sequence
  Description of Artificial Sequence: Synthetic oligonucleotide
gaucuagaucgugaccugc

SEQ ID NO: 1723769 - RNA, 19 nt, Artificial Sequence
  Description of Artificial Sequence: Synthetic oligonucleotide
uuuugauuagaugguugau

SEQ ID NO: 1723770 - RNA, 19 nt, Artificial Sequence
  Description of Artificial Sequence: Synthetic oligonucleotide
cgcgauuggaaauaccucg

SEQ ID NO: 1723771 - RNA, 19 nt, Artificial Sequence
  Description of Artificial Sequence: Synthetic oligonucleotide
uuccuagguuacauuuuac

SEQ ID NO: 1723772 - RNA, 19 nt, Artificial Sequence
  Description of Artificial Sequence: Synthetic oligonucleotide
uggacuuccugauggggaa

SEQ ID NO: 1723773 - RNA, 19 nt, Artificial Sequence
  Description of Artificial Sequence: Synthetic oligonucleotide
cacacucauagcaucuauc

SEQ ID NO: 1723774 - RNA, 19 nt, Artificial Sequence
  Description of Artificial Sequence: Synthetic oligonucleotide
uucccuaaagggugaauuu

SEQ ID NO: 1723775 - RNA, 19 nt, Artificial Sequence
  Description of Artificial Sequence: Synthetic oligonucleotide
gaucgggaaugugaucuag

SEQ ID NO: 1723776 - RNA, 19 nt, Artificial Sequence
  Description of Artificial Sequence: Synthetic oligonucleotide
cccauaguaacugaaugcc

SEQ ID NO: 1723777 - RNA, 19 nt, Artificial Sequence
  Description of Artificial Sequence: Synthetic oligonucleotide
gcccauaguaacugaaugc

SEQ ID NO: 1723778 - RNA, 19 nt, Artificial Sequence
  Description of Artificial Sequence: Synthetic oligonucleotide
uuagaugguugaugauccu

SEQ ID NO: 1723779 - RNA, 19 nt, Artificial Sequence
  Description of Artificial Sequence: Synthetic oligonucleotide
ugaaauagaccuggaucuc

SEQ ID NO: 1723780 - RNA, 19 nt, Artificial Sequence
  Description of Artificial Sequence: Synthetic oligonucleotide
ggaucaaagggacgucggg

SEQ ID NO: 1723781 - RNA, 19 nt, Artificial Sequence
  Description of Artificial Sequence: Synthetic oligonucleotide
ucguggacuuccugauggg

SEQ ID NO: 1723782 - RNA, 19 nt, Artificial Sequence
  Description of Artificial Sequence: Synthetic oligonucleotide
cauaccaaccauguauuca

SEQ ID NO: 1723783 - RNA, 19 nt, Artificial Sequence
  Description of Artificial Sequence: Synthetic oligonucleotide
aaacgagaucuccgaggca

SEQ ID NO: 1723784 - RNA, 19 nt, Artificial Sequence
  Description of Artificial Sequence: Synthetic oligonucleotide
cuuggccgugaaauagacc

SEQ ID NO: 1723785 - RNA, 19 nt, Artificial Sequence
  Description of Artificial Sequence: Synthetic oligonucleotide
gaucggcugcuucuuggcc

SEQ ID NO: 1723786 - RNA, 19 nt, Artificial Sequence
  Description of Artificial Sequence: Synthetic oligonucleotide
guuaccaaauugcaaaguu

SEQ ID NO: 1723787 - RNA, 19 nt, Artificial Sequence
  Description of Artificial Sequence: Synthetic oligonucleotide
ugauuagaugguugaugau

SEQ ID NO: 1723788 - RNA, 19 nt, Artificial Sequence
  Description of Artificial Sequence: Synthetic oligonucleotide
gauggagaucuggauuuug

SEQ ID NO: 1723789 - RNA, 19 nt, Artificial Sequence
  Description of Artificial Sequence: Synthetic oligonucleotide
ucucuaggaucuucaaauu

SEQ ID NO: 1723790 - RNA, 19 nt, Artificial Sequence
  Description of Artificial Sequence: Synthetic oligonucleotide
cucgauccuuuuauagaac

SEQ ID NO: 1723791 - RNA, 19 nt, Artificial Sequence
  Description of Artificial Sequence: Synthetic oligonucleotide
auaguaacugaaugcccuu

SEQ ID NO: 1723792 - RNA, 19 nt, Artificial Sequence
  Description of Artificial Sequence: Synthetic oligonucleotide
uagcaucuaucauuaggau

SEQ ID NO: 1723793 - RNA, 19 nt, Artificial Sequence
  Description of Artificial Sequence: Synthetic oligonucleotide
aggaucaaagggacgucgg

SEQ ID NO: 1723794 - RNA, 19 nt, Artificial Sequence
  Description of Artificial Sequence: Synthetic oligonucleotide
gaucuccgaggcaugcccg

SEQ ID NO: 1723795 - RNA, 19 nt, Artificial Sequence
  Description of Artificial Sequence: Synthetic oligonucleotide
agcuaaccaagugcaacag

SEQ ID NO: 1723796 - RNA, 19 nt, Artificial Sequence
  Description of Artificial Sequence: Synthetic oligonucleotide
ggcccauaguaacugaaug

SEQ ID NO: 1723797 - RNA, 19 nt, Artificial Sequence
  Description of Artificial Sequence: Synthetic oligonucleotide
agauaagacugccguuaca

SEQ ID NO: 1723798 - RNA, 19 nt, Artificial Sequence
  Description of Artificial Sequence: Synthetic oligonucleotide
ggcuauagcgaugacaguc

SEQ ID NO: 1723799 - RNA, 19 nt, Artificial Sequence
  Description of Artificial Sequence: Synthetic oligonucleotide
accgacauacaccuugguu

SEQ ID NO: 1723800 - RNA, 19 nt, Artificial Sequence
  Description of Artificial Sequence: Synthetic oligonucleotide
gacaugauggcaggcccgc

SEQ ID NO: 1723801 - RNA, 19 nt, Artificial Sequence
  Description of Artificial Sequence: Synthetic oligonucleotide
aaccagaccuagaucuucu

SEQ ID NO: 1723802 - RNA, 19 nt, Artificial Sequence
  Description of Artificial Sequence: Synthetic oligonucleotide
caacagauaagacugccgu

SEQ ID NO: 1723803 - RNA, 19 nt, Artificial Sequence
  Description of Artificial Sequence: Synthetic oligonucleotide
ucuagaucgugaccugcuu

SEQ ID NO: 1723804 - RNA, 19 nt, Artificial Sequence
  Description of Artificial Sequence: Synthetic oligonucleotide
uaaugucccuuuucaccac

SEQ ID NO: 1723805 - RNA, 19 nt, Artificial Sequence
  Description of Artificial Sequence: Synthetic oligonucleotide
ccguaacgugacaugaugg

SEQ ID NO: 1723806 - RNA, 19 nt, Artificial Sequence
  Description of Artificial Sequence: Synthetic oligonucleotide
ugagcgagaguaucgccuu

SEQ ID NO: 1723807 - RNA, 19 nt, Artificial Sequence
  Description of Artificial Sequence: Synthetic oligonucleotide
uucgacggcuauagcgaug

SEQ ID NO: 1723808 - RNA, 19 nt, Artificial Sequence
  Description of Artificial Sequence: Synthetic oligonucleotide
ucgugagcgagaguaucgc

SEQ ID NO: 1723809 - RNA, 19 nt, Artificial Sequence
  Description of Artificial Sequence: Synthetic oligonucleotide
guaacgugacaugauggca

SEQ ID NO: 1723810 - RNA, 19 nt, Artificial Sequence
  Description of Artificial Sequence: Synthetic oligonucleotide
guuucuggcgauccauaca

SEQ ID NO: 1723811 - RNA, 19 nt, Artificial Sequence
  Description of Artificial Sequence: Synthetic oligonucleotide
gacggcuauagcgaugaca

SEQ ID NO: 1723812 - RNA, 19 nt, Artificial Sequence
  Description of Artificial Sequence: Synthetic oligonucleotide
auaauaacccagauccauu

SEQ ID NO: 1723813 - RNA, 19 nt, Artificial Sequence
  Description of Artificial Sequence: Synthetic oligonucleotide
gaggcaugcccgucgauaa

SEQ ID NO: 1723814 - RNA, 19 nt, Artificial Sequence
  Description of Artificial Sequence: Synthetic oligonucleotide
accaagugcaacagauaag

SEQ ID NO: 1723815 - RNA, 19 nt, Artificial Sequence
  Description of Artificial Sequence: Synthetic oligonucleotide
uacuagugaccugauguua

SEQ ID NO: 1723816 - RNA, 19 nt, Artificial Sequence
  Description of Artificial Sequence: Synthetic oligonucleotide
acauaacaaaucccuuaua

SEQ ID NO: 1723817 - RNA, 19 nt, Artificial Sequence
  Description of Artificial Sequence: Synthetic oligonucleotide
uaucgccuuccccuggauc

SEQ ID NO: 1723818 - RNA, 19 nt, Artificial Sequence
  Description of Artificial Sequence: Synthetic oligonucleotide
gcaacagauaagacugccg

SEQ ID NO: 1723819 - RNA, 19 nt, Artificial Sequence
  Description of Artificial Sequence: Synthetic oligonucleotide
uggccgugaaauagaccug

SEQ ID NO: 1723820 - RNA, 19 nt, Artificial Sequence
  Description of Artificial Sequence: Synthetic oligonucleotide
uggaaauaccucgauccuu

SEQ ID NO: 1723821 - RNA, 19 nt, Artificial Sequence
  Description of Artificial Sequence: Synthetic oligonucleotide
acgcgauuggaaauaccuc

SEQ ID NO: 1723822 - RNA, 19 nt, Artificial Sequence
  Description of Artificial Sequence: Synthetic oligonucleotide
accggugcccagguuaccg

SEQ ID NO: 1723823 - RNA, 19 nt, Artificial Sequence
  Description of Artificial Sequence: Synthetic oligonucleotide
augauccuuccuagguuac

SEQ ID NO: 1723824 - RNA, 19 nt, Artificial Sequence
  Description of Artificial Sequence: Synthetic oligonucleotide
uagaugguugaugauccuu

SEQ ID NO: 1723825 - RNA, 19 nt, Artificial Sequence
  Description of Artificial Sequence: Synthetic oligonucleotide
auggagaucuggauuuuga

SEQ ID NO: 1723826 - RNA, 19 nt, Artificial Sequence
  Description of Artificial Sequence: Synthetic oligonucleotide
ggccgugaaauagaccugg

SEQ ID NO: 1723827 - RNA, 19 nt, Artificial Sequence
  Description of Artificial Sequence: Synthetic oligonucleotide
auccuuuuauagaaccaga

SEQ ID NO: 1723828 - RNA, 19 nt, Artificial Sequence
  Description of Artificial Sequence: Synthetic oligonucleotide
cuuuaccagcaccggugcc

SEQ ID NO: 1723829 - RNA, 19 nt, Artificial Sequence
  Description of Artificial Sequence: Synthetic oligonucleotide
cguaacgugacaugauggc

SEQ ID NO: 1723830 - RNA, 19 nt, Artificial Sequence
  Description of Artificial Sequence: Synthetic oligonucleotide
guauucaaucaaauucuaa

SEQ ID NO: 1723831 - RNA, 19 nt, Artificial Sequence
  Description of Artificial Sequence: Synthetic oligonucleotide
cuuccuagguuacauuuua

SEQ ID NO: 1723832 - RNA, 19 nt, Artificial Sequence
  Description of Artificial Sequence: Synthetic oligonucleotide
cguacucggcuauagcucg

SEQ ID NO: 1723833 - RNA, 19 nt, Artificial Sequence
  Description of Artificial Sequence: Synthetic oligonucleotide
agcucgaguagcgcggaag

SEQ ID NO: 1723834 - RNA, 19 nt, Artificial Sequence
  Description of Artificial Sequence: Synthetic oligonucleotide
uccauaccgcccguaacgu

SEQ ID NO: 1723835 - RNA, 19 nt, Artificial Sequence
  Description of Artificial Sequence: Synthetic oligonucleotide
ucgggcagguggccuauca

SEQ ID NO: 1723836 - RNA, 19 nt, Artificial Sequence
  Description of Artificial Sequence: Synthetic oligonucleotide
uuccccggcuccugcuucg

SEQ ID NO: 1723837 - RNA, 19 nt, Artificial Sequence
  Description of Artificial Sequence: Synthetic oligonucleotide
cugccguuacacacauagc

SEQ ID NO: 1723838 - RNA, 19 nt, Artificial Sequence
  Description of Artificial Sequence: Synthetic oligonucleotide
gguuucuggcgauccauac

SEQ ID NO: 1723839 - RNA, 19 nt, Artificial Sequence
  Description of Artificial Sequence: Synthetic oligonucleotide
gucgauaauucaacucuca

SEQ ID NO: 1723840 - RNA, 19 nt, Artificial Sequence
  Description of Artificial Sequence: Synthetic oligonucleotide
auaucuaguuagaaacauu

SEQ ID NO: 1723841 - RNA, 19 nt, Artificial Sequence
  Description of Artificial Sequence: Synthetic oligonucleotide
ccguuacacacauagcuuc

SEQ ID NO: 1723842 - RNA, 19 nt, Artificial Sequence
  Description of Artificial Sequence: Synthetic oligonucleotide
acgugacaugauggcaggc

SEQ ID NO: 1723843 - RNA, 19 nt, Artificial Sequence
  Description of Artificial Sequence: Synthetic oligonucleotide
cucgaguagcgcggaagcg

SEQ ID NO: 1723844 - RNA, 19 nt, Artificial Sequence
  Description of Artificial Sequence: Synthetic oligonucleotide
cuugaucuacgaagagaca

SEQ ID NO: 1723845 - RNA, 19 nt, Artificial Sequence
  Description of Artificial Sequence: Synthetic oligonucleotide
aguagcgcggaagcggcug

SEQ ID NO: 1723846 - RNA, 19 nt, Artificial Sequence
  Description of Artificial Sequence: Synthetic oligonucleotide
uuuugaucggcugcuucuu

SEQ ID NO: 1723847 - RNA, 19 nt, Artificial Sequence
  Description of Artificial Sequence: Synthetic oligonucleotide
uucagaccauaagauguua

SEQ ID NO: 1723848 - RNA, 19 nt, Artificial Sequence
  Description of Artificial Sequence: Synthetic oligonucleotide
agacugccguuacacacau

SEQ ID NO: 1723849 - RNA, 19 nt, Artificial Sequence
  Description of Artificial Sequence: Synthetic oligonucleotide
cuucgugagcgagaguauc

SEQ ID NO: 1723850 - RNA, 19 nt, Artificial Sequence
  Description of Artificial Sequence: Synthetic oligonucleotide
cuuuuaggagauggagauc

SEQ ID NO: 1723851 - RNA, 19 nt, Artificial Sequence
  Description of Artificial Sequence: Synthetic oligonucleotide
ccuaucaaaacgagaucuc

SEQ ID NO: 1723852 - RNA, 19 nt, Artificial Sequence
  Description of Artificial Sequence: Synthetic oligonucleotide
cuucuuagugaagcugauc

SEQ ID NO: 1723853 - RNA, 19 nt, Artificial Sequence
  Description of Artificial Sequence: Synthetic oligonucleotide
uccgaggcaugcccgucga

SEQ ID NO: 1723854 - RNA, 19 nt, Artificial Sequence
  Description of Artificial Sequence: Synthetic oligonucleotide
cuucguggacuuccugaug

SEQ ID NO: 1723855 - RNA, 19 nt, Artificial Sequence
  Description of Artificial Sequence: Synthetic oligonucleotide
uucuggcgauccauacagu

SEQ ID NO: 1723856 - RNA, 19 nt, Artificial Sequence
  Description of Artificial Sequence: Synthetic oligonucleotide
gcucgaguagcgcggaagc

SEQ ID NO: 1723857 - RNA, 19 nt, Artificial Sequence
  Description of Artificial Sequence: Synthetic oligonucleotide
uaccgacauacaccuuggu

SEQ ID NO: 1723858 - RNA, 19 nt, Artificial Sequence
  Description of Artificial Sequence: Synthetic oligonucleotide
auaccucgauccuuuuaua

SEQ ID NO: 1723859 - RNA, 19 nt, Artificial Sequence
  Description of Artificial Sequence: Synthetic oligonucleotide
gugcucgcagcucgaguag

SEQ ID NO: 1723860 - RNA, 19 nt, Artificial Sequence
  Description of Artificial Sequence: Synthetic oligonucleotide
uggcaggcccgcguacucg

SEQ ID NO: 1723861 - RNA, 19 nt, Artificial Sequence
  Description of Artificial Sequence: Synthetic oligonucleotide
auaccgcccguaacgugac

SEQ ID NO: 1723862 - RNA, 19 nt, Artificial Sequence
  Description of Artificial Sequence: Synthetic oligonucleotide
uacucggcuauagcucgca

SEQ ID NO: 1723863 - RNA, 19 nt, Artificial Sequence
  Description of Artificial Sequence: Synthetic oligonucleotide
aucuccgaggcaugcccgu

SEQ ID NO: 1723864 - RNA, 19 nt, Artificial Sequence
  Description of Artificial Sequence: Synthetic oligonucleotide
acauuucccuaaaggguga

SEQ ID NO: 1723865 - RNA, 19 nt, Artificial Sequence
  Description of Artificial Sequence: Synthetic oligonucleotide
agaauccaaaugacuucca

SEQ ID NO: 1723866 - RNA, 19 nt, Artificial Sequence
  Description of Artificial Sequence: Synthetic oligonucleotide
ugcucgcagcucgaguagc

SEQ ID NO: 1723867 - RNA, 19 nt, Artificial Sequence
  Description of Artificial Sequence: Synthetic oligonucleotide
gccuaucaaaacgagaucu

SEQ ID NO: 1723868 - RNA, 19 nt, Artificial Sequence
  Description of Artificial Sequence: Synthetic oligonucleotide
ccuuuaccagcaccggugc

SEQ ID NO: 1723869 - RNA, 19 nt, Artificial Sequence
  Description of Artificial Sequence: Synthetic oligonucleotide
gcuauagcgaugacaguca

SEQ ID NO: 1723870 - RNA, 19 nt, Artificial Sequence
  Description of Artificial Sequence: Synthetic oligonucleotide
auagcucgcagugcucgca

SEQ ID NO: 1723871 - RNA, 19 nt, Artificial Sequence
  Description of Artificial Sequence: Synthetic oligonucleotide
guagcgcggaagcggcugc

SEQ ID NO: 1723872 - RNA, 19 nt, Artificial Sequence
  Description of Artificial Sequence: Synthetic oligonucleotide
aucgggaaugugaucuaga

SEQ ID NO: 1723873 - RNA, 19 nt, Artificial Sequence
  Description of Artificial Sequence: Synthetic oligonucleotide
cccguaacgugacaugaug

SEQ ID NO: 1723874 - RNA, 19 nt, Artificial Sequence
  Description of Artificial Sequence: Synthetic oligonucleotide
aggguuucuggcgauccau

SEQ ID NO: 1723875 - RNA, 19 nt, Artificial Sequence
  Description of Artificial Sequence: Synthetic oligonucleotide
augcccgucgauaauucaa

SEQ ID NO: 1723876 - RNA, 19 nt, Artificial Sequence
  Description of Artificial Sequence: Synthetic oligonucleotide
cuggaucgggaaugugauc

SEQ ID NO: 1723877 - RNA, 19 nt, Artificial Sequence
  Description of Artificial Sequence: Synthetic oligonucleotide
gugcaacagauaagacugc

SEQ ID NO: 1723878 - RNA, 19 nt, Artificial Sequence
  Description of Artificial Sequence: Synthetic oligonucleotide
ggggaacgacuucuuuuag

SEQ ID NO: 1723879 - RNA, 19 nt, Artificial Sequence
  Description of Artificial Sequence: Synthetic oligonucleotide
acaugauggcaggcccgcg

SEQ ID NO: 1723880 - RNA, 19 nt, Artificial Sequence
  Description of Artificial Sequence: Synthetic oligonucleotide
ggcaggcccgcguacucgg

SEQ ID NO: 1723881 - RNA, 19 nt, Artificial Sequence
  Description of Artificial Sequence: Synthetic oligonucleotide
cccgucgauaauucaacuc

SEQ ID NO: 1723882 - RNA, 19 nt, Artificial Sequence
  Description of Artificial Sequence: Synthetic oligonucleotide
ggcuauagcucgcagugcu

SEQ ID NO: 1723883 - RNA, 19 nt, Artificial Sequence
  Description of Artificial Sequence: Synthetic oligonucleotide
accuggaacgcgauuggaa

SEQ ID NO: 1723884 - RNA, 19 nt, Artificial Sequence
  Description of Artificial Sequence: Synthetic oligonucleotide
caugcccgucgauaauuca

SEQ ID NO: 1723885 - RNA, 19 nt, Artificial Sequence
  Description of Artificial Sequence: Synthetic oligonucleotide
gaccugauguuaccaaauu

SEQ ID NO: 1723886 - RNA, 19 nt, Artificial Sequence
  Description of Artificial Sequence: Synthetic oligonucleotide
auuucccuaaagggugaau

SEQ ID NO: 1723887 - RNA, 19 nt, Artificial Sequence
  Description of Artificial Sequence: Synthetic oligonucleotide
gcaauauaauaacccagau

SEQ ID NO: 1723888 - RNA, 19 nt, Artificial Sequence
  Description of Artificial Sequence: Synthetic oligonucleotide
accaaauugcaaaguuauu

SEQ ID NO: 1723889 - RNA, 19 nt, Artificial Sequence
  Description of Artificial Sequence: Synthetic oligonucleotide
gggugaauuugagaacuuc

SEQ ID NO: 1723890 - RNA, 19 nt, Artificial Sequence
  Description of Artificial Sequence: Synthetic oligonucleotide
ggccuaucaaaacgagauc

SEQ ID NO: 1723891 - RNA, 19 nt, Artificial Sequence
  Description of Artificial Sequence: Synthetic oligonucleotide
ccuggaacgcgauuggaaa

SEQ ID NO: 1723892 - RNA, 19 nt, Artificial Sequence
  Description of Artificial Sequence: Synthetic oligonucleotide
accgcccguaacgugacau

SEQ ID NO: 1723893 - RNA, 19 nt, Artificial Sequence
  Description of Artificial Sequence: Synthetic oligonucleotide
accagaccuagaucuucuu

SEQ ID NO: 1723894 - RNA, 19 nt, Artificial Sequence
  Description of Artificial Sequence: Synthetic oligonucleotide
gagcgagaguaucgccuuc

SEQ ID NO: 1723895 - RNA, 19 nt, Artificial Sequence
  Description of Artificial Sequence: Synthetic oligonucleotide
ccgucgauaauucaacucu

SEQ ID NO: 1723896 - RNA, 19 nt, Artificial Sequence
  Description of Artificial Sequence: Synthetic oligonucleotide
cgugacaugauggcaggcc

SEQ ID NO: 1723897 - RNA, 19 nt, Artificial Sequence
  Description of Artificial Sequence: Synthetic oligonucleotide
ccgacauacaccuugguuu

SEQ ID NO: 1723898 - RNA, 19 nt, Artificial Sequence
  Description of Artificial Sequence: Synthetic oligonucleotide
ccaaaugacuuccaucaua

SEQ ID NO: 1723899 - RNA, 19 nt, Artificial Sequence
  Description of Artificial Sequence: Synthetic oligonucleotide
gauggggaacgacuucuuu

SEQ ID NO: 1723900 - RNA, 19 nt, Artificial Sequence
  Description of Artificial Sequence: Synthetic oligonucleotide
cgaguagcgcggaagcggc

SEQ ID NO: 1723901 - RNA, 19 nt, Artificial Sequence
  Description of Artificial Sequence: Synthetic oligonucleotide
cuccugcuucgugagcgag

SEQ ID NO: 1723902 - RNA, 19 nt, Artificial Sequence
  Description of Artificial Sequence: Synthetic oligonucleotide
cuucgaggggaugcugauc

SEQ ID NO: 1723903 - RNA, 19 nt, Artificial Sequence
  Description of Artificial Sequence: Synthetic oligonucleotide
cccuggaucgggaauguga

SEQ ID NO: 1723904 - RNA, 19 nt, Artificial Sequence
  Description of Artificial Sequence: Synthetic oligonucleotide
gagaaccacaaaucaccuu

SEQ ID NO: 1723905 - RNA, 19 nt, Artificial Sequence
  Description of Artificial Sequence: Synthetic oligonucleotide
aucauacuagugaccugau

SEQ ID NO: 1723906 - RNA, 19 nt, Artificial Sequence
  Description of Artificial Sequence: Synthetic oligonucleotide
gaccuggaacgcgauugga

SEQ ID NO: 1723907 - RNA, 19 nt, Artificial Sequence
  Description of Artificial Sequence: Synthetic oligonucleotide
guccuuaagggcccauagu

SEQ ID NO: 1723908 - RNA, 19 nt, Artificial Sequence
  Description of Artificial Sequence: Synthetic oligonucleotide
ccuuaagggcccauaguaa

SEQ ID NO: 1723909 - RNA, 19 nt, Artificial Sequence
  Description of Artificial Sequence: Synthetic oligonucleotide
cgucgauaauucaacucuc

SEQ ID NO: 1723910 - RNA, 19 nt, Artificial Sequence
  Description of Artificial Sequence: Synthetic oligonucleotide
cucggcuauagcucgcagu

SEQ ID NO: 1723911 - RNA, 19 nt, Artificial Sequence
  Description of Artificial Sequence: Synthetic oligonucleotide
ggaaauaccucgauccuuu

SEQ ID NO: 1723912 - RNA, 19 nt, Artificial Sequence
  Description of Artificial Sequence: Synthetic oligonucleotide
guacucggcuauagcucgc

SEQ ID NO: 1723913 - RNA, 19 nt, Artificial Sequence
  Description of Artificial Sequence: Synthetic oligonucleotide
cgcagcucgaguagcgcgg

SEQ ID NO: 1723914 - RNA, 19 nt, Artificial Sequence
  Description of Artificial Sequence: Synthetic oligonucleotide
gcgagaguaucgccuuccc

SEQ ID NO: 1723915 - RNA, 19 nt, Artificial Sequence
  Description of Artificial Sequence: Synthetic oligonucleotide
cgauaauucaacucucacu

SEQ ID NO: 1723916 - RNA, 19 nt, Artificial Sequence
  Description of Artificial Sequence: Synthetic oligonucleotide
ccaucauacuagugaccug

SEQ ID NO: 1723917 - RNA, 19 nt, Artificial Sequence
  Description of Artificial Sequence: Synthetic oligonucleotide
gcgauuggaaauaccucga

SEQ ID NO: 1723918 - RNA, 19 nt, Artificial Sequence
  Description of Artificial Sequence: Synthetic oligonucleotide
agguuacauuuuacagaca

SEQ ID NO: 1723919 - RNA, 19 nt, Artificial Sequence
  Description of Artificial Sequence: Synthetic oligonucleotide
gcguacucggcuauagcuc

SEQ ID NO: 1723920 - RNA, 19 nt, Artificial Sequence
  Description of Artificial Sequence: Synthetic oligonucleotide
cuggaacgcgauuggaaau

SEQ ID NO: 1723921 - RNA, 19 nt, Artificial Sequence
  Description of Artificial Sequence: Synthetic oligonucleotide
aggcaugcccgucgauaau

SEQ ID NO: 1723922 - RNA, 19 nt, Artificial Sequence
  Description of Artificial Sequence: Synthetic oligonucleotide
ggaucucgaucucgaccug

SEQ ID NO: 1723923 - RNA, 19 nt, Artificial Sequence
  Description of Artificial Sequence: Synthetic oligonucleotide
cacucauagcaucuaucau

SEQ ID NO: 1723924 - RNA, 19 nt, Artificial Sequence
  Description of Artificial Sequence: Synthetic oligonucleotide
uaccgcccguaacgugaca

SEQ ID NO: 1723925 - RNA, 19 nt, Artificial Sequence
  Description of Artificial Sequence: Synthetic oligonucleotide
gggacgucgggcagguggc

SEQ ID NO: 1723926 - RNA, 19 nt, Artificial Sequence
  Description of Artificial Sequence: Synthetic oligonucleotide
acgucgggcagguggccua

SEQ ID NO: 1723927 - RNA, 19 nt, Artificial Sequence
  Description of Artificial Sequence: Synthetic oligonucleotide
cuauagcgaugacagucau

SEQ ID NO: 1723928 - RNA, 19 nt, Artificial Sequence
  Description of Artificial Sequence: Synthetic oligonucleotide
agggugaauuugagaacuu

SEQ ID NO: 1723929 - RNA, 19 nt, Artificial Sequence
  Description of Artificial Sequence: Synthetic oligonucleotide
cguuacacacauagcuuca

SEQ ID NO: 1723930 - RNA, 19 nt, Artificial Sequence
  Description of Artificial Sequence: Synthetic oligonucleotide
aggcccgcguacucggcua

SEQ ID NO: 1723931 - RNA, 19 nt, Artificial Sequence
  Description of Artificial Sequence: Synthetic oligonucleotide
cauuucccuaaagggugaa

SEQ ID NO: 1723932 - RNA, 19 nt, Artificial Sequence
  Description of Artificial Sequence: Synthetic oligonucleotide
cuucgacggcuauagcgau

SEQ ID NO: 1723933 - RNA, 19 nt, Artificial Sequence
  Description of Artificial Sequence: Synthetic oligonucleotide
ccauaccgcccguaacgug

SEQ ID NO: 1723934 - RNA, 19 nt, Artificial Sequence
  Description of Artificial Sequence: Synthetic oligonucleotide
cauaagcauaaugucccuu

SEQ ID NO: 1723935 - RNA, 19 nt, Artificial Sequence
  Description of Artificial Sequence: Synthetic oligonucleotide
acccacauuuucagaccau

SEQ ID NO: 1723936 - RNA, 19 nt, Artificial Sequence
  Description of Artificial Sequence: Synthetic oligonucleotide
caucuaucauuaggaucaa

SEQ ID NO: 1723937 - RNA, 19 nt, Artificial Sequence
  Description of Artificial Sequence: Synthetic oligonucleotide
gcaugcccgucgauaauuc

SEQ ID NO: 1723938 - RNA, 19 nt, Artificial Sequence
  Description of Artificial Sequence: Synthetic oligonucleotide
gcuauagcucgcagugcuc

SEQ ID NO: 1723939 - RNA, 19 nt, Artificial Sequence
  Description of Artificial Sequence: Synthetic oligonucleotide
cgagaucuccgaggcaugc

SEQ ID NO: 1723940 - RNA, 19 nt, Artificial Sequence
  Description of Artificial Sequence: Synthetic oligonucleotide
ggaucgggaaugugaucua

SEQ ID NO: 1723941 - RNA, 19 nt, Artificial Sequence
  Description of Artificial Sequence: Synthetic oligonucleotide
ccuggaucgggaaugugau

SEQ ID NO: 1723942 - RNA, 19 nt, Artificial Sequence
  Description of Artificial Sequence: Synthetic oligonucleotide
ccagaccuagaucuucuua

SEQ ID NO: 1723943 - RNA, 19 nt, Artificial Sequence
  Description of Artificial Sequence: Synthetic oligonucleotide
ccgcguacucggcuauagc

SEQ ID NO: 1723944 - RNA, 19 nt, Artificial Sequence
  Description of Artificial Sequence: Synthetic oligonucleotide
cccgcguacucggcuauag

SEQ ID NO: 1723945 - RNA, 19 nt, Artificial Sequence
  Description of Artificial Sequence: Synthetic oligonucleotide
gcaccggugcccagguuac

SEQ ID NO: 1723946 - RNA, 19 nt, Artificial Sequence
  Description of Artificial Sequence: Synthetic oligonucleotide
gacgucgggcagguggccu

SEQ ID NO: 1723947 - RNA, 19 nt, Artificial Sequence
  Description of Artificial Sequence: Synthetic oligonucleotide
ggaaugugaucuagaucgu

SEQ ID NO: 1723948 - RNA, 19 nt, Artificial Sequence
  Description of Artificial Sequence: Synthetic oligonucleotide
cgcguacucggcuauagcu

SEQ ID NO: 1723949 - RNA, 19 nt, Artificial Sequence
  Description of Artificial Sequence: Synthetic oligonucleotide
ccgcccguaacgugacaug

SEQ ID NO: 1723950 - RNA, 19 nt, Artificial Sequence
  Description of Artificial Sequence: Synthetic oligonucleotide
cccagguuaccgacauaca

SEQ ID NO: 1723951 - RNA, 19 nt, Artificial Sequence
  Description of Artificial Sequence: Synthetic oligonucleotide
cgauccauacaguccuuaa

SEQ ID NO: 1723952 - RNA, 19 nt, Artificial Sequence
  Description of Artificial Sequence: Synthetic oligonucleotide
cagugcucgcagcucgagu

SEQ ID NO: 1723953 - RNA, 19 nt, Artificial Sequence
  Description of Artificial Sequence: Synthetic oligonucleotide
gccguuacacacauagcuu

SEQ ID NO: 1723954 - RNA, 19 nt, Artificial Sequence
  Description of Artificial Sequence: Synthetic oligonucleotide
gcccgucgauaauucaacu

SEQ ID NO: 1723955 - RNA, 19 nt, Artificial Sequence
  Description of Artificial Sequence: Synthetic oligonucleotide
gccgugaaauagaccugga

SEQ ID NO: 1723956 - RNA, 19 nt, Artificial Sequence
  Description of Artificial Sequence: Synthetic oligonucleotide
ggcaugcccgucgauaauu

SEQ ID NO: 1723957 - RNA, 19 nt, Artificial Sequence
  Description of Artificial Sequence: Synthetic oligonucleotide
gcgauccauacaguccuua

SEQ ID NO: 1723958 - RNA, 19 nt, Artificial Sequence
  Description of Artificial Sequence: Synthetic oligonucleotide
cuggaggguuucuggcgau

SEQ ID NO: 1723959 - RNA, 19 nt, Artificial Sequence
  Description of Artificial Sequence: Synthetic oligonucleotide
gaguagcgcggaagcggcu

SEQ ID NO: 1723960 - RNA, 19 nt, Artificial Sequence
  Description of Artificial Sequence: Synthetic oligonucleotide
gcagcucgaguagcgcgga

SEQ ID NO: 1723961 - RNA, 19 nt, Artificial Sequence
  Description of Artificial Sequence: Synthetic oligonucleotide
caggcccgcguacucggcu

SEQ ID NO: 1723962 - RNA, 19 nt, Artificial Sequence
  Description of Artificial Sequence: Synthetic oligonucleotide
gggcccauaguaacugaau

SEQ ID NO: 1723963 - RNA, 19 nt, Artificial Sequence
  Description of Artificial Sequence: Synthetic oligonucleotide
ccgugaaauagaccuggau

SEQ ID NO: 1723964 - RNA, 19 nt, Artificial Sequence
  Description of Artificial Sequence: Synthetic oligonucleotide
cgcccguaacgugacauga

SEQ ID NO: 1723965 - RNA, 19 nt, Artificial Sequence
  Description of Artificial Sequence: Synthetic oligonucleotide
ccggugcccagguuaccga

SEQ ID NO: 1723966 - RNA, 19 nt, Artificial Sequence
  Description of Artificial Sequence: Synthetic oligonucleotide
cagcucgaguagcgcggaa

SEQ ID NO: 1723967 - RNA, 19 nt, Artificial Sequence
  Description of Artificial Sequence: Synthetic oligonucleotide
gacugccguuacacacaua

SEQ ID NO: 1723968 - RNA, 19 nt, Artificial Sequence
  Description of Artificial Sequence: Synthetic oligonucleotide
ggauuuugaucggcugcuu

SEQ ID NO: 1723969 - RNA, 19 nt, Artificial Sequence
  Description of Artificial Sequence: Synthetic oligonucleotide
gcuucgugagcgagaguau

SEQ ID NO: 1723970 - RNA, 19 nt, Artificial Sequence
  Description of Artificial Sequence: Synthetic oligonucleotide
cgaggcaugcccgucgaua

SEQ ID NO: 1723971 - RNA, 19 nt, Artificial Sequence
  Description of Artificial Sequence: Synthetic oligonucleotide
cgauuggaaauaccucgau

SEQ ID NO: 1723972 - RNA, 19 nt, Artificial Sequence
  Description of Artificial Sequence: Synthetic oligonucleotide
cugcuucgugagcgagagu

SEQ ID NO: 1723973 - RNA, 19 nt, Artificial Sequence
  Description of Artificial Sequence: Synthetic oligonucleotide
gcccguaacgugacaugau

SEQ ID NO: 1723974 - RNA, 19 nt, Artificial Sequence
  Description of Artificial Sequence: Synthetic oligonucleotide
ggcaaacccuggaggguuu

SEQ ID NO: 1723975 - RNA, 19 nt, Artificial Sequence
  Description of Artificial Sequence: Synthetic oligonucleotide
ggcccgcguacucggcuau

SEQ ID NO: 1723976 - RNA, 19 nt, Artificial Sequence
  Description of Artificial Sequence: Synthetic oligonucleotide
gguuaccgacauacaccuu

SEQ ID NO: 1723977 - RNA, 19 nt, Artificial Sequence
  Description of Artificial Sequence: Synthetic oligonucleotide
cgacggcuauagcgaugac

SEQ ID NO: 1723978 - RNA, 19 nt, Artificial Sequence
  Description of Artificial Sequence: Synthetic oligonucleotide
cggcuauagcgaugacagu

SEQ ID NO: 1723979 - RNA, 19 nt, Artificial Sequence
  Description of Artificial Sequence: Synthetic oligonucleotide
cagcaccggugcccagguu

SEQ ID NO: 1723980 - RNA, 19 nt, Artificial Sequence
  Description of Artificial Sequence: Synthetic oligonucleotide
gcccgcguacucggcuaua

SEQ ID NO: 1723981 - RNA, 19 nt, Artificial Sequence
  Description of Artificial Sequence: Synthetic oligonucleotide
ccgaggcaugcccgucgau

SEQ ID NO: 1723982 - RNA, 19 nt, Artificial Sequence
  Description of Artificial Sequence: Synthetic oligonucleotide
aauucuacccuuuaucccc

SEQ ID NO: 1723983 - RNA, 19 nt, Artificial Sequence
  Description of Artificial Sequence: Synthetic oligonucleotide
uuuacuauaaauuaaggau

SEQ ID NO: 1723984 - RNA, 19 nt, Artificial Sequence
  Description of Artificial Sequence: Synthetic oligonucleotide
aaaaucucaugguagcugc

SEQ ID NO: 1723985 - RNA, 19 nt, Artificial Sequence
  Description of Artificial Sequence: Synthetic oligonucleotide
aauugaaucaccugcaugu

SEQ ID NO: 1723986 - RNA, 19 nt, Artificial Sequence
  Description of Artificial Sequence: Synthetic oligonucleotide
aaaauggugcaauuugggc

SEQ ID NO: 1723987 - RNA, 19 nt, Artificial Sequence
  Description of Artificial Sequence: Synthetic oligonucleotide
ugagcauccauucagaaga

SEQ ID NO: 1723988 - RNA, 19 nt, Artificial Sequence
  Description of Artificial Sequence: Synthetic oligonucleotide
aaauuaaggauacuguaca

SEQ ID NO: 1723989 - RNA, 19 nt, Artificial Sequence
  Description of Artificial Sequence: Synthetic oligonucleotide
aaaccuguuguugugaggc

SEQ ID NO: 1723990 - RNA, 19 nt, Artificial Sequence
  Description of Artificial Sequence: Synthetic oligonucleotide
uauucuagaagagaaagag

SEQ ID NO: 1723991 - RNA, 19 nt, Artificial Sequence
  Description of Artificial Sequence: Synthetic oligonucleotide
ucuaccaccccuaugcucg

SEQ ID NO: 1723992 - RNA, 19 nt, Artificial Sequence
  Description of Artificial Sequence: Synthetic oligonucleotide
uguacagauauucuagaag

SEQ ID NO: 1723993 - RNA, 19 nt, Artificial Sequence
  Description of Artificial Sequence: Synthetic oligonucleotide
aaauggugcaauuugggca

SEQ ID NO: 1723994 - RNA, 19 nt, Artificial Sequence
  Description of Artificial Sequence: Synthetic oligonucleotide
aauggugcaauuugggcag

SEQ ID NO: 1723995 - RNA, 19 nt, Artificial Sequence
  Description of Artificial Sequence: Synthetic oligonucleotide
gauauucuagaagagaaag

SEQ ID NO: 1723996 - RNA, 19 nt, Artificial Sequence
  Description of Artificial Sequence: Synthetic oligonucleotide
aaaaugacaauuaguuuac

SEQ ID NO: 1723997 - RNA, 19 nt, Artificial Sequence
  Description of Artificial Sequence: Synthetic oligonucleotide
uaaauuaaggauacuguac

SEQ ID NO: 1723998 - RNA, 19 nt, Artificial Sequence
  Description of Artificial Sequence: Synthetic oligonucleotide
ucaauucuacccuuuaucc

SEQ ID NO: 1723999 - RNA, 19 nt, Artificial Sequence
  Description of Artificial Sequence: Synthetic oligonucleotide
uacauuggaacacccaggg

SEQ ID NO: 1724000 - RNA, 19 nt, Artificial Sequence
  Description of Artificial Sequence: Synthetic oligonucleotide
uuacuauaaauuaaggaua

SEQ ID NO: 1724001 - RNA, 19 nt, Artificial Sequence
  Description of Artificial Sequence: Synthetic oligonucleotide
aauuaaggauacuguacag

SEQ ID NO: 1724002 - RNA, 19 nt, Artificial Sequence
  Description of Artificial Sequence: Synthetic oligonucleotide
uuuaaucccugccugaaca

SEQ ID NO: 1724003 - RNA, 19 nt, Artificial Sequence
  Description of Artificial Sequence: Synthetic oligonucleotide
gaacacugcauuuuggaag

SEQ ID NO: 1724004 - RNA, 19 nt, Artificial Sequence
  Description of Artificial Sequence: Synthetic oligonucleotide
ugcaaaauggugcaauuug

SEQ ID NO: 1724005 - RNA, 19 nt, Artificial Sequence
  Description of Artificial Sequence: Synthetic oligonucleotide
ugcaauagagggcauuggg

SEQ ID NO: 1724006 - RNA, 19 nt, Artificial Sequence
  Description of Artificial Sequence: Synthetic oligonucleotide
aaauugaaucaccugcaug

SEQ ID NO: 1724007 - RNA, 19 nt, Artificial Sequence
  Description of Artificial Sequence: Synthetic oligonucleotide
uucagaagauuguagaagu

SEQ ID NO: 1724008 - RNA, 19 nt, Artificial Sequence
  Description of Artificial Sequence: Synthetic oligonucleotide
uuuguucuuuaccugaacu

SEQ ID NO: 1724009 - RNA, 19 nt, Artificial Sequence
  Description of Artificial Sequence: Synthetic oligonucleotide
ucacuuuuaacuccccucc

SEQ ID NO: 1724010 - RNA, 19 nt, Artificial Sequence
  Description of Artificial Sequence: Synthetic oligonucleotide
uuaaggauacuguacagau

SEQ ID NO: 1724011 - RNA, 19 nt, Artificial Sequence
  Description of Artificial Sequence: Synthetic oligonucleotide
aggaagaggggucaaagag

SEQ ID NO: 1724012 - RNA, 19 nt, Artificial Sequence
  Description of Artificial Sequence: Synthetic oligonucleotide
ugugugugaaauugaauca

SEQ ID NO: 1724013 - RNA, 19 nt, Artificial Sequence
  Description of Artificial Sequence: Synthetic oligonucleotide
uucaauucuacccuuuauc

SEQ ID NO: 1724014 - RNA, 19 nt, Artificial Sequence
  Description of Artificial Sequence: Synthetic oligonucleotide
uguagaaguguucccagca

SEQ ID NO: 1724015 - RNA, 19 nt, Artificial Sequence
  Description of Artificial Sequence: Synthetic oligonucleotide
auaaauuaaggauacugua

SEQ ID NO: 1724016 - RNA, 19 nt, Artificial Sequence
  Description of Artificial Sequence: Synthetic oligonucleotide
aaugacaauuaguuuacua

SEQ ID NO: 1724017 - RNA, 19 nt, Artificial Sequence
  Description of Artificial Sequence: Synthetic oligonucleotide
uguaguuguggucacucgc

SEQ ID NO: 1724018 - RNA, 19 nt, Artificial Sequence
  Description of Artificial Sequence: Synthetic oligonucleotide
ugugugaaauugaaucacc

SEQ ID NO: 1724019 - RNA, 19 nt, Artificial Sequence
  Description of Artificial Sequence: Synthetic oligonucleotide
aagcuagucucuuguguac

SEQ ID NO: 1724020 - RNA, 19 nt, Artificial Sequence
  Description of Artificial Sequence: Synthetic oligonucleotide
uccauucagaagauuguag

SEQ ID NO: 1724021 - RNA, 19 nt, Artificial Sequence
  Description of Artificial Sequence: Synthetic oligonucleotide
agauuguagaaguguuccc

SEQ ID NO: 1724022 - RNA, 19 nt, Artificial Sequence
  Description of Artificial Sequence: Synthetic oligonucleotide
agauuuuaaucccugccug

SEQ ID NO: 1724023 - RNA, 19 nt, Artificial Sequence
  Description of Artificial Sequence: Synthetic oligonucleotide
auaucaagaucuuuggaau

SEQ ID NO: 1724024 - RNA, 19 nt, Artificial Sequence
  Description of Artificial Sequence: Synthetic oligonucleotide
uacagauauucuagaagag

SEQ ID NO: 1724025 - RNA, 19 nt, Artificial Sequence
  Description of Artificial Sequence: Synthetic oligonucleotide
ucguaaaccucacacucag

SEQ ID NO: 1724026 - RNA, 19 nt, Artificial Sequence
  Description of Artificial Sequence: Synthetic oligonucleotide
gguaaugggagacagggcc

SEQ ID NO: 1724027 - RNA, 19 nt, Artificial Sequence
  Description of Artificial Sequence: Synthetic oligonucleotide
acaacugugugugaaauug

SEQ ID NO: 1724028 - RNA, 19 nt, Artificial Sequence
  Description of Artificial Sequence: Synthetic oligonucleotide
agcaauaucaagaucuuug

SEQ ID NO: 1724029 - RNA, 19 nt, Artificial Sequence
  Description of Artificial Sequence: Synthetic oligonucleotide
cuuuacuucccugaguugc

SEQ ID NO: 1724030 - RNA, 19 nt, Artificial Sequence
  Description of Artificial Sequence: Synthetic oligonucleotide
aaguguucccagcacuggg

SEQ ID NO: 1724031 - RNA, 19 nt, Artificial Sequence
  Description of Artificial Sequence: Synthetic oligonucleotide
ucaucagcggcacuggcgc

SEQ ID NO: 1724032 - RNA, 19 nt, Artificial Sequence
  Description of Artificial Sequence: Synthetic oligonucleotide
uuaacuccccuccaugccc

SEQ ID NO: 1724033 - RNA, 19 nt, Artificial Sequence
  Description of Artificial Sequence: Synthetic oligonucleotide
ucaguguacauggugagca

SEQ ID NO: 1724034 - RNA, 19 nt, Artificial Sequence
  Description of Artificial Sequence: Synthetic oligonucleotide
agacuucugcucuaccacc

SEQ ID NO: 1724035 - RNA, 19 nt, Artificial Sequence
  Description of Artificial Sequence: Synthetic oligonucleotide
uuuaacuccccuccaugcc

SEQ ID NO: 1724036 - RNA, 19 nt, Artificial Sequence
  Description of Artificial Sequence: Synthetic oligonucleotide
ucauugcugcaguacacgg

SEQ ID NO: 1724037 - RNA, 19 nt, Artificial Sequence
  Description of Artificial Sequence: Synthetic oligonucleotide
auucagaagauuguagaag

SEQ ID NO: 1724038 - RNA, 19 nt, Artificial Sequence
  Description of Artificial Sequence: Synthetic oligonucleotide
cagaagagauuuuaauccc

SEQ ID NO: 1724039 - RNA, 19 nt, Artificial Sequence
  Description of Artificial Sequence: Synthetic oligonucleotide
uguuugugaaauagcaauc

SEQ ID NO: 1724040 - RNA, 19 nt, Artificial Sequence
  Description of Artificial Sequence: Synthetic oligonucleotide
auggugagcauccauucag

SEQ ID NO: 1724041 - RNA, 19 nt, Artificial Sequence
  Description of Artificial Sequence: Synthetic oligonucleotide
ggaaccacuccucacaccg

SEQ ID NO: 1724042 - RNA, 19 nt, Artificial Sequence
  Description of Artificial Sequence: Synthetic oligonucleotide
aauagcaaucauugcugca

SEQ ID NO: 1724043 - RNA, 19 nt, Artificial Sequence
  Description of Artificial Sequence: Synthetic oligonucleotide
agucugugccgucagcacc

SEQ ID NO: 1724044 - RNA, 19 nt, Artificial Sequence
  Description of Artificial Sequence: Synthetic oligonucleotide
auaaaccuguuguugugag

SEQ ID NO: 1724045 - RNA, 19 nt, Artificial Sequence
  Description of Artificial Sequence: Synthetic oligonucleotide
caauucuacccuuuauccc

SEQ ID NO: 1724046 - RNA, 19 nt, Artificial Sequence
  Description of Artificial Sequence: Synthetic oligonucleotide
ugcucgugcagucugugcc

SEQ ID NO: 1724047 - RNA, 19 nt, Artificial Sequence
  Description of Artificial Sequence: Synthetic oligonucleotide
ucuacgacaggcuggaaua

SEQ ID NO: 1724048 - RNA, 19 nt, Artificial Sequence
  Description of Artificial Sequence: Synthetic oligonucleotide
acagguuaccuccuucccg

SEQ ID NO: 1724049 - RNA, 19 nt, Artificial Sequence
  Description of Artificial Sequence: Synthetic oligonucleotide
ugugccgucagcaccuaag

SEQ ID NO: 1724050 - RNA, 19 nt, Artificial Sequence
  Description of Artificial Sequence: Synthetic oligonucleotide
uucacuuuuaacuccccuc

SEQ ID NO: 1724051 - RNA, 19 nt, Artificial Sequence
  Description of Artificial Sequence: Synthetic oligonucleotide
ucaccauggaaccacuccu

SEQ ID NO: 1724052 - RNA, 19 nt, Artificial Sequence
  Description of Artificial Sequence: Synthetic oligonucleotide
ucauaaaccuguuguugug

SEQ ID NO: 1724053 - RNA, 19 nt, Artificial Sequence
  Description of Artificial Sequence: Synthetic oligonucleotide
uggucacucgcccaggaug

SEQ ID NO: 1724054 - RNA, 19 nt, Artificial Sequence
  Description of Artificial Sequence: Synthetic oligonucleotide
aaucucaugguagcugcag

SEQ ID NO: 1724055 - RNA, 19 nt, Artificial Sequence
  Description of Artificial Sequence: Synthetic oligonucleotide
acagucaccauggaaccac

SEQ ID NO: 1724056 - RNA, 19 nt, Artificial Sequence
  Description of Artificial Sequence: Synthetic oligonucleotide
cuucccgcaaguuucacuc

SEQ ID NO: 1724057 - RNA, 19 nt, Artificial Sequence
  Description of Artificial Sequence: Synthetic oligonucleotide
ucuuuaccugaacuuaaaa

SEQ ID NO: 1724058 - RNA, 19 nt, Artificial Sequence
  Description of Artificial Sequence: Synthetic oligonucleotide
auuaaggauacuguacaga

SEQ ID NO: 1724059 - RNA, 19 nt, Artificial Sequence
  Description of Artificial Sequence: Synthetic oligonucleotide
gauuuuaaucccugccuga

SEQ ID NO: 1724060 - RNA, 19 nt, Artificial Sequence
  Description of Artificial Sequence: Synthetic oligonucleotide
gacaggcuggaauaucuug

SEQ ID NO: 1724061 - RNA, 19 nt, Artificial Sequence
  Description of Artificial Sequence: Synthetic oligonucleotide
acuguacagauauucuaga

SEQ ID NO: 1724062 - RNA, 19 nt, Artificial Sequence
  Description of Artificial Sequence: Synthetic oligonucleotide
uuuucaauucuacccuuua

SEQ ID NO: 1724063 - RNA, 19 nt, Artificial Sequence
  Description of Artificial Sequence: Synthetic oligonucleotide
uuugccgccuuuucaauuc

SEQ ID NO: 1724064 - RNA, 19 nt, Artificial Sequence
  Description of Artificial Sequence: Synthetic oligonucleotide
uguucuuuaccugaacuua

SEQ ID NO: 1724065 - RNA, 19 nt, Artificial Sequence
  Description of Artificial Sequence: Synthetic oligonucleotide
acagauauucuagaagaga

SEQ ID NO: 1724066 - RNA, 19 nt, Artificial Sequence
  Description of Artificial Sequence: Synthetic oligonucleotide
cagguuaccuccuucccgc

SEQ ID NO: 1724067 - RNA, 19 nt, Artificial Sequence
  Description of Artificial Sequence: Synthetic oligonucleotide
gaugguguggugcuuucac

SEQ ID NO: 1724068 - RNA, 19 nt, Artificial Sequence
  Description of Artificial Sequence: Synthetic oligonucleotide
uuuccaggagccguccucg

SEQ ID NO: 1724069 - RNA, 19 nt, Artificial Sequence
  Description of Artificial Sequence: Synthetic oligonucleotide
uuuuaaucccugccugaac

SEQ ID NO: 1724070 - RNA, 19 nt, Artificial Sequence
  Description of Artificial Sequence: Synthetic oligonucleotide
agggccaaugcacuuagca

SEQ ID NO: 1724071 - RNA, 19 nt, Artificial Sequence
  Description of Artificial Sequence: Synthetic oligonucleotide
ugccaugcagucuucucag

SEQ ID NO: 1724072 - RNA, 19 nt, Artificial Sequence
  Description of Artificial Sequence: Synthetic oligonucleotide
ucaugguagcugcagcgug

SEQ ID NO: 1724073 - RNA, 19 nt, Artificial Sequence
  Description of Artificial Sequence: Synthetic oligonucleotide
cucaucagcggcacuggcg

SEQ ID NO: 1724074 - RNA, 19 nt, Artificial Sequence
  Description of Artificial Sequence: Synthetic oligonucleotide
gcaaguuucacuccuagga

SEQ ID NO: 1724075 - RNA, 19 nt, Artificial Sequence
  Description of Artificial Sequence: Synthetic oligonucleotide
uacauggugagcauccauu

SEQ ID NO: 1724076 - RNA, 19 nt, Artificial Sequence
  Description of Artificial Sequence: Synthetic oligonucleotide
uuccucuuuacuucccuga

SEQ ID NO: 1724077 - RNA, 19 nt, Artificial Sequence
  Description of Artificial Sequence: Synthetic oligonucleotide
aaugcacuuagcagcacca

SEQ ID NO: 1724078 - RNA, 19 nt, Artificial Sequence
  Description of Artificial Sequence: Synthetic oligonucleotide
gugagcauccauucagaag

SEQ ID NO: 1724079 - RNA, 19 nt, Artificial Sequence
  Description of Artificial Sequence: Synthetic oligonucleotide
gagauuuuaaucccugccu

SEQ ID NO: 1724080 - RNA, 19 nt, Artificial Sequence
  Description of Artificial Sequence: Synthetic oligonucleotide
guagcagcagggcuccucg

SEQ ID NO: 1724081 - RNA, 19 nt, Artificial Sequence
  Description of Artificial Sequence: Synthetic oligonucleotide
caaugcacuuagcagcacc

SEQ ID NO: 1724082 - RNA, 19 nt, Artificial Sequence
  Description of Artificial Sequence: Synthetic oligonucleotide
ugucucguccugcacuugc

SEQ ID NO: 1724083 - RNA, 19 nt, Artificial Sequence
  Description of Artificial Sequence: Synthetic oligonucleotide
uuuccgcugggguuugccg

SEQ ID NO: 1724084 - RNA, 19 nt, Artificial Sequence
  Description of Artificial Sequence: Synthetic oligonucleotide
aacacccagggccaaugca

SEQ ID NO: 1724085 - RNA, 19 nt, Artificial Sequence
  Description of Artificial Sequence: Synthetic oligonucleotide
guuguggucacucgcccag

SEQ ID NO: 1724086 - RNA, 19 nt, Artificial Sequence
  Description of Artificial Sequence: Synthetic oligonucleotide
guaaaccucacacucaggu

SEQ ID NO: 1724087 - RNA, 19 nt, Artificial Sequence
  Description of Artificial Sequence: Synthetic oligonucleotide
agcguguuugugaaauagc

SEQ ID NO: 1724088 - RNA, 19 nt, Artificial Sequence
  Description of Artificial Sequence: Synthetic oligonucleotide
guuaccuccuucccgcaag

SEQ ID NO: 1724089 - RNA, 19 nt, Artificial Sequence
  Description of Artificial Sequence: Synthetic oligonucleotide
ugcguguucugcacacccg

SEQ ID NO: 1724090 - RNA, 19 nt, Artificial Sequence
  Description of Artificial Sequence: Synthetic oligonucleotide
uuaaucccugccugaacac

SEQ ID NO: 1724091 - RNA, 19 nt, Artificial Sequence
  Description of Artificial Sequence: Synthetic oligonucleotide
uugguugccugcaucccug

SEQ ID NO: 1724092 - RNA, 19 nt, Artificial Sequence
  Description of Artificial Sequence: Synthetic oligonucleotide
aguguccugcucaucagcg

SEQ ID NO: 1724093 - RNA, 19 nt, Artificial Sequence
  Description of Artificial Sequence: Synthetic oligonucleotide
ugcuacauuggaacaccca

SEQ ID NO: 1724094 - RNA, 19 nt, Artificial Sequence
  Description of Artificial Sequence: Synthetic oligonucleotide
gaaguguucccagcacugg

SEQ ID NO: 1724095 - RNA, 19 nt, Artificial Sequence
  Description of Artificial Sequence: Synthetic oligonucleotide
agcaccuaagggucugcac

SEQ ID NO: 1724096 - RNA, 19 nt, Artificial Sequence
  Description of Artificial Sequence: Synthetic oligonucleotide
aaucccugccugaacacug

SEQ ID NO: 1724097 - RNA, 19 nt, Artificial Sequence
  Description of Artificial Sequence: Synthetic oligonucleotide
gaagauuguagaaguguuc

SEQ ID NO: 1724098 - RNA, 19 nt, Artificial Sequence
  Description of Artificial Sequence: Synthetic oligonucleotide
aguguacauggugagcauc

SEQ ID NO: 1724099 - RNA, 19 nt, Artificial Sequence
  Description of Artificial Sequence: Synthetic oligonucleotide
ucuuuacuucccugaguug

SEQ ID NO: 1724100 - RNA, 19 nt, Artificial Sequence
  Description of Artificial Sequence: Synthetic oligonucleotide
aacaacugugugugaaauu

SEQ ID NO: 1724101 - RNA, 19 nt, Artificial Sequence
  Description of Artificial Sequence: Synthetic oligonucleotide
acacccagggccaaugcac

SEQ ID NO: 1724102 - RNA, 19 nt, Artificial Sequence
  Description of Artificial Sequence: Synthetic oligonucleotide
caccuaagggucugcaccc

SEQ ID NO: 1724103 - RNA, 19 nt, Artificial Sequence
  Description of Artificial Sequence: Synthetic oligonucleotide
ggaagaggggucaaagagg

SEQ ID NO: 1724104 - RNA, 19 nt, Artificial Sequence
  Description of Artificial Sequence: Synthetic oligonucleotide
auuggggucguaaaccuca

SEQ ID NO: 1724105 - RNA, 19 nt, Artificial Sequence
  Description of Artificial Sequence: Synthetic oligonucleotide
ucguccugcacuugcaaaa

SEQ ID NO: 1724106 - RNA, 19 nt, Artificial Sequence
  Description of Artificial Sequence: Synthetic oligonucleotide
acccuuuauccccuggucu

SEQ ID NO: 1724107 - RNA, 19 nt, Artificial Sequence
  Description of Artificial Sequence: Synthetic oligonucleotide
gcauccauucagaagauug

SEQ ID NO: 1724108 - RNA, 19 nt, Artificial Sequence
  Description of Artificial Sequence: Synthetic oligonucleotide
guaguuguggucacucgcc

SEQ ID NO: 1724109 - RNA, 19 nt, Artificial Sequence
  Description of Artificial Sequence: Synthetic oligonucleotide
ucugcacccaguguccugc

SEQ ID NO: 1724110 - RNA, 19 nt, Artificial Sequence
  Description of Artificial Sequence: Synthetic oligonucleotide
uggugagcauccauucaga

SEQ ID NO: 1724111 - RNA, 19 nt, Artificial Sequence
  Description of Artificial Sequence: Synthetic oligonucleotide
ucaaagaggacuggggcuu

SEQ ID NO: 1724112 - RNA, 19 nt, Artificial Sequence
  Description of Artificial Sequence: Synthetic oligonucleotide
gugugugaaauugaaucac

SEQ ID NO: 1724113 - RNA, 19 nt, Artificial Sequence
  Description of Artificial Sequence: Synthetic oligonucleotide
aaaugacaauuaguuuacu

SEQ ID NO: 1724114 - RNA, 19 nt, Artificial Sequence
  Description of Artificial Sequence: Synthetic oligonucleotide
agaagagauuuuaaucccu

SEQ ID NO: 1724115 - RNA, 19 nt, Artificial Sequence
  Description of Artificial Sequence: Synthetic oligonucleotide
cugcacacccgguaauggg

SEQ ID NO: 1724116 - RNA, 19 nt, Artificial Sequence
  Description of Artificial Sequence: Synthetic oligonucleotide
ggcugugcuacauuggaac

SEQ ID NO: 1724117 - RNA, 19 nt, Artificial Sequence
  Description of Artificial Sequence: Synthetic oligonucleotide
ggggucguaaaccucacac

SEQ ID NO: 1724118 - RNA, 19 nt, Artificial Sequence
  Description of Artificial Sequence: Synthetic oligonucleotide
uagucuuccccauuccuuu

SEQ ID NO: 1724119 - RNA, 19 nt, Artificial Sequence
  Description of Artificial Sequence: Synthetic oligonucleotide
uguggugccuucccacugu

SEQ ID NO: 1724120 - RNA, 19 nt, Artificial Sequence
  Description of Artificial Sequence: Synthetic oligonucleotide
uuccgcugggguuugccgc

SEQ ID NO: 1724121 - RNA, 19 nt, Artificial Sequence
  Description of Artificial Sequence: Synthetic oligonucleotide
acacccgguaaugggagac

SEQ ID NO: 1724122 - RNA, 19 nt, Artificial Sequence
  Description of Artificial Sequence: Synthetic oligonucleotide
gaggaagaggggucaaaga

SEQ ID NO: 1724123 - RNA, 19 nt, Artificial Sequence
  Description of Artificial Sequence: Synthetic oligonucleotide
gugccgucagcaccuaagg

SEQ ID NO: 1724124 - RNA, 19 nt, Artificial Sequence
  Description of Artificial Sequence: Synthetic oligonucleotide
uggucuucaccagacuucu

SEQ ID NO: 1724125 - RNA, 19 nt, Artificial Sequence
  Description of Artificial Sequence: Synthetic oligonucleotide
acuugcaaaauggugcaau

SEQ ID NO: 1724126 - RNA, 19 nt, Artificial Sequence
  Description of Artificial Sequence: Synthetic oligonucleotide
auugaaucaccugcaugug

SEQ ID NO: 1724127 - RNA, 19 nt, Artificial Sequence
  Description of Artificial Sequence: Synthetic oligonucleotide
uacccuuuauccccugguc

SEQ ID NO: 1724128 - RNA, 19 nt, Artificial Sequence
  Description of Artificial Sequence: Synthetic oligonucleotide
ucccacugugcagaggaag

SEQ ID NO: 1724129 - RNA, 19 nt, Artificial Sequence
  Description of Artificial Sequence: Synthetic oligonucleotide
aucaagaucuuuggaauuu

SEQ ID NO: 1724130 - RNA, 19 nt, Artificial Sequence
  Description of Artificial Sequence: Synthetic oligonucleotide
cugcaguacacggagucag

SEQ ID NO: 1724131 - RNA, 19 nt, Artificial Sequence
  Description of Artificial Sequence: Synthetic oligonucleotide
uucacuccuaggagccacc

SEQ ID NO: 1724132 - RNA, 19 nt, Artificial Sequence
  Description of Artificial Sequence: Synthetic oligonucleotide
ccgguaaugggagacaggg

SEQ ID NO: 1724133 - RNA, 19 nt, Artificial Sequence
  Description of Artificial Sequence: Synthetic oligonucleotide
gcagaugcaauagagggca

SEQ ID NO: 1724134 - RNA, 19 nt, Artificial Sequence
  Description of Artificial Sequence: Synthetic oligonucleotide
cacuuagcagcaccaggag

SEQ ID NO: 1724135 - RNA, 19 nt, Artificial Sequence
  Description of Artificial Sequence: Synthetic oligonucleotide
augcaauagagggcauugg

SEQ ID NO: 1724136 - RNA, 19 nt, Artificial Sequence
  Description of Artificial Sequence: Synthetic oligonucleotide
uggagguguggcuuccugu

SEQ ID NO: 1724137 - RNA, 19 nt, Artificial Sequence
  Description of Artificial Sequence: Synthetic oligonucleotide
gggccaaugcacuuagcag

SEQ ID NO: 1724138 - RNA, 19 nt, Artificial Sequence
  Description of Artificial Sequence: Synthetic oligonucleotide
ggcacuggcgcuugucucg

SEQ ID NO: 1724139 - RNA, 19 nt, Artificial Sequence
  Description of Artificial Sequence: Synthetic oligonucleotide
cugccugccuguauccacc

SEQ ID NO: 1724140 - RNA, 19 nt, Artificial Sequence
  Description of Artificial Sequence: Synthetic oligonucleotide
ucacaccggucacagcaga

SEQ ID NO: 1724141 - RNA, 19 nt, Artificial Sequence
  Description of Artificial Sequence: Synthetic oligonucleotide
cugaagcuagucucuugug

SEQ ID NO: 1724142 - RNA, 19 nt, Artificial Sequence
  Description of Artificial Sequence: Synthetic oligonucleotide
gaacacccagggccaaugc

SEQ ID NO: 1724143 - RNA, 19 nt, Artificial Sequence
  Description of Artificial Sequence: Synthetic oligonucleotide
uucugcacacccgguaaug

SEQ ID NO: 1724144 - RNA, 19 nt, Artificial Sequence
  Description of Artificial Sequence: Synthetic oligonucleotide
ggcauuggggucguaaacc

SEQ ID NO: 1724145 - RNA, 19 nt, Artificial Sequence
  Description of Artificial Sequence: Synthetic oligonucleotide
aggaacaacugugugugaa

SEQ ID NO: 1724146 - RNA, 19 nt, Artificial Sequence
  Description of Artificial Sequence: Synthetic oligonucleotide
guguccugcucaucagcgg

SEQ ID NO: 1724147 - RNA, 19 nt, Artificial Sequence
  Description of Artificial Sequence: Synthetic oligonucleotide
cugcauguggagguguggc

SEQ ID NO: 1724148 - RNA, 19 nt, Artificial Sequence
  Description of Artificial Sequence: Synthetic oligonucleotide
uaaucccugccugaacacu

SEQ ID NO: 1724149 - RNA, 19 nt, Artificial Sequence
  Description of Artificial Sequence: Synthetic oligonucleotide
cuguacagauauucuagaa

SEQ ID NO: 1724150 - RNA, 19 nt, Artificial Sequence
  Description of Artificial Sequence: Synthetic oligonucleotide
gagguguggcuuccugugc

SEQ ID NO: 1724151 - RNA, 19 nt, Artificial Sequence
  Description of Artificial Sequence: Synthetic oligonucleotide
uccuugcguguucugcaca

SEQ ID NO: 1724152 - RNA, 19 nt, Artificial Sequence
  Description of Artificial Sequence: Synthetic oligonucleotide
ggucacucgcccaggaugg

SEQ ID NO: 1724153 - RNA, 19 nt, Artificial Sequence
  Description of Artificial Sequence: Synthetic oligonucleotide
aagaggacuggggcuucuc

SEQ ID NO: 1724154 - RNA, 19 nt, Artificial Sequence
  Description of Artificial Sequence: Synthetic oligonucleotide
acgacaggcuggaauaucu

SEQ ID NO: 1724155 - RNA, 19 nt, Artificial Sequence
  Description of Artificial Sequence: Synthetic oligonucleotide
uuaccuccuucccgcaagu

SEQ ID NO: 1724156 - RNA, 19 nt, Artificial Sequence
  Description of Artificial Sequence: Synthetic oligonucleotide
cucacaccggucacagcag

SEQ ID NO: 1724157 - RNA, 19 nt, Artificial Sequence
  Description of Artificial Sequence: Synthetic oligonucleotide
uaugcucgugcagucugug

SEQ ID NO: 1724158 - RNA, 19 nt, Artificial Sequence
  Description of Artificial Sequence: Synthetic oligonucleotide
uguacauggugagcaucca

SEQ ID NO: 1724159 - RNA, 19 nt, Artificial Sequence
  Description of Artificial Sequence: Synthetic oligonucleotide
uggaaccacuccucacacc

SEQ ID NO: 1724160 - RNA, 19 nt, Artificial Sequence
  Description of Artificial Sequence: Synthetic oligonucleotide
aaaucucaugguagcugca

SEQ ID NO: 1724161 - RNA, 19 nt, Artificial Sequence
  Description of Artificial Sequence: Synthetic oligonucleotide
ucugcucuaccaccccuau

SEQ ID NO: 1724162 - RNA, 19 nt, Artificial Sequence
  Description of Artificial Sequence: Synthetic oligonucleotide
cauuccuuuccaggagccg

SEQ ID NO: 1724163 - RNA, 19 nt, Artificial Sequence
  Description of Artificial Sequence: Synthetic oligonucleotide
uccgcugggguuugccgcc

SEQ ID NO: 1724164 - RNA, 19 nt, Artificial Sequence
  Description of Artificial Sequence: Synthetic oligonucleotide
ucaagaucuuuggaauuuu

SEQ ID NO: 1724165 - RNA, 19 nt, Artificial Sequence
  Description of Artificial Sequence: Synthetic oligonucleotide
agagaugcccacacaguca

SEQ ID NO: 1724166 - RNA, 19 nt, Artificial Sequence
  Description of Artificial Sequence: Synthetic oligonucleotide
ugguugccugcaucccugg

SEQ ID NO: 1724167 - RNA, 19 nt, Artificial Sequence
  Description of Artificial Sequence: Synthetic oligonucleotide
gaguccuugggacacaguu

SEQ ID NO: 1724168 - RNA, 19 nt, Artificial Sequence
  Description of Artificial Sequence: Synthetic oligonucleotide
gccuguauccacccagggg

SEQ ID NO: 1724169 - RNA, 19 nt, Artificial Sequence
  Description of Artificial Sequence: Synthetic oligonucleotide
cugcucaucagcggcacug

SEQ ID NO: 1724170 - RNA, 19 nt, Artificial Sequence
  Description of Artificial Sequence: Synthetic oligonucleotide
cauugcugcaguacacgga

SEQ ID NO: 1724171 - RNA, 19 nt, Artificial Sequence
  Description of Artificial Sequence: Synthetic oligonucleotide
uccccuggucuucaccaga

SEQ ID NO: 1724172 - RNA, 19 nt, Artificial Sequence
  Description of Artificial Sequence: Synthetic oligonucleotide
ccaggagccucuacgacag

SEQ ID NO: 1724173 - RNA, 19 nt, Artificial Sequence
  Description of Artificial Sequence: Synthetic oligonucleotide
gaaccacuccucacaccgg

SEQ ID NO: 1724174 - RNA, 19 nt, Artificial Sequence
  Description of Artificial Sequence: Synthetic oligonucleotide
ugcagucugugccgucagc

SEQ ID NO: 1724175 - RNA, 19 nt, Artificial Sequence
  Description of Artificial Sequence: Synthetic oligonucleotide
agggcauuggggucguaaa

SEQ ID NO: 1724176 - RNA, 19 nt, Artificial Sequence
  Description of Artificial Sequence: Synthetic oligonucleotide
caucccuggggcuuuccuc

SEQ ID NO: 1724177 - RNA, 19 nt, Artificial Sequence
  Description of Artificial Sequence: Synthetic oligonucleotide
accccuaugcucgugcagu

SEQ ID NO: 1724178 - RNA, 19 nt, Artificial Sequence
  Description of Artificial Sequence: Synthetic oligonucleotide
acccgguaaugggagacag

SEQ ID NO: 1724179 - RNA, 19 nt, Artificial Sequence
  Description of Artificial Sequence: Synthetic oligonucleotide
ugggguuugccgccuuuuc

SEQ ID NO: 1724180 - RNA, 19 nt, Artificial Sequence
  Description of Artificial Sequence: Synthetic oligonucleotide
caacugugugugaaauuga

SEQ ID NO: 1724181 - RNA, 19 nt, Artificial Sequence
  Description of Artificial Sequence: Synthetic oligonucleotide
uuggggucguaaaccucac

SEQ ID NO: 1724182 - RNA, 19 nt, Artificial Sequence
  Description of Artificial Sequence: Synthetic oligonucleotide
caguugcacaggcugugug

SEQ ID NO: 1724183 - RNA, 19 nt, Artificial Sequence
  Description of Artificial Sequence: Synthetic oligonucleotide
cagaggaacaacugugugu

SEQ ID NO: 1724184 - RNA, 19 nt, Artificial Sequence
  Description of Artificial Sequence: Synthetic oligonucleotide
ggcagaugcaauagagggc

SEQ ID NO: 1724185 - RNA, 19 nt, Artificial Sequence
  Description of Artificial Sequence: Synthetic oligonucleotide
caccggucacagcagauca

SEQ ID NO: 1724186 - RNA, 19 nt, Artificial Sequence
  Description of Artificial Sequence: Synthetic oligonucleotide
cuccuugcguguucugcac

SEQ ID NO: 1724187 - RNA, 19 nt, Artificial Sequence
  Description of Artificial Sequence: Synthetic oligonucleotide
gcguguuugugaaauagca

SEQ ID NO: 1724188 - RNA, 19 nt, Artificial Sequence
  Description of Artificial Sequence: Synthetic oligonucleotide
acugugugugaaauugaau

SEQ ID NO: 1724189 - RNA, 19 nt, Artificial Sequence
  Description of Artificial Sequence: Synthetic oligonucleotide
gcucgugcagucugugccg

SEQ ID NO: 1724190 - RNA, 19 nt, Artificial Sequence
  Description of Artificial Sequence: Synthetic oligonucleotide
aggcuucacggcauuguag

SEQ ID NO: 1724191 - RNA, 19 nt, Artificial Sequence
  Description of Artificial Sequence: Synthetic oligonucleotide
uggugccuucccacugugc

SEQ ID NO: 1724192 - RNA, 19 nt, Artificial Sequence
  Description of Artificial Sequence: Synthetic oligonucleotide
gcacuugcaaaauggugca

SEQ ID NO: 1724193 - RNA, 19 nt, Artificial Sequence
  Description of Artificial Sequence: Synthetic oligonucleotide
augcacuuagcagcaccag

SEQ ID NO: 1724194 - RNA, 19 nt, Artificial Sequence
  Description of Artificial Sequence: Synthetic oligonucleotide
gucguaaaccucacacuca

SEQ ID NO: 1724195 - RNA, 19 nt, Artificial Sequence
  Description of Artificial Sequence: Synthetic oligonucleotide
gguuuugguugccugcauc

SEQ ID NO: 1724196 - RNA, 19 nt, Artificial Sequence
  Description of Artificial Sequence: Synthetic oligonucleotide
guguggugccuucccacug

SEQ ID NO: 1724197 - RNA, 19 nt, Artificial Sequence
  Description of Artificial Sequence: Synthetic oligonucleotide
gccugaacacugcauuuug

SEQ ID NO: 1724198 - RNA, 19 nt, Artificial Sequence
  Description of Artificial Sequence: Synthetic oligonucleotide
ccauuccuuuccaggagcc

SEQ ID NO: 1724199 - RNA, 19 nt, Artificial Sequence
  Description of Artificial Sequence: Synthetic oligonucleotide
uacgacaggcuggaauauc

SEQ ID NO: 1724200 - RNA, 19 nt, Artificial Sequence
  Description of Artificial Sequence: Synthetic oligonucleotide
agucaccauggaaccacuc

SEQ ID NO: 1724201 - RNA, 19 nt, Artificial Sequence
  Description of Artificial Sequence: Synthetic oligonucleotide
ucacuccuaggagccacca

SEQ ID NO: 1724202 - RNA, 19 nt, Artificial Sequence
  Description of Artificial Sequence: Synthetic oligonucleotide
ugccugaacacugcauuuu

SEQ ID NO: 1724203 - RNA, 19 nt, Artificial Sequence
  Description of Artificial Sequence: Synthetic oligonucleotide
aggggucaaagaggacugg

SEQ ID NO: 1724204 - RNA, 19 nt, Artificial Sequence
  Description of Artificial Sequence: Synthetic oligonucleotide
uucuacccuuuauccccug

SEQ ID NO: 1724205 - RNA, 19 nt, Artificial Sequence
  Description of Artificial Sequence: Synthetic oligonucleotide
uggcgcuugucucguccug

SEQ ID NO: 1724206 - RNA, 19 nt, Artificial Sequence
  Description of Artificial Sequence: Synthetic oligonucleotide
gcacuuagcagcaccagga

SEQ ID NO: 1724207 - RNA, 19 nt, Artificial Sequence
  Description of Artificial Sequence: Synthetic oligonucleotide
gcggcagaugcaauagagg

SEQ ID NO: 1724208 - RNA, 19 nt, Artificial Sequence
  Description of Artificial Sequence: Synthetic oligonucleotide
cucacacucagguuuuggu

SEQ ID NO: 1724209 - RNA, 19 nt, Artificial Sequence
  Description of Artificial Sequence: Synthetic oligonucleotide
ggaacaacugugugugaaa

SEQ ID NO: 1724210 - RNA, 19 nt, Artificial Sequence
  Description of Artificial Sequence: Synthetic oligonucleotide
ucagcaccuaagggucugc

SEQ ID NO: 1724211 - RNA, 19 nt, Artificial Sequence
  Description of Artificial Sequence: Synthetic oligonucleotide
aaccucacacucagguuuu

SEQ ID NO: 1724212 - RNA, 19 nt, Artificial Sequence
  Description of Artificial Sequence: Synthetic oligonucleotide
cacuuuuaacuccccucca

SEQ ID NO: 1724213 - RNA, 19 nt, Artificial Sequence
  Description of Artificial Sequence: Synthetic oligonucleotide
acacggagucaggcugugc

SEQ ID NO: 1724214 - RNA, 19 nt, Artificial Sequence
  Description of Artificial Sequence: Synthetic oligonucleotide
caauuugggcagauguagu

SEQ ID NO: 1724215 - RNA, 19 nt, Artificial Sequence
  Description of Artificial Sequence: Synthetic oligonucleotide
ugcccuccccuccuugcgu

SEQ ID NO: 1724216 - RNA, 19 nt, Artificial Sequence
  Description of Artificial Sequence: Synthetic oligonucleotide
ccgucagcaccuaaggguc

SEQ ID NO: 1724217 - RNA, 19 nt, Artificial Sequence
  Description of Artificial Sequence: Synthetic oligonucleotide
gucagcaccuaagggucug

SEQ ID NO: 1724218 - RNA, 19 nt, Artificial Sequence
  Description of Artificial Sequence: Synthetic oligonucleotide
gaggaacaacuguguguga

SEQ ID NO: 1724219 - RNA, 19 nt, Artificial Sequence
  Description of Artificial Sequence: Synthetic oligonucleotide
ccgccuuuucaauucuacc

SEQ ID NO: 1724220 - RNA, 19 nt, Artificial Sequence
  Description of Artificial Sequence: Synthetic oligonucleotide
gcaguacacggagucaggc

SEQ ID NO: 1724221 - RNA, 19 nt, Artificial Sequence
  Description of Artificial Sequence: Synthetic oligonucleotide
ggucacagcagaucauaaa

SEQ ID NO: 1724222 - RNA, 19 nt, Artificial Sequence
  Description of Artificial Sequence: Synthetic oligonucleotide
ggguuugccgccuuuucaa

SEQ ID NO: 1724223 - RNA, 19 nt, Artificial Sequence
  Description of Artificial Sequence: Synthetic oligonucleotide
caccccuaugcucgugcag

SEQ ID NO: 1724224 - RNA, 19 nt, Artificial Sequence
  Description of Artificial Sequence: Synthetic oligonucleotide
ggugagcauccauucagaa

SEQ ID NO: 1724225 - RNA, 19 nt, Artificial Sequence
  Description of Artificial Sequence: Synthetic oligonucleotide
gccgucagcaccuaagggu

SEQ ID NO: 1724226 - RNA, 19 nt, Artificial Sequence
  Description of Artificial Sequence: Synthetic oligonucleotide
ccuugcguguucugcacac

SEQ ID NO: 1724227 - RNA, 19 nt, Artificial Sequence
  Description of Artificial Sequence: Synthetic oligonucleotide
cacggagucaggcugugcu

SEQ ID NO: 1724228 - RNA, 19 nt, Artificial Sequence
  Description of Artificial Sequence: Synthetic oligonucleotide
gagggcauuggggucguaa

SEQ ID NO: 1724229 - RNA, 19 nt, Artificial Sequence
  Description of Artificial Sequence: Synthetic oligonucleotide
cuugcaaaauggugcaauu

SEQ ID NO: 1724230 - RNA, 19 nt, Artificial Sequence
  Description of Artificial Sequence: Synthetic oligonucleotide
gggcauuggggucguaaac

SEQ ID NO: 1724231 - RNA, 19 nt, Artificial Sequence
  Description of Artificial Sequence: Synthetic oligonucleotide
guggugccuucccacugug

SEQ ID NO: 1724232 - RNA, 19 nt, Artificial Sequence
  Description of Artificial Sequence: Synthetic oligonucleotide
cuccucggcucugccaugc

SEQ ID NO: 1724233 - RNA, 19 nt, Artificial Sequence
  Description of Artificial Sequence: Synthetic oligonucleotide
cuagucucuuguguacaga

SEQ ID NO: 1724234 - RNA, 19 nt, Artificial Sequence
  Description of Artificial Sequence: Synthetic oligonucleotide
gucugcacccaguguccug

SEQ ID NO: 1724235 - RNA, 19 nt, Artificial Sequence
  Description of Artificial Sequence: Synthetic oligonucleotide
caggcuguguggugccuuc

SEQ ID NO: 1724236 - RNA, 19 nt, Artificial Sequence
  Description of Artificial Sequence: Synthetic oligonucleotide
cucguccugcacuugcaaa

SEQ ID NO: 1724237 - RNA, 19 nt, Artificial Sequence
  Description of Artificial Sequence: Synthetic oligonucleotide
agguuaccuccuucccgca

SEQ ID NO: 1724238 - RNA, 19 nt, Artificial Sequence
  Description of Artificial Sequence: Synthetic oligonucleotide
agcggcacuggcgcuuguc

SEQ ID NO: 1724239 - RNA, 19 nt, Artificial Sequence
  Description of Artificial Sequence: Synthetic oligonucleotide
gggguuugccgccuuuuca

SEQ ID NO: 1724240 - RNA, 19 nt, Artificial Sequence
  Description of Artificial Sequence: Synthetic oligonucleotide
ugcugccugccuguaucca

SEQ ID NO: 1724241 - RNA, 19 nt, Artificial Sequence
  Description of Artificial Sequence: Synthetic oligonucleotide
ggugcaauuugggcagaug

SEQ ID NO: 1724242 - RNA, 19 nt, Artificial Sequence
  Description of Artificial Sequence: Synthetic oligonucleotide
cucuacgacaggcuggaau

SEQ ID NO: 1724243 - RNA, 19 nt, Artificial Sequence
  Description of Artificial Sequence: Synthetic oligonucleotide
gcugccugccuguauccac

SEQ ID NO: 1724244 - RNA, 19 nt, Artificial Sequence
  Description of Artificial Sequence: Synthetic oligonucleotide
cugcucuaccaccccuaug

SEQ ID NO: 1724245 - RNA, 19 nt, Artificial Sequence
  Description of Artificial Sequence: Synthetic oligonucleotide
cuuucacagguuaccuccu

SEQ ID NO: 1724246 - RNA, 19 nt, Artificial Sequence
  Description of Artificial Sequence: Synthetic oligonucleotide
gccaaugcacuuagcagca

SEQ ID NO: 1724247 - RNA, 19 nt, Artificial Sequence
  Description of Artificial Sequence: Synthetic oligonucleotide
uccucggcucugccaugca

SEQ ID NO: 1724248 - RNA, 19 nt, Artificial Sequence
  Description of Artificial Sequence: Synthetic oligonucleotide
cucggcucugccaugcagu

SEQ ID NO: 1724249 - RNA, 19 nt, Artificial Sequence
  Description of Artificial Sequence: Synthetic oligonucleotide
gcacacccgguaaugggag

SEQ ID NO: 1724250 - RNA, 19 nt, Artificial Sequence
  Description of Artificial Sequence: Synthetic oligonucleotide
cuacccuuuauccccuggu

SEQ ID NO: 1724251 - RNA, 19 nt, Artificial Sequence
  Description of Artificial Sequence: Synthetic oligonucleotide
ccgcaaguuucacuccuag

SEQ ID NO: 1724252 - RNA, 19 nt, Artificial Sequence
  Description of Artificial Sequence: Synthetic oligonucleotide
cagggccaaugcacuuagc

SEQ ID NO: 1724253 - RNA, 19 nt, Artificial Sequence
  Description of Artificial Sequence: Synthetic oligonucleotide
cuaagggucugcacccagu

SEQ ID NO: 1724254 - RNA, 19 nt, Artificial Sequence
  Description of Artificial Sequence: Synthetic oligonucleotide
cacucagguuuugguugcc

SEQ ID NO: 1724255 - RNA, 19 nt, Artificial Sequence
  Description of Artificial Sequence: Synthetic oligonucleotide
guacauggugagcauccau

SEQ ID NO: 1724256 - RNA, 19 nt, Artificial Sequence
  Description of Artificial Sequence: Synthetic oligonucleotide
uggugcaauuugggcagau

SEQ ID NO: 1724257 - RNA, 19 nt, Artificial Sequence
  Description of Artificial Sequence: Synthetic oligonucleotide
cguaaaccucacacucagg

SEQ ID NO: 1724258 - RNA, 19 nt, Artificial Sequence
  Description of Artificial Sequence: Synthetic oligonucleotide
caguacacggagucaggcu

SEQ ID NO: 1724259 - RNA, 19 nt, Artificial Sequence
  Description of Artificial Sequence: Synthetic oligonucleotide
cccacugugcagaggaaga

SEQ ID NO: 1724260 - RNA, 19 nt, Artificial Sequence
  Description of Artificial Sequence: Synthetic oligonucleotide
gcuggaauaucuugaguuu

SEQ ID NO: 1724261 - RNA, 19 nt, Artificial Sequence
  Description of Artificial Sequence: Synthetic oligonucleotide
cccgguaaugggagacagg

SEQ ID NO: 1724262 - RNA, 19 nt, Artificial Sequence
  Description of Artificial Sequence: Synthetic oligonucleotide
guuugccgccuuuucaauu

SEQ ID NO: 1724263 - RNA, 19 nt, Artificial Sequence
  Description of Artificial Sequence: Synthetic oligonucleotide
guagucuuccccauuccuu

SEQ ID NO: 1724264 - RNA, 19 nt, Artificial Sequence
  Description of Artificial Sequence: Synthetic oligonucleotide
gggguagcagcagggcucc

SEQ ID NO: 1724265 - RNA, 19 nt, Artificial Sequence
  Description of Artificial Sequence: Synthetic oligonucleotide
gccgccuuuucaauucuac

SEQ ID NO: 1724266 - RNA, 19 nt, Artificial Sequence
  Description of Artificial Sequence: Synthetic oligonucleotide
agcauccauucagaagauu

SEQ ID NO: 1724267 - RNA, 19 nt, Artificial Sequence
  Description of Artificial Sequence: Synthetic oligonucleotide
cacucgcccaggauggugu

SEQ ID NO: 1724268 - RNA, 19 nt, Artificial Sequence
  Description of Artificial Sequence: Synthetic oligonucleotide
gggucguaaaccucacacu

SEQ ID NO: 1724269 - RNA, 19 nt, Artificial Sequence
  Description of Artificial Sequence: Synthetic oligonucleotide
uccuucccgcaaguuucac

SEQ ID NO: 1724270 - RNA, 19 nt, Artificial Sequence
  Description of Artificial Sequence: Synthetic oligonucleotide
cuggaauaucuugaguuuu

SEQ ID NO: 1724271 - RNA, 19 nt, Artificial Sequence
  Description of Artificial Sequence: Synthetic oligonucleotide
cacagucaccauggaacca

SEQ ID NO: 1724272 - RNA, 19 nt, Artificial Sequence
  Description of Artificial Sequence: Synthetic oligonucleotide
aucagcggcacuggcgcuu

SEQ ID NO: 1724273 - RNA, 19 nt, Artificial Sequence
  Description of Artificial Sequence: Synthetic oligonucleotide
aggcugugcuacauuggaa

SEQ ID NO: 1724274 - RNA, 19 nt, Artificial Sequence
  Description of Artificial Sequence: Synthetic oligonucleotide
caggagccucuacgacagg

SEQ ID NO: 1724275 - RNA, 19 nt, Artificial Sequence
  Description of Artificial Sequence: Synthetic oligonucleotide
ccuccuugcguguucugca

SEQ ID NO: 1724276 - RNA, 19 nt, Artificial Sequence
  Description of Artificial Sequence: Synthetic oligonucleotide
ucuuuccgcugggguuugc

SEQ ID NO: 1724277 - RNA, 19 nt, Artificial Sequence
  Description of Artificial Sequence: Synthetic oligonucleotide
acccagggccaaugcacuu

SEQ ID NO: 1724278 - RNA, 19 nt, Artificial Sequence
  Description of Artificial Sequence: Synthetic oligonucleotide
ggccagaguccuugggaca

SEQ ID NO: 1724279 - RNA, 19 nt, Artificial Sequence
  Description of Artificial Sequence: Synthetic oligonucleotide
cuaugcucgugcagucugu

SEQ ID NO: 1724280 - RNA, 19 nt, Artificial Sequence
  Description of Artificial Sequence: Synthetic oligonucleotide
cccuccuugcguguucugc

SEQ ID NO: 1724281 - RNA, 19 nt, Artificial Sequence
  Description of Artificial Sequence: Synthetic oligonucleotide
ucgugcagucugugccguc

SEQ ID NO: 1724282 - RNA, 19 nt, Artificial Sequence
  Description of Artificial Sequence: Synthetic oligonucleotide
gcuggcggcagaugcaaua

SEQ ID NO: 1724283 - RNA, 19 nt, Artificial Sequence
  Description of Artificial Sequence: Synthetic oligonucleotide
ggagucaggcugugcuaca

SEQ ID NO: 1724284 - RNA, 19 nt, Artificial Sequence
  Description of Artificial Sequence: Synthetic oligonucleotide
gguagcagcagggcuccuc

SEQ ID NO: 1724285 - RNA, 19 nt, Artificial Sequence
  Description of Artificial Sequence: Synthetic oligonucleotide
cucaugguagcugcagcgu

SEQ ID NO: 1724286 - RNA, 19 nt, Artificial Sequence
  Description of Artificial Sequence: Synthetic oligonucleotide
guucugcacacccgguaau

SEQ ID NO: 1724287 - RNA, 19 nt, Artificial Sequence
  Description of Artificial Sequence: Synthetic oligonucleotide
auggugcaauuugggcaga

SEQ ID NO: 1724288 - RNA, 19 nt, Artificial Sequence
  Description of Artificial Sequence: Synthetic oligonucleotide
gcugcaguacacggaguca

SEQ ID NO: 1724289 - RNA, 19 nt, Artificial Sequence
  Description of Artificial Sequence: Synthetic oligonucleotide
cgguaaugggagacagggc

SEQ ID NO: 1724290 - RNA, 19 nt, Artificial Sequence
  Description of Artificial Sequence: Synthetic oligonucleotide
gccucuacgacaggcugga

SEQ ID NO: 1724291 - RNA, 19 nt, Artificial Sequence
  Description of Artificial Sequence: Synthetic oligonucleotide
ccucggcucugccaugcag

SEQ ID NO: 1724292 - RNA, 19 nt, Artificial Sequence
  Description of Artificial Sequence: Synthetic oligonucleotide
agaguccuugggacacagu

SEQ ID NO: 1724293 - RNA, 19 nt, Artificial Sequence
  Description of Artificial Sequence: Synthetic oligonucleotide
cacccagggccaaugcacu

SEQ ID NO: 1724294 - RNA, 19 nt, Artificial Sequence
  Description of Artificial Sequence: Synthetic oligonucleotide
guacacggagucaggcugu

SEQ ID NO: 1724295 - RNA, 19 nt, Artificial Sequence
  Description of Artificial Sequence: Synthetic oligonucleotide
gagucaggcugugcuacau

SEQ ID NO: 1724296 - RNA, 19 nt, Artificial Sequence
  Description of Artificial Sequence: Synthetic oligonucleotide
accggucacagcagaucau

SEQ ID NO: 1724297 - RNA, 19 nt, Artificial Sequence
  Description of Artificial Sequence: Synthetic oligonucleotide
uaccuccuucccgcaaguu

SEQ ID NO: 1724298 - RNA, 19 nt, Artificial Sequence
  Description of Artificial Sequence: Synthetic oligonucleotide
ggcuccucggcucugccau

SEQ ID NO: 1724299 - RNA, 19 nt, Artificial Sequence
  Description of Artificial Sequence: Synthetic oligonucleotide
ucccuggggcuuuccucuu

SEQ ID NO: 1724300 - RNA, 19 nt, Artificial Sequence
  Description of Artificial Sequence: Synthetic oligonucleotide
cagcaccuaagggucugca

SEQ ID NO: 1724301 - RNA, 19 nt, Artificial Sequence
  Description of Artificial Sequence: Synthetic oligonucleotide
ccuaggagccaccaucacu

SEQ ID NO: 1724302 - RNA, 19 nt, Artificial Sequence
  Description of Artificial Sequence: Synthetic oligonucleotide
gagcauccauucagaagau

SEQ ID NO: 1724303 - RNA, 19 nt, Artificial Sequence
  Description of Artificial Sequence: Synthetic oligonucleotide
cacccgguaaugggagaca

SEQ ID NO: 1724304 - RNA, 19 nt, Artificial Sequence
  Description of Artificial Sequence: Synthetic oligonucleotide
caguguacauggugagcau

SEQ ID NO: 1724305 - RNA, 19 nt, Artificial Sequence
  Description of Artificial Sequence: Synthetic oligonucleotide
gcacuggguucacuuuuaa

SEQ ID NO: 1724306 - RNA, 19 nt, Artificial Sequence
  Description of Artificial Sequence: Synthetic oligonucleotide
gguuugccgccuuuucaau

SEQ ID NO: 1724307 - RNA, 19 nt, Artificial Sequence
  Description of Artificial Sequence: Synthetic oligonucleotide
ggucuucaccagacuucug

SEQ ID NO: 1724308 - RNA, 19 nt, Artificial Sequence
  Description of Artificial Sequence: Synthetic oligonucleotide
ccccuaugcucgugcaguc

SEQ ID NO: 1724309 - RNA, 19 nt, Artificial Sequence
  Description of Artificial Sequence: Synthetic oligonucleotide
ggagccucuacgacaggcu

SEQ ID NO: 1724310 - RNA, 19 nt, Artificial Sequence
  Description of Artificial Sequence: Synthetic oligonucleotide
cacaccggucacagcagau

SEQ ID NO: 1724311 - RNA, 19 nt, Artificial Sequence
  Description of Artificial Sequence: Synthetic oligonucleotide
gcagcguguuugugaaaua

SEQ ID NO: 1724312 - RNA, 19 nt, Artificial Sequence
  Description of Artificial Sequence: Synthetic oligonucleotide
cacuggcgcuugucucguc

SEQ ID NO: 1724313 - RNA, 19 nt, Artificial Sequence
  Description of Artificial Sequence: Synthetic oligonucleotide
ggagccguccucgggccuc

SEQ ID NO: 1724314 - RNA, 19 nt, Artificial Sequence
  Description of Artificial Sequence: Synthetic oligonucleotide
cuacgacaggcuggaauau

SEQ ID NO: 1724315 - RNA, 19 nt, Artificial Sequence
  Description of Artificial Sequence: Synthetic oligonucleotide
ccaaugcacuuagcagcac

SEQ ID NO: 1724316 - RNA, 19 nt, Artificial Sequence
  Description of Artificial Sequence: Synthetic oligonucleotide
cugcagcguguuugugaaa

SEQ ID NO: 1724317 - RNA, 19 nt, Artificial Sequence
  Description of Artificial Sequence: Synthetic oligonucleotide
gcuccucggcucugccaug

SEQ ID NO: 1724318 - RNA, 19 nt, Artificial Sequence
  Description of Artificial Sequence: Synthetic oligonucleotide
gcucuaccaccccuaugcu

SEQ ID NO: 1724319 - RNA, 19 nt, Artificial Sequence
  Description of Artificial Sequence: Synthetic oligonucleotide
gcggcacuggcgcuugucu

SEQ ID NO: 1724320 - RNA, 19 nt, Artificial Sequence
  Description of Artificial Sequence: Synthetic oligonucleotide
ccucuuuacuucccugagu

SEQ ID NO: 1724321 - RNA, 19 nt, Artificial Sequence
  Description of Artificial Sequence: Synthetic oligonucleotide
cccuuuauccccuggucuu

SEQ ID NO: 1724322 - RNA, 19 nt, Artificial Sequence
  Description of Artificial Sequence: Synthetic oligonucleotide
cuaccaccccuaugcucgu

SEQ ID NO: 1724323 - RNA, 19 nt, Artificial Sequence
  Description of Artificial Sequence: Synthetic oligonucleotide
caucagcggcacuggcgcu

SEQ ID NO: 1724324 - RNA, 19 nt, Artificial Sequence
  Description of Artificial Sequence: Synthetic oligonucleotide
cucgugcagucugugccgu

SEQ ID NO: 1724325 - RNA, 19 nt, Artificial Sequence
  Description of Artificial Sequence: Synthetic oligonucleotide
caggaugguguggugcuuu

SEQ ID NO: 1724326 - RNA, 19 nt, Artificial Sequence
  Description of Artificial Sequence: Synthetic oligonucleotide
cugugccgucagcaccuaa

SEQ ID NO: 1724327 - RNA, 19 nt, Artificial Sequence
  Description of Artificial Sequence: Synthetic oligonucleotide
ccuucccgcaaguuucacu

SEQ ID NO: 1724328 - RNA, 19 nt, Artificial Sequence
  Description of Artificial Sequence: Synthetic oligonucleotide
ccaccccuaugcucgugca

SEQ ID NO: 1724329 - RNA, 19 nt, Artificial Sequence
  Description of Artificial Sequence: Synthetic oligonucleotide
cacuccuaggagccaccau

SEQ ID NO: 1724330 - RNA, 19 nt, Artificial Sequence
  Description of Artificial Sequence: Synthetic oligonucleotide
caccugcauguggaggugu

SEQ ID NO: 1724331 - RNA, 19 nt, Artificial Sequence
  Description of Artificial Sequence: Synthetic oligonucleotide
cugcaucccuggggcuuuc

SEQ ID NO: 1724332 - RNA, 19 nt, Artificial Sequence
  Description of Artificial Sequence: Synthetic oligonucleotide
cggucacagcagaucauaa

SEQ ID NO: 1724333 - RNA, 19 nt, Artificial Sequence
  Description of Artificial Sequence: Synthetic oligonucleotide
cgcuugucucguccugcac

SEQ ID NO: 1724334 - RNA, 19 nt, Artificial Sequence
  Description of Artificial Sequence: Synthetic oligonucleotide
ggucugcacccaguguccu

SEQ ID NO: 1724335 - RNA, 19 nt, Artificial Sequence
  Description of Artificial Sequence: Synthetic oligonucleotide
gucacucgcccaggauggu

SEQ ID NO: 1724336 - RNA, 19 nt, Artificial Sequence
  Description of Artificial Sequence: Synthetic oligonucleotide
cccgcaaguuucacuccua

SEQ ID NO: 1724337 - RNA, 19 nt, Artificial Sequence
  Description of Artificial Sequence: Synthetic oligonucleotide
cugggguuugccgccuuuu

SEQ ID NO: 1724338 - RNA, 19 nt, Artificial Sequence
  Description of Artificial Sequence: Synthetic oligonucleotide
agccguccucgggccucag

SEQ ID NO: 1724339 - RNA, 19 nt, Artificial Sequence
  Description of Artificial Sequence: Synthetic oligonucleotide
gccguccucgggccucaga

SEQ ID NO: 1724340 - RNA, 19 nt, Artificial Sequence
  Description of Artificial Sequence: Synthetic oligonucleotide
cccagggccaaugcacuua

SEQ ID NO: 1724341 - RNA, 19 nt, Artificial Sequence
  Description of Artificial Sequence: Synthetic oligonucleotide
ccccuccuugcguguucug

SEQ ID NO: 1724342 - RNA, 19 nt, Artificial Sequence
  Description of Artificial Sequence: Synthetic oligonucleotide
cacaggcuguguggugccu

SEQ ID NO: 1724343 - RNA, 19 nt, Artificial Sequence
  Description of Artificial Sequence: Synthetic oligonucleotide
gcacuggcgcuugucucgu

SEQ ID NO: 1724344 - RNA, 19 nt, Artificial Sequence
  Description of Artificial Sequence: Synthetic oligonucleotide
cguguucugcacacccggu

SEQ ID NO: 1724345 - RNA, 19 nt, Artificial Sequence
  Description of Artificial Sequence: Synthetic oligonucleotide
cccuaugcucgugcagucu

SEQ ID NO: 1724346 - RNA, 19 nt, Artificial Sequence
  Description of Artificial Sequence: Synthetic oligonucleotide
ggcuggcggcagaugcaau

SEQ ID NO: 1724347 - RNA, 19 nt, Artificial Sequence
  Description of Artificial Sequence: Synthetic oligonucleotide
ccucuacgacaggcuggaa

SEQ ID NO: 1724348 - RNA, 19 nt, Artificial Sequence
  Description of Artificial Sequence: Synthetic oligonucleotide
ggguagcagcagggcuccu

SEQ ID NO: 1724349 - RNA, 19 nt, Artificial Sequence
  Description of Artificial Sequence: Synthetic oligonucleotide
ccuccccuccuugcguguu

SEQ ID NO: 1724350 - RNA, 19 nt, Artificial Sequence
  Description of Artificial Sequence: Synthetic oligonucleotide
ccgcugggguuugccgccu

SEQ ID NO: 1724351 - RNA, 19 nt, Artificial Sequence
  Description of Artificial Sequence: Synthetic oligonucleotide
aauucaaugaguccacucc

SEQ ID NO: 1724352 - RNA, 19 nt, Artificial Sequence
  Description of Artificial Sequence: Synthetic oligonucleotide
aagauaucuuguaaaaucc

SEQ ID NO: 1724353 - RNA, 19 nt, Artificial Sequence
  Description of Artificial Sequence: Synthetic oligonucleotide
auugaaacgggcaugaagc

SEQ ID NO: 1724354 - RNA, 19 nt, Artificial Sequence
  Description of Artificial Sequence: Synthetic oligonucleotide
aaguauauagaagaagaac

SEQ ID NO: 1724355 - RNA, 19 nt, Artificial Sequence
  Description of Artificial Sequence: Synthetic oligonucleotide
cuaucaaccaacuagcagc

SEQ ID NO: 1724356 - RNA, 19 nt, Artificial Sequence
  Description of Artificial Sequence: Synthetic oligonucleotide
aaugcgacaacuguaagag

SEQ ID NO: 1724357 - RNA, 19 nt, Artificial Sequence
  Description of Artificial Sequence: Synthetic oligonucleotide
aaauuggguaacuucauug

SEQ ID NO: 1724358 - RNA, 19 nt, Artificial Sequence
  Description of Artificial Sequence: Synthetic oligonucleotide
ugcgacaacuguaagaggg

SEQ ID NO: 1724359 - RNA, 19 nt, Artificial Sequence
  Description of Artificial Sequence: Synthetic oligonucleotide
aguaagacgaucauuacac

SEQ ID NO: 1724360 - RNA, 19 nt, Artificial Sequence
  Description of Artificial Sequence: Synthetic oligonucleotide
agggcugaaagucaaauac

SEQ ID NO: 1724361 - RNA, 19 nt, Artificial Sequence
  Description of Artificial Sequence: Synthetic oligonucleotide
guaauuaucaugccaacag

SEQ ID NO: 1724362 - RNA, 19 nt, Artificial Sequence
  Description of Artificial Sequence: Synthetic oligonucleotide
uaagauaucuuguaaaauc

SEQ ID NO: 1724363 - RNA, 19 nt, Artificial Sequence
  Description of Artificial Sequence: Synthetic oligonucleotide
aaacacaucauagaccagg

SEQ ID NO: 1724364 - RNA, 19 nt, Artificial Sequence
  Description of Artificial Sequence: Synthetic oligonucleotide
aaauacucguccuucuuuc

SEQ ID NO: 1724365 - RNA, 19 nt, Artificial Sequence
  Description of Artificial Sequence: Synthetic oligonucleotide
uccaguauccuccuaaugc

SEQ ID NO: 1724366 - RNA, 19 nt, Artificial Sequence
  Description of Artificial Sequence: Synthetic oligonucleotide
aaauguaauuaucaugcca

SEQ ID NO: 1724367 - RNA, 19 nt, Artificial Sequence
  Description of Artificial Sequence: Synthetic oligonucleotide
gaaaauugcuaucauaaca

SEQ ID NO: 1724368 - RNA, 19 nt, Artificial Sequence
  Description of Artificial Sequence: Synthetic oligonucleotide
uguagaugaaauaaaguau

SEQ ID NO: 1724369 - RNA, 19 nt, Artificial Sequence
  Description of Artificial Sequence: Synthetic oligonucleotide
aguauagucauauuuugga

SEQ ID NO: 1724370 - RNA, 19 nt, Artificial Sequence
  Description of Artificial Sequence: Synthetic oligonucleotide
auaacugacaauuaguaua

SEQ ID NO: 1724371 - RNA, 19 nt, Artificial Sequence
  Description of Artificial Sequence: Synthetic oligonucleotide
uaaguugagacagaaagca

SEQ ID NO: 1724372 - RNA, 19 nt, Artificial Sequence
  Description of Artificial Sequence: Synthetic oligonucleotide
auauuuuggaauucagauc

SEQ ID NO: 1724373 - RNA, 19 nt, Artificial Sequence
  Description of Artificial Sequence: Synthetic oligonucleotide
auaaacaagccacuuguag

SEQ ID NO: 1724374 - RNA, 19 nt, Artificial Sequence
  Description of Artificial Sequence: Synthetic oligonucleotide
uaacagaucagcuuuggca

SEQ ID NO: 1724375 - RNA, 19 nt, Artificial Sequence
  Description of Artificial Sequence: Synthetic oligonucleotide
uuaguauagucauauuuug

SEQ ID NO: 1724376 - RNA, 19 nt, Artificial Sequence
  Description of Artificial Sequence: Synthetic oligonucleotide
uguagagaaauagaguaag

SEQ ID NO: 1724377 - RNA, 19 nt, Artificial Sequence
  Description of Artificial Sequence: Synthetic oligonucleotide
uuaaguugagacagaaagc

SEQ ID NO: 1724378 - RNA, 19 nt, Artificial Sequence
  Description of Artificial Sequence: Synthetic oligonucleotide
uguagguccacauaauuac

SEQ ID NO: 1724379 - RNA, 19 nt, Artificial Sequence
  Description of Artificial Sequence: Synthetic oligonucleotide
uauagaagaagaaccaguc

SEQ ID NO: 1724380 - RNA, 19 nt, Artificial Sequence
  Description of Artificial Sequence: Synthetic oligonucleotide
uaguauagucauauuuugg

SEQ ID NO: 1724381 - RNA, 19 nt, Artificial Sequence
  Description of Artificial Sequence: Synthetic oligonucleotide
aacauaaacaagccacuug

SEQ ID NO: 1724382 - RNA, 19 nt, Artificial Sequence
  Description of Artificial Sequence: Synthetic oligonucleotide
aauguaauuaucaugccaa

SEQ ID NO: 1724383 - RNA, 19 nt, Artificial Sequence
  Description of Artificial Sequence: Synthetic oligonucleotide
uauuuugcgaacaggaauc

SEQ ID NO: 1724384 - RNA, 19 nt, Artificial Sequence
  Description of Artificial Sequence: Synthetic oligonucleotide
uaagacgaucauuacacag

SEQ ID NO: 1724385 - RNA, 19 nt, Artificial Sequence
  Description of Artificial Sequence: Synthetic oligonucleotide
aauuggguaacuucauugu

SEQ ID NO: 1724386 - RNA, 19 nt, Artificial Sequence
  Description of Artificial Sequence: Synthetic oligonucleotide
uuugcgaacaggaaucgug

SEQ ID NO: 1724387 - RNA, 19 nt, Artificial Sequence
  Description of Artificial Sequence: Synthetic oligonucleotide
caauaauaucuccaaaacc

SEQ ID NO: 1724388 - RNA, 19 nt, Artificial Sequence
  Description of Artificial Sequence: Synthetic oligonucleotide
aaugguguuaugaagacaa

SEQ ID NO: 1724389 - RNA, 19 nt, Artificial Sequence
  Description of Artificial Sequence: Synthetic oligonucleotide
ucaaccaacuagcagcaag

SEQ ID NO: 1724390 - RNA, 19 nt, Artificial Sequence
  Description of Artificial Sequence: Synthetic oligonucleotide
acgggcaugaagcauacac

SEQ ID NO: 1724391 - RNA, 19 nt, Artificial Sequence
  Description of Artificial Sequence: Synthetic oligonucleotide
caagaaguguacaagguac

SEQ ID NO: 1724392 - RNA, 19 nt, Artificial Sequence
  Description of Artificial Sequence: Synthetic oligonucleotide
ucauuacugaguaacagau

SEQ ID NO: 1724393 - RNA, 19 nt, Artificial Sequence
  Description of Artificial Sequence: Synthetic oligonucleotide
aaaugcgacaacuguaaga

SEQ ID NO: 1724394 - RNA, 19 nt, Artificial Sequence
  Description of Artificial Sequence: Synthetic oligonucleotide
cacuuguagagaaauagag

SEQ ID NO: 1724395 - RNA, 19 nt, Artificial Sequence
  Description of Artificial Sequence: Synthetic oligonucleotide
ucauuguagguccacauaa

SEQ ID NO: 1724396 - RNA, 19 nt, Artificial Sequence
  Description of Artificial Sequence: Synthetic oligonucleotide
uucggcauucucaaaaggc

SEQ ID NO: 1724397 - RNA, 19 nt, Artificial Sequence
  Description of Artificial Sequence: Synthetic oligonucleotide
caagguacuaaauacagga

SEQ ID NO: 1724398 - RNA, 19 nt, Artificial Sequence
  Description of Artificial Sequence: Synthetic oligonucleotide
agaaugguguuaugaagac

SEQ ID NO: 1724399 - RNA, 19 nt, Artificial Sequence
  Description of Artificial Sequence: Synthetic oligonucleotide
uguacagacucacugcuga

SEQ ID NO: 1724400 - RNA, 19 nt, Artificial Sequence
  Description of Artificial Sequence: Synthetic oligonucleotide
acacucauuacugaguaac

SEQ ID NO: 1724401 - RNA, 19 nt, Artificial Sequence
  Description of Artificial Sequence: Synthetic oligonucleotide
auucucaaaaggcccagcg

SEQ ID NO: 1724402 - RNA, 19 nt, Artificial Sequence
  Description of Artificial Sequence: Synthetic oligonucleotide
aaagucaaauacucguccu

SEQ ID NO: 1724403 - RNA, 19 nt, Artificial Sequence
  Description of Artificial Sequence: Synthetic oligonucleotide
aaauagaguaagacgauca

SEQ ID NO: 1724404 - RNA, 19 nt, Artificial Sequence
  Description of Artificial Sequence: Synthetic oligonucleotide
cauaauuacugcugcacag

SEQ ID NO: 1724405 - RNA, 19 nt, Artificial Sequence
  Description of Artificial Sequence: Synthetic oligonucleotide
aaaucuucuacaauaugca

SEQ ID NO: 1724406 - RNA, 19 nt, Artificial Sequence
  Description of Artificial Sequence: Synthetic oligonucleotide
cuuguagagaaauagagua

SEQ ID NO: 1724407 - RNA, 19 nt, Artificial Sequence
  Description of Artificial Sequence: Synthetic oligonucleotide
caagcaacgacugaggcag

SEQ ID NO: 1724408 - RNA, 19 nt, Artificial Sequence
  Description of Artificial Sequence: Synthetic oligonucleotide
ggagaauacauuugcacgg

SEQ ID NO: 1724409 - RNA, 19 nt, Artificial Sequence
  Description of Artificial Sequence: Synthetic oligonucleotide
ucauagaccaggagaaggc

SEQ ID NO: 1724410 - RNA, 19 nt, Artificial Sequence
  Description of Artificial Sequence: Synthetic oligonucleotide
acgaucauuacacagcaga

SEQ ID NO: 1724411 - RNA, 19 nt, Artificial Sequence
  Description of Artificial Sequence: Synthetic oligonucleotide
guauagucaaaguuaggcc

SEQ ID NO: 1724412 - RNA, 19 nt, Artificial Sequence
  Description of Artificial Sequence: Synthetic oligonucleotide
aacagcgacagagaugcac

SEQ ID NO: 1724413 - RNA, 19 nt, Artificial Sequence
  Description of Artificial Sequence: Synthetic oligonucleotide
uaauuacugcugcacagcc

SEQ ID NO: 1724414 - RNA, 19 nt, Artificial Sequence
  Description of Artificial Sequence: Synthetic oligonucleotide
ugacaauuaguauagucau

SEQ ID NO: 1724415 - RNA, 19 nt, Artificial Sequence
  Description of Artificial Sequence: Synthetic oligonucleotide
cugacaauuaguauaguca

SEQ ID NO: 1724416 - RNA, 19 nt, Artificial Sequence
  Description of Artificial Sequence: Synthetic oligonucleotide
auaguauagucaaaguuag

SEQ ID NO: 1724417 - RNA, 19 nt, Artificial Sequence
  Description of Artificial Sequence: Synthetic oligonucleotide
uguaagagggcugaaaguc

SEQ ID NO: 1724418 - RNA, 19 nt, Artificial Sequence
  Description of Artificial Sequence: Synthetic oligonucleotide
gcuaucauaacauaaacaa

SEQ ID NO: 1724419 - RNA, 19 nt, Artificial Sequence
  Description of Artificial Sequence: Synthetic oligonucleotide
gacgcuaugcagaaaauug

SEQ ID NO: 1724420 - RNA, 19 nt, Artificial Sequence
  Description of Artificial Sequence: Synthetic oligonucleotide
caaucaacaggccugguac

SEQ ID NO: 1724421 - RNA, 19 nt, Artificial Sequence
  Description of Artificial Sequence: Synthetic oligonucleotide
agguacuaaauacaggaga

SEQ ID NO: 1724422 - RNA, 19 nt, Artificial Sequence
  Description of Artificial Sequence: Synthetic oligonucleotide
aauaaaguauauagaagaa

SEQ ID NO: 1724423 - RNA, 19 nt, Artificial Sequence
  Description of Artificial Sequence: Synthetic oligonucleotide
ugaagaaugguguuaugaa

SEQ ID NO: 1724424 - RNA, 19 nt, Artificial Sequence
  Description of Artificial Sequence: Synthetic oligonucleotide
aauagaguaagacgaucau

SEQ ID NO: 1724425 - RNA, 19 nt, Artificial Sequence
  Description of Artificial Sequence: Synthetic oligonucleotide
ucuccuuacgacuccaagc

SEQ ID NO: 1724426 - RNA, 19 nt, Artificial Sequence
  Description of Artificial Sequence: Synthetic oligonucleotide
uacauuugcacgguaaugu

SEQ ID NO: 1724427 - RNA, 19 nt, Artificial Sequence
  Description of Artificial Sequence: Synthetic oligonucleotide
uuuucggcauucucaaaag

SEQ ID NO: 1724428 - RNA, 19 nt, Artificial Sequence
  Description of Artificial Sequence: Synthetic oligonucleotide
uuucggcauucucaaaagg

SEQ ID NO: 1724429 - RNA, 19 nt, Artificial Sequence
  Description of Artificial Sequence: Synthetic oligonucleotide
acaauuaguauagucauau

SEQ ID NO: 1724430 - RNA, 19 nt, Artificial Sequence
  Description of Artificial Sequence: Synthetic oligonucleotide
agcagcaagacaguuguac

SEQ ID NO: 1724431 - RNA, 19 nt, Artificial Sequence
  Description of Artificial Sequence: Synthetic oligonucleotide
ugaaagucaaauacucguc

SEQ ID NO: 1724432 - RNA, 19 nt, Artificial Sequence
  Description of Artificial Sequence: Synthetic oligonucleotide
cuauccucauuuucuaacc

SEQ ID NO: 1724433 - RNA, 19 nt, Artificial Sequence
  Description of Artificial Sequence: Synthetic oligonucleotide
uuuccaauucaaugagucc

SEQ ID NO: 1724434 - RNA, 19 nt, Artificial Sequence
  Description of Artificial Sequence: Synthetic oligonucleotide
auuuucuaaccacagccca

SEQ ID NO: 1724435 - RNA, 19 nt, Artificial Sequence
  Description of Artificial Sequence: Synthetic oligonucleotide
cauuacacagcagaugacc

SEQ ID NO: 1724436 - RNA, 19 nt, Artificial Sequence
  Description of Artificial Sequence: Synthetic oligonucleotide
auguaauuaucaugccaac

SEQ ID NO: 1724437 - RNA, 19 nt, Artificial Sequence
  Description of Artificial Sequence: Synthetic oligonucleotide
aauugcuaucauaacauaa

SEQ ID NO: 1724438 - RNA, 19 nt, Artificial Sequence
  Description of Artificial Sequence: Synthetic oligonucleotide
uccuaagauaucuuguaaa

SEQ ID NO: 1724439 - RNA, 19 nt, Artificial Sequence
  Description of Artificial Sequence: Synthetic oligonucleotide
auaugcaaucaacaggccu

SEQ ID NO: 1724440 - RNA, 19 nt, Artificial Sequence
  Description of Artificial Sequence: Synthetic oligonucleotide
augacuugaaauuggguaa

SEQ ID NO: 1724441 - RNA, 19 nt, Artificial Sequence
  Description of Artificial Sequence: Synthetic oligonucleotide
agcaauuccuaagauaucu

SEQ ID NO: 1724442 - RNA, 19 nt, Artificial Sequence
  Description of Artificial Sequence: Synthetic oligonucleotide
uguaauuaucaugccaaca

SEQ ID NO: 1724443 - RNA, 19 nt, Artificial Sequence
  Description of Artificial Sequence: Synthetic oligonucleotide
uucuacaauaugcaaucaa

SEQ ID NO: 1724444 - RNA, 19 nt, Artificial Sequence
  Description of Artificial Sequence: Synthetic oligonucleotide
uugcgaacaggaaucgugc

SEQ ID NO: 1724445 - RNA, 19 nt, Artificial Sequence
  Description of Artificial Sequence: Synthetic oligonucleotide
ugaagcauacacucauuac

SEQ ID NO: 1724446 - RNA, 19 nt, Artificial Sequence
  Description of Artificial Sequence: Synthetic oligonucleotide
aggccuagcaguaucacac

SEQ ID NO: 1724447 - RNA, 19 nt, Artificial Sequence
  Description of Artificial Sequence: Synthetic oligonucleotide
cuagcaguaucacacauga

SEQ ID NO: 1724448 - RNA, 19 nt, Artificial Sequence
  Description of Artificial Sequence: Synthetic oligonucleotide
uuguagguccacauaauua

SEQ ID NO: 1724449 - RNA, 19 nt, Artificial Sequence
  Description of Artificial Sequence: Synthetic oligonucleotide
gguacuaaauacaggagag

SEQ ID NO: 1724450 - RNA, 19 nt, Artificial Sequence
  Description of Artificial Sequence: Synthetic oligonucleotide
acagaucagcuuuggcacc

SEQ ID NO: 1724451 - RNA, 19 nt, Artificial Sequence
  Description of Artificial Sequence: Synthetic oligonucleotide
aaaaucaggaucacuuuaa

SEQ ID NO: 1724452 - RNA, 19 nt, Artificial Sequence
  Description of Artificial Sequence: Synthetic oligonucleotide
agacgaucauuacacagca

SEQ ID NO: 1724453 - RNA, 19 nt, Artificial Sequence
  Description of Artificial Sequence: Synthetic oligonucleotide
cagcagaugaccacaaaug

SEQ ID NO: 1724454 - RNA, 19 nt, Artificial Sequence
  Description of Artificial Sequence: Synthetic oligonucleotide
auaaccaccauaguauagu

SEQ ID NO: 1724455 - RNA, 19 nt, Artificial Sequence
  Description of Artificial Sequence: Synthetic oligonucleotide
uacgacuccaagcaacgac

SEQ ID NO: 1724456 - RNA, 19 nt, Artificial Sequence
  Description of Artificial Sequence: Synthetic oligonucleotide
uccaagcaacgacugaggc

SEQ ID NO: 1724457 - RNA, 19 nt, Artificial Sequence
  Description of Artificial Sequence: Synthetic oligonucleotide
gaucauuacacagcagaug

SEQ ID NO: 1724458 - RNA, 19 nt, Artificial Sequence
  Description of Artificial Sequence: Synthetic oligonucleotide
aaauugcuaucauaacaua

SEQ ID NO: 1724459 - RNA, 19 nt, Artificial Sequence
  Description of Artificial Sequence: Synthetic oligonucleotide
acgcuaugcagaaaauugc

SEQ ID NO: 1724460 - RNA, 19 nt, Artificial Sequence
  Description of Artificial Sequence: Synthetic oligonucleotide
caguuguacagacucacug

SEQ ID NO: 1724461 - RNA, 19 nt, Artificial Sequence
  Description of Artificial Sequence: Synthetic oligonucleotide
uacagacucacugcugacg

SEQ ID NO: 1724462 - RNA, 19 nt, Artificial Sequence
  Description of Artificial Sequence: Synthetic oligonucleotide
aguccagaugguucauuac

SEQ ID NO: 1724463 - RNA, 19 nt, Artificial Sequence
  Description of Artificial Sequence: Synthetic oligonucleotide
ugaaauuggguaacuucau

SEQ ID NO: 1724464 - RNA, 19 nt, Artificial Sequence
  Description of Artificial Sequence: Synthetic oligonucleotide
augaguccacuccaguauc

SEQ ID NO: 1724465 - RNA, 19 nt, Artificial Sequence
  Description of Artificial Sequence: Synthetic oligonucleotide
uuccuaagauaucuuguaa

SEQ ID NO: 1724466 - RNA, 19 nt, Artificial Sequence
  Description of Artificial Sequence: Synthetic oligonucleotide
acucauuacugaguaacag

SEQ ID NO: 1724467 - RNA, 19 nt, Artificial Sequence
  Description of Artificial Sequence: Synthetic oligonucleotide
auacucguccuucuuucuc

SEQ ID NO: 1724468 - RNA, 19 nt, Artificial Sequence
  Description of Artificial Sequence: Synthetic oligonucleotide
ugauuaaguugagacagaa

SEQ ID NO: 1724469 - RNA, 19 nt, Artificial Sequence
  Description of Artificial Sequence: Synthetic oligonucleotide
cucauuuucuaaccacagc

SEQ ID NO: 1724470 - RNA, 19 nt, Artificial Sequence
  Description of Artificial Sequence: Synthetic oligonucleotide
uaagagggcugaaagucaa

SEQ ID NO: 1724471 - RNA, 19 nt, Artificial Sequence
  Description of Artificial Sequence: Synthetic oligonucleotide
aguaucacacaugacuuga

SEQ ID NO: 1724472 - RNA, 19 nt, Artificial Sequence
  Description of Artificial Sequence: Synthetic oligonucleotide
guagaugaaauaaaguaua

SEQ ID NO: 1724473 - RNA, 19 nt, Artificial Sequence
  Description of Artificial Sequence: Synthetic oligonucleotide
auacacucauuacugagua

SEQ ID NO: 1724474 - RNA, 19 nt, Artificial Sequence
  Description of Artificial Sequence: Synthetic oligonucleotide
uuguuuugauuaaguugag

SEQ ID NO: 1724475 - RNA, 19 nt, Artificial Sequence
  Description of Artificial Sequence: Synthetic oligonucleotide
auugcuaucauaacauaaa

SEQ ID NO: 1724476 - RNA, 19 nt, Artificial Sequence
  Description of Artificial Sequence: Synthetic oligonucleotide
aguaacagaucagcuuugg

SEQ ID NO: 1724477 - RNA, 19 nt, Artificial Sequence
  Description of Artificial Sequence: Synthetic oligonucleotide
gaaauagaguaagacgauc

SEQ ID NO: 1724478 - RNA, 19 nt, Artificial Sequence
  Description of Artificial Sequence: Synthetic oligonucleotide
ucaaugaguccacuccagu

SEQ ID NO: 1724479 - RNA, 19 nt, Artificial Sequence
  Description of Artificial Sequence: Synthetic oligonucleotide
uugauuaaguugagacaga

SEQ ID NO: 1724480 - RNA, 19 nt, Artificial Sequence
  Description of Artificial Sequence: Synthetic oligonucleotide
cacauaauuacugcugcac

SEQ ID NO: 1724481 - RNA, 19 nt, Artificial Sequence
  Description of Artificial Sequence: Synthetic oligonucleotide
uuucuaaccacagcccaca

SEQ ID NO: 1724482 - RNA, 19 nt, Artificial Sequence
  Description of Artificial Sequence: Synthetic oligonucleotide
cugguacaauaauaucucc

SEQ ID NO: 1724483 - RNA, 19 nt, Artificial Sequence
  Description of Artificial Sequence: Synthetic oligonucleotide
acuaaauacaggagagcag

SEQ ID NO: 1724484 - RNA, 19 nt, Artificial Sequence
  Description of Artificial Sequence: Synthetic oligonucleotide
gacagaaagcaauuccuaa

SEQ ID NO: 1724485 - RNA, 19 nt, Artificial Sequence
  Description of Artificial Sequence: Synthetic oligonucleotide
aaggccuagcaguaucaca

SEQ ID NO: 1724486 - RNA, 19 nt, Artificial Sequence
  Description of Artificial Sequence: Synthetic oligonucleotide
ugaguccacuccaguaucc

SEQ ID NO: 1724487 - RNA, 19 nt, Artificial Sequence
  Description of Artificial Sequence: Synthetic oligonucleotide
ugcacgguaauguuaucuc

SEQ ID NO: 1724488 - RNA, 19 nt, Artificial Sequence
  Description of Artificial Sequence: Synthetic oligonucleotide
cucauuacugaguaacaga

SEQ ID NO: 1724489 - RNA, 19 nt, Artificial Sequence
  Description of Artificial Sequence: Synthetic oligonucleotide
acaagguacuaaauacagg

SEQ ID NO: 1724490 - RNA, 19 nt, Artificial Sequence
  Description of Artificial Sequence: Synthetic oligonucleotide
aguauccuccuaaugccac

SEQ ID NO: 1724491 - RNA, 19 nt, Artificial Sequence
  Description of Artificial Sequence: Synthetic oligonucleotide
gacaguuguacagacucac

SEQ ID NO: 1724492 - RNA, 19 nt, Artificial Sequence
  Description of Artificial Sequence: Synthetic oligonucleotide
augaagcauacacucauua

SEQ ID NO: 1724493 - RNA, 19 nt, Artificial Sequence
  Description of Artificial Sequence: Synthetic oligonucleotide
uguuuugauuaaguugaga

SEQ ID NO: 1724494 - RNA, 19 nt, Artificial Sequence
  Description of Artificial Sequence: Synthetic oligonucleotide
cugaaagucaaauacucgu

SEQ ID NO: 1724495 - RNA, 19 nt, Artificial Sequence
  Description of Artificial Sequence: Synthetic oligonucleotide
aguugagacagaaagcaau

SEQ ID NO: 1724496 - RNA, 19 nt, Artificial Sequence
  Description of Artificial Sequence: Synthetic oligonucleotide
aucuccuuacgacuccaag

SEQ ID NO: 1724497 - RNA, 19 nt, Artificial Sequence
  Description of Artificial Sequence: Synthetic oligonucleotide
aaacgggcaugaagcauac

SEQ ID NO: 1724498 - RNA, 19 nt, Artificial Sequence
  Description of Artificial Sequence: Synthetic oligonucleotide
agucauauuuuggaauuca

SEQ ID NO: 1724499 - RNA, 19 nt, Artificial Sequence
  Description of Artificial Sequence: Synthetic oligonucleotide
aaccagucugaacaucaaa

SEQ ID NO: 1724500 - RNA, 19 nt, Artificial Sequence
  Description of Artificial Sequence: Synthetic oligonucleotide
cuccuuacgacuccaagca

SEQ ID NO: 1724501 - RNA, 19 nt, Artificial Sequence
  Description of Artificial Sequence: Synthetic oligonucleotide
gucauauuuuggaauucag

SEQ ID NO: 1724502 - RNA, 19 nt, Artificial Sequence
  Description of Artificial Sequence: Synthetic oligonucleotide
cuccaagcaacgacugagg

SEQ ID NO: 1724503 - RNA, 19 nt, Artificial Sequence
  Description of Artificial Sequence: Synthetic oligonucleotide
acauggcauccuaucaacc

SEQ ID NO: 1724504 - RNA, 19 nt, Artificial Sequence
  Description of Artificial Sequence: Synthetic oligonucleotide
agcaccaggacaacaaaug

SEQ ID NO: 1724505 - RNA, 19 nt, Artificial Sequence
  Description of Artificial Sequence: Synthetic oligonucleotide
guaacagaucagcuuuggc

SEQ ID NO: 1724506 - RNA, 19 nt, Artificial Sequence
  Description of Artificial Sequence: Synthetic oligonucleotide
auuugcacgguaauguuau

SEQ ID NO: 1724507 - RNA, 19 nt, Artificial Sequence
  Description of Artificial Sequence: Synthetic oligonucleotide
uugcacgguaauguuaucu

SEQ ID NO: 1724508 - RNA, 19 nt, Artificial Sequence
  Description of Artificial Sequence: Synthetic oligonucleotide
aaucgugcacuguccacau

SEQ ID NO: 1724509 - RNA, 19 nt, Artificial Sequence
  Description of Artificial Sequence: Synthetic oligonucleotide
auuacacagcagaugacca

SEQ ID NO: 1724510 - RNA, 19 nt, Artificial Sequence
  Description of Artificial Sequence: Synthetic oligonucleotide
acaaaugcgacaacuguaa

SEQ ID NO: 1724511 - RNA, 19 nt, Artificial Sequence
  Description of Artificial Sequence: Synthetic oligonucleotide
gcauacacucauuacugag

SEQ ID NO: 1724512 - RNA, 19 nt, Artificial Sequence
  Description of Artificial Sequence: Synthetic oligonucleotide
gcaauuguagaugaaauaa

SEQ ID NO: 1724513 - RNA, 19 nt, Artificial Sequence
  Description of Artificial Sequence: Synthetic oligonucleotide
cuuuaauauuuugcgaaca

SEQ ID NO: 1724514 - RNA, 19 nt, Artificial Sequence
  Description of Artificial Sequence: Synthetic oligonucleotide
cagaucuguuccuugagga

SEQ ID NO: 1724515 - RNA, 19 nt, Artificial Sequence
  Description of Artificial Sequence: Synthetic oligonucleotide
ugacuugaaauuggguaac

SEQ ID NO: 1724516 - RNA, 19 nt, Artificial Sequence
  Description of Artificial Sequence: Synthetic oligonucleotide
agcauacacucauuacuga

SEQ ID NO: 1724517 - RNA, 19 nt, Artificial Sequence
  Description of Artificial Sequence: Synthetic oligonucleotide
caggaaucgugcacugucc

SEQ ID NO: 1724518 - RNA, 19 nt, Artificial Sequence
  Description of Artificial Sequence: Synthetic oligonucleotide
cucacugcugacgcuaugc

SEQ ID NO: 1724519 - RNA, 19 nt, Artificial Sequence
  Description of Artificial Sequence: Synthetic oligonucleotide
uggcauccuaucaaccaac

SEQ ID NO: 1724520 - RNA, 19 nt, Artificial Sequence
  Description of Artificial Sequence: Synthetic oligonucleotide
caacgacugaggcagcaag

SEQ ID NO: 1724521 - RNA, 19 nt, Artificial Sequence
  Description of Artificial Sequence: Synthetic oligonucleotide
uguuggcaaucaagcaaug

SEQ ID NO: 1724522 - RNA, 19 nt, Artificial Sequence
  Description of Artificial Sequence: Synthetic oligonucleotide
gaaucgugcacuguccaca

SEQ ID NO: 1724523 - RNA, 19 nt, Artificial Sequence
  Description of Artificial Sequence: Synthetic oligonucleotide
ugugaagaaugguguuaug

SEQ ID NO: 1724524 - RNA, 19 nt, Artificial Sequence
  Description of Artificial Sequence: Synthetic oligonucleotide
guguacaagguacuaaaua

SEQ ID NO: 1724525 - RNA, 19 nt, Artificial Sequence
  Description of Artificial Sequence: Synthetic oligonucleotide
ucgccguucuuugugaaga

SEQ ID NO: 1724526 - RNA, 19 nt, Artificial Sequence
  Description of Artificial Sequence: Synthetic oligonucleotide
caaccaacuagcagcaaga

SEQ ID NO: 1724527 - RNA, 19 nt, Artificial Sequence
  Description of Artificial Sequence: Synthetic oligonucleotide
acacaacagcgacagagau

SEQ ID NO: 1724528 - RNA, 19 nt, Artificial Sequence
  Description of Artificial Sequence: Synthetic oligonucleotide
ccugguacaauaauaucuc

SEQ ID NO: 1724529 - RNA, 19 nt, Artificial Sequence
  Description of Artificial Sequence: Synthetic oligonucleotide
gcagaugaccacaaaugcg

SEQ ID NO: 1724530 - RNA, 19 nt, Artificial Sequence
  Description of Artificial Sequence: Synthetic oligonucleotide
uagaccaggagaaggccua

SEQ ID NO: 1724531 - RNA, 19 nt, Artificial Sequence
  Description of Artificial Sequence: Synthetic oligonucleotide
cagugaacacagcaauuac

SEQ ID NO: 1724532 - RNA, 19 nt, Artificial Sequence
  Description of Artificial Sequence: Synthetic oligonucleotide
agcggcaaguuccaccaug

SEQ ID NO: 1724533 - RNA, 19 nt, Artificial Sequence
  Description of Artificial Sequence: Synthetic oligonucleotide
gcugaaagucaaauacucg

SEQ ID NO: 1724534 - RNA, 19 nt, Artificial Sequence
  Description of Artificial Sequence: Synthetic oligonucleotide
caaaugcgacaacuguaag

SEQ ID NO: 1724535 - RNA, 19 nt, Artificial Sequence
  Description of Artificial Sequence: Synthetic oligonucleotide
augcaaucaacaggccugg

SEQ ID NO: 1724536 - RNA, 19 nt, Artificial Sequence
  Description of Artificial Sequence: Synthetic oligonucleotide
uagucaaaguuaggccagg

SEQ ID NO: 1724537 - RNA, 19 nt, Artificial Sequence
  Description of Artificial Sequence: Synthetic oligonucleotide
cacgguaauguuaucucca

SEQ ID NO: 1724538 - RNA, 19 nt, Artificial Sequence
  Description of Artificial Sequence: Synthetic oligonucleotide
guucauuaccugauagcug

SEQ ID NO: 1724539 - RNA, 19 nt, Artificial Sequence
  Description of Artificial Sequence: Synthetic oligonucleotide
aggaaucgugcacugucca

SEQ ID NO: 1724540 - RNA, 19 nt, Artificial Sequence
  Description of Artificial Sequence: Synthetic oligonucleotide
agucugaacaucaaaucuu

SEQ ID NO: 1724541 - RNA, 19 nt, Artificial Sequence
  Description of Artificial Sequence: Synthetic oligonucleotide
aaccaccauaguauaguca

SEQ ID NO: 1724542 - RNA, 19 nt, Artificial Sequence
  Description of Artificial Sequence: Synthetic oligonucleotide
ugcgaacaggaaucgugca

SEQ ID NO: 1724543 - RNA, 19 nt, Artificial Sequence
  Description of Artificial Sequence: Synthetic oligonucleotide
caagagucuguuucauguc

SEQ ID NO: 1724544 - RNA, 19 nt, Artificial Sequence
  Description of Artificial Sequence: Synthetic oligonucleotide
gucugaacaucaaaucuuc

SEQ ID NO: 1724545 - RNA, 19 nt, Artificial Sequence
  Description of Artificial Sequence: Synthetic oligonucleotide
augcgacaacuguaagagg

SEQ ID NO: 1724546 - RNA, 19 nt, Artificial Sequence
  Description of Artificial Sequence: Synthetic oligonucleotide
gggcaugaagcauacacuc

SEQ ID NO: 1724547 - RNA, 19 nt, Artificial Sequence
  Description of Artificial Sequence: Synthetic oligonucleotide
cagaugguucauuaccuga

SEQ ID NO: 1724548 - RNA, 19 nt, Artificial Sequence
  Description of Artificial Sequence: Synthetic oligonucleotide
ccuaucaaccaacuagcag

SEQ ID NO: 1724549 - RNA, 19 nt, Artificial Sequence
  Description of Artificial Sequence: Synthetic oligonucleotide
agaaauagaguaagacgau

SEQ ID NO: 1724550 - RNA, 19 nt, Artificial Sequence
  Description of Artificial Sequence: Synthetic oligonucleotide
aacgacugaggcagcaaga

SEQ ID NO: 1724551 - RNA, 19 nt, Artificial Sequence
  Description of Artificial Sequence: Synthetic oligonucleotide
ccguucuuugugaagaaug

SEQ ID NO: 1724552 - RNA, 19 nt, Artificial Sequence
  Description of Artificial Sequence: Synthetic oligonucleotide
acauuugcacgguaauguu

SEQ ID NO: 1724553 - RNA, 19 nt, Artificial Sequence
  Description of Artificial Sequence: Synthetic oligonucleotide
acagcgacagagaugcaca

SEQ ID NO: 1724554 - RNA, 19 nt, Artificial Sequence
  Description of Artificial Sequence: Synthetic oligonucleotide
aaguugagacagaaagcaa

SEQ ID NO: 1724555 - RNA, 19 nt, Artificial Sequence
  Description of Artificial Sequence: Synthetic oligonucleotide
guaagacgaucauuacaca

SEQ ID NO: 1724556 - RNA, 19 nt, Artificial Sequence
  Description of Artificial Sequence: Synthetic oligonucleotide
acgacuccaagcaacgacu

SEQ ID NO: 1724557 - RNA, 19 nt, Artificial Sequence
  Description of Artificial Sequence: Synthetic oligonucleotide
ccuuacgacuccaagcaac

SEQ ID NO: 1724558 - RNA, 19 nt, Artificial Sequence
  Description of Artificial Sequence: Synthetic oligonucleotide
acgguaauguuaucuccaa

SEQ ID NO: 1724559 - RNA, 19 nt, Artificial Sequence
  Description of Artificial Sequence: Synthetic oligonucleotide
uagucauauuuuggaauuc

SEQ ID NO: 1724560 - RNA, 19 nt, Artificial Sequence
  Description of Artificial Sequence: Synthetic oligonucleotide
gcgacagagaugcacaguc

SEQ ID NO: 1724561 - RNA, 19 nt, Artificial Sequence
  Description of Artificial Sequence: Synthetic oligonucleotide
cauacacucauuacugagu

SEQ ID NO: 1724562 - RNA, 19 nt, Artificial Sequence
  Description of Artificial Sequence: Synthetic oligonucleotide
aggcaauuguagaugaaau

SEQ ID NO: 1724563 - RNA, 19 nt, Artificial Sequence
  Description of Artificial Sequence: Synthetic oligonucleotide
ugacgcuaugcagaaaauu

SEQ ID NO: 1724564 - RNA, 19 nt, Artificial Sequence
  Description of Artificial Sequence: Synthetic oligonucleotide
uucuaaccacagcccacac

SEQ ID NO: 1724565 - RNA, 19 nt, Artificial Sequence
  Description of Artificial Sequence: Synthetic oligonucleotide
gcugacgcuaugcagaaaa

SEQ ID NO: 1724566 - RNA, 19 nt, Artificial Sequence
  Description of Artificial Sequence: Synthetic oligonucleotide
aagcccaucuauccucauu

SEQ ID NO: 1724567 - RNA, 19 nt, Artificial Sequence
  Description of Artificial Sequence: Synthetic oligonucleotide
guaagagggcugaaaguca

SEQ ID NO: 1724568 - RNA, 19 nt, Artificial Sequence
  Description of Artificial Sequence: Synthetic oligonucleotide
uuacugcugcacagccugc

SEQ ID NO: 1724569 - RNA, 19 nt, Artificial Sequence
  Description of Artificial Sequence: Synthetic oligonucleotide
cacucauuacugaguaaca

SEQ ID NO: 1724570 - RNA, 19 nt, Artificial Sequence
  Description of Artificial Sequence: Synthetic oligonucleotide
gcacgguaauguuaucucc

SEQ ID NO: 1724571 - RNA, 19 nt, Artificial Sequence
  Description of Artificial Sequence: Synthetic oligonucleotide
caucauagaccaggagaag

SEQ ID NO: 1724572 - RNA, 19 nt, Artificial Sequence
  Description of Artificial Sequence: Synthetic oligonucleotide
uccuuacgacuccaagcaa

SEQ ID NO: 1724573 - RNA, 19 nt, Artificial Sequence
  Description of Artificial Sequence: Synthetic oligonucleotide
aggacacugcuguuggcaa

SEQ ID NO: 1724574 - RNA, 19 nt, Artificial Sequence
  Description of Artificial Sequence: Synthetic oligonucleotide
aggccugguacaauaauau

SEQ ID NO: 1724575 - RNA, 19 nt, Artificial Sequence
  Description of Artificial Sequence: Synthetic oligonucleotide
cauuaccugauagcuguuc

SEQ ID NO: 1724576 - RNA, 19 nt, Artificial Sequence
  Description of Artificial Sequence: Synthetic oligonucleotide
acuccaguauccuccuaau

SEQ ID NO: 1724577 - RNA, 19 nt, Artificial Sequence
  Description of Artificial Sequence: Synthetic oligonucleotide
caaugaguccacuccagua

SEQ ID NO: 1724578 - RNA, 19 nt, Artificial Sequence
  Description of Artificial Sequence: Synthetic oligonucleotide
cauuugcacgguaauguua

SEQ ID NO: 1724579 - RNA, 19 nt, Artificial Sequence
  Description of Artificial Sequence: Synthetic oligonucleotide
gcauaggcaauuguagaug

SEQ ID NO: 1724580 - RNA, 19 nt, Artificial Sequence
  Description of Artificial Sequence: Synthetic oligonucleotide
cuccaguauccuccuaaug

SEQ ID NO: 1724581 - RNA, 19 nt, Artificial Sequence
  Description of Artificial Sequence: Synthetic oligonucleotide
cucgccguucuuugugaag

SEQ ID NO: 1724582 - RNA, 19 nt, Artificial Sequence
  Description of Artificial Sequence: Synthetic oligonucleotide
acaugacuugaaauugggu

SEQ ID NO: 1724583 - RNA, 19 nt, Artificial Sequence
  Description of Artificial Sequence: Synthetic oligonucleotide
gaucagcuuuggcacccug

SEQ ID NO: 1724584 - RNA, 19 nt, Artificial Sequence
  Description of Artificial Sequence: Synthetic oligonucleotide
agaaguguacaagguacua

SEQ ID NO: 1724585 - RNA, 19 nt, Artificial Sequence
  Description of Artificial Sequence: Synthetic oligonucleotide
uguucccuuuccagaacuu

SEQ ID NO: 1724586 - RNA, 19 nt, Artificial Sequence
  Description of Artificial Sequence: Synthetic oligonucleotide
gagggcugaaagucaaaua

SEQ ID NO: 1724587 - RNA, 19 nt, Artificial Sequence
  Description of Artificial Sequence: Synthetic oligonucleotide
acccugaucaguacuggca

SEQ ID NO: 1724588 - RNA, 19 nt, Artificial Sequence
  Description of Artificial Sequence: Synthetic oligonucleotide
gaaggccuagcaguaucac

SEQ ID NO: 1724589 - RNA, 19 nt, Artificial Sequence
  Description of Artificial Sequence: Synthetic oligonucleotide
caggauggagaauacauuu

SEQ ID NO: 1724590 - RNA, 19 nt, Artificial Sequence
  Description of Artificial Sequence: Synthetic oligonucleotide
gacgaucauuacacagcag

SEQ ID NO: 1724591 - RNA, 19 nt, Artificial Sequence
  Description of Artificial Sequence: Synthetic oligonucleotide
uagcaguaucacacaugac

SEQ ID NO: 1724592 - RNA, 19 nt, Artificial Sequence
  Description of Artificial Sequence: Synthetic oligonucleotide
cagcgacagagaugcacag

SEQ ID NO: 1724593 - RNA, 19 nt, Artificial Sequence
  Description of Artificial Sequence: Synthetic oligonucleotide
ggcaauuguagaugaaaua

SEQ ID NO: 1724594 - RNA, 19 nt, Artificial Sequence
  Description of Artificial Sequence: Synthetic oligonucleotide
uuacgacuccaagcaacga

SEQ ID NO: 1724595 - RNA, 19 nt, Artificial Sequence
  Description of Artificial Sequence: Synthetic oligonucleotide
caguauccuccuaaugcca

SEQ ID NO: 1724596 - RNA, 19 nt, Artificial Sequence
  Description of Artificial Sequence: Synthetic oligonucleotide
agacagaaagcaauuccua

SEQ ID NO: 1724597 - RNA, 19 nt, Artificial Sequence
  Description of Artificial Sequence: Synthetic oligonucleotide
guacagacucacugcugac

SEQ ID NO: 1724598 - RNA, 19 nt, Artificial Sequence
  Description of Artificial Sequence: Synthetic oligonucleotide
guauccuccuaaugccaca

SEQ ID NO: 1724599 - RNA, 19 nt, Artificial Sequence
  Description of Artificial Sequence: Synthetic oligonucleotide
acgacugaggcagcaagaa

SEQ ID NO: 1724600 - RNA, 19 nt, Artificial Sequence
  Description of Artificial Sequence: Synthetic oligonucleotide
ccuagcaguaucacacaug

SEQ ID NO: 1724601 - RNA, 19 nt, Artificial Sequence
  Description of Artificial Sequence: Synthetic oligonucleotide
uuugcacgguaauguuauc

SEQ ID NO: 1724602 - RNA, 19 nt, Artificial Sequence
  Description of Artificial Sequence: Synthetic oligonucleotide
agucaaaguuaggccagga

SEQ ID NO: 1724603 - RNA, 19 nt, Artificial Sequence
  Description of Artificial Sequence: Synthetic oligonucleotide
gcagaaaauugcuaucaua

SEQ ID NO: 1724604 - RNA, 19 nt, Artificial Sequence
  Description of Artificial Sequence: Synthetic oligonucleotide
gcaagaaguguacaaggua

SEQ ID NO: 1724605 - RNA, 19 nt, Artificial Sequence
  Description of Artificial Sequence: Synthetic oligonucleotide
ggcagcaagaaguguacaa

SEQ ID NO: 1724606 - RNA, 19 nt, Artificial Sequence
  Description of Artificial Sequence: Synthetic oligonucleotide
agacucacugcugacgcua

SEQ ID NO: 1724607 - RNA, 19 nt, Artificial Sequence
  Description of Artificial Sequence: Synthetic oligonucleotide
ucauuaccugauagcuguu

SEQ ID NO: 1724608 - RNA, 19 nt, Artificial Sequence
  Description of Artificial Sequence: Synthetic oligonucleotide
cagagaugcacaguccaga

SEQ ID NO: 1724609 - RNA, 19 nt, Artificial Sequence
  Description of Artificial Sequence: Synthetic oligonucleotide
caggccugguacaauaaua

SEQ ID NO: 1724610 - RNA, 19 nt, Artificial Sequence
  Description of Artificial Sequence: Synthetic oligonucleotide
cugaguaacagaucagcuu

SEQ ID NO: 1724611 - RNA, 19 nt, Artificial Sequence
  Description of Artificial Sequence: Synthetic oligonucleotide
gccugguacaauaauaucu

SEQ ID NO: 1724612 - RNA, 19 nt, Artificial Sequence
  Description of Artificial Sequence: Synthetic oligonucleotide
acaguuguacagacucacu

SEQ ID NO: 1724613 - RNA, 19 nt, Artificial Sequence
  Description of Artificial Sequence: Synthetic oligonucleotide
ucucgccguucuuugugaa

SEQ ID NO: 1724614 - RNA, 19 nt, Artificial Sequence
  Description of Artificial Sequence: Synthetic oligonucleotide
gcgaacaggaaucgugcac

SEQ ID NO: 1724615 - RNA, 19 nt, Artificial Sequence
  Description of Artificial Sequence: Synthetic oligonucleotide
ggaaucgugcacuguccac

SEQ ID NO: 1724616 - RNA, 19 nt, Artificial Sequence
  Description of Artificial Sequence: Synthetic oligonucleotide
ucaacaggccugguacaau

SEQ ID NO: 1724617 - RNA, 19 nt, Artificial Sequence
  Description of Artificial Sequence: Synthetic oligonucleotide
caacaggccugguacaaua

SEQ ID NO: 1724618 - RNA, 19 nt, Artificial Sequence
  Description of Artificial Sequence: Synthetic oligonucleotide
cuucuacaauaugcaauca

SEQ ID NO: 1724619 - RNA, 19 nt, Artificial Sequence
  Description of Artificial Sequence: Synthetic oligonucleotide
gcucucgccguucuuugug

SEQ ID NO: 1724620 - RNA, 19 nt, Artificial Sequence
  Description of Artificial Sequence: Synthetic oligonucleotide
ccugaucaguacuggcagc

SEQ ID NO: 1724621 - RNA, 19 nt, Artificial Sequence
  Description of Artificial Sequence: Synthetic oligonucleotide
aucaguacuggcagcuuuu

SEQ ID NO: 1724622 - RNA, 19 nt, Artificial Sequence
  Description of Artificial Sequence: Synthetic oligonucleotide
agcgacagagaugcacagu

SEQ ID NO: 1724623 - RNA, 19 nt, Artificial Sequence
  Description of Artificial Sequence: Synthetic oligonucleotide
guugagacagaaagcaauu

SEQ ID NO: 1724624 - RNA, 19 nt, Artificial Sequence
  Description of Artificial Sequence: Synthetic oligonucleotide
gucaaaguuaggccaggau

SEQ ID NO: 1724625 - RNA, 19 nt, Artificial Sequence
  Description of Artificial Sequence: Synthetic oligonucleotide
cucucgccguucuuuguga

SEQ ID NO: 1724626 - RNA, 19 nt, Artificial Sequence
  Description of Artificial Sequence: Synthetic oligonucleotide
ggcauucucaaaaggccca

SEQ ID NO: 1724627 - RNA, 19 nt, Artificial Sequence
  Description of Artificial Sequence: Synthetic oligonucleotide
ggccugguacaauaauauc

SEQ ID NO: 1724628 - RNA, 19 nt, Artificial Sequence
  Description of Artificial Sequence: Synthetic oligonucleotide
cccagcggcaaguuccacc

SEQ ID NO: 1724629 - RNA, 19 nt, Artificial Sequence
  Description of Artificial Sequence: Synthetic oligonucleotide
ccaagcaacgacugaggca

SEQ ID NO: 1724630 - RNA, 19 nt, Artificial Sequence
  Description of Artificial Sequence: Synthetic oligonucleotide
ugaucaguacuggcagcuu

SEQ ID NO: 1724631 - RNA, 19 nt, Artificial Sequence
  Description of Artificial Sequence: Synthetic oligonucleotide
gcaaucaacaggccuggua

SEQ ID NO: 1724632 - RNA, 19 nt, Artificial Sequence
  Description of Artificial Sequence: Synthetic oligonucleotide
caagacaguuguacagacu

SEQ ID NO: 1724633 - RNA, 19 nt, Artificial Sequence
  Description of Artificial Sequence: Synthetic oligonucleotide
ccagcggcaaguuccacca

SEQ ID NO: 1724634 - RNA, 19 nt, Artificial Sequence
  Description of Artificial Sequence: Synthetic oligonucleotide
gcgacaacuguaagagggc

SEQ ID NO: 1724635 - RNA, 19 nt, Artificial Sequence
  Description of Artificial Sequence: Synthetic oligonucleotide
gacuugaaauuggguaacu

SEQ ID NO: 1724636 - RNA, 19 nt, Artificial Sequence
  Description of Artificial Sequence: Synthetic oligonucleotide
ggacaacaaauguaauuau

SEQ ID NO: 1724637 - RNA, 19 nt, Artificial Sequence
  Description of Artificial Sequence: Synthetic oligonucleotide
cugcugacgcuaugcagaa

SEQ ID NO: 1724638 - RNA, 19 nt, Artificial Sequence
  Description of Artificial Sequence: Synthetic oligonucleotide
aggcagcaagaaguguaca

SEQ ID NO: 1724639 - RNA, 19 nt, Artificial Sequence
  Description of Artificial Sequence: Synthetic oligonucleotide
aguagucacugggcucucu

SEQ ID NO: 1724640 - RNA, 19 nt, Artificial Sequence
  Description of Artificial Sequence: Synthetic oligonucleotide
gcacccugaucaguacugg

SEQ ID NO: 1724641 - RNA, 19 nt, Artificial Sequence
  Description of Artificial Sequence: Synthetic oligonucleotide
aacgggcaugaagcauaca

SEQ ID NO: 1724642 - RNA, 19 nt, Artificial Sequence
  Description of Artificial Sequence: Synthetic oligonucleotide
ccaauauugaaacgggcau

SEQ ID NO: 1724643 - RNA, 19 nt, Artificial Sequence
  Description of Artificial Sequence: Synthetic oligonucleotide
uuaggccaggauggagaau

SEQ ID NO: 1724644 - RNA, 19 nt, Artificial Sequence
  Description of Artificial Sequence: Synthetic oligonucleotide
cgacagagaugcacagucc

SEQ ID NO: 1724645 - RNA, 19 nt, Artificial Sequence
  Description of Artificial Sequence: Synthetic oligonucleotide
gcuaugcagaaaauugcua

SEQ ID NO: 1724646 - RNA, 19 nt, Artificial Sequence
  Description of Artificial Sequence: Synthetic oligonucleotide
gcaguaucacacaugacuu

SEQ ID NO: 1724647 - RNA, 19 nt, Artificial Sequence
  Description of Artificial Sequence: Synthetic oligonucleotide
caucuccuuacgacuccaa

SEQ ID NO: 1724648 - RNA, 19 nt, Artificial Sequence
  Description of Artificial Sequence: Synthetic oligonucleotide
ggccuagcaguaucacaca

SEQ ID NO: 1724649 - RNA, 19 nt, Artificial Sequence
  Description of Artificial Sequence: Synthetic oligonucleotide
ccacaaaugcgacaacugu

SEQ ID NO: 1724650 - RNA, 19 nt, Artificial Sequence
  Description of Artificial Sequence: Synthetic oligonucleotide
gcggcaaguuccaccauga

SEQ ID NO: 1724651 - RNA, 19 nt, Artificial Sequence
  Description of Artificial Sequence: Synthetic oligonucleotide
gcauccuaucaaccaacua

SEQ ID NO: 1724652 - RNA, 19 nt, Artificial Sequence
  Description of Artificial Sequence: Synthetic oligonucleotide
cugacgcuaugcagaaaau

SEQ ID NO: 1724653 - RNA, 19 nt, Artificial Sequence
  Description of Artificial Sequence: Synthetic oligonucleotide
cgcuaugcagaaaauugcu

SEQ ID NO: 1724654 - RNA, 19 nt, Artificial Sequence
  Description of Artificial Sequence: Synthetic oligonucleotide
ggcauccuaucaaccaacu

SEQ ID NO: 1724655 - RNA, 19 nt, Artificial Sequence
  Description of Artificial Sequence: Synthetic oligonucleotide
gccuagcaguaucacacau

SEQ ID NO: 1724656 - RNA, 19 nt, Artificial Sequence
  Description of Artificial Sequence: Synthetic oligonucleotide
gacucacugcugacgcuau

SEQ ID NO: 1724657 - RNA, 19 nt, Artificial Sequence
  Description of Artificial Sequence: Synthetic oligonucleotide
caacagcgacagagaugca

SEQ ID NO: 1724658 - RNA, 19 nt, Artificial Sequence
  Description of Artificial Sequence: Synthetic oligonucleotide
cgaucauuacacagcagau

SEQ ID NO: 1724659 - RNA, 19 nt, Artificial Sequence
  Description of Artificial Sequence: Synthetic oligonucleotide
gcaacgacugaggcagcaa

SEQ ID NO: 1724660 - RNA, 19 nt, Artificial Sequence
  Description of Artificial Sequence: Synthetic oligonucleotide
gagcaggcugccccuucuu

SEQ ID NO: 1724661 - RNA, 19 nt, Artificial Sequence
  Description of Artificial Sequence: Synthetic oligonucleotide
ccaggacaacaaauguaau

SEQ ID NO: 1724662 - RNA, 19 nt, Artificial Sequence
  Description of Artificial Sequence: Synthetic oligonucleotide
ccaauucaaugaguccacu

SEQ ID NO: 1724663 - RNA, 19 nt, Artificial Sequence
  Description of Artificial Sequence: Synthetic oligonucleotide
gccguucuuugugaagaau

SEQ ID NO: 1724664 - RNA, 19 nt, Artificial Sequence
  Description of Artificial Sequence: Synthetic oligonucleotide
cgccguucuuugugaagaa

SEQ ID NO: 1724665 - RNA, 19 nt, Artificial Sequence
  Description of Artificial Sequence: Synthetic oligonucleotide
cguccuucuuucuccucgu

SEQ ID NO: 1724666 - RNA, 19 nt, Artificial Sequence
  Description of Artificial Sequence: Synthetic oligonucleotide
cagcggcaaguuccaccau

SEQ ID NO: 1724667 - RNA, 19 nt, Artificial Sequence
  Description of Artificial Sequence: Synthetic oligonucleotide
uauuucauaagggugacgg

SEQ ID NO: 1724668 - RNA, 19 nt, Artificial Sequence
  Description of Artificial Sequence: Synthetic oligonucleotide
ucgauagucauccacaacc

SEQ ID NO: 1724669 - RNA, 19 nt, Artificial Sequence
  Description of Artificial Sequence: Synthetic oligonucleotide
uaugaauagacgaacacgu

SEQ ID NO: 1724670 - RNA, 19 nt, Artificial Sequence
  Description of Artificial Sequence: Synthetic oligonucleotide
gacuagaacauucucaucc

SEQ ID NO: 1724671 - RNA, 19 nt, Artificial Sequence
  Description of Artificial Sequence: Synthetic oligonucleotide
agaaauucguauuuccagc

SEQ ID NO: 1724672 - RNA, 19 nt, Artificial Sequence
  Description of Artificial Sequence: Synthetic oligonucleotide
aguaacucaaaucugcguc

SEQ ID NO: 1724673 - RNA, 19 nt, Artificial Sequence
  Description of Artificial Sequence: Synthetic oligonucleotide
acaucuaauacauggauug

SEQ ID NO: 1724674 - RNA, 19 nt, Artificial Sequence
  Description of Artificial Sequence: Synthetic oligonucleotide
ugaauagacgaacacgucc

SEQ ID NO: 1724675 - RNA, 19 nt, Artificial Sequence
  Description of Artificial Sequence: Synthetic oligonucleotide
ucauguuccaaaauuugag

SEQ ID NO: 1724676 - RNA, 19 nt, Artificial Sequence
  Description of Artificial Sequence: Synthetic oligonucleotide
ggugacggaaguuagaucg

SEQ ID NO: 1724677 - RNA, 19 nt, Artificial Sequence
  Description of Artificial Sequence: Synthetic oligonucleotide
ucaaucuacagcaucaaaa

SEQ ID NO: 1724678 - RNA, 19 nt, Artificial Sequence
  Description of Artificial Sequence: Synthetic oligonucleotide
uguucaacaucuaauacau

SEQ ID NO: 1724679 - RNA, 19 nt, Artificial Sequence
  Description of Artificial Sequence: Synthetic oligonucleotide
uauucaagguuguagauuc

SEQ ID NO: 1724680 - RNA, 19 nt, Artificial Sequence
  Description of Artificial Sequence: Synthetic oligonucleotide
aaugggauagggcuagcuc

SEQ ID NO: 1724681 - RNA, 19 nt, Artificial Sequence
  Description of Artificial Sequence: Synthetic oligonucleotide
aaccguuccaauugaaaag

SEQ ID NO: 1724682 - RNA, 19 nt, Artificial Sequence
  Description of Artificial Sequence: Synthetic oligonucleotide
aaauuugagucgcugguca

SEQ ID NO: 1724683 - RNA, 19 nt, Artificial Sequence
  Description of Artificial Sequence: Synthetic oligonucleotide
aucgcuuuccuucaccacc

SEQ ID NO: 1724684 - RNA, 19 nt, Artificial Sequence
  Description of Artificial Sequence: Synthetic oligonucleotide
agcccuaaugauuccaucc

SEQ ID NO: 1724685 - RNA, 19 nt, Artificial Sequence
  Description of Artificial Sequence: Synthetic oligonucleotide
cuucacuagauccacaggc

SEQ ID NO: 1724686 - RNA, 19 nt, Artificial Sequence
  Description of Artificial Sequence: Synthetic oligonucleotide
aauagacgaacacgucccc

SEQ ID NO: 1724687 - RNA, 19 nt, Artificial Sequence
  Description of Artificial Sequence: Synthetic oligonucleotide
aauucguauuuccagcugu

SEQ ID NO: 1724688 - RNA, 19 nt, Artificial Sequence
  Description of Artificial Sequence: Synthetic oligonucleotide
aaaucugcgucucuugaug

SEQ ID NO: 1724689 - RNA, 19 nt, Artificial Sequence
  Description of Artificial Sequence: Synthetic oligonucleotide
uuagagacaguaacaagcu

SEQ ID NO: 1724690 - RNA, 19 nt, Artificial Sequence
  Description of Artificial Sequence: Synthetic oligonucleotide
uaagcuuauauucaagguu

SEQ ID NO: 1724691 - RNA, 19 nt, Artificial Sequence
  Description of Artificial Sequence: Synthetic oligonucleotide
uuucuugcggcgucgauag

SEQ ID NO: 1724692 - RNA, 19 nt, Artificial Sequence
  Description of Artificial Sequence: Synthetic oligonucleotide
uugaaaagguagaugguac

SEQ ID NO: 1724693 - RNA, 19 nt, Artificial Sequence
  Description of Artificial Sequence: Synthetic oligonucleotide
guaugaauagacgaacacg

SEQ ID NO: 1724694 - RNA, 19 nt, Artificial Sequence
  Description of Artificial Sequence: Synthetic oligonucleotide
aaguuccuugguuucuccc

SEQ ID NO: 1724695 - RNA, 19 nt, Artificial Sequence
  Description of Artificial Sequence: Synthetic oligonucleotide
cuaaugauuccauccgugg

SEQ ID NO: 1724696 - RNA, 19 nt, Artificial Sequence
  Description of Artificial Sequence: Synthetic oligonucleotide
agaguaugaauagacgaac

SEQ ID NO: 1724697 - RNA, 19 nt, Artificial Sequence
  Description of Artificial Sequence: Synthetic oligonucleotide
agagacaguaacaagcuuc

SEQ ID NO: 1724698 - RNA, 19 nt, Artificial Sequence
  Description of Artificial Sequence: Synthetic oligonucleotide
acuuguagccccaaaaccg

SEQ ID NO: 1724699 - RNA, 19 nt, Artificial Sequence
  Description of Artificial Sequence: Synthetic oligonucleotide
cuucccguauuucauaagg

SEQ ID NO: 1724700 - RNA, 19 nt, Artificial Sequence
  Description of Artificial Sequence: Synthetic oligonucleotide
ucaacaucuaauacaugga

SEQ ID NO: 1724701 - RNA, 19 nt, Artificial Sequence
  Description of Artificial Sequence: Synthetic oligonucleotide
uuguagauucaaucuacag

SEQ ID NO: 1724702 - RNA, 19 nt, Artificial Sequence
  Description of Artificial Sequence: Synthetic oligonucleotide
auuagagggcccuccuucc

SEQ ID NO: 1724703 - RNA, 19 nt, Artificial Sequence
  Description of Artificial Sequence: Synthetic oligonucleotide
gagaguaacucaaaucugc

SEQ ID NO: 1724704 - RNA, 19 nt, Artificial Sequence
  Description of Artificial Sequence: Synthetic oligonucleotide
cugacaagaguaugaauag

SEQ ID NO: 1724705 - RNA, 19 nt, Artificial Sequence
  Description of Artificial Sequence: Synthetic oligonucleotide
gaauagacgaacacguccc

SEQ ID NO: 1724706 - RNA, 19 nt, Artificial Sequence
  Description of Artificial Sequence: Synthetic oligonucleotide
uucccguauuucauaaggg

SEQ ID NO: 1724707 - RNA, 19 nt, Artificial Sequence
  Description of Artificial Sequence: Synthetic oligonucleotide
ugagaguaacucaaaucug

SEQ ID NO: 1724708 - RNA, 19 nt, Artificial Sequence
  Description of Artificial Sequence: Synthetic oligonucleotide
uucacuagauccacaggcc

SEQ ID NO: 1724709 - RNA, 19 nt, Artificial Sequence
  Description of Artificial Sequence: Synthetic oligonucleotide
aaauucguauuuccagcug

SEQ ID NO: 1724710 - RNA, 19 nt, Artificial Sequence
  Description of Artificial Sequence: Synthetic oligonucleotide
gcuaagcuuauauucaagg

SEQ ID NO: 1724711 - RNA, 19 nt, Artificial Sequence
  Description of Artificial Sequence: Synthetic oligonucleotide
ugccgcauguccauuagag

SEQ ID NO: 1724712 - RNA, 19 nt, Artificial Sequence
  Description of Artificial Sequence: Synthetic oligonucleotide
ugugggauucuccucacac

SEQ ID NO: 1724713 - RNA, 19 nt, Artificial Sequence
  Description of Artificial Sequence: Synthetic oligonucleotide
cacaguucgaagcugaguc

SEQ ID NO: 1724714 - RNA, 19 nt, Artificial Sequence
  Description of Artificial Sequence: Synthetic oligonucleotide
ucacuuguagccccaaaac

SEQ ID NO: 1724715 - RNA, 19 nt, Artificial Sequence
  Description of Artificial Sequence: Synthetic oligonucleotide
ucaaaucugcgucucuuga

SEQ ID NO: 1724716 - RNA, 19 nt, Artificial Sequence
  Description of Artificial Sequence: Synthetic oligonucleotide
cacaaccacaguucgaagc

SEQ ID NO: 1724717 - RNA, 19 nt, Artificial Sequence
  Description of Artificial Sequence: Synthetic oligonucleotide
ucuaauacauggauugcuu

SEQ ID NO: 1724718 - RNA, 19 nt, Artificial Sequence
  Description of Artificial Sequence: Synthetic oligonucleotide
uaagggugacggaaguuag

SEQ ID NO: 1724719 - RNA, 19 nt, Artificial Sequence
  Description of Artificial Sequence: Synthetic oligonucleotide
aucaucgcuuuccuucacc

SEQ ID NO: 1724720 - RNA, 19 nt, Artificial Sequence
  Description of Artificial Sequence: Synthetic oligonucleotide
auccccagugacuagaaca

SEQ ID NO: 1724721 - RNA, 19 nt, Artificial Sequence
  Description of Artificial Sequence: Synthetic oligonucleotide
uuucauaagggugacggaa

SEQ ID NO: 1724722 - RNA, 19 nt, Artificial Sequence
  Description of Artificial Sequence: Synthetic oligonucleotide
ugagucgcuggucauggcc

SEQ ID NO: 1724723 - RNA, 19 nt, Artificial Sequence
  Description of Artificial Sequence: Synthetic oligonucleotide
accuucacuagauccacag

SEQ ID NO: 1724724 - RNA, 19 nt, Artificial Sequence
  Description of Artificial Sequence: Synthetic oligonucleotide
uacauggauugcuuugucc

SEQ ID NO: 1724725 - RNA, 19 nt, Artificial Sequence
  Description of Artificial Sequence: Synthetic oligonucleotide
aaucugcgucucuugaugu

SEQ ID NO: 1724726 - RNA, 19 nt, Artificial Sequence
  Description of Artificial Sequence: Synthetic oligonucleotide
cacuuguagccccaaaacc

SEQ ID NO: 1724727 - RNA, 19 nt, Artificial Sequence
  Description of Artificial Sequence: Synthetic oligonucleotide
cugagaguaacucaaaucu

SEQ ID NO: 1724728 - RNA, 19 nt, Artificial Sequence
  Description of Artificial Sequence: Synthetic oligonucleotide
ugugagccuuagaaauucg

SEQ ID NO: 1724729 - RNA, 19 nt, Artificial Sequence
  Description of Artificial Sequence: Synthetic oligonucleotide
aagaguaugaauagacgaa

SEQ ID NO: 1724730 - RNA, 19 nt, Artificial Sequence
  Description of Artificial Sequence: Synthetic oligonucleotide
cacaauuguucuucugggg

SEQ ID NO: 1724731 - RNA, 19 nt, Artificial Sequence
  Description of Artificial Sequence: Synthetic oligonucleotide
gauucucaguaacuggaac

SEQ ID NO: 1724732 - RNA, 19 nt, Artificial Sequence
  Description of Artificial Sequence: Synthetic oligonucleotide
augauuccauccguggagc

SEQ ID NO: 1724733 - RNA, 19 nt, Artificial Sequence
  Description of Artificial Sequence: Synthetic oligonucleotide
ucccguauuucauaagggu

SEQ ID NO: 1724734 - RNA, 19 nt, Artificial Sequence
  Description of Artificial Sequence: Synthetic oligonucleotide
agaguaacucaaaucugcg

SEQ ID NO: 1724735 - RNA, 19 nt, Artificial Sequence
  Description of Artificial Sequence: Synthetic oligonucleotide
guagaugguaccuucacua

SEQ ID NO: 1724736 - RNA, 19 nt, Artificial Sequence
  Description of Artificial Sequence: Synthetic oligonucleotide
cuggucauggccacuacug

SEQ ID NO: 1724737 - RNA, 19 nt, Artificial Sequence
  Description of Artificial Sequence: Synthetic oligonucleotide
uuaucacggauccggggug

SEQ ID NO: 1724738 - RNA, 19 nt, Artificial Sequence
  Description of Artificial Sequence: Synthetic oligonucleotide
ucugggguuaucacggauc

SEQ ID NO: 1724739 - RNA, 19 nt, Artificial Sequence
  Description of Artificial Sequence: Synthetic oligonucleotide
agcggucacuuguagcccc

SEQ ID NO: 1724740 - RNA, 19 nt, Artificial Sequence
  Description of Artificial Sequence: Synthetic oligonucleotide
uuagagggcccuccuuccg

SEQ ID NO: 1724741 - RNA, 19 nt, Artificial Sequence
  Description of Artificial Sequence: Synthetic oligonucleotide
cucaguaacuggaaccaug

SEQ ID NO: 1724742 - RNA, 19 nt, Artificial Sequence
  Description of Artificial Sequence: Synthetic oligonucleotide
auugaaaagguagauggua

SEQ ID NO: 1724743 - RNA, 19 nt, Artificial Sequence
  Description of Artificial Sequence: Synthetic oligonucleotide
aacacguccccgucuacgu

SEQ ID NO: 1724744 - RNA, 19 nt, Artificial Sequence
  Description of Artificial Sequence: Synthetic oligonucleotide
uccuuagagacaguaacaa

SEQ ID NO: 1724745 - RNA, 19 nt, Artificial Sequence
  Description of Artificial Sequence: Synthetic oligonucleotide
guuagaucgccugacugag

SEQ ID NO: 1724746 - RNA, 19 nt, Artificial Sequence
  Description of Artificial Sequence: Synthetic oligonucleotide
cucggggugggauggaacg

SEQ ID NO: 1724747 - RNA, 19 nt, Artificial Sequence
  Description of Artificial Sequence: Synthetic oligonucleotide
auacauggauugcuuuguc

SEQ ID NO: 1724748 - RNA, 19 nt, Artificial Sequence
  Description of Artificial Sequence: Synthetic oligonucleotide
cugggguuaucacggaucc

SEQ ID NO: 1724749 - RNA, 19 nt, Artificial Sequence
  Description of Artificial Sequence: Synthetic oligonucleotide
uucaaucuacagcaucaaa

SEQ ID NO: 1724750 - RNA, 19 nt, Artificial Sequence
  Description of Artificial Sequence: Synthetic oligonucleotide
aagcggucacuuguagccc

SEQ ID NO: 1724751 - RNA, 19 nt, Artificial Sequence
  Description of Artificial Sequence: Synthetic oligonucleotide
acggaaguuagaucgccug

SEQ ID NO: 1724752 - RNA, 19 nt, Artificial Sequence
  Description of Artificial Sequence: Synthetic oligonucleotide
uucucucaacccugcaaag

SEQ ID NO: 1724753 - RNA, 19 nt, Artificial Sequence
  Description of Artificial Sequence: Synthetic oligonucleotide
uuagaucgccugacugagg

SEQ ID NO: 1724754 - RNA, 19 nt, Artificial Sequence
  Description of Artificial Sequence: Synthetic oligonucleotide
aggccuuacugcucagggc

SEQ ID NO: 1724755 - RNA, 19 nt, Artificial Sequence
  Description of Artificial Sequence: Synthetic oligonucleotide
aauuugagucgcuggucau

SEQ ID NO: 1724756 - RNA, 19 nt, Artificial Sequence
  Description of Artificial Sequence: Synthetic oligonucleotide
cauuagagggcccuccuuc

SEQ ID NO: 1724757 - RNA, 19 nt, Artificial Sequence
  Description of Artificial Sequence: Synthetic oligonucleotide
ucccuguucaacaucuaau

SEQ ID NO: 1724758 - RNA, 19 nt, Artificial Sequence
  Description of Artificial Sequence: Synthetic oligonucleotide
gugccuaccacucgguuug

SEQ ID NO: 1724759 - RNA, 19 nt, Artificial Sequence
  Description of Artificial Sequence: Synthetic oligonucleotide
ucaagguuguagauucaau

SEQ ID NO: 1724760 - RNA, 19 nt, Artificial Sequence
  Description of Artificial Sequence: Synthetic oligonucleotide
uagacgaacacguccccgu

SEQ ID NO: 1724761 - RNA, 19 nt, Artificial Sequence
  Description of Artificial Sequence: Synthetic oligonucleotide
gggguuaucacggauccgg

SEQ ID NO: 1724762 - RNA, 19 nt, Artificial Sequence
  Description of Artificial Sequence: Synthetic oligonucleotide
gaacacguccccgucuacg

SEQ ID NO: 1724763 - RNA, 19 nt, Artificial Sequence
  Description of Artificial Sequence: Synthetic oligonucleotide
ucugcgucucuugauguug

SEQ ID NO: 1724764 - RNA, 19 nt, Artificial Sequence
  Description of Artificial Sequence: Synthetic oligonucleotide
uugggauccauaggaacca

SEQ ID NO: 1724765 - RNA, 19 nt, Artificial Sequence
  Description of Artificial Sequence: Synthetic oligonucleotide
uguagccccaaaaccguuc

SEQ ID NO: 1724766 - RNA, 19 nt, Artificial Sequence
  Description of Artificial Sequence: Synthetic oligonucleotide
auagacgaacacguccccg

SEQ ID NO: 1724767 - RNA, 19 nt, Artificial Sequence
  Description of Artificial Sequence: Synthetic oligonucleotide
auuucauaagggugacgga

SEQ ID NO: 1724768 - RNA, 19 nt, Artificial Sequence
  Description of Artificial Sequence: Synthetic oligonucleotide
cuugaggugguguccugag

SEQ ID NO: 1724769 - RNA, 19 nt, Artificial Sequence
  Description of Artificial Sequence: Synthetic oligonucleotide
ucuucccguauuucauaag

SEQ ID NO: 1724770 - RNA, 19 nt, Artificial Sequence
  Description of Artificial Sequence: Synthetic oligonucleotide
ugggauagggcuagcuccu

SEQ ID NO: 1724771 - RNA, 19 nt, Artificial Sequence
  Description of Artificial Sequence: Synthetic oligonucleotide
auaagggugacggaaguua

SEQ ID NO: 1724772 - RNA, 19 nt, Artificial Sequence
  Description of Artificial Sequence: Synthetic oligonucleotide
agccuuagaaauucguauu

SEQ ID NO: 1724773 - RNA, 19 nt, Artificial Sequence
  Description of Artificial Sequence: Synthetic oligonucleotide
gauagggcuagcuccucca

SEQ ID NO: 1724774 - RNA, 19 nt, Artificial Sequence
  Description of Artificial Sequence: Synthetic oligonucleotide
uggauugcuuuguccuuag

SEQ ID NO: 1724775 - RNA, 19 nt, Artificial Sequence
  Description of Artificial Sequence: Synthetic oligonucleotide
uucguauuuccagcugucc

SEQ ID NO: 1724776 - RNA, 19 nt, Artificial Sequence
  Description of Artificial Sequence: Synthetic oligonucleotide
ggcacugugagccuuagaa

SEQ ID NO: 1724777 - RNA, 19 nt, Artificial Sequence
  Description of Artificial Sequence: Synthetic oligonucleotide
uguucacagcccuaaugau

SEQ ID NO: 1724778 - RNA, 19 nt, Artificial Sequence
  Description of Artificial Sequence: Synthetic oligonucleotide
caucuaauacauggauugc

SEQ ID NO: 1724779 - RNA, 19 nt, Artificial Sequence
  Description of Artificial Sequence: Synthetic oligonucleotide
guagccccaaaaccguucc

SEQ ID NO: 1724780 - RNA, 19 nt, Artificial Sequence
  Description of Artificial Sequence: Synthetic oligonucleotide
aauuguucuucugggguua

SEQ ID NO: 1724781 - RNA, 19 nt, Artificial Sequence
  Description of Artificial Sequence: Synthetic oligonucleotide
gaguaugaauagacgaaca

SEQ ID NO: 1724782 - RNA, 19 nt, Artificial Sequence
  Description of Artificial Sequence: Synthetic oligonucleotide
ugaggcucugagaguaacu

SEQ ID NO: 1724783 - RNA, 19 nt, Artificial Sequence
  Description of Artificial Sequence: Synthetic oligonucleotide
aggaccaaaguuccuuggu

SEQ ID NO: 1724784 - RNA, 19 nt, Artificial Sequence
  Description of Artificial Sequence: Synthetic oligonucleotide
acaguucgaagcugaguca

SEQ ID NO: 1724785 - RNA, 19 nt, Artificial Sequence
  Description of Artificial Sequence: Synthetic oligonucleotide
ucucucaacccugcaaaga

SEQ ID NO: 1724786 - RNA, 19 nt, Artificial Sequence
  Description of Artificial Sequence: Synthetic oligonucleotide
uuuucuugcggcgucgaua

SEQ ID NO: 1724787 - RNA, 19 nt, Artificial Sequence
  Description of Artificial Sequence: Synthetic oligonucleotide
ugacggaaguuagaucgcc

SEQ ID NO: 1724788 - RNA, 19 nt, Artificial Sequence
  Description of Artificial Sequence: Synthetic oligonucleotide
augaauagacgaacacguc

SEQ ID NO: 1724789 - RNA, 19 nt, Artificial Sequence
  Description of Artificial Sequence: Synthetic oligonucleotide
cacaaugggauagggcuag

SEQ ID NO: 1724790 - RNA, 19 nt, Artificial Sequence
  Description of Artificial Sequence: Synthetic oligonucleotide
guaacuggaaccaugcagu

SEQ ID NO: 1724791 - RNA, 19 nt, Artificial Sequence
  Description of Artificial Sequence: Synthetic oligonucleotide
uggucccagagccggauac

SEQ ID NO: 1724792 - RNA, 19 nt, Artificial Sequence
  Description of Artificial Sequence: Synthetic oligonucleotide
ucuugcggcgucgauaguc

SEQ ID NO: 1724793 - RNA, 19 nt, Artificial Sequence
  Description of Artificial Sequence: Synthetic oligonucleotide
uccauuagagggcccuccu

SEQ ID NO: 1724794 - RNA, 19 nt, Artificial Sequence
  Description of Artificial Sequence: Synthetic oligonucleotide
cacuagauccacaggccac

SEQ ID NO: 1724795 - RNA, 19 nt, Artificial Sequence
  Description of Artificial Sequence: Synthetic oligonucleotide
cuaagcuuauauucaaggu

SEQ ID NO: 1724796 - RNA, 19 nt, Artificial Sequence
  Description of Artificial Sequence: Synthetic oligonucleotide
gcccuaaugauuccauccg

SEQ ID NO: 1724797 - RNA, 19 nt, Artificial Sequence
  Description of Artificial Sequence: Synthetic oligonucleotide
ugauuccauccguggagcc

SEQ ID NO: 1724798 - RNA, 19 nt, Artificial Sequence
  Description of Artificial Sequence: Synthetic oligonucleotide
gaggcucugagaguaacuc

SEQ ID NO: 1724799 - RNA, 19 nt, Artificial Sequence
  Description of Artificial Sequence: Synthetic oligonucleotide
uagagggcccuccuuccgc

SEQ ID NO: 1724800 - RNA, 19 nt, Artificial Sequence
  Description of Artificial Sequence: Synthetic oligonucleotide
guuaucacggauccggggu

SEQ ID NO: 1724801 - RNA, 19 nt, Artificial Sequence
  Description of Artificial Sequence: Synthetic oligonucleotide
cuucucucaacccugcaaa

SEQ ID NO: 1724802 - RNA, 19 nt, Artificial Sequence
  Description of Artificial Sequence: Synthetic oligonucleotide
cccaaaaccguuccaauug

SEQ ID NO: 1724803 - RNA, 19 nt, Artificial Sequence
  Description of Artificial Sequence: Synthetic oligonucleotide
gguuaucacggauccgggg

SEQ ID NO: 1724804 - RNA, 19 nt, Artificial Sequence
  Description of Artificial Sequence: Synthetic oligonucleotide
agacgaacacguccccguc

SEQ ID NO: 1724805 - RNA, 19 nt, Artificial Sequence
  Description of Artificial Sequence: Synthetic oligonucleotide
gaucgccugacugaggcuc

SEQ ID NO: 1724806 - RNA, 19 nt, Artificial Sequence
  Description of Artificial Sequence: Synthetic oligonucleotide
gagcuaagcuuauauucaa

SEQ ID NO: 1724807 - RNA, 19 nt, Artificial Sequence
  Description of Artificial Sequence: Synthetic oligonucleotide
agagccggauaccaccugu

SEQ ID NO: 1724808 - RNA, 19 nt, Artificial Sequence
  Description of Artificial Sequence: Synthetic oligonucleotide
gucacuuguagccccaaaa

SEQ ID NO: 1724809 - RNA, 19 nt, Artificial Sequence
  Description of Artificial Sequence: Synthetic oligonucleotide
agucgcuggucauggccac

SEQ ID NO: 1724810 - RNA, 19 nt, Artificial Sequence
  Description of Artificial Sequence: Synthetic oligonucleotide
auuugagucgcuggucaug

SEQ ID NO: 1724811 - RNA, 19 nt, Artificial Sequence
  Description of Artificial Sequence: Synthetic oligonucleotide
ggccaugucagcaauguac

SEQ ID NO: 1724812 - RNA, 19 nt, Artificial Sequence
  Description of Artificial Sequence: Synthetic oligonucleotide
ugcucucagugcgaagcgg

SEQ ID NO: 1724813 - RNA, 19 nt, Artificial Sequence
  Description of Artificial Sequence: Synthetic oligonucleotide
agugcgaagcggucacuug

SEQ ID NO: 1724814 - RNA, 19 nt, Artificial Sequence
  Description of Artificial Sequence: Synthetic oligonucleotide
cuucguggagucaaggucu

SEQ ID NO: 1724815 - RNA, 19 nt, Artificial Sequence
  Description of Artificial Sequence: Synthetic oligonucleotide
uccgcuggucccagagccg

SEQ ID NO: 1724816 - RNA, 19 nt, Artificial Sequence
  Description of Artificial Sequence: Synthetic oligonucleotide
cccguauuucauaagggug

SEQ ID NO: 1724817 - RNA, 19 nt, Artificial Sequence
  Description of Artificial Sequence: Synthetic oligonucleotide
cauguuccaaaauuugagu

SEQ ID NO: 1724818 - RNA, 19 nt, Artificial Sequence
  Description of Artificial Sequence: Synthetic oligonucleotide
cucucaacccugcaaagaa

SEQ ID NO: 1724819 - RNA, 19 nt, Artificial Sequence
  Description of Artificial Sequence: Synthetic oligonucleotide
agcuaagcuuauauucaag

SEQ ID NO: 1724820 - RNA, 19 nt, Artificial Sequence
  Description of Artificial Sequence: Synthetic oligonucleotide
ccuaaugauuccauccgug

SEQ ID NO: 1724821 - RNA, 19 nt, Artificial Sequence
  Description of Artificial Sequence: Synthetic oligonucleotide
ggccuuacugcucagggca

SEQ ID NO: 1724822 - RNA, 19 nt, Artificial Sequence
  Description of Artificial Sequence: Synthetic oligonucleotide
cucagugcgaagcggucac

SEQ ID NO: 1724823 - RNA, 19 nt, Artificial Sequence
  Description of Artificial Sequence: Synthetic oligonucleotide
ggcgcuuccagcacaauug

SEQ ID NO: 1724824 - RNA, 19 nt, Artificial Sequence
  Description of Artificial Sequence: Synthetic oligonucleotide
aggcucugagaguaacuca

SEQ ID NO: 1724825 - RNA, 19 nt, Artificial Sequence
  Description of Artificial Sequence: Synthetic oligonucleotide
gaguaacucaaaucugcgu

SEQ ID NO: 1724826 - RNA, 19 nt, Artificial Sequence
  Description of Artificial Sequence: Synthetic oligonucleotide
guauuuccagcugucccug

SEQ ID NO: 1724827 - RNA, 19 nt, Artificial Sequence
  Description of Artificial Sequence: Synthetic oligonucleotide
cugcucucagugcgaagcg

SEQ ID NO: 1724828 - RNA, 19 nt, Artificial Sequence
  Description of Artificial Sequence: Synthetic oligonucleotide
uccugacaagaguaugaau

SEQ ID NO: 1724829 - RNA, 19 nt, Artificial Sequence
  Description of Artificial Sequence: Synthetic oligonucleotide
agggugacggaaguuagau

SEQ ID NO: 1724830 - RNA, 19 nt, Artificial Sequence
  Description of Artificial Sequence: Synthetic oligonucleotide
gagacaguaacaagcuucu

SEQ ID NO: 1724831 - RNA, 19 nt, Artificial Sequence
  Description of Artificial Sequence: Synthetic oligonucleotide
gaggugguguccugaggac

SEQ ID NO: 1724832 - RNA, 19 nt, Artificial Sequence
  Description of Artificial Sequence: Synthetic oligonucleotide
cucaacccugcaaagaagu

SEQ ID NO: 1724833 - RNA, 19 nt, Artificial Sequence
  Description of Artificial Sequence: Synthetic oligonucleotide
cucagucacugucaucauc

SEQ ID NO: 1724834 - RNA, 19 nt, Artificial Sequence
  Description of Artificial Sequence: Synthetic oligonucleotide
uaccuucacuagauccaca

SEQ ID NO: 1724835 - RNA, 19 nt, Artificial Sequence
  Description of Artificial Sequence: Synthetic oligonucleotide
uaucacggauccggggugc

SEQ ID NO: 1724836 - RNA, 19 nt, Artificial Sequence
  Description of Artificial Sequence: Synthetic oligonucleotide
ugcagucaauggacucugc

SEQ ID NO: 1724837 - RNA, 19 nt, Artificial Sequence
  Description of Artificial Sequence: Synthetic oligonucleotide
cacucgguuuggcaggaug

SEQ ID NO: 1724838 - RNA, 19 nt, Artificial Sequence
  Description of Artificial Sequence: Synthetic oligonucleotide
gaaguuagaucgccugacu

SEQ ID NO: 1724839 - RNA, 19 nt, Artificial Sequence
  Description of Artificial Sequence: Synthetic oligonucleotide
gccagugcacagcagauuc

SEQ ID NO: 1724840 - RNA, 19 nt, Artificial Sequence
  Description of Artificial Sequence: Synthetic oligonucleotide
cuugcggcgucgauaguca

SEQ ID NO: 1724841 - RNA, 19 nt, Artificial Sequence
  Description of Artificial Sequence: Synthetic oligonucleotide
ugcgccuucguggagucaa

SEQ ID NO: 1724842 - RNA, 19 nt, Artificial Sequence
  Description of Artificial Sequence: Synthetic oligonucleotide
acucgguuuggcaggaugu

SEQ ID NO: 1724843 - RNA, 19 nt, Artificial Sequence
  Description of Artificial Sequence: Synthetic oligonucleotide
guaccuucacuagauccac

SEQ ID NO: 1724844 - RNA, 19 nt, Artificial Sequence
  Description of Artificial Sequence: Synthetic oligonucleotide
ugcgaagcggucacuugua

SEQ ID NO: 1724845 - RNA, 19 nt, Artificial Sequence
  Description of Artificial Sequence: Synthetic oligonucleotide
aggucucggggugggaugg

SEQ ID NO: 1724846 - RNA, 19 nt, Artificial Sequence
  Description of Artificial Sequence: Synthetic oligonucleotide
cagcaauguacuccucaug

SEQ ID NO: 1724847 - RNA, 19 nt, Artificial Sequence
  Description of Artificial Sequence: Synthetic oligonucleotide
guccuuagagacaguaaca

SEQ ID NO: 1724848 - RNA, 19 nt, Artificial Sequence
  Description of Artificial Sequence: Synthetic oligonucleotide
ggaaguuagaucgccugac

SEQ ID NO: 1724849 - RNA, 19 nt, Artificial Sequence
  Description of Artificial Sequence: Synthetic oligonucleotide
gguagagcuaagcuuauau

SEQ ID NO: 1724850 - RNA, 19 nt, Artificial Sequence
  Description of Artificial Sequence: Synthetic oligonucleotide
acaaugggauagggcuagc

SEQ ID NO: 1724851 - RNA, 19 nt, Artificial Sequence
  Description of Artificial Sequence: Synthetic oligonucleotide
caacaucuaauacauggau

SEQ ID NO: 1724852 - RNA, 19 nt, Artificial Sequence
  Description of Artificial Sequence: Synthetic oligonucleotide
gagucgcuggucauggcca

SEQ ID NO: 1724853 - RNA, 19 nt, Artificial Sequence
  Description of Artificial Sequence: Synthetic oligonucleotide
aagggugacggaaguuaga

SEQ ID NO: 1724854 - RNA, 19 nt, Artificial Sequence
  Description of Artificial Sequence: Synthetic oligonucleotide
ugggguuaucacggauccg

SEQ ID NO: 1724855 - RNA, 19 nt, Artificial Sequence
  Description of Artificial Sequence: Synthetic oligonucleotide
cauguccauuagagggccc

SEQ ID NO: 1724856 - RNA, 19 nt, Artificial Sequence
  Description of Artificial Sequence: Synthetic oligonucleotide
acgaacacguccccgucua

SEQ ID NO: 1724857 - RNA, 19 nt, Artificial Sequence
  Description of Artificial Sequence: Synthetic oligonucleotide
ccuucguggagucaagguc

SEQ ID NO: 1724858 - RNA, 19 nt, Artificial Sequence
  Description of Artificial Sequence: Synthetic oligonucleotide
gcggcgucgauagucaucc

SEQ ID NO: 1724859 - RNA, 19 nt, Artificial Sequence
  Description of Artificial Sequence: Synthetic oligonucleotide
ucgguuuggcaggauguuc

SEQ ID NO: 1724860 - RNA, 19 nt, Artificial Sequence
  Description of Artificial Sequence: Synthetic oligonucleotide
uccguggagccagugcaca

SEQ ID NO: 1724861 - RNA, 19 nt, Artificial Sequence
  Description of Artificial Sequence: Synthetic oligonucleotide
ggaacgccaggccacuggc

SEQ ID NO: 1724862 - RNA, 19 nt, Artificial Sequence
  Description of Artificial Sequence: Synthetic oligonucleotide
agagggcccuccuuccgcu

SEQ ID NO: 1724863 - RNA, 19 nt, Artificial Sequence
  Description of Artificial Sequence: Synthetic oligonucleotide
ucuacguccccggcugcca

SEQ ID NO: 1724864 - RNA, 19 nt, Artificial Sequence
  Description of Artificial Sequence: Synthetic oligonucleotide
cacggauccggggugcgcc

SEQ ID NO: 1724865 - RNA, 19 nt, Artificial Sequence
  Description of Artificial Sequence: Synthetic oligonucleotide
gugacggaaguuagaucgc

SEQ ID NO: 1724866 - RNA, 19 nt, Artificial Sequence
  Description of Artificial Sequence: Synthetic oligonucleotide
uccccggcugccagaaggu

SEQ ID NO: 1724867 - RNA, 19 nt, Artificial Sequence
  Description of Artificial Sequence: Synthetic oligonucleotide
uucguggagucaaggucuu

SEQ ID NO: 1724868 - RNA, 19 nt, Artificial Sequence
  Description of Artificial Sequence: Synthetic oligonucleotide
caaaaccguuccaauugaa

SEQ ID NO: 1724869 - RNA, 19 nt, Artificial Sequence
  Description of Artificial Sequence: Synthetic oligonucleotide
ggauagggcuagcuccucc

SEQ ID NO: 1724870 - RNA, 19 nt, Artificial Sequence
  Description of Artificial Sequence: Synthetic oligonucleotide
uugagucgcuggucauggc

SEQ ID NO: 1724871 - RNA, 19 nt, Artificial Sequence
  Description of Artificial Sequence: Synthetic oligonucleotide
cucucagugcgaagcgguc

SEQ ID NO: 1724872 - RNA, 19 nt, Artificial Sequence
  Description of Artificial Sequence: Synthetic oligonucleotide
guagagcuaagcuuauauu

SEQ ID NO: 1724873 - RNA, 19 nt, Artificial Sequence
  Description of Artificial Sequence: Synthetic oligonucleotide
agaucgccugacugaggcu

SEQ ID NO: 1724874 - RNA, 19 nt, Artificial Sequence
  Description of Artificial Sequence: Synthetic oligonucleotide
gcucagggcacgaaguggc

SEQ ID NO: 1724875 - RNA, 19 nt, Artificial Sequence
  Description of Artificial Sequence: Synthetic oligonucleotide
ucggggugggauggaacgc

SEQ ID NO: 1724876 - RNA, 19 nt, Artificial Sequence
  Description of Artificial Sequence: Synthetic oligonucleotide
cagcccuaaugauuccauc

SEQ ID NO: 1724877 - RNA, 19 nt, Artificial Sequence
  Description of Artificial Sequence: Synthetic oligonucleotide
gggauccauaggaaccacg

SEQ ID NO: 1724878 - RNA, 19 nt, Artificial Sequence
  Description of Artificial Sequence: Synthetic oligonucleotide
gagccggauaccaccugug

SEQ ID NO: 1724879 - RNA, 19 nt, Artificial Sequence
  Description of Artificial Sequence: Synthetic oligonucleotide
aucugcgucucuugauguu

SEQ ID NO: 1724880 - RNA, 19 nt, Artificial Sequence
  Description of Artificial Sequence: Synthetic oligonucleotide
ccuuagaaauucguauuuc

SEQ ID NO: 1724881 - RNA, 19 nt, Artificial Sequence
  Description of Artificial Sequence: Synthetic oligonucleotide
cauccccagugacuagaac

SEQ ID NO: 1724882 - RNA, 19 nt, Artificial Sequence
  Description of Artificial Sequence: Synthetic oligonucleotide
agacaguaacaagcuucug

SEQ ID NO: 1724883 - RNA, 19 nt, Artificial Sequence
  Description of Artificial Sequence: Synthetic oligonucleotide
ggcucugagaguaacucaa

SEQ ID NO: 1724884 - RNA, 19 nt, Artificial Sequence
  Description of Artificial Sequence: Synthetic oligonucleotide
auucaagguuguagauuca

SEQ ID NO: 1724885 - RNA, 19 nt, Artificial Sequence
  Description of Artificial Sequence: Synthetic oligonucleotide
cuacguccccggcugccag

SEQ ID NO: 1724886 - RNA, 19 nt, Artificial Sequence
  Description of Artificial Sequence: Synthetic oligonucleotide
uguccauuagagggcccuc

SEQ ID NO: 1724887 - RNA, 19 nt, Artificial Sequence
  Description of Artificial Sequence: Synthetic oligonucleotide
ugcgucucuugauguugaa

SEQ ID NO: 1724888 - RNA, 19 nt, Artificial Sequence
  Description of Artificial Sequence: Synthetic oligonucleotide
ugggauccauaggaaccac

SEQ ID NO: 1724889 - RNA, 19 nt, Artificial Sequence
  Description of Artificial Sequence: Synthetic oligonucleotide
cugcgucucuugauguuga

SEQ ID NO: 1724890 - RNA, 19 nt, Artificial Sequence
  Description of Artificial Sequence: Synthetic oligonucleotide
gggcugucccagaaaacag

SEQ ID NO: 1724891 - RNA, 19 nt, Artificial Sequence
  Description of Artificial Sequence: Synthetic oligonucleotide
gguagaugguaccuucacu

SEQ ID NO: 1724892 - RNA, 19 nt, Artificial Sequence
  Description of Artificial Sequence: Synthetic oligonucleotide
gacgaacacguccccgucu

SEQ ID NO: 1724893 - RNA, 19 nt, Artificial Sequence
  Description of Artificial Sequence: Synthetic oligonucleotide
augcccucagucacuguca

SEQ ID NO: 1724894 - RNA, 19 nt, Artificial Sequence
  Description of Artificial Sequence: Synthetic oligonucleotide
cuuacugcucagggcacga

SEQ ID NO: 1724895 - RNA, 19 nt, Artificial Sequence
  Description of Artificial Sequence: Synthetic oligonucleotide
ccaugcagucaauggacuc

SEQ ID NO: 1724896 - RNA, 19 nt, Artificial Sequence
  Description of Artificial Sequence: Synthetic oligonucleotide
caaaucugcgucucuugau

SEQ ID NO: 1724897 - RNA, 19 nt, Artificial Sequence
  Description of Artificial Sequence: Synthetic oligonucleotide
cgaagcggucacuuguagc

SEQ ID NO: 1724898 - RNA, 19 nt, Artificial Sequence
  Description of Artificial Sequence: Synthetic oligonucleotide
gcgaagcggucacuuguag

SEQ ID NO: 1724899 - RNA, 19 nt, Artificial Sequence
  Description of Artificial Sequence: Synthetic oligonucleotide
ucacggauccggggugcgc

SEQ ID NO: 1724900 - RNA, 19 nt, Artificial Sequence
  Description of Artificial Sequence: Synthetic oligonucleotide
ucgcuggucauggccacua

SEQ ID NO: 1724901 - RNA, 19 nt, Artificial Sequence
  Description of Artificial Sequence: Synthetic oligonucleotide
cccuguucaacaucuaaua

SEQ ID NO: 1724902 - RNA, 19 nt, Artificial Sequence
  Description of Artificial Sequence: Synthetic oligonucleotide
gccggauaccaccuguguc

SEQ ID NO: 1724903 - RNA, 19 nt, Artificial Sequence
  Description of Artificial Sequence: Synthetic oligonucleotide
ccaaaaccguuccaauuga

SEQ ID NO: 1724904 - RNA, 19 nt, Artificial Sequence
  Description of Artificial Sequence: Synthetic oligonucleotide
ugccuaccacucgguuugg

SEQ ID NO: 1724905 - RNA, 19 nt, Artificial Sequence
  Description of Artificial Sequence: Synthetic oligonucleotide
gacucugcucucagugcga

SEQ ID NO: 1724906 - RNA, 19 nt, Artificial Sequence
  Description of Artificial Sequence: Synthetic oligonucleotide
gcgucucuugauguugaag

SEQ ID NO: 1724907 - RNA, 19 nt, Artificial Sequence
  Description of Artificial Sequence: Synthetic oligonucleotide
gucuacguccccggcugcc

SEQ ID NO: 1724908 - RNA, 19 nt, Artificial Sequence
  Description of Artificial Sequence: Synthetic oligonucleotide
cuuuaggggcugucccaga

SEQ ID NO: 1724909 - RNA, 19 nt, Artificial Sequence
  Description of Artificial Sequence: Synthetic oligonucleotide
uuacugcucagggcacgaa

SEQ ID NO: 1724910 - RNA, 19 nt, Artificial Sequence
  Description of Artificial Sequence: Synthetic oligonucleotide
ugguagagcuaagcuuaua

SEQ ID NO: 1724911 - RNA, 19 nt, Artificial Sequence
  Description of Artificial Sequence: Synthetic oligonucleotide
cuucugggguuaucacgga

SEQ ID NO: 1724912 - RNA, 19 nt, Artificial Sequence
  Description of Artificial Sequence: Synthetic oligonucleotide
ccuaccacucgguuuggca

SEQ ID NO: 1724913 - RNA, 19 nt, Artificial Sequence
  Description of Artificial Sequence: Synthetic oligonucleotide
gacggaaguuagaucgccu

SEQ ID NO: 1724914 - RNA, 19 nt, Artificial Sequence
  Description of Artificial Sequence: Synthetic oligonucleotide
uggccggcgcuuccagcac

SEQ ID NO: 1724915 - RNA, 19 nt, Artificial Sequence
  Description of Artificial Sequence: Synthetic oligonucleotide
uucuugcggcgucgauagu

SEQ ID NO: 1724916 - RNA, 19 nt, Artificial Sequence
  Description of Artificial Sequence: Synthetic oligonucleotide
cccacggugccuaccacuc

SEQ ID NO: 1724917 - RNA, 19 nt, Artificial Sequence
  Description of Artificial Sequence: Synthetic oligonucleotide
ccgucuacguccccggcug

SEQ ID NO: 1724918 - RNA, 19 nt, Artificial Sequence
  Description of Artificial Sequence: Synthetic oligonucleotide
gugagccuuagaaauucgu

SEQ ID NO: 1724919 - RNA, 19 nt, Artificial Sequence
  Description of Artificial Sequence: Synthetic oligonucleotide
gggugacggaaguuagauc

SEQ ID NO: 1724920 - RNA, 19 nt, Artificial Sequence
  Description of Artificial Sequence: Synthetic oligonucleotide
gauggaacgccaggccacu

SEQ ID NO: 1724921 - RNA, 19 nt, Artificial Sequence
  Description of Artificial Sequence: Synthetic oligonucleotide
cacuggccggcgcuuccag

SEQ ID NO: 1724922 - RNA, 19 nt, Artificial Sequence
  Description of Artificial Sequence: Synthetic oligonucleotide
cgauagucauccacaacca

SEQ ID NO: 1724923 - RNA, 19 nt, Artificial Sequence
  Description of Artificial Sequence: Synthetic oligonucleotide
ccuuacugcucagggcacg

SEQ ID NO: 1724924 - RNA, 19 nt, Artificial Sequence
  Description of Artificial Sequence: Synthetic oligonucleotide
uuccauccguggagccagu

SEQ ID NO: 1724925 - RNA, 19 nt, Artificial Sequence
  Description of Artificial Sequence: Synthetic oligonucleotide
agggcacgaaguggcccuc

SEQ ID NO: 1724926 - RNA, 19 nt, Artificial Sequence
  Description of Artificial Sequence: Synthetic oligonucleotide
uugcggcgucgauagucau

SEQ ID NO: 1724927 - RNA, 19 nt, Artificial Sequence
  Description of Artificial Sequence: Synthetic oligonucleotide
cauggauugcuuuguccuu

SEQ ID NO: 1724928 - RNA, 19 nt, Artificial Sequence
  Description of Artificial Sequence: Synthetic oligonucleotide
aucgccugacugaggcucu

SEQ ID NO: 1724929 - RNA, 19 nt, Artificial Sequence
  Description of Artificial Sequence: Synthetic oligonucleotide
cagggcacgaaguggcccu

SEQ ID NO: 1724930 - RNA, 19 nt, Artificial Sequence
  Description of Artificial Sequence: Synthetic oligonucleotide
ucgccugacugaggcucug

SEQ ID NO: 1724931 - RNA, 19 nt, Artificial Sequence
  Description of Artificial Sequence: Synthetic oligonucleotide
agaaggucucgggguggga

SEQ ID NO: 1724932 - RNA, 19 nt, Artificial Sequence
  Description of Artificial Sequence: Synthetic oligonucleotide
cugccgcauguccauuaga

SEQ ID NO: 1724933 - RNA, 19 nt, Artificial Sequence
  Description of Artificial Sequence: Synthetic oligonucleotide
ggugcgccuucguggaguc

SEQ ID NO: 1724934 - RNA, 19 nt, Artificial Sequence
  Description of Artificial Sequence: Synthetic oligonucleotide
ggugccuaccacucgguuu

SEQ ID NO: 1724935 - RNA, 19 nt, Artificial Sequence
  Description of Artificial Sequence: Synthetic oligonucleotide
aucagugcuccaggccuua

SEQ ID NO: 1724936 - RNA, 19 nt, Artificial Sequence
  Description of Artificial Sequence: Synthetic oligonucleotide
ccguggagccagugcacag

SEQ ID NO: 1724937 - RNA, 19 nt, Artificial Sequence
  Description of Artificial Sequence: Synthetic oligonucleotide
ccacggugccuaccacucg

SEQ ID NO: 1724938 - RNA, 19 nt, Artificial Sequence
  Description of Artificial Sequence: Synthetic oligonucleotide
gccuucguggagucaaggu

SEQ ID NO: 1724939 - RNA, 19 nt, Artificial Sequence
  Description of Artificial Sequence: Synthetic oligonucleotide
cauaagggugacggaaguu

SEQ ID NO: 1724940 - RNA, 19 nt, Artificial Sequence
  Description of Artificial Sequence: Synthetic oligonucleotide
cggaaguuagaucgccuga

SEQ ID NO: 1724941 - RNA, 19 nt, Artificial Sequence
  Description of Artificial Sequence: Synthetic oligonucleotide
cuagauccacaggccaccu

SEQ ID NO: 1724942 - RNA, 19 nt, Artificial Sequence
  Description of Artificial Sequence: Synthetic oligonucleotide
cgucgauagucauccacaa

SEQ ID NO: 1724943 - RNA, 19 nt, Artificial Sequence
  Description of Artificial Sequence: Synthetic oligonucleotide
gccuuacugcucagggcac

SEQ ID NO: 1724944 - RNA, 19 nt, Artificial Sequence
  Description of Artificial Sequence: Synthetic oligonucleotide
gucucggggugggauggaa

SEQ ID NO: 1724945 - RNA, 19 nt, Artificial Sequence
  Description of Artificial Sequence: Synthetic oligonucleotide
caucagugcuccaggccuu

SEQ ID NO: 1724946 - RNA, 19 nt, Artificial Sequence
  Description of Artificial Sequence: Synthetic oligonucleotide
cccuaaugauuccauccgu

SEQ ID NO: 1724947 - RNA, 19 nt, Artificial Sequence
  Description of Artificial Sequence: Synthetic oligonucleotide
ggggugcgccuucguggag

SEQ ID NO: 1724948 - RNA, 19 nt, Artificial Sequence
  Description of Artificial Sequence: Synthetic oligonucleotide
cacgagcagcagacuguua

SEQ ID NO: 1724949 - RNA, 19 nt, Artificial Sequence
  Description of Artificial Sequence: Synthetic oligonucleotide
gugguagagcuaagcuuau

SEQ ID NO: 1724950 - RNA, 19 nt, Artificial Sequence
  Description of Artificial Sequence: Synthetic oligonucleotide
cuggucccagagccggaua

SEQ ID NO: 1724951 - RNA, 19 nt, Artificial Sequence
  Description of Artificial Sequence: Synthetic oligonucleotide
gccuaccacucgguuuggc

SEQ ID NO: 1724952 - RNA, 19 nt, Artificial Sequence
  Description of Artificial Sequence: Synthetic oligonucleotide
cgccuucguggagucaagg

SEQ ID NO: 1724953 - RNA, 19 nt, Artificial Sequence
  Description of Artificial Sequence: Synthetic oligonucleotide
ggccggcgcuuccagcaca

SEQ ID NO: 1724954 - RNA, 19 nt, Artificial Sequence
  Description of Artificial Sequence: Synthetic oligonucleotide
ccagcacaauuguucuucu

SEQ ID NO: 1724955 - RNA, 19 nt, Artificial Sequence
  Description of Artificial Sequence: Synthetic oligonucleotide
gggauagggcuagcuccuc

SEQ ID NO: 1724956 - RNA, 19 nt, Artificial Sequence
  Description of Artificial Sequence: Synthetic oligonucleotide
cucgguuuggcaggauguu

SEQ ID NO: 1724957 - RNA, 19 nt, Artificial Sequence
  Description of Artificial Sequence: Synthetic oligonucleotide
ccguuccaauugaaaaggu

SEQ ID NO: 1724958 - RNA, 19 nt, Artificial Sequence
  Description of Artificial Sequence: Synthetic oligonucleotide
augcugccgcauguccauu

SEQ ID NO: 1724959 - RNA, 19 nt, Artificial Sequence
  Description of Artificial Sequence: Synthetic oligonucleotide
cagugcgaagcggucacuu

SEQ ID NO: 1724960 - RNA, 19 nt, Artificial Sequence
  Description of Artificial Sequence: Synthetic oligonucleotide
gcgccuucguggagucaag

SEQ ID NO: 1724961 - RNA, 19 nt, Artificial Sequence
  Description of Artificial Sequence: Synthetic oligonucleotide
cgaacacguccccgucuac

SEQ ID NO: 1724962 - RNA, 19 nt, Artificial Sequence
  Description of Artificial Sequence: Synthetic oligonucleotide
gggugcgccuucguggagu

SEQ ID NO: 1724963 - RNA, 19 nt, Artificial Sequence
  Description of Artificial Sequence: Synthetic oligonucleotide
aggccacuggccggcgcuu

SEQ ID NO: 1724964 - RNA, 19 nt, Artificial Sequence
  Description of Artificial Sequence: Synthetic oligonucleotide
cgucuacguccccggcugc

SEQ ID NO: 1724965 - RNA, 19 nt, Artificial Sequence
  Description of Artificial Sequence: Synthetic oligonucleotide
ccccgucuacguccccggc

SEQ ID NO: 1724966 - RNA, 19 nt, Artificial Sequence
  Description of Artificial Sequence: Synthetic oligonucleotide
cggggugcgccuucgugga

SEQ ID NO: 1724967 - RNA, 19 nt, Artificial Sequence
  Description of Artificial Sequence: Synthetic oligonucleotide
cgcuggucauggccacuac

SEQ ID NO: 1724968 - RNA, 19 nt, Artificial Sequence
  Description of Artificial Sequence: Synthetic oligonucleotide
ggucucggggugggaugga

SEQ ID NO: 1724969 - RNA, 19 nt, Artificial Sequence
  Description of Artificial Sequence: Synthetic oligonucleotide
gccggcgcuuccagcacaa

SEQ ID NO: 1724970 - RNA, 19 nt, Artificial Sequence
  Description of Artificial Sequence: Synthetic oligonucleotide
ccauuagagggcccuccuu

SEQ ID NO: 1724971 - RNA, 19 nt, Artificial Sequence
  Description of Artificial Sequence: Synthetic oligonucleotide
cgaaguggcccucccuuuu

SEQ ID NO: 1724972 - RNA, 19 nt, Artificial Sequence
  Description of Artificial Sequence: Synthetic oligonucleotide
cguccccgucuacgucccc

SEQ ID NO: 1724973 - RNA, 19 nt, Artificial Sequence
  Description of Artificial Sequence: Synthetic oligonucleotide
cggcgcuuccagcacaauu

SEQ ID NO: 1724974 - RNA, 19 nt, Artificial Sequence
  Description of Artificial Sequence: Synthetic oligonucleotide
cgcuuccagcacaauuguu

SEQ ID NO: 1724975 - RNA, 19 nt, Artificial Sequence
  Description of Artificial Sequence: Synthetic oligonucleotide
cgccugacugaggcucuga

SEQ ID NO: 1724976 - RNA, 19 nt, Artificial Sequence
  Description of Artificial Sequence: Synthetic oligonucleotide
cggcgucgauagucaucca

SEQ ID NO: 1724977 - RNA, 19 nt, Artificial Sequence
  Description of Artificial Sequence: Synthetic oligonucleotide
ccccagugacuagaacauu

SEQ ID NO: 1724978 - RNA, 19 nt, Artificial Sequence
  Description of Artificial Sequence: Synthetic oligonucleotide
cggugccuaccacucgguu

SEQ ID NO: 1724979 - RNA, 19 nt, Artificial Sequence
  Description of Artificial Sequence: Synthetic oligonucleotide
ccacucgguuuggcaggau

SEQ ID NO: 1724980 - RNA, 19 nt, Artificial Sequence
  Description of Artificial Sequence: Synthetic oligonucleotide
uaaacuaagagucaugucc

SEQ ID NO: 1724981 - RNA, 19 nt, Artificial Sequence
  Description of Artificial Sequence: Synthetic oligonucleotide
agaaauauuggucugaauc

SEQ ID NO: 1724982 - RNA, 19 nt, Artificial Sequence
  Description of Artificial Sequence: Synthetic oligonucleotide
aagaauaaauuguaggaag

SEQ ID NO: 1724983 - RNA, 19 nt, Artificial Sequence
  Description of Artificial Sequence: Synthetic oligonucleotide
gauacgacaauuugcaugg

SEQ ID NO: 1724984 - RNA, 19 nt, Artificial Sequence
  Description of Artificial Sequence: Synthetic oligonucleotide
uaguaaaugagccauagca

SEQ ID NO: 1724985 - RNA, 19 nt, Artificial Sequence
  Description of Artificial Sequence: Synthetic oligonucleotide
uuguaugucacucaaagcu

SEQ ID NO: 1724986 - RNA, 19 nt, Artificial Sequence
  Description of Artificial Sequence: Synthetic oligonucleotide
aaguaaacccuucggauac

SEQ ID NO: 1724987 - RNA, 19 nt, Artificial Sequence
  Description of Artificial Sequence: Synthetic oligonucleotide
aaaggcuugacucgggugg

SEQ ID NO: 1724988 - RNA, 19 nt, Artificial Sequence
  Description of Artificial Sequence: Synthetic oligonucleotide
uguaguuugugccauacgc

SEQ ID NO: 1724989 - RNA, 19 nt, Artificial Sequence
  Description of Artificial Sequence: Synthetic oligonucleotide
agauaaguugaacugaauc

SEQ ID NO: 1724990 - RNA, 19 nt, Artificial Sequence
  Description of Artificial Sequence: Synthetic oligonucleotide
aagagucauguccagaguc

SEQ ID NO: 1724991 - RNA, 19 nt, Artificial Sequence
  Description of Artificial Sequence: Synthetic oligonucleotide
aguuguaugucacucaaag

SEQ ID NO: 1724992 - RNA, 19 nt, Artificial Sequence
  Description of Artificial Sequence: Synthetic oligonucleotide
aaagacacgaaguaguaaa

SEQ ID NO: 1724993 - RNA, 19 nt, Artificial Sequence
  Description of Artificial Sequence: Synthetic oligonucleotide
uauuguuuggccuuguucu

SEQ ID NO: 1724994 - RNA, 19 nt, Artificial Sequence
  Description of Artificial Sequence: Synthetic oligonucleotide
uacaguuugaacucugccg

SEQ ID NO: 1724995 - RNA, 19 nt, Artificial Sequence
  Description of Artificial Sequence: Synthetic oligonucleotide
uguaggaagaaauauuggu

SEQ ID NO: 1724996 - RNA, 19 nt, Artificial Sequence
  Description of Artificial Sequence: Synthetic oligonucleotide
ucugguaguuacuugcucg

SEQ ID NO: 1724997 - RNA, 19 nt, Artificial Sequence
  Description of Artificial Sequence: Synthetic oligonucleotide
gaaucugccuuguaggacg

SEQ ID NO: 1724998 - RNA, 19 nt, Artificial Sequence
  Description of Artificial Sequence: Synthetic oligonucleotide
ggugaaaucagauaaguug

SEQ ID NO: 1724999 - RNA, 19 nt, Artificial Sequence
  Description of Artificial Sequence: Synthetic oligonucleotide
uuuaaauccgugcauuugu

SEQ ID NO: 1725000 - RNA, 19 nt, Artificial Sequence
  Description of Artificial Sequence: Synthetic oligonucleotide
uaaguugaacugaaucugg

SEQ ID NO: 1725001 - RNA, 19 nt, Artificial Sequence
  Description of Artificial Sequence: Synthetic oligonucleotide
aaaccaagaauauagcauu

SEQ ID NO: 1725002 - RNA, 19 nt, Artificial Sequence
  Description of Artificial Sequence: Synthetic oligonucleotide
ugagccauagcacagugga

SEQ ID NO: 1725003 - RNA, 19 nt, Artificial Sequence
  Description of Artificial Sequence: Synthetic oligonucleotide
uuuaaacuaagagucaugu

SEQ ID NO: 1725004 - RNA, 19 nt, Artificial Sequence
  Description of Artificial Sequence: Synthetic oligonucleotide
aaauccgugcauuuguugu

SEQ ID NO: 1725005 - RNA, 19 nt, Artificial Sequence
  Description of Artificial Sequence: Synthetic oligonucleotide
acaauuugcauggaucugc

SEQ ID NO: 1725006 - RNA, 19 nt, Artificial Sequence
  Description of Artificial Sequence: Synthetic oligonucleotide
uuaugcguauuacacaaca

SEQ ID NO: 1725007 - RNA, 19 nt, Artificial Sequence
  Description of Artificial Sequence: Synthetic oligonucleotide
uuagaaugcaaguaacaga

SEQ ID NO: 1725008 - RNA, 19 nt, Artificial Sequence
  Description of Artificial Sequence: Synthetic oligonucleotide
cugucugagaaguaaaccc

SEQ ID NO: 1725009 - RNA, 19 nt, Artificial Sequence
  Description of Artificial Sequence: Synthetic oligonucleotide
ucggauacgacaauuugca

SEQ ID NO: 1725010 - RNA, 19 nt, Artificial Sequence
  Description of Artificial Sequence: Synthetic oligonucleotide
cagauuaugcguauuacac

SEQ ID NO: 1725011 - RNA, 19 nt, Artificial Sequence
  Description of Artificial Sequence: Synthetic oligonucleotide
uuguaggaagaaauauugg

SEQ ID NO: 1725012 - RNA, 19 nt, Artificial Sequence
  Description of Artificial Sequence: Synthetic oligonucleotide
gaagauacaguuugaacuc

SEQ ID NO: 1725013 - RNA, 19 nt, Artificial Sequence
  Description of Artificial Sequence: Synthetic oligonucleotide
aaacccuucggauacgaca

SEQ ID NO: 1725014 - RNA, 19 nt, Artificial Sequence
  Description of Artificial Sequence: Synthetic oligonucleotide
uggaacguguucuugaaca

SEQ ID NO: 1725015 - RNA, 19 nt, Artificial Sequence
  Description of Artificial Sequence: Synthetic oligonucleotide
uucggauacgacaauuugc

SEQ ID NO: 1725016 - RNA, 19 nt, Artificial Sequence
  Description of Artificial Sequence: Synthetic oligonucleotide
uaggacgucuuuaaauccg

SEQ ID NO: 1725017 - RNA, 19 nt, Artificial Sequence
  Description of Artificial Sequence: Synthetic oligonucleotide
acgaaguaguaaaugagcc

SEQ ID NO: 1725018 - RNA, 19 nt, Artificial Sequence
  Description of Artificial Sequence: Synthetic oligonucleotide
gauaaguugaacugaaucu

SEQ ID NO: 1725019 - RNA, 19 nt, Artificial Sequence
  Description of Artificial Sequence: Synthetic oligonucleotide
uguaggacgucuuuaaauc

SEQ ID NO: 1725020 - RNA, 19 nt, Artificial Sequence
  Description of Artificial Sequence: Synthetic oligonucleotide
gaucaugacaaggaaaggc

SEQ ID NO: 1725021 - RNA, 19 nt, Artificial Sequence
  Description of Artificial Sequence: Synthetic oligonucleotide
gauuaugcguauuacacaa

SEQ ID NO: 1725022 - RNA, 19 nt, Artificial Sequence
  Description of Artificial Sequence: Synthetic oligonucleotide
aguaccuguacuucaaaug

SEQ ID NO: 1725023 - RNA, 19 nt, Artificial Sequence
  Description of Artificial Sequence: Synthetic oligonucleotide
cuuagaaugcaaguaacag

SEQ ID NO: 1725024 - RNA, 19 nt, Artificial Sequence
  Description of Artificial Sequence: Synthetic oligonucleotide
uuuuaaacuaagagucaug

SEQ ID NO: 1725025 - RNA, 19 nt, Artificial Sequence
  Description of Artificial Sequence: Synthetic oligonucleotide
ugaacaucucgucagccgc

SEQ ID NO: 1725026 - RNA, 19 nt, Artificial Sequence
  Description of Artificial Sequence: Synthetic oligonucleotide
ugcguauuacacaacauau

SEQ ID NO: 1725027 - RNA, 19 nt, Artificial Sequence
  Description of Artificial Sequence: Synthetic oligonucleotide
aaugcaaguaacagaacug

SEQ ID NO: 1725028 - RNA, 19 nt, Artificial Sequence
  Description of Artificial Sequence: Synthetic oligonucleotide
ggacaugugauguaugugg

SEQ ID NO: 1725029 - RNA, 19 nt, Artificial Sequence
  Description of Artificial Sequence: Synthetic oligonucleotide
uugaacaucucgucagccg

SEQ ID NO: 1725030 - RNA, 19 nt, Artificial Sequence
  Description of Artificial Sequence: Synthetic oligonucleotide
aaauauuggucugaaucug

SEQ ID NO: 1725031 - RNA, 19 nt, Artificial Sequence
  Description of Artificial Sequence: Synthetic oligonucleotide
cagaugaaaggcuugacuc

SEQ ID NO: 1725032 - RNA, 19 nt, Artificial Sequence
  Description of Artificial Sequence: Synthetic oligonucleotide
auaaguugaacugaaucug

SEQ ID NO: 1725033 - RNA, 19 nt, Artificial Sequence
  Description of Artificial Sequence: Synthetic oligonucleotide
gaacccgcaagccugggcg

SEQ ID NO: 1725034 - RNA, 19 nt, Artificial Sequence
  Description of Artificial Sequence: Synthetic oligonucleotide
ucucgauguaguuugugcc

SEQ ID NO: 1725035 - RNA, 19 nt, Artificial Sequence
  Description of Artificial Sequence: Synthetic oligonucleotide
gacacgaaguaguaaauga

SEQ ID NO: 1725036 - RNA, 19 nt, Artificial Sequence
  Description of Artificial Sequence: Synthetic oligonucleotide
ugucugagaaguaaacccu

SEQ ID NO: 1725037 - RNA, 19 nt, Artificial Sequence
  Description of Artificial Sequence: Synthetic oligonucleotide
auccaguuauuguuuggcc

SEQ ID NO: 1725038 - RNA, 19 nt, Artificial Sequence
  Description of Artificial Sequence: Synthetic oligonucleotide
aaugagccauagcacagug

SEQ ID NO: 1725039 - RNA, 19 nt, Artificial Sequence
  Description of Artificial Sequence: Synthetic oligonucleotide
uuauuguuuggccuuguuc

SEQ ID NO: 1725040 - RNA, 19 nt, Artificial Sequence
  Description of Artificial Sequence: Synthetic oligonucleotide
ucugguuccagccaucauc

SEQ ID NO: 1725041 - RNA, 19 nt, Artificial Sequence
  Description of Artificial Sequence: Synthetic oligonucleotide
ugcucugguaguuacuugc

SEQ ID NO: 1725042 - RNA, 19 nt, Artificial Sequence
  Description of Artificial Sequence: Synthetic oligonucleotide
caugugauguauguggugc

SEQ ID NO: 1725043 - RNA, 19 nt, Artificial Sequence
  Description of Artificial Sequence: Synthetic oligonucleotide
uguaugucacucaaagcuc

SEQ ID NO: 1725044 - RNA, 19 nt, Artificial Sequence
  Description of Artificial Sequence: Synthetic oligonucleotide
aaacuaagagucaugucca

SEQ ID NO: 1725045 - RNA, 19 nt, Artificial Sequence
  Description of Artificial Sequence: Synthetic oligonucleotide
gacgucuuuaaauccgugc

SEQ ID NO: 1725046 - RNA, 19 nt, Artificial Sequence
  Description of Artificial Sequence: Synthetic oligonucleotide
aguaguaaaugagccauag

SEQ ID NO: 1725047 - RNA, 19 nt, Artificial Sequence
  Description of Artificial Sequence: Synthetic oligonucleotide
gaacuuagaaugcaaguaa

SEQ ID NO: 1725048 - RNA, 19 nt, Artificial Sequence
  Description of Artificial Sequence: Synthetic oligonucleotide
ugugccauacgcccgccgg

SEQ ID NO: 1725049 - RNA, 19 nt, Artificial Sequence
  Description of Artificial Sequence: Synthetic oligonucleotide
aauccgugcauuuguugug

SEQ ID NO: 1725050 - RNA, 19 nt, Artificial Sequence
  Description of Artificial Sequence: Synthetic oligonucleotide
acaguggauuauuuaaaug

SEQ ID NO: 1725051 - RNA, 19 nt, Artificial Sequence
  Description of Artificial Sequence: Synthetic oligonucleotide
agcacaguggauuauuuaa

SEQ ID NO: 1725052 - RNA, 19 nt, Artificial Sequence
  Description of Artificial Sequence: Synthetic oligonucleotide
aacguguucuugaacaucu

SEQ ID NO: 1725053 - RNA, 19 nt, Artificial Sequence
  Description of Artificial Sequence: Synthetic oligonucleotide
agggucucgauguaguuug

SEQ ID NO: 1725054 - RNA, 19 nt, Artificial Sequence
  Description of Artificial Sequence: Synthetic oligonucleotide
ucugucugagaaguaaacc

SEQ ID NO: 1725055 - RNA, 19 nt, Artificial Sequence
  Description of Artificial Sequence: Synthetic oligonucleotide
acgucuuuaaauccgugca

SEQ ID NO: 1725056 - RNA, 19 nt, Artificial Sequence
  Description of Artificial Sequence: Synthetic oligonucleotide
agauuaugcguauuacaca

SEQ ID NO: 1725057 - RNA, 19 nt, Artificial Sequence
  Description of Artificial Sequence: Synthetic oligonucleotide
aauuguaggaagaaauauu

SEQ ID NO: 1725058 - RNA, 19 nt, Artificial Sequence
  Description of Artificial Sequence: Synthetic oligonucleotide
ggaagauacaguuugaacu

SEQ ID NO: 1725059 - RNA, 19 nt, Artificial Sequence
  Description of Artificial Sequence: Synthetic oligonucleotide
aacuaagagucauguccag

SEQ ID NO: 1725060 - RNA, 19 nt, Artificial Sequence
  Description of Artificial Sequence: Synthetic oligonucleotide
uccgaaggaaggacgcugg

SEQ ID NO: 1725061 - RNA, 19 nt, Artificial Sequence
  Description of Artificial Sequence: Synthetic oligonucleotide
uuguaggacgucuuuaaau

SEQ ID NO: 1725062 - RNA, 19 nt, Artificial Sequence
  Description of Artificial Sequence: Synthetic oligonucleotide
gugaaaucagauaaguuga

SEQ ID NO: 1725063 - RNA, 19 nt, Artificial Sequence
  Description of Artificial Sequence: Synthetic oligonucleotide
uaaauccgugcauuuguug

SEQ ID NO: 1725064 - RNA, 19 nt, Artificial Sequence
  Description of Artificial Sequence: Synthetic oligonucleotide
ucggguggugcucugguag

SEQ ID NO: 1725065 - RNA, 19 nt, Artificial Sequence
  Description of Artificial Sequence: Synthetic oligonucleotide
uuacuugcucgaaaccgcc

SEQ ID NO: 1725066 - RNA, 19 nt, Artificial Sequence
  Description of Artificial Sequence: Synthetic oligonucleotide
ugcaaguaacagaacugug

SEQ ID NO: 1725067 - RNA, 19 nt, Artificial Sequence
  Description of Artificial Sequence: Synthetic oligonucleotide
acgacaauuugcauggauc

SEQ ID NO: 1725068 - RNA, 19 nt, Artificial Sequence
  Description of Artificial Sequence: Synthetic oligonucleotide
guaggacgucuuuaaaucc

SEQ ID NO: 1725069 - RNA, 19 nt, Artificial Sequence
  Description of Artificial Sequence: Synthetic oligonucleotide
guuguaugucacucaaagc

SEQ ID NO: 1725070 - RNA, 19 nt, Artificial Sequence
  Description of Artificial Sequence: Synthetic oligonucleotide
ugaaucugguuccagccau

SEQ ID NO: 1725071 - RNA, 19 nt, Artificial Sequence
  Description of Artificial Sequence: Synthetic oligonucleotide
agaauaaauuguaggaaga

SEQ ID NO: 1725072 - RNA, 19 nt, Artificial Sequence
  Description of Artificial Sequence: Synthetic oligonucleotide
uuaaacuaagagucauguc

SEQ ID NO: 1725073 - RNA, 19 nt, Artificial Sequence
  Description of Artificial Sequence: Synthetic oligonucleotide
gaagucggcaccgagcggc

SEQ ID NO: 1725074 - RNA, 19 nt, Artificial Sequence
  Description of Artificial Sequence: Synthetic oligonucleotide
ggcaguuugauucccagug

SEQ ID NO: 1725075 - RNA, 19 nt, Artificial Sequence
  Description of Artificial Sequence: Synthetic oligonucleotide
auuggucugaaucugccuu

SEQ ID NO: 1725076 - RNA, 19 nt, Artificial Sequence
  Description of Artificial Sequence: Synthetic oligonucleotide
gaaguaaacccuucggaua

SEQ ID NO: 1725077 - RNA, 19 nt, Artificial Sequence
  Description of Artificial Sequence: Synthetic oligonucleotide
cguauuacacaacauauac

SEQ ID NO: 1725078 - RNA, 19 nt, Artificial Sequence
  Description of Artificial Sequence: Synthetic oligonucleotide
aucaugacaaggaaaggca

SEQ ID NO: 1725079 - RNA, 19 nt, Artificial Sequence
  Description of Artificial Sequence: Synthetic oligonucleotide
aacccgcaagccugggcgc

SEQ ID NO: 1725080 - RNA, 19 nt, Artificial Sequence
  Description of Artificial Sequence: Synthetic oligonucleotide
aggacgcugggcugcagcc

SEQ ID NO: 1725081 - RNA, 19 nt, Artificial Sequence
  Description of Artificial Sequence: Synthetic oligonucleotide
uacuugcucgaaaccgccg

SEQ ID NO: 1725082 - RNA, 19 nt, Artificial Sequence
  Description of Artificial Sequence: Synthetic oligonucleotide
cuucggauacgacaauuug

SEQ ID NO: 1725083 - RNA, 19 nt, Artificial Sequence
  Description of Artificial Sequence: Synthetic oligonucleotide
uaugcguauuacacaacau

SEQ ID NO: 1725084 - RNA, 19 nt, Artificial Sequence
  Description of Artificial Sequence: Synthetic oligonucleotide
augcguauuacacaacaua

SEQ ID NO: 1725085 - RNA, 19 nt, Artificial Sequence
  Description of Artificial Sequence: Synthetic oligonucleotide
ugucaucuaguaccuguac

SEQ ID NO: 1725086 - RNA, 19 nt, Artificial Sequence
  Description of Artificial Sequence: Synthetic oligonucleotide
cuuuugauguggccauucc

SEQ ID NO: 1725087 - RNA, 19 nt, Artificial Sequence
  Description of Artificial Sequence: Synthetic oligonucleotide
guuacuugcucgaaaccgc

SEQ ID NO: 1725088 - RNA, 19 nt, Artificial Sequence
  Description of Artificial Sequence: Synthetic oligonucleotide
accgaaaccacagcaacug

SEQ ID NO: 1725089 - RNA, 19 nt, Artificial Sequence
  Description of Artificial Sequence: Synthetic oligonucleotide
aagaaauauuggucugaau

SEQ ID NO: 1725090 - RNA, 19 nt, Artificial Sequence
  Description of Artificial Sequence: Synthetic oligonucleotide
cauggaucugcacucucag

SEQ ID NO: 1725091 - RNA, 19 nt, Artificial Sequence
  Description of Artificial Sequence: Synthetic oligonucleotide
guaguuugugccauacgcc

SEQ ID NO: 1725092 - RNA, 19 nt, Artificial Sequence
  Description of Artificial Sequence: Synthetic oligonucleotide
augcaaguaacagaacugu

SEQ ID NO: 1725093 - RNA, 19 nt, Artificial Sequence
  Description of Artificial Sequence: Synthetic oligonucleotide
agcaacugccgcccgcgcc

SEQ ID NO: 1725094 - RNA, 19 nt, Artificial Sequence
  Description of Artificial Sequence: Synthetic oligonucleotide
uauguggugcugacauuug

SEQ ID NO: 1725095 - RNA, 19 nt, Artificial Sequence
  Description of Artificial Sequence: Synthetic oligonucleotide
gaaguaguaaaugagccau

SEQ ID NO: 1725096 - RNA, 19 nt, Artificial Sequence
  Description of Artificial Sequence: Synthetic oligonucleotide
agccgcaugggcaugguac

SEQ ID NO: 1725097 - RNA, 19 nt, Artificial Sequence
  Description of Artificial Sequence: Synthetic oligonucleotide
aaaugagccauagcacagu

SEQ ID NO: 1725098 - RNA, 19 nt, Artificial Sequence
  Description of Artificial Sequence: Synthetic oligonucleotide
uauuggucugaaucugccu

SEQ ID NO: 1725099 - RNA, 19 nt, Artificial Sequence
  Description of Artificial Sequence: Synthetic oligonucleotide
auccgugcauuuguugugc

SEQ ID NO: 1725100 - RNA, 19 nt, Artificial Sequence
  Description of Artificial Sequence: Synthetic oligonucleotide
guaguaaaugagccauagc

SEQ ID NO: 1725101 - RNA, 19 nt, Artificial Sequence
  Description of Artificial Sequence: Synthetic oligonucleotide
agagggugccgccgggucc

SEQ ID NO: 1725102 - RNA, 19 nt, Artificial Sequence
  Description of Artificial Sequence: Synthetic oligonucleotide
cucgaaaccgccgacgaac

SEQ ID NO: 1725103 - RNA, 19 nt, Artificial Sequence
  Description of Artificial Sequence: Synthetic oligonucleotide
acugacggcgggaagcggc

SEQ ID NO: 1725104 - RNA, 19 nt, Artificial Sequence
  Description of Artificial Sequence: Synthetic oligonucleotide
ugucucucacaugccaggg

SEQ ID NO: 1725105 - RNA, 19 nt, Artificial Sequence
  Description of Artificial Sequence: Synthetic oligonucleotide
ugguguccaugacaaagac

SEQ ID NO: 1725106 - RNA, 19 nt, Artificial Sequence
  Description of Artificial Sequence: Synthetic oligonucleotide
ugcucgaaaccgccgacga

SEQ ID NO: 1725107 - RNA, 19 nt, Artificial Sequence
  Description of Artificial Sequence: Synthetic oligonucleotide
uacgacaauuugcauggau

SEQ ID NO: 1725108 - RNA, 19 nt, Artificial Sequence
  Description of Artificial Sequence: Synthetic oligonucleotide
uucugaacuggaagauaca

SEQ ID NO: 1725109 - RNA, 19 nt, Artificial Sequence
  Description of Artificial Sequence: Synthetic oligonucleotide
ucccagugucuucuugggg

SEQ ID NO: 1725110 - RNA, 19 nt, Artificial Sequence
  Description of Artificial Sequence: Synthetic oligonucleotide
gcgugugucucucacaugc

SEQ ID NO: 1725111 - RNA, 19 nt, Artificial Sequence
  Description of Artificial Sequence: Synthetic oligonucleotide
uccagauuaugcguauuac

SEQ ID NO: 1725112 - RNA, 19 nt, Artificial Sequence
  Description of Artificial Sequence: Synthetic oligonucleotide
agacacgaaguaguaaaug

SEQ ID NO: 1725113 - RNA, 19 nt, Artificial Sequence
  Description of Artificial Sequence: Synthetic oligonucleotide
aacccuucggauacgacaa

SEQ ID NO: 1725114 - RNA, 19 nt, Artificial Sequence
  Description of Artificial Sequence: Synthetic oligonucleotide
cuugaacaucucgucagcc

SEQ ID NO: 1725115 - RNA, 19 nt, Artificial Sequence
  Description of Artificial Sequence: Synthetic oligonucleotide
guuugugccauacgcccgc

SEQ ID NO: 1725116 - RNA, 19 nt, Artificial Sequence
  Description of Artificial Sequence: Synthetic oligonucleotide
acuugcucgaaaccgccga

SEQ ID NO: 1725117 - RNA, 19 nt, Artificial Sequence
  Description of Artificial Sequence: Synthetic oligonucleotide
ccccacugaacuuagaaug

SEQ ID NO: 1725118 - RNA, 19 nt, Artificial Sequence
  Description of Artificial Sequence: Synthetic oligonucleotide
ugugauguauguggugcug

SEQ ID NO: 1725119 - RNA, 19 nt, Artificial Sequence
  Description of Artificial Sequence: Synthetic oligonucleotide
agcaguuguaugucacuca

SEQ ID NO: 1725120 - RNA, 19 nt, Artificial Sequence
  Description of Artificial Sequence: Synthetic oligonucleotide
auuaugcguauuacacaac

SEQ ID NO: 1725121 - RNA, 19 nt, Artificial Sequence
  Description of Artificial Sequence: Synthetic oligonucleotide
ucgaaaccgccgacgaaca

SEQ ID NO: 1725122 - RNA, 19 nt, Artificial Sequence
  Description of Artificial Sequence: Synthetic oligonucleotide
auuuccagauuaugcguau

SEQ ID NO: 1725123 - RNA, 19 nt, Artificial Sequence
  Description of Artificial Sequence: Synthetic oligonucleotide
gaucugcacucucaggguc

SEQ ID NO: 1725124 - RNA, 19 nt, Artificial Sequence
  Description of Artificial Sequence: Synthetic oligonucleotide
gaagaaauauuggucugaa

SEQ ID NO: 1725125 - RNA, 19 nt, Artificial Sequence
  Description of Artificial Sequence: Synthetic oligonucleotide
gaacaucucgucagccgcg

SEQ ID NO: 1725126 - RNA, 19 nt, Artificial Sequence
  Description of Artificial Sequence: Synthetic oligonucleotide
uggccuuguucugaacugg

SEQ ID NO: 1725127 - RNA, 19 nt, Artificial Sequence
  Description of Artificial Sequence: Synthetic oligonucleotide
ugucagugauucuuuugau

SEQ ID NO: 1725128 - RNA, 19 nt, Artificial Sequence
  Description of Artificial Sequence: Synthetic oligonucleotide
uccgugcauuuguugugcg

SEQ ID NO: 1725129 - RNA, 19 nt, Artificial Sequence
  Description of Artificial Sequence: Synthetic oligonucleotide
uugcucgaaaccgccgacg

SEQ ID NO: 1725130 - RNA, 19 nt, Artificial Sequence
  Description of Artificial Sequence: Synthetic oligonucleotide
aguuugugccauacgcccg

SEQ ID NO: 1725131 - RNA, 19 nt, Artificial Sequence
  Description of Artificial Sequence: Synthetic oligonucleotide
cucgauguaguuugugcca

SEQ ID NO: 1725132 - RNA, 19 nt, Artificial Sequence
  Description of Artificial Sequence: Synthetic oligonucleotide
uaaacccuucggauacgac

SEQ ID NO: 1725133 - RNA, 19 nt, Artificial Sequence
  Description of Artificial Sequence: Synthetic oligonucleotide
augugauguauguggugcu

SEQ ID NO: 1725134 - RNA, 19 nt, Artificial Sequence
  Description of Artificial Sequence: Synthetic oligonucleotide
cauuuguugugcguguguc

SEQ ID NO: 1725135 - RNA, 19 nt, Artificial Sequence
  Description of Artificial Sequence: Synthetic oligonucleotide
aaaccgccgacgaacauuu

SEQ ID NO: 1725136 - RNA, 19 nt, Artificial Sequence
  Description of Artificial Sequence: Synthetic oligonucleotide
aagacacgaaguaguaaau

SEQ ID NO: 1725137 - RNA, 19 nt, Artificial Sequence
  Description of Artificial Sequence: Synthetic oligonucleotide
auuugucccuucaaucucu

SEQ ID NO: 1725138 - RNA, 19 nt, Artificial Sequence
  Description of Artificial Sequence: Synthetic oligonucleotide
agccauagcacaguggauu

SEQ ID NO: 1725139 - RNA, 19 nt, Artificial Sequence
  Description of Artificial Sequence: Synthetic oligonucleotide
acuaagagucauguccaga

SEQ ID NO: 1725140 - RNA, 19 nt, Artificial Sequence
  Description of Artificial Sequence: Synthetic oligonucleotide
aguaaacccuucggauacg

SEQ ID NO: 1725141 - RNA, 19 nt, Artificial Sequence
  Description of Artificial Sequence: Synthetic oligonucleotide
uguucugaacuggaagaua

SEQ ID NO: 1725142 - RNA, 19 nt, Artificial Sequence
  Description of Artificial Sequence: Synthetic oligonucleotide
caauuugcauggaucugca

SEQ ID NO: 1725143 - RNA, 19 nt, Artificial Sequence
  Description of Artificial Sequence: Synthetic oligonucleotide
gaagcggcggcgcgacgcg

SEQ ID NO: 1725144 - RNA, 19 nt, Artificial Sequence
  Description of Artificial Sequence: Synthetic oligonucleotide
uuuugucaucuaguaccug

SEQ ID NO: 1725145 - RNA, 19 nt, Artificial Sequence
  Description of Artificial Sequence: Synthetic oligonucleotide
cugacggcgggaagcggcg

SEQ ID NO: 1725146 - RNA, 19 nt, Artificial Sequence
  Description of Artificial Sequence: Synthetic oligonucleotide
gaacguguucuugaacauc

SEQ ID NO: 1725147 - RNA, 19 nt, Artificial Sequence
  Description of Artificial Sequence: Synthetic oligonucleotide
aguuugaacucugccggga

SEQ ID NO: 1725148 - RNA, 19 nt, Artificial Sequence
  Description of Artificial Sequence: Synthetic oligonucleotide
cccacugaacuuagaaugc

SEQ ID NO: 1725149 - RNA, 19 nt, Artificial Sequence
  Description of Artificial Sequence: Synthetic oligonucleotide
gaacugaaucugguuccag

SEQ ID NO: 1725150 - RNA, 19 nt, Artificial Sequence
  Description of Artificial Sequence: Synthetic oligonucleotide
cugguaguuacuugcucga

SEQ ID NO: 1725151 - RNA, 19 nt, Artificial Sequence
  Description of Artificial Sequence: Synthetic oligonucleotide
ucgauguaguuugugccau

SEQ ID NO: 1725152 - RNA, 19 nt, Artificial Sequence
  Description of Artificial Sequence: Synthetic oligonucleotide
accucagcaccgaaaccac

SEQ ID NO: 1725153 - RNA, 19 nt, Artificial Sequence
  Description of Artificial Sequence: Synthetic oligonucleotide
augagccauagcacagugg

SEQ ID NO: 1725154 - RNA, 19 nt, Artificial Sequence
  Description of Artificial Sequence: Synthetic oligonucleotide
gguacagaugaaaggcuug

SEQ ID NO: 1725155 - RNA, 19 nt, Artificial Sequence
  Description of Artificial Sequence: Synthetic oligonucleotide
gcaacugccgcccgcgccg

SEQ ID NO: 1725156 - RNA, 19 nt, Artificial Sequence
  Description of Artificial Sequence: Synthetic oligonucleotide
cuugcucgaaaccgccgac

SEQ ID NO: 1725157 - RNA, 19 nt, Artificial Sequence
  Description of Artificial Sequence: Synthetic oligonucleotide
gucaucuaguaccuguacu

SEQ ID NO: 1725158 - RNA, 19 nt, Artificial Sequence
  Description of Artificial Sequence: Synthetic oligonucleotide
gagggugccgccggguccg

SEQ ID NO: 1725159 - RNA, 19 nt, Artificial Sequence
  Description of Artificial Sequence: Synthetic oligonucleotide
uguugugcgugugucucuc

SEQ ID NO: 1725160 - RNA, 19 nt, Artificial Sequence
  Description of Artificial Sequence: Synthetic oligonucleotide
gagagagggugccgccggg

SEQ ID NO: 1725161 - RNA, 19 nt, Artificial Sequence
  Description of Artificial Sequence: Synthetic oligonucleotide
cucugguaguuacuugcuc

SEQ ID NO: 1725162 - RNA, 19 nt, Artificial Sequence
  Description of Artificial Sequence: Synthetic oligonucleotide
aggcaguuugauucccagu

SEQ ID NO: 1725163 - RNA, 19 nt, Artificial Sequence
  Description of Artificial Sequence: Synthetic oligonucleotide
agaugccauccaguuauug

SEQ ID NO: 1725164 - RNA, 19 nt, Artificial Sequence
  Description of Artificial Sequence: Synthetic oligonucleotide
ggagagagggugccgccgg

SEQ ID NO: 1725165 - RNA, 19 nt, Artificial Sequence
  Description of Artificial Sequence: Synthetic oligonucleotide
uugacucggguggugcucu

SEQ ID NO: 1725166 - RNA, 19 nt, Artificial Sequence
  Description of Artificial Sequence: Synthetic oligonucleotide
guccgaaggaaggacgcug

SEQ ID NO: 1725167 - RNA, 19 nt, Artificial Sequence
  Description of Artificial Sequence: Synthetic oligonucleotide
uguauguggugcugacauu

SEQ ID NO: 1725168 - RNA, 19 nt, Artificial Sequence
  Description of Artificial Sequence: Synthetic oligonucleotide
aaucugccuuguaggacgu

SEQ ID NO: 1725169 - RNA, 19 nt, Artificial Sequence
  Description of Artificial Sequence: Synthetic oligonucleotide
gguaguuacuugcucgaaa

SEQ ID NO: 1725170 - RNA, 19 nt, Artificial Sequence
  Description of Artificial Sequence: Synthetic oligonucleotide
ccagauuaugcguauuaca

SEQ ID NO: 1725171 - RNA, 19 nt, Artificial Sequence
  Description of Artificial Sequence: Synthetic oligonucleotide
gcaccgaaaccacagcaac

SEQ ID NO: 1725172 - RNA, 19 nt, Artificial Sequence
  Description of Artificial Sequence: Synthetic oligonucleotide
accaagaauauagcauuuu

SEQ ID NO: 1725173 - RNA, 19 nt, Artificial Sequence
  Description of Artificial Sequence: Synthetic oligonucleotide
aaguaguaaaugagccaua

SEQ ID NO: 1725174 - RNA, 19 nt, Artificial Sequence
  Description of Artificial Sequence: Synthetic oligonucleotide
cagcaccgaaaccacagca

SEQ ID NO: 1725175 - RNA, 19 nt, Artificial Sequence
  Description of Artificial Sequence: Synthetic oligonucleotide
aagucggcaccgagcggcg

SEQ ID NO: 1725176 - RNA, 19 nt, Artificial Sequence
  Description of Artificial Sequence: Synthetic oligonucleotide
guaugucacucaaagcucu

SEQ ID NO: 1725177 - RNA, 19 nt, Artificial Sequence
  Description of Artificial Sequence: Synthetic oligonucleotide
guaaacccuucggauacga

SEQ ID NO: 1725178 - RNA, 19 nt, Artificial Sequence
  Description of Artificial Sequence: Synthetic oligonucleotide
ugcgugugucucucacaug

SEQ ID NO: 1725179 - RNA, 19 nt, Artificial Sequence
  Description of Artificial Sequence: Synthetic oligonucleotide
ccauccaguuauuguuugg

SEQ ID NO: 1725180 - RNA, 19 nt, Artificial Sequence
  Description of Artificial Sequence: Synthetic oligonucleotide
caguuauuguuuggccuug

SEQ ID NO: 1725181 - RNA, 19 nt, Artificial Sequence
  Description of Artificial Sequence: Synthetic oligonucleotide
gcaguuguaugucacucaa

SEQ ID NO: 1725182 - RNA, 19 nt, Artificial Sequence
  Description of Artificial Sequence: Synthetic oligonucleotide
caggacaugugauguaugu

SEQ ID NO: 1725183 - RNA, 19 nt, Artificial Sequence
  Description of Artificial Sequence: Synthetic oligonucleotide
gaagccgcucuggaacgug

SEQ ID NO: 1725184 - RNA, 19 nt, Artificial Sequence
  Description of Artificial Sequence: Synthetic oligonucleotide
gacgcgaacccgcaagccu

SEQ ID NO: 1725185 - RNA, 19 nt, Artificial Sequence
  Description of Artificial Sequence: Synthetic oligonucleotide
cugccgggagcucaucuuc

SEQ ID NO: 1725186 - RNA, 19 nt, Artificial Sequence
  Description of Artificial Sequence: Synthetic oligonucleotide
aguuauuguuuggccuugu

SEQ ID NO: 1725187 - RNA, 19 nt, Artificial Sequence
  Description of Artificial Sequence: Synthetic oligonucleotide
agcaccgaaaccacagcaa

SEQ ID NO: 1725188 - RNA, 19 nt, Artificial Sequence
  Description of Artificial Sequence: Synthetic oligonucleotide
caccgagcggcgaaggaga

SEQ ID NO: 1725189 - RNA, 19 nt, Artificial Sequence
  Description of Artificial Sequence: Synthetic oligonucleotide
auagcacaguggauuauuu

SEQ ID NO: 1725190 - RNA, 19 nt, Artificial Sequence
  Description of Artificial Sequence: Synthetic oligonucleotide
acgcccgccgggugaaauc

SEQ ID NO: 1725191 - RNA, 19 nt, Artificial Sequence
  Description of Artificial Sequence: Synthetic oligonucleotide
uuugugccauacgcccgcc

SEQ ID NO: 1725192 - RNA, 19 nt, Artificial Sequence
  Description of Artificial Sequence: Synthetic oligonucleotide
ugacaaggaaaggcaguuu

SEQ ID NO: 1725193 - RNA, 19 nt, Artificial Sequence
  Description of Artificial Sequence: Synthetic oligonucleotide
caaagacacgaaguaguaa

SEQ ID NO: 1725194 - RNA, 19 nt, Artificial Sequence
  Description of Artificial Sequence: Synthetic oligonucleotide
ugguaguuacuugcucgaa

SEQ ID NO: 1725195 - RNA, 19 nt, Artificial Sequence
  Description of Artificial Sequence: Synthetic oligonucleotide
gccgaugcuguagaggaug

SEQ ID NO: 1725196 - RNA, 19 nt, Artificial Sequence
  Description of Artificial Sequence: Synthetic oligonucleotide
cuugacucggguggugcuc

SEQ ID NO: 1725197 - RNA, 19 nt, Artificial Sequence
  Description of Artificial Sequence: Synthetic oligonucleotide
uuuccagauuaugcguauu

SEQ ID NO: 1725198 - RNA, 19 nt, Artificial Sequence
  Description of Artificial Sequence: Synthetic oligonucleotide
gaaucugguuccagccauc

SEQ ID NO: 1725199 - RNA, 19 nt, Artificial Sequence
  Description of Artificial Sequence: Synthetic oligonucleotide
caugccagggcaggcagca

SEQ ID NO: 1725200 - RNA, 19 nt, Artificial Sequence
  Description of Artificial Sequence: Synthetic oligonucleotide
aggccggacuggaagucgg

SEQ ID NO: 1725201 - RNA, 19 nt, Artificial Sequence
  Description of Artificial Sequence: Synthetic oligonucleotide
aagccgcucuggaacgugu

SEQ ID NO: 1725202 - RNA, 19 nt, Artificial Sequence
  Description of Artificial Sequence: Synthetic oligonucleotide
gccacugacggcgggaagc

SEQ ID NO: 1725203 - RNA, 19 nt, Artificial Sequence
  Description of Artificial Sequence: Synthetic oligonucleotide
auguggccauuccguaccu

SEQ ID NO: 1725204 - RNA, 19 nt, Artificial Sequence
  Description of Artificial Sequence: Synthetic oligonucleotide
guggauuauuuaaauguuu

SEQ ID NO: 1725205 - RNA, 19 nt, Artificial Sequence
  Description of Artificial Sequence: Synthetic oligonucleotide
ccgcuagccugccugagag

SEQ ID NO: 1725206 - RNA, 19 nt, Artificial Sequence
  Description of Artificial Sequence: Synthetic oligonucleotide
gaaaccgccgacgaacauu

SEQ ID NO: 1725207 - RNA, 19 nt, Artificial Sequence
  Description of Artificial Sequence: Synthetic oligonucleotide
cuaggccggacuggaaguc

SEQ ID NO: 1725208 - RNA, 19 nt, Artificial Sequence
  Description of Artificial Sequence: Synthetic oligonucleotide
cgugcauuuguugugcgug

SEQ ID NO: 1725209 - RNA, 19 nt, Artificial Sequence
  Description of Artificial Sequence: Synthetic oligonucleotide
ggaagucggcaccgagcgg

SEQ ID NO: 1725210 - RNA, 19 nt, Artificial Sequence
  Description of Artificial Sequence: Synthetic oligonucleotide
agccacugacggcgggaag

SEQ ID NO: 1725211 - RNA, 19 nt, Artificial Sequence
  Description of Artificial Sequence: Synthetic oligonucleotide
ggaagcggcggcgcgacgc

SEQ ID NO: 1725212 - RNA, 19 nt, Artificial Sequence
  Description of Artificial Sequence: Synthetic oligonucleotide
gaaaccccagcaguuguau

SEQ ID NO: 1725213 - RNA, 19 nt, Artificial Sequence
  Description of Artificial Sequence: Synthetic oligonucleotide
ggguccgaaggaaggacgc

SEQ ID NO: 1725214 - RNA, 19 nt, Artificial Sequence
  Description of Artificial Sequence: Synthetic oligonucleotide
acccgcaagccugggcgcg

SEQ ID NO: 1725215 - RNA, 19 nt, Artificial Sequence
  Description of Artificial Sequence: Synthetic oligonucleotide
ggugccgccggguccgaag

SEQ ID NO: 1725216 - RNA, 19 nt, Artificial Sequence
  Description of Artificial Sequence: Synthetic oligonucleotide
gguguccaugacaaagaca

SEQ ID NO: 1725217 - RNA, 19 nt, Artificial Sequence
  Description of Artificial Sequence: Synthetic oligonucleotide
ccccuuagaugccauccag

SEQ ID NO: 1725218 - RNA, 19 nt, Artificial Sequence
  Description of Artificial Sequence: Synthetic oligonucleotide
ccuuguaggacgucuuuaa

SEQ ID NO: 1725219 - RNA, 19 nt, Artificial Sequence
  Description of Artificial Sequence: Synthetic oligonucleotide
caguuguaugucacucaaa

SEQ ID NO: 1725220 - RNA, 19 nt, Artificial Sequence
  Description of Artificial Sequence: Synthetic oligonucleotide
ggcuugacucggguggugc

SEQ ID NO: 1725221 - RNA, 19 nt, Artificial Sequence
  Description of Artificial Sequence: Synthetic oligonucleotide
gugcauuuguugugcgugu

SEQ ID NO: 1725222 - RNA, 19 nt, Artificial Sequence
  Description of Artificial Sequence: Synthetic oligonucleotide
ggucucgauguaguuugug

SEQ ID NO: 1725223 - RNA, 19 nt, Artificial Sequence
  Description of Artificial Sequence: Synthetic oligonucleotide
ggcgaaggagagagggugc

SEQ ID NO: 1725224 - RNA, 19 nt, Artificial Sequence
  Description of Artificial Sequence: Synthetic oligonucleotide
caccgaaaccacagcaacu

SEQ ID NO: 1725225 - RNA, 19 nt, Artificial Sequence
  Description of Artificial Sequence: Synthetic oligonucleotide
guugugcgugugucucuca

SEQ ID NO: 1725226 - RNA, 19 nt, Artificial Sequence
  Description of Artificial Sequence: Synthetic oligonucleotide
gcgaaggagagagggugcc

SEQ ID NO: 1725227 - RNA, 19 nt, Artificial Sequence
  Description of Artificial Sequence: Synthetic oligonucleotide
gcgacgcgaacccgcaagc

SEQ ID NO: 1725228 - RNA, 19 nt, Artificial Sequence
  Description of Artificial Sequence: Synthetic oligonucleotide
cggguccgaaggaaggacg

SEQ ID NO: 1725229 - RNA, 19 nt, Artificial Sequence
  Description of Artificial Sequence: Synthetic oligonucleotide
guggccauuccguaccuuu

SEQ ID NO: 1725230 - RNA, 19 nt, Artificial Sequence
  Description of Artificial Sequence: Synthetic oligonucleotide
aucugccuuguaggacguc

SEQ ID NO: 1725231 - RNA, 19 nt, Artificial Sequence
  Description of Artificial Sequence: Synthetic oligonucleotide
auacgacaauuugcaugga

SEQ ID NO: 1725232 - RNA, 19 nt, Artificial Sequence
  Description of Artificial Sequence: Synthetic oligonucleotide
ggacgucuuuaaauccgug

SEQ ID NO: 1725233 - RNA, 19 nt, Artificial Sequence
  Description of Artificial Sequence: Synthetic oligonucleotide
gucagccgcggccccgcag

SEQ ID NO: 1725234 - RNA, 19 nt, Artificial Sequence
  Description of Artificial Sequence: Synthetic oligonucleotide
cucgucagccgcggccccg

SEQ ID NO: 1725235 - RNA, 19 nt, Artificial Sequence
  Description of Artificial Sequence: Synthetic oligonucleotide
gaaggacgcugggcugcag

SEQ ID NO: 1725236 - RNA, 19 nt, Artificial Sequence
  Description of Artificial Sequence: Synthetic oligonucleotide
gcauggaucugcacucuca

SEQ ID NO: 1725237 - RNA, 19 nt, Artificial Sequence
  Description of Artificial Sequence: Synthetic oligonucleotide
ccgaaggaaggacgcuggg

SEQ ID NO: 1725238 - RNA, 19 nt, Artificial Sequence
  Description of Artificial Sequence: Synthetic oligonucleotide
accgagcggcgaaggagag

SEQ ID NO: 1725239 - RNA, 19 nt, Artificial Sequence
  Description of Artificial Sequence: Synthetic oligonucleotide
ccacugacggcgggaagcg

SEQ ID NO: 1725240 - RNA, 19 nt, Artificial Sequence
  Description of Artificial Sequence: Synthetic oligonucleotide
ggaacguguucuugaacau

SEQ ID NO: 1725241 - RNA, 19 nt, Artificial Sequence
  Description of Artificial Sequence: Synthetic oligonucleotide
gcguauuacacaacauaua

SEQ ID NO: 1725242 - RNA, 19 nt, Artificial Sequence
  Description of Artificial Sequence: Synthetic oligonucleotide
gccgcaugggcaugguaca

SEQ ID NO: 1725243 - RNA, 19 nt, Artificial Sequence
  Description of Artificial Sequence: Synthetic oligonucleotide
gagcggcgaaggagagagg

SEQ ID NO: 1725244 - RNA, 19 nt, Artificial Sequence
  Description of Artificial Sequence: Synthetic oligonucleotide
acccuucggauacgacaau

SEQ ID NO: 1725245 - RNA, 19 nt, Artificial Sequence
  Description of Artificial Sequence: Synthetic oligonucleotide
cacugacggcgggaagcgg

SEQ ID NO: 1725246 - RNA, 19 nt, Artificial Sequence
  Description of Artificial Sequence: Synthetic oligonucleotide
cugcaggggcuugcugccg

SEQ ID NO: 1725247 - RNA, 19 nt, Artificial Sequence
  Description of Artificial Sequence: Synthetic oligonucleotide
cauccagccgcaugggcau

SEQ ID NO: 1725248 - RNA, 19 nt, Artificial Sequence
  Description of Artificial Sequence: Synthetic oligonucleotide
uacgcccgccgggugaaau

SEQ ID NO: 1725249 - RNA, 19 nt, Artificial Sequence
  Description of Artificial Sequence: Synthetic oligonucleotide
gucggcaccgagcggcgaa

SEQ ID NO: 1725250 - RNA, 19 nt, Artificial Sequence
  Description of Artificial Sequence: Synthetic oligonucleotide
agagucugucugagaagua

SEQ ID NO: 1725251 - RNA, 19 nt, Artificial Sequence
  Description of Artificial Sequence: Synthetic oligonucleotide
gccgcccuaggccggacug

SEQ ID NO: 1725252 - RNA, 19 nt, Artificial Sequence
  Description of Artificial Sequence: Synthetic oligonucleotide
uguggccauuccguaccuu

SEQ ID NO: 1725253 - RNA, 19 nt, Artificial Sequence
  Description of Artificial Sequence: Synthetic oligonucleotide
agccgcccuaggccggacu

SEQ ID NO: 1725254 - RNA, 19 nt, Artificial Sequence
  Description of Artificial Sequence: Synthetic oligonucleotide
cgcgacgcgaacccgcaag

SEQ ID NO: 1725255 - RNA, 19 nt, Artificial Sequence
  Description of Artificial Sequence: Synthetic oligonucleotide
gcaugggcaugguacagau

SEQ ID NO: 1725256 - RNA, 19 nt, Artificial Sequence
  Description of Artificial Sequence: Synthetic oligonucleotide
ggugcucugguaguuacuu

SEQ ID NO: 1725257 - RNA, 19 nt, Artificial Sequence
  Description of Artificial Sequence: Synthetic oligonucleotide
gccgcucuggaacguguuc

SEQ ID NO: 1725258 - RNA, 19 nt, Artificial Sequence
  Description of Artificial Sequence: Synthetic oligonucleotide
cgccggguccgaaggaagg

SEQ ID NO: 1725259 - RNA, 19 nt, Artificial Sequence
  Description of Artificial Sequence: Synthetic oligonucleotide
cauacgcccgccgggugaa

SEQ ID NO: 1725260 - RNA, 19 nt, Artificial Sequence
  Description of Artificial Sequence: Synthetic oligonucleotide
gccauacgcccgccgggug

SEQ ID NO: 1725261 - RNA, 19 nt, Artificial Sequence
  Description of Artificial Sequence: Synthetic oligonucleotide
cgaacccgcaagccugggc

SEQ ID NO: 1725262 - RNA, 19 nt, Artificial Sequence
  Description of Artificial Sequence: Synthetic oligonucleotide
gccgcuagccugccugaga

SEQ ID NO: 1725263 - RNA, 19 nt, Artificial Sequence
  Description of Artificial Sequence: Synthetic oligonucleotide
cgcgccgcuagccugccug

SEQ ID NO: 1725264 - RNA, 19 nt, Artificial Sequence
  Description of Artificial Sequence: Synthetic oligonucleotide
gagccauagcacaguggau

SEQ ID NO: 1725265 - RNA, 19 nt, Artificial Sequence
  Description of Artificial Sequence: Synthetic oligonucleotide
gggugaaaucagauaaguu

SEQ ID NO: 1725266 - RNA, 19 nt, Artificial Sequence
  Description of Artificial Sequence: Synthetic oligonucleotide
ccggguccgaaggaaggac

SEQ ID NO: 1725267 - RNA, 19 nt, Artificial Sequence
  Description of Artificial Sequence: Synthetic oligonucleotide
agucggcaccgagcggcga

SEQ ID NO: 1725268 - RNA, 19 nt, Artificial Sequence
  Description of Artificial Sequence: Synthetic oligonucleotide
ccuucggauacgacaauuu

SEQ ID NO: 1725269 - RNA, 19 nt, Artificial Sequence
  Description of Artificial Sequence: Synthetic oligonucleotide
ccccgcagccgcccuaggc

SEQ ID NO: 1725270 - RNA, 19 nt, Artificial Sequence
  Description of Artificial Sequence: Synthetic oligonucleotide
ccauacgcccgccggguga

SEQ ID NO: 1725271 - RNA, 19 nt, Artificial Sequence
  Description of Artificial Sequence: Synthetic oligonucleotide
ccuaggccggacuggaagu

SEQ ID NO: 1725272 - RNA, 19 nt, Artificial Sequence
  Description of Artificial Sequence: Synthetic oligonucleotide
gggaagcggcggcgcgacg

SEQ ID NO: 1725273 - RNA, 19 nt, Artificial Sequence
  Description of Artificial Sequence: Synthetic oligonucleotide
cgcuagccugccugagagg

SEQ ID NO: 1725274 - RNA, 19 nt, Artificial Sequence
  Description of Artificial Sequence: Synthetic oligonucleotide
gcuugacucggguggugcu

SEQ ID NO: 1725275 - RNA, 19 nt, Artificial Sequence
  Description of Artificial Sequence: Synthetic oligonucleotide
gcucugguaguuacuugcu

SEQ ID NO: 1725276 - RNA, 19 nt, Artificial Sequence
  Description of Artificial Sequence: Synthetic oligonucleotide
agccgcucuggaacguguu

SEQ ID NO: 1725277 - RNA, 19 nt, Artificial Sequence
  Description of Artificial Sequence: Synthetic oligonucleotide
ccgcaugggcaugguacag

SEQ ID NO: 1725278 - RNA, 19 nt, Artificial Sequence
  Description of Artificial Sequence: Synthetic oligonucleotide
gccggguccgaaggaagga

SEQ ID NO: 1725279 - RNA, 19 nt, Artificial Sequence
  Description of Artificial Sequence: Synthetic oligonucleotide
gcgaacccgcaagccuggg

SEQ ID NO: 1725280 - RNA, 19 nt, Artificial Sequence
  Description of Artificial Sequence: Synthetic oligonucleotide
cgacgcgaacccgcaagcc

SEQ ID NO: 1725281 - RNA, 19 nt, Artificial Sequence
  Description of Artificial Sequence: Synthetic oligonucleotide
aaccgccgacgaacauuuu

SEQ ID NO: 1725282 - RNA, 19 nt, Artificial Sequence
  Description of Artificial Sequence: Synthetic oligonucleotide
cccgccgggugaaaucaga

SEQ ID NO: 1725283 - RNA, 19 nt, Artificial Sequence
  Description of Artificial Sequence: Synthetic oligonucleotide
cggcgcgacgcgaacccgc

SEQ ID NO: 1725284 - RNA, 19 nt, Artificial Sequence
  Description of Artificial Sequence: Synthetic oligonucleotide
cgggugaaaucagauaagu

SEQ ID NO: 1725285 - RNA, 19 nt, Artificial Sequence
  Description of Artificial Sequence: Synthetic oligonucleotide
ggccaccucagcaccgaaa

SEQ ID NO: 1725286 - RNA, 19 nt, Artificial Sequence
  Description of Artificial Sequence: Synthetic oligonucleotide
ggcgcgacgcgaacccgca

SEQ ID NO: 1725287 - RNA, 19 nt, Artificial Sequence
  Description of Artificial Sequence: Synthetic oligonucleotide
gguccgaaggaaggacgcu

SEQ ID NO: 1725288 - RNA, 19 nt, Artificial Sequence
  Description of Artificial Sequence: Synthetic oligonucleotide
cagccgcaugggcauggua

SEQ ID NO: 1725289 - RNA, 19 nt, Artificial Sequence
  Description of Artificial Sequence: Synthetic oligonucleotide
gcgccgcuagccugccuga

SEQ ID NO: 1725290 - RNA, 19 nt, Artificial Sequence
  Description of Artificial Sequence: Synthetic oligonucleotide
gcccgccgggugaaaucag

SEQ ID NO: 1725291 - RNA, 19 nt, Artificial Sequence
  Description of Artificial Sequence: Synthetic oligonucleotide
gccgccggguccgaaggaa

SEQ ID NO: 1725292 - RNA, 19 nt, Artificial Sequence
  Description of Artificial Sequence: Synthetic oligonucleotide
ccgcucuggaacguguucu

SEQ ID NO: 1725293 - RNA, 19 nt, Artificial Sequence
  Description of Artificial Sequence: Synthetic oligonucleotide
cccgcaagccugggcgcgc

SEQ ID NO: 1725294 - RNA, 19 nt, Artificial Sequence
  Description of Artificial Sequence: Synthetic oligonucleotide
ccgugcauuuguugugcgu

SEQ ID NO: 1725295 - RNA, 19 nt, Artificial Sequence
  Description of Artificial Sequence: Synthetic oligonucleotide
auacgcccgccgggugaaa

SEQ ID NO: 1725296 - RNA, 19 nt, Artificial Sequence
  Description of Artificial Sequence: Synthetic oligonucleotide
gcagccgcccuaggccgga

SEQ ID NO: 1725297 - RNA, 19 nt, Artificial Sequence
  Description of Artificial Sequence: Synthetic oligonucleotide
ccgccgggugaaaucagau

SEQ ID NO: 1725298 - RNA, 19 nt, Artificial Sequence
  Description of Artificial Sequence: Synthetic oligonucleotide
gggucucgauguaguuugu

SEQ ID NO: 1725299 - RNA, 19 nt, Artificial Sequence
  Description of Artificial Sequence: Synthetic oligonucleotide
cgcccgccgggugaaauca

SEQ ID NO: 1725300 - RNA, 19 nt, Artificial Sequence
  Description of Artificial Sequence: Synthetic oligonucleotide
cccuucggauacgacaauu

SEQ ID NO: 1725301 - RNA, 19 nt, Artificial Sequence
  Description of Artificial Sequence: Synthetic oligonucleotide
cggauacgacaauuugcau

SEQ ID NO: 1725302 - RNA, 19 nt, Artificial Sequence
  Description of Artificial Sequence: Synthetic oligonucleotide
ggguggugcucugguaguu

SEQ ID NO: 1725303 - RNA, 19 nt, Artificial Sequence
  Description of Artificial Sequence: Synthetic oligonucleotide
cggcggcgcgacgcgaacc

SEQ ID NO: 1725304 - RNA, 19 nt, Artificial Sequence
  Description of Artificial Sequence: Synthetic oligonucleotide
ccgagcggcgaaggagaga

SEQ ID NO: 1725305 - RNA, 19 nt, Artificial Sequence
  Description of Artificial Sequence: Synthetic oligonucleotide
cgccgcuagccugccugag

SEQ ID NO: 1725306 - RNA, 19 nt, Artificial Sequence
  Description of Artificial Sequence: Synthetic oligonucleotide
gcgcgacgcgaacccgcaa

SEQ ID NO: 1725307 - RNA, 19 nt, Artificial Sequence
  Description of Artificial Sequence: Synthetic oligonucleotide
gcccuaggccggacuggaa

SEQ ID NO: 1725308 - RNA, 19 nt, Artificial Sequence
  Description of Artificial Sequence: Synthetic oligonucleotide
cccgcggcccgccacggau

SEQ ID NO: 1725309 - RNA, 19 nt, Artificial Sequence
  Description of Artificial Sequence: Synthetic oligonucleotide
ccgcaagccugggcgcgca

SEQ ID NO: 1725310 - RNA, 19 nt, Artificial Sequence
  Description of Artificial Sequence: Synthetic oligonucleotide
cgaaaccgccgacgaacau

SEQ ID NO: 1725311 - RNA, 19 nt, Artificial Sequence
  Description of Artificial Sequence: Synthetic oligonucleotide
cggcccgccacggaucccu

SEQ ID NO: 1725312 - RNA, 19 nt, Artificial Sequence
  Description of Artificial Sequence: Synthetic oligonucleotide
ccagccgcaugggcauggu

SEQ ID NO: 1725313 - RNA, 19 nt, Artificial Sequence
  Description of Artificial Sequence: Synthetic oligonucleotide
cgucagccgcggccccgca

SEQ ID NO: 1725314 - RNA, 19 nt, Artificial Sequence
  Description of Artificial Sequence: Synthetic oligonucleotide
ccccgcggcccgccacgga

SEQ ID NO: 1725315 - RNA, 19 nt, Artificial Sequence
  Description of Artificial Sequence: Synthetic oligonucleotide
ccgcgccgcuagccugccu

SEQ ID NO: 1725316 - RNA, 19 nt, Artificial Sequence
  Description of Artificial Sequence: Synthetic oligonucleotide
auaguagacauuuucaucc

SEQ ID NO: 1725317 - RNA, 19 nt, Artificial Sequence
  Description of Artificial Sequence: Synthetic oligonucleotide
aauagaagcgcacagcagc

SEQ ID NO: 1725318 - RNA, 19 nt, Artificial Sequence
  Description of Artificial Sequence: Synthetic oligonucleotide
uuaacaacuagucaugccg

SEQ ID NO: 1725319 - RNA, 19 nt, Artificial Sequence
  Description of Artificial Sequence: Synthetic oligonucleotide
aaauuagaaauucuucugg

SEQ ID NO: 1725320 - RNA, 19 nt, Artificial Sequence
  Description of Artificial Sequence: Synthetic oligonucleotide
ucuguuaggaaacuaagcc

SEQ ID NO: 1725321 - RNA, 19 nt, Artificial Sequence
  Description of Artificial Sequence: Synthetic oligonucleotide
acugaaagaaaacuacacc

SEQ ID NO: 1725322 - RNA, 19 nt, Artificial Sequence
  Description of Artificial Sequence: Synthetic oligonucleotide
uuuuaaugaacagagacca

SEQ ID NO: 1725323 - RNA, 19 nt, Artificial Sequence
  Description of Artificial Sequence: Synthetic oligonucleotide
ucagaauucuuccagaacu

SEQ ID NO: 1725324 - RNA, 19 nt, Artificial Sequence
  Description of Artificial Sequence: Synthetic oligonucleotide
aauuggaucuuguagagau

SEQ ID NO: 1725325 - RNA, 19 nt, Artificial Sequence
  Description of Artificial Sequence: Synthetic oligonucleotide
aggaaacuaagccaugucc

SEQ ID NO: 1725326 - RNA, 19 nt, Artificial Sequence
  Description of Artificial Sequence: Synthetic oligonucleotide
aacccaucagaauucuucc

SEQ ID NO: 1725327 - RNA, 19 nt, Artificial Sequence
  Description of Artificial Sequence: Synthetic oligonucleotide
uuuguaggcccauaggugg

SEQ ID NO: 1725328 - RNA, 19 nt, Artificial Sequence
  Description of Artificial Sequence: Synthetic oligonucleotide
aaaagaagccucccacugc

SEQ ID NO: 1725329 - RNA, 19 nt, Artificial Sequence
  Description of Artificial Sequence: Synthetic oligonucleotide
uuaaugaacagagaccagg

SEQ ID NO: 1725330 - RNA, 19 nt, Artificial Sequence
  Description of Artificial Sequence: Synthetic oligonucleotide
auuuuaaugaacagagacc

SEQ ID NO: 1725331 - RNA, 19 nt, Artificial Sequence
  Description of Artificial Sequence: Synthetic oligonucleotide
gaaauuagaaauucuucug

SEQ ID NO: 1725332 - RNA, 19 nt, Artificial Sequence
  Description of Artificial Sequence: Synthetic oligonucleotide
uucagcgggaucaugaucc

SEQ ID NO: 1725333 - RNA, 19 nt, Artificial Sequence
  Description of Artificial Sequence: Synthetic oligonucleotide
cuauuugugaaaagaagcc

SEQ ID NO: 1725334 - RNA, 19 nt, Artificial Sequence
  Description of Artificial Sequence: Synthetic oligonucleotide
uaaugaacagagaccaggg

SEQ ID NO: 1725335 - RNA, 19 nt, Artificial Sequence
  Description of Artificial Sequence: Synthetic oligonucleotide
uguccuuggaauagaagcg

SEQ ID NO: 1725336 - RNA, 19 nt, Artificial Sequence
  Description of Artificial Sequence: Synthetic oligonucleotide
agagaugaugcacaaccgc

SEQ ID NO: 1725337 - RNA, 19 nt, Artificial Sequence
  Description of Artificial Sequence: Synthetic oligonucleotide
acaaagagggagcggaacc

SEQ ID NO: 1725338 - RNA, 19 nt, Artificial Sequence
  Description of Artificial Sequence: Synthetic oligonucleotide
uccuauuugugaaaagaag

SEQ ID NO: 1725339 - RNA, 19 nt, Artificial Sequence
  Description of Artificial Sequence: Synthetic oligonucleotide
agaagcaacugguuucucc

SEQ ID NO: 1725340 - RNA, 19 nt, Artificial Sequence
  Description of Artificial Sequence: Synthetic oligonucleotide
gaaauuggaucuuguagag

SEQ ID NO: 1725341 - RNA, 19 nt, Artificial Sequence
  Description of Artificial Sequence: Synthetic oligonucleotide
uguuaggaaacuaagccau

SEQ ID NO: 1725342 - RNA, 19 nt, Artificial Sequence
  Description of Artificial Sequence: Synthetic oligonucleotide
ucuugacgguacuugaugg

SEQ ID NO: 1725343 - RNA, 19 nt, Artificial Sequence
  Description of Artificial Sequence: Synthetic oligonucleotide
gaaaacuacaccagcaggc

SEQ ID NO: 1725344 - RNA, 19 nt, Artificial Sequence
  Description of Artificial Sequence: Synthetic oligonucleotide
uuuagcuuguucaugcagu

SEQ ID NO: 1725345 - RNA, 19 nt, Artificial Sequence
  Description of Artificial Sequence: Synthetic oligonucleotide
uuuuagcuuguucaugcag

SEQ ID NO: 1725346 - RNA, 19 nt, Artificial Sequence
  Description of Artificial Sequence: Synthetic oligonucleotide
gagacgagaagccuugggg

SEQ ID NO: 1725347 - RNA, 19 nt, Artificial Sequence
  Description of Artificial Sequence: Synthetic oligonucleotide
caugugucgaaccaagggg

SEQ ID NO: 1725348 - RNA, 19 nt, Artificial Sequence
  Description of Artificial Sequence: Synthetic oligonucleotide
uuccagguuacuccaaggg

SEQ ID NO: 1725349 - RNA, 19 nt, Artificial Sequence
  Description of Artificial Sequence: Synthetic oligonucleotide
guauagacagaacuguaag

SEQ ID NO: 1725350 - RNA, 19 nt, Artificial Sequence
  Description of Artificial Sequence: Synthetic oligonucleotide
gaaaagaagccucccacug

SEQ ID NO: 1725351 - RNA, 19 nt, Artificial Sequence
  Description of Artificial Sequence: Synthetic oligonucleotide
acauucaggcuucacauug

SEQ ID NO: 1725352 - RNA, 19 nt, Artificial Sequence
  Description of Artificial Sequence: Synthetic oligonucleotide
uacuccaagggagaaaggg

SEQ ID NO: 1725353 - RNA, 19 nt, Artificial Sequence
  Description of Artificial Sequence: Synthetic oligonucleotide
ucaaucaugguuccuggcu

SEQ ID NO: 1725354 - RNA, 19 nt, Artificial Sequence
  Description of Artificial Sequence: Synthetic oligonucleotide
cagacuugcauuuuaauga

SEQ ID NO: 1725355 - RNA, 19 nt, Artificial Sequence
  Description of Artificial Sequence: Synthetic oligonucleotide
ccuauuugugaaaagaagc

SEQ ID NO: 1725356 - RNA, 19 nt, Artificial Sequence
  Description of Artificial Sequence: Synthetic oligonucleotide
uuuccccacucaaucaugg

SEQ ID NO: 1725357 - RNA, 19 nt, Artificial Sequence
  Description of Artificial Sequence: Synthetic oligonucleotide
gagaugaugcacaaccgcg

SEQ ID NO: 1725358 - RNA, 19 nt, Artificial Sequence
  Description of Artificial Sequence: Synthetic oligonucleotide
ucuugcuucguuccuuccg

SEQ ID NO: 1725359 - RNA, 19 nt, Artificial Sequence
  Description of Artificial Sequence: Synthetic oligonucleotide
aaugcuuaaaauguugcua

SEQ ID NO: 1725360 - RNA, 19 nt, Artificial Sequence
  Description of Artificial Sequence: Synthetic oligonucleotide
aucagaauucuuccagaac

SEQ ID NO: 1725361 - RNA, 19 nt, Artificial Sequence
  Description of Artificial Sequence: Synthetic oligonucleotide
ugugaacaaagagggagcg

SEQ ID NO: 1725362 - RNA, 19 nt, Artificial Sequence
  Description of Artificial Sequence: Synthetic oligonucleotide
ugugaaaagaagccuccca

SEQ ID NO: 1725363 - RNA, 19 nt, Artificial Sequence
  Description of Artificial Sequence: Synthetic oligonucleotide
uauagacagaacuguaagu

SEQ ID NO: 1725364 - RNA, 19 nt, Artificial Sequence
  Description of Artificial Sequence: Synthetic oligonucleotide
uuccaguugcccacaagcg

SEQ ID NO: 1725365 - RNA, 19 nt, Artificial Sequence
  Description of Artificial Sequence: Synthetic oligonucleotide
ugagaaccgccauaggugc

SEQ ID NO: 1725366 - RNA, 19 nt, Artificial Sequence
  Description of Artificial Sequence: Synthetic oligonucleotide
aacaacuagucaugccguc

SEQ ID NO: 1725367 - RNA, 19 nt, Artificial Sequence
  Description of Artificial Sequence: Synthetic oligonucleotide
ucuccuauuugugaaaaga

SEQ ID NO: 1725368 - RNA, 19 nt, Artificial Sequence
  Description of Artificial Sequence: Synthetic oligonucleotide
uaucucuucacaccccacc

SEQ ID NO: 1725369 - RNA, 19 nt, Artificial Sequence
  Description of Artificial Sequence: Synthetic oligonucleotide
agcacaacccaucagaauu

SEQ ID NO: 1725370 - RNA, 19 nt, Artificial Sequence
  Description of Artificial Sequence: Synthetic oligonucleotide
uuuaaugaacagagaccag

SEQ ID NO: 1725371 - RNA, 19 nt, Artificial Sequence
  Description of Artificial Sequence: Synthetic oligonucleotide
aaacaucaucuuuuccaag

SEQ ID NO: 1725372 - RNA, 19 nt, Artificial Sequence
  Description of Artificial Sequence: Synthetic oligonucleotide
gaucuuuguaggcccauag

SEQ ID NO: 1725373 - RNA, 19 nt, Artificial Sequence
  Description of Artificial Sequence: Synthetic oligonucleotide
uagaaauucuucuggccug

SEQ ID NO: 1725374 - RNA, 19 nt, Artificial Sequence
  Description of Artificial Sequence: Synthetic oligonucleotide
uuagggaaauuagaaauuc

SEQ ID NO: 1725375 - RNA, 19 nt, Artificial Sequence
  Description of Artificial Sequence: Synthetic oligonucleotide
aaugaacagagaccaggga

SEQ ID NO: 1725376 - RNA, 19 nt, Artificial Sequence
  Description of Artificial Sequence: Synthetic oligonucleotide
aacugguuucuccuggaca

SEQ ID NO: 1725377 - RNA, 19 nt, Artificial Sequence
  Description of Artificial Sequence: Synthetic oligonucleotide
cugagaaccgccauaggug

SEQ ID NO: 1725378 - RNA, 19 nt, Artificial Sequence
  Description of Artificial Sequence: Synthetic oligonucleotide
ugauccgugacuccaugug

SEQ ID NO: 1725379 - RNA, 19 nt, Artificial Sequence
  Description of Artificial Sequence: Synthetic oligonucleotide
aagccuuggggaaaugugg

SEQ ID NO: 1725380 - RNA, 19 nt, Artificial Sequence
  Description of Artificial Sequence: Synthetic oligonucleotide
uguuccagguuacuccaag

SEQ ID NO: 1725381 - RNA, 19 nt, Artificial Sequence
  Description of Artificial Sequence: Synthetic oligonucleotide
uguagagauugcuagucuc

SEQ ID NO: 1725382 - RNA, 19 nt, Artificial Sequence
  Description of Artificial Sequence: Synthetic oligonucleotide
uuuuaaggcucagacuugc

SEQ ID NO: 1725383 - RNA, 19 nt, Artificial Sequence
  Description of Artificial Sequence: Synthetic oligonucleotide
cuguauaguagacauuuuc

SEQ ID NO: 1725384 - RNA, 19 nt, Artificial Sequence
  Description of Artificial Sequence: Synthetic oligonucleotide
uaacaacuagucaugccgu

SEQ ID NO: 1725385 - RNA, 19 nt, Artificial Sequence
  Description of Artificial Sequence: Synthetic oligonucleotide
caacccaucagaauucuuc

SEQ ID NO: 1725386 - RNA, 19 nt, Artificial Sequence
  Description of Artificial Sequence: Synthetic oligonucleotide
cuugcuucguuccuuccgg

SEQ ID NO: 1725387 - RNA, 19 nt, Artificial Sequence
  Description of Artificial Sequence: Synthetic oligonucleotide
aucuuuguaggcccauagg

SEQ ID NO: 1725388 - RNA, 19 nt, Artificial Sequence
  Description of Artificial Sequence: Synthetic oligonucleotide
aaaguguuagcuggggacu

SEQ ID NO: 1725389 - RNA, 19 nt, Artificial Sequence
  Description of Artificial Sequence: Synthetic oligonucleotide
uccagguuacuccaaggga

SEQ ID NO: 1725390 - RNA, 19 nt, Artificial Sequence
  Description of Artificial Sequence: Synthetic oligonucleotide
auagaagcgcacagcagcc

SEQ ID NO: 1725391 - RNA, 19 nt, Artificial Sequence
  Description of Artificial Sequence: Synthetic oligonucleotide
gagauugcuagucuccuuc

SEQ ID NO: 1725392 - RNA, 19 nt, Artificial Sequence
  Description of Artificial Sequence: Synthetic oligonucleotide
uccagaagcaacugguuuc

SEQ ID NO: 1725393 - RNA, 19 nt, Artificial Sequence
  Description of Artificial Sequence: Synthetic oligonucleotide
gagguagaggcaaugccgg

SEQ ID NO: 1725394 - RNA, 19 nt, Artificial Sequence
  Description of Artificial Sequence: Synthetic oligonucleotide
ucuuaacaacuagucaugc

SEQ ID NO: 1725395 - RNA, 19 nt, Artificial Sequence
  Description of Artificial Sequence: Synthetic oligonucleotide
aauucuuccagaacugaaa

SEQ ID NO: 1725396 - RNA, 19 nt, Artificial Sequence
  Description of Artificial Sequence: Synthetic oligonucleotide
ucuuggacagcagagugga

SEQ ID NO: 1725397 - RNA, 19 nt, Artificial Sequence
  Description of Artificial Sequence: Synthetic oligonucleotide
uuaaggcucagacuugcau

SEQ ID NO: 1725398 - RNA, 19 nt, Artificial Sequence
  Description of Artificial Sequence: Synthetic oligonucleotide
uccgucagacuguuguagg

SEQ ID NO: 1725399 - RNA, 19 nt, Artificial Sequence
  Description of Artificial Sequence: Synthetic oligonucleotide
uccuccaggccgcauuucg

SEQ ID NO: 1725400 - RNA, 19 nt, Artificial Sequence
  Description of Artificial Sequence: Synthetic oligonucleotide
uuaggaaacuaagccaugu

SEQ ID NO: 1725401 - RNA, 19 nt, Artificial Sequence
  Description of Artificial Sequence: Synthetic oligonucleotide
ugaugcacaaccgcggagc

SEQ ID NO: 1725402 - RNA, 19 nt, Artificial Sequence
  Description of Artificial Sequence: Synthetic oligonucleotide
agacgagaagccuugggga

SEQ ID NO: 1725403 - RNA, 19 nt, Artificial Sequence
  Description of Artificial Sequence: Synthetic oligonucleotide
cuuccgaggauccaccuug

SEQ ID NO: 1725404 - RNA, 19 nt, Artificial Sequence
  Description of Artificial Sequence: Synthetic oligonucleotide
gacuguuguaggcauccag

SEQ ID NO: 1725405 - RNA, 19 nt, Artificial Sequence
  Description of Artificial Sequence: Synthetic oligonucleotide
ugugaaauuggaucuugua

SEQ ID NO: 1725406 - RNA, 19 nt, Artificial Sequence
  Description of Artificial Sequence: Synthetic oligonucleotide
cagagaugaugcacaaccg

SEQ ID NO: 1725407 - RNA, 19 nt, Artificial Sequence
  Description of Artificial Sequence: Synthetic oligonucleotide
ggaaauuagaaauucuucu

SEQ ID NO: 1725408 - RNA, 19 nt, Artificial Sequence
  Description of Artificial Sequence: Synthetic oligonucleotide
guacuugauggcccgagcc

SEQ ID NO: 1725409 - RNA, 19 nt, Artificial Sequence
  Description of Artificial Sequence: Synthetic oligonucleotide
uuguagagauugcuagucu

SEQ ID NO: 1725410 - RNA, 19 nt, Artificial Sequence
  Description of Artificial Sequence: Synthetic oligonucleotide
uugacgguacuugauggcc

SEQ ID NO: 1725411 - RNA, 19 nt, Artificial Sequence
  Description of Artificial Sequence: Synthetic oligonucleotide
uggauagccaccugagaac

SEQ ID NO: 1725412 - RNA, 19 nt, Artificial Sequence
  Description of Artificial Sequence: Synthetic oligonucleotide
gacgguacuugauggcccg

SEQ ID NO: 1725413 - RNA, 19 nt, Artificial Sequence
  Description of Artificial Sequence: Synthetic oligonucleotide
ucacauugugaaauuggau

SEQ ID NO: 1725414 - RNA, 19 nt, Artificial Sequence
  Description of Artificial Sequence: Synthetic oligonucleotide
uguuuccccacucaaucau

SEQ ID NO: 1725415 - RNA, 19 nt, Artificial Sequence
  Description of Artificial Sequence: Synthetic oligonucleotide
guuguaggcauccagacau

SEQ ID NO: 1725416 - RNA, 19 nt, Artificial Sequence
  Description of Artificial Sequence: Synthetic oligonucleotide
cuguuaggaaacuaagcca

SEQ ID NO: 1725417 - RNA, 19 nt, Artificial Sequence
  Description of Artificial Sequence: Synthetic oligonucleotide
cuugacgguacuugauggc

SEQ ID NO: 1725418 - RNA, 19 nt, Artificial Sequence
  Description of Artificial Sequence: Synthetic oligonucleotide
uuucgagucuccucccgag

SEQ ID NO: 1725419 - RNA, 19 nt, Artificial Sequence
  Description of Artificial Sequence: Synthetic oligonucleotide
ugacgguacuugauggccc

SEQ ID NO: 1725420 - RNA, 19 nt, Artificial Sequence
  Description of Artificial Sequence: Synthetic oligonucleotide
ugucgaaccaaggggacug

SEQ ID NO: 1725421 - RNA, 19 nt, Artificial Sequence
  Description of Artificial Sequence: Synthetic oligonucleotide
caccucuuaacaacuaguc

SEQ ID NO: 1725422 - RNA, 19 nt, Artificial Sequence
  Description of Artificial Sequence: Synthetic oligonucleotide
uaaggcucagacuugcauu

SEQ ID NO: 1725423 - RNA, 19 nt, Artificial Sequence
  Description of Artificial Sequence: Synthetic oligonucleotide
uccuuggaauagaagcgca

SEQ ID NO: 1725424 - RNA, 19 nt, Artificial Sequence
  Description of Artificial Sequence: Synthetic oligonucleotide
guagagauugcuagucucc

SEQ ID NO: 1725425 - RNA, 19 nt, Artificial Sequence
  Description of Artificial Sequence: Synthetic oligonucleotide
uccgugacuccaugugucg

SEQ ID NO: 1725426 - RNA, 19 nt, Artificial Sequence
  Description of Artificial Sequence: Synthetic oligonucleotide
agaugaugcacaaccgcgg

SEQ ID NO: 1725427 - RNA, 19 nt, Artificial Sequence
  Description of Artificial Sequence: Synthetic oligonucleotide
aacuacaccagcaggccca

SEQ ID NO: 1725428 - RNA, 19 nt, Artificial Sequence
  Description of Artificial Sequence: Synthetic oligonucleotide
gaauagaagcgcacagcag

SEQ ID NO: 1725429 - RNA, 19 nt, Artificial Sequence
  Description of Artificial Sequence: Synthetic oligonucleotide
cuuguauguccucagcuca

SEQ ID NO: 1725430 - RNA, 19 nt, Artificial Sequence
  Description of Artificial Sequence: Synthetic oligonucleotide
agaacuguaagugcuuaga

SEQ ID NO: 1725431 - RNA, 19 nt, Artificial Sequence
  Description of Artificial Sequence: Synthetic oligonucleotide
uugggcaacacagccuccg

SEQ ID NO: 1725432 - RNA, 19 nt, Artificial Sequence
  Description of Artificial Sequence: Synthetic oligonucleotide
aaauuggaucuuguagaga

SEQ ID NO: 1725433 - RNA, 19 nt, Artificial Sequence
  Description of Artificial Sequence: Synthetic oligonucleotide
cucuugacgguacuugaug

SEQ ID NO: 1725434 - RNA, 19 nt, Artificial Sequence
  Description of Artificial Sequence: Synthetic oligonucleotide
aguagacauuuucauccca

SEQ ID NO: 1725435 - RNA, 19 nt, Artificial Sequence
  Description of Artificial Sequence: Synthetic oligonucleotide
uuuucaucccagccccucu

SEQ ID NO: 1725436 - RNA, 19 nt, Artificial Sequence
  Description of Artificial Sequence: Synthetic oligonucleotide
ucgagucuccucccgagac

SEQ ID NO: 1725437 - RNA, 19 nt, Artificial Sequence
  Description of Artificial Sequence: Synthetic oligonucleotide
uuuaaggcucagacuugca

SEQ ID NO: 1725438 - RNA, 19 nt, Artificial Sequence
  Description of Artificial Sequence: Synthetic oligonucleotide
ggaaugcuuaaaauguugc

SEQ ID NO: 1725439 - RNA, 19 nt, Artificial Sequence
  Description of Artificial Sequence: Synthetic oligonucleotide
gaugcacaaccgcggagcc

SEQ ID NO: 1725440 - RNA, 19 nt, Artificial Sequence
  Description of Artificial Sequence: Synthetic oligonucleotide
ugugucgaaccaaggggac

SEQ ID NO: 1725441 - RNA, 19 nt, Artificial Sequence
  Description of Artificial Sequence: Synthetic oligonucleotide
agacagaacuguaagugcu

SEQ ID NO: 1725442 - RNA, 19 nt, Artificial Sequence
  Description of Artificial Sequence: Synthetic oligonucleotide
gaugaugcacaaccgcgga

SEQ ID NO: 1725443 - RNA, 19 nt, Artificial Sequence
  Description of Artificial Sequence: Synthetic oligonucleotide
agguagaggcaaugccggc

SEQ ID NO: 1725444 - RNA, 19 nt, Artificial Sequence
  Description of Artificial Sequence: Synthetic oligonucleotide
agaaccgccauaggugcac

SEQ ID NO: 1725445 - RNA, 19 nt, Artificial Sequence
  Description of Artificial Sequence: Synthetic oligonucleotide
uguuccaguugcccacaag

SEQ ID NO: 1725446 - RNA, 19 nt, Artificial Sequence
  Description of Artificial Sequence: Synthetic oligonucleotide
guauguccucagcucauag

SEQ ID NO: 1725447 - RNA, 19 nt, Artificial Sequence
  Description of Artificial Sequence: Synthetic oligonucleotide
aagcugagcacaacccauc

SEQ ID NO: 1725448 - RNA, 19 nt, Artificial Sequence
  Description of Artificial Sequence: Synthetic oligonucleotide
aucaugauccgugacucca

SEQ ID NO: 1725449 - RNA, 19 nt, Artificial Sequence
  Description of Artificial Sequence: Synthetic oligonucleotide
cuggauagccaccugagaa

SEQ ID NO: 1725450 - RNA, 19 nt, Artificial Sequence
  Description of Artificial Sequence: Synthetic oligonucleotide
aaaugugggaaugcuuaaa

SEQ ID NO: 1725451 - RNA, 19 nt, Artificial Sequence
  Description of Artificial Sequence: Synthetic oligonucleotide
caugccgucuguuaggaaa

SEQ ID NO: 1725452 - RNA, 19 nt, Artificial Sequence
  Description of Artificial Sequence: Synthetic oligonucleotide
aacuagucaugccgucugu

SEQ ID NO: 1725453 - RNA, 19 nt, Artificial Sequence
  Description of Artificial Sequence: Synthetic oligonucleotide
cauuucgagucuccucccg

SEQ ID NO: 1725454 - RNA, 19 nt, Artificial Sequence
  Description of Artificial Sequence: Synthetic oligonucleotide
gacuguauaguagacauuu

SEQ ID NO: 1725455 - RNA, 19 nt, Artificial Sequence
  Description of Artificial Sequence: Synthetic oligonucleotide
aaacuaagccauguccaaa

SEQ ID NO: 1725456 - RNA, 19 nt, Artificial Sequence
  Description of Artificial Sequence: Synthetic oligonucleotide
uugugaaaagaagccuccc

SEQ ID NO: 1725457 - RNA, 19 nt, Artificial Sequence
  Description of Artificial Sequence: Synthetic oligonucleotide
auaggugcacugccugguc

SEQ ID NO: 1725458 - RNA, 19 nt, Artificial Sequence
  Description of Artificial Sequence: Synthetic oligonucleotide
ucagcgggaucaugauccg

SEQ ID NO: 1725459 - RNA, 19 nt, Artificial Sequence
  Description of Artificial Sequence: Synthetic oligonucleotide
auuagggaaauuagaaauu

SEQ ID NO: 1725460 - RNA, 19 nt, Artificial Sequence
  Description of Artificial Sequence: Synthetic oligonucleotide
ugggaaugcuuaaaauguu

SEQ ID NO: 1725461 - RNA, 19 nt, Artificial Sequence
  Description of Artificial Sequence: Synthetic oligonucleotide
agggaaauuagaaauucuu

SEQ ID NO: 1725462 - RNA, 19 nt, Artificial Sequence
  Description of Artificial Sequence: Synthetic oligonucleotide
cuccuauuugugaaaagaa

SEQ ID NO: 1725463 - RNA, 19 nt, Artificial Sequence
  Description of Artificial Sequence: Synthetic oligonucleotide
uggagugggcguccuuccg

SEQ ID NO: 1725464 - RNA, 19 nt, Artificial Sequence
  Description of Artificial Sequence: Synthetic oligonucleotide
cagaacuguaagugcuuag

SEQ ID NO: 1725465 - RNA, 19 nt, Artificial Sequence
  Description of Artificial Sequence: Synthetic oligonucleotide
augaugcacaaccgcggag

SEQ ID NO: 1725466 - RNA, 19 nt, Artificial Sequence
  Description of Artificial Sequence: Synthetic oligonucleotide
ugacuccaugugucgaacc

SEQ ID NO: 1725467 - RNA, 19 nt, Artificial Sequence
  Description of Artificial Sequence: Synthetic oligonucleotide
uagagauugcuagucuccu

SEQ ID NO: 1725468 - RNA, 19 nt, Artificial Sequence
  Description of Artificial Sequence: Synthetic oligonucleotide
agauugcuagucuccuucu

SEQ ID NO: 1725469 - RNA, 19 nt, Artificial Sequence
  Description of Artificial Sequence: Synthetic oligonucleotide
ggugguguaccacguagag

SEQ ID NO: 1725470 - RNA, 19 nt, Artificial Sequence
  Description of Artificial Sequence: Synthetic oligonucleotide
caccccaccucuuaacaac

SEQ ID NO: 1725471 - RNA, 19 nt, Artificial Sequence
  Description of Artificial Sequence: Synthetic oligonucleotide
ugcacaaccgcggagccau

SEQ ID NO: 1725472 - RNA, 19 nt, Artificial Sequence
  Description of Artificial Sequence: Synthetic oligonucleotide
uucccggaggccauaccug

SEQ ID NO: 1725473 - RNA, 19 nt, Artificial Sequence
  Description of Artificial Sequence: Synthetic oligonucleotide
ggaaacuaagccaugucca

SEQ ID NO: 1725474 - RNA, 19 nt, Artificial Sequence
  Description of Artificial Sequence: Synthetic oligonucleotide
aacagagaccagggaguuc

SEQ ID NO: 1725475 - RNA, 19 nt, Artificial Sequence
  Description of Artificial Sequence: Synthetic oligonucleotide
gugggaaugcuuaaaaugu

SEQ ID NO: 1725476 - RNA, 19 nt, Artificial Sequence
  Description of Artificial Sequence: Synthetic oligonucleotide
auagauguuggggccagcu

SEQ ID NO: 1725477 - RNA, 19 nt, Artificial Sequence
  Description of Artificial Sequence: Synthetic oligonucleotide
uggggacuuggccuggaga

SEQ ID NO: 1725478 - RNA, 19 nt, Artificial Sequence
  Description of Artificial Sequence: Synthetic oligonucleotide
uguuagcuggggacuuggc

SEQ ID NO: 1725479 - RNA, 19 nt, Artificial Sequence
  Description of Artificial Sequence: Synthetic oligonucleotide
gauagccaccugagaaccg

SEQ ID NO: 1725480 - RNA, 19 nt, Artificial Sequence
  Description of Artificial Sequence: Synthetic oligonucleotide
augugucgaaccaagggga

SEQ ID NO: 1725481 - RNA, 19 nt, Artificial Sequence
  Description of Artificial Sequence: Synthetic oligonucleotide
ugccgaugcagagaugaug

SEQ ID NO: 1725482 - RNA, 19 nt, Artificial Sequence
  Description of Artificial Sequence: Synthetic oligonucleotide
guccuuggaauagaagcgc

SEQ ID NO: 1725483 - RNA, 19 nt, Artificial Sequence
  Description of Artificial Sequence: Synthetic oligonucleotide
uaccacguagagcucuccu

SEQ ID NO: 1725484 - RNA, 19 nt, Artificial Sequence
  Description of Artificial Sequence: Synthetic oligonucleotide
cuucuggccugggagagag

SEQ ID NO: 1725485 - RNA, 19 nt, Artificial Sequence
  Description of Artificial Sequence: Synthetic oligonucleotide
augccgucuguuaggaaac

SEQ ID NO: 1725486 - RNA, 19 nt, Artificial Sequence
  Description of Artificial Sequence: Synthetic oligonucleotide
gggaaauuagaaauucuuc

SEQ ID NO: 1725487 - RNA, 19 nt, Artificial Sequence
  Description of Artificial Sequence: Synthetic oligonucleotide
cuccaggccgcauuucgag

SEQ ID NO: 1725488 - RNA, 19 nt, Artificial Sequence
  Description of Artificial Sequence: Synthetic oligonucleotide
uguaggcauccagacauuc

SEQ ID NO: 1725489 - RNA, 19 nt, Artificial Sequence
  Description of Artificial Sequence: Synthetic oligonucleotide
auccgugacuccauguguc

SEQ ID NO: 1725490 - RNA, 19 nt, Artificial Sequence
  Description of Artificial Sequence: Synthetic oligonucleotide
gaauucuuccagaacugaa

SEQ ID NO: 1725491 - RNA, 19 nt, Artificial Sequence
  Description of Artificial Sequence: Synthetic oligonucleotide
caccugagaaccgccauag

SEQ ID NO: 1725492 - RNA, 19 nt, Artificial Sequence
  Description of Artificial Sequence: Synthetic oligonucleotide
cuccaagggagaaagggaa

SEQ ID NO: 1725493 - RNA, 19 nt, Artificial Sequence
  Description of Artificial Sequence: Synthetic oligonucleotide
ggcuugagcuuguaugucc

SEQ ID NO: 1725494 - RNA, 19 nt, Artificial Sequence
  Description of Artificial Sequence: Synthetic oligonucleotide
gacgagaagccuuggggaa

SEQ ID NO: 1725495 - RNA, 19 nt, Artificial Sequence
  Description of Artificial Sequence: Synthetic oligonucleotide
agcugagcacaacccauca

SEQ ID NO: 1725496 - RNA, 19 nt, Artificial Sequence
  Description of Artificial Sequence: Synthetic oligonucleotide
agugcuuagaaaacaucau

SEQ ID NO: 1725497 - RNA, 19 nt, Artificial Sequence
  Description of Artificial Sequence: Synthetic oligonucleotide
aaugccggccucacuggag

SEQ ID NO: 1725498 - RNA, 19 nt, Artificial Sequence
  Description of Artificial Sequence: Synthetic oligonucleotide
uguaccacguagagcucuc

SEQ ID NO: 1725499 - RNA, 19 nt, Artificial Sequence
  Description of Artificial Sequence: Synthetic oligonucleotide
uucgagucuccucccgaga

SEQ ID NO: 1725500 - RNA, 19 nt, Artificial Sequence
  Description of Artificial Sequence: Synthetic oligonucleotide
uagauguuggggccagcuc

SEQ ID NO: 1725501 - RNA, 19 nt, Artificial Sequence
  Description of Artificial Sequence: Synthetic oligonucleotide
acaacuagucaugccgucu

SEQ ID NO: 1725502 - RNA, 19 nt, Artificial Sequence
  Description of Artificial Sequence: Synthetic oligonucleotide
gccgaugcagagaugaugc

SEQ ID NO: 1725503 - RNA, 19 nt, Artificial Sequence
  Description of Artificial Sequence: Synthetic oligonucleotide
caucagaauucuuccagaa

SEQ ID NO: 1725504 - RNA, 19 nt, Artificial Sequence
  Description of Artificial Sequence: Synthetic oligonucleotide
gcuauucuucauuagggaa

SEQ ID NO: 1725505 - RNA, 19 nt, Artificial Sequence
  Description of Artificial Sequence: Synthetic oligonucleotide
agguacuccuuguugguuu

SEQ ID NO: 1725506 - RNA, 19 nt, Artificial Sequence
  Description of Artificial Sequence: Synthetic oligonucleotide
ucuuccuccaggccgcauu

SEQ ID NO: 1725507 - RNA, 19 nt, Artificial Sequence
  Description of Artificial Sequence: Synthetic oligonucleotide
ggggacuuggccuggagac

SEQ ID NO: 1725508 - RNA, 19 nt, Artificial Sequence
  Description of Artificial Sequence: Synthetic oligonucleotide
agcgggaucaugauccgug

SEQ ID NO: 1725509 - RNA, 19 nt, Artificial Sequence
  Description of Artificial Sequence: Synthetic oligonucleotide
augauccgugacuccaugu

SEQ ID NO: 1725510 - RNA, 19 nt, Artificial Sequence
  Description of Artificial Sequence: Synthetic oligonucleotide
caucuugcuucguuccuuc

SEQ ID NO: 1725511 - RNA, 19 nt, Artificial Sequence
  Description of Artificial Sequence: Synthetic oligonucleotide
ucaugauccgugacuccau

SEQ ID NO: 1725512 - RNA, 19 nt, Artificial Sequence
  Description of Artificial Sequence: Synthetic oligonucleotide
ggauagccaccugagaacc

SEQ ID NO: 1725513 - RNA, 19 nt, Artificial Sequence
  Description of Artificial Sequence: Synthetic oligonucleotide
uccccguaccauguguucc

SEQ ID NO: 1725514 - RNA, 19 nt, Artificial Sequence
  Description of Artificial Sequence: Synthetic oligonucleotide
ggaaaugugggaaugcuua

SEQ ID NO: 1725515 - RNA, 19 nt, Artificial Sequence
  Description of Artificial Sequence: Synthetic oligonucleotide
guuaggaaacuaagccaug

SEQ ID NO: 1725516 - RNA, 19 nt, Artificial Sequence
  Description of Artificial Sequence: Synthetic oligonucleotide
agcaucuugcuucguuccu

SEQ ID NO: 1725517 - RNA, 19 nt, Artificial Sequence
  Description of Artificial Sequence: Synthetic oligonucleotide
aaucuucagcgggaucaug

SEQ ID NO: 1725518 - RNA, 19 nt, Artificial Sequence
  Description of Artificial Sequence: Synthetic oligonucleotide
acguagagcucuccuauuu

SEQ ID NO: 1725519 - RNA, 19 nt, Artificial Sequence
  Description of Artificial Sequence: Synthetic oligonucleotide
agaccagggaguucccgga

SEQ ID NO: 1725520 - RNA, 19 nt, Artificial Sequence
  Description of Artificial Sequence: Synthetic oligonucleotide
cugguucucuugacgguac

SEQ ID NO: 1725521 - RNA, 19 nt, Artificial Sequence
  Description of Artificial Sequence: Synthetic oligonucleotide
guguuagcuggggacuugg

SEQ ID NO: 1725522 - RNA, 19 nt, Artificial Sequence
  Description of Artificial Sequence: Synthetic oligonucleotide
ugcuccccguaccaugugu

SEQ ID NO: 1725523 - RNA, 19 nt, Artificial Sequence
  Description of Artificial Sequence: Synthetic oligonucleotide
caugauccgugacuccaug

SEQ ID NO: 1725524 - RNA, 19 nt, Artificial Sequence
  Description of Artificial Sequence: Synthetic oligonucleotide
auccagacauucaggcuuc

SEQ ID NO: 1725525 - RNA, 19 nt, Artificial Sequence
  Description of Artificial Sequence: Synthetic oligonucleotide
aguccaugagggcuggaua

SEQ ID NO: 1725526 - RNA, 19 nt, Artificial Sequence
  Description of Artificial Sequence: Synthetic oligonucleotide
uccugguucucuugacggu

SEQ ID NO: 1725527 - RNA, 19 nt, Artificial Sequence
  Description of Artificial Sequence: Synthetic oligonucleotide
cugaacuccagaagcaacu

SEQ ID NO: 1725528 - RNA, 19 nt, Artificial Sequence
  Description of Artificial Sequence: Synthetic oligonucleotide
uagccaccugagaaccgcc

SEQ ID NO: 1725529 - RNA, 19 nt, Artificial Sequence
  Description of Artificial Sequence: Synthetic oligonucleotide
aggugcacugccugguccu

SEQ ID NO: 1725530 - RNA, 19 nt, Artificial Sequence
  Description of Artificial Sequence: Synthetic oligonucleotide
agcgagcagggguaguccu

SEQ ID NO: 1725531 - RNA, 19 nt, Artificial Sequence
  Description of Artificial Sequence: Synthetic oligonucleotide
gcuagucuccuucuuggac

SEQ ID NO: 1725532 - RNA, 19 nt, Artificial Sequence
  Description of Artificial Sequence: Synthetic oligonucleotide
accacguagagcucuccua

SEQ ID NO: 1725533 - RNA, 19 nt, Artificial Sequence
  Description of Artificial Sequence: Synthetic oligonucleotide
ucaugguuccuggcuugag

SEQ ID NO: 1725534 - RNA, 19 nt, Artificial Sequence
  Description of Artificial Sequence: Synthetic oligonucleotide
cagcgagguccccagcgcg

SEQ ID NO: 1725535 - RNA, 19 nt, Artificial Sequence
  Description of Artificial Sequence: Synthetic oligonucleotide
cagguuacuccaagggaga

SEQ ID NO: 1725536 - RNA, 19 nt, Artificial Sequence
  Description of Artificial Sequence: Synthetic oligonucleotide
caacugguuucuccuggac

SEQ ID NO: 1725537 - RNA, 19 nt, Artificial Sequence
  Description of Artificial Sequence: Synthetic oligonucleotide
uccgaggauccaccuugug

SEQ ID NO: 1725538 - RNA, 19 nt, Artificial Sequence
  Description of Artificial Sequence: Synthetic oligonucleotide
uccaggccgcauuucgagu

SEQ ID NO: 1725539 - RNA, 19 nt, Artificial Sequence
  Description of Artificial Sequence: Synthetic oligonucleotide
agggguaguccucguccag

SEQ ID NO: 1725540 - RNA, 19 nt, Artificial Sequence
  Description of Artificial Sequence: Synthetic oligonucleotide
aaguguuagcuggggacuu

SEQ ID NO: 1725541 - RNA, 19 nt, Artificial Sequence
  Description of Artificial Sequence: Synthetic oligonucleotide
aguuguuuccccacucaau

SEQ ID NO: 1725542 - RNA, 19 nt, Artificial Sequence
  Description of Artificial Sequence: Synthetic oligonucleotide
guuuccccacucaaucaug

SEQ ID NO: 1725543 - RNA, 19 nt, Artificial Sequence
  Description of Artificial Sequence: Synthetic oligonucleotide
aagccauguccaaaguguu

SEQ ID NO: 1725544 - RNA, 19 nt, Artificial Sequence
  Description of Artificial Sequence: Synthetic oligonucleotide
caaagagggagcggaacca

SEQ ID NO: 1725545 - RNA, 19 nt, Artificial Sequence
  Description of Artificial Sequence: Synthetic oligonucleotide
agagauugcuagucuccuu

SEQ ID NO: 1725546 - RNA, 19 nt, Artificial Sequence
  Description of Artificial Sequence: Synthetic oligonucleotide
uggagacgagaagccuugg

SEQ ID NO: 1725547 - RNA, 19 nt, Artificial Sequence
  Description of Artificial Sequence: Synthetic oligonucleotide
cuugggcaacacagccucc

SEQ ID NO: 1725548 - RNA, 19 nt, Artificial Sequence
  Description of Artificial Sequence: Synthetic oligonucleotide
cagaaguuccucuguucca

SEQ ID NO: 1725549 - RNA, 19 nt, Artificial Sequence
  Description of Artificial Sequence: Synthetic oligonucleotide
agugggcguccuuccgagg

SEQ ID NO: 1725550 - RNA, 19 nt, Artificial Sequence
  Description of Artificial Sequence: Synthetic oligonucleotide
cuagucaugccgucuguua

SEQ ID NO: 1725551 - RNA, 19 nt, Artificial Sequence
  Description of Artificial Sequence: Synthetic oligonucleotide
ucccggcuuccccagcagc

SEQ ID NO: 1725552 - RNA, 19 nt, Artificial Sequence
  Description of Artificial Sequence: Synthetic oligonucleotide
gugggcguccuuccgagga

SEQ ID NO: 1725553 - RNA, 19 nt, Artificial Sequence
  Description of Artificial Sequence: Synthetic oligonucleotide
ugggcaacacagccuccgu

SEQ ID NO: 1725554 - RNA, 19 nt, Artificial Sequence
  Description of Artificial Sequence: Synthetic oligonucleotide
cucccgagacuguagaucu

SEQ ID NO: 1725555 - RNA, 19 nt, Artificial Sequence
  Description of Artificial Sequence: Synthetic oligonucleotide
uuccccacucaaucauggu

SEQ ID NO: 1725556 - RNA, 19 nt, Artificial Sequence
  Description of Artificial Sequence: Synthetic oligonucleotide
uccuuccgaggauccaccu

SEQ ID NO: 1725557 - RNA, 19 nt, Artificial Sequence
  Description of Artificial Sequence: Synthetic oligonucleotide
gcaaugccggccucacugg

SEQ ID NO: 1725558 - RNA, 19 nt, Artificial Sequence
  Description of Artificial Sequence: Synthetic oligonucleotide
caagcgagcagggguaguc

SEQ ID NO: 1725559 - RNA, 19 nt, Artificial Sequence
  Description of Artificial Sequence: Synthetic oligonucleotide
uguauguccucagcucaua

SEQ ID NO: 1725560 - RNA, 19 nt, Artificial Sequence
  Description of Artificial Sequence: Synthetic oligonucleotide
cacaccccaccucuuaaca

SEQ ID NO: 1725561 - RNA, 19 nt, Artificial Sequence
  Description of Artificial Sequence: Synthetic oligonucleotide
aguguuagcuggggacuug

SEQ ID NO: 1725562 - RNA, 19 nt, Artificial Sequence
  Description of Artificial Sequence: Synthetic oligonucleotide
guucccggaggccauaccu

SEQ ID NO: 1725563 - RNA, 19 nt, Artificial Sequence
  Description of Artificial Sequence: Synthetic oligonucleotide
ccauaggugcacugccugg

SEQ ID NO: 1725564 - RNA, 19 nt, Artificial Sequence
  Description of Artificial Sequence: Synthetic oligonucleotide
cagguauagacagaacugu

SEQ ID NO: 1725565 - RNA, 19 nt, Artificial Sequence
  Description of Artificial Sequence: Synthetic oligonucleotide
guaggcauccagacauuca

SEQ ID NO: 1725566 - RNA, 19 nt, Artificial Sequence
  Description of Artificial Sequence: Synthetic oligonucleotide
auaggugguguaccacgua

SEQ ID NO: 1725567 - RNA, 19 nt, Artificial Sequence
  Description of Artificial Sequence: Synthetic oligonucleotide
uuguaggcauccagacauu

SEQ ID NO: 1725568 - RNA, 19 nt, Artificial Sequence
  Description of Artificial Sequence: Synthetic oligonucleotide
cuucguuccuuccggaacu

SEQ ID NO: 1725569 - RNA, 19 nt, Artificial Sequence
  Description of Artificial Sequence: Synthetic oligonucleotide
agguauagacagaacugua

SEQ ID NO: 1725570 - RNA, 19 nt, Artificial Sequence
  Description of Artificial Sequence: Synthetic oligonucleotide
gggacagguauagacagaa

SEQ ID NO: 1725571 - RNA, 19 nt, Artificial Sequence
  Description of Artificial Sequence: Synthetic oligonucleotide
ucguuccuuccggaacucc

SEQ ID NO: 1725572 - RNA, 19 nt, Artificial Sequence
  Description of Artificial Sequence: Synthetic oligonucleotide
cccaccucuuaacaacuag

SEQ ID NO: 1725573 - RNA, 19 nt, Artificial Sequence
  Description of Artificial Sequence: Synthetic oligonucleotide
ugccggccucacuggagag

SEQ ID NO: 1725574 - RNA, 19 nt, Artificial Sequence
  Description of Artificial Sequence: Synthetic oligonucleotide
gucaugccgucuguuagga

SEQ ID NO: 1725575 - RNA, 19 nt, Artificial Sequence
  Description of Artificial Sequence: Synthetic oligonucleotide
aguugcccacaagcgagca

SEQ ID NO: 1725576 - RNA, 19 nt, Artificial Sequence
  Description of Artificial Sequence: Synthetic oligonucleotide
uccucccgagacuguagau

SEQ ID NO: 1725577 - RNA, 19 nt, Artificial Sequence
  Description of Artificial Sequence: Synthetic oligonucleotide
ccgucagacuguuguaggc

SEQ ID NO: 1725578 - RNA, 19 nt, Artificial Sequence
  Description of Artificial Sequence: Synthetic oligonucleotide
agcuugggcaacacagccu

SEQ ID NO: 1725579 - RNA, 19 nt, Artificial Sequence
  Description of Artificial Sequence: Synthetic oligonucleotide
gugacuccaugugucgaac

SEQ ID NO: 1725580 - RNA, 19 nt, Artificial Sequence
  Description of Artificial Sequence: Synthetic oligonucleotide
aucaugguuccuggcuuga

SEQ ID NO: 1725581 - RNA, 19 nt, Artificial Sequence
  Description of Artificial Sequence: Synthetic oligonucleotide
cacaagcgagcagggguag

SEQ ID NO: 1725582 - RNA, 19 nt, Artificial Sequence
  Description of Artificial Sequence: Synthetic oligonucleotide
cucacuggagaggagaaau

SEQ ID NO: 1725583 - RNA, 19 nt, Artificial Sequence
  Description of Artificial Sequence: Synthetic oligonucleotide
guccuuccgaggauccacc

SEQ ID NO: 1725584 - RNA, 19 nt, Artificial Sequence
  Description of Artificial Sequence: Synthetic oligonucleotide
acuagucaugccgucuguu

SEQ ID NO: 1725585 - RNA, 19 nt, Artificial Sequence
  Description of Artificial Sequence: Synthetic oligonucleotide
uccucuguuccagguuacu

SEQ ID NO: 1725586 - RNA, 19 nt, Artificial Sequence
  Description of Artificial Sequence: Synthetic oligonucleotide
aggugguguaccacguaga

SEQ ID NO: 1725587 - RNA, 19 nt, Artificial Sequence
  Description of Artificial Sequence: Synthetic oligonucleotide
cagaguggagugggcgucc

SEQ ID NO: 1725588 - RNA, 19 nt, Artificial Sequence
  Description of Artificial Sequence: Synthetic oligonucleotide
caggcuucacauugugaaa

SEQ ID NO: 1725589 - RNA, 19 nt, Artificial Sequence
  Description of Artificial Sequence: Synthetic oligonucleotide
ugggcguccuuccgaggau

SEQ ID NO: 1725590 - RNA, 19 nt, Artificial Sequence
  Description of Artificial Sequence: Synthetic oligonucleotide
ccagggaguucccggaggc

SEQ ID NO: 1725591 - RNA, 19 nt, Artificial Sequence
  Description of Artificial Sequence: Synthetic oligonucleotide
ucaugccgucuguuaggaa

SEQ ID NO: 1725592 - RNA, 19 nt, Artificial Sequence
  Description of Artificial Sequence: Synthetic oligonucleotide
cagggguaguccucgucca

SEQ ID NO: 1725593 - RNA, 19 nt, Artificial Sequence
  Description of Artificial Sequence: Synthetic oligonucleotide
acgagaagccuuggggaaa

SEQ ID NO: 1725594 - RNA, 19 nt, Artificial Sequence
  Description of Artificial Sequence: Synthetic oligonucleotide
ccaggccgcauuucgaguc

SEQ ID NO: 1725595 - RNA, 19 nt, Artificial Sequence
  Description of Artificial Sequence: Synthetic oligonucleotide
accccaccucuuaacaacu

SEQ ID NO: 1725596 - RNA, 19 nt, Artificial Sequence
  Description of Artificial Sequence: Synthetic oligonucleotide
ggaucuuguagagauugcu

SEQ ID NO: 1725597 - RNA, 19 nt, Artificial Sequence
  Description of Artificial Sequence: Synthetic oligonucleotide
agguuacuccaagggagaa

SEQ ID NO: 1725598 - RNA, 19 nt, Artificial Sequence
  Description of Artificial Sequence: Synthetic oligonucleotide
ccauguccaaaguguuagc

SEQ ID NO: 1725599 - RNA, 19 nt, Artificial Sequence
  Description of Artificial Sequence: Synthetic oligonucleotide
uucguuccuuccggaacuc

SEQ ID NO: 1725600 - RNA, 19 nt, Artificial Sequence
  Description of Artificial Sequence: Synthetic oligonucleotide
gcauuuuaaugaacagaga

SEQ ID NO: 1725601 - RNA, 19 nt, Artificial Sequence
  Description of Artificial Sequence: Synthetic oligonucleotide
agaucuuuguaggcccaua

SEQ ID NO: 1725602 - RNA, 19 nt, Artificial Sequence
  Description of Artificial Sequence: Synthetic oligonucleotide
cauucaggcuucacauugu

SEQ ID NO: 1725603 - RNA, 19 nt, Artificial Sequence
  Description of Artificial Sequence: Synthetic oligonucleotide
caaucaugguuccuggcuu

SEQ ID NO: 1725604 - RNA, 19 nt, Artificial Sequence
  Description of Artificial Sequence: Synthetic oligonucleotide
gagcacaacccaucagaau

SEQ ID NO: 1725605 - RNA, 19 nt, Artificial Sequence
  Description of Artificial Sequence: Synthetic oligonucleotide
cauaccuggucugguaucu

SEQ ID NO: 1725606 - RNA, 19 nt, Artificial Sequence
  Description of Artificial Sequence: Synthetic oligonucleotide
gauugcuagucuccuucuu

SEQ ID NO: 1725607 - RNA, 19 nt, Artificial Sequence
  Description of Artificial Sequence: Synthetic oligonucleotide
ugccgucuguuaggaaacu

SEQ ID NO: 1725608 - RNA, 19 nt, Artificial Sequence
  Description of Artificial Sequence: Synthetic oligonucleotide
gacuuggccuggagacgag

SEQ ID NO: 1725609 - RNA, 19 nt, Artificial Sequence
  Description of Artificial Sequence: Synthetic oligonucleotide
gaguucccggaggccauac

SEQ ID NO: 1725610 - RNA, 19 nt, Artificial Sequence
  Description of Artificial Sequence: Synthetic oligonucleotide
ccugagaaccgccauaggu

SEQ ID NO: 1725611 - RNA, 19 nt, Artificial Sequence
  Description of Artificial Sequence: Synthetic oligonucleotide
ggagugggcguccuuccga

SEQ ID NO: 1725612 - RNA, 19 nt, Artificial Sequence
  Description of Artificial Sequence: Synthetic oligonucleotide
gcacaacccaucagaauuc

SEQ ID NO: 1725613 - RNA, 19 nt, Artificial Sequence
  Description of Artificial Sequence: Synthetic oligonucleotide
gggcuggauagccaccuga

SEQ ID NO: 1725614 - RNA, 19 nt, Artificial Sequence
  Description of Artificial Sequence: Synthetic oligonucleotide
aggccgcauuucgagucuc

SEQ ID NO: 1725615 - RNA, 19 nt, Artificial Sequence
  Description of Artificial Sequence: Synthetic oligonucleotide
cagggaguucccggaggcc

SEQ ID NO: 1725616 - RNA, 19 nt, Artificial Sequence
  Description of Artificial Sequence: Synthetic oligonucleotide
gagaaccgccauaggugca

SEQ ID NO: 1725617 - RNA, 19 nt, Artificial Sequence
  Description of Artificial Sequence: Synthetic oligonucleotide
agacuguuguaggcaucca

SEQ ID NO: 1725618 - RNA, 19 nt, Artificial Sequence
  Description of Artificial Sequence: Synthetic oligonucleotide
ccgaggauccaccuuguga

SEQ ID NO: 1725619 - RNA, 19 nt, Artificial Sequence
  Description of Artificial Sequence: Synthetic oligonucleotide
gagaggugggacagguaua

SEQ ID NO: 1725620 - RNA, 19 nt, Artificial Sequence
  Description of Artificial Sequence: Synthetic oligonucleotide
gcuggauagccaccugaga

SEQ ID NO: 1725621 - RNA, 19 nt, Artificial Sequence
  Description of Artificial Sequence: Synthetic oligonucleotide
caaugccggccucacugga

SEQ ID NO: 1725622 - RNA, 19 nt, Artificial Sequence
  Description of Artificial Sequence: Synthetic oligonucleotide
gguccugcuccccguacca

SEQ ID NO: 1725623 - RNA, 19 nt, Artificial Sequence
  Description of Artificial Sequence: Synthetic oligonucleotide
ccauaccuggucugguauc

SEQ ID NO: 1725624 - RNA, 19 nt, Artificial Sequence
  Description of Artificial Sequence: Synthetic oligonucleotide
ccaaaguguuagcugggga

SEQ ID NO: 1725625 - RNA, 19 nt, Artificial Sequence
  Description of Artificial Sequence: Synthetic oligonucleotide
ucccgagacuguagaucuu

SEQ ID NO: 1725626 - RNA, 19 nt, Artificial Sequence
  Description of Artificial Sequence: Synthetic oligonucleotide
agccauguccaaaguguua

SEQ ID NO: 1725627 - RNA, 19 nt, Artificial Sequence
  Description of Artificial Sequence: Synthetic oligonucleotide
cccgagcccaguuguuucc

SEQ ID NO: 1725628 - RNA, 19 nt, Artificial Sequence
  Description of Artificial Sequence: Synthetic oligonucleotide
aggcaaugccggccucacu

SEQ ID NO: 1725629 - RNA, 19 nt, Artificial Sequence
  Description of Artificial Sequence: Synthetic oligonucleotide
augcacaaccgcggagcca

SEQ ID NO: 1725630 - RNA, 19 nt, Artificial Sequence
  Description of Artificial Sequence: Synthetic oligonucleotide
gggagcggaaccagcugcc

SEQ ID NO: 1725631 - RNA, 19 nt, Artificial Sequence
  Description of Artificial Sequence: Synthetic oligonucleotide
ggcucagacuugcauuuua

SEQ ID NO: 1725632 - RNA, 19 nt, Artificial Sequence
  Description of Artificial Sequence: Synthetic oligonucleotide
cgugccgaugcagagauga

SEQ ID NO: 1725633 - RNA, 19 nt, Artificial Sequence
  Description of Artificial Sequence: Synthetic oligonucleotide
aggccauaccuggucuggu

SEQ ID NO: 1725634 - RNA, 19 nt, Artificial Sequence
  Description of Artificial Sequence: Synthetic oligonucleotide
ccucccgagacuguagauc

SEQ ID NO: 1725635 - RNA, 19 nt, Artificial Sequence
  Description of Artificial Sequence: Synthetic oligonucleotide
cgagcagggguaguccucg

SEQ ID NO: 1725636 - RNA, 19 nt, Artificial Sequence
  Description of Artificial Sequence: Synthetic oligonucleotide
gguuacuccaagggagaaa

SEQ ID NO: 1725637 - RNA, 19 nt, Artificial Sequence
  Description of Artificial Sequence: Synthetic oligonucleotide
gcccauaggugguguacca

SEQ ID NO: 1725638 - RNA, 19 nt, Artificial Sequence
  Description of Artificial Sequence: Synthetic oligonucleotide
ccaaggggacuguauagua

SEQ ID NO: 1725639 - RNA, 19 nt, Artificial Sequence
  Description of Artificial Sequence: Synthetic oligonucleotide
acaacccaucagaauucuu

SEQ ID NO: 1725640 - RNA, 19 nt, Artificial Sequence
  Description of Artificial Sequence: Synthetic oligonucleotide
cuguuccagguuacuccaa

SEQ ID NO: 1725641 - RNA, 19 nt, Artificial Sequence
  Description of Artificial Sequence: Synthetic oligonucleotide
gcgggaucaugauccguga

SEQ ID NO: 1725642 - RNA, 19 nt, Artificial Sequence
  Description of Artificial Sequence: Synthetic oligonucleotide
cugcuccccguaccaugug

SEQ ID NO: 1725643 - RNA, 19 nt, Artificial Sequence
  Description of Artificial Sequence: Synthetic oligonucleotide
ggggaaaugugggaaugcu

SEQ ID NO: 1725644 - RNA, 19 nt, Artificial Sequence
  Description of Artificial Sequence: Synthetic oligonucleotide
agccgccgugccgaugcag

SEQ ID NO: 1725645 - RNA, 19 nt, Artificial Sequence
  Description of Artificial Sequence: Synthetic oligonucleotide
ccaccucuuaacaacuagu

SEQ ID NO: 1725646 - RNA, 19 nt, Artificial Sequence
  Description of Artificial Sequence: Synthetic oligonucleotide
cugguuucuccuggacaga

SEQ ID NO: 1725647 - RNA, 19 nt, Artificial Sequence
  Description of Artificial Sequence: Synthetic oligonucleotide
gcccgagcccaguuguuuc

SEQ ID NO: 1725648 - RNA, 19 nt, Artificial Sequence
  Description of Artificial Sequence: Synthetic oligonucleotide
gccggccucacuggagagg

SEQ ID NO: 1725649 - RNA, 19 nt, Artificial Sequence
  Description of Artificial Sequence: Synthetic oligonucleotide
gcgagguccccagcgcggg

SEQ ID NO: 1725650 - RNA, 19 nt, Artificial Sequence
  Description of Artificial Sequence: Synthetic oligonucleotide
gugucgaaccaaggggacu

SEQ ID NO: 1725651 - RNA, 19 nt, Artificial Sequence
  Description of Artificial Sequence: Synthetic oligonucleotide
gugguucauuccagaagcu

SEQ ID NO: 1725652 - RNA, 19 nt, Artificial Sequence
  Description of Artificial Sequence: Synthetic oligonucleotide
ccggaggccauaccugguc

SEQ ID NO: 1725653 - RNA, 19 nt, Artificial Sequence
  Description of Artificial Sequence: Synthetic oligonucleotide
gagcggaaccagcugccuu

SEQ ID NO: 1725654 - RNA, 19 nt, Artificial Sequence
  Description of Artificial Sequence: Synthetic oligonucleotide
cccauaggugguguaccac

SEQ ID NO: 1725655 - RNA, 19 nt, Artificial Sequence
  Description of Artificial Sequence: Synthetic oligonucleotide
ggccauaccuggucuggua

SEQ ID NO: 1725656 - RNA, 19 nt, Artificial Sequence
  Description of Artificial Sequence: Synthetic oligonucleotide
gccgugccgaugcagagau

SEQ ID NO: 1725657 - RNA, 19 nt, Artificial Sequence
  Description of Artificial Sequence: Synthetic oligonucleotide
ccggcuuccccagcagccg

SEQ ID NO: 1725658 - RNA, 19 nt, Artificial Sequence
  Description of Artificial Sequence: Synthetic oligonucleotide
cguccuuccgaggauccac

SEQ ID NO: 1725659 - RNA, 19 nt, Artificial Sequence
  Description of Artificial Sequence: Synthetic oligonucleotide
ggccgcauuucgagucucc

SEQ ID NO: 1725660 - RNA, 19 nt, Artificial Sequence
  Description of Artificial Sequence: Synthetic oligonucleotide
gguacuccuuguugguuuu

SEQ ID NO: 1725661 - RNA, 19 nt, Artificial Sequence
  Description of Artificial Sequence: Synthetic oligonucleotide
cuuccuccaggccgcauuu

SEQ ID NO: 1725662 - RNA, 19 nt, Artificial Sequence
  Description of Artificial Sequence: Synthetic oligonucleotide
gaaccgccauaggugcacu

SEQ ID NO: 1725663 - RNA, 19 nt, Artificial Sequence
  Description of Artificial Sequence: Synthetic oligonucleotide
ccgagcccaguuguuuccc

SEQ ID NO: 1725664 - RNA, 19 nt, Artificial Sequence
  Description of Artificial Sequence: Synthetic oligonucleotide
cgucagacuguuguaggca

SEQ ID NO: 1725665 - RNA, 19 nt, Artificial Sequence
  Description of Artificial Sequence: Synthetic oligonucleotide
caguccaugagggcuggau

SEQ ID NO: 1725666 - RNA, 19 nt, Artificial Sequence
  Description of Artificial Sequence: Synthetic oligonucleotide
ccacguagagcucuccuau

SEQ ID NO: 1725667 - RNA, 19 nt, Artificial Sequence
  Description of Artificial Sequence: Synthetic oligonucleotide
ccgccgugccgaugcagag

SEQ ID NO: 1725668 - RNA, 19 nt, Artificial Sequence
  Description of Artificial Sequence: Synthetic oligonucleotide
ggcccagaaguuccucugu

SEQ ID NO: 1725669 - RNA, 19 nt, Artificial Sequence
  Description of Artificial Sequence: Synthetic oligonucleotide
gggaaaugugggaaugcuu

SEQ ID NO: 1725670 - RNA, 19 nt, Artificial Sequence
  Description of Artificial Sequence: Synthetic oligonucleotide
cacguagagcucuccuauu

SEQ ID NO: 1725671 - RNA, 19 nt, Artificial Sequence
  Description of Artificial Sequence: Synthetic oligonucleotide
cgguacuugauggcccgag

SEQ ID NO: 1725672 - RNA, 19 nt, Artificial Sequence
  Description of Artificial Sequence: Synthetic oligonucleotide
ccgaugcagagaugaugca

SEQ ID NO: 1725673 - RNA, 19 nt, Artificial Sequence
  Description of Artificial Sequence: Synthetic oligonucleotide
cgugacuccaugugucgaa

SEQ ID NO: 1725674 - RNA, 19 nt, Artificial Sequence
  Description of Artificial Sequence: Synthetic oligonucleotide
gccgccgugccgaugcaga

SEQ ID NO: 1725675 - RNA, 19 nt, Artificial Sequence
  Description of Artificial Sequence: Synthetic oligonucleotide
gggcguccuuccgaggauc

SEQ ID NO: 1725676 - RNA, 19 nt, Artificial Sequence
  Description of Artificial Sequence: Synthetic oligonucleotide
gcgagcagggguaguccuc

SEQ ID NO: 1725677 - RNA, 19 nt, Artificial Sequence
  Description of Artificial Sequence: Synthetic oligonucleotide
cgagacuguagaucuuugu

SEQ ID NO: 1725678 - RNA, 19 nt, Artificial Sequence
  Description of Artificial Sequence: Synthetic oligonucleotide
gucgaaccaaggggacugu

SEQ ID NO: 1725679 - RNA, 19 nt, Artificial Sequence
  Description of Artificial Sequence: Synthetic oligonucleotide
ccaccugagaaccgccaua

SEQ ID NO: 1725680 - RNA, 19 nt, Artificial Sequence
  Description of Artificial Sequence: Synthetic oligonucleotide
gccgucuguuaggaaacua

SEQ ID NO: 1725681 - RNA, 19 nt, Artificial Sequence
  Description of Artificial Sequence: Synthetic oligonucleotide
gcccagaaguuccucuguu

SEQ ID NO: 1725682 - RNA, 19 nt, Artificial Sequence
  Description of Artificial Sequence: Synthetic oligonucleotide
ggacuguauaguagacauu

SEQ ID NO: 1725683 - RNA, 19 nt, Artificial Sequence
  Description of Artificial Sequence: Synthetic oligonucleotide
ccgugacuccaugugucga

SEQ ID NO: 1725684 - RNA, 19 nt, Artificial Sequence
  Description of Artificial Sequence: Synthetic oligonucleotide
ggagcggaaccagcugccu

SEQ ID NO: 1725685 - RNA, 19 nt, Artificial Sequence
  Description of Artificial Sequence: Synthetic oligonucleotide
gugccgaugcagagaugau

SEQ ID NO: 1725686 - RNA, 19 nt, Artificial Sequence
  Description of Artificial Sequence: Synthetic oligonucleotide
cagcgggaucaugauccgu

SEQ ID NO: 1725687 - RNA, 19 nt, Artificial Sequence
  Description of Artificial Sequence: Synthetic oligonucleotide
ccccaccucuuaacaacua

SEQ ID NO: 1725688 - RNA, 19 nt, Artificial Sequence
  Description of Artificial Sequence: Synthetic oligonucleotide
ggaguucccggaggccaua

SEQ ID NO: 1725689 - RNA, 19 nt, Artificial Sequence
  Description of Artificial Sequence: Synthetic oligonucleotide
ccgugccgaugcagagaug

SEQ ID NO: 1725690 - RNA, 19 nt, Artificial Sequence
  Description of Artificial Sequence: Synthetic oligonucleotide
cccgagacuguagaucuuu

SEQ ID NO: 1725691 - RNA, 19 nt, Artificial Sequence
  Description of Artificial Sequence: Synthetic oligonucleotide
gcuccccguaccauguguu

SEQ ID NO: 1725692 - RNA, 19 nt, Artificial Sequence
  Description of Artificial Sequence: Synthetic oligonucleotide
cagccgccgugccgaugca

SEQ ID NO: 1725693 - RNA, 19 nt, Artificial Sequence
  Description of Artificial Sequence: Synthetic oligonucleotide
gggaguucccggaggccau

SEQ ID NO: 1725694 - RNA, 19 nt, Artificial Sequence
  Description of Artificial Sequence: Synthetic oligonucleotide
ggcccgagcccaguuguuu

SEQ ID NO: 1725695 - RNA, 19 nt, Artificial Sequence
  Description of Artificial Sequence: Synthetic oligonucleotide
cgagucuccucccgagacu

SEQ ID NO: 1725696 - RNA, 19 nt, Artificial Sequence
  Description of Artificial Sequence: Synthetic oligonucleotide
cggaggccauaccuggucu

SEQ ID NO: 1725697 - RNA, 19 nt, Artificial Sequence
  Description of Artificial Sequence: Synthetic oligonucleotide
ccuuccgaggauccaccuu

SEQ ID NO: 1725698 - RNA, 19 nt, Artificial Sequence
  Description of Artificial Sequence: Synthetic oligonucleotide
cgcggggucccggcuuccc

SEQ ID NO: 1725699 - RNA, 19 nt, Artificial Sequence
  Description of Artificial Sequence: Synthetic oligonucleotide
cagcagccgccgugccgau

SEQ ID NO: 1725700 - RNA, 19 nt, Artificial Sequence
  Description of Artificial Sequence: Synthetic oligonucleotide
auaugaacaaccuugaacc

SEQ ID NO: 1725701 - RNA, 19 nt, Artificial Sequence
  Description of Artificial Sequence: Synthetic oligonucleotide
  modified_base (6)..(6): a, c, u, g, unknown or other
ugaaunuaaaggauuaagg

SEQ ID NO: 1725702 - RNA, 19 nt, Artificial Sequence
  Description of Artificial Sequence: Synthetic oligonucleotide
uuauacaaggcauuaaugg

SEQ ID NO: 1725703 - RNA, 19 nt, Artificial Sequence
  Description of Artificial Sequence: Synthetic oligonucleotide
aauuaucuguauuuaaggg

SEQ ID NO: 1725704 - RNA, 19 nt, Artificial Sequence
  Description of Artificial Sequence: Synthetic oligonucleotide
uuauaauucauuaugaaua

SEQ ID NO: 1725705 - RNA, 19 nt, Artificial Sequence
  Description of Artificial Sequence: Synthetic oligonucleotide
  modified_base (12)..(12): a, c, u, g, unknown or other
aaagguugaaunuaaagga

SEQ ID NO: 1725706 - RNA, 19 nt, Artificial Sequence
  Description of Artificial Sequence: Synthetic oligonucleotide
  modified_base (4)..(4): a, c, u, g, unknown or other
aaunuaaaggauuaaggau

SEQ ID NO: 1725707 - RNA, 19 nt, Artificial Sequence
  Description of Artificial Sequence: Synthetic oligonucleotide
  modified_base (13)..(13): a, c, u, g, unknown or other
gaaagguugaaunuaaagg

SEQ ID NO: 1725708 - RNA, 19 nt, Artificial Sequence
  Description of Artificial Sequence: Synthetic oligonucleotide
cauucuaacaguuuguucc

SEQ ID NO: 1725709 - RNA, 19 nt, Artificial Sequence
  Description of Artificial Sequence: Synthetic oligonucleotide
aaauacaagugccaaacag

SEQ ID NO: 1725710 - RNA, 19 nt, Artificial Sequence
  Description of Artificial Sequence: Synthetic oligonucleotide
ugauuuauuguccacacug

SEQ ID NO: 1725711 - RNA, 19 nt, Artificial Sequence
  Description of Artificial Sequence: Synthetic oligonucleotide
uguuuaagauuuaauacag

SEQ ID NO: 1725712 - RNA, 19 nt, Artificial Sequence
  Description of Artificial Sequence: Synthetic oligonucleotide
ugaauuaucuguauuuaag

SEQ ID NO: 1725713 - RNA, 19 nt, Artificial Sequence
  Description of Artificial Sequence: Synthetic oligonucleotide
aaaauaacaaccaucuuug

SEQ ID NO: 1725714 - RNA, 19 nt, Artificial Sequence
  Description of Artificial Sequence: Synthetic oligonucleotide
acuguuauaauucauuaug

SEQ ID NO: 1725715 - RNA, 19 nt, Artificial Sequence
  Description of Artificial Sequence: Synthetic oligonucleotide
aaaauaacugauuuauaga

SEQ ID NO: 1725716 - RNA, 19 nt, Artificial Sequence
  Description of Artificial Sequence: Synthetic oligonucleotide
auaacaaccaucuuuguga

SEQ ID NO: 1725717 - RNA, 19 nt, Artificial Sequence
  Description of Artificial Sequence: Synthetic oligonucleotide
  modified_base (5)..(5): a, c, u, g, unknown or other
gaaunuaaaggauuaagga

SEQ ID NO: 1725718 - RNA, 19 nt, Artificial Sequence
  Description of Artificial Sequence: Synthetic oligonucleotide
accaauuagcuauuuauac

SEQ ID NO: 1725719 - RNA, 19 nt, Artificial Sequence
  Description of Artificial Sequence: Synthetic oligonucleotide
aaggauuaaggauucugac

SEQ ID NO: 1725720 - RNA, 19 nt, Artificial Sequence
  Description of Artificial Sequence: Synthetic oligonucleotide
uuaaauagcuucaaugaac

SEQ ID NO: 1725721 - RNA, 19 nt, Artificial Sequence
  Description of Artificial Sequence: Synthetic oligonucleotide
uuguuuaagauuuaauaca

SEQ ID NO: 1725722 - RNA, 19 nt, Artificial Sequence
  Description of Artificial Sequence: Synthetic oligonucleotide
  modified_base (2)..(2): a, c, u, g, unknown or other
anaccaauuagcuauuuau

SEQ ID NO: 1725723 - RNA, 19 nt, Artificial Sequence
  Description of Artificial Sequence: Synthetic oligonucleotide
ugugagacaggucauauga

SEQ ID NO: 1725724 - RNA, 19 nt, Artificial Sequence
  Description of Artificial Sequence: Synthetic oligonucleotide
auuacaagacugaaaaugc

SEQ ID NO: 1725725 - RNA, 19 nt, Artificial Sequence
  Description of Artificial Sequence: Synthetic oligonucleotide
aaacagauuggaaucauac

SEQ ID NO: 1725726 - RNA, 19 nt, Artificial Sequence
  Description of Artificial Sequence: Synthetic oligonucleotide
aacgcuucgagauucucac

SEQ ID NO: 1725727 - RNA, 19 nt, Artificial Sequence
  Description of Artificial Sequence: Synthetic oligonucleotide
aagugaaaacaacuuuggc

SEQ ID NO: 1725728 - RNA, 19 nt, Artificial Sequence
  Description of Artificial Sequence: Synthetic oligonucleotide
uuuagccuaauucaaaccu

SEQ ID NO: 1725729 - RNA, 19 nt, Artificial Sequence
  Description of Artificial Sequence: Synthetic oligonucleotide
agaccuuuuagccuaauuc

SEQ ID NO: 1725730 - RNA, 19 nt, Artificial Sequence
  Description of Artificial Sequence: Synthetic oligonucleotide
  modified_base (7)..(7): a, c, u, g, unknown or other
uugaaunuaaaggauuaag

SEQ ID NO: 1725731 - RNA, 19 nt, Artificial Sequence
  Description of Artificial Sequence: Synthetic oligonucleotide
aaaugaauuaucuguauuu

SEQ ID NO: 1725732 - RNA, 19 nt, Artificial Sequence
  Description of Artificial Sequence: Synthetic oligonucleotide
aauucaaaccuguaaacau

SEQ ID NO: 1725733 - RNA, 19 nt, Artificial Sequence
  Description of Artificial Sequence: Synthetic oligonucleotide
ucauacaacauaaagucaa

SEQ ID NO: 1725734 - RNA, 19 nt, Artificial Sequence
  Description of Artificial Sequence: Synthetic oligonucleotide
  modified_base (15)..(15): a, c, u, g, unknown or other
uuaauggauaggcanacca

SEQ ID NO: 1725735 - RNA, 19 nt, Artificial Sequence
  Description of Artificial Sequence: Synthetic oligonucleotide
uuaucuguauuuaagggaa

SEQ ID NO: 1725736 - RNA, 19 nt, Artificial Sequence
  Description of Artificial Sequence: Synthetic oligonucleotide
acaaccaucuuugugagac

SEQ ID NO: 1725737 - RNA, 19 nt, Artificial Sequence
  Description of Artificial Sequence: Synthetic oligonucleotide
acugaaaaugcuuucuuag

SEQ ID NO: 1725738 - RNA, 19 nt, Artificial Sequence
  Description of Artificial Sequence: Synthetic oligonucleotide
uuugaacuggcuaaguaca

SEQ ID NO: 1725739 - RNA, 19 nt, Artificial Sequence
  Description of Artificial Sequence: Synthetic oligonucleotide
agugccagguuuuaaauag

SEQ ID NO: 1725740 - RNA, 19 nt, Artificial Sequence
  Description of Artificial Sequence: Synthetic oligonucleotide
uggggaauuaaauacaagu

SEQ ID NO: 1725741 - RNA, 19 nt, Artificial Sequence
  Description of Artificial Sequence: Synthetic oligonucleotide
aagucaacaagugaaaaca

SEQ ID NO: 1725742 - RNA, 19 nt, Artificial Sequence
  Description of Artificial Sequence: Synthetic oligonucleotide
uguguauuaacagugccag

SEQ ID NO: 1725743 - RNA, 19 nt, Artificial Sequence
  Description of Artificial Sequence: Synthetic oligonucleotide
auuaucuguauuuaaggga

SEQ ID NO: 1725744 - RNA, 19 nt, Artificial Sequence
  Description of Artificial Sequence: Synthetic oligonucleotide
acuguguauuaacagugcc

SEQ ID NO: 1725745 - RNA, 19 nt, Artificial Sequence
  Description of Artificial Sequence: Synthetic oligonucleotide
acugauuuauuguccacac

SEQ ID NO: 1725746 - RNA, 19 nt, Artificial Sequence
  Description of Artificial Sequence: Synthetic oligonucleotide
uguauugccagaaaacaaa

SEQ ID NO: 1725747 - RNA, 19 nt, Artificial Sequence
  Description of Artificial Sequence: Synthetic oligonucleotide
aguacagaauuacugccac

SEQ ID NO: 1725748 - RNA, 19 nt, Artificial Sequence
  Description of Artificial Sequence: Synthetic oligonucleotide
uuagcaucuacaacaaaac

SEQ ID NO: 1725749 - RNA, 19 nt, Artificial Sequence
  Description of Artificial Sequence: Synthetic oligonucleotide
uguaagcucauaauaaaau

SEQ ID NO: 1725750 - RNA, 19 nt, Artificial Sequence
  Description of Artificial Sequence: Synthetic oligonucleotide
acagauuggaaucauacaa

SEQ ID NO: 1725751 - RNA, 19 nt, Artificial Sequence
  Description of Artificial Sequence: Synthetic oligonucleotide
uguauuaacagugccaggu

SEQ ID NO: 1725752 - RNA, 19 nt, Artificial Sequence
  Description of Artificial Sequence: Synthetic oligonucleotide
ugcuuucuuagaaagguug

SEQ ID NO: 1725753 - RNA, 19 nt, Artificial Sequence
  Description of Artificial Sequence: Synthetic oligonucleotide
caagugaaaacaacuuugg

SEQ ID NO: 1725754 - RNA, 19 nt, Artificial Sequence
  Description of Artificial Sequence: Synthetic oligonucleotide
  modified_base (2)..(2): a, c, u, g, unknown or other
unuaaaggauuaaggauuc

SEQ ID NO: 1725755 - RNA, 19 nt, Artificial Sequence
  Description of Artificial Sequence: Synthetic oligonucleotide
uagcaucuacaacaaaacg

SEQ ID NO: 1725756 - RNA, 19 nt, Artificial Sequence
  Description of Artificial Sequence: Synthetic oligonucleotide
uaaaguacuguguauuaac

SEQ ID NO: 1725757 - RNA, 19 nt, Artificial Sequence
  Description of Artificial Sequence: Synthetic oligonucleotide
uuauacauuguuuaagauu

SEQ ID NO: 1725758 - RNA, 19 nt, Artificial Sequence
  Description of Artificial Sequence: Synthetic oligonucleotide
cuugauacuucgaaccucc

SEQ ID NO: 1725759 - RNA, 19 nt, Artificial Sequence
  Description of Artificial Sequence: Synthetic oligonucleotide
aaugggugaacaacucucc

SEQ ID NO: 1725760 - RNA, 19 nt, Artificial Sequence
  Description of Artificial Sequence: Synthetic oligonucleotide
gaauuacugccacugcucg

SEQ ID NO: 1725761 - RNA, 19 nt, Artificial Sequence
  Description of Artificial Sequence: Synthetic oligonucleotide
aguacuguguauuaacagu

SEQ ID NO: 1725762 - RNA, 19 nt, Artificial Sequence
  Description of Artificial Sequence: Synthetic oligonucleotide
aaccuugaaccauucuaac

SEQ ID NO: 1725763 - RNA, 19 nt, Artificial Sequence
  Description of Artificial Sequence: Synthetic oligonucleotide
cuuugaacuggcuaaguac

SEQ ID NO: 1725764 - RNA, 19 nt, Artificial Sequence
  Description of Artificial Sequence: Synthetic oligonucleotide
uuucacucuugauacuucg

SEQ ID NO: 1725765 - RNA, 19 nt, Artificial Sequence
  Description of Artificial Sequence: Synthetic oligonucleotide
ucuucaacugauuuauugu

SEQ ID NO: 1725766 - RNA, 19 nt, Artificial Sequence
  Description of Artificial Sequence: Synthetic oligonucleotide
aauacaagugccaaacaga

SEQ ID NO: 1725767 - RNA, 19 nt, Artificial Sequence
  Description of Artificial Sequence: Synthetic oligonucleotide
uuuauuguccacacuggcu

SEQ ID NO: 1725768 - RNA, 19 nt, Artificial Sequence
  Description of Artificial Sequence: Synthetic oligonucleotide
ugucacuaaccucuagagg

SEQ ID NO: 1725769 - RNA, 19 nt, Artificial Sequence
  Description of Artificial Sequence: Synthetic oligonucleotide
uucaaaccuguaaacaugu

SEQ ID NO: 1725770 - RNA, 19 nt, Artificial Sequence
  Description of Artificial Sequence: Synthetic oligonucleotide
aacaagugaaaacaacuuu

SEQ ID NO: 1725771 - RNA, 19 nt, Artificial Sequence
  Description of Artificial Sequence: Synthetic oligonucleotide
cuuuuagccuaauucaaac

SEQ ID NO: 1725772 - RNA, 19 nt, Artificial Sequence
  Description of Artificial Sequence: Synthetic oligonucleotide
gggaauuaaauacaagugc

SEQ ID NO: 1725773 - RNA, 19 nt, Artificial Sequence
  Description of Artificial Sequence: Synthetic oligonucleotide
  modified_base (14)..(14): a, c, u, g, unknown or other
uaauggauaggcanaccaa

SEQ ID NO: 1725774 - RNA, 19 nt, Artificial Sequence
  Description of Artificial Sequence: Synthetic oligonucleotide
  modified_base (6)..(6): a, c, u, g, unknown or other
aggcanaccaauuagcuau

SEQ ID NO: 1725775 - RNA, 19 nt, Artificial Sequence
  Description of Artificial Sequence: Synthetic oligonucleotide
uuggcguucauuuugcagu

SEQ ID NO: 1725776 - RNA, 19 nt, Artificial Sequence
  Description of Artificial Sequence: Synthetic oligonucleotide
aaagguggggaauuaaaua

SEQ ID NO: 1725777 - RNA, 19 nt, Artificial Sequence
  Description of Artificial Sequence: Synthetic oligonucleotide
aacagauuggaaucauaca

SEQ ID NO: 1725778 - RNA, 19 nt, Artificial Sequence
  Description of Artificial Sequence: Synthetic oligonucleotide
cacguuagcaucuacaaca

SEQ ID NO: 1725779 - RNA, 19 nt, Artificial Sequence
  Description of Artificial Sequence: Synthetic oligonucleotide
ucaaggggcgugaaaagcc

SEQ ID NO: 1725780 - RNA, 19 nt, Artificial Sequence
  Description of Artificial Sequence: Synthetic oligonucleotide
  modified_base (16)..(16): a, c, u, g, unknown or other
auuaauggauaggcanacc

SEQ ID NO: 1725781 - RNA, 19 nt, Artificial Sequence
  Description of Artificial Sequence: Synthetic oligonucleotide
uuagccuaauucaaaccug

SEQ ID NO: 1725782 - RNA, 19 nt, Artificial Sequence
  Description of Artificial Sequence: Synthetic oligonucleotide
  modified_base (3)..(3): a, c, u, g, unknown or other
aunuaaaggauuaaggauu

SEQ ID NO: 1725783 - RNA, 19 nt, Artificial Sequence
  Description of Artificial Sequence: Synthetic oligonucleotide
ugagcuauuucccucugac

SEQ ID NO: 1725784 - RNA, 19 nt, Artificial Sequence
  Description of Artificial Sequence: Synthetic oligonucleotide
aaaggauuaaggauucuga

SEQ ID NO: 1725785 - RNA, 19 nt, Artificial Sequence
  Description of Artificial Sequence: Synthetic oligonucleotide
aauuacugccacugcucgg

SEQ ID NO: 1725786 - RNA, 19 nt, Artificial Sequence
  Description of Artificial Sequence: Synthetic oligonucleotide
ggaauuaaauacaagugcc

SEQ ID NO: 1725787 - RNA, 19 nt, Artificial Sequence
  Description of Artificial Sequence: Synthetic oligonucleotide
acauccgcaauauacaaau

SEQ ID NO: 1725788 - RNA, 19 nt, Artificial Sequence
  Description of Artificial Sequence: Synthetic oligonucleotide
acauguauugccagaaaac

SEQ ID NO: 1725789 - RNA, 19 nt, Artificial Sequence
  Description of Artificial Sequence: Synthetic oligonucleotide
auccgcaauauacaaaugu

SEQ ID NO: 1725790 - RNA, 19 nt, Artificial Sequence
  Description of Artificial Sequence: Synthetic oligonucleotide
acagaauuacugccacugc

SEQ ID NO: 1725791 - RNA, 19 nt, Artificial Sequence
  Description of Artificial Sequence: Synthetic oligonucleotide
gugaaaacaacuuuggcgu

SEQ ID NO: 1725792 - RNA, 19 nt, Artificial Sequence
  Description of Artificial Sequence: Synthetic oligonucleotide
acaaaacgcuucgagauuc

SEQ ID NO: 1725793 - RNA, 19 nt, Artificial Sequence
  Description of Artificial Sequence: Synthetic oligonucleotide
uuuauacauuguuuaagau

SEQ ID NO: 1725794 - RNA, 19 nt, Artificial Sequence
  Description of Artificial Sequence: Synthetic oligonucleotide
  modified_base (9)..(9): a, c, u, g, unknown or other
gauaggcanaccaauuagc

SEQ ID NO: 1725795 - RNA, 19 nt, Artificial Sequence
  Description of Artificial Sequence: Synthetic oligonucleotide
uuucacacaauguauuaua

SEQ ID NO: 1725796 - RNA, 19 nt, Artificial Sequence
  Description of Artificial Sequence: Synthetic oligonucleotide
aaugaauuaucuguauuua

SEQ ID NO: 1725797 - RNA, 19 nt, Artificial Sequence
  Description of Artificial Sequence: Synthetic oligonucleotide
aggauucugacacguuagc

SEQ ID NO: 1725798 - RNA, 19 nt, Artificial Sequence
  Description of Artificial Sequence: Synthetic oligonucleotide
acauaaagucaacaaguga

SEQ ID NO: 1725799 - RNA, 19 nt, Artificial Sequence
  Description of Artificial Sequence: Synthetic oligonucleotide
uccgcaauauacaaauguc

SEQ ID NO: 1725800 - RNA, 19 nt, Artificial Sequence
  Description of Artificial Sequence: Synthetic oligonucleotide
aaccuguaaacauguucag

SEQ ID NO: 1725801 - RNA, 19 nt, Artificial Sequence
  Description of Artificial Sequence: Synthetic oligonucleotide
cacagaaccacaauuaaaa

SEQ ID NO: 1725802 - RNA, 19 nt, Artificial Sequence
  Description of Artificial Sequence: Synthetic oligonucleotide
uaaauacaagugccaaaca

SEQ ID NO: 1725803 - RNA, 19 nt, Artificial Sequence
  Description of Artificial Sequence: Synthetic oligonucleotide
gucacuaaccucuagaggu

SEQ ID NO: 1725804 - RNA, 19 nt, Artificial Sequence
  Description of Artificial Sequence: Synthetic oligonucleotide
aaugaacacauccgcaaua

SEQ ID NO: 1725805 - RNA, 19 nt, Artificial Sequence
  Description of Artificial Sequence: Synthetic oligonucleotide
caaaugucuuacaaaggug

SEQ ID NO: 1725806 - RNA, 19 nt, Artificial Sequence
  Description of Artificial Sequence: Synthetic oligonucleotide
ugacacguuagcaucuaca

SEQ ID NO: 1725807 - RNA, 19 nt, Artificial Sequence
  Description of Artificial Sequence: Synthetic oligonucleotide
agauucucacauguauugc

SEQ ID NO: 1725808 - RNA, 19 nt, Artificial Sequence
  Description of Artificial Sequence: Synthetic oligonucleotide
  modified_base (10)..(10): a, c, u, g, unknown or other
ggauaggcanaccaauuag

SEQ ID NO: 1725809 - RNA, 19 nt, Artificial Sequence
  Description of Artificial Sequence: Synthetic oligonucleotide
cugucacuaaccucuagag

SEQ ID NO: 1725810 - RNA, 19 nt, Artificial Sequence
  Description of Artificial Sequence: Synthetic oligonucleotide
uucaauuucaaggggcgug

SEQ ID NO: 1725811 - RNA, 19 nt, Artificial Sequence
  Description of Artificial Sequence: Synthetic oligonucleotide
aaggauucugacacguuag

SEQ ID NO: 1725812 - RNA, 19 nt, Artificial Sequence
  Description of Artificial Sequence: Synthetic oligonucleotide
uacuguguauuaacagugc

SEQ ID NO: 1725813 - RNA, 19 nt, Artificial Sequence
  Description of Artificial Sequence: Synthetic oligonucleotide
aaauaacaaccaucuuugu

SEQ ID NO: 1725814 - RNA, 19 nt, Artificial Sequence
  Description of Artificial Sequence: Synthetic oligonucleotide
aacacauccgcaauauaca

SEQ ID NO: 1725815 - RNA, 19 nt, Artificial Sequence
  Description of Artificial Sequence: Synthetic oligonucleotide
  modified_base (13)..(13): a, c, u, g, unknown or other
aauggauaggcanaccaau

SEQ ID NO: 1725816 - RNA, 19 nt, Artificial Sequence
  Description of Artificial Sequence: Synthetic oligonucleotide
ggagcucacacuugcaucg

SEQ ID NO: 1725817 - RNA, 19 nt, Artificial Sequence
  Description of Artificial Sequence: Synthetic oligonucleotide
acacguuagcaucuacaac

SEQ ID NO: 1725818 - RNA, 19 nt, Artificial Sequence
  Description of Artificial Sequence: Synthetic oligonucleotide
agaauuacugccacugcuc

SEQ ID NO: 1725819 - RNA, 19 nt, Artificial Sequence
  Description of Artificial Sequence: Synthetic oligonucleotide
guuagcaucuacaacaaaa

SEQ ID NO: 1725820 - RNA, 19 nt, Artificial Sequence
  Description of Artificial Sequence: Synthetic oligonucleotide
  modified_base (11)..(11): a, c, u, g, unknown or other
uggauaggcanaccaauua

SEQ ID NO: 1725821 - RNA, 19 nt, Artificial Sequence
  Description of Artificial Sequence: Synthetic oligonucleotide
uuucaaggggcgugaaaag

SEQ ID NO: 1725822 - RNA, 19 nt, Artificial Sequence
  Description of Artificial Sequence: Synthetic oligonucleotide
auuaaggauucugacacgu

SEQ ID NO: 1725823 - RNA, 19 nt, Artificial Sequence
  Description of Artificial Sequence: Synthetic oligonucleotide
uauuguccacacuggcugg

SEQ ID NO: 1725824 - RNA, 19 nt, Artificial Sequence
  Description of Artificial Sequence: Synthetic oligonucleotide
aagcucauaauaaaauaaa

SEQ ID NO: 1725825 - RNA, 19 nt, Artificial Sequence
  Description of Artificial Sequence: Synthetic oligonucleotide
ugcagugacuccucuacug

SEQ ID NO: 1725826 - RNA, 19 nt, Artificial Sequence
  Description of Artificial Sequence: Synthetic oligonucleotide
uagccuaauucaaaccugu

SEQ ID NO: 1725827 - RNA, 19 nt, Artificial Sequence
  Description of Artificial Sequence: Synthetic oligonucleotide
auuucaaggggcgugaaaa

SEQ ID NO: 1725828 - RNA, 19 nt, Artificial Sequence
  Description of Artificial Sequence: Synthetic oligonucleotide
augaaggcgacuccggugu

SEQ ID NO: 1725829 - RNA, 19 nt, Artificial Sequence
  Description of Artificial Sequence: Synthetic oligonucleotide
uugauugcuacugcuggag

SEQ ID NO: 1725830 - RNA, 19 nt, Artificial Sequence
  Description of Artificial Sequence: Synthetic oligonucleotide
gaugaaggcgacuccggug

SEQ ID NO: 1725831 - RNA, 19 nt, Artificial Sequence
  Description of Artificial Sequence: Synthetic oligonucleotide
  modified_base (8)..(8): a, c, u, g, unknown or other
auaggcanaccaauuagcu

SEQ ID NO: 1725832 - RNA, 19 nt, Artificial Sequence
  Description of Artificial Sequence: Synthetic oligonucleotide
augaauuaucuguauuuaa

SEQ ID NO: 1725833 - RNA, 19 nt, Artificial Sequence
  Description of Artificial Sequence: Synthetic oligonucleotide
aguaaaguacuguguauua

SEQ ID NO: 1725834 - RNA, 19 nt, Artificial Sequence
  Description of Artificial Sequence: Synthetic oligonucleotide
ucuuccgucacagucugca

SEQ ID NO: 1725835 - RNA, 19 nt, Artificial Sequence
  Description of Artificial Sequence: Synthetic oligonucleotide
guaagcucauaauaaaaua

SEQ ID NO: 1725836 - RNA, 19 nt, Artificial Sequence
  Description of Artificial Sequence: Synthetic oligonucleotide
aacaaaacgcuucgagauu

SEQ ID NO: 1725837 - RNA, 19 nt, Artificial Sequence
  Description of Artificial Sequence: Synthetic oligonucleotide
  modified_base (17)..(17): a, c, u, g, unknown or other
cauuaauggauaggcanac

SEQ ID NO: 1725838 - RNA, 19 nt, Artificial Sequence
  Description of Artificial Sequence: Synthetic oligonucleotide
ugcucggaaauucuguuuu

SEQ ID NO: 1725839 - RNA, 19 nt, Artificial Sequence
  Description of Artificial Sequence: Synthetic oligonucleotide
uacaguagucccauuucaa

SEQ ID NO: 1725840 - RNA, 19 nt, Artificial Sequence
  Description of Artificial Sequence: Synthetic oligonucleotide
uucaaggggcgugaaaagc

SEQ ID NO: 1725841 - RNA, 19 nt, Artificial Sequence
  Description of Artificial Sequence: Synthetic oligonucleotide
aaaacgcuucgagauucuc

SEQ ID NO: 1725842 - RNA, 19 nt, Artificial Sequence
  Description of Artificial Sequence: Synthetic oligonucleotide
acaaugggugaacaacucu

SEQ ID NO: 1725843 - RNA, 19 nt, Artificial Sequence
  Description of Artificial Sequence: Synthetic oligonucleotide
agugacuccucuacugccc

SEQ ID NO: 1725844 - RNA, 19 nt, Artificial Sequence
  Description of Artificial Sequence: Synthetic oligonucleotide
ugauugcuacugcuggagc

SEQ ID NO: 1725845 - RNA, 19 nt, Artificial Sequence
  Description of Artificial Sequence: Synthetic oligonucleotide
augucuuacaaaggugggg

SEQ ID NO: 1725846 - RNA, 19 nt, Artificial Sequence
  Description of Artificial Sequence: Synthetic oligonucleotide
uacaaugggugaacaacuc

SEQ ID NO: 1725847 - RNA, 19 nt, Artificial Sequence
  Description of Artificial Sequence: Synthetic oligonucleotide
ggcaaaguacaguaguccc

SEQ ID NO: 1725848 - RNA, 19 nt, Artificial Sequence
  Description of Artificial Sequence: Synthetic oligonucleotide
aacaaccuugaaccauucu

SEQ ID NO: 1725849 - RNA, 19 nt, Artificial Sequence
  Description of Artificial Sequence: Synthetic oligonucleotide
  modified_base (7)..(7): a, c, u, g, unknown or other
uaggcanaccaauuagcua

SEQ ID NO: 1725850 - RNA, 19 nt, Artificial Sequence
  Description of Artificial Sequence: Synthetic oligonucleotide
ugauacuucgaaccuccuc

SEQ ID NO: 1725851 - RNA, 19 nt, Artificial Sequence
  Description of Artificial Sequence: Synthetic oligonucleotide
ucucacauguauugccaga

SEQ ID NO: 1725852 - RNA, 19 nt, Artificial Sequence
  Description of Artificial Sequence: Synthetic oligonucleotide
gagacaggucauaugaaca

SEQ ID NO: 1725853 - RNA, 19 nt, Artificial Sequence
  Description of Artificial Sequence: Synthetic oligonucleotide
gauucugacacguuagcau

SEQ ID NO: 1725854 - RNA, 19 nt, Artificial Sequence
  Description of Artificial Sequence: Synthetic oligonucleotide
  modified_base (19)..(19): a, c, u, g, unknown or other
ggcauuaauggauaggcan

SEQ ID NO: 1725855 - RNA, 19 nt, Artificial Sequence
  Description of Artificial Sequence: Synthetic oligonucleotide
ugacugaugaaggcgacuc

SEQ ID NO: 1725856 - RNA, 19 nt, Artificial Sequence
  Description of Artificial Sequence: Synthetic oligonucleotide
acaguagucccauuucaau

SEQ ID NO: 1725857 - RNA, 19 nt, Artificial Sequence
  Description of Artificial Sequence: Synthetic oligonucleotide
auuacugccacugcucgga

SEQ ID NO: 1725858 - RNA, 19 nt, Artificial Sequence
  Description of Artificial Sequence: Synthetic oligonucleotide
caagugccaaacagauugg

SEQ ID NO: 1725859 - RNA, 19 nt, Artificial Sequence
  Description of Artificial Sequence: Synthetic oligonucleotide
cugaugaaggcgacuccgg

SEQ ID NO: 1725860 - RNA, 19 nt, Artificial Sequence
  Description of Artificial Sequence: Synthetic oligonucleotide
aaacgcuucgagauucuca

SEQ ID NO: 1725861 - RNA, 19 nt, Artificial Sequence
  Description of Artificial Sequence: Synthetic oligonucleotide
auacaaggcauuaauggau

SEQ ID NO: 1725862 - RNA, 19 nt, Artificial Sequence
  Description of Artificial Sequence: Synthetic oligonucleotide
cacugugacagaagacugc

SEQ ID NO: 1725863 - RNA, 19 nt, Artificial Sequence
  Description of Artificial Sequence: Synthetic oligonucleotide
  modified_base (15)..(15): a, c, u, g, unknown or other
uagaaagguugaaunuaaa

SEQ ID NO: 1725864 - RNA, 19 nt, Artificial Sequence
  Description of Artificial Sequence: Synthetic oligonucleotide
uaggcgggguauuaaguac

SEQ ID NO: 1725865 - RNA, 19 nt, Artificial Sequence
  Description of Artificial Sequence: Synthetic oligonucleotide
agcucuacaaugggugaac

SEQ ID NO: 1725866 - RNA, 19 nt, Artificial Sequence
  Description of Artificial Sequence: Synthetic oligonucleotide
cuugcaucgaagccugcug

SEQ ID NO: 1725867 - RNA, 19 nt, Artificial Sequence
  Description of Artificial Sequence: Synthetic oligonucleotide
gcuauuucccucugacugg

SEQ ID NO: 1725868 - RNA, 19 nt, Artificial Sequence
  Description of Artificial Sequence: Synthetic oligonucleotide
cuguguauuaacagugcca

SEQ ID NO: 1725869 - RNA, 19 nt, Artificial Sequence
  Description of Artificial Sequence: Synthetic oligonucleotide
uugugagacaggucauaug

SEQ ID NO: 1725870 - RNA, 19 nt, Artificial Sequence
  Description of Artificial Sequence: Synthetic oligonucleotide
ucaauugugcugucaguuu

SEQ ID NO: 1725871 - RNA, 19 nt, Artificial Sequence
  Description of Artificial Sequence: Synthetic oligonucleotide
uugaacuggcuaaguacaa

SEQ ID NO: 1725872 - RNA, 19 nt, Artificial Sequence
  Description of Artificial Sequence: Synthetic oligonucleotide
ugcugacuagcuucuguca

SEQ ID NO: 1725873 - RNA, 19 nt, Artificial Sequence
  Description of Artificial Sequence: Synthetic oligonucleotide
acacauccgcaauauacaa

SEQ ID NO: 1725874 - RNA, 19 nt, Artificial Sequence
  Description of Artificial Sequence: Synthetic oligonucleotide
ucagucugguucugguuga

SEQ ID NO: 1725875 - RNA, 19 nt, Artificial Sequence
  Description of Artificial Sequence: Synthetic oligonucleotide
guguauuaacagugccagg

SEQ ID NO: 1725876 - RNA, 19 nt, Artificial Sequence
  Description of Artificial Sequence: Synthetic oligonucleotide
aauuagcuauuuauacuua

SEQ ID NO: 1725877 - RNA, 19 nt, Artificial Sequence
  Description of Artificial Sequence: Synthetic oligonucleotide
ucuugauacuucgaaccuc

SEQ ID NO: 1725878 - RNA, 19 nt, Artificial Sequence
  Description of Artificial Sequence: Synthetic oligonucleotide
uaucuguauuuaagggaaa

SEQ ID NO: 1725879 - RNA, 19 nt, Artificial Sequence
  Description of Artificial Sequence: Synthetic oligonucleotide
  modified_base (17)..(17): a, c, u, g, unknown or other
cuuagaaagguugaaunua

SEQ ID NO: 1725880 - RNA, 19 nt, Artificial Sequence
  Description of Artificial Sequence: Synthetic oligonucleotide
caacaaaacgcuucgagau

SEQ ID NO: 1725881 - RNA, 19 nt, Artificial Sequence
  Description of Artificial Sequence: Synthetic oligonucleotide
cacauguauugccagaaaa

SEQ ID NO: 1725882 - RNA, 19 nt, Artificial Sequence
  Description of Artificial Sequence: Synthetic oligonucleotide
gauugcuacugcuggagcu

SEQ ID NO: 1725883 - RNA, 19 nt, Artificial Sequence
  Description of Artificial Sequence: Synthetic oligonucleotide
aguuucacucuugauacuu

SEQ ID NO: 1725884 - RNA, 19 nt, Artificial Sequence
  Description of Artificial Sequence: Synthetic oligonucleotide
ccuaauucaaaccuguaaa

SEQ ID NO: 1725885 - RNA, 19 nt, Artificial Sequence
  Description of Artificial Sequence: Synthetic oligonucleotide
aaggggcgugaaaagccac

SEQ ID NO: 1725886 - RNA, 19 nt, Artificial Sequence
  Description of Artificial Sequence: Synthetic oligonucleotide
cugcugacuagcuucuguc

SEQ ID NO: 1725887 - RNA, 19 nt, Artificial Sequence
  Description of Artificial Sequence: Synthetic oligonucleotide
gacaggucauaugaacaac

SEQ ID NO: 1725888 - RNA, 19 nt, Artificial Sequence
  Description of Artificial Sequence: Synthetic oligonucleotide
caacugauuuauuguccac

SEQ ID NO: 1725889 - RNA, 19 nt, Artificial Sequence
  Description of Artificial Sequence: Synthetic oligonucleotide
uucgagauucucacaugua

SEQ ID NO: 1725890 - RNA, 19 nt, Artificial Sequence
  Description of Artificial Sequence: Synthetic oligonucleotide
acacuuugaacuggcuaag

SEQ ID NO: 1725891 - RNA, 19 nt, Artificial Sequence
  Description of Artificial Sequence: Synthetic oligonucleotide
ugaaaacaacuuuggcguu

SEQ ID NO: 1725892 - RNA, 19 nt, Artificial Sequence
  Description of Artificial Sequence: Synthetic oligonucleotide
cuacaaugggugaacaacu

SEQ ID NO: 1725893 - RNA, 19 nt, Artificial Sequence
  Description of Artificial Sequence: Synthetic oligonucleotide
aagccugcuggugagcuau

SEQ ID NO: 1725894 - RNA, 19 nt, Artificial Sequence
  Description of Artificial Sequence: Synthetic oligonucleotide
uccgguguaguaggcgggg

SEQ ID NO: 1725895 - RNA, 19 nt, Artificial Sequence
  Description of Artificial Sequence: Synthetic oligonucleotide
auguauugccagaaaacaa

SEQ ID NO: 1725896 - RNA, 19 nt, Artificial Sequence
  Description of Artificial Sequence: Synthetic oligonucleotide
gacuccgguguaguaggcg

SEQ ID NO: 1725897 - RNA, 19 nt, Artificial Sequence
  Description of Artificial Sequence: Synthetic oligonucleotide
ugcaucgaagccugcuggu

SEQ ID NO: 1725898 - RNA, 19 nt, Artificial Sequence
  Description of Artificial Sequence: Synthetic oligonucleotide
cuggugagcuauuucccuc

SEQ ID NO: 1725899 - RNA, 19 nt, Artificial Sequence
  Description of Artificial Sequence: Synthetic oligonucleotide
gcuaaguacaaucuuuaua

SEQ ID NO: 1725900 - RNA, 19 nt, Artificial Sequence
  Description of Artificial Sequence: Synthetic oligonucleotide
ugaacacauccgcaauaua

SEQ ID NO: 1725901 - RNA, 19 nt, Artificial Sequence
  Description of Artificial Sequence: Synthetic oligonucleotide
ugaacuggcuaaguacaau

SEQ ID NO: 1725902 - RNA, 19 nt, Artificial Sequence
  Description of Artificial Sequence: Synthetic oligonucleotide
cuagcucuacaauggguga

SEQ ID NO: 1725903 - RNA, 19 nt, Artificial Sequence
  Description of Artificial Sequence: Synthetic oligonucleotide
ggcgugaaaagccacugca

SEQ ID NO: 1725904 - RNA, 19 nt, Artificial Sequence
  Description of Artificial Sequence: Synthetic oligonucleotide
guagucccauuucaauuuc

SEQ ID NO: 1725905 - RNA, 19 nt, Artificial Sequence
  Description of Artificial Sequence: Synthetic oligonucleotide
acaaagguggggaauuaaa

SEQ ID NO: 1725906 - RNA, 19 nt, Artificial Sequence
  Description of Artificial Sequence: Synthetic oligonucleotide
ugucaguuucacucuugau

SEQ ID NO: 1725907 - RNA, 19 nt, Artificial Sequence
  Description of Artificial Sequence: Synthetic oligonucleotide
  modified_base (9)..(9): a, c, u, g, unknown or other
gguugaaunuaaaggauua

SEQ ID NO: 1725908 - RNA, 19 nt, Artificial Sequence
  Description of Artificial Sequence: Synthetic oligonucleotide
uugauacuucgaaccuccu

SEQ ID NO: 1725909 - RNA, 19 nt, Artificial Sequence
  Description of Artificial Sequence: Synthetic oligonucleotide
  modified_base (8)..(8): a, c, u, g, unknown or other
guugaaunuaaaggauuaa

SEQ ID NO: 1725910 - RNA, 19 nt, Artificial Sequence
  Description of Artificial Sequence: Synthetic oligonucleotide
cauccgcaauauacaaaug

SEQ ID NO: 1725911 - RNA, 19 nt, Artificial Sequence
  Description of Artificial Sequence: Synthetic oligonucleotide
gcgacuccgguguaguagg

SEQ ID NO: 1725912 - RNA, 19 nt, Artificial Sequence
  Description of Artificial Sequence: Synthetic oligonucleotide
guaggcgggguauuaagua

SEQ ID NO: 1725913 - RNA, 19 nt, Artificial Sequence
  Description of Artificial Sequence: Synthetic oligonucleotide
cuccgguguaguaggcggg

SEQ ID NO: 1725914 - RNA, 19 nt, Artificial Sequence
  Description of Artificial Sequence: Synthetic oligonucleotide
aguaggcgggguauuaagu

SEQ ID NO: 1725915 - RNA, 19 nt, Artificial Sequence
  Description of Artificial Sequence: Synthetic oligonucleotide
uguaguaggcgggguauua

SEQ ID NO: 1725916 - RNA, 19 nt, Artificial Sequence
  Description of Artificial Sequence: Synthetic oligonucleotide
auguucagucugguucugg

SEQ ID NO: 1725917 - RNA, 19 nt, Artificial Sequence
  Description of Artificial Sequence: Synthetic oligonucleotide
accuuuuagccuaauucaa

SEQ ID NO: 1725918 - RNA, 19 nt, Artificial Sequence
  Description of Artificial Sequence: Synthetic oligonucleotide
cuucgagauucucacaugu

SEQ ID NO: 1725919 - RNA, 19 nt, Artificial Sequence
  Description of Artificial Sequence: Synthetic oligonucleotide
aaggcgacuccgguguagu

SEQ ID NO: 1725920 - RNA, 19 nt, Artificial Sequence
  Description of Artificial Sequence: Synthetic oligonucleotide
accauucuaacaguuuguu

SEQ ID NO: 1725921 - RNA, 19 nt, Artificial Sequence
  Description of Artificial Sequence: Synthetic oligonucleotide
gcaucuacaacaaaacgcu

SEQ ID NO: 1725922 - RNA, 19 nt, Artificial Sequence
  Description of Artificial Sequence: Synthetic oligonucleotide
cuuccgucacagucugcag

SEQ ID NO: 1725923 - RNA, 19 nt, Artificial Sequence
  Description of Artificial Sequence: Synthetic oligonucleotide
gaaggcgacuccgguguag

SEQ ID NO: 1725924 - RNA, 19 nt, Artificial Sequence
  Description of Artificial Sequence: Synthetic oligonucleotide
caucgaagccugcugguga

SEQ ID NO: 1725925 - RNA, 19 nt, Artificial Sequence
  Description of Artificial Sequence: Synthetic oligonucleotide
caaagguggggaauuaaau

SEQ ID NO: 1725926 - RNA, 19 nt, Artificial Sequence
  Description of Artificial Sequence: Synthetic oligonucleotide
cagaauuacugccacugcu

SEQ ID NO: 1725927 - RNA, 19 nt, Artificial Sequence
  Description of Artificial Sequence: Synthetic oligonucleotide
uuacaaagguggggaauua

SEQ ID NO: 1725928 - RNA, 19 nt, Artificial Sequence
  Description of Artificial Sequence: Synthetic oligonucleotide
caaggggcgugaaaagcca

SEQ ID NO: 1725929 - RNA, 19 nt, Artificial Sequence
  Description of Artificial Sequence: Synthetic oligonucleotide
  modified_base (3)..(3): a, c, u, g, unknown or other
canaccaauuagcuauuua

SEQ ID NO: 1725930 - RNA, 19 nt, Artificial Sequence
  Description of Artificial Sequence: Synthetic oligonucleotide
cuuucuuagaaagguugaa

SEQ ID NO: 1725931 - RNA, 19 nt, Artificial Sequence
  Description of Artificial Sequence: Synthetic oligonucleotide
gccuaauucaaaccuguaa

SEQ ID NO: 1725932 - RNA, 19 nt, Artificial Sequence
  Description of Artificial Sequence: Synthetic oligonucleotide
uggcguucauuuugcaguu

SEQ ID NO: 1725933 - RNA, 19 nt, Artificial Sequence
  Description of Artificial Sequence: Synthetic oligonucleotide
cucacauguauugccagaa

SEQ ID NO: 1725934 - RNA, 19 nt, Artificial Sequence
  Description of Artificial Sequence: Synthetic oligonucleotide
  modified_base (12)..(12): a, c, u, g, unknown or other
auggauaggcanaccaauu

SEQ ID NO: 1725935 - RNA, 19 nt, Artificial Sequence
  Description of Artificial Sequence: Synthetic oligonucleotide
agucccauuucaauuucaa

SEQ ID NO: 1725936 - RNA, 19 nt, Artificial Sequence
  Description of Artificial Sequence: Synthetic oligonucleotide
cucuacaaugggugaacaa

SEQ ID NO: 1725937 - RNA, 19 nt, Artificial Sequence
  Description of Artificial Sequence: Synthetic oligonucleotide
gaacaaccuugaaccauuc

SEQ ID NO: 1725938 - RNA, 19 nt, Artificial Sequence
  Description of Artificial Sequence: Synthetic oligonucleotide
cacauccgcaauauacaaa

SEQ ID NO: 1725939 - RNA, 19 nt, Artificial Sequence
  Description of Artificial Sequence: Synthetic oligonucleotide
cugacacguuagcaucuac

SEQ ID NO: 1725940 - RNA, 19 nt, Artificial Sequence
  Description of Artificial Sequence: Synthetic oligonucleotide
ccauucuaacaguuuguuc

SEQ ID NO: 1725941 - RNA, 19 nt, Artificial Sequence
  Description of Artificial Sequence: Synthetic oligonucleotide
  modified_base (18)..(18): a, c, u, g, unknown or other
gcauuaauggauaggcana

SEQ ID NO: 1725942 - RNA, 19 nt, Artificial Sequence
  Description of Artificial Sequence: Synthetic oligonucleotide
ggcgacuccgguguaguag

SEQ ID NO: 1725943 - RNA, 19 nt, Artificial Sequence
  Description of Artificial Sequence: Synthetic oligonucleotide
uuacugccacugcucggaa

SEQ ID NO: 1725944 - RNA, 19 nt, Artificial Sequence
  Description of Artificial Sequence: Synthetic oligonucleotide
gugccagguuuuaaauagc

SEQ ID NO: 1725945 - RNA, 19 nt, Artificial Sequence
  Description of Artificial Sequence: Synthetic oligonucleotide
aggcgggguauuaaguaca

SEQ ID NO: 1725946 - RNA, 19 nt, Artificial Sequence
  Description of Artificial Sequence: Synthetic oligonucleotide
gcuucgagauucucacaug

SEQ ID NO: 1725947 - RNA, 19 nt, Artificial Sequence
  Description of Artificial Sequence: Synthetic oligonucleotide
gagcuauuucccucugacu

SEQ ID NO: 1725948 - RNA, 19 nt, Artificial Sequence
  Description of Artificial Sequence: Synthetic oligonucleotide
gucuuacaaagguggggaa

SEQ ID NO: 1725949 - RNA, 19 nt, Artificial Sequence
  Description of Artificial Sequence: Synthetic oligonucleotide
ccaauuagcuauuuauacu

SEQ ID NO: 1725950 - RNA, 19 nt, Artificial Sequence
  Description of Artificial Sequence: Synthetic oligonucleotide
ugcagaccuuuuagccuaa

SEQ ID NO: 1725951 - RNA, 19 nt, Artificial Sequence
  Description of Artificial Sequence: Synthetic oligonucleotide
gcgugaaaagccacugcag

SEQ ID NO: 1725952 - RNA, 19 nt, Artificial Sequence
  Description of Artificial Sequence: Synthetic oligonucleotide
cucaauugugcugucaguu

SEQ ID NO: 1725953 - RNA, 19 nt, Artificial Sequence
  Description of Artificial Sequence: Synthetic oligonucleotide
uucgaaccuccuccugguu

SEQ ID NO: 1725954 - RNA, 19 nt, Artificial Sequence
  Description of Artificial Sequence: Synthetic oligonucleotide
guaaaacagucuguacagu

SEQ ID NO: 1725955 - RNA, 19 nt, Artificial Sequence
  Description of Artificial Sequence: Synthetic oligonucleotide
ccuuuuagccuaauucaaa

SEQ ID NO: 1725956 - RNA, 19 nt, Artificial Sequence
  Description of Artificial Sequence: Synthetic oligonucleotide
acgcuucgagauucucaca

SEQ ID NO: 1725957 - RNA, 19 nt, Artificial Sequence
  Description of Artificial Sequence: Synthetic oligonucleotide
ucgaagccugcuggugagc

SEQ ID NO: 1725958 - RNA, 19 nt, Artificial Sequence
  Description of Artificial Sequence: Synthetic oligonucleotide
caaugaacacauccgcaau

SEQ ID NO: 1725959 - RNA, 19 nt, Artificial Sequence
  Description of Artificial Sequence: Synthetic oligonucleotide
guaguaggcgggguauuaa

SEQ ID NO: 1725960 - RNA, 19 nt, Artificial Sequence
  Description of Artificial Sequence: Synthetic oligonucleotide
guacagaauuacugccacu

SEQ ID NO: 1725961 - RNA, 19 nt, Artificial Sequence
  Description of Artificial Sequence: Synthetic oligonucleotide
gggcgugaaaagccacugc

SEQ ID NO: 1725962 - RNA, 19 nt, Artificial Sequence
  Description of Artificial Sequence: Synthetic oligonucleotide
cuucgaaccuccuccuggu

SEQ ID NO: 1725963 - RNA, 19 nt, Artificial Sequence
  Description of Artificial Sequence: Synthetic oligonucleotide
ggcgggguauuaaguacag

SEQ ID NO: 1725964 - RNA, 19 nt, Artificial Sequence
  Description of Artificial Sequence: Synthetic oligonucleotide
gugagacaggucauaugaa

SEQ ID NO: 1725965 - RNA, 19 nt, Artificial Sequence
  Description of Artificial Sequence: Synthetic oligonucleotide
aggggcgugaaaagccacu

SEQ ID NO: 1725966 - RNA, 19 nt, Artificial Sequence
  Description of Artificial Sequence: Synthetic oligonucleotide
cugauuuauuguccacacu

SEQ ID NO: 1725967 - RNA, 19 nt, Artificial Sequence
  Description of Artificial Sequence: Synthetic oligonucleotide
ccgcaauauacaaaugucu

SEQ ID NO: 1725968 - RNA, 19 nt, Artificial Sequence
  Description of Artificial Sequence: Synthetic oligonucleotide
ggggcgugaaaagccacug

SEQ ID NO: 1725969 - RNA, 19 nt, Artificial Sequence
  Description of Artificial Sequence: Synthetic oligonucleotide
cucuuccgucacagucugc

SEQ ID NO: 1725970 - RNA, 19 nt, Artificial Sequence
  Description of Artificial Sequence: Synthetic oligonucleotide
gcguucauuuugcaguuua

SEQ ID NO: 1725971 - RNA, 19 nt, Artificial Sequence
  Description of Artificial Sequence: Synthetic oligonucleotide
ccucuuccgucacagucug

SEQ ID NO: 1725972 - RNA, 19 nt, Artificial Sequence
  Description of Artificial Sequence: Synthetic oligonucleotide
acuaaccucuagagguuuu

SEQ ID NO: 1725973 - RNA, 19 nt, Artificial Sequence
  Description of Artificial Sequence: Synthetic oligonucleotide
aggggcucugacacuguga

SEQ ID NO: 1725974 - RNA, 19 nt, Artificial Sequence
  Description of Artificial Sequence: Synthetic oligonucleotide
gcaucgaagccugcuggug

SEQ ID NO: 1725975 - RNA, 19 nt, Artificial Sequence
  Description of Artificial Sequence: Synthetic oligonucleotide
cuggagcucacacuugcau

SEQ ID NO: 1725976 - RNA, 19 nt, Artificial Sequence
  Description of Artificial Sequence: Synthetic oligonucleotide
gagcucacacuugcaucga

SEQ ID NO: 1725977 - RNA, 19 nt, Artificial Sequence
  Description of Artificial Sequence: Synthetic oligonucleotide
cugguucugguugauugcu

SEQ ID NO: 1725978 - RNA, 19 nt, Artificial Sequence
  Description of Artificial Sequence: Synthetic oligonucleotide
agccuaauucaaaccugua

SEQ ID NO: 1725979 - RNA, 19 nt, Artificial Sequence
  Description of Artificial Sequence: Synthetic oligonucleotide
ggcuaaguacaaucuuuau

SEQ ID NO: 1725980 - RNA, 19 nt, Artificial Sequence
  Description of Artificial Sequence: Synthetic oligonucleotide
gcucuacaaugggugaaca

SEQ ID NO: 1725981 - RNA, 19 nt, Artificial Sequence
  Description of Artificial Sequence: Synthetic oligonucleotide
cgucacagucugcagugac

SEQ ID NO: 1725982 - RNA, 19 nt, Artificial Sequence
  Description of Artificial Sequence: Synthetic oligonucleotide
caauuucaaggggcgugaa

SEQ ID NO: 1725983 - RNA, 19 nt, Artificial Sequence
  Description of Artificial Sequence: Synthetic oligonucleotide
cgcaauauacaaaugucuu

SEQ ID NO: 1725984 - RNA, 19 nt, Artificial Sequence
  Description of Artificial Sequence: Synthetic oligonucleotide
ggagcuccccaccaacacu

SEQ ID NO: 1725985 - RNA, 19 nt, Artificial Sequence
  Description of Artificial Sequence: Synthetic oligonucleotide
aggcgacuccgguguagua

SEQ ID NO: 1725986 - RNA, 19 nt, Artificial Sequence
  Description of Artificial Sequence: Synthetic oligonucleotide
cagaccuuuuagccuaauu

SEQ ID NO: 1725987 - RNA, 19 nt, Artificial Sequence
  Description of Artificial Sequence: Synthetic oligonucleotide
cacuaaccucuagagguuu

SEQ ID NO: 1725988 - RNA, 19 nt, Artificial Sequence
  Description of Artificial Sequence: Synthetic oligonucleotide
ccucaauugugcugucagu

SEQ ID NO: 1725989 - RNA, 19 nt, Artificial Sequence
  Description of Artificial Sequence: Synthetic oligonucleotide
cgacuccgguguaguaggc

SEQ ID NO: 1725990 - RNA, 19 nt, Artificial Sequence
  Description of Artificial Sequence: Synthetic oligonucleotide
cgcuucgagauucucacau

SEQ ID NO: 1725991 - RNA, 19 nt, Artificial Sequence
  Description of Artificial Sequence: Synthetic oligonucleotide
  modified_base (5)..(5): a, c, u, g, unknown or other
ggcanaccaauuagcuauu

SEQ ID NO: 1725992 - RNA, 19 nt, Artificial Sequence
  Description of Artificial Sequence: Synthetic oligonucleotide
gcgggguauuaaguacaga

SEQ ID NO: 1725993 - RNA, 19 nt, Artificial Sequence
  Description of Artificial Sequence: Synthetic oligonucleotide
  modified_base (4)..(4): a, c, u, g, unknown or other
gcanaccaauuagcuauuu

SEQ ID NO: 1725994 - RNA, 19 nt, Artificial Sequence
  Description of Artificial Sequence: Synthetic oligonucleotide
ccccaccaacacuguccac

SEQ ID NO: 1725995 - RNA, 19 nt, Artificial Sequence
  Description of Artificial Sequence: Synthetic oligonucleotide
ccgucacagucugcaguga

SEQ ID NO: 1725996 - RNA, 19 nt, Artificial Sequence
  Description of Artificial Sequence: Synthetic oligonucleotide
cugccacugcucggaaauu

SEQ ID NO: 1725997 - RNA, 19 nt, Artificial Sequence
  Description of Artificial Sequence: Synthetic oligonucleotide
ggcguucauuuugcaguuu

SEQ ID NO: 1725998 - RNA, 19 nt, Artificial Sequence
  Description of Artificial Sequence: Synthetic oligonucleotide
gcagaccuuuuagccuaau

SEQ ID NO: 1725999 - RNA, 19 nt, Artificial Sequence
  Description of Artificial Sequence: Synthetic oligonucleotide
ccgguguaguaggcggggu

SEQ ID NO: 1726000 - RNA, 19 nt, Artificial Sequence
  Description of Artificial Sequence: Synthetic oligonucleotide
auugauauuguauagaugu

SEQ ID NO: 1726001 - RNA, 19 nt, Artificial Sequence
  Description of Artificial Sequence: Synthetic oligonucleotide
uaauguuuccacuacaugg

SEQ ID NO: 1726002 - RNA, 19 nt, Artificial Sequence
  Description of Artificial Sequence: Synthetic oligonucleotide
augacgacaauucaaauac

SEQ ID NO: 1726003 - RNA, 19 nt, Artificial Sequence
  Description of Artificial Sequence: Synthetic oligonucleotide
uaaugaguaagucaugugg

SEQ ID NO: 1726004 - RNA, 19 nt, Artificial Sequence
  Description of Artificial Sequence: Synthetic oligonucleotide
uguagaugaacaaugacga

SEQ ID NO: 1726005 - RNA, 19 nt, Artificial Sequence
  Description of Artificial Sequence: Synthetic oligonucleotide
aaauccaagucucaggcuc

SEQ ID NO: 1726006 - RNA, 19 nt, Artificial Sequence
  Description of Artificial Sequence: Synthetic oligonucleotide
aguaaaacguuuuagaaau

SEQ ID NO: 1726007 - RNA, 19 nt, Artificial Sequence
  Description of Artificial Sequence: Synthetic oligonucleotide
aaauuuaggauauucucgu

SEQ ID NO: 1726008 - RNA, 19 nt, Artificial Sequence
  Description of Artificial Sequence: Synthetic oligonucleotide
auaaauuagucaugaaaac

SEQ ID NO: 1726009 - RNA, 19 nt, Artificial Sequence
  Description of Artificial Sequence: Synthetic oligonucleotide
aaaucuaugggucccaaca

SEQ ID NO: 1726010 - RNA, 19 nt, Artificial Sequence
  Description of Artificial Sequence: Synthetic oligonucleotide
aauacaucaucuguacagc

SEQ ID NO: 1726011 - RNA, 19 nt, Artificial Sequence
  Description of Artificial Sequence: Synthetic oligonucleotide
agucaugugguucuguacc

SEQ ID NO: 1726012 - RNA, 19 nt, Artificial Sequence
  Description of Artificial Sequence: Synthetic oligonucleotide
guacauacuaaacaaauug

SEQ ID NO: 1726013 - RNA, 19 nt, Artificial Sequence
  Description of Artificial Sequence: Synthetic oligonucleotide
uucacauuuagcuacauau

SEQ ID NO: 1726014 - RNA, 19 nt, Artificial Sequence
  Description of Artificial Sequence: Synthetic oligonucleotide
aggaagagcgacuauaggg

SEQ ID NO: 1726015 - RNA, 19 nt, Artificial Sequence
  Description of Artificial Sequence: Synthetic oligonucleotide
aaacgaacauaugagaaag

SEQ ID NO: 1726016 - RNA, 19 nt, Artificial Sequence
  Description of Artificial Sequence: Synthetic oligonucleotide
aaauuagucaugaaaacga

SEQ ID NO: 1726017 - RNA, 19 nt, Artificial Sequence
  Description of Artificial Sequence: Synthetic oligonucleotide
acauauguaaucuugcaca

SEQ ID NO: 1726018 - RNA, 19 nt, Artificial Sequence
  Description of Artificial Sequence: Synthetic oligonucleotide
uguaugcuuccucuaaucg

SEQ ID NO: 1726019 - RNA, 19 nt, Artificial Sequence
  Description of Artificial Sequence: Synthetic oligonucleotide
auugcgaacaucaacacuc

SEQ ID NO: 1726020 - RNA, 19 nt, Artificial Sequence
  Description of Artificial Sequence: Synthetic oligonucleotide
aauugcagacuucgugucc

SEQ ID NO: 1726021 - RNA, 19 nt, Artificial Sequence
  Description of Artificial Sequence: Synthetic oligonucleotide
uguaacaccuuuaacugca

SEQ ID NO: 1726022 - RNA, 19 nt, Artificial Sequence
  Description of Artificial Sequence: Synthetic oligonucleotide
aaagauaaccagcacaauu

SEQ ID NO: 1726023 - RNA, 19 nt, Artificial Sequence
  Description of Artificial Sequence: Synthetic oligonucleotide
aaaggauccagaacaauuc

SEQ ID NO: 1726024 - RNA, 19 nt, Artificial Sequence
  Description of Artificial Sequence: Synthetic oligonucleotide
ugauaagcuuuaaagauaa

SEQ ID NO: 1726025 - RNA, 19 nt, Artificial Sequence
  Description of Artificial Sequence: Synthetic oligonucleotide
uuuuggcacggacacaucg

SEQ ID NO: 1726026 - RNA, 19 nt, Artificial Sequence
  Description of Artificial Sequence: Synthetic oligonucleotide
auuaucagcuaauguuucc

SEQ ID NO: 1726027 - RNA, 19 nt, Artificial Sequence
  Description of Artificial Sequence: Synthetic oligonucleotide
ucugugaacaucgucagag

SEQ ID NO: 1726028 - RNA, 19 nt, Artificial Sequence
  Description of Artificial Sequence: Synthetic oligonucleotide
ucugaucggacaaauaacu

SEQ ID NO: 1726029 - RNA, 19 nt, Artificial Sequence
  Description of Artificial Sequence: Synthetic oligonucleotide
ucacaagcaaaccagcuca

SEQ ID NO: 1726030 - RNA, 19 nt, Artificial Sequence
  Description of Artificial Sequence: Synthetic oligonucleotide
agaggcacugacuagauca

SEQ ID NO: 1726031 - RNA, 19 nt, Artificial Sequence
  Description of Artificial Sequence: Synthetic oligonucleotide
aacguuuuagaaauuuagg

SEQ ID NO: 1726032 - RNA, 19 nt, Artificial Sequence
  Description of Artificial Sequence: Synthetic oligonucleotide
uguaaucuugcacagaauu

SEQ ID NO: 1726033 - RNA, 19 nt, Artificial Sequence
  Description of Artificial Sequence: Synthetic oligonucleotide
uuuucuauaguaguuuccc

SEQ ID NO: 1726034 - RNA, 19 nt, Artificial Sequence
  Description of Artificial Sequence: Synthetic oligonucleotide
uaagguuugacaaaucaua

SEQ ID NO: 1726035 - RNA, 19 nt, Artificial Sequence
  Description of Artificial Sequence: Synthetic oligonucleotide
aaaacgaacauaugagaaa

SEQ ID NO: 1726036 - RNA, 19 nt, Artificial Sequence
  Description of Artificial Sequence: Synthetic oligonucleotide
ugucugaucggacaaauaa

SEQ ID NO: 1726037 - RNA, 19 nt, Artificial Sequence
  Description of Artificial Sequence: Synthetic oligonucleotide
auacuaaacaaauugguuu

SEQ ID NO: 1726038 - RNA, 19 nt, Artificial Sequence
  Description of Artificial Sequence: Synthetic oligonucleotide
aaucugugaacaucgucag

SEQ ID NO: 1726039 - RNA, 19 nt, Artificial Sequence
  Description of Artificial Sequence: Synthetic oligonucleotide
aaugacgacaauucaaaua

SEQ ID NO: 1726040 - RNA, 19 nt, Artificial Sequence
  Description of Artificial Sequence: Synthetic oligonucleotide
acaucgauuguucuagagg

SEQ ID NO: 1726041 - RNA, 19 nt, Artificial Sequence
  Description of Artificial Sequence: Synthetic oligonucleotide
acguuuuagaaauuuagga

SEQ ID NO: 1726042 - RNA, 19 nt, Artificial Sequence
  Description of Artificial Sequence: Synthetic oligonucleotide
ucugccauugcuauucuug

SEQ ID NO: 1726043 - RNA, 19 nt, Artificial Sequence
  Description of Artificial Sequence: Synthetic oligonucleotide
uguaccaucucuucaaccu

SEQ ID NO: 1726044 - RNA, 19 nt, Artificial Sequence
  Description of Artificial Sequence: Synthetic oligonucleotide
ugaaaacgaacauaugaga

SEQ ID NO: 1726045 - RNA, 19 nt, Artificial Sequence
  Description of Artificial Sequence: Synthetic oligonucleotide
aaaugaugauugcauuauc

SEQ ID NO: 1726046 - RNA, 19 nt, Artificial Sequence
  Description of Artificial Sequence: Synthetic oligonucleotide
uggaaguuuucuauaguag

SEQ ID NO: 1726047 - RNA, 19 nt, Artificial Sequence
  Description of Artificial Sequence: Synthetic oligonucleotide
caugaaaacgaacauauga

SEQ ID NO: 1726048 - RNA, 19 nt, Artificial Sequence
  Description of Artificial Sequence: Synthetic oligonucleotide
uguacaaaucuaugggucc

SEQ ID NO: 1726049 - RNA, 19 nt, Artificial Sequence
  Description of Artificial Sequence: Synthetic oligonucleotide
uuagcuacauauguaaucu

SEQ ID NO: 1726050 - RNA, 19 nt, Artificial Sequence
  Description of Artificial Sequence: Synthetic oligonucleotide
gacuauagggcuuuuguac

SEQ ID NO: 1726051 - RNA, 19 nt, Artificial Sequence
  Description of Artificial Sequence: Synthetic oligonucleotide
ugaugauugcauuaucagc

SEQ ID NO: 1726052 - RNA, 19 nt, Artificial Sequence
  Description of Artificial Sequence: Synthetic oligonucleotide
aaucuaugggucccaacag

SEQ ID NO: 1726053 - RNA, 19 nt, Artificial Sequence
  Description of Artificial Sequence: Synthetic oligonucleotide
cuccucauuaaucagacug

SEQ ID NO: 1726054 - RNA, 19 nt, Artificial Sequence
  Description of Artificial Sequence: Synthetic oligonucleotide
uaguuucccagucauugcg

SEQ ID NO: 1726055 - RNA, 19 nt, Artificial Sequence
  Description of Artificial Sequence: Synthetic oligonucleotide
auacaucaucuguacagcc

SEQ ID NO: 1726056 - RNA, 19 nt, Artificial Sequence
  Description of Artificial Sequence: Synthetic oligonucleotide
aaugaugauugcauuauca

SEQ ID NO: 1726057 - RNA, 19 nt, Artificial Sequence
  Description of Artificial Sequence: Synthetic oligonucleotide
acuaagguuugacaaauca

SEQ ID NO: 1726058 - RNA, 19 nt, Artificial Sequence
  Description of Artificial Sequence: Synthetic oligonucleotide
ugugaacaucgucagaggc

SEQ ID NO: 1726059 - RNA, 19 nt, Artificial Sequence
  Description of Artificial Sequence: Synthetic oligonucleotide
agguuugacaaaucauagc

SEQ ID NO: 1726060 - RNA, 19 nt, Artificial Sequence
  Description of Artificial Sequence: Synthetic oligonucleotide
augaugauugcauuaucag

SEQ ID NO: 1726061 - RNA, 19 nt, Artificial Sequence
  Description of Artificial Sequence: Synthetic oligonucleotide
ugaucggacaaauaacuga

SEQ ID NO: 1726062 - RNA, 19 nt, Artificial Sequence
  Description of Artificial Sequence: Synthetic oligonucleotide
ucuguauaccuucauuucu

SEQ ID NO: 1726063 - RNA, 19 nt, Artificial Sequence
  Description of Artificial Sequence: Synthetic oligonucleotide
uguaaccugaccuucucgc

SEQ ID NO: 1726064 - RNA, 19 nt, Artificial Sequence
  Description of Artificial Sequence: Synthetic oligonucleotide
aaagguguaggccagugua

SEQ ID NO: 1726065 - RNA, 19 nt, Artificial Sequence
  Description of Artificial Sequence: Synthetic oligonucleotide
ucuugcacagaauuguugu

SEQ ID NO: 1726066 - RNA, 19 nt, Artificial Sequence
  Description of Artificial Sequence: Synthetic oligonucleotide
uagaugaacaaugacgaca

SEQ ID NO: 1726067 - RNA, 19 nt, Artificial Sequence
  Description of Artificial Sequence: Synthetic oligonucleotide
ugucaugauccacagaaaa

SEQ ID NO: 1726068 - RNA, 19 nt, Artificial Sequence
  Description of Artificial Sequence: Synthetic oligonucleotide
ucggacaaauaacugauaa

SEQ ID NO: 1726069 - RNA, 19 nt, Artificial Sequence
  Description of Artificial Sequence: Synthetic oligonucleotide
uguaaugaguaagucaugu

SEQ ID NO: 1726070 - RNA, 19 nt, Artificial Sequence
  Description of Artificial Sequence: Synthetic oligonucleotide
uacaaacuaaauccaaguc

SEQ ID NO: 1726071 - RNA, 19 nt, Artificial Sequence
  Description of Artificial Sequence: Synthetic oligonucleotide
aagguuugacaaaucauag

SEQ ID NO: 1726072 - RNA, 19 nt, Artificial Sequence
  Description of Artificial Sequence: Synthetic oligonucleotide
aauucgcaucaccaccuac

SEQ ID NO: 1726073 - RNA, 19 nt, Artificial Sequence
  Description of Artificial Sequence: Synthetic oligonucleotide
aguaguuucccagucauug

SEQ ID NO: 1726074 - RNA, 19 nt, Artificial Sequence
  Description of Artificial Sequence: Synthetic oligonucleotide
uaaagugucugaucggaca

SEQ ID NO: 1726075 - RNA, 19 nt, Artificial Sequence
  Description of Artificial Sequence: Synthetic oligonucleotide
acaaaucauagcaacauug

SEQ ID NO: 1726076 - RNA, 19 nt, Artificial Sequence
  Description of Artificial Sequence: Synthetic oligonucleotide
aaugaguaagucauguggu

SEQ ID NO: 1726077 - RNA, 19 nt, Artificial Sequence
  Description of Artificial Sequence: Synthetic oligonucleotide
cauauguaaucuugcacag

SEQ ID NO: 1726078 - RNA, 19 nt, Artificial Sequence
  Description of Artificial Sequence: Synthetic oligonucleotide
uggguucacauuuagcuac

SEQ ID NO: 1726079 - RNA, 19 nt, Artificial Sequence
  Description of Artificial Sequence: Synthetic oligonucleotide
auuacaaacuaaauccaag

SEQ ID NO: 1726080 - RNA, 19 nt, Artificial Sequence
  Description of Artificial Sequence: Synthetic oligonucleotide
auggcaaaagguguaggcc

SEQ ID NO: 1726081 - RNA, 19 nt, Artificial Sequence
  Description of Artificial Sequence: Synthetic oligonucleotide
uccuguaaugaguaaguca

SEQ ID NO: 1726082 - RNA, 19 nt, Artificial Sequence
  Description of Artificial Sequence: Synthetic oligonucleotide
auaccuucauuucuccuuc

SEQ ID NO: 1726083 - RNA, 19 nt, Artificial Sequence
  Description of Artificial Sequence: Synthetic oligonucleotide
uuguauagauguauaaauu

SEQ ID NO: 1726084 - RNA, 19 nt, Artificial Sequence
  Description of Artificial Sequence: Synthetic oligonucleotide
cauuaaucagacuguucgg

SEQ ID NO: 1726085 - RNA, 19 nt, Artificial Sequence
  Description of Artificial Sequence: Synthetic oligonucleotide
ucuauaguaguuucccagu

SEQ ID NO: 1726086 - RNA, 19 nt, Artificial Sequence
  Description of Artificial Sequence: Synthetic oligonucleotide
caagcaaaccagcucagcc

SEQ ID NO: 1726087 - RNA, 19 nt, Artificial Sequence
  Description of Artificial Sequence: Synthetic oligonucleotide
uacuaaacaaauugguuuu

SEQ ID NO: 1726088 - RNA, 19 nt, Artificial Sequence
  Description of Artificial Sequence: Synthetic oligonucleotide
aaagugucugaucggacaa

SEQ ID NO: 1726089 - RNA, 19 nt, Artificial Sequence
  Description of Artificial Sequence: Synthetic oligonucleotide
aucuccagauggcaaaagg

SEQ ID NO: 1726090 - RNA, 19 nt, Artificial Sequence
  Description of Artificial Sequence: Synthetic oligonucleotide
uucguguccuguaacaccu

SEQ ID NO: 1726091 - RNA, 19 nt, Artificial Sequence
  Description of Artificial Sequence: Synthetic oligonucleotide
uguuuccacuacauggaag

SEQ ID NO: 1726092 - RNA, 19 nt, Artificial Sequence
  Description of Artificial Sequence: Synthetic oligonucleotide
caucgauuguucuagagga

SEQ ID NO: 1726093 - RNA, 19 nt, Artificial Sequence
  Description of Artificial Sequence: Synthetic oligonucleotide
uuuaggauauucucguuuu

SEQ ID NO: 1726094 - RNA, 19 nt, Artificial Sequence
  Description of Artificial Sequence: Synthetic oligonucleotide
auaaccagcacaauuuuca

SEQ ID NO: 1726095 - RNA, 19 nt, Artificial Sequence
  Description of Artificial Sequence: Synthetic oligonucleotide
ugugcguuugauaaaugau

SEQ ID NO: 1726096 - RNA, 19 nt, Artificial Sequence
  Description of Artificial Sequence: Synthetic oligonucleotide
uggcaaaagguguaggcca

SEQ ID NO: 1726097 - RNA, 19 nt, Artificial Sequence
  Description of Artificial Sequence: Synthetic oligonucleotide
uuaaucagacuguucggac

SEQ ID NO: 1726098 - RNA, 19 nt, Artificial Sequence
  Description of Artificial Sequence: Synthetic oligonucleotide
ucuagaggagcgcuuguca

SEQ ID NO: 1726099 - RNA, 19 nt, Artificial Sequence
  Description of Artificial Sequence: Synthetic oligonucleotide
auuagucaugaaaacgaac

SEQ ID NO: 1726100 - RNA, 19 nt, Artificial Sequence
  Description of Artificial Sequence: Synthetic oligonucleotide
gaaaacgaacauaugagaa

SEQ ID NO: 1726101 - RNA, 19 nt, Artificial Sequence
  Description of Artificial Sequence: Synthetic oligonucleotide
aacgaacauaugagaaagc

SEQ ID NO: 1726102 - RNA, 19 nt, Artificial Sequence
  Description of Artificial Sequence: Synthetic oligonucleotide
ucuaugggucccaacagaa

SEQ ID NO: 1726103 - RNA, 19 nt, Artificial Sequence
  Description of Artificial Sequence: Synthetic oligonucleotide
augagaaagcccauguuuc

SEQ ID NO: 1726104 - RNA, 19 nt, Artificial Sequence
  Description of Artificial Sequence: Synthetic oligonucleotide
cuaguugccaauucgcauc

SEQ ID NO: 1726105 - RNA, 19 nt, Artificial Sequence
  Description of Artificial Sequence: Synthetic oligonucleotide
uaaaugaugauugcauuau

SEQ ID NO: 1726106 - RNA, 19 nt, Artificial Sequence
  Description of Artificial Sequence: Synthetic oligonucleotide
cugcucuuaacaccgaggc

SEQ ID NO: 1726107 - RNA, 19 nt, Artificial Sequence
  Description of Artificial Sequence: Synthetic oligonucleotide
gacuagaucaauggaagac

SEQ ID NO: 1726108 - RNA, 19 nt, Artificial Sequence
  Description of Artificial Sequence: Synthetic oligonucleotide
cuugcuucagucacuguac

SEQ ID NO: 1726109 - RNA, 19 nt, Artificial Sequence
  Description of Artificial Sequence: Synthetic oligonucleotide
aacaaugacgacaauucaa

SEQ ID NO: 1726110 - RNA, 19 nt, Artificial Sequence
  Description of Artificial Sequence: Synthetic oligonucleotide
ugaacaucgucagaggcac

SEQ ID NO: 1726111 - RNA, 19 nt, Artificial Sequence
  Description of Artificial Sequence: Synthetic oligonucleotide
cauugcuauucuuguaugc

SEQ ID NO: 1726112 - RNA, 19 nt, Artificial Sequence
  Description of Artificial Sequence: Synthetic oligonucleotide
uccucauuaaucagacugu

SEQ ID NO: 1726113 - RNA, 19 nt, Artificial Sequence
  Description of Artificial Sequence: Synthetic oligonucleotide
accuacauccuguaaugag

SEQ ID NO: 1726114 - RNA, 19 nt, Artificial Sequence
  Description of Artificial Sequence: Synthetic oligonucleotide
auaacugauaagcuuuaaa

SEQ ID NO: 1726115 - RNA, 19 nt, Artificial Sequence
  Description of Artificial Sequence: Synthetic oligonucleotide
auaguaguuucccagucau

SEQ ID NO: 1726116 - RNA, 19 nt, Artificial Sequence
  Description of Artificial Sequence: Synthetic oligonucleotide
ugacaaaucauagcaacau

SEQ ID NO: 1726117 - RNA, 19 nt, Artificial Sequence
  Description of Artificial Sequence: Synthetic oligonucleotide
uuggacguaagaaguaaaa

SEQ ID NO: 1726118 - RNA, 19 nt, Artificial Sequence
  Description of Artificial Sequence: Synthetic oligonucleotide
ucucaguagcaacugacau

SEQ ID NO: 1726119 - RNA, 19 nt, Artificial Sequence
  Description of Artificial Sequence: Synthetic oligonucleotide
aacaucgucagaggcacug

SEQ ID NO: 1726120 - RNA, 19 nt, Artificial Sequence
  Description of Artificial Sequence: Synthetic oligonucleotide
gucauugcgaacaucaaca

SEQ ID NO: 1726121 - RNA, 19 nt, Artificial Sequence
  Description of Artificial Sequence: Synthetic oligonucleotide
aaaagguguaggccagugu

SEQ ID NO: 1726122 - RNA, 19 nt, Artificial Sequence
  Description of Artificial Sequence: Synthetic oligonucleotide
ucgauuguucuagaggagc

SEQ ID NO: 1726123 - RNA, 19 nt, Artificial Sequence
  Description of Artificial Sequence: Synthetic oligonucleotide
acauacuaaacaaauuggu

SEQ ID NO: 1726124 - RNA, 19 nt, Artificial Sequence
  Description of Artificial Sequence: Synthetic oligonucleotide
uccacuacauggaaguuuu

SEQ ID NO: 1726125 - RNA, 19 nt, Artificial Sequence
  Description of Artificial Sequence: Synthetic oligonucleotide
auuaaucagacuguucgga

SEQ ID NO: 1726126 - RNA, 19 nt, Artificial Sequence
  Description of Artificial Sequence: Synthetic oligonucleotide
acauccuguaaugaguaag

SEQ ID NO: 1726127 - RNA, 19 nt, Artificial Sequence
  Description of Artificial Sequence: Synthetic oligonucleotide
uaaucaggcccuccaaaac

SEQ ID NO: 1726128 - RNA, 19 nt, Artificial Sequence
  Description of Artificial Sequence: Synthetic oligonucleotide
acuagaucaauggaagaca

SEQ ID NO: 1726129 - RNA, 19 nt, Artificial Sequence
  Description of Artificial Sequence: Synthetic oligonucleotide
acaccuuuaacugcauggg

SEQ ID NO: 1726130 - RNA, 19 nt, Artificial Sequence
  Description of Artificial Sequence: Synthetic oligonucleotide
uuuaacugcauggguagcu

SEQ ID NO: 1726131 - RNA, 19 nt, Artificial Sequence
  Description of Artificial Sequence: Synthetic oligonucleotide
caaaucauagcaacauuga

SEQ ID NO: 1726132 - RNA, 19 nt, Artificial Sequence
  Description of Artificial Sequence: Synthetic oligonucleotide
acuguucggaccuucuuca

SEQ ID NO: 1726133 - RNA, 19 nt, Artificial Sequence
  Description of Artificial Sequence: Synthetic oligonucleotide
gaaaaggcaucuccagaug

SEQ ID NO: 1726134 - RNA, 19 nt, Artificial Sequence
  Description of Artificial Sequence: Synthetic oligonucleotide
aguguaaccugaccuucuc

SEQ ID NO: 1726135 - RNA, 19 nt, Artificial Sequence
  Description of Artificial Sequence: Synthetic oligonucleotide
uuuggcacggacacaucga

SEQ ID NO: 1726136 - RNA, 19 nt, Artificial Sequence
  Description of Artificial Sequence: Synthetic oligonucleotide
ucuaaucgucuucucuucu

SEQ ID NO: 1726137 - RNA, 19 nt, Artificial Sequence
  Description of Artificial Sequence: Synthetic oligonucleotide
ucuucaaccugggagcuga

SEQ ID NO: 1726138 - RNA, 19 nt, Artificial Sequence
  Description of Artificial Sequence: Synthetic oligonucleotide
aguagcaacugacauugau

SEQ ID NO: 1726139 - RNA, 19 nt, Artificial Sequence
  Description of Artificial Sequence: Synthetic oligonucleotide
uucuacaacuaguugccaa

SEQ ID NO: 1726140 - RNA, 19 nt, Artificial Sequence
  Description of Artificial Sequence: Synthetic oligonucleotide
cuguaacaccuuuaacugc

SEQ ID NO: 1726141 - RNA, 19 nt, Artificial Sequence
  Description of Artificial Sequence: Synthetic oligonucleotide
accaccuacauccuguaau

SEQ ID NO: 1726142 - RNA, 19 nt, Artificial Sequence
  Description of Artificial Sequence: Synthetic oligonucleotide
uggacuaaauacugguaaa

SEQ ID NO: 1726143 - RNA, 19 nt, Artificial Sequence
  Description of Artificial Sequence: Synthetic oligonucleotide
aaaacgggguuucuucuua

SEQ ID NO: 1726144 - RNA, 19 nt, Artificial Sequence
  Description of Artificial Sequence: Synthetic oligonucleotide
aacgggguuucuucuuaag

SEQ ID NO: 1726145 - RNA, 19 nt, Artificial Sequence
  Description of Artificial Sequence: Synthetic oligonucleotide
acuacauggaaguuuucua

SEQ ID NO: 1726146 - RNA, 19 nt, Artificial Sequence
  Description of Artificial Sequence: Synthetic oligonucleotide
gugcguuugauaaaugaug

SEQ ID NO: 1726147 - RNA, 19 nt, Artificial Sequence
  Description of Artificial Sequence: Synthetic oligonucleotide
ggcacggacacaucgauug

SEQ ID NO: 1726148 - RNA, 19 nt, Artificial Sequence
  Description of Artificial Sequence: Synthetic oligonucleotide
ugacuagaucaauggaaga

SEQ ID NO: 1726149 - RNA, 19 nt, Artificial Sequence
  Description of Artificial Sequence: Synthetic oligonucleotide
cucuuaacaccgaggcugg

SEQ ID NO: 1726150 - RNA, 19 nt, Artificial Sequence
  Description of Artificial Sequence: Synthetic oligonucleotide
uacaacuaguugccaauuc

SEQ ID NO: 1726151 - RNA, 19 nt, Artificial Sequence
  Description of Artificial Sequence: Synthetic oligonucleotide
agacuucguguccuguaac

SEQ ID NO: 1726152 - RNA, 19 nt, Artificial Sequence
  Description of Artificial Sequence: Synthetic oligonucleotide
uaauugcagacuucguguc

SEQ ID NO: 1726153 - RNA, 19 nt, Artificial Sequence
  Description of Artificial Sequence: Synthetic oligonucleotide
agcuacauauguaaucuug

SEQ ID NO: 1726154 - RNA, 19 nt, Artificial Sequence
  Description of Artificial Sequence: Synthetic oligonucleotide
ucuugugcguuugauaaau

SEQ ID NO: 1726155 - RNA, 19 nt, Artificial Sequence
  Description of Artificial Sequence: Synthetic oligonucleotide
agcugaaucugugaacauc

SEQ ID NO: 1726156 - RNA, 19 nt, Artificial Sequence
  Description of Artificial Sequence: Synthetic oligonucleotide
guugccaauucgcaucacc

SEQ ID NO: 1726157 - RNA, 19 nt, Artificial Sequence
  Description of Artificial Sequence: Synthetic oligonucleotide
acuaguugccaauucgcau

SEQ ID NO: 1726158 - RNA, 19 nt, Artificial Sequence
  Description of Artificial Sequence: Synthetic oligonucleotide
aaaacguuuuagaaauuua

SEQ ID NO: 1726159 - RNA, 19 nt, Artificial Sequence
  Description of Artificial Sequence: Synthetic oligonucleotide
guuuccacuacauggaagu

SEQ ID NO: 1726160 - RNA, 19 nt, Artificial Sequence
  Description of Artificial Sequence: Synthetic oligonucleotide
aauuguugucucugcuuau

SEQ ID NO: 1726161 - RNA, 19 nt, Artificial Sequence
  Description of Artificial Sequence: Synthetic oligonucleotide
cugaucggacaaauaacug

SEQ ID NO: 1726162 - RNA, 19 nt, Artificial Sequence
  Description of Artificial Sequence: Synthetic oligonucleotide
aacuaguugccaauucgca

SEQ ID NO: 1726163 - RNA, 19 nt, Artificial Sequence
  Description of Artificial Sequence: Synthetic oligonucleotide
uacauggaaguuuucuaua

SEQ ID NO: 1726164 - RNA, 19 nt, Artificial Sequence
  Description of Artificial Sequence: Synthetic oligonucleotide
acgacaauucaaauacauc

SEQ ID NO: 1726165 - RNA, 19 nt, Artificial Sequence
  Description of Artificial Sequence: Synthetic oligonucleotide
acaaugacgacaauucaaa

SEQ ID NO: 1726166 - RNA, 19 nt, Artificial Sequence
  Description of Artificial Sequence: Synthetic oligonucleotide
ggaagagcgacuauagggc

SEQ ID NO: 1726167 - RNA, 19 nt, Artificial Sequence
  Description of Artificial Sequence: Synthetic oligonucleotide
gacuguucggaccuucuuc

SEQ ID NO: 1726168 - RNA, 19 nt, Artificial Sequence
  Description of Artificial Sequence: Synthetic oligonucleotide
gcucuuaacaccgaggcug

SEQ ID NO: 1726169 - RNA, 19 nt, Artificial Sequence
  Description of Artificial Sequence: Synthetic oligonucleotide
uuagcacacagccuugcuu

SEQ ID NO: 1726170 - RNA, 19 nt, Artificial Sequence
  Description of Artificial Sequence: Synthetic oligonucleotide
acaagcaaaccagcucagc

SEQ ID NO: 1726171 - RNA, 19 nt, Artificial Sequence
  Description of Artificial Sequence: Synthetic oligonucleotide
uaaccugaccuucucgcuc

SEQ ID NO: 1726172 - RNA, 19 nt, Artificial Sequence
  Description of Artificial Sequence: Synthetic oligonucleotide
uguacagccuggacuaaau

SEQ ID NO: 1726173 - RNA, 19 nt, Artificial Sequence
  Description of Artificial Sequence: Synthetic oligonucleotide
ucgacuucucuucuguaua

SEQ ID NO: 1726174 - RNA, 19 nt, Artificial Sequence
  Description of Artificial Sequence: Synthetic oligonucleotide
cacaucgauuguucuagag

SEQ ID NO: 1726175 - RNA, 19 nt, Artificial Sequence
  Description of Artificial Sequence: Synthetic oligonucleotide
cuacauauguaaucuugca

SEQ ID NO: 1726176 - RNA, 19 nt, Artificial Sequence
  Description of Artificial Sequence: Synthetic oligonucleotide
cugugaacaucgucagagg

SEQ ID NO: 1726177 - RNA, 19 nt, Artificial Sequence
  Description of Artificial Sequence: Synthetic oligonucleotide
gauuguucuagaggagcgc

SEQ ID NO: 1726178 - RNA, 19 nt, Artificial Sequence
  Description of Artificial Sequence: Synthetic oligonucleotide
ccucucuuagcacacagcc

SEQ ID NO: 1726179 - RNA, 19 nt, Artificial Sequence
  Description of Artificial Sequence: Synthetic oligonucleotide
ucucguuuugccacugcuc

SEQ ID NO: 1726180 - RNA, 19 nt, Artificial Sequence
  Description of Artificial Sequence: Synthetic oligonucleotide
cuucuucuacaacuaguug

SEQ ID NO: 1726181 - RNA, 19 nt, Artificial Sequence
  Description of Artificial Sequence: Synthetic oligonucleotide
aggccaguguaaccugacc

SEQ ID NO: 1726182 - RNA, 19 nt, Artificial Sequence
  Description of Artificial Sequence: Synthetic oligonucleotide
gcuuacuaagguuugacaa

SEQ ID NO: 1726183 - RNA, 19 nt, Artificial Sequence
  Description of Artificial Sequence: Synthetic oligonucleotide
ucuuggacguaagaaguaa

SEQ ID NO: 1726184 - RNA, 19 nt, Artificial Sequence
  Description of Artificial Sequence: Synthetic oligonucleotide
ugacgacaauucaaauaca

SEQ ID NO: 1726185 - RNA, 19 nt, Artificial Sequence
  Description of Artificial Sequence: Synthetic oligonucleotide
cuguaccaucucuucaacc

SEQ ID NO: 1726186 - RNA, 19 nt, Artificial Sequence
  Description of Artificial Sequence: Synthetic oligonucleotide
gacauggaggaagagcgac

SEQ ID NO: 1726187 - RNA, 19 nt, Artificial Sequence
  Description of Artificial Sequence: Synthetic oligonucleotide
cuaaucgucuucucuucuc

SEQ ID NO: 1726188 - RNA, 19 nt, Artificial Sequence
  Description of Artificial Sequence: Synthetic oligonucleotide
guacaaaucuauggguccc

SEQ ID NO: 1726189 - RNA, 19 nt, Artificial Sequence
  Description of Artificial Sequence: Synthetic oligonucleotide
acugcucuuaacaccgagg

SEQ ID NO: 1726190 - RNA, 19 nt, Artificial Sequence
  Description of Artificial Sequence: Synthetic oligonucleotide
aauaacugauaagcuuuaa

SEQ ID NO: 1726191 - RNA, 19 nt, Artificial Sequence
  Description of Artificial Sequence: Synthetic oligonucleotide
agcuaauguuuccacuaca

SEQ ID NO: 1726192 - RNA, 19 nt, Artificial Sequence
  Description of Artificial Sequence: Synthetic oligonucleotide
cuaugggucccaacagaag

SEQ ID NO: 1726193 - RNA, 19 nt, Artificial Sequence
  Description of Artificial Sequence: Synthetic oligonucleotide
ucagcccagcuaaaauucu

SEQ ID NO: 1726194 - RNA, 19 nt, Artificial Sequence
  Description of Artificial Sequence: Synthetic oligonucleotide
uucgcaucaccaccuacau

SEQ ID NO: 1726195 - RNA, 19 nt, Artificial Sequence
  Description of Artificial Sequence: Synthetic oligonucleotide
ucggaccuucuucauaauc

SEQ ID NO: 1726196 - RNA, 19 nt, Artificial Sequence
  Description of Artificial Sequence: Synthetic oligonucleotide
acauaugagaaagcccaug

SEQ ID NO: 1726197 - RNA, 19 nt, Artificial Sequence
  Description of Artificial Sequence: Synthetic oligonucleotide
ugccaauucgcaucaccac

SEQ ID NO: 1726198 - RNA, 19 nt, Artificial Sequence
  Description of Artificial Sequence: Synthetic oligonucleotide
auugcagacuucguguccu

SEQ ID NO: 1726199 - RNA, 19 nt, Artificial Sequence
  Description of Artificial Sequence: Synthetic oligonucleotide
uucuuggacguaagaagua

SEQ ID NO: 1726200 - RNA, 19 nt, Artificial Sequence
  Description of Artificial Sequence: Synthetic oligonucleotide
agauggcaaaagguguagg

SEQ ID NO: 1726201 - RNA, 19 nt, Artificial Sequence
  Description of Artificial Sequence: Synthetic oligonucleotide
auccuguaaugaguaaguc

SEQ ID NO: 1726202 - RNA, 19 nt, Artificial Sequence
  Description of Artificial Sequence: Synthetic oligonucleotide
guagaugaacaaugacgac

SEQ ID NO: 1726203 - RNA, 19 nt, Artificial Sequence
  Description of Artificial Sequence: Synthetic oligonucleotide
agucaugaaaacgaacaua

SEQ ID NO: 1726204 - RNA, 19 nt, Artificial Sequence
  Description of Artificial Sequence: Synthetic oligonucleotide
ugcucuuaacaccgaggcu

SEQ ID NO: 1726205 - RNA, 19 nt, Artificial Sequence
  Description of Artificial Sequence: Synthetic oligonucleotide
gccacugcucuuaacaccg

SEQ ID NO: 1726206 - RNA, 19 nt, Artificial Sequence
  Description of Artificial Sequence: Synthetic oligonucleotide
uguucggaccuucuucaua

SEQ ID NO: 1726207 - RNA, 19 nt, Artificial Sequence
  Description of Artificial Sequence: Synthetic oligonucleotide
auagggcuuuuguacaaau

SEQ ID NO: 1726208 - RNA, 19 nt, Artificial Sequence
  Description of Artificial Sequence: Synthetic oligonucleotide
ucuuagcacacagccuugc

SEQ ID NO: 1726209 - RNA, 19 nt, Artificial Sequence
  Description of Artificial Sequence: Synthetic oligonucleotide
uuggcacggacacaucgau

SEQ ID NO: 1726210 - RNA, 19 nt, Artificial Sequence
  Description of Artificial Sequence: Synthetic oligonucleotide
gccaauucgcaucaccacc

SEQ ID NO: 1726211 - RNA, 19 nt, Artificial Sequence
  Description of Artificial Sequence: Synthetic oligonucleotide
cuguacauacuaaacaaau

SEQ ID NO: 1726212 - RNA, 19 nt, Artificial Sequence
  Description of Artificial Sequence: Synthetic oligonucleotide
cauaugagaaagcccaugu

SEQ ID NO: 1726213 - RNA, 19 nt, Artificial Sequence
  Description of Artificial Sequence: Synthetic oligonucleotide
ggauauucucguuuugcca

SEQ ID NO: 1726214 - RNA, 19 nt, Artificial Sequence
  Description of Artificial Sequence: Synthetic oligonucleotide
ggagcgcuugucaugaucc

SEQ ID NO: 1726215 - RNA, 19 nt, Artificial Sequence
  Description of Artificial Sequence: Synthetic oligonucleotide
gucugaucggacaaauaac

SEQ ID NO: 1726216 - RNA, 19 nt, Artificial Sequence
  Description of Artificial Sequence: Synthetic oligonucleotide
caaaucuaugggucccaac

SEQ ID NO: 1726217 - RNA, 19 nt, Artificial Sequence
  Description of Artificial Sequence: Synthetic oligonucleotide
uacuaagguuugacaaauc

SEQ ID NO: 1726218 - RNA, 19 nt, Artificial Sequence
  Description of Artificial Sequence: Synthetic oligonucleotide
cuguaaugaguaagucaug

SEQ ID NO: 1726219 - RNA, 19 nt, Artificial Sequence
  Description of Artificial Sequence: Synthetic oligonucleotide
gacuucucuucuguauacc

SEQ ID NO: 1726220 - RNA, 19 nt, Artificial Sequence
  Description of Artificial Sequence: Synthetic oligonucleotide
cauacuaaacaaauugguu

SEQ ID NO: 1726221 - RNA, 19 nt, Artificial Sequence
  Description of Artificial Sequence: Synthetic oligonucleotide
cacaagcaaaccagcucag

SEQ ID NO: 1726222 - RNA, 19 nt, Artificial Sequence
  Description of Artificial Sequence: Synthetic oligonucleotide
ggucccaacagaagaaaag

SEQ ID NO: 1726223 - RNA, 19 nt, Artificial Sequence
  Description of Artificial Sequence: Synthetic oligonucleotide
uacaaaucuauggguccca

SEQ ID NO: 1726224 - RNA, 19 nt, Artificial Sequence
  Description of Artificial Sequence: Synthetic oligonucleotide
ggccacacucucuugugcg

SEQ ID NO: 1726225 - RNA, 19 nt, Artificial Sequence
  Description of Artificial Sequence: Synthetic oligonucleotide
cgaacauaugagaaagccc

SEQ ID NO: 1726226 - RNA, 19 nt, Artificial Sequence
  Description of Artificial Sequence: Synthetic oligonucleotide
ggaggaagagcgacuauag

SEQ ID NO: 1726227 - RNA, 19 nt, Artificial Sequence
  Description of Artificial Sequence: Synthetic oligonucleotide
agaaagcccauguuuccuu

SEQ ID NO: 1726228 - RNA, 19 nt, Artificial Sequence
  Description of Artificial Sequence: Synthetic oligonucleotide
cuacauccuguaaugagua

SEQ ID NO: 1726229 - RNA, 19 nt, Artificial Sequence
  Description of Artificial Sequence: Synthetic oligonucleotide
ccagcuaaaauucucagua

SEQ ID NO: 1726230 - RNA, 19 nt, Artificial Sequence
  Description of Artificial Sequence: Synthetic oligonucleotide
cagcuaauguuuccacuac

SEQ ID NO: 1726231 - RNA, 19 nt, Artificial Sequence
  Description of Artificial Sequence: Synthetic oligonucleotide
aucuugcacagaauuguug

SEQ ID NO: 1726232 - RNA, 19 nt, Artificial Sequence
  Description of Artificial Sequence: Synthetic oligonucleotide
cuugugcguuugauaaaug

SEQ ID NO: 1726233 - RNA, 19 nt, Artificial Sequence
  Description of Artificial Sequence: Synthetic oligonucleotide
cacaccucucuuagcacac

SEQ ID NO: 1726234 - RNA, 19 nt, Artificial Sequence
  Description of Artificial Sequence: Synthetic oligonucleotide
aaguaauugcagacuucgu

SEQ ID NO: 1726235 - RNA, 19 nt, Artificial Sequence
  Description of Artificial Sequence: Synthetic oligonucleotide
guaugcuuccucuaaucgu

SEQ ID NO: 1726236 - RNA, 19 nt, Artificial Sequence
  Description of Artificial Sequence: Synthetic oligonucleotide
aacauaugagaaagcccau

SEQ ID NO: 1726237 - RNA, 19 nt, Artificial Sequence
  Description of Artificial Sequence: Synthetic oligonucleotide
cuuauuuccugguuucccu

SEQ ID NO: 1726238 - RNA, 19 nt, Artificial Sequence
  Description of Artificial Sequence: Synthetic oligonucleotide
auauguaaucuugcacaga

SEQ ID NO: 1726239 - RNA, 19 nt, Artificial Sequence
  Description of Artificial Sequence: Synthetic oligonucleotide
gaagagcgacuauagggcu

SEQ ID NO: 1726240 - RNA, 19 nt, Artificial Sequence
  Description of Artificial Sequence: Synthetic oligonucleotide
gacgacaauucaaauacau

SEQ ID NO: 1726241 - RNA, 19 nt, Artificial Sequence
  Description of Artificial Sequence: Synthetic oligonucleotide
gucaugugguucuguacca

SEQ ID NO: 1726242 - RNA, 19 nt, Artificial Sequence
  Description of Artificial Sequence: Synthetic oligonucleotide
acauuuagcuacauaugua

SEQ ID NO: 1726243 - RNA, 19 nt, Artificial Sequence
  Description of Artificial Sequence: Synthetic oligonucleotide
cacugcucuuaacaccgag

SEQ ID NO: 1726244 - RNA, 19 nt, Artificial Sequence
  Description of Artificial Sequence: Synthetic oligonucleotide
agugucugaucggacaaau

SEQ ID NO: 1726245 - RNA, 19 nt, Artificial Sequence
  Description of Artificial Sequence: Synthetic oligonucleotide
cuacauggaaguuuucuau

SEQ ID NO: 1726246 - RNA, 19 nt, Artificial Sequence
  Description of Artificial Sequence: Synthetic oligonucleotide
cgauuguucuagaggagcg

SEQ ID NO: 1726247 - RNA, 19 nt, Artificial Sequence
  Description of Artificial Sequence: Synthetic oligonucleotide
ccuguaaugaguaagucau

SEQ ID NO: 1726248 - RNA, 19 nt, Artificial Sequence
  Description of Artificial Sequence: Synthetic oligonucleotide
aucgauuguucuagaggag

SEQ ID NO: 1726249 - RNA, 19 nt, Artificial Sequence
  Description of Artificial Sequence: Synthetic oligonucleotide
cagaacaauuccauuuucu

SEQ ID NO: 1726250 - RNA, 19 nt, Artificial Sequence
  Description of Artificial Sequence: Synthetic oligonucleotide
cauccuguaaugaguaagu

SEQ ID NO: 1726251 - RNA, 19 nt, Artificial Sequence
  Description of Artificial Sequence: Synthetic oligonucleotide
aagguguaggccaguguaa

SEQ ID NO: 1726252 - RNA, 19 nt, Artificial Sequence
  Description of Artificial Sequence: Synthetic oligonucleotide
uucuagaggagcgcuuguc

SEQ ID NO: 1726253 - RNA, 19 nt, Artificial Sequence
  Description of Artificial Sequence: Synthetic oligonucleotide
cuagaucaauggaagacau

SEQ ID NO: 1726254 - RNA, 19 nt, Artificial Sequence
  Description of Artificial Sequence: Synthetic oligonucleotide
cucguuuugccacugcucu

SEQ ID NO: 1726255 - RNA, 19 nt, Artificial Sequence
  Description of Artificial Sequence: Synthetic oligonucleotide
ccaccuacauccuguaaug

SEQ ID NO: 1726256 - RNA, 19 nt, Artificial Sequence
  Description of Artificial Sequence: Synthetic oligonucleotide
uccucacaccucucuuagc

SEQ ID NO: 1726257 - RNA, 19 nt, Artificial Sequence
  Description of Artificial Sequence: Synthetic oligonucleotide
auuguugucucugcuuauu

SEQ ID NO: 1726258 - RNA, 19 nt, Artificial Sequence
  Description of Artificial Sequence: Synthetic oligonucleotide
agcccagcuaaaauucuca

SEQ ID NO: 1726259 - RNA, 19 nt, Artificial Sequence
  Description of Artificial Sequence: Synthetic oligonucleotide
uaguaguuucccagucauu

SEQ ID NO: 1726260 - RNA, 19 nt, Artificial Sequence
  Description of Artificial Sequence: Synthetic oligonucleotide
ugccauugcuauucuugua

SEQ ID NO: 1726261 - RNA, 19 nt, Artificial Sequence
  Description of Artificial Sequence: Synthetic oligonucleotide
acacaucgauuguucuaga

SEQ ID NO: 1726262 - RNA, 19 nt, Artificial Sequence
  Description of Artificial Sequence: Synthetic oligonucleotide
acguaagaaguaaaacguu

SEQ ID NO: 1726263 - RNA, 19 nt, Artificial Sequence
  Description of Artificial Sequence: Synthetic oligonucleotide
ugggcuuacuaagguuuga

SEQ ID NO: 1726264 - RNA, 19 nt, Artificial Sequence
  Description of Artificial Sequence: Synthetic oligonucleotide
caaccugggagcugaaucu

SEQ ID NO: 1726265 - RNA, 19 nt, Artificial Sequence
  Description of Artificial Sequence: Synthetic oligonucleotide
guucacauuuagcuacaua

SEQ ID NO: 1726266 - RNA, 19 nt, Artificial Sequence
  Description of Artificial Sequence: Synthetic oligonucleotide
cggacaaauaacugauaag

SEQ ID NO: 1726267 - RNA, 19 nt, Artificial Sequence
  Description of Artificial Sequence: Synthetic oligonucleotide
uugcagacuucguguccug

SEQ ID NO: 1726268 - RNA, 19 nt, Artificial Sequence
  Description of Artificial Sequence: Synthetic oligonucleotide
agagcgacuauagggcuuu

SEQ ID NO: 1726269 - RNA, 19 nt, Artificial Sequence
  Description of Artificial Sequence: Synthetic oligonucleotide
gcccagcuaaaauucucag

SEQ ID NO: 1726270 - RNA, 19 nt, Artificial Sequence
  Description of Artificial Sequence: Synthetic oligonucleotide
ucgcaucaccaccuacauc

SEQ ID NO: 1726271 - RNA, 19 nt, Artificial Sequence
  Description of Artificial Sequence: Synthetic oligonucleotide
gugggcuuacuaagguuug

SEQ ID NO: 1726272 - RNA, 19 nt, Artificial Sequence
  Description of Artificial Sequence: Synthetic oligonucleotide
auuuuggcacggacacauc

SEQ ID NO: 1726273 - RNA, 19 nt, Artificial Sequence
  Description of Artificial Sequence: Synthetic oligonucleotide
guguaggccaguguaaccu

SEQ ID NO: 1726274 - RNA, 19 nt, Artificial Sequence
  Description of Artificial Sequence: Synthetic oligonucleotide
ccucacaccucucuuagca

SEQ ID NO: 1726275 - RNA, 19 nt, Artificial Sequence
  Description of Artificial Sequence: Synthetic oligonucleotide
acauggaggaagagcgacu

SEQ ID NO: 1726276 - RNA, 19 nt, Artificial Sequence
  Description of Artificial Sequence: Synthetic oligonucleotide
cucucuugugcguuugaua

SEQ ID NO: 1726277 - RNA, 19 nt, Artificial Sequence
  Description of Artificial Sequence: Synthetic oligonucleotide
ugcagacuucguguccugu

SEQ ID NO: 1726278 - RNA, 19 nt, Artificial Sequence
  Description of Artificial Sequence: Synthetic oligonucleotide
guaaccugaccuucucgcu

SEQ ID NO: 1726279 - RNA, 19 nt, Artificial Sequence
  Description of Artificial Sequence: Synthetic oligonucleotide
gauccagaacaauuccauu

SEQ ID NO: 1726280 - RNA, 19 nt, Artificial Sequence
  Description of Artificial Sequence: Synthetic oligonucleotide
cugggagcugaaucuguga

SEQ ID NO: 1726281 - RNA, 19 nt, Artificial Sequence
  Description of Artificial Sequence: Synthetic oligonucleotide
aguugccaauucgcaucac

SEQ ID NO: 1726282 - RNA, 19 nt, Artificial Sequence
  Description of Artificial Sequence: Synthetic oligonucleotide
cauggaaguuuucuauagu

SEQ ID NO: 1726283 - RNA, 19 nt, Artificial Sequence
  Description of Artificial Sequence: Synthetic oligonucleotide
cagacuucguguccuguaa

SEQ ID NO: 1726284 - RNA, 19 nt, Artificial Sequence
  Description of Artificial Sequence: Synthetic oligonucleotide
agcaggccacacucucuug

SEQ ID NO: 1726285 - RNA, 19 nt, Artificial Sequence
  Description of Artificial Sequence: Synthetic oligonucleotide
acucucuugugcguuugau

SEQ ID NO: 1726286 - RNA, 19 nt, Artificial Sequence
  Description of Artificial Sequence: Synthetic oligonucleotide
cauugcgaacaucaacacu

SEQ ID NO: 1726287 - RNA, 19 nt, Artificial Sequence
  Description of Artificial Sequence: Synthetic oligonucleotide
acacucucuugugcguuug

SEQ ID NO: 1726288 - RNA, 19 nt, Artificial Sequence
  Description of Artificial Sequence: Synthetic oligonucleotide
caacacuccaaaaguaauu

SEQ ID NO: 1726289 - RNA, 19 nt, Artificial Sequence
  Description of Artificial Sequence: Synthetic oligonucleotide
uggcacggacacaucgauu

SEQ ID NO: 1726290 - RNA, 19 nt, Artificial Sequence
  Description of Artificial Sequence: Synthetic oligonucleotide
gccauugcuauucuuguau

SEQ ID NO: 1726291 - RNA, 19 nt, Artificial Sequence
  Description of Artificial Sequence: Synthetic oligonucleotide
gcgacuauagggcuuuugu

SEQ ID NO: 1726292 - RNA, 19 nt, Artificial Sequence
  Description of Artificial Sequence: Synthetic oligonucleotide
gaggcacugacuagaucaa

SEQ ID NO: 1726293 - RNA, 19 nt, Artificial Sequence
  Description of Artificial Sequence: Synthetic oligonucleotide
ccuacauccuguaaugagu

SEQ ID NO: 1726294 - RNA, 19 nt, Artificial Sequence
  Description of Artificial Sequence: Synthetic oligonucleotide
cuagaggagcgcuugucau

SEQ ID NO: 1726295 - RNA, 19 nt, Artificial Sequence
  Description of Artificial Sequence: Synthetic oligonucleotide
guacagccuggacuaaaua

SEQ ID NO: 1726296 - RNA, 19 nt, Artificial Sequence
  Description of Artificial Sequence: Synthetic oligonucleotide
uucggaccuucuucauaau

SEQ ID NO: 1726297 - RNA, 19 nt, Artificial Sequence
  Description of Artificial Sequence: Synthetic oligonucleotide
auguaaucuugcacagaau

SEQ ID NO: 1726298 - RNA, 19 nt, Artificial Sequence
  Description of Artificial Sequence: Synthetic oligonucleotide
ucuguacagccuggacuaa

SEQ ID NO: 1726299 - RNA, 19 nt, Artificial Sequence
  Description of Artificial Sequence: Synthetic oligonucleotide
cagaggcacugacuagauc

SEQ ID NO: 1726300 - RNA, 19 nt, Artificial Sequence
  Description of Artificial Sequence: Synthetic oligonucleotide
cucuugugcguuugauaaa

SEQ ID NO: 1726301 - RNA, 19 nt, Artificial Sequence
  Description of Artificial Sequence: Synthetic oligonucleotide
gggcuuacuaagguuugac

SEQ ID NO: 1726302 - RNA, 19 nt, Artificial Sequence
  Description of Artificial Sequence: Synthetic oligonucleotide
gcgaacaucaacacuccaa

SEQ ID NO: 1726303 - RNA, 19 nt, Artificial Sequence
  Description of Artificial Sequence: Synthetic oligonucleotide
cucucuuagcacacagccu

SEQ ID NO: 1726304 - RNA, 19 nt, Artificial Sequence
  Description of Artificial Sequence: Synthetic oligonucleotide
guuuugccacugcucuuaa

SEQ ID NO: 1726305 - RNA, 19 nt, Artificial Sequence
  Description of Artificial Sequence: Synthetic oligonucleotide
gccuggacuaaauacuggu

SEQ ID NO: 1726306 - RNA, 19 nt, Artificial Sequence
  Description of Artificial Sequence: Synthetic oligonucleotide
acaccgaggcuggugccca

SEQ ID NO: 1726307 - RNA, 19 nt, Artificial Sequence
  Description of Artificial Sequence: Synthetic oligonucleotide
ggguagcuuucaaaggauc

SEQ ID NO: 1726308 - RNA, 19 nt, Artificial Sequence
  Description of Artificial Sequence: Synthetic oligonucleotide
ccaguguaaccugaccuuc

SEQ ID NO: 1726309 - RNA, 19 nt, Artificial Sequence
  Description of Artificial Sequence: Synthetic oligonucleotide
ggauccagaacaauuccau

SEQ ID NO: 1726310 - RNA, 19 nt, Artificial Sequence
  Description of Artificial Sequence: Synthetic oligonucleotide
accgaggcuggugcccauc

SEQ ID NO: 1726311 - RNA, 19 nt, Artificial Sequence
  Description of Artificial Sequence: Synthetic oligonucleotide
caccuuuaacugcaugggu

SEQ ID NO: 1726312 - RNA, 19 nt, Artificial Sequence
  Description of Artificial Sequence: Synthetic oligonucleotide
ccaauucgcaucaccaccu

SEQ ID NO: 1726313 - RNA, 19 nt, Artificial Sequence
  Description of Artificial Sequence: Synthetic oligonucleotide
guaagucaugugguucugu

SEQ ID NO: 1726314 - RNA, 19 nt, Artificial Sequence
  Description of Artificial Sequence: Synthetic oligonucleotide
gcgcuugucaugauccaca

SEQ ID NO: 1726315 - RNA, 19 nt, Artificial Sequence
  Description of Artificial Sequence: Synthetic oligonucleotide
gagcugaaucugugaacau

SEQ ID NO: 1726316 - RNA, 19 nt, Artificial Sequence
  Description of Artificial Sequence: Synthetic oligonucleotide
uucccucuggugggcuuac

SEQ ID NO: 1726317 - RNA, 19 nt, Artificial Sequence
  Description of Artificial Sequence: Synthetic oligonucleotide
caauucgcaucaccaccua

SEQ ID NO: 1726318 - RNA, 19 nt, Artificial Sequence
  Description of Artificial Sequence: Synthetic oligonucleotide
cuguacagccuggacuaaa

SEQ ID NO: 1726319 - RNA, 19 nt, Artificial Sequence
  Description of Artificial Sequence: Synthetic oligonucleotide
cacucucuugugcguuuga

SEQ ID NO: 1726320 - RNA, 19 nt, Artificial Sequence
  Description of Artificial Sequence: Synthetic oligonucleotide
cagacuguucggaccuucu

SEQ ID NO: 1726321 - RNA, 19 nt, Artificial Sequence
  Description of Artificial Sequence: Synthetic oligonucleotide
ccgaggcuggugcccaucc

SEQ ID NO: 1726322 - RNA, 19 nt, Artificial Sequence
  Description of Artificial Sequence: Synthetic oligonucleotide
gugucugaucggacaaaua

SEQ ID NO: 1726323 - RNA, 19 nt, Artificial Sequence
  Description of Artificial Sequence: Synthetic oligonucleotide
gggucccaacagaagaaaa

SEQ ID NO: 1726324 - RNA, 19 nt, Artificial Sequence
  Description of Artificial Sequence: Synthetic oligonucleotide
cguuugauaaaugaugauu

SEQ ID NO: 1726325 - RNA, 19 nt, Artificial Sequence
  Description of Artificial Sequence: Synthetic oligonucleotide
cucugcuuauuuccugguu

SEQ ID NO: 1726326 - RNA, 19 nt, Artificial Sequence
  Description of Artificial Sequence: Synthetic oligonucleotide
aucagacuguucggaccuu

SEQ ID NO: 1726327 - RNA, 19 nt, Artificial Sequence
  Description of Artificial Sequence: Synthetic oligonucleotide
guaacaccuuuaacugcau

SEQ ID NO: 1726328 - RNA, 19 nt, Artificial Sequence
  Description of Artificial Sequence: Synthetic oligonucleotide
cgacuauagggcuuuugua

SEQ ID NO: 1726329 - RNA, 19 nt, Artificial Sequence
  Description of Artificial Sequence: Synthetic oligonucleotide
ccacuacauggaaguuuuc

SEQ ID NO: 1726330 - RNA, 19 nt, Artificial Sequence
  Description of Artificial Sequence: Synthetic oligonucleotide
ucccucuggugggcuuacu

SEQ ID NO: 1726331 - RNA, 19 nt, Artificial Sequence
  Description of Artificial Sequence: Synthetic oligonucleotide
cacacucucuugugcguuu

SEQ ID NO: 1726332 - RNA, 19 nt, Artificial Sequence
  Description of Artificial Sequence: Synthetic oligonucleotide
gaacaucgucagaggcacu

SEQ ID NO: 1726333 - RNA, 19 nt, Artificial Sequence
  Description of Artificial Sequence: Synthetic oligonucleotide
cacggacacaucgauuguu

SEQ ID NO: 1726334 - RNA, 19 nt, Artificial Sequence
  Description of Artificial Sequence: Synthetic oligonucleotide
gcacggacacaucgauugu

SEQ ID NO: 1726335 - RNA, 19 nt, Artificial Sequence
  Description of Artificial Sequence: Synthetic oligonucleotide
gaggagcgcuugucaugau

SEQ ID NO: 1726336 - RNA, 19 nt, Artificial Sequence
  Description of Artificial Sequence: Synthetic oligonucleotide
ccauccuccuggguucaca

SEQ ID NO: 1726337 - RNA, 19 nt, Artificial Sequence
  Description of Artificial Sequence: Synthetic oligonucleotide
ccacugcucuuaacaccga

SEQ ID NO: 1726338 - RNA, 19 nt, Artificial Sequence
  Description of Artificial Sequence: Synthetic oligonucleotide
gguuucccucuggugggcu

SEQ ID NO: 1726339 - RNA, 19 nt, Artificial Sequence
  Description of Artificial Sequence: Synthetic oligonucleotide
cggacacaucgauuguucu

SEQ ID NO: 1726340 - RNA, 19 nt, Artificial Sequence
  Description of Artificial Sequence: Synthetic oligonucleotide
ccacacucucuugugcguu

SEQ ID NO: 1726341 - RNA, 19 nt, Artificial Sequence
  Description of Artificial Sequence: Synthetic oligonucleotide
caccgaggcuggugcccau

SEQ ID NO: 1726342 - RNA, 19 nt, Artificial Sequence
  Description of Artificial Sequence: Synthetic oligonucleotide
uucauaguaaagcucaucg

SEQ ID NO: 1726343 - RNA, 19 nt, Artificial Sequence
  Description of Artificial Sequence: Synthetic oligonucleotide
aaauacaggaaguagaggu

SEQ ID NO: 1726344 - RNA, 19 nt, Artificial Sequence
  Description of Artificial Sequence: Synthetic oligonucleotide
gauaauuucauaguaaagc

SEQ ID NO: 1726345 - RNA, 19 nt, Artificial Sequence
  Description of Artificial Sequence: Synthetic oligonucleotide
cuauauaagaucauccugg

SEQ ID NO: 1726346 - RNA, 19 nt, Artificial Sequence
  Description of Artificial Sequence: Synthetic oligonucleotide
uucuauguaaguuuacucg

SEQ ID NO: 1726347 - RNA, 19 nt, Artificial Sequence
  Description of Artificial Sequence: Synthetic oligonucleotide
aacacagcaguuuaugcac

SEQ ID NO: 1726348 - RNA, 19 nt, Artificial Sequence
  Description of Artificial Sequence: Synthetic oligonucleotide
agauaugugauucacagca

SEQ ID NO: 1726349 - RNA, 19 nt, Artificial Sequence
  Description of Artificial Sequence: Synthetic oligonucleotide
uuugggauuaaagugauug

SEQ ID NO: 1726350 - RNA, 19 nt, Artificial Sequence
  Description of Artificial Sequence: Synthetic oligonucleotide
uguagcuucaaugugagug

SEQ ID NO: 1726351 - RNA, 19 nt, Artificial Sequence
  Description of Artificial Sequence: Synthetic oligonucleotide
cacauagagauccauaggg

SEQ ID NO: 1726352 - RNA, 19 nt, Artificial Sequence
  Description of Artificial Sequence: Synthetic oligonucleotide
uuuacucgaaaauucaugu

SEQ ID NO: 1726353 - RNA, 19 nt, Artificial Sequence
  Description of Artificial Sequence: Synthetic oligonucleotide
aaaugaaaggcuaacguug

SEQ ID NO: 1726354 - RNA, 19 nt, Artificial Sequence
  Description of Artificial Sequence: Synthetic oligonucleotide
guuacaaugaacuccacca

SEQ ID NO: 1726355 - RNA, 19 nt, Artificial Sequence
  Description of Artificial Sequence: Synthetic oligonucleotide
uaaguuuacucgaaaauuc

SEQ ID NO: 1726356 - RNA, 19 nt, Artificial Sequence
  Description of Artificial Sequence: Synthetic oligonucleotide
uauauaagaucauccuggg

SEQ ID NO: 1726357 - RNA, 19 nt, Artificial Sequence
  Description of Artificial Sequence: Synthetic oligonucleotide
uuucguuugacauaaggaa

SEQ ID NO: 1726358 - RNA, 19 nt, Artificial Sequence
  Description of Artificial Sequence: Synthetic oligonucleotide
ugauauuaaccaaugcgug

SEQ ID NO: 1726359 - RNA, 19 nt, Artificial Sequence
  Description of Artificial Sequence: Synthetic oligonucleotide
auucuauguaaguuuacuc

SEQ ID NO: 1726360 - RNA, 19 nt, Artificial Sequence
  Description of Artificial Sequence: Synthetic oligonucleotide
aagccuaaggaccauggag

SEQ ID NO: 1726361 - RNA, 19 nt, Artificial Sequence
  Description of Artificial Sequence: Synthetic oligonucleotide
uuuaugcacaaccuggaca

SEQ ID NO: 1726362 - RNA, 19 nt, Artificial Sequence
  Description of Artificial Sequence: Synthetic oligonucleotide
ugaggugucaacuuuaaau

SEQ ID NO: 1726363 - RNA, 19 nt, Artificial Sequence
  Description of Artificial Sequence: Synthetic oligonucleotide
caugcggauaauuucauag

SEQ ID NO: 1726364 - RNA, 19 nt, Artificial Sequence
  Description of Artificial Sequence: Synthetic oligonucleotide
aaugugucaccauacguga

SEQ ID NO: 1726365 - RNA, 19 nt, Artificial Sequence
  Description of Artificial Sequence: Synthetic oligonucleotide
gaaaggcuaacguuguggg

SEQ ID NO: 1726366 - RNA, 19 nt, Artificial Sequence
  Description of Artificial Sequence: Synthetic oligonucleotide
uuaugcacaaccuggacac

SEQ ID NO: 1726367 - RNA, 19 nt, Artificial Sequence
  Description of Artificial Sequence: Synthetic oligonucleotide
aaagcucuggugcaugcgg

SEQ ID NO: 1726368 - RNA, 19 nt, Artificial Sequence
  Description of Artificial Sequence: Synthetic oligonucleotide
aacccuacacuucuucugg

SEQ ID NO: 1726369 - RNA, 19 nt, Artificial Sequence
  Description of Artificial Sequence: Synthetic oligonucleotide
ucuuguagcuucaauguga

SEQ ID NO: 1726370 - RNA, 19 nt, Artificial Sequence
  Description of Artificial Sequence: Synthetic oligonucleotide
ucuauguaaguuuacucga

SEQ ID NO: 1726371 - RNA, 19 nt, Artificial Sequence
  Description of Artificial Sequence: Synthetic oligonucleotide
auauuaaccaaugcgugcg

SEQ ID NO: 1726372 - RNA, 19 nt, Artificial Sequence
  Description of Artificial Sequence: Synthetic oligonucleotide
uugguagaaagccuaagga

SEQ ID NO: 1726373 - RNA, 19 nt, Artificial Sequence
  Description of Artificial Sequence: Synthetic oligonucleotide
aaagguuggaaggcaaugg

SEQ ID NO: 1726374 - RNA, 19 nt, Artificial Sequence
  Description of Artificial Sequence: Synthetic oligonucleotide
caguuuaugcacaaccugg

SEQ ID NO: 1726375 - RNA, 19 nt, Artificial Sequence
  Description of Artificial Sequence: Synthetic oligonucleotide
aaaggcuaacguugugggc

SEQ ID NO: 1726376 - RNA, 19 nt, Artificial Sequence
  Description of Artificial Sequence: Synthetic oligonucleotide
aagugauugaugauggcuc

SEQ ID NO: 1726377 - RNA, 19 nt, Artificial Sequence
  Description of Artificial Sequence: Synthetic oligonucleotide
uacgugauaaacauauuaa

SEQ ID NO: 1726378 - RNA, 19 nt, Artificial Sequence
  Description of Artificial Sequence: Synthetic oligonucleotide
uucucccuauauaagauca

SEQ ID NO: 1726379 - RNA, 19 nt, Artificial Sequence
  Description of Artificial Sequence: Synthetic oligonucleotide
guugguagaaagccuaagg

SEQ ID NO: 1726380 - RNA, 19 nt, Artificial Sequence
  Description of Artificial Sequence: Synthetic oligonucleotide
ucauaguuggcucggacca

SEQ ID NO: 1726381 - RNA, 19 nt, Artificial Sequence
  Description of Artificial Sequence: Synthetic oligonucleotide
aaagugauugaugauggcu

SEQ ID NO: 1726382 - RNA, 19 nt, Artificial Sequence
  Description of Artificial Sequence: Synthetic oligonucleotide
uguuacaaugaacuccacc

SEQ ID NO: 1726383 - RNA, 19 nt, Artificial Sequence
  Description of Artificial Sequence: Synthetic oligonucleotide
ucccuauauaagaucaucc

SEQ ID NO: 1726384 - RNA, 19 nt, Artificial Sequence
  Description of Artificial Sequence: Synthetic oligonucleotide
caauggagagugaacaggg

SEQ ID NO: 1726385 - RNA, 19 nt, Artificial Sequence
  Description of Artificial Sequence: Synthetic oligonucleotide
auggagagugaacagggac
